United States Patent Application Publication US 2015/0141320 A1 - sequence listing, part 7

SEQ ID NO: 64147 - DNA, 15 bp, Homo sapiens
tgatgggaggtgttt

SEQ ID NO: 64148 - DNA, 15 bp, Homo sapiens
ctgatgggaggtgtt

SEQ ID NO: 64149 - DNA, 15 bp, Homo sapiens
cctgatgggaggtgt

SEQ ID NO: 64150 - DNA, 15 bp, Homo sapiens
gcctgatgggaggtg

SEQ ID NO: 64151 - DNA, 15 bp, Homo sapiens
ggcctgatgggaggt

SEQ ID NO: 64152 - DNA, 15 bp, Homo sapiens
gggcctgatgggagg

SEQ ID NO: 64153 - DNA, 15 bp, Homo sapiens
ggggcctgatgggag

SEQ ID NO: 64154 - DNA, 15 bp, Homo sapiens
tggggcctgatggga

SEQ ID NO: 64155 - DNA, 15 bp, Homo sapiens
gtggggcctgatggg

SEQ ID NO: 64156 - DNA, 15 bp, Homo sapiens
ggtggggcctgatgg

SEQ ID NO: 64157 - DNA, 15 bp, Homo sapiens
aggtggggcctgatg

SEQ ID NO: 64158 - DNA, 15 bp, Homo sapiens
gaggtggggcctgat

SEQ ID NO: 64159 - DNA, 15 bp, Homo sapiens
ggaggtggggcctga

SEQ ID NO: 64160 - DNA, 15 bp, Homo sapiens
tggaggtggggcctg

SEQ ID NO: 64161 - DNA, 15 bp, Homo sapiens
ttggaggtggggcct

SEQ ID NO: 64162 - DNA, 15 bp, Homo sapiens
gttggaggtggggcc

SEQ ID NO: 64163 - DNA, 15 bp, Homo sapiens
tgttggaggtggggc

SEQ ID NO: 64164 - DNA, 15 bp, Homo sapiens
gtgttggaggtgggg

SEQ ID NO: 64165 - DNA, 15 bp, Homo sapiens
agtgttggaggtggg

SEQ ID NO: 64166 - DNA, 15 bp, Homo sapiens
cagtgttggaggtgg

SEQ ID NO: 64167 - DNA, 15 bp, Homo sapiens
tcagtgttggaggtg

SEQ ID NO: 64168 - DNA, 15 bp, Homo sapiens
ctcagtgttggaggt

SEQ ID NO: 64169 - DNA, 15 bp, Homo sapiens
cctcagtgttggagg

SEQ ID NO: 64170 - DNA, 15 bp, Homo sapiens
tcctcagtgttggag

SEQ ID NO: 64171 - DNA, 15 bp, Homo sapiens
atcctcagtgttgga

SEQ ID NO: 64172 - DNA, 15 bp, Homo sapiens
gatcctcagtgttgg

SEQ ID NO: 64173 - DNA, 15 bp, Homo sapiens
tgatcctcagtgttg

SEQ ID NO: 64174 - DNA, 15 bp, Homo sapiens
gtgatcctcagtgtt

SEQ ID NO: 64175 - DNA, 15 bp, Homo sapiens
tgtgatcctcagtgt

SEQ ID NO: 64176 - DNA, 15 bp, Homo sapiens
atgtgatcctcagtg

SEQ ID NO: 64177 - DNA, 15 bp, Homo sapiens
aatgtgatcctcagt

SEQ ID NO: 64178 - DNA, 15 bp, Homo sapiens
aaatgtgatcctcag

SEQ ID NO: 64179 - DNA, 15 bp, Homo sapiens
gaaatgtgatcctca

SEQ ID NO: 64180 - DNA, 15 bp, Homo sapiens
tgaaatgtgatcctc

SEQ ID NO: 64181 - DNA, 15 bp, Homo sapiens
ttgaaatgtgatcct

SEQ ID NO: 64182 - DNA, 15 bp, Homo sapiens
gttgaaatgtgatcc

SEQ ID NO: 64183 - DNA, 15 bp, Homo sapiens
cgttgaaatgtgatc

SEQ ID NO: 64184 - DNA, 15 bp, Homo sapiens
acgttgaaatgtgat

SEQ ID NO: 64185 - DNA, 15 bp, Homo sapiens
cacgttgaaatgtga

SEQ ID NO: 64186 - DNA, 15 bp, Homo sapiens
tcacgttgaaatgtg

SEQ ID NO: 64187 - DNA, 15 bp, Homo sapiens
ctcacgttgaaatgt

SEQ ID NO: 64188 - DNA, 15 bp, Homo sapiens
tctcacgttgaaatg

SEQ ID NO: 64189 - DNA, 15 bp, Homo sapiens
atctcacgttgaaat

SEQ ID NO: 64190 - DNA, 15 bp, Homo sapiens
aatctcacgttgaaa

SEQ ID NO: 64191 - DNA, 15 bp, Homo sapiens
aaatctcacgttgaa

SEQ ID NO: 64192 - DNA, 15 bp, Homo sapiens
caaatctcacgttga

SEQ ID NO: 64193 - DNA, 15 bp, Homo sapiens
ccaaatctcacgttg

SEQ ID NO: 64194 - DNA, 15 bp, Homo sapiens
tccaaatctcacgtt

SEQ ID NO: 64195 - DNA, 15 bp, Homo sapiens
ctccaaatctcacgt

SEQ ID NO: 64196 - DNA, 15 bp, Homo sapiens
cctccaaatctcacg

SEQ ID NO: 64197 - DNA, 15 bp, Homo sapiens
ccctccaaatctcac

SEQ ID NO: 64198 - DNA, 15 bp, Homo sapiens
tccctccaaatctca

SEQ ID NO: 64199 - DNA, 15 bp, Homo sapiens
ttccctccaaatctc

SEQ ID NO: 64200 - DNA, 15 bp, Homo sapiens
gttccctccaaatct

SEQ ID NO: 64201 - DNA, 15 bp, Homo sapiens
tgttccctccaaatc

SEQ ID NO: 64202 - DNA, 15 bp, Homo sapiens
ttgttccctccaaat

SEQ ID NO: 64203 - DNA, 15 bp, Homo sapiens
tttgttccctccaaa

SEQ ID NO: 64204 - DNA, 15 bp, Homo sapiens
atttgttccctccaa

SEQ ID NO: 64205 - DNA, 15 bp, Homo sapiens
tatttgttccctcca

SEQ ID NO: 64206 - DNA, 15 bp, Homo sapiens
atatttgttccctcc

SEQ ID NO: 64207 - DNA, 15 bp, Homo sapiens
gatatttgttccctc

SEQ ID NO: 64208 - DNA, 15 bp, Homo sapiens
ggatatttgttccct

SEQ ID NO: 64209 - DNA, 15 bp, Homo sapiens
tggatatttgttccc

SEQ ID NO: 64210 - DNA, 15 bp, Homo sapiens
ttggatatttgttcc

SEQ ID NO: 64211 - DNA, 15 bp, Homo sapiens
tttggatatttgttc

SEQ ID NO: 64212 - DNA, 15 bp, Homo sapiens
gtttggatatttgtt

SEQ ID NO: 64213 - DNA, 15 bp, Homo sapiens
ggtttggatatttgt

SEQ ID NO: 64214 - DNA, 15 bp, Homo sapiens
tggtttggatatttg

SEQ ID NO: 64215 - DNA, 15 bp, Homo sapiens
atggtttggatattt

SEQ ID NO: 64216 - DNA, 15 bp, Homo sapiens
tatggtttggatatt

SEQ ID NO: 64217 - DNA, 15 bp, Homo sapiens
atatggtttggatat

SEQ ID NO: 64218 - DNA, 15 bp, Homo sapiens
gatatggtttggata

SEQ ID NO: 64219 - DNA, 15 bp, Homo sapiens
tgatatggtttggat

SEQ ID NO: 64220 - DNA, 15 bp, Homo sapiens
ctgatatggtttgga

SEQ ID NO: 64221 - DNA, 15 bp, Homo sapiens
actgatatggtttgg

SEQ ID NO: 64222 - DNA, 15 bp, Homo sapiens
tactgatatggtttg

SEQ ID NO: 64223 - DNA, 15 bp, Homo sapiens
atactgatatggttt

SEQ ID NO: 64224 - DNA, 15 bp, Homo sapiens
gatactgatatggtt

SEQ ID NO: 64225 - DNA, 15 bp, Homo sapiens
ggatactgatatggt

SEQ ID NO: 64226 - DNA, 15 bp, Homo sapiens
aggatactgatatgg

SEQ ID NO: 64227 - DNA, 15 bp, Homo sapiens
aaggatactgatatg

SEQ ID NO: 64228 - DNA, 15 bp, Homo sapiens
taaggatactgatat

SEQ ID NO: 64229 - DNA, 15 bp, Homo sapiens
ataaggatactgata

SEQ ID NO: 64230 - DNA, 15 bp, Homo sapiens
aataaggatactgat

SEQ ID NO: 64231 - DNA, 15 bp, Homo sapiens
caataaggatactga

SEQ ID NO: 64232 - DNA, 15 bp, Homo sapiens
tcaataaggatactg

SEQ ID NO: 64233 - DNA, 15 bp, Homo sapiens
ctcaataaggatact

SEQ ID NO: 64234 - DNA, 15 bp, Homo sapiens
tctcaataaggatac

SEQ ID NO: 64235 - DNA, 15 bp, Homo sapiens
ctctcaataaggata

SEQ ID NO: 64236 - DNA, 15 bp, Homo sapiens
tctctcaataaggat

SEQ ID NO: 64237 - DNA, 15 bp, Homo sapiens
ttctctcaataagga

SEQ ID NO: 64238 - DNA, 15 bp, Homo sapiens
attctctcaataagg

SEQ ID NO: 64239 - DNA, 15 bp, Homo sapiens
aattctctcaataag

SEQ ID NO: 64240 - DNA, 15 bp, Homo sapiens
aaattctctcaataa

SEQ ID NO: 64241 - DNA, 15 bp, Homo sapiens
taaattctctcaata

SEQ ID NO: 64242 - DNA, 15 bp, Homo sapiens
ttaaattctctcaat

SEQ ID NO: 64243 - DNA, 15 bp, Homo sapiens
tttaaattctctcaa

SEQ ID NO: 64244 - DNA, 15 bp, Homo sapiens
ttttaaattctctca

SEQ ID NO: 64245 - DNA, 15 bp, Homo sapiens
cttttaaattctctc

SEQ ID NO: 64246 - DNA, 15 bp, Homo sapiens
acttttaaattctct

SEQ ID NO: 64247 - DNA, 15 bp, Homo sapiens
aacttttaaattctc

SEQ ID NO: 64248 - DNA, 15 bp, Homo sapiens
aaacttttaaattct

SEQ ID NO: 64249 - DNA, 15 bp, Homo sapiens
caaacttttaaattc

SEQ ID NO: 64250 - DNA, 15 bp, Homo sapiens
tcaaacttttaaatt

SEQ ID NO: 64251 - DNA, 15 bp, Homo sapiens
ctcaaacttttaaat

SEQ ID NO: 64252 - DNA, 15 bp, Homo sapiens
cctcaaacttttaaa

SEQ ID NO: 64253 - DNA, 15 bp, Homo sapiens
acctcaaacttttaa

SEQ ID NO: 64254 - DNA, 15 bp, Homo sapiens
tacctcaaactttta

SEQ ID NO: 64255 - DNA, 15 bp, Homo sapiens
ctacctcaaactttt

SEQ ID NO: 64256 - DNA, 15 bp, Homo sapiens
cctacctcaaacttt

SEQ ID NO: 64257 - DNA, 15 bp, Homo sapiens
acctacctcaaactt

SEQ ID NO: 64258 - DNA, 15 bp, Homo sapiens
cacctacctcaaact

SEQ ID NO: 64259 - DNA, 15 bp, Homo sapiens
acacctacctcaaac

SEQ ID NO: 64260 - DNA, 15 bp, Homo sapiens
aacacctacctcaaa

SEQ ID NO: 64261 - DNA, 15 bp, Homo sapiens
caacacctacctcaa

SEQ ID NO: 64262 - DNA, 15 bp, Homo sapiens
tcaacacctacctca

SEQ ID NO: 64263 - DNA, 15 bp, Homo sapiens
ttcaacacctacctc

SEQ ID NO: 64264 - DNA, 15 bp, Homo sapiens
tttcaacacctacct

SEQ ID NO: 64265 - DNA, 15 bp, Homo sapiens
ctttcaacacctacc

SEQ ID NO: 64266 - DNA, 15 bp, Homo sapiens
tctttcaacacctac

SEQ ID NO: 64267 - DNA, 15 bp, Homo sapiens
ctctttcaacaccta

SEQ ID NO: 64268 - DNA, 15 bp, Homo sapiens
tctctttcaacacct

SEQ ID NO: 64269 - DNA, 15 bp, Homo sapiens
ctctctttcaacacc

SEQ ID NO: 64270 - DNA, 15 bp, Homo sapiens
cctctctttcaacac

SEQ ID NO: 64271 - DNA, 15 bp, Homo sapiens
tcctctctttcaaca

SEQ ID NO: 64272 - DNA, 15 bp, Homo sapiens
ttcctctctttcaac

SEQ ID NO: 64273 - DNA, 15 bp, Homo sapiens
tttcctctctttcaa

SEQ ID NO: 64274 - DNA, 15 bp, Homo sapiens
ttttcctctctttca

SEQ ID NO: 64275 - DNA, 15 bp, Homo sapiens
tttttcctctctttc

SEQ ID NO: 64276 - DNA, 15 bp, Homo sapiens
gtttttcctctcttt

SEQ ID NO: 64277 - DNA, 15 bp, Homo sapiens
agtttttcctctctt

SEQ ID NO: 64278 - DNA, 15 bp, Homo sapiens
aagtttttcctctct

SEQ ID NO: 64279 - DNA, 15 bp, Homo sapiens
taagtttttcctctc

SEQ ID NO: 64280 - DNA, 15 bp, Homo sapiens
ataagtttttcctct

SEQ ID NO: 64281 - DNA, 15 bp, Homo sapiens
aataagtttttcctc

SEQ ID NO: 64282 - DNA, 15 bp, Homo sapiens
aaataagtttttcct

SEQ ID NO: 64283 - DNA, 15 bp, Homo sapiens
taaataagtttttcc

SEQ ID NO: 64284 - DNA, 15 bp, Homo sapiens
ttaaataagtttttc

SEQ ID NO: 64285 - DNA, 15 bp, Homo sapiens
cttaaataagttttt

SEQ ID NO: 64286 - DNA, 15 bp, Homo sapiens
tcttaaataagtttt

SEQ ID NO: 64287 - DNA, 15 bp, Homo sapiens
atcttaaataagttt

SEQ ID NO: 64288 - DNA, 15 bp, Homo sapiens
aatcttaaataagtt

SEQ ID NO: 64289 - DNA, 15 bp, Homo sapiens
aaatcttaaataagt

SEQ ID NO: 64290 - DNA, 15 bp, Homo sapiens
gaaatcttaaataag

SEQ ID NO: 64291 - DNA, 15 bp, Homo sapiens
tgaaatcttaaataa

SEQ ID NO: 64292 - DNA, 15 bp, Homo sapiens
gtgaaatcttaaata

SEQ ID NO: 64293 - DNA, 15 bp, Homo sapiens
ggtgaaatcttaaat

SEQ ID NO: 64294 - DNA, 15 bp, Homo sapiens
gggtgaaatcttaaa

SEQ ID NO: 64295 - DNA, 15 bp, Homo sapiens
tgggtgaaatcttaa

SEQ ID NO: 64296 - DNA, 15 bp, Homo sapiens
ttgggtgaaatctta

SEQ ID NO: 64297 - DNA, 15 bp, Homo sapiens
attgggtgaaatctt

SEQ ID NO: 64298 - DNA, 15 bp, Homo sapiens
aattgggtgaaatct

SEQ ID NO: 64299 - DNA, 15 bp, Homo sapiens
aaattgggtgaaatc

SEQ ID NO: 64300 - DNA, 15 bp, Homo sapiens
aaaattgggtgaaat

SEQ ID NO: 64301 - DNA, 15 bp, Homo sapiens
aaaaattgggtgaaa

SEQ ID NO: 64302 - DNA, 15 bp, Homo sapiens
gaaaaattgggtgaa

SEQ ID NO: 64303 - DNA, 15 bp, Homo sapiens
tgaaaaattgggtga

SEQ ID NO: 64304 - DNA, 15 bp, Homo sapiens
ctgaaaaattgggtg

SEQ ID NO: 64305 - DNA, 15 bp, Homo sapiens
actgaaaaattgggt

SEQ ID NO: 64306 - DNA, 15 bp, Homo sapiens
aactgaaaaattggg

SEQ ID NO: 64307 - DNA, 15 bp, Homo sapiens
gaactgaaaaattgg

SEQ ID NO: 64308 - DNA, 15 bp, Homo sapiens
tgaactgaaaaattg

SEQ ID NO: 64309 - DNA, 15 bp, Homo sapiens
ctgaactgaaaaatt

SEQ ID NO: 64310 - DNA, 15 bp, Homo sapiens
cctgaactgaaaaat

SEQ ID NO: 64311 - DNA, 15 bp, Homo sapiens
ccctgaactgaaaaa

SEQ ID NO: 64312 - DNA, 15 bp, Homo sapiens
tccctgaactgaaaa

SEQ ID NO: 64313 - DNA, 15 bp, Homo sapiens
ttccctgaactgaaa

SEQ ID NO: 64314 - DNA, 15 bp, Homo sapiens
tttccctgaactgaa

SEQ ID NO: 64315 - DNA, 15 bp, Homo sapiens
atttccctgaactga

SEQ ID NO: 64316 - DNA, 15 bp, Homo sapiens
tatttccctgaactg

SEQ ID NO: 64317 - DNA, 15 bp, Homo sapiens
ttatttccctgaact

SEQ ID NO: 64318 - DNA, 15 bp, Homo sapiens
tttatttccctgaac

SEQ ID NO: 64319 - DNA, 15 bp, Homo sapiens
ttttatttccctgaa

SEQ ID NO: 64320 - DNA, 15 bp, Homo sapiens
tttttatttccctga

SEQ ID NO: 64321 - DNA, 15 bp, Homo sapiens
ttttttatttccctg

SEQ ID NO: 64322 - DNA, 15 bp, Homo sapiens
tttttttatttccct

SEQ ID NO: 64323 - DNA, 15 bp, Homo sapiens
gtttttttatttccc

SEQ ID NO: 64324 - DNA, 15 bp, Homo sapiens
ggtttttttatttcc

SEQ ID NO: 64325 - DNA, 15 bp, Homo sapiens
tggtttttttatttc

SEQ ID NO: 64326 - DNA, 15 bp, Homo sapiens
gtggtttttttattt

SEQ ID NO: 64327 - DNA, 15 bp, Homo sapiens
tgtggtttttttatt

SEQ ID NO: 64328 - DNA, 15 bp, Homo sapiens
ttgtggtttttttat

SEQ ID NO: 64329 - DNA, 15 bp, Homo sapiens
attgtggttttttta

SEQ ID NO: 64330 - DNA, 15 bp, Homo sapiens
cattgtggttttttt

SEQ ID NO: 64331 - DNA, 15 bp, Homo sapiens
tcattgtggtttttt

SEQ ID NO: 64332 - DNA, 15 bp, Homo sapiens
atcattgtggttttt

SEQ ID NO: 64333 - DNA, 15 bp, Homo sapiens
aatcattgtggtttt

SEQ ID NO: 64334 - DNA, 15 bp, Homo sapiens
aaatcattgtggttt

SEQ ID NO: 64335 - DNA, 15 bp, Homo sapiens
aaaatcattgtggtt

SEQ ID NO: 64336 - DNA, 15 bp, Homo sapiens
aaaaatcattgtggt

SEQ ID NO: 64337 - DNA, 15 bp, Homo sapiens
taaaaatcattgtgg

SEQ ID NO: 64338 - DNA, 15 bp, Homo sapiens
gtaaaaatcattgtg

SEQ ID NO: 64339 - DNA, 15 bp, Homo sapiens
tgtaaaaatcattgt

SEQ ID NO: 64340 - DNA, 15 bp, Homo sapiens
ttgtaaaaatcattg

SEQ ID NO: 64341 - DNA, 15 bp, Homo sapiens
tttgtaaaaatcatt

SEQ ID NO: 64342 - DNA, 15 bp, Homo sapiens
atttgtaaaaatcat

SEQ ID NO: 64343 - DNA, 15 bp, Homo sapiens
catttgtaaaaatca

SEQ ID NO: 64344 - DNA, 15 bp, Homo sapiens
gcatttgtaaaaatc

SEQ ID NO: 64345 - DNA, 15 bp, Homo sapiens
ggcatttgtaaaaat

SEQ ID NO: 64346 - DNA, 15 bp, Homo sapiens
tggcatttgtaaaaa

SEQ ID NO: 64347 - DNA, 15 bp, Homo sapiens
gtggcatttgtaaaa

SEQ ID NO: 64348 - DNA, 15 bp, Homo sapiens
tgtggcatttgtaaa

SEQ ID NO: 64349 - DNA, 15 bp, Homo sapiens
ctgtggcatttgtaa

SEQ ID NO: 64350 - DNA, 15 bp, Homo sapiens
gctgtggcatttgta

SEQ ID NO: 64351 - DNA, 15 bp, Homo sapiens
agctgtggcatttgt

SEQ ID NO: 64352 - DNA, 15 bp, Homo sapiens
aagctgtggcatttg

SEQ ID NO: 64353 - DNA, 15 bp, Homo sapiens
aaagctgtggcattt

SEQ ID NO: 64354 - DNA, 15 bp, Homo sapiens
taaagctgtggcatt

SEQ ID NO: 64355 - DNA, 15 bp, Homo sapiens
ctaaagctgtggcat

SEQ ID NO: 64356 - DNA, 15 bp, Homo sapiens
tctaaagctgtggca

SEQ ID NO: 64357 - DNA, 15 bp, Homo sapiens
ttctaaagctgtggc

SEQ ID NO: 64358 - DNA, 15 bp, Homo sapiens
attctaaagctgtgg

SEQ ID NO: 64359 - DNA, 15 bp, Homo sapiens
tattctaaagctgtg

SEQ ID NO: 64360 - DNA, 15 bp, Homo sapiens
ctattctaaagctgt

SEQ ID NO: 64361 - DNA, 15 bp, Homo sapiens
gctattctaaagctg

SEQ ID NO: 64362 - DNA, 15 bp, Homo sapiens
agctattctaaagct

SEQ ID NO: 64363 - DNA, 15 bp, Homo sapiens
aagctattctaaagc

SEQ ID NO: 64364 - DNA, 15 bp, Homo sapiens
caagctattctaaag

SEQ ID NO: 64365 - DNA, 15 bp, Homo sapiens
gcaagctattctaaa

SEQ ID NO: 64366 - DNA, 15 bp, Homo sapiens
ggcaagctattctaa

SEQ ID NO: 64367 - DNA, 15 bp, Homo sapiens
aggcaagctattcta

SEQ ID NO: 64368 - DNA, 15 bp, Homo sapiens
caggcaagctattct

SEQ ID NO: 64369 - DNA, 15 bp, Homo sapiens
gcaggcaagctattc

SEQ ID NO: 64370 - DNA, 15 bp, Homo sapiens
ggcaggcaagctatt

SEQ ID NO: 64371 - DNA, 15 bp, Homo sapiens
aggcaggcaagctat

SEQ ID NO: 64372 - DNA, 15 bp, Homo sapiens
gaggcaggcaagcta

SEQ ID NO: 64373 - DNA, 15 bp, Homo sapiens
agaggcaggcaagct

SEQ ID NO: 64374 - DNA, 15 bp, Homo sapiens
tagaggcaggcaagc

SEQ ID NO: 64375 - DNA, 15 bp, Homo sapiens
ctagaggcaggcaag

SEQ ID NO: 64376 - DNA, 15 bp, Homo sapiens
actagaggcaggcaa

SEQ ID NO: 64377 - DNA, 15 bp, Homo sapiens
aactagaggcaggca

SEQ ID NO: 64378 - DNA, 15 bp, Homo sapiens
gaactagaggcaggc

SEQ ID NO: 64379 - DNA, 15 bp, Homo sapiens
ggaactagaggcagg

SEQ ID NO: 64380 - DNA, 15 bp, Homo sapiens
tggaactagaggcag

SEQ ID NO: 64381 - DNA, 15 bp, Homo sapiens
ttggaactagaggca

SEQ ID NO: 64382 - DNA, 15 bp, Homo sapiens
tttggaactagaggc

SEQ ID NO: 64383 - DNA, 15 bp, Homo sapiens
atttggaactagagg

SEQ ID NO: 64384 - DNA, 15 bp, Homo sapiens
tatttggaactagag

SEQ ID NO: 64385 - DNA, 15 bp, Homo sapiens
gtatttggaactaga

SEQ ID NO: 64386 - DNA, 15 bp, Homo sapiens
agtatttggaactag

SEQ ID NO: 64387 - DNA, 15 bp, Homo sapiens
gagtatttggaacta

SEQ ID NO: 64388 - DNA, 15 bp, Homo sapiens
agagtatttggaact

SEQ ID NO: 64389 - DNA, 15 bp, Homo sapiens
aagagtatttggaac

SEQ ID NO: 64390 - DNA, 15 bp, Homo sapiens
gaagagtatttggaa

SEQ ID NO: 64391 - DNA, 15 bp, Homo sapiens
ggaagagtatttgga

SEQ ID NO: 64392 - DNA, 15 bp, Homo sapiens
tggaagagtatttgg

SEQ ID NO: 64393 - DNA, 15 bp, Homo sapiens
ttggaagagtatttg

SEQ ID NO: 64394 - DNA, 15 bp, Homo sapiens
attggaagagtattt

SEQ ID NO: 64395 - DNA, 15 bp, Homo sapiens
aattggaagagtatt

SEQ ID NO: 64396 - DNA, 15 bp, Homo sapiens
aaattggaagagtat

SEQ ID NO: 64397 - DNA, 15 bp, Homo sapiens
caaattggaagagta

SEQ ID NO: 64398 - DNA, 15 bp, Homo sapiens
gcaaattggaagagt

SEQ ID NO: 64399 - DNA, 15 bp, Homo sapiens
ggcaaattggaagag

SEQ ID NO: 64400 - DNA, 15 bp, Homo sapiens
gggcaaattggaaga

SEQ ID NO: 64401 - DNA, 15 bp, Homo sapiens
agggcaaattggaag

SEQ ID NO: 64402 - DNA, 15 bp, Homo sapiens
tagggcaaattggaa

SEQ ID NO: 64403 - DNA, 15 bp, Homo sapiens
atagggcaaattgga

SEQ ID NO: 64404 - DNA, 15 bp, Homo sapiens
aatagggcaaattgg

SEQ ID NO: 64405 - DNA, 15 bp, Homo sapiens
aaatagggcaaattg

SEQ ID NO: 64406 - DNA, 15 bp, Homo sapiens
taaatagggcaaatt

SEQ ID NO: 64407 - DNA, 15 bp, Homo sapiens
ttaaatagggcaaat

SEQ ID NO: 64408 - DNA, 15 bp, Homo sapiens
tttaaatagggcaaa

SEQ ID NO: 64409 - DNA, 15 bp, Homo sapiens
ttttaaatagggcaa

SEQ ID NO: 64410 - DNA, 15 bp, Homo sapiens
gttttaaatagggca

SEQ ID NO: 64411 - DNA, 15 bp, Homo sapiens
agttttaaatagggc

SEQ ID NO: 64412 - DNA, 15 bp, Homo sapiens
aagttttaaataggg

SEQ ID NO: 64413 - DNA, 15 bp, Homo sapiens
gaagttttaaatagg

SEQ ID NO: 64414 - DNA, 15 bp, Homo sapiens
tgaagttttaaatag

SEQ ID NO: 64415 - DNA, 15 bp, Homo sapiens
ctgaagttttaaata

SEQ ID NO: 64416 - DNA, 15 bp, Homo sapiens
cctgaagttttaaat

SEQ ID NO: 64417 - DNA, 15 bp, Homo sapiens
tcctgaagttttaaa

SEQ ID NO: 64418 - DNA, 15 bp, Homo sapiens
atcctgaagttttaa

SEQ ID NO: 64419 - DNA, 15 bp, Homo sapiens
catcctgaagtttta

SEQ ID NO: 64420 - DNA, 15 bp, Homo sapiens
ccatcctgaagtttt

SEQ ID NO: 64421 - DNA, 15 bp, Homo sapiens
tccatcctgaagttt

SEQ ID NO: 64422 - DNA, 15 bp, Homo sapiens
ttccatcctgaagtt

SEQ ID NO: 64423 - DNA, 15 bp, Homo sapiens
tttccatcctgaagt

SEQ ID NO: 64424 - DNA, 15 bp, Homo sapiens
atttccatcctgaag

SEQ ID NO: 64425 - DNA, 15 bp, Homo sapiens
catttccatcctgaa

SEQ ID NO: 64426 - DNA, 15 bp, Homo sapiens
tcatttccatcctga

SEQ ID NO: 64427 - DNA, 15 bp, Homo sapiens
ttcatttccatcctg

SEQ ID NO: 64428 - DNA, 15 bp, Homo sapiens
gttcatttccatcct

SEQ ID NO: 64429 - DNA, 15 bp, Homo sapiens
tgttcatttccatcc

SEQ ID NO: 64430 - DNA, 15 bp, Homo sapiens
gtgttcatttccatc

SEQ ID NO: 64431 - DNA, 15 bp, Homo sapiens
tgtgttcatttccat

SEQ ID NO: 64432 - DNA, 15 bp, Homo sapiens
gtgtgttcatttcca

SEQ ID NO: 64433 - DNA, 15 bp, Homo sapiens
tgtgtgttcatttcc

SEQ ID NO: 64434 - DNA, 15 bp, Homo sapiens
ctgtgtgttcatttc

SEQ ID NO: 64435 - DNA, 15 bp, Homo sapiens
tctgtgtgttcattt

SEQ ID NO: 64436 - DNA, 15 bp, Homo sapiens
ttctgtgtgttcatt

SEQ ID NO: 64437 - DNA, 15 bp, Homo sapiens
tttctgtgtgttcat

SEQ ID NO: 64438 - DNA, 15 bp, Homo sapiens
ctttctgtgtgttca

SEQ ID NO: 64439 - DNA, 15 bp, Homo sapiens
cctttctgtgtgttc

SEQ ID NO: 64440 - DNA, 15 bp, Homo sapiens
tcctttctgtgtgtt

SEQ ID NO: 64441 - DNA, 15 bp, Homo sapiens
ttcctttctgtgtgt

SEQ ID NO: 64442 - DNA, 15 bp, Homo sapiens
gttcctttctgtgtg

SEQ ID NO: 64443 - DNA, 15 bp, Homo sapiens
agttcctttctgtgt

SEQ ID NO: 64444 - DNA, 15 bp, Homo sapiens
cagttcctttctgtg

SEQ ID NO: 64445 - DNA, 15 bp, Homo sapiens
tcagttcctttctgt

SEQ ID NO: 64446 - DNA, 15 bp, Homo sapiens
atcagttcctttctg

SEQ ID NO: 64447 - DNA, 15 bp, Homo sapiens
tatcagttcctttct

SEQ ID NO: 64448 - DNA, 15 bp, Homo sapiens
ttatcagttcctttc

SEQ ID NO: 64449 - DNA, 15 bp, Homo sapiens
cttatcagttccttt

SEQ ID NO: 64450 - DNA, 15 bp, Homo sapiens
tcttatcagttcctt

SEQ ID NO: 64451 - DNA, 15 bp, Homo sapiens
atcttatcagttcct

SEQ ID NO: 64452 - DNA, 15 bp, Homo sapiens
catcttatcagttcc

SEQ ID NO: 64453 - DNA, 15 bp, Homo sapiens
tcatcttatcagttc

SEQ ID NO: 64454 - DNA, 15 bp, Homo sapiens
ttcatcttatcagtt

SEQ ID NO: 64455 - DNA, 15 bp, Homo sapiens
tttcatcttatcagt

SEQ ID NO: 64456 - DNA, 15 bp, Homo sapiens
ttttcatcttatcag

SEQ ID NO: 64457 - DNA, 15 bp, Homo sapiens
cttttcatcttatca

SEQ ID NO: 64458 - DNA, 15 bp, Homo sapiens
acttttcatcttatc

SEQ ID NO: 64459 - DNA, 15 bp, Homo sapiens
tacttttcatcttat

SEQ ID NO: 64460 - DNA, 15 bp, Homo sapiens
ttacttttcatctta

SEQ ID NO: 64461 - DNA, 15 bp, Homo sapiens
tttacttttcatctt

SEQ ID NO: 64462 - DNA, 15 bp, Homo sapiens
ttttacttttcatct

SEQ ID NO: 64463 - DNA, 15 bp, Homo sapiens
attttacttttcatc

SEQ ID NO: 64464 - DNA, 15 bp, Homo sapiens
tattttacttttcat

SEQ ID NO: 64465 - DNA, 15 bp, Homo sapiens
ctattttacttttca

SEQ ID NO: 64466 - DNA, 15 bp, Homo sapiens
cctattttacttttc

SEQ ID NO: 64467 - DNA, 15 bp, Homo sapiens
ccctattttactttt

SEQ ID NO: 64468 - DNA, 15 bp, Homo sapiens
accctattttacttt

SEQ ID NO: 64469 - DNA, 15 bp, Homo sapiens
taccctattttactt

SEQ ID NO: 64470 - DNA, 15 bp, Homo sapiens
ataccctattttact

SEQ ID NO: 64471 - DNA, 15 bp, Homo sapiens
cataccctattttac

SEQ ID NO: 64472 - DNA, 15 bp, Homo sapiens
tcataccctatttta

SEQ ID NO: 64473 - DNA, 15 bp, Homo sapiens
ttcataccctatttt

SEQ ID NO: 64474 - DNA, 15 bp, Homo sapiens
attcataccctattt

SEQ ID NO: 64475 - DNA, 15 bp, Homo sapiens
gattcataccctatt

SEQ ID NO: 64476 - DNA, 15 bp, Homo sapiens
agattcataccctat

SEQ ID NO: 64477 - DNA, 15 bp, Homo sapiens
aagattcatacccta

SEQ ID NO: 64478 - DNA, 15 bp, Homo sapiens
gaagattcataccct

SEQ ID NO: 64479 - DNA, 15 bp, Homo sapiens
tgaagattcataccc

SEQ ID NO: 64480 - DNA, 15 bp, Homo sapiens
ttgaagattcatacc

SEQ ID NO: 64481 - DNA, 15 bp, Homo sapiens
cttgaagattcatac

SEQ ID NO: 64482 - DNA, 15 bp, Homo sapiens
ccttgaagattcata

SEQ ID NO: 64483 - DNA, 15 bp, Homo sapiens
accttgaagattcat

SEQ ID NO: 64484 - DNA, 15 bp, Homo sapiens
aaccttgaagattca

SEQ ID NO: 64485 - DNA, 15 bp, Homo sapiens
gaaccttgaagattc

SEQ ID NO: 64486 - DNA, 15 bp, Homo sapiens
agaaccttgaagatt

SEQ ID NO: 64487 - DNA, 15 bp, Homo sapiens
cagaaccttgaagat

SEQ ID NO: 64488 - DNA, 15 bp, Homo sapiens
tcagaaccttgaaga

SEQ ID NO: 64489 - DNA, 15 bp, Homo sapiens
atcagaaccttgaag

SEQ ID NO: 64490 - DNA, 15 bp, Homo sapiens
tatcagaaccttgaa

SEQ ID NO: 64491 - DNA, 15 bp, Homo sapiens
ctatcagaaccttga

SEQ ID NO: 64492 - DNA, 15 bp, Homo sapiens
gctatcagaaccttg

SEQ ID NO: 64493 - DNA, 15 bp, Homo sapiens
agctatcagaacctt

SEQ ID NO: 64494 - DNA, 15 bp, Homo sapiens
aagctatcagaacct

SEQ ID NO: 64495 - DNA, 15 bp, Homo sapiens
taagctatcagaacc

SEQ ID NO: 64496 - DNA, 15 bp, Homo sapiens
ataagctatcagaac

SEQ ID NO: 64497 - DNA, 15 bp, Homo sapiens
tataagctatcagaa

SEQ ID NO: 64498 - DNA, 15 bp, Homo sapiens
ttataagctatcaga

SEQ ID NO: 64499 - DNA, 15 bp, Homo sapiens
tttataagctatcag

SEQ ID NO: 64500 - DNA, 15 bp, Homo sapiens
ctttataagctatca

SEQ ID NO: 64501 - DNA, 15 bp, Homo sapiens
tctttataagctatc

SEQ ID NO: 64502 - DNA, 15 bp, Homo sapiens
ctctttataagctat

SEQ ID NO: 64503 - DNA, 15 bp, Homo sapiens
gctctttataagcta

SEQ ID NO: 64504 - DNA, 15 bp, Homo sapiens
agctctttataagct

SEQ ID NO: 64505 - DNA, 15 bp, Homo sapiens
tagctctttataagc

SEQ ID NO: 64506 - DNA, 15 bp, Homo sapiens
ctagctctttataag

SEQ ID NO: 64507 - DNA, 15 bp, Homo sapiens
tctagctctttataa

SEQ ID NO: 64508 - DNA, 15 bp, Homo sapiens
atctagctctttata

SEQ ID NO: 64509 - DNA, 15 bp, Homo sapiens
aatctagctctttat

SEQ ID NO: 64510 - DNA, 15 bp, Homo sapiens
taatctagctcttta

SEQ ID NO: 64511 - DNA, 15 bp, Homo sapiens
ttaatctagctcttt

SEQ ID NO: 64512 - DNA, 15 bp, Homo sapiens
attaatctagctctt

SEQ ID NO: 64513 - DNA, 15 bp, Homo sapiens
tattaatctagctct

SEQ ID NO: 64514 - DNA, 15 bp, Homo sapiens
ttattaatctagctc

SEQ ID NO: 64515 - DNA, 15 bp, Homo sapiens
attattaatctagct

SEQ ID NO: 64516 - DNA, 15 bp, Homo sapiens
gattattaatctagc

SEQ ID NO: 64517 - DNA, 15 bp, Homo sapiens
cgattattaatctag

SEQ ID NO: 64518 - DNA, 15 bp, Homo sapiens
ccgattattaatcta

SEQ ID NO: 64519 - DNA, 15 bp, Homo sapiens
tccgattattaatct

SEQ ID NO: 64520 - DNA, 15 bp, Homo sapiens
ttccgattattaatc

SEQ ID NO: 64521 - DNA, 15 bp, Homo sapiens
tttccgattattaat

SEQ ID NO: 64522 - DNA, 15 bp, Homo sapiens
atttccgattattaa

SEQ ID NO: 64523 - DNA, 15 bp, Homo sapiens
aatttccgattatta

SEQ ID NO: 64524 - DNA, 15 bp, Homo sapiens
aaatttccgattatt

SEQ ID NO: 64525 - DNA, 15 bp, Homo sapiens
gaaatttccgattat

SEQ ID NO: 64526 - DNA, 15 bp, Homo sapiens
tgaaatttccgatta

SEQ ID NO: 64527 - DNA, 15 bp, Homo sapiens
gtgaaatttccgatt

SEQ ID NO: 64528 - DNA, 15 bp, Homo sapiens
agtgaaatttccgat

SEQ ID NO: 64529 - DNA, 15 bp, Homo sapiens
cagtgaaatttccga

SEQ ID NO: 64530 - DNA, 15 bp, Homo sapiens
acagtgaaatttccg

SEQ ID NO: 64531 - DNA, 15 bp, Homo sapiens
cacagtgaaatttcc

SEQ ID NO: 64532 - DNA, 15 bp, Homo sapiens
tcacagtgaaatttc

SEQ ID NO: 64533 - DNA, 15 bp, Homo sapiens
ttcacagtgaaattt

SEQ ID NO: 64534 - DNA, 15 bp, Homo sapiens
gttcacagtgaaatt

SEQ ID NO: 64535 - DNA, 15 bp, Homo sapiens
tgttcacagtgaaat

SEQ ID NO: 64536 - DNA, 15 bp, Homo sapiens
atgttcacagtgaaa

SEQ ID NO: 64537 - DNA, 15 bp, Homo sapiens
gatgttcacagtgaa

SEQ ID NO: 64538 - DNA, 15 bp, Homo sapiens
tgatgttcacagtga

SEQ ID NO: 64539 - DNA, 15 bp, Homo sapiens
ctgatgttcacagtg

SEQ ID NO: 64540 - DNA, 15 bp, Homo sapiens
actgatgttcacagt

SEQ ID NO: 64541 - DNA, 15 bp, Homo sapiens
tactgatgttcacag

SEQ ID NO: 64542 - DNA, 15 bp, Homo sapiens
ctactgatgttcaca

SEQ ID NO: 64543 - DNA, 15 bp, Homo sapiens
tctactgatgttcac

SEQ ID NO: 64544 - DNA, 15 bp, Homo sapiens
ttctactgatgttca

SEQ ID NO: 64545 - DNA, 15 bp, Homo sapiens
tttctactgatgttc

SEQ ID NO: 64546 - DNA, 15 bp, Homo sapiens
atttctactgatgtt

SEQ ID NO: 64547 - DNA, 15 bp, Homo sapiens
aatttctactgatgt

SEQ ID NO: 64548 - DNA, 15 bp, Homo sapiens
taatttctactgatg

SEQ ID NO: 64549 - DNA, 15 bp, Homo sapiens
ataatttctactgat

SEQ ID NO: 64550 - DNA, 15 bp, Homo sapiens
tataatttctactga

SEQ ID NO: 64551 - DNA, 15 bp, Homo sapiens
ttataatttctactg

SEQ ID NO: 64552 - DNA, 15 bp, Homo sapiens
attataatttctact

SEQ ID NO: 64553 - DNA, 15 bp, Homo sapiens
gattataatttctac

SEQ ID NO: 64554 - DNA, 15 bp, Homo sapiens
ggattataatttcta

SEQ ID NO: 64555 - DNA, 15 bp, Homo sapiens
aggattataatttct

SEQ ID NO: 64556 - DNA, 15 bp, Homo sapiens
caggattataatttc

SEQ ID NO: 64557 - DNA, 15 bp, Homo sapiens
ccaggattataattt

SEQ ID NO: 64558 - DNA, 15 bp, Homo sapiens
cccaggattataatt

SEQ ID NO: 64559 - DNA, 15 bp, Homo sapiens
ccccaggattataat

SEQ ID NO: 64560 - DNA, 15 bp, Homo sapiens
cccccaggattataa

SEQ ID NO: 64561 - DNA, 15 bp, Homo sapiens
tcccccaggattata

SEQ ID NO: 64562 - DNA, 15 bp, Homo sapiens
ttcccccaggattat

SEQ ID NO: 64563 - DNA, 15 bp, Homo sapiens
tttcccccaggatta

SEQ ID NO: 64564 - DNA, 15 bp, Homo sapiens
ctttcccccaggatt

SEQ ID NO: 64565 - DNA, 15 bp, Homo sapiens
tctttcccccaggat

SEQ ID NO: 64566 - DNA, 15 bp, Homo sapiens
atctttcccccagga

SEQ ID NO: 64567 - DNA, 15 bp, Homo sapiens
catctttcccccagg

SEQ ID NO: 64568 - DNA, 15 bp, Homo sapiens
tcatctttcccccag

SEQ ID NO: 64569 - DNA, 15 bp, Homo sapiens
atcatctttccccca

SEQ ID NO: 64570 - DNA, 15 bp, Homo sapiens
catcatctttccccc

SEQ ID NO: 64571 - DNA, 15 bp, Homo sapiens
gcatcatctttcccc

SEQ ID NO: 64572 - DNA, 15 bp, Homo sapiens
agcatcatctttccc

SEQ ID NO: 64573 - DNA, 15 bp, Homo sapiens
cagcatcatctttcc

SEQ ID NO: 64574 - DNA, 15 bp, Homo sapiens
gcagcatcatctttc

SEQ ID NO: 64575 - DNA, 15 bp, Homo sapiens
tgcagcatcatcttt

SEQ ID NO: 64576 - DNA, 15 bp, Homo sapiens
ctgcagcatcatctt

SEQ ID NO: 64577 - DNA, 15 bp, Homo sapiens
actgcagcatcatct

SEQ ID NO: 64578 - DNA, 15 bp, Homo sapiens
aactgcagcatcatc

SEQ ID NO: 64579 - DNA, 15 bp, Homo sapiens
caactgcagcatcat

SEQ ID NO: 64580 - DNA, 15 bp, Homo sapiens
ccaactgcagcatca

SEQ ID NO: 64581 - DNA, 15 bp, Homo sapiens
cccaactgcagcatc

SEQ ID NO: 64582 - DNA, 15 bp, Homo sapiens
ccccaactgcagcat

SEQ ID NO: 64583 - DNA, 15 bp, Homo sapiens
gccccaactgcagca

SEQ ID NO: 64584 - DNA, 15 bp, Homo sapiens
ggccccaactgcagc

SEQ ID NO: 64585 - DNA, 15 bp, Homo sapiens
tggccccaactgcag

SEQ ID NO: 64586 - DNA, 15 bp, Homo sapiens
ctggccccaactgca

SEQ ID NO: 64587 - DNA, 15 bp, Homo sapiens
tctggccccaactgc

SEQ ID NO: 64588 - DNA, 15 bp, Homo sapiens
atctggccccaactg

SEQ ID NO: 64589 - DNA, 15 bp, Homo sapiens
catctggccccaact

SEQ ID NO: 64590 - DNA, 15 bp, Homo sapiens
gcatctggccccaac

SEQ ID NO: 64591 - DNA, 15 bp, Homo sapiens
ggcatctggccccaa

SEQ ID NO: 64592 - DNA, 15 bp, Homo sapiens
aggcatctggcccca

SEQ ID NO: 64593 - DNA, 15 bp, Homo sapiens
caggcatctggcccc

SEQ ID NO: 64594 - DNA, 15 bp, Homo sapiens
ccaggcatctggccc

SEQ ID NO: 64595 - DNA, 15 bp, Homo sapiens
accaggcatctggcc

SEQ ID NO: 64596 - DNA, 15 bp, Homo sapiens
taccaggcatctggc

SEQ ID NO: 64597 - DNA, 15 bp, Homo sapiens
ttaccaggcatctgg

SEQ ID NO: 64598 - DNA, 15 bp, Homo sapiens
attaccaggcatctg

SEQ ID NO: 64599 - DNA, 15 bp, Homo sapiens
aattaccaggcatct

SEQ ID NO: 64600 - DNA, 15 bp, Homo sapiens
caattaccaggcatc

SEQ ID NO: 64601 - DNA, 15 bp, Homo sapiens
tcaattaccaggcat

SEQ ID NO: 64602 - DNA, 15 bp, Homo sapiens
atcaattaccaggca

SEQ ID NO: 64603 - DNA, 15 bp, Homo sapiens
gatcaattaccaggc

SEQ ID NO: 64604 - DNA, 15 bp, Homo sapiens
ggatcaattaccagg

SEQ ID NO: 64605 - DNA, 15 bp, Homo sapiens
aggatcaattaccag

SEQ ID NO: 64606 - DNA, 15 bp, Homo sapiens
caggatcaattacca

SEQ ID NO: 64607 - DNA, 15 bp, Homo sapiens
tcaggatcaattacc

SEQ ID NO: 64608 - DNA, 15 bp, Homo sapiens
gtcaggatcaattac

SEQ ID NO: 64609 - DNA, 15 bp, Homo sapiens
tgtcaggatcaatta

SEQ ID NO: 64610 - DNA, 15 bp, Homo sapiens
ctgtcaggatcaatt

SEQ ID NO: 64611 - DNA, 15 bp, Homo sapiens
actgtcaggatcaat

SEQ ID NO: 64612 - DNA, 15 bp, Homo sapiens
tactgtcaggatcaa

SEQ ID NO: 64613 - DNA, 15 bp, Homo sapiens
ctactgtcaggatca

SEQ ID NO: 64614 - DNA, 15 bp, Homo sapiens
actactgtcaggatc

SEQ ID NO: 64615 - DNA, 15 bp, Homo sapiens
aactactgtcaggat

SEQ ID NO: 64616 - DNA, 15 bp, Homo sapiens
aaactactgtcagga

SEQ ID NO: 64617 - DNA, 15 bp, Homo sapiens
caaactactgtcagg

SEQ ID NO: 64618 - DNA, 15 bp, Homo sapiens
tcaaactactgtcag

SEQ ID NO: 64619 - DNA, 15 bp, Homo sapiens
ctcaaactactgtca

SEQ ID NO: 64620 - DNA, 15 bp, Homo sapiens
actcaaactactgtc

SEQ ID NO: 64621 - DNA, 15 bp, Homo sapiens
aactcaaactactgt

SEQ ID NO: 64622 - DNA, 15 bp, Homo sapiens
aaactcaaactactg

SEQ ID NO: 64623 - DNA, 15 bp, Homo sapiens
aaaactcaaactact

SEQ ID NO: 64624 - DNA, 15 bp, Homo sapiens
taaaactcaaactac

SEQ ID NO: 64625 - DNA, 15 bp, Homo sapiens
ttaaaactcaaacta

SEQ ID NO: 64626 - DNA, 15 bp, Homo sapiens
tttaaaactcaaact

SEQ ID NO: 64627 - DNA, 15 bp, Homo sapiens
atttaaaactcaaac

SEQ ID NO: 64628 - DNA, 15 bp, Homo sapiens
tatttaaaactcaaa

SEQ ID NO: 64629 - DNA, 15 bp, Homo sapiens
ttatttaaaactcaa

SEQ ID NO: 64630 - DNA, 15 bp, Homo sapiens
cttatttaaaactca

SEQ ID NO: 64631 - DNA, 15 bp, Homo sapiens
acttatttaaaactc

SEQ ID NO: 64632 - DNA, 15 bp, Homo sapiens
aacttatttaaaact

SEQ ID NO: 64633 - DNA, 15 bp, Homo sapiens
aaacttatttaaaac

SEQ ID NO: 64634 - DNA, 15 bp, Homo sapiens
gaaacttatttaaaa

SEQ ID NO: 64635 - DNA, 15 bp, Homo sapiens
tgaaacttatttaaa

SEQ ID NO: 64636 - DNA, 15 bp, Homo sapiens
ttgaaacttatttaa

SEQ ID NO: 64637 - DNA, 15 bp, Homo sapiens
gttgaaacttattta

SEQ ID NO: 64638 - DNA, 15 bp, Homo sapiens
ggttgaaacttattt

SEQ ID NO: 64639 - DNA, 15 bp, Homo sapiens
aggttgaaacttatt

SEQ ID NO: 64640 - DNA, 15 bp, Homo sapiens
aaggttgaaacttat

SEQ ID NO: 64641 - DNA, 15 bp, Homo sapiens
taaggttgaaactta

SEQ ID NO: 64642 - DNA, 15 bp, Homo sapiens
ataaggttgaaactt

SEQ ID NO: 64643 - DNA, 15 bp, Homo sapiens
gataaggttgaaact

SEQ ID NO: 64644 - DNA, 15 bp, Homo sapiens
agataaggttgaaac

SEQ ID NO: 64645 - DNA, 15 bp, Homo sapiens
aagataaggttgaaa

SEQ ID NO: 64646 - DNA, 15 bp, Homo sapiens
aaagataaggttgaa

SEQ ID NO: 64647 - DNA, 15 bp, Homo sapiens
gaaagataaggttga

SEQ ID NO: 64648 - DNA, 15 bp, Homo sapiens
agaaagataaggttg

SEQ ID NO: 64649 - DNA, 15 bp, Homo sapiens
aagaaagataaggtt

SEQ ID NO: 64650 - DNA, 15 bp, Homo sapiens
aaagaaagataaggt

SEQ ID NO: 64651 - DNA, 15 bp, Homo sapiens
caaagaaagataagg

SEQ ID NO: 64652 - DNA, 15 bp, Homo sapiens
ccaaagaaagataag

SEQ ID NO: 64653 - DNA, 15 bp, Homo sapiens
tccaaagaaagataa

SEQ ID NO: 64654 - DNA, 15 bp, Homo sapiens
ttccaaagaaagata

SEQ ID NO: 64655 - DNA, 15 bp, Homo sapiens
tttccaaagaaagat

SEQ ID NO: 64656 - DNA, 15 bp, Homo sapiens
ttttccaaagaaaga

SEQ ID NO: 64657 - DNA, 15 bp, Homo sapiens
tttttccaaagaaag

SEQ ID NO: 64658 - DNA, 15 bp, Homo sapiens
ctttttccaaagaaa

SEQ ID NO: 64659 - DNA, 15 bp, Homo sapiens
tctttttccaaagaa

SEQ ID NO: 64660 - DNA, 15 bp, Homo sapiens
atctttttccaaaga

SEQ ID NO: 64661 - DNA, 15 bp, Homo sapiens
tatctttttccaaag

SEQ ID NO: 64662 - DNA, 15 bp, Homo sapiens
ttatctttttccaaa

SEQ ID NO: 64663 - DNA, 15 bp, Homo sapiens
cttatctttttccaa

SEQ ID NO: 64664 - DNA, 15 bp, Homo sapiens
ccttatctttttcca

SEQ ID NO: 64665 - DNA, 15 bp, Homo sapiens
tccttatctttttcc

SEQ ID NO: 64666 - DNA, 15 bp, Homo sapiens
ctccttatctttttc

SEQ ID NO: 64667 - DNA, 15 bp, Homo sapiens
cctccttatcttttt

SEQ ID NO: 64668 - DNA, 15 bp, Homo sapiens
tcctccttatctttt

SEQ ID NO: 64669 - DNA, 15 bp, Homo sapiens
atcctccttatcttt

SEQ ID NO: 64670 - DNA, 15 bp, Homo sapiens
tatcctccttatctt

SEQ ID NO: 64671 - DNA, 15 bp, Homo sapiens
gtatcctccttatct

SEQ ID NO: 64672 - DNA, 15 bp, Homo sapiens
tgtatcctccttatc

SEQ ID NO: 64673 - DNA, 15 bp, Homo sapiens
gtgtatcctccttat

SEQ ID NO: 64674 - DNA, 15 bp, Homo sapiens
tgtgtatcctcctta

SEQ ID NO: 64675 - DNA, 15 bp, Homo sapiens
ctgtgtatcctcctt

SEQ ID NO: 64676 - DNA, 15 bp, Homo sapiens
gctgtgtatcctcct

SEQ ID NO: 64677 - DNA, 15 bp, Homo sapiens
tgctgtgtatcctcc

SEQ ID NO: 64678 - DNA, 15 bp, Homo sapiens
gtgctgtgtatcctc

SEQ ID NO: 64679 - DNA, 15 bp, Homo sapiens
ggtgctgtgtatcct

SEQ ID NO: 64680 - DNA, 15 bp, Homo sapiens
tggtgctgtgtatcc

SEQ ID NO: 64681 - DNA, 15 bp, Homo sapiens
gtggtgctgtgtatc

SEQ ID NO: 64682 - DNA, 15 bp, Homo sapiens
cgtggtgctgtgtat

SEQ ID NO: 64683 - DNA, 15 bp, Homo sapiens
tcgtggtgctgtgta

SEQ ID NO: 64684 - DNA, 15 bp, Homo sapiens
ttcgtggtgctgtgt

SEQ ID NO: 64685 - DNA, 15 bp, Homo sapiens
tttcgtggtgctgtg

SEQ ID NO: 64686 - DNA, 15 bp, Homo sapiens
ttttcgtggtgctgt

SEQ ID NO: 64687 - DNA, 15 bp, Homo sapiens
gttttcgtggtgctg

SEQ ID NO: 64688 - DNA, 15 bp, Homo sapiens
tgttttcgtggtgct

SEQ ID NO: 64689 - DNA, 15 bp, Homo sapiens
gtgttttcgtggtgc

SEQ ID NO: 64690 - DNA, 15 bp, Homo sapiens
cgtgttttcgtggtg

SEQ ID NO: 64691 - DNA, 15 bp, Homo sapiens
tcgtgttttcgtggt

SEQ ID NO: 64692 - DNA, 15 bp, Homo sapiens
ttcgtgttttcgtgg

SEQ ID NO: 64693 - DNA, 15 bp, Homo sapiens
tttcgtgttttcgtg

SEQ ID NO: 64694 - DNA, 15 bp, Homo sapiens
ttttcgtgttttcgt

SEQ ID NO: 64695 - DNA, 15 bp, Homo sapiens
gttttcgtgttttcg

SEQ ID NO: 64696 - DNA, 15 bp, Homo sapiens
tgttttcgtgttttc

SEQ ID NO: 64697 - DNA, 15 bp, Homo sapiens
gtgttttcgtgtttt

SEQ ID NO: 64698 - DNA, 15 bp, Homo sapiens
cgtgttttcgtgttt

SEQ ID NO: 64699 - DNA, 15 bp, Homo sapiens
tcgtgttttcgtgtt

SEQ ID NO: 64700 - DNA, 15 bp, Homo sapiens
gtcgtgttttcgtgt

SEQ ID NO: 64701 - DNA, 15 bp, Homo sapiens
ggtcgtgttttcgtg

SEQ ID NO: 64702 - DNA, 15 bp, Homo sapiens
gggtcgtgttttcgt

SEQ ID NO: 64703 - DNA, 15 bp, Homo sapiens
ggggtcgtgttttcg

SEQ ID NO: 64704 - DNA, 15 bp, Homo sapiens
aggggtcgtgttttc

SEQ ID NO: 64705 - DNA, 15 bp, Homo sapiens
caggggtcgtgtttt

SEQ ID NO: 64706 - DNA, 15 bp, Homo sapiens
ccaggggtcgtgttt

SEQ ID NO: 64707 - DNA, 15 bp, Homo sapiens
cccaggggtcgtgtt

SEQ ID NO: 64708 - DNA, 15 bp, Homo sapiens
gcccaggggtcgtgt

SEQ ID NO: 64709 - DNA, 15 bp, Homo sapiens
agcccaggggtcgtg

SEQ ID NO: 64710 - DNA, 15 bp, Homo sapiens
tagcccaggggtcgt

SEQ ID NO: 64711 - DNA, 15 bp, Homo sapiens
atagcccaggggtcg

SEQ ID NO: 64712 - DNA, 15 bp, Homo sapiens
aatagcccaggggtc

SEQ ID NO: 64713 - DNA, 15 bp, Homo sapiens
aaatagcccaggggt

SEQ ID NO: 64714 - DNA, 15 bp, Homo sapiens
taaatagcccagggg

SEQ ID NO: 64715 - DNA, 15 bp, Homo sapiens
gtaaatagcccaggg

SEQ ID NO: 64716 - DNA, 15 bp, Homo sapiens
tgtaaatagcccagg

SEQ ID NO: 64717 - DNA, 15 bp, Homo sapiens
gtgtaaatagcccag

SEQ ID NO: 64718 - DNA, 15 bp, Homo sapiens
tgtgtaaatagccca

SEQ ID NO: 64719 - DNA, 15 bp, Homo sapiens
atgtgtaaatagccc

SEQ ID NO: 64720 - DNA, 15 bp, Homo sapiens
catgtgtaaatagcc

SEQ ID NO: 64721 - DNA, 15 bp, Homo sapiens
ccatgtgtaaatagc

SEQ ID NO: 64722 - DNA, 15 bp, Homo sapiens
gccatgtgtaaatag

SEQ ID NO: 64723 - DNA, 15 bp, Homo sapiens
tgccatgtgtaaata

SEQ ID NO: 64724 - DNA, 15 bp, Homo sapiens
ttgccatgtgtaaat

SEQ ID NO: 64725 - DNA, 15 bp, Homo sapiens
tttgccatgtgtaaa

SEQ ID NO: 64726 - DNA, 15 bp, Homo sapiens
ctttgccatgtgtaa

SEQ ID NO: 64727 - DNA, 15 bp, Homo sapiens
cctttgccatgtgta

SEQ ID NO: 64728 - DNA, 15 bp, Homo sapiens
tcctttgccatgtgt

SEQ ID NO: 64729 - DNA, 15 bp, Homo sapiens
ttcctttgccatgtg

SEQ ID NO: 64730 - DNA, 15 bp, Homo sapiens
gttcctttgccatgt

SEQ ID NO: 64731 - DNA, 15 bp, Homo sapiens
tgttcctttgccatg

SEQ ID NO: 64732 - DNA, 15 bp, Homo sapiens
ttgttcctttgccat

SEQ ID NO: 64733 - DNA, 15 bp, Homo sapiens
tttgttcctttgcca

SEQ ID NO: 64734 - DNA, 15 bp, Homo sapiens
ctttgttcctttgcc

SEQ ID NO: 64735 - DNA, 15 bp, Homo sapiens
tctttgttcctttgc

SEQ ID NO: 64736 - DNA, 15 bp, Homo sapiens
ctctttgttcctttg

SEQ ID NO: 64737 - DNA, 15 bp, Homo sapiens
tctctttgttccttt

SEQ ID NO: 64738 - DNA, 15 bp, Homo sapiens
gtctctttgttcctt

SEQ ID NO: 64739 - DNA, 15 bp, Homo sapiens
ggtctctttgttcct

SEQ ID NO: 64740 - DNA, 15 bp, Homo sapiens
tggtctctttgttcc

SEQ ID NO: 64741 - DNA, 15 bp, Homo sapiens
ttggtctctttgttc

SEQ ID NO: 64742 - DNA, 15 bp, Homo sapiens
attggtctctttgtt

SEQ ID NO: 64743 - DNA, 15 bp, Homo sapiens
aattggtctctttgt

SEQ ID NO: 64744 - DNA, 15 bp, Homo sapiens
aaattggtctctttg

SEQ ID NO: 64745 - DNA, 15 bp, Homo sapiens
gaaattggtctcttt

SEQ ID NO: 64746 - DNA, 15 bp, Homo sapiens
agaaattggtctctt

SEQ ID NO: 64747 - DNA, 15 bp, Homo sapiens
gagaaattggtctct

SEQ ID NO: 64748 - DNA, 15 bp, Homo sapiens
agagaaattggtctc

SEQ ID NO: 64749 - DNA, 15 bp, Homo sapiens
gagagaaattggtct

SEQ ID NO: 64750 - DNA, 15 bp, Homo sapiens
ggagagaaattggtc

SEQ ID NO: 64751 - DNA, 15 bp, Homo sapiens
aggagagaaattggt

SEQ ID NO: 64752 - DNA, 15 bp, Homo sapiens
taggagagaaattgg

SEQ ID NO: 64753 - DNA, 15 bp, Homo sapiens
ctaggagagaaattg

SEQ ID NO: 64754 - DNA, 15 bp, Homo sapiens
cctaggagagaaatt

SEQ ID NO: 64755 - DNA, 15 bp, Homo sapiens
tcctaggagagaaat

SEQ ID NO: 64756 - DNA, 15 bp, Homo sapiens
gtcctaggagagaaa

SEQ ID NO: 64757 - DNA, 15 bp, Homo sapiens
ggtcctaggagagaa

SEQ ID NO: 64758 - DNA, 15 bp, Homo sapiens
tggtcctaggagaga

SEQ ID NO: 64759 - DNA, 15 bp, Homo sapiens
atggtcctaggagag

SEQ ID NO: 64760 - DNA, 15 bp, Homo sapiens
catggtcctaggaga

SEQ ID NO: 64761 - DNA, 15 bp, Homo sapiens
ccatggtcctaggag

SEQ ID NO: 64762 - DNA, 15 bp, Homo sapiens
tccatggtcctagga

SEQ ID NO: 64763 - DNA, 15 bp, Homo sapiens
ttccatggtcctagg

SEQ ID NO: 64764 - DNA, 15 bp, Homo sapiens
tttccatggtcctag

SEQ ID NO: 64765 - DNA, 15 bp, Homo sapiens
ttttccatggtccta

SEQ ID NO: 64766 - DNA, 15 bp, Homo sapiens
attttccatggtcct

SEQ ID NO: 64767 - DNA, 15 bp, Homo sapiens
cattttccatggtcc

SEQ ID NO: 64768 - DNA, 15 bp, Homo sapiens
tcattttccatggtc

SEQ ID NO: 64769 - DNA, 15 bp, Homo sapiens
ctcattttccatggt

SEQ ID NO: 64770 - DNA, 15 bp, Homo sapiens
tctcattttccatgg

SEQ ID NO: 64771 - DNA, 15 bp, Homo sapiens
ttctcattttccatg

SEQ ID NO: 64772 - DNA, 15 bp, Homo sapiens
tttctcattttccat

SEQ ID NO: 64773 - DNA, 15 bp, Homo sapiens
atttctcattttcca

SEQ ID NO: 64774 - DNA, 15 bp, Homo sapiens
tatttctcattttcc

SEQ ID NO: 64775 - DNA, 15 bp, Homo sapiens
atatttctcattttc

SEQ ID NO: 64776 - DNA, 15 bp, Homo sapiens
catatttctcatttt

SEQ ID NO: 64777 - DNA, 15 bp, Homo sapiens
acatatttctcattt

SEQ ID NO: 64778 - DNA, 15 bp, Homo sapiens
tacatatttctcatt

SEQ ID NO: 64779 - DNA, 15 bp, Homo sapiens
gtacatatttctcat

SEQ ID NO: 64780 - DNA, 15 bp, Homo sapiens
ggtacatatttctca

SEQ ID NO: 64781 - DNA, 15 bp, Homo sapiens
gggtacatatttctc

SEQ ID NO: 64782 - DNA, 15 bp, Homo sapiens
agggtacatatttct

SEQ ID NO: 64783 - DNA, 15 bp, Homo sapiens
cagggtacatatttc

SEQ ID NO: 64784 - DNA, 15 bp, Homo sapiens
tcagggtacatattt

SEQ ID NO: 64785 - DNA, 15 bp, Homo sapiens
atcagggtacatatt

SEQ ID NO: 64786 - DNA, 15 bp, Homo sapiens
catcagggtacatat

SEQ ID NO: 64787 - DNA, 15 bp, Homo sapiens
acatcagggtacata

SEQ ID NO: 64788 - DNA, 15 bp, Homo sapiens
cacatcagggtacat

SEQ ID NO: 64789 - DNA, 15 bp, Homo sapiens
acacatcagggtaca

SEQ ID NO: 64790 - DNA, 15 bp, Homo sapiens
aacacatcagggtac

SEQ ID NO: 64791 - DNA, 15 bp, Homo sapiens
aaacacatcagggta

SEQ ID NO: 64792 - DNA, 15 bp, Homo sapiens
aaaacacatcagggt

SEQ ID NO: 64793 - DNA, 15 bp, Homo sapiens
gaaaacacatcaggg

SEQ ID NO: 64794 - DNA, 15 bp, Homo sapiens
agaaaacacatcagg

SEQ ID NO: 64795 - DNA, 15 bp, Homo sapiens
gagaaaacacatcag

SEQ ID NO: 64796 - DNA, 15 bp, Homo sapiens
tgagaaaacacatca

SEQ ID NO: 64797 - DNA, 15 bp, Homo sapiens
ttgagaaaacacatc

SEQ ID NO: 64798 - DNA, 15 bp, Homo sapiens
gttgagaaaacacat

SEQ ID NO: 64799 - DNA, 15 bp, Homo sapiens
tgttgagaaaacaca

SEQ ID NO: 64800 - DNA, 15 bp, Homo sapiens
ttgttgagaaaacac

SEQ ID NO: 64801 - DNA, 15 bp, Homo sapiens
attgttgagaaaaca

SEQ ID NO: 64802 - DNA, 15 bp, Homo sapiens
cattgttgagaaaac

SEQ ID NO: 64803 - DNA, 15 bp, Homo sapiens
gcattgttgagaaaa

SEQ ID NO: 64804 - DNA, 15 bp, Homo sapiens
agcattgttgagaaa

SEQ ID NO: 64805 - DNA, 15 bp, Homo sapiens
cagcattgttgagaa

SEQ ID NO: 64806 - DNA, 15 bp, Homo sapiens
acagcattgttgaga

SEQ ID NO: 64807 - DNA, 15 bp, Homo sapiens
cacagcattgttgag

SEQ ID NO: 64808 - DNA, 15 bp, Homo sapiens
ccacagcattgttga

SEQ ID NO: 64809 - DNA, 15 bp, Homo sapiens
accacagcattgttg

SEQ ID NO: 64810 - DNA, 15 bp, Homo sapiens
caccacagcattgtt

SEQ ID NO: 64811 - DNA, 15 bp, Homo sapiens
tcaccacagcattgt

SEQ ID NO: 64812 - DNA, 15 bp, Homo sapiens
atcaccacagcattg

SEQ ID NO: 64813 - DNA, 15 bp, Homo sapiens
tatcaccacagcatt

SEQ ID NO: 64814 - DNA, 15 bp, Homo sapiens
atatcaccacagcat

SEQ ID NO: 64815 - DNA, 15 bp, Homo sapiens
aatatcaccacagca

SEQ ID NO: 64816 - DNA, 15 bp, Homo sapiens
aaatatcaccacagc

SEQ ID NO: 64817 - DNA, 15 bp, Homo sapiens
aaaatatcaccacag

SEQ ID NO: 64818 - DNA, 15 bp, Homo sapiens
taaaatatcaccaca

SEQ ID NO: 64819 - DNA, 15 bp, Homo sapiens
ataaaatatcaccac

SEQ ID NO: 64820 - DNA, 15 bp, Homo sapiens
gataaaatatcacca

SEQ ID NO: 64821 - DNA, 15 bp, Homo sapiens
ggataaaatatcacc

SEQ ID NO: 64822 - DNA, 15 bp, Homo sapiens
aggataaaatatcac

SEQ ID NO: 64823 - DNA, 15 bp, Homo sapiens
taggataaaatatca

SEQ ID NO: 64824 - DNA, 15 bp, Homo sapiens
ataggataaaatatc

SEQ ID NO: 64825 - DNA, 15 bp, Homo sapiens
aataggataaaatat

SEQ ID NO: 64826 - DNA, 15 bp, Homo sapiens
taataggataaaata

SEQ ID NO: 64827 - DNA, 15 bp, Homo sapiens
ataataggataaaat

SEQ ID NO: 64828 - DNA, 15 bp, Homo sapiens
aataataggataaaa

SEQ ID NO: 64829 - DNA, 15 bp, Homo sapiens
aaataataggataaa

SEQ ID NO: 64830 - DNA, 15 bp, Homo sapiens
aaaataataggataa

SEQ ID NO: 64831 - DNA, 15 bp, Homo sapiens
caaaataataggata

SEQ ID NO: 64832 - DNA, 15 bp, Homo sapiens
acaaaataataggat

SEQ ID NO: 64833 - DNA, 15 bp, Homo sapiens
cacaaaataatagga

SEQ ID NO: 64834 - DNA, 15 bp, Homo sapiens
tcacaaaataatagg

SEQ ID NO: 64835 - DNA, 15 bp, Homo sapiens
ttcacaaaataatag

SEQ ID NO: 64836 - DNA, 15 bp, Homo sapiens
attcacaaaataata

SEQ ID NO: 64837 - DNA, 15 bp, Homo sapiens
cattcacaaaataat

SEQ ID NO: 64838 - DNA, 15 bp, Homo sapiens
gcattcacaaaataa

SEQ ID NO: 64839 - DNA, 15 bp, Homo sapiens
tgcattcacaaaata

SEQ ID NO: 64840 - DNA, 15 bp, Homo sapiens
ctgcattcacaaaat

SEQ ID NO: 64841 - DNA, 15 bp, Homo sapiens
actgcattcacaaaa

SEQ ID NO: 64842 - DNA, 15 bp, Homo sapiens
tactgcattcacaaa

SEQ ID NO: 64843 - DNA, 15 bp, Homo sapiens
ctactgcattcacaa

SEQ ID NO: 64844 - DNA, 15 bp, Homo sapiens
tctactgcattcaca

SEQ ID NO: 64845 - DNA, 15 bp, Homo sapiens
atctactgcattcac

SEQ ID NO: 64846 - DNA, 15 bp, Homo sapiens
catctactgcattca

SEQ ID NO: 64847 - DNA, 15 bp, Homo sapiens
acatctactgcattc

SEQ ID NO: 64848 - DNA, 15 bp, Homo sapiens
tacatctactgcatt

SEQ ID NO: 64849 - DNA, 15 bp, Homo sapiens
ctacatctactgcat

SEQ ID NO: 64850 - DNA, 15 bp, Homo sapiens
cctacatctactgca

SEQ ID NO: 64851 - DNA, 15 bp, Homo sapiens
gcctacatctactgc

SEQ ID NO: 64852 - DNA, 15 bp, Homo sapiens
agcctacatctactg

SEQ ID NO: 64853 - DNA, 15 bp, Homo sapiens
cagcctacatctact

SEQ ID NO: 64854 - DNA, 15 bp, Homo sapiens
acagcctacatctac

SEQ ID NO: 64855 - DNA, 15 bp, Homo sapiens
aacagcctacatcta

SEQ ID NO: 64856 - DNA, 15 bp, Homo sapiens
aaacagcctacatct

SEQ ID NO: 64857 - DNA, 15 bp, Homo sapiens
gaaacagcctacatc

SEQ ID NO: 64858 - DNA, 15 bp, Homo sapiens
agaaacagcctacat

SEQ ID NO: 64859 - DNA, 15 bp, Homo sapiens
aagaaacagcctaca

SEQ ID NO: 64860 - DNA, 15 bp, Homo sapiens
taagaaacagcctac

SEQ ID NO: 64861 - DNA, 15 bp, Homo sapiens
ataagaaacagccta

SEQ ID NO: 64862 - DNA, 15 bp, Homo sapiens
aataagaaacagcct

SEQ ID NO: 64863 - DNA, 15 bp, Homo sapiens
aaataagaaacagcc

SEQ ID NO: 64864 - DNA, 15 bp, Homo sapiens
aaaataagaaacagc

SEQ ID NO: 64865 - DNA, 15 bp, Homo sapiens
aaaaataagaaacag

SEQ ID NO: 64866 - DNA, 15 bp, Homo sapiens
aaaaaataagaaaca

SEQ ID NO: 64867 - DNA, 15 bp, Homo sapiens
gaaaaaataagaaac

SEQ ID NO: 64868 - DNA, 15 bp, Homo sapiens
tgaaaaaataagaaa

SEQ ID NO: 64869 - DNA, 15 bp, Homo sapiens
atgaaaaaataagaa

SEQ ID NO: 64870 - DNA, 15 bp, Homo sapiens
aatgaaaaaataaga

SEQ ID NO: 64871 - DNA, 15 bp, Homo sapiens
aaatgaaaaaataag

SEQ ID NO: 64872 - DNA, 15 bp, Homo sapiens
caaatgaaaaaataa

SEQ ID NO: 64873 - DNA, 15 bp, Homo sapiens
acaaatgaaaaaata

SEQ ID NO: 64874 - DNA, 15 bp, Homo sapiens
gacaaatgaaaaaat

SEQ ID NO: 64875 - DNA, 15 bp, Homo sapiens
agacaaatgaaaaaa

SEQ ID NO: 64876 - DNA, 15 bp, Homo sapiens
aagacaaatgaaaaa

SEQ ID NO: 64877 - DNA, 15 bp, Homo sapiens
aaagacaaatgaaaa

SEQ ID NO: 64878 - DNA, 15 bp, Homo sapiens
aaaagacaaatgaaa

SEQ ID NO: 64879 - DNA, 15 bp, Homo sapiens
gaaaagacaaatgaa

SEQ ID NO: 64880 - DNA, 15 bp, Homo sapiens
agaaaagacaaatga

SEQ ID NO: 64881 - DNA, 15 bp, Homo sapiens
tagaaaagacaaatg

SEQ ID NO: 64882 - DNA, 15 bp, Homo sapiens
ttagaaaagacaaat

SEQ ID NO: 64883 - DNA, 15 bp, Homo sapiens
tttagaaaagacaaa

SEQ ID NO: 64884 - DNA, 15 bp, Homo sapiens
ttttagaaaagacaa

SEQ ID NO: 64885 - DNA, 15 bp, Homo sapiens
tttttagaaaagaca

SEQ ID NO: 64886 - DNA, 15 bp, Homo sapiens
ttttttagaaaagac

SEQ ID NO: 64887 - DNA, 15 bp, Homo sapiens
attttttagaaaaga

SEQ ID NO: 64888 - DNA, 15 bp, Homo sapiens
tattttttagaaaag

SEQ ID NO: 64889 - DNA, 15 bp, Homo sapiens
ttattttttagaaaa

SEQ ID NO: 64890 - DNA, 15 bp, Homo sapiens
tttattttttagaaa

SEQ ID NO: 64891 - DNA, 15 bp, Homo sapiens
ttttattttttagaa

SEQ ID NO: 64892 - DNA, 15 bp, Homo sapiens
tttttattttttaga

SEQ ID NO: 64893 - DNA, 15 bp, Homo sapiens
atttttattttttag

SEQ ID NO: 64894 - DNA, 15 bp, Homo sapiens
tatttttatttttta

SEQ ID NO: 64895 - DNA, 15 bp, Homo sapiens
ttatttttatttttt

SEQ ID NO: 64896 - DNA, 15 bp, Homo sapiens
cttatttttattttt

SEQ ID NO: 64897 - DNA, 15 bp, Homo sapiens
acttatttttatttt

SEQ ID NO: 64898 - DNA, 15 bp, Homo sapiens
gacttatttttattt

SEQ ID NO: 64899 - DNA, 15 bp, Homo sapiens
tgacttatttttatt

SEQ ID NO: 64900 - DNA, 15 bp, Homo sapiens
atgacttatttttat

SEQ ID NO: 64901 - DNA, 15 bp, Homo sapiens
aatgacttattttta

SEQ ID NO: 64902 - DNA, 15 bp, Homo sapiens
caatgacttattttt

SEQ ID NO: 64903 - DNA, 15 bp, Homo sapiens
acaatgacttatttt

SEQ ID NO: 64904 - DNA, 15 bp, Homo sapiens
gacaatgacttattt

SEQ ID NO: 64905 - DNA, 15 bp, Homo sapiens
tgacaatgacttatt

SEQ ID NO: 64906 - DNA, 15 bp, Homo sapiens
gtgacaatgacttat

SEQ ID NO: 64907 - DNA, 15 bp, Homo sapiens
tgtgacaatgactta

SEQ ID NO: 64908 - DNA, 15 bp, Homo sapiens
atgtgacaatgactt

SEQ ID NO: 64909 - DNA, 15 bp, Homo sapiens
catgtgacaatgact

SEQ ID NO: 64910 - DNA, 15 bp, Homo sapiens
tcatgtgacaatgac

SEQ ID NO: 64911 - DNA, 15 bp, Homo sapiens
ttcatgtgacaatga

SEQ ID NO: 64912 - DNA, 15 bp, Homo sapiens
attcatgtgacaatg

SEQ ID NO: 64913 - DNA, 15 bp, Homo sapiens
tattcatgtgacaat

SEQ ID NO: 64914 - DNA, 15 bp, Homo sapiens
ttattcatgtgacaa

SEQ ID NO: 64915 - DNA, 15 bp, Homo sapiens
tttattcatgtgaca

SEQ ID NO: 64916 - DNA, 15 bp, Homo sapiens
atttattcatgtgac

SEQ ID NO: 64917 - DNA, 15 bp, Homo sapiens
gatttattcatgtga

SEQ ID NO: 64918 - DNA, 15 bp, Homo sapiens
tgatttattcatgtg

SEQ ID NO: 64919 - DNA, 15 bp, Homo sapiens
ctgatttattcatgt

SEQ ID NO: 64920 - DNA, 15 bp, Homo sapiens
actgatttattcatg

SEQ ID NO: 64921 - DNA, 15 bp, Homo sapiens
tactgatttattcat

SEQ ID NO: 64922 - DNA, 15 bp, Homo sapiens
atactgatttattca

SEQ ID NO: 64923 - DNA, 15 bp, Homo sapiens
tatactgatttattc

SEQ ID NO: 64924 - DNA, 15 bp, Homo sapiens
ctatactgatttatt

SEQ ID NO: 64925 - DNA, 15 bp, Homo sapiens
actatactgatttat

SEQ ID NO: 64926 - DNA, 15 bp, Homo sapiens
tactatactgattta

SEQ ID NO: 64927 - DNA, 15 bp, Homo sapiens
atactatactgattt

SEQ ID NO: 64928 - DNA, 15 bp, Homo sapiens
tatactatactgatt

SEQ ID NO: 64929 - DNA, 15 bp, Homo sapiens
ctatactatactgat

SEQ ID NO: 64930 - DNA, 15 bp, Homo sapiens
actatactatactga

SEQ ID NO: 64931 - DNA, 15 bp, Homo sapiens
cactatactatactg

SEQ ID NO: 64932 - DNA, 15 bp, Homo sapiens
acactatactatact

SEQ ID NO: 64933 - DNA, 15 bp, Homo sapiens
aacactatactatac

SEQ ID NO: 64934 - DNA, 15 bp, Homo sapiens
taacactatactata

SEQ ID NO: 64935 - DNA, 15 bp, Homo sapiens
gtaacactatactat

SEQ ID NO: 64936 - DNA, 15 bp, Homo sapiens
cgtaacactatacta

SEQ ID NO: 64937 - DNA, 15 bp, Homo sapiens
tcgtaacactatact

SEQ ID NO: 64938 - DNA, 15 bp, Homo sapiens
ctcgtaacactatac

SEQ ID NO: 64939 - DNA, 15 bp, Homo sapiens
gctcgtaacactata

SEQ ID NO: 64940 - DNA, 15 bp, Homo sapiens
tgctcgtaacactat

SEQ ID NO: 64941 - DNA, 15 bp, Homo sapiens
atgctcgtaacacta

SEQ ID NO: 64942 - DNA, 15 bp, Homo sapiens
tatgctcgtaacact

SEQ ID NO: 64943 - DNA, 15 bp, Homo sapiens
ctatgctcgtaacac

SEQ ID NO: 64944 - DNA, 15 bp, Homo sapiens
cctatgctcgtaaca

SEQ ID NO: 64945 - DNA, 15 bp, Homo sapiens
gcctatgctcgtaac

SEQ ID NO: 64946 - DNA, 15 bp, Homo sapiens
ggcctatgctcgtaa

SEQ ID NO: 64947 - DNA, 15 bp, Homo sapiens
tggcctatgctcgta

SEQ ID NO: 64948 - DNA, 15 bp, Homo sapiens
ttggcctatgctcgt

SEQ ID NO: 64949 - DNA, 15 bp, Homo sapiens
tttggcctatgctcg

SEQ ID NO: 64950 - DNA, 15 bp, Homo sapiens
atttggcctatgctc

SEQ ID NO: 64951 - DNA, 15 bp, Homo sapiens
aatttggcctatgct

SEQ ID NO: 64952 - DNA, 15 bp, Homo sapiens
caatttggcctatgc

SEQ ID NO: 64953 - DNA, 15 bp, Homo sapiens
gcaatttggcctatg

SEQ ID NO: 64954 - DNA, 15 bp, Homo sapiens
ggcaatttggcctat

SEQ ID NO: 64955 - DNA, 15 bp, Homo sapiens
aggcaatttggccta

SEQ ID NO: 64956 - DNA, 15 bp, Homo sapiens
caggcaatttggcct

SEQ ID NO: 64957 - DNA, 15 bp, Homo sapiens
ccaggcaatttggcc

SEQ ID NO: 64958 - DNA, 15 bp, Homo sapiens
cccaggcaatttggc

SEQ ID NO: 64959 - DNA, 15 bp, Homo sapiens
gcccaggcaatttgg

SEQ ID NO: 64960 - DNA, 15 bp, Homo sapiens
agcccaggcaatttg

SEQ ID NO: 64961 - DNA, 15 bp, Homo sapiens
cagcccaggcaattt

SEQ ID NO: 64962 - DNA, 15 bp, Homo sapiens
tcagcccaggcaatt

SEQ ID NO: 64963 - DNA, 15 bp, Homo sapiens
gtcagcccaggcaat

SEQ ID NO: 64964 - DNA, 15 bp, Homo sapiens
agtcagcccaggcaa

SEQ ID NO: 64965 - DNA, 15 bp, Homo sapiens
aagtcagcccaggca

SEQ ID NO: 64966 - DNA, 15 bp, Homo sapiens
aaagtcagcccaggc

SEQ ID NO: 64967 - DNA, 15 bp, Homo sapiens
gaaagtcagcccagg

SEQ ID NO: 64968 - DNA, 15 bp, Homo sapiens
tgaaagtcagcccag

SEQ ID NO: 64969 - DNA, 15 bp, Homo sapiens
ctgaaagtcagccca

SEQ ID NO: 64970 - DNA, 15 bp, Homo sapiens
gctgaaagtcagccc

SEQ ID NO: 64971 - DNA, 15 bp, Homo sapiens
agctgaaagtcagcc

SEQ ID NO: 64972 - DNA, 15 bp, Homo sapiens
gagctgaaagtcagc

SEQ ID NO: 64973 - DNA, 15 bp, Homo sapiens
agagctgaaagtcag

SEQ ID NO: 64974 - DNA, 15 bp, Homo sapiens
cagagctgaaagtca

SEQ ID NO: 64975 - DNA, 15 bp, Homo sapiens
gcagagctgaaagtc

SEQ ID NO: 64976 - DNA, 15 bp, Homo sapiens
ggcagagctgaaagt

SEQ ID NO: 64977 - DNA, 15 bp, Homo sapiens
tggcagagctgaaag

SEQ ID NO: 64978 - DNA, 15 bp, Homo sapiens
gtggcagagctgaaa

SEQ ID NO: 64979 - DNA, 15 bp, Homo sapiens
agtggcagagctgaa

SEQ ID NO: 64980 - DNA, 15 bp, Homo sapiens
aagtggcagagctga

SEQ ID NO: 64981 - DNA, 15 bp, Homo sapiens
taagtggcagagctg

SEQ ID NO: 64982 - DNA, 15 bp, Homo sapiens
gtaagtggcagagct

SEQ ID NO: 64983 - DNA, 15 bp, Homo sapiens
agtaagtggcagagc

SEQ ID NO: 64984 - DNA, 15 bp, Homo sapiens
tagtaagtggcagag

SEQ ID NO: 64985 - DNA, 15 bp, Homo sapiens
ctagtaagtggcaga

SEQ ID NO: 64986 - DNA, 15 bp, Homo sapiens
gctagtaagtggcag

SEQ ID NO: 64987 - DNA, 15 bp, Homo sapiens
agctagtaagtggca

SEQ ID NO: 64988 - DNA, 15 bp, Homo sapiens
cagctagtaagtggc

SEQ ID NO: 64989 - DNA, 15 bp, Homo sapiens
acagctagtaagtgg

SEQ ID NO: 64990 - DNA, 15 bp, Homo sapiens
tacagctagtaagtg

SEQ ID NO: 64991 - DNA, 15 bp, Homo sapiens
atacagctagtaagt

SEQ ID NO: 64992 - DNA, 15 bp, Homo sapiens
catacagctagtaag

SEQ ID NO: 64993 - DNA, 15 bp, Homo sapiens
tcatacagctagtaa

SEQ ID NO: 64994 - DNA, 15 bp, Homo sapiens
gtcatacagctagta

SEQ ID NO: 64995 - DNA, 15 bp, Homo sapiens
tgtcatacagctagt

SEQ ID NO: 64996 - DNA, 15 bp, Homo sapiens
atgtcatacagctag

SEQ ID NO: 64997 - DNA, 15 bp, Homo sapiens
aatgtcatacagcta

SEQ ID NO: 64998 - DNA, 15 bp, Homo sapiens
caatgtcatacagct

SEQ ID NO: 64999 - DNA, 15 bp, Homo sapiens
tcaatgtcatacagc

SEQ ID NO: 65000 - DNA, 15 bp, Homo sapiens
ctcaatgtcatacag

SEQ ID NO: 65001 - DNA, 15 bp, Homo sapiens
actcaatgtcataca

SEQ ID NO: 65002 - DNA, 15 bp, Homo sapiens
tactcaatgtcatac

SEQ ID NO: 65003 - DNA, 15 bp, Homo sapiens
ttactcaatgtcata

SEQ ID NO: 65004 - DNA, 15 bp, Homo sapiens
cttactcaatgtcat

SEQ ID NO: 65005 - DNA, 15 bp, Homo sapiens
acttactcaatgtca

SEQ ID NO: 65006 - DNA, 15 bp, Homo sapiens
aacttactcaatgtc

SEQ ID NO: 65007 - DNA, 15 bp, Homo sapiens
taacttactcaatgt

SEQ ID NO: 65008 - DNA, 15 bp, Homo sapiens
gtaacttactcaatg

SEQ ID NO: 65009 - DNA, 15 bp, Homo sapiens
agtaacttactcaat

SEQ ID NO: 65010 - DNA, 15 bp, Homo sapiens
aagtaacttactcaa

SEQ ID NO: 65011 - DNA, 15 bp, Homo sapiens
aaagtaacttactca

SEQ ID NO: 65012 - DNA, 15 bp, Homo sapiens
taaagtaacttactc

SEQ ID NO: 65013 - DNA, 15 bp, Homo sapiens
ataaagtaacttact

SEQ ID NO: 65014 - DNA, 15 bp, Homo sapiens
aataaagtaacttac

SEQ ID NO: 65015 - DNA, 15 bp, Homo sapiens
aaataaagtaactta

SEQ ID NO: 65016 - DNA, 15 bp, Homo sapiens
taaataaagtaactt

SEQ ID NO: 65017 - DNA, 15 bp, Homo sapiens
ataaataaagtaact

SEQ ID NO: 65018 - DNA, 15 bp, Homo sapiens
gataaataaagtaac

SEQ ID NO: 65019 - DNA, 15 bp, Homo sapiens
agataaataaagtaa

SEQ ID NO: 65020 - DNA, 15 bp, Homo sapiens
cagataaataaagta

SEQ ID NO: 65021 - DNA, 15 bp, Homo sapiens
acagataaataaagt

SEQ ID NO: 65022 - DNA, 15 bp, Homo sapiens
cacagataaataaag

SEQ ID NO: 65023 - DNA, 15 bp, Homo sapiens
gcacagataaataaa

SEQ ID NO: 65024 - DNA, 15 bp, Homo sapiens
ggcacagataaataa

SEQ ID NO: 65025 - DNA, 15 bp, Homo sapiens
aggcacagataaata

SEQ ID NO: 65026 - DNA, 15 bp, Homo sapiens
gaggcacagataaat

SEQ ID NO: 65027 - DNA, 15 bp, Homo sapiens
ggaggcacagataaa

SEQ ID NO: 65028 - DNA, 15 bp, Homo sapiens
tggaggcacagataa

SEQ ID NO: 65029 - DNA, 15 bp, Homo sapiens
atggaggcacagata

SEQ ID NO: 65030 - DNA, 15 bp, Homo sapiens
aatggaggcacagat

SEQ ID NO: 65031 - DNA, 15 bp, Homo sapiens
aaatggaggcacaga

SEQ ID NO: 65032 - DNA, 15 bp, Homo sapiens
gaaatggaggcacag

SEQ ID NO: 65033 - DNA, 15 bp, Homo sapiens
ggaaatggaggcaca

SEQ ID NO: 65034 - DNA, 15 bp, Homo sapiens
aggaaatggaggcac

SEQ ID NO: 65035 - DNA, 15 bp, Homo sapiens
taggaaatggaggca

SEQ ID NO: 65036 - DNA, 15 bp, Homo sapiens
ataggaaatggaggc

SEQ ID NO: 65037 - DNA, 15 bp, Homo sapiens
aataggaaatggagg

SEQ ID NO: 65038 - DNA, 15 bp, Homo sapiens
gaataggaaatggag

SEQ ID NO: 65039 - DNA, 15 bp, Homo sapiens
agaataggaaatgga

SEQ ID NO: 65040 - DNA, 15 bp, Homo sapiens
tagaataggaaatgg

SEQ ID NO: 65041 - DNA, 15 bp, Homo sapiens
atagaataggaaatg

SEQ ID NO: 65042 - DNA, 15 bp, Homo sapiens
tatagaataggaaat

SEQ ID NO: 65043 - DNA, 15 bp, Homo sapiens
ttatagaataggaaa

SEQ ID NO: 65044 - DNA, 15 bp, Homo sapiens
tttatagaataggaa

SEQ ID NO: 65045 - DNA, 15 bp, Homo sapiens
ttttatagaatagga

SEQ ID NO: 65046 - DNA, 15 bp, Homo sapiens
attttatagaatagg

SEQ ID NO: 65047 - DNA, 15 bp, Homo sapiens
cattttatagaatag

SEQ ID NO: 65048 - DNA, 15 bp, Homo sapiens
ccattttatagaata

SEQ ID NO: 65049 - DNA, 15 bp, Homo sapiens
cccattttatagaat

SEQ ID NO: 65050 - DNA, 15 bp, Homo sapiens
ccccattttatagaa

SEQ ID NO: 65051 - DNA, 15 bp, Homo sapiens
accccattttataga

SEQ ID NO: 65052 - DNA, 15 bp, Homo sapiens
aaccccattttatag

SEQ ID NO: 65053 - DNA, 15 bp, Homo sapiens
aaaccccattttata

SEQ ID NO: 65054 - DNA, 15 bp, Homo sapiens
caaaccccattttat

SEQ ID NO: 65055 - DNA, 15 bp, Homo sapiens
acaaaccccatttta

SEQ ID NO: 65056 - DNA, 15 bp, Homo sapiens
cacaaaccccatttt

SEQ ID NO: 65057 - DNA, 15 bp, Homo sapiens
tcacaaaccccattt

SEQ ID NO: 65058 - DNA, 15 bp, Homo sapiens
ttcacaaaccccatt

SEQ ID NO: 65059 - DNA, 15 bp, Homo sapiens
tttcacaaaccccat

SEQ ID NO: 65060 - DNA, 15 bp, Homo sapiens
atttcacaaacccca

SEQ ID NO: 65061 - DNA, 15 bp, Homo sapiens
tatttcacaaacccc

SEQ ID NO: 65062 - DNA, 15 bp, Homo sapiens
ctatttcacaaaccc

SEQ ID NO: 65063 - DNA, 15 bp, Homo sapiens
actatttcacaaacc

SEQ ID NO: 65064 - DNA, 15 bp, Homo sapiens
gactatttcacaaac

SEQ ID NO: 65065 - DNA, 15 bp, Homo sapiens
agactatttcacaaa

SEQ ID NO: 65066 - DNA, 15 bp, Homo sapiens
gagactatttcacaa

SEQ ID NO: 65067 - DNA, 15 bp, Homo sapiens
tgagactatttcaca

SEQ ID NO: 65068 - DNA, 15 bp, Homo sapiens
gtgagactatttcac

SEQ ID NO: 65069 - DNA, 15 bp, Homo sapiens
ggtgagactatttca

SEQ ID NO: 65070 - DNA, 15 bp, Homo sapiens
aggtgagactatttc

SEQ ID NO: 65071 - DNA, 15 bp, Homo sapiens
gaggtgagactattt

SEQ ID NO: 65072 - DNA, 15 bp, Homo sapiens
tgaggtgagactatt

SEQ ID NO: 65073 - DNA, 15 bp, Homo sapiens
atgaggtgagactat

SEQ ID NO: 65074 - DNA, 15 bp, Homo sapiens
tatgaggtgagacta

SEQ ID NO: 65075 - DNA, 15 bp, Homo sapiens
ttatgaggtgagact

SEQ ID NO: 65076 - DNA, 15 bp, Homo sapiens
cttatgaggtgagac

SEQ ID NO: 65077 - DNA, 15 bp, Homo sapiens
tcttatgaggtgaga

SEQ ID NO: 65078 - DNA, 15 bp, Homo sapiens
atcttatgaggtgag

SEQ ID NO: 65079 - DNA, 15 bp, Homo sapiens
tatcttatgaggtga

SEQ ID NO: 65080 - DNA, 15 bp, Homo sapiens
ttatcttatgaggtg

SEQ ID NO: 65081 - DNA, 15 bp, Homo sapiens
attatcttatgaggt

SEQ ID NO: 65082 - DNA, 15 bp, Homo sapiens
aattatcttatgagg

SEQ ID NO: 65083 - DNA, 15 bp, Homo sapiens
taattatcttatgag

SEQ ID NO: 65084 - DNA, 15 bp, Homo sapiens
ttaattatcttatga

SEQ ID NO: 65085 - DNA, 15 bp, Homo sapiens
tttaattatcttatg

SEQ ID NO: 65086 - DNA, 15 bp, Homo sapiens
atttaattatcttat

SEQ ID NO: 65087 - DNA, 15 bp, Homo sapiens
catttaattatctta

SEQ ID NO: 65088 - DNA, 15 bp, Homo sapiens
tcatttaattatctt

SEQ ID NO: 65089 - DNA, 15 bp, Homo sapiens
ttcatttaattatct

SEQ ID NO: 65090 - DNA, 15 bp, Homo sapiens
attcatttaattatc

SEQ ID NO: 65091 - DNA, 15 bp, Homo sapiens
aattcatttaattat

SEQ ID NO: 65092 - DNA, 15 bp, Homo sapiens
taattcatttaatta

SEQ ID NO: 65093 - DNA, 15 bp, Homo sapiens
ttaattcatttaatt

SEQ ID NO: 65094 - DNA, 15 bp, Homo sapiens
gttaattcatttaat

SEQ ID NO: 65095 - DNA, 15 bp, Homo sapiens
tgttaattcatttaa

SEQ ID NO: 65096 - DNA, 15 bp, Homo sapiens
gtgttaattcattta

SEQ ID NO: 65097 - DNA, 15 bp, Homo sapiens
tgtgttaattcattt

SEQ ID NO: 65098 - DNA, 15 bp, Homo sapiens
gtgtgttaattcatt

SEQ ID NO: 65099 - DNA, 15 bp, Homo sapiens
ggtgtgttaattcat

SEQ ID NO: 65100 - DNA, 15 bp, Homo sapiens
aggtgtgttaattca

SEQ ID NO: 65101 - DNA, 15 bp, Homo sapiens
taggtgtgttaattc

SEQ ID NO: 65102 - DNA, 15 bp, Homo sapiens
ttaggtgtgttaatt

SEQ ID NO: 65103 - DNA, 15 bp, Homo sapiens
tttaggtgtgttaat

SEQ ID NO: 65104 - DNA, 15 bp, Homo sapiens
ctttaggtgtgttaa

SEQ ID NO: 65105 - DNA, 15 bp, Homo sapiens
actttaggtgtgtta

SEQ ID NO: 65106 - DNA, 15 bp, Homo sapiens
tactttaggtgtgtt

SEQ ID NO: 65107 - DNA, 15 bp, Homo sapiens
atactttaggtgtgt

SEQ ID NO: 65108 - DNA, 15 bp, Homo sapiens
aatactttaggtgtg

SEQ ID NO: 65109 - DNA, 15 bp, Homo sapiens
gaatactttaggtgt

SEQ ID NO: 65110 - DNA, 15 bp, Homo sapiens
tgaatactttaggtg

SEQ ID NO: 65111 - DNA, 15 bp, Homo sapiens
ctgaatactttaggt

SEQ ID NO: 65112 - DNA, 15 bp, Homo sapiens
tctgaatactttagg

SEQ ID NO: 65113 - DNA, 15 bp, Homo sapiens
ctctgaatactttag

SEQ ID NO: 65114 - DNA, 15 bp, Homo sapiens
gctctgaatacttta

SEQ ID NO: 65115 - DNA, 15 bp, Homo sapiens
tgctctgaatacttt

SEQ ID NO: 65116 - DNA, 15 bp, Homo sapiens
ctgctctgaatactt

SEQ ID NO: 65117 - DNA, 15 bp, Homo sapiens
actgctctgaatact

SEQ ID NO: 65118 - DNA, 15 bp, Homo sapiens
cactgctctgaatac

SEQ ID NO: 65119 - DNA, 15 bp, Homo sapiens
gcactgctctgaata

SEQ ID NO: 65120 - DNA, 15 bp, Homo sapiens
ggcactgctctgaat

SEQ ID NO: 65121 - DNA, 15 bp, Homo sapiens
aggcactgctctgaa

SEQ ID NO: 65122 - DNA, 15 bp, Homo sapiens
caggcactgctctga

SEQ ID NO: 65123 - DNA, 15 bp, Homo sapiens
ccaggcactgctctg

SEQ ID NO: 65124 - DNA, 15 bp, Homo sapiens
accaggcactgctct

SEQ ID NO: 65125 - DNA, 15 bp, Homo sapiens
taccaggcactgctc

SEQ ID NO: 65126 - DNA, 15 bp, Homo sapiens
ataccaggcactgct

SEQ ID NO: 65127 - DNA, 15 bp, Homo sapiens
aataccaggcactgc

SEQ ID NO: 65128 - DNA, 15 bp, Homo sapiens
aaataccaggcactg

SEQ ID NO: 65129 - DNA, 15 bp, Homo sapiens
taaataccaggcact

SEQ ID NO: 65130 - DNA, 15 bp, Homo sapiens
ttaaataccaggcac

SEQ ID NO: 65131 - DNA, 15 bp, Homo sapiens
attaaataccaggca

SEQ ID NO: 65132 - DNA, 15 bp, Homo sapiens
tattaaataccaggc

SEQ ID NO: 65133 - DNA, 15 bp, Homo sapiens
ttattaaataccagg

SEQ ID NO: 65134 - DNA, 15 bp, Homo sapiens
tttattaaataccag

SEQ ID NO: 65135 - DNA, 15 bp, Homo sapiens
atttattaaatacca

SEQ ID NO: 65136 - DNA, 15 bp, Homo sapiens
catttattaaatacc

SEQ ID NO: 65137 - DNA, 15 bp, Homo sapiens
gcatttattaaatac

SEQ ID NO: 65138 - DNA, 15 bp, Homo sapiens
agcatttattaaata

SEQ ID NO: 65139 - DNA, 15 bp, Homo sapiens
gagcatttattaaat

SEQ ID NO: 65140 - DNA, 15 bp, Homo sapiens
tgagcatttattaaa

SEQ ID NO: 65141 - DNA, 15 bp, Homo sapiens
ttgagcatttattaa

SEQ ID NO: 65142 - DNA, 15 bp, Homo sapiens
attgagcatttatta

SEQ ID NO: 65143 - DNA, 15 bp, Homo sapiens
tattgagcatttatt

SEQ ID NO: 65144 - DNA, 15 bp, Homo sapiens
ttattgagcatttat

SEQ ID NO: 65145 - DNA, 15 bp, Homo sapiens
tttattgagcattta

SEQ ID NO: 65146 - DNA, 15 bp, Homo sapiens
gtttattgagcattt

SEQ ID NO: 65147 - DNA, 15 bp, Homo sapiens
tgtttattgagcatt

SEQ ID NO: 65148 - DNA, 15 bp, Homo sapiens
atgtttattgagcat

SEQ ID NO: 65149 - DNA, 15 bp, Homo sapiens
aatgtttattgagca

SEQ ID NO: 65150 - DNA, 15 bp, Homo sapiens
taatgtttattgagc

SEQ ID NO: 65151 - DNA, 15 bp, Homo sapiens
ctaatgtttattgag

SEQ ID NO: 65152 - DNA, 15 bp, Homo sapiens
gctaatgtttattga

SEQ ID NO: 65153 - DNA, 15 bp, Homo sapiens
agctaatgtttattg

SEQ ID NO: 65154 - DNA, 15 bp, Homo sapiens
tagctaatgtttatt

SEQ ID NO: 65155 - DNA, 15 bp, Homo sapiens
atagctaatgtttat

SEQ ID NO: 65156 - DNA, 15 bp, Homo sapiens
aatagctaatgttta

SEQ ID NO: 65157 - DNA, 15 bp, Homo sapiens
taatagctaatgttt

SEQ ID NO: 65158 - DNA, 15 bp, Homo sapiens
ataatagctaatgtt

SEQ ID NO: 65159 - DNA, 15 bp, Homo sapiens
aataatagctaatgt

SEQ ID NO: 65160 - DNA, 15 bp, Homo sapiens
taataatagctaatg

SEQ ID NO: 65161 - DNA, 15 bp, Homo sapiens
ttaataatagctaat

SEQ ID NO: 65162 - DNA, 15 bp, Homo sapiens
tttaataatagctaa

SEQ ID NO: 65163 - DNA, 15 bp, Homo sapiens
ttttaataatagcta

SEQ ID NO: 65164 - DNA, 15 bp, Homo sapiens
gttttaataatagct

SEQ ID NO: 65165 - DNA, 15 bp, Homo sapiens
tgttttaataatagc

SEQ ID NO: 65166 - DNA, 15 bp, Homo sapiens
atgttttaataatag

SEQ ID NO: 65167 - DNA, 15 bp, Homo sapiens
catgttttaataata

SEQ ID NO: 65168 - DNA, 15 bp, Homo sapiens
ccatgttttaataat

SEQ ID NO: 65169 - DNA, 15 bp, Homo sapiens
tccatgttttaataa

SEQ ID NO: 65170 - DNA, 15 bp, Homo sapiens
ttccatgttttaata

SEQ ID NO: 65171 - DNA, 15 bp, Homo sapiens
tttccatgttttaat

SEQ ID NO: 65172 - DNA, 15 bp, Homo sapiens
atttccatgttttaa

SEQ ID NO: 65173 - DNA, 15 bp, Homo sapiens
gatttccatgtttta

SEQ ID NO: 65174 - DNA, 15 bp, Homo sapiens
tgatttccatgtttt

SEQ ID NO: 65175 - DNA, 15 bp, Homo sapiens
ctgatttccatgttt

SEQ ID NO: 65176 - DNA, 15 bp, Homo sapiens
cctgatttccatgtt

SEQ ID NO: 65177 - DNA, 15 bp, Homo sapiens
tcctgatttccatgt

SEQ ID NO: 65178 - DNA, 15 bp, Homo sapiens
ttcctgatttccatg

SEQ ID NO: 65179 - DNA, 15 bp, Homo sapiens
tttcctgatttccat

SEQ ID NO: 65180 - DNA, 15 bp, Homo sapiens
ctttcctgatttcca

SEQ ID NO: 65181 - DNA, 15 bp, Homo sapiens
tctttcctgatttcc

SEQ ID NO: 65182 - DNA, 15 bp, Homo sapiens
atctttcctgatttc

SEQ ID NO: 65183 - DNA, 15 bp, Homo sapiens
tatctttcctgattt

SEQ ID NO: 65184 - DNA, 15 bp, Homo sapiens
gtatctttcctgatt

SEQ ID NO: 65185 - DNA, 15 bp, Homo sapiens
tgtatctttcctgat

SEQ ID NO: 65186 - DNA, 15 bp, Homo sapiens
atgtatctttcctga

SEQ ID NO: 65187 - DNA, 15 bp, Homo sapiens
aatgtatctttcctg

SEQ ID NO: 65188 - DNA, 15 bp, Homo sapiens
caatgtatctttcct

SEQ ID NO: 65189 - DNA, 15 bp, Homo sapiens
tcaatgtatctttcc

SEQ ID NO: 65190 - DNA, 15 bp, Homo sapiens
gtcaatgtatctttc

SEQ ID NO: 65191 - DNA, 15 bp, Homo sapiens
tgtcaatgtatcttt

SEQ ID NO: 65192 - DNA, 15 bp, Homo sapiens
atgtcaatgtatctt

SEQ ID NO: 65193 - DNA, 15 bp, Homo sapiens
aatgtcaatgtatct

SEQ ID NO: 65194 - DNA, 15 bp, Homo sapiens
aaatgtcaatgtatc

SEQ ID NO: 65195 - DNA, 15 bp, Homo sapiens
aaaatgtcaatgtat

SEQ ID NO: 65196 - DNA, 15 bp, Homo sapiens
taaaatgtcaatgta

SEQ ID NO: 65197 - DNA, 15 bp, Homo sapiens
ataaaatgtcaatgt

SEQ ID NO: 65198 - DNA, 15 bp, Homo sapiens
gataaaatgtcaatg

SEQ ID NO: 65199 - DNA, 15 bp, Homo sapiens
tgataaaatgtcaat

SEQ ID NO: 65200 - DNA, 15 bp, Homo sapiens
ttgataaaatgtcaa

SEQ ID NO: 65201 - DNA, 15 bp, Homo sapiens
tttgataaaatgtca

SEQ ID NO: 65202 - DNA, 15 bp, Homo sapiens
atttgataaaatgtc

SEQ ID NO: 65203 - DNA, 15 bp, Homo sapiens
aatttgataaaatgt

SEQ ID NO: 65204 - DNA, 15 bp, Homo sapiens
taatttgataaaatg

SEQ ID NO: 65205 - DNA, 15 bp, Homo sapiens
ctaatttgataaaat

SEQ ID NO: 65206 - DNA, 15 bp, Homo sapiens
gctaatttgataaaa

SEQ ID NO: 65207 - DNA, 15 bp, Homo sapiens
agctaatttgataaa

SEQ ID NO: 65208 - DNA, 15 bp, Homo sapiens
gagctaatttgataa

SEQ ID NO: 65209 - DNA, 15 bp, Homo sapiens
tgagctaatttgata

SEQ ID NO: 65210 - DNA, 15 bp, Homo sapiens
ttgagctaatttgat

SEQ ID NO: 65211 - DNA, 15 bp, Homo sapiens
tttgagctaatttga

SEQ ID NO: 65212 - DNA, 15 bp, Homo sapiens
atttgagctaatttg

SEQ ID NO: 65213 - DNA, 15 bp, Homo sapiens
aatttgagctaattt

SEQ ID NO: 65214 - DNA, 15 bp, Homo sapiens
taatttgagctaatt

SEQ ID NO: 65215 - DNA, 15 bp, Homo sapiens
ttaatttgagctaat

SEQ ID NO: 65216 - DNA, 15 bp, Homo sapiens
attaatttgagctaa

SEQ ID NO: 65217 - DNA, 15 bp, Homo sapiens
tattaatttgagcta

SEQ ID NO: 65218 - DNA, 15 bp, Homo sapiens
ctattaatttgagct

SEQ ID NO: 65219 - DNA, 15 bp, Homo sapiens
tctattaatttgagc

SEQ ID NO: 65220 - DNA, 15 bp, Homo sapiens
gtctattaatttgag

SEQ ID NO: 65221 - DNA, 15 bp, Homo sapiens
tgtctattaatttga

SEQ ID NO: 65222 - DNA, 15 bp, Homo sapiens
ttgtctattaatttg

SEQ ID NO: 65223 - DNA, 15 bp, Homo sapiens
attgtctattaattt

SEQ ID NO: 65224 - DNA, 15 bp, Homo sapiens
tattgtctattaatt

SEQ ID NO: 65225 - DNA, 15 bp, Homo sapiens
ctattgtctattaat

SEQ ID NO: 65226 - DNA, 15 bp, Homo sapiens
tctattgtctattaa

SEQ ID NO: 65227 - DNA, 15 bp, Homo sapiens
atctattgtctatta

SEQ ID NO: 65228 - DNA, 15 bp, Homo sapiens
aatctattgtctatt

SEQ ID NO: 65229 - DNA, 15 bp, Homo sapiens
aaatctattgtctat

SEQ ID NO: 65230 - DNA, 15 bp, Homo sapiens
gaaatctattgtcta

SEQ ID NO: 65231 - DNA, 15 bp, Homo sapiens
agaaatctattgtct

SEQ ID NO: 65232 - DNA, 15 bp, Homo sapiens
aagaaatctattgtc

SEQ ID NO: 65233 - DNA, 15 bp, Homo sapiens
aaagaaatctattgt

SEQ ID NO: 65234 - DNA, 15 bp, Homo sapiens
gaaagaaatctattg

SEQ ID NO: 65235 - DNA, 15 bp, Homo sapiens
ggaaagaaatctatt

SEQ ID NO: 65236 - DNA, 15 bp, Homo sapiens
tggaaagaaatctat

SEQ ID NO: 65237 - DNA, 15 bp, Homo sapiens
ttggaaagaaatcta

SEQ ID NO: 65238 - DNA, 15 bp, Homo sapiens
attggaaagaaatct

SEQ ID NO: 65239 - DNA, 15 bp, Homo sapiens
aattggaaagaaatc

SEQ ID NO: 65240 - DNA, 15 bp, Homo sapiens
taattggaaagaaat

SEQ ID NO: 65241 - DNA, 15 bp, Homo sapiens
ttaattggaaagaaa

SEQ ID NO: 65242 - DNA, 15 bp, Homo sapiens
attaattggaaagaa

SEQ ID NO: 65243 - DNA, 15 bp, Homo sapiens
tattaattggaaaga

SEQ ID NO: 65244 - DNA, 15 bp, Homo sapiens
gtattaattggaaag

SEQ ID NO: 65245 - DNA, 15 bp, Homo sapiens
agtattaattggaaa

SEQ ID NO: 65246 - DNA, 15 bp, Homo sapiens
cagtattaattggaa

SEQ ID NO: 65247 - DNA, 15 bp, Homo sapiens
gcagtattaattgga

SEQ ID NO: 65248 - DNA, 15 bp, Homo sapiens
agcagtattaattgg

SEQ ID NO: 65249 - DNA, 15 bp, Homo sapiens
aagcagtattaattg

SEQ ID NO: 65250 - DNA, 15 bp, Homo sapiens
gaagcagtattaatt

SEQ ID NO: 65251 - DNA, 15 bp, Homo sapiens
tgaagcagtattaat

SEQ ID NO: 65252 - DNA, 15 bp, Homo sapiens
ttgaagcagtattaa

SEQ ID NO: 65253 - DNA, 15 bp, Homo sapiens
tttgaagcagtatta

SEQ ID NO: 65254 - DNA, 15 bp, Homo sapiens
ttttgaagcagtatt

SEQ ID NO: 65255 - DNA, 15 bp, Homo sapiens
tttttgaagcagtat

SEQ ID NO: 65256 - DNA, 15 bp, Homo sapiens
ttttttgaagcagta

SEQ ID NO: 65257 - DNA, 15 bp, Homo sapiens
attttttgaagcagt

SEQ ID NO: 65258 - DNA, 15 bp, Homo sapiens
tattttttgaagcag

SEQ ID NO: 65259 - DNA, 15 bp, Homo sapiens
gtattttttgaagca

SEQ ID NO: 65260 - DNA, 15 bp, Homo sapiens
agtattttttgaagc

SEQ ID NO: 65261 - DNA, 15 bp, Homo sapiens
tagtattttttgaag

SEQ ID NO: 65262 - DNA, 15 bp, Homo sapiens
ctagtattttttgaa

SEQ ID NO: 65263 - DNA, 15 bp, Homo sapiens
tctagtattttttga

SEQ ID NO: 65264 - DNA, 15 bp, Homo sapiens
ttctagtattttttg

SEQ ID NO: 65265 - DNA, 15 bp, Homo sapiens
attctagtatttttt

SEQ ID NO: 65266 - DNA, 15 bp, Homo sapiens
tattctagtattttt

SEQ ID NO: 65267 - DNA, 15 bp, Homo sapiens
gtattctagtatttt

SEQ ID NO: 65268 - DNA, 15 bp, Homo sapiens
tgtattctagtattt

SEQ ID NO: 65269 - DNA, 15 bp, Homo sapiens
ctgtattctagtatt

SEQ ID NO: 65270 - DNA, 15 bp, Homo sapiens
gctgtattctagtat

SEQ ID NO: 65271 - DNA, 15 bp, Homo sapiens
tgctgtattctagta

SEQ ID NO: 65272 - DNA, 15 bp, Homo sapiens
ctgctgtattctagt

SEQ ID NO: 65273 - DNA, 15 bp, Homo sapiens
actgctgtattctag

SEQ ID NO: 65274 - DNA, 15 bp, Homo sapiens
cactgctgtattcta

SEQ ID NO: 65275 - DNA, 15 bp, Homo sapiens
gcactgctgtattct

SEQ ID NO: 65276 - DNA, 15 bp, Homo sapiens
agcactgctgtattc

SEQ ID NO: 65277 - DNA, 15 bp, Homo sapiens
cagcactgctgtatt

SEQ ID NO: 65278 - DNA, 15 bp, Homo sapiens
ccagcactgctgtat

SEQ ID NO: 65279 - DNA, 15 bp, Homo sapiens
accagcactgctgta

SEQ ID NO: 65280 - DNA, 15 bp, Homo sapiens
taccagcactgctgt

SEQ ID NO: 65281 - DNA, 15 bp, Homo sapiens
ttaccagcactgctg

SEQ ID NO: 65282 - DNA, 15 bp, Homo sapiens
tttaccagcactgct

SEQ ID NO: 65283 - DNA, 15 bp, Homo sapiens
gtttaccagcactgc

SEQ ID NO: 65284 - DNA, 15 bp, Homo sapiens
tgtttaccagcactg

SEQ ID NO: 65285 - DNA, 15 bp, Homo sapiens
ttgtttaccagcact

SEQ ID NO: 65286 - DNA, 15 bp, Homo sapiens
cttgtttaccagcac

SEQ ID NO: 65287 - DNA, 15 bp, Homo sapiens
tcttgtttaccagca

SEQ ID NO: 65288 - DNA, 15 bp, Homo sapiens
ctcttgtttaccagc

SEQ ID NO: 65289 - DNA, 15 bp, Homo sapiens
cctcttgtttaccag

SEQ ID NO: 65290 - DNA, 15 bp, Homo sapiens
acctcttgtttacca

SEQ ID NO: 65291 - DNA, 15 bp, Homo sapiens
cacctcttgtttacc

SEQ ID NO: 65292 - DNA, 15 bp, Homo sapiens
ccacctcttgtttac

SEQ ID NO: 65293 - DNA, 15 bp, Homo sapiens
tccacctcttgttta

SEQ ID NO: 65294 - DNA, 15 bp, Homo sapiens
ttccacctcttgttt

SEQ ID NO: 65295 - DNA, 15 bp, Homo sapiens
attccacctcttgtt

SEQ ID NO: 65296 - DNA, 15 bp, Homo sapiens
cattccacctcttgt

SEQ ID NO: 65297 - DNA, 15 bp, Homo sapiens
gcattccacctcttg

SEQ ID NO: 65298 - DNA, 15 bp, Homo sapiens
tgcattccacctctt

SEQ ID NO: 65299 - DNA, 15 bp, Homo sapiens
ctgcattccacctct

SEQ ID NO: 65300 - DNA, 15 bp, Homo sapiens
cctgcattccacctc

SEQ ID NO: 65301 - DNA, 15 bp, Homo sapiens
tcctgcattccacct

SEQ ID NO: 65302 - DNA, 15 bp, Homo sapiens
atcctgcattccacc

SEQ ID NO: 65303 - DNA, 15 bp, Homo sapiens
catcctgcattccac

SEQ ID NO: 65304 - DNA, 15 bp, Homo sapiens
acatcctgcattcca

SEQ ID NO: 65305 - DNA, 15 bp, Homo sapiens
aacatcctgcattcc

SEQ ID NO: 65306 - DNA, 15 bp, Homo sapiens
gaacatcctgcattc

SEQ ID NO: 65307 - DNA, 15 bp, Homo sapiens
tgaacatcctgcatt

SEQ ID NO: 65308 - DNA, 15 bp, Homo sapiens
gtgaacatcctgcat

SEQ ID NO: 65309 - DNA, 15 bp, Homo sapiens
agtgaacatcctgca

SEQ ID NO: 65310 - DNA, 15 bp, Homo sapiens
tagtgaacatcctgc

SEQ ID NO: 65311 - DNA, 15 bp, Homo sapiens
ttagtgaacatcctg

SEQ ID NO: 65312 - DNA, 15 bp, Homo sapiens
attagtgaacatcct

SEQ ID NO: 65313 - DNA, 15 bp, Homo sapiens
aattagtgaacatcc

SEQ ID NO: 65314 - DNA, 15 bp, Homo sapiens
caattagtgaacatc

SEQ ID NO: 65315 - DNA, 15 bp, Homo sapiens
gcaattagtgaacat

SEQ ID NO: 65316 - DNA, 15 bp, Homo sapiens
ggcaattagtgaaca

SEQ ID NO: 65317 - DNA, 15 bp, Homo sapiens
tggcaattagtgaac

SEQ ID NO: 65318 - DNA, 15 bp, Homo sapiens
ctggcaattagtgaa

SEQ ID NO: 65319 - DNA, 15 bp, Homo sapiens
actggcaattagtga

SEQ ID NO: 65320 - DNA, 15 bp, Homo sapiens
cactggcaattagtg

SEQ ID NO: 65321 - DNA, 15 bp, Homo sapiens
tcactggcaattagt

SEQ ID NO: 65322 - DNA, 15 bp, Homo sapiens
atcactggcaattag

SEQ ID NO: 65323 - DNA, 15 bp, Homo sapiens
gatcactggcaatta

SEQ ID NO: 65324 - DNA, 15 bp, Homo sapiens
tgatcactggcaatt

SEQ ID NO: 65325 - DNA, 15 bp, Homo sapiens
gtgatcactggcaat

SEQ ID NO: 65326 - DNA, 15 bp, Homo sapiens
agtgatcactggcaa

SEQ ID NO: 65327 - DNA, 15 bp, Homo sapiens
cagtgatcactggca

SEQ ID NO: 65328 - DNA, 15 bp, Homo sapiens
tcagtgatcactggc

SEQ ID NO: 65329 - DNA, 15 bp, Homo sapiens
gtcagtgatcactgg

SEQ ID NO: 65330 - DNA, 15 bp, Homo sapiens
tgtcagtgatcactg

SEQ ID NO: 65331 - DNA, 15 bp, Homo sapiens
atgtcagtgatcact

SEQ ID NO: 65332 - DNA, 15 bp, Homo sapiens
catgtcagtgatcac

SEQ ID NO: 65333 - DNA, 15 bp, Homo sapiens
gcatgtcagtgatca

SEQ ID NO: 65334 - DNA, 15 bp, Homo sapiens
ggcatgtcagtgatc

SEQ ID NO: 65335 - DNA, 15 bp, Homo sapiens
aggcatgtcagtgat

SEQ ID NO: 65336 - DNA, 15 bp, Homo sapiens
aaggcatgtcagtga

SEQ ID NO: 65337 - DNA, 15 bp, Homo sapiens
aaaggcatgtcagtg

SEQ ID NO: 65338 - DNA, 15 bp, Homo sapiens
caaaggcatgtcagt

SEQ ID NO: 65339 - DNA, 15 bp, Homo sapiens
tcaaaggcatgtcag

SEQ ID NO: 65340 - DNA, 15 bp, Homo sapiens
ctcaaaggcatgtca

SEQ ID NO: 65341 - DNA, 15 bp, Homo sapiens
gctcaaaggcatgtc

SEQ ID NO: 65342 - DNA, 15 bp, Homo sapiens
tgctcaaaggcatgt

SEQ ID NO: 65343 - DNA, 15 bp, Homo sapiens
ttgctcaaaggcatg

SEQ ID NO: 65344 - DNA, 15 bp, Homo sapiens
gttgctcaaaggcat

SEQ ID NO: 65345 - DNA, 15 bp, Homo sapiens
agttgctcaaaggca

SEQ ID NO: 65346 - DNA, 15 bp, Homo sapiens
tagttgctcaaaggc

SEQ ID NO: 65347 - DNA, 15 bp, Homo sapiens
ttagttgctcaaagg

SEQ ID NO: 65348 - DNA, 15 bp, Homo sapiens
cttagttgctcaaag

SEQ ID NO: 65349 - DNA, 15 bp, Homo sapiens
acttagttgctcaaa

SEQ ID NO: 65350 - DNA, 15 bp, Homo sapiens
aacttagttgctcaa

SEQ ID NO: 65351 - DNA, 15 bp, Homo sapiens
taacttagttgctca

SEQ ID NO: 65352 - DNA, 15 bp, Homo sapiens
ataacttagttgctc

SEQ ID NO: 65353 - DNA, 15 bp, Homo sapiens
gataacttagttgct

SEQ ID NO: 65354 - DNA, 15 bp, Homo sapiens
agataacttagttgc

SEQ ID NO: 65355 - DNA, 15 bp, Homo sapiens
aagataacttagttg

SEQ ID NO: 65356 - DNA, 15 bp, Homo sapiens
gaagataacttagtt

SEQ ID NO: 65357 - DNA, 15 bp, Homo sapiens
ggaagataacttagt

SEQ ID NO: 65358 - DNA, 15 bp, Homo sapiens
gggaagataacttag

SEQ ID NO: 65359 - DNA, 15 bp, Homo sapiens
agggaagataactta

SEQ ID NO: 65360 - DNA, 15 bp, Homo sapiens
cagggaagataactt

SEQ ID NO: 65361 - DNA, 15 bp, Homo sapiens
acagggaagataact

SEQ ID NO: 65362 - DNA, 15 bp, Homo sapiens
gacagggaagataac

SEQ ID NO: 65363 - DNA, 15 bp, Homo sapiens
agacagggaagataa

SEQ ID NO: 65364 - DNA, 15 bp, Homo sapiens
tagacagggaagata

SEQ ID NO: 65365 - DNA, 15 bp, Homo sapiens
ctagacagggaagat

SEQ ID NO: 65366 - DNA, 15 bp, Homo sapiens
actagacagggaaga

SEQ ID NO: 65367 - DNA, 15 bp, Homo sapiens
aactagacagggaag

SEQ ID NO: 65368 - DNA, 15 bp, Homo sapiens
aaactagacagggaa

SEQ ID NO: 65369 - DNA, 15 bp, Homo sapiens
aaaactagacaggga

SEQ ID NO: 65370 - DNA, 15 bp, Homo sapiens
aaaaactagacaggg

SEQ ID NO: 65371 - DNA, 15 bp, Homo sapiens
gaaaaactagacagg

SEQ ID NO: 65372 - DNA, 15 bp, Homo sapiens
ggaaaaactagacag

SEQ ID NO: 65373 - DNA, 15 bp, Homo sapiens
aggaaaaactagaca

SEQ ID NO: 65374 - DNA, 15 bp, Homo sapiens
gaggaaaaactagac

SEQ ID NO: 65375 - DNA, 15 bp, Homo sapiens
ggaggaaaaactaga

SEQ ID NO: 65376 - DNA, 15 bp, Homo sapiens
aggaggaaaaactag

SEQ ID NO: 65377 - DNA, 15 bp, Homo sapiens
aaggaggaaaaacta

SEQ ID NO: 65378 - DNA, 15 bp, Homo sapiens
aaaggaggaaaaact

SEQ ID NO: 65379 - DNA, 15 bp, Homo sapiens
caaaggaggaaaaac

SEQ ID NO: 65380 - DNA, 15 bp, Homo sapiens
gcaaaggaggaaaaa

SEQ ID NO: 65381 - DNA, 15 bp, Homo sapiens
cgcaaaggaggaaaa

SEQ ID NO: 65382 - DNA, 15 bp, Homo sapiens
tcgcaaaggaggaaa

SEQ ID NO: 65383 - DNA, 15 bp, Homo sapiens
atcgcaaaggaggaa

SEQ ID NO: 65384 - DNA, 15 bp, Homo sapiens
catcgcaaaggagga

SEQ ID NO: 65385 - DNA, 15 bp, Homo sapiens
ccatcgcaaaggagg

SEQ ID NO: 65386 - DNA, 15 bp, Homo sapiens
tccatcgcaaaggag

SEQ ID NO: 65387 - DNA, 15 bp, Homo sapiens
atccatcgcaaagga

SEQ ID NO: 65388 - DNA, 15 bp, Homo sapiens
catccatcgcaaagg

SEQ ID NO: 65389 - DNA, 15 bp, Homo sapiens
acatccatcgcaaag

SEQ ID NO: 65390 - DNA, 15 bp, Homo sapiens
tacatccatcgcaaa

SEQ ID NO: 65391 - DNA, 15 bp, Homo sapiens
ttacatccatcgcaa

SEQ ID NO: 65392 - DNA, 15 bp, Homo sapiens
gttacatccatcgca

SEQ ID NO: 65393 - DNA, 15 bp, Homo sapiens
agttacatccatcgc

SEQ ID NO: 65394 - DNA, 15 bp, Homo sapiens
aagttacatccatcg

SEQ ID NO: 65395 - DNA, 15 bp, Homo sapiens
taagttacatccatc

SEQ ID NO: 65396 - DNA, 15 bp, Homo sapiens
ctaagttacatccat

SEQ ID NO: 65397 - DNA, 15 bp, Homo sapiens
gctaagttacatcca

SEQ ID NO: 65398 - DNA, 15 bp, Homo sapiens
ggctaagttacatcc

SEQ ID NO: 65399 - DNA, 15 bp, Homo sapiens
aggctaagttacatc

SEQ ID NO: 65400 - DNA, 15 bp, Homo sapiens
aaggctaagttacat

SEQ ID NO: 65401 - DNA, 15 bp, Homo sapiens
aaaggctaagttaca

SEQ ID NO: 65402 - DNA, 15 bp, Homo sapiens
gaaaggctaagttac

SEQ ID NO: 65403 - DNA, 15 bp, Homo sapiens
ggaaaggctaagtta

SEQ ID NO: 65404 - DNA, 15 bp, Homo sapiens
gggaaaggctaagtt

SEQ ID NO: 65405 - DNA, 15 bp, Homo sapiens
agggaaaggctaagt

SEQ ID NO: 65406 - DNA, 15 bp, Homo sapiens
aagggaaaggctaag

SEQ ID NO: 65407 - DNA, 15 bp, Homo sapiens
taagggaaaggctaa

SEQ ID NO: 65408 - DNA, 15 bp, Homo sapiens
gtaagggaaaggcta

SEQ ID NO: 65409 - DNA, 15 bp, Homo sapiens
agtaagggaaaggct

SEQ ID NO: 65410 - DNA, 15 bp, Homo sapiens
aagtaagggaaaggc

SEQ ID NO: 65411 - DNA, 15 bp, Homo sapiens
taagtaagggaaagg

SEQ ID NO: 65412 - DNA, 15 bp, Homo sapiens
ataagtaagggaaag

SEQ ID NO: 65413 - DNA, 15 bp, Homo sapiens
cataagtaagggaaa

SEQ ID NO: 65414 - DNA, 15 bp, Homo sapiens
acataagtaagggaa

SEQ ID NO: 65415 - DNA, 15 bp, Homo sapiens
gacataagtaaggga

SEQ ID NO: 65416 - DNA, 15 bp, Homo sapiens
tgacataagtaaggg

SEQ ID NO: 65417 - DNA, 15 bp, Homo sapiens
atgacataagtaagg

SEQ ID NO: 65418 - DNA, 15 bp, Homo sapiens
tatgacataagtaag

SEQ ID NO: 65419 - DNA, 15 bp, Homo sapiens
atatgacataagtaa

SEQ ID NO: 65420 - DNA, 15 bp, Homo sapiens
catatgacataagta

SEQ ID NO: 65421 - DNA, 15 bp, Homo sapiens
tcatatgacataagt

SEQ ID NO: 65422 - DNA, 15 bp, Homo sapiens
ctcatatgacataag

SEQ ID NO: 65423 - DNA, 15 bp, Homo sapiens
tctcatatgacataa

SEQ ID NO: 65424 - DNA, 15 bp, Homo sapiens
gtctcatatgacata

SEQ ID NO: 65425 - DNA, 15 bp, Homo sapiens
tgtctcatatgacat

SEQ ID NO: 65426 - DNA, 15 bp, Homo sapiens
atgtctcatatgaca

SEQ ID NO: 65427 - DNA, 15 bp, Homo sapiens
catgtctcatatgac

SEQ ID NO: 65428 - DNA, 15 bp, Homo sapiens
acatgtctcatatga

SEQ ID NO: 65429 - DNA, 15 bp, Homo sapiens
tacatgtctcatatg

SEQ ID NO: 65430 - DNA, 15 bp, Homo sapiens
ttacatgtctcatat

SEQ ID NO: 65431 - DNA, 15 bp, Homo sapiens
tttacatgtctcata

SEQ ID NO: 65432 - DNA, 15 bp, Homo sapiens
ctttacatgtctcat

SEQ ID NO: 65433 - DNA, 15 bp, Homo sapiens
tctttacatgtctca

SEQ ID NO: 65434 - DNA, 15 bp, Homo sapiens
ttctttacatgtctc

SEQ ID NO: 65435 - DNA, 15 bp, Homo sapiens
tttctttacatgtct

SEQ ID NO: 65436 - DNA, 15 bp, Homo sapiens
ttttctttacatgtc

SEQ ID NO: 65437 - DNA, 15 bp, Homo sapiens
tttttctttacatgt

SEQ ID NO: 65438 - DNA, 15 bp, Homo sapiens
ttttttctttacatg

SEQ ID NO: 65439 - DNA, 15 bp, Homo sapiens
gttttttctttacat

SEQ ID NO: 65440 - DNA, 15 bp, Homo sapiens
tgttttttctttaca

SEQ ID NO: 65441 - DNA, 15 bp, Homo sapiens
gtgttttttctttac

SEQ ID NO: 65442 - DNA, 15 bp, Homo sapiens
tgtgttttttcttta

SEQ ID NO: 65443 - DNA, 15 bp, Homo sapiens
gtgtgttttttcttt

SEQ ID NO: 65444 - DNA, 15 bp, Homo sapiens
tgtgtgttttttctt

SEQ ID NO: 65445 - DNA, 15 bp, Homo sapiens
ctgtgtgttttttct

SEQ ID NO: 65446 - DNA, 15 bp, Homo sapiens
tctgtgtgttttttc

SEQ ID NO: 65447 - DNA, 15 bp, Homo sapiens
atctgtgtgtttttt

SEQ ID NO: 65448 - DNA, 15 bp, Homo sapiens
tatctgtgtgttttt

SEQ ID NO: 65449 - DNA, 15 bp, Homo sapiens
atatctgtgtgtttt

SEQ ID NO: 65450 - DNA, 15 bp, Homo sapiens
tatatctgtgtgttt

SEQ ID NO: 65451 - DNA, 15 bp, Homo sapiens
ttatatctgtgtgtt

SEQ ID NO: 65452 - DNA, 15 bp, Homo sapiens
tttatatctgtgtgt

SEQ ID NO: 65453 - DNA, 15 bp, Homo sapiens
ttttatatctgtgtg

SEQ ID NO: 65454 - DNA, 15 bp, Homo sapiens
tttttatatctgtgt

SEQ ID NO: 65455 - DNA, 15 bp, Homo sapiens
atttttatatctgtg

SEQ ID NO: 65456 - DNA, 15 bp, Homo sapiens
tatttttatatctgt

SEQ ID NO: 65457 - DNA, 15 bp, Homo sapiens
ttatttttatatctg

SEQ ID NO: 65458 - DNA, 15 bp, Homo sapiens
tttatttttatatct

SEQ ID NO: 65459 - DNA, 15 bp, Homo sapiens
ttttatttttatatc

SEQ ID NO: 65460 - DNA, 15 bp, Homo sapiens
attttatttttatat

SEQ ID NO: 65461 - DNA, 15 bp, Homo sapiens
aattttatttttata

SEQ ID NO: 65462 - DNA, 15 bp, Homo sapiens
aaattttatttttat

SEQ ID NO: 65463 - DNA, 15 bp, Homo sapiens
taaattttattttta

SEQ ID NO: 65464 - DNA, 15 bp, Homo sapiens
ataaattttattttt

SEQ ID NO: 65465 - DNA, 15 bp, Homo sapiens
aataaattttatttt

SEQ ID NO: 65466 - DNA, 15 bp, Homo sapiens
caataaattttattt

SEQ ID NO: 65467 - DNA, 15 bp, Homo sapiens
tcaataaattttatt

SEQ ID NO: 65468 - DNA, 15 bp, Homo sapiens
ttcaataaattttat

SEQ ID NO: 65469 - DNA, 15 bp, Homo sapiens
cttcaataaatttta

SEQ ID NO: 65470 - DNA, 15 bp, Homo sapiens
acttcaataaatttt

SEQ ID NO: 65471 - DNA, 15 bp, Homo sapiens
aacttcaataaattt

SEQ ID NO: 65472 - DNA, 15 bp, Homo sapiens
gaacttcaataaatt

SEQ ID NO: 65473 - DNA, 15 bp, Homo sapiens
agaacttcaataaat

SEQ ID NO: 65474 - DNA, 15 bp, Homo sapiens
tagaacttcaataaa

SEQ ID NO: 65475 - DNA, 15 bp, Homo sapiens
atagaacttcaataa

SEQ ID NO: 65476 - DNA, 15 bp, Homo sapiens
tatagaacttcaata

SEQ ID NO: 65477 - DNA, 15 bp, Homo sapiens
ttatagaacttcaat

SEQ ID NO: 65478 - DNA, 15 bp, Homo sapiens
tttatagaacttcaa

SEQ ID NO: 65479 - DNA, 15 bp, Homo sapiens
ctttatagaacttca

SEQ ID NO: 65480 - DNA, 15 bp, Homo sapiens
actttatagaacttc

SEQ ID NO: 65481 - DNA, 15 bp, Homo sapiens
cactttatagaactt

SEQ ID NO: 65482 - DNA, 15 bp, Homo sapiens
gcactttatagaact

SEQ ID NO: 65483 - DNA, 15 bp, Homo sapiens
agcactttatagaac

SEQ ID NO: 65484 - DNA, 15 bp, Homo sapiens
aagcactttatagaa

SEQ ID NO: 65485 - DNA, 15 bp, Homo sapiens
aaagcactttataga

SEQ ID NO: 65486 - DNA, 15 bp, Homo sapiens
caaagcactttatag

SEQ ID NO: 65487 - DNA, 15 bp, Homo sapiens
tcaaagcactttata

SEQ ID NO: 65488 - DNA, 15 bp, Homo sapiens
ctcaaagcactttat

SEQ ID NO: 65489 - DNA, 15 bp, Homo sapiens
gctcaaagcacttta

SEQ ID NO: 65490 - DNA, 15 bp, Homo sapiens
ggctcaaagcacttt

SEQ ID NO: 65491 - DNA, 15 bp, Homo sapiens
tggctcaaagcactt

SEQ ID NO: 65492 - DNA, 15 bp, Homo sapiens
gtggctcaaagcact

SEQ ID NO: 65493 - DNA, 15 bp, Homo sapiens
ggtggctcaaagcac

SEQ ID NO: 65494 - DNA, 15 bp, Homo sapiens
tggtggctcaaagca

SEQ ID NO: 65495 - DNA, 15 bp, Homo sapiens
ttggtggctcaaagc

SEQ ID NO: 65496 - DNA, 15 bp, Homo sapiens
tttggtggctcaaag

SEQ ID NO: 65497 - DNA, 15 bp, Homo sapiens
ttttggtggctcaaa

SEQ ID NO: 65498 - DNA, 15 bp, Homo sapiens
tttttggtggctcaa

SEQ ID NO: 65499 - DNA, 15 bp, Homo sapiens
ttttttggtggctca

SEQ ID NO: 65500 - DNA, 15 bp, Homo sapiens
tttttttggtggctc

SEQ ID NO: 65501 - DNA, 15 bp, Homo sapiens
ttttttttggtggct

SEQ ID NO: 65502 - DNA, 15 bp, Homo sapiens
tttttttttggtggc

SEQ ID NO: 65503 - DNA, 15 bp, Homo sapiens
ttttttttttggtgg

SEQ ID NO: 65504 - DNA, 15 bp, Homo sapiens
tttttttttttggtg

SEQ ID NO: 65505 - DNA, 15 bp, Homo sapiens
ttttttttttttggt

SEQ ID NO: 65506 - DNA, 15 bp, Homo sapiens
attttttttttttgg

SEQ ID NO: 65507 - DNA, 15 bp, Homo sapiens
cattttttttttttg

SEQ ID NO: 65508 - DNA, 15 bp, Homo sapiens
gcatttttttttttt

SEQ ID NO: 65509 - DNA, 15 bp, Homo sapiens
ggcattttttttttt

SEQ ID NO: 65510 - DNA, 15 bp, Homo sapiens
aggcatttttttttt

SEQ ID NO: 65511 - DNA, 15 bp, Homo sapiens
gaggcattttttttt

SEQ ID NO: 65512 - DNA, 15 bp, Homo sapiens
agaggcatttttttt

SEQ ID NO: 65513 - DNA, 15 bp, Homo sapiens
aagaggcattttttt

SEQ ID NO: 65514 - DNA, 15 bp, Homo sapiens
taagaggcatttttt

SEQ ID NO: 65515 - DNA, 15 bp, Homo sapiens
ttaagaggcattttt

SEQ ID NO: 65516 - DNA, 15 bp, Homo sapiens
tttaagaggcatttt

SEQ ID NO: 65517 - DNA, 15 bp, Homo sapiens
atttaagaggcattt

SEQ ID NO: 65518 - DNA, 15 bp, Homo sapiens
gatttaagaggcatt

SEQ ID NO: 65519 - DNA, 15 bp, Homo sapiens
ggatttaagaggcat

SEQ ID NO: 65520 - DNA, 15 bp, Homo sapiens
aggatttaagaggca

SEQ ID NO: 65521 - DNA, 15 bp, Homo sapiens
caggatttaagaggc

SEQ ID NO: 65522 - DNA, 15 bp, Homo sapiens
acaggatttaagagg

SEQ ID NO: 65523 - DNA, 15 bp, Homo sapiens
cacaggatttaagag

SEQ ID NO: 65524 - DNA, 15 bp, Homo sapiens
acacaggatttaaga

SEQ ID NO: 65525 - DNA, 15 bp, Homo sapiens
aacacaggatttaag

SEQ ID NO: 65526 - DNA, 15 bp, Homo sapiens
aaacacaggatttaa

SEQ ID NO: 65527 - DNA, 15 bp, Homo sapiens
aaaacacaggattta

SEQ ID NO: 65528 - DNA, 15 bp, Homo sapiens
gaaaacacaggattt

SEQ ID NO: 65529 - DNA, 15 bp, Homo sapiens
agaaaacacaggatt

SEQ ID NO: 65530 - DNA, 15 bp, Homo sapiens
tagaaaacacaggat

SEQ ID NO: 65531 - DNA, 15 bp, Homo sapiens
atagaaaacacagga

SEQ ID NO: 65532 - DNA, 15 bp, Homo sapiens
aatagaaaacacagg

SEQ ID NO: 65533 - DNA, 15 bp, Homo sapiens
aaatagaaaacacag

SEQ ID NO: 65534 - DNA, 15 bp, Homo sapiens
aaaatagaaaacaca

SEQ ID NO: 65535 - DNA, 15 bp, Homo sapiens
taaaatagaaaacac

SEQ ID NO: 65536 - DNA, 15 bp, Homo sapiens
ttaaaatagaaaaca

SEQ ID NO: 65537 - DNA, 15 bp, Homo sapiens
tttaaaatagaaaac

SEQ ID NO: 65538 - DNA, 15 bp, Homo sapiens
atttaaaatagaaaa

SEQ ID NO: 65539 - DNA, 15 bp, Homo sapiens
tatttaaaatagaaa

SEQ ID NO: 65540 - DNA, 15 bp, Homo sapiens
atatttaaaatagaa

SEQ ID NO: 65541 - DNA, 15 bp, Homo sapiens
aatatttaaaataga

SEQ ID NO: 65542 - DNA, 15 bp, Homo sapiens
aaatatttaaaatag

SEQ ID NO: 65543 - DNA, 15 bp, Homo sapiens
gaaatatttaaaata

SEQ ID NO: 65544 - DNA, 15 bp, Homo sapiens
agaaatatttaaaat

SEQ ID NO: 65545 - DNA, 15 bp, Homo sapiens
aagaaatatttaaaa

SEQ ID NO: 65546 - DNA, 15 bp, Homo sapiens
taagaaatatttaaa

SEQ ID NO: 65547 - DNA, 15 bp, Homo sapiens
ataagaaatatttaa

SEQ ID NO: 65548 - DNA, 15 bp, Homo sapiens
aataagaaatattta

SEQ ID NO: 65549 - DNA, 15 bp, Homo sapiens
gaataagaaatattt

SEQ ID NO: 65550 - DNA, 15 bp, Homo sapiens
ggaataagaaatatt

SEQ ID NO: 65551 - DNA, 15 bp, Homo sapiens
gggaataagaaatat

SEQ ID NO: 65552 - DNA, 15 bp, Homo sapiens
agggaataagaaata

SEQ ID NO: 65553 - DNA, 15 bp, Homo sapiens
gagggaataagaaat

SEQ ID NO: 65554 - DNA, 15 bp, Homo sapiens
ggagggaataagaaa

SEQ ID NO: 65555 - DNA, 15 bp, Homo sapiens
aggagggaataagaa

SEQ ID NO: 65556 - DNA, 15 bp, Homo sapiens
gaggagggaataaga

SEQ ID NO: 65557 - DNA, 15 bp, Homo sapiens
agaggagggaataag

SEQ ID NO: 65558 - DNA, 15 bp, Homo sapiens
cagaggagggaataa

SEQ ID NO: 65559 - DNA, 15 bp, Homo sapiens
acagaggagggaata

SEQ ID NO: 65560 - DNA, 15 bp, Homo sapiens
gacagaggagggaat

SEQ ID NO: 65561 - DNA, 15 bp, Homo sapiens
agacagaggagggaa

SEQ ID NO: 65562 - DNA, 15 bp, Homo sapiens
aagacagaggaggga

SEQ ID NO: 65563 - DNA, 15 bp, Homo sapiens
gaagacagaggaggg

SEQ ID NO: 65564 - DNA, 15 bp, Homo sapiens
agaagacagaggagg

SEQ ID NO: 65565 - DNA, 15 bp, Homo sapiens
cagaagacagaggag

SEQ ID NO: 65566 - DNA, 15 bp, Homo sapiens
acagaagacagagga

SEQ ID NO: 65567 - DNA, 15 bp, Homo sapiens
cacagaagacagagg

SEQ ID NO: 65568 - DNA, 15 bp, Homo sapiens
acacagaagacagag

SEQ ID NO: 65569 - DNA, 15 bp, Homo sapiens
cacacagaagacaga

SEQ ID NO: 65570 - DNA, 15 bp, Homo sapiens
acacacagaagacag

SEQ ID NO: 65571 - DNA, 15 bp, Homo sapiens
aacacacagaagaca

SEQ ID NO: 65572 - DNA, 15 bp, Homo sapiens
aaacacacagaagac

SEQ ID NO: 65573 - DNA, 15 bp, Homo sapiens
aaaacacacagaaga

SEQ ID NO: 65574 - DNA, 15 bp, Homo sapiens
caaaacacacagaag

SEQ ID NO: 65575 - DNA, 15 bp, Homo sapiens
acaaaacacacagaa

SEQ ID NO: 65576 - DNA, 15 bp, Homo sapiens
cacaaaacacacaga

SEQ ID NO: 65577 - DNA, 15 bp, Homo sapiens
ccacaaaacacacag

SEQ ID NO: 65578 - DNA, 15 bp, Homo sapiens
gccacaaaacacaca

SEQ ID NO: 65579 - DNA, 15 bp, Homo sapiens
agccacaaaacacac

SEQ ID NO: 65580 - DNA, 15 bp, Homo sapiens
aagccacaaaacaca

SEQ ID NO: 65581 - DNA, 15 bp, Homo sapiens
gaagccacaaaacac

SEQ ID NO: 65582 - DNA, 15 bp, Homo sapiens
ggaagccacaaaaca

SEQ ID NO: 65583 - DNA, 15 bp, Homo sapiens
aggaagccacaaaac

SEQ ID NO: 65584 - DNA, 15 bp, Homo sapiens
aaggaagccacaaaa

SEQ ID NO: 65585 - DNA, 15 bp, Homo sapiens
caaggaagccacaaa

SEQ ID NO: 65586 - DNA, 15 bp, Homo sapiens
acaaggaagccacaa

SEQ ID NO: 65587 - DNA, 15 bp, Homo sapiens
gacaaggaagccaca

SEQ ID NO: 65588 - DNA, 15 bp, Homo sapiens
agacaaggaagccac

SEQ ID NO: 65589 - DNA, 15 bp, Homo sapiens
gagacaaggaagcca

SEQ ID NO: 65590 - DNA, 15 bp, Homo sapiens
agagacaaggaagcc

SEQ ID NO: 65591 - DNA, 15 bp, Homo sapiens
aagagacaaggaagc

SEQ ID NO: 65592 - DNA, 15 bp, Homo sapiens
gaagagacaaggaag

SEQ ID NO: 65593 - DNA, 15 bp, Homo sapiens
tgaagagacaaggaa

SEQ ID NO: 65594 - DNA, 15 bp, Homo sapiens
ctgaagagacaagga

SEQ ID NO: 65595 - DNA, 15 bp, Homo sapiens
actgaagagacaagg

SEQ ID NO: 65596 - DNA, 15 bp, Homo sapiens
cactgaagagacaag

SEQ ID NO: 65597 - DNA, 15 bp, Homo sapiens
ccactgaagagacaa

SEQ ID NO: 65598 - DNA, 15 bp, Homo sapiens
gccactgaagagaca

SEQ ID NO: 65599 - DNA, 15 bp, Homo sapiens
agccactgaagagac

SEQ ID NO: 65600 - DNA, 15 bp, Homo sapiens
gagccactgaagaga

SEQ ID NO: 65601 - DNA, 15 bp, Homo sapiens
ggagccactgaagag

SEQ ID NO: 65602 - DNA, 15 bp, Homo sapiens
aggagccactgaaga

SEQ ID NO: 65603 - DNA, 15 bp, Homo sapiens
gaggagccactgaag

SEQ ID NO: 65604 - DNA, 15 bp, Homo sapiens
agaggagccactgaa

SEQ ID NO: 65605 - DNA, 15 bp, Homo sapiens
cagaggagccactga

SEQ ID NO: 65606 - DNA, 15 bp, Homo sapiens
acagaggagccactg

SEQ ID NO: 65607 - DNA, 15 bp, Homo sapiens
cacagaggagccact

SEQ ID NO: 65608 - DNA, 15 bp, Homo sapiens
gcacagaggagccac

SEQ ID NO: 65609 - DNA, 15 bp, Homo sapiens
ggcacagaggagcca

SEQ ID NO: 65610 - DNA, 15 bp, Homo sapiens
aggcacagaggagcc

SEQ ID NO: 65611 - DNA, 15 bp, Homo sapiens
gaggcacagaggagc

SEQ ID NO: 65612 - DNA, 15 bp, Homo sapiens
ggaggcacagaggag

SEQ ID NO: 65613 - DNA, 15 bp, Homo sapiens
aggaggcacagagga

SEQ ID NO: 65614 - DNA, 15 bp, Homo sapiens
aaggaggcacagagg

SEQ ID NO: 65615 - DNA, 15 bp, Homo sapiens
taaggaggcacagag

SEQ ID NO: 65616 - DNA, 15 bp, Homo sapiens
ctaaggaggcacaga

SEQ ID NO: 65617 - DNA, 15 bp, Homo sapiens
tctaaggaggcacag

SEQ ID NO: 65618 - DNA, 15 bp, Homo sapiens
ttctaaggaggcaca

SEQ ID NO: 65619 - DNA, 15 bp, Homo sapiens
cttctaaggaggcac

SEQ ID NO: 65620 - DNA, 15 bp, Homo sapiens
ccttctaaggaggca

SEQ ID NO: 65621 - DNA, 15 bp, Homo sapiens
gccttctaaggaggc

SEQ ID NO: 65622 - DNA, 15 bp, Homo sapiens
agccttctaaggagg

SEQ ID NO: 65623 - DNA, 15 bp, Homo sapiens
cagccttctaaggag

SEQ ID NO: 65624 - DNA, 15 bp, Homo sapiens
gcagccttctaagga

SEQ ID NO: 65625 - DNA, 15 bp, Homo sapiens
agcagccttctaagg

SEQ ID NO: 65626 - DNA, 15 bp, Homo sapiens
aagcagccttctaag

SEQ ID NO: 65627 - DNA, 15 bp, Homo sapiens
aaagcagccttctaa

SEQ ID NO: 65628 - DNA, 15 bp, Homo sapiens
caaagcagccttcta

SEQ ID NO: 65629 - DNA, 15 bp, Homo sapiens
gcaaagcagccttct

SEQ ID NO: 65630 - DNA, 15 bp, Homo sapiens
agcaaagcagccttc

SEQ ID NO: 65631 - DNA, 15 bp, Homo sapiens
tagcaaagcagcctt

SEQ ID NO: 65632 - DNA, 15 bp, Homo sapiens
ttagcaaagcagcct

SEQ ID NO: 65633 - DNA, 15 bp, Homo sapiens
tttagcaaagcagcc

SEQ ID NO: 65634 - DNA, 15 bp, Homo sapiens
ctttagcaaagcagc

SEQ ID NO: 65635 - DNA, 15 bp, Homo sapiens
cctttagcaaagcag

SEQ ID NO: 65636 - DNA, 15 bp, Homo sapiens
gcctttagcaaagca

SEQ ID NO: 65637 - DNA, 15 bp, Homo sapiens
agcctttagcaaagc

SEQ ID NO: 65638 - DNA, 15 bp, Homo sapiens
cagcctttagcaaag

SEQ ID NO: 65639 - DNA, 15 bp, Homo sapiens
tcagcctttagcaaa

SEQ ID NO: 65640 - DNA, 15 bp, Homo sapiens
ctcagcctttagcaa

SEQ ID NO: 65641 - DNA, 15 bp, Homo sapiens
tctcagcctttagca

SEQ ID NO: 65642 - DNA, 15 bp, Homo sapiens
gtctcagcctttagc

SEQ ID NO: 65643 - DNA, 15 bp, Homo sapiens
ggtctcagcctttag

SEQ ID NO: 65644 - DNA, 15 bp, Homo sapiens
cggtctcagccttta

SEQ ID NO: 65645 - DNA, 15 bp, Homo sapiens
gcggtctcagccttt

SEQ ID NO: 65646 - DNA, 15 bp, Homo sapiens
ggcggtctcagcctt

SEQ ID NO: 65647 - DNA, 15 bp, Homo sapiens
tggcggtctcagcct

SEQ ID NO: 65648 - DNA, 15 bp, Homo sapiens
ctggcggtctcagcc

SEQ ID NO: 65649 - DNA, 15 bp, Homo sapiens
cctggcggtctcagc

SEQ ID NO: 65650 - DNA, 15 bp, Homo sapiens
tcctggcggtctcag

SEQ ID NO: 65651 - DNA, 15 bp, Homo sapiens
atcctggcggtctca

SEQ ID NO: 65652 - DNA, 15 bp, Homo sapiens
catcctggcggtctc

SEQ ID NO: 65653 - DNA, 15 bp, Homo sapiens
ccatcctggcggtct

SEQ ID NO: 65654 - DNA, 15 bp, Homo sapiens
cccatcctggcggtc

SEQ ID NO: 65655 - DNA, 15 bp, Homo sapiens
ccccatcctggcggt

SEQ ID NO: 65656 - DNA, 15 bp, Homo sapiens
cccccatcctggcgg

SEQ ID NO: 65657 - DNA, 15 bp, Homo sapiens
tcccccatcctggcg

SEQ ID NO: 65658 - DNA, 15 bp, Homo sapiens
ttcccccatcctggc

SEQ ID NO: 65659 - DNA, 15 bp, Homo sapiens
tttcccccatcctgg

SEQ ID NO: 65660 - DNA, 15 bp, Homo sapiens
ctttcccccatcctg

SEQ ID NO: 65661 - DNA, 15 bp, Homo sapiens
tctttcccccatcct

SEQ ID NO: 65662 - DNA, 15 bp, Homo sapiens
gtctttcccccatcc

SEQ ID NO: 65663 - DNA, 15 bp, Homo sapiens
ggtctttcccccatc

SEQ ID NO: 65664 - DNA, 15 bp, Homo sapiens
aggtctttcccccat

SEQ ID NO: 65665 - DNA, 15 bp, Homo sapiens
caggtctttccccca

SEQ ID NO: 65666 - DNA, 15 bp, Homo sapiens
ccaggtctttccccc

SEQ ID NO: 65667 - DNA, 15 bp, Homo sapiens
cccaggtctttcccc

SEQ ID NO: 65668 - DNA, 15 bp, Homo sapiens
tcccaggtctttccc

SEQ ID NO: 65669 - DNA, 15 bp, Homo sapiens
ctcccaggtctttcc

SEQ ID NO: 65670 - DNA, 15 bp, Homo sapiens
cctcccaggtctttc

SEQ ID NO: 65671 - DNA, 15 bp, Homo sapiens
ccctcccaggtcttt

SEQ ID NO: 65672 - DNA, 15 bp, Homo sapiens
gccctcccaggtctt

SEQ ID NO: 65673 - DNA, 15 bp, Homo sapiens
agccctcccaggtct

SEQ ID NO: 65674 - DNA, 15 bp, Homo sapiens
aagccctcccaggtc

SEQ ID NO: 65675 - DNA, 15 bp, Homo sapiens
taagccctcccaggt

SEQ ID NO: 65676 - DNA, 15 bp, Homo sapiens
ataagccctcccagg

SEQ ID NO: 65677 - DNA, 15 bp, Homo sapiens
gataagccctcccag

SEQ ID NO: 65678 - DNA, 15 bp, Homo sapiens
agataagccctccca

SEQ ID NO: 65679 - DNA, 15 bp, Homo sapiens
aagataagccctccc

SEQ ID NO: 65680 - DNA, 15 bp, Homo sapiens
gaagataagccctcc

SEQ ID NO: 65681 - DNA, 15 bp, Homo sapiens
ggaagataagccctc

SEQ ID NO: 65682 - DNA, 15 bp, Homo sapiens
gggaagataagccct

SEQ ID NO: 65683 - DNA, 15 bp, Homo sapiens
ggggaagataagccc

SEQ ID NO: 65684 - DNA, 15 bp, Homo sapiens
aggggaagataagcc

SEQ ID NO: 65685 - DNA, 15 bp, Homo sapiens
aaggggaagataagc

SEQ ID NO: 65686 - DNA, 15 bp, Homo sapiens
aaaggggaagataag

SEQ ID NO: 65687 - DNA, 15 bp, Homo sapiens
gaaaggggaagataa

SEQ ID NO: 65688 - DNA, 15 bp, Homo sapiens
agaaaggggaagata

SEQ ID NO: 65689 - DNA, 15 bp, Homo sapiens
aagaaaggggaagat

SEQ ID NO: 65690 - DNA, 15 bp, Homo sapiens
caagaaaggggaaga

SEQ ID NO: 65691 - DNA, 15 bp, Homo sapiens
ccaagaaaggggaag

SEQ ID NO: 65692 - DNA, 15 bp, Homo sapiens
gccaagaaaggggaa

SEQ ID NO: 65693 - DNA, 15 bp, Homo sapiens
ggccaagaaagggga

SEQ ID NO: 65694 - DNA, 15 bp, Homo sapiens
gggccaagaaagggg

SEQ ID NO: 65695 - DNA, 15 bp, Homo sapiens
agggccaagaaaggg

SEQ ID NO: 65696 - DNA, 15 bp, Homo sapiens
aagggccaagaaagg

SEQ ID NO: 65697 - DNA, 15 bp, Homo sapiens
taagggccaagaaag

SEQ ID NO: 65698 - DNA, 15 bp, Homo sapiens
ttaagggccaagaaa

SEQ ID NO: 65699 - DNA, 15 bp, Homo sapiens
attaagggccaagaa

SEQ ID NO: 65700 - DNA, 15 bp, Homo sapiens
cattaagggccaaga

SEQ ID NO: 65701 - DNA, 15 bp, Homo sapiens
acattaagggccaag

SEQ ID NO: 65702 - DNA, 15 bp, Homo sapiens
gacattaagggccaa

SEQ ID NO: 65703 - DNA, 15 bp, Homo sapiens
ggacattaagggcca

SEQ ID NO: 65704 - DNA, 15 bp, Homo sapiens
tggacattaagggcc

SEQ ID NO: 65705 - DNA, 15 bp, Homo sapiens
ctggacattaagggc

SEQ ID NO: 65706 - DNA, 15 bp, Homo sapiens
actggacattaaggg

SEQ ID NO: 65707 - DNA, 15 bp, Homo sapiens
tactggacattaagg

SEQ ID NO: 65708 - DNA, 15 bp, Homo sapiens
gtactggacattaag

SEQ ID NO: 65709 - DNA, 15 bp, Homo sapiens
ggtactggacattaa

SEQ ID NO: 65710 - DNA, 15 bp, Homo sapiens
aggtactggacatta

SEQ ID NO: 65711 - DNA, 15 bp, Homo sapiens
taggtactggacatt

SEQ ID NO: 65712 - DNA, 15 bp, Homo sapiens
ttaggtactggacat

SEQ ID NO: 65713 - DNA, 15 bp, Homo sapiens
tttaggtactggaca

SEQ ID NO: 65714 - DNA, 15 bp, Homo sapiens
gtttaggtactggac

SEQ ID NO: 65715 - DNA, 15 bp, Homo sapiens
ggtttaggtactgga

SEQ ID NO: 65716 - DNA, 15 bp, Homo sapiens
gggtttaggtactgg

SEQ ID NO: 65717 - DNA, 15 bp, Homo sapiens
agggtttaggtactg

SEQ ID NO: 65718 - DNA, 15 bp, Homo sapiens
aagggtttaggtact

SEQ ID NO: 65719 - DNA, 15 bp, Homo sapiens
caagggtttaggtac

SEQ ID NO: 65720 - DNA, 15 bp, Homo sapiens
ccaagggtttaggta

SEQ ID NO: 65721 - DNA, 15 bp, Homo sapiens
cccaagggtttaggt

SEQ ID NO: 65722 - DNA, 15 bp, Homo sapiens
gcccaagggtttagg

SEQ ID NO: 65723 - DNA, 15 bp, Homo sapiens
agcccaagggtttag

SEQ ID NO: 65724 - DNA, 15 bp, Homo sapiens
gagcccaagggttta

SEQ ID NO: 65725 - DNA, 15 bp, Homo sapiens
agagcccaagggttt

SEQ ID NO: 65726 - DNA, 15 bp, Homo sapiens
aagagcccaagggtt

SEQ ID NO: 65727 - DNA, 15 bp, Homo sapiens
aaagagcccaagggt

SEQ ID NO: 65728 - DNA, 15 bp, Homo sapiens
taaagagcccaaggg

SEQ ID NO: 65729 - DNA, 15 bp, Homo sapiens
gtaaagagcccaagg

SEQ ID NO: 65730 - DNA, 15 bp, Homo sapiens
agtaaagagcccaag

SEQ ID NO: 65731 - DNA, 15 bp, Homo sapiens
aagtaaagagcccaa

SEQ ID NO: 65732 - DNA, 15 bp, Homo sapiens
caagtaaagagccca

SEQ ID NO: 65733 - DNA, 15 bp, Homo sapiens
tcaagtaaagagccc

SEQ ID NO: 65734 - DNA, 15 bp, Homo sapiens
ctcaagtaaagagcc

SEQ ID NO: 65735 - DNA, 15 bp, Homo sapiens
actcaagtaaagagc

SEQ ID NO: 65736 - DNA, 15 bp, Homo sapiens
tactcaagtaaagag

SEQ ID NO: 65737 - DNA, 15 bp, Homo sapiens
ttactcaagtaaaga

SEQ ID NO: 65738 - DNA, 15 bp, Homo sapiens
tttactcaagtaaag

SEQ ID NO: 65739 - DNA, 15 bp, Homo sapiens
ctttactcaagtaaa

SEQ ID NO: 65740 - DNA, 15 bp, Homo sapiens
actttactcaagtaa

SEQ ID NO: 65741 - DNA, 15 bp, Homo sapiens
cactttactcaagta

SEQ ID NO: 65742 - DNA, 15 bp, Homo sapiens
tcactttactcaagt

SEQ ID NO: 65743 - DNA, 15 bp, Homo sapiens
ttcactttactcaag

SEQ ID NO: 65744 - DNA, 15 bp, Homo sapiens
tttcactttactcaa

SEQ ID NO: 65745 - DNA, 15 bp, Homo sapiens
ttttcactttactca

SEQ ID NO: 65746 - DNA, 15 bp, Homo sapiens
cttttcactttactc

SEQ ID NO: 65747 - DNA, 15 bp, Homo sapiens
tcttttcactttact

SEQ ID NO: 65748 - DNA, 15 bp, Homo sapiens
ttcttttcactttac

SEQ ID NO: 65749 - DNA, 15 bp, Homo sapiens
attcttttcacttta

SEQ ID NO: 65750 - DNA, 15 bp, Homo sapiens
cattcttttcacttt

SEQ ID NO: 65751 - DNA, 15 bp, Homo sapiens
gcattcttttcactt

SEQ ID NO: 65752 - DNA, 15 bp, Homo sapiens
tgcattcttttcact

SEQ ID NO: 65753 - DNA, 15 bp, Homo sapiens
gtgcattcttttcac

SEQ ID NO: 65754 - DNA, 15 bp, Homo sapiens
agtgcattcttttca

SEQ ID NO: 65755 - DNA, 15 bp, Homo sapiens
aagtgcattcttttc

SEQ ID NO: 65756 - DNA, 15 bp, Homo sapiens
taagtgcattctttt

SEQ ID NO: 65757 - DNA, 15 bp, Homo sapiens
ttaagtgcattcttt

SEQ ID NO: 65758 - DNA, 15 bp, Homo sapiens
cttaagtgcattctt

SEQ ID NO: 65759 - DNA, 15 bp, Homo sapiens
acttaagtgcattct

SEQ ID NO: 65760 - DNA, 15 bp, Homo sapiens
cacttaagtgcattc

SEQ ID NO: 65761 - DNA, 15 bp, Homo sapiens
acacttaagtgcatt

SEQ ID NO: 65762 - DNA, 15 bp, Homo sapiens
cacacttaagtgcat

SEQ ID NO: 65763 - DNA, 15 bp, Homo sapiens
gcacacttaagtgca

SEQ ID NO: 65764 - DNA, 15 bp, Homo sapiens
tgcacacttaagtgc

SEQ ID NO: 65765 - DNA, 15 bp, Homo sapiens
ttgcacacttaagtg

SEQ ID NO: 65766 - DNA, 15 bp, Homo sapiens
tttgcacacttaagt

SEQ ID NO: 65767 - DNA, 15 bp, Homo sapiens
ctttgcacacttaag

SEQ ID NO: 65768 - DNA, 15 bp, Homo sapiens
tctttgcacacttaa

SEQ ID NO: 65769 - DNA, 15 bp, Homo sapiens
ttctttgcacactta

SEQ ID NO: 65770 - DNA, 15 bp, Homo sapiens
tttctttgcacactt

SEQ ID NO: 65771 - DNA, 15 bp, Homo sapiens
ttttctttgcacact

SEQ ID NO: 65772 - DNA, 15 bp, Homo sapiens
cttttctttgcacac

SEQ ID NO: 65773 - DNA, 15 bp, Homo sapiens
acttttctttgcaca

SEQ ID NO: 65774 - DNA, 15 bp, Homo sapiens
cacttttctttgcac

SEQ ID NO: 65775 - DNA, 15 bp, Homo sapiens
acacttttctttgca

SEQ ID NO: 65776 - DNA, 15 bp, Homo sapiens
aacacttttctttgc

SEQ ID NO: 65777 - DNA, 15 bp, Homo sapiens
aaacacttttctttg

SEQ ID NO: 65778 - DNA, 15 bp, Homo sapiens
aaaacacttttcttt

SEQ ID NO: 65779 - DNA, 15 bp, Homo sapiens
aaaaacacttttctt

SEQ ID NO: 65780 - DNA, 15 bp, Homo sapiens
aaaaaacacttttct

SEQ ID NO: 65781 - DNA, 15 bp, Homo sapiens
taaaaaacacttttc

SEQ ID NO: 65782 - DNA, 15 bp, Homo sapiens
ttaaaaaacactttt

SEQ ID NO: 65783 - DNA, 15 bp, Homo sapiens
tttaaaaaacacttt

SEQ ID NO: 65784 - DNA, 15 bp, Homo sapiens
ctttaaaaaacactt

SEQ ID NO: 65785 - DNA, 15 bp, Homo sapiens
tctttaaaaaacact

SEQ ID NO: 65786 - DNA, 15 bp, Homo sapiens
ctctttaaaaaacac

SEQ ID NO: 65787 - DNA, 15 bp, Homo sapiens
tctctttaaaaaaca

SEQ ID NO: 65788 - DNA, 15 bp, Homo sapiens
ttctctttaaaaaac

SEQ ID NO: 65789 - DNA, 15 bp, Homo sapiens
tttctctttaaaaaa

SEQ ID NO: 65790 - DNA, 15 bp, Homo sapiens
gtttctctttaaaaa

SEQ ID NO: 65791 - DNA, 15 bp, Homo sapiens
agtttctctttaaaa

SEQ ID NO: 65792 - DNA, 15 bp, Homo sapiens
aagtttctctttaaa

SEQ ID NO: 65793 - DNA, 15 bp, Homo sapiens
taagtttctctttaa

SEQ ID NO: 65794 - DNA, 15 bp, Homo sapiens
ttaagtttctcttta

SEQ ID NO: 65795 - DNA, 15 bp, Homo sapiens
gttaagtttctcttt

SEQ ID NO: 65796 - DNA, 15 bp, Homo sapiens
tgttaagtttctctt

SEQ ID NO: 65797 - DNA, 15 bp, Homo sapiens
ttgttaagtttctct

SEQ ID NO: 65798 - DNA, 15 bp, Homo sapiens
attgttaagtttctc

SEQ ID NO: 65799 - DNA, 15 bp, Homo sapiens
tattgttaagtttct

SEQ ID NO: 65800 - DNA, 15 bp, Homo sapiens
ctattgttaagtttc

SEQ ID NO: 65801 - DNA, 15 bp, Homo sapiens
gctattgttaagttt

SEQ ID NO: 65802 - DNA, 15 bp, Homo sapiens
tgctattgttaagtt

SEQ ID NO: 65803 - DNA, 15 bp, Homo sapiens
atgctattgttaagt

SEQ ID NO: 65804 - DNA, 15 bp, Homo sapiens
gatgctattgttaag

SEQ ID NO: 65805 - DNA, 15 bp, Homo sapiens
agatgctattgttaa

SEQ ID NO: 65806 - DNA, 15 bp, Homo sapiens
aagatgctattgtta

SEQ ID NO: 65807 - DNA, 15 bp, Homo sapiens
gaagatgctattgtt

SEQ ID NO: 65808 - DNA, 15 bp, Homo sapiens
agaagatgctattgt

SEQ ID NO: 65809 - DNA, 15 bp, Homo sapiens
tagaagatgctattg

SEQ ID NO: 65810 - DNA, 15 bp, Homo sapiens
ctagaagatgctatt

SEQ ID NO: 65811 - DNA, 15 bp, Homo sapiens
gctagaagatgctat

SEQ ID NO: 65812 - DNA, 15 bp, Homo sapiens
agctagaagatgcta

SEQ ID NO: 65813 - DNA, 15 bp, Homo sapiens
aagctagaagatgct

SEQ ID NO: 65814 - DNA, 15 bp, Homo sapiens
aaagctagaagatgc

SEQ ID NO: 65815 - DNA, 15 bp, Homo sapiens
gaaagctagaagatg

SEQ ID NO: 65816 - DNA, 15 bp, Homo sapiens
tgaaagctagaagat

SEQ ID NO: 65817 - DNA, 15 bp, Homo sapiens
atgaaagctagaaga

SEQ ID NO: 65818 - DNA, 15 bp, Homo sapiens
tatgaaagctagaag

SEQ ID NO: 65819 - DNA, 15 bp, Homo sapiens
gtatgaaagctagaa

SEQ ID NO: 65820 - DNA, 15 bp, Homo sapiens
tgtatgaaagctaga

SEQ ID NO: 65821 - DNA, 15 bp, Homo sapiens
atgtatgaaagctag

SEQ ID NO: 65822 - DNA, 15 bp, Homo sapiens
aatgtatgaaagcta

SEQ ID NO: 65823 - DNA, 15 bp, Homo sapiens
aaatgtatgaaagct

SEQ ID NO: 65824 - DNA, 15 bp, Homo sapiens
taaatgtatgaaagc

SEQ ID NO: 65825 - DNA, 15 bp, Homo sapiens
ttaaatgtatgaaag

SEQ ID NO: 65826 - DNA, 15 bp, Homo sapiens
tttaaatgtatgaaa

SEQ ID NO: 65827 - DNA, 15 bp, Homo sapiens
atttaaatgtatgaa

SEQ ID NO: 65828 - DNA, 15 bp, Homo sapiens
aatttaaatgtatga

SEQ ID NO: 65829 - DNA, 15 bp, Homo sapiens
taatttaaatgtatg

SEQ ID NO: 65830 - DNA, 15 bp, Homo sapiens
ataatttaaatgtat

SEQ ID NO: 65831 - DNA, 15 bp, Homo sapiens
aataatttaaatgta

SEQ ID NO: 65832 - DNA, 15 bp, Homo sapiens
taataatttaaatgt

SEQ ID NO: 65833 - DNA, 15 bp, Homo sapiens
ttaataatttaaatg

SEQ ID NO: 65834 - DNA, 15 bp, Homo sapiens
gttaataatttaaat

SEQ ID NO: 65835 - DNA, 15 bp, Homo sapiens
tgttaataatttaaa

SEQ ID NO: 65836 - DNA, 15 bp, Homo sapiens
ctgttaataatttaa

SEQ ID NO: 65837 - DNA, 15 bp, Homo sapiens
tctgttaataattta

SEQ ID NO: 65838 - DNA, 15 bp, Homo sapiens
atctgttaataattt

SEQ ID NO: 65839 - DNA, 15 bp, Homo sapiens
aatctgttaataatt

SEQ ID NO: 65840 - DNA, 15 bp, Homo sapiens
aaatctgttaataat

SEQ ID NO: 65841 - DNA, 15 bp, Homo sapiens
aaaatctgttaataa

SEQ ID NO: 65842 - DNA, 15 bp, Homo sapiens
aaaaatctgttaata

SEQ ID NO: 65843 - DNA, 15 bp, Homo sapiens
taaaaatctgttaat

SEQ ID NO: 65844 - DNA, 15 bp, Homo sapiens
ttaaaaatctgttaa

SEQ ID NO: 65845 - DNA, 15 bp, Homo sapiens
tttaaaaatctgtta

SEQ ID NO: 65846 - DNA, 15 bp, Homo sapiens
ttttaaaaatctgtt

SEQ ID NO: 65847 - DNA, 15 bp, Homo sapiens
tttttaaaaatctgt

SEQ ID NO: 65848 - DNA, 15 bp, Homo sapiens
gtttttaaaaatctg

SEQ ID NO: 65849 - DNA, 15 bp, Homo sapiens
ggtttttaaaaatct

SEQ ID NO: 65850 - DNA, 15 bp, Homo sapiens
aggtttttaaaaatc

SEQ ID NO: 65851 - DNA, 15 bp, Homo sapiens
caggtttttaaaaat

SEQ ID NO: 65852 - DNA, 15 bp, Homo sapiens
ccaggtttttaaaaa

SEQ ID NO: 65853 - DNA, 15 bp, Homo sapiens
gccaggtttttaaaa

SEQ ID NO: 65854 - DNA, 15 bp, Homo sapiens
tgccaggtttttaaa

SEQ ID NO: 65855 - DNA, 15 bp, Homo sapiens
ttgccaggtttttaa

SEQ ID NO: 65856 - DNA, 15 bp, Homo sapiens
attgccaggttttta

SEQ ID NO: 65857 - DNA, 15 bp, Homo sapiens
cattgccaggttttt

SEQ ID NO: 65858 - DNA, 15 bp, Homo sapiens
gcattgccaggtttt

SEQ ID NO: 65859 - DNA, 15 bp, Homo sapiens
ggcattgccaggttt

SEQ ID NO: 65860 - DNA, 15 bp, Homo sapiens
aggcattgccaggtt

SEQ ID NO: 65861 - DNA, 15 bp, Homo sapiens
taggcattgccaggt

SEQ ID NO: 65862 - DNA, 15 bp, Homo sapiens
ataggcattgccagg

SEQ ID NO: 65863 - DNA, 15 bp, Homo sapiens
aataggcattgccag

SEQ ID NO: 65864 - DNA, 15 bp, Homo sapiens
taataggcattgcca

SEQ ID NO: 65865 - DNA, 15 bp, Homo sapiens
ttaataggcattgcc

SEQ ID NO: 65866 - DNA, 15 bp, Homo sapiens
attaataggcattgc

SEQ ID NO: 65867 - DNA, 15 bp, Homo sapiens
tattaataggcattg

SEQ ID NO: 65868 - DNA, 15 bp, Homo sapiens
ctattaataggcatt

SEQ ID NO: 65869 - DNA, 15 bp, Homo sapiens
actattaataggcat

SEQ ID NO: 65870 - DNA, 15 bp, Homo sapiens
aactattaataggca

SEQ ID NO: 65871 - DNA, 15 bp, Homo sapiens
aaactattaataggc

SEQ ID NO: 65872 - DNA, 15 bp, Homo sapiens
caaactattaatagg

SEQ ID NO: 65873 - DNA, 15 bp, Homo sapiens
tcaaactattaatag

SEQ ID NO: 65874 - DNA, 15 bp, Homo sapiens
atcaaactattaata

SEQ ID NO: 65875 - DNA, 15 bp, Homo sapiens
gatcaaactattaat

SEQ ID NO: 65876 - DNA, 15 bp, Homo sapiens
agatcaaactattaa

SEQ ID NO: 65877 - DNA, 15 bp, Homo sapiens
aagatcaaactatta

SEQ ID NO: 65878 - DNA, 15 bp, Homo sapiens
aaagatcaaactatt

SEQ ID NO: 65879 - DNA, 15 bp, Homo sapiens
aaaagatcaaactat

SEQ ID NO: 65880 - DNA, 15 bp, Homo sapiens
taaaagatcaaacta

SEQ ID NO: 65881 - DNA, 15 bp, Homo sapiens
ttaaaagatcaaact

SEQ ID NO: 65882 - DNA, 15 bp, Homo sapiens
gttaaaagatcaaac

SEQ ID NO: 65883 - DNA, 15 bp, Homo sapiens
tgttaaaagatcaaa

SEQ ID NO: 65884 - DNA, 15 bp, Homo sapiens
atgttaaaagatcaa

SEQ ID NO: 65885 - DNA, 15 bp, Homo sapiens
catgttaaaagatca

SEQ ID NO: 65886 - DNA, 15 bp, Homo sapiens
acatgttaaaagatc

SEQ ID NO: 65887 - DNA, 15 bp, Homo sapiens
aacatgttaaaagat

SEQ ID NO: 65888 - DNA, 15 bp, Homo sapiens
aaacatgttaaaaga

SEQ ID NO: 65889 - DNA, 15 bp, Homo sapiens
aaaacatgttaaaag

SEQ ID NO: 65890 - DNA, 15 bp, Homo sapiens
taaaacatgttaaaa

SEQ ID NO: 65891 - DNA, 15 bp, Homo sapiens
ataaaacatgttaaa

SEQ ID NO: 65892 - DNA, 15 bp, Homo sapiens
aataaaacatgttaa

SEQ ID NO: 65893 - DNA, 15 bp, Homo sapiens
aaataaaacatgtta

SEQ ID NO: 65894 - DNA, 15 bp, Homo sapiens
aaaataaaacatgtt

SEQ ID NO: 65895 - DNA, 15 bp, Homo sapiens
taaaataaaacatgt

SEQ ID NO: 65896 - DNA, 15 bp, Homo sapiens
ataaaataaaacatg

SEQ ID NO: 65897 - DNA, 15 bp, Homo sapiens
aataaaataaaacat

SEQ ID NO: 65898 - DNA, 15 bp, Homo sapiens
aaataaaataaaaca

SEQ ID NO: 65899 - DNA, 15 bp, Homo sapiens
aaaataaaataaaac

SEQ ID NO: 65900 - DNA, 15 bp, Homo sapiens
aaaaataaaataaaa

SEQ ID NO: 65901 - DNA, 15 bp, Homo sapiens
aaaaaataaaataaa

SEQ ID NO: 65902 - DNA, 15 bp, Homo sapiens
taaaaaataaaataa

SEQ ID NO: 65903 - DNA, 15 bp, Homo sapiens
ttaaaaaataaaata

SEQ ID NO: 65904 - DNA, 15 bp, Homo sapiens
attaaaaaataaaat

SEQ ID NO: 65905 - DNA, 15 bp, Homo sapiens
aattaaaaaataaaa

SEQ ID NO: 65906 - DNA, 15 bp, Homo sapiens
aaattaaaaaataaa

SEQ ID NO: 65907 - DNA, 15 bp, Homo sapiens
taaattaaaaaataa

SEQ ID NO: 65908 - DNA, 15 bp, Homo sapiens
ctaaattaaaaaata

SEQ ID NO: 65909 - DNA, 15 bp, Homo sapiens
actaaattaaaaaat

SEQ ID NO: 65910 - DNA, 15 bp, Homo sapiens
cactaaattaaaaaa

SEQ ID NO: 65911 - DNA, 15 bp, Homo sapiens
tcactaaattaaaaa

SEQ ID NO: 65912 - DNA, 15 bp, Homo sapiens
ttcactaaattaaaa

SEQ ID NO: 65913 - DNA, 15 bp, Homo sapiens
gttcactaaattaaa

SEQ ID NO: 65914 - DNA, 15 bp, Homo sapiens
agttcactaaattaa

SEQ ID NO: 65915 - DNA, 15 bp, Homo sapiens
aagttcactaaatta

SEQ ID NO: 65916 - DNA, 15 bp, Homo sapiens
aaagttcactaaatt

SEQ ID NO: 65917 - DNA, 15 bp, Homo sapiens
aaaagttcactaaat

SEQ ID NO: 65918 - DNA, 15 bp, Homo sapiens
gaaaagttcactaaa

SEQ ID NO: 65919 - DNA, 15 bp, Homo sapiens
ggaaaagttcactaa

SEQ ID NO: 65920 - DNA, 15 bp, Homo sapiens
aggaaaagttcacta

SEQ ID NO: 65921 - DNA, 15 bp, Homo sapiens
aaggaaaagttcact

SEQ ID NO: 65922 - DNA, 15 bp, Homo sapiens
caaggaaaagttcac

SEQ ID NO: 65923 - DNA, 15 bp, Homo sapiens
acaaggaaaagttca

SEQ ID NO: 65924 - DNA, 15 bp, Homo sapiens
gacaaggaaaagttc

SEQ ID NO: 65925 - DNA, 15 bp, Homo sapiens
cgacaaggaaaagtt

SEQ ID NO: 65926 - DNA, 15 bp, Homo sapiens
gcgacaaggaaaagt

SEQ ID NO: 65927 - DNA, 15 bp, Homo sapiens
agcgacaaggaaaag

SEQ ID NO: 65928 - DNA, 15 bp, Homo sapiens
cagcgacaaggaaaa

SEQ ID NO: 65929 - DNA, 15 bp, Homo sapiens
gcagcgacaaggaaa

SEQ ID NO: 65930 - DNA, 15 bp, Homo sapiens
agcagcgacaaggaa

SEQ ID NO: 65931 - DNA, 15 bp, Homo sapiens
tagcagcgacaagga

SEQ ID NO: 65932 - DNA, 15 bp, Homo sapiens
ttagcagcgacaagg

SEQ ID NO: 65933 - DNA, 15 bp, Homo sapiens
tttagcagcgacaag

SEQ ID NO: 65934 - DNA, 15 bp, Homo sapiens
atttagcagcgacaa

SEQ ID NO: 65935 - DNA, 15 bp, Homo sapiens
gatttagcagcgaca

SEQ ID NO: 65936 - DNA, 15 bp, Homo sapiens
ggatttagcagcgac

SEQ ID NO: 65937 - DNA, 15 bp, Homo sapiens
tggatttagcagcga

SEQ ID NO: 65938 - DNA, 15 bp, Homo sapiens
ctggatttagcagcg

SEQ ID NO: 65939 - DNA, 15 bp, Homo sapiens
cctggatttagcagc

SEQ ID NO: 65940 - DNA, 15 bp, Homo sapiens
gcctggatttagcag

SEQ ID NO: 65941 - DNA, 15 bp, Homo sapiens
tgcctggatttagca

SEQ ID NO: 65942 - DNA, 15 bp, Homo sapiens
ttgcctggatttagc

SEQ ID NO: 65943 - DNA, 15 bp, Homo sapiens
tttgcctggatttag

SEQ ID NO: 65944 - DNA, 15 bp, Homo sapiens
ttttgcctggattta

SEQ ID NO: 65945 - DNA, 15 bp, Homo sapiens
attttgcctggattt

SEQ ID NO: 65946 - DNA, 15 bp, Homo sapiens
aattttgcctggatt

SEQ ID NO: 65947 - DNA, 15 bp, Homo sapiens
gaattttgcctggat

SEQ ID NO: 65948 - DNA, 15 bp, Homo sapiens
agaattttgcctgga

SEQ ID NO: 65949 - DNA, 15 bp, Homo sapiens
cagaattttgcctgg

SEQ ID NO: 65950 - DNA, 15 bp, Homo sapiens
ccagaattttgcctg

SEQ ID NO: 65951 - DNA, 15 bp, Homo sapiens
tccagaattttgcct

SEQ ID NO: 65952 - DNA, 15 bp, Homo sapiens
ttccagaattttgcc

SEQ ID NO: 65953 - DNA, 15 bp, Homo sapiens
cttccagaattttgc

SEQ ID NO: 65954 - DNA, 15 bp, Homo sapiens
tcttccagaattttg

SEQ ID NO: 65955 - DNA, 15 bp, Homo sapiens
ttcttccagaatttt

SEQ ID NO: 65956 - DNA, 15 bp, Homo sapiens
cttcttccagaattt

SEQ ID NO: 65957 - DNA, 15 bp, Homo sapiens
tcttcttccagaatt

SEQ ID NO: 65958 - DNA, 15 bp, Homo sapiens
ttcttcttccagaat

SEQ ID NO: 65959 - DNA, 15 bp, Homo sapiens
tttcttcttccagaa

SEQ ID NO: 65960 - DNA, 15 bp, Homo sapiens
atttcttcttccaga

SEQ ID NO: 65961 - DNA, 15 bp, Homo sapiens
catttcttcttccag

SEQ ID NO: 65962 - DNA, 15 bp, Homo sapiens
tcatttcttcttcca

SEQ ID NO: 65963 - DNA, 15 bp, Homo sapiens
gtcatttcttcttcc

SEQ ID NO: 65964 - DNA, 15 bp, Homo sapiens
agtcatttcttcttc

SEQ ID NO: 65965 - DNA, 15 bp, Homo sapiens
tagtcatttcttctt

SEQ ID NO: 65966 - DNA, 15 bp, Homo sapiens
ctagtcatttcttct

SEQ ID NO: 65967 - DNA, 15 bp, Homo sapiens
cctagtcatttcttc

SEQ ID NO: 65968 - DNA, 15 bp, Homo sapiens
acctagtcatttctt

SEQ ID NO: 65969 - DNA, 15 bp, Homo sapiens
tacctagtcatttct

SEQ ID NO: 65970 - DNA, 15 bp, Homo sapiens
ttacctagtcatttc

SEQ ID NO: 65971 - DNA, 15 bp, Homo sapiens
gttacctagtcattt

SEQ ID NO: 65972 - DNA, 15 bp, Homo sapiens
agttacctagtcatt

SEQ ID NO: 65973 - DNA, 15 bp, Homo sapiens
gagttacctagtcat

SEQ ID NO: 65974 - DNA, 15 bp, Homo sapiens
tgagttacctagtca

SEQ ID NO: 65975 - DNA, 15 bp, Homo sapiens
atgagttacctagtc

SEQ ID NO: 65976 - DNA, 15 bp, Homo sapiens
tatgagttacctagt

SEQ ID NO: 65977 - DNA, 15 bp, Homo sapiens
atatgagttacctag

SEQ ID NO: 65978 - DNA, 15 bp, Homo sapiens
tatatgagttaccta

SEQ ID NO: 65979 - DNA, 15 bp, Homo sapiens
atatatgagttacct

SEQ ID NO: 65980 - DNA, 15 bp, Homo sapiens
tatatatgagttacc

SEQ ID NO: 65981 - DNA, 15 bp, Homo sapiens
atatatatgagttac

SEQ ID NO: 65982 - DNA, 15 bp, Homo sapiens
catatatatgagtta

SEQ ID NO: 65983 - DNA, 15 bp, Homo sapiens
ccatatatatgagtt

SEQ ID NO: 65984 - DNA, 15 bp, Homo sapiens
accatatatatgagt

SEQ ID NO: 65985 - DNA, 15 bp, Homo sapiens
gaccatatatatgag

SEQ ID NO: 65986 - DNA, 15 bp, Homo sapiens
agaccatatatatga

SEQ ID NO: 65987 - DNA, 15 bp, Homo sapiens
tagaccatatatatg

SEQ ID NO: 65988 - DNA, 15 bp, Homo sapiens
gtagaccatatatat

SEQ ID NO: 65989 - DNA, 15 bp, Homo sapiens
agtagaccatatata

SEQ ID NO: 65990 - DNA, 15 bp, Homo sapiens
aagtagaccatatat

SEQ ID NO: 65991 - DNA, 15 bp, Homo sapiens
aaagtagaccatata

SEQ ID NO: 65992 - DNA, 15 bp, Homo sapiens
aaaagtagaccatat

SEQ ID NO: 65993 - DNA, 15 bp, Homo sapiens
aaaaagtagaccata

SEQ ID NO: 65994 - DNA, 15 bp, Homo sapiens
aaaaaagtagaccat

SEQ ID NO: 65995 - DNA, 15 bp, Homo sapiens
taaaaaagtagacca

SEQ ID NO: 65996 - DNA, 15 bp, Homo sapiens
ttaaaaaagtagacc

SEQ ID NO: 65997 - DNA, 15 bp, Homo sapiens
tttaaaaaagtagac

SEQ ID NO: 65998 - DNA, 15 bp, Homo sapiens
ctttaaaaaagtaga

SEQ ID NO: 65999 - DNA, 15 bp, Homo sapiens
actttaaaaaagtag

SEQ ID NO: 66000 - DNA, 15 bp, Homo sapiens
aactttaaaaaagta

SEQ ID NO: 66001 - DNA, 15 bp, Homo sapiens
aaactttaaaaaagt

SEQ ID NO: 66002 - DNA, 15 bp, Homo sapiens
gaaactttaaaaaag

SEQ ID NO: 66003 - DNA, 15 bp, Homo sapiens
tgaaactttaaaaaa

SEQ ID NO: 66004 - DNA, 15 bp, Homo sapiens
atgaaactttaaaaa

SEQ ID NO: 66005 - DNA, 15 bp, Homo sapiens
aatgaaactttaaaa

SEQ ID NO: 66006 - DNA, 15 bp, Homo sapiens
aaatgaaactttaaa

SEQ ID NO: 66007 - DNA, 15 bp, Homo sapiens
caaatgaaactttaa

SEQ ID NO: 66008 - DNA, 15 bp, Homo sapiens
tcaaatgaaacttta

SEQ ID NO: 66009 - DNA, 15 bp, Homo sapiens
ttcaaatgaaacttt

SEQ ID NO: 66010 - DNA, 15 bp, Homo sapiens
cttcaaatgaaactt

SEQ ID NO: 66011 - DNA, 15 bp, Homo sapiens
tcttcaaatgaaact

SEQ ID NO: 66012 - DNA, 15 bp, Homo sapiens
atcttcaaatgaaac

SEQ ID NO: 66013 - DNA, 15 bp, Homo sapiens
tatcttcaaatgaaa

SEQ ID NO: 66014 - DNA, 15 bp, Homo sapiens
ttatcttcaaatgaa

SEQ ID NO: 66015 - DNA, 15 bp, Homo sapiens
attatcttcaaatga

SEQ ID NO: 66016 - DNA, 15 bp, Homo sapiens
aattatcttcaaatg

SEQ ID NO: 66017 - DNA, 15 bp, Homo sapiens
aaattatcttcaaat

SEQ ID NO: 66018 - DNA, 15 bp, Homo sapiens
gaaattatcttcaaa

SEQ ID NO: 66019 - DNA, 15 bp, Homo sapiens
ggaaattatcttcaa

SEQ ID NO: 66020 - DNA, 15 bp, Homo sapiens
tggaaattatcttca

SEQ ID NO: 66021 - DNA, 15 bp, Homo sapiens
ttggaaattatcttc

SEQ ID NO: 66022 - DNA, 15 bp, Homo sapiens
attggaaattatctt

SEQ ID NO: 66023 - DNA, 15 bp, Homo sapiens
aattggaaattatct

SEQ ID NO: 66024 - DNA, 15 bp, Homo sapiens
taattggaaattatc

SEQ ID NO: 66025 - DNA, 15 bp, Homo sapiens
gtaattggaaattat

SEQ ID NO: 66026 - DNA, 15 bp, Homo sapiens
tgtaattggaaatta

SEQ ID NO: 66027 - DNA, 15 bp, Homo sapiens
ctgtaattggaaatt

SEQ ID NO: 66028 - DNA, 15 bp, Homo sapiens
tctgtaattggaaat

SEQ ID NO: 66029 - DNA, 15 bp, Homo sapiens
ctctgtaattggaaa

SEQ ID NO: 66030 - DNA, 15 bp, Homo sapiens
actctgtaattggaa

SEQ ID NO: 66031 - DNA, 15 bp, Homo sapiens
aactctgtaattgga

SEQ ID NO: 66032 - DNA, 15 bp, Homo sapiens
taactctgtaattgg

SEQ ID NO: 66033 - DNA, 15 bp, Homo sapiens
ataactctgtaattg

SEQ ID NO: 66034 - DNA, 15 bp, Homo sapiens
tataactctgtaatt

SEQ ID NO: 66035 - DNA, 15 bp, Homo sapiens
ttataactctgtaat

SEQ ID NO: 66036 - DNA, 15 bp, Homo sapiens
cttataactctgtaa

SEQ ID NO: 66037 - DNA, 15 bp, Homo sapiens
tcttataactctgta

SEQ ID NO: 66038 - DNA, 15 bp, Homo sapiens
ttcttataactctgt

SEQ ID NO: 66039 - DNA, 15 bp, Homo sapiens
attcttataactctg

SEQ ID NO: 66040 - DNA, 15 bp, Homo sapiens
tattcttataactct

SEQ ID NO: 66041 - DNA, 15 bp, Homo sapiens
atattcttataactc

SEQ ID NO: 66042 - DNA, 15 bp, Homo sapiens
tatattcttataact

SEQ ID NO: 66043 - DNA, 15 bp, Homo sapiens
gtatattcttataac

SEQ ID NO: 66044 - DNA, 15 bp, Homo sapiens
tgtatattcttataa

SEQ ID NO: 66045 - DNA, 15 bp, Homo sapiens
ttgtatattcttata

SEQ ID NO: 66046 - DNA, 15 bp, Homo sapiens
tttgtatattcttat

SEQ ID NO: 66047 - DNA, 15 bp, Homo sapiens
atttgtatattctta

SEQ ID NO: 66048 - DNA, 15 bp, Homo sapiens
tatttgtatattctt

SEQ ID NO: 66049 - DNA, 15 bp, Homo sapiens
ttatttgtatattct

SEQ ID NO: 66050 - DNA, 15 bp, Homo sapiens
gttatttgtatattc

SEQ ID NO: 66051 - DNA, 15 bp, Homo sapiens
cgttatttgtatatt

SEQ ID NO: 66052 - DNA, 15 bp, Homo sapiens
acgttatttgtatat

SEQ ID NO: 66053 - DNA, 15 bp, Homo sapiens
cacgttatttgtata

SEQ ID NO: 66054 - DNA, 15 bp, Homo sapiens
acacgttatttgtat

SEQ ID NO: 66055 - DNA, 15 bp, Homo sapiens
tacacgttatttgta

SEQ ID NO: 66056 - DNA, 15 bp, Homo sapiens
gtacacgttatttgt

SEQ ID NO: 66057 - DNA, 15 bp, Homo sapiens
agtacacgttatttg

SEQ ID NO: 66058 - DNA, 15 bp, Homo sapiens
gagtacacgttattt

SEQ ID NO: 66059 - DNA, 15 bp, Homo sapiens
agagtacacgttatt

SEQ ID NO: 66060 - DNA, 15 bp, Homo sapiens
aagagtacacgttat

SEQ ID NO: 66061 - DNA, 15 bp, Homo sapiens
aaagagtacacgtta

SEQ ID NO: 66062 - DNA, 15 bp, Homo sapiens
taaagagtacacgtt

SEQ ID NO: 66063 - DNA, 15 bp, Homo sapiens
gtaaagagtacacgt

SEQ ID NO: 66064 - DNA, 15 bp, Homo sapiens
ggtaaagagtacacg

SEQ ID NO: 66065 - DNA, 15 bp, Homo sapiens
gggtaaagagtacac

SEQ ID NO: 66066 - DNA, 15 bp, Homo sapiens
tgggtaaagagtaca

SEQ ID NO: 66067 - DNA, 15 bp, Homo sapiens
ctgggtaaagagtac

SEQ ID NO: 66068 - DNA, 15 bp, Homo sapiens
tctgggtaaagagta

SEQ ID NO: 66069 - DNA, 15 bp, Homo sapiens
atctgggtaaagagt

SEQ ID NO: 66070 - DNA, 15 bp, Homo sapiens
aatctgggtaaagag

SEQ ID NO: 66071 - DNA, 15 bp, Homo sapiens
gaatctgggtaaaga

SEQ ID NO: 66072 - DNA, 15 bp, Homo sapiens
tgaatctgggtaaag

SEQ ID NO: 66073 - DNA, 15 bp, Homo sapiens
gtgaatctgggtaaa

SEQ ID NO: 66074 - DNA, 15 bp, Homo sapiens
ggtgaatctgggtaa

SEQ ID NO: 66075 - DNA, 15 bp, Homo sapiens
aggtgaatctgggta

SEQ ID NO: 66076 - DNA, 15 bp, Homo sapiens
taggtgaatctgggt

SEQ ID NO: 66077 - DNA, 15 bp, Homo sapiens
ataggtgaatctggg

SEQ ID NO: 66078 - DNA, 15 bp, Homo sapiens
aataggtgaatctgg

SEQ ID NO: 66079 - DNA, 15 bp, Homo sapiens
taataggtgaatctg

SEQ ID NO: 66080 - DNA, 15 bp, Homo sapiens
ataataggtgaatct

SEQ ID NO: 66081 - DNA, 15 bp, Homo sapiens
aataataggtgaatc

SEQ ID NO: 66082 - DNA, 15 bp, Homo sapiens
taataataggtgaat

SEQ ID NO: 66083 - DNA, 15 bp, Homo sapiens
ataataataggtgaa

SEQ ID NO: 66084 - DNA, 15 bp, Homo sapiens
gataataataggtga

SEQ ID NO: 66085 - DNA, 15 bp, Homo sapiens
tgataataataggtg

SEQ ID NO: 66086 - DNA, 15 bp, Homo sapiens
atgataataataggt

SEQ ID NO: 66087 - DNA, 15 bp, Homo sapiens
aatgataataatagg

SEQ ID NO: 66088 - DNA, 15 bp, Homo sapiens
aaatgataataatag

SEQ ID NO: 66089 - DNA, 15 bp, Homo sapiens
aaaatgataataata

SEQ ID NO: 66090 - DNA, 15 bp, Homo sapiens
aaaaatgataataat

SEQ ID NO: 66091 - DNA, 15 bp, Homo sapiens
caaaaatgataataa

SEQ ID NO: 66092 - DNA, 15 bp, Homo sapiens
gcaaaaatgataata

SEQ ID NO: 66093 - DNA, 15 bp, Homo sapiens
agcaaaaatgataat

SEQ ID NO: 66094 - DNA, 15 bp, Homo sapiens
gagcaaaaatgataa

SEQ ID NO: 66095 - DNA, 15 bp, Homo sapiens
ggagcaaaaatgata

SEQ ID NO: 66096 - DNA, 15 bp, Homo sapiens
gggagcaaaaatgat

SEQ ID NO: 66097 - DNA, 15 bp, Homo sapiens
tgggagcaaaaatga

SEQ ID NO: 66098 - DNA, 15 bp, Homo sapiens
ttgggagcaaaaatg

SEQ ID NO: 66099 - DNA, 15 bp, Homo sapiens
tttgggagcaaaaat

SEQ ID NO: 66100 - DNA, 15 bp, Homo sapiens
atttgggagcaaaaa

SEQ ID NO: 66101 - DNA, 15 bp, Homo sapiens
gatttgggagcaaaa

SEQ ID NO: 66102 - DNA, 15 bp, Homo sapiens
ggatttgggagcaaa

SEQ ID NO: 66103 - DNA, 15 bp, Homo sapiens
gggatttgggagcaa

SEQ ID NO: 66104 - DNA, 15 bp, Homo sapiens
tgggatttgggagca

SEQ ID NO: 66105 - DNA, 15 bp, Homo sapiens
ttgggatttgggagc

SEQ ID NO: 66106 - DNA, 15 bp, Homo sapiens
attgggatttgggag

SEQ ID NO: 66107 - DNA, 15 bp, Homo sapiens
aattgggatttggga

SEQ ID NO: 66108 - DNA, 15 bp, Homo sapiens
aaattgggatttggg

SEQ ID NO: 66109 - DNA, 15 bp, Homo sapiens
taaattgggatttgg

SEQ ID NO: 66110 - DNA, 15 bp, Homo sapiens
ttaaattgggatttg

SEQ ID NO: 66111 - DNA, 15 bp, Homo sapiens
tttaaattgggattt

SEQ ID NO: 66112 - DNA, 15 bp, Homo sapiens
ctttaaattgggatt

SEQ ID NO: 66113 - DNA, 15 bp, Homo sapiens
actttaaattgggat

SEQ ID NO: 66114 - DNA, 15 bp, Homo sapiens
tactttaaattggga

SEQ ID NO: 66115 - DNA, 15 bp, Homo sapiens
ttactttaaattggg

SEQ ID NO: 66116 - DNA, 15 bp, Homo sapiens
cttactttaaattgg

SEQ ID NO: 66117 - DNA, 15 bp, Homo sapiens
tcttactttaaattg

SEQ ID NO: 66118 - DNA, 15 bp, Homo sapiens
atcttactttaaatt

SEQ ID NO: 66119 - DNA, 15 bp, Homo sapiens
catcttactttaaat

SEQ ID NO: 66120 - DNA, 15 bp, Homo sapiens
gcatcttactttaaa

SEQ ID NO: 66121 - DNA, 15 bp, Homo sapiens
tgcatcttactttaa

SEQ ID NO: 66122 - DNA, 15 bp, Homo sapiens
gtgcatcttacttta

SEQ ID NO: 66123 - DNA, 15 bp, Homo sapiens
tgtgcatcttacttt

SEQ ID NO: 66124 - DNA, 15 bp, Homo sapiens
gtgtgcatcttactt

SEQ ID NO: 66125 - DNA, 15 bp, Homo sapiens
tgtgtgcatcttact

SEQ ID NO: 66126 - DNA, 15 bp, Homo sapiens
atgtgtgcatcttac

SEQ ID NO: 66127 - DNA, 15 bp, Homo sapiens
gatgtgtgcatctta

SEQ ID NO: 66128 - DNA, 15 bp, Homo sapiens
tgatgtgtgcatctt

SEQ ID NO: 66129 - DNA, 15 bp, Homo sapiens
atgatgtgtgcatct

SEQ ID NO: 66130 - DNA, 15 bp, Homo sapiens
catgatgtgtgcatc

SEQ ID NO: 66131 - DNA, 15 bp, Homo sapiens
ccatgatgtgtgcat

SEQ ID NO: 66132 - DNA, 15 bp, Homo sapiens
gccatgatgtgtgca

SEQ ID NO: 66133 - DNA, 15 bp, Homo sapiens
ggccatgatgtgtgc

SEQ ID NO: 66134 - DNA, 15 bp, Homo sapiens
gggccatgatgtgtg

SEQ ID NO: 66135 - DNA, 15 bp, Homo sapiens
agggccatgatgtgt

SEQ ID NO: 66136 - DNA, 15 bp, Homo sapiens
aagggccatgatgtg

SEQ ID NO: 66137 - DNA, 15 bp, Homo sapiens
aaagggccatgatgt

SEQ ID NO: 66138 - DNA, 15 bp, Homo sapiens
taaagggccatgatg

SEQ ID NO: 66139 - DNA, 15 bp, Homo sapiens
gtaaagggccatgat

SEQ ID NO: 66140 - DNA, 15 bp, Homo sapiens
agtaaagggccatga

SEQ ID NO: 66141 - DNA, 15 bp, Homo sapiens
cagtaaagggccatg

SEQ ID NO: 66142 - DNA, 15 bp, Homo sapiens
gcagtaaagggccat

SEQ ID NO: 66143 - DNA, 15 bp, Homo sapiens
tgcagtaaagggcca

SEQ ID NO: 66144 - DNA, 15 bp, Homo sapiens
ctgcagtaaagggcc

SEQ ID NO: 66145 - DNA, 15 bp, Homo sapiens
actgcagtaaagggc

SEQ ID NO: 66146 - DNA, 15 bp, Homo sapiens
tactgcagtaaaggg

SEQ ID NO: 66147 - DNA, 15 bp, Homo sapiens
atactgcagtaaagg

SEQ ID NO: 66148 - DNA, 15 bp, Homo sapiens
catactgcagtaaag

SEQ ID NO: 66149 - DNA, 15 bp, Homo sapiens
tcatactgcagtaaa

SEQ ID NO: 66150 - DNA, 15 bp, Homo sapiens
gtcatactgcagtaa

SEQ ID NO: 66151 - DNA, 15 bp, Homo sapiens
agtcatactgcagta

SEQ ID NO: 66152 - DNA, 15 bp, Homo sapiens
gagtcatactgcagt

SEQ ID NO: 66153 - DNA, 15 bp, Homo sapiens
ggagtcatactgcag

SEQ ID NO: 66154 - DNA, 15 bp, Homo sapiens
aggagtcatactgca

SEQ ID NO: 66155 - DNA, 15 bp, Homo sapiens
taggagtcatactgc

SEQ ID NO: 66156 - DNA, 15 bp, Homo sapiens
ttaggagtcatactg

SEQ ID NO: 66157 - DNA, 15 bp, Homo sapiens
cttaggagtcatact

SEQ ID NO: 66158 - DNA, 15 bp, Homo sapiens
tcttaggagtcatac

SEQ ID NO: 66159 - DNA, 15 bp, Homo sapiens
ttcttaggagtcata

SEQ ID NO: 66160 - DNA, 15 bp, Homo sapiens
attcttaggagtcat

SEQ ID NO: 66161 - DNA, 15 bp, Homo sapiens
tattcttaggagtca

SEQ ID NO: 66162 - DNA, 15 bp, Homo sapiens
ttattcttaggagtc

SEQ ID NO: 66163 - DNA, 15 bp, Homo sapiens
cttattcttaggagt

SEQ ID NO: 66164 - DNA, 15 bp, Homo sapiens
ccttattcttaggag

SEQ ID NO: 66165 - DNA, 15 bp, Homo sapiens
tccttattcttagga

SEQ ID NO: 66166 - DNA, 15 bp, Homo sapiens
atccttattcttagg

SEQ ID NO: 66167 - DNA, 15 bp, Homo sapiens
tatccttattcttag

SEQ ID NO: 66168 - DNA, 15 bp, Homo sapiens
atatccttattctta

SEQ ID NO: 66169 - DNA, 15 bp, Homo sapiens
aatatccttattctt

SEQ ID NO: 66170 - DNA, 15 bp, Homo sapiens
aaatatccttattct

SEQ ID NO: 66171 - DNA, 15 bp, Homo sapiens
aaaatatccttattc

SEQ ID NO: 66172 - DNA, 15 bp, Homo sapiens
gaaaatatccttatt

SEQ ID NO: 66173 - DNA, 15 bp, Homo sapiens
agaaaatatccttat

SEQ ID NO: 66174 - DNA, 15 bp, Homo sapiens
aagaaaatatcctta

SEQ ID NO: 66175 - DNA, 15 bp, Homo sapiens
taagaaaatatcctt

SEQ ID NO: 66176 - DNA, 15 bp, Homo sapiens
gtaagaaaatatcct

SEQ ID NO: 66177 - DNA, 15 bp, Homo sapiens
tgtaagaaaatatcc

SEQ ID NO: 66178 - DNA, 15 bp, Homo sapiens
atgtaagaaaatatc

SEQ ID NO: 66179 - DNA, 15 bp, Homo sapiens
tatgtaagaaaatat

SEQ ID NO: 66180 - DNA, 15 bp, Homo sapiens
ttatgtaagaaaata

SEQ ID NO: 66181 - DNA, 15 bp, Homo sapiens
attatgtaagaaaat

SEQ ID NO: 66182 - DNA, 15 bp, Homo sapiens
gattatgtaagaaaa

SEQ ID NO: 66183 - DNA, 15 bp, Homo sapiens
tgattatgtaagaaa

SEQ ID NO: 66184 - DNA, 15 bp, Homo sapiens
gtgattatgtaagaa

SEQ ID NO: 66185 - DNA, 15 bp, Homo sapiens
tgtgattatgtaaga

SEQ ID NO: 66186 - DNA, 15 bp, Homo sapiens
ctgtgattatgtaag

SEQ ID NO: 66187 - DNA, 15 bp, Homo sapiens
actgtgattatgtaa

SEQ ID NO: 66188 - DNA, 15 bp, Homo sapiens
tactgtgattatgta

SEQ ID NO: 66189 - DNA, 15 bp, Homo sapiens
gtactgtgattatgt

SEQ ID NO: 66190 - DNA, 15 bp, Homo sapiens
tgtactgtgattatg

SEQ ID NO: 66191 - DNA, 15 bp, Homo sapiens
ctgtactgtgattat

SEQ ID NO: 66192 - DNA, 15 bp, Homo sapiens
gctgtactgtgatta

SEQ ID NO: 66193 - DNA, 15 bp, Homo sapiens
agctgtactgtgatt

SEQ ID NO: 66194 - DNA, 15 bp, Homo sapiens
tagctgtactgtgat

SEQ ID NO: 66195 - DNA, 15 bp, Homo sapiens
atagctgtactgtga

SEQ ID NO: 66196 - DNA, 15 bp, Homo sapiens
aatagctgtactgtg

SEQ ID NO: 66197 - DNA, 15 bp, Homo sapiens
taatagctgtactgt

SEQ ID NO: 66198 - DNA, 15 bp, Homo sapiens
ctaatagctgtactg

SEQ ID NO: 66199 - DNA, 15 bp, Homo sapiens
gctaatagctgtact

SEQ ID NO: 66200 - DNA, 15 bp, Homo sapiens
agctaatagctgtac

SEQ ID NO: 66201 - DNA, 15 bp, Homo sapiens
aagctaatagctgta

SEQ ID NO: 66202 - DNA, 15 bp, Homo sapiens
gaagctaatagctgt

SEQ ID NO: 66203 - DNA, 15 bp, Homo sapiens
tgaagctaatagctg

SEQ ID NO: 66204 - DNA, 15 bp, Homo sapiens
ctgaagctaatagct

SEQ ID NO: 66205 - DNA, 15 bp, Homo sapiens
actgaagctaatagc

SEQ ID NO: 66206 - DNA, 15 bp, Homo sapiens
tactgaagctaatag

SEQ ID NO: 66207 - DNA, 15 bp, Homo sapiens
ttactgaagctaata

SEQ ID NO: 66208 - DNA, 15 bp, Homo sapiens
tttactgaagctaat

SEQ ID NO: 66209 - DNA, 15 bp, Homo sapiens
atttactgaagctaa

SEQ ID NO: 66210 - DNA, 15 bp, Homo sapiens
aatttactgaagcta

SEQ ID NO: 66211 - DNA, 15 bp, Homo sapiens
aaatttactgaagct

SEQ ID NO: 66212 - DNA, 15 bp, Homo sapiens
gaaatttactgaagc

SEQ ID NO: 66213 - DNA, 15 bp, Homo sapiens
tgaaatttactgaag

SEQ ID NO: 66214 - DNA, 15 bp, Homo sapiens
ctgaaatttactgaa

SEQ ID NO: 66215 - DNA, 15 bp, Homo sapiens
actgaaatttactga

SEQ ID NO: 66216 - DNA, 15 bp, Homo sapiens
tactgaaatttactg

SEQ ID NO: 66217 - DNA, 15 bp, Homo sapiens
gtactgaaatttact

SEQ ID NO: 66218 - DNA, 15 bp, Homo sapiens
agtactgaaatttac

SEQ ID NO: 66219 - DNA, 15 bp, Homo sapiens
aagtactgaaattta

SEQ ID NO: 66220 - DNA, 15 bp, Homo sapiens
aaagtactgaaattt

SEQ ID NO: 66221 - DNA, 15 bp, Homo sapiens
aaaagtactgaaatt

SEQ ID NO: 66222 - DNA, 15 bp, Homo sapiens
taaaagtactgaaat

SEQ ID NO: 66223 - DNA, 15 bp, Homo sapiens
ataaaagtactgaaa

SEQ ID NO: 66224 - DNA, 15 bp, Homo sapiens
gataaaagtactgaa

SEQ ID NO: 66225 - DNA, 15 bp, Homo sapiens
agataaaagtactga

SEQ ID NO: 66226 - DNA, 15 bp, Homo sapiens
tagataaaagtactg

SEQ ID NO: 66227 - DNA, 15 bp, Homo sapiens
ttagataaaagtact

SEQ ID NO: 66228 - DNA, 15 bp, Homo sapiens
attagataaaagtac

SEQ ID NO: 66229 - DNA, 15 bp, Homo sapiens
tattagataaaagta

SEQ ID NO: 66230 - DNA, 15 bp, Homo sapiens
atattagataaaagt

SEQ ID NO: 66231 - DNA, 15 bp, Homo sapiens
tatattagataaaag

SEQ ID NO: 66232 - DNA, 15 bp, Homo sapiens
ttatattagataaaa

SEQ ID NO: 66233 - DNA, 15 bp, Homo sapiens
gttatattagataaa

SEQ ID NO: 66234 - DNA, 15 bp, Homo sapiens
tgttatattagataa

SEQ ID NO: 66235 - DNA, 15 bp, Homo sapiens
atgttatattagata

SEQ ID NO: 66236 - DNA, 15 bp, Homo sapiens
gatgttatattagat

SEQ ID NO: 66237 - DNA, 15 bp, Homo sapiens
agatgttatattaga

SEQ ID NO: 66238 - DNA, 15 bp, Homo sapiens
tagatgttatattag

SEQ ID NO: 66239 - DNA, 15 bp, Homo sapiens
atagatgttatatta

SEQ ID NO: 66240 - DNA, 15 bp, Homo sapiens
tatagatgttatatt

SEQ ID NO: 66241 - DNA, 15 bp, Homo sapiens
atatagatgttatat

SEQ ID NO: 66242 - DNA, 15 bp, Homo sapiens
aatatagatgttata

SEQ ID NO: 66243 - DNA, 15 bp, Homo sapiens
gaatatagatgttat

SEQ ID NO: 66244 - DNA, 15 bp, Homo sapiens
ggaatatagatgtta

SEQ ID NO: 66245 - DNA, 15 bp, Homo sapiens
tggaatatagatgtt

SEQ ID NO: 66246 - DNA, 15 bp, Homo sapiens
ttggaatatagatgt

SEQ ID NO: 66247 - DNA, 15 bp, Homo sapiens
attggaatatagatg

SEQ ID NO: 66248 - DNA, 15 bp, Homo sapiens
aattggaatatagat

SEQ ID NO: 66249 - DNA, 15 bp, Homo sapiens
aaattggaatataga

SEQ ID NO: 66250 - DNA, 15 bp, Homo sapiens
aaaattggaatatag

SEQ ID NO: 66251 - DNA, 15 bp, Homo sapiens
caaaattggaatata

SEQ ID NO: 66252 - DNA, 15 bp, Homo sapiens
acaaaattggaatat

SEQ ID NO: 66253 - DNA, 15 bp, Homo sapiens
gacaaaattggaata

SEQ ID NO: 66254 - DNA, 15 bp, Homo sapiens
tgacaaaattggaat

SEQ ID NO: 66255 - DNA, 15 bp, Homo sapiens
atgacaaaattggaa

SEQ ID NO: 66256 - DNA, 15 bp, Homo sapiens
aatgacaaaattgga

SEQ ID NO: 66257 - DNA, 15 bp, Homo sapiens
aaatgacaaaattgg

SEQ ID NO: 66258 - DNA, 15 bp, Homo sapiens
caaatgacaaaattg

SEQ ID NO: 66259 - DNA, 15 bp, Homo sapiens
tcaaatgacaaaatt

SEQ ID NO: 66260 - DNA, 15 bp, Homo sapiens
atcaaatgacaaaat

SEQ ID NO: 66261 - DNA, 15 bp, Homo sapiens
gatcaaatgacaaaa

SEQ ID NO: 66262 - DNA, 15 bp, Homo sapiens
ggatcaaatgacaaa

SEQ ID NO: 66263 - DNA, 15 bp, Homo sapiens
tggatcaaatgacaa

SEQ ID NO: 66264 - DNA, 15 bp, Homo sapiens
ttggatcaaatgaca

SEQ ID NO: 66265 - DNA, 15 bp, Homo sapiens
attggatcaaatgac

SEQ ID NO: 66266 - DNA, 15 bp, Homo sapiens
tattggatcaaatga

SEQ ID NO: 66267 - DNA, 15 bp, Homo sapiens
ttattggatcaaatg

SEQ ID NO: 66268 - DNA, 15 bp, Homo sapiens
attattggatcaaat

SEQ ID NO: 66269 - DNA, 15 bp, Homo sapiens
cattattggatcaaa

SEQ ID NO: 66270 - DNA, 15 bp, Homo sapiens
acattattggatcaa

SEQ ID NO: 66271 - DNA, 15 bp, Homo sapiens
gacattattggatca

SEQ ID NO: 66272 - DNA, 15 bp, Homo sapiens
tgacattattggatc

SEQ ID NO: 66273 - DNA, 15 bp, Homo sapiens
atgacattattggat

SEQ ID NO: 66274 - DNA, 15 bp, Homo sapiens
aatgacattattgga

SEQ ID NO: 66275 - DNA, 15 bp, Homo sapiens
aaatgacattattgg

SEQ ID NO: 66276 - DNA, 15 bp, Homo sapiens
taaatgacattattg

SEQ ID NO: 66277 - DNA, 15 bp, Homo sapiens
ataaatgacattatt

SEQ ID NO: 66278 - DNA, 15 bp, Homo sapiens
cataaatgacattat

SEQ ID NO: 66279 - DNA, 15 bp, Homo sapiens
ccataaatgacatta

SEQ ID NO: 66280 - DNA, 15 bp, Homo sapiens
gccataaatgacatt

SEQ ID NO: 66281 - DNA, 15 bp, Homo sapiens
tgccataaatgacat

SEQ ID NO: 66282 - DNA, 15 bp, Homo sapiens
atgccataaatgaca

SEQ ID NO: 66283 - DNA, 15 bp, Homo sapiens
aatgccataaatgac

SEQ ID NO: 66284 - DNA, 15 bp, Homo sapiens
aaatgccataaatga

SEQ ID NO: 66285 - DNA, 15 bp, Homo sapiens
aaaatgccataaatg

SEQ ID NO: 66286 - DNA, 15 bp, Homo sapiens
gaaaatgccataaat

SEQ ID NO: 66287 - DNA, 15 bp, Homo sapiens
agaaaatgccataaa

SEQ ID NO: 66288 - DNA, 15 bp, Homo sapiens
gagaaaatgccataa

SEQ ID NO: 66289 - DNA, 15 bp, Homo sapiens
ggagaaaatgccata

SEQ ID NO: 66290 - DNA, 15 bp, Homo sapiens
aggagaaaatgccat

SEQ ID NO: 66291 - DNA, 15 bp, Homo sapiens
gaggagaaaatgcca

SEQ ID NO: 66292 - DNA, 15 bp, Homo sapiens
ggaggagaaaatgcc

SEQ ID NO: 66293 - DNA, 15 bp, Homo sapiens
aggaggagaaaatgc

SEQ ID NO: 66294 - DNA, 15 bp, Homo sapiens
aaggaggagaaaatg

SEQ ID NO: 66295 - DNA, 15 bp, Homo sapiens
gaaggaggagaaaat

SEQ ID NO: 66296 - DNA, 15 bp, Homo sapiens
agaaggaggagaaaa

SEQ ID NO: 66297 - DNA, 15 bp, Homo sapiens
tagaaggaggagaaa

SEQ ID NO: 66298 - DNA, 15 bp, Homo sapiens
ctagaaggaggagaa

SEQ ID NO: 66299 - DNA, 15 bp, Homo sapiens
actagaaggaggaga

SEQ ID NO: 66300 - DNA, 15 bp, Homo sapiens
aactagaaggaggag

SEQ ID NO: 66301 - DNA, 15 bp, Homo sapiens
aaactagaaggagga

SEQ ID NO: 66302 - DNA, 15 bp, Homo sapiens
gaaactagaaggagg

SEQ ID NO: 66303 - DNA, 15 bp, Homo sapiens
agaaactagaaggag

SEQ ID NO: 66304 - DNA, 15 bp, Homo sapiens
gagaaactagaagga

SEQ ID NO: 66305 - DNA, 15 bp, Homo sapiens
tgagaaactagaagg

SEQ ID NO: 66306 - DNA, 15 bp, Homo sapiens
ttgagaaactagaag

SEQ ID NO: 66307 - DNA, 15 bp, Homo sapiens
attgagaaactagaa

SEQ ID NO: 66308 - DNA, 15 bp, Homo sapiens
tattgagaaactaga

SEQ ID NO: 66309 - DNA, 15 bp, Homo sapiens
ctattgagaaactag

SEQ ID NO: 66310 - DNA, 15 bp, Homo sapiens
tctattgagaaacta

SEQ ID NO: 66311 - DNA, 15 bp, Homo sapiens
ttctattgagaaact

SEQ ID NO: 66312 - DNA, 15 bp, Homo sapiens
tttctattgagaaac

SEQ ID NO: 66313 - DNA, 15 bp, Homo sapiens
atttctattgagaaa

SEQ ID NO: 66314 - DNA, 15 bp, Homo sapiens
gatttctattgagaa

SEQ ID NO: 66315 - DNA, 15 bp, Homo sapiens
agatttctattgaga

SEQ ID NO: 66316 - DNA, 15 bp, Homo sapiens
gagatttctattgag

SEQ ID NO: 66317 - DNA, 15 bp, Homo sapiens
agagatttctattga

SEQ ID NO: 66318 - DNA, 15 bp, Homo sapiens
tagagatttctattg

SEQ ID NO: 66319 - DNA, 15 bp, Homo sapiens
ttagagatttctatt

SEQ ID NO: 66320 - DNA, 15 bp, Homo sapiens
tttagagatttctat

SEQ ID NO: 66321 - DNA, 15 bp, Homo sapiens
ctttagagatttcta

SEQ ID NO: 66322 - DNA, 15 bp, Homo sapiens
gctttagagatttct

SEQ ID NO: 66323 - DNA, 15 bp, Homo sapiens
ggctttagagatttc

SEQ ID NO: 66324 - DNA, 15 bp, Homo sapiens
aggctttagagattt

SEQ ID NO: 66325 - DNA, 15 bp, Homo sapiens
caggctttagagatt

SEQ ID NO: 66326 - DNA, 15 bp, Homo sapiens
acaggctttagagat

SEQ ID NO: 66327 - DNA, 15 bp, Homo sapiens
tacaggctttagaga

SEQ ID NO: 66328 - DNA, 15 bp, Homo sapiens
ttagcaattccttta

SEQ ID NO: 66329 - DNA, 15 bp, Homo sapiens
gttagcaattccttt

SEQ ID NO: 66330 - DNA, 15 bp, Homo sapiens
ggttagcaattcctt

SEQ ID NO: 66331 - DNA, 15 bp, Homo sapiens
tggttagcaattcct

SEQ ID NO: 66332 - DNA, 15 bp, Homo sapiens
ctggttagcaattcc

SEQ ID NO: 66333 - DNA, 15 bp, Homo sapiens
actggttagcaattc

SEQ ID NO: 66334 - DNA, 15 bp, Homo sapiens
cactggttagcaatt

SEQ ID NO: 66335 - DNA, 15 bp, Homo sapiens
gcactggttagcaat

SEQ ID NO: 66336 - DNA, 15 bp, Homo sapiens
tgcactggttagcaa

SEQ ID NO: 66337 - DNA, 15 bp, Homo sapiens
gtgcactggttagca

SEQ ID NO: 66338 - DNA, 15 bp, Homo sapiens
tgtgcactggttagc

SEQ ID NO: 66339 - DNA, 15 bp, Homo sapiens
gtgtgcactggttag

SEQ ID NO: 66340 - DNA, 15 bp, Homo sapiens
agtgtgcactggtta

SEQ ID NO: 66341 - DNA, 15 bp, Homo sapiens
cagtgtgcactggtt

SEQ ID NO: 66342 - DNA, 15 bp, Homo sapiens
ccagtgtgcactggt

SEQ ID NO: 66343 - DNA, 15 bp, Homo sapiens
tccagtgtgcactgg

SEQ ID NO: 66344 - DNA, 15 bp, Homo sapiens
ctccagtgtgcactg

SEQ ID NO: 66345 - DNA, 15 bp, Homo sapiens
actccagtgtgcact

SEQ ID NO: 66346 - DNA, 15 bp, Homo sapiens
cactccagtgtgcac

SEQ ID NO: 66347 - DNA, 15 bp, Homo sapiens
tcactccagtgtgca

SEQ ID NO: 66348 - DNA, 15 bp, Homo sapiens
atcactccagtgtgc

SEQ ID NO: 66349 - DNA, 15 bp, Homo sapiens
aatcactccagtgtg

SEQ ID NO: 66350 - DNA, 15 bp, Homo sapiens
aaatcactccagtgt

SEQ ID NO: 66351 - DNA, 15 bp, Homo sapiens
aaaatcactccagtg

SEQ ID NO: 66352 - DNA, 15 bp, Homo sapiens
taaaatcactccagt

SEQ ID NO: 66353 - DNA, 15 bp, Homo sapiens
ataaaatcactccag

SEQ ID NO: 66354 - DNA, 15 bp, Homo sapiens
cataaaatcactcca

SEQ ID NO: 66355 - DNA, 15 bp, Homo sapiens
acataaaatcactcc

SEQ ID NO: 66356 - DNA, 15 bp, Homo sapiens
aacataaaatcactc

SEQ ID NO: 66357 - DNA, 15 bp, Homo sapiens
aaacataaaatcact

SEQ ID NO: 66358 - DNA, 15 bp, Homo sapiens
aaaacataaaatcac

SEQ ID NO: 66359 - DNA, 15 bp, Homo sapiens
taaaacataaaatca

SEQ ID NO: 66360 - DNA, 15 bp, Homo sapiens
ataaaacataaaatc

SEQ ID NO: 66361 - DNA, 15 bp, Homo sapiens
cataaaacataaaat

SEQ ID NO: 66362 - DNA, 15 bp, Homo sapiens
tcataaaacataaaa

SEQ ID NO: 66363 - DNA, 15 bp, Homo sapiens
atcataaaacataaa

SEQ ID NO: 66364 - DNA, 15 bp, Homo sapiens
catcataaaacataa

SEQ ID NO: 66365 - DNA, 15 bp, Homo sapiens
acatcataaaacata

SEQ ID NO: 66366 - DNA, 15 bp, Homo sapiens
cacatcataaaacat

SEQ ID NO: 66367 - DNA, 15 bp, Homo sapiens
gcacatcataaaaca

SEQ ID NO: 66368 - DNA, 15 bp, Homo sapiens
tgcacatcataaaac

SEQ ID NO: 66369 - DNA, 15 bp, Homo sapiens
ttgcacatcataaaa

SEQ ID NO: 66370 - DNA, 15 bp, Homo sapiens
tttgcacatcataaa

SEQ ID NO: 66371 - DNA, 15 bp, Homo sapiens
gtttgcacatcataa

SEQ ID NO: 66372 - DNA, 15 bp, Homo sapiens
agtttgcacatcata

SEQ ID NO: 66373 - DNA, 15 bp, Homo sapiens
cagtttgcacatcat

SEQ ID NO: 66374 - DNA, 15 bp, Homo sapiens
acagtttgcacatca

SEQ ID NO: 66375 - DNA, 15 bp, Homo sapiens
aacagtttgcacatc

SEQ ID NO: 66376 - DNA, 15 bp, Homo sapiens
taacagtttgcacat

SEQ ID NO: 66377 - DNA, 15 bp, Homo sapiens
gtaacagtttgcaca

SEQ ID NO: 66378 - DNA, 15 bp, Homo sapiens
agtaacagtttgcac

SEQ ID NO: 66379 - DNA, 15 bp, Homo sapiens
aagtaacagtttgca

SEQ ID NO: 66380 - DNA, 15 bp, Homo sapiens
aaagtaacagtttgc

SEQ ID NO: 66381 - DNA, 15 bp, Homo sapiens
aaaagtaacagtttg

SEQ ID NO: 66382 - DNA, 15 bp, Homo sapiens
aaaaagtaacagttt

SEQ ID NO: 66383 - DNA, 15 bp, Homo sapiens
taaaaagtaacagtt

SEQ ID NO: 66384 - DNA, 15 bp, Homo sapiens
ataaaaagtaacagt

SEQ ID NO: 66385 - DNA, 15 bp, Homo sapiens
cataaaaagtaacag

SEQ ID NO: 66386 - DNA, 15 bp, Homo sapiens
acataaaaagtaaca

SEQ ID NO: 66387 - DNA, 15 bp, Homo sapiens
aacataaaaagtaac

SEQ ID NO: 66388 - DNA, 15 bp, Homo sapiens
taacataaaaagtaa

SEQ ID NO: 66389 - DNA, 15 bp, Homo sapiens
ttaacataaaaagta

SEQ ID NO: 66390 - DNA, 15 bp, Homo sapiens
tttaacataaaaagt

SEQ ID NO: 66391 - DNA, 15 bp, Homo sapiens
ttttaacataaaaag

SEQ ID NO: 66392 - DNA, 15 bp, Homo sapiens
tttttaacataaaaa

SEQ ID NO: 66393 - DNA, 15 bp, Homo sapiens
atttttaacataaaa

SEQ ID NO: 66394 - DNA, 15 bp, Homo sapiens
gatttttaacataaa

SEQ ID NO: 66395 - DNA, 15 bp, Homo sapiens
agatttttaacataa

SEQ ID NO: 66396 - DNA, 15 bp, Homo sapiens
aagatttttaacata

SEQ ID NO: 66397 - DNA, 15 bp, Homo sapiens
aaagatttttaacat

SEQ ID NO: 66398 - DNA, 15 bp, Homo sapiens
taaagatttttaaca

SEQ ID NO: 66399 - DNA, 15 bp, Homo sapiens
ttaaagatttttaac

SEQ ID NO: 66400 - DNA, 15 bp, Homo sapiens
tttaaagatttttaa

SEQ ID NO: 66401 - DNA, 15 bp, Homo sapiens
ttttaaagattttta

SEQ ID NO: 66402 - DNA, 15 bp, Homo sapiens
tttttaaagattttt

SEQ ID NO: 66403 - DNA, 15 bp, Homo sapiens
atttttaaagatttt

SEQ ID NO: 66404 - DNA, 15 bp, Homo sapiens
tatttttaaagattt

SEQ ID NO: 66405 - DNA, 15 bp, Homo sapiens
atatttttaaagatt

SEQ ID NO: 66406 - DNA, 15 bp, Homo sapiens
tatatttttaaagat

SEQ ID NO: 66407 - DNA, 15 bp, Homo sapiens
atatatttttaaaga

SEQ ID NO: 66408 - DNA, 15 bp, Homo sapiens
catatatttttaaag

SEQ ID NO: 66409 - DNA, 15 bp, Homo sapiens
acatatatttttaaa

SEQ ID NO: 66410 - DNA, 15 bp, Homo sapiens
cacatatatttttaa

SEQ ID NO: 66411 - DNA, 15 bp, Homo sapiens
tcacatatattttta

SEQ ID NO: 66412 - DNA, 15 bp, Homo sapiens
gtcacatatattttt

SEQ ID NO: 66413 - DNA, 15 bp, Homo sapiens
tgtcacatatatttt

SEQ ID NO: 66414 - DNA, 15 bp, Homo sapiens
atgtcacatatattt

SEQ ID NO: 66415 - DNA, 15 bp, Homo sapiens
catgtcacatatatt

SEQ ID NO: 66416 - DNA, 15 bp, Homo sapiens
ccatgtcacatatat

SEQ ID NO: 66417 - DNA, 15 bp, Homo sapiens
accatgtcacatata

SEQ ID NO: 66418 - DNA, 15 bp, Homo sapiens
caccatgtcacatat

SEQ ID NO: 66419 - DNA, 15 bp, Homo sapiens
gcaccatgtcacata

SEQ ID NO: 66420 - DNA, 15 bp, Homo sapiens
agcaccatgtcacat

SEQ ID NO: 66421 - DNA, 15 bp, Homo sapiens
aagcaccatgtcaca

SEQ ID NO: 66422 - DNA, 15 bp, Homo sapiens
aaagcaccatgtcac

SEQ ID NO: 66423 - DNA, 15 bp, Homo sapiens
aaaagcaccatgtca

SEQ ID NO: 66424 - DNA, 15 bp, Homo sapiens
aaaaagcaccatgtc

SEQ ID NO: 66425 - DNA, 15 bp, Homo sapiens
taaaaagcaccatgt

SEQ ID NO: 66426 - DNA, 15 bp, Homo sapiens
ctaaaaagcaccatg

SEQ ID NO: 66427 - DNA, 15 bp, Homo sapiens
cctaaaaagcaccat

SEQ ID NO: 66428 - DNA, 15 bp, Homo sapiens
tcctaaaaagcacca

SEQ ID NO: 66429 - DNA, 15 bp, Homo sapiens
ctcctaaaaagcacc

SEQ ID NO: 66430 - DNA, 15 bp, Homo sapiens
gctcctaaaaagcac

SEQ ID NO: 66431 - DNA, 15 bp, Homo sapiens
tgctcctaaaaagca

SEQ ID NO: 66432 - DNA, 15 bp, Homo sapiens
atgctcctaaaaagc

SEQ ID NO: 66433 - DNA, 15 bp, Homo sapiens
aatgctcctaaaaag

SEQ ID NO: 66434 - DNA, 15 bp, Homo sapiens
taatgctcctaaaaa

SEQ ID NO: 66435 - DNA, 15 bp, Homo sapiens
gtaatgctcctaaaa

SEQ ID NO: 66436 - DNA, 15 bp, Homo sapiens
tgtaatgctcctaaa

SEQ ID NO: 66437 - DNA, 15 bp, Homo sapiens
atgtaatgctcctaa

SEQ ID NO: 66438 - DNA, 15 bp, Homo sapiens
tatgtaatgctccta

SEQ ID NO: 66439 - DNA, 15 bp, Homo sapiens
ctatgtaatgctcct

SEQ ID NO: 66440 - DNA, 15 bp, Homo sapiens
cctatgtaatgctcc

SEQ ID NO: 66441 - DNA, 15 bp, Homo sapiens
ccctatgtaatgctc

SEQ ID NO: 66442 - DNA, 15 bp, Homo sapiens
gccctatgtaatgct

SEQ ID NO: 66443 - DNA, 15 bp, Homo sapiens
ggccctatgtaatgc

SEQ ID NO: 66444 - DNA, 15 bp, Homo sapiens
tggccctatgtaatg

SEQ ID NO: 66445 - DNA, 15 bp, Homo sapiens
ttggccctatgtaat

SEQ ID NO: 66446 - DNA, 15 bp, Homo sapiens
tttggccctatgtaa

SEQ ID NO: 66447 - DNA, 15 bp, Homo sapiens
ttttggccctatgta

SEQ ID NO: 66448 - DNA, 15 bp, Homo sapiens
attttggccctatgt

SEQ ID NO: 66449 - DNA, 15 bp, Homo sapiens
gattttggccctatg

SEQ ID NO: 66450 - DNA, 15 bp, Homo sapiens
agattttggccctat

SEQ ID NO: 66451 - DNA, 15 bp, Homo sapiens
cagattttggcccta

SEQ ID NO: 66452 - DNA, 15 bp, Homo sapiens
gcagattttggccct

SEQ ID NO: 66453 - DNA, 15 bp, Homo sapiens
ggcagattttggccc

SEQ ID NO: 66454 - DNA, 15 bp, Homo sapiens
tggcagattttggcc

SEQ ID NO: 66455 - DNA, 15 bp, Homo sapiens
atggcagattttggc

SEQ ID NO: 66456 - DNA, 15 bp, Homo sapiens
catggcagattttgg

SEQ ID NO: 66457 - DNA, 15 bp, Homo sapiens
acatggcagattttg

SEQ ID NO: 66458 - DNA, 15 bp, Homo sapiens
aacatggcagatttt

SEQ ID NO: 66459 - DNA, 15 bp, Homo sapiens
aaacatggcagattt

SEQ ID NO: 66460 - DNA, 15 bp, Homo sapiens
aaaacatggcagatt

SEQ ID NO: 66461 - DNA, 15 bp, Homo sapiens
taaaacatggcagat

SEQ ID NO: 66462 - DNA, 15 bp, Homo sapiens
ataaaacatggcaga

SEQ ID NO: 66463 - DNA, 15 bp, Homo sapiens
tataaaacatggcag

SEQ ID NO: 66464 - DNA, 15 bp, Homo sapiens
atataaaacatggca

SEQ ID NO: 66465 - DNA, 15 bp, Homo sapiens
aatataaaacatggc

SEQ ID NO: 66466 - DNA, 15 bp, Homo sapiens
caatataaaacatgg

SEQ ID NO: 66467 - DNA, 15 bp, Homo sapiens
tcaatataaaacatg

SEQ ID NO: 66468 - DNA, 15 bp, Homo sapiens
ttcaatataaaacat

SEQ ID NO: 66469 - DNA, 15 bp, Homo sapiens
gttcaatataaaaca

SEQ ID NO: 66470 - DNA, 15 bp, Homo sapiens
ggttcaatataaaac

SEQ ID NO: 66471 - DNA, 15 bp, Homo sapiens
cggttcaatataaaa

SEQ ID NO: 66472 - DNA, 15 bp, Homo sapiens
acggttcaatataaa

SEQ ID NO: 66473 - DNA, 15 bp, Homo sapiens
gacggttcaatataa

SEQ ID NO: 66474 - DNA, 15 bp, Homo sapiens
agacggttcaatata

SEQ ID NO: 66475 - DNA, 15 bp, Homo sapiens
tagacggttcaatat

SEQ ID NO: 66476 - DNA, 15 bp, Homo sapiens
atagacggttcaata

SEQ ID NO: 66477 - DNA, 15 bp, Homo sapiens
catagacggttcaat

SEQ ID NO: 66478 - DNA, 15 bp, Homo sapiens
acatagacggttcaa

SEQ ID NO: 66479 - DNA, 15 bp, Homo sapiens
tacatagacggttca

SEQ ID NO: 66480 - DNA, 15 bp, Homo sapiens
ttacatagacggttc

SEQ ID NO: 66481 - DNA, 15 bp, Homo sapiens
attacatagacggtt

SEQ ID NO: 66482 - DNA, 15 bp, Homo sapiens
aattacatagacggt

SEQ ID NO: 66483 - DNA, 15 bp, Homo sapiens
gaattacatagacgg

SEQ ID NO: 66484 - DNA, 15 bp, Homo sapiens
ggaattacatagacg

SEQ ID NO: 66485 - DNA, 15 bp, Homo sapiens
tggaattacatagac

SEQ ID NO: 66486 - DNA, 15 bp, Homo sapiens
atggaattacataga

SEQ ID NO: 66487 - DNA, 15 bp, Homo sapiens
catggaattacatag

SEQ ID NO: 66488 - DNA, 15 bp, Homo sapiens
gcatggaattacata

SEQ ID NO: 66489 - DNA, 15 bp, Homo sapiens
tgcatggaattacat

SEQ ID NO: 66490 - DNA, 15 bp, Homo sapiens
atgcatggaattaca

SEQ ID NO: 66491 - DNA, 15 bp, Homo sapiens
tatgcatggaattac

SEQ ID NO: 66492 - DNA, 15 bp, Homo sapiens
ctatgcatggaatta

SEQ ID NO: 66493 - DNA, 15 bp, Homo sapiens
actatgcatggaatt

SEQ ID NO: 66494 - DNA, 15 bp, Homo sapiens
aactatgcatggaat

SEQ ID NO: 66495 - DNA, 15 bp, Homo sapiens
taactatgcatggaa

SEQ ID NO: 66496 - DNA, 15 bp, Homo sapiens
ctaactatgcatgga

SEQ ID NO: 66497 - DNA, 15 bp, Homo sapiens
tctaactatgcatgg

SEQ ID NO: 66498 - DNA, 15 bp, Homo sapiens
ctctaactatgcatg

SEQ ID NO: 66499 - DNA, 15 bp, Homo sapiens
tctctaactatgcat

SEQ ID NO: 66500 - DNA, 15 bp, Homo sapiens
ttctctaactatgca

SEQ ID NO: 66501 - DNA, 15 bp, Homo sapiens
tttctctaactatgc

SEQ ID NO: 66502 - DNA, 15 bp, Homo sapiens
ttttctctaactatg

SEQ ID NO: 66503 - DNA, 15 bp, Homo sapiens
attttctctaactat

SEQ ID NO: 66504 - DNA, 15 bp, Homo sapiens
gattttctctaacta

SEQ ID NO: 66505 - DNA, 15 bp, Homo sapiens
tgattttctctaact

SEQ ID NO: 66506 - DNA, 15 bp, Homo sapiens
atgattttctctaac

SEQ ID NO: 66507 - DNA, 15 bp, Homo sapiens
tatgattttctctaa

SEQ ID NO: 66508 - DNA, 15 bp, Homo sapiens
atatgattttctcta

SEQ ID NO: 66509 - DNA, 15 bp, Homo sapiens
tatatgattttctct

SEQ ID NO: 66510 - DNA, 15 bp, Homo sapiens
ctatatgattttctc

SEQ ID NO: 66511 - DNA, 15 bp, Homo sapiens
cctatatgattttct

SEQ ID NO: 66512 - DNA, 15 bp, Homo sapiens
tcctatatgattttc

SEQ ID NO: 66513 - DNA, 15 bp, Homo sapiens
atcctatatgatttt

SEQ ID NO: 66514 - DNA, 15 bp, Homo sapiens
catcctatatgattt

SEQ ID NO: 66515 - DNA, 15 bp, Homo sapiens
ccatcctatatgatt

SEQ ID NO: 66516 - DNA, 15 bp, Homo sapiens
tccatcctatatgat

SEQ ID NO: 66517 - DNA, 15 bp, Homo sapiens
ttccatcctatatga

SEQ ID NO: 66518 - DNA, 15 bp, Homo sapiens
attccatcctatatg

SEQ ID NO: 66519 - DNA, 15 bp, Homo sapiens
tattccatcctatat

SEQ ID NO: 66520 - DNA, 15 bp, Homo sapiens
ttattccatcctata

SEQ ID NO: 66521 - DNA, 15 bp, Homo sapiens
attattccatcctat

SEQ ID NO: 66522 - DNA, 15 bp, Homo sapiens
tattattccatccta

SEQ ID NO: 66523 - DNA, 15 bp, Homo sapiens
ttattattccatcct

SEQ ID NO: 66524 - DNA, 15 bp, Homo sapiens
attattattccatcc

SEQ ID NO: 66525 - DNA, 15 bp, Homo sapiens
tattattattccatc

SEQ ID NO: 66526 - DNA, 15 bp, Homo sapiens
gtattattattccat

SEQ ID NO: 66527 - DNA, 15 bp, Homo sapiens
agtattattattcca

SEQ ID NO: 66528 - DNA, 15 bp, Homo sapiens
cagtattattattcc

SEQ ID NO: 66529 - DNA, 15 bp, Homo sapiens
tcagtattattattc

SEQ ID NO: 66530 - DNA, 15 bp, Homo sapiens
gtcagtattattatt

SEQ ID NO: 66531 - DNA, 15 bp, Homo sapiens
agtcagtattattat

SEQ ID NO: 66532 - DNA, 15 bp, Homo sapiens
cagtcagtattatta

SEQ ID NO: 66533 - DNA, 15 bp, Homo sapiens
tcagtcagtattatt

SEQ ID NO: 66534 - DNA, 15 bp, Homo sapiens
ttcagtcagtattat

SEQ ID NO: 66535 - DNA, 15 bp, Homo sapiens
tttcagtcagtatta

SEQ ID NO: 66536 - DNA, 15 bp, Homo sapiens
ttttcagtcagtatt

SEQ ID NO: 66537 - DNA, 15 bp, Homo sapiens
attttcagtcagtat

SEQ ID NO: 66538 - DNA, 15 bp, Homo sapiens
cattttcagtcagta

SEQ ID NO: 66539 - DNA, 15 bp, Homo sapiens
acattttcagtcagt

SEQ ID NO: 66540 - DNA, 15 bp, Homo sapiens
aacattttcagtcag

SEQ ID NO: 66541 - DNA, 15 bp, Homo sapiens
aaacattttcagtca

SEQ ID NO: 66542 - DNA, 15 bp, Homo sapiens
gaaacattttcagtc

SEQ ID NO: 66543 - DNA, 15 bp, Homo sapiens
agaaacattttcagt

SEQ ID NO: 66544 - DNA, 15 bp, Homo sapiens
aagaaacattttcag

SEQ ID NO: 66545 - DNA, 15 bp, Homo sapiens
aaagaaacattttca

SEQ ID NO: 66546 - DNA, 15 bp, Homo sapiens
gaaagaaacattttc

SEQ ID NO: 66547 - DNA, 15 bp, Homo sapiens
agaaagaaacatttt

SEQ ID NO: 66548 - DNA, 15 bp, Homo sapiens
cagaaagaaacattt

SEQ ID NO: 66549 - DNA, 15 bp, Homo sapiens
ccagaaagaaacatt

SEQ ID NO: 66550 - DNA, 15 bp, Homo sapiens
accagaaagaaacat

SEQ ID NO: 66551 - DNA, 15 bp, Homo sapiens
caccagaaagaaaca

SEQ ID NO: 66552 - DNA, 15 bp, Homo sapiens
ccaccagaaagaaac

SEQ ID NO: 66553 - DNA, 15 bp, Homo sapiens
gccaccagaaagaaa

SEQ ID NO: 66554 - DNA, 15 bp, Homo sapiens
tgccaccagaaagaa

SEQ ID NO: 66555 - DNA, 15 bp, Homo sapiens
atgccaccagaaaga

SEQ ID NO: 66556 - DNA, 15 bp, Homo sapiens
aatgccaccagaaag

SEQ ID NO: 66557 - DNA, 15 bp, Homo sapiens
aaatgccaccagaaa

SEQ ID NO: 66558 - DNA, 15 bp, Homo sapiens
caaatgccaccagaa

SEQ ID NO: 66559 - DNA, 15 bp, Homo sapiens
acaaatgccaccaga

SEQ ID NO: 66560 - DNA, 15 bp, Homo sapiens
cacaaatgccaccag

SEQ ID NO: 66561 - DNA, 15 bp, Homo sapiens
tcacaaatgccacca

SEQ ID NO: 66562 - DNA, 15 bp, Homo sapiens
ctcacaaatgccacc

SEQ ID NO: 66563 - DNA, 15 bp, Homo sapiens
actcacaaatgccac

SEQ ID NO: 66564 - DNA, 15 bp, Homo sapiens
cactcacaaatgcca

SEQ ID NO: 66565 - DNA, 15 bp, Homo sapiens
tcactcacaaatgcc

SEQ ID NO: 66566 - DNA, 15 bp, Homo sapiens
ctcactcacaaatgc

SEQ ID NO: 66567 - DNA, 15 bp, Homo sapiens
actcactcacaaatg

SEQ ID NO: 66568 - DNA, 15 bp, Homo sapiens
gactcactcacaaat

SEQ ID NO: 66569 - DNA, 15 bp, Homo sapiens
tgactcactcacaaa

SEQ ID NO: 66570 - DNA, 15 bp, Homo sapiens
ttgactcactcacaa

SEQ ID NO: 66571 - DNA, 15 bp, Homo sapiens
attgactcactcaca

SEQ ID NO: 66572 - DNA, 15 bp, Homo sapiens
cattgactcactcac

SEQ ID NO: 66573 - DNA, 15 bp, Homo sapiens
tcattgactcactca

SEQ ID NO: 66574 - DNA, 15 bp, Homo sapiens
ttcattgactcactc

SEQ ID NO: 66575 - DNA, 15 bp, Homo sapiens
tttcattgactcact

SEQ ID NO: 66576 - DNA, 15 bp, Homo sapiens
atttcattgactcac

SEQ ID NO: 66577 - DNA, 15 bp, Homo sapiens
tatttcattgactca

SEQ ID NO: 66578 - DNA, 15 bp, Homo sapiens
ctatttcattgactc

SEQ ID NO: 66579 - DNA, 15 bp, Homo sapiens
cctatttcattgact

SEQ ID NO: 66580 - DNA, 15 bp, Homo sapiens
acctatttcattgac

SEQ ID NO: 66581 - DNA, 15 bp, Homo sapiens
aacctatttcattga

SEQ ID NO: 66582 - DNA, 15 bp, Homo sapiens
aaacctatttcattg

SEQ ID NO: 66583 - DNA, 15 bp, Homo sapiens
caaacctatttcatt

SEQ ID NO: 66584 - DNA, 15 bp, Homo sapiens
tcaaacctatttcat

SEQ ID NO: 66585 - DNA, 15 bp, Homo sapiens
ttcaaacctatttca

SEQ ID NO: 66586 - DNA, 15 bp, Homo sapiens
tttcaaacctatttc

SEQ ID NO: 66587 - DNA, 15 bp, Homo sapiens
ttttcaaacctattt

SEQ ID NO: 66588 - DNA, 15 bp, Homo sapiens
tttttcaaacctatt

SEQ ID NO: 66589 - DNA, 15 bp, Homo sapiens
atttttcaaacctat

SEQ ID NO: 66590 - DNA, 15 bp, Homo sapiens
gatttttcaaaccta

SEQ ID NO: 66591 - DNA, 15 bp, Homo sapiens
agatttttcaaacct

SEQ ID NO: 66592 - DNA, 15 bp, Homo sapiens
aagatttttcaaacc

SEQ ID NO: 66593 - DNA, 15 bp, Homo sapiens
aaagatttttcaaac

SEQ ID NO: 66594 - DNA, 15 bp, Homo sapiens
aaaagatttttcaaa

SEQ ID NO: 66595 - DNA, 15 bp, Homo sapiens
aaaaagatttttcaa

SEQ ID NO: 66596 - DNA, 15 bp, Homo sapiens
taaaaagatttttca

SEQ ID NO: 66597 - DNA, 15 bp, Homo sapiens
ttaaaaagatttttc

SEQ ID NO: 66598 - DNA, 15 bp, Homo sapiens
gttaaaaagattttt

SEQ ID NO: 66599 - DNA, 15 bp, Homo sapiens
agttaaaaagatttt

SEQ ID NO: 66600 - DNA, 15 bp, Homo sapiens
gagttaaaaagattt

SEQ ID NO: 66601 - DNA, 15 bp, Homo sapiens
agagttaaaaagatt

SEQ ID NO: 66602 - DNA, 15 bp, Homo sapiens
cagagttaaaaagat

SEQ ID NO: 66603 - DNA, 15 bp, Homo sapiens
acagagttaaaaaga

SEQ ID NO: 66604 - DNA, 15 bp, Homo sapiens
tacagagttaaaaag

SEQ ID NO: 66605 - DNA, 15 bp, Homo sapiens
atacagagttaaaaa

SEQ ID NO: 66606 - DNA, 15 bp, Homo sapiens
catacagagttaaaa

SEQ ID NO: 66607 - DNA, 15 bp, Homo sapiens
acatacagagttaaa

SEQ ID NO: 66608 - DNA, 15 bp, Homo sapiens
tacatacagagttaa

SEQ ID NO: 66609 - DNA, 15 bp, Homo sapiens
atacatacagagtta

SEQ ID NO: 66610 - DNA, 15 bp, Homo sapiens
aatacatacagagtt

SEQ ID NO: 66611 - DNA, 15 bp, Homo sapiens
gaatacatacagagt

SEQ ID NO: 66612 - DNA, 15 bp, Homo sapiens
tgaatacatacagag

SEQ ID NO: 66613 - DNA, 15 bp, Homo sapiens
ctgaatacatacaga

SEQ ID NO: 66614 - DNA, 15 bp, Homo sapiens
cctgaatacatacag

SEQ ID NO: 66615 - DNA, 15 bp, Homo sapiens
tcctgaatacataca

SEQ ID NO: 66616 - DNA, 15 bp, Homo sapiens
ctcctgaatacatac

SEQ ID NO: 66617 - DNA, 15 bp, Homo sapiens
tctcctgaatacata

SEQ ID NO: 66618 - DNA, 15 bp, Homo sapiens
ttctcctgaatacat

SEQ ID NO: 66619 - DNA, 15 bp, Homo sapiens
gttctcctgaataca

SEQ ID NO: 66620 - DNA, 15 bp, Homo sapiens
tgttctcctgaatac

SEQ ID NO: 66621 - DNA, 15 bp, Homo sapiens
ttgttctcctgaata

SEQ ID NO: 66622 - DNA, 15 bp, Homo sapiens
attgttctcctgaat

SEQ ID NO: 66623 - DNA, 15 bp, Homo sapiens
tattgttctcctgaa

SEQ ID NO: 66624 - DNA, 15 bp, Homo sapiens
ctattgttctcctga

SEQ ID NO: 66625 - DNA, 15 bp, Homo sapiens
cctattgttctcctg

SEQ ID NO: 66626 - DNA, 15 bp, Homo sapiens
acctattgttctcct

SEQ ID NO: 66627 - DNA, 15 bp, Homo sapiens
tacctattgttctcc

SEQ ID NO: 66628 - DNA, 15 bp, Homo sapiens
ctacctattgttctc

SEQ ID NO: 66629 - DNA, 15 bp, Homo sapiens
actacctattgttct

SEQ ID NO: 66630 - DNA, 15 bp, Homo sapiens
aactacctattgttc

SEQ ID NO: 66631 - DNA, 15 bp, Homo sapiens
aaactacctattgtt

SEQ ID NO: 66632 - DNA, 15 bp, Homo sapiens
caaactacctattgt

SEQ ID NO: 66633 - DNA, 15 bp, Homo sapiens
tcaaactacctattg

SEQ ID NO: 66634 - DNA, 15 bp, Homo sapiens
ctcaaactacctatt

SEQ ID NO: 66635 - DNA, 15 bp, Homo sapiens
tctcaaactacctat

SEQ ID NO: 66636 - DNA, 15 bp, Homo sapiens
ttctcaaactaccta

SEQ ID NO: 66637 - DNA, 15 bp, Homo sapiens
tttctcaaactacct

SEQ ID NO: 66638 - DNA, 15 bp, Homo sapiens
ttttctcaaactacc

SEQ ID NO: 66639 - DNA, 15 bp, Homo sapiens
attttctcaaactac

SEQ ID NO: 66640 - DNA, 15 bp, Homo sapiens
tattttctcaaacta

SEQ ID NO: 66641 - DNA, 15 bp, Homo sapiens
ctattttctcaaact

SEQ ID NO: 66642 - DNA, 15 bp, Homo sapiens
tctattttctcaaac

SEQ ID NO: 66643 - DNA, 15 bp, Homo sapiens
gtctattttctcaaa

SEQ ID NO: 66644 - DNA, 15 bp, Homo sapiens
ggtctattttctcaa

SEQ ID NO: 66645 - DNA, 15 bp, Homo sapiens
gggtctattttctca

SEQ ID NO: 66646 - DNA, 15 bp, Homo sapiens
tgggtctattttctc

SEQ ID NO: 66647 - DNA, 15 bp, Homo sapiens
gtgggtctattttct

SEQ ID NO: 66648 - DNA, 15 bp, Homo sapiens
agtgggtctattttc

SEQ ID NO: 66649 - DNA, 15 bp, Homo sapiens
gagtgggtctatttt

SEQ ID NO: 66650 - DNA, 15 bp, Homo sapiens
tgagtgggtctattt

SEQ ID NO: 66651 - DNA, 15 bp, Homo sapiens
ctgagtgggtctatt

SEQ ID NO: 66652 - DNA, 15 bp, Homo sapiens
cctgagtgggtctat

SEQ ID NO: 66653 - DNA, 15 bp, Homo sapiens
gcctgagtgggtcta

SEQ ID NO: 66654 - DNA, 15 bp, Homo sapiens
tgcctgagtgggtct

SEQ ID NO: 66655 - DNA, 15 bp, Homo sapiens
ttgcctgagtgggtc

SEQ ID NO: 66656 - DNA, 15 bp, Homo sapiens
attgcctgagtgggt

SEQ ID NO: 66657 - DNA, 15 bp, Homo sapiens
tattgcctgagtggg

SEQ ID NO: 66658 - DNA, 15 bp, Homo sapiens
ttattgcctgagtgg

SEQ ID NO: 66659 - DNA, 15 bp, Homo sapiens
tttattgcctgagtg

SEQ ID NO: 66660 - DNA, 15 bp, Homo sapiens
ttttattgcctgagt

SEQ ID NO: 66661 - DNA, 15 bp, Homo sapiens
attttattgcctgag

SEQ ID NO: 66662 - DNA, 15 bp, Homo sapiens
cattttattgcctga

SEQ ID NO: 66663 - DNA, 15 bp, Homo sapiens
gcattttattgcctg

SEQ ID NO: 66664 - DNA, 15 bp, Homo sapiens
agcattttattgcct

SEQ ID NO: 66665 - DNA, 15 bp, Homo sapiens
tagcattttattgcc

SEQ ID NO: 66666 - DNA, 15 bp, Homo sapiens
atagcattttattgc

SEQ ID NO: 66667 - DNA, 15 bp, Homo sapiens
tatagcattttattg

SEQ ID NO: 66668 - DNA, 15 bp, Homo sapiens
atatagcattttatt

SEQ ID NO: 66669 - DNA, 15 bp, Homo sapiens
aatatagcattttat

SEQ ID NO: 66670 - DNA, 15 bp, Homo sapiens
taatatagcatttta

SEQ ID NO: 66671 - DNA, 15 bp, Homo sapiens
ctaatatagcatttt

SEQ ID NO: 66672 - DNA, 15 bp, Homo sapiens
gctaatatagcattt

SEQ ID NO: 66673 - DNA, 15 bp, Homo sapiens
ggctaatatagcatt

SEQ ID NO: 66674 - DNA, 15 bp, Homo sapiens
aggctaatatagcat

SEQ ID NO: 66675 - DNA, 15 bp, Homo sapiens
aaggctaatatagca

SEQ ID NO: 66676 - DNA, 15 bp, Homo sapiens
caaggctaatatagc

SEQ ID NO: 66677 - DNA, 15 bp, Homo sapiens
gcaaggctaatatag

SEQ ID NO: 66678 - DNA, 15 bp, Homo sapiens
tgcaaggctaatata

SEQ ID NO: 66679 - DNA, 15 bp, Homo sapiens
ttgcaaggctaatat

SEQ ID NO: 66680 - DNA, 15 bp, Homo sapiens
tttgcaaggctaata

SEQ ID NO: 66681 - DNA, 15 bp, Homo sapiens
atttgcaaggctaat

SEQ ID NO: 66682 - DNA, 15 bp, Homo sapiens
catttgcaaggctaa

SEQ ID NO: 66683 - DNA, 15 bp, Homo sapiens
acatttgcaaggcta

SEQ ID NO: 66684 - DNA, 15 bp, Homo sapiens
aacatttgcaaggct

SEQ ID NO: 66685 - DNA, 15 bp, Homo sapiens
caacatttgcaaggc

SEQ ID NO: 66686 - DNA, 15 bp, Homo sapiens
gcaacatttgcaagg

SEQ ID NO: 66687 - DNA, 15 bp, Homo sapiens
agcaacatttgcaag

SEQ ID NO: 66688 - DNA, 15 bp, Homo sapiens
gagcaacatttgcaa

SEQ ID NO: 66689 - DNA, 15 bp, Homo sapiens
agagcaacatttgca

SEQ ID NO: 66690 - DNA, 15 bp, Homo sapiens
aagagcaacatttgc

SEQ ID NO: 66691 - DNA, 15 bp, Homo sapiens
gaagagcaacatttg

SEQ ID NO: 66692 - DNA, 15 bp, Homo sapiens
ggaagagcaacattt

SEQ ID NO: 66693 - DNA, 15 bp, Homo sapiens
tggaagagcaacatt

SEQ ID NO: 66694 - DNA, 15 bp, Homo sapiens
gtggaagagcaacat

SEQ ID NO: 66695 - DNA, 15 bp, Homo sapiens
tgtggaagagcaaca

SEQ ID NO: 66696 - DNA, 15 bp, Homo sapiens
ttgtggaagagcaac

SEQ ID NO: 66697 - DNA, 15 bp, Homo sapiens
tttgtggaagagcaa

SEQ ID NO: 66698 - DNA, 15 bp, Homo sapiens
ttttgtggaagagca

SEQ ID NO: 66699 - DNA, 15 bp, Homo sapiens
tttttgtggaagagc

SEQ ID NO: 66700 - DNA, 15 bp, Homo sapiens
ttttttgtggaagag

SEQ ID NO: 66701 - DNA, 15 bp, Homo sapiens
tttttttgtggaaga

SEQ ID NO: 66702 - DNA, 15 bp, Homo sapiens
ttttttttgtggaag

SEQ ID NO: 66703 - DNA, 15 bp, Homo sapiens
tttttttttgtggaa

SEQ ID NO: 66704 - DNA, 15 bp, Homo sapiens
ttttttttttgtgga

SEQ ID NO: 66705 - DNA, 15 bp, Homo sapiens
cttttttttttgtgg

SEQ ID NO: 66706 - DNA, 15 bp, Homo sapiens
ccttttttttttgtg

SEQ ID NO: 66707 - DNA, 15 bp, Homo sapiens
tccttttttttttgt

SEQ ID NO: 66708 - DNA, 15 bp, Homo sapiens
ttccttttttttttg

SEQ ID NO: 66709 - DNA, 15 bp, Homo sapiens
tttcctttttttttt

SEQ ID NO: 66710 - DNA, 15 bp, Homo sapiens
ctttccttttttttt

SEQ ID NO: 66711 - DNA, 15 bp, Homo sapiens
cctttcctttttttt

SEQ ID NO: 66712 - DNA, 15 bp, Homo sapiens
tcctttccttttttt

SEQ ID NO: 66713 - DNA, 15 bp, Homo sapiens
atcctttcctttttt

SEQ ID NO: 66714 - DNA, 15 bp, Homo sapiens
tatcctttccttttt

SEQ ID NO: 66715 - DNA, 15 bp, Homo sapiens
ttatcctttcctttt

SEQ ID NO: 66716 - DNA, 15 bp, Homo sapiens
tttatcctttccttt

SEQ ID NO: 66717 - DNA, 15 bp, Homo sapiens
gtttatcctttcctt

SEQ ID NO: 66718 - DNA, 15 bp, Homo sapiens
ggtttatcctttcct

SEQ ID NO: 66719 - DNA, 15 bp, Homo sapiens
aggtttatcctttcc

SEQ ID NO: 66720 - DNA, 15 bp, Homo sapiens
taggtttatcctttc

SEQ ID NO: 66721 - DNA, 15 bp, Homo sapiens
ttaggtttatccttt

SEQ ID NO: 66722 - DNA, 15 bp, Homo sapiens
tttaggtttatcctt

SEQ ID NO: 66723 - DNA, 15 bp, Homo sapiens
gtttaggtttatcct

SEQ ID NO: 66724 - DNA, 15 bp, Homo sapiens
agtttaggtttatcc

SEQ ID NO: 66725 - DNA, 15 bp, Homo sapiens
aagtttaggtttatc

SEQ ID NO: 66726 - DNA, 15 bp, Homo sapiens
taagtttaggtttat

SEQ ID NO: 66727 - DNA, 15 bp, Homo sapiens
ttaagtttaggttta

SEQ ID NO: 66728 - DNA, 15 bp, Homo sapiens
attaagtttaggttt

SEQ ID NO: 66729 - DNA, 15 bp, Homo sapiens
gattaagtttaggtt

SEQ ID NO: 66730 - DNA, 15 bp, Homo sapiens
ggattaagtttaggt

SEQ ID NO: 66731 - DNA, 15 bp, Homo sapiens
aggattaagtttagg

SEQ ID NO: 66732 - DNA, 15 bp, Homo sapiens
aaggattaagtttag

SEQ ID NO: 66733 - DNA, 15 bp, Homo sapiens
aaaggattaagttta

SEQ ID NO: 66734 - DNA, 15 bp, Homo sapiens
taaaggattaagttt

SEQ ID NO: 66735 - DNA, 15 bp, Homo sapiens
ataaaggattaagtt

SEQ ID NO: 66736 - DNA, 15 bp, Homo sapiens
cataaaggattaagt

SEQ ID NO: 66737 - DNA, 15 bp, Homo sapiens
acataaaggattaag

SEQ ID NO: 66738 - DNA, 15 bp, Homo sapiens
tacataaaggattaa

SEQ ID NO: 66739 - DNA, 15 bp, Homo sapiens
gtacataaaggatta

SEQ ID NO: 66740 - DNA, 15 bp, Homo sapiens
agtacataaaggatt

SEQ ID NO: 66741 - DNA, 15 bp, Homo sapiens
tagtacataaaggat

SEQ ID NO: 66742 - DNA, 15 bp, Homo sapiens
atagtacataaagga

SEQ ID NO: 66743 - DNA, 15 bp, Homo sapiens
catagtacataaagg

SEQ ID NO: 66744 - DNA, 15 bp, Homo sapiens
acatagtacataaag

SEQ ID NO: 66745 - DNA, 15 bp, Homo sapiens
aacatagtacataaa

SEQ ID NO: 66746 - DNA, 15 bp, Homo sapiens
taacatagtacataa

SEQ ID NO: 66747 - DNA, 15 bp, Homo sapiens
gtaacatagtacata

SEQ ID NO: 66748 - DNA, 15 bp, Homo sapiens
tgtaacatagtacat

SEQ ID NO: 66749 - DNA, 15 bp, Homo sapiens
atgtaacatagtaca

SEQ ID NO: 66750 - DNA, 15 bp, Homo sapiens
tatgtaacatagtac

SEQ ID NO: 66751 - DNA, 15 bp, Homo sapiens
atatgtaacatagta

SEQ ID NO: 66752 - DNA, 15 bp, Homo sapiens
tatatgtaacatagt

SEQ ID NO: 66753 - DNA, 15 bp, Homo sapiens
gtatatgtaacatag

SEQ ID NO: 66754 - DNA, 15 bp, Homo sapiens
tgtatatgtaacata

SEQ ID NO: 66755 - DNA, 15 bp, Homo sapiens
atgtatatgtaacat

SEQ ID NO: 66756 - DNA, 15 bp, Homo sapiens
gatgtatatgtaaca

SEQ ID NO: 66757 - DNA, 15 bp, Homo sapiens
tgatgtatatgtaac

SEQ ID NO: 66758 - DNA, 15 bp, Homo sapiens
gtgatgtatatgtaa

SEQ ID NO: 66759 - DNA, 15 bp, Homo sapiens
tgtgatgtatatgta

SEQ ID NO: 66760 - DNA, 15 bp, Homo sapiens
atgtgatgtatatgt

SEQ ID NO: 66761 - DNA, 15 bp, Homo sapiens
aatgtgatgtatatg

SEQ ID NO: 66762 - DNA, 15 bp, Homo sapiens
aaatgtgatgtatat

SEQ ID NO: 66763 - DNA, 15 bp, Homo sapiens
aaaatgtgatgtata

SEQ ID NO: 66764 - DNA, 15 bp, Homo sapiens
taaaatgtgatgtat

SEQ ID NO: 66765 - DNA, 15 bp, Homo sapiens
ctaaaatgtgatgta

SEQ ID NO: 66766 - DNA, 15 bp, Homo sapiens
tctaaaatgtgatgt

SEQ ID NO: 66767 - DNA, 15 bp, Homo sapiens
atctaaaatgtgatg

SEQ ID NO: 66768 - DNA, 15 bp, Homo sapiens
tatctaaaatgtgat

SEQ ID NO: 66769 - DNA, 15 bp, Homo sapiens
ttatctaaaatgtga

SEQ ID NO: 66770 - DNA, 15 bp, Homo sapiens
attatctaaaatgtg

SEQ ID NO: 66771 - DNA, 15 bp, Homo sapiens
tattatctaaaatgt

SEQ ID NO: 66772 - DNA, 15 bp, Homo sapiens
ttattatctaaaatg

SEQ ID NO: 66773 - DNA, 15 bp, Homo sapiens
attattatctaaaat

SEQ ID NO: 66774 - DNA, 15 bp, Homo sapiens
cattattatctaaaa

SEQ ID NO: 66775 - DNA, 15 bp, Homo sapiens
tcattattatctaaa

SEQ ID NO: 66776 - DNA, 15 bp, Homo sapiens
ttcattattatctaa

SEQ ID NO: 66777 - DNA, 15 bp, Homo sapiens
attcattattatcta

SEQ ID NO: 66778 - DNA, 15 bp, Homo sapiens
cattcattattatct

SEQ ID NO: 66779 - DNA, 15 bp, Homo sapiens
gcattcattattatc

SEQ ID NO: 66780 - DNA, 15 bp, Homo sapiens
ggcattcattattat

SEQ ID NO: 66781 - DNA, 15 bp, Homo sapiens
tggcattcattatta

SEQ ID NO: 66782 - DNA, 15 bp, Homo sapiens
ctggcattcattatt

SEQ ID NO: 66783 - DNA, 15 bp, Homo sapiens
tctggcattcattat

SEQ ID NO: 66784 - DNA, 15 bp, Homo sapiens
ttctggcattcatta

SEQ ID NO: 66785 - DNA, 15 bp, Homo sapiens
attctggcattcatt

SEQ ID NO: 66786 - DNA, 15 bp, Homo sapiens
cattctggcattcat

SEQ ID NO: 66787 - DNA, 15 bp, Homo sapiens
acattctggcattca

SEQ ID NO: 66788 - DNA, 15 bp, Homo sapiens
cacattctggcattc

SEQ ID NO: 66789 - DNA, 15 bp, Homo sapiens
tcacattctggcatt

SEQ ID NO: 66790 - DNA, 15 bp, Homo sapiens
gtcacattctggcat

SEQ ID NO: 66791 - DNA, 15 bp, Homo sapiens
agtcacattctggca

SEQ ID NO: 66792 - DNA, 15 bp, Homo sapiens
aagtcacattctggc

SEQ ID NO: 66793 - DNA, 15 bp, Homo sapiens
taagtcacattctgg

SEQ ID NO: 66794 - DNA, 15 bp, Homo sapiens
ttaagtcacattctg

SEQ ID NO: 66795 - DNA, 15 bp, Homo sapiens
tttaagtcacattct

SEQ ID NO: 66796 - DNA, 15 bp, Homo sapiens
gtttaagtcacattc

SEQ ID NO: 66797 - DNA, 15 bp, Homo sapiens
agtttaagtcacatt

SEQ ID NO: 66798 - DNA, 15 bp, Homo sapiens
aagtttaagtcacat

SEQ ID NO: 66799 - DNA, 15 bp, Homo sapiens
aaagtttaagtcaca

SEQ ID NO: 66800 - DNA, 15 bp, Homo sapiens
aaaagtttaagtcac

SEQ ID NO: 66801 - DNA, 15 bp, Homo sapiens
gaaaagtttaagtca

SEQ ID NO: 66802 - DNA, 15 bp, Homo sapiens
ggaaaagtttaagtc

SEQ ID NO: 66803 - DNA, 15 bp, Homo sapiens
aggaaaagtttaagt

SEQ ID NO: 66804 - DNA, 15 bp, Homo sapiens
gaggaaaagtttaag

SEQ ID NO: 66805 - DNA, 15 bp, Homo sapiens
tgaggaaaagtttaa

SEQ ID NO: 66806 - DNA, 15 bp, Homo sapiens
atgaggaaaagttta

SEQ ID NO: 66807 - DNA, 15 bp, Homo sapiens
catgaggaaaagttt

SEQ ID NO: 66808 - DNA, 15 bp, Homo sapiens
acatgaggaaaagtt

SEQ ID NO: 66809 - DNA, 15 bp, Homo sapiens
aacatgaggaaaagt

SEQ ID NO: 66810 - DNA, 15 bp, Homo sapiens
taacatgaggaaaag

SEQ ID NO: 66811 - DNA, 15 bp, Homo sapiens
ataacatgaggaaaa

SEQ ID NO: 66812 - DNA, 15 bp, Homo sapiens
aataacatgaggaaa

SEQ ID NO: 66813 - DNA, 15 bp, Homo sapiens
aaataacatgaggaa

SEQ ID NO: 66814 - DNA, 15 bp, Homo sapiens
aaaataacatgagga

SEQ ID NO: 66815 - DNA, 15 bp, Homo sapiens
caaaataacatgagg

SEQ ID NO: 66816 - DNA, 15 bp, Homo sapiens
gcaaaataacatgag

SEQ ID NO: 66817 - DNA, 15 bp, Homo sapiens
agcaaaataacatga

SEQ ID NO: 66818 - DNA, 15 bp, Homo sapiens
gagcaaaataacatg

SEQ ID NO: 66819 - DNA, 15 bp, Homo sapiens
tgagcaaaataacat

SEQ ID NO: 66820 - DNA, 15 bp, Homo sapiens
ctgagcaaaataaca

SEQ ID NO: 66821 - DNA, 15 bp, Homo sapiens
cctgagcaaaataac

SEQ ID NO: 66822 - DNA, 15 bp, Homo sapiens
acctgagcaaaataa

SEQ ID NO: 66823 - DNA, 15 bp, Homo sapiens
aacctgagcaaaata

SEQ ID NO: 66824 - DNA, 15 bp, Homo sapiens
aaacctgagcaaaat

SEQ ID NO: 66825 - DNA, 15 bp, Homo sapiens
aaaacctgagcaaaa

SEQ ID NO: 66826 - DNA, 15 bp, Homo sapiens
aaaaacctgagcaaa

SEQ ID NO: 66827 - DNA, 15 bp, Homo sapiens
aaaaaacctgagcaa

SEQ ID NO: 66828 - DNA, 15 bp, Homo sapiens
aaaaaaacctgagca

SEQ ID NO: 66829 - DNA, 15 bp, Homo sapiens
aaaaaaaacctgagc

SEQ ID NO: 66830 - DNA, 15 bp, Homo sapiens
aaaaaaaaacctgag

SEQ ID NO: 66831 - DNA, 15 bp, Homo sapiens
gaaaaaaaaacctga

SEQ ID NO: 66832 - DNA, 15 bp, Homo sapiens
tgaaaaaaaaacctg

SEQ ID NO: 66833 - DNA, 15 bp, Homo sapiens
ttgaaaaaaaaacct

SEQ ID NO: 66834 - DNA, 15 bp, Homo sapiens
attgaaaaaaaaacc

SEQ ID NO: 66835 - DNA, 15 bp, Homo sapiens
gattgaaaaaaaaac

SEQ ID NO: 66836 - DNA, 15 bp, Homo sapiens
ggattgaaaaaaaaa

SEQ ID NO: 66837 - DNA, 15 bp, Homo sapiens
aggattgaaaaaaaa

SEQ ID NO: 66838 - DNA, 15 bp, Homo sapiens
taggattgaaaaaaa

SEQ ID NO: 66839 - DNA, 15 bp, Homo sapiens
ttaggattgaaaaaa

SEQ ID NO: 66840 - DNA, 15 bp, Homo sapiens
attaggattgaaaaa

SEQ ID NO: 66841 - DNA, 15 bp, Homo sapiens
aattaggattgaaaa

SEQ ID NO: 66842 - DNA, 15 bp, Homo sapiens
caattaggattgaaa

SEQ ID NO: 66843 - DNA, 15 bp, Homo sapiens
ccaattaggattgaa

SEQ ID NO: 66844 - DNA, 15 bp, Homo sapiens
tccaattaggattga

SEQ ID NO: 66845 - DNA, 15 bp, Homo sapiens
ctccaattaggattg

SEQ ID NO: 66846 - DNA, 15 bp, Homo sapiens
gctccaattaggatt

SEQ ID NO: 66847 - DNA, 15 bp, Homo sapiens
agctccaattaggat

SEQ ID NO: 66848 - DNA, 15 bp, Homo sapiens
aagctccaattagga

SEQ ID NO: 66849 - DNA, 15 bp, Homo sapiens
aaagctccaattagg

SEQ ID NO: 66850 - DNA, 15 bp, Homo sapiens
gaaagctccaattag

SEQ ID NO: 66851 - DNA, 15 bp, Homo sapiens
tgaaagctccaatta

SEQ ID NO: 66852 - DNA, 15 bp, Homo sapiens
ctgaaagctccaatt

SEQ ID NO: 66853 - DNA, 15 bp, Homo sapiens
actgaaagctccaat

SEQ ID NO: 66854 - DNA, 15 bp, Homo sapiens
cactgaaagctccaa

SEQ ID NO: 66855 - DNA, 15 bp, Homo sapiens
acactgaaagctcca

SEQ ID NO: 66856 - DNA, 15 bp, Homo sapiens
aacactgaaagctcc

SEQ ID NO: 66857 - DNA, 15 bp, Homo sapiens
caacactgaaagctc

SEQ ID NO: 66858 - DNA, 15 bp, Homo sapiens
ccaacactgaaagct

SEQ ID NO: 66859 - DNA, 15 bp, Homo sapiens
gccaacactgaaagc

SEQ ID NO: 66860 - DNA, 15 bp, Homo sapiens
ggccaacactgaaag

SEQ ID NO: 66861 - DNA, 15 bp, Homo sapiens
tggccaacactgaaa

SEQ ID NO: 66862 - DNA, 15 bp, Homo sapiens
ctggccaacactgaa

SEQ ID NO: 66863 - DNA, 15 bp, Homo sapiens
cctggccaacactga

SEQ ID NO: 66864 - DNA, 15 bp, Homo sapiens
gcctggccaacactg

SEQ ID NO: 66865 - DNA, 15 bp, Homo sapiens
agcctggccaacact

SEQ ID NO: 66866 - DNA, 15 bp, Homo sapiens
cagcctggccaacac

SEQ ID NO: 66867 - DNA, 15 bp, Homo sapiens
gcagcctggccaaca

SEQ ID NO: 66868 - DNA, 15 bp, Homo sapiens
ggcagcctggccaac

SEQ ID NO: 66869 - DNA, 15 bp, Homo sapiens
gggcagcctggccaa

SEQ ID NO: 66870 - DNA, 15 bp, Homo sapiens
ggggcagcctggcca

SEQ ID NO: 66871 - DNA, 15 bp, Homo sapiens
tggggcagcctggcc

SEQ ID NO: 66872 - DNA, 15 bp, Homo sapiens
atggggcagcctggc

SEQ ID NO: 66873 - DNA, 15 bp, Homo sapiens
catggggcagcctgg

SEQ ID NO: 66874 - DNA, 15 bp, Homo sapiens
acatggggcagcctg

SEQ ID NO: 66875 - DNA, 15 bp, Homo sapiens
tacatggggcagcct

SEQ ID NO: 66876 - DNA, 15 bp, Homo sapiens
atacatggggcagcc

SEQ ID NO: 66877 - DNA, 15 bp, Homo sapiens
aatacatggggcagc

SEQ ID NO: 66878 - DNA, 15 bp, Homo sapiens
caatacatggggcag

SEQ ID NO: 66879 - DNA, 15 bp, Homo sapiens
tcaatacatggggca

SEQ ID NO: 66880 - DNA, 15 bp, Homo sapiens
atcaatacatggggc

SEQ ID NO: 66881 - DNA, 15 bp, Homo sapiens
catcaatacatgggg

SEQ ID NO: 66882 - DNA, 15 bp, Homo sapiens
gcatcaatacatggg

SEQ ID NO: 66883 - DNA, 15 bp, Homo sapiens
agcatcaatacatgg

SEQ ID NO: 66884 - DNA, 15 bp, Homo sapiens
aagcatcaatacatg

SEQ ID NO: 66885 - DNA, 15 bp, Homo sapiens
aaagcatcaatacat

SEQ ID NO: 66886 - DNA, 15 bp, Homo sapiens
aaaagcatcaataca

SEQ ID NO: 66887 - DNA, 15 bp, Homo sapiens
caaaagcatcaatac

SEQ ID NO: 66888 - DNA, 15 bp, Homo sapiens
gcaaaagcatcaata

SEQ ID NO: 66889 - DNA, 15 bp, Homo sapiens
ggcaaaagcatcaat

SEQ ID NO: 66890 - DNA, 15 bp, Homo sapiens
tggcaaaagcatcaa

SEQ ID NO: 66891 - DNA, 15 bp, Homo sapiens
ttggcaaaagcatca

SEQ ID NO: 66892 - DNA, 15 bp, Homo sapiens
attggcaaaagcatc

SEQ ID NO: 66893 - DNA, 15 bp, Homo sapiens
cattggcaaaagcat

SEQ ID NO: 66894 - DNA, 15 bp, Homo sapiens
gcattggcaaaagca

SEQ ID NO: 66895 - DNA, 15 bp, Homo sapiens
tgcattggcaaaagc

SEQ ID NO: 66896 - DNA, 15 bp, Homo sapiens
ttgcattggcaaaag

SEQ ID NO: 66897 - DNA, 15 bp, Homo sapiens
cttgcattggcaaaa

SEQ ID NO: 66898 - DNA, 15 bp, Homo sapiens
tcttgcattggcaaa

SEQ ID NO: 66899 - DNA, 15 bp, Homo sapiens
ctcttgcattggcaa

SEQ ID NO: 66900 - DNA, 15 bp, Homo sapiens
cctcttgcattggca

SEQ ID NO: 66901 - DNA, 15 bp, Homo sapiens
tcctcttgcattggc

SEQ ID NO: 66902 - DNA, 15 bp, Homo sapiens
ctcctcttgcattgg

SEQ ID NO: 66903 - DNA, 15 bp, Homo sapiens
gctcctcttgcattg

SEQ ID NO: 66904 - DNA, 15 bp, Homo sapiens
tgctcctcttgcatt

SEQ ID NO: 66905 - DNA, 15 bp, Homo sapiens
ctgctcctcttgcat

SEQ ID NO: 66906 - DNA, 15 bp, Homo sapiens
gctgctcctcttgca

SEQ ID NO: 66907 - DNA, 15 bp, Homo sapiens
tgctgctcctcttgc

SEQ ID NO: 66908 - DNA, 15 bp, Homo sapiens
atgctgctcctcttg

SEQ ID NO: 66909 - DNA, 15 bp, Homo sapiens
tatgctgctcctctt

SEQ ID NO: 66910 - DNA, 15 bp, Homo sapiens
atatgctgctcctct

SEQ ID NO: 66911 - DNA, 15 bp, Homo sapiens
catatgctgctcctc

SEQ ID NO: 66912 - DNA, 15 bp, Homo sapiens
acatatgctgctcct

SEQ ID NO: 66913 - DNA, 15 bp, Homo sapiens
cacatatgctgctcc

SEQ ID NO: 66914 - DNA, 15 bp, Homo sapiens
tcacatatgctgctc

SEQ ID NO: 66915 - DNA, 15 bp, Homo sapiens
atcacatatgctgct

SEQ ID NO: 66916 - DNA, 15 bp, Homo sapiens
gatcacatatgctgc

SEQ ID NO: 66917 - DNA, 15 bp, Homo sapiens
agatcacatatgctg

SEQ ID NO: 66918 - DNA, 15 bp, Homo sapiens
aagatcacatatgct

SEQ ID NO: 66919 - DNA, 15 bp, Homo sapiens
aaagatcacatatgc

SEQ ID NO: 66920 - DNA, 15 bp, Homo sapiens
caaagatcacatatg

SEQ ID NO: 66921 - DNA, 15 bp, Homo sapiens
tcaaagatcacatat

SEQ ID NO: 66922 - DNA, 15 bp, Homo sapiens
atcaaagatcacata

SEQ ID NO: 66923 - DNA, 15 bp, Homo sapiens
tatcaaagatcacat

SEQ ID NO: 66924 - DNA, 15 bp, Homo sapiens
atatcaaagatcaca

SEQ ID NO: 66925 - DNA, 15 bp, Homo sapiens
aatatcaaagatcac

SEQ ID NO: 66926 - DNA, 15 bp, Homo sapiens
taatatcaaagatca

SEQ ID NO: 66927 - DNA, 15 bp, Homo sapiens
ataatatcaaagatc

SEQ ID NO: 66928 - DNA, 15 bp, Homo sapiens
aataatatcaaagat

SEQ ID NO: 66929 - DNA, 15 bp, Homo sapiens
caataatatcaaaga

SEQ ID NO: 66930 - DNA, 15 bp, Homo sapiens
tcaataatatcaaag

SEQ ID NO: 66931 - DNA, 15 bp, Homo sapiens
atcaataatatcaaa

SEQ ID NO: 66932 - DNA, 15 bp, Homo sapiens
tatcaataatatcaa

SEQ ID NO: 66933 - DNA, 15 bp, Homo sapiens
ttatcaataatatca

SEQ ID NO: 66934 - DNA, 15 bp, Homo sapiens
attatcaataatatc

SEQ ID NO: 66935 - DNA, 15 bp, Homo sapiens
cattatcaataatat

SEQ ID NO: 66936 - DNA, 15 bp, Homo sapiens
acattatcaataata

SEQ ID NO: 66937 - DNA, 15 bp, Homo sapiens
tacattatcaataat

SEQ ID NO: 66938 - DNA, 15 bp, Homo sapiens
ttacattatcaataa

SEQ ID NO: 66939 - DNA, 15 bp, Homo sapiens
cttacattatcaata

SEQ ID NO: 66940 - DNA, 15 bp, Homo sapiens
acttacattatcaat

SEQ ID NO: 66941 - DNA, 15 bp, Homo sapiens
gacttacattatcaa

SEQ ID NO: 66942 - DNA, 15 bp, Homo sapiens
tgacttacattatca

SEQ ID NO: 66943 - DNA, 15 bp, Homo sapiens
atgacttacattatc

SEQ ID NO: 66944 - DNA, 15 bp, Homo sapiens
aatgacttacattat

SEQ ID NO: 66945 - DNA, 15 bp, Homo sapiens
aaatgacttacatta

SEQ ID NO: 66946 - DNA, 15 bp, Homo sapiens
taaatgacttacatt

SEQ ID NO: 66947 - DNA, 15 bp, Homo sapiens
ataaatgacttacat

SEQ ID NO: 66948 - DNA, 15 bp, Homo sapiens
aataaatgacttaca

SEQ ID NO: 66949 - DNA, 15 bp, Homo sapiens
taataaatgacttac

SEQ ID NO: 66950 - DNA, 15 bp, Homo sapiens
ataataaatgactta

SEQ ID NO: 66951 - DNA, 15 bp, Homo sapiens
aataataaatgactt

SEQ ID NO: 66952 - DNA, 15 bp, Homo sapiens
aaataataaatgact

SEQ ID NO: 66953 - DNA, 15 bp, Homo sapiens
aaaataataaatgac

SEQ ID NO: 66954 - DNA, 15 bp, Homo sapiens
taaaataataaatga

SEQ ID NO: 66955 - DNA, 15 bp, Homo sapiens
ctaaaataataaatg

SEQ ID NO: 66956 - DNA, 15 bp, Homo sapiens
actaaaataataaat

SEQ ID NO: 66957 - DNA, 15 bp, Homo sapiens
cactaaaataataaa

SEQ ID NO: 66958 - DNA, 15 bp, Homo sapiens
gcactaaaataataa

SEQ ID NO: 66959 - DNA, 15 bp, Homo sapiens
ggcactaaaataata

SEQ ID NO: 66960 - DNA, 15 bp, Homo sapiens
tggcactaaaataat

SEQ ID NO: 66961 - DNA, 15 bp, Homo sapiens
ttggcactaaaataa

SEQ ID NO: 66962 - DNA, 15 bp, Homo sapiens
tttggcactaaaata

SEQ ID NO: 66963 - DNA, 15 bp, Homo sapiens
ttttggcactaaaat

SEQ ID NO: 66964 - DNA, 15 bp, Homo sapiens
cttttggcactaaaa

SEQ ID NO: 66965 - DNA, 15 bp, Homo sapiens
tcttttggcactaaa

SEQ ID NO: 66966 - DNA, 15 bp, Homo sapiens
ttcttttggcactaa

SEQ ID NO: 66967 - DNA, 15 bp, Homo sapiens
cttcttttggcacta

SEQ ID NO: 66968 - DNA, 15 bp, Homo sapiens
acttcttttggcact

SEQ ID NO: 66969 - DNA, 15 bp, Homo sapiens
gacttcttttggcac

SEQ ID NO: 66970 - DNA, 15 bp, Homo sapiens
agacttcttttggca

SEQ ID NO: 66971 - DNA, 15 bp, Homo sapiens
aagacttcttttggc

SEQ ID NO: 66972 - DNA, 15 bp, Homo sapiens
aaagacttcttttgg

SEQ ID NO: 66973 - DNA, 15 bp, Homo sapiens
caaagacttcttttg

SEQ ID NO: 66974 - DNA, 15 bp, Homo sapiens
tcaaagacttctttt

SEQ ID NO: 66975 - DNA, 15 bp, Homo sapiens
ctcaaagacttcttt

SEQ ID NO: 66976 - DNA, 15 bp, Homo sapiens
gctcaaagacttctt

SEQ ID NO: 66977 - DNA, 15 bp, Homo sapiens
agctcaaagacttct

SEQ ID NO: 66978 - DNA, 15 bp, Homo sapiens
aagctcaaagacttc

SEQ ID NO: 66979 - DNA, 15 bp, Homo sapiens
caagctcaaagactt

SEQ ID NO: 66980 - DNA, 15 bp, Homo sapiens
acaagctcaaagact

SEQ ID NO: 66981 - DNA, 15 bp, Homo sapiens
tacaagctcaaagac

SEQ ID NO: 66982 - DNA, 15 bp, Homo sapiens
atacaagctcaaaga

SEQ ID NO: 66983 - DNA, 15 bp, Homo sapiens
tatacaagctcaaag

SEQ ID NO: 66984 - DNA, 15 bp, Homo sapiens
ttatacaagctcaaa

SEQ ID NO: 66985 - DNA, 15 bp, Homo sapiens
attatacaagctcaa

SEQ ID NO: 66986 - DNA, 15 bp, Homo sapiens
aattatacaagctca

SEQ ID NO: 66987 - DNA, 15 bp, Homo sapiens
taattatacaagctc

SEQ ID NO: 66988 - DNA, 15 bp, Homo sapiens
ttaattatacaagct

SEQ ID NO: 66989 - DNA, 15 bp, Homo sapiens
tttaattatacaagc

SEQ ID NO: 66990 - DNA, 15 bp, Homo sapiens
atttaattatacaag

SEQ ID NO: 66991 - DNA, 15 bp, Homo sapiens
gatttaattatacaa

SEQ ID NO: 66992 - DNA, 15 bp, Homo sapiens
agatttaattataca

SEQ ID NO: 66993 - DNA, 15 bp, Homo sapiens
cagatttaattatac

SEQ ID NO: 66994 - DNA, 15 bp, Homo sapiens
ccagatttaattata

SEQ ID NO: 66995 - DNA, 15 bp, Homo sapiens
gccagatttaattat

SEQ ID NO: 66996 - DNA, 15 bp, Homo sapiens
agccagatttaatta

SEQ ID NO: 66997 - DNA, 15 bp, Homo sapiens
aagccagatttaatt

SEQ ID NO: 66998 - DNA, 15 bp, Homo sapiens
aaagccagatttaat

SEQ ID NO: 66999 - DNA, 15 bp, Homo sapiens
taaagccagatttaa

SEQ ID NO: 67000 - DNA, 15 bp, Homo sapiens
ctaaagccagattta

SEQ ID NO: 67001 - DNA, 15 bp, Homo sapiens
actaaagccagattt

SEQ ID NO: 67002 - DNA, 15 bp, Homo sapiens
aactaaagccagatt

SEQ ID NO: 67003 - DNA, 15 bp, Homo sapiens
aaactaaagccagat

SEQ ID NO: 67004 - DNA, 15 bp, Homo sapiens
caaactaaagccaga

SEQ ID NO: 67005 - DNA, 15 bp, Homo sapiens
gcaaactaaagccag

SEQ ID NO: 67006 - DNA, 15 bp, Homo sapiens
tgcaaactaaagcca

SEQ ID NO: 67007 - DNA, 15 bp, Homo sapiens
atgcaaactaaagcc

SEQ ID NO: 67008 - DNA, 15 bp, Homo sapiens
tatgcaaactaaagc

SEQ ID NO: 67009 - DNA, 15 bp, Homo sapiens
atatgcaaactaaag

SEQ ID NO: 67010 - DNA, 15 bp, Homo sapiens
aatatgcaaactaaa

SEQ ID NO: 67011 - DNA, 15 bp, Homo sapiens
aaatatgcaaactaa

SEQ ID NO: 67012 - DNA, 15 bp, Homo sapiens
aaaatatgcaaacta

SEQ ID NO: 67013 - DNA, 15 bp, Homo sapiens
aaaaatatgcaaact

SEQ ID NO: 67014 - DNA, 15 bp, Homo sapiens
caaaaatatgcaaac

SEQ ID NO: 67015 - DNA, 15 bp, Homo sapiens
tcaaaaatatgcaaa

SEQ ID NO: 67016 - DNA, 15 bp, Homo sapiens
ttcaaaaatatgcaa

SEQ ID NO: 67017 - DNA, 15 bp, Homo sapiens
attcaaaaatatgca

SEQ ID NO: 67018 - DNA, 15 bp, Homo sapiens
gattcaaaaatatgc

SEQ ID NO: 67019 - DNA, 15 bp, Homo sapiens
tgattcaaaaatatg

SEQ ID NO: 67020 - DNA, 15 bp, Homo sapiens
ttgattcaaaaatat

SEQ ID NO: 67021 - DNA, 15 bp, Homo sapiens
gttgattcaaaaata

SEQ ID NO: 67022 - DNA, 15 bp, Homo sapiens
agttgattcaaaaat

SEQ ID NO: 67023 - DNA, 15 bp, Homo sapiens
tagttgattcaaaaa

SEQ ID NO: 67024 - DNA, 15 bp, Homo sapiens
gtagttgattcaaaa

SEQ ID NO: 67025 - DNA, 15 bp, Homo sapiens
tgtagttgattcaaa

SEQ ID NO: 67026 - DNA, 15 bp, Homo sapiens
atgtagttgattcaa

SEQ ID NO: 67027 - DNA, 15 bp, Homo sapiens
aatgtagttgattca

SEQ ID NO: 67028 - DNA, 15 bp, Homo sapiens
caatgtagttgattc

SEQ ID NO: 67029 - DNA, 15 bp, Homo sapiens
tcaatgtagttgatt

SEQ ID NO: 67030 - DNA, 15 bp, Homo sapiens
ttcaatgtagttgat

SEQ ID NO: 67031 - DNA, 15 bp, Homo sapiens
attcaatgtagttga

SEQ ID NO: 67032 - DNA, 15 bp, Homo sapiens
tattcaatgtagttg

SEQ ID NO: 67033 - DNA, 15 bp, Homo sapiens
ttattcaatgtagtt

SEQ ID NO: 67034 - DNA, 15 bp, Homo sapiens
cttattcaatgtagt

SEQ ID NO: 67035 - DNA, 15 bp, Homo sapiens
acttattcaatgtag

SEQ ID NO: 67036 - DNA, 15 bp, Homo sapiens
aacttattcaatgta

SEQ ID NO: 67037 - DNA, 15 bp, Homo sapiens
caacttattcaatgt

SEQ ID NO: 67038 - DNA, 15 bp, Homo sapiens
acaacttattcaatg

SEQ ID NO: 67039 - DNA, 15 bp, Homo sapiens
tacaacttattcaat

SEQ ID NO: 67040 - DNA, 15 bp, Homo sapiens
gtacaacttattcaa

SEQ ID NO: 67041 - DNA, 15 bp, Homo sapiens
agtacaacttattca

SEQ ID NO: 67042 - DNA, 15 bp, Homo sapiens
cagtacaacttattc

SEQ ID NO: 67043 - DNA, 15 bp, Homo sapiens
tcagtacaacttatt

SEQ ID NO: 67044 - DNA, 15 bp, Homo sapiens
gtcagtacaacttat

SEQ ID NO: 67045 - DNA, 15 bp, Homo sapiens
agtcagtacaactta

SEQ ID NO: 67046 - DNA, 15 bp, Homo sapiens
tagtcagtacaactt

SEQ ID NO: 67047 - DNA, 15 bp, Homo sapiens
ttagtcagtacaact

SEQ ID NO: 67048 - DNA, 15 bp, Homo sapiens
tttagtcagtacaac

SEQ ID NO: 67049 - DNA, 15 bp, Homo sapiens
ctttagtcagtacaa

SEQ ID NO: 67050 - DNA, 15 bp, Homo sapiens
actttagtcagtaca

SEQ ID NO: 67051 - DNA, 15 bp, Homo sapiens
cactttagtcagtac

SEQ ID NO: 67052 - DNA, 15 bp, Homo sapiens
tcactttagtcagta

SEQ ID NO: 67053 - DNA, 15 bp, Homo sapiens
gtcactttagtcagt

SEQ ID NO: 67054 - DNA, 15 bp, Homo sapiens
tgtcactttagtcag

SEQ ID NO: 67055 - DNA, 15 bp, Homo sapiens
atgtcactttagtca

SEQ ID NO: 67056 - DNA, 15 bp, Homo sapiens
aatgtcactttagtc

SEQ ID NO: 67057 - DNA, 15 bp, Homo sapiens
aaatgtcactttagt

SEQ ID NO: 67058 - DNA, 15 bp, Homo sapiens
taaatgtcactttag

SEQ ID NO: 67059 - DNA, 15 bp, Homo sapiens
ttaaatgtcacttta

SEQ ID NO: 67060 - DNA, 15 bp, Homo sapiens
attaaatgtcacttt

SEQ ID NO: 67061 - DNA, 15 bp, Homo sapiens
aattaaatgtcactt

SEQ ID NO: 67062 - DNA, 15 bp, Homo sapiens
taattaaatgtcact

SEQ ID NO: 67063 - DNA, 15 bp, Homo sapiens
ataattaaatgtcac

SEQ ID NO: 67064 - DNA, 15 bp, Homo sapiens
tataattaaatgtca

SEQ ID NO: 67065 - DNA, 15 bp, Homo sapiens
atataattaaatgtc

SEQ ID NO: 67066 - DNA, 15 bp, Homo sapiens
catataattaaatgt

SEQ ID NO: 67067 - DNA, 15 bp, Homo sapiens
tcatataattaaatg

SEQ ID NO: 67068 - DNA, 15 bp, Homo sapiens
ttcatataattaaat

SEQ ID NO: 67069 - DNA, 15 bp, Homo sapiens
tttcatataattaaa

SEQ ID NO: 67070 - DNA, 15 bp, Homo sapiens
atttcatataattaa

SEQ ID NO: 67071 - DNA, 15 bp, Homo sapiens
catttcatataatta

SEQ ID NO: 67072 - DNA, 15 bp, Homo sapiens
tcatttcatataatt

SEQ ID NO: 67073 - DNA, 15 bp, Homo sapiens
ttcatttcatataat

SEQ ID NO: 67074 - DNA, 15 bp, Homo sapiens
attcatttcatataa

SEQ ID NO: 67075 - DNA, 15 bp, Homo sapiens
cattcatttcatata

SEQ ID NO: 67076 - DNA, 15 bp, Homo sapiens
tcattcatttcatat

SEQ ID NO: 67077 - DNA, 15 bp, Homo sapiens
gtcattcatttcata

SEQ ID NO: 67078 - DNA, 15 bp, Homo sapiens
ggtcattcatttcat

SEQ ID NO: 67079 - DNA, 15 bp, Homo sapiens
aggtcattcatttca

SEQ ID NO: 67080 - DNA, 15 bp, Homo sapiens
caggtcattcatttc

SEQ ID NO: 67081 - DNA, 15 bp, Homo sapiens
acaggtcattcattt

SEQ ID NO: 67082 - DNA, 15 bp, Homo sapiens
aacaggtcattcatt

SEQ ID NO: 67083 - DNA, 15 bp, Homo sapiens
taacaggtcattcat

SEQ ID NO: 67084 - DNA, 15 bp, Homo sapiens
ctaacaggtcattca

SEQ ID NO: 67085 - DNA, 15 bp, Homo sapiens
actaacaggtcattc

SEQ ID NO: 67086 - DNA, 15 bp, Homo sapiens
tactaacaggtcatt

SEQ ID NO: 67087 - DNA, 15 bp, Homo sapiens
ttactaacaggtcat

SEQ ID NO: 67088 - DNA, 15 bp, Homo sapiens
attactaacaggtca

SEQ ID NO: 67089 - DNA, 15 bp, Homo sapiens
tattactaacaggtc

SEQ ID NO: 67090 - DNA, 15 bp, Homo sapiens
ttattactaacaggt

SEQ ID NO: 67091 - DNA, 15 bp, Homo sapiens
tttattactaacagg

SEQ ID NO: 67092 - DNA, 15 bp, Homo sapiens
atttattactaacag

SEQ ID NO: 67093 - DNA, 15 bp, Homo sapiens
catttattactaaca

SEQ ID NO: 67094 - DNA, 15 bp, Homo sapiens
tcatttattactaac

SEQ ID NO: 67095 - DNA, 15 bp, Homo sapiens
ttcatttattactaa

SEQ ID NO: 67096 - DNA, 15 bp, Homo sapiens
tttcatttattacta

SEQ ID NO: 67097 - DNA, 15 bp, Homo sapiens
ctttcatttattact

SEQ ID NO: 67098 - DNA, 15 bp, Homo sapiens
tctttcatttattac

SEQ ID NO: 67099 - DNA, 15 bp, Homo sapiens
ttctttcatttatta

SEQ ID NO: 67100 - DNA, 15 bp, Homo sapiens
tttctttcatttatt

SEQ ID NO: 67101 - DNA, 15 bp, Homo sapiens
ttttctttcatttat

SEQ ID NO: 67102 - DNA, 15 bp, Homo sapiens
attttctttcattta

SEQ ID NO: 67103 - DNA, 15 bp, Homo sapiens
tattttctttcattt

SEQ ID NO: 67104 - DNA, 15 bp, Homo sapiens
gtattttctttcatt

SEQ ID NO: 67105 - DNA, 15 bp, Homo sapiens
ggtattttctttcat

SEQ ID NO: 67106 - DNA, 15 bp, Homo sapiens
aggtattttctttca

SEQ ID NO: 67107 - DNA, 15 bp, Homo sapiens
gaggtattttctttc

SEQ ID NO: 67108 - DNA, 15 bp, Homo sapiens
agaggtattttcttt

SEQ ID NO: 67109 - DNA, 15 bp, Homo sapiens
aagaggtattttctt

SEQ ID NO: 67110 - DNA, 15 bp, Homo sapiens
taagaggtattttct

SEQ ID NO: 67111 - DNA, 15 bp, Homo sapiens
ataagaggtattttc

SEQ ID NO: 67112 - DNA, 15 bp, Homo sapiens
aataagaggtatttt

SEQ ID NO: 67113 - DNA, 15 bp, Homo sapiens
taataagaggtattt

SEQ ID NO: 67114 - DNA, 15 bp, Homo sapiens
ttaataagaggtatt

SEQ ID NO: 67115 - DNA, 15 bp, Homo sapiens
attaataagaggtat

SEQ ID NO: 67116 - DNA, 15 bp, Homo sapiens
tattaataagaggta

SEQ ID NO: 67117 - DNA, 15 bp, Homo sapiens
atattaataagaggt

SEQ ID NO: 67118 - DNA, 15 bp, Homo sapiens
aatattaataagagg

SEQ ID NO: 67119 - DNA, 15 bp, Homo sapiens
aaatattaataagag

SEQ ID NO: 67120 - DNA, 15 bp, Homo sapiens
aaaatattaataaga

SEQ ID NO: 67121 - DNA, 15 bp, Homo sapiens
aaaaatattaataag

SEQ ID NO: 67122 - DNA, 15 bp, Homo sapiens
aaaaaatattaataa

SEQ ID NO: 67123 - DNA, 15 bp, Homo sapiens
taaaaaatattaata

SEQ ID NO: 67124 - DNA, 15 bp, Homo sapiens
ttaaaaaatattaat

SEQ ID NO: 67125 - DNA, 15 bp, Homo sapiens
tttaaaaaatattaa

SEQ ID NO: 67126 - DNA, 15 bp, Homo sapiens
atttaaaaaatatta

SEQ ID NO: 67127 - DNA, 15 bp, Homo sapiens
catttaaaaaatatt

SEQ ID NO: 67128 - DNA, 15 bp, Homo sapiens
acatttaaaaaatat

SEQ ID NO: 67129 - DNA, 15 bp, Homo sapiens
tacatttaaaaaata

SEQ ID NO: 67130 - DNA, 15 bp, Homo sapiens
atacatttaaaaaat

SEQ ID NO: 67131 - DNA, 15 bp, Homo sapiens
gatacatttaaaaaa

SEQ ID NO: 67132 - DNA, 15 bp, Homo sapiens
agatacatttaaaaa

SEQ ID NO: 67133 - DNA, 15 bp, Homo sapiens
aagatacatttaaaa

SEQ ID NO: 67134 - DNA, 15 bp, Homo sapiens
aaagatacatttaaa

SEQ ID NO: 67135 - DNA, 15 bp, Homo sapiens
taaagatacatttaa

SEQ ID NO: 67136 - DNA, 15 bp, Homo sapiens
ctaaagatacattta

SEQ ID NO: 67137 - DNA, 15 bp, Homo sapiens
tctaaagatacattt

SEQ ID NO: 67138 - DNA, 15 bp, Homo sapiens
atctaaagatacatt

SEQ ID NO: 67139 - DNA, 15 bp, Homo sapiens
tatctaaagatacat

SEQ ID NO: 67140 - DNA, 15 bp, Homo sapiens
ttatctaaagataca

SEQ ID NO: 67141 - DNA, 15 bp, Homo sapiens
attatctaaagatac

SEQ ID NO: 67142 - DNA, 15 bp, Homo sapiens
tattatctaaagata

SEQ ID NO: 67143 - DNA, 15 bp, Homo sapiens
atattatctaaagat

SEQ ID NO: 67144 - DNA, 15 bp, Homo sapiens
tatattatctaaaga

SEQ ID NO: 67145 - DNA, 15 bp, Homo sapiens
ttatattatctaaag

SEQ ID NO: 67146 - DNA, 15 bp, Homo sapiens
attatattatctaaa

SEQ ID NO: 67147 - DNA, 15 bp, Homo sapiens
tattatattatctaa

SEQ ID NO: 67148 - DNA, 15 bp, Homo sapiens
ttattatattatcta

SEQ ID NO: 67149 - DNA, 15 bp, Homo sapiens
attattatattatct

SEQ ID NO: 67150 - DNA, 15 bp, Homo sapiens
tattattatattatc

SEQ ID NO: 67151 - DNA, 15 bp, Homo sapiens
gtattattatattat

SEQ ID NO: 67152 - DNA, 15 bp, Homo sapiens
agtattattatatta

SEQ ID NO: 67153 - DNA, 15 bp, Homo sapiens
cagtattattatatt

SEQ ID NO: 67154 - DNA, 15 bp, Homo sapiens
tcagtattattatat

SEQ ID NO: 67155 - DNA, 15 bp, Homo sapiens
atcagtattattata

SEQ ID NO: 67156 - DNA, 15 bp, Homo sapiens
gatcagtattattat

SEQ ID NO: 67157 - DNA, 15 bp, Homo sapiens
agatcagtattatta

SEQ ID NO: 67158 - DNA, 15 bp, Homo sapiens
gagatcagtattatt

SEQ ID NO: 67159 - DNA, 15 bp, Homo sapiens
tgagatcagtattat

SEQ ID NO: 67160 - DNA, 15 bp, Homo sapiens
atgagatcagtatta

SEQ ID NO: 67161 - DNA, 15 bp, Homo sapiens
aatgagatcagtatt

SEQ ID NO: 67162 - DNA, 15 bp, Homo sapiens
aaatgagatcagtat

SEQ ID NO: 67163 - DNA, 15 bp, Homo sapiens
aaaatgagatcagta

SEQ ID NO: 67164 - DNA, 15 bp, Homo sapiens
caaaatgagatcagt

SEQ ID NO: 67165 - DNA, 15 bp, Homo sapiens
ccaaaatgagatcag

SEQ ID NO: 67166 - DNA, 15 bp, Homo sapiens
tccaaaatgagatca

SEQ ID NO: 67167 - DNA, 15 bp, Homo sapiens
ttccaaaatgagatc

SEQ ID NO: 67168 - DNA, 15 bp, Homo sapiens
tttccaaaatgagat

SEQ ID NO: 67169 - DNA, 15 bp, Homo sapiens
ttttccaaaatgaga

SEQ ID NO: 67170 - DNA, 15 bp, Homo sapiens
cttttccaaaatgag

SEQ ID NO: 67171 - DNA, 15 bp, Homo sapiens
ccttttccaaaatga

SEQ ID NO: 67172 - DNA, 15 bp, Homo sapiens
tccttttccaaaatg

SEQ ID NO: 67173 - DNA, 15 bp, Homo sapiens
gtccttttccaaaat

SEQ ID NO: 67174 - DNA, 15 bp, Homo sapiens
tgtccttttccaaaa

SEQ ID NO: 67175 - DNA, 15 bp, Homo sapiens
atgtccttttccaaa

SEQ ID NO: 67176 - DNA, 15 bp, Homo sapiens
gatgtccttttccaa

SEQ ID NO: 67177 - DNA, 15 bp, Homo sapiens
agatgtccttttcca

SEQ ID NO: 67178 - DNA, 15 bp, Homo sapiens
cagatgtccttttcc

SEQ ID NO: 67179 - DNA, 15 bp, Homo sapiens
gcagatgtccttttc

SEQ ID NO: 67180 - DNA, 15 bp, Homo sapiens
tgcagatgtcctttt

SEQ ID NO: 67181 - DNA, 15 bp, Homo sapiens
gtgcagatgtccttt

SEQ ID NO: 67182 - DNA, 15 bp, Homo sapiens
agtgcagatgtcctt

SEQ ID NO: 67183 - DNA, 15 bp, Homo sapiens
tagtgcagatgtcct

SEQ ID NO: 67184 - DNA, 15 bp, Homo sapiens
ctagtgcagatgtcc

SEQ ID NO: 67185 - DNA, 15 bp, Homo sapiens
actagtgcagatgtc

SEQ ID NO: 67186 - DNA, 15 bp, Homo sapiens
cactagtgcagatgt

SEQ ID NO: 67187 - DNA, 15 bp, Homo sapiens
gcactagtgcagatg

SEQ ID NO: 67188 - DNA, 15 bp, Homo sapiens
tgcactagtgcagat

SEQ ID NO: 67189 - DNA, 15 bp, Homo sapiens
ctgcactagtgcaga

SEQ ID NO: 67190 - DNA, 15 bp, Homo sapiens
tctgcactagtgcag

SEQ ID NO: 67191 - DNA, 15 bp, Homo sapiens
ctctgcactagtgca

SEQ ID NO: 67192 - DNA, 15 bp, Homo sapiens
gctctgcactagtgc

SEQ ID NO: 67193 - DNA, 15 bp, Homo sapiens
tgctctgcactagtg

SEQ ID NO: 67194 - DNA, 15 bp, Homo sapiens
ttgctctgcactagt

SEQ ID NO: 67195 - DNA, 15 bp, Homo sapiens
tttgctctgcactag

SEQ ID NO: 67196 - DNA, 15 bp, Homo sapiens
ctttgctctgcacta

SEQ ID NO: 67197 - DNA, 15 bp, Homo sapiens
tctttgctctgcact

SEQ ID NO: 67198 - DNA, 15 bp, Homo sapiens
gtctttgctctgcac

SEQ ID NO: 67199 - DNA, 15 bp, Homo sapiens
cgtctttgctctgca

SEQ ID NO: 67200 - DNA, 15 bp, Homo sapiens
acgtctttgctctgc

SEQ ID NO: 67201 - DNA, 15 bp, Homo sapiens
aacgtctttgctctg

SEQ ID NO: 67202 - DNA, 15 bp, Homo sapiens
aaacgtctttgctct

SEQ ID NO: 67203 - DNA, 15 bp, Homo sapiens
gaaacgtctttgctc

SEQ ID NO: 67204 - DNA, 15 bp, Homo sapiens
agaaacgtctttgct

SEQ ID NO: 67205 - DNA, 15 bp, Homo sapiens
gagaaacgtctttgc

SEQ ID NO: 67206 - DNA, 15 bp, Homo sapiens
agagaaacgtctttg

SEQ ID NO: 67207 - DNA, 15 bp, Homo sapiens
aagagaaacgtcttt

SEQ ID NO: 67208 - DNA, 15 bp, Homo sapiens
gaagagaaacgtctt

SEQ ID NO: 67209 - DNA, 15 bp, Homo sapiens
ggaagagaaacgtct

SEQ ID NO: 67210 - DNA, 15 bp, Homo sapiens
aggaagagaaacgtc

SEQ ID NO: 67211 - DNA, 15 bp, Homo sapiens
taggaagagaaacgt

SEQ ID NO: 67212 - DNA, 15 bp, Homo sapiens
ctaggaagagaaacg

SEQ ID NO: 67213 - DNA, 15 bp, Homo sapiens
actaggaagagaaac

SEQ ID NO: 67214 - DNA, 15 bp, Homo sapiens
aactaggaagagaaa

SEQ ID NO: 67215 - DNA, 15 bp, Homo sapiens
aaactaggaagagaa

SEQ ID NO: 67216 - DNA, 15 bp, Homo sapiens
aaaactaggaagaga

SEQ ID NO: 67217 - DNA, 15 bp, Homo sapiens
aaaaactaggaagag

SEQ ID NO: 67218 - DNA, 15 bp, Homo sapiens
taaaaactaggaaga

SEQ ID NO: 67219 - DNA, 15 bp, Homo sapiens
ataaaaactaggaag

SEQ ID NO: 67220 - DNA, 15 bp, Homo sapiens
gataaaaactaggaa

SEQ ID NO: 67221 - DNA, 15 bp, Homo sapiens
agataaaaactagga

SEQ ID NO: 67222 - DNA, 15 bp, Homo sapiens
aagataaaaactagg

SEQ ID NO: 67223 - DNA, 15 bp, Homo sapiens
aaagataaaaactag

SEQ ID NO: 67224 - DNA, 15 bp, Homo sapiens
aaaagataaaaacta

SEQ ID NO: 67225 - DNA, 15 bp, Homo sapiens
aaaaagataaaaact

SEQ ID NO: 67226 - DNA, 15 bp, Homo sapiens
gaaaaagataaaaac

SEQ ID NO: 67227 - DNA, 15 bp, Homo sapiens
tgaaaaagataaaaa

SEQ ID NO: 67228 - DNA, 15 bp, Homo sapiens
gtgaaaaagataaaa

SEQ ID NO: 67229 - DNA, 15 bp, Homo sapiens
agtgaaaaagataaa

SEQ ID NO: 67230 - DNA, 15 bp, Homo sapiens
aagtgaaaaagataa

SEQ ID NO: 67231 - DNA, 15 bp, Homo sapiens
aaagtgaaaaagata

SEQ ID NO: 67232 - DNA, 15 bp, Homo sapiens
gaaagtgaaaaagat

SEQ ID NO: 67233 - DNA, 15 bp, Homo sapiens
tgaaagtgaaaaaga

SEQ ID NO: 67234 - DNA, 15 bp, Homo sapiens
atgaaagtgaaaaag

SEQ ID NO: 67235 - DNA, 15 bp, Homo sapiens
catgaaagtgaaaaa

SEQ ID NO: 67236 - DNA, 15 bp, Homo sapiens
acatgaaagtgaaaa

SEQ ID NO: 67237 - DNA, 15 bp, Homo sapiens
aacatgaaagtgaaa

SEQ ID NO: 67238 - DNA, 15 bp, Homo sapiens
caacatgaaagtgaa

SEQ ID NO: 67239 - DNA, 15 bp, Homo sapiens
acaacatgaaagtga

SEQ ID NO: 67240 - DNA, 15 bp, Homo sapiens
tacaacatgaaagtg

SEQ ID NO: 67241 - DNA, 15 bp, Homo sapiens
ctacaacatgaaagt

SEQ ID NO: 67242 - DNA, 15 bp, Homo sapiens
gctacaacatgaaag

SEQ ID NO: 67243 - DNA, 15 bp, Homo sapiens
ggctacaacatgaaa

SEQ ID NO: 67244 - DNA, 15 bp, Homo sapiens
tggctacaacatgaa

SEQ ID NO: 67245 - DNA, 15 bp, Homo sapiens
ctggctacaacatga

SEQ ID NO: 67246 - DNA, 15 bp, Homo sapiens
tctggctacaacatg

SEQ ID NO: 67247 - DNA, 15 bp, Homo sapiens
gtctggctacaacat

SEQ ID NO: 67248 - DNA, 15 bp, Homo sapiens
agtctggctacaaca

SEQ ID NO: 67249 - DNA, 15 bp, Homo sapiens
cagtctggctacaac

SEQ ID NO: 67250 - DNA, 15 bp, Homo sapiens
tcagtctggctacaa

SEQ ID NO: 67251 - DNA, 15 bp, Homo sapiens
ctcagtctggctaca

SEQ ID NO: 67252 - DNA, 15 bp, Homo sapiens
tctcagtctggctac

SEQ ID NO: 67253 - DNA, 15 bp, Homo sapiens
ttctcagtctggcta

SEQ ID NO: 67254 - DNA, 15 bp, Homo sapiens
attctcagtctggct

SEQ ID NO: 67255 - DNA, 15 bp, Homo sapiens
gattctcagtctggc

SEQ ID NO: 67256 - DNA, 15 bp, Homo sapiens
agattctcagtctgg

SEQ ID NO: 67257 - DNA, 15 bp, Homo sapiens
aagattctcagtctg

SEQ ID NO: 67258 - DNA, 15 bp, Homo sapiens
taagattctcagtct

SEQ ID NO: 67259 - DNA, 15 bp, Homo sapiens
ataagattctcagtc

SEQ ID NO: 67260 - DNA, 15 bp, Homo sapiens
cataagattctcagt

SEQ ID NO: 67261 - DNA, 15 bp, Homo sapiens
tcataagattctcag

SEQ ID NO: 67262 - DNA, 15 bp, Homo sapiens
atcataagattctca

SEQ ID NO: 67263 - DNA, 15 bp, Homo sapiens
aatcataagattctc

SEQ ID NO: 67264 - DNA, 15 bp, Homo sapiens
aaatcataagattct

SEQ ID NO: 67265 - DNA, 15 bp, Homo sapiens
gaaatcataagattc

SEQ ID NO: 67266 - DNA, 15 bp, Homo sapiens
agaaatcataagatt

SEQ ID NO: 67267 - DNA, 15 bp, Homo sapiens
tagaaatcataagat

SEQ ID NO: 67268 - DNA, 15 bp, Homo sapiens
atagaaatcataaga

SEQ ID NO: 67269 - DNA, 15 bp, Homo sapiens
tatagaaatcataag

SEQ ID NO: 67270 - DNA, 15 bp, Homo sapiens
atatagaaatcataa

SEQ ID NO: 67271 - DNA, 15 bp, Homo sapiens
catatagaaatcata

SEQ ID NO: 67272 - DNA, 15 bp, Homo sapiens
ccatatagaaatcat

SEQ ID NO: 67273 - DNA, 15 bp, Homo sapiens
cccatatagaaatca

SEQ ID NO: 67274 - DNA, 15 bp, Homo sapiens
tcccatatagaaatc

SEQ ID NO: 67275 - DNA, 15 bp, Homo sapiens
atcccatatagaaat

SEQ ID NO: 67276 - DNA, 15 bp, Homo sapiens
catcccatatagaaa

SEQ ID NO: 67277 - DNA, 15 bp, Homo sapiens
ccatcccatatagaa

SEQ ID NO: 67278 - DNA, 15 bp, Homo sapiens
cccatcccatataga

SEQ ID NO: 67279 - DNA, 15 bp, Homo sapiens
ccccatcccatatag

SEQ ID NO: 67280 - DNA, 15 bp, Homo sapiens
cccccatcccatata

SEQ ID NO: 67281 - DNA, 15 bp, Homo sapiens
ccccccatcccatat

SEQ ID NO: 67282 - DNA, 15 bp, Homo sapiens
accccccatcccata

SEQ ID NO: 67283 - DNA, 15 bp, Homo sapiens
taccccccatcccat

SEQ ID NO: 67284 - DNA, 15 bp, Homo sapiens
ctaccccccatccca

SEQ ID NO: 67285 - DNA, 15 bp, Homo sapiens
tctaccccccatccc

SEQ ID NO: 67286 - DNA, 15 bp, Homo sapiens
atctaccccccatcc

SEQ ID NO: 67287 - DNA, 15 bp, Homo sapiens
tatctaccccccatc

SEQ ID NO: 67288 - DNA, 15 bp, Homo sapiens
ttatctaccccccat

SEQ ID NO: 67289 - DNA, 15 bp, Homo sapiens
tttatctacccccca

SEQ ID NO: 67290 - DNA, 15 bp, Homo sapiens
atttatctacccccc

SEQ ID NO: 67291 - DNA, 15 bp, Homo sapiens
aatttatctaccccc

SEQ ID NO: 67292 - DNA, 15 bp, Homo sapiens
taatttatctacccc

SEQ ID NO: 67293 - DNA, 15 bp, Homo sapiens
ataatttatctaccc

SEQ ID NO: 67294 - DNA, 15 bp, Homo sapiens
gataatttatctacc

SEQ ID NO: 67295 - DNA, 15 bp, Homo sapiens
cgataatttatctac

SEQ ID NO: 67296 - DNA, 15 bp, Homo sapiens
ccgataatttatcta

SEQ ID NO: 67297 - DNA, 15 bp, Homo sapiens
accgataatttatct

SEQ ID NO: 67298 - DNA, 15 bp, Homo sapiens
caccgataatttatc

SEQ ID NO: 67299 - DNA, 15 bp, Homo sapiens
ccaccgataatttat

SEQ ID NO: 67300 - DNA, 15 bp, Homo sapiens
cccaccgataattta

SEQ ID NO: 67301 - DNA, 15 bp, Homo sapiens
tcccaccgataattt

SEQ ID NO: 67302 - DNA, 15 bp, Homo sapiens
gtcccaccgataatt

SEQ ID NO: 67303 - DNA, 15 bp, Homo sapiens
ggtcccaccgataat

SEQ ID NO: 67304 - DNA, 15 bp, Homo sapiens
tggtcccaccgataa

SEQ ID NO: 67305 - DNA, 15 bp, Homo sapiens
ttggtcccaccgata

SEQ ID NO: 67306 - DNA, 15 bp, Homo sapiens
tttggtcccaccgat

SEQ ID NO: 67307 - DNA, 15 bp, Homo sapiens
ttttggtcccaccga

SEQ ID NO: 67308 - DNA, 15 bp, Homo sapiens
attttggtcccaccg

SEQ ID NO: 67309 - DNA, 15 bp, Homo sapiens
aattttggtcccacc

SEQ ID NO: 67310 - DNA, 15 bp, Homo sapiens
caattttggtcccac

SEQ ID NO: 67311 - DNA, 15 bp, Homo sapiens
tcaattttggtccca

SEQ ID NO: 67312 - DNA, 15 bp, Homo sapiens
gtcaattttggtccc

SEQ ID NO: 67313 - DNA, 15 bp, Homo sapiens
tgtcaattttggtcc

SEQ ID NO: 67314 - DNA, 15 bp, Homo sapiens
ctgtcaattttggtc

SEQ ID NO: 67315 - DNA, 15 bp, Homo sapiens
actgtcaattttggt

SEQ ID NO: 67316 - DNA, 15 bp, Homo sapiens
tactgtcaattttgg

SEQ ID NO: 67317 - DNA, 15 bp, Homo sapiens
atactgtcaattttg

SEQ ID NO: 67318 - DNA, 15 bp, Homo sapiens
tatactgtcaatttt

SEQ ID NO: 67319 - DNA, 15 bp, Homo sapiens
atatactgtcaattt

SEQ ID NO: 67320 - DNA, 15 bp, Homo sapiens
aatatactgtcaatt

SEQ ID NO: 67321 - DNA, 15 bp, Homo sapiens
aaatatactgtcaat

SEQ ID NO: 67322 - DNA, 15 bp, Homo sapiens
aaaatatactgtcaa

SEQ ID NO: 67323 - DNA, 15 bp, Homo sapiens
caaaatatactgtca

SEQ ID NO: 67324 - DNA, 15 bp, Homo sapiens
gcaaaatatactgtc

SEQ ID NO: 67325 - DNA, 15 bp, Homo sapiens
agcaaaatatactgt

SEQ ID NO: 67326 - DNA, 15 bp, Homo sapiens
cagcaaaatatactg

SEQ ID NO: 67327 - DNA, 15 bp, Homo sapiens
acagcaaaatatact

SEQ ID NO: 67328 - DNA, 15 bp, Homo sapiens
cacagcaaaatatac

SEQ ID NO: 67329 - DNA, 15 bp, Homo sapiens
ccacagcaaaatata

SEQ ID NO: 67330 - DNA, 15 bp, Homo sapiens
cccacagcaaaatat

SEQ ID NO: 67331 - DNA, 15 bp, Homo sapiens
acccacagcaaaata

SEQ ID NO: 67332 - DNA, 15 bp, Homo sapiens
aacccacagcaaaat

SEQ ID NO: 67333 - DNA, 15 bp, Homo sapiens
gaacccacagcaaaa

SEQ ID NO: 67334 - DNA, 15 bp, Homo sapiens
ggaacccacagcaaa

SEQ ID NO: 67335 - DNA, 15 bp, Homo sapiens
gggaacccacagcaa

SEQ ID NO: 67336 - DNA, 15 bp, Homo sapiens
ggggaacccacagca

SEQ ID NO: 67337 - DNA, 15 bp, Homo sapiens
gggggaacccacagc

SEQ ID NO: 67338 - DNA, 15 bp, Homo sapiens
agggggaacccacag

SEQ ID NO: 67339 - DNA, 15 bp, Homo sapiens
gagggggaacccaca

SEQ ID NO: 67340 - DNA, 15 bp, Homo sapiens
agagggggaacccac

SEQ ID NO: 67341 - DNA, 15 bp, Homo sapiens
gagagggggaaccca

SEQ ID NO: 67342 - DNA, 15 bp, Homo sapiens
ggagagggggaaccc

SEQ ID NO: 67343 - DNA, 15 bp, Homo sapiens
tggagagggggaacc

SEQ ID NO: 67344 - DNA, 15 bp, Homo sapiens
ttggagagggggaac

SEQ ID NO: 67345 - DNA, 15 bp, Homo sapiens
tttggagagggggaa

SEQ ID NO: 67346 - DNA, 15 bp, Homo sapiens
ttttggagaggggga

SEQ ID NO: 67347 - DNA, 15 bp, Homo sapiens
tttttggagaggggg

SEQ ID NO: 67348 - DNA, 15 bp, Homo sapiens
ttttttggagagggg

SEQ ID NO: 67349 - DNA, 15 bp, Homo sapiens
attttttggagaggg

SEQ ID NO: 67350 - DNA, 15 bp, Homo sapiens
aattttttggagagg

SEQ ID NO: 67351 - DNA, 15 bp, Homo sapiens
taattttttggagag

SEQ ID NO: 67352 - DNA, 15 bp, Homo sapiens
ataattttttggaga

SEQ ID NO: 67353 - DNA, 15 bp, Homo sapiens
gataattttttggag

SEQ ID NO: 67354 - DNA, 15 bp, Homo sapiens
tgataattttttgga

SEQ ID NO: 67355 - DNA, 15 bp, Homo sapiens
gtgataattttttgg

SEQ ID NO: 67356 - DNA, 15 bp, Homo sapiens
agtgataattttttg

SEQ ID NO: 67357 - DNA, 15 bp, Homo sapiens
cagtgataatttttt

SEQ ID NO: 67358 - DNA, 15 bp, Homo sapiens
gcagtgataattttt

SEQ ID NO: 67359 - DNA, 15 bp, Homo sapiens
tgcagtgataatttt

SEQ ID NO: 67360 - DNA, 15 bp, Homo sapiens
atgcagtgataattt

SEQ ID NO: 67361 - DNA, 15 bp, Homo sapiens
catgcagtgataatt

SEQ ID NO: 67362 - DNA, 15 bp, Homo sapiens
acatgcagtgataat

SEQ ID NO: 67363 - DNA, 15 bp, Homo sapiens
aacatgcagtgataa

SEQ ID NO: 67364 - DNA, 15 bp, Homo sapiens
aaacatgcagtgata

SEQ ID NO: 67365 - DNA, 15 bp, Homo sapiens
caaacatgcagtgat

SEQ ID NO: 67366 - DNA, 15 bp, Homo sapiens
ccaaacatgcagtga

SEQ ID NO: 67367 - DNA, 15 bp, Homo sapiens
accaaacatgcagtg

SEQ ID NO: 67368 - DNA, 15 bp, Homo sapiens
taccaaacatgcagt

SEQ ID NO: 67369 - DNA, 15 bp, Homo sapiens
ataccaaacatgcag

SEQ ID NO: 67370 - DNA, 15 bp, Homo sapiens
cataccaaacatgca

SEQ ID NO: 67371 - DNA, 15 bp, Homo sapiens
tcataccaaacatgc

SEQ ID NO: 67372 - DNA, 15 bp, Homo sapiens
atcataccaaacatg

SEQ ID NO: 67373 - DNA, 15 bp, Homo sapiens
aatcataccaaacat

SEQ ID NO: 67374 - DNA, 15 bp, Homo sapiens
aaatcataccaaaca

SEQ ID NO: 67375 - DNA, 15 bp, Homo sapiens
aaaatcataccaaac

SEQ ID NO: 67376 - DNA, 15 bp, Homo sapiens
taaaatcataccaaa

SEQ ID NO: 67377 - DNA, 15 bp, Homo sapiens
ttaaaatcataccaa

SEQ ID NO: 67378 - DNA, 15 bp, Homo sapiens
tttaaaatcatacca

SEQ ID NO: 67379 - DNA, 15 bp, Homo sapiens
atttaaaatcatacc

SEQ ID NO: 67380 - DNA, 15 bp, Homo sapiens
tatttaaaatcatac

SEQ ID NO: 67381 - DNA, 15 bp, Homo sapiens
ttatttaaaatcata

SEQ ID NO: 67382 - DNA, 15 bp, Homo sapiens
tttatttaaaatcat

SEQ ID NO: 67383 - DNA, 15 bp, Homo sapiens
gtttatttaaaatca

SEQ ID NO: 67384 - DNA, 15 bp, Homo sapiens
agtttatttaaaatc

SEQ ID NO: 67385 - DNA, 15 bp, Homo sapiens
tagtttatttaaaat

SEQ ID NO: 67386 - DNA, 15 bp, Homo sapiens
gtagtttatttaaaa

SEQ ID NO: 67387 - DNA, 15 bp, Homo sapiens
tgtagtttatttaaa

SEQ ID NO: 67388 - DNA, 15 bp, Homo sapiens
atgtagtttatttaa

SEQ ID NO: 67389 - DNA, 15 bp, Homo sapiens
aatgtagtttattta

SEQ ID NO: 67390 - DNA, 15 bp, Homo sapiens
taatgtagtttattt

SEQ ID NO: 67391 - DNA, 15 bp, Homo sapiens
ttaatgtagtttatt

SEQ ID NO: 67392 - DNA, 15 bp, Homo sapiens
tttaatgtagtttat

SEQ ID NO: 67393 - DNA, 15 bp, Homo sapiens
atttaatgtagttta

SEQ ID NO: 67394 - DNA, 15 bp, Homo sapiens
tatttaatgtagttt

SEQ ID NO: 67395 - DNA, 15 bp, Homo sapiens
ttatttaatgtagtt

SEQ ID NO: 67396 - DNA, 15 bp, Homo sapiens
tttatttaatgtagt

SEQ ID NO: 67397 - DNA, 15 bp, Homo sapiens
gtttatttaatgtag

SEQ ID NO: 67398 - DNA, 15 bp, Homo sapiens
agtttatttaatgta

SEQ ID NO: 67399 - DNA, 15 bp, Homo sapiens
cagtttatttaatgt

SEQ ID NO: 67400 - DNA, 15 bp, Homo sapiens
tcagtttatttaatg

SEQ ID NO: 67401 - DNA, 15 bp, Homo sapiens
gtcagtttatttaat

SEQ ID NO: 67402 - DNA, 15 bp, Homo sapiens
agtcagtttatttaa

SEQ ID NO: 67403 - DNA, 15 bp, Homo sapiens
tagtcagtttattta

SEQ ID NO: 67404 - DNA, 15 bp, Homo sapiens
gtagtcagtttattt

SEQ ID NO: 67405 - DNA, 15 bp, Homo sapiens
tgtagtcagtttatt

SEQ ID NO: 67406 - DNA, 15 bp, Homo sapiens
ctgtagtcagtttat

SEQ ID NO: 67407 - DNA, 15 bp, Homo sapiens
actgtagtcagttta

SEQ ID NO: 67408 - DNA, 15 bp, Homo sapiens
cactgtagtcagttt

SEQ ID NO: 67409 - DNA, 15 bp, Homo sapiens
tcactgtagtcagtt

SEQ ID NO: 67410 - DNA, 15 bp, Homo sapiens
ttcactgtagtcagt

SEQ ID NO: 67411 - DNA, 15 bp, Homo sapiens
tttcactgtagtcag

SEQ ID NO: 67412 - DNA, 15 bp, Homo sapiens
ttttcactgtagtca

SEQ ID NO: 67413 - DNA, 15 bp, Homo sapiens
tttttcactgtagtc

SEQ ID NO: 67414 - DNA, 15 bp, Homo sapiens
ctttttcactgtagt

SEQ ID NO: 67415 - DNA, 15 bp, Homo sapiens
tctttttcactgtag

SEQ ID NO: 67416 - DNA, 15 bp, Homo sapiens
ttctttttcactgta

SEQ ID NO: 67417 - DNA, 15 bp, Homo sapiens
tttctttttcactgt

SEQ ID NO: 67418 - DNA, 15 bp, Homo sapiens
ttttctttttcactg

SEQ ID NO: 67419 - DNA, 15 bp, Homo sapiens
tttttctttttcact

SEQ ID NO: 67420 - DNA, 15 bp, Homo sapiens
ctttttctttttcac

SEQ ID NO: 67421 - DNA, 15 bp, Homo sapiens
actttttctttttca

SEQ ID NO: 67422 - DNA, 15 bp, Homo sapiens
aactttttctttttc

SEQ ID NO: 67423 - DNA, 15 bp, Homo sapiens
aaactttttcttttt

SEQ ID NO: 67424 - DNA, 15 bp, Homo sapiens
aaaactttttctttt

SEQ ID NO: 67425 - DNA, 15 bp, Homo sapiens
caaaactttttcttt

SEQ ID NO: 67426 - DNA, 15 bp, Homo sapiens
tcaaaactttttctt

SEQ ID NO: 67427 - DNA, 15 bp, Homo sapiens
gtcaaaactttttct

SEQ ID NO: 67428 - DNA, 15 bp, Homo sapiens
cgtcaaaactttttc

SEQ ID NO: 67429 - DNA, 15 bp, Homo sapiens
acgtcaaaacttttt

SEQ ID NO: 67430 - DNA, 15 bp, Homo sapiens
tacgtcaaaactttt

SEQ ID NO: 67431 - DNA, 15 bp, Homo sapiens
ttacgtcaaaacttt

SEQ ID NO: 67432 - DNA, 15 bp, Homo sapiens
tttacgtcaaaactt

SEQ ID NO: 67433 - DNA, 15 bp, Homo sapiens
ttttacgtcaaaact

SEQ ID NO: 67434 - DNA, 15 bp, Homo sapiens
tttttacgtcaaaac

SEQ ID NO: 67435 - DNA, 15 bp, Homo sapiens
ttttttacgtcaaaa

SEQ ID NO: 67436 - DNA, 15 bp, Homo sapiens
cttttttacgtcaaa

SEQ ID NO: 67437 - DNA, 15 bp, Homo sapiens
acttttttacgtcaa

SEQ ID NO: 67438 - DNA, 15 bp, Homo sapiens
tacttttttacgtca

SEQ ID NO: 67439 - DNA, 15 bp, Homo sapiens
ttacttttttacgtc

SEQ ID NO: 67440 - DNA, 15 bp, Homo sapiens
cttacttttttacgt

SEQ ID NO: 67441 - DNA, 15 bp, Homo sapiens
acttacttttttacg

SEQ ID NO: 67442 - DNA, 15 bp, Homo sapiens
gacttacttttttac

SEQ ID NO: 67443 - DNA, 15 bp, Homo sapiens
tgacttactttttta

SEQ ID NO: 67444 - DNA, 15 bp, Homo sapiens
gtgacttactttttt

SEQ ID NO: 67445 - DNA, 15 bp, Homo sapiens
agtgacttacttttt

SEQ ID NO: 67446 - DNA, 15 bp, Homo sapiens
cagtgacttactttt

SEQ ID NO: 67447 - DNA, 15 bp, Homo sapiens
gcagtgacttacttt

SEQ ID NO: 67448 - DNA, 15 bp, Homo sapiens
tgcagtgacttactt

SEQ ID NO: 67449 - DNA, 15 bp, Homo sapiens
atgcagtgacttact

SEQ ID NO: 67450 - DNA, 15 bp, Homo sapiens
aatgcagtgacttac

SEQ ID NO: 67451 - DNA, 15 bp, Homo sapiens
gaatgcagtgactta

SEQ ID NO: 67452 - DNA, 15 bp, Homo sapiens
tgaatgcagtgactt

SEQ ID NO: 67453 - DNA, 15 bp, Homo sapiens
ttgaatgcagtgact

SEQ ID NO: 67454 - DNA, 15 bp, Homo sapiens
tttgaatgcagtgac

SEQ ID NO: 67455 - DNA, 15 bp, Homo sapiens
atttgaatgcagtga

SEQ ID NO: 67456 - DNA, 15 bp, Homo sapiens
tatttgaatgcagtg

SEQ ID NO: 67457 - DNA, 15 bp, Homo sapiens
atatttgaatgcagt

SEQ ID NO: 67458 - DNA, 15 bp, Homo sapiens
aatatttgaatgcag

SEQ ID NO: 67459 - DNA, 15 bp, Homo sapiens
caatatttgaatgca

SEQ ID NO: 67460 - DNA, 15 bp, Homo sapiens
gcaatatttgaatgc

SEQ ID NO: 67461 - DNA, 15 bp, Homo sapiens
tgcaatatttgaatg

SEQ ID NO: 67462 - DNA, 15 bp, Homo sapiens
ttgcaatatttgaat

SEQ ID NO: 67463 - DNA, 15 bp, Homo sapiens
cttgcaatatttgaa

SEQ ID NO: 67464 - DNA, 15 bp, Homo sapiens
ccttgcaatatttga

SEQ ID NO: 67465 - DNA, 15 bp, Homo sapiens
accttgcaatatttg

SEQ ID NO: 67466 - DNA, 15 bp, Homo sapiens
taccttgcaatattt

SEQ ID NO: 67467 - DNA, 15 bp, Homo sapiens
ctaccttgcaatatt

SEQ ID NO: 67468 - DNA, 15 bp, Homo sapiens
gctaccttgcaatat

SEQ ID NO: 67469 - DNA, 15 bp, Homo sapiens
agctaccttgcaata

SEQ ID NO: 67470 - DNA, 15 bp, Homo sapiens
tagctaccttgcaat

SEQ ID NO: 67471 - DNA, 15 bp, Homo sapiens
ttagctaccttgcaa

SEQ ID NO: 67472 - DNA, 15 bp, Homo sapiens
cttagctaccttgca

SEQ ID NO: 67473 - DNA, 15 bp, Homo sapiens
acttagctaccttgc

SEQ ID NO: 67474 - DNA, 15 bp, Homo sapiens
cacttagctaccttg

SEQ ID NO: 67475 - DNA, 15 bp, Homo sapiens
tcacttagctacctt

SEQ ID NO: 67476 - DNA, 15 bp, Homo sapiens
ttcacttagctacct

SEQ ID NO: 67477 - DNA, 15 bp, Homo sapiens
tttcacttagctacc

SEQ ID NO: 67478 - DNA, 15 bp, Homo sapiens
atttcacttagctac

SEQ ID NO: 67479 - DNA, 15 bp, Homo sapiens
aatttcacttagcta

SEQ ID NO: 67480 - DNA, 15 bp, Homo sapiens
aaatttcacttagct

SEQ ID NO: 67481 - DNA, 15 bp, Homo sapiens
caaatttcacttagc

SEQ ID NO: 67482 - DNA, 15 bp, Homo sapiens
tcaaatttcacttag

SEQ ID NO: 67483 - DNA, 15 bp, Homo sapiens
atcaaatttcactta

SEQ ID NO: 67484 - DNA, 15 bp, Homo sapiens
gatcaaatttcactt

SEQ ID NO: 67485 - DNA, 15 bp, Homo sapiens
tgatcaaatttcact

SEQ ID NO: 67486 - DNA, 15 bp, Homo sapiens
atgatcaaatttcac

SEQ ID NO: 67487 - DNA, 15 bp, Homo sapiens
aatgatcaaatttca

SEQ ID NO: 67488 - DNA, 15 bp, Homo sapiens
aaatgatcaaatttc

SEQ ID NO: 67489 - DNA, 15 bp, Homo sapiens
taaatgatcaaattt

SEQ ID NO: 67490 - DNA, 15 bp, Homo sapiens
ttaaatgatcaaatt

SEQ ID NO: 67491 - DNA, 15 bp, Homo sapiens
attaaatgatcaaat

SEQ ID NO: 67492 - DNA, 15 bp, Homo sapiens
gattaaatgatcaaa

SEQ ID NO: 67493 - DNA, 15 bp, Homo sapiens
agattaaatgatcaa

SEQ ID NO: 67494 - DNA, 15 bp, Homo sapiens
tagattaaatgatca

SEQ ID NO: 67495 - DNA, 15 bp, Homo sapiens
ttagattaaatgatc

SEQ ID NO: 67496 - DNA, 15 bp, Homo sapiens
cttagattaaatgat

SEQ ID NO: 67497 - DNA, 15 bp, Homo sapiens
gcttagattaaatga

SEQ ID NO: 67498 - DNA, 15 bp, Homo sapiens
tgcttagattaaatg

SEQ ID NO: 67499 - DNA, 15 bp, Homo sapiens
ttgcttagattaaat

SEQ ID NO: 67500 - DNA, 15 bp, Homo sapiens
attgcttagattaaa

SEQ ID NO: 67501 - DNA, 15 bp, Homo sapiens
aattgcttagattaa

SEQ ID NO: 67502 - DNA, 15 bp, Homo sapiens
aaattgcttagatta

SEQ ID NO: 67503 - DNA, 15 bp, Homo sapiens
gaaattgcttagatt

SEQ ID NO: 67504 - DNA, 15 bp, Homo sapiens
ggaaattgcttagat

SEQ ID NO: 67505 - DNA, 15 bp, Homo sapiens
aggaaattgcttaga

SEQ ID NO: 67506 - DNA, 15 bp, Homo sapiens
aaggaaattgcttag

SEQ ID NO: 67507 - DNA, 15 bp, Homo sapiens
aaaggaaattgctta

SEQ ID NO: 67508 - DNA, 15 bp, Homo sapiens
aaaaggaaattgctt

SEQ ID NO: 67509 - DNA, 15 bp, Homo sapiens
aaaaaggaaattgct

SEQ ID NO: 67510 - DNA, 15 bp, Homo sapiens
gaaaaaggaaattgc

SEQ ID NO: 67511 - DNA, 15 bp, Homo sapiens
tgaaaaaggaaattg

SEQ ID NO: 67512 - DNA, 15 bp, Homo sapiens
atgaaaaaggaaatt

SEQ ID NO: 67513 - DNA, 15 bp, Homo sapiens
aatgaaaaaggaaat

SEQ ID NO: 67514 - DNA, 15 bp, Homo sapiens
caatgaaaaaggaaa

SEQ ID NO: 67515 - DNA, 15 bp, Homo sapiens
tcaatgaaaaaggaa

SEQ ID NO: 67516 - DNA, 15 bp, Homo sapiens
atcaatgaaaaagga

SEQ ID NO: 67517 - DNA, 15 bp, Homo sapiens
gatcaatgaaaaagg

SEQ ID NO: 67518 - DNA, 15 bp, Homo sapiens
ggatcaatgaaaaag

SEQ ID NO: 67519 - DNA, 15 bp, Homo sapiens
tggatcaatgaaaaa

SEQ ID NO: 67520 - DNA, 15 bp, Homo sapiens
ttggatcaatgaaaa

SEQ ID NO: 67521 - DNA, 15 bp, Homo sapiens
cttggatcaatgaaa

SEQ ID NO: 67522 - DNA, 15 bp, Homo sapiens
acttggatcaatgaa

SEQ ID NO: 67523 - DNA, 15 bp, Homo sapiens
gacttggatcaatga

SEQ ID NO: 67524 - DNA, 15 bp, Homo sapiens
cgacttggatcaatg

SEQ ID NO: 67525 - DNA, 15 bp, Homo sapiens
acgacttggatcaat

SEQ ID NO: 67526 - DNA, 15 bp, Homo sapiens
cacgacttggatcaa

SEQ ID NO: 67527 - DNA, 15 bp, Homo sapiens
tcacgacttggatca

SEQ ID NO: 67528 - DNA, 15 bp, Homo sapiens
ctcacgacttggatc

SEQ ID NO: 67529 - DNA, 15 bp, Homo sapiens
tctcacgacttggat

SEQ ID NO: 67530 - DNA, 15 bp, Homo sapiens
ttctcacgacttgga

SEQ ID NO: 67531 - DNA, 15 bp, Homo sapiens
tttctcacgacttgg

SEQ ID NO: 67532 - DNA, 15 bp, Homo sapiens
ttttctcacgacttg

SEQ ID NO: 67533 - DNA, 15 bp, Homo sapiens
cttttctcacgactt

SEQ ID NO: 67534 - DNA, 15 bp, Homo sapiens
acttttctcacgact

SEQ ID NO: 67535 - DNA, 15 bp, Homo sapiens
cacttttctcacgac

SEQ ID NO: 67536 - DNA, 15 bp, Homo sapiens
gcacttttctcacga

SEQ ID NO: 67537 - DNA, 15 bp, Homo sapiens
agcacttttctcacg

SEQ ID NO: 67538 - DNA, 15 bp, Homo sapiens
gagcacttttctcac

SEQ ID NO: 67539 - DNA, 15 bp, Homo sapiens
tgagcacttttctca

SEQ ID NO: 67540 - DNA, 15 bp, Homo sapiens
ctgagcacttttctc

SEQ ID NO: 67541 - DNA, 15 bp, Homo sapiens
actgagcacttttct

SEQ ID NO: 67542 - DNA, 15 bp, Homo sapiens
aactgagcacttttc

SEQ ID NO: 67543 - DNA, 15 bp, Homo sapiens
aaactgagcactttt

SEQ ID NO: 67544 - DNA, 15 bp, Homo sapiens
gaaactgagcacttt

SEQ ID NO: 67545 - DNA, 15 bp, Homo sapiens
agaaactgagcactt

SEQ ID NO: 67546 - DNA, 15 bp, Homo sapiens
cagaaactgagcact

SEQ ID NO: 67547 - DNA, 15 bp, Homo sapiens
tcagaaactgagcac

SEQ ID NO: 67548 - DNA, 15 bp, Homo sapiens
atcagaaactgagca

SEQ ID NO: 67549 - DNA, 15 bp, Homo sapiens
aatcagaaactgagc

SEQ ID NO: 67550 - DNA, 15 bp, Homo sapiens
caatcagaaactgag

SEQ ID NO: 67551 - DNA, 15 bp, Homo sapiens
acaatcagaaactga

SEQ ID NO: 67552 - DNA, 15 bp, Homo sapiens
tacaatcagaaactg

SEQ ID NO: 67553 - DNA, 15 bp, Homo sapiens
atacaatcagaaact

SEQ ID NO: 67554 - DNA, 15 bp, Homo sapiens
aatacaatcagaaac

SEQ ID NO: 67555 - DNA, 15 bp, Homo sapiens
taatacaatcagaaa

SEQ ID NO: 67556 - DNA, 15 bp, Homo sapiens
ttaatacaatcagaa

SEQ ID NO: 67557 - DNA, 15 bp, Homo sapiens
tttaatacaatcaga

SEQ ID NO: 67558 - DNA, 15 bp, Homo sapiens
ttttaatacaatcag

SEQ ID NO: 67559 - DNA, 15 bp, Homo sapiens
cttttaatacaatca

SEQ ID NO: 67560 - DNA, 15 bp, Homo sapiens
acttttaatacaatc

SEQ ID NO: 67561 - DNA, 15 bp, Homo sapiens
aacttttaatacaat

SEQ ID NO: 67562 - DNA, 15 bp, Homo sapiens
aaacttttaatacaa

SEQ ID NO: 67563 - DNA, 15 bp, Homo sapiens
taaacttttaataca

SEQ ID NO: 67564 - DNA, 15 bp, Homo sapiens
gtaaacttttaatac

SEQ ID NO: 67565 - DNA, 15 bp, Homo sapiens
tgtaaacttttaata

SEQ ID NO: 67566 - DNA, 15 bp, Homo sapiens
atgtaaacttttaat

SEQ ID NO: 67567 - DNA, 15 bp, Homo sapiens
aatgtaaacttttaa

SEQ ID NO: 67568 - DNA, 15 bp, Homo sapiens
taatgtaaactttta

SEQ ID NO: 67569 - DNA, 15 bp, Homo sapiens
ataatgtaaactttt

SEQ ID NO: 67570 - DNA, 15 bp, Homo sapiens
aataatgtaaacttt

SEQ ID NO: 67571 - DNA, 15 bp, Homo sapiens
aaataatgtaaactt

SEQ ID NO: 67572 - DNA, 15 bp, Homo sapiens
gaaataatgtaaact

SEQ ID NO: 67573 - DNA, 15 bp, Homo sapiens
agaaataatgtaaac

SEQ ID NO: 67574 - DNA, 15 bp, Homo sapiens
tagaaataatgtaaa

SEQ ID NO: 67575 - DNA, 15 bp, Homo sapiens
ttagaaataatgtaa

SEQ ID NO: 67576 - DNA, 15 bp, Homo sapiens
tttagaaataatgta

SEQ ID NO: 67577 - DNA, 15 bp, Homo sapiens
atttagaaataatgt

SEQ ID NO: 67578 - DNA, 15 bp, Homo sapiens
tatttagaaataatg

SEQ ID NO: 67579 - DNA, 15 bp, Homo sapiens
ttatttagaaataat

SEQ ID NO: 67580 - DNA, 15 bp, Homo sapiens
gttatttagaaataa

SEQ ID NO: 67581 - DNA, 15 bp, Homo sapiens
agttatttagaaata

SEQ ID NO: 67582 - DNA, 15 bp, Homo sapiens
cagttatttagaaat

SEQ ID NO: 67583 - DNA, 15 bp, Homo sapiens
gcagttatttagaaa

SEQ ID NO: 67584 - DNA, 15 bp, Homo sapiens
agcagttatttagaa

SEQ ID NO: 67585 - DNA, 15 bp, Homo sapiens
tagcagttatttaga

SEQ ID NO: 67586 - DNA, 15 bp, Homo sapiens
atagcagttatttag

SEQ ID NO: 67587 - DNA, 15 bp, Homo sapiens
tatagcagttattta

SEQ ID NO: 67588 - DNA, 15 bp, Homo sapiens
ttatagcagttattt

SEQ ID NO: 67589 - DNA, 15 bp, Homo sapiens
attatagcagttatt

SEQ ID NO: 67590 - DNA, 15 bp, Homo sapiens
gattatagcagttat

SEQ ID NO: 67591 - DNA, 15 bp, Homo sapiens
tgattatagcagtta

SEQ ID NO: 67592 - DNA, 15 bp, Homo sapiens
ttgattatagcagtt

SEQ ID NO: 67593 - DNA, 15 bp, Homo sapiens
gttgattatagcagt

SEQ ID NO: 67594 - DNA, 15 bp, Homo sapiens
ggttgattatagcag

SEQ ID NO: 67595 - DNA, 15 bp, Homo sapiens
tggttgattatagca

SEQ ID NO: 67596 - DNA, 15 bp, Homo sapiens
atggttgattatagc

SEQ ID NO: 67597 - DNA, 15 bp, Homo sapiens
aatggttgattatag

SEQ ID NO: 67598 - DNA, 15 bp, Homo sapiens
gaatggttgattata

SEQ ID NO: 67599 - DNA, 15 bp, Homo sapiens
tgaatggttgattat

SEQ ID NO: 67600 - DNA, 15 bp, Homo sapiens
ttgaatggttgatta

SEQ ID NO: 67601 - DNA, 15 bp, Homo sapiens
attgaatggttgatt

SEQ ID NO: 67602 - DNA, 15 bp, Homo sapiens
gattgaatggttgat

SEQ ID NO: 67603 - DNA, 15 bp, Homo sapiens
agattgaatggttga

SEQ ID NO: 67604 - DNA, 15 bp, Homo sapiens
aagattgaatggttg

SEQ ID NO: 67605 - DNA, 15 bp, Homo sapiens
gaagattgaatggtt

SEQ ID NO: 67606 - DNA, 15 bp, Homo sapiens
agaagattgaatggt

SEQ ID NO: 67607 - DNA, 15 bp, Homo sapiens
gagaagattgaatgg

SEQ ID NO: 67608 - DNA, 15 bp, Homo sapiens
tgagaagattgaatg

SEQ ID NO: 67609 - DNA, 15 bp, Homo sapiens
ttgagaagattgaat

SEQ ID NO: 67610 - DNA, 15 bp, Homo sapiens
attgagaagattgaa

SEQ ID NO: 67611 - DNA, 15 bp, Homo sapiens
aattgagaagattga

SEQ ID NO: 67612 - DNA, 15 bp, Homo sapiens
gaattgagaagattg

SEQ ID NO: 67613 - DNA, 15 bp, Homo sapiens
tgaattgagaagatt

SEQ ID NO: 67614 - DNA, 15 bp, Homo sapiens
ttgaattgagaagat

SEQ ID NO: 67615 - DNA, 15 bp, Homo sapiens
attgaattgagaaga

SEQ ID NO: 67616 - DNA, 15 bp, Homo sapiens
gattgaattgagaag

SEQ ID NO: 67617 - DNA, 15 bp, Homo sapiens
agattgaattgagaa

SEQ ID NO: 67618 - DNA, 15 bp, Homo sapiens
tagattgaattgaga

SEQ ID NO: 67619 - DNA, 15 bp, Homo sapiens
atagattgaattgag

SEQ ID NO: 67620 - DNA, 15 bp, Homo sapiens
aatagattgaattga

SEQ ID NO: 67621 - DNA, 15 bp, Homo sapiens
taatagattgaattg

SEQ ID NO: 67622 - DNA, 15 bp, Homo sapiens
gtaatagattgaatt

SEQ ID NO: 67623 - DNA, 15 bp, Homo sapiens
tgtaatagattgaat

SEQ ID NO: 67624 - DNA, 15 bp, Homo sapiens
atgtaatagattgaa

SEQ ID NO: 67625 - DNA, 15 bp, Homo sapiens
aatgtaatagattga

SEQ ID NO: 67626 - DNA, 15 bp, Homo sapiens
aaatgtaatagattg

SEQ ID NO: 67627 - DNA, 15 bp, Homo sapiens
taaatgtaatagatt

SEQ ID NO: 67628 - DNA, 15 bp, Homo sapiens
ataaatgtaatagat

SEQ ID NO: 67629 - DNA, 15 bp, Homo sapiens
aataaatgtaataga

SEQ ID NO: 67630 - DNA, 15 bp, Homo sapiens
taataaatgtaatag

SEQ ID NO: 67631 - DNA, 15 bp, Homo sapiens
ataataaatgtaata

SEQ ID NO: 67632 - DNA, 15 bp, Homo sapiens
aataataaatgtaat

SEQ ID NO: 67633 - DNA, 15 bp, Homo sapiens
aaataataaatgtaa

SEQ ID NO: 67634 - DNA, 15 bp, Homo sapiens
taaataataaatgta

SEQ ID NO: 67635 - DNA, 15 bp, Homo sapiens
ctaaataataaatgt

SEQ ID NO: 67636 - DNA, 15 bp, Homo sapiens
cctaaataataaatg

SEQ ID NO: 67637 - DNA, 15 bp, Homo sapiens
tcctaaataataaat

SEQ ID NO: 67638 - DNA, 15 bp, Homo sapiens
ttcctaaataataaa

SEQ ID NO: 67639 - DNA, 15 bp, Homo sapiens
attcctaaataataa

SEQ ID NO: 67640 - DNA, 15 bp, Homo sapiens
cattcctaaataata

SEQ ID NO: 67641 - DNA, 15 bp, Homo sapiens
tcattcctaaataat

SEQ ID NO: 67642 - DNA, 15 bp, Homo sapiens
ctcattcctaaataa

SEQ ID NO: 67643 - DNA, 15 bp, Homo sapiens
gctcattcctaaata

SEQ ID NO: 67644 - DNA, 15 bp, Homo sapiens
agctcattcctaaat

SEQ ID NO: 67645 - DNA, 15 bp, Homo sapiens
tagctcattcctaaa

SEQ ID NO: 67646 - DNA, 15 bp, Homo sapiens
ttagctcattcctaa

SEQ ID NO: 67647 - DNA, 15 bp, Homo sapiens
attagctcattccta

SEQ ID NO: 67648 - DNA, 15 bp, Homo sapiens
aattagctcattcct

SEQ ID NO: 67649 - DNA, 15 bp, Homo sapiens
aaattagctcattcc

SEQ ID NO: 67650 - DNA, 15 bp, Homo sapiens
aaaattagctcattc

SEQ ID NO: 67651 - DNA, 15 bp, Homo sapiens
gaaaattagctcatt

SEQ ID NO: 67652 - DNA, 15 bp, Homo sapiens
tgaaaattagctcat

SEQ ID NO: 67653 - DNA, 15 bp, Homo sapiens
gtgaaaattagctca

SEQ ID NO: 67654 - DNA, 15 bp, Homo sapiens
agtgaaaattagctc

SEQ ID NO: 67655 - DNA, 15 bp, Homo sapiens
tagtgaaaattagct

SEQ ID NO: 67656 - DNA, 15 bp, Homo sapiens
ttagtgaaaattagc

SEQ ID NO: 67657 - DNA, 15 bp, Homo sapiens
tttagtgaaaattag

SEQ ID NO: 67658 - DNA, 15 bp, Homo sapiens
atttagtgaaaatta

SEQ ID NO: 67659 - DNA, 15 bp, Homo sapiens
catttagtgaaaatt

SEQ ID NO: 67660 - DNA, 15 bp, Homo sapiens
gcatttagtgaaaat

SEQ ID NO: 67661 - DNA, 15 bp, Homo sapiens
agcatttagtgaaaa

SEQ ID NO: 67662 - DNA, 15 bp, Homo sapiens
cagcatttagtgaaa

SEQ ID NO: 67663 - DNA, 15 bp, Homo sapiens
tcagcatttagtgaa

SEQ ID NO: 67664 - DNA, 15 bp, Homo sapiens
ttcagcatttagtga

SEQ ID NO: 67665 - DNA, 15 bp, Homo sapiens
tttcagcatttagtg

SEQ ID NO: 67666 - DNA, 15 bp, Homo sapiens
atttcagcatttagt

SEQ ID NO: 67667 - DNA, 15 bp, Homo sapiens
tatttcagcatttag

SEQ ID NO: 67668 - DNA, 15 bp, Homo sapiens
gtatttcagcattta

SEQ ID NO: 67669 - DNA, 15 bp, Homo sapiens
agtatttcagcattt

SEQ ID NO: 67670 - DNA, 15 bp, Homo sapiens
aagtatttcagcatt

SEQ ID NO: 67671 - DNA, 15 bp, Homo sapiens
caagtatttcagcat

SEQ ID NO: 67672 - DNA, 15 bp, Homo sapiens
ccaagtatttcagca

SEQ ID NO: 67673 - DNA, 15 bp, Homo sapiens
gccaagtatttcagc

SEQ ID NO: 67674 - DNA, 15 bp, Homo sapiens
agccaagtatttcag

SEQ ID NO: 67675 - DNA, 15 bp, Homo sapiens
tagccaagtatttca

SEQ ID NO: 67676 - DNA, 15 bp, Homo sapiens
atagccaagtatttc

SEQ ID NO: 67677 - DNA, 15 bp, Homo sapiens
tatagccaagtattt

SEQ ID NO: 67678 - DNA, 15 bp, Homo sapiens
ttatagccaagtatt

SEQ ID NO: 67679 - DNA, 15 bp, Homo sapiens
attatagccaagtat

SEQ ID NO: 67680 - DNA, 15 bp, Homo sapiens
tattatagccaagta

SEQ ID NO: 67681 - DNA, 15 bp, Homo sapiens
atattatagccaagt

SEQ ID NO: 67682 - DNA, 15 bp, Homo sapiens
tatattatagccaag

SEQ ID NO: 67683 - DNA, 15 bp, Homo sapiens
atatattatagccaa

SEQ ID NO: 67684 - DNA, 15 bp, Homo sapiens
tatatattatagcca

SEQ ID NO: 67685 - DNA, 15 bp, Homo sapiens
atatatattatagcc

SEQ ID NO: 67686 - DNA, 15 bp, Homo sapiens
gatatatattatagc

SEQ ID NO: 67687 - DNA, 15 bp, Homo sapiens
tgatatatattatag

SEQ ID NO: 67688 - DNA, 15 bp, Homo sapiens
ttgatatatattata

SEQ ID NO: 67689 - DNA, 15 bp, Homo sapiens
attgatatatattat

SEQ ID NO: 67690 - DNA, 15 bp, Homo sapiens
aattgatatatatta

SEQ ID NO: 67691 - DNA, 15 bp, Homo sapiens
taattgatatatatt

SEQ ID NO: 67692 - DNA, 15 bp, Homo sapiens
ataattgatatatat

SEQ ID NO: 67693 - DNA, 15 bp, Homo sapiens
tataattgatatata

SEQ ID NO: 67694 - DNA, 15 bp, Homo sapiens
ctataattgatatat

SEQ ID NO: 67695 - DNA, 15 bp, Homo sapiens
gctataattgatata

SEQ ID NO: 67696 - DNA, 15 bp, Homo sapiens
tgctataattgatat

SEQ ID NO: 67697 - DNA, 15 bp, Homo sapiens
atgctataattgata

SEQ ID NO: 67698 - DNA, 15 bp, Homo sapiens
tatgctataattgat

SEQ ID NO: 67699 - DNA, 15 bp, Homo sapiens
atatgctataattga

SEQ ID NO: 67700 - DNA, 15 bp, Homo sapiens
aatatgctataattg

SEQ ID NO: 67701 - DNA, 15 bp, Homo sapiens
aaatatgctataatt

SEQ ID NO: 67702 - DNA, 15 bp, Homo sapiens
aaaatatgctataat

SEQ ID NO: 67703 - DNA, 15 bp, Homo sapiens
aaaaatatgctataa

SEQ ID NO: 67704 - DNA, 15 bp, Homo sapiens
caaaaatatgctata

SEQ ID NO: 67705 - DNA, 15 bp, Homo sapiens
acaaaaatatgctat

SEQ ID NO: 67706 - DNA, 15 bp, Homo sapiens
aacaaaaatatgcta

SEQ ID NO: 67707 - DNA, 15 bp, Homo sapiens
taacaaaaatatgct

SEQ ID NO: 67708 - DNA, 15 bp, Homo sapiens
ataacaaaaatatgc

SEQ ID NO: 67709 - DNA, 15 bp, Homo sapiens
aataacaaaaatatg

SEQ ID NO: 67710 - DNA, 15 bp, Homo sapiens
caataacaaaaatat

SEQ ID NO: 67711 - DNA, 15 bp, Homo sapiens
gcaataacaaaaata

SEQ ID NO: 67712 - DNA, 15 bp, Homo sapiens
tgcaataacaaaaat

SEQ ID NO: 67713 - DNA, 15 bp, Homo sapiens
gtgcaataacaaaaa

SEQ ID NO: 67714 - DNA, 15 bp, Homo sapiens
agtgcaataacaaaa

SEQ ID NO: 67715 - DNA, 15 bp, Homo sapiens
aagtgcaataacaaa

SEQ ID NO: 67716 - DNA, 15 bp, Homo sapiens
caagtgcaataacaa

SEQ ID NO: 67717 - DNA, 15 bp, Homo sapiens
acaagtgcaataaca

SEQ ID NO: 67718 - DNA, 15 bp, Homo sapiens
tacaagtgcaataac

SEQ ID NO: 67719 - DNA, 15 bp, Homo sapiens
atacaagtgcaataa

SEQ ID NO: 67720 - DNA, 15 bp, Homo sapiens
tatacaagtgcaata

SEQ ID NO: 67721 - DNA, 15 bp, Homo sapiens
ttatacaagtgcaat

SEQ ID NO: 67722 - DNA, 15 bp, Homo sapiens
tttatacaagtgcaa

SEQ ID NO: 67723 - DNA, 15 bp, Homo sapiens
atttatacaagtgca

SEQ ID NO: 67724 - DNA, 15 bp, Homo sapiens
tatttatacaagtgc

SEQ ID NO: 67725 - DNA, 15 bp, Homo sapiens
atatttatacaagtg

SEQ ID NO: 67726 - DNA, 15 bp, Homo sapiens
catatttatacaagt

SEQ ID NO: 67727 - DNA, 15 bp, Homo sapiens
gcatatttatacaag

SEQ ID NO: 67728 - DNA, 15 bp, Homo sapiens
tgcatatttatacaa

SEQ ID NO: 67729 - DNA, 15 bp, Homo sapiens
atgcatatttataca

SEQ ID NO: 67730 - DNA, 15 bp, Homo sapiens
tatgcatatttatac

SEQ ID NO: 67731 - DNA, 15 bp, Homo sapiens
atatgcatatttata

SEQ ID NO: 67732 - DNA, 15 bp, Homo sapiens
gatatgcatatttat

SEQ ID NO: 67733 - DNA, 15 bp, Homo sapiens
agatatgcatattta

SEQ ID NO: 67734 - DNA, 15 bp, Homo sapiens
cagatatgcatattt

SEQ ID NO: 67735 - DNA, 15 bp, Homo sapiens
tcagatatgcatatt

SEQ ID NO: 67736 - DNA, 15 bp, Homo sapiens
gtcagatatgcatat

SEQ ID NO: 67737 - DNA, 15 bp, Homo sapiens
ggtcagatatgcata

SEQ ID NO: 67738 - DNA, 15 bp, Homo sapiens
tggtcagatatgcat

SEQ ID NO: 67739 - DNA, 15 bp, Homo sapiens
atggtcagatatgca

SEQ ID NO: 67740 - DNA, 15 bp, Homo sapiens
aatggtcagatatgc

SEQ ID NO: 67741 - DNA, 15 bp, Homo sapiens
aaatggtcagatatg

SEQ ID NO: 67742 - DNA, 15 bp, Homo sapiens
taaatggtcagatat

SEQ ID NO: 67743 - DNA, 15 bp, Homo sapiens
ctaaatggtcagata

SEQ ID NO: 67744 - DNA, 15 bp, Homo sapiens
tctaaatggtcagat

SEQ ID NO: 67745 - DNA, 15 bp, Homo sapiens
ttctaaatggtcaga

SEQ ID NO: 67746 - DNA, 15 bp, Homo sapiens
tttctaaatggtcag

SEQ ID NO: 67747 - DNA, 15 bp, Homo sapiens
ttttctaaatggtca

SEQ ID NO: 67748 - DNA, 15 bp, Homo sapiens
attttctaaatggtc

SEQ ID NO: 67749 - DNA, 15 bp, Homo sapiens
aattttctaaatggt

SEQ ID NO: 67750 - DNA, 15 bp, Homo sapiens
aaattttctaaatgg

SEQ ID NO: 67751 - DNA, 15 bp, Homo sapiens
taaattttctaaatg

SEQ ID NO: 67752 - DNA, 15 bp, Homo sapiens
ataaattttctaaat

SEQ ID NO: 67753 - DNA, 15 bp, Homo sapiens
cataaattttctaaa

SEQ ID NO: 67754 - DNA, 15 bp, Homo sapiens
tcataaattttctaa

SEQ ID NO: 67755 - DNA, 15 bp, Homo sapiens
ctcataaattttcta

SEQ ID NO: 67756 - DNA, 15 bp, Homo sapiens
cctcataaattttct

SEQ ID NO: 67757 - DNA, 15 bp, Homo sapiens
tcctcataaattttc

SEQ ID NO: 67758 - DNA, 15 bp, Homo sapiens
atcctcataaatttt

SEQ ID NO: 67759 - DNA, 15 bp, Homo sapiens
tatcctcataaattt

SEQ ID NO: 67760 - DNA, 15 bp, Homo sapiens
atatcctcataaatt

SEQ ID NO: 67761 - DNA, 15 bp, Homo sapiens
catatcctcataaat

SEQ ID NO: 67762 - DNA, 15 bp, Homo sapiens
gcatatcctcataaa

SEQ ID NO: 67763 - DNA, 15 bp, Homo sapiens
ggcatatcctcataa

SEQ ID NO: 67764 - DNA, 15 bp, Homo sapiens
tggcatatcctcata

SEQ ID NO: 67765 - DNA, 15 bp, Homo sapiens
ttggcatatcctcat

SEQ ID NO: 67766 - DNA, 15 bp, Homo sapiens
tttggcatatcctca

SEQ ID NO: 67767 - DNA, 15 bp, Homo sapiens
ttttggcatatcctc

SEQ ID NO: 67768 - DNA, 15 bp, Homo sapiens
tttttggcatatcct

SEQ ID NO: 67769 - DNA, 15 bp, Homo sapiens
gtttttggcatatcc

SEQ ID NO: 67770 - DNA, 15 bp, Homo sapiens
agtttttggcatatc

SEQ ID NO: 67771 - DNA, 15 bp, Homo sapiens
aagtttttggcatat

SEQ ID NO: 67772 - DNA, 15 bp, Homo sapiens
taagtttttggcata

SEQ ID NO: 67773 - DNA, 15 bp, Homo sapiens
ttaagtttttggcat

SEQ ID NO: 67774 - DNA, 15 bp, Homo sapiens
tttaagtttttggca

SEQ ID NO: 67775 - DNA, 15 bp, Homo sapiens
ctttaagtttttggc

SEQ ID NO: 67776 - DNA, 15 bp, Homo sapiens
cctttaagtttttgg

SEQ ID NO: 67777 - DNA, 15 bp, Homo sapiens
ccctttaagtttttg

SEQ ID NO: 67778 - DNA, 15 bp, Homo sapiens
tccctttaagttttt

SEQ ID NO: 67779 - DNA, 15 bp, Homo sapiens
ttccctttaagtttt

SEQ ID NO: 67780 - DNA, 15 bp, Homo sapiens
tttccctttaagttt

SEQ ID NO: 67781 - DNA, 15 bp, Homo sapiens
atttccctttaagtt

SEQ ID NO: 67782 - DNA, 15 bp, Homo sapiens
tatttccctttaagt

SEQ ID NO: 67783 - DNA, 15 bp, Homo sapiens
atatttccctttaag

SEQ ID NO: 67784 - DNA, 15 bp, Homo sapiens
aatatttccctttaa

SEQ ID NO: 67785 - DNA, 15 bp, Homo sapiens
taatatttcccttta

SEQ ID NO: 67786 - DNA, 15 bp, Homo sapiens
ataatatttcccttt

SEQ ID NO: 67787 - DNA, 15 bp, Homo sapiens
tataatatttccctt

SEQ ID NO: 67788 - DNA, 15 bp, Homo sapiens
atataatatttccct

SEQ ID NO: 67789 - DNA, 15 bp, Homo sapiens
catataatatttccc

SEQ ID NO: 67790 - DNA, 15 bp, Homo sapiens
tcatataatatttcc

SEQ ID NO: 67791 - DNA, 15 bp, Homo sapiens
ttcatataatatttc

SEQ ID NO: 67792 - DNA, 15 bp, Homo sapiens
tttcatataatattt

SEQ ID NO: 67793 - DNA, 15 bp, Homo sapiens
atttcatataatatt

SEQ ID NO: 67794 - DNA, 15 bp, Homo sapiens
catttcatataatat

SEQ ID NO: 67795 - DNA, 15 bp, Homo sapiens
tcatttcatataata

SEQ ID NO: 67796 - DNA, 15 bp, Homo sapiens
ctcatttcatataat

SEQ ID NO: 67797 - DNA, 15 bp, Homo sapiens
tctcatttcatataa

SEQ ID NO: 67798 - DNA, 15 bp, Homo sapiens
atctcatttcatata

SEQ ID NO: 67799 - DNA, 15 bp, Homo sapiens
catctcatttcatat

SEQ ID NO: 67800 - DNA, 15 bp, Homo sapiens
tcatctcatttcata

SEQ ID NO: 67801 - DNA, 15 bp, Homo sapiens
ttcatctcatttcat

SEQ ID NO: 67802 - DNA, 15 bp, Homo sapiens
attcatctcatttca

SEQ ID NO: 67803 - DNA, 15 bp, Homo sapiens
tattcatctcatttc

SEQ ID NO: 67804 - DNA, 15 bp, Homo sapiens
atattcatctcattt

SEQ ID NO: 67805 - DNA, 15 bp, Homo sapiens
gatattcatctcatt

SEQ ID NO: 67806 - DNA, 15 bp, Homo sapiens
agatattcatctcat

SEQ ID NO: 67807 - DNA, 15 bp, Homo sapiens
gagatattcatctca

SEQ ID NO: 67808 - DNA, 15 bp, Homo sapiens
agagatattcatctc

SEQ ID NO: 67809 - DNA, 15 bp, Homo sapiens
aagagatattcatct

SEQ ID NO: 67810 - DNA, 15 bp, Homo sapiens
taagagatattcatc

SEQ ID NO: 67811 - DNA, 15 bp, Homo sapiens
gtaagagatattcat

SEQ ID NO: 67812 - DNA, 15 bp, Homo sapiens
cgtaagagatattca

SEQ ID NO: 67813 - DNA, 15 bp, Homo sapiens
acgtaagagatattc

SEQ ID NO: 67814 - DNA, 15 bp, Homo sapiens
tacgtaagagatatt

SEQ ID NO: 67815 - DNA, 15 bp, Homo sapiens
gtacgtaagagatat

SEQ ID NO: 67816 - DNA, 15 bp, Homo sapiens
agtacgtaagagata

SEQ ID NO: 67817 - DNA, 15 bp, Homo sapiens
aagtacgtaagagat

SEQ ID NO: 67818 - DNA, 15 bp, Homo sapiens
aaagtacgtaagaga

SEQ ID NO: 67819 - DNA, 15 bp, Homo sapiens
aaaagtacgtaagag

SEQ ID NO: 67820 - DNA, 15 bp, Homo sapiens
gaaaagtacgtaaga

SEQ ID NO: 67821 - DNA, 15 bp, Homo sapiens
tgaaaagtacgtaag

SEQ ID NO: 67822 - DNA, 15 bp, Homo sapiens
ctgaaaagtacgtaa

SEQ ID NO: 67823 - DNA, 15 bp, Homo sapiens
cctgaaaagtacgta

SEQ ID NO: 67824 - DNA, 15 bp, Homo sapiens
tcctgaaaagtacgt

SEQ ID NO: 67825 - DNA, 15 bp, Homo sapiens
ttcctgaaaagtacg

SEQ ID NO: 67826 - DNA, 15 bp, Homo sapiens
tttcctgaaaagtac

SEQ ID NO: 67827 - DNA, 15 bp, Homo sapiens
ttttcctgaaaagta

SEQ ID NO: 67828 - DNA, 15 bp, Homo sapiens
gttttcctgaaaagt

SEQ ID NO: 67829 - DNA, 15 bp, Homo sapiens
tgttttcctgaaaag

SEQ ID NO: 67830 - DNA, 15 bp, Homo sapiens
gtgttttcctgaaaa

SEQ ID NO: 67831 - DNA, 15 bp, Homo sapiens
agtgttttcctgaaa

SEQ ID NO: 67832 - DNA, 15 bp, Homo sapiens
tagtgttttcctgaa

SEQ ID NO: 67833 - DNA, 15 bp, Homo sapiens
atagtgttttcctga

SEQ ID NO: 67834 - DNA, 15 bp, Homo sapiens
aatagtgttttcctg

SEQ ID NO: 67835 - DNA, 15 bp, Homo sapiens
aaatagtgttttcct

SEQ ID NO: 67836 - DNA, 15 bp, Homo sapiens
aaaatagtgttttcc

SEQ ID NO: 67837 - DNA, 15 bp, Homo sapiens
gaaaatagtgttttc

SEQ ID NO: 67838 - DNA, 15 bp, Homo sapiens
agaaaatagtgtttt

SEQ ID NO: 67839 - DNA, 15 bp, Homo sapiens
cagaaaatagtgttt

SEQ ID NO: 67840 - DNA, 15 bp, Homo sapiens
tcagaaaatagtgtt

SEQ ID NO: 67841 - DNA, 15 bp, Homo sapiens
ttcagaaaatagtgt

SEQ ID NO: 67842 - DNA, 15 bp, Homo sapiens
tttcagaaaatagtg

SEQ ID NO: 67843 - DNA, 15 bp, Homo sapiens
ttttcagaaaatagt

SEQ ID NO: 67844 - DNA, 15 bp, Homo sapiens
cttttcagaaaatag

SEQ ID NO: 67845 - DNA, 15 bp, Homo sapiens
ccttttcagaaaata

SEQ ID NO: 67846 - DNA, 15 bp, Homo sapiens
tccttttcagaaaat

SEQ ID NO: 67847 - DNA, 15 bp, Homo sapiens
ctccttttcagaaaa

SEQ ID NO: 67848 - DNA, 15 bp, Homo sapiens
actccttttcagaaa

SEQ ID NO: 67849 - DNA, 15 bp, Homo sapiens
tactccttttcagaa

SEQ ID NO: 67850 - DNA, 15 bp, Homo sapiens
atactccttttcaga

SEQ ID NO: 67851 - DNA, 15 bp, Homo sapiens
aatactccttttcag

SEQ ID NO: 67852 - DNA, 15 bp, Homo sapiens
aaatactccttttca

SEQ ID NO: 67853 - DNA, 15 bp, Homo sapiens
gaaatactccttttc

SEQ ID NO: 67854 - DNA, 15 bp, Homo sapiens
agaaatactcctttt

SEQ ID NO: 67855 - DNA, 15 bp, Homo sapiens
aagaaatactccttt

SEQ ID NO: 67856 - DNA, 15 bp, Homo sapiens
aaagaaatactcctt

SEQ ID NO: 67857 - DNA, 15 bp, Homo sapiens
taaagaaatactcct

SEQ ID NO: 67858 - DNA, 15 bp, Homo sapiens
ttaaagaaatactcc

SEQ ID NO: 67859 - DNA, 15 bp, Homo sapiens
tttaaagaaatactc

SEQ ID NO: 67860 - DNA, 15 bp, Homo sapiens
gtttaaagaaatact

SEQ ID NO: 67861 - DNA, 15 bp, Homo sapiens
tgtttaaagaaatac

SEQ ID NO: 67862 - DNA, 15 bp, Homo sapiens
ctgtttaaagaaata

SEQ ID NO: 67863 - DNA, 15 bp, Homo sapiens
gctgtttaaagaaat

SEQ ID NO: 67864 - DNA, 15 bp, Homo sapiens
tgctgtttaaagaaa

SEQ ID NO: 67865 - DNA, 15 bp, Homo sapiens
gtgctgtttaaagaa

SEQ ID NO: 67866 - DNA, 15 bp, Homo sapiens
tgtgctgtttaaaga

SEQ ID NO: 67867 - DNA, 15 bp, Homo sapiens
gtgtgctgtttaaag

SEQ ID NO: 67868 - DNA, 15 bp, Homo sapiens
tgtgtgctgtttaaa

SEQ ID NO: 67869 - DNA, 15 bp, Homo sapiens
atgtgtgctgtttaa

SEQ ID NO: 67870 - DNA, 15 bp, Homo sapiens
tatgtgtgctgttta

SEQ ID NO: 67871 - DNA, 15 bp, Homo sapiens
gtatgtgtgctgttt

SEQ ID NO: 67872 - DNA, 15 bp, Homo sapiens
tgtatgtgtgctgtt

SEQ ID NO: 67873 - DNA, 15 bp, Homo sapiens
atgtatgtgtgctgt

SEQ ID NO: 67874 - DNA, 15 bp, Homo sapiens
tatgtatgtgtgctg

SEQ ID NO: 67875 - DNA, 15 bp, Homo sapiens
atatgtatgtgtgct

SEQ ID NO: 67876 - DNA, 15 bp, Homo sapiens
tatatgtatgtgtgc

SEQ ID NO: 67877 - DNA, 15 bp, Homo sapiens
gtatatgtatgtgtg

SEQ ID NO: 67878 - DNA, 15 bp, Homo sapiens
tgtatatgtatgtgt

SEQ ID NO: 67879 - DNA, 15 bp, Homo sapiens
gtgtatatgtatgtg

SEQ ID NO: 67880 - DNA, 15 bp, Homo sapiens
tgtgtatatgtatgt

SEQ ID NO: 67881 - DNA, 15 bp, Homo sapiens
gtgtgtatatgtatg

SEQ ID NO: 67882 - DNA, 15 bp, Homo sapiens
tgtgtgtatatgtat

SEQ ID NO: 67883 - DNA, 15 bp, Homo sapiens
ttgtgtgtatatgta

SEQ ID NO: 67884 - DNA, 15 bp, Homo sapiens
attgtgtgtatatgt

SEQ ID NO: 67885 - DNA, 15 bp, Homo sapiens
gattgtgtgtatatg

SEQ ID NO: 67886 - DNA, 15 bp, Homo sapiens
agattgtgtgtatat

SEQ ID NO: 67887 - DNA, 15 bp, Homo sapiens
aagattgtgtgtata

SEQ ID NO: 67888 - DNA, 15 bp, Homo sapiens
gaagattgtgtgtat

SEQ ID NO: 67889 - DNA, 15 bp, Homo sapiens
tgaagattgtgtgta

SEQ ID NO: 67890 - DNA, 15 bp, Homo sapiens
atgaagattgtgtgt

SEQ ID NO: 67891 - DNA, 15 bp, Homo sapiens
gatgaagattgtgtg

SEQ ID NO: 67892 - DNA, 15 bp, Homo sapiens
agatgaagattgtgt

SEQ ID NO: 67893 - DNA, 15 bp, Homo sapiens
aagatgaagattgtg

SEQ ID NO: 67894 - DNA, 15 bp, Homo sapiens
caagatgaagattgt

SEQ ID NO: 67895 - DNA, 15 bp, Homo sapiens
ccaagatgaagattg

SEQ ID NO: 67896 - DNA, 15 bp, Homo sapiens
cccaagatgaagatt

SEQ ID NO: 67897 - DNA, 15 bp, Homo sapiens
acccaagatgaagat

SEQ ID NO: 67898 - DNA, 15 bp, Homo sapiens
aacccaagatgaaga

SEQ ID NO: 67899 - DNA, 15 bp, Homo sapiens
aaacccaagatgaag

SEQ ID NO: 67900 - DNA, 15 bp, Homo sapiens
aaaacccaagatgaa

SEQ ID NO: 67901 - DNA, 15 bp, Homo sapiens
aaaaacccaagatga

SEQ ID NO: 67902 - DNA, 15 bp, Homo sapiens
gaaaaacccaagatg

SEQ ID NO: 67903 - DNA, 15 bp, Homo sapiens
agaaaaacccaagat

SEQ ID NO: 67904 - DNA, 15 bp, Homo sapiens
aagaaaaacccaaga

SEQ ID NO: 67905 - DNA, 15 bp, Homo sapiens
taagaaaaacccaag

SEQ ID NO: 67906 - DNA, 15 bp, Homo sapiens
ataagaaaaacccaa

SEQ ID NO: 67907 - DNA, 15 bp, Homo sapiens
cataagaaaaaccca

SEQ ID NO: 67908 - DNA, 15 bp, Homo sapiens
acataagaaaaaccc

SEQ ID NO: 67909 - DNA, 15 bp, Homo sapiens
tacataagaaaaacc

SEQ ID NO: 67910 - DNA, 15 bp, Homo sapiens
ttacataagaaaaac

SEQ ID NO: 67911 - DNA, 15 bp, Homo sapiens
tttacataagaaaaa

SEQ ID NO: 67912 - DNA, 15 bp, Homo sapiens
ctttacataagaaaa

SEQ ID NO: 67913 - DNA, 15 bp, Homo sapiens
cctttacataagaaa

SEQ ID NO: 67914 - DNA, 15 bp, Homo sapiens
ccctttacataagaa

SEQ ID NO: 67915 - DNA, 15 bp, Homo sapiens
cccctttacataaga

SEQ ID NO: 67916 - DNA, 15 bp, Homo sapiens
tcccctttacataag

SEQ ID NO: 67917 - DNA, 15 bp, Homo sapiens
atcccctttacataa

SEQ ID NO: 67918 - DNA, 15 bp, Homo sapiens
aatcccctttacata

SEQ ID NO: 67919 - DNA, 15 bp, Homo sapiens
caatcccctttacat

SEQ ID NO: 67920 - DNA, 15 bp, Homo sapiens
acaatcccctttaca

SEQ ID NO: 67921 - DNA, 15 bp, Homo sapiens
cacaatcccctttac

SEQ ID NO: 67922 - DNA, 15 bp, Homo sapiens
tcacaatccccttta

SEQ ID NO: 67923 - DNA, 15 bp, Homo sapiens
gtcacaatccccttt

SEQ ID NO: 67924 - DNA, 15 bp, Homo sapiens
tgtcacaatcccctt

SEQ ID NO: 67925 - DNA, 15 bp, Homo sapiens
atgtcacaatcccct

SEQ ID NO: 67926 - DNA, 15 bp, Homo sapiens
aatgtcacaatcccc

SEQ ID NO: 67927 - DNA, 15 bp, Homo sapiens
gaatgtcacaatccc

SEQ ID NO: 67928 - DNA, 15 bp, Homo sapiens
ggaatgtcacaatcc

SEQ ID NO: 67929 - DNA, 15 bp, Homo sapiens
tggaatgtcacaatc

SEQ ID NO: 67930 - DNA, 15 bp, Homo sapiens
ctggaatgtcacaat

SEQ ID NO: 67931 - DNA, 15 bp, Homo sapiens
cctggaatgtcacaa

SEQ ID NO: 67932 - DNA, 15 bp, Homo sapiens
acctggaatgtcaca

SEQ ID NO: 67933 - DNA, 15 bp, Homo sapiens
gacctggaatgtcac

SEQ ID NO: 67934 - DNA, 15 bp, Homo sapiens
ggacctggaatgtca

SEQ ID NO: 67935 - DNA, 15 bp, Homo sapiens
aggacctggaatgtc

SEQ ID NO: 67936 - DNA, 15 bp, Homo sapiens
taggacctggaatgt

SEQ ID NO: 67937 - DNA, 15 bp, Homo sapiens
ataggacctggaatg

SEQ ID NO: 67938 - DNA, 15 bp, Homo sapiens
aataggacctggaat

SEQ ID NO: 67939 - DNA, 15 bp, Homo sapiens
aaataggacctggaa

SEQ ID NO: 67940 - DNA, 15 bp, Homo sapiens
aaaataggacctgga

SEQ ID NO: 67941 - DNA, 15 bp, Homo sapiens
aaaaataggacctgg

SEQ ID NO: 67942 - DNA, 15 bp, Homo sapiens
caaaaataggacctg

SEQ ID NO: 67943 - DNA, 15 bp, Homo sapiens
ccaaaaataggacct

SEQ ID NO: 67944 - DNA, 15 bp, Homo sapiens
tccaaaaataggacc

SEQ ID NO: 67945 - DNA, 15 bp, Homo sapiens
ttccaaaaataggac

SEQ ID NO: 67946 - DNA, 15 bp, Homo sapiens
attccaaaaatagga

SEQ ID NO: 67947 - DNA, 15 bp, Homo sapiens
aattccaaaaatagg

SEQ ID NO: 67948 - DNA, 15 bp, Homo sapiens
aaattccaaaaatag

SEQ ID NO: 67949 - DNA, 15 bp, Homo sapiens
caaattccaaaaata

SEQ ID NO: 67950 - DNA, 15 bp, Homo sapiens
gcaaattccaaaaat

SEQ ID NO: 67951 - DNA, 15 bp, Homo sapiens
agcaaattccaaaaa

SEQ ID NO: 67952 - DNA, 15 bp, Homo sapiens
cagcaaattccaaaa

SEQ ID NO: 67953 - DNA, 15 bp, Homo sapiens
tcagcaaattccaaa

SEQ ID NO: 67954 - DNA, 15 bp, Homo sapiens
ttcagcaaattccaa

SEQ ID NO: 67955 - DNA, 15 bp, Homo sapiens
attcagcaaattcca

SEQ ID NO: 67956 - DNA, 15 bp, Homo sapiens
gattcagcaaattcc

SEQ ID NO: 67957 - DNA, 15 bp, Homo sapiens
tgattcagcaaattc

SEQ ID NO: 67958 - DNA, 15 bp, Homo sapiens
atgattcagcaaatt

SEQ ID NO: 67959 - DNA, 15 bp, Homo sapiens
tatgattcagcaaat

SEQ ID NO: 67960 - DNA, 15 bp, Homo sapiens
atatgattcagcaaa

SEQ ID NO: 67961 - DNA, 15 bp, Homo sapiens
aatatgattcagcaa

SEQ ID NO: 67962 - DNA, 15 bp, Homo sapiens
gaatatgattcagca

SEQ ID NO: 67963 - DNA, 15 bp, Homo sapiens
ggaatatgattcagc

SEQ ID NO: 67964 - DNA, 15 bp, Homo sapiens
aggaatatgattcag

SEQ ID NO: 67965 - DNA, 15 bp, Homo sapiens
aaggaatatgattca

SEQ ID NO: 67966 - DNA, 15 bp, Homo sapiens
taaggaatatgattc

SEQ ID NO: 67967 - DNA, 15 bp, Homo sapiens
ttaaggaatatgatt

SEQ ID NO: 67968 - DNA, 15 bp, Homo sapiens
tttaaggaatatgat

SEQ ID NO: 67969 - DNA, 15 bp, Homo sapiens
ttttaaggaatatga

SEQ ID NO: 67970 - DNA, 15 bp, Homo sapiens
tttttaaggaatatg

SEQ ID NO: 67971 - DNA, 15 bp, Homo sapiens
atttttaaggaatat

SEQ ID NO: 67972 - DNA, 15 bp, Homo sapiens
catttttaaggaata

SEQ ID NO: 67973 - DNA, 15 bp, Homo sapiens
gcatttttaaggaat

SEQ ID NO: 67974 - DNA, 15 bp, Homo sapiens
tgcatttttaaggaa

SEQ ID NO: 67975 - DNA, 15 bp, Homo sapiens
ttgcatttttaagga

SEQ ID NO: 67976 - DNA, 15 bp, Homo sapiens
gttgcatttttaagg

SEQ ID NO: 67977 - DNA, 15 bp, Homo sapiens
agttgcatttttaag

SEQ ID NO: 67978 - DNA, 15 bp, Homo sapiens
aagttgcatttttaa

SEQ ID NO: 67979 - DNA, 15 bp, Homo sapiens
caagttgcattttta

SEQ ID NO: 67980 - DNA, 15 bp, Homo sapiens
acaagttgcattttt

SEQ ID NO: 67981 - DNA, 15 bp, Homo sapiens
aacaagttgcatttt

SEQ ID NO: 67982 - DNA, 15 bp, Homo sapiens
aaacaagttgcattt

SEQ ID NO: 67983 - DNA, 15 bp, Homo sapiens
caaacaagttgcatt

SEQ ID NO: 67984 - DNA, 15 bp, Homo sapiens
acaaacaagttgcat

SEQ ID NO: 67985 - DNA, 15 bp, Homo sapiens
cacaaacaagttgca

SEQ ID NO: 67986 - DNA, 15 bp, Homo sapiens
gcacaaacaagttgc

SEQ ID NO: 67987 - DNA, 15 bp, Homo sapiens
agcacaaacaagttg

SEQ ID NO: 67988 - DNA, 15 bp, Homo sapiens
tagcacaaacaagtt

SEQ ID NO: 67989 - DNA, 15 bp, Homo sapiens
atagcacaaacaagt

SEQ ID NO: 67990 - DNA, 15 bp, Homo sapiens
catagcacaaacaag

SEQ ID NO: 67991 - DNA, 15 bp, Homo sapiens
tcatagcacaaacaa

SEQ ID NO: 67992 - DNA, 15 bp, Homo sapiens
atcatagcacaaaca

SEQ ID NO: 67993 - DNA, 15 bp, Homo sapiens
catcatagcacaaac

SEQ ID NO: 67994 - DNA, 15 bp, Homo sapiens
ccatcatagcacaaa

SEQ ID NO: 67995 - DNA, 15 bp, Homo sapiens
tccatcatagcacaa

SEQ ID NO: 67996 - DNA, 15 bp, Homo sapiens
ttccatcatagcaca

SEQ ID NO: 67997 - DNA, 15 bp, Homo sapiens
attccatcatagcac

SEQ ID NO: 67998 - DNA, 15 bp, Homo sapiens
tattccatcatagca

SEQ ID NO: 67999 - DNA, 15 bp, Homo sapiens
ctattccatcatagc

SEQ ID NO: 68000 - DNA, 15 bp, Homo sapiens
actattccatcatag

SEQ ID NO: 68001 - DNA, 15 bp, Homo sapiens
gactattccatcata

SEQ ID NO: 68002 - DNA, 15 bp, Homo sapiens
tgactattccatcat

SEQ ID NO: 68003 - DNA, 15 bp, Homo sapiens
atgactattccatca

SEQ ID NO: 68004 - DNA, 15 bp, Homo sapiens
aatgactattccatc

SEQ ID NO: 68005 - DNA, 15 bp, Homo sapiens
taatgactattccat

SEQ ID NO: 68006 - DNA, 15 bp, Homo sapiens
gtaatgactattcca

SEQ ID NO: 68007 - DNA, 15 bp, Homo sapiens
tgtaatgactattcc

SEQ ID NO: 68008 - DNA, 15 bp, Homo sapiens
atgtaatgactattc

SEQ ID NO: 68009 - DNA, 15 bp, Homo sapiens
aatgtaatgactatt

SEQ ID NO: 68010 - DNA, 15 bp, Homo sapiens
aaatgtaatgactat

SEQ ID NO: 68011 - DNA, 15 bp, Homo sapiens
aaaatgtaatgacta

SEQ ID NO: 68012 - DNA, 15 bp, Homo sapiens
caaaatgtaatgact

SEQ ID NO: 68013 - DNA, 15 bp, Homo sapiens
acaaaatgtaatgac

SEQ ID NO: 68014 - DNA, 15 bp, Homo sapiens
aacaaaatgtaatga

SEQ ID NO: 68015 - DNA, 15 bp, Homo sapiens
aaacaaaatgtaatg

SEQ ID NO: 68016 - DNA, 15 bp, Homo sapiens
aaaacaaaatgtaat

SEQ ID NO: 68017 - DNA, 15 bp, Homo sapiens
taaaacaaaatgtaa

SEQ ID NO: 68018 - DNA, 15 bp, Homo sapiens
ataaaacaaaatgta

SEQ ID NO: 68019 - DNA, 15 bp, Homo sapiens
aataaaacaaaatgt

SEQ ID NO: 68020 - DNA, 15 bp, Homo sapiens
aaataaaacaaaatg

SEQ ID NO: 68021 - DNA, 15 bp, Homo sapiens
taaataaaacaaaat

SEQ ID NO: 68022 - DNA, 15 bp, Homo sapiens
ctaaataaaacaaaa

SEQ ID NO: 68023 - DNA, 15 bp, Homo sapiens
tctaaataaaacaaa

SEQ ID NO: 68024 - DNA, 15 bp, Homo sapiens
ttctaaataaaacaa

SEQ ID NO: 68025 - DNA, 15 bp, Homo sapiens
attctaaataaaaca

SEQ ID NO: 68026 - DNA, 15 bp, Homo sapiens
gattctaaataaaac

SEQ ID NO: 68027 - DNA, 15 bp, Homo sapiens
ggattctaaataaaa

SEQ ID NO: 68028 - DNA, 15 bp, Homo sapiens
aggattctaaataaa

SEQ ID NO: 68029 - DNA, 15 bp, Homo sapiens
taggattctaaataa

SEQ ID NO: 68030 - DNA, 15 bp, Homo sapiens
ttaggattctaaata

SEQ ID NO: 68031 - DNA, 15 bp, Homo sapiens
tttaggattctaaat

SEQ ID NO: 68032 - DNA, 15 bp, Homo sapiens
ttttaggattctaaa

SEQ ID NO: 68033 - DNA, 15 bp, Homo sapiens
attttaggattctaa

SEQ ID NO: 68034 - DNA, 15 bp, Homo sapiens
aattttaggattcta

SEQ ID NO: 68035 - DNA, 15 bp, Homo sapiens
caattttaggattct

SEQ ID NO: 68036 - DNA, 15 bp, Homo sapiens
tcaattttaggattc

SEQ ID NO: 68037 - DNA, 15 bp, Homo sapiens
gtcaattttaggatt

SEQ ID NO: 68038 - DNA, 15 bp, Homo sapiens
tgtcaattttaggat

SEQ ID NO: 68039 - DNA, 15 bp, Homo sapiens
ctgtcaattttagga

SEQ ID NO: 68040 - DNA, 15 bp, Homo sapiens
actgtcaattttagg

SEQ ID NO: 68041 - DNA, 15 bp, Homo sapiens
aactgtcaattttag

SEQ ID NO: 68042 - DNA, 15 bp, Homo sapiens
aaactgtcaatttta

SEQ ID NO: 68043 - DNA, 15 bp, Homo sapiens
aaaactgtcaatttt

SEQ ID NO: 68044 - DNA, 15 bp, Homo sapiens
aaaaactgtcaattt

SEQ ID NO: 68045 - DNA, 15 bp, Homo sapiens
gaaaaactgtcaatt

SEQ ID NO: 68046 - DNA, 15 bp, Homo sapiens
tgaaaaactgtcaat

SEQ ID NO: 68047 - DNA, 15 bp, Homo sapiens
ctgaaaaactgtcaa

SEQ ID NO: 68048 - DNA, 15 bp, Homo sapiens
tctgaaaaactgtca

SEQ ID NO: 68049 - DNA, 15 bp, Homo sapiens
ctctgaaaaactgtc

SEQ ID NO: 68050 - DNA, 15 bp, Homo sapiens
tctctgaaaaactgt

SEQ ID NO: 68051 - DNA, 15 bp, Homo sapiens
ctctctgaaaaactg

SEQ ID NO: 68052 - DNA, 15 bp, Homo sapiens
tctctctgaaaaact

SEQ ID NO: 68053 - DNA, 15 bp, Homo sapiens
ctctctctgaaaaac

SEQ ID NO: 68054 - DNA, 15 bp, Homo sapiens
cctctctctgaaaaa

SEQ ID NO: 68055 - DNA, 15 bp, Homo sapiens
tcctctctctgaaaa

SEQ ID NO: 68056 - DNA, 15 bp, Homo sapiens
gtcctctctctgaaa

SEQ ID NO: 68057 - DNA, 15 bp, Homo sapiens
tgtcctctctctgaa

SEQ ID NO: 68058 - DNA, 15 bp, Homo sapiens
gtgtcctctctctga

SEQ ID NO: 68059 - DNA, 15 bp, Homo sapiens
tgtgtcctctctctg

SEQ ID NO: 68060 - DNA, 15 bp, Homo sapiens
ttgtgtcctctctct

SEQ ID NO: 68061 - DNA, 15 bp, Homo sapiens
tttgtgtcctctctc

SEQ ID NO: 68062 - DNA, 15 bp, Homo sapiens
gtttgtgtcctctct

SEQ ID NO: 68063 - DNA, 15 bp, Homo sapiens
ggtttgtgtcctctc

SEQ ID NO: 68064 - DNA, 15 bp, Homo sapiens
tggtttgtgtcctct

SEQ ID NO: 68065 - DNA, 15 bp, Homo sapiens
ctggtttgtgtcctc

SEQ ID NO: 68066 - DNA, 15 bp, Homo sapiens
tctggtttgtgtcct

SEQ ID NO: 68067 - DNA, 15 bp, Homo sapiens
gtctggtttgtgtcc

SEQ ID NO: 68068 - DNA, 15 bp, Homo sapiens
tgtctggtttgtgtc

SEQ ID NO: 68069 - DNA, 15 bp, Homo sapiens
ctgtctggtttgtgt

SEQ ID NO: 68070 - DNA, 15 bp, Homo sapiens
gctgtctggtttgtg

SEQ ID NO: 68071 - DNA, 15 bp, Homo sapiens
tgctgtctggtttgt

SEQ ID NO: 68072 - DNA, 15 bp, Homo sapiens
atgctgtctggtttg

SEQ ID NO: 68073 - DNA, 15 bp, Homo sapiens
gatgctgtctggttt

SEQ ID NO: 68074 - DNA, 15 bp, Homo sapiens
tgatgctgtctggtt

SEQ ID NO: 68075 - DNA, 15 bp, Homo sapiens
ttgatgctgtctggt

SEQ ID NO: 68076 - DNA, 15 bp, Homo sapiens
tttgatgctgtctgg

SEQ ID NO: 68077 - DNA, 15 bp, Homo sapiens
ctttgatgctgtctg

SEQ ID NO: 68078 - DNA, 15 bp, Homo sapiens
cctttgatgctgtct

SEQ ID NO: 68079 - DNA, 15 bp, Homo sapiens
ccctttgatgctgtc

SEQ ID NO: 68080 - DNA, 15 bp, Homo sapiens
tccctttgatgctgt

SEQ ID NO: 68081 - DNA, 15 bp, Homo sapiens
ttccctttgatgctg

SEQ ID NO: 68082 - DNA, 15 bp, Homo sapiens
attccctttgatgct

SEQ ID NO: 68083 - DNA, 15 bp, Homo sapiens
aattccctttgatgc

SEQ ID NO: 68084 - DNA, 15 bp, Homo sapiens
aaattccctttgatg

SEQ ID NO: 68085 - DNA, 15 bp, Homo sapiens
caaattccctttgat

SEQ ID NO: 68086 - DNA, 15 bp, Homo sapiens
ccaaattccctttga

SEQ ID NO: 68087 - DNA, 15 bp, Homo sapiens
tccaaattccctttg

SEQ ID NO: 68088 - DNA, 15 bp, Homo sapiens
ctccaaattcccttt

SEQ ID NO: 68089 - DNA, 15 bp, Homo sapiens
actccaaattccctt

SEQ ID NO: 68090 - DNA, 15 bp, Homo sapiens
aactccaaattccct

SEQ ID NO: 68091 - DNA, 15 bp, Homo sapiens
gaactccaaattccc

SEQ ID NO: 68092 - DNA, 15 bp, Homo sapiens
tgaactccaaattcc

SEQ ID NO: 68093 - DNA, 15 bp, Homo sapiens
ttgaactccaaattc

SEQ ID NO: 68094 - DNA, 15 bp, Homo sapiens
attgaactccaaatt

SEQ ID NO: 68095 - DNA, 15 bp, Homo sapiens
cattgaactccaaat

SEQ ID NO: 68096 - DNA, 15 bp, Homo sapiens
tcattgaactccaaa

SEQ ID NO: 68097 - DNA, 15 bp, Homo sapiens
atcattgaactccaa

SEQ ID NO: 68098 - DNA, 15 bp, Homo sapiens
catcattgaactcca

SEQ ID NO: 68099 - DNA, 15 bp, Homo sapiens
acatcattgaactcc

SEQ ID NO: 68100 - DNA, 15 bp, Homo sapiens
aacatcattgaactc

SEQ ID NO: 68101 - DNA, 15 bp, Homo sapiens
gaacatcattgaact

SEQ ID NO: 68102 - DNA, 15 bp, Homo sapiens
tgaacatcattgaac

SEQ ID NO: 68103 - DNA, 15 bp, Homo sapiens
gtgaacatcattgaa

SEQ ID NO: 68104 - DNA, 15 bp, Homo sapiens
agtgaacatcattga

SEQ ID NO: 68105 - DNA, 15 bp, Homo sapiens
aagtgaacatcattg

SEQ ID NO: 68106 - DNA, 15 bp, Homo sapiens
aaagtgaacatcatt

SEQ ID NO: 68107 - DNA, 15 bp, Homo sapiens
aaaagtgaacatcat

SEQ ID NO: 68108 - DNA, 15 bp, Homo sapiens
gaaaagtgaacatca

SEQ ID NO: 68109 - DNA, 15 bp, Homo sapiens
agaaaagtgaacatc

SEQ ID NO: 68110 - DNA, 15 bp, Homo sapiens
aagaaaagtgaacat

SEQ ID NO: 68111 - DNA, 15 bp, Homo sapiens
taagaaaagtgaaca

SEQ ID NO: 68112 - DNA, 15 bp, Homo sapiens
gtaagaaaagtgaac

SEQ ID NO: 68113 - DNA, 15 bp, Homo sapiens
ggtaagaaaagtgaa

SEQ ID NO: 68114 - DNA, 15 bp, Homo sapiens
gggtaagaaaagtga

SEQ ID NO: 68115 - DNA, 15 bp, Homo sapiens
agggtaagaaaagtg

SEQ ID NO: 68116 - DNA, 15 bp, Homo sapiens
aagggtaagaaaagt

SEQ ID NO: 68117 - DNA, 15 bp, Homo sapiens
gaagggtaagaaaag

SEQ ID NO: 68118 - DNA, 15 bp, Homo sapiens
agaagggtaagaaaa

SEQ ID NO: 68119 - DNA, 15 bp, Homo sapiens
gagaagggtaagaaa

SEQ ID NO: 68120 - DNA, 15 bp, Homo sapiens
cgagaagggtaagaa

SEQ ID NO: 68121 - DNA, 15 bp, Homo sapiens
tcgagaagggtaaga

SEQ ID NO: 68122 - DNA, 15 bp, Homo sapiens
ctcgagaagggtaag

SEQ ID NO: 68123 - DNA, 15 bp, Homo sapiens
gctcgagaagggtaa

SEQ ID NO: 68124 - DNA, 15 bp, Homo sapiens
agctcgagaagggta

SEQ ID NO: 68125 - DNA, 15 bp, Homo sapiens
tagctcgagaagggt

SEQ ID NO: 68126 - DNA, 15 bp, Homo sapiens
ttagctcgagaaggg

SEQ ID NO: 68127 - DNA, 15 bp, Homo sapiens
gttagctcgagaagg

SEQ ID NO: 68128 - DNA, 15 bp, Homo sapiens
cgttagctcgagaag

SEQ ID NO: 68129 - DNA, 15 bp, Homo sapiens
acgttagctcgagaa

SEQ ID NO: 68130 - DNA, 15 bp, Homo sapiens
gacgttagctcgaga

SEQ ID NO: 68131 - DNA, 15 bp, Homo sapiens
tgacgttagctcgag

SEQ ID NO: 68132 - DNA, 15 bp, Homo sapiens
ttgacgttagctcga

SEQ ID NO: 68133 - DNA, 15 bp, Homo sapiens
cttgacgttagctcg

SEQ ID NO: 68134 - DNA, 15 bp, Homo sapiens
ccttgacgttagctc

SEQ ID NO: 68135 - DNA, 15 bp, Homo sapiens
accttgacgttagct

SEQ ID NO: 68136 - DNA, 15 bp, Homo sapiens
taccttgacgttagc

SEQ ID NO: 68137 - DNA, 15 bp, Homo sapiens
gtaccttgacgttag

SEQ ID NO: 68138 - DNA, 15 bp, Homo sapiens
agtaccttgacgtta

SEQ ID NO: 68139 - DNA, 15 bp, Homo sapiens
cagtaccttgacgtt

SEQ ID NO: 68140 - DNA, 15 bp, Homo sapiens
acagtaccttgacgt

SEQ ID NO: 68141 - DNA, 15 bp, Homo sapiens
tacagtaccttgacg

SEQ ID NO: 68142 - DNA, 15 bp, Homo sapiens
ttacagtaccttgac

SEQ ID NO: 68143 - DNA, 15 bp, Homo sapiens
cttacagtaccttga

SEQ ID NO: 68144 - DNA, 15 bp, Homo sapiens
acttacagtaccttg

SEQ ID NO: 68145 - DNA, 15 bp, Homo sapiens
tacttacagtacctt

SEQ ID NO: 68146 - DNA, 15 bp, Homo sapiens
ttacttacagtacct

SEQ ID NO: 68147 - DNA, 15 bp, Homo sapiens
attacttacagtacc

SEQ ID NO: 68148 - DNA, 15 bp, Homo sapiens
tattacttacagtac

SEQ ID NO: 68149 - DNA, 15 bp, Homo sapiens
atattacttacagta

SEQ ID NO: 68150 - DNA, 15 bp, Homo sapiens
aatattacttacagt

SEQ ID NO: 68151 - DNA, 15 bp, Homo sapiens
aaatattacttacag

SEQ ID NO: 68152 - DNA, 15 bp, Homo sapiens
taaatattacttaca

SEQ ID NO: 68153 - DNA, 15 bp, Homo sapiens
ataaatattacttac

SEQ ID NO: 68154 - DNA, 15 bp, Homo sapiens
tataaatattactta

SEQ ID NO: 68155 - DNA, 15 bp, Homo sapiens
ctataaatattactt

SEQ ID NO: 68156 - DNA, 15 bp, Homo sapiens
cctataaatattact

SEQ ID NO: 68157 - DNA, 15 bp, Homo sapiens
tcctataaatattac

SEQ ID NO: 68158 - DNA, 15 bp, Homo sapiens
ttcctataaatatta

SEQ ID NO: 68159 - DNA, 15 bp, Homo sapiens
attcctataaatatt

SEQ ID NO: 68160 - DNA, 15 bp, Homo sapiens
aattcctataaatat

SEQ ID NO: 68161 - DNA, 15 bp, Homo sapiens
gaattcctataaata

SEQ ID NO: 68162 - DNA, 15 bp, Homo sapiens
ggaattcctataaat

SEQ ID NO: 68163 - DNA, 15 bp, Homo sapiens
aggaattcctataaa

SEQ ID NO: 68164 - DNA, 15 bp, Homo sapiens
taggaattcctataa

SEQ ID NO: 68165 - DNA, 15 bp, Homo sapiens
ttaggaattcctata

SEQ ID NO: 68166 - DNA, 15 bp, Homo sapiens
gttaggaattcctat

SEQ ID NO: 68167 - DNA, 15 bp, Homo sapiens
agttaggaattccta

SEQ ID NO: 68168 - DNA, 15 bp, Homo sapiens
cagttaggaattcct

SEQ ID NO: 68169 - DNA, 15 bp, Homo sapiens
tcagttaggaattcc

SEQ ID NO: 68170 - DNA, 15 bp, Homo sapiens
ctcagttaggaattc

SEQ ID NO: 68171 - DNA, 15 bp, Homo sapiens
cctcagttaggaatt

SEQ ID NO: 68172 - DNA, 15 bp, Homo sapiens
acctcagttaggaat

SEQ ID NO: 68173 - DNA, 15 bp, Homo sapiens
aacctcagttaggaa

SEQ ID NO: 68174 - DNA, 15 bp, Homo sapiens
caacctcagttagga

SEQ ID NO: 68175 - DNA, 15 bp, Homo sapiens
tcaacctcagttagg

SEQ ID NO: 68176 - DNA, 15 bp, Homo sapiens
atcaacctcagttag

SEQ ID NO: 68177 - DNA, 15 bp, Homo sapiens
aatcaacctcagtta

SEQ ID NO: 68178 - DNA, 15 bp, Homo sapiens
caatcaacctcagtt

SEQ ID NO: 68179 - DNA, 15 bp, Homo sapiens
acaatcaacctcagt

SEQ ID NO: 68180 - DNA, 15 bp, Homo sapiens
aacaatcaacctcag

SEQ ID NO: 68181 - DNA, 15 bp, Homo sapiens
caacaatcaacctca

SEQ ID NO: 68182 - DNA, 15 bp, Homo sapiens
tcaacaatcaacctc

SEQ ID NO: 68183 - DNA, 15 bp, Homo sapiens
ttcaacaatcaacct

SEQ ID NO: 68184 - DNA, 15 bp, Homo sapiens
attcaacaatcaacc

SEQ ID NO: 68185 - DNA, 15 bp, Homo sapiens
gattcaacaatcaac

SEQ ID NO: 68186 - DNA, 15 bp, Homo sapiens
tgattcaacaatcaa

SEQ ID NO: 68187 - DNA, 15 bp, Homo sapiens
atgattcaacaatca

SEQ ID NO: 68188 - DNA, 15 bp, Homo sapiens
aatgattcaacaatc

SEQ ID NO: 68189 - DNA, 15 bp, Homo sapiens
aaatgattcaacaat

SEQ ID NO: 68190 - DNA, 15 bp, Homo sapiens
aaaatgattcaacaa

SEQ ID NO: 68191 - DNA, 15 bp, Homo sapiens
taaaatgattcaaca

SEQ ID NO: 68192 - DNA, 15 bp, Homo sapiens
ttaaaatgattcaac

SEQ ID NO: 68193 - DNA, 15 bp, Homo sapiens
tttaaaatgattcaa

SEQ ID NO: 68194 - DNA, 15 bp, Homo sapiens
ctttaaaatgattca

SEQ ID NO: 68195 - DNA, 15 bp, Homo sapiens
tctttaaaatgattc

SEQ ID NO: 68196 - DNA, 15 bp, Homo sapiens
ttctttaaaatgatt

SEQ ID NO: 68197 - DNA, 15 bp, Homo sapiens
attctttaaaatgat

SEQ ID NO: 68198 - DNA, 15 bp, Homo sapiens
tattctttaaaatga

SEQ ID NO: 68199 - DNA, 15 bp, Homo sapiens
ttattctttaaaatg

SEQ ID NO: 68200 - DNA, 15 bp, Homo sapiens
tttattctttaaaat

SEQ ID NO: 68201 - DNA, 15 bp, Homo sapiens
ctttattctttaaaa

SEQ ID NO: 68202 - DNA, 15 bp, Homo sapiens
actttattctttaaa

SEQ ID NO: 68203 - DNA, 15 bp, Homo sapiens
gactttattctttaa

SEQ ID NO: 68204 - DNA, 15 bp, Homo sapiens
agactttattcttta

SEQ ID NO: 68205 - DNA, 15 bp, Homo sapiens
gagactttattcttt

SEQ ID NO: 68206 - DNA, 15 bp, Homo sapiens
agagactttattctt

SEQ ID NO: 68207 - DNA, 15 bp, Homo sapiens
tagagactttattct

SEQ ID NO: 68208 - DNA, 15 bp, Homo sapiens
atagagactttattc

SEQ ID NO: 68209 - DNA, 15 bp, Homo sapiens
aatagagactttatt

SEQ ID NO: 68210 - DNA, 15 bp, Homo sapiens
taatagagactttat

SEQ ID NO: 68211 - DNA, 15 bp, Homo sapiens
ataatagagacttta

SEQ ID NO: 68212 - DNA, 15 bp, Homo sapiens
aataatagagacttt

SEQ ID NO: 68213 - DNA, 15 bp, Homo sapiens
aaataatagagactt

SEQ ID NO: 68214 - DNA, 15 bp, Homo sapiens
aaaataatagagact

SEQ ID NO: 68215 - DNA, 15 bp, Homo sapiens
caaaataatagagac

SEQ ID NO: 68216 - DNA, 15 bp, Homo sapiens
tcaaaataatagaga

SEQ ID NO: 68217 - DNA, 15 bp, Homo sapiens
atcaaaataatagag

SEQ ID NO: 68218 - DNA, 15 bp, Homo sapiens
tatcaaaataataga

SEQ ID NO: 68219 - DNA, 15 bp, Homo sapiens
gtatcaaaataatag

SEQ ID NO: 68220 - DNA, 15 bp, Homo sapiens
agtatcaaaataata

SEQ ID NO: 68221 - DNA, 15 bp, Homo sapiens
aagtatcaaaataat

SEQ ID NO: 68222 - DNA, 15 bp, Homo sapiens
taagtatcaaaataa

SEQ ID NO: 68223 - DNA, 15 bp, Homo sapiens
ataagtatcaaaata

SEQ ID NO: 68224 - DNA, 15 bp, Homo sapiens
cataagtatcaaaat

SEQ ID NO: 68225 - DNA, 15 bp, Homo sapiens
acataagtatcaaaa

SEQ ID NO: 68226 - DNA, 15 bp, Homo sapiens
cacataagtatcaaa

SEQ ID NO: 68227 - DNA, 15 bp, Homo sapiens
gcacataagtatcaa

SEQ ID NO: 68228 - DNA, 15 bp, Homo sapiens
ggcacataagtatca

SEQ ID NO: 68229 - DNA, 15 bp, Homo sapiens
aggcacataagtatc

SEQ ID NO: 68230 - DNA, 15 bp, Homo sapiens
aaggcacataagtat

SEQ ID NO: 68231 - DNA, 15 bp, Homo sapiens
aaaggcacataagta

SEQ ID NO: 68232 - DNA, 15 bp, Homo sapiens
aaaaggcacataagt

SEQ ID NO: 68233 - DNA, 15 bp, Homo sapiens
gaaaaggcacataag

SEQ ID NO: 68234 - DNA, 15 bp, Homo sapiens
ggaaaaggcacataa

SEQ ID NO: 68235 - DNA, 15 bp, Homo sapiens
aggaaaaggcacata

SEQ ID NO: 68236 - DNA, 15 bp, Homo sapiens
aaggaaaaggcacat

SEQ ID NO: 68237 - DNA, 15 bp, Homo sapiens
aaaggaaaaggcaca

SEQ ID NO: 68238 - DNA, 15 bp, Homo sapiens
caaaggaaaaggcac

SEQ ID NO: 68239 - DNA, 15 bp, Homo sapiens
ccaaaggaaaaggca

SEQ ID NO: 68240 - DNA, 15 bp, Homo sapiens
cccaaaggaaaaggc

SEQ ID NO: 68241 - DNA, 15 bp, Homo sapiens
ccccaaaggaaaagg

SEQ ID NO: 68242 - DNA, 15 bp, Homo sapiens
cccccaaaggaaaag

SEQ ID NO: 68243 - DNA, 15 bp, Homo sapiens
acccccaaaggaaaa

SEQ ID NO: 68244 - DNA, 15 bp, Homo sapiens
aacccccaaaggaaa

SEQ ID NO: 68245 - DNA, 15 bp, Homo sapiens
taacccccaaaggaa

SEQ ID NO: 68246 - DNA, 15 bp, Homo sapiens
ataacccccaaagga

SEQ ID NO: 68247 - DNA, 15 bp, Homo sapiens
tataacccccaaagg

SEQ ID NO: 68248 - DNA, 15 bp, Homo sapiens
atataacccccaaag

SEQ ID NO: 68249 - DNA, 15 bp, Homo sapiens
aatataacccccaaa

SEQ ID NO: 68250 - DNA, 15 bp, Homo sapiens
gaatataacccccaa

SEQ ID NO: 68251 - DNA, 15 bp, Homo sapiens
ggaatataaccccca

SEQ ID NO: 68252 - DNA, 15 bp, Homo sapiens
gggaatataaccccc

SEQ ID NO: 68253 - DNA, 15 bp, Homo sapiens
agggaatataacccc

SEQ ID NO: 68254 - DNA, 15 bp, Homo sapiens
aagggaatataaccc

SEQ ID NO: 68255 - DNA, 15 bp, Homo sapiens
taagggaatataacc

SEQ ID NO: 68256 - DNA, 15 bp, Homo sapiens
ataagggaatataac

SEQ ID NO: 68257 - DNA, 15 bp, Homo sapiens
aataagggaatataa

SEQ ID NO: 68258 - DNA, 15 bp, Homo sapiens
aaataagggaatata

SEQ ID NO: 68259 - DNA, 15 bp, Homo sapiens
caaataagggaatat

SEQ ID NO: 68260 - DNA, 15 bp, Homo sapiens
tcaaataagggaata

SEQ ID NO: 68261 - DNA, 15 bp, Homo sapiens
atcaaataagggaat

SEQ ID NO: 68262 - DNA, 15 bp, Homo sapiens
tatcaaataagggaa

SEQ ID NO: 68263 - DNA, 15 bp, Homo sapiens
gtatcaaataaggga

SEQ ID NO: 68264 - DNA, 15 bp, Homo sapiens
agtatcaaataaggg

SEQ ID NO: 68265 - DNA, 15 bp, Homo sapiens
aagtatcaaataagg

SEQ ID NO: 68266 - DNA, 15 bp, Homo sapiens
aaagtatcaaataag

SEQ ID NO: 68267 - DNA, 15 bp, Homo sapiens
aaaagtatcaaataa

SEQ ID NO: 68268 - DNA, 15 bp, Homo sapiens
aaaaagtatcaaata

SEQ ID NO: 68269 - DNA, 15 bp, Homo sapiens
aaaaaagtatcaaat

SEQ ID NO: 68270 - DNA, 15 bp, Homo sapiens
aaaaaaagtatcaaa

SEQ ID NO: 68271 - DNA, 15 bp, Homo sapiens
aaaaaaaagtatcaa

SEQ ID NO: 68272 - DNA, 15 bp, Homo sapiens
gaaaaaaaagtatca

SEQ ID NO: 68273 - DNA, 15 bp, Homo sapiens
tgaaaaaaaagtatc

SEQ ID NO: 68274 - DNA, 15 bp, Homo sapiens
ttgaaaaaaaagtat

SEQ ID NO: 68275 - DNA, 15 bp, Homo sapiens
tttgaaaaaaaagta

SEQ ID NO: 68276 - DNA, 15 bp, Homo sapiens
atttgaaaaaaaagt

SEQ ID NO: 68277 - DNA, 15 bp, Homo sapiens
aatttgaaaaaaaag

SEQ ID NO: 68278 - DNA, 15 bp, Homo sapiens
aaatttgaaaaaaaa

SEQ ID NO: 68279 - DNA, 15 bp, Homo sapiens
gaaatttgaaaaaaa

SEQ ID NO: 68280 - DNA, 15 bp, Homo sapiens
tgaaatttgaaaaaa

SEQ ID NO: 68281 - DNA, 15 bp, Homo sapiens
ttgaaatttgaaaaa

SEQ ID NO: 68282 - DNA, 15 bp, Homo sapiens
tttgaaatttgaaaa

SEQ ID NO: 68283 - DNA, 15 bp, Homo sapiens
gtttgaaatttgaaa

SEQ ID NO: 68284 - DNA, 15 bp, Homo sapiens
agtttgaaatttgaa

SEQ ID NO: 68285 - DNA, 15 bp, Homo sapiens
cagtttgaaatttga

SEQ ID NO: 68286 - DNA, 15 bp, Homo sapiens
tcagtttgaaatttg

SEQ ID NO: 68287 - DNA, 15 bp, Homo sapiens
ttcagtttgaaattt

SEQ ID NO: 68288 - DNA, 15 bp, Homo sapiens
attcagtttgaaatt

SEQ ID NO: 68289 - DNA, 15 bp, Homo sapiens
gattcagtttgaaat

SEQ ID NO: 68290 - DNA, 15 bp, Homo sapiens
cgattcagtttgaaa

SEQ ID NO: 68291 - DNA, 15 bp, Homo sapiens
tcgattcagtttgaa

SEQ ID NO: 68292 - DNA, 15 bp, Homo sapiens
ttcgattcagtttga

SEQ ID NO: 68293 - DNA, 15 bp, Homo sapiens
attcgattcagtttg

SEQ ID NO: 68294 - DNA, 15 bp, Homo sapiens
aattcgattcagttt

SEQ ID NO: 68295 - DNA, 15 bp, Homo sapiens
taattcgattcagtt

SEQ ID NO: 68296 - DNA, 15 bp, Homo sapiens
ataattcgattcagt

SEQ ID NO: 68297 - DNA, 15 bp, Homo sapiens
aataattcgattcag

SEQ ID NO: 68298 - DNA, 15 bp, Homo sapiens
gaataattcgattca

SEQ ID NO: 68299 - DNA, 15 bp, Homo sapiens
ggaataattcgattc

SEQ ID NO: 68300 - DNA, 15 bp, Homo sapiens
gggaataattcgatt

SEQ ID NO: 68301 - DNA, 15 bp, Homo sapiens
tgggaataattcgat

SEQ ID NO: 68302 - DNA, 15 bp, Homo sapiens
atgggaataattcga

SEQ ID NO: 68303 - DNA, 15 bp, Homo sapiens
aatgggaataattcg

SEQ ID NO: 68304 - DNA, 15 bp, Homo sapiens
aaatgggaataattc

SEQ ID NO: 68305 - DNA, 15 bp, Homo sapiens
aaaatgggaataatt

SEQ ID NO: 68306 - DNA, 15 bp, Homo sapiens
taaaatgggaataat

SEQ ID NO: 68307 - DNA, 15 bp, Homo sapiens
ctaaaatgggaataa

SEQ ID NO: 68308 - DNA, 15 bp, Homo sapiens
cctaaaatgggaata

SEQ ID NO: 68309 - DNA, 15 bp, Homo sapiens
ccctaaaatgggaat

SEQ ID NO: 68310 - DNA, 15 bp, Homo sapiens
gccctaaaatgggaa

SEQ ID NO: 68311 - DNA, 15 bp, Homo sapiens
agccctaaaatggga

SEQ ID NO: 68312 - DNA, 15 bp, Homo sapiens
aagccctaaaatggg

SEQ ID NO: 68313 - DNA, 15 bp, Homo sapiens
aaagccctaaaatgg

SEQ ID NO: 68314 - DNA, 15 bp, Homo sapiens
caaagccctaaaatg

SEQ ID NO: 68315 - DNA, 15 bp, Homo sapiens
acaaagccctaaaat

SEQ ID NO: 68316 - DNA, 15 bp, Homo sapiens
aacaaagccctaaaa

SEQ ID NO: 68317 - DNA, 15 bp, Homo sapiens
caacaaagccctaaa

SEQ ID NO: 68318 - DNA, 15 bp, Homo sapiens
acaacaaagccctaa

SEQ ID NO: 68319 - DNA, 15 bp, Homo sapiens
cacaacaaagcccta

SEQ ID NO: 68320 - DNA, 15 bp, Homo sapiens
tcacaacaaagccct

SEQ ID NO: 68321 - DNA, 15 bp, Homo sapiens
ttcacaacaaagccc

SEQ ID NO: 68322 - DNA, 15 bp, Homo sapiens
cttcacaacaaagcc

SEQ ID NO: 68323 - DNA, 15 bp, Homo sapiens
acttcacaacaaagc

SEQ ID NO: 68324 - DNA, 15 bp, Homo sapiens
cacttcacaacaaag

SEQ ID NO: 68325 - DNA, 15 bp, Homo sapiens
acacttcacaacaaa

SEQ ID NO: 68326 - DNA, 15 bp, Homo sapiens
cacacttcacaacaa

SEQ ID NO: 68327 - DNA, 15 bp, Homo sapiens
acacacttcacaaca

SEQ ID NO: 68328 - DNA, 15 bp, Homo sapiens
aacacacttcacaac

SEQ ID NO: 68329 - DNA, 15 bp, Homo sapiens
gaacacacttcacaa

SEQ ID NO: 68330 - DNA, 15 bp, Homo sapiens
agaacacacttcaca

SEQ ID NO: 68331 - DNA, 15 bp, Homo sapiens
aagaacacacttcac

SEQ ID NO: 68332 - DNA, 15 bp, Homo sapiens
aaagaacacacttca

SEQ ID NO: 68333 - DNA, 15 bp, Homo sapiens
aaaagaacacacttc

SEQ ID NO: 68334 - DNA, 15 bp, Homo sapiens
aaaaagaacacactt

SEQ ID NO: 68335 - DNA, 15 bp, Homo sapiens
aaaaaagaacacact

SEQ ID NO: 68336 - DNA, 15 bp, Homo sapiens
gaaaaaagaacacac

SEQ ID NO: 68337 - DNA, 15 bp, Homo sapiens
agaaaaaagaacaca

SEQ ID NO: 68338 - DNA, 15 bp, Homo sapiens
gagaaaaaagaacac

SEQ ID NO: 68339 - DNA, 15 bp, Homo sapiens
tgagaaaaaagaaca

SEQ ID NO: 68340 - DNA, 15 bp, Homo sapiens
atgagaaaaaagaac

SEQ ID NO: 68341 - DNA, 15 bp, Homo sapiens
aatgagaaaaaagaa

SEQ ID NO: 68342 - DNA, 15 bp, Homo sapiens
aaatgagaaaaaaga

SEQ ID NO: 68343 - DNA, 15 bp, Homo sapiens
aaaatgagaaaaaag

SEQ ID NO: 68344 - DNA, 15 bp, Homo sapiens
gaaaatgagaaaaaa

SEQ ID NO: 68345 - DNA, 15 bp, Homo sapiens
ggaaaatgagaaaaa

SEQ ID NO: 68346 - DNA, 15 bp, Homo sapiens
aggaaaatgagaaaa

SEQ ID NO: 68347 - DNA, 15 bp, Homo sapiens
aaggaaaatgagaaa

SEQ ID NO: 68348 - DNA, 15 bp, Homo sapiens
taaggaaaatgagaa

SEQ ID NO: 68349 - DNA, 15 bp, Homo sapiens
gtaaggaaaatgaga

SEQ ID NO: 68350 - DNA, 15 bp, Homo sapiens
tgtaaggaaaatgag

SEQ ID NO: 68351 - DNA, 15 bp, Homo sapiens
ctgtaaggaaaatga

SEQ ID NO: 68352 - DNA, 15 bp, Homo sapiens
tctgtaaggaaaatg

SEQ ID NO: 68353 - DNA, 15 bp, Homo sapiens
atctgtaaggaaaat

SEQ ID NO: 68354 - DNA, 15 bp, Homo sapiens
gatctgtaaggaaaa

SEQ ID NO: 68355 - DNA, 15 bp, Homo sapiens
agatctgtaaggaaa

SEQ ID NO: 68356 - DNA, 15 bp, Homo sapiens
aagatctgtaaggaa

SEQ ID NO: 68357 - DNA, 15 bp, Homo sapiens
caagatctgtaagga

SEQ ID NO: 68358 - DNA, 15 bp, Homo sapiens
tcaagatctgtaagg

SEQ ID NO: 68359 - DNA, 15 bp, Homo sapiens
ttcaagatctgtaag

SEQ ID NO: 68360 - DNA, 15 bp, Homo sapiens
cttcaagatctgtaa

SEQ ID NO: 68361 - DNA, 15 bp, Homo sapiens
ccttcaagatctgta

SEQ ID NO: 68362 - DNA, 15 bp, Homo sapiens
cccttcaagatctgt

SEQ ID NO: 68363 - DNA, 15 bp, Homo sapiens
gcccttcaagatctg

SEQ ID NO: 68364 - DNA, 15 bp, Homo sapiens
ggcccttcaagatct

SEQ ID NO: 68365 - DNA, 15 bp, Homo sapiens
aggcccttcaagatc

SEQ ID NO: 68366 - DNA, 15 bp, Homo sapiens
gaggcccttcaagat

SEQ ID NO: 68367 - DNA, 15 bp, Homo sapiens
tgaggcccttcaaga

SEQ ID NO: 68368 - DNA, 15 bp, Homo sapiens
ttgaggcccttcaag

SEQ ID NO: 68369 - DNA, 15 bp, Homo sapiens
gttgaggcccttcaa

SEQ ID NO: 68370 - DNA, 15 bp, Homo sapiens
ggttgaggcccttca

SEQ ID NO: 68371 - DNA, 15 bp, Homo sapiens
aggttgaggcccttc

SEQ ID NO: 68372 - DNA, 15 bp, Homo sapiens
caggttgaggccctt

SEQ ID NO: 68373 - DNA, 15 bp, Homo sapiens
tcaggttgaggccct

SEQ ID NO: 68374 - DNA, 15 bp, Homo sapiens
ttcaggttgaggccc

SEQ ID NO: 68375 - DNA, 15 bp, Homo sapiens
cttcaggttgaggcc

SEQ ID NO: 68376 - DNA, 15 bp, Homo sapiens
ccttcaggttgaggc

SEQ ID NO: 68377 - DNA, 15 bp, Homo sapiens
accttcaggttgagg

SEQ ID NO: 68378 - DNA, 15 bp, Homo sapiens
caccttcaggttgag

SEQ ID NO: 68379 - DNA, 15 bp, Homo sapiens
gcaccttcaggttga

SEQ ID NO: 68380 - DNA, 15 bp, Homo sapiens
tgcaccttcaggttg

SEQ ID NO: 68381 - DNA, 15 bp, Homo sapiens
ctgcaccttcaggtt

SEQ ID NO: 68382 - DNA, 15 bp, Homo sapiens
tctgcaccttcaggt

SEQ ID NO: 68383 - DNA, 15 bp, Homo sapiens
ctctgcaccttcagg

SEQ ID NO: 68384 - DNA, 15 bp, Homo sapiens
actctgcaccttcag

SEQ ID NO: 68385 - DNA, 15 bp, Homo sapiens
cactctgcaccttca

SEQ ID NO: 68386 - DNA, 15 bp, Homo sapiens
ccactctgcaccttc

SEQ ID NO: 68387 - DNA, 15 bp, Homo sapiens
cccactctgcacctt

SEQ ID NO: 68388 - DNA, 15 bp, Homo sapiens
gcccactctgcacct

SEQ ID NO: 68389 - DNA, 15 bp, Homo sapiens
tgcccactctgcacc

SEQ ID NO: 68390 - DNA, 15 bp, Homo sapiens
ctgcccactctgcac

SEQ ID NO: 68391 - DNA, 15 bp, Homo sapiens
tctgcccactctgca

SEQ ID NO: 68392 - DNA, 15 bp, Homo sapiens
gtctgcccactctgc

SEQ ID NO: 68393 - DNA, 15 bp, Homo sapiens
cgtctgcccactctg

SEQ ID NO: 68394 - DNA, 15 bp, Homo sapiens
ccgtctgcccactct

SEQ ID NO: 68395 - DNA, 15 bp, Homo sapiens
accgtctgcccactc

SEQ ID NO: 68396 - DNA, 15 bp, Homo sapiens
caccgtctgcccact

SEQ ID NO: 68397 - DNA, 15 bp, Homo sapiens
ccaccgtctgcccac

SEQ ID NO: 68398 - DNA, 15 bp, Homo sapiens
gccaccgtctgccca

SEQ ID NO: 68399 - DNA, 15 bp, Homo sapiens
ggccaccgtctgccc

SEQ ID NO: 68400 - DNA, 15 bp, Homo sapiens
gggccaccgtctgcc

SEQ ID NO: 68401 - DNA, 15 bp, Homo sapiens
agggccaccgtctgc

SEQ ID NO: 68402 - DNA, 15 bp, Homo sapiens
cagggccaccgtctg

SEQ ID NO: 68403 - DNA, 15 bp, Homo sapiens
ccagggccaccgtct

SEQ ID NO: 68404 - DNA, 15 bp, Homo sapiens
accagggccaccgtc

SEQ ID NO: 68405 - DNA, 15 bp, Homo sapiens
aaccagggccaccgt

SEQ ID NO: 68406 - DNA, 15 bp, Homo sapiens
caaccagggccaccg

SEQ ID NO: 68407 - DNA, 15 bp, Homo sapiens
ccaaccagggccacc

SEQ ID NO: 68408 - DNA, 15 bp, Homo sapiens
tccaaccagggccac

SEQ ID NO: 68409 - DNA, 15 bp, Homo sapiens
ttccaaccagggcca

SEQ ID NO: 68410 - DNA, 15 bp, Homo sapiens
cttccaaccagggcc

SEQ ID NO: 68411 - DNA, 15 bp, Homo sapiens
acttccaaccagggc

SEQ ID NO: 68412 - DNA, 15 bp, Homo sapiens
tacttccaaccaggg

SEQ ID NO: 68413 - DNA, 15 bp, Homo sapiens
ctacttccaaccagg

SEQ ID NO: 68414 - DNA, 15 bp, Homo sapiens
actacttccaaccag

SEQ ID NO: 68415 - DNA, 15 bp, Homo sapiens
cactacttccaacca

SEQ ID NO: 68416 - DNA, 15 bp, Homo sapiens
ccactacttccaacc

SEQ ID NO: 68417 - DNA, 15 bp, Homo sapiens
gccactacttccaac

SEQ ID NO: 68418 - DNA, 15 bp, Homo sapiens
agccactacttccaa

SEQ ID NO: 68419 - DNA, 15 bp, Homo sapiens
cagccactacttcca

SEQ ID NO: 68420 - DNA, 15 bp, Homo sapiens
acagccactacttcc

SEQ ID NO: 68421 - DNA, 15 bp, Homo sapiens
cacagccactacttc

SEQ ID NO: 68422 - DNA, 15 bp, Homo sapiens
ccacagccactactt

SEQ ID NO: 68423 - DNA, 15 bp, Homo sapiens
cccacagccactact

SEQ ID NO: 68424 - DNA, 15 bp, Homo sapiens
tcccacagccactac

SEQ ID NO: 68425 - DNA, 15 bp, Homo sapiens
ttcccacagccacta

SEQ ID NO: 68426 - DNA, 15 bp, Homo sapiens
cttcccacagccact

SEQ ID NO: 68427 - DNA, 15 bp, Homo sapiens
tcttcccacagccac

SEQ ID NO: 68428 - DNA, 15 bp, Homo sapiens
ctcttcccacagcca

SEQ ID NO: 68429 - DNA, 15 bp, Homo sapiens
gctcttcccacagcc

SEQ ID NO: 68430 - DNA, 15 bp, Homo sapiens
tgctcttcccacagc

SEQ ID NO: 68431 - DNA, 15 bp, Homo sapiens
gtgctcttcccacag

SEQ ID NO: 68432 - DNA, 15 bp, Homo sapiens
tgtgctcttcccaca

SEQ ID NO: 68433 - DNA, 15 bp, Homo sapiens
ttgtgctcttcccac

SEQ ID NO: 68434 - DNA, 15 bp, Homo sapiens
gttgtgctcttccca

SEQ ID NO: 68435 - DNA, 15 bp, Homo sapiens
cgttgtgctcttccc

SEQ ID NO: 68436 - DNA, 15 bp, Homo sapiens
ccgttgtgctcttcc

SEQ ID NO: 68437 - DNA, 15 bp, Homo sapiens
accgttgtgctcttc

SEQ ID NO: 68438 - DNA, 15 bp, Homo sapiens
gaccgttgtgctctt

SEQ ID NO: 68439 - DNA, 15 bp, Homo sapiens
ggaccgttgtgctct

SEQ ID NO: 68440 - DNA, 15 bp, Homo sapiens
tggaccgttgtgctc

SEQ ID NO: 68441 - DNA, 15 bp, Homo sapiens
ctggaccgttgtgct

SEQ ID NO: 68442 - DNA, 15 bp, Homo sapiens
gctggaccgttgtgc

SEQ ID NO: 68443 - DNA, 15 bp, Homo sapiens
agctggaccgttgtg

SEQ ID NO: 68444 - DNA, 15 bp, Homo sapiens
cagctggaccgttgt

SEQ ID NO: 68445 - DNA, 15 bp, Homo sapiens
tcagctggaccgttg

SEQ ID NO: 68446 - DNA, 15 bp, Homo sapiens
atcagctggaccgtt

SEQ ID NO: 68447 - DNA, 15 bp, Homo sapiens
tatcagctggaccgt

SEQ ID NO: 68448 - DNA, 15 bp, Homo sapiens
gtatcagctggaccg

SEQ ID NO: 68449 - DNA, 15 bp, Homo sapiens
tgtatcagctggacc

SEQ ID NO: 68450 - DNA, 15 bp, Homo sapiens
ctgtatcagctggac

SEQ ID NO: 68451 - DNA, 15 bp, Homo sapiens
tctgtatcagctgga

SEQ ID NO: 68452 - DNA, 15 bp, Homo sapiens
ctctgtatcagctgg

SEQ ID NO: 68453 - DNA, 15 bp, Homo sapiens
cctctgtatcagctg

SEQ ID NO: 68454 - DNA, 15 bp, Homo sapiens
gcctctgtatcagct

SEQ ID NO: 68455 - DNA, 15 bp, Homo sapiens
agcctctgtatcagc

SEQ ID NO: 68456 - DNA, 15 bp, Homo sapiens
gagcctctgtatcag

SEQ ID NO: 68457 - DNA, 15 bp, Homo sapiens
agagcctctgtatca

SEQ ID NO: 68458 - DNA, 15 bp, Homo sapiens
tagagcctctgtatc

SEQ ID NO: 68459 - DNA, 15 bp, Homo sapiens
atagagcctctgtat

SEQ ID NO: 68460 - DNA, 15 bp, Homo sapiens
catagagcctctgta

SEQ ID NO: 68461 - DNA, 15 bp, Homo sapiens
tcatagagcctctgt

SEQ ID NO: 68462 - DNA, 15 bp, Homo sapiens
gtcatagagcctctg

SEQ ID NO: 68463 - DNA, 15 bp, Homo sapiens
ggtcatagagcctct

SEQ ID NO: 68464 - DNA, 15 bp, Homo sapiens
gggtcatagagcctc

SEQ ID NO: 68465 - DNA, 15 bp, Homo sapiens
agggtcatagagcct

SEQ ID NO: 68466 - DNA, 15 bp, Homo sapiens
cagggtcatagagcc

SEQ ID NO: 68467 - DNA, 15 bp, Homo sapiens
tcagggtcatagagc

SEQ ID NO: 68468 - DNA, 15 bp, Homo sapiens
atcagggtcatagag

SEQ ID NO: 68469 - DNA, 15 bp, Homo sapiens
catcagggtcataga

SEQ ID NO: 68470 - DNA, 15 bp, Homo sapiens
tcatcagggtcatag

SEQ ID NO: 68471 - DNA, 15 bp, Homo sapiens
ctcatcagggtcata

SEQ ID NO: 68472 - DNA, 15 bp, Homo sapiens
cctcatcagggtcat

SEQ ID NO: 68473 - DNA, 15 bp, Homo sapiens
ccctcatcagggtca

SEQ ID NO: 68474 - DNA, 15 bp, Homo sapiens
gccctcatcagggtc

SEQ ID NO: 68475 - DNA, 15 bp, Homo sapiens
tgccctcatcagggt

SEQ ID NO: 68476 - DNA, 15 bp, Homo sapiens
gtgccctcatcaggg

SEQ ID NO: 68477 - DNA, 15 bp, Homo sapiens
tgtgccctcatcagg

SEQ ID NO: 68478 - DNA, 15 bp, Homo sapiens
ctgtgccctcatcag

SEQ ID NO: 68479 - DNA, 15 bp, Homo sapiens
actgtgccctcatca

SEQ ID NO: 68480 - DNA, 15 bp, Homo sapiens
tactgtgccctcatc

SEQ ID NO: 68481 - DNA, 15 bp, Homo sapiens
ttactgtgccctcat

SEQ ID NO: 68482 - DNA, 15 bp, Homo sapiens
cttactgtgccctca

SEQ ID NO: 68483 - DNA, 15 bp, Homo sapiens
acttactgtgccctc

SEQ ID NO: 68484 - DNA, 15 bp, Homo sapiens
cacttactgtgccct

SEQ ID NO: 68485 - DNA, 15 bp, Homo sapiens
ccacttactgtgccc

SEQ ID NO: 68486 - DNA, 15 bp, Homo sapiens
cccacttactgtgcc

SEQ ID NO: 68487 - DNA, 15 bp, Homo sapiens
tcccacttactgtgc

SEQ ID NO: 68488 - DNA, 15 bp, Homo sapiens
ttcccacttactgtg

SEQ ID NO: 68489 - DNA, 15 bp, Homo sapiens
cttcccacttactgt

SEQ ID NO: 68490 - DNA, 15 bp, Homo sapiens
tcttcccacttactg

SEQ ID NO: 68491 - DNA, 15 bp, Homo sapiens
ttcttcccacttact

SEQ ID NO: 68492 - DNA, 15 bp, Homo sapiens
gttcttcccacttac

SEQ ID NO: 68493 - DNA, 15 bp, Homo sapiens
ggttcttcccactta

SEQ ID NO: 68494 - DNA, 15 bp, Homo sapiens
tggttcttcccactt

SEQ ID NO: 68495 - DNA, 15 bp, Homo sapiens
ttggttcttcccact

SEQ ID NO: 68496 - DNA, 15 bp, Homo sapiens
cttggttcttcccac

SEQ ID NO: 68497 - DNA, 15 bp, Homo sapiens
gcttggttcttccca

SEQ ID NO: 68498 - DNA, 15 bp, Homo sapiens
agcttggttcttccc

SEQ ID NO: 68499 - DNA, 15 bp, Homo sapiens
aagcttggttcttcc

SEQ ID NO: 68500 - DNA, 15 bp, Homo sapiens
aaagcttggttcttc

SEQ ID NO: 68501 - DNA, 15 bp, Homo sapiens
gaaagcttggttctt

SEQ ID NO: 68502 - DNA, 15 bp, Homo sapiens
ggaaagcttggttct

SEQ ID NO: 68503 - DNA, 15 bp, Homo sapiens
tggaaagcttggttc

SEQ ID NO: 68504 - DNA, 15 bp, Homo sapiens
ctggaaagcttggtt

SEQ ID NO: 68505 - DNA, 15 bp, Homo sapiens
tctggaaagcttggt

SEQ ID NO: 68506 - DNA, 15 bp, Homo sapiens
ctctggaaagcttgg

SEQ ID NO: 68507 - DNA, 15 bp, Homo sapiens
actctggaaagcttg

SEQ ID NO: 68508 - DNA, 15 bp, Homo sapiens
cactctggaaagctt

SEQ ID NO: 68509 - DNA, 15 bp, Homo sapiens
ccactctggaaagct

SEQ ID NO: 68510 - DNA, 15 bp, Homo sapiens
cccactctggaaagc

SEQ ID NO: 68511 - DNA, 15 bp, Homo sapiens
tcccactctggaaag

SEQ ID NO: 68512 - DNA, 15 bp, Homo sapiens
ttcccactctggaaa

SEQ ID NO: 68513 - DNA, 15 bp, Homo sapiens
cttcccactctggaa

SEQ ID NO: 68514 - DNA, 15 bp, Homo sapiens
gcttcccactctgga

SEQ ID NO: 68515 - DNA, 15 bp, Homo sapiens
agcttcccactctgg

SEQ ID NO: 68516 - DNA, 15 bp, Homo sapiens
cagcttcccactctg

SEQ ID NO: 68517 - DNA, 15 bp, Homo sapiens
ccagcttcccactct

SEQ ID NO: 68518 - DNA, 15 bp, Homo sapiens
tccagcttcccactc

SEQ ID NO: 68519 - DNA, 15 bp, Homo sapiens
atccagcttcccact

SEQ ID NO: 68520 - DNA, 15 bp, Homo sapiens
tatccagcttcccac

SEQ ID NO: 68521 - DNA, 15 bp, Homo sapiens
gtatccagcttccca

SEQ ID NO: 68522 - DNA, 15 bp, Homo sapiens
tgtatccagcttccc

SEQ ID NO: 68523 - DNA, 15 bp, Homo sapiens
ttgtatccagcttcc

SEQ ID NO: 68524 - DNA, 15 bp, Homo sapiens
tttgtatccagcttc

SEQ ID NO: 68525 - DNA, 15 bp, Homo sapiens
atttgtatccagctt

SEQ ID NO: 68526 - DNA, 15 bp, Homo sapiens
aatttgtatccagct

SEQ ID NO: 68527 - DNA, 15 bp, Homo sapiens
caatttgtatccagc

SEQ ID NO: 68528 - DNA, 15 bp, Homo sapiens
ccaatttgtatccag

SEQ ID NO: 68529 - DNA, 15 bp, Homo sapiens
gccaatttgtatcca

SEQ ID NO: 68530 - DNA, 15 bp, Homo sapiens
ggccaatttgtatcc

SEQ ID NO: 68531 - DNA, 15 bp, Homo sapiens
gggccaatttgtatc

SEQ ID NO: 68532 - DNA, 15 bp, Homo sapiens
agggccaatttgtat

SEQ ID NO: 68533 - DNA, 15 bp, Homo sapiens
aagggccaatttgta

SEQ ID NO: 68534 - DNA, 15 bp, Homo sapiens
aaagggccaatttgt

SEQ ID NO: 68535 - DNA, 15 bp, Homo sapiens
caaagggccaatttg

SEQ ID NO: 68536 - DNA, 15 bp, Homo sapiens
tcaaagggccaattt

SEQ ID NO: 68537 - DNA, 15 bp, Homo sapiens
ttcaaagggccaatt

SEQ ID NO: 68538 - DNA, 15 bp, Homo sapiens
tttcaaagggccaat

SEQ ID NO: 68539 - DNA, 15 bp, Homo sapiens
atttcaaagggccaa

SEQ ID NO: 68540 - DNA, 15 bp, Homo sapiens
aatttcaaagggcca

SEQ ID NO: 68541 - DNA, 15 bp, Homo sapiens
caatttcaaagggcc

SEQ ID NO: 68542 - DNA, 15 bp, Homo sapiens
ccaatttcaaagggc

SEQ ID NO: 68543 - DNA, 15 bp, Homo sapiens
accaatttcaaaggg

SEQ ID NO: 68544 - DNA, 15 bp, Homo sapiens
aaccaatttcaaagg

SEQ ID NO: 68545 - DNA, 15 bp, Homo sapiens
aaaccaatttcaaag

SEQ ID NO: 68546 - DNA, 15 bp, Homo sapiens
aaaaccaatttcaaa

SEQ ID NO: 68547 - DNA, 15 bp, Homo sapiens
aaaaaccaatttcaa

SEQ ID NO: 68548 - DNA, 15 bp, Homo sapiens
gaaaaaccaatttca

SEQ ID NO: 68549 - DNA, 15 bp, Homo sapiens
tgaaaaaccaatttc

SEQ ID NO: 68550 - DNA, 15 bp, Homo sapiens
ctgaaaaaccaattt

SEQ ID NO: 68551 - DNA, 15 bp, Homo sapiens
actgaaaaaccaatt

SEQ ID NO: 68552 - DNA, 15 bp, Homo sapiens
tactgaaaaaccaat

SEQ ID NO: 68553 - DNA, 15 bp, Homo sapiens
ttactgaaaaaccaa

SEQ ID NO: 68554 - DNA, 15 bp, Homo sapiens
gttactgaaaaacca

SEQ ID NO: 68555 - DNA, 15 bp, Homo sapiens
tgttactgaaaaacc

SEQ ID NO: 68556 - DNA, 15 bp, Homo sapiens
ttgttactgaaaaac

SEQ ID NO: 68557 - DNA, 15 bp, Homo sapiens
tttgttactgaaaaa

SEQ ID NO: 68558 - DNA, 15 bp, Homo sapiens
atttgttactgaaaa

SEQ ID NO: 68559 - DNA, 15 bp, Homo sapiens
aatttgttactgaaa

SEQ ID NO: 68560 - DNA, 15 bp, Homo sapiens
aaatttgttactgaa

SEQ ID NO: 68561 - DNA, 15 bp, Homo sapiens
caaatttgttactga

SEQ ID NO: 68562 - DNA, 15 bp, Homo sapiens
gcaaatttgttactg

SEQ ID NO: 68563 - DNA, 15 bp, Homo sapiens
cgcaaatttgttact

SEQ ID NO: 68564 - DNA, 15 bp, Homo sapiens
acgcaaatttgttac

SEQ ID NO: 68565 - DNA, 15 bp, Homo sapiens
cacgcaaatttgtta

SEQ ID NO: 68566 - DNA, 15 bp, Homo sapiens
acacgcaaatttgtt

SEQ ID NO: 68567 - DNA, 15 bp, Homo sapiens
cacacgcaaatttgt

SEQ ID NO: 68568 - DNA, 15 bp, Homo sapiens
tcacacgcaaatttg

SEQ ID NO: 68569 - DNA, 15 bp, Homo sapiens
ttcacacgcaaattt

SEQ ID NO: 68570 - DNA, 15 bp, Homo sapiens
attcacacgcaaatt

SEQ ID NO: 68571 - DNA, 15 bp, Homo sapiens
gattcacacgcaaat

SEQ ID NO: 68572 - DNA, 15 bp, Homo sapiens
ggattcacacgcaaa

SEQ ID NO: 68573 - DNA, 15 bp, Homo sapiens
tggattcacacgcaa

SEQ ID NO: 68574 - DNA, 15 bp, Homo sapiens
ctggattcacacgca

SEQ ID NO: 68575 - DNA, 15 bp, Homo sapiens
actggattcacacgc

SEQ ID NO: 68576 - DNA, 15 bp, Homo sapiens
aactggattcacacg

SEQ ID NO: 68577 - DNA, 15 bp, Homo sapiens
aaactggattcacac

SEQ ID NO: 68578 - DNA, 15 bp, Homo sapiens
aaaactggattcaca

SEQ ID NO: 68579 - DNA, 15 bp, Homo sapiens
caaaactggattcac

SEQ ID NO: 68580 - DNA, 15 bp, Homo sapiens
ccaaaactggattca

SEQ ID NO: 68581 - DNA, 15 bp, Homo sapiens
accaaaactggattc

SEQ ID NO: 68582 - DNA, 15 bp, Homo sapiens
taccaaaactggatt

SEQ ID NO: 68583 - DNA, 15 bp, Homo sapiens
ttaccaaaactggat

SEQ ID NO: 68584 - DNA, 15 bp, Homo sapiens
tttaccaaaactgga

SEQ ID NO: 68585 - DNA, 15 bp, Homo sapiens
ttttaccaaaactgg

SEQ ID NO: 68586 - DNA, 15 bp, Homo sapiens
tttttaccaaaactg

SEQ ID NO: 68587 - DNA, 15 bp, Homo sapiens
ctttttaccaaaact

SEQ ID NO: 68588 - DNA, 15 bp, Homo sapiens
gctttttaccaaaac

SEQ ID NO: 68589 - DNA, 15 bp, Homo sapiens
ggctttttaccaaaa

SEQ ID NO: 68590 - DNA, 15 bp, Homo sapiens
aggctttttaccaaa

SEQ ID NO: 68591 - DNA, 15 bp, Homo sapiens
taggctttttaccaa

SEQ ID NO: 68592 - DNA, 15 bp, Homo sapiens
gtaggctttttacca

SEQ ID NO: 68593 - DNA, 15 bp, Homo sapiens
tgtaggctttttacc

SEQ ID NO: 68594 - DNA, 15 bp, Homo sapiens
ttgtaggctttttac

SEQ ID NO: 68595 - DNA, 15 bp, Homo sapiens
tttgtaggcttttta

SEQ ID NO: 68596 - DNA, 15 bp, Homo sapiens
ttttgtaggcttttt

SEQ ID NO: 68597 - DNA, 15 bp, Homo sapiens
attttgtaggctttt

SEQ ID NO: 68598 - DNA, 15 bp, Homo sapiens
cattttgtaggcttt

SEQ ID NO: 68599 - DNA, 15 bp, Homo sapiens
ccattttgtaggctt

SEQ ID NO: 68600 - DNA, 15 bp, Homo sapiens
gccattttgtaggct

SEQ ID NO: 68601 - DNA, 15 bp, Homo sapiens
tgccattttgtaggc

SEQ ID NO: 68602 - DNA, 15 bp, Homo sapiens
ttgccattttgtagg

SEQ ID NO: 68603 - DNA, 15 bp, Homo sapiens
attgccattttgtag

SEQ ID NO: 68604 - DNA, 15 bp, Homo sapiens
cattgccattttgta

SEQ ID NO: 68605 - DNA, 15 bp, Homo sapiens
gcattgccattttgt

SEQ ID NO: 68606 - DNA, 15 bp, Homo sapiens
ggcattgccattttg

SEQ ID NO: 68607 - DNA, 15 bp, Homo sapiens
cggcattgccatttt

SEQ ID NO: 68608 - DNA, 15 bp, Homo sapiens
tcggcattgccattt

SEQ ID NO: 68609 - DNA, 15 bp, Homo sapiens
atcggcattgccatt

SEQ ID NO: 68610 - DNA, 15 bp, Homo sapiens
catcggcattgccat

SEQ ID NO: 68611 - DNA, 15 bp, Homo sapiens
ccatcggcattgcca

SEQ ID NO: 68612 - DNA, 15 bp, Homo sapiens
tccatcggcattgcc

SEQ ID NO: 68613 - DNA, 15 bp, Homo sapiens
atccatcggcattgc

SEQ ID NO: 68614 - DNA, 15 bp, Homo sapiens
tatccatcggcattg

SEQ ID NO: 68615 - DNA, 15 bp, Homo sapiens
ttatccatcggcatt

SEQ ID NO: 68616 - DNA, 15 bp, Homo sapiens
attatccatcggcat

SEQ ID NO: 68617 - DNA, 15 bp, Homo sapiens
cattatccatcggca

SEQ ID NO: 68618 - DNA, 15 bp, Homo sapiens
gcattatccatcggc

SEQ ID NO: 68619 - DNA, 15 bp, Homo sapiens
ggcattatccatcgg

SEQ ID NO: 68620 - DNA, 15 bp, Homo sapiens
aggcattatccatcg

SEQ ID NO: 68621 - DNA, 15 bp, Homo sapiens
aaggcattatccatc

SEQ ID NO: 68622 - DNA, 15 bp, Homo sapiens
gaaggcattatccat

SEQ ID NO: 68623 - DNA, 15 bp, Homo sapiens
tgaaggcattatcca

SEQ ID NO: 68624 - DNA, 15 bp, Homo sapiens
gtgaaggcattatcc

SEQ ID NO: 68625 - DNA, 15 bp, Homo sapiens
tgtgaaggcattatc

SEQ ID NO: 68626 - DNA, 15 bp, Homo sapiens
gtgtgaaggcattat

SEQ ID NO: 68627 - DNA, 15 bp, Homo sapiens
ggtgtgaaggcatta

SEQ ID NO: 68628 - DNA, 15 bp, Homo sapiens
gggtgtgaaggcatt

SEQ ID NO: 68629 - DNA, 15 bp, Homo sapiens
agggtgtgaaggcat

SEQ ID NO: 68630 - DNA, 15 bp, Homo sapiens
aagggtgtgaaggca

SEQ ID NO: 68631 - DNA, 15 bp, Homo sapiens
caagggtgtgaaggc

SEQ ID NO: 68632 - DNA, 15 bp, Homo sapiens
ccaagggtgtgaagg

SEQ ID NO: 68633 - DNA, 15 bp, Homo sapiens
cccaagggtgtgaag

SEQ ID NO: 68634 - DNA, 15 bp, Homo sapiens
gcccaagggtgtgaa

SEQ ID NO: 68635 - DNA, 15 bp, Homo sapiens
agcccaagggtgtga

SEQ ID NO: 68636 - DNA, 15 bp, Homo sapiens
cagcccaagggtgtg

SEQ ID NO: 68637 - DNA, 15 bp, Homo sapiens
ccagcccaagggtgt

SEQ ID NO: 68638 - DNA, 15 bp, Homo sapiens
accagcccaagggtg

SEQ ID NO: 68639 - DNA, 15 bp, Homo sapiens
aaccagcccaagggt

SEQ ID NO: 68640 - DNA, 15 bp, Homo sapiens
aaaccagcccaaggg

SEQ ID NO: 68641 - DNA, 15 bp, Homo sapiens
gaaaccagcccaagg

SEQ ID NO: 68642 - DNA, 15 bp, Homo sapiens
tgaaaccagcccaag

SEQ ID NO: 68643 - DNA, 15 bp, Homo sapiens
gtgaaaccagcccaa

SEQ ID NO: 68644 - DNA, 15 bp, Homo sapiens
tgtgaaaccagccca

SEQ ID NO: 68645 - DNA, 15 bp, Homo sapiens
ttgtgaaaccagccc

SEQ ID NO: 68646 - DNA, 15 bp, Homo sapiens
tttgtgaaaccagcc

SEQ ID NO: 68647 - DNA, 15 bp, Homo sapiens
atttgtgaaaccagc

SEQ ID NO: 68648 - DNA, 15 bp, Homo sapiens
catttgtgaaaccag

SEQ ID NO: 68649 - DNA, 15 bp, Homo sapiens
gcatttgtgaaacca

SEQ ID NO: 68650 - DNA, 15 bp, Homo sapiens
tgcatttgtgaaacc

SEQ ID NO: 68651 - DNA, 15 bp, Homo sapiens
atgcatttgtgaaac

SEQ ID NO: 68652 - DNA, 15 bp, Homo sapiens
aatgcatttgtgaaa

SEQ ID NO: 68653 - DNA, 15 bp, Homo sapiens
taatgcatttgtgaa

SEQ ID NO: 68654 - DNA, 15 bp, Homo sapiens
ttaatgcatttgtga

SEQ ID NO: 68655 - DNA, 15 bp, Homo sapiens
tttaatgcatttgtg

SEQ ID NO: 68656 - DNA, 15 bp, Homo sapiens
atttaatgcatttgt

SEQ ID NO: 68657 - DNA, 15 bp, Homo sapiens
tatttaatgcatttg

SEQ ID NO: 68658 - DNA, 15 bp, Homo sapiens
ttatttaatgcattt

SEQ ID NO: 68659 - DNA, 15 bp, Homo sapiens
tttatttaatgcatt

SEQ ID NO: 68660 - DNA, 15 bp, Homo sapiens
ttttatttaatgcat

SEQ ID NO: 68661 - DNA, 15 bp, Homo sapiens
cttttatttaatgca

SEQ ID NO: 68662 - DNA, 15 bp, Homo sapiens
acttttatttaatgc

SEQ ID NO: 68663 - DNA, 15 bp, Homo sapiens
gacttttatttaatg

SEQ ID NO: 68664 - DNA, 15 bp, Homo sapiens
tgacttttatttaat

SEQ ID NO: 68665 - DNA, 15 bp, Homo sapiens
atgacttttatttaa

SEQ ID NO: 68666 - DNA, 15 bp, Homo sapiens
tatgacttttattta

SEQ ID NO: 68667 - DNA, 15 bp, Homo sapiens
ttatgacttttattt

SEQ ID NO: 68668 - DNA, 15 bp, Homo sapiens
tttatgacttttatt

SEQ ID NO: 68669 - DNA, 15 bp, Homo sapiens
ttttatgacttttat

SEQ ID NO: 68670 - DNA, 15 bp, Homo sapiens
cttttatgactttta

SEQ ID NO: 68671 - DNA, 15 bp, Homo sapiens
gcttttatgactttt

SEQ ID NO: 68672 - DNA, 15 bp, Homo sapiens
agcttttatgacttt

SEQ ID NO: 68673 - DNA, 15 bp, Homo sapiens
cagcttttatgactt

SEQ ID NO: 68674 - DNA, 15 bp, Homo sapiens
acagcttttatgact

SEQ ID NO: 68675 - DNA, 15 bp, Homo sapiens
cacagcttttatgac

SEQ ID NO: 68676 - DNA, 15 bp, Homo sapiens
ccacagcttttatga

SEQ ID NO: 68677 - DNA, 15 bp, Homo sapiens
tccacagcttttatg

SEQ ID NO: 68678 - DNA, 15 bp, Homo sapiens
ttccacagcttttat

SEQ ID NO: 68679 - DNA, 15 bp, Homo sapiens
cttccacagctttta

SEQ ID NO: 68680 - DNA, 15 bp, Homo sapiens
gcttccacagctttt

SEQ ID NO: 68681 - DNA, 15 bp, Homo sapiens
agcttccacagcttt

SEQ ID NO: 68682 - DNA, 15 bp, Homo sapiens
cagcttccacagctt

SEQ ID NO: 68683 - DNA, 15 bp, Homo sapiens
ccagcttccacagct

SEQ ID NO: 68684 - DNA, 15 bp, Homo sapiens
tccagcttccacagc

SEQ ID NO: 68685 - DNA, 15 bp, Homo sapiens
gtccagcttccacag

SEQ ID NO: 68686 - DNA, 15 bp, Homo sapiens
tgtccagcttccaca

SEQ ID NO: 68687 - DNA, 15 bp, Homo sapiens
ttgtccagcttccac

SEQ ID NO: 68688 - DNA, 15 bp, Homo sapiens
tttgtccagcttcca

SEQ ID NO: 68689 - DNA, 15 bp, Homo sapiens
ctttgtccagcttcc

SEQ ID NO: 68690 - DNA, 15 bp, Homo sapiens
gctttgtccagcttc

SEQ ID NO: 68691 - DNA, 15 bp, Homo sapiens
agctttgtccagctt

SEQ ID NO: 68692 - DNA, 15 bp, Homo sapiens
gagctttgtccagct

SEQ ID NO: 68693 - DNA, 15 bp, Homo sapiens
agagctttgtccagc

SEQ ID NO: 68694 - DNA, 15 bp, Homo sapiens
gagagctttgtccag

SEQ ID NO: 68695 - DNA, 15 bp, Homo sapiens
ggagagctttgtcca

SEQ ID NO: 68696 - DNA, 15 bp, Homo sapiens
aggagagctttgtcc

SEQ ID NO: 68697 - DNA, 15 bp, Homo sapiens
gaggagagctttgtc

SEQ ID NO: 68698 - DNA, 15 bp, Homo sapiens
agaggagagctttgt

SEQ ID NO: 68699 - DNA, 15 bp, Homo sapiens
cagaggagagctttg

SEQ ID NO: 68700 - DNA, 15 bp, Homo sapiens
acagaggagagcttt

SEQ ID NO: 68701 - DNA, 15 bp, Homo sapiens
aacagaggagagctt

SEQ ID NO: 68702 - DNA, 15 bp, Homo sapiens
gaacagaggagagct

SEQ ID NO: 68703 - DNA, 15 bp, Homo sapiens
agaacagaggagagc

SEQ ID NO: 68704 - DNA, 15 bp, Homo sapiens
cagaacagaggagag

SEQ ID NO: 68705 - DNA, 15 bp, Homo sapiens
tcagaacagaggaga

SEQ ID NO: 68706 - DNA, 15 bp, Homo sapiens
gtcagaacagaggag

SEQ ID NO: 68707 - DNA, 15 bp, Homo sapiens
agtcagaacagagga

SEQ ID NO: 68708 - DNA, 15 bp, Homo sapiens
tagtcagaacagagg

SEQ ID NO: 68709 - DNA, 15 bp, Homo sapiens
ttagtcagaacagag

SEQ ID NO: 68710 - DNA, 15 bp, Homo sapiens
cttagtcagaacaga

SEQ ID NO: 68711 - DNA, 15 bp, Homo sapiens
gcttagtcagaacag

SEQ ID NO: 68712 - DNA, 15 bp, Homo sapiens
agcttagtcagaaca

SEQ ID NO: 68713 - DNA, 15 bp, Homo sapiens
aagcttagtcagaac

SEQ ID NO: 68714 - DNA, 15 bp, Homo sapiens
aaagcttagtcagaa

SEQ ID NO: 68715 - DNA, 15 bp, Homo sapiens
gaaagcttagtcaga

SEQ ID NO: 68716 - DNA, 15 bp, Homo sapiens
tgaaagcttagtcag

SEQ ID NO: 68717 - DNA, 15 bp, Homo sapiens
atgaaagcttagtca

SEQ ID NO: 68718 - DNA, 15 bp, Homo sapiens
tatgaaagcttagtc

SEQ ID NO: 68719 - DNA, 15 bp, Homo sapiens
ttatgaaagcttagt

SEQ ID NO: 68720 - DNA, 15 bp, Homo sapiens
gttatgaaagcttag

SEQ ID NO: 68721 - DNA, 15 bp, Homo sapiens
tgttatgaaagctta

SEQ ID NO: 68722 - DNA, 15 bp, Homo sapiens
gtgttatgaaagctt

SEQ ID NO: 68723 - DNA, 15 bp, Homo sapiens
tgtgttatgaaagct

SEQ ID NO: 68724 - DNA, 15 bp, Homo sapiens
atgtgttatgaaagc

SEQ ID NO: 68725 - DNA, 15 bp, Homo sapiens
aatgtgttatgaaag

SEQ ID NO: 68726 - DNA, 15 bp, Homo sapiens
taatgtgttatgaaa

SEQ ID NO: 68727 - DNA, 15 bp, Homo sapiens
ttaatgtgttatgaa

SEQ ID NO: 68728 - DNA, 15 bp, Homo sapiens
tttaatgtgttatga

SEQ ID NO: 68729 - DNA, 15 bp, Homo sapiens
atttaatgtgttatg

SEQ ID NO: 68730 - DNA, 15 bp, Homo sapiens
aatttaatgtgttat

SEQ ID NO: 68731 - DNA, 15 bp, Homo sapiens
taatttaatgtgtta

SEQ ID NO: 68732 - DNA, 15 bp, Homo sapiens
gtaatttaatgtgtt

SEQ ID NO: 68733 - DNA, 15 bp, Homo sapiens
agtaatttaatgtgt

SEQ ID NO: 68734 - DNA, 15 bp, Homo sapiens
cagtaatttaatgtg

SEQ ID NO: 68735 - DNA, 15 bp, Homo sapiens
gcagtaatttaatgt

SEQ ID NO: 68736 - DNA, 15 bp, Homo sapiens
tgcagtaatttaatg

SEQ ID NO: 68737 - DNA, 15 bp, Homo sapiens
ttgcagtaatttaat

SEQ ID NO: 68738 - DNA, 15 bp, Homo sapiens
tttgcagtaatttaa

SEQ ID NO: 68739 - DNA, 15 bp, Homo sapiens
ctttgcagtaattta

SEQ ID NO: 68740 - DNA, 15 bp, Homo sapiens
gctttgcagtaattt

SEQ ID NO: 68741 - DNA, 15 bp, Homo sapiens
tgctttgcagtaatt

SEQ ID NO: 68742 - DNA, 15 bp, Homo sapiens
ctgctttgcagtaat

SEQ ID NO: 68743 - DNA, 15 bp, Homo sapiens
actgctttgcagtaa

SEQ ID NO: 68744 - DNA, 15 bp, Homo sapiens
gactgctttgcagta

SEQ ID NO: 68745 - DNA, 15 bp, Homo sapiens
agactgctttgcagt

SEQ ID NO: 68746 - DNA, 15 bp, Homo sapiens
tagactgctttgcag

SEQ ID NO: 68747 - DNA, 15 bp, Homo sapiens
gtagactgctttgca

SEQ ID NO: 68748 - DNA, 15 bp, Homo sapiens
tgtagactgctttgc

SEQ ID NO: 68749 - DNA, 15 bp, Homo sapiens
ttgtagactgctttg

SEQ ID NO: 68750 - DNA, 15 bp, Homo sapiens
tttgtagactgcttt

SEQ ID NO: 68751 - DNA, 15 bp, Homo sapiens
gtttgtagactgctt

SEQ ID NO: 68752 - DNA, 15 bp, Homo sapiens
ggtttgtagactgct

SEQ ID NO: 68753 - DNA, 15 bp, Homo sapiens
tggtttgtagactgc

SEQ ID NO: 68754 - DNA, 15 bp, Homo sapiens
gtggtttgtagactg

SEQ ID NO: 68755 - DNA, 15 bp, Homo sapiens
agtggtttgtagact

SEQ ID NO: 68756 - DNA, 15 bp, Homo sapiens
cagtggtttgtagac

SEQ ID NO: 68757 - DNA, 15 bp, Homo sapiens
tcagtggtttgtaga

SEQ ID NO: 68758 - DNA, 15 bp, Homo sapiens
ctcagtggtttgtag

SEQ ID NO: 68759 - DNA, 15 bp, Homo sapiens
tctcagtggtttgta

SEQ ID NO: 68760 - DNA, 15 bp, Homo sapiens
ctctcagtggtttgt

SEQ ID NO: 68761 - DNA, 15 bp, Homo sapiens
cctctcagtggtttg

SEQ ID NO: 68762 - DNA, 15 bp, Homo sapiens
tcctctcagtggttt

SEQ ID NO: 68763 - DNA, 15 bp, Homo sapiens
atcctctcagtggtt

SEQ ID NO: 68764 - DNA, 15 bp, Homo sapiens
aatcctctcagtggt

SEQ ID NO: 68765 - DNA, 15 bp, Homo sapiens
taatcctctcagtgg

SEQ ID NO: 68766 - DNA, 15 bp, Homo sapiens
gtaatcctctcagtg

SEQ ID NO: 68767 - DNA, 15 bp, Homo sapiens
agtaatcctctcagt

SEQ ID NO: 68768 - DNA, 15 bp, Homo sapiens
aagtaatcctctcag

SEQ ID NO: 68769 - DNA, 15 bp, Homo sapiens
aaagtaatcctctca

SEQ ID NO: 68770 - DNA, 15 bp, Homo sapiens
gaaagtaatcctctc

SEQ ID NO: 68771 - DNA, 15 bp, Homo sapiens
tgaaagtaatcctct

SEQ ID NO: 68772 - DNA, 15 bp, Homo sapiens
ttgaaagtaatcctc

SEQ ID NO: 68773 - DNA, 15 bp, Homo sapiens
attgaaagtaatcct

SEQ ID NO: 68774 - DNA, 15 bp, Homo sapiens
cattgaaagtaatcc

SEQ ID NO: 68775 - DNA, 15 bp, Homo sapiens
tcattgaaagtaatc

SEQ ID NO: 68776 - DNA, 15 bp, Homo sapiens
ctcattgaaagtaat

SEQ ID NO: 68777 - DNA, 15 bp, Homo sapiens
actcattgaaagtaa

SEQ ID NO: 68778 - DNA, 15 bp, Homo sapiens
aactcattgaaagta

SEQ ID NO: 68779 - DNA, 15 bp, Homo sapiens
taactcattgaaagt

SEQ ID NO: 68780 - DNA, 15 bp, Homo sapiens
ctaactcattgaaag

SEQ ID NO: 68781 - DNA, 15 bp, Homo sapiens
tctaactcattgaaa

SEQ ID NO: 68782 - DNA, 15 bp, Homo sapiens
ctctaactcattgaa

SEQ ID NO: 68783 - DNA, 15 bp, Homo sapiens
actctaactcattga

SEQ ID NO: 68784 - DNA, 15 bp, Homo sapiens
aactctaactcattg

SEQ ID NO: 68785 - DNA, 15 bp, Homo sapiens
aaactctaactcatt

SEQ ID NO: 68786 - DNA, 15 bp, Homo sapiens
caaactctaactcat

SEQ ID NO: 68787 - DNA, 15 bp, Homo sapiens
ccaaactctaactca

SEQ ID NO: 68788 - DNA, 15 bp, Homo sapiens
accaaactctaactc

SEQ ID NO: 68789 - DNA, 15 bp, Homo sapiens
gaccaaactctaact

SEQ ID NO: 68790 - DNA, 15 bp, Homo sapiens
tgaccaaactctaac

SEQ ID NO: 68791 - DNA, 15 bp, Homo sapiens
ttgaccaaactctaa

SEQ ID NO: 68792 - DNA, 15 bp, Homo sapiens
tttgaccaaactcta

SEQ ID NO: 68793 - DNA, 15 bp, Homo sapiens
gtttgaccaaactct

SEQ ID NO: 68794 - DNA, 15 bp, Homo sapiens
tgtttgaccaaactc

SEQ ID NO: 68795 - DNA, 15 bp, Homo sapiens
atgtttgaccaaact

SEQ ID NO: 68796 - DNA, 15 bp, Homo sapiens
tatgtttgaccaaac

SEQ ID NO: 68797 - DNA, 15 bp, Homo sapiens
gtatgtttgaccaaa

SEQ ID NO: 68798 - DNA, 15 bp, Homo sapiens
agtatgtttgaccaa

SEQ ID NO: 68799 - DNA, 15 bp, Homo sapiens
gagtatgtttgacca

SEQ ID NO: 68800 - DNA, 15 bp, Homo sapiens
ggagtatgtttgacc

SEQ ID NO: 68801 - DNA, 15 bp, Homo sapiens
tggagtatgtttgac

SEQ ID NO: 68802 - DNA, 15 bp, Homo sapiens
atggagtatgtttga

SEQ ID NO: 68803 - DNA, 15 bp, Homo sapiens
tatggagtatgtttg

SEQ ID NO: 68804 - DNA, 15 bp, Homo sapiens
atatggagtatgttt

SEQ ID NO: 68805 - DNA, 15 bp, Homo sapiens
tatatggagtatgtt

SEQ ID NO: 68806 - DNA, 15 bp, Homo sapiens
ctatatggagtatgt

SEQ ID NO: 68807 - DNA, 15 bp, Homo sapiens
gctatatggagtatg

SEQ ID NO: 68808 - DNA, 15 bp, Homo sapiens
tgctatatggagtat

SEQ ID NO: 68809 - DNA, 15 bp, Homo sapiens
ttgctatatggagta

SEQ ID NO: 68810 - DNA, 15 bp, Homo sapiens
attgctatatggagt

SEQ ID NO: 68811 - DNA, 15 bp, Homo sapiens
aattgctatatggag

SEQ ID NO: 68812 - DNA, 15 bp, Homo sapiens
caattgctatatgga

SEQ ID NO: 68813 - DNA, 15 bp, Homo sapiens
acaattgctatatgg

SEQ ID NO: 68814 - DNA, 15 bp, Homo sapiens
aacaattgctatatg

SEQ ID NO: 68815 - DNA, 15 bp, Homo sapiens
caacaattgctatat

SEQ ID NO: 68816 - DNA, 15 bp, Homo sapiens
ccaacaattgctata

SEQ ID NO: 68817 - DNA, 15 bp, Homo sapiens
cccaacaattgctat

SEQ ID NO: 68818 - DNA, 15 bp, Homo sapiens
tcccaacaattgcta

SEQ ID NO: 68819 - DNA, 15 bp, Homo sapiens
ttcccaacaattgct

SEQ ID NO: 68820 - DNA, 15 bp, Homo sapiens
gttcccaacaattgc

SEQ ID NO: 68821 - DNA, 15 bp, Homo sapiens
tgttcccaacaattg

SEQ ID NO: 68822 - DNA, 15 bp, Homo sapiens
ttgttcccaacaatt

SEQ ID NO: 68823 - DNA, 15 bp, Homo sapiens
attgttcccaacaat

SEQ ID NO: 68824 - DNA, 15 bp, Homo sapiens
aattgttcccaacaa

SEQ ID NO: 68825 - DNA, 15 bp, Homo sapiens
caattgttcccaaca

SEQ ID NO: 68826 - DNA, 15 bp, Homo sapiens
tcaattgttcccaac

SEQ ID NO: 68827 - DNA, 15 bp, Homo sapiens
atcaattgttcccaa

SEQ ID NO: 68828 - DNA, 15 bp, Homo sapiens
catcaattgttccca

SEQ ID NO: 68829 - DNA, 15 bp, Homo sapiens
tcatcaattgttccc

SEQ ID NO: 68830 - DNA, 15 bp, Homo sapiens
gtcatcaattgttcc

SEQ ID NO: 68831 - DNA, 15 bp, Homo sapiens
tgtcatcaattgttc

SEQ ID NO: 68832 - DNA, 15 bp, Homo sapiens
ttgtcatcaattgtt

SEQ ID NO: 68833 - DNA, 15 bp, Homo sapiens
attgtcatcaattgt

SEQ ID NO: 68834 - DNA, 15 bp, Homo sapiens
aattgtcatcaattg

SEQ ID NO: 68835 - DNA, 15 bp, Homo sapiens
taattgtcatcaatt

SEQ ID NO: 68836 - DNA, 15 bp, Homo sapiens
ctaattgtcatcaat

SEQ ID NO: 68837 - DNA, 15 bp, Homo sapiens
cctaattgtcatcaa

SEQ ID NO: 68838 - DNA, 15 bp, Homo sapiens
ccctaattgtcatca

SEQ ID NO: 68839 - DNA, 15 bp, Homo sapiens
accctaattgtcatc

SEQ ID NO: 68840 - DNA, 15 bp, Homo sapiens
gaccctaattgtcat

SEQ ID NO: 68841 - DNA, 15 bp, Homo sapiens
tgaccctaattgtca

SEQ ID NO: 68842 - DNA, 15 bp, Homo sapiens
gtgaccctaattgtc

SEQ ID NO: 68843 - DNA, 15 bp, Homo sapiens
ggtgaccctaattgt

SEQ ID NO: 68844 - DNA, 15 bp, Homo sapiens
tggtgaccctaattg

SEQ ID NO: 68845 - DNA, 15 bp, Homo sapiens
ctggtgaccctaatt

SEQ ID NO: 68846 - DNA, 15 bp, Homo sapiens
tctggtgaccctaat

SEQ ID NO: 68847 - DNA, 15 bp, Homo sapiens
atctggtgaccctaa

SEQ ID NO: 68848 - DNA, 15 bp, Homo sapiens
tatctggtgacccta

SEQ ID NO: 68849 - DNA, 15 bp, Homo sapiens
atatctggtgaccct

SEQ ID NO: 68850 - DNA, 15 bp, Homo sapiens
aatatctggtgaccc

SEQ ID NO: 68851 - DNA, 15 bp, Homo sapiens
aaatatctggtgacc

SEQ ID NO: 68852 - DNA, 15 bp, Homo sapiens
aaaatatctggtgac

SEQ ID NO: 68853 - DNA, 15 bp, Homo sapiens
taaaatatctggtga

SEQ ID NO: 68854 - DNA, 15 bp, Homo sapiens
ctaaaatatctggtg

SEQ ID NO: 68855 - DNA, 15 bp, Homo sapiens
cctaaaatatctggt

SEQ ID NO: 68856 - DNA, 15 bp, Homo sapiens
tcctaaaatatctgg

SEQ ID NO: 68857 - DNA, 15 bp, Homo sapiens
gtcctaaaatatctg

SEQ ID NO: 68858 - DNA, 15 bp, Homo sapiens
tgtcctaaaatatct

SEQ ID NO: 68859 - DNA, 15 bp, Homo sapiens
ctgtcctaaaatatc

SEQ ID NO: 68860 - DNA, 15 bp, Homo sapiens
gctgtcctaaaatat

SEQ ID NO: 68861 - DNA, 15 bp, Homo sapiens
tgctgtcctaaaata

SEQ ID NO: 68862 - DNA, 15 bp, Homo sapiens
ttgctgtcctaaaat

SEQ ID NO: 68863 - DNA, 15 bp, Homo sapiens
attgctgtcctaaaa

SEQ ID NO: 68864 - DNA, 15 bp, Homo sapiens
aattgctgtcctaaa

SEQ ID NO: 68865 - DNA, 15 bp, Homo sapiens
taattgctgtcctaa

SEQ ID NO: 68866 - DNA, 15 bp, Homo sapiens
ttaattgctgtccta

SEQ ID NO: 68867 - DNA, 15 bp, Homo sapiens
tttaattgctgtcct

SEQ ID NO: 68868 - DNA, 15 bp, Homo sapiens
atttaattgctgtcc

SEQ ID NO: 68869 - DNA, 15 bp, Homo sapiens
aatttaattgctgtc

SEQ ID NO: 68870 - DNA, 15 bp, Homo sapiens
gaatttaattgctgt

SEQ ID NO: 68871 - DNA, 15 bp, Homo sapiens
tgaatttaattgctg

SEQ ID NO: 68872 - DNA, 15 bp, Homo sapiens
atgaatttaattgct

SEQ ID NO: 68873 - DNA, 15 bp, Homo sapiens
gatgaatttaattgc

SEQ ID NO: 68874 - DNA, 15 bp, Homo sapiens
ggatgaatttaattg

SEQ ID NO: 68875 - DNA, 15 bp, Homo sapiens
tggatgaatttaatt

SEQ ID NO: 68876 - DNA, 15 bp, Homo sapiens
ttggatgaatttaat

SEQ ID NO: 68877 - DNA, 15 bp, Homo sapiens
cttggatgaatttaa

SEQ ID NO: 68878 - DNA, 15 bp, Homo sapiens
tcttggatgaattta

SEQ ID NO: 68879 - DNA, 15 bp, Homo sapiens
gtcttggatgaattt

SEQ ID NO: 68880 - DNA, 15 bp, Homo sapiens
tgtcttggatgaatt

SEQ ID NO: 68881 - DNA, 15 bp, Homo sapiens
ctgtcttggatgaat

SEQ ID NO: 68882 - DNA, 15 bp, Homo sapiens
actgtcttggatgaa

SEQ ID NO: 68883 - DNA, 15 bp, Homo sapiens
aactgtcttggatga

SEQ ID NO: 68884 - DNA, 15 bp, Homo sapiens
caactgtcttggatg

SEQ ID NO: 68885 - DNA, 15 bp, Homo sapiens
tcaactgtcttggat

SEQ ID NO: 68886 - DNA, 15 bp, Homo sapiens
ctcaactgtcttgga

SEQ ID NO: 68887 - DNA, 15 bp, Homo sapiens
actcaactgtcttgg

SEQ ID NO: 68888 - DNA, 15 bp, Homo sapiens
aactcaactgtcttg

SEQ ID NO: 68889 - DNA, 15 bp, Homo sapiens
aaactcaactgtctt

SEQ ID NO: 68890 - DNA, 15 bp, Homo sapiens
aaaactcaactgtct

SEQ ID NO: 68891 - DNA, 15 bp, Homo sapiens
gaaaactcaactgtc

SEQ ID NO: 68892 - DNA, 15 bp, Homo sapiens
agaaaactcaactgt

SEQ ID NO: 68893 - DNA, 15 bp, Homo sapiens
aagaaaactcaactg

SEQ ID NO: 68894 - DNA, 15 bp, Homo sapiens
taagaaaactcaact

SEQ ID NO: 68895 - DNA, 15 bp, Homo sapiens
ttaagaaaactcaac

SEQ ID NO: 68896 - DNA, 15 bp, Homo sapiens
tttaagaaaactcaa

SEQ ID NO: 68897 - DNA, 15 bp, Homo sapiens
gtttaagaaaactca

SEQ ID NO: 68898 - DNA, 15 bp, Homo sapiens
agtttaagaaaactc

SEQ ID NO: 68899 - DNA, 15 bp, Homo sapiens
aagtttaagaaaact

SEQ ID NO: 68900 - DNA, 15 bp, Homo sapiens
taagtttaagaaaac

SEQ ID NO: 68901 - DNA, 15 bp, Homo sapiens
ctaagtttaagaaaa

SEQ ID NO: 68902 - DNA, 15 bp, Homo sapiens
cctaagtttaagaaa

SEQ ID NO: 68903 - DNA, 15 bp, Homo sapiens
tcctaagtttaagaa

SEQ ID NO: 68904 - DNA, 15 bp, Homo sapiens
ttcctaagtttaaga

SEQ ID NO: 68905 - DNA, 15 bp, Homo sapiens
attcctaagtttaag

SEQ ID NO: 68906 - DNA, 15 bp, Homo sapiens
tattcctaagtttaa

SEQ ID NO: 68907 - DNA, 15 bp, Homo sapiens
atattcctaagttta

SEQ ID NO: 68908 - DNA, 15 bp, Homo sapiens
gatattcctaagttt

SEQ ID NO: 68909 - DNA, 15 bp, Homo sapiens
agatattcctaagtt

SEQ ID NO: 68910 - DNA, 15 bp, Homo sapiens
tagatattcctaagt

SEQ ID NO: 68911 - DNA, 15 bp, Homo sapiens
ttagatattcctaag

SEQ ID NO: 68912 - DNA, 15 bp, Homo sapiens
cttagatattcctaa

SEQ ID NO: 68913 - DNA, 15 bp, Homo sapiens
ccttagatattccta

SEQ ID NO: 68914 - DNA, 15 bp, Homo sapiens
cccttagatattcct

SEQ ID NO: 68915 - DNA, 15 bp, Homo sapiens
ccccttagatattcc

SEQ ID NO: 68916 - DNA, 15 bp, Homo sapiens
cccccttagatattc

SEQ ID NO: 68917 - DNA, 15 bp, Homo sapiens
tcccccttagatatt

SEQ ID NO: 68918 - DNA, 15 bp, Homo sapiens
ttcccccttagatat

SEQ ID NO: 68919 - DNA, 15 bp, Homo sapiens
tttcccccttagata

SEQ ID NO: 68920 - DNA, 15 bp, Homo sapiens
ctttcccccttagat

SEQ ID NO: 68921 - DNA, 15 bp, Homo sapiens
actttcccccttaga

SEQ ID NO: 68922 - DNA, 15 bp, Homo sapiens
cactttcccccttag

SEQ ID NO: 68923 - DNA, 15 bp, Homo sapiens
ccactttccccctta

SEQ ID NO: 68924 - DNA, 15 bp, Homo sapiens
cccactttccccctt

SEQ ID NO: 68925 - DNA, 15 bp, Homo sapiens
tcccactttccccct

SEQ ID NO: 68926 - DNA, 15 bp, Homo sapiens
atcccactttccccc

SEQ ID NO: 68927 - DNA, 15 bp, Homo sapiens
catcccactttcccc

SEQ ID NO: 68928 - DNA, 15 bp, Homo sapiens
ccatcccactttccc

SEQ ID NO: 68929 - DNA, 15 bp, Homo sapiens
accatcccactttcc

SEQ ID NO: 68930 - DNA, 15 bp, Homo sapiens
gaccatcccactttc

SEQ ID NO: 68931 - DNA, 15 bp, Homo sapiens
agaccatcccacttt

SEQ ID NO: 68932 - DNA, 15 bp, Homo sapiens
gagaccatcccactt

SEQ ID NO: 68933 - DNA, 15 bp, Homo sapiens
agagaccatcccact

SEQ ID NO: 68934 - DNA, 15 bp, Homo sapiens
aagagaccatcccac

SEQ ID NO: 68935 - DNA, 15 bp, Homo sapiens
taagagaccatccca

SEQ ID NO: 68936 - DNA, 15 bp, Homo sapiens
ttaagagaccatccc

SEQ ID NO: 68937 - DNA, 15 bp, Homo sapiens
cttaagagaccatcc

SEQ ID NO: 68938 - DNA, 15 bp, Homo sapiens
tcttaagagaccatc

SEQ ID NO: 68939 - DNA, 15 bp, Homo sapiens
ttcttaagagaccat

SEQ ID NO: 68940 - DNA, 15 bp, Homo sapiens
tttcttaagagacca

SEQ ID NO: 68941 - DNA, 15 bp, Homo sapiens
gtttcttaagagacc

SEQ ID NO: 68942 - DNA, 15 bp, Homo sapiens
agtttcttaagagac

SEQ ID NO: 68943 - DNA, 15 bp, Homo sapiens
tagtttcttaagaga

SEQ ID NO: 68944 - DNA, 15 bp, Homo sapiens
ctagtttcttaagag

SEQ ID NO: 68945 - DNA, 15 bp, Homo sapiens
actagtttcttaaga

SEQ ID NO: 68946 - DNA, 15 bp, Homo sapiens
gactagtttcttaag

SEQ ID NO: 68947 - DNA, 15 bp, Homo sapiens
agactagtttcttaa

SEQ ID NO: 68948 - DNA, 15 bp, Homo sapiens
gagactagtttctta

SEQ ID NO: 68949 - DNA, 15 bp, Homo sapiens
agagactagtttctt

SEQ ID NO: 68950 - DNA, 15 bp, Homo sapiens
aagagactagtttct

SEQ ID NO: 68951 - DNA, 15 bp, Homo sapiens
caagagactagtttc

SEQ ID NO: 68952 - DNA, 15 bp, Homo sapiens
tcaagagactagttt

SEQ ID NO: 68953 - DNA, 15 bp, Homo sapiens
ctcaagagactagtt

SEQ ID NO: 68954 - DNA, 15 bp, Homo sapiens
tctcaagagactagt

SEQ ID NO: 68955 - DNA, 15 bp, Homo sapiens
ttctcaagagactag

SEQ ID NO: 68956 - DNA, 15 bp, Homo sapiens
tttctcaagagacta

SEQ ID NO: 68957 - DNA, 15 bp, Homo sapiens
ttttctcaagagact

SEQ ID NO: 68958 - DNA, 15 bp, Homo sapiens
attttctcaagagac

SEQ ID NO: 68959 - DNA, 15 bp, Homo sapiens
aattttctcaagaga

SEQ ID NO: 68960 - DNA, 15 bp, Homo sapiens
gaattttctcaagag

SEQ ID NO: 68961 - DNA, 15 bp, Homo sapiens
agaattttctcaaga

SEQ ID NO: 68962 - DNA, 15 bp, Homo sapiens
tagaattttctcaag

SEQ ID NO: 68963 - DNA, 15 bp, Homo sapiens
ctagaattttctcaa

SEQ ID NO: 68964 - DNA, 15 bp, Homo sapiens
tctagaattttctca

SEQ ID NO: 68965 - DNA, 15 bp, Homo sapiens
ttctagaattttctc

SEQ ID NO: 68966 - DNA, 15 bp, Homo sapiens
tttctagaattttct

SEQ ID NO: 68967 - DNA, 15 bp, Homo sapiens
gtttctagaattttc

SEQ ID NO: 68968 - DNA, 15 bp, Homo sapiens
tgtttctagaatttt

SEQ ID NO: 68969 - DNA, 15 bp, Homo sapiens
gtgtttctagaattt

SEQ ID NO: 68970 - DNA, 15 bp, Homo sapiens
tgtgtttctagaatt

SEQ ID NO: 68971 - DNA, 15 bp, Homo sapiens
ctgtgtttctagaat

SEQ ID NO: 68972 - DNA, 15 bp, Homo sapiens
tctgtgtttctagaa

SEQ ID NO: 68973 - DNA, 15 bp, Homo sapiens
ctctgtgtttctaga

SEQ ID NO: 68974 - DNA, 15 bp, Homo sapiens
tctctgtgtttctag

SEQ ID NO: 68975 - DNA, 15 bp, Homo sapiens
gtctctgtgtttcta

SEQ ID NO: 68976 - DNA, 15 bp, Homo sapiens
tgtctctgtgtttct

SEQ ID NO: 68977 - DNA, 15 bp, Homo sapiens
ctgtctctgtgtttc

SEQ ID NO: 68978 - DNA, 15 bp, Homo sapiens
actgtctctgtgttt

SEQ ID NO: 68979 - DNA, 15 bp, Homo sapiens
tactgtctctgtgtt

SEQ ID NO: 68980 - DNA, 15 bp, Homo sapiens
ttactgtctctgtgt

SEQ ID NO: 68981 - DNA, 15 bp, Homo sapiens
attactgtctctgtg

SEQ ID NO: 68982 - DNA, 15 bp, Homo sapiens
tattactgtctctgt

SEQ ID NO: 68983 - DNA, 15 bp, Homo sapiens
ctattactgtctctg

SEQ ID NO: 68984 - DNA, 15 bp, Homo sapiens
gctattactgtctct

SEQ ID NO: 68985 - DNA, 15 bp, Homo sapiens
ggctattactgtctc

SEQ ID NO: 68986 - DNA, 15 bp, Homo sapiens
aggctattactgtct

SEQ ID NO: 68987 - DNA, 15 bp, Homo sapiens
taggctattactgtc

SEQ ID NO: 68988 - DNA, 15 bp, Homo sapiens
ctaggctattactgt

SEQ ID NO: 68989 - DNA, 15 bp, Homo sapiens
cctaggctattactg

SEQ ID NO: 68990 - DNA, 15 bp, Homo sapiens
ccctaggctattact

SEQ ID NO: 68991 - DNA, 15 bp, Homo sapiens
accctaggctattac

SEQ ID NO: 68992 - DNA, 15 bp, Homo sapiens
taccctaggctatta

SEQ ID NO: 68993 - DNA, 15 bp, Homo sapiens
ataccctaggctatt

SEQ ID NO: 68994 - DNA, 15 bp, Homo sapiens
cataccctaggctat

SEQ ID NO: 68995 - DNA, 15 bp, Homo sapiens
acataccctaggcta

SEQ ID NO: 68996 - DNA, 15 bp, Homo sapiens
aacataccctaggct

SEQ ID NO: 68997 - DNA, 15 bp, Homo sapiens
aaacataccctaggc

SEQ ID NO: 68998 - DNA, 15 bp, Homo sapiens
aaaacataccctagg

SEQ ID NO: 68999 - DNA, 15 bp, Homo sapiens
aaaaacataccctag

SEQ ID NO: 69000 - DNA, 15 bp, Homo sapiens
aaaaaacatacccta

SEQ ID NO: 69001 - DNA, 15 bp, Homo sapiens
aaaaaaacataccct

SEQ ID NO: 69002 - DNA, 15 bp, Homo sapiens
caaaaaaacataccc

SEQ ID NO: 69003 - DNA, 15 bp, Homo sapiens
gcaaaaaaacatacc

SEQ ID NO: 69004 - DNA, 15 bp, Homo sapiens
ggcaaaaaaacatac

SEQ ID NO: 69005 - DNA, 15 bp, Homo sapiens
tggcaaaaaaacata

SEQ ID NO: 69006 - DNA, 15 bp, Homo sapiens
atggcaaaaaaacat

SEQ ID NO: 69007 - DNA, 15 bp, Homo sapiens
aatggcaaaaaaaca

SEQ ID NO: 69008 - DNA, 15 bp, Homo sapiens
aaatggcaaaaaaac

SEQ ID NO: 69009 - DNA, 15 bp, Homo sapiens
taaatggcaaaaaaa

SEQ ID NO: 69010 - DNA, 15 bp, Homo sapiens
ttaaatggcaaaaaa

SEQ ID NO: 69011 - DNA, 15 bp, Homo sapiens
tttaaatggcaaaaa

SEQ ID NO: 69012 - DNA, 15 bp, Homo sapiens
ttttaaatggcaaaa

SEQ ID NO: 69013 - DNA, 15 bp, Homo sapiens
cttttaaatggcaaa

SEQ ID NO: 69014 - DNA, 15 bp, Homo sapiens
acttttaaatggcaa

SEQ ID NO: 69015 - DNA, 15 bp, Homo sapiens
aacttttaaatggca

SEQ ID NO: 69016 - DNA, 15 bp, Homo sapiens
aaacttttaaatggc

SEQ ID NO: 69017 - DNA, 15 bp, Homo sapiens
aaaacttttaaatgg

SEQ ID NO: 69018 - DNA, 15 bp, Homo sapiens
caaaacttttaaatg

SEQ ID NO: 69019 - DNA, 15 bp, Homo sapiens
gcaaaacttttaaat

SEQ ID NO: 69020 - DNA, 15 bp, Homo sapiens
agcaaaacttttaaa

SEQ ID NO: 69021 - DNA, 15 bp, Homo sapiens
tagcaaaacttttaa

SEQ ID NO: 69022 - DNA, 15 bp, Homo sapiens
atagcaaaactttta

SEQ ID NO: 69023 - DNA, 15 bp, Homo sapiens
tatagcaaaactttt

SEQ ID NO: 69024 - DNA, 15 bp, Homo sapiens
ttatagcaaaacttt

SEQ ID NO: 69025 - DNA, 15 bp, Homo sapiens
tttatagcaaaactt

SEQ ID NO: 69026 - DNA, 15 bp, Homo sapiens
atttatagcaaaact

SEQ ID NO: 69027 - DNA, 15 bp, Homo sapiens
aatttatagcaaaac

SEQ ID NO: 69028 - DNA, 15 bp, Homo sapiens
aaatttatagcaaaa

SEQ ID NO: 69029 - DNA, 15 bp, Homo sapiens
caaatttatagcaaa

SEQ ID NO: 69030 - DNA, 15 bp, Homo sapiens
tcaaatttatagcaa

SEQ ID NO: 69031 - DNA, 15 bp, Homo sapiens
ttcaaatttatagca

SEQ ID NO: 69032 - DNA, 15 bp, Homo sapiens
attcaaatttatagc

SEQ ID NO: 69033 - DNA, 15 bp, Homo sapiens
aattcaaatttatag

SEQ ID NO: 69034 - DNA, 15 bp, Homo sapiens
aaattcaaatttata

SEQ ID NO: 69035 - DNA, 15 bp, Homo sapiens
taaattcaaatttat

SEQ ID NO: 69036 - DNA, 15 bp, Homo sapiens
gtaaattcaaattta

SEQ ID NO: 69037 - DNA, 15 bp, Homo sapiens
tgtaaattcaaattt

SEQ ID NO: 69038 - DNA, 15 bp, Homo sapiens
ctgtaaattcaaatt

SEQ ID NO: 69039 - DNA, 15 bp, Homo sapiens
tctgtaaattcaaat

SEQ ID NO: 69040 - DNA, 15 bp, Homo sapiens
ttctgtaaattcaaa

SEQ ID NO: 69041 - DNA, 15 bp, Homo sapiens
tttctgtaaattcaa

SEQ ID NO: 69042 - DNA, 15 bp, Homo sapiens
ttttctgtaaattca

SEQ ID NO: 69043 - DNA, 15 bp, Homo sapiens
attttctgtaaattc

SEQ ID NO: 69044 - DNA, 15 bp, Homo sapiens
aattttctgtaaatt

SEQ ID NO: 69045 - DNA, 15 bp, Homo sapiens
caattttctgtaaat

SEQ ID NO: 69046 - DNA, 15 bp, Homo sapiens
acaattttctgtaaa

SEQ ID NO: 69047 - DNA, 15 bp, Homo sapiens
tacaattttctgtaa

SEQ ID NO: 69048 - DNA, 15 bp, Homo sapiens
ttacaattttctgta

SEQ ID NO: 69049 - DNA, 15 bp, Homo sapiens
gttacaattttctgt

SEQ ID NO: 69050 - DNA, 15 bp, Homo sapiens
agttacaattttctg

SEQ ID NO: 69051 - DNA, 15 bp, Homo sapiens
tagttacaattttct

SEQ ID NO: 69052 - DNA, 15 bp, Homo sapiens
ctagttacaattttc

SEQ ID NO: 69053 - DNA, 15 bp, Homo sapiens
tctagttacaatttt

SEQ ID NO: 69054 - DNA, 15 bp, Homo sapiens
ctctagttacaattt

SEQ ID NO: 69055 - DNA, 15 bp, Homo sapiens
tctctagttacaatt

SEQ ID NO: 69056 - DNA, 15 bp, Homo sapiens
ttctctagttacaat

SEQ ID NO: 69057 - DNA, 15 bp, Homo sapiens
gttctctagttacaa

SEQ ID NO: 69058 - DNA, 15 bp, Homo sapiens
agttctctagttaca

SEQ ID NO: 69059 - DNA, 15 bp, Homo sapiens
gagttctctagttac

SEQ ID NO: 69060 - DNA, 15 bp, Homo sapiens
tgagttctctagtta

SEQ ID NO: 69061 - DNA, 15 bp, Homo sapiens
gtgagttctctagtt

SEQ ID NO: 69062 - DNA, 15 bp, Homo sapiens
tgtgagttctctagt

SEQ ID NO: 69063 - DNA, 15 bp, Homo sapiens
ctgtgagttctctag

SEQ ID NO: 69064 - DNA, 15 bp, Homo sapiens
tctgtgagttctcta

SEQ ID NO: 69065 - DNA, 15 bp, Homo sapiens
atctgtgagttctct

SEQ ID NO: 69066 - DNA, 15 bp, Homo sapiens
gatctgtgagttctc

SEQ ID NO: 69067 - DNA, 15 bp, Homo sapiens
ggatctgtgagttct

SEQ ID NO: 69068 - DNA, 15 bp, Homo sapiens
aggatctgtgagttc

SEQ ID NO: 69069 - DNA, 15 bp, Homo sapiens
aaggatctgtgagtt

SEQ ID NO: 69070 - DNA, 15 bp, Homo sapiens
gaaggatctgtgagt

SEQ ID NO: 69071 - DNA, 15 bp, Homo sapiens
tgaaggatctgtgag

SEQ ID NO: 69072 - DNA, 15 bp, Homo sapiens
gtgaaggatctgtga

SEQ ID NO: 69073 - DNA, 15 bp, Homo sapiens
ggtgaaggatctgtg

SEQ ID NO: 69074 - DNA, 15 bp, Homo sapiens
gggtgaaggatctgt

SEQ ID NO: 69075 - DNA, 15 bp, Homo sapiens
tgggtgaaggatctg

SEQ ID NO: 69076 - DNA, 15 bp, Homo sapiens
ctgggtgaaggatct

SEQ ID NO: 69077 - DNA, 15 bp, Homo sapiens
tctgggtgaaggatc

SEQ ID NO: 69078 - DNA, 15 bp, Homo sapiens
atctgggtgaaggat

SEQ ID NO: 69079 - DNA, 15 bp, Homo sapiens
aatctgggtgaagga

SEQ ID NO: 69080 - DNA, 15 bp, Homo sapiens
aaatctgggtgaagg

SEQ ID NO: 69081 - DNA, 15 bp, Homo sapiens
taaatctgggtgaag

SEQ ID NO: 69082 - DNA, 15 bp, Homo sapiens
ctaaatctgggtgaa

SEQ ID NO: 69083 - DNA, 15 bp, Homo sapiens
tctaaatctgggtga

SEQ ID NO: 69084 - DNA, 15 bp, Homo sapiens
atctaaatctgggtg

SEQ ID NO: 69085 - DNA, 15 bp, Homo sapiens
aatctaaatctgggt

SEQ ID NO: 69086 - DNA, 15 bp, Homo sapiens
caatctaaatctggg

SEQ ID NO: 69087 - DNA, 15 bp, Homo sapiens
acaatctaaatctgg

SEQ ID NO: 69088 - DNA, 15 bp, Homo sapiens
aacaatctaaatctg

SEQ ID NO: 69089 - DNA, 15 bp, Homo sapiens
aaacaatctaaatct

SEQ ID NO: 69090 - DNA, 15 bp, Homo sapiens
taaacaatctaaatc

SEQ ID NO: 69091 - DNA, 15 bp, Homo sapiens
ataaacaatctaaat

SEQ ID NO: 69092 - DNA, 15 bp, Homo sapiens
tataaacaatctaaa

SEQ ID NO: 69093 - DNA, 15 bp, Homo sapiens
atataaacaatctaa

SEQ ID NO: 69094 - DNA, 15 bp, Homo sapiens
aatataaacaatcta

SEQ ID NO: 69095 - DNA, 15 bp, Homo sapiens
aaatataaacaatct

SEQ ID NO: 69096 - DNA, 15 bp, Homo sapiens
aaaatataaacaatc

SEQ ID NO: 69097 - DNA, 15 bp, Homo sapiens
caaaatataaacaat

SEQ ID NO: 69098 - DNA, 15 bp, Homo sapiens
tcaaaatataaacaa

SEQ ID NO: 69099 - DNA, 15 bp, Homo sapiens
gtcaaaatataaaca

SEQ ID NO: 69100 - DNA, 15 bp, Homo sapiens
ggtcaaaatataaac

SEQ ID NO: 69101 - DNA, 15 bp, Homo sapiens
gggtcaaaatataaa

SEQ ID NO: 69102 - DNA, 15 bp, Homo sapiens
tgggtcaaaatataa

SEQ ID NO: 69103 - DNA, 15 bp, Homo sapiens
gtgggtcaaaatata

SEQ ID NO: 69104 - DNA, 15 bp, Homo sapiens
agtgggtcaaaatat

SEQ ID NO: 69105 - DNA, 15 bp, Homo sapiens
aagtgggtcaaaata

SEQ ID NO: 69106 - DNA, 15 bp, Homo sapiens
caagtgggtcaaaat

SEQ ID NO: 69107 - DNA, 15 bp, Homo sapiens
gcaagtgggtcaaaa

SEQ ID NO: 69108 - DNA, 15 bp, Homo sapiens
agcaagtgggtcaaa

SEQ ID NO: 69109 - DNA, 15 bp, Homo sapiens
aagcaagtgggtcaa

SEQ ID NO: 69110 - DNA, 15 bp, Homo sapiens
aaagcaagtgggtca

SEQ ID NO: 69111 - DNA, 15 bp, Homo sapiens
taaagcaagtgggtc

SEQ ID NO: 69112 - DNA, 15 bp, Homo sapiens
ataaagcaagtgggt

SEQ ID NO: 69113 - DNA, 15 bp, Homo sapiens
gataaagcaagtggg

SEQ ID NO: 69114 - DNA, 15 bp, Homo sapiens
tgataaagcaagtgg

SEQ ID NO: 69115 - DNA, 15 bp, Homo sapiens
atgataaagcaagtg

SEQ ID NO: 69116 - DNA, 15 bp, Homo sapiens
gatgataaagcaagt

SEQ ID NO: 69117 - DNA, 15 bp, Homo sapiens
agatgataaagcaag

SEQ ID NO: 69118 - DNA, 15 bp, Homo sapiens
aagatgataaagcaa

SEQ ID NO: 69119 - DNA, 15 bp, Homo sapiens
gaagatgataaagca

SEQ ID NO: 69120 - DNA, 15 bp, Homo sapiens
agaagatgataaagc

SEQ ID NO: 69121 - DNA, 15 bp, Homo sapiens
gagaagatgataaag

SEQ ID NO: 69122 - DNA, 15 bp, Homo sapiens
agagaagatgataaa

SEQ ID NO: 69123 - DNA, 15 bp, Homo sapiens
aagagaagatgataa

SEQ ID NO: 69124 - DNA, 15 bp, Homo sapiens
aaagagaagatgata

SEQ ID NO: 69125 - DNA, 15 bp, Homo sapiens
gaaagagaagatgat

SEQ ID NO: 69126 - DNA, 15 bp, Homo sapiens
agaaagagaagatga

SEQ ID NO: 69127 - DNA, 15 bp, Homo sapiens
gagaaagagaagatg

SEQ ID NO: 69128 - DNA, 15 bp, Homo sapiens
ggagaaagagaagat

SEQ ID NO: 69129 - DNA, 15 bp, Homo sapiens
cggagaaagagaaga

SEQ ID NO: 69130 - DNA, 15 bp, Homo sapiens
acggagaaagagaag

SEQ ID NO: 69131 - DNA, 15 bp, Homo sapiens
cacggagaaagagaa

SEQ ID NO: 69132 - DNA, 15 bp, Homo sapiens
acacggagaaagaga

SEQ ID NO: 69133 - DNA, 15 bp, Homo sapiens
cacacggagaaagag

SEQ ID NO: 69134 - DNA, 15 bp, Homo sapiens
acacacggagaaaga

SEQ ID NO: 69135 - DNA, 15 bp, Homo sapiens
cacacacggagaaag

SEQ ID NO: 69136 - DNA, 15 bp, Homo sapiens
acacacacggagaaa

SEQ ID NO: 69137 - DNA, 15 bp, Homo sapiens
cacacacacggagaa

SEQ ID NO: 69138 - DNA, 15 bp, Homo sapiens
acacacacacggaga

SEQ ID NO: 69139 - DNA, 15 bp, Homo sapiens
cacacacacacggag

SEQ ID NO: 69140 - DNA, 15 bp, Homo sapiens
acacacacacacgga

SEQ ID NO: 69141 - DNA, 15 bp, Homo sapiens
tacacacacacacgg

SEQ ID NO: 69142 - DNA, 15 bp, Homo sapiens
atacacacacacacg

SEQ ID NO: 69143 - DNA, 15 bp, Homo sapiens
catacacacacacac

SEQ ID NO: 69144 - DNA, 15 bp, Homo sapiens
acatacacacacaca

SEQ ID NO: 69145 - DNA, 15 bp, Homo sapiens
cacatacacacacac

SEQ ID NO: 69146 - DNA, 15 bp, Homo sapiens
acacatacacacaca

SEQ ID NO: 69147 - DNA, 15 bp, Homo sapiens
cacacatacacacac

SEQ ID NO: 69148 - DNA, 15 bp, Homo sapiens
acacacatacacaca

SEQ ID NO: 69149 - DNA, 15 bp, Homo sapiens
cacacacatacacac

SEQ ID NO: 69150 - DNA, 15 bp, Homo sapiens
acacacacatacaca

SEQ ID NO: 69151 - DNA, 15 bp, Homo sapiens
aacacacacatacac

SEQ ID NO: 69152 - DNA, 15 bp, Homo sapiens
aaacacacacataca

SEQ ID NO: 69153 - DNA, 15 bp, Homo sapiens
taaacacacacatac

SEQ ID NO: 69154 - DNA, 15 bp, Homo sapiens
ataaacacacacata

SEQ ID NO: 69155 - DNA, 15 bp, Homo sapiens
cataaacacacacat

SEQ ID NO: 69156 - DNA, 15 bp, Homo sapiens
acataaacacacaca

SEQ ID NO: 69157 - DNA, 15 bp, Homo sapiens
cacataaacacacac

SEQ ID NO: 69158 - DNA, 15 bp, Homo sapiens
acacataaacacaca

SEQ ID NO: 69159 - DNA, 15 bp, Homo sapiens
cacacataaacacac

SEQ ID NO: 69160 - DNA, 15 bp, Homo sapiens
acacacataaacaca

SEQ ID NO: 69161 - DNA, 15 bp, Homo sapiens
cacacacataaacac

SEQ ID NO: 69162 - DNA, 15 bp, Homo sapiens
acacacacataaaca

SEQ ID NO: 69163 - DNA, 15 bp, Homo sapiens
cacacacacataaac

SEQ ID NO: 69164 - DNA, 15 bp, Homo sapiens
acacacacacataaa

SEQ ID NO: 69165 - DNA, 15 bp, Homo sapiens
cacacacacacataa

SEQ ID NO: 69166 - DNA, 15 bp, Homo sapiens
acacacacacacata

SEQ ID NO: 69167 - DNA, 15 bp, Homo sapiens
cacacacacacacat

SEQ ID NO: 69168 - DNA, 15 bp, Homo sapiens
tacacacacacacac

SEQ ID NO: 69169 - DNA, 15 bp, Homo sapiens
atacacacacacaca

SEQ ID NO: 69170 - DNA, 15 bp, Homo sapiens
aatacacacacacac

SEQ ID NO: 69171 - DNA, 15 bp, Homo sapiens
taatacacacacaca

SEQ ID NO: 69172 - DNA, 15 bp, Homo sapiens
ataatacacacacac

SEQ ID NO: 69173 - DNA, 15 bp, Homo sapiens
cataatacacacaca

SEQ ID NO: 69174 - DNA, 15 bp, Homo sapiens
acataatacacacac

SEQ ID NO: 69175 - DNA, 15 bp, Homo sapiens
tacataatacacaca

SEQ ID NO: 69176 - DNA, 15 bp, Homo sapiens
atacataatacacac

SEQ ID NO: 69177 - DNA, 15 bp, Homo sapiens
tatacataatacaca

SEQ ID NO: 69178 - DNA, 15 bp, Homo sapiens
gtatacataatacac

SEQ ID NO: 69179 - DNA, 15 bp, Homo sapiens
ggtatacataataca

SEQ ID NO: 69180 - DNA, 15 bp, Homo sapiens
gggtatacataatac

SEQ ID NO: 69181 - DNA, 15 bp, Homo sapiens
agggtatacataata

SEQ ID NO: 69182 - DNA, 15 bp, Homo sapiens
aagggtatacataat

SEQ ID NO: 69183 - DNA, 15 bp, Homo sapiens
taagggtatacataa

SEQ ID NO: 69184 - DNA, 15 bp, Homo sapiens
ataagggtatacata

SEQ ID NO: 69185 - DNA, 15 bp, Homo sapiens
tataagggtatacat

SEQ ID NO: 69186 - DNA, 15 bp, Homo sapiens
gtataagggtataca

SEQ ID NO: 69187 - DNA, 15 bp, Homo sapiens
agtataagggtatac

SEQ ID NO: 69188 - DNA, 15 bp, Homo sapiens
aagtataagggtata

SEQ ID NO: 69189 - DNA, 15 bp, Homo sapiens
gaagtataagggtat

SEQ ID NO: 69190 - DNA, 15 bp, Homo sapiens
tgaagtataagggta

SEQ ID NO: 69191 - DNA, 15 bp, Homo sapiens
ctgaagtataagggt

SEQ ID NO: 69192 - DNA, 15 bp, Homo sapiens
tctgaagtataaggg

SEQ ID NO: 69193 - DNA, 15 bp, Homo sapiens
ttctgaagtataagg

SEQ ID NO: 69194 - DNA, 15 bp, Homo sapiens
attctgaagtataag

SEQ ID NO: 69195 - DNA, 15 bp, Homo sapiens
tattctgaagtataa

SEQ ID NO: 69196 - DNA, 15 bp, Homo sapiens
gtattctgaagtata

SEQ ID NO: 69197 - DNA, 15 bp, Homo sapiens
tgtattctgaagtat

SEQ ID NO: 69198 - DNA, 15 bp, Homo sapiens
atgtattctgaagta

SEQ ID NO: 69199 - DNA, 15 bp, Homo sapiens
aatgtattctgaagt

SEQ ID NO: 69200 - DNA, 15 bp, Homo sapiens
gaatgtattctgaag

SEQ ID NO: 69201 - DNA, 15 bp, Homo sapiens
ggaatgtattctgaa

SEQ ID NO: 69202 - DNA, 15 bp, Homo sapiens
aggaatgtattctga

SEQ ID NO: 69203 - DNA, 15 bp, Homo sapiens
taggaatgtattctg

SEQ ID NO: 69204 - DNA, 15 bp, Homo sapiens
ttaggaatgtattct

SEQ ID NO: 69205 - DNA, 15 bp, Homo sapiens
tttaggaatgtattc

SEQ ID NO: 69206 - DNA, 15 bp, Homo sapiens
ttttaggaatgtatt

SEQ ID NO: 69207 - DNA, 15 bp, Homo sapiens
tttttaggaatgtat

SEQ ID NO: 69208 - DNA, 15 bp, Homo sapiens
ctttttaggaatgta

SEQ ID NO: 69209 - DNA, 15 bp, Homo sapiens
cctttttaggaatgt

SEQ ID NO: 69210 - DNA, 15 bp, Homo sapiens
tcctttttaggaatg

SEQ ID NO: 69211 - DNA, 15 bp, Homo sapiens
gtcctttttaggaat

SEQ ID NO: 69212 - DNA, 15 bp, Homo sapiens
tgtcctttttaggaa

SEQ ID NO: 69213 - DNA, 15 bp, Homo sapiens
atgtcctttttagga

SEQ ID NO: 69214 - DNA, 15 bp, Homo sapiens
aatgtcctttttagg

SEQ ID NO: 69215 - DNA, 15 bp, Homo sapiens
gaatgtcctttttag

SEQ ID NO: 69216 - DNA, 15 bp, Homo sapiens
agaatgtccttttta

SEQ ID NO: 69217 - DNA, 15 bp, Homo sapiens
gagaatgtccttttt

SEQ ID NO: 69218 - DNA, 15 bp, Homo sapiens
agagaatgtcctttt

SEQ ID NO: 69219 - DNA, 15 bp, Homo sapiens
aagagaatgtccttt

SEQ ID NO: 69220 - DNA, 15 bp, Homo sapiens
taagagaatgtcctt

SEQ ID NO: 69221 - DNA, 15 bp, Homo sapiens
ctaagagaatgtcct

SEQ ID NO: 69222 - DNA, 15 bp, Homo sapiens
tctaagagaatgtcc

SEQ ID NO: 69223 - DNA, 15 bp, Homo sapiens
atctaagagaatgtc

SEQ ID NO: 69224 - DNA, 15 bp, Homo sapiens
aatctaagagaatgt

SEQ ID NO: 69225 - DNA, 15 bp, Homo sapiens
taatctaagagaatg

SEQ ID NO: 69226 - DNA, 15 bp, Homo sapiens
gtaatctaagagaat

SEQ ID NO: 69227 - DNA, 15 bp, Homo sapiens
ggtaatctaagagaa

SEQ ID NO: 69228 - DNA, 15 bp, Homo sapiens
tggtaatctaagaga

SEQ ID NO: 69229 - DNA, 15 bp, Homo sapiens
gtggtaatctaagag

SEQ ID NO: 69230 - DNA, 15 bp, Homo sapiens
tgtggtaatctaaga

SEQ ID NO: 69231 - DNA, 15 bp, Homo sapiens
ttgtggtaatctaag

SEQ ID NO: 69232 - DNA, 15 bp, Homo sapiens
tttgtggtaatctaa

SEQ ID NO: 69233 - DNA, 15 bp, Homo sapiens
ttttgtggtaatcta

SEQ ID NO: 69234 - DNA, 15 bp, Homo sapiens
gttttgtggtaatct

SEQ ID NO: 69235 - DNA, 15 bp, Homo sapiens
tgttttgtggtaatc

SEQ ID NO: 69236 - DNA, 15 bp, Homo sapiens
ttgttttgtggtaat

SEQ ID NO: 69237 - DNA, 15 bp, Homo sapiens
attgttttgtggtaa

SEQ ID NO: 69238 - DNA, 15 bp, Homo sapiens
cattgttttgtggta

SEQ ID NO: 69239 - DNA, 15 bp, Homo sapiens
tcattgttttgtggt

SEQ ID NO: 69240 - DNA, 15 bp, Homo sapiens
atcattgttttgtgg

SEQ ID NO: 69241 - DNA, 15 bp, Homo sapiens
aatcattgttttgtg

SEQ ID NO: 69242 - DNA, 15 bp, Homo sapiens
taatcattgttttgt

SEQ ID NO: 69243 - DNA, 15 bp, Homo sapiens
ttaatcattgttttg

SEQ ID NO: 69244 - DNA, 15 bp, Homo sapiens
tttaatcattgtttt

SEQ ID NO: 69245 - DNA, 15 bp, Homo sapiens
ttttaatcattgttt

SEQ ID NO: 69246 - DNA, 15 bp, Homo sapiens
tttttaatcattgtt

SEQ ID NO: 69247 - DNA, 15 bp, Homo sapiens
atttttaatcattgt

SEQ ID NO: 69248 - DNA, 15 bp, Homo sapiens
gatttttaatcattg

SEQ ID NO: 69249 - DNA, 15 bp, Homo sapiens
tgatttttaatcatt

SEQ ID NO: 69250 - DNA, 15 bp, Homo sapiens
ctgatttttaatcat

SEQ ID NO: 69251 - DNA, 15 bp, Homo sapiens
actgatttttaatca

SEQ ID NO: 69252 - DNA, 15 bp, Homo sapiens
tactgatttttaatc

SEQ ID NO: 69253 - DNA, 15 bp, Homo sapiens
ttactgatttttaat

SEQ ID NO: 69254 - DNA, 15 bp, Homo sapiens
tttactgatttttaa

SEQ ID NO: 69255 - DNA, 15 bp, Homo sapiens
atttactgattttta

SEQ ID NO: 69256 - DNA, 15 bp, Homo sapiens
aatttactgattttt

SEQ ID NO: 69257 - DNA, 15 bp, Homo sapiens
aaatttactgatttt

SEQ ID NO: 69258 - DNA, 15 bp, Homo sapiens
taaatttactgattt

SEQ ID NO: 69259 - DNA, 15 bp, Homo sapiens
ttaaatttactgatt

SEQ ID NO: 69260 - DNA, 15 bp, Homo sapiens
gttaaatttactgat

SEQ ID NO: 69261 - DNA, 15 bp, Homo sapiens
tgttaaatttactga

SEQ ID NO: 69262 - DNA, 15 bp, Homo sapiens
atgttaaatttactg

SEQ ID NO: 69263 - DNA, 15 bp, Homo sapiens
aatgttaaatttact

SEQ ID NO: 69264 - DNA, 15 bp, Homo sapiens
taatgttaaatttac

SEQ ID NO: 69265 - DNA, 15 bp, Homo sapiens
ttaatgttaaattta

SEQ ID NO: 69266 - DNA, 15 bp, Homo sapiens
attaatgttaaattt

SEQ ID NO: 69267 - DNA, 15 bp, Homo sapiens
cattaatgttaaatt

SEQ ID NO: 69268 - DNA, 15 bp, Homo sapiens
gcattaatgttaaat

SEQ ID NO: 69269 - DNA, 15 bp, Homo sapiens
tgcattaatgttaaa

SEQ ID NO: 69270 - DNA, 15 bp, Homo sapiens
ttgcattaatgttaa

SEQ ID NO: 69271 - DNA, 15 bp, Homo sapiens
attgcattaatgtta

SEQ ID NO: 69272 - DNA, 15 bp, Homo sapiens
tattgcattaatgtt

SEQ ID NO: 69273 - DNA, 15 bp, Homo sapiens
atattgcattaatgt

SEQ ID NO: 69274 - DNA, 15 bp, Homo sapiens
tatattgcattaatg

SEQ ID NO: 69275 - DNA, 15 bp, Homo sapiens
gtatattgcattaat

SEQ ID NO: 69276 - DNA, 15 bp, Homo sapiens
tgtatattgcattaa

SEQ ID NO: 69277 - DNA, 15 bp, Homo sapiens
ttgtatattgcatta

SEQ ID NO: 69278 - DNA, 15 bp, Homo sapiens
cttgtatattgcatt

SEQ ID NO: 69279 - DNA, 15 bp, Homo sapiens
acttgtatattgcat

SEQ ID NO: 69280 - DNA, 15 bp, Homo sapiens
gacttgtatattgca

SEQ ID NO: 69281 - DNA, 15 bp, Homo sapiens
ggacttgtatattgc

SEQ ID NO: 69282 - DNA, 15 bp, Homo sapiens
tggacttgtatattg

SEQ ID NO: 69283 - DNA, 15 bp, Homo sapiens
gtggacttgtatatt

SEQ ID NO: 69284 - DNA, 15 bp, Homo sapiens
cgtggacttgtatat

SEQ ID NO: 69285 - DNA, 15 bp, Homo sapiens
tcgtggacttgtata

SEQ ID NO: 69286 - DNA, 15 bp, Homo sapiens
ctcgtggacttgtat

SEQ ID NO: 69287 - DNA, 15 bp, Homo sapiens
gctcgtggacttgta

SEQ ID NO: 69288 - DNA, 15 bp, Homo sapiens
agctcgtggacttgt

SEQ ID NO: 69289 - DNA, 15 bp, Homo sapiens
tagctcgtggacttg

SEQ ID NO: 69290 - DNA, 15 bp, Homo sapiens
atagctcgtggactt

SEQ ID NO: 69291 - DNA, 15 bp, Homo sapiens
tatagctcgtggact

SEQ ID NO: 69292 - DNA, 15 bp, Homo sapiens
atatagctcgtggac

SEQ ID NO: 69293 - DNA, 15 bp, Homo sapiens
aatatagctcgtgga

SEQ ID NO: 69294 - DNA, 15 bp, Homo sapiens
gaatatagctcgtgg

SEQ ID NO: 69295 - DNA, 15 bp, Homo sapiens
tgaatatagctcgtg

SEQ ID NO: 69296 - DNA, 15 bp, Homo sapiens
ctgaatatagctcgt

SEQ ID NO: 69297 - DNA, 15 bp, Homo sapiens
tctgaatatagctcg

SEQ ID NO: 69298 - DNA, 15 bp, Homo sapiens
ttctgaatatagctc

SEQ ID NO: 69299 - DNA, 15 bp, Homo sapiens
attctgaatatagct

SEQ ID NO: 69300 - DNA, 15 bp, Homo sapiens
aattctgaatatagc

SEQ ID NO: 69301 - DNA, 15 bp, Homo sapiens
aaattctgaatatag

SEQ ID NO: 69302 - DNA, 15 bp, Homo sapiens
gaaattctgaatata

SEQ ID NO: 69303 - DNA, 15 bp, Homo sapiens
ggaaattctgaatat

SEQ ID NO: 69304 - DNA, 15 bp, Homo sapiens
aggaaattctgaata

SEQ ID NO: 69305 - DNA, 15 bp, Homo sapiens
gaggaaattctgaat

SEQ ID NO: 69306 - DNA, 15 bp, Homo sapiens
tgaggaaattctgaa

SEQ ID NO: 69307 - DNA, 15 bp, Homo sapiens
ctgaggaaattctga

SEQ ID NO: 69308 - DNA, 15 bp, Homo sapiens
actgaggaaattctg

SEQ ID NO: 69309 - DNA, 15 bp, Homo sapiens
aactgaggaaattct

SEQ ID NO: 69310 - DNA, 15 bp, Homo sapiens
caactgaggaaattc

SEQ ID NO: 69311 - DNA, 15 bp, Homo sapiens
acaactgaggaaatt

SEQ ID NO: 69312 - DNA, 15 bp, Homo sapiens
gacaactgaggaaat

SEQ ID NO: 69313 - DNA, 15 bp, Homo sapiens
ggacaactgaggaaa

SEQ ID NO: 69314 - DNA, 15 bp, Homo sapiens
gggacaactgaggaa

SEQ ID NO: 69315 - DNA, 15 bp, Homo sapiens
tgggacaactgagga

SEQ ID NO: 69316 - DNA, 15 bp, Homo sapiens
ttgggacaactgagg

SEQ ID NO: 69317 - DNA, 15 bp, Homo sapiens
attgggacaactgag

SEQ ID NO: 69318 - DNA, 15 bp, Homo sapiens
aattgggacaactga

SEQ ID NO: 69319 - DNA, 15 bp, Homo sapiens
aaattgggacaactg

SEQ ID NO: 69320 - DNA, 15 bp, Homo sapiens
aaaattgggacaact

SEQ ID NO: 69321 - DNA, 15 bp, Homo sapiens
taaaattgggacaac

SEQ ID NO: 69322 - DNA, 15 bp, Homo sapiens
ctaaaattgggacaa

SEQ ID NO: 69323 - DNA, 15 bp, Homo sapiens
tctaaaattgggaca

SEQ ID NO: 69324 - DNA, 15 bp, Homo sapiens
ctctaaaattgggac

SEQ ID NO: 69325 - DNA, 15 bp, Homo sapiens
gctctaaaattggga

SEQ ID NO: 69326 - DNA, 15 bp, Homo sapiens
tgctctaaaattggg

SEQ ID NO: 69327 - DNA, 15 bp, Homo sapiens
atgctctaaaattgg

SEQ ID NO: 69328 - DNA, 15 bp, Homo sapiens
aatgctctaaaattg

SEQ ID NO: 69329 - DNA, 15 bp, Homo sapiens
caatgctctaaaatt

SEQ ID NO: 69330 - DNA, 15 bp, Homo sapiens
tcaatgctctaaaat

SEQ ID NO: 69331 - DNA, 15 bp, Homo sapiens
ctcaatgctctaaaa

SEQ ID NO: 69332 - DNA, 15 bp, Homo sapiens
actcaatgctctaaa

SEQ ID NO: 69333 - DNA, 15 bp, Homo sapiens
aactcaatgctctaa

SEQ ID NO: 69334 - DNA, 15 bp, Homo sapiens
aaactcaatgctcta

SEQ ID NO: 69335 - DNA, 15 bp, Homo sapiens
taaactcaatgctct

SEQ ID NO: 69336 - DNA, 15 bp, Homo sapiens
ataaactcaatgctc

SEQ ID NO: 69337 - DNA, 15 bp, Homo sapiens
gataaactcaatgct

SEQ ID NO: 69338 - DNA, 15 bp, Homo sapiens
agataaactcaatgc

SEQ ID NO: 69339 - DNA, 15 bp, Homo sapiens
cagataaactcaatg

SEQ ID NO: 69340 - DNA, 15 bp, Homo sapiens
tcagataaactcaat

SEQ ID NO: 69341 - DNA, 15 bp, Homo sapiens
atcagataaactcaa

SEQ ID NO: 69342 - DNA, 15 bp, Homo sapiens
tatcagataaactca

SEQ ID NO: 69343 - DNA, 15 bp, Homo sapiens
atatcagataaactc

SEQ ID NO: 69344 - DNA, 15 bp, Homo sapiens
aatatcagataaact

SEQ ID NO: 69345 - DNA, 15 bp, Homo sapiens
taatatcagataaac

SEQ ID NO: 69346 - DNA, 15 bp, Homo sapiens
ttaatatcagataaa

SEQ ID NO: 69347 - DNA, 15 bp, Homo sapiens
tttaatatcagataa

SEQ ID NO: 69348 - DNA, 15 bp, Homo sapiens
ttttaatatcagata

SEQ ID NO: 69349 - DNA, 15 bp, Homo sapiens
attttaatatcagat

SEQ ID NO: 69350 - DNA, 15 bp, Homo sapiens
cattttaatatcaga

SEQ ID NO: 69351 - DNA, 15 bp, Homo sapiens
ccattttaatatcag

SEQ ID NO: 69352 - DNA, 15 bp, Homo sapiens
tccattttaatatca

SEQ ID NO: 69353 - DNA, 15 bp, Homo sapiens
atccattttaatatc

SEQ ID NO: 69354 - DNA, 15 bp, Homo sapiens
aatccattttaatat

SEQ ID NO: 69355 - DNA, 15 bp, Homo sapiens
taatccattttaata

SEQ ID NO: 69356 - DNA, 15 bp, Homo sapiens
ataatccattttaat

SEQ ID NO: 69357 - DNA, 15 bp, Homo sapiens
tataatccattttaa

SEQ ID NO: 69358 - DNA, 15 bp, Homo sapiens
ttataatccatttta

SEQ ID NO: 69359 - DNA, 15 bp, Homo sapiens
attataatccatttt

SEQ ID NO: 69360 - DNA, 15 bp, Homo sapiens
aattataatccattt

SEQ ID NO: 69361 - DNA, 15 bp, Homo sapiens
gaattataatccatt

SEQ ID NO: 69362 - DNA, 15 bp, Homo sapiens
tgaattataatccat

SEQ ID NO: 69363 - DNA, 15 bp, Homo sapiens
ttgaattataatcca

SEQ ID NO: 69364 - DNA, 15 bp, Homo sapiens
attgaattataatcc

SEQ ID NO: 69365 - DNA, 15 bp, Homo sapiens
tattgaattataatc

SEQ ID NO: 69366 - DNA, 15 bp, Homo sapiens
ttattgaattataat

SEQ ID NO: 69367 - DNA, 15 bp, Homo sapiens
attattgaattataa

SEQ ID NO: 69368 - DNA, 15 bp, Homo sapiens
aattattgaattata

SEQ ID NO: 69369 - DNA, 15 bp, Homo sapiens
caattattgaattat

SEQ ID NO: 69370 - DNA, 15 bp, Homo sapiens
acaattattgaatta

SEQ ID NO: 69371 - DNA, 15 bp, Homo sapiens
cacaattattgaatt

SEQ ID NO: 69372 - DNA, 15 bp, Homo sapiens
tcacaattattgaat

SEQ ID NO: 69373 - DNA, 15 bp, Homo sapiens
ttcacaattattgaa

SEQ ID NO: 69374 - DNA, 15 bp, Homo sapiens
tttcacaattattga

SEQ ID NO: 69375 - DNA, 15 bp, Homo sapiens
ttttcacaattattg

SEQ ID NO: 69376 - DNA, 15 bp, Homo sapiens
gttttcacaattatt

SEQ ID NO: 69377 - DNA, 15 bp, Homo sapiens
tgttttcacaattat

SEQ ID NO: 69378 - DNA, 15 bp, Homo sapiens
ctgttttcacaatta

SEQ ID NO: 69379 - DNA, 15 bp, Homo sapiens
tctgttttcacaatt

SEQ ID NO: 69380 - DNA, 15 bp, Homo sapiens
ttctgttttcacaat

SEQ ID NO: 69381 - DNA, 15 bp, Homo sapiens
cttctgttttcacaa

SEQ ID NO: 69382 - DNA, 15 bp, Homo sapiens
tcttctgttttcaca

SEQ ID NO: 69383 - DNA, 15 bp, Homo sapiens
atcttctgttttcac

SEQ ID NO: 69384 - DNA, 15 bp, Homo sapiens
aatcttctgttttca

SEQ ID NO: 69385 - DNA, 15 bp, Homo sapiens
taatcttctgttttc

SEQ ID NO: 69386 - DNA, 15 bp, Homo sapiens
ataatcttctgtttt

SEQ ID NO: 69387 - DNA, 15 bp, Homo sapiens
tataatcttctgttt

SEQ ID NO: 69388 - DNA, 15 bp, Homo sapiens
ttataatcttctgtt

SEQ ID NO: 69389 - DNA, 15 bp, Homo sapiens
cttataatcttctgt

SEQ ID NO: 69390 - DNA, 15 bp, Homo sapiens
ccttataatcttctg

SEQ ID NO: 69391 - DNA, 15 bp, Homo sapiens
accttataatcttct

SEQ ID NO: 69392 - DNA, 15 bp, Homo sapiens
taccttataatcttc

SEQ ID NO: 69393 - DNA, 15 bp, Homo sapiens
ttaccttataatctt

SEQ ID NO: 69394 - DNA, 15 bp, Homo sapiens
tttaccttataatct

SEQ ID NO: 69395 - DNA, 15 bp, Homo sapiens
ttttaccttataatc

SEQ ID NO: 69396 - DNA, 15 bp, Homo sapiens
tttttaccttataat

SEQ ID NO: 69397 - DNA, 15 bp, Homo sapiens
ctttttaccttataa

SEQ ID NO: 69398 - DNA, 15 bp, Homo sapiens
actttttaccttata

SEQ ID NO: 69399 - DNA, 15 bp, Homo sapiens
tactttttaccttat

SEQ ID NO: 69400 - DNA, 15 bp, Homo sapiens
ttactttttacctta

SEQ ID NO: 69401 - DNA, 15 bp, Homo sapiens
tttactttttacctt

SEQ ID NO: 69402 - DNA, 15 bp, Homo sapiens
ttttactttttacct

SEQ ID NO: 69403 - DNA, 15 bp, Homo sapiens
tttttactttttacc

SEQ ID NO: 69404 - DNA, 15 bp, Homo sapiens
atttttactttttac

SEQ ID NO: 69405 - DNA, 15 bp, Homo sapiens
tatttttacttttta

SEQ ID NO: 69406 - DNA, 15 bp, Homo sapiens
ttatttttacttttt

SEQ ID NO: 69407 - DNA, 15 bp, Homo sapiens
attatttttactttt

SEQ ID NO: 69408 - DNA, 15 bp, Homo sapiens
cattatttttacttt

SEQ ID NO: 69409 - DNA, 15 bp, Homo sapiens
ccattatttttactt

SEQ ID NO: 69410 - DNA, 15 bp, Homo sapiens
gccattatttttact

SEQ ID NO: 69411 - DNA, 15 bp, Homo sapiens
tgccattatttttac

SEQ ID NO: 69412 - DNA, 15 bp, Homo sapiens
atgccattattttta

SEQ ID NO: 69413 - DNA, 15 bp, Homo sapiens
catgccattattttt

SEQ ID NO: 69414 - DNA, 15 bp, Homo sapiens
gcatgccattatttt

SEQ ID NO: 69415 - DNA, 15 bp, Homo sapiens
ggcatgccattattt

SEQ ID NO: 69416 - DNA, 15 bp, Homo sapiens
tggcatgccattatt

SEQ ID NO: 69417 - DNA, 15 bp, Homo sapiens
ttggcatgccattat

SEQ ID NO: 69418 - DNA, 15 bp, Homo sapiens
tttggcatgccatta

SEQ ID NO: 69419 - DNA, 15 bp, Homo sapiens
ttttggcatgccatt

SEQ ID NO: 69420 - DNA, 15 bp, Homo sapiens
gttttggcatgccat

SEQ ID NO: 69421 - DNA, 15 bp, Homo sapiens
ggttttggcatgcca

SEQ ID NO: 69422 - DNA, 15 bp, Homo sapiens
tggttttggcatgcc

SEQ ID NO: 69423 - DNA, 15 bp, Homo sapiens
ttggttttggcatgc

SEQ ID NO: 69424 - DNA, 15 bp, Homo sapiens
tttggttttggcatg

SEQ ID NO: 69425 - DNA, 15 bp, Homo sapiens
ttttggttttggcat

SEQ ID NO: 69426 - DNA, 15 bp, Homo sapiens
tttttggttttggca

SEQ ID NO: 69427 - DNA, 15 bp, Homo sapiens
atttttggttttggc

SEQ ID NO: 69428 - DNA, 15 bp, Homo sapiens
gatttttggttttgg

SEQ ID NO: 69429 - DNA, 15 bp, Homo sapiens
tgatttttggttttg

SEQ ID NO: 69430 - DNA, 15 bp, Homo sapiens
atgatttttggtttt

SEQ ID NO: 69431 - DNA, 15 bp, Homo sapiens
tatgatttttggttt

SEQ ID NO: 69432 - DNA, 15 bp, Homo sapiens
ttatgatttttggtt

SEQ ID NO: 69433 - DNA, 15 bp, Homo sapiens
tttatgatttttggt

SEQ ID NO: 69434 - DNA, 15 bp, Homo sapiens
ttttatgatttttgg

SEQ ID NO: 69435 - DNA, 15 bp, Homo sapiens
tttttatgatttttg

SEQ ID NO: 69436 - DNA, 15 bp, Homo sapiens
ctttttatgattttt

SEQ ID NO: 69437 - DNA, 15 bp, Homo sapiens
cctttttatgatttt

SEQ ID NO: 69438 - DNA, 15 bp, Homo sapiens
gcctttttatgattt

SEQ ID NO: 69439 - DNA, 15 bp, Homo sapiens
tgcctttttatgatt

SEQ ID NO: 69440 - DNA, 15 bp, Homo sapiens
atgcctttttatgat

SEQ ID NO: 69441 - DNA, 15 bp, Homo sapiens
aatgcctttttatga

SEQ ID NO: 69442 - DNA, 15 bp, Homo sapiens
caatgcctttttatg

SEQ ID NO: 69443 - DNA, 15 bp, Homo sapiens
ccaatgcctttttat

SEQ ID NO: 69444 - DNA, 15 bp, Homo sapiens
cccaatgccttttta

SEQ ID NO: 69445 - DNA, 15 bp, Homo sapiens
tcccaatgccttttt

SEQ ID NO: 69446 - DNA, 15 bp, Homo sapiens
gtcccaatgcctttt

SEQ ID NO: 69447 - DNA, 15 bp, Homo sapiens
tgtcccaatgccttt

SEQ ID NO: 69448 - DNA, 15 bp, Homo sapiens
ctgtcccaatgcctt

SEQ ID NO: 69449 - DNA, 15 bp, Homo sapiens
tctgtcccaatgcct

SEQ ID NO: 69450 - DNA, 15 bp, Homo sapiens
ttctgtcccaatgcc

SEQ ID NO: 69451 - DNA, 15 bp, Homo sapiens
gttctgtcccaatgc

SEQ ID NO: 69452 - DNA, 15 bp, Homo sapiens
tgttctgtcccaatg

SEQ ID NO: 69453 - DNA, 15 bp, Homo sapiens
ctgttctgtcccaat

SEQ ID NO: 69454 - DNA, 15 bp, Homo sapiens
tctgttctgtcccaa

SEQ ID NO: 69455 - DNA, 15 bp, Homo sapiens
ctctgttctgtccca

SEQ ID NO: 69456 - DNA, 15 bp, Homo sapiens
tctctgttctgtccc

SEQ ID NO: 69457 - DNA, 15 bp, Homo sapiens
atctctgttctgtcc

SEQ ID NO: 69458 - DNA, 15 bp, Homo sapiens
gatctctgttctgtc

SEQ ID NO: 69459 - DNA, 15 bp, Homo sapiens
agatctctgttctgt

SEQ ID NO: 69460 - DNA, 15 bp, Homo sapiens
gagatctctgttctg

SEQ ID NO: 69461 - DNA, 15 bp, Homo sapiens
ggagatctctgttct

SEQ ID NO: 69462 - DNA, 15 bp, Homo sapiens
tggagatctctgttc

SEQ ID NO: 69463 - DNA, 15 bp, Homo sapiens
ctggagatctctgtt

SEQ ID NO: 69464 - DNA, 15 bp, Homo sapiens
tctggagatctctgt

SEQ ID NO: 69465 - DNA, 15 bp, Homo sapiens
ttctggagatctctg

SEQ ID NO: 69466 - DNA, 15 bp, Homo sapiens
attctggagatctct

SEQ ID NO: 69467 - DNA, 15 bp, Homo sapiens
aattctggagatctc

SEQ ID NO: 69468 - DNA, 15 bp, Homo sapiens
taattctggagatct

SEQ ID NO: 69469 - DNA, 15 bp, Homo sapiens
ttaattctggagatc

SEQ ID NO: 69470 - DNA, 15 bp, Homo sapiens
attaattctggagat

SEQ ID NO: 69471 - DNA, 15 bp, Homo sapiens
tattaattctggaga

SEQ ID NO: 69472 - DNA, 15 bp, Homo sapiens
gtattaattctggag

SEQ ID NO: 69473 - DNA, 15 bp, Homo sapiens
tgtattaattctgga

SEQ ID NO: 69474 - DNA, 15 bp, Homo sapiens
atgtattaattctgg

SEQ ID NO: 69475 - DNA, 15 bp, Homo sapiens
tatgtattaattctg

SEQ ID NO: 69476 - DNA, 15 bp, Homo sapiens
ttatgtattaattct

SEQ ID NO: 69477 - DNA, 15 bp, Homo sapiens
attatgtattaattc

SEQ ID NO: 69478 - DNA, 15 bp, Homo sapiens
aattatgtattaatt

SEQ ID NO: 69479 - DNA, 15 bp, Homo sapiens
aaattatgtattaat

SEQ ID NO: 69480 - DNA, 15 bp, Homo sapiens
aaaattatgtattaa

SEQ ID NO: 69481 - DNA, 15 bp, Homo sapiens
gaaaattatgtatta

SEQ ID NO: 69482 - DNA, 15 bp, Homo sapiens
agaaaattatgtatt

SEQ ID NO: 69483 - DNA, 15 bp, Homo sapiens
tagaaaattatgtat

SEQ ID NO: 69484 - DNA, 15 bp, Homo sapiens
gtagaaaattatgta

SEQ ID NO: 69485 - DNA, 15 bp, Homo sapiens
tgtagaaaattatgt

SEQ ID NO: 69486 - DNA, 15 bp, Homo sapiens
ttgtagaaaattatg

SEQ ID NO: 69487 - DNA, 15 bp, Homo sapiens
attgtagaaaattat

SEQ ID NO: 69488 - DNA, 15 bp, Homo sapiens
tattgtagaaaatta

SEQ ID NO: 69489 - DNA, 15 bp, Homo sapiens
gtattgtagaaaatt

SEQ ID NO: 69490 - DNA, 15 bp, Homo sapiens
tgtattgtagaaaat

SEQ ID NO: 69491 - DNA, 15 bp, Homo sapiens
atgtattgtagaaaa

SEQ ID NO: 69492 - DNA, 15 bp, Homo sapiens
catgtattgtagaaa

SEQ ID NO: 69493 - DNA, 15 bp, Homo sapiens
ccatgtattgtagaa

SEQ ID NO: 69494 - DNA, 15 bp, Homo sapiens
tccatgtattgtaga

SEQ ID NO: 69495 - DNA, 15 bp, Homo sapiens
ttccatgtattgtag

SEQ ID NO: 69496 - DNA, 15 bp, Homo sapiens
gttccatgtattgta

SEQ ID NO: 69497 - DNA, 15 bp, Homo sapiens
agttccatgtattgt

SEQ ID NO: 69498 - DNA, 15 bp, Homo sapiens
tagttccatgtattg

SEQ ID NO: 69499 - DNA, 15 bp, Homo sapiens
atagttccatgtatt

SEQ ID NO: 69500 - DNA, 15 bp, Homo sapiens
aatagttccatgtat

SEQ ID NO: 69501 - DNA, 15 bp, Homo sapiens
aaatagttccatgta

SEQ ID NO: 69502 - DNA, 15 bp, Homo sapiens
taaatagttccatgt

SEQ ID NO: 69503 - DNA, 15 bp, Homo sapiens
ataaatagttccatg

SEQ ID NO: 69504 - DNA, 15 bp, Homo sapiens
aataaatagttccat

SEQ ID NO: 69505 - DNA, 15 bp, Homo sapiens
aaataaatagttcca

SEQ ID NO: 69506 - DNA, 15 bp, Homo sapiens
taaataaatagttcc

SEQ ID NO: 69507 - DNA, 15 bp, Homo sapiens
ttaaataaatagttc

SEQ ID NO: 69508 - DNA, 15 bp, Homo sapiens
attaaataaatagtt

SEQ ID NO: 69509 - DNA, 15 bp, Homo sapiens
aattaaataaatagt

SEQ ID NO: 69510 - DNA, 15 bp, Homo sapiens
aaattaaataaatag

SEQ ID NO: 69511 - DNA, 15 bp, Homo sapiens
taaattaaataaata

SEQ ID NO: 69512 - DNA, 15 bp, Homo sapiens
ttaaattaaataaat

SEQ ID NO: 69513 - DNA, 15 bp, Homo sapiens
attaaattaaataaa

SEQ ID NO: 69514 - DNA, 15 bp, Homo sapiens
tattaaattaaataa

SEQ ID NO: 69515 - DNA, 15 bp, Homo sapiens
ttattaaattaaata

SEQ ID NO: 69516 - DNA, 15 bp, Homo sapiens
tttattaaattaaat

SEQ ID NO: 69517 - DNA, 15 bp, Homo sapiens
ttttattaaattaaa

SEQ ID NO: 69518 - DNA, 15 bp, Homo sapiens
attttattaaattaa

SEQ ID NO: 69519 - DNA, 15 bp, Homo sapiens
aattttattaaatta

SEQ ID NO: 69520 - DNA, 15 bp, Homo sapiens
taattttattaaatt

SEQ ID NO: 69521 - DNA, 15 bp, Homo sapiens
ttaattttattaaat

SEQ ID NO: 69522 - DNA, 15 bp, Homo sapiens
attaattttattaaa

SEQ ID NO: 69523 - DNA, 15 bp, Homo sapiens
tattaattttattaa

SEQ ID NO: 69524 - DNA, 15 bp, Homo sapiens
atattaattttatta

SEQ ID NO: 69525 - DNA, 15 bp, Homo sapiens
aatattaattttatt

SEQ ID NO: 69526 - DNA, 15 bp, Homo sapiens
taatattaattttat

SEQ ID NO: 69527 - DNA, 15 bp, Homo sapiens
ataatattaatttta

SEQ ID NO: 69528 - DNA, 15 bp, Homo sapiens
aataatattaatttt

SEQ ID NO: 69529 - DNA, 15 bp, Homo sapiens
caataatattaattt

SEQ ID NO: 69530 - DNA, 15 bp, Homo sapiens
ccaataatattaatt

SEQ ID NO: 69531 - DNA, 15 bp, Homo sapiens
tccaataatattaat

SEQ ID NO: 69532 - DNA, 15 bp, Homo sapiens
ttccaataatattaa

SEQ ID NO: 69533 - DNA, 15 bp, Homo sapiens
tttccaataatatta

SEQ ID NO: 69534 - DNA, 15 bp, Homo sapiens
ttttccaataatatt

SEQ ID NO: 69535 - DNA, 15 bp, Homo sapiens
tttttccaataatat

SEQ ID NO: 69536 - DNA, 15 bp, Homo sapiens
atttttccaataata

SEQ ID NO: 69537 - DNA, 15 bp, Homo sapiens
gatttttccaataat

SEQ ID NO: 69538 - DNA, 15 bp, Homo sapiens
agatttttccaataa

SEQ ID NO: 69539 - DNA, 15 bp, Homo sapiens
cagatttttccaata

SEQ ID NO: 69540 - DNA, 15 bp, Homo sapiens
tcagatttttccaat

SEQ ID NO: 69541 - DNA, 15 bp, Homo sapiens
atcagatttttccaa

SEQ ID NO: 69542 - DNA, 15 bp, Homo sapiens
tatcagatttttcca

SEQ ID NO: 69543 - DNA, 15 bp, Homo sapiens
atatcagatttttcc

SEQ ID NO: 69544 - DNA, 15 bp, Homo sapiens
aatatcagatttttc

SEQ ID NO: 69545 - DNA, 15 bp, Homo sapiens
taatatcagattttt

SEQ ID NO: 69546 - DNA, 15 bp, Homo sapiens
gtaatatcagatttt

SEQ ID NO: 69547 - DNA, 15 bp, Homo sapiens
agtaatatcagattt

SEQ ID NO: 69548 - DNA, 15 bp, Homo sapiens
tagtaatatcagatt

SEQ ID NO: 69549 - DNA, 15 bp, Homo sapiens
atagtaatatcagat

SEQ ID NO: 69550 - DNA, 15 bp, Homo sapiens
catagtaatatcaga

SEQ ID NO: 69551 - DNA, 15 bp, Homo sapiens
ccatagtaatatcag

SEQ ID NO: 69552 - DNA, 15 bp, Homo sapiens
cccatagtaatatca

SEQ ID NO: 69553 - DNA, 15 bp, Homo sapiens
ccccatagtaatatc

SEQ ID NO: 69554 - DNA, 15 bp, Homo sapiens
cccccatagtaatat

SEQ ID NO: 69555 - DNA, 15 bp, Homo sapiens
tcccccatagtaata

SEQ ID NO: 69556 - DNA, 15 bp, Homo sapiens
ttcccccatagtaat

SEQ ID NO: 69557 - DNA, 15 bp, Homo sapiens
gttcccccatagtaa

SEQ ID NO: 69558 - DNA, 15 bp, Homo sapiens
tgttcccccatagta

SEQ ID NO: 69559 - DNA, 15 bp, Homo sapiens
atgttcccccatagt

SEQ ID NO: 69560 - DNA, 15 bp, Homo sapiens
tatgttcccccatag

SEQ ID NO: 69561 - DNA, 15 bp, Homo sapiens
ctatgttcccccata

SEQ ID NO: 69562 - DNA, 15 bp, Homo sapiens
cctatgttcccccat

SEQ ID NO: 69563 - DNA, 15 bp, Homo sapiens
gcctatgttccccca

SEQ ID NO: 69564 - DNA, 15 bp, Homo sapiens
ggcctatgttccccc

SEQ ID NO: 69565 - DNA, 15 bp, Homo sapiens
gggcctatgttcccc

SEQ ID NO: 69566 - DNA, 15 bp, Homo sapiens
tgggcctatgttccc

SEQ ID NO: 69567 - DNA, 15 bp, Homo sapiens
atgggcctatgttcc

SEQ ID NO: 69568 - DNA, 15 bp, Homo sapiens
aatgggcctatgttc

SEQ ID NO: 69569 - DNA, 15 bp, Homo sapiens
gaatgggcctatgtt

SEQ ID NO: 69570 - DNA, 15 bp, Homo sapiens
agaatgggcctatgt

SEQ ID NO: 69571 - DNA, 15 bp, Homo sapiens
gagaatgggcctatg

SEQ ID NO: 69572 - DNA, 15 bp, Homo sapiens
tgagaatgggcctat

SEQ ID NO: 69573 - DNA, 15 bp, Homo sapiens
atgagaatgggccta

SEQ ID NO: 69574 - DNA, 15 bp, Homo sapiens
aatgagaatgggcct

SEQ ID NO: 69575 - DNA, 15 bp, Homo sapiens
aaatgagaatgggcc

SEQ ID NO: 69576 - DNA, 15 bp, Homo sapiens
taaatgagaatgggc

SEQ ID NO: 69577 - DNA, 15 bp, Homo sapiens
gtaaatgagaatggg

SEQ ID NO: 69578 - DNA, 15 bp, Homo sapiens
agtaaatgagaatgg

SEQ ID NO: 69579 - DNA, 15 bp, Homo sapiens
tagtaaatgagaatg

SEQ ID NO: 69580 - DNA, 15 bp, Homo sapiens
ttagtaaatgagaat

SEQ ID NO: 69581 - DNA, 15 bp, Homo sapiens
tttagtaaatgagaa

SEQ ID NO: 69582 - DNA, 15 bp, Homo sapiens
ctttagtaaatgaga

SEQ ID NO: 69583 - DNA, 15 bp, Homo sapiens
actttagtaaatgag

SEQ ID NO: 69584 - DNA, 15 bp, Homo sapiens
tactttagtaaatga

SEQ ID NO: 69585 - DNA, 15 bp, Homo sapiens
ttactttagtaaatg

SEQ ID NO: 69586 - DNA, 15 bp, Homo sapiens
tttactttagtaaat

SEQ ID NO: 69587 - DNA, 15 bp, Homo sapiens
gtttactttagtaaa

SEQ ID NO: 69588 - DNA, 15 bp, Homo sapiens
agtttactttagtaa

SEQ ID NO: 69589 - DNA, 15 bp, Homo sapiens
gagtttactttagta

SEQ ID NO: 69590 - DNA, 15 bp, Homo sapiens
agagtttactttagt

SEQ ID NO: 69591 - DNA, 15 bp, Homo sapiens
cagagtttactttag

SEQ ID NO: 69592 - DNA, 15 bp, Homo sapiens
ccagagtttacttta

SEQ ID NO: 69593 - DNA, 15 bp, Homo sapiens
cccagagtttacttt

SEQ ID NO: 69594 - DNA, 15 bp, Homo sapiens
acccagagtttactt

SEQ ID NO: 69595 - DNA, 15 bp, Homo sapiens
aacccagagtttact

SEQ ID NO: 69596 - DNA, 15 bp, Homo sapiens
caacccagagtttac

SEQ ID NO: 69597 - DNA, 15 bp, Homo sapiens
ccaacccagagttta

SEQ ID NO: 69598 - DNA, 15 bp, Homo sapiens
accaacccagagttt

SEQ ID NO: 69599 - DNA, 15 bp, Homo sapiens
aaccaacccagagtt

SEQ ID NO: 69600 - DNA, 15 bp, Homo sapiens
gaaccaacccagagt

SEQ ID NO: 69601 - DNA, 15 bp, Homo sapiens
tgaaccaacccagag

SEQ ID NO: 69602 - DNA, 15 bp, Homo sapiens
ttgaaccaacccaga

SEQ ID NO: 69603 - DNA, 15 bp, Homo sapiens
cttgaaccaacccag

SEQ ID NO: 69604 - DNA, 15 bp, Homo sapiens
acttgaaccaaccca

SEQ ID NO: 69605 - DNA, 15 bp, Homo sapiens
cacttgaaccaaccc

SEQ ID NO: 69606 - DNA, 15 bp, Homo sapiens
acacttgaaccaacc

SEQ ID NO: 69607 - DNA, 15 bp, Homo sapiens
tacacttgaaccaac

SEQ ID NO: 69608 - DNA, 15 bp, Homo sapiens
ttacacttgaaccaa

SEQ ID NO: 69609 - DNA, 15 bp, Homo sapiens
tttacacttgaacca

SEQ ID NO: 69610 - DNA, 15 bp, Homo sapiens
atttacacttgaacc

SEQ ID NO: 69611 - DNA, 15 bp, Homo sapiens
tatttacacttgaac

SEQ ID NO: 69612 - DNA, 15 bp, Homo sapiens
atatttacacttgaa

SEQ ID NO: 69613 - DNA, 15 bp, Homo sapiens
aatatttacacttga

SEQ ID NO: 69614 - DNA, 15 bp, Homo sapiens
aaatatttacacttg

SEQ ID NO: 69615 - DNA, 15 bp, Homo sapiens
aaaatatttacactt

SEQ ID NO: 69616 - DNA, 15 bp, Homo sapiens
gaaaatatttacact

SEQ ID NO: 69617 - DNA, 15 bp, Homo sapiens
agaaaatatttacac

SEQ ID NO: 69618 - DNA, 15 bp, Homo sapiens
aagaaaatatttaca

SEQ ID NO: 69619 - DNA, 15 bp, Homo sapiens
aaagaaaatatttac

SEQ ID NO: 69620 - DNA, 15 bp, Homo sapiens
taaagaaaatattta

SEQ ID NO: 69621 - DNA, 15 bp, Homo sapiens
ataaagaaaatattt

SEQ ID NO: 69622 - DNA, 15 bp, Homo sapiens
aataaagaaaatatt

SEQ ID NO: 69623 - DNA, 15 bp, Homo sapiens
aaataaagaaaatat

SEQ ID NO: 69624 - DNA, 15 bp, Homo sapiens
aaaataaagaaaata

SEQ ID NO: 69625 - DNA, 15 bp, Homo sapiens
aaaaataaagaaaat

SEQ ID NO: 69626 - DNA, 15 bp, Homo sapiens
taaaaaataaagaaa

SEQ ID NO: 69627 - DNA, 15 bp, Homo sapiens
ttaaaaaataaagaa

SEQ ID NO: 69628 - DNA, 15 bp, Homo sapiens
tttaaaaaataaaga

SEQ ID NO: 69629 - DNA, 15 bp, Homo sapiens
ttttaaaaaataaag

SEQ ID NO: 69630 - DNA, 15 bp, Homo sapiens
tttttaaaaaataaa

SEQ ID NO: 69631 - DNA, 15 bp, Homo sapiens
ctttttaaaaaataa

SEQ ID NO: 69632 - DNA, 15 bp, Homo sapiens
tctttttaaaaaata

SEQ ID NO: 69633 - DNA, 15 bp, Homo sapiens
ttctttttaaaaaat

SEQ ID NO: 69634 - DNA, 15 bp, Homo sapiens
gttctttttaaaaaa

SEQ ID NO: 69635 - DNA, 15 bp, Homo sapiens
ggttctttttaaaaa

SEQ ID NO: 69636 - DNA, 15 bp, Homo sapiens
aggttctttttaaaa

SEQ ID NO: 69637 - DNA, 15 bp, Homo sapiens
caggttctttttaaa

SEQ ID NO: 69638 - DNA, 15 bp, Homo sapiens
ccaggttctttttaa

SEQ ID NO: 69639 - DNA, 15 bp, Homo sapiens
accaggttcttttta

SEQ ID NO: 69640 - DNA, 15 bp, Homo sapiens
taccaggttcttttt

SEQ ID NO: 69641 - DNA, 15 bp, Homo sapiens
ttaccaggttctttt

SEQ ID NO: 69642 - DNA, 15 bp, Homo sapiens
tttaccaggttcttt

SEQ ID NO: 69643 - DNA, 15 bp, Homo sapiens
ttttaccaggttctt

SEQ ID NO: 69644 - DNA, 15 bp, Homo sapiens
attttaccaggttct

SEQ ID NO: 69645 - DNA, 15 bp, Homo sapiens
tattttaccaggttc

SEQ ID NO: 69646 - DNA, 15 bp, Homo sapiens
gtattttaccaggtt

SEQ ID NO: 69647 - DNA, 15 bp, Homo sapiens
ggtattttaccaggt

SEQ ID NO: 69648 - DNA, 15 bp, Homo sapiens
tggtattttaccagg

SEQ ID NO: 69649 - DNA, 15 bp, Homo sapiens
ttggtattttaccag

SEQ ID NO: 69650 - DNA, 15 bp, Homo sapiens
gttggtattttacca

SEQ ID NO: 69651 - DNA, 15 bp, Homo sapiens
ggttggtattttacc

SEQ ID NO: 69652 - DNA, 15 bp, Homo sapiens
tggttggtattttac

SEQ ID NO: 69653 - DNA, 15 bp, Homo sapiens
atggttggtatttta

SEQ ID NO: 69654 - DNA, 15 bp, Homo sapiens
aatggttggtatttt

SEQ ID NO: 69655 - DNA, 15 bp, Homo sapiens
caatggttggtattt

SEQ ID NO: 69656 - DNA, 15 bp, Homo sapiens
tcaatggttggtatt

SEQ ID NO: 69657 - DNA, 15 bp, Homo sapiens
ctcaatggttggtat

SEQ ID NO: 69658 - DNA, 15 bp, Homo sapiens
tctcaatggttggta

SEQ ID NO: 69659 - DNA, 15 bp, Homo sapiens
ttctcaatggttggt

SEQ ID NO: 69660 - DNA, 15 bp, Homo sapiens
attctcaatggttgg

SEQ ID NO: 69661 - DNA, 15 bp, Homo sapiens
aattctcaatggttg

SEQ ID NO: 69662 - DNA, 15 bp, Homo sapiens
taattctcaatggtt

SEQ ID NO: 69663 - DNA, 15 bp, Homo sapiens
ttaattctcaatggt

SEQ ID NO: 69664 - DNA, 15 bp, Homo sapiens
tttaattctcaatgg

SEQ ID NO: 69665 - DNA, 15 bp, Homo sapiens
atttaattctcaatg

SEQ ID NO: 69666 - DNA, 15 bp, Homo sapiens
aatttaattctcaat

SEQ ID NO: 69667 - DNA, 15 bp, Homo sapiens
taatttaattctcaa

SEQ ID NO: 69668 - DNA, 15 bp, Homo sapiens
ataatttaattctca

SEQ ID NO: 69669 - DNA, 15 bp, Homo sapiens
aataatttaattctc

SEQ ID NO: 69670 - DNA, 15 bp, Homo sapiens
taataatttaattct

SEQ ID NO: 69671 - DNA, 15 bp, Homo sapiens
ataataatttaattc

SEQ ID NO: 69672 - DNA, 15 bp, Homo sapiens
aataataatttaatt

SEQ ID NO: 69673 - DNA, 15 bp, Homo sapiens
caataataatttaat

SEQ ID NO: 69674 - DNA, 15 bp, Homo sapiens
tcaataataatttaa

SEQ ID NO: 69675 - DNA, 15 bp, Homo sapiens
ttcaataataattta

SEQ ID NO: 69676 - DNA, 15 bp, Homo sapiens
tttcaataataattt

SEQ ID NO: 69677 - DNA, 15 bp, Homo sapiens
gtttcaataataatt

SEQ ID NO: 69678 - DNA, 15 bp, Homo sapiens
tgtttcaataataat

SEQ ID NO: 69679 - DNA, 15 bp, Homo sapiens
ttgtttcaataataa

SEQ ID NO: 69680 - DNA, 15 bp, Homo sapiens
gttgtttcaataata

SEQ ID NO: 69681 - DNA, 15 bp, Homo sapiens
agttgtttcaataat

SEQ ID NO: 69682 - DNA, 15 bp, Homo sapiens
cagttgtttcaataa

SEQ ID NO: 69683 - DNA, 15 bp, Homo sapiens
tcagttgtttcaata

SEQ ID NO: 69684 - DNA, 15 bp, Homo sapiens
gtcagttgtttcaat

SEQ ID NO: 69685 - DNA, 15 bp, Homo sapiens
tgtcagttgtttcaa

SEQ ID NO: 69686 - DNA, 15 bp, Homo sapiens
atgtcagttgtttca

SEQ ID NO: 69687 - DNA, 15 bp, Homo sapiens
aatgtcagttgtttc

SEQ ID NO: 69688 - DNA, 15 bp, Homo sapiens
aaatgtcagttgttt

SEQ ID NO: 69689 - DNA, 15 bp, Homo sapiens
aaaatgtcagttgtt

SEQ ID NO: 69690 - DNA, 15 bp, Homo sapiens
aaaaatgtcagttgt

SEQ ID NO: 69691 - DNA, 15 bp, Homo sapiens
taaaaatgtcagttg

SEQ ID NO: 69692 - DNA, 15 bp, Homo sapiens
ttaaaaatgtcagtt

SEQ ID NO: 69693 - DNA, 15 bp, Homo sapiens
tttaaaaatgtcagt

SEQ ID NO: 69694 - DNA, 15 bp, Homo sapiens
ctttaaaaatgtcag

SEQ ID NO: 69695 - DNA, 15 bp, Homo sapiens
tctttaaaaatgtca

SEQ ID NO: 69696 - DNA, 15 bp, Homo sapiens
ttctttaaaaatgtc

SEQ ID NO: 69697 - DNA, 15 bp, Homo sapiens
tttctttaaaaatgt

SEQ ID NO: 69698 - DNA, 15 bp, Homo sapiens
ctttctttaaaaatg

SEQ ID NO: 69699 - DNA, 15 bp, Homo sapiens
gctttctttaaaaat

SEQ ID NO: 69700 - DNA, 15 bp, Homo sapiens
tgctttctttaaaaa

SEQ ID NO: 69701 - DNA, 15 bp, Homo sapiens
atgctttctttaaaa

SEQ ID NO: 69702 - DNA, 15 bp, Homo sapiens
tatgctttctttaaa

SEQ ID NO: 69703 - DNA, 15 bp, Homo sapiens
atatgctttctttaa

SEQ ID NO: 69704 - DNA, 15 bp, Homo sapiens
catatgctttcttta

SEQ ID NO: 69705 - DNA, 15 bp, Homo sapiens
acatatgctttcttt

SEQ ID NO: 69706 - DNA, 15 bp, Homo sapiens
aacatatgctttctt

SEQ ID NO: 69707 - DNA, 15 bp, Homo sapiens
taacatatgctttct

SEQ ID NO: 69708 - DNA, 15 bp, Homo sapiens
ttaacatatgctttc

SEQ ID NO: 69709 - DNA, 15 bp, Homo sapiens
gttaacatatgcttt

SEQ ID NO: 69710 - DNA, 15 bp, Homo sapiens
tgttaacatatgctt

SEQ ID NO: 69711 - DNA, 15 bp, Homo sapiens
ctgttaacatatgct

SEQ ID NO: 69712 - DNA, 15 bp, Homo sapiens
tctgttaacatatgc

SEQ ID NO: 69713 - DNA, 15 bp, Homo sapiens
ttctgttaacatatg

SEQ ID NO: 69714 - DNA, 15 bp, Homo sapiens
tttctgttaacatat

SEQ ID NO: 69715 - DNA, 15 bp, Homo sapiens
ttttctgttaacata

SEQ ID NO: 69716 - DNA, 15 bp, Homo sapiens
tttttctgttaacat

SEQ ID NO: 69717 - DNA, 15 bp, Homo sapiens
ttttttctgttaaca

SEQ ID NO: 69718 - DNA, 15 bp, Homo sapiens
tttttttctgttaac

SEQ ID NO: 69719 - DNA, 15 bp, Homo sapiens
ttttttttctgttaa

SEQ ID NO: 69720 - DNA, 15 bp, Homo sapiens
cttttttttctgtta

SEQ ID NO: 69721 - DNA, 15 bp, Homo sapiens
tcttttttttctgtt

SEQ ID NO: 69722 - DNA, 15 bp, Homo sapiens
atcttttttttctgt

SEQ ID NO: 69723 - DNA, 15 bp, Homo sapiens
gatcttttttttctg

SEQ ID NO: 69724 - DNA, 15 bp, Homo sapiens
agatcttttttttct

SEQ ID NO: 69725 - DNA, 15 bp, Homo sapiens
aagatcttttttttc

SEQ ID NO: 69726 - DNA, 15 bp, Homo sapiens
gaagatctttttttt

SEQ ID NO: 69727 - DNA, 15 bp, Homo sapiens
tgaagatcttttttt

SEQ ID NO: 69728 - DNA, 15 bp, Homo sapiens
ctgaagatctttttt

SEQ ID NO: 69729 - DNA, 15 bp, Homo sapiens
tctgaagatcttttt

SEQ ID NO: 69730 - DNA, 15 bp, Homo sapiens
ttctgaagatctttt

SEQ ID NO: 69731 - DNA, 15 bp, Homo sapiens
tttctgaagatcttt

SEQ ID NO: 69732 - DNA, 15 bp, Homo sapiens
atttctgaagatctt

SEQ ID NO: 69733 - DNA, 15 bp, Homo sapiens
aatttctgaagatct

SEQ ID NO: 69734 - DNA, 15 bp, Homo sapiens
gaatttctgaagatc

SEQ ID NO: 69735 - DNA, 15 bp, Homo sapiens
agaatttctgaagat

SEQ ID NO: 69736 - DNA, 15 bp, Homo sapiens
tagaatttctgaaga

SEQ ID NO: 69737 - DNA, 15 bp, Homo sapiens
atagaatttctgaag

SEQ ID NO: 69738 - DNA, 15 bp, Homo sapiens
tatagaatttctgaa

SEQ ID NO: 69739 - DNA, 15 bp, Homo sapiens
ttatagaatttctga

SEQ ID NO: 69740 - DNA, 15 bp, Homo sapiens
gttatagaatttctg

SEQ ID NO: 69741 - DNA, 15 bp, Homo sapiens
agttatagaatttct

SEQ ID NO: 69742 - DNA, 15 bp, Homo sapiens
gagttatagaatttc

SEQ ID NO: 69743 - DNA, 15 bp, Homo sapiens
tgagttatagaattt

SEQ ID NO: 69744 - DNA, 15 bp, Homo sapiens
ctgagttatagaatt

SEQ ID NO: 69745 - DNA, 15 bp, Homo sapiens
tctgagttatagaat

SEQ ID NO: 69746 - DNA, 15 bp, Homo sapiens
ctctgagttatagaa

SEQ ID NO: 69747 - DNA, 15 bp, Homo sapiens
tctctgagttataga

SEQ ID NO: 69748 - DNA, 15 bp, Homo sapiens
atctctgagttatag

SEQ ID NO: 69749 - DNA, 15 bp, Homo sapiens
tatctctgagttata

SEQ ID NO: 69750 - DNA, 15 bp, Homo sapiens
atatctctgagttat

SEQ ID NO: 69751 - DNA, 15 bp, Homo sapiens
aatatctctgagtta

SEQ ID NO: 69752 - DNA, 15 bp, Homo sapiens
gaatatctctgagtt

SEQ ID NO: 69753 - DNA, 15 bp, Homo sapiens
tgaatatctctgagt

SEQ ID NO: 69754 - DNA, 15 bp, Homo sapiens
gtgaatatctctgag

SEQ ID NO: 69755 - DNA, 15 bp, Homo sapiens
agtgaatatctctga

SEQ ID NO: 69756 - DNA, 15 bp, Homo sapiens
cagtgaatatctctg

SEQ ID NO: 69757 - DNA, 15 bp, Homo sapiens
acagtgaatatctct

SEQ ID NO: 69758 - DNA, 15 bp, Homo sapiens
aacagtgaatatctc

SEQ ID NO: 69759 - DNA, 15 bp, Homo sapiens
taacagtgaatatct

SEQ ID NO: 69760 - DNA, 15 bp, Homo sapiens
ttaacagtgaatatc

SEQ ID NO: 69761 - DNA, 15 bp, Homo sapiens
gttaacagtgaatat

SEQ ID NO: 69762 - DNA, 15 bp, Homo sapiens
tgttaacagtgaata

SEQ ID NO: 69763 - DNA, 15 bp, Homo sapiens
atgttaacagtgaat

SEQ ID NO: 69764 - DNA, 15 bp, Homo sapiens
gatgttaacagtgaa

SEQ ID NO: 69765 - DNA, 15 bp, Homo sapiens
tgatgttaacagtga

SEQ ID NO: 69766 - DNA, 15 bp, Homo sapiens
atgatgttaacagtg

SEQ ID NO: 69767 - DNA, 15 bp, Homo sapiens
catgatgttaacagt

SEQ ID NO: 69768 - DNA, 15 bp, Homo sapiens
tcatgatgttaacag

SEQ ID NO: 69769 - DNA, 15 bp, Homo sapiens
atcatgatgttaaca

SEQ ID NO: 69770 - DNA, 15 bp, Homo sapiens
aatcatgatgttaac

SEQ ID NO: 69771 - DNA, 15 bp, Homo sapiens
aaatcatgatgttaa

SEQ ID NO: 69772 - DNA, 15 bp, Homo sapiens
taaatcatgatgtta

SEQ ID NO: 69773 - DNA, 15 bp, Homo sapiens
ttaaatcatgatgtt

SEQ ID NO: 69774 - DNA, 15 bp, Homo sapiens
gttaaatcatgatgt

SEQ ID NO: 69775 - DNA, 15 bp, Homo sapiens
tgttaaatcatgatg

SEQ ID NO: 69776 - DNA, 15 bp, Homo sapiens
ttgttaaatcatgat

SEQ ID NO: 69777 - DNA, 15 bp, Homo sapiens
attgttaaatcatga

SEQ ID NO: 69778 - DNA, 15 bp, Homo sapiens
aattgttaaatcatg

SEQ ID NO: 69779 - DNA, 15 bp, Homo sapiens
aaattgttaaatcat

SEQ ID NO: 69780 - DNA, 15 bp, Homo sapiens
aaaattgttaaatca

SEQ ID NO: 69781 - DNA, 15 bp, Homo sapiens
gaaaattgttaaatc

SEQ ID NO: 69782 - DNA, 15 bp, Homo sapiens
agaaaattgttaaat

SEQ ID NO: 69783 - DNA, 15 bp, Homo sapiens
aagaaaattgttaaa

SEQ ID NO: 69784 - DNA, 15 bp, Homo sapiens
taagaaaattgttaa

SEQ ID NO: 69785 - DNA, 15 bp, Homo sapiens
gtaagaaaattgtta

SEQ ID NO: 69786 - DNA, 15 bp, Homo sapiens
ggtaagaaaattgtt

SEQ ID NO: 69787 - DNA, 15 bp, Homo sapiens
tggtaagaaaattgt

SEQ ID NO: 69788 - DNA, 15 bp, Homo sapiens
gtggtaagaaaattg

SEQ ID NO: 69789 - DNA, 15 bp, Homo sapiens
agtggtaagaaaatt

SEQ ID NO: 69790 - DNA, 15 bp, Homo sapiens
cagtggtaagaaaat

SEQ ID NO: 69791 - DNA, 15 bp, Homo sapiens
tcagtggtaagaaaa

SEQ ID NO: 69792 - DNA, 15 bp, Homo sapiens
ttcagtggtaagaaa

SEQ ID NO: 69793 - DNA, 15 bp, Homo sapiens
tttcagtggtaagaa

SEQ ID NO: 69794 - DNA, 15 bp, Homo sapiens
atttcagtggtaaga

SEQ ID NO: 69795 - DNA, 15 bp, Homo sapiens
tatttcagtggtaag

SEQ ID NO: 69796 - DNA, 15 bp, Homo sapiens
ttatttcagtggtaa

SEQ ID NO: 69797 - DNA, 15 bp, Homo sapiens
attatttcagtggta

SEQ ID NO: 69798 - DNA, 15 bp, Homo sapiens
tattatttcagtggt

SEQ ID NO: 69799 - DNA, 15 bp, Homo sapiens
ctattatttcagtgg

SEQ ID NO: 69800 - DNA, 15 bp, Homo sapiens
tctattatttcagtg

SEQ ID NO: 69801 - DNA, 15 bp, Homo sapiens
ttctattatttcagt

SEQ ID NO: 69802 - DNA, 15 bp, Homo sapiens
tttctattatttcag

SEQ ID NO: 69803 - DNA, 15 bp, Homo sapiens
ttttctattatttca

SEQ ID NO: 69804 - DNA, 15 bp, Homo sapiens
tttttctattatttc

SEQ ID NO: 69805 - DNA, 15 bp, Homo sapiens
ttttttctattattt

SEQ ID NO: 69806 - DNA, 15 bp, Homo sapiens
tttttttctattatt

SEQ ID NO: 69807 - DNA, 15 bp, Homo sapiens
atttttttctattat

SEQ ID NO: 69808 - DNA, 15 bp, Homo sapiens
catttttttctatta

SEQ ID NO: 69809 - DNA, 15 bp, Homo sapiens
gcatttttttctatt

SEQ ID NO: 69810 - DNA, 15 bp, Homo sapiens
ggcatttttttctat

SEQ ID NO: 69811 - DNA, 15 bp, Homo sapiens
gggcatttttttcta

SEQ ID NO: 69812 - DNA, 15 bp, Homo sapiens
tgggcatttttttct

SEQ ID NO: 69813 - DNA, 15 bp, Homo sapiens
ctgggcatttttttc

SEQ ID NO: 69814 - DNA, 15 bp, Homo sapiens
actgggcattttttt

SEQ ID NO: 69815 - DNA, 15 bp, Homo sapiens
cactgggcatttttt

SEQ ID NO: 69816 - DNA, 15 bp, Homo sapiens
ccactgggcattttt

SEQ ID NO: 69817 - DNA, 15 bp, Homo sapiens
gccactgggcatttt

SEQ ID NO: 69818 - DNA, 15 bp, Homo sapiens
tgccactgggcattt

SEQ ID NO: 69819 - DNA, 15 bp, Homo sapiens
atgccactgggcatt

SEQ ID NO: 69820 - DNA, 15 bp, Homo sapiens
tatgccactgggcat

SEQ ID NO: 69821 - DNA, 15 bp, Homo sapiens
ttatgccactgggca

SEQ ID NO: 69822 - DNA, 15 bp, Homo sapiens
attatgccactgggc

SEQ ID NO: 69823 - DNA, 15 bp, Homo sapiens
aattatgccactggg

SEQ ID NO: 69824 - DNA, 15 bp, Homo sapiens
caattatgccactgg

SEQ ID NO: 69825 - DNA, 15 bp, Homo sapiens
tcaattatgccactg

SEQ ID NO: 69826 - DNA, 15 bp, Homo sapiens
atcaattatgccact

SEQ ID NO: 69827 - DNA, 15 bp, Homo sapiens
aatcaattatgccac

SEQ ID NO: 69828 - DNA, 15 bp, Homo sapiens
taatcaattatgcca

SEQ ID NO: 69829 - DNA, 15 bp, Homo sapiens
ttaatcaattatgcc

SEQ ID NO: 69830 - DNA, 15 bp, Homo sapiens
attaatcaattatgc

SEQ ID NO: 69831 - DNA, 15 bp, Homo sapiens
aattaatcaattatg

SEQ ID NO: 69832 - DNA, 15 bp, Homo sapiens
gaattaatcaattat

SEQ ID NO: 69833 - DNA, 15 bp, Homo sapiens
tgaattaatcaatta

SEQ ID NO: 69834 - DNA, 15 bp, Homo sapiens
ctgaattaatcaatt

SEQ ID NO: 69835 - DNA, 15 bp, Homo sapiens
actgaattaatcaat

SEQ ID NO: 69836 - DNA, 15 bp, Homo sapiens
aactgaattaatcaa

SEQ ID NO: 69837 - DNA, 15 bp, Homo sapiens
caactgaattaatca

SEQ ID NO: 69838 - DNA, 15 bp, Homo sapiens
acaactgaattaatc

SEQ ID NO: 69839 - DNA, 15 bp, Homo sapiens
aacaactgaattaat

SEQ ID NO: 69840 - DNA, 15 bp, Homo sapiens
gaacaactgaattaa

SEQ ID NO: 69841 - DNA, 15 bp, Homo sapiens
ggaacaactgaatta

SEQ ID NO: 69842 - DNA, 15 bp, Homo sapiens
aggaacaactgaatt

SEQ ID NO: 69843 - DNA, 15 bp, Homo sapiens
aaggaacaactgaat

SEQ ID NO: 69844 - DNA, 15 bp, Homo sapiens
taaggaacaactgaa

SEQ ID NO: 69845 - DNA, 15 bp, Homo sapiens
ttaaggaacaactga

SEQ ID NO: 69846 - DNA, 15 bp, Homo sapiens
cttaaggaacaactg

SEQ ID NO: 69847 - DNA, 15 bp, Homo sapiens
gcttaaggaacaact

SEQ ID NO: 69848 - DNA, 15 bp, Homo sapiens
ggcttaaggaacaac

SEQ ID NO: 69849 - DNA, 15 bp, Homo sapiens
aggcttaaggaacaa

SEQ ID NO: 69850 - DNA, 15 bp, Homo sapiens
gaggcttaaggaaca

SEQ ID NO: 69851 - DNA, 15 bp, Homo sapiens
agaggcttaaggaac

SEQ ID NO: 69852 - DNA, 15 bp, Homo sapiens
aagaggcttaaggaa

SEQ ID NO: 69853 - DNA, 15 bp, Homo sapiens
aaagaggcttaagga

SEQ ID NO: 69854 - DNA, 15 bp, Homo sapiens
gaaagaggcttaagg

SEQ ID NO: 69855 - DNA, 15 bp, Homo sapiens
ggaaagaggcttaag

SEQ ID NO: 69856 - DNA, 15 bp, Homo sapiens
tggaaagaggcttaa

SEQ ID NO: 69857 - DNA, 15 bp, Homo sapiens
ttggaaagaggctta

SEQ ID NO: 69858 - DNA, 15 bp, Homo sapiens
attggaaagaggctt

SEQ ID NO: 69859 - DNA, 15 bp, Homo sapiens
tattggaaagaggct

SEQ ID NO: 69860 - DNA, 15 bp, Homo sapiens
ttattggaaagaggc

SEQ ID NO: 69861 - DNA, 15 bp, Homo sapiens
tttattggaaagagg

SEQ ID NO: 69862 - DNA, 15 bp, Homo sapiens
ttttattggaaagag

SEQ ID NO: 69863 - DNA, 15 bp, Homo sapiens
tttttattggaaaga

SEQ ID NO: 69864 - DNA, 15 bp, Homo sapiens
gtttttattggaaag

SEQ ID NO: 69865 - DNA, 15 bp, Homo sapiens
ggtttttattggaaa

SEQ ID NO: 69866 - DNA, 15 bp, Homo sapiens
tggtttttattggaa

SEQ ID NO: 69867 - DNA, 15 bp, Homo sapiens
ttggtttttattgga

SEQ ID NO: 69868 - DNA, 15 bp, Homo sapiens
attggtttttattgg

SEQ ID NO: 69869 - DNA, 15 bp, Homo sapiens
tattggtttttattg

SEQ ID NO: 69870 - DNA, 15 bp, Homo sapiens
ttattggtttttatt

SEQ ID NO: 69871 - DNA, 15 bp, Homo sapiens
tttattggtttttat

SEQ ID NO: 69872 - DNA, 15 bp, Homo sapiens
ttttattggttttta

SEQ ID NO: 69873 - DNA, 15 bp, Homo sapiens
gttttattggttttt

SEQ ID NO: 69874 - DNA, 15 bp, Homo sapiens
agttttattggtttt

SEQ ID NO: 69875 - DNA, 15 bp, Homo sapiens
tagttttattggttt

SEQ ID NO: 69876 - DNA, 15 bp, Homo sapiens
atagttttattggtt

SEQ ID NO: 69877 - DNA, 15 bp, Homo sapiens
catagttttattggt

SEQ ID NO: 69878 - DNA, 15 bp, Homo sapiens
tcatagttttattgg

SEQ ID NO: 69879 - DNA, 15 bp, Homo sapiens
atcatagttttattg

SEQ ID NO: 69880 - DNA, 15 bp, Homo sapiens
catcatagttttatt

SEQ ID NO: 69881 - DNA, 15 bp, Homo sapiens
tcatcatagttttat

SEQ ID NO: 69882 - DNA, 15 bp, Homo sapiens
ttcatcatagtttta

SEQ ID NO: 69883 - DNA, 15 bp, Homo sapiens
tttcatcatagtttt

SEQ ID NO: 69884 - DNA, 15 bp, Homo sapiens
ctttcatcatagttt

SEQ ID NO: 69885 - DNA, 15 bp, Homo sapiens
tctttcatcatagtt

SEQ ID NO: 69886 - DNA, 15 bp, Homo sapiens
ttctttcatcatagt

SEQ ID NO: 69887 - DNA, 15 bp, Homo sapiens
tttctttcatcatag

SEQ ID NO: 69888 - DNA, 15 bp, Homo sapiens
ctttctttcatcata

SEQ ID NO: 69889 - DNA, 15 bp, Homo sapiens
gctttctttcatcat

SEQ ID NO: 69890 - DNA, 15 bp, Homo sapiens
tgctttctttcatca

SEQ ID NO: 69891 - DNA, 15 bp, Homo sapiens
ttgctttctttcatc

SEQ ID NO: 69892 - DNA, 15 bp, Homo sapiens
attgctttctttcat

SEQ ID NO: 69893 - DNA, 15 bp, Homo sapiens
tattgctttctttca

SEQ ID NO: 69894 - DNA, 15 bp, Homo sapiens
ttattgctttctttc

SEQ ID NO: 69895 - DNA, 15 bp, Homo sapiens
tttattgctttcttt

SEQ ID NO: 69896 - DNA, 15 bp, Homo sapiens
ctttattgctttctt

SEQ ID NO: 69897 - DNA, 15 bp, Homo sapiens
cctttattgctttct

SEQ ID NO: 69898 - DNA, 15 bp, Homo sapiens
gcctttattgctttc

SEQ ID NO: 69899 - DNA, 15 bp, Homo sapiens
ggcctttattgcttt

SEQ ID NO: 69900 - DNA, 15 bp, Homo sapiens
aggcctttattgctt

SEQ ID NO: 69901 - DNA, 15 bp, Homo sapiens
caggcctttattgct

SEQ ID NO: 69902 - DNA, 15 bp, Homo sapiens
tcaggcctttattgc

SEQ ID NO: 69903 - DNA, 15 bp, Homo sapiens
gtcaggcctttattg

SEQ ID NO: 69904 - DNA, 15 bp, Homo sapiens
tgtcaggcctttatt

SEQ ID NO: 69905 - DNA, 15 bp, Homo sapiens
atgtcaggcctttat

SEQ ID NO: 69906 - DNA, 15 bp, Homo sapiens
catgtcaggccttta

SEQ ID NO: 69907 - DNA, 15 bp, Homo sapiens
ccatgtcaggccttt

SEQ ID NO: 69908 - DNA, 15 bp, Homo sapiens
accatgtcaggcctt

SEQ ID NO: 69909 - DNA, 15 bp, Homo sapiens
caccatgtcaggcct

SEQ ID NO: 69910 - DNA, 15 bp, Homo sapiens
ccaccatgtcaggcc

SEQ ID NO: 69911 - DNA, 15 bp, Homo sapiens
gccaccatgtcaggc

SEQ ID NO: 69912 - DNA, 15 bp, Homo sapiens
agccaccatgtcagg

SEQ ID NO: 69913 - DNA, 15 bp, Homo sapiens
tagccaccatgtcag

SEQ ID NO: 69914 - DNA, 15 bp, Homo sapiens
ttagccaccatgtca

SEQ ID NO: 69915 - DNA, 15 bp, Homo sapiens
attagccaccatgtc

SEQ ID NO: 69916 - DNA, 15 bp, Homo sapiens
cattagccaccatgt

SEQ ID NO: 69917 - DNA, 15 bp, Homo sapiens
gcattagccaccatg

SEQ ID NO: 69918 - DNA, 15 bp, Homo sapiens
agcattagccaccat

SEQ ID NO: 69919 - DNA, 15 bp, Homo sapiens
aagcattagccacca

SEQ ID NO: 69920 - DNA, 15 bp, Homo sapiens
caagcattagccacc

SEQ ID NO: 69921 - DNA, 15 bp, Homo sapiens
acaagcattagccac

SEQ ID NO: 69922 - DNA, 15 bp, Homo sapiens
cacaagcattagcca

SEQ ID NO: 69923 - DNA, 15 bp, Homo sapiens
tcacaagcattagcc

SEQ ID NO: 69924 - DNA, 15 bp, Homo sapiens
atcacaagcattagc

SEQ ID NO: 69925 - DNA, 15 bp, Homo sapiens
gatcacaagcattag

SEQ ID NO: 69926 - DNA, 15 bp, Homo sapiens
agatcacaagcatta

SEQ ID NO: 69927 - DNA, 15 bp, Homo sapiens
gagatcacaagcatt

SEQ ID NO: 69928 - DNA, 15 bp, Homo sapiens
tgagatcacaagcat

SEQ ID NO: 69929 - DNA, 15 bp, Homo sapiens
ctgagatcacaagca

SEQ ID NO: 69930 - DNA, 15 bp, Homo sapiens
gctgagatcacaagc

SEQ ID NO: 69931 - DNA, 15 bp, Homo sapiens
tgctgagatcacaag

SEQ ID NO: 69932 - DNA, 15 bp, Homo sapiens
gtgctgagatcacaa

SEQ ID NO: 69933 - DNA, 15 bp, Homo sapiens
agtgctgagatcaca

SEQ ID NO: 69934 - DNA, 15 bp, Homo sapiens
aagtgctgagatcac

SEQ ID NO: 69935 - DNA, 15 bp, Homo sapiens
aaagtgctgagatca

SEQ ID NO: 69936 - DNA, 15 bp, Homo sapiens
caaagtgctgagatc

SEQ ID NO: 69937 - DNA, 15 bp, Homo sapiens
ccaaagtgctgagat

SEQ ID NO: 69938 - DNA, 15 bp, Homo sapiens
cccaaagtgctgaga

SEQ ID NO: 69939 - DNA, 15 bp, Homo sapiens
tcccaaagtgctgag

SEQ ID NO: 69940 - DNA, 15 bp, Homo sapiens
ctcccaaagtgctga

SEQ ID NO: 69941 - DNA, 15 bp, Homo sapiens
atctcccaaagtgct

SEQ ID NO: 69942 - DNA, 15 bp, Homo sapiens
aatctcccaaagtgc

SEQ ID NO: 69943 - DNA, 15 bp, Homo sapiens
caatctcccaaagtg

SEQ ID NO: 69944 - DNA, 15 bp, Homo sapiens
tcaatctcccaaagt

SEQ ID NO: 69945 - DNA, 15 bp, Homo sapiens
ctcaatctcccaaag

SEQ ID NO: 69946 - DNA, 15 bp, Homo sapiens
cctcaatctcccaaa

SEQ ID NO: 69947 - DNA, 15 bp, Homo sapiens
acctcaatctcccaa

SEQ ID NO: 69948 - DNA, 15 bp, Homo sapiens
cacctcaatctccca

SEQ ID NO: 69949 - DNA, 15 bp, Homo sapiens
ccacctcaatctccc

SEQ ID NO: 69950 - DNA, 15 bp, Homo sapiens
cccacctcaatctcc

SEQ ID NO: 69951 - DNA, 15 bp, Homo sapiens
tcccacctcaatctc

SEQ ID NO: 69952 - DNA, 15 bp, Homo sapiens
ctcccacctcaatct

SEQ ID NO: 69953 - DNA, 15 bp, Homo sapiens
cctcccacctcaatc

SEQ ID NO: 69954 - DNA, 15 bp, Homo sapiens
acctcccacctcaat

SEQ ID NO: 69955 - DNA, 15 bp, Homo sapiens
aacctcccacctcaa

SEQ ID NO: 69956 - DNA, 15 bp, Homo sapiens
gaacctcccacctca

SEQ ID NO: 69957 - DNA, 15 bp, Homo sapiens
tgaacctcccacctc

SEQ ID NO: 69958 - DNA, 15 bp, Homo sapiens
gtgaacctcccacct

SEQ ID NO: 69959 - DNA, 15 bp, Homo sapiens
agtgaacctcccacc

SEQ ID NO: 69960 - DNA, 15 bp, Homo sapiens
aagtgaacctcccac

SEQ ID NO: 69961 - DNA, 15 bp, Homo sapiens
caagtgaacctccca

SEQ ID NO: 69962 - DNA, 15 bp, Homo sapiens
tcaagtgaacctccc

SEQ ID NO: 69963 - DNA, 15 bp, Homo sapiens
ctcaagtgaacctcc

SEQ ID NO: 69964 - DNA, 15 bp, Homo sapiens
cctcaagtgaacctc

SEQ ID NO: 69965 - DNA, 15 bp, Homo sapiens
gcctcaagtgaacct

SEQ ID NO: 69966 - DNA, 15 bp, Homo sapiens
ggcctcaagtgaacc

SEQ ID NO: 69967 - DNA, 15 bp, Homo sapiens
tggcctcaagtgaac

SEQ ID NO: 69968 - DNA, 15 bp, Homo sapiens
ctggcctcaagtgaa

SEQ ID NO: 69969 - DNA, 15 bp, Homo sapiens
cctggcctcaagtga

SEQ ID NO: 69970 - DNA, 15 bp, Homo sapiens
tcctggcctcaagtg

SEQ ID NO: 69971 - DNA, 15 bp, Homo sapiens
ctcctggcctcaagt

SEQ ID NO: 69972 - DNA, 15 bp, Homo sapiens
actcctggcctcaag

SEQ ID NO: 69973 - DNA, 15 bp, Homo sapiens
aactcctggcctcaa

SEQ ID NO: 69974 - DNA, 15 bp, Homo sapiens
aaactcctggcctca

SEQ ID NO: 69975 - DNA, 15 bp, Homo sapiens
caaactcctggcctc

SEQ ID NO: 69976 - DNA, 15 bp, Homo sapiens
tcaaactcctggcct

SEQ ID NO: 69977 - DNA, 15 bp, Homo sapiens
ctcaaactcctggcc

SEQ ID NO: 69978 - DNA, 15 bp, Homo sapiens
tctcaaactcctggc

SEQ ID NO: 69979 - DNA, 15 bp, Homo sapiens
atctcaaactcctgg

SEQ ID NO: 69980 - DNA, 15 bp, Homo sapiens
gatctcaaactcctg

SEQ ID NO: 69981 - DNA, 15 bp, Homo sapiens
tgatctcaaactcct

SEQ ID NO: 69982 - DNA, 15 bp, Homo sapiens
atgatctcaaactcc

SEQ ID NO: 69983 - DNA, 15 bp, Homo sapiens
gatgatctcaaactc

SEQ ID NO: 69984 - DNA, 15 bp, Homo sapiens
ggatgatctcaaact

SEQ ID NO: 69985 - DNA, 15 bp, Homo sapiens
aggatgatctcaaac

SEQ ID NO: 69986 - DNA, 15 bp, Homo sapiens
caggatgatctcaaa

SEQ ID NO: 69987 - DNA, 15 bp, Homo sapiens
ccaggatgatctcaa

SEQ ID NO: 69988 - DNA, 15 bp, Homo sapiens
cccaggatgatctca

SEQ ID NO: 69989 - DNA, 15 bp, Homo sapiens
gcccaggatgatctc

SEQ ID NO: 69990 - DNA, 15 bp, Homo sapiens
tgcccaggatgatct

SEQ ID NO: 69991 - DNA, 15 bp, Homo sapiens
ttgcccaggatgatc

SEQ ID NO: 69992 - DNA, 15 bp, Homo sapiens
gttgcccaggatgat

SEQ ID NO: 69993 - DNA, 15 bp, Homo sapiens
agttgcccaggatga

SEQ ID NO: 69994 - DNA, 15 bp, Homo sapiens
tagttgcccaggatg

SEQ ID NO: 69995 - DNA, 15 bp, Homo sapiens
ttagttgcccaggat

SEQ ID NO: 69996 - DNA, 15 bp, Homo sapiens
attagttgcccagga

SEQ ID NO: 69997 - DNA, 15 bp, Homo sapiens
cattagttgcccagg

SEQ ID NO: 69998 - DNA, 15 bp, Homo sapiens
tcattagttgcccag

SEQ ID NO: 69999 - DNA, 15 bp, Homo sapiens
ctcattagttgccca

SEQ ID NO: 70000 - DNA, 15 bp, Homo sapiens
tctcattagttgccc

SEQ ID NO: 70001 - DNA, 15 bp, Homo sapiens
ttctcattagttgcc

SEQ ID NO: 70002 - DNA, 15 bp, Homo sapiens
attctcattagttgc

SEQ ID NO: 70003 - DNA, 15 bp, Homo sapiens
gattctcattagttg

SEQ ID NO: 70004 - DNA, 15 bp, Homo sapiens
agattctcattagtt

SEQ ID NO: 70005 - DNA, 15 bp, Homo sapiens
cagattctcattagt

SEQ ID NO: 70006 - DNA, 15 bp, Homo sapiens
acagattctcattag

SEQ ID NO: 70007 - DNA, 15 bp, Homo sapiens
gacagattctcatta

SEQ ID NO: 70008 - DNA, 15 bp, Homo sapiens
agacagattctcatt

SEQ ID NO: 70009 - DNA, 15 bp, Homo sapiens
gagacagattctcat

SEQ ID NO: 70010 - DNA, 15 bp, Homo sapiens
agagacagattctca

SEQ ID NO: 70011 - DNA, 15 bp, Homo sapiens
tagagacagattctc

SEQ ID NO: 70012 - DNA, 15 bp, Homo sapiens
gtagagacagattct

SEQ ID NO: 70013 - DNA, 15 bp, Homo sapiens
tgtagagacagattc

SEQ ID NO: 70014 - DNA, 15 bp, Homo sapiens
ttgtagagacagatt

SEQ ID NO: 70015 - DNA, 15 bp, Homo sapiens
tttgtagagacagat

SEQ ID NO: 70016 - DNA, 15 bp, Homo sapiens
ttttgtagagacaga

SEQ ID NO: 70017 - DNA, 15 bp, Homo sapiens
attttgtagagacag

SEQ ID NO: 70018 - DNA, 15 bp, Homo sapiens
tattttgtagagaca

SEQ ID NO: 70019 - DNA, 15 bp, Homo sapiens
atattttgtagagac

SEQ ID NO: 70020 - DNA, 15 bp, Homo sapiens
aatattttgtagaga

SEQ ID NO: 70021 - DNA, 15 bp, Homo sapiens
aaatattttgtagag

SEQ ID NO: 70022 - DNA, 15 bp, Homo sapiens
aaaatattttgtaga

SEQ ID NO: 70023 - DNA, 15 bp, Homo sapiens
aaaaatattttgtag

SEQ ID NO: 70024 - DNA, 15 bp, Homo sapiens
aaaaaatattttgta

SEQ ID NO: 70025 - DNA, 15 bp, Homo sapiens
taaaaaatattttgt

SEQ ID NO: 70026 - DNA, 15 bp, Homo sapiens
ttaaaaaatattttg

SEQ ID NO: 70027 - DNA, 15 bp, Homo sapiens
tttaaaaaatatttt

SEQ ID NO: 70028 - DNA, 15 bp, Homo sapiens
ttttaaaaaatattt

SEQ ID NO: 70029 - DNA, 15 bp, Homo sapiens
attttaaaaaatatt

SEQ ID NO: 70030 - DNA, 15 bp, Homo sapiens
tattttaaaaaatat

SEQ ID NO: 70031 - DNA, 15 bp, Homo sapiens
ctattttaaaaaata

SEQ ID NO: 70032 - DNA, 15 bp, Homo sapiens
gctattttaaaaaat

SEQ ID NO: 70033 - DNA, 15 bp, Homo sapiens
ggctattttaaaaaa

SEQ ID NO: 70034 - DNA, 15 bp, Homo sapiens
tggctattttaaaaa

SEQ ID NO: 70035 - DNA, 15 bp, Homo sapiens
ctggctattttaaaa

SEQ ID NO: 70036 - DNA, 15 bp, Homo sapiens
cctggctattttaaa

SEQ ID NO: 70037 - DNA, 15 bp, Homo sapiens
gcctggctattttaa

SEQ ID NO: 70038 - DNA, 15 bp, Homo sapiens
ggcctggctatttta

SEQ ID NO: 70039 - DNA, 15 bp, Homo sapiens
aggcctggctatttt

SEQ ID NO: 70040 - DNA, 15 bp, Homo sapiens
caggcctggctattt

SEQ ID NO: 70041 - DNA, 15 bp, Homo sapiens
ccaggcctggctatt

SEQ ID NO: 70042 - DNA, 15 bp, Homo sapiens
accaggcctggctat

SEQ ID NO: 70043 - DNA, 15 bp, Homo sapiens
caccaggcctggcta

SEQ ID NO: 70044 - DNA, 15 bp, Homo sapiens
ccaccaggcctggct

SEQ ID NO: 70045 - DNA, 15 bp, Homo sapiens
accaccaggcctggc

SEQ ID NO: 70046 - DNA, 15 bp, Homo sapiens
caccaccaggcctgg

SEQ ID NO: 70047 - DNA, 15 bp, Homo sapiens
acaccaccaggcctg

SEQ ID NO: 70048 - DNA, 15 bp, Homo sapiens
cacaccaccaggcct

SEQ ID NO: 70049 - DNA, 15 bp, Homo sapiens
gcacaccaccaggcc

SEQ ID NO: 70050 - DNA, 15 bp, Homo sapiens
tgcacaccaccaggc

SEQ ID NO: 70051 - DNA, 15 bp, Homo sapiens
gtgcacaccaccagg

SEQ ID NO: 70052 - DNA, 15 bp, Homo sapiens
ggtgcacaccaccag

SEQ ID NO: 70053 - DNA, 15 bp, Homo sapiens
gggtgcacaccacca

SEQ ID NO: 70054 - DNA, 15 bp, Homo sapiens
tgggtgcacaccacc

SEQ ID NO: 70055 - DNA, 15 bp, Homo sapiens
atgggtgcacaccac

SEQ ID NO: 70056 - DNA, 15 bp, Homo sapiens
tatgggtgcacacca

SEQ ID NO: 70057 - DNA, 15 bp, Homo sapiens
ctatgggtgcacacc

SEQ ID NO: 70058 - DNA, 15 bp, Homo sapiens
actatgggtgcacac

SEQ ID NO: 70059 - DNA, 15 bp, Homo sapiens
gactatgggtgcaca

SEQ ID NO: 70060 - DNA, 15 bp, Homo sapiens
ggactatgggtgcac

SEQ ID NO: 70061 - DNA, 15 bp, Homo sapiens
aggactatgggtgca

SEQ ID NO: 70062 - DNA, 15 bp, Homo sapiens
taggactatgggtgc

SEQ ID NO: 70063 - DNA, 15 bp, Homo sapiens
ctaggactatgggtg

SEQ ID NO: 70064 - DNA, 15 bp, Homo sapiens
gctaggactatgggt

SEQ ID NO: 70065 - DNA, 15 bp, Homo sapiens
agctaggactatggg

SEQ ID NO: 70066 - DNA, 15 bp, Homo sapiens
tagctaggactatgg

SEQ ID NO: 70067 - DNA, 15 bp, Homo sapiens
gtagctaggactatg

SEQ ID NO: 70068 - DNA, 15 bp, Homo sapiens
agtagctaggactat

SEQ ID NO: 70069 - DNA, 15 bp, Homo sapiens
aagtagctaggacta

SEQ ID NO: 70070 - DNA, 15 bp, Homo sapiens
caagtagctaggact

SEQ ID NO: 70071 - DNA, 15 bp, Homo sapiens
ccaagtagctaggac

SEQ ID NO: 70072 - DNA, 15 bp, Homo sapiens
cccaagtagctagga

SEQ ID NO: 70073 - DNA, 15 bp, Homo sapiens
tcccaagtagctagg

SEQ ID NO: 70074 - DNA, 15 bp, Homo sapiens
ctcccaagtagctag

SEQ ID NO: 70075 - DNA, 15 bp, Homo sapiens
cctcccaagtagcta

SEQ ID NO: 70076 - DNA, 15 bp, Homo sapiens
tcctcctgcctcagc

SEQ ID NO: 70077 - DNA, 15 bp, Homo sapiens
atcctcctgcctcag

SEQ ID NO: 70078 - DNA, 15 bp, Homo sapiens
gatcctcctgcctca

SEQ ID NO: 70079 - DNA, 15 bp, Homo sapiens
tgatcctcctgcctc

SEQ ID NO: 70080 - DNA, 15 bp, Homo sapiens
gtgatcctcctgcct

SEQ ID NO: 70081 - DNA, 15 bp, Homo sapiens
agtgatcctcctgcc

SEQ ID NO: 70082 - DNA, 15 bp, Homo sapiens
aagtgatcctcctgc

SEQ ID NO: 70083 - DNA, 15 bp, Homo sapiens
caagtgatcctcctg

SEQ ID NO: 70084 - DNA, 15 bp, Homo sapiens
tcaagtgatcctcct

SEQ ID NO: 70085 - DNA, 15 bp, Homo sapiens
ctcaagtgatcctcc

SEQ ID NO: 70086 - DNA, 15 bp, Homo sapiens
gctcaagtgatcctc

SEQ ID NO: 70087 - DNA, 15 bp, Homo sapiens
ggctcaagtgatcct

SEQ ID NO: 70088 - DNA, 15 bp, Homo sapiens
gggctcaagtgatcc

SEQ ID NO: 70089 - DNA, 15 bp, Homo sapiens
tgggctcaagtgatc

SEQ ID NO: 70090 - DNA, 15 bp, Homo sapiens
ctgggctcaagtgat

SEQ ID NO: 70091 - DNA, 15 bp, Homo sapiens
cctgggctcaagtga

SEQ ID NO: 70092 - DNA, 15 bp, Homo sapiens
tcctgggctcaagtg

SEQ ID NO: 70093 - DNA, 15 bp, Homo sapiens
ctcctgggctcaagt

SEQ ID NO: 70094 - DNA, 15 bp, Homo sapiens
actcctgggctcaag

SEQ ID NO: 70095 - DNA, 15 bp, Homo sapiens
aactcctgggctcaa

SEQ ID NO: 70096 - DNA, 15 bp, Homo sapiens
gaactcctgggctca

SEQ ID NO: 70097 - DNA, 15 bp, Homo sapiens
tgaactcctgggctc

SEQ ID NO: 70098 - DNA, 15 bp, Homo sapiens
ttgaactcctgggct

SEQ ID NO: 70099 - DNA, 15 bp, Homo sapiens
cttgaactcctgggc

SEQ ID NO: 70100 - DNA, 15 bp, Homo sapiens
ccttgaactcctggg

SEQ ID NO: 70101 - DNA, 15 bp, Homo sapiens
gccttgaactcctgg

SEQ ID NO: 70102 - DNA, 15 bp, Homo sapiens
agccttgaactcctg

SEQ ID NO: 70103 - DNA, 15 bp, Homo sapiens
cagccttgaactcct

SEQ ID NO: 70104 - DNA, 15 bp, Homo sapiens
gcagccttgaactcc

SEQ ID NO: 70105 - DNA, 15 bp, Homo sapiens
tgcagccttgaactc

SEQ ID NO: 70106 - DNA, 15 bp, Homo sapiens
ctgcagccttgaact

SEQ ID NO: 70107 - DNA, 15 bp, Homo sapiens
actgcagccttgaac

SEQ ID NO: 70108 - DNA, 15 bp, Homo sapiens
cactgcagccttgaa

SEQ ID NO: 70109 - DNA, 15 bp, Homo sapiens
tcactgcagccttga

SEQ ID NO: 70110 - DNA, 15 bp, Homo sapiens
ctcactgcagccttg

SEQ ID NO: 70111 - DNA, 15 bp, Homo sapiens
gctcactgcagcctt

SEQ ID NO: 70112 - DNA, 15 bp, Homo sapiens
agctcactgcagcct

SEQ ID NO: 70113 - DNA, 15 bp, Homo sapiens
tagctcactgcagcc

SEQ ID NO: 70114 - DNA, 15 bp, Homo sapiens
atagctcactgcagc

SEQ ID NO: 70115 - DNA, 15 bp, Homo sapiens
aatagctcactgcag

SEQ ID NO: 70116 - DNA, 15 bp, Homo sapiens
caatagctcactgca

SEQ ID NO: 70117 - DNA, 15 bp, Homo sapiens
acaatagctcactgc

SEQ ID NO: 70118 - DNA, 15 bp, Homo sapiens
aacaatagctcactg

SEQ ID NO: 70119 - DNA, 15 bp, Homo sapiens
caacaatagctcact

SEQ ID NO: 70120 - DNA, 15 bp, Homo sapiens
gcaacaatagctcac

SEQ ID NO: 70121 - DNA, 15 bp, Homo sapiens
tgcaacaatagctca

SEQ ID NO: 70122 - DNA, 15 bp, Homo sapiens
gtgcaacaatagctc

SEQ ID NO: 70123 - DNA, 15 bp, Homo sapiens
ggtgcaacaatagct

SEQ ID NO: 70124 - DNA, 15 bp, Homo sapiens
tggtgcaacaatagc

SEQ ID NO: 70125 - DNA, 15 bp, Homo sapiens
ttggtgcaacaatag

SEQ ID NO: 70126 - DNA, 15 bp, Homo sapiens
attggtgcaacaata

SEQ ID NO: 70127 - DNA, 15 bp, Homo sapiens
cattggtgcaacaat

SEQ ID NO: 70128 - DNA, 15 bp, Homo sapiens
ccattggtgcaacaa

SEQ ID NO: 70129 - DNA, 15 bp, Homo sapiens
accattggtgcaaca

SEQ ID NO: 70130 - DNA, 15 bp, Homo sapiens
aaccattggtgcaac

SEQ ID NO: 70131 - DNA, 15 bp, Homo sapiens
caaccattggtgcaa

SEQ ID NO: 70132 - DNA, 15 bp, Homo sapiens
gcaaccattggtgca

SEQ ID NO: 70133 - DNA, 15 bp, Homo sapiens
tgcaaccattggtgc

SEQ ID NO: 70134 - DNA, 15 bp, Homo sapiens
gtgcaaccattggtg

SEQ ID NO: 70135 - DNA, 15 bp, Homo sapiens
ggtgcaaccattggt

SEQ ID NO: 70136 - DNA, 15 bp, Homo sapiens
tggtgcaaccattgg

SEQ ID NO: 70137 - DNA, 15 bp, Homo sapiens
gtggtgcaaccattg

SEQ ID NO: 70138 - DNA, 15 bp, Homo sapiens
agtggtgcaaccatt

SEQ ID NO: 70139 - DNA, 15 bp, Homo sapiens
tagtggtgcaaccat

SEQ ID NO: 70140 - DNA, 15 bp, Homo sapiens
atagtggtgcaacca

SEQ ID NO: 70141 - DNA, 15 bp, Homo sapiens
catagtggtgcaacc

SEQ ID NO: 70142 - DNA, 15 bp, Homo sapiens
gcatagtggtgcaac

SEQ ID NO: 70143 - DNA, 15 bp, Homo sapiens
agcatagtggtgcaa

SEQ ID NO: 70144 - DNA, 15 bp, Homo sapiens
gagcatagtggtgca

SEQ ID NO: 70145 - DNA, 15 bp, Homo sapiens
ggagcatagtggtgc

SEQ ID NO: 70146 - DNA, 15 bp, Homo sapiens
aggagcatagtggtg

SEQ ID NO: 70147 - DNA, 15 bp, Homo sapiens
gaggagcatagtggt

SEQ ID NO: 70148 - DNA, 15 bp, Homo sapiens
ggaggagcatagtgg

SEQ ID NO: 70149 - DNA, 15 bp, Homo sapiens
tggaggagcatagtg

SEQ ID NO: 70150 - DNA, 15 bp, Homo sapiens
ttggaggagcatagt

SEQ ID NO: 70151 - DNA, 15 bp, Homo sapiens
tttggaggagcatag

SEQ ID NO: 70152 - DNA, 15 bp, Homo sapiens
ctttggaggagcata

SEQ ID NO: 70153 - DNA, 15 bp, Homo sapiens
gctttggaggagcat

SEQ ID NO: 70154 - DNA, 15 bp, Homo sapiens
ggctttggaggagca

SEQ ID NO: 70155 - DNA, 15 bp, Homo sapiens
aggctttggaggagc

SEQ ID NO: 70156 - DNA, 15 bp, Homo sapiens
caggctttggaggag

SEQ ID NO: 70157 - DNA, 15 bp, Homo sapiens
tcaggctttggagga

SEQ ID NO: 70158 - DNA, 15 bp, Homo sapiens
ctcaggctttggagg

SEQ ID NO: 70159 - DNA, 15 bp, Homo sapiens
actcaggctttggag

SEQ ID NO: 70160 - DNA, 15 bp, Homo sapiens
cactcaggctttgga

SEQ ID NO: 70161 - DNA, 15 bp, Homo sapiens
tcactcaggctttgg

SEQ ID NO: 70162 - DNA, 15 bp, Homo sapiens
gtcactcaggctttg

SEQ ID NO: 70163 - DNA, 15 bp, Homo sapiens
tgtcactcaggcttt

SEQ ID NO: 70164 - DNA, 15 bp, Homo sapiens
ctgtcactcaggctt

SEQ ID NO: 70165 - DNA, 15 bp, Homo sapiens
tctgtcactcaggct

SEQ ID NO: 70166 - DNA, 15 bp, Homo sapiens
ttctgtcactcaggc

SEQ ID NO: 70167 - DNA, 15 bp, Homo sapiens
attctgtcactcagg

SEQ ID NO: 70168 - DNA, 15 bp, Homo sapiens
cattctgtcactcag

SEQ ID NO: 70169 - DNA, 15 bp, Homo sapiens
tcattctgtcactca

SEQ ID NO: 70170 - DNA, 15 bp, Homo sapiens
ttcattctgtcactc

SEQ ID NO: 70171 - DNA, 15 bp, Homo sapiens
tttcattctgtcact

SEQ ID NO: 70172 - DNA, 15 bp, Homo sapiens
gtttcattctgtcac

SEQ ID NO: 70173 - DNA, 15 bp, Homo sapiens
agtttcattctgtca

SEQ ID NO: 70174 - DNA, 15 bp, Homo sapiens
gagtttcattctgtc

SEQ ID NO: 70175 - DNA, 15 bp, Homo sapiens
agagtttcattctgt

SEQ ID NO: 70176 - DNA, 15 bp, Homo sapiens
cagagtttcattctg

SEQ ID NO: 70177 - DNA, 15 bp, Homo sapiens
acagagtttcattct

SEQ ID NO: 70178 - DNA, 15 bp, Homo sapiens
gacagagtttcattc

SEQ ID NO: 70179 - DNA, 15 bp, Homo sapiens
agacagagtttcatt

SEQ ID NO: 70180 - DNA, 15 bp, Homo sapiens
gagacagagtttcat

SEQ ID NO: 70181 - DNA, 15 bp, Homo sapiens
agagacagagtttca

SEQ ID NO: 70182 - DNA, 15 bp, Homo sapiens
tagagacagagtttc

SEQ ID NO: 70183 - DNA, 15 bp, Homo sapiens
ttagagacagagttt

SEQ ID NO: 70184 - DNA, 15 bp, Homo sapiens
tttagagacagagtt

SEQ ID NO: 70185 - DNA, 15 bp, Homo sapiens
atttagagacagagt

SEQ ID NO: 70186 - DNA, 15 bp, Homo sapiens
aatttagagacagag

SEQ ID NO: 70187 - DNA, 15 bp, Homo sapiens
aaatttagagacaga

SEQ ID NO: 70188 - DNA, 15 bp, Homo sapiens
taaatttagagacag

SEQ ID NO: 70189 - DNA, 15 bp, Homo sapiens
ttaaatttagagaca

SEQ ID NO: 70190 - DNA, 15 bp, Homo sapiens
tttaaatttagagac

SEQ ID NO: 70191 - DNA, 15 bp, Homo sapiens
ttttaaatttagaga

SEQ ID NO: 70192 - DNA, 15 bp, Homo sapiens
tttttaaatttagag

SEQ ID NO: 70193 - DNA, 15 bp, Homo sapiens
ttttttaaatttaga

SEQ ID NO: 70194 - DNA, 15 bp, Homo sapiens
tttttttaaatttag

SEQ ID NO: 70195 - DNA, 15 bp, Homo sapiens
ttttttttaaattta

SEQ ID NO: 70196 - DNA, 15 bp, Homo sapiens
tttttttttaaattt

SEQ ID NO: 70197 - DNA, 15 bp, Homo sapiens
ttttttttttaaatt

SEQ ID NO: 70198 - DNA, 15 bp, Homo sapiens
tttttttttttaaat

SEQ ID NO: 70199 - DNA, 15 bp, Homo sapiens
ttttttttttttaaa

SEQ ID NO: 70200 - DNA, 15 bp, Homo sapiens
cttttttttttttaa

SEQ ID NO: 70201 - DNA, 15 bp, Homo sapiens
cctttttttttttta

SEQ ID NO: 70202 - DNA, 15 bp, Homo sapiens
tcctttttttttttt

SEQ ID NO: 70203 - DNA, 15 bp, Homo sapiens
gtccttttttttttt

SEQ ID NO: 70204 - DNA, 15 bp, Homo sapiens
tgtcctttttttttt

SEQ ID NO: 70205 - DNA, 15 bp, Homo sapiens
ttgtccttttttttt

SEQ ID NO: 70206 - DNA, 15 bp, Homo sapiens
tttgtcctttttttt

SEQ ID NO: 70207 - DNA, 15 bp, Homo sapiens
ttttgtccttttttt

SEQ ID NO: 70208 - DNA, 15 bp, Homo sapiens
tttttgtcctttttt

SEQ ID NO: 70209 - DNA, 15 bp, Homo sapiens
atttttgtccttttt

SEQ ID NO: 70210 - DNA, 15 bp, Homo sapiens
tatttttgtcctttt

SEQ ID NO: 70211 - DNA, 15 bp, Homo sapiens
ttatttttgtccttt

SEQ ID NO: 70212 - DNA, 15 bp, Homo sapiens
attatttttgtcctt

SEQ ID NO: 70213 - DNA, 15 bp, Homo sapiens
cattatttttgtcct

SEQ ID NO: 70214 - DNA, 15 bp, Homo sapiens
tcattatttttgtcc

SEQ ID NO: 70215 - DNA, 15 bp, Homo sapiens
ttcattatttttgtc

SEQ ID NO: 70216 - DNA, 15 bp, Homo sapiens
attcattatttttgt

SEQ ID NO: 70217 - DNA, 15 bp, Homo sapiens
aattcattatttttg

SEQ ID NO: 70218 - DNA, 15 bp, Homo sapiens
caattcattattttt

SEQ ID NO: 70219 - DNA, 15 bp, Homo sapiens
ccaattcattatttt

SEQ ID NO: 70220 - DNA, 15 bp, Homo sapiens
tccaattcattattt

SEQ ID NO: 70221 - DNA, 15 bp, Homo sapiens
ttccaattcattatt

SEQ ID NO: 70222 - DNA, 15 bp, Homo sapiens
gttccaattcattat

SEQ ID NO: 70223 - DNA, 15 bp, Homo sapiens
tgttccaattcatta

SEQ ID NO: 70224 - DNA, 15 bp, Homo sapiens
ttgttccaattcatt

SEQ ID NO: 70225 - DNA, 15 bp, Homo sapiens
tttgttccaattcat

SEQ ID NO: 70226 - DNA, 15 bp, Homo sapiens
ttttgttccaattca

SEQ ID NO: 70227 - DNA, 15 bp, Homo sapiens
cttttgttccaattc

SEQ ID NO: 70228 - DNA, 15 bp, Homo sapiens
tcttttgttccaatt

SEQ ID NO: 70229 - DNA, 15 bp, Homo sapiens
atcttttgttccaat

SEQ ID NO: 70230 - DNA, 15 bp, Homo sapiens
aatcttttgttccaa

SEQ ID NO: 70231 - DNA, 15 bp, Homo sapiens
aaatcttttgttcca

SEQ ID NO: 70232 - DNA, 15 bp, Homo sapiens
taaatcttttgttcc

SEQ ID NO: 70233 - DNA, 15 bp, Homo sapiens
ataaatcttttgttc

SEQ ID NO: 70234 - DNA, 15 bp, Homo sapiens
aataaatcttttgtt

SEQ ID NO: 70235 - DNA, 15 bp, Homo sapiens
taataaatcttttgt

SEQ ID NO: 70236 - DNA, 15 bp, Homo sapiens
ataataaatcttttg

SEQ ID NO: 70237 - DNA, 15 bp, Homo sapiens
tataataaatctttt

SEQ ID NO: 70238 - DNA, 15 bp, Homo sapiens
atataataaatcttt

SEQ ID NO: 70239 - DNA, 15 bp, Homo sapiens
tatataataaatctt

SEQ ID NO: 70240 - DNA, 15 bp, Homo sapiens
atatataataaatct

SEQ ID NO: 70241 - DNA, 15 bp, Homo sapiens
catatataataaatc

SEQ ID NO: 70242 - DNA, 15 bp, Homo sapiens
ccatatataataaat

SEQ ID NO: 70243 - DNA, 15 bp, Homo sapiens
tccatatataataaa

SEQ ID NO: 70244 - DNA, 15 bp, Homo sapiens
ttccatatataataa

SEQ ID NO: 70245 - DNA, 15 bp, Homo sapiens
tttccatatataata

SEQ ID NO: 70246 - DNA, 15 bp, Homo sapiens
ttttccatatataat

SEQ ID NO: 70247 - DNA, 15 bp, Homo sapiens
tttttccatatataa

SEQ ID NO: 70248 - DNA, 15 bp, Homo sapiens
ctttttccatatata

SEQ ID NO: 70249 - DNA, 15 bp, Homo sapiens
actttttccatatat

SEQ ID NO: 70250 - DNA, 15 bp, Homo sapiens
tactttttccatata

SEQ ID NO: 70251 - DNA, 15 bp, Homo sapiens
atactttttccatat

SEQ ID NO: 70252 - DNA, 15 bp, Homo sapiens
aatactttttccata

SEQ ID NO: 70253 - DNA, 15 bp, Homo sapiens
taatactttttccat

SEQ ID NO: 70254 - DNA, 15 bp, Homo sapiens
ataatactttttcca

SEQ ID NO: 70255 - DNA, 15 bp, Homo sapiens
tataatactttttcc

SEQ ID NO: 70256 - DNA, 15 bp, Homo sapiens
atataatactttttc

SEQ ID NO: 70257 - DNA, 15 bp, Homo sapiens
aatataatacttttt

SEQ ID NO: 70258 - DNA, 15 bp, Homo sapiens
aaatataatactttt

SEQ ID NO: 70259 - DNA, 15 bp, Homo sapiens
taaatataatacttt

SEQ ID NO: 70260 - DNA, 15 bp, Homo sapiens
ataaatataatactt

SEQ ID NO: 70261 - DNA, 15 bp, Homo sapiens
aataaatataatact

SEQ ID NO: 70262 - DNA, 15 bp, Homo sapiens
taataaatataatac

SEQ ID NO: 70263 - DNA, 15 bp, Homo sapiens
ataataaatataata

SEQ ID NO: 70264 - DNA, 15 bp, Homo sapiens
aataataaatataat

SEQ ID NO: 70265 - DNA, 15 bp, Homo sapiens
taataataaatataa

SEQ ID NO: 70266 - DNA, 15 bp, Homo sapiens
ctaataataaatata

SEQ ID NO: 70267 - DNA, 15 bp, Homo sapiens
tctaataataaatat

SEQ ID NO: 70268 - DNA, 15 bp, Homo sapiens
ctctaataataaata

SEQ ID NO: 70269 - DNA, 15 bp, Homo sapiens
tctctaataataaat

SEQ ID NO: 70270 - DNA, 15 bp, Homo sapiens
ttctctaataataaa

SEQ ID NO: 70271 - DNA, 15 bp, Homo sapiens
cttctctaataataa

SEQ ID NO: 70272 - DNA, 15 bp, Homo sapiens
acttctctaataata

SEQ ID NO: 70273 - DNA, 15 bp, Homo sapiens
aacttctctaataat

SEQ ID NO: 70274 - DNA, 15 bp, Homo sapiens
taacttctctaataa

SEQ ID NO: 70275 - DNA, 15 bp, Homo sapiens
ttaacttctctaata

SEQ ID NO: 70276 - DNA, 15 bp, Homo sapiens
attaacttctctaat

SEQ ID NO: 70277 - DNA, 15 bp, Homo sapiens
tattaacttctctaa

SEQ ID NO: 70278 - DNA, 15 bp, Homo sapiens
atattaacttctcta

SEQ ID NO: 70279 - DNA, 15 bp, Homo sapiens
catattaacttctct

SEQ ID NO: 70280 - DNA, 15 bp, Homo sapiens
tcatattaacttctc

SEQ ID NO: 70281 - DNA, 15 bp, Homo sapiens
ttcatattaacttct

SEQ ID NO: 70282 - DNA, 15 bp, Homo sapiens
attcatattaacttc

SEQ ID NO: 70283 - DNA, 15 bp, Homo sapiens
tattcatattaactt

SEQ ID NO: 70284 - DNA, 15 bp, Homo sapiens
atattcatattaact

SEQ ID NO: 70285 - DNA, 15 bp, Homo sapiens
tatattcatattaac

SEQ ID NO: 70286 - DNA, 15 bp, Homo sapiens
atatattcatattaa

SEQ ID NO: 70287 - DNA, 15 bp, Homo sapiens
catatattcatatta

SEQ ID NO: 70288 - DNA, 15 bp, Homo sapiens
tcatatattcatatt

SEQ ID NO: 70289 - DNA, 15 bp, Homo sapiens
ttcatatattcatat

SEQ ID NO: 70290 - DNA, 15 bp, Homo sapiens
cttcatatattcata

SEQ ID NO: 70291 - DNA, 15 bp, Homo sapiens
ccttcatatattcat

SEQ ID NO: 70292 - DNA, 15 bp, Homo sapiens
accttcatatattca

SEQ ID NO: 70293 - DNA, 15 bp, Homo sapiens
taccttcatatattc

SEQ ID NO: 70294 - DNA, 15 bp, Homo sapiens
ttaccttcatatatt

SEQ ID NO: 70295 - DNA, 15 bp, Homo sapiens
gttaccttcatatat

SEQ ID NO: 70296 - DNA, 15 bp, Homo sapiens
ggttaccttcatata

SEQ ID NO: 70297 - DNA, 15 bp, Homo sapiens
gggttaccttcatat

SEQ ID NO: 70298 - DNA, 15 bp, Homo sapiens
agggttaccttcata

SEQ ID NO: 70299 - DNA, 15 bp, Homo sapiens
cagggttaccttcat

SEQ ID NO: 70300 - DNA, 15 bp, Homo sapiens
gcagggttaccttca

SEQ ID NO: 70301 - DNA, 15 bp, Homo sapiens
agcagggttaccttc

SEQ ID NO: 70302 - DNA, 15 bp, Homo sapiens
gagcagggttacctt

SEQ ID NO: 70303 - DNA, 15 bp, Homo sapiens
tgagcagggttacct

SEQ ID NO: 70304 - DNA, 15 bp, Homo sapiens
atgagcagggttacc

SEQ ID NO: 70305 - DNA, 15 bp, Homo sapiens
aatgagcagggttac

SEQ ID NO: 70306 - DNA, 15 bp, Homo sapiens
taatgagcagggtta

SEQ ID NO: 70307 - DNA, 15 bp, Homo sapiens
ataatgagcagggtt

SEQ ID NO: 70308 - DNA, 15 bp, Homo sapiens
cataatgagcagggt

SEQ ID NO: 70309 - DNA, 15 bp, Homo sapiens
tcataatgagcaggg

SEQ ID NO: 70310 - DNA, 15 bp, Homo sapiens
ttcataatgagcagg

SEQ ID NO: 70311 - DNA, 15 bp, Homo sapiens
gttcataatgagcag

SEQ ID NO: 70312 - DNA, 15 bp, Homo sapiens
tgttcataatgagca

SEQ ID NO: 70313 - DNA, 15 bp, Homo sapiens
atgttcataatgagc

SEQ ID NO: 70314 - DNA, 15 bp, Homo sapiens
catgttcataatgag

SEQ ID NO: 70315 - DNA, 15 bp, Homo sapiens
gcatgttcataatga

SEQ ID NO: 70316 - DNA, 15 bp, Homo sapiens
cgcatgttcataatg

SEQ ID NO: 70317 - DNA, 15 bp, Homo sapiens
tcgcatgttcataat

SEQ ID NO: 70318 - DNA, 15 bp, Homo sapiens
gtcgcatgttcataa

SEQ ID NO: 70319 - DNA, 15 bp, Homo sapiens
agtcgcatgttcata

SEQ ID NO: 70320 - DNA, 15 bp, Homo sapiens
gagtcgcatgttcat

SEQ ID NO: 70321 - DNA, 15 bp, Homo sapiens
agagtcgcatgttca

SEQ ID NO: 70322 - DNA, 15 bp, Homo sapiens
gagagtcgcatgttc

SEQ ID NO: 70323 - DNA, 15 bp, Homo sapiens
agagagtcgcatgtt

SEQ ID NO: 70324 - DNA, 15 bp, Homo sapiens
cagagagtcgcatgt

SEQ ID NO: 70325 - DNA, 15 bp, Homo sapiens
ccagagagtcgcatg

SEQ ID NO: 70326 - DNA, 15 bp, Homo sapiens
tccagagagtcgcat

SEQ ID NO: 70327 - DNA, 15 bp, Homo sapiens
ttccagagagtcgca

SEQ ID NO: 70328 - DNA, 15 bp, Homo sapiens
attccagagagtcgc

SEQ ID NO: 70329 - DNA, 15 bp, Homo sapiens
tattccagagagtcg

SEQ ID NO: 70330 - DNA, 15 bp, Homo sapiens
atattccagagagtc

SEQ ID NO: 70331 - DNA, 15 bp, Homo sapiens
tatattccagagagt

SEQ ID NO: 70332 - DNA, 15 bp, Homo sapiens
atatattccagagag

SEQ ID NO: 70333 - DNA, 15 bp, Homo sapiens
tatatattccagaga

SEQ ID NO: 70334 - DNA, 15 bp, Homo sapiens
ttatatattccagag

SEQ ID NO: 70335 - DNA, 15 bp, Homo sapiens
tttatatattccaga

SEQ ID NO: 70336 - DNA, 15 bp, Homo sapiens
ctttatatattccag

SEQ ID NO: 70337 - DNA, 15 bp, Homo sapiens
tctttatatattcca

SEQ ID NO: 70338 - DNA, 15 bp, Homo sapiens
atctttatatattcc

SEQ ID NO: 70339 - DNA, 15 bp, Homo sapiens
aatctttatatattc

SEQ ID NO: 70340 - DNA, 15 bp, Homo sapiens
aaatctttatatatt

SEQ ID NO: 70341 - DNA, 15 bp, Homo sapiens
caaatctttatatat

SEQ ID NO: 70342 - DNA, 15 bp, Homo sapiens
acaaatctttatata

SEQ ID NO: 70343 - DNA, 15 bp, Homo sapiens
tacaaatctttatat

SEQ ID NO: 70344 - DNA, 15 bp, Homo sapiens
ttacaaatctttata

SEQ ID NO: 70345 - DNA, 15 bp, Homo sapiens
tttacaaatctttat

SEQ ID NO: 70346 - DNA, 15 bp, Homo sapiens
ttttacaaatcttta

SEQ ID NO: 70347 - DNA, 15 bp, Homo sapiens
tttttacaaatcttt

SEQ ID NO: 70348 - DNA, 15 bp, Homo sapiens
ctttttacaaatctt

SEQ ID NO: 70349 - DNA, 15 bp, Homo sapiens
actttttacaaatct

SEQ ID NO: 70350 - DNA, 15 bp, Homo sapiens
aactttttacaaatc

SEQ ID NO: 70351 - DNA, 15 bp, Homo sapiens
aaactttttacaaat

SEQ ID NO: 70352 - DNA, 15 bp, Homo sapiens
gaaactttttacaaa

SEQ ID NO: 70353 - DNA, 15 bp, Homo sapiens
tgaaactttttacaa

SEQ ID NO: 70354 - DNA, 15 bp, Homo sapiens
ttgaaactttttaca

SEQ ID NO: 70355 - DNA, 15 bp, Homo sapiens
cttgaaactttttac

SEQ ID NO: 70356 - DNA, 15 bp, Homo sapiens
tcttgaaacttttta

SEQ ID NO: 70357 - DNA, 15 bp, Homo sapiens
ttcttgaaacttttt

SEQ ID NO: 70358 - DNA, 15 bp, Homo sapiens
tttcttgaaactttt

SEQ ID NO: 70359 - DNA, 15 bp, Homo sapiens
atttcttgaaacttt

SEQ ID NO: 70360 - DNA, 15 bp, Homo sapiens
catttcttgaaactt

SEQ ID NO: 70361 - DNA, 15 bp, Homo sapiens
ccatttcttgaaact

SEQ ID NO: 70362 - DNA, 15 bp, Homo sapiens
accatttcttgaaac

SEQ ID NO: 70363 - DNA, 15 bp, Homo sapiens
gaccatttcttgaaa

SEQ ID NO: 70364 - DNA, 15 bp, Homo sapiens
tgaccatttcttgaa

SEQ ID NO: 70365 - DNA, 15 bp, Homo sapiens
ttgaccatttcttga

SEQ ID NO: 70366 - DNA, 15 bp, Homo sapiens
gttgaccatttcttg

SEQ ID NO: 70367 - DNA, 15 bp, Homo sapiens
agttgaccatttctt

SEQ ID NO: 70368 - DNA, 15 bp, Homo sapiens
aagttgaccatttct

SEQ ID NO: 70369 - DNA, 15 bp, Homo sapiens
aaagttgaccatttc

SEQ ID NO: 70370 - DNA, 15 bp, Homo sapiens
taaagttgaccattt

SEQ ID NO: 70371 - DNA, 15 bp, Homo sapiens
ataaagttgaccatt

SEQ ID NO: 70372 - DNA, 15 bp, Homo sapiens
tataaagttgaccat

SEQ ID NO: 70373 - DNA, 15 bp, Homo sapiens
ttataaagttgacca

SEQ ID NO: 70374 - DNA, 15 bp, Homo sapiens
tttataaagttgacc

SEQ ID NO: 70375 - DNA, 15 bp, Homo sapiens
tttatttttcaaaac

SEQ ID NO: 70376 - DNA, 15 bp, Homo sapiens
gtttatttttcaaaa

SEQ ID NO: 70377 - DNA, 15 bp, Homo sapiens
ggtttatttttcaaa

SEQ ID NO: 70378 - DNA, 15 bp, Homo sapiens
aggtttatttttcaa

SEQ ID NO: 70379 - DNA, 15 bp, Homo sapiens
taggtttatttttca

SEQ ID NO: 70380 - DNA, 15 bp, Homo sapiens
ataggtttatttttc

SEQ ID NO: 70381 - DNA, 15 bp, Homo sapiens
aataggtttattttt

SEQ ID NO: 70382 - DNA, 15 bp, Homo sapiens
aaataggtttatttt

SEQ ID NO: 70383 - DNA, 15 bp, Homo sapiens
taaataggtttattt

SEQ ID NO: 70384 - DNA, 15 bp, Homo sapiens
ctaaataggtttatt

SEQ ID NO: 70385 - DNA, 15 bp, Homo sapiens
tctaaataggtttat

SEQ ID NO: 70386 - DNA, 15 bp, Homo sapiens
ttctaaataggttta

SEQ ID NO: 70387 - DNA, 15 bp, Homo sapiens
attctaaataggttt

SEQ ID NO: 70388 - DNA, 15 bp, Homo sapiens
cattctaaataggtt

SEQ ID NO: 70389 - DNA, 15 bp, Homo sapiens
ccattctaaataggt

SEQ ID NO: 70390 - DNA, 15 bp, Homo sapiens
accattctaaatagg

SEQ ID NO: 70391 - DNA, 15 bp, Homo sapiens
aaccattctaaatag

SEQ ID NO: 70392 - DNA, 15 bp, Homo sapiens
aaaccattctaaata

SEQ ID NO: 70393 - DNA, 15 bp, Homo sapiens
taaaccattctaaat

SEQ ID NO: 70394 - DNA, 15 bp, Homo sapiens
ctaaaccattctaaa

SEQ ID NO: 70395 - DNA, 15 bp, Homo sapiens
tctaaaccattctaa

SEQ ID NO: 70396 - DNA, 15 bp, Homo sapiens
ttctaaaccattcta

SEQ ID NO: 70397 - DNA, 15 bp, Homo sapiens
cttctaaaccattct

SEQ ID NO: 70398 - DNA, 15 bp, Homo sapiens
gcttctaaaccattc

SEQ ID NO: 70399 - DNA, 15 bp, Homo sapiens
ggcttctaaaccatt

SEQ ID NO: 70400 - DNA, 15 bp, Homo sapiens
tggcttctaaaccat

SEQ ID NO: 70401 - DNA, 15 bp, Homo sapiens
ctggcttctaaacca

SEQ ID NO: 70402 - DNA, 15 bp, Homo sapiens
tctggcttctaaacc

SEQ ID NO: 70403 - DNA, 15 bp, Homo sapiens
ttctggcttctaaac

SEQ ID NO: 70404 - DNA, 15 bp, Homo sapiens
gttctggcttctaaa

SEQ ID NO: 70405 - DNA, 15 bp, Homo sapiens
agttctggcttctaa

SEQ ID NO: 70406 - DNA, 15 bp, Homo sapiens
cagttctggcttcta

SEQ ID NO: 70407 - DNA, 15 bp, Homo sapiens
ccagttctggcttct

SEQ ID NO: 70408 - DNA, 15 bp, Homo sapiens
tccagttctggcttc

SEQ ID NO: 70409 - DNA, 15 bp, Homo sapiens
gtccagttctggctt

SEQ ID NO: 70410 - DNA, 15 bp, Homo sapiens
tgtccagttctggct

SEQ ID NO: 70411 - DNA, 15 bp, Homo sapiens
gtgtccagttctggc

SEQ ID NO: 70412 - DNA, 15 bp, Homo sapiens
ggtgtccagttctgg

SEQ ID NO: 70413 - DNA, 15 bp, Homo sapiens
aggtgtccagttctg

SEQ ID NO: 70414 - DNA, 15 bp, Homo sapiens
aaggtgtccagttct

SEQ ID NO: 70415 - DNA, 15 bp, Homo sapiens
aaaggtgtccagttc

SEQ ID NO: 70416 - DNA, 15 bp, Homo sapiens
taaaggtgtccagtt

SEQ ID NO: 70417 - DNA, 15 bp, Homo sapiens
ttaaaggtgtccagt

SEQ ID NO: 70418 - DNA, 15 bp, Homo sapiens
cttaaaggtgtccag

SEQ ID NO: 70419 - DNA, 15 bp, Homo sapiens
tcttaaaggtgtcca

SEQ ID NO: 70420 - DNA, 15 bp, Homo sapiens
atcttaaaggtgtcc

SEQ ID NO: 70421 - DNA, 15 bp, Homo sapiens
aatcttaaaggtgtc

SEQ ID NO: 70422 - DNA, 15 bp, Homo sapiens
aaatcttaaaggtgt

SEQ ID NO: 70423 - DNA, 15 bp, Homo sapiens
aaaatcttaaaggtg

SEQ ID NO: 70424 - DNA, 15 bp, Homo sapiens
aaaaatcttaaaggt

SEQ ID NO: 70425 - DNA, 15 bp, Homo sapiens
caaaaatcttaaagg

SEQ ID NO: 70426 - DNA, 15 bp, Homo sapiens
ccaaaaatcttaaag

SEQ ID NO: 70427 - DNA, 15 bp, Homo sapiens
gccaaaaatcttaaa

SEQ ID NO: 70428 - DNA, 15 bp, Homo sapiens
ggccaaaaatcttaa

SEQ ID NO: 70429 - DNA, 15 bp, Homo sapiens
aggccaaaaatctta

SEQ ID NO: 70430 - DNA, 15 bp, Homo sapiens
aaggccaaaaatctt

SEQ ID NO: 70431 - DNA, 15 bp, Homo sapiens
aaaggccaaaaatct

SEQ ID NO: 70432 - DNA, 15 bp, Homo sapiens
caaaggccaaaaatc

SEQ ID NO: 70433 - DNA, 15 bp, Homo sapiens
tcaaaggccaaaaat

SEQ ID NO: 70434 - DNA, 15 bp, Homo sapiens
atcaaaggccaaaaa

SEQ ID NO: 70435 - DNA, 15 bp, Homo sapiens
aatcaaaggccaaaa

SEQ ID NO: 70436 - DNA, 15 bp, Homo sapiens
caatcaaaggccaaa

SEQ ID NO: 70437 - DNA, 15 bp, Homo sapiens
acaatcaaaggccaa

SEQ ID NO: 70438 - DNA, 15 bp, Homo sapiens
tacaatcaaaggcca

SEQ ID NO: 70439 - DNA, 15 bp, Homo sapiens
ttacaatcaaaggcc

SEQ ID NO: 70440 - DNA, 15 bp, Homo sapiens
attacaatcaaaggc

SEQ ID NO: 70441 - DNA, 15 bp, Homo sapiens
cattacaatcaaagg

SEQ ID NO: 70442 - DNA, 15 bp, Homo sapiens
gcattacaatcaaag

SEQ ID NO: 70443 - DNA, 15 bp, Homo sapiens
tgcattacaatcaaa

SEQ ID NO: 70444 - DNA, 15 bp, Homo sapiens
atgcattacaatcaa

SEQ ID NO: 70445 - DNA, 15 bp, Homo sapiens
tatgcattacaatca

SEQ ID NO: 70446 - DNA, 15 bp, Homo sapiens
gtatgcattacaatc

SEQ ID NO: 70447 - DNA, 15 bp, Homo sapiens
agtatgcattacaat

SEQ ID NO: 70448 - DNA, 15 bp, Homo sapiens
cagtatgcattacaa

SEQ ID NO: 70449 - DNA, 15 bp, Homo sapiens
tcagtatgcattaca

SEQ ID NO: 70450 - DNA, 15 bp, Homo sapiens
atcagtatgcattac

SEQ ID NO: 70451 - DNA, 15 bp, Homo sapiens
catcagtatgcatta

SEQ ID NO: 70452 - DNA, 15 bp, Homo sapiens
tcatcagtatgcatt

SEQ ID NO: 70453 - DNA, 15 bp, Homo sapiens
atcatcagtatgcat

SEQ ID NO: 70454 - DNA, 15 bp, Homo sapiens
aatcatcagtatgca

SEQ ID NO: 70455 - DNA, 15 bp, Homo sapiens
aaatcatcagtatgc

SEQ ID NO: 70456 - DNA, 15 bp, Homo sapiens
aaaatcatcagtatg

SEQ ID NO: 70457 - DNA, 15 bp, Homo sapiens
caaaatcatcagtat

SEQ ID NO: 70458 - DNA, 15 bp, Homo sapiens
gcaaaatcatcagta

SEQ ID NO: 70459 - DNA, 15 bp, Homo sapiens
tgcaaaatcatcagt

SEQ ID NO: 70460 - DNA, 15 bp, Homo sapiens
ctgcaaaatcatcag

SEQ ID NO: 70461 - DNA, 15 bp, Homo sapiens
actgcaaaatcatca

SEQ ID NO: 70462 - DNA, 15 bp, Homo sapiens
tactgcaaaatcatc

SEQ ID NO: 70463 - DNA, 15 bp, Homo sapiens
gtactgcaaaatcat

SEQ ID NO: 70464 - DNA, 15 bp, Homo sapiens
tgtactgcaaaatca

SEQ ID NO: 70465 - DNA, 15 bp, Homo sapiens
atgtactgcaaaatc

SEQ ID NO: 70466 - DNA, 15 bp, Homo sapiens
catgtactgcaaaat

SEQ ID NO: 70467 - DNA, 15 bp, Homo sapiens
tcatgtactgcaaaa

SEQ ID NO: 70468 - DNA, 15 bp, Homo sapiens
ttcatgtactgcaaa

SEQ ID NO: 70469 - DNA, 15 bp, Homo sapiens
attcatgtactgcaa

SEQ ID NO: 70470 - DNA, 15 bp, Homo sapiens
aattcatgtactgca

SEQ ID NO: 70471 - DNA, 15 bp, Homo sapiens
aaattcatgtactgc

SEQ ID NO: 70472 - DNA, 15 bp, Homo sapiens
caaattcatgtactg

SEQ ID NO: 70473 - DNA, 15 bp, Homo sapiens
tcaaattcatgtact

SEQ ID NO: 70474 - DNA, 15 bp, Homo sapiens
gtcaaattcatgtac

SEQ ID NO: 70475 - DNA, 15 bp, Homo sapiens
cgtcaaattcatgta

SEQ ID NO: 70476 - DNA, 15 bp, Homo sapiens
acgtcaaattcatgt

SEQ ID NO: 70477 - DNA, 15 bp, Homo sapiens
cacgtcaaattcatg

SEQ ID NO: 70478 - DNA, 15 bp, Homo sapiens
ccacgtcaaattcat

SEQ ID NO: 70479 - DNA, 15 bp, Homo sapiens
cccacgtcaaattca

SEQ ID NO: 70480 - DNA, 15 bp, Homo sapiens
ccccacgtcaaattc

SEQ ID NO: 70481 - DNA, 15 bp, Homo sapiens
cccccacgtcaaatt

SEQ ID NO: 70482 - DNA, 15 bp, Homo sapiens
gcccccacgtcaaat

SEQ ID NO: 70483 - DNA, 15 bp, Homo sapiens
agcccccacgtcaaa

SEQ ID NO: 70484 - DNA, 15 bp, Homo sapiens
aagcccccacgtcaa

SEQ ID NO: 70485 - DNA, 15 bp, Homo sapiens
aaagcccccacgtca

SEQ ID NO: 70486 - DNA, 15 bp, Homo sapiens
caaagcccccacgtc

SEQ ID NO: 70487 - DNA, 15 bp, Homo sapiens
tcaaagcccccacgt

SEQ ID NO: 70488 - DNA, 15 bp, Homo sapiens
ttcaaagcccccacg

SEQ ID NO: 70489 - DNA, 15 bp, Homo sapiens
attcaaagcccccac

SEQ ID NO: 70490 - DNA, 15 bp, Homo sapiens
aattcaaagccccca

SEQ ID NO: 70491 - DNA, 15 bp, Homo sapiens
gaattcaaagccccc

SEQ ID NO: 70492 - DNA, 15 bp, Homo sapiens
cgaattcaaagcccc

SEQ ID NO: 70493 - DNA, 15 bp, Homo sapiens
acgaattcaaagccc

SEQ ID NO: 70494 - DNA, 15 bp, Homo sapiens
tacgaattcaaagcc

SEQ ID NO: 70495 - DNA, 15 bp, Homo sapiens
atacgaattcaaagc

SEQ ID NO: 70496 - DNA, 15 bp, Homo sapiens
aatacgaattcaaag

SEQ ID NO: 70497 - DNA, 15 bp, Homo sapiens
aaatacgaattcaaa

SEQ ID NO: 70498 - DNA, 15 bp, Homo sapiens
caaatacgaattcaa

SEQ ID NO: 70499 - DNA, 15 bp, Homo sapiens
ccaaatacgaattca

SEQ ID NO: 70500 - DNA, 15 bp, Homo sapiens
accaaatacgaattc

SEQ ID NO: 70501 - DNA, 15 bp, Homo sapiens
gaccaaatacgaatt

SEQ ID NO: 70502 - DNA, 15 bp, Homo sapiens
ggaccaaatacgaat

SEQ ID NO: 70503 - DNA, 15 bp, Homo sapiens
aggaccaaatacgaa

SEQ ID NO: 70504 - DNA, 15 bp, Homo sapiens
caggaccaaatacga

SEQ ID NO: 70505 - DNA, 15 bp, Homo sapiens
ccaggaccaaatacg

SEQ ID NO: 70506 - DNA, 15 bp, Homo sapiens
tccaggaccaaatac

SEQ ID NO: 70507 - DNA, 15 bp, Homo sapiens
gtccaggaccaaata

SEQ ID NO: 70508 - DNA, 15 bp, Homo sapiens
agtccaggaccaaat

SEQ ID NO: 70509 - DNA, 15 bp, Homo sapiens
aagtccaggaccaaa

SEQ ID NO: 70510 - DNA, 15 bp, Homo sapiens
aaagtccaggaccaa

SEQ ID NO: 70511 - DNA, 15 bp, Homo sapiens
caaaagtccaggacc

SEQ ID NO: 70512 - DNA, 15 bp, Homo sapiens
acaaaagtccaggac

SEQ ID NO: 70513 - DNA, 15 bp, Homo sapiens
aacaaaagtccagga

SEQ ID NO: 70514 - DNA, 15 bp, Homo sapiens
taacaaaagtccagg

SEQ ID NO: 70515 - DNA, 15 bp, Homo sapiens
ataacaaaagtccag

SEQ ID NO: 70516 - DNA, 15 bp, Homo sapiens
aataacaaaagtcca

SEQ ID NO: 70517 - DNA, 15 bp, Homo sapiens
aaataacaaaagtcc

SEQ ID NO: 70518 - DNA, 15 bp, Homo sapiens
taaataacaaaagtc

SEQ ID NO: 70519 - DNA, 15 bp, Homo sapiens
ttaaataacaaaagt

SEQ ID NO: 70520 - DNA, 15 bp, Homo sapiens
tttaaataacaaaag

SEQ ID NO: 70521 - DNA, 15 bp, Homo sapiens
atttaaataacaaaa

SEQ ID NO: 70522 - DNA, 15 bp, Homo sapiens
tatttaaataacaaa

SEQ ID NO: 70523 - DNA, 15 bp, Homo sapiens
ctatttaaataacaa

SEQ ID NO: 70524 - DNA, 15 bp, Homo sapiens
actatttaaataaca

SEQ ID NO: 70525 - DNA, 15 bp, Homo sapiens
aactatttaaataac

SEQ ID NO: 70526 - DNA, 15 bp, Homo sapiens
taactatttaaataa

SEQ ID NO: 70527 - DNA, 15 bp, Homo sapiens
ttaactatttaaata

SEQ ID NO: 70528 - DNA, 15 bp, Homo sapiens
gttaactatttaaat

SEQ ID NO: 70529 - DNA, 15 bp, Homo sapiens
tgttaactatttaaa

SEQ ID NO: 70530 - DNA, 15 bp, Homo sapiens
atgttaactatttaa

SEQ ID NO: 70531 - DNA, 15 bp, Homo sapiens
tatgttaactattta

SEQ ID NO: 70532 - DNA, 15 bp, Homo sapiens
gtatgttaactattt

SEQ ID NO: 70533 - DNA, 15 bp, Homo sapiens
tgtatgttaactatt

SEQ ID NO: 70534 - DNA, 15 bp, Homo sapiens
ttgtatgttaactat

SEQ ID NO: 70535 - DNA, 15 bp, Homo sapiens
tttgtatgttaacta

SEQ ID NO: 70536 - DNA, 15 bp, Homo sapiens
atttgtatgttaact

SEQ ID NO: 70537 - DNA, 15 bp, Homo sapiens
tatttgtatgttaac

SEQ ID NO: 70538 - DNA, 15 bp, Homo sapiens
ttatttgtatgttaa

SEQ ID NO: 70539 - DNA, 15 bp, Homo sapiens
attatttgtatgtta

SEQ ID NO: 70540 - DNA, 15 bp, Homo sapiens
cattatttgtatgtt

SEQ ID NO: 70541 - DNA, 15 bp, Homo sapiens
acattatttgtatgt

SEQ ID NO: 70542 - DNA, 15 bp, Homo sapiens
tacattatttgtatg

SEQ ID NO: 70543 - DNA, 15 bp, Homo sapiens
ttacattatttgtat

SEQ ID NO: 70544 - DNA, 15 bp, Homo sapiens
tttacattatttgta

SEQ ID NO: 70545 - DNA, 15 bp, Homo sapiens
ttttacattatttgt

SEQ ID NO: 70546 - DNA, 15 bp, Homo sapiens
attttacattatttg

SEQ ID NO: 70547 - DNA, 15 bp, Homo sapiens
gattttacattattt

SEQ ID NO: 70548 - DNA, 15 bp, Homo sapiens
tgattttacattatt

SEQ ID NO: 70549 - DNA, 15 bp, Homo sapiens
ttgattttacattat

SEQ ID NO: 70550 - DNA, 15 bp, Homo sapiens
attgattttacatta

SEQ ID NO: 70551 - DNA, 15 bp, Homo sapiens
acattgattttacat

SEQ ID NO: 70552 - DNA, 15 bp, Homo sapiens
cacattgattttaca

SEQ ID NO: 70553 - DNA, 15 bp, Homo sapiens
tcacattgattttac

SEQ ID NO: 70554 - DNA, 15 bp, Homo sapiens
ttcacattgatttta

SEQ ID NO: 70555 - DNA, 15 bp, Homo sapiens
attcacattgatttt

SEQ ID NO: 70556 - DNA, 15 bp, Homo sapiens
tattcacattgattt

SEQ ID NO: 70557 - DNA, 15 bp, Homo sapiens
atattcacattgatt

SEQ ID NO: 70558 - DNA, 15 bp, Homo sapiens
tatattcacattgat

SEQ ID NO: 70559 - DNA, 15 bp, Homo sapiens
ctatattcacattga

SEQ ID NO: 70560 - DNA, 15 bp, Homo sapiens
cctatattcacattg

SEQ ID NO: 70561 - DNA, 15 bp, Homo sapiens
gcctatattcacatt

SEQ ID NO: 70562 - DNA, 15 bp, Homo sapiens
tgcctatattcacat

SEQ ID NO: 70563 - DNA, 15 bp, Homo sapiens
gtgcctatattcaca

SEQ ID NO: 70564 - DNA, 15 bp, Homo sapiens
ggtgcctatattcac

SEQ ID NO: 70565 - DNA, 15 bp, Homo sapiens
aggtgcctatattca

SEQ ID NO: 70566 - DNA, 15 bp, Homo sapiens
caggtgcctatattc

SEQ ID NO: 70567 - DNA, 15 bp, Homo sapiens
acaggtgcctatatt

SEQ ID NO: 70568 - DNA, 15 bp, Homo sapiens
cacaggtgcctatat

SEQ ID NO: 70569 - DNA, 15 bp, Homo sapiens
acacaggtgcctata

SEQ ID NO: 70570 - DNA, 15 bp, Homo sapiens
gacacaggtgcctat

SEQ ID NO: 70571 - DNA, 15 bp, Homo sapiens
tgacacaggtgccta

SEQ ID NO: 70572 - DNA, 15 bp, Homo sapiens
ctgacacaggtgcct

SEQ ID NO: 70573 - DNA, 15 bp, Homo sapiens
tctgacacaggtgcc

SEQ ID NO: 70574 - DNA, 15 bp, Homo sapiens
ttctgacacaggtgc

SEQ ID NO: 70575 - DNA, 15 bp, Homo sapiens
attctgacacaggtg

SEQ ID NO: 70576 - DNA, 15 bp, Homo sapiens
tattctgacacaggt

SEQ ID NO: 70577 - DNA, 15 bp, Homo sapiens
gtattctgacacagg

SEQ ID NO: 70578 - DNA, 15 bp, Homo sapiens
agtattctgacacag

SEQ ID NO: 70579 - DNA, 15 bp, Homo sapiens
tagtattctgacaca

SEQ ID NO: 70580 - DNA, 15 bp, Homo sapiens
ctagtattctgacac

SEQ ID NO: 70581 - DNA, 15 bp, Homo sapiens
gctagtattctgaca

SEQ ID NO: 70582 - DNA, 15 bp, Homo sapiens
tgctagtattctgac

SEQ ID NO: 70583 - DNA, 15 bp, Homo sapiens
ttgctagtattctga

SEQ ID NO: 70584 - DNA, 15 bp, Homo sapiens
gttgctagtattctg

SEQ ID NO: 70585 - DNA, 15 bp, Homo sapiens
agttgctagtattct

SEQ ID NO: 70586 - DNA, 15 bp, Homo sapiens
cagttgctagtattc

SEQ ID NO: 70587 - DNA, 15 bp, Homo sapiens
acagttgctagtatt

SEQ ID NO: 70588 - DNA, 15 bp, Homo sapiens
aacagttgctagtat

SEQ ID NO: 70589 - DNA, 15 bp, Homo sapiens
taacagttgctagta

SEQ ID NO: 70590 - DNA, 15 bp, Homo sapiens
gtaacagttgctagt

SEQ ID NO: 70591 - DNA, 15 bp, Homo sapiens
ggtaacagttgctag

SEQ ID NO: 70592 - DNA, 15 bp, Homo sapiens
gggtaacagttgcta

SEQ ID NO: 70593 - DNA, 15 bp, Homo sapiens
tgggtaacagttgct

SEQ ID NO: 70594 - DNA, 15 bp, Homo sapiens
gtgggtaacagttgc

SEQ ID NO: 70595 - DNA, 15 bp, Homo sapiens
tgtgggtaacagttg

SEQ ID NO: 70596 - DNA, 15 bp, Homo sapiens
gtgtgggtaacagtt

SEQ ID NO: 70597 - DNA, 15 bp, Homo sapiens
tgtgtgggtaacagt

SEQ ID NO: 70598 - DNA, 15 bp, Homo sapiens
ttgtgtgggtaacag

SEQ ID NO: 70599 - DNA, 15 bp, Homo sapiens
gttgtgtgggtaaca

SEQ ID NO: 70600 - DNA, 15 bp, Homo sapiens
cgttgtgtgggtaac

SEQ ID NO: 70601 - DNA, 15 bp, Homo sapiens
ccgttgtgtgggtaa

SEQ ID NO: 70602 - DNA, 15 bp, Homo sapiens
cccgttgtgtgggta

SEQ ID NO: 70603 - DNA, 15 bp, Homo sapiens
gcccgttgtgtgggt

SEQ ID NO: 70604 - DNA, 15 bp, Homo sapiens
tgcccgttgtgtggg

SEQ ID NO: 70605 - DNA, 15 bp, Homo sapiens
ctgcccgttgtgtgg

SEQ ID NO: 70606 - DNA, 15 bp, Homo sapiens
cctgcccgttgtgtg

SEQ ID NO: 70607 - DNA, 15 bp, Homo sapiens
acctgcccgttgtgt

SEQ ID NO: 70608 - DNA, 15 bp, Homo sapiens
aacctgcccgttgtg

SEQ ID NO: 70609 - DNA, 15 bp, Homo sapiens
aaacctgcccgttgt

SEQ ID NO: 70610 - DNA, 15 bp, Homo sapiens
caaacctgcccgttg

SEQ ID NO: 70611 - DNA, 15 bp, Homo sapiens
ccaaacctgcccgtt

SEQ ID NO: 70612 - DNA, 15 bp, Homo sapiens
accaaacctgcccgt

SEQ ID NO: 70613 - DNA, 15 bp, Homo sapiens
gaccaaacctgcccg

SEQ ID NO: 70614 - DNA, 15 bp, Homo sapiens
tgaccaaacctgccc

SEQ ID NO: 70615 - DNA, 15 bp, Homo sapiens
gtgaccaaacctgcc

SEQ ID NO: 70616 - DNA, 15 bp, Homo sapiens
agtgaccaaacctgc

SEQ ID NO: 70617 - DNA, 15 bp, Homo sapiens
aagtgaccaaacctg

SEQ ID NO: 70618 - DNA, 15 bp, Homo sapiens
caagtgaccaaacct

SEQ ID NO: 70619 - DNA, 15 bp, Homo sapiens
ccaagtgaccaaacc

SEQ ID NO: 70620 - DNA, 15 bp, Homo sapiens
accaagtgaccaaac

SEQ ID NO: 70621 - DNA, 15 bp, Homo sapiens
caccaagtgaccaaa

SEQ ID NO: 70622 - DNA, 15 bp, Homo sapiens
ccaccaagtgaccaa

SEQ ID NO: 70623 - DNA, 15 bp, Homo sapiens
cccaccaagtgacca

SEQ ID NO: 70624 - DNA, 15 bp, Homo sapiens
acccaccaagtgacc

SEQ ID NO: 70625 - DNA, 15 bp, Homo sapiens
aacccaccaagtgac

SEQ ID NO: 70626 - DNA, 15 bp, Homo sapiens
aaacccaccaagtga

SEQ ID NO: 70627 - DNA, 15 bp, Homo sapiens
gaaacccaccaagtg

SEQ ID NO: 70628 - DNA, 15 bp, Homo sapiens
tgaaacccaccaagt

SEQ ID NO: 70629 - DNA, 15 bp, Homo sapiens
ttgaaacccaccaag

SEQ ID NO: 70630 - DNA, 15 bp, Homo sapiens
gttgaaacccaccaa

SEQ ID NO: 70631 - DNA, 15 bp, Homo sapiens
ggttgaaacccacca

SEQ ID NO: 70632 - DNA, 15 bp, Homo sapiens
gggttgaaacccacc

SEQ ID NO: 70633 - DNA, 15 bp, Homo sapiens
tgggttgaaacccac

SEQ ID NO: 70634 - DNA, 15 bp, Homo sapiens
ttgggttgaaaccca

SEQ ID NO: 70635 - DNA, 15 bp, Homo sapiens
attgggttgaaaccc

SEQ ID NO: 70636 - DNA, 15 bp, Homo sapiens
cattgggttgaaacc

SEQ ID NO: 70637 - DNA, 15 bp, Homo sapiens
tcattgggttgaaac

SEQ ID NO: 70638 - DNA, 15 bp, Homo sapiens
gtcattgggttgaaa

SEQ ID NO: 70639 - DNA, 15 bp, Homo sapiens
ggtcattgggttgaa

SEQ ID NO: 70640 - DNA, 15 bp, Homo sapiens
tggtcattgggttga

SEQ ID NO: 70641 - DNA, 15 bp, Homo sapiens
gtggtcattgggttg

SEQ ID NO: 70642 - DNA, 15 bp, Homo sapiens
tgtggtcattgggtt

SEQ ID NO: 70643 - DNA, 15 bp, Homo sapiens
atgtggtcattgggt

SEQ ID NO: 70644 - DNA, 15 bp, Homo sapiens
gatgtggtcattggg

SEQ ID NO: 70645 - DNA, 15 bp, Homo sapiens
tgatgtggtcattgg

SEQ ID NO: 70646 - DNA, 15 bp, Homo sapiens
ttgatgtggtcattg

SEQ ID NO: 70647 - DNA, 15 bp, Homo sapiens
cttgatgtggtcatt

SEQ ID NO: 70648 - DNA, 15 bp, Homo sapiens
ccttgatgtggtcat

SEQ ID NO: 70649 - DNA, 15 bp, Homo sapiens
tccttgatgtggtca

SEQ ID NO: 70650 - DNA, 15 bp, Homo sapiens
ctccttgatgtggtc

SEQ ID NO: 70651 - DNA, 15 bp, Homo sapiens
cctccttgatgtggt

SEQ ID NO: 70652 - DNA, 15 bp, Homo sapiens
tcctccttgatgtgg

SEQ ID NO: 70653 - DNA, 15 bp, Homo sapiens
atcctccttgatgtg

SEQ ID NO: 70654 - DNA, 15 bp, Homo sapiens
aatcctccttgatgt

SEQ ID NO: 70655 - DNA, 15 bp, Homo sapiens
aaatcctccttgatg

SEQ ID NO: 70656 - DNA, 15 bp, Homo sapiens
taaatcctccttgat

SEQ ID NO: 70657 - DNA, 15 bp, Homo sapiens
ctaaatcctccttga

SEQ ID NO: 70658 - DNA, 15 bp, Homo sapiens
gctaaatcctccttg

SEQ ID NO: 70659 - DNA, 15 bp, Homo sapiens
tgctaaatcctcctt

SEQ ID NO: 70660 - DNA, 15 bp, Homo sapiens
ttgctaaatcctcct

SEQ ID NO: 70661 - DNA, 15 bp, Homo sapiens
tttgctaaatcctcc

SEQ ID NO: 70662 - DNA, 15 bp, Homo sapiens
ctttgctaaatcctc

SEQ ID NO: 70663 - DNA, 15 bp, Homo sapiens
cctttgctaaatcct

SEQ ID NO: 70664 - DNA, 15 bp, Homo sapiens
tcctttgctaaatcc

SEQ ID NO: 70665 - DNA, 15 bp, Homo sapiens
ttcctttgctaaatc

SEQ ID NO: 70666 - DNA, 15 bp, Homo sapiens
attcctttgctaaat

SEQ ID NO: 70667 - DNA, 15 bp, Homo sapiens
aattcctttgctaaa

SEQ ID NO: 70668 - DNA, 15 bp, Homo sapiens
aaattcctttgctaa

SEQ ID NO: 70669 - DNA, 15 bp, Homo sapiens
aaaattcctttgcta

SEQ ID NO: 70670 - DNA, 15 bp, Homo sapiens
taaaattcctttgct

SEQ ID NO: 70671 - DNA, 15 bp, Homo sapiens
ataaaattcctttgc

SEQ ID NO: 70672 - DNA, 15 bp, Homo sapiens
tataaaattcctttg

SEQ ID NO: 70673 - DNA, 15 bp, Homo sapiens
ttataaaattccttt

SEQ ID NO: 70674 - DNA, 15 bp, Homo sapiens
gttataaaattcctt

SEQ ID NO: 70675 - DNA, 15 bp, Homo sapiens
agttataaaattcct

SEQ ID NO: 70676 - DNA, 15 bp, Homo sapiens
aagttataaaattcc

SEQ ID NO: 70677 - DNA, 15 bp, Homo sapiens
caagttataaaattc

SEQ ID NO: 70678 - DNA, 15 bp, Homo sapiens
acaagttataaaatt

SEQ ID NO: 70679 - DNA, 15 bp, Homo sapiens
gacaagttataaaat

SEQ ID NO: 70680 - DNA, 15 bp, Homo sapiens
tgacaagttataaaa

SEQ ID NO: 70681 - DNA, 15 bp, Homo sapiens
gtgacaagttataaa

SEQ ID NO: 70682 - DNA, 15 bp, Homo sapiens
tgtgacaagttataa

SEQ ID NO: 70683 - DNA, 15 bp, Homo sapiens
ttgtgacaagttata

SEQ ID NO: 70684 - DNA, 15 bp, Homo sapiens
cttgtgacaagttat

SEQ ID NO: 70685 - DNA, 15 bp, Homo sapiens
acttgtgacaagtta

SEQ ID NO: 70686 - DNA, 15 bp, Homo sapiens
cacttgtgacaagtt

SEQ ID NO: 70687 - DNA, 15 bp, Homo sapiens
tcacttgtgacaagt

SEQ ID NO: 70688 - DNA, 15 bp, Homo sapiens
ctcacttgtgacaag

SEQ ID NO: 70689 - DNA, 15 bp, Homo sapiens
tctcacttgtgacaa

SEQ ID NO: 70690 - DNA, 15 bp, Homo sapiens
ttctcacttgtgaca

SEQ ID NO: 70691 - DNA, 15 bp, Homo sapiens
cttctcacttgtgac

SEQ ID NO: 70692 - DNA, 15 bp, Homo sapiens
gcttctcacttgtga

SEQ ID NO: 70693 - DNA, 15 bp, Homo sapiens
agcttctcacttgtg

SEQ ID NO: 70694 - DNA, 15 bp, Homo sapiens
gagcttctcacttgt

SEQ ID NO: 70695 - DNA, 15 bp, Homo sapiens
tgagcttctcacttg

SEQ ID NO: 70696 - DNA, 15 bp, Homo sapiens
gtgagcttctcactt

SEQ ID NO: 70697 - DNA, 15 bp, Homo sapiens
tgtgagcttctcact

SEQ ID NO: 70698 - DNA, 15 bp, Homo sapiens
ctgtgagcttctcac

SEQ ID NO: 70699 - DNA, 15 bp, Homo sapiens
tctgtgagcttctca

SEQ ID NO: 70700 - DNA, 15 bp, Homo sapiens
ctctgtgagcttctc

SEQ ID NO: 70701 - DNA, 15 bp, Homo sapiens
gctctgtgagcttct

SEQ ID NO: 70702 - DNA, 15 bp, Homo sapiens
agctctgtgagcttc

SEQ ID NO: 70703 - DNA, 15 bp, Homo sapiens
aagctctgtgagctt

SEQ ID NO: 70704 - DNA, 15 bp, Homo sapiens
taagctctgtgagct

SEQ ID NO: 70705 - DNA, 15 bp, Homo sapiens
ctaagctctgtgagc

SEQ ID NO: 70706 - DNA, 15 bp, Homo sapiens
actaagctctgtgag

SEQ ID NO: 70707 - DNA, 15 bp, Homo sapiens
aactaagctctgtga

SEQ ID NO: 70708 - DNA, 15 bp, Homo sapiens
gaactaagctctgtg

SEQ ID NO: 70709 - DNA, 15 bp, Homo sapiens
ggaactaagctctgt

SEQ ID NO: 70710 - DNA, 15 bp, Homo sapiens
gggaactaagctctg

SEQ ID NO: 70711 - DNA, 15 bp, Homo sapiens
tgggaactaagctct

SEQ ID NO: 70712 - DNA, 15 bp, Homo sapiens
ttgggaactaagctc

SEQ ID NO: 70713 - DNA, 15 bp, Homo sapiens
tttgggaactaagct

SEQ ID NO: 70714 - DNA, 15 bp, Homo sapiens
ctttgggaactaagc

SEQ ID NO: 70715 - DNA, 15 bp, Homo sapiens
gctttgggaactaag

SEQ ID NO: 70716 - DNA, 15 bp, Homo sapiens
tgctttgggaactaa

SEQ ID NO: 70717 - DNA, 15 bp, Homo sapiens
ctgctttgggaacta

SEQ ID NO: 70718 - DNA, 15 bp, Homo sapiens
actgctttgggaact

SEQ ID NO: 70719 - DNA, 15 bp, Homo sapiens
tactgctttgggaac

SEQ ID NO: 70720 - DNA, 15 bp, Homo sapiens
atactgctttgggaa

SEQ ID NO: 70721 - DNA, 15 bp, Homo sapiens
gatactgctttggga

SEQ ID NO: 70722 - DNA, 15 bp, Homo sapiens
agatactgctttggg

SEQ ID NO: 70723 - DNA, 15 bp, Homo sapiens
gagatactgctttgg

SEQ ID NO: 70724 - DNA, 15 bp, Homo sapiens
ggagatactgctttg

SEQ ID NO: 70725 - DNA, 15 bp, Homo sapiens
gggagatactgcttt

SEQ ID NO: 70726 - DNA, 15 bp, Homo sapiens
ggggagatactgctt

SEQ ID NO: 70727 - DNA, 15 bp, Homo sapiens
tggggagatactgct

SEQ ID NO: 70728 - DNA, 15 bp, Homo sapiens
ttggggagatactgc

SEQ ID NO: 70729 - DNA, 15 bp, Homo sapiens
cttggggagatactg

SEQ ID NO: 70730 - DNA, 15 bp, Homo sapiens
gcttggggagatact

SEQ ID NO: 70731 - DNA, 15 bp, Homo sapiens
agcttggggagatac

SEQ ID NO: 70732 - DNA, 15 bp, Homo sapiens
cagcttggggagata

SEQ ID NO: 70733 - DNA, 15 bp, Homo sapiens
ccagcttggggagat

SEQ ID NO: 70734 - DNA, 15 bp, Homo sapiens
tccagcttggggaga

SEQ ID NO: 70735 - DNA, 15 bp, Homo sapiens
ctccagcttggggag

SEQ ID NO: 70736 - DNA, 15 bp, Homo sapiens
cctccagcttgggga

SEQ ID NO: 70737 - DNA, 15 bp, Homo sapiens
gcctccagcttgggg

SEQ ID NO: 70738 - DNA, 15 bp, Homo sapiens
agcctccagcttggg

SEQ ID NO: 70739 - DNA, 15 bp, Homo sapiens
cagcctccagcttgg

SEQ ID NO: 70740 - DNA, 15 bp, Homo sapiens
ccagcctccagcttg

SEQ ID NO: 70741 - DNA, 15 bp, Homo sapiens
cccagcctccagctt

SEQ ID NO: 70742 - DNA, 15 bp, Homo sapiens
acccagcctccagct

SEQ ID NO: 70743 - DNA, 15 bp, Homo sapiens
gacccagcctccagc

SEQ ID NO: 70744 - DNA, 15 bp, Homo sapiens
tgacccagcctccag

SEQ ID NO: 70745 - DNA, 15 bp, Homo sapiens
ctgacccagcctcca

SEQ ID NO: 70746 - DNA, 15 bp, Homo sapiens
cctgacccagcctcc

SEQ ID NO: 70747 - DNA, 15 bp, Homo sapiens
acctgacccagcctc

SEQ ID NO: 70748 - DNA, 15 bp, Homo sapiens
aacctgacccagcct

SEQ ID NO: 70749 - DNA, 15 bp, Homo sapiens
aaacctgacccagcc

SEQ ID NO: 70750 - DNA, 15 bp, Homo sapiens
aaaacctgacccagc

SEQ ID NO: 70751 - DNA, 15 bp, Homo sapiens
taaaacctgacccag

SEQ ID NO: 70752 - DNA, 15 bp, Homo sapiens
ataaaacctgaccca

SEQ ID NO: 70753 - DNA, 15 bp, Homo sapiens
tataaaacctgaccc

SEQ ID NO: 70754 - DNA, 15 bp, Homo sapiens
ttataaaacctgacc

SEQ ID NO: 70755 - DNA, 15 bp, Homo sapiens
cttataaaacctgac

SEQ ID NO: 70756 - DNA, 15 bp, Homo sapiens
gcttataaaacctga

SEQ ID NO: 70757 - DNA, 15 bp, Homo sapiens
cgcttataaaacctg

SEQ ID NO: 70758 - DNA, 15 bp, Homo sapiens
acgcttataaaacct

SEQ ID NO: 70759 - DNA, 15 bp, Homo sapiens
tacgcttataaaacc

SEQ ID NO: 70760 - DNA, 15 bp, Homo sapiens
atacgcttataaaac

SEQ ID NO: 70761 - DNA, 15 bp, Homo sapiens
catacgcttataaaa

SEQ ID NO: 70762 - DNA, 15 bp, Homo sapiens
ccatacgcttataaa

SEQ ID NO: 70763 - DNA, 15 bp, Homo sapiens
accatacgcttataa

SEQ ID NO: 70764 - DNA, 15 bp, Homo sapiens
taccatacgcttata

SEQ ID NO: 70765 - DNA, 15 bp, Homo sapiens
ttaccatacgcttat

SEQ ID NO: 70766 - DNA, 15 bp, Homo sapiens
attaccatacgctta

SEQ ID NO: 70767 - DNA, 15 bp, Homo sapiens
cattaccatacgctt

SEQ ID NO: 70768 - DNA, 15 bp, Homo sapiens
tcattaccatacgct

SEQ ID NO: 70769 - DNA, 15 bp, Homo sapiens
ttcattaccatacgc

SEQ ID NO: 70770 - DNA, 15 bp, Homo sapiens
cttcattaccatacg

SEQ ID NO: 70771 - DNA, 15 bp, Homo sapiens
acttcattaccatac

SEQ ID NO: 70772 - DNA, 15 bp, Homo sapiens
cacttcattaccata

SEQ ID NO: 70773 - DNA, 15 bp, Homo sapiens
acacttcattaccat

SEQ ID NO: 70774 - DNA, 15 bp, Homo sapiens
cacacttcattacca

SEQ ID NO: 70775 - DNA, 15 bp, Homo sapiens
tcacacttcattacc

SEQ ID NO: 70776 - DNA, 15 bp, Homo sapiens
atcacacttcattac

SEQ ID NO: 70777 - DNA, 15 bp, Homo sapiens
gatcacacttcatta

SEQ ID NO: 70778 - DNA, 15 bp, Homo sapiens
agatcacacttcatt

SEQ ID NO: 70779 - DNA, 15 bp, Homo sapiens
cagatcacacttcat

SEQ ID NO: 70780 - DNA, 15 bp, Homo sapiens
tcagatcacacttca

SEQ ID NO: 70781 - DNA, 15 bp, Homo sapiens
atcagatcacacttc

SEQ ID NO: 70782 - DNA, 15 bp, Homo sapiens
aatcagatcacactt

SEQ ID NO: 70783 - DNA, 15 bp, Homo sapiens
caatcagatcacact

SEQ ID NO: 70784 - DNA, 15 bp, Homo sapiens
ccaatcagatcacac

SEQ ID NO: 70785 - DNA, 15 bp, Homo sapiens
tccaatcagatcaca

SEQ ID NO: 70786 - DNA, 15 bp, Homo sapiens
atccaatcagatcac

SEQ ID NO: 70787 - DNA, 15 bp, Homo sapiens
gatccaatcagatca

SEQ ID NO: 70788 - DNA, 15 bp, Homo sapiens
agatccaatcagatc

SEQ ID NO: 70789 - DNA, 15 bp, Homo sapiens
aagatccaatcagat

SEQ ID NO: 70790 - DNA, 15 bp, Homo sapiens
caagatccaatcaga

SEQ ID NO: 70791 - DNA, 15 bp, Homo sapiens
gcaagatccaatcag

SEQ ID NO: 70792 - DNA, 15 bp, Homo sapiens
tgcaagatccaatca

SEQ ID NO: 70793 - DNA, 15 bp, Homo sapiens
ttgcaagatccaatc

SEQ ID NO: 70794 - DNA, 15 bp, Homo sapiens
attgcaagatccaat

SEQ ID NO: 70795 - DNA, 15 bp, Homo sapiens
cattgcaagatccaa

SEQ ID NO: 70796 - DNA, 15 bp, Homo sapiens
tcattgcaagatcca

SEQ ID NO: 70797 - DNA, 15 bp, Homo sapiens
ttcattgcaagatcc

SEQ ID NO: 70798 - DNA, 15 bp, Homo sapiens
cttcattgcaagatc

SEQ ID NO: 70799 - DNA, 15 bp, Homo sapiens
acttcattgcaagat

SEQ ID NO: 70800 - DNA, 15 bp, Homo sapiens
cacttcattgcaaga

SEQ ID NO: 70801 - DNA, 15 bp, Homo sapiens
tcacttcattgcaag

SEQ ID NO: 70802 - DNA, 15 bp, Homo sapiens
atcacttcattgcaa

SEQ ID NO: 70803 - DNA, 15 bp, Homo sapiens
catcacttcattgca

SEQ ID NO: 70804 - DNA, 15 bp, Homo sapiens
gcatcacttcattgc

SEQ ID NO: 70805 - DNA, 15 bp, Homo sapiens
ggcatcacttcattg

SEQ ID NO: 70806 - DNA, 15 bp, Homo sapiens
cggcatcacttcatt

SEQ ID NO: 70807 - DNA, 15 bp, Homo sapiens
ccggcatcacttcat

SEQ ID NO: 70808 - DNA, 15 bp, Homo sapiens
cccggcatcacttca

SEQ ID NO: 70809 - DNA, 15 bp, Homo sapiens
tcccggcatcacttc

SEQ ID NO: 70810 - DNA, 15 bp, Homo sapiens
ttcccggcatcactt

SEQ ID NO: 70811 - DNA, 15 bp, Homo sapiens
cttcccggcatcact

SEQ ID NO: 70812 - DNA, 15 bp, Homo sapiens
gcttcccggcatcac

SEQ ID NO: 70813 - DNA, 15 bp, Homo sapiens
tgcttcccggcatca

SEQ ID NO: 70814 - DNA, 15 bp, Homo sapiens
gtgcttcccggcatc

SEQ ID NO: 70815 - DNA, 15 bp, Homo sapiens
ggtgcttcccggcat

SEQ ID NO: 70816 - DNA, 15 bp, Homo sapiens
tggtgcttcccggca

SEQ ID NO: 70817 - DNA, 15 bp, Homo sapiens
atggtgcttcccggc

SEQ ID NO: 70818 - DNA, 15 bp, Homo sapiens
gatggtgcttcccgg

SEQ ID NO: 70819 - DNA, 15 bp, Homo sapiens
agatggtgcttcccg

SEQ ID NO: 70820 - DNA, 15 bp, Homo sapiens
cagatggtgcttccc

SEQ ID NO: 70821 - DNA, 15 bp, Homo sapiens
tcagatggtgcttcc

SEQ ID NO: 70822 - DNA, 15 bp, Homo sapiens
gtcagatggtgcttc

SEQ ID NO: 70823 - DNA, 15 bp, Homo sapiens
agtcagatggtgctt

SEQ ID NO: 70824 - DNA, 15 bp, Homo sapiens
cagtcagatggtgct

SEQ ID NO: 70825 - DNA, 15 bp, Homo sapiens
ccagtcagatggtgc

SEQ ID NO: 70826 - DNA, 15 bp, Homo sapiens
tccagtcagatggtg

SEQ ID NO: 70827 - DNA, 15 bp, Homo sapiens
atccagtcagatggt

SEQ ID NO: 70828 - DNA, 15 bp, Homo sapiens
gatccagtcagatgg

SEQ ID NO: 70829 - DNA, 15 bp, Homo sapiens
ggatccagtcagatg

SEQ ID NO: 70830 - DNA, 15 bp, Homo sapiens
aggatccagtcagat

SEQ ID NO: 70831 - DNA, 15 bp, Homo sapiens
caggatccagtcaga

SEQ ID NO: 70832 - DNA, 15 bp, Homo sapiens
gcaggatccagtcag

SEQ ID NO: 70833 - DNA, 15 bp, Homo sapiens
ggcaggatccagtca

SEQ ID NO: 70834 - DNA, 15 bp, Homo sapiens
tggcaggatccagtc

SEQ ID NO: 70835 - DNA, 15 bp, Homo sapiens
atggcaggatccagt

SEQ ID NO: 70836 - DNA, 15 bp, Homo sapiens
catggcaggatccag

SEQ ID NO: 70837 - DNA, 15 bp, Homo sapiens
ccatggcaggatcca

SEQ ID NO: 70838 - DNA, 15 bp, Homo sapiens
cccatggcaggatcc

SEQ ID NO: 70839 - DNA, 15 bp, Homo sapiens
ccccatggcaggatc

SEQ ID NO: 70840 - DNA, 15 bp, Homo sapiens
accccatggcaggat

SEQ ID NO: 70841 - DNA, 15 bp, Homo sapiens
caccccatggcagga

SEQ ID NO: 70842 - DNA, 15 bp, Homo sapiens
ccaccccatggcagg

SEQ ID NO: 70843 - DNA, 15 bp, Homo sapiens
accaccccatggcag

SEQ ID NO: 70844 - DNA, 15 bp, Homo sapiens
caccaccccatggca

SEQ ID NO: 70845 - DNA, 15 bp, Homo sapiens
acaccaccccatggc

SEQ ID NO: 70846 - DNA, 15 bp, Homo sapiens
gacaccaccccatgg

SEQ ID NO: 70847 - DNA, 15 bp, Homo sapiens
tgacaccaccccatg

SEQ ID NO: 70848 - DNA, 15 bp, Homo sapiens
ctgacaccaccccat

SEQ ID NO: 70849 - DNA, 15 bp, Homo sapiens
tctgacaccacccca

SEQ ID NO: 70850 - DNA, 15 bp, Homo sapiens
ctctgacaccacccc

SEQ ID NO: 70851 - DNA, 15 bp, Homo sapiens
gctctgacaccaccc

SEQ ID NO: 70852 - DNA, 15 bp, Homo sapiens
agctctgacaccacc

SEQ ID NO: 70853 - DNA, 15 bp, Homo sapiens
gagctctgacaccac

SEQ ID NO: 70854 - DNA, 15 bp, Homo sapiens
tgagctctgacacca

SEQ ID NO: 70855 - DNA, 15 bp, Homo sapiens
ttgagctctgacacc

SEQ ID NO: 70856 - DNA, 15 bp, Homo sapiens
attgagctctgacac

SEQ ID NO: 70857 - DNA, 15 bp, Homo sapiens
gattgagctctgaca

SEQ ID NO: 70858 - DNA, 15 bp, Homo sapiens
agattgagctctgac

SEQ ID NO: 70859 - DNA, 15 bp, Homo sapiens
cagattgagctctga

SEQ ID NO: 70860 - DNA, 15 bp, Homo sapiens
tcagattgagctctg

SEQ ID NO: 70861 - DNA, 15 bp, Homo sapiens
atcagattgagctct

SEQ ID NO: 70862 - DNA, 15 bp, Homo sapiens
aatcagattgagctc

SEQ ID NO: 70863 - DNA, 15 bp, Homo sapiens
caatcagattgagct

SEQ ID NO: 70864 - DNA, 15 bp, Homo sapiens
tcaatcagattgagc

SEQ ID NO: 70865 - DNA, 15 bp, Homo sapiens
ttcaatcagattgag

SEQ ID NO: 70866 - DNA, 15 bp, Homo sapiens
attcaatcagattga

SEQ ID NO: 70867 - DNA, 15 bp, Homo sapiens
gattcaatcagattg

SEQ ID NO: 70868 - DNA, 15 bp, Homo sapiens
ggattcaatcagatt

SEQ ID NO: 70869 - DNA, 15 bp, Homo sapiens
aggattcaatcagat

SEQ ID NO: 70870 - DNA, 15 bp, Homo sapiens
caggattcaatcaga

SEQ ID NO: 70871 - DNA, 15 bp, Homo sapiens
gcaggattcaatcag

SEQ ID NO: 70872 - DNA, 15 bp, Homo sapiens
tgcaggattcaatca

SEQ ID NO: 70873 - DNA, 15 bp, Homo sapiens
atgcaggattcaatc

SEQ ID NO: 70874 - DNA, 15 bp, Homo sapiens
gatgcaggattcaat

SEQ ID NO: 70875 - DNA, 15 bp, Homo sapiens
ggatgcaggattcaa

SEQ ID NO: 70876 - DNA, 15 bp, Homo sapiens
aggatgcaggattca

SEQ ID NO: 70877 - DNA, 15 bp, Homo sapiens
caggatgcaggattc

SEQ ID NO: 70878 - DNA, 15 bp, Homo sapiens
gcaggatgcaggatt

SEQ ID NO: 70879 - DNA, 15 bp, Homo sapiens
ggcaggatgcaggat

SEQ ID NO: 70880 - DNA, 15 bp, Homo sapiens
tggcaggatgcagga

SEQ ID NO: 70881 - DNA, 15 bp, Homo sapiens
atggcaggatgcagg

SEQ ID NO: 70882 - DNA, 15 bp, Homo sapiens
catggcaggatgcag

SEQ ID NO: 70883 - DNA, 15 bp, Homo sapiens
acatggcaggatgca

SEQ ID NO: 70884 - DNA, 15 bp, Homo sapiens
cacatggcaggatgc

SEQ ID NO: 70885 - DNA, 15 bp, Homo sapiens
ccacatggcaggatg

SEQ ID NO: 70886 - DNA, 15 bp, Homo sapiens
accacatggcaggat

SEQ ID NO: 70887 - DNA, 15 bp, Homo sapiens
caccacatggcagga

SEQ ID NO: 70888 - DNA, 15 bp, Homo sapiens
acaccacatggcagg

SEQ ID NO: 70889 - DNA, 15 bp, Homo sapiens
gacaccacatggcag

SEQ ID NO: 70890 - DNA, 15 bp, Homo sapiens
agacaccacatggca

SEQ ID NO: 70891 - DNA, 15 bp, Homo sapiens
cagacaccacatggc

SEQ ID NO: 70892 - DNA, 15 bp, Homo sapiens
gcagacaccacatgg

SEQ ID NO: 70893 - DNA, 15 bp, Homo sapiens
agcagacaccacatg

SEQ ID NO: 70894 - DNA, 15 bp, Homo sapiens
aagcagacaccacat

SEQ ID NO: 70895 - DNA, 15 bp, Homo sapiens
gaagcagacaccaca

SEQ ID NO: 70896 - DNA, 15 bp, Homo sapiens
agaagcagacaccac

SEQ ID NO: 70897 - DNA, 15 bp, Homo sapiens
aagaagcagacacca

SEQ ID NO: 70898 - DNA, 15 bp, Homo sapiens
taagaagcagacacc

SEQ ID NO: 70899 - DNA, 15 bp, Homo sapiens
ttaagaagcagacac

SEQ ID NO: 70900 - DNA, 15 bp, Homo sapiens
attaagaagcagaca

SEQ ID NO: 70901 - DNA, 15 bp, Homo sapiens
aattaagaagcagac

SEQ ID NO: 70902 - DNA, 15 bp, Homo sapiens
gaattaagaagcaga

SEQ ID NO: 70903 - DNA, 15 bp, Homo sapiens
tgaattaagaagcag

SEQ ID NO: 70904 - DNA, 15 bp, Homo sapiens
ctgaattaagaagca

SEQ ID NO: 70905 - DNA, 15 bp, Homo sapiens
actgaattaagaagc

SEQ ID NO: 70906 - DNA, 15 bp, Homo sapiens
gactgaattaagaag

SEQ ID NO: 70907 - DNA, 15 bp, Homo sapiens
ggactgaattaagaa

SEQ ID NO: 70908 - DNA, 15 bp, Homo sapiens
gggactgaattaaga

SEQ ID NO: 70909 - DNA, 15 bp, Homo sapiens
agggactgaattaag

SEQ ID NO: 70910 - DNA, 15 bp, Homo sapiens
cagggactgaattaa

SEQ ID NO: 70911 - DNA, 15 bp, Homo sapiens
tcagggactgaatta

SEQ ID NO: 70912 - DNA, 15 bp, Homo sapiens
atcagggactgaatt

SEQ ID NO: 70913 - DNA, 15 bp, Homo sapiens
aatcagggactgaat

SEQ ID NO: 70914 - DNA, 15 bp, Homo sapiens
gaatcagggactgaa

SEQ ID NO: 70915 - DNA, 15 bp, Homo sapiens
agaatcagggactga

SEQ ID NO: 70916 - DNA, 15 bp, Homo sapiens
aagaatcagggactg

SEQ ID NO: 70917 - DNA, 15 bp, Homo sapiens
caagaatcagggact

SEQ ID NO: 70918 - DNA, 15 bp, Homo sapiens
acaagaatcagggac

SEQ ID NO: 70919 - DNA, 15 bp, Homo sapiens
aacaagaatcaggga

SEQ ID NO: 70920 - DNA, 15 bp, Homo sapiens
aaacaagaatcaggg

SEQ ID NO: 70921 - DNA, 15 bp, Homo sapiens
gaaacaagaatcagg

SEQ ID NO: 70922 - DNA, 15 bp, Homo sapiens
cgaaacaagaatcag

SEQ ID NO: 70923 - DNA, 15 bp, Homo sapiens
ccgaaacaagaatca

SEQ ID NO: 70924 - DNA, 15 bp, Homo sapiens
tccgaaacaagaatc

SEQ ID NO: 70925 - DNA, 15 bp, Homo sapiens
ctccgaaacaagaat

SEQ ID NO: 70926 - DNA, 15 bp, Homo sapiens
gctccgaaacaagaa

SEQ ID NO: 70927 - DNA, 15 bp, Homo sapiens
tgctccgaaacaaga

SEQ ID NO: 70928 - DNA, 15 bp, Homo sapiens
gtgctccgaaacaag

SEQ ID NO: 70929 - DNA, 15 bp, Homo sapiens
agtgctccgaaacaa

SEQ ID NO: 70930 - DNA, 15 bp, Homo sapiens
aagtgctccgaaaca

SEQ ID NO: 70931 - DNA, 15 bp, Homo sapiens
taagtgctccgaaac

SEQ ID NO: 70932 - DNA, 15 bp, Homo sapiens
ctaagtgctccgaaa

SEQ ID NO: 70933 - DNA, 15 bp, Homo sapiens
cctaagtgctccgaa

SEQ ID NO: 70934 - DNA, 15 bp, Homo sapiens
acctaagtgctccga

SEQ ID NO: 70935 - DNA, 15 bp, Homo sapiens
aacctaagtgctccg

SEQ ID NO: 70936 - DNA, 15 bp, Homo sapiens
gaacctaagtgctcc

SEQ ID NO: 70937 - DNA, 15 bp, Homo sapiens
ggaacctaagtgctc

SEQ ID NO: 70938 - DNA, 15 bp, Homo sapiens
aggaacctaagtgct

SEQ ID NO: 70939 - DNA, 15 bp, Homo sapiens
caggaacctaagtgc

SEQ ID NO: 70940 - DNA, 15 bp, Homo sapiens
gcaggaacctaagtg

SEQ ID NO: 70941 - DNA, 15 bp, Homo sapiens
agcaggaacctaagt

SEQ ID NO: 70942 - DNA, 15 bp, Homo sapiens
tagcaggaacctaag

SEQ ID NO: 70943 - DNA, 15 bp, Homo sapiens
atagcaggaacctaa

SEQ ID NO: 70944 - DNA, 15 bp, Homo sapiens
catagcaggaaccta

SEQ ID NO: 70945 - DNA, 15 bp, Homo sapiens
ccatagcaggaacct

SEQ ID NO: 70946 - DNA, 15 bp, Homo sapiens
accatagcaggaacc

SEQ ID NO: 70947 - DNA, 15 bp, Homo sapiens
aaccatagcaggaac

SEQ ID NO: 70948 - DNA, 15 bp, Homo sapiens
caaccatagcaggaa

SEQ ID NO: 70949 - DNA, 15 bp, Homo sapiens
gcaaccatagcagga

SEQ ID NO: 70950 - DNA, 15 bp, Homo sapiens
tgcaaccatagcagg

SEQ ID NO: 70951 - DNA, 15 bp, Homo sapiens
atgcaaccatagcag

SEQ ID NO: 70952 - DNA, 15 bp, Homo sapiens
catgcaaccatagca

SEQ ID NO: 70953 - DNA, 15 bp, Homo sapiens
gcatgcaaccatagc

SEQ ID NO: 70954 - DNA, 15 bp, Homo sapiens
agcatgcaaccatag

SEQ ID NO: 70955 - DNA, 15 bp, Homo sapiens
aagcatgcaaccata

SEQ ID NO: 70956 - DNA, 15 bp, Homo sapiens
caagcatgcaaccat

SEQ ID NO: 70957 - DNA, 15 bp, Homo sapiens
tcaagcatgcaacca

SEQ ID NO: 70958 - DNA, 15 bp, Homo sapiens
atcaagcatgcaacc

SEQ ID NO: 70959 - DNA, 15 bp, Homo sapiens
aatcaagcatgcaac

SEQ ID NO: 70960 - DNA, 15 bp, Homo sapiens
gaatcaagcatgcaa

SEQ ID NO: 70961 - DNA, 15 bp, Homo sapiens
tgaatcaagcatgca

SEQ ID NO: 70962 - DNA, 15 bp, Homo sapiens
atgaatcaagcatgc

SEQ ID NO: 70963 - DNA, 15 bp, Homo sapiens
gatgaatcaagcatg

SEQ ID NO: 70964 - DNA, 15 bp, Homo sapiens
agatgaatcaagcat

SEQ ID NO: 70965 - DNA, 15 bp, Homo sapiens
cagatgaatcaagca

SEQ ID NO: 70966 - DNA, 15 bp, Homo sapiens
ccagatgaatcaagc

SEQ ID NO: 70967 - DNA, 15 bp, Homo sapiens
cccagatgaatcaag

SEQ ID NO: 70968 - DNA, 15 bp, Homo sapiens
ccccagatgaatcaa

SEQ ID NO: 70969 - DNA, 15 bp, Homo sapiens
gccccagatgaatca

SEQ ID NO: 70970 - DNA, 15 bp, Homo sapiens
agccccagatgaatc

SEQ ID NO: 70971 - DNA, 15 bp, Homo sapiens
cagccccagatgaat

SEQ ID NO: 70972 - DNA, 15 bp, Homo sapiens
gcagccccagatgaa

SEQ ID NO: 70973 - DNA, 15 bp, Homo sapiens
agcagccccagatga

SEQ ID NO: 70974 - DNA, 15 bp, Homo sapiens
gagcagccccagatg

SEQ ID NO: 70975 - DNA, 15 bp, Homo sapiens
tgagcagccccagat

SEQ ID NO: 70976 - DNA, 15 bp, Homo sapiens
ctgagcagccccaga

SEQ ID NO: 70977 - DNA, 15 bp, Homo sapiens
cctgagcagccccag

SEQ ID NO: 70978 - DNA, 15 bp, Homo sapiens
acctgagcagcccca

SEQ ID NO: 70979 - DNA, 15 bp, Homo sapiens
aacctgagcagcccc

SEQ ID NO: 70980 - DNA, 15 bp, Homo sapiens
taacctgagcagccc

SEQ ID NO: 70981 - DNA, 15 bp, Homo sapiens
ataacctgagcagcc

SEQ ID NO: 70982 - DNA, 15 bp, Homo sapiens
aataacctgagcagc

SEQ ID NO: 70983 - DNA, 15 bp, Homo sapiens
taataacctgagcag

SEQ ID NO: 70984 - DNA, 15 bp, Homo sapiens
ttaataacctgagca

SEQ ID NO: 70985 - DNA, 15 bp, Homo sapiens
gttaataacctgagc

SEQ ID NO: 70986 - DNA, 15 bp, Homo sapiens
tgttaataacctgag

SEQ ID NO: 70987 - DNA, 15 bp, Homo sapiens
atgttaataacctga

SEQ ID NO: 70988 - DNA, 15 bp, Homo sapiens
catgttaataacctg

SEQ ID NO: 70989 - DNA, 15 bp, Homo sapiens
tcatgttaataacct

SEQ ID NO: 70990 - DNA, 15 bp, Homo sapiens
gtcatgttaataacc

SEQ ID NO: 70991 - DNA, 15 bp, Homo sapiens
agtcatgttaataac

SEQ ID NO: 70992 - DNA, 15 bp, Homo sapiens
aagtcatgttaataa

SEQ ID NO: 70993 - DNA, 15 bp, Homo sapiens
caagtcatgttaata

SEQ ID NO: 70994 - DNA, 15 bp, Homo sapiens
tcaagtcatgttaat

SEQ ID NO: 70995 - DNA, 15 bp, Homo sapiens
ctcaagtcatgttaa

SEQ ID NO: 70996 - DNA, 15 bp, Homo sapiens
cctcaagtcatgtta

SEQ ID NO: 70997 - DNA, 15 bp, Homo sapiens
tcctcaagtcatgtt

SEQ ID NO: 70998 - DNA, 15 bp, Homo sapiens
atcctcaagtcatgt

SEQ ID NO: 70999 - DNA, 15 bp, Homo sapiens
gatcctcaagtcatg

SEQ ID NO: 71000 - DNA, 15 bp, Homo sapiens
ggatcctcaagtcat

SEQ ID NO: 71001 - DNA, 15 bp, Homo sapiens
cggatcctcaagtca

SEQ ID NO: 71002 - DNA, 15 bp, Homo sapiens
acggatcctcaagtc

SEQ ID NO: 71003 - DNA, 15 bp, Homo sapiens
cacggatcctcaagt

SEQ ID NO: 71004 - DNA, 15 bp, Homo sapiens
ccacggatcctcaag

SEQ ID NO: 71005 - DNA, 15 bp, Homo sapiens
gccacggatcctcaa

SEQ ID NO: 71006 - DNA, 15 bp, Homo sapiens
tgccacggatcctca

SEQ ID NO: 71007 - DNA, 15 bp, Homo sapiens
ttgccacggatcctc

SEQ ID NO: 71008 - DNA, 15 bp, Homo sapiens
gttgccacggatcct

SEQ ID NO: 71009 - DNA, 15 bp, Homo sapiens
agttgccacggatcc

SEQ ID NO: 71010 - DNA, 15 bp, Homo sapiens
cagttgccacggatc

SEQ ID NO: 71011 - DNA, 15 bp, Homo sapiens
acagttgccacggat

SEQ ID NO: 71012 - DNA, 15 bp, Homo sapiens
tacagttgccacgga

SEQ ID NO: 71013 - DNA, 15 bp, Homo sapiens
ttacagttgccacgg

SEQ ID NO: 71014 - DNA, 15 bp, Homo sapiens
tttacagttgccacg

SEQ ID NO: 71015 - DNA, 15 bp, Homo sapiens
ttttacagttgccac

SEQ ID NO: 71016 - DNA, 15 bp, Homo sapiens
gttttacagttgcca

SEQ ID NO: 71017 - DNA, 15 bp, Homo sapiens
tgttttacagttgcc

SEQ ID NO: 71018 - DNA, 15 bp, Homo sapiens
ttgttttacagttgc

SEQ ID NO: 71019 - DNA, 15 bp, Homo sapiens
gttgttttacagttg

SEQ ID NO: 71020 - DNA, 15 bp, Homo sapiens
agttgttttacagtt

SEQ ID NO: 71021 - DNA, 15 bp, Homo sapiens
gagttgttttacagt

SEQ ID NO: 71022 - DNA, 15 bp, Homo sapiens
tgagttgttttacag

SEQ ID NO: 71023 - DNA, 15 bp, Homo sapiens
atgagttgttttaca

SEQ ID NO: 71024 - DNA, 15 bp, Homo sapiens
tatgagttgttttac

SEQ ID NO: 71025 - DNA, 15 bp, Homo sapiens
ttatgagttgtttta

SEQ ID NO: 71026 - DNA, 15 bp, Homo sapiens
gttatgagttgtttt

SEQ ID NO: 71027 - DNA, 15 bp, Homo sapiens
agttatgagttgttt

SEQ ID NO: 71028 - DNA, 15 bp, Homo sapiens
aagttatgagttgtt

SEQ ID NO: 71029 - DNA, 15 bp, Homo sapiens
aaagttatgagttgt

SEQ ID NO: 71030 - DNA, 15 bp, Homo sapiens
caaagttatgagttg

SEQ ID NO: 71031 - DNA, 15 bp, Homo sapiens
gcaaagttatgagtt

SEQ ID NO: 71032 - DNA, 15 bp, Homo sapiens
agcaaagttatgagt

SEQ ID NO: 71033 - DNA, 15 bp, Homo sapiens
tagcaaagttatgag

SEQ ID NO: 71034 - DNA, 15 bp, Homo sapiens
gtagcaaagttatga

SEQ ID NO: 71035 - DNA, 15 bp, Homo sapiens
tgtagcaaagttatg

SEQ ID NO: 71036 - DNA, 15 bp, Homo sapiens
atgtagcaaagttat

SEQ ID NO: 71037 - DNA, 15 bp, Homo sapiens
tatgtagcaaagtta

SEQ ID NO: 71038 - DNA, 15 bp, Homo sapiens
ttatgtagcaaagtt

SEQ ID NO: 71039 - DNA, 15 bp, Homo sapiens
tttatgtagcaaagt

SEQ ID NO: 71040 - DNA, 15 bp, Homo sapiens
ttttatgtagcaaag

SEQ ID NO: 71041 - DNA, 15 bp, Homo sapiens
cttttatgtagcaaa

SEQ ID NO: 71042 - DNA, 15 bp, Homo sapiens
acttttatgtagcaa

SEQ ID NO: 71043 - DNA, 15 bp, Homo sapiens
aacttttatgtagca

SEQ ID NO: 71044 - DNA, 15 bp, Homo sapiens
caacttttatgtagc

SEQ ID NO: 71045 - DNA, 15 bp, Homo sapiens
tcaacttttatgtag

SEQ ID NO: 71046 - DNA, 15 bp, Homo sapiens
ttcaacttttatgta

SEQ ID NO: 71047 - DNA, 15 bp, Homo sapiens
gttcaacttttatgt

SEQ ID NO: 71048 - DNA, 15 bp, Homo sapiens
tgttcaacttttatg

SEQ ID NO: 71049 - DNA, 15 bp, Homo sapiens
atgttcaacttttat

SEQ ID NO: 71050 - DNA, 15 bp, Homo sapiens
catgttcaactttta

SEQ ID NO: 71051 - DNA, 15 bp, Homo sapiens
tcatgttcaactttt

SEQ ID NO: 71052 - DNA, 15 bp, Homo sapiens
atcatgttcaacttt

SEQ ID NO: 71053 - DNA, 15 bp, Homo sapiens
aatcatgttcaactt

SEQ ID NO: 71054 - DNA, 15 bp, Homo sapiens
caatcatgttcaact

SEQ ID NO: 71055 - DNA, 15 bp, Homo sapiens
ccaatcatgttcaac

SEQ ID NO: 71056 - DNA, 15 bp, Homo sapiens
accaatcatgttcaa

SEQ ID NO: 71057 - DNA, 15 bp, Homo sapiens
gaccaatcatgttca

SEQ ID NO: 71058 - DNA, 15 bp, Homo sapiens
agaccaatcatgttc

SEQ ID NO: 71059 - DNA, 15 bp, Homo sapiens
cagaccaatcatgtt

SEQ ID NO: 71060 - DNA, 15 bp, Homo sapiens
ccagaccaatcatgt

SEQ ID NO: 71061 - DNA, 15 bp, Homo sapiens
accagaccaatcatg

SEQ ID NO: 71062 - DNA, 15 bp, Homo sapiens
caccagaccaatcat

SEQ ID NO: 71063 - DNA, 15 bp, Homo sapiens
gcaccagaccaatca

SEQ ID NO: 71064 - DNA, 15 bp, Homo sapiens
tgcaccagaccaatc

SEQ ID NO: 71065 - DNA, 15 bp, Homo sapiens
ttgcaccagaccaat

SEQ ID NO: 71066 - DNA, 15 bp, Homo sapiens
attgcaccagaccaa

SEQ ID NO: 71067 - DNA, 15 bp, Homo sapiens
aattgcaccagacca

SEQ ID NO: 71068 - DNA, 15 bp, Homo sapiens
taattgcaccagacc

SEQ ID NO: 71069 - DNA, 15 bp, Homo sapiens
gtaattgcaccagac

SEQ ID NO: 71070 - DNA, 15 bp, Homo sapiens
tgtaattgcaccaga

SEQ ID NO: 71071 - DNA, 15 bp, Homo sapiens
atgtaattgcaccag

SEQ ID NO: 71072 - DNA, 15 bp, Homo sapiens
tatgtaattgcacca

SEQ ID NO: 71073 - DNA, 15 bp, Homo sapiens
gtatgtaattgcacc

SEQ ID NO: 71074 - DNA, 15 bp, Homo sapiens
tgtatgtaattgcac

SEQ ID NO: 71075 - DNA, 15 bp, Homo sapiens
atgtatgtaattgca

SEQ ID NO: 71076 - DNA, 15 bp, Homo sapiens
tatgtatgtaattgc

SEQ ID NO: 71077 - DNA, 15 bp, Homo sapiens
ttatgtatgtaattg

SEQ ID NO: 71078 - DNA, 15 bp, Homo sapiens
tttatgtatgtaatt

SEQ ID NO: 71079 - DNA, 15 bp, Homo sapiens
ctttatgtatgtaat

SEQ ID NO: 71080 - DNA, 15 bp, Homo sapiens
tctttatgtatgtaa

SEQ ID NO: 71081 - DNA, 15 bp, Homo sapiens
atctttatgtatgta

SEQ ID NO: 71082 - DNA, 15 bp, Homo sapiens
gatctttatgtatgt

SEQ ID NO: 71083 - DNA, 15 bp, Homo sapiens
tgatctttatgtatg

SEQ ID NO: 71084 - DNA, 15 bp, Homo sapiens
ttgatctttatgtat

SEQ ID NO: 71085 - DNA, 15 bp, Homo sapiens
tttgatctttatgta

SEQ ID NO: 71086 - DNA, 15 bp, Homo sapiens
ttttgatctttatgt

SEQ ID NO: 71087 - DNA, 15 bp, Homo sapiens
cttttgatctttatg

SEQ ID NO: 71088 - DNA, 15 bp, Homo sapiens
tcttttgatctttat

SEQ ID NO: 71089 - DNA, 15 bp, Homo sapiens
ctcttttgatcttta

SEQ ID NO: 71090 - DNA, 15 bp, Homo sapiens
tctcttttgatcttt

SEQ ID NO: 71091 - DNA, 15 bp, Homo sapiens
gtctcttttgatctt

SEQ ID NO: 71092 - DNA, 15 bp, Homo sapiens
ggtctcttttgatct

SEQ ID NO: 71093 - DNA, 15 bp, Homo sapiens
tggtctcttttgatc

SEQ ID NO: 71094 - DNA, 15 bp, Homo sapiens
atggtctcttttgat

SEQ ID NO: 71095 - DNA, 15 bp, Homo sapiens
tatggtctcttttga

SEQ ID NO: 71096 - DNA, 15 bp, Homo sapiens
ctatggtctcttttg

SEQ ID NO: 71097 - DNA, 15 bp, Homo sapiens
gctatggtctctttt

SEQ ID NO: 71098 - DNA, 15 bp, Homo sapiens
ggctatggtctcttt

SEQ ID NO: 71099 - DNA, 15 bp, Homo sapiens
aggctatggtctctt

SEQ ID NO: 71100 - DNA, 15 bp, Homo sapiens
aaggctatggtctct

SEQ ID NO: 71101 - DNA, 15 bp, Homo sapiens
aaaggctatggtctc

SEQ ID NO: 71102 - DNA, 15 bp, Homo sapiens
aaaaggctatggtct

SEQ ID NO: 71103 - DNA, 15 bp, Homo sapiens
aaaaaggctatggtc

SEQ ID NO: 71104 - DNA, 15 bp, Homo sapiens
aaaaaaggctatggt

SEQ ID NO: 71105 - DNA, 15 bp, Homo sapiens
gaaaaaaggctatgg

SEQ ID NO: 71106 - DNA, 15 bp, Homo sapiens
agaaaaaaggctatg

SEQ ID NO: 71107 - DNA, 15 bp, Homo sapiens
gagaaaaaaggctat

SEQ ID NO: 71108 - DNA, 15 bp, Homo sapiens
tgagaaaaaaggcta

SEQ ID NO: 71109 - DNA, 15 bp, Homo sapiens
ttgagaaaaaaggct

SEQ ID NO: 71110 - DNA, 15 bp, Homo sapiens
gttgagaaaaaaggc

SEQ ID NO: 71111 - DNA, 15 bp, Homo sapiens
ggttgagaaaaaagg

SEQ ID NO: 71112 - DNA, 15 bp, Homo sapiens
tggttgagaaaaaag

SEQ ID NO: 71113 - DNA, 15 bp, Homo sapiens
ctggttgagaaaaaa

SEQ ID NO: 71114 - DNA, 15 bp, Homo sapiens
cctggttgagaaaaa

SEQ ID NO: 71115 - DNA, 15 bp, Homo sapiens
ccctggttgagaaaa

SEQ ID NO: 71116 - DNA, 15 bp, Homo sapiens
accctggttgagaaa

SEQ ID NO: 71117 - DNA, 15 bp, Homo sapiens
aaccctggttgagaa

SEQ ID NO: 71118 - DNA, 15 bp, Homo sapiens
aaaccctggttgaga

SEQ ID NO: 71119 - DNA, 15 bp, Homo sapiens
gaaaccctggttgag

SEQ ID NO: 71120 - DNA, 15 bp, Homo sapiens
tgaaaccctggttga

SEQ ID NO: 71121 - DNA, 15 bp, Homo sapiens
gtgaaaccctggttg

SEQ ID NO: 71122 - DNA, 15 bp, Homo sapiens
cgtgaaaccctggtt

SEQ ID NO: 71123 - DNA, 15 bp, Homo sapiens
acgtgaaaccctggt

SEQ ID NO: 71124 - DNA, 15 bp, Homo sapiens
aacgtgaaaccctgg

SEQ ID NO: 71125 - DNA, 15 bp, Homo sapiens
aaacgtgaaaccctg

SEQ ID NO: 71126 - DNA, 15 bp, Homo sapiens
caaacgtgaaaccct

SEQ ID NO: 71127 - DNA, 15 bp, Homo sapiens
ccaaacgtgaaaccc

SEQ ID NO: 71128 - DNA, 15 bp, Homo sapiens
cccaaacgtgaaacc

SEQ ID NO: 71129 - DNA, 15 bp, Homo sapiens
tcccaaacgtgaaac

SEQ ID NO: 71130 - DNA, 15 bp, Homo sapiens
ttcccaaacgtgaaa

SEQ ID NO: 71131 - DNA, 15 bp, Homo sapiens
tttcccaaacgtgaa

SEQ ID NO: 71132 - DNA, 15 bp, Homo sapiens
ctttcccaaacgtga

SEQ ID NO: 71133 - DNA, 15 bp, Homo sapiens
gctttcccaaacgtg

SEQ ID NO: 71134 - DNA, 15 bp, Homo sapiens
agctttcccaaacgt

SEQ ID NO: 71135 - DNA, 15 bp, Homo sapiens
cagctttcccaaacg

SEQ ID NO: 71136 - DNA, 15 bp, Homo sapiens
ccagctttcccaaac

SEQ ID NO: 71137 - DNA, 15 bp, Homo sapiens
gccagctttcccaaa

SEQ ID NO: 71138 - DNA, 15 bp, Homo sapiens
cgccagctttcccaa

SEQ ID NO: 71139 - DNA, 15 bp, Homo sapiens
tcgccagctttccca

SEQ ID NO: 71140 - DNA, 15 bp, Homo sapiens
ctcgccagctttccc

SEQ ID NO: 71141 - DNA, 15 bp, Homo sapiens
tctcgccagctttcc

SEQ ID NO: 71142 - DNA, 15 bp, Homo sapiens
atctcgccagctttc

SEQ ID NO: 71143 - DNA, 15 bp, Homo sapiens
gatctcgccagcttt

SEQ ID NO: 71144 - DNA, 15 bp, Homo sapiens
ggatctcgccagctt

SEQ ID NO: 71145 - DNA, 15 bp, Homo sapiens
aggatctcgccagct

SEQ ID NO: 71146 - DNA, 15 bp, Homo sapiens
gaggatctcgccagc

SEQ ID NO: 71147 - DNA, 15 bp, Homo sapiens
tgaggatctcgccag

SEQ ID NO: 71148 - DNA, 15 bp, Homo sapiens
gtgaggatctcgcca

SEQ ID NO: 71149 - DNA, 15 bp, Homo sapiens
ggtgaggatctcgcc

SEQ ID NO: 71150 - DNA, 15 bp, Homo sapiens
tggtgaggatctcgc

SEQ ID NO: 71151 - DNA, 15 bp, Homo sapiens
ctggtgaggatctcg

SEQ ID NO: 71152 - DNA, 15 bp, Homo sapiens
tctggtgaggatctc

SEQ ID NO: 71153 - DNA, 15 bp, Homo sapiens
ttctggtgaggatct

SEQ ID NO: 71154 - DNA, 15 bp, Homo sapiens
cttctggtgaggatc

SEQ ID NO: 71155 - DNA, 15 bp, Homo sapiens
tcttctggtgaggat

SEQ ID NO: 71156 - DNA, 15 bp, Homo sapiens
gtcttctggtgagga

SEQ ID NO: 71157 - DNA, 15 bp, Homo sapiens
agtcttctggtgagg

SEQ ID NO: 71158 - DNA, 15 bp, Homo sapiens
cagtcttctggtgag

SEQ ID NO: 71159 - DNA, 15 bp, Homo sapiens
gcagtcttctggtga

SEQ ID NO: 71160 - DNA, 15 bp, Homo sapiens
cgcagtcttctggtg

SEQ ID NO: 71161 - DNA, 15 bp, Homo sapiens
ccgcagtcttctggt

SEQ ID NO: 71162 - DNA, 15 bp, Homo sapiens
accgcagtcttctgg

SEQ ID NO: 71163 - DNA, 15 bp, Homo sapiens
gaccgcagtcttctg

SEQ ID NO: 71164 - DNA, 15 bp, Homo sapiens
tgaccgcagtcttct

SEQ ID NO: 71165 - DNA, 15 bp, Homo sapiens
ttgaccgcagtcttc

SEQ ID NO: 71166 - DNA, 15 bp, Homo sapiens
attgaccgcagtctt

SEQ ID NO: 71167 - DNA, 15 bp, Homo sapiens
cattgaccgcagtct

SEQ ID NO: 71168 - DNA, 15 bp, Homo sapiens
ccattgaccgcagtc

SEQ ID NO: 71169 - DNA, 15 bp, Homo sapiens
gccattgaccgcagt

SEQ ID NO: 71170 - DNA, 15 bp, Homo sapiens
agccattgaccgcag

SEQ ID NO: 71171 - DNA, 15 bp, Homo sapiens
aagccattgaccgca

SEQ ID NO: 71172 - DNA, 15 bp, Homo sapiens
aaagccattgaccgc

SEQ ID NO: 71173 - DNA, 15 bp, Homo sapiens
aaaagccattgaccg

SEQ ID NO: 71174 - DNA, 15 bp, Homo sapiens
taaaagccattgacc

SEQ ID NO: 71175 - DNA, 15 bp, Homo sapiens
ttaaaagccattgac

SEQ ID NO: 71176 - DNA, 15 bp, Homo sapiens
tttaaaagccattga

SEQ ID NO: 71177 - DNA, 15 bp, Homo sapiens
ctttaaaagccattg

SEQ ID NO: 71178 - DNA, 15 bp, Homo sapiens
gctttaaaagccatt

SEQ ID NO: 71179 - DNA, 15 bp, Homo sapiens
tgctttaaaagccat

SEQ ID NO: 71180 - DNA, 15 bp, Homo sapiens
ttgctttaaaagcca

SEQ ID NO: 71181 - DNA, 15 bp, Homo sapiens
attgctttaaaagcc

SEQ ID NO: 71182 - DNA, 15 bp, Homo sapiens
cattgctttaaaagc

SEQ ID NO: 71183 - DNA, 15 bp, Homo sapiens
gcattgctttaaaag

SEQ ID NO: 71184 - DNA, 15 bp, Homo sapiens
agcattgctttaaaa

SEQ ID NO: 71185 - DNA, 15 bp, Homo sapiens
tagcattgctttaaa

SEQ ID NO: 71186 - DNA, 15 bp, Homo sapiens
ttagcattgctttaa

SEQ ID NO: 71187 - DNA, 15 bp, Homo sapiens
cttagcattgcttta

SEQ ID NO: 71188 - DNA, 15 bp, Homo sapiens
tcttagcattgcttt

SEQ ID NO: 71189 - DNA, 15 bp, Homo sapiens
gtcttagcattgctt

SEQ ID NO: 71190 - DNA, 15 bp, Homo sapiens
tgtcttagcattgct

SEQ ID NO: 71191 - DNA, 15 bp, Homo sapiens
ctgtcttagcattgc

SEQ ID NO: 71192 - DNA, 15 bp, Homo sapiens
cctgtcttagcattg

SEQ ID NO: 71193 - DNA, 15 bp, Homo sapiens
acctgtcttagcatt

SEQ ID NO: 71194 - DNA, 15 bp, Homo sapiens
tacctgtcttagcat

SEQ ID NO: 71195 - DNA, 15 bp, Homo sapiens
ctacctgtcttagca

SEQ ID NO: 71196 - DNA, 15 bp, Homo sapiens
cctacctgtcttagc

SEQ ID NO: 71197 - DNA, 15 bp, Homo sapiens
tcctacctgtcttag

SEQ ID NO: 71198 - DNA, 15 bp, Homo sapiens
ctcctacctgtctta

SEQ ID NO: 71199 - DNA, 15 bp, Homo sapiens
actcctacctgtctt

SEQ ID NO: 71200 - DNA, 15 bp, Homo sapiens
cactcctacctgtct

SEQ ID NO: 71201 - DNA, 15 bp, Homo sapiens
acactcctacctgtc

SEQ ID NO: 71202 - DNA, 15 bp, Homo sapiens
cacactcctacctgt

SEQ ID NO: 71203 - DNA, 15 bp, Homo sapiens
gcacactcctacctg

SEQ ID NO: 71204 - DNA, 15 bp, Homo sapiens
cgcacactcctacct

SEQ ID NO: 71205 - DNA, 15 bp, Homo sapiens
gcgcacactcctacc

SEQ ID NO: 71206 - DNA, 15 bp, Homo sapiens
agcgcacactcctac

SEQ ID NO: 71207 - DNA, 15 bp, Homo sapiens
cagcgcacactccta

SEQ ID NO: 71208 - DNA, 15 bp, Homo sapiens
ccagcgcacactcct

SEQ ID NO: 71209 - DNA, 15 bp, Homo sapiens
tccagcgcacactcc

SEQ ID NO: 71210 - DNA, 15 bp, Homo sapiens
ctccagcgcacactc

SEQ ID NO: 71211 - DNA, 15 bp, Homo sapiens
tctccagcgcacact

SEQ ID NO: 71212 - DNA, 15 bp, Homo sapiens
ttctccagcgcacac

SEQ ID NO: 71213 - DNA, 15 bp, Homo sapiens
attctccagcgcaca

SEQ ID NO: 71214 - DNA, 15 bp, Homo sapiens
cattctccagcgcac

SEQ ID NO: 71215 - DNA, 15 bp, Homo sapiens
gcattctccagcgca

SEQ ID NO: 71216 - DNA, 15 bp, Homo sapiens
ggcattctccagcgc

SEQ ID NO: 71217 - DNA, 15 bp, Homo sapiens
aggcattctccagcg

SEQ ID NO: 71218 - DNA, 15 bp, Homo sapiens
aaggcattctccagc

SEQ ID NO: 71219 - DNA, 15 bp, Homo sapiens
gaaggcattctccag

SEQ ID NO: 71220 - DNA, 15 bp, Homo sapiens
agaaggcattctcca

SEQ ID NO: 71221 - DNA, 15 bp, Homo sapiens
cagaaggcattctcc

SEQ ID NO: 71222 - DNA, 15 bp, Homo sapiens
tcagaaggcattctc

SEQ ID NO: 71223 - DNA, 15 bp, Homo sapiens
atcagaaggcattct

SEQ ID NO: 71224 - DNA, 15 bp, Homo sapiens
gatcagaaggcattc

SEQ ID NO: 71225 - DNA, 15 bp, Homo sapiens
agatcagaaggcatt

SEQ ID NO: 71226 - DNA, 15 bp, Homo sapiens
aagatcagaaggcat

SEQ ID NO: 71227 - DNA, 15 bp, Homo sapiens
aaagatcagaaggca

SEQ ID NO: 71228 - DNA, 15 bp, Homo sapiens
gaaagatcagaaggc

SEQ ID NO: 71229 - DNA, 15 bp, Homo sapiens
tgaaagatcagaagg

SEQ ID NO: 71230 - DNA, 15 bp, Homo sapiens
gtgaaagatcagaag

SEQ ID NO: 71231 - DNA, 15 bp, Homo sapiens
tgtgaaagatcagaa

SEQ ID NO: 71232 - DNA, 15 bp, Homo sapiens
atgtgaaagatcaga

SEQ ID NO: 71233 - DNA, 15 bp, Homo sapiens
aatgtgaaagatcag

SEQ ID NO: 71234 - DNA, 15 bp, Homo sapiens
aaatgtgaaagatca

SEQ ID NO: 71235 - DNA, 15 bp, Homo sapiens
gaaatgtgaaagatc

SEQ ID NO: 71236 - DNA, 15 bp, Homo sapiens
agaaatgtgaaagat

SEQ ID NO: 71237 - DNA, 15 bp, Homo sapiens
aagaaatgtgaaaga

SEQ ID NO: 71238 - DNA, 15 bp, Homo sapiens
gaagaaatgtgaaag

SEQ ID NO: 71239 - DNA, 15 bp, Homo sapiens
ggaagaaatgtgaaa

SEQ ID NO: 71240 - DNA, 15 bp, Homo sapiens
tggaagaaatgtgaa

SEQ ID NO: 71241 - DNA, 15 bp, Homo sapiens
atggaagaaatgtga

SEQ ID NO: 71242 - DNA, 15 bp, Homo sapiens
tatggaagaaatgtg

SEQ ID NO: 71243 - DNA, 15 bp, Homo sapiens
atatggaagaaatgt

SEQ ID NO: 71244 - DNA, 15 bp, Homo sapiens
aatatggaagaaatg

SEQ ID NO: 71245 - DNA, 15 bp, Homo sapiens
taatatggaagaaat

SEQ ID NO: 71246 - DNA, 15 bp, Homo sapiens
ttaatatggaagaaa

SEQ ID NO: 71247 - DNA, 15 bp, Homo sapiens
cttaatatggaagaa

SEQ ID NO: 71248 - DNA, 15 bp, Homo sapiens
gcttaatatggaaga

SEQ ID NO: 71249 - DNA, 15 bp, Homo sapiens
agcttaatatggaag

SEQ ID NO: 71250 - DNA, 15 bp, Homo sapiens
aagcttaatatggaa

SEQ ID NO: 71251 - DNA, 15 bp, Homo sapiens
gaagcttaatatgga

SEQ ID NO: 71252 - DNA, 15 bp, Homo sapiens
agaagcttaatatgg

SEQ ID NO: 71253 - DNA, 15 bp, Homo sapiens
aagaagcttaatatg

SEQ ID NO: 71254 - DNA, 15 bp, Homo sapiens
taagaagcttaatat

SEQ ID NO: 71255 - DNA, 15 bp, Homo sapiens
gtaagaagcttaata

SEQ ID NO: 71256 - DNA, 15 bp, Homo sapiens
agtaagaagcttaat

SEQ ID NO: 71257 - DNA, 15 bp, Homo sapiens
cagtaagaagcttaa

SEQ ID NO: 71258 - DNA, 15 bp, Homo sapiens
acagtaagaagctta

SEQ ID NO: 71259 - DNA, 15 bp, Homo sapiens
aacagtaagaagctt

SEQ ID NO: 71260 - DNA, 15 bp, Homo sapiens
gaacagtaagaagct

SEQ ID NO: 71261 - DNA, 15 bp, Homo sapiens
agaacagtaagaagc

SEQ ID NO: 71262 - DNA, 15 bp, Homo sapiens
aagaacagtaagaag

SEQ ID NO: 71263 - DNA, 15 bp, Homo sapiens
taagaacagtaagaa

SEQ ID NO: 71264 - DNA, 15 bp, Homo sapiens
ataagaacagtaaga

SEQ ID NO: 71265 - DNA, 15 bp, Homo sapiens
aataagaacagtaag

SEQ ID NO: 71266 - DNA, 15 bp, Homo sapiens
caataagaacagtaa

SEQ ID NO: 71267 - DNA, 15 bp, Homo sapiens
acaataagaacagta

SEQ ID NO: 71268 - DNA, 15 bp, Homo sapiens
aacaataagaacagt

SEQ ID NO: 71269 - DNA, 15 bp, Homo sapiens
taacaataagaacag

SEQ ID NO: 71270 - DNA, 15 bp, Homo sapiens
ataacaataagaaca

SEQ ID NO: 71271 - DNA, 15 bp, Homo sapiens
cataacaataagaac

SEQ ID NO: 71272 - DNA, 15 bp, Homo sapiens
acataacaataagaa

SEQ ID NO: 71273 - DNA, 15 bp, Homo sapiens
gacataacaataaga

SEQ ID NO: 71274 - DNA, 15 bp, Homo sapiens
cgacataacaataag

SEQ ID NO: 71275 - DNA, 15 bp, Homo sapiens
tcgacataacaataa

SEQ ID NO: 71276 - DNA, 15 bp, Homo sapiens
atcgacataacaata

SEQ ID NO: 71277 - DNA, 15 bp, Homo sapiens
tatcgacataacaat

SEQ ID NO: 71278 - DNA, 15 bp, Homo sapiens
atatcgacataacaa

SEQ ID NO: 71279 - DNA, 15 bp, Homo sapiens
catatcgacataaca

SEQ ID NO: 71280 - DNA, 15 bp, Homo sapiens
gcatatcgacataac

SEQ ID NO: 71281 - DNA, 15 bp, Homo sapiens
tgcatatcgacataa

SEQ ID NO: 71282 - DNA, 15 bp, Homo sapiens
atgcatatcgacata

SEQ ID NO: 71283 - DNA, 15 bp, Homo sapiens
catgcatatcgacat

SEQ ID NO: 71284 - DNA, 15 bp, Homo sapiens
acatgcatatcgaca

SEQ ID NO: 71285 - DNA, 15 bp, Homo sapiens
aacatgcatatcgac

SEQ ID NO: 71286 - DNA, 15 bp, Homo sapiens
aaacatgcatatcga

SEQ ID NO: 71287 - DNA, 15 bp, Homo sapiens
aaaacatgcatatcg

SEQ ID NO: 71288 - DNA, 15 bp, Homo sapiens
gaaaacatgcatatc

SEQ ID NO: 71289 - DNA, 15 bp, Homo sapiens
ggaaaacatgcatat

SEQ ID NO: 71290 - DNA, 15 bp, Homo sapiens
gggaaaacatgcata

SEQ ID NO: 71291 - DNA, 15 bp, Homo sapiens
ggggaaaacatgcat

SEQ ID NO: 71292 - DNA, 15 bp, Homo sapiens
gggggaaaacatgca

SEQ ID NO: 71293 - DNA, 15 bp, Homo sapiens
ggggggaaaacatgc

SEQ ID NO: 71294 - DNA, 15 bp, Homo sapiens
tggggggaaaacatg

SEQ ID NO: 71295 - DNA, 15 bp, Homo sapiens
ctggggggaaaacat

SEQ ID NO: 71296 - DNA, 15 bp, Homo sapiens
cctggggggaaaaca

SEQ ID NO: 71297 - DNA, 15 bp, Homo sapiens
ccctggggggaaaac

SEQ ID NO: 71298 - DNA, 15 bp, Homo sapiens
accctggggggaaaa

SEQ ID NO: 71299 - DNA, 15 bp, Homo sapiens
taccctggggggaaa

SEQ ID NO: 71300 - DNA, 15 bp, Homo sapiens
ataccctggggggaa

SEQ ID NO: 71301 - DNA, 15 bp, Homo sapiens
aataccctgggggga

SEQ ID NO: 71302 - DNA, 15 bp, Homo sapiens
gaataccctgggggg

SEQ ID NO: 71303 - DNA, 15 bp, Homo sapiens
tgaataccctggggg

SEQ ID NO: 71304 - DNA, 15 bp, Homo sapiens
gtgaataccctgggg

SEQ ID NO: 71305 - DNA, 15 bp, Homo sapiens
cgtgaataccctggg

SEQ ID NO: 71306 - DNA, 15 bp, Homo sapiens
gcgtgaataccctgg

SEQ ID NO: 71307 - DNA, 15 bp, Homo sapiens
tgcgtgaataccctg

SEQ ID NO: 71308 - DNA, 15 bp, Homo sapiens
ttgcgtgaataccct

SEQ ID NO: 71309 - DNA, 15 bp, Homo sapiens
cttgcgtgaataccc

SEQ ID NO: 71310 - DNA, 15 bp, Homo sapiens
ccttgcgtgaatacc

SEQ ID NO: 71311 - DNA, 15 bp, Homo sapiens
tccttgcgtgaatac

SEQ ID NO: 71312 - DNA, 15 bp, Homo sapiens
atccttgcgtgaata

SEQ ID NO: 71313 - DNA, 15 bp, Homo sapiens
catccttgcgtgaat

SEQ ID NO: 71314 - DNA, 15 bp, Homo sapiens
ccatccttgcgtgaa

SEQ ID NO: 71315 - DNA, 15 bp, Homo sapiens
cccatccttgcgtga

SEQ ID NO: 71316 - DNA, 15 bp, Homo sapiens
ccccatccttgcgtg

SEQ ID NO: 71317 - DNA, 15 bp, Homo sapiens
gccccatccttgcgt

SEQ ID NO: 71318 - DNA, 15 bp, Homo sapiens
tgccccatccttgcg

SEQ ID NO: 71319 - DNA, 15 bp, Homo sapiens
ctgccccatccttgc

SEQ ID NO: 71320 - DNA, 15 bp, Homo sapiens
tctgccccatccttg

SEQ ID NO: 71321 - DNA, 15 bp, Homo sapiens
ctctgccccatcctt

SEQ ID NO: 71322 - DNA, 15 bp, Homo sapiens
actctgccccatcct

SEQ ID NO: 71323 - DNA, 15 bp, Homo sapiens
gactctgccccatcc

SEQ ID NO: 71324 - DNA, 15 bp, Homo sapiens
ggactctgccccatc

SEQ ID NO: 71325 - DNA, 15 bp, Homo sapiens
aggactctgccccat

SEQ ID NO: 71326 - DNA, 15 bp, Homo sapiens
caggactctgcccca

SEQ ID NO: 71327 - DNA, 15 bp, Homo sapiens
gcaggactctgcccc

SEQ ID NO: 71328 - DNA, 15 bp, Homo sapiens
tgcaggactctgccc

SEQ ID NO: 71329 - DNA, 15 bp, Homo sapiens
ttgcaggactctgcc

SEQ ID NO: 71330 - DNA, 15 bp, Homo sapiens
tttgcaggactctgc

SEQ ID NO: 71331 - DNA, 15 bp, Homo sapiens
atttgcaggactctg

SEQ ID NO: 71332 - DNA, 15 bp, Homo sapiens
aatttgcaggactct

SEQ ID NO: 71333 - DNA, 15 bp, Homo sapiens
caatttgcaggactc

SEQ ID NO: 71334 - DNA, 15 bp, Homo sapiens
acaatttgcaggact

SEQ ID NO: 71335 - DNA, 15 bp, Homo sapiens
gacaatttgcaggac

SEQ ID NO: 71336 - DNA, 15 bp, Homo sapiens
ggacaatttgcagga

SEQ ID NO: 71337 - DNA, 15 bp, Homo sapiens
aggacaatttgcagg

SEQ ID NO: 71338 - DNA, 15 bp, Homo sapiens
caggacaatttgcag

SEQ ID NO: 71339 - DNA, 15 bp, Homo sapiens
ccaggacaatttgca

SEQ ID NO: 71340 - DNA, 15 bp, Homo sapiens
accaggacaatttgc

SEQ ID NO: 71341 - DNA, 15 bp, Homo sapiens
gaccaggacaatttg

SEQ ID NO: 71342 - DNA, 15 bp, Homo sapiens
ggaccaggacaattt

SEQ ID NO: 71343 - DNA, 15 bp, Homo sapiens
aggaccaggacaatt

SEQ ID NO: 71344 - DNA, 15 bp, Homo sapiens
aaggaccaggacaat

SEQ ID NO: 71345 - DNA, 15 bp, Homo sapiens
gaaggaccaggacaa

SEQ ID NO: 71346 - DNA, 15 bp, Homo sapiens
tgaaggaccaggaca

SEQ ID NO: 71347 - DNA, 15 bp, Homo sapiens
ttgaaggaccaggac

SEQ ID NO: 71348 - DNA, 15 bp, Homo sapiens
cttgaaggaccagga

SEQ ID NO: 71349 - DNA, 15 bp, Homo sapiens
tcttgaaggaccagg

SEQ ID NO: 71350 - DNA, 15 bp, Homo sapiens
ctcttgaaggaccag

SEQ ID NO: 71351 - DNA, 15 bp, Homo sapiens
gctcttgaaggacca

SEQ ID NO: 71352 - DNA, 15 bp, Homo sapiens
agctcttgaaggacc

SEQ ID NO: 71353 - DNA, 15 bp, Homo sapiens
tagctcttgaaggac

SEQ ID NO: 71354 - DNA, 15 bp, Homo sapiens
ttagctcttgaagga

SEQ ID NO: 71355 - DNA, 15 bp, Homo sapiens
tttagctcttgaagg

SEQ ID NO: 71356 - DNA, 15 bp, Homo sapiens
ctttagctcttgaag

SEQ ID NO: 71357 - DNA, 15 bp, Homo sapiens
tctttagctcttgaa

SEQ ID NO: 71358 - DNA, 15 bp, Homo sapiens
gtctttagctcttga

SEQ ID NO: 71359 - DNA, 15 bp, Homo sapiens
agtctttagctcttg

SEQ ID NO: 71360 - DNA, 15 bp, Homo sapiens
aagtctttagctctt

SEQ ID NO: 71361 - DNA, 15 bp, Homo sapiens
gaagtctttagctct

SEQ ID NO: 71362 - DNA, 15 bp, Homo sapiens
agaagtctttagctc

SEQ ID NO: 71363 - DNA, 15 bp, Homo sapiens
gagaagtctttagct

SEQ ID NO: 71364 - DNA, 15 bp, Homo sapiens
tgagaagtctttagc

SEQ ID NO: 71365 - DNA, 15 bp, Homo sapiens
atgagaagtctttag

SEQ ID NO: 71366 - DNA, 15 bp, Homo sapiens
catgagaagtcttta

SEQ ID NO: 71367 - DNA, 15 bp, Homo sapiens
acatgagaagtcttt

SEQ ID NO: 71368 - DNA, 15 bp, Homo sapiens
aacatgagaagtctt

SEQ ID NO: 71369 - DNA, 15 bp, Homo sapiens
aaacatgagaagtct

SEQ ID NO: 71370 - DNA, 15 bp, Homo sapiens
aaaacatgagaagtc

SEQ ID NO: 71371 - DNA, 15 bp, Homo sapiens
aaaaacatgagaagt

SEQ ID NO: 71372 - DNA, 15 bp, Homo sapiens
aaaaaacatgagaag

SEQ ID NO: 71373 - DNA, 15 bp, Homo sapiens
aaaaaaacatgagaa

SEQ ID NO: 71374 - DNA, 15 bp, Homo sapiens
aaaaaaaacatgaga

SEQ ID NO: 71375 - DNA, 15 bp, Homo sapiens
caaaaaaaacatgag

SEQ ID NO: 71376 - DNA, 15 bp, Homo sapiens
acaaaaaaaacatga

SEQ ID NO: 71377 - DNA, 15 bp, Homo sapiens
aacaaaaaaaacatg

SEQ ID NO: 71378 - DNA, 15 bp, Homo sapiens
aaacaaaaaaaacat

SEQ ID NO: 71379 - DNA, 15 bp, Homo sapiens
aaaacaaaaaaaaca

SEQ ID NO: 71380 - DNA, 15 bp, Homo sapiens
aaaaacaaaaaaaac

SEQ ID NO: 71381 - DNA, 15 bp, Homo sapiens
aaaaaacaaaaaaaa

SEQ ID NO: 71382 - DNA, 15 bp, Homo sapiens
aaaaaaacaaaaaaa

SEQ ID NO: 71383 - DNA, 15 bp, Homo sapiens
aaaaaaaaaacaaaa

SEQ ID NO: 71384 - DNA, 15 bp, Homo sapiens
caaaaaaaaaacaaa

SEQ ID NO: 71385 - DNA, 15 bp, Homo sapiens
acaaaaaaaaaacaa

SEQ ID NO: 71386 - DNA, 15 bp, Homo sapiens
aacaaaaaaaaaaca

SEQ ID NO: 71387 - DNA, 15 bp, Homo sapiens
aaacaaaaaaaaaac

SEQ ID NO: 71388 - DNA, 15 bp, Homo sapiens
aaaacaaaaaaaaaa

SEQ ID NO: 71389 - DNA, 15 bp, Homo sapiens
aaaaacaaaaaaaaa

SEQ ID NO: 71390 - DNA, 15 bp, Homo sapiens
caaaaacaaaaaaaa

SEQ ID NO: 71391 - DNA, 15 bp, Homo sapiens
acaaaaacaaaaaaa

SEQ ID NO: 71392 - DNA, 15 bp, Homo sapiens
aacaaaaacaaaaaa

SEQ ID NO: 71393 - DNA, 15 bp, Homo sapiens
aaacaaaaacaaaaa

SEQ ID NO: 71394 - DNA, 15 bp, Homo sapiens
aaaacaaaaacaaaa

SEQ ID NO: 71395 - DNA, 15 bp, Homo sapiens
aaaaacaaaaacaaa

SEQ ID NO: 71396 - DNA, 15 bp, Homo sapiens
aaaaaacaaaaacaa

SEQ ID NO: 71397 - DNA, 15 bp, Homo sapiens
aaaaaaacaaaaaca

SEQ ID NO: 71398 - DNA, 15 bp, Homo sapiens
aaaaaaaacaaaaac

SEQ ID NO: 71399 - DNA, 15 bp, Homo sapiens
gaaaaaaaacaaaaa

SEQ ID NO: 71400 - DNA, 15 bp, Homo sapiens
tgaaaaaaaacaaaa

SEQ ID NO: 71401 - DNA, 15 bp, Homo sapiens
atgaaaaaaaacaaa

SEQ ID NO: 71402 - DNA, 15 bp, Homo sapiens
tatgaaaaaaaacaa

SEQ ID NO: 71403 - DNA, 15 bp, Homo sapiens
ctatgaaaaaaaaca

SEQ ID NO: 71404 - DNA, 15 bp, Homo sapiens
tctatgaaaaaaaac

SEQ ID NO: 71405 - DNA, 15 bp, Homo sapiens
ttctatgaaaaaaaa

SEQ ID NO: 71406 - DNA, 15 bp, Homo sapiens
tttctatgaaaaaaa

SEQ ID NO: 71407 - DNA, 15 bp, Homo sapiens
atttctatgaaaaaa

SEQ ID NO: 71408 - DNA, 15 bp, Homo sapiens
tatttctatgaaaaa

SEQ ID NO: 71409 - DNA, 15 bp, Homo sapiens
ctatttctatgaaaa

SEQ ID NO: 71410 - DNA, 15 bp, Homo sapiens
cctatttctatgaaa

SEQ ID NO: 71411 - DNA, 15 bp, Homo sapiens
gcctatttctatgaa

SEQ ID NO: 71412 - DNA, 15 bp, Homo sapiens
agcctatttctatga

SEQ ID NO: 71413 - DNA, 15 bp, Homo sapiens
aagcctatttctatg

SEQ ID NO: 71414 - DNA, 15 bp, Homo sapiens
aaagcctatttctat

SEQ ID NO: 71415 - DNA, 15 bp, Homo sapiens
taaagcctatttcta

SEQ ID NO: 71416 - DNA, 15 bp, Homo sapiens
ataaagcctatttct

SEQ ID NO: 71417 - DNA, 15 bp, Homo sapiens
aataaagcctatttc

SEQ ID NO: 71418 - DNA, 15 bp, Homo sapiens
aaataaagcctattt

SEQ ID NO: 71419 - DNA, 15 bp, Homo sapiens
caaataaagcctatt

SEQ ID NO: 71420 - DNA, 15 bp, Homo sapiens
ccaaataaagcctat

SEQ ID NO: 71421 - DNA, 15 bp, Homo sapiens
cccaaataaagccta

SEQ ID NO: 71422 - DNA, 15 bp, Homo sapiens
acccaaataaagcct

SEQ ID NO: 71423 - DNA, 15 bp, Homo sapiens
tacccaaataaagcc

SEQ ID NO: 71424 - DNA, 15 bp, Homo sapiens
ctacccaaataaagc

SEQ ID NO: 71425 - DNA, 15 bp, Homo sapiens
gctacccaaataaag

SEQ ID NO: 71426 - DNA, 15 bp, Homo sapiens
agctacccaaataaa

SEQ ID NO: 71427 - DNA, 15 bp, Homo sapiens
aagctacccaaataa

SEQ ID NO: 71428 - DNA, 15 bp, Homo sapiens
aaagctacccaaata

SEQ ID NO: 71429 - DNA, 15 bp, Homo sapiens
caaagctacccaaat

SEQ ID NO: 71430 - DNA, 15 bp, Homo sapiens
ccaaagctacccaaa

SEQ ID NO: 71431 - DNA, 15 bp, Homo sapiens
gccaaagctacccaa

SEQ ID NO: 71432 - DNA, 15 bp, Homo sapiens
agccaaagctaccca

SEQ ID NO: 71433 - DNA, 15 bp, Homo sapiens
aagccaaagctaccc

SEQ ID NO: 71434 - DNA, 15 bp, Homo sapiens
taagccaaagctacc

SEQ ID NO: 71435 - DNA, 15 bp, Homo sapiens
ataagccaaagctac

SEQ ID NO: 71436 - DNA, 15 bp, Homo sapiens
aataagccaaagcta

SEQ ID NO: 71437 - DNA, 15 bp, Homo sapiens
gaataagccaaagct

SEQ ID NO: 71438 - DNA, 15 bp, Homo sapiens
agaataagccaaagc

SEQ ID NO: 71439 - DNA, 15 bp, Homo sapiens
cagaataagccaaag

SEQ ID NO: 71440 - DNA, 15 bp, Homo sapiens
acagaataagccaaa

SEQ ID NO: 71441 - DNA, 15 bp, Homo sapiens
tacagaataagccaa

SEQ ID NO: 71442 - DNA, 15 bp, Homo sapiens
ttacagaataagcca

SEQ ID NO: 71443 - DNA, 15 bp, Homo sapiens
tttacagaataagcc

SEQ ID NO: 71444 - DNA, 15 bp, Homo sapiens
atttacagaataagc

SEQ ID NO: 71445 - DNA, 15 bp, Homo sapiens
tatttacagaataag

SEQ ID NO: 71446 - DNA, 15 bp, Homo sapiens
atatttacagaataa

SEQ ID NO: 71447 - DNA, 15 bp, Homo sapiens
gatatttacagaata

SEQ ID NO: 71448 - DNA, 15 bp, Homo sapiens
agatatttacagaat

SEQ ID NO: 71449 - DNA, 15 bp, Homo sapiens
gagatatttacagaa

SEQ ID NO: 71450 - DNA, 15 bp, Homo sapiens
agagatatttacaga

SEQ ID NO: 71451 - DNA, 15 bp, Homo sapiens
gagagatatttacag

SEQ ID NO: 71452 - DNA, 15 bp, Homo sapiens
agagagatatttaca

SEQ ID NO: 71453 - DNA, 15 bp, Homo sapiens
gagagagatatttac

SEQ ID NO: 71454 - DNA, 15 bp, Homo sapiens
ggagagagatattta

SEQ ID NO: 71455 - DNA, 15 bp, Homo sapiens
tggagagagatattt

SEQ ID NO: 71456 - DNA, 15 bp, Homo sapiens
atggagagagatatt

SEQ ID NO: 71457 - DNA, 15 bp, Homo sapiens
catggagagagatat

SEQ ID NO: 71458 - DNA, 15 bp, Homo sapiens
acatggagagagata

SEQ ID NO: 71459 - DNA, 15 bp, Homo sapiens
tacatggagagagat

SEQ ID NO: 71460 - DNA, 15 bp, Homo sapiens
ctacatggagagaga

SEQ ID NO: 71461 - DNA, 15 bp, Homo sapiens
tctacatggagagag

SEQ ID NO: 71462 - DNA, 15 bp, Homo sapiens
gtctacatggagaga

SEQ ID NO: 71463 - DNA, 15 bp, Homo sapiens
tgtctacatggagag

SEQ ID NO: 71464 - DNA, 15 bp, Homo sapiens
gtgtctacatggaga

SEQ ID NO: 71465 - DNA, 15 bp, Homo sapiens
agtgtctacatggag

SEQ ID NO: 71466 - DNA, 15 bp, Homo sapiens
tagtgtctacatgga

SEQ ID NO: 71467 - DNA, 15 bp, Homo sapiens
atagtgtctacatgg

SEQ ID NO: 71468 - DNA, 15 bp, Homo sapiens
gatagtgtctacatg

SEQ ID NO: 71469 - DNA, 15 bp, Homo sapiens
tgatagtgtctacat

SEQ ID NO: 71470 - DNA, 15 bp, Homo sapiens
atgatagtgtctaca

SEQ ID NO: 71471 - DNA, 15 bp, Homo sapiens
aatgatagtgtctac

SEQ ID NO: 71472 - DNA, 15 bp, Homo sapiens
aaatgatagtgtcta

SEQ ID NO: 71473 - DNA, 15 bp, Homo sapiens
gaaatgatagtgtct

SEQ ID NO: 71474 - DNA, 15 bp, Homo sapiens
cgaaatgatagtgtc

SEQ ID NO: 71475 - DNA, 15 bp, Homo sapiens
tcgaaatgatagtgt

SEQ ID NO: 71476 - DNA, 15 bp, Homo sapiens
ttcgaaatgatagtg

SEQ ID NO: 71477 - DNA, 15 bp, Homo sapiens
cttcgaaatgatagt

SEQ ID NO: 71478 - DNA, 15 bp, Homo sapiens
tcttcgaaatgatag

SEQ ID NO: 71479 - DNA, 15 bp, Homo sapiens
gtcttcgaaatgata

SEQ ID NO: 71480 - DNA, 15 bp, Homo sapiens
ggtcttcgaaatgat

SEQ ID NO: 71481 - DNA, 15 bp, Homo sapiens
aggtcttcgaaatga

SEQ ID NO: 71482 - DNA, 15 bp, Homo sapiens
caggtcttcgaaatg

SEQ ID NO: 71483 - DNA, 15 bp, Homo sapiens
acaggtcttcgaaat

SEQ ID NO: 71484 - DNA, 15 bp, Homo sapiens
tacaggtcttcgaaa

SEQ ID NO: 71485 - DNA, 15 bp, Homo sapiens
atacaggtcttcgaa

SEQ ID NO: 71486 - DNA, 15 bp, Homo sapiens
gatacaggtcttcga

SEQ ID NO: 71487 - DNA, 15 bp, Homo sapiens
agatacaggtcttcg

SEQ ID NO: 71488 - DNA, 15 bp, Homo sapiens
gagatacaggtcttc

SEQ ID NO: 71489 - DNA, 15 bp, Homo sapiens
agagatacaggtctt

SEQ ID NO: 71490 - DNA, 15 bp, Homo sapiens
aagagatacaggtct

SEQ ID NO: 71491 - DNA, 15 bp, Homo sapiens
aaagagatacaggtc

SEQ ID NO: 71492 - DNA, 15 bp, Homo sapiens
gaaaagagatacagg

SEQ ID NO: 71493 - DNA, 15 bp, Homo sapiens
agaaaagagatacag

SEQ ID NO: 71494 - DNA, 15 bp, Homo sapiens
cagaaaagagataca

SEQ ID NO: 71495 - DNA, 15 bp, Homo sapiens
ccagaaaagagatac

SEQ ID NO: 71496 - DNA, 15 bp, Homo sapiens
tccagaaaagagata

SEQ ID NO: 71497 - DNA, 15 bp, Homo sapiens
atccagaaaagagat

SEQ ID NO: 71498 - DNA, 15 bp, Homo sapiens
gatccagaaaagaga

SEQ ID NO: 71499 - DNA, 15 bp, Homo sapiens
ggatccagaaaagag

SEQ ID NO: 71500 - DNA, 15 bp, Homo sapiens
aggatccagaaaaga

SEQ ID NO: 71501 - DNA, 15 bp, Homo sapiens
caggatccagaaaag

SEQ ID NO: 71502 - DNA, 15 bp, Homo sapiens
acaggatccagaaaa

SEQ ID NO: 71503 - DNA, 15 bp, Homo sapiens
cacaggatccagaaa

SEQ ID NO: 71504 - DNA, 15 bp, Homo sapiens
gcacaggatccagaa

SEQ ID NO: 71505 - DNA, 15 bp, Homo sapiens
tgcacaggatccaga

SEQ ID NO: 71506 - DNA, 15 bp, Homo sapiens
ctgcacaggatccag

SEQ ID NO: 71507 - DNA, 15 bp, Homo sapiens
cctgcacaggatcca

SEQ ID NO: 71508 - DNA, 15 bp, Homo sapiens
gcctgcacaggatcc

SEQ ID NO: 71509 - DNA, 15 bp, Homo sapiens
ggcctgcacaggatc

SEQ ID NO: 71510 - DNA, 15 bp, Homo sapiens
gggcctgcacaggat

SEQ ID NO: 71511 - DNA, 15 bp, Homo sapiens
agggcctgcacagga

SEQ ID NO: 71512 - DNA, 15 bp, Homo sapiens
cagggcctgcacagg

SEQ ID NO: 71513 - DNA, 15 bp, Homo sapiens
ccagggcctgcacag

SEQ ID NO: 71514 - DNA, 15 bp, Homo sapiens
accagggcctgcaca

SEQ ID NO: 71515 - DNA, 15 bp, Homo sapiens
caccagggcctgcac

SEQ ID NO: 71516 - DNA, 15 bp, Homo sapiens
tcaccagggcctgca

SEQ ID NO: 71517 - DNA, 15 bp, Homo sapiens
ctcaccagggcctgc

SEQ ID NO: 71518 - DNA, 15 bp, Homo sapiens
actcaccagggcctg

SEQ ID NO: 71519 - DNA, 15 bp, Homo sapiens
gactcaccagggcct

SEQ ID NO: 71520 - DNA, 15 bp, Homo sapiens
ggactcaccagggcc

SEQ ID NO: 71521 - DNA, 15 bp, Homo sapiens
tggactcaccagggc

SEQ ID NO: 71522 - DNA, 15 bp, Homo sapiens
atggactcaccaggg

SEQ ID NO: 71523 - DNA, 15 bp, Homo sapiens
aatggactcaccagg

SEQ ID NO: 71524 - DNA, 15 bp, Homo sapiens
caatggactcaccag

SEQ ID NO: 71525 - DNA, 15 bp, Homo sapiens
tcaatggactcacca

SEQ ID NO: 71526 - DNA, 15 bp, Homo sapiens
ctcaatggactcacc

SEQ ID NO: 71527 - DNA, 15 bp, Homo sapiens
tctcaatggactcac

SEQ ID NO: 71528 - DNA, 15 bp, Homo sapiens
gtctcaatggactca

SEQ ID NO: 71529 - DNA, 15 bp, Homo sapiens
agtctcaatggactc

SEQ ID NO: 71530 - DNA, 15 bp, Homo sapiens
gagtctcaatggact

SEQ ID NO: 71531 - DNA, 15 bp, Homo sapiens
ggagtctcaatggac

SEQ ID NO: 71532 - DNA, 15 bp, Homo sapiens
tggagtctcaatgga

SEQ ID NO: 71533 - DNA, 15 bp, Homo sapiens
ctggagtctcaatgg

SEQ ID NO: 71534 - DNA, 15 bp, Homo sapiens
cctggagtctcaatg

SEQ ID NO: 71535 - DNA, 15 bp, Homo sapiens
tcctggagtctcaat

SEQ ID NO: 71536 - DNA, 15 bp, Homo sapiens
atcctggagtctcaa

SEQ ID NO: 71537 - DNA, 15 bp, Homo sapiens
catcctggagtctca

SEQ ID NO: 71538 - DNA, 15 bp, Homo sapiens
acatcctggagtctc

SEQ ID NO: 71539 - DNA, 15 bp, Homo sapiens
gacatcctggagtct

SEQ ID NO: 71540 - DNA, 15 bp, Homo sapiens
agacatcctggagtc

SEQ ID NO: 71541 - DNA, 15 bp, Homo sapiens
aagacatcctggagt

SEQ ID NO: 71542 - DNA, 15 bp, Homo sapiens
aaagacatcctggag

SEQ ID NO: 71543 - DNA, 15 bp, Homo sapiens
taaagacatcctgga

SEQ ID NO: 71544 - DNA, 15 bp, Homo sapiens
ttaaagacatcctgg

SEQ ID NO: 71545 - DNA, 15 bp, Homo sapiens
tttaaagacatcctg

SEQ ID NO: 71546 - DNA, 15 bp, Homo sapiens
gtttaaagacatcct

SEQ ID NO: 71547 - DNA, 15 bp, Homo sapiens
ggtttaaagacatcc

SEQ ID NO: 71548 - DNA, 15 bp, Homo sapiens
tggtttaaagacatc

SEQ ID NO: 71549 - DNA, 15 bp, Homo sapiens
ttggtttaaagacat

SEQ ID NO: 71550 - DNA, 15 bp, Homo sapiens
cttggtttaaagaca

SEQ ID NO: 71551 - DNA, 15 bp, Homo sapiens
tcttggtttaaagac

SEQ ID NO: 71552 - DNA, 15 bp, Homo sapiens
ttcttggtttaaaga

SEQ ID NO: 71553 - DNA, 15 bp, Homo sapiens
tttcttggtttaaag

SEQ ID NO: 71554 - DNA, 15 bp, Homo sapiens
ttttcttggtttaaa

SEQ ID NO: 71555 - DNA, 15 bp, Homo sapiens
tttttcttggtttaa

SEQ ID NO: 71556 - DNA, 15 bp, Homo sapiens
gtttttcttggttta

SEQ ID NO: 71557 - DNA, 15 bp, Homo sapiens
ggtttttcttggttt

SEQ ID NO: 71558 - DNA, 15 bp, Homo sapiens
aggtttttcttggtt

SEQ ID NO: 71559 - DNA, 15 bp, Homo sapiens
taggtttttcttggt

SEQ ID NO: 71560 - DNA, 15 bp, Homo sapiens
ctaggtttttcttgg

SEQ ID NO: 71561 - DNA, 15 bp, Homo sapiens
actaggtttttcttg

SEQ ID NO: 71562 - DNA, 15 bp, Homo sapiens
aactaggtttttctt

SEQ ID NO: 71563 - DNA, 15 bp, Homo sapiens
caactaggtttttct

SEQ ID NO: 71564 - DNA, 15 bp, Homo sapiens
tcaactaggtttttc

SEQ ID NO: 71565 - DNA, 15 bp, Homo sapiens
atcaactaggttttt

SEQ ID NO: 71566 - DNA, 15 bp, Homo sapiens
tatcaactaggtttt

SEQ ID NO: 71567 - DNA, 15 bp, Homo sapiens
ctatcaactaggttt

SEQ ID NO: 71568 - DNA, 15 bp, Homo sapiens
gctatcaactaggtt

SEQ ID NO: 71569 - DNA, 15 bp, Homo sapiens
tgctatcaactaggt

SEQ ID NO: 71570 - DNA, 15 bp, Homo sapiens
atgctatcaactagg

SEQ ID NO: 71571 - DNA, 15 bp, Homo sapiens
aatgctatcaactag

SEQ ID NO: 71572 - DNA, 15 bp, Homo sapiens
aaatgctatcaacta

SEQ ID NO: 71573 - DNA, 15 bp, Homo sapiens
taaatgctatcaact

SEQ ID NO: 71574 - DNA, 15 bp, Homo sapiens
ttaaatgctatcaac

SEQ ID NO: 71575 - DNA, 15 bp, Homo sapiens
attaaatgctatcaa

SEQ ID NO: 71576 - DNA, 15 bp, Homo sapiens
gattaaatgctatca

SEQ ID NO: 71577 - DNA, 15 bp, Homo sapiens
agattaaatgctatc

SEQ ID NO: 71578 - DNA, 15 bp, Homo sapiens
gagattaaatgctat

SEQ ID NO: 71579 - DNA, 15 bp, Homo sapiens
tgagattaaatgcta

SEQ ID NO: 71580 - DNA, 15 bp, Homo sapiens
atgagattaaatgct

SEQ ID NO: 71581 - DNA, 15 bp, Homo sapiens
catgagattaaatgc

SEQ ID NO: 71582 - DNA, 15 bp, Homo sapiens
acatgagattaaatg

SEQ ID NO: 71583 - DNA, 15 bp, Homo sapiens
tacatgagattaaat

SEQ ID NO: 71584 - DNA, 15 bp, Homo sapiens
gtacatgagattaaa

SEQ ID NO: 71585 - DNA, 15 bp, Homo sapiens
ggtacatgagattaa

SEQ ID NO: 71586 - DNA, 15 bp, Homo sapiens
tggtacatgagatta

SEQ ID NO: 71587 - DNA, 15 bp, Homo sapiens
gtggtacatgagatt

SEQ ID NO: 71588 - DNA, 15 bp, Homo sapiens
tgtggtacatgagat

SEQ ID NO: 71589 - DNA, 15 bp, Homo sapiens
ttgtggtacatgaga

SEQ ID NO: 71590 - DNA, 15 bp, Homo sapiens
attgtggtacatgag

SEQ ID NO: 71591 - DNA, 15 bp, Homo sapiens
gattgtggtacatga

SEQ ID NO: 71592 - DNA, 15 bp, Homo sapiens
agattgtggtacatg

SEQ ID NO: 71593 - DNA, 15 bp, Homo sapiens
tagattgtggtacat

SEQ ID NO: 71594 - DNA, 15 bp, Homo sapiens
gtagattgtggtaca

SEQ ID NO: 71595 - DNA, 15 bp, Homo sapiens
ggtagattgtggtac

SEQ ID NO: 71596 - DNA, 15 bp, Homo sapiens
tggtagattgtggta

SEQ ID NO: 71597 - DNA, 15 bp, Homo sapiens
atggtagattgtggt

SEQ ID NO: 71598 - DNA, 15 bp, Homo sapiens
tatggtagattgtgg

SEQ ID NO: 71599 - DNA, 15 bp, Homo sapiens
gtatggtagattgtg

SEQ ID NO: 71600 - DNA, 15 bp, Homo sapiens
agtatggtagattgt

SEQ ID NO: 71601 - DNA, 15 bp, Homo sapiens
tagtatggtagattg

SEQ ID NO: 71602 - DNA, 15 bp, Homo sapiens
ttagtatggtagatt

SEQ ID NO: 71603 - DNA, 15 bp, Homo sapiens
gttagtatggtagat

SEQ ID NO: 71604 - DNA, 15 bp, Homo sapiens
agttagtatggtaga

SEQ ID NO: 71605 - DNA, 15 bp, Homo sapiens
cagttagtatggtag

SEQ ID NO: 71606 - DNA, 15 bp, Homo sapiens
acagttagtatggta

SEQ ID NO: 71607 - DNA, 15 bp, Homo sapiens
tacagttagtatggt

SEQ ID NO: 71608 - DNA, 15 bp, Homo sapiens
ctacagttagtatgg

SEQ ID NO: 71609 - DNA, 15 bp, Homo sapiens
cctacagttagtatg

SEQ ID NO: 71610 - DNA, 15 bp, Homo sapiens
acctacagttagtat

SEQ ID NO: 71611 - DNA, 15 bp, Homo sapiens
tacctacagttagta

SEQ ID NO: 71612 - DNA, 15 bp, Homo sapiens
atacctacagttagt

SEQ ID NO: 71613 - DNA, 15 bp, Homo sapiens
gatacctacagttag

SEQ ID NO: 71614 - DNA, 15 bp, Homo sapiens
ggatacctacagtta

SEQ ID NO: 71615 - DNA, 15 bp, Homo sapiens
aggatacctacagtt

SEQ ID NO: 71616 - DNA, 15 bp, Homo sapiens
gaggatacctacagt

SEQ ID NO: 71617 - DNA, 15 bp, Homo sapiens
tgaggatacctacag

SEQ ID NO: 71618 - DNA, 15 bp, Homo sapiens
ttgaggatacctaca

SEQ ID NO: 71619 - DNA, 15 bp, Homo sapiens
tttgaggatacctac

SEQ ID NO: 71620 - DNA, 15 bp, Homo sapiens
atttgaggataccta

SEQ ID NO: 71621 - DNA, 15 bp, Homo sapiens
catttgaggatacct

SEQ ID NO: 71622 - DNA, 15 bp, Homo sapiens
acatttgaggatacc

SEQ ID NO: 71623 - DNA, 15 bp, Homo sapiens
aacatttgaggatac

SEQ ID NO: 71624 - DNA, 15 bp, Homo sapiens
taacatttgaggata

SEQ ID NO: 71625 - DNA, 15 bp, Homo sapiens
ttaacatttgaggat

SEQ ID NO: 71626 - DNA, 15 bp, Homo sapiens
attaacatttgagga

SEQ ID NO: 71627 - DNA, 15 bp, Homo sapiens
tattaacatttgagg

SEQ ID NO: 71628 - DNA, 15 bp, Homo sapiens
ttattaacatttgag

SEQ ID NO: 71629 - DNA, 15 bp, Homo sapiens
attattaacatttga

SEQ ID NO: 71630 - DNA, 15 bp, Homo sapiens
aattattaacatttg

SEQ ID NO: 71631 - DNA, 15 bp, Homo sapiens
caattattaacattt

SEQ ID NO: 71632 - DNA, 15 bp, Homo sapiens
tcaattattaacatt

SEQ ID NO: 71633 - DNA, 15 bp, Homo sapiens
ctcaattattaacat

SEQ ID NO: 71634 - DNA, 15 bp, Homo sapiens
actcaattattaaca

SEQ ID NO: 71635 - DNA, 15 bp, Homo sapiens
aactcaattattaac

SEQ ID NO: 71636 - DNA, 15 bp, Homo sapiens
aaactcaattattaa

SEQ ID NO: 71637 - DNA, 15 bp, Homo sapiens
aaaactcaattatta

SEQ ID NO: 71638 - DNA, 15 bp, Homo sapiens
caaaactcaattatt

SEQ ID NO: 71639 - DNA, 15 bp, Homo sapiens
acaaaactcaattat

SEQ ID NO: 71640 - DNA, 15 bp, Homo sapiens
aacaaaactcaatta

SEQ ID NO: 71641 - DNA, 15 bp, Homo sapiens
aaacaaaactcaatt

SEQ ID NO: 71642 - DNA, 15 bp, Homo sapiens
taaacaaaactcaat

SEQ ID NO: 71643 - DNA, 15 bp, Homo sapiens
ataaacaaaactcaa

SEQ ID NO: 71644 - DNA, 15 bp, Homo sapiens
aataaacaaaactca

SEQ ID NO: 71645 - DNA, 15 bp, Homo sapiens
aaataaacaaaactc

SEQ ID NO: 71646 - DNA, 15 bp, Homo sapiens
gaaataaacaaaact

SEQ ID NO: 71647 - DNA, 15 bp, Homo sapiens
agaaataaacaaaac

SEQ ID NO: 71648 - DNA, 15 bp, Homo sapiens
aagaaataaacaaaa

SEQ ID NO: 71649 - DNA, 15 bp, Homo sapiens
taagaaataaacaaa

SEQ ID NO: 71650 - DNA, 15 bp, Homo sapiens
ataagaaataaacaa

SEQ ID NO: 71651 - DNA, 15 bp, Homo sapiens
aataagaaataaaca

SEQ ID NO: 71652 - DNA, 15 bp, Homo sapiens
aaataagaaataaac

SEQ ID NO: 71653 - DNA, 15 bp, Homo sapiens
caaataagaaataaa

SEQ ID NO: 71654 - DNA, 15 bp, Homo sapiens
tcaaataagaaataa

SEQ ID NO: 71655 - DNA, 15 bp, Homo sapiens
ctcaaataagaaata

SEQ ID NO: 71656 - DNA, 15 bp, Homo sapiens
cctcaaataagaaat

SEQ ID NO: 71657 - DNA, 15 bp, Homo sapiens
acctcaaataagaaa

SEQ ID NO: 71658 - DNA, 15 bp, Homo sapiens
gacctcaaataagaa

SEQ ID NO: 71659 - DNA, 15 bp, Homo sapiens
agacctcaaataaga

SEQ ID NO: 71660 - DNA, 15 bp, Homo sapiens
tagacctcaaataag

SEQ ID NO: 71661 - DNA, 15 bp, Homo sapiens
atagacctcaaataa

SEQ ID NO: 71662 - DNA, 15 bp, Homo sapiens
aatagacctcaaata

SEQ ID NO: 71663 - DNA, 15 bp, Homo sapiens
aaatagacctcaaat

SEQ ID NO: 71664 - DNA, 15 bp, Homo sapiens
aaaatagacctcaaa

SEQ ID NO: 71665 - DNA, 15 bp, Homo sapiens
gaaaatagacctcaa

SEQ ID NO: 71666 - DNA, 15 bp, Homo sapiens
tgaaaatagacctca

SEQ ID NO: 71667 - DNA, 15 bp, Homo sapiens
gtgaaaatagacctc

SEQ ID NO: 71668 - DNA, 15 bp, Homo sapiens
tgtgaaaatagacct

SEQ ID NO: 71669 - DNA, 15 bp, Homo sapiens
atgtgaaaatagacc

SEQ ID NO: 71670 - DNA, 15 bp, Homo sapiens
aatgtgaaaatagac

SEQ ID NO: 71671 - DNA, 15 bp, Homo sapiens
taatgtgaaaataga

SEQ ID NO: 71672 - DNA, 15 bp, Homo sapiens
ttaatgtgaaaatag

SEQ ID NO: 71673 - DNA, 15 bp, Homo sapiens
attaatgtgaaaata

SEQ ID NO: 71674 - DNA, 15 bp, Homo sapiens
aattaatgtgaaaat

SEQ ID NO: 71675 - DNA, 15 bp, Homo sapiens
gaattaatgtgaaaa

SEQ ID NO: 71676 - DNA, 15 bp, Homo sapiens
tgaattaatgtgaaa

SEQ ID NO: 71677 - DNA, 15 bp, Homo sapiens
gtgaattaatgtgaa

SEQ ID NO: 71678 - DNA, 15 bp, Homo sapiens
agtgaattaatgtga

SEQ ID NO: 71679 - DNA, 15 bp, Homo sapiens
aagtgaattaatgtg

SEQ ID NO: 71680 - DNA, 15 bp, Homo sapiens
caagtgaattaatgt

SEQ ID NO: 71681 - DNA, 15 bp, Homo sapiens
acaagtgaattaatg

SEQ ID NO: 71682 - DNA, 15 bp, Homo sapiens
aacaagtgaattaat

SEQ ID NO: 71683 - DNA, 15 bp, Homo sapiens
aaacaagtgaattaa

SEQ ID NO: 71684 - DNA, 15 bp, Homo sapiens
caaacaagtgaatta

SEQ ID NO: 71685 - DNA, 15 bp, Homo sapiens
acaaacaagtgaatt

SEQ ID NO: 71686 - DNA, 15 bp, Homo sapiens
aacaaacaagtgaat

SEQ ID NO: 71687 - DNA, 15 bp, Homo sapiens
aaacaaacaagtgaa

SEQ ID NO: 71688 - DNA, 15 bp, Homo sapiens
taaacaaacaagtga

SEQ ID NO: 71689 - DNA, 15 bp, Homo sapiens
ataaacaaacaagtg

SEQ ID NO: 71690 - DNA, 15 bp, Homo sapiens
aataaacaaacaagt

SEQ ID NO: 71691 - DNA, 15 bp, Homo sapiens
gaataaacaaacaag

SEQ ID NO: 71692 - DNA, 15 bp, Homo sapiens
tgaataaacaaacaa

SEQ ID NO: 71693 - DNA, 15 bp, Homo sapiens
ttgaataaacaaaca

SEQ ID NO: 71694 - DNA, 15 bp, Homo sapiens
tttgaataaacaaac

SEQ ID NO: 71695 - DNA, 15 bp, Homo sapiens
gtttgaataaacaaa

SEQ ID NO: 71696 - DNA, 15 bp, Homo sapiens
tgtttgaataaacaa

SEQ ID NO: 71697 - DNA, 15 bp, Homo sapiens
atgtttgaataaaca

SEQ ID NO: 71698 - DNA, 15 bp, Homo sapiens
aatgtttgaataaac

SEQ ID NO: 71699 - DNA, 15 bp, Homo sapiens
taatgtttgaataaa

SEQ ID NO: 71700 - DNA, 15 bp, Homo sapiens
gtaatgtttgaataa

SEQ ID NO: 71701 - DNA, 15 bp, Homo sapiens
agtaatgtttgaata

SEQ ID NO: 71702 - DNA, 15 bp, Homo sapiens
aagtaatgtttgaat

SEQ ID NO: 71703 - DNA, 15 bp, Homo sapiens
taagtaatgtttgaa

SEQ ID NO: 71704 - DNA, 15 bp, Homo sapiens
ataagtaatgtttga

SEQ ID NO: 71705 - DNA, 15 bp, Homo sapiens
gataagtaatgtttg

SEQ ID NO: 71706 - DNA, 15 bp, Homo sapiens
tgataagtaatgttt

SEQ ID NO: 71707 - DNA, 15 bp, Homo sapiens
atgataagtaatgtt

SEQ ID NO: 71708 - DNA, 15 bp, Homo sapiens
catgataagtaatgt

SEQ ID NO: 71709 - DNA, 15 bp, Homo sapiens
acatgataagtaatg

SEQ ID NO: 71710 - DNA, 15 bp, Homo sapiens
tacatgataagtaat

SEQ ID NO: 71711 - DNA, 15 bp, Homo sapiens
gtacatgataagtaa

SEQ ID NO: 71712 - DNA, 15 bp, Homo sapiens
ggtacatgataagta

SEQ ID NO: 71713 - DNA, 15 bp, Homo sapiens
tggtacatgataagt

SEQ ID NO: 71714 - DNA, 15 bp, Homo sapiens
ctggtacatgataag

SEQ ID NO: 71715 - DNA, 15 bp, Homo sapiens
tctggtacatgataa

SEQ ID NO: 71716 - DNA, 15 bp, Homo sapiens
gtctggtacatgata

SEQ ID NO: 71717 - DNA, 15 bp, Homo sapiens
tgtctggtacatgat

SEQ ID NO: 71718 - DNA, 15 bp, Homo sapiens
gtgtctggtacatga

SEQ ID NO: 71719 - DNA, 15 bp, Homo sapiens
agtgtctggtacatg

SEQ ID NO: 71720 - DNA, 15 bp, Homo sapiens
cagtgtctggtacat

SEQ ID NO: 71721 - DNA, 15 bp, Homo sapiens
acagtgtctggtaca

SEQ ID NO: 71722 - DNA, 15 bp, Homo sapiens
cacagtgtctggtac

SEQ ID NO: 71723 - DNA, 15 bp, Homo sapiens
gcacagtgtctggta

SEQ ID NO: 71724 - DNA, 15 bp, Homo sapiens
agcacagtgtctggt

SEQ ID NO: 71725 - DNA, 15 bp, Homo sapiens
cagcacagtgtctgg

SEQ ID NO: 71726 - DNA, 15 bp, Homo sapiens
ccagcacagtgtctg

SEQ ID NO: 71727 - DNA, 15 bp, Homo sapiens
accagcacagtgtct

SEQ ID NO: 71728 - DNA, 15 bp, Homo sapiens
caccagcacagtgtc

SEQ ID NO: 71729 - DNA, 15 bp, Homo sapiens
ccaccagcacagtgt

SEQ ID NO: 71730 - DNA, 15 bp, Homo sapiens
gccaccagcacagtg

SEQ ID NO: 71731 - DNA, 15 bp, Homo sapiens
agccaccagcacagt

SEQ ID NO: 71732 - DNA, 15 bp, Homo sapiens
cagccaccagcacag

SEQ ID NO: 71733 - DNA, 15 bp, Homo sapiens
ccagccaccagcaca

SEQ ID NO: 71734 - DNA, 15 bp, Homo sapiens
accagccaccagcac

SEQ ID NO: 71735 - DNA, 15 bp, Homo sapiens
taccagccaccagca

SEQ ID NO: 71736 - DNA, 15 bp, Homo sapiens
gtaccagccaccagc

SEQ ID NO: 71737 - DNA, 15 bp, Homo sapiens
agtaccagccaccag

SEQ ID NO: 71738 - DNA, 15 bp, Homo sapiens
cagtaccagccacca

SEQ ID NO: 71739 - DNA, 15 bp, Homo sapiens
acagtaccagccacc

SEQ ID NO: 71740 - DNA, 15 bp, Homo sapiens
tacagtaccagccac

SEQ ID NO: 71741 - DNA, 15 bp, Homo sapiens
atacagtaccagcca

SEQ ID NO: 71742 - DNA, 15 bp, Homo sapiens
tatacagtaccagcc

SEQ ID NO: 71743 - DNA, 15 bp, Homo sapiens
ttatacagtaccagc

SEQ ID NO: 71744 - DNA, 15 bp, Homo sapiens
attatacagtaccag

SEQ ID NO: 71745 - DNA, 15 bp, Homo sapiens
gattatacagtacca

SEQ ID NO: 71746 - DNA, 15 bp, Homo sapiens
ggattatacagtacc

SEQ ID NO: 71747 - DNA, 15 bp, Homo sapiens
tggattatacagtac

SEQ ID NO: 71748 - DNA, 15 bp, Homo sapiens
atggattatacagta

SEQ ID NO: 71749 - DNA, 15 bp, Homo sapiens
aatggattatacagt

SEQ ID NO: 71750 - DNA, 15 bp, Homo sapiens
taatggattatacag

SEQ ID NO: 71751 - DNA, 15 bp, Homo sapiens
ataatggattataca

SEQ ID NO: 71752 - DNA, 15 bp, Homo sapiens
aataatggattatac

SEQ ID NO: 71753 - DNA, 15 bp, Homo sapiens
aaataatggattata

SEQ ID NO: 71754 - DNA, 15 bp, Homo sapiens
caaataatggattat

SEQ ID NO: 71755 - DNA, 15 bp, Homo sapiens
gcaaataatggatta

SEQ ID NO: 71756 - DNA, 15 bp, Homo sapiens
agcaaataatggatt

SEQ ID NO: 71757 - DNA, 15 bp, Homo sapiens
gagcaaataatggat

SEQ ID NO: 71758 - DNA, 15 bp, Homo sapiens
agagcaaataatgga

SEQ ID NO: 71759 - DNA, 15 bp, Homo sapiens
gagagcaaataatgg

SEQ ID NO: 71760 - DNA, 15 bp, Homo sapiens
ggagagcaaataatg

SEQ ID NO: 71761 - DNA, 15 bp, Homo sapiens
aggagagcaaataat

SEQ ID NO: 71762 - DNA, 15 bp, Homo sapiens
gaggagagcaaataa

SEQ ID NO: 71763 - DNA, 15 bp, Homo sapiens
cgaggagagcaaata

SEQ ID NO: 71764 - DNA, 15 bp, Homo sapiens
acgaggagagcaaat

SEQ ID NO: 71765 - DNA, 15 bp, Homo sapiens
tacgaggagagcaaa

SEQ ID NO: 71766 - DNA, 15 bp, Homo sapiens
ttacgaggagagcaa

SEQ ID NO: 71767 - DNA, 15 bp, Homo sapiens
cttacgaggagagca

SEQ ID NO: 71768 - DNA, 15 bp, Homo sapiens
acttacgaggagagc

SEQ ID NO: 71769 - DNA, 15 bp, Homo sapiens
aacttacgaggagag

SEQ ID NO: 71770 - DNA, 15 bp, Homo sapiens
gaacttacgaggaga

SEQ ID NO: 71771 - DNA, 15 bp, Homo sapiens
tgaacttacgaggag

SEQ ID NO: 71772 - DNA, 15 bp, Homo sapiens
gtgaacttacgagga

SEQ ID NO: 71773 - DNA, 15 bp, Homo sapiens
tgtgaacttacgagg

SEQ ID NO: 71774 - DNA, 15 bp, Homo sapiens
atgtgaacttacgag

SEQ ID NO: 71775 - DNA, 15 bp, Homo sapiens
aatgtgaacttacga

SEQ ID NO: 71776 - DNA, 15 bp, Homo sapiens
gaatgtgaacttacg

SEQ ID NO: 71777 - DNA, 15 bp, Homo sapiens
agaatgtgaacttac

SEQ ID NO: 71778 - DNA, 15 bp, Homo sapiens
tagaatgtgaactta

SEQ ID NO: 71779 - DNA, 15 bp, Homo sapiens
ctagaatgtgaactt

SEQ ID NO: 71780 - DNA, 15 bp, Homo sapiens
actagaatgtgaact

SEQ ID NO: 71781 - DNA, 15 bp, Homo sapiens
cactagaatgtgaac

SEQ ID NO: 71782 - DNA, 15 bp, Homo sapiens
gcactagaatgtgaa

SEQ ID NO: 71783 - DNA, 15 bp, Homo sapiens
ggcactagaatgtga

SEQ ID NO: 71784 - DNA, 15 bp, Homo sapiens
aggcactagaatgtg

SEQ ID NO: 71785 - DNA, 15 bp, Homo sapiens
caggcactagaatgt

SEQ ID NO: 71786 - DNA, 15 bp, Homo sapiens
tcaggcactagaatg

SEQ ID NO: 71787 - DNA, 15 bp, Homo sapiens
gtcaggcactagaat

SEQ ID NO: 71788 - DNA, 15 bp, Homo sapiens
tgtcaggcactagaa

SEQ ID NO: 71789 - DNA, 15 bp, Homo sapiens
atgtcaggcactaga

SEQ ID NO: 71790 - DNA, 15 bp, Homo sapiens
tatgtcaggcactag

SEQ ID NO: 71791 - DNA, 15 bp, Homo sapiens
ctatgtcaggcacta

SEQ ID NO: 71792 - DNA, 15 bp, Homo sapiens
cctatgtcaggcact

SEQ ID NO: 71793 - DNA, 15 bp, Homo sapiens
tcctatgtcaggcac

SEQ ID NO: 71794 - DNA, 15 bp, Homo sapiens
ttcctatgtcaggca

SEQ ID NO: 71795 - DNA, 15 bp, Homo sapiens
tttcctatgtcaggc

SEQ ID NO: 71796 - DNA, 15 bp, Homo sapiens
ttttcctatgtcagg

SEQ ID NO: 71797 - DNA, 15 bp, Homo sapiens
attttcctatgtcag

SEQ ID NO: 71798 - DNA, 15 bp, Homo sapiens
tattttcctatgtca

SEQ ID NO: 71799 - DNA, 15 bp, Homo sapiens
atattttcctatgtc

SEQ ID NO: 71800 - DNA, 15 bp, Homo sapiens
catattttcctatgt

SEQ ID NO: 71801 - DNA, 15 bp, Homo sapiens
gcatattttcctatg

SEQ ID NO: 71802 - DNA, 15 bp, Homo sapiens
tgcatattttcctat

SEQ ID NO: 71803 - DNA, 15 bp, Homo sapiens
ttgcatattttccta

SEQ ID NO: 71804 - DNA, 15 bp, Homo sapiens
tttgcatattttcct

SEQ ID NO: 71805 - DNA, 15 bp, Homo sapiens
gtttgcatattttcc

SEQ ID NO: 71806 - DNA, 15 bp, Homo sapiens
tgtttgcatattttc

SEQ ID NO: 71807 - DNA, 15 bp, Homo sapiens
atgtttgcatatttt

SEQ ID NO: 71808 - DNA, 15 bp, Homo sapiens
catgtttgcatattt

SEQ ID NO: 71809 - DNA, 15 bp, Homo sapiens
tcatgtttgcatatt

SEQ ID NO: 71810 - DNA, 15 bp, Homo sapiens
ttcatgtttgcatat

SEQ ID NO: 71811 - DNA, 15 bp, Homo sapiens
attcatgtttgcata

SEQ ID NO: 71812 - DNA, 15 bp, Homo sapiens
aattcatgtttgcat

SEQ ID NO: 71813 - DNA, 15 bp, Homo sapiens
taattcatgtttgca

SEQ ID NO: 71814 - DNA, 15 bp, Homo sapiens
ataattcatgtttgc

SEQ ID NO: 71815 - DNA, 15 bp, Homo sapiens
gataattcatgtttg

SEQ ID NO: 71816 - DNA, 15 bp, Homo sapiens
agataattcatgttt

SEQ ID NO: 71817 - DNA, 15 bp, Homo sapiens
tagataattcatgtt

SEQ ID NO: 71818 - DNA, 15 bp, Homo sapiens
atagataattcatgt

SEQ ID NO: 71819 - DNA, 15 bp, Homo sapiens
aatagataattcatg

SEQ ID NO: 71820 - DNA, 15 bp, Homo sapiens
aaatagataattcat

SEQ ID NO: 71821 - DNA, 15 bp, Homo sapiens
aaaatagataattca

SEQ ID NO: 71822 - DNA, 15 bp, Homo sapiens
aaaaatagataattc

SEQ ID NO: 71823 - DNA, 15 bp, Homo sapiens
taaaaatagataatt

SEQ ID NO: 71824 - DNA, 15 bp, Homo sapiens
ataaaaatagataat

SEQ ID NO: 71825 - DNA, 15 bp, Homo sapiens
tataaaaatagataa

SEQ ID NO: 71826 - DNA, 15 bp, Homo sapiens
ctataaaaatagata

SEQ ID NO: 71827 - DNA, 15 bp, Homo sapiens
tctataaaaatagat

SEQ ID NO: 71828 - DNA, 15 bp, Homo sapiens
ttctataaaaataga

SEQ ID NO: 71829 - DNA, 15 bp, Homo sapiens
tttctataaaaatag

SEQ ID NO: 71830 - DNA, 15 bp, Homo sapiens
ttttctataaaaata

SEQ ID NO: 71831 - DNA, 15 bp, Homo sapiens
attttctataaaaat

SEQ ID NO: 71832 - DNA, 15 bp, Homo sapiens
cattttctataaaaa

SEQ ID NO: 71833 - DNA, 15 bp, Homo sapiens
gcattttctataaaa

SEQ ID NO: 71834 - DNA, 15 bp, Homo sapiens
ggcattttctataaa

SEQ ID NO: 71835 - DNA, 15 bp, Homo sapiens
aggcattttctataa

SEQ ID NO: 71836 - DNA, 15 bp, Homo sapiens
taggcattttctata

SEQ ID NO: 71837 - DNA, 15 bp, Homo sapiens
ttaggcattttctat

SEQ ID NO: 71838 - DNA, 15 bp, Homo sapiens
cttaggcattttcta

SEQ ID NO: 71839 - DNA, 15 bp, Homo sapiens
tcttaggcattttct

SEQ ID NO: 71840 - DNA, 15 bp, Homo sapiens
ctcttaggcattttc

SEQ ID NO: 71841 - DNA, 15 bp, Homo sapiens
tctcttaggcatttt

SEQ ID NO: 71842 - DNA, 15 bp, Homo sapiens
ctctcttaggcattt

SEQ ID NO: 71843 - DNA, 15 bp, Homo sapiens
cctctcttaggcatt

SEQ ID NO: 71844 - DNA, 15 bp, Homo sapiens
ccctctcttaggcat

SEQ ID NO: 71845 - DNA, 15 bp, Homo sapiens
gccctctcttaggca

SEQ ID NO: 71846 - DNA, 15 bp, Homo sapiens
ggccctctcttaggc

SEQ ID NO: 71847 - DNA, 15 bp, Homo sapiens
tggccctctcttagg

SEQ ID NO: 71848 - DNA, 15 bp, Homo sapiens
ctggccctctcttag

SEQ ID NO: 71849 - DNA, 15 bp, Homo sapiens
tctggccctctctta

SEQ ID NO: 71850 - DNA, 15 bp, Homo sapiens
ttctggccctctctt

SEQ ID NO: 71851 - DNA, 15 bp, Homo sapiens
attctggccctctct

SEQ ID NO: 71852 - DNA, 15 bp, Homo sapiens
tattctggccctctc

SEQ ID NO: 71853 - DNA, 15 bp, Homo sapiens
atattctggccctct

SEQ ID NO: 71854 - DNA, 15 bp, Homo sapiens
aatattctggccctc

SEQ ID NO: 71855 - DNA, 15 bp, Homo sapiens
taatattctggccct

SEQ ID NO: 71856 - DNA, 15 bp, Homo sapiens
ataatattctggccc

SEQ ID NO: 71857 - DNA, 15 bp, Homo sapiens
gataatattctggcc

SEQ ID NO: 71858 - DNA, 15 bp, Homo sapiens
ggataatattctggc

SEQ ID NO: 71859 - DNA, 15 bp, Homo sapiens
tggataatattctgg

SEQ ID NO: 71860 - DNA, 15 bp, Homo sapiens
atggataatattctg

SEQ ID NO: 71861 - DNA, 15 bp, Homo sapiens
aatggataatattct

SEQ ID NO: 71862 - DNA, 15 bp, Homo sapiens
gaatggataatattc

SEQ ID NO: 71863 - DNA, 15 bp, Homo sapiens
tgaatggataatatt

SEQ ID NO: 71864 - DNA, 15 bp, Homo sapiens
ttgaatggataatat

SEQ ID NO: 71865 - DNA, 15 bp, Homo sapiens
attgaatggataata

SEQ ID NO: 71866 - DNA, 15 bp, Homo sapiens
aattgaatggataat

SEQ ID NO: 71867 - DNA, 15 bp, Homo sapiens
caattgaatggataa

SEQ ID NO: 71868 - DNA, 15 bp, Homo sapiens
tcaattgaatggata

SEQ ID NO: 71869 - DNA, 15 bp, Homo sapiens
gtcaattgaatggat

SEQ ID NO: 71870 - DNA, 15 bp, Homo sapiens
tgtcaattgaatgga

SEQ ID NO: 71871 - DNA, 15 bp, Homo sapiens
ctgtcaattgaatgg

SEQ ID NO: 71872 - DNA, 15 bp, Homo sapiens
cctgtcaattgaatg

SEQ ID NO: 71873 - DNA, 15 bp, Homo sapiens
tcctgtcaattgaat

SEQ ID NO: 71874 - DNA, 15 bp, Homo sapiens
ttcctgtcaattgaa

SEQ ID NO: 71875 - DNA, 15 bp, Homo sapiens
gttcctgtcaattga

SEQ ID NO: 71876 - DNA, 15 bp, Homo sapiens
agttcctgtcaattg

SEQ ID NO: 71877 - DNA, 15 bp, Homo sapiens
cagttcctgtcaatt

SEQ ID NO: 71878 - DNA, 15 bp, Homo sapiens
tcagttcctgtcaat

SEQ ID NO: 71879 - DNA, 15 bp, Homo sapiens
atcagttcctgtcaa

SEQ ID NO: 71880 - DNA, 15 bp, Homo sapiens
aatcagttcctgtca

SEQ ID NO: 71881 - DNA, 15 bp, Homo sapiens
taatcagttcctgtc

SEQ ID NO: 71882 - DNA, 15 bp, Homo sapiens
gtaatcagttcctgt

SEQ ID NO: 71883 - DNA, 15 bp, Homo sapiens
tgtaatcagttcctg

SEQ ID NO: 71884 - DNA, 15 bp, Homo sapiens
atgtaatcagttcct

SEQ ID NO: 71885 - DNA, 15 bp, Homo sapiens
aatgtaatcagttcc

SEQ ID NO: 71886 - DNA, 15 bp, Homo sapiens
aaatgtaatcagttc

SEQ ID NO: 71887 - DNA, 15 bp, Homo sapiens
gaaatgtaatcagtt

SEQ ID NO: 71888 - DNA, 15 bp, Homo sapiens
agaaatgtaatcagt

SEQ ID NO: 71889 - DNA, 15 bp, Homo sapiens
cagaaatgtaatcag

SEQ ID NO: 71890 - DNA, 15 bp, Homo sapiens
acagaaatgtaatca

SEQ ID NO: 71891 - DNA, 15 bp, Homo sapiens
aacagaaatgtaatc

SEQ ID NO: 71892 - DNA, 15 bp, Homo sapiens
gaacagaaatgtaat

SEQ ID NO: 71893 - DNA, 15 bp, Homo sapiens
tgaacagaaatgtaa

SEQ ID NO: 71894 - DNA, 15 bp, Homo sapiens
gtgaacagaaatgta

SEQ ID NO: 71895 - DNA, 15 bp, Homo sapiens
tgtgaacagaaatgt

SEQ ID NO: 71896 - DNA, 15 bp, Homo sapiens
ttgtgaacagaaatg

SEQ ID NO: 71897 - DNA, 15 bp, Homo sapiens
tttgtgaacagaaat

SEQ ID NO: 71898 - DNA, 15 bp, Homo sapiens
atttgtgaacagaaa

SEQ ID NO: 71899 - DNA, 15 bp, Homo sapiens
catttgtgaacagaa

SEQ ID NO: 71900 - DNA, 15 bp, Homo sapiens
ccatttgtgaacaga

SEQ ID NO: 71901 - DNA, 15 bp, Homo sapiens
cccatttgtgaacag

SEQ ID NO: 71902 - DNA, 15 bp, Homo sapiens
gcccatttgtgaaca

SEQ ID NO: 71903 - DNA, 15 bp, Homo sapiens
tgcccatttgtgaac

SEQ ID NO: 71904 - DNA, 15 bp, Homo sapiens
gtgcccatttgtgaa

SEQ ID NO: 71905 - DNA, 15 bp, Homo sapiens
tgtgcccatttgtga

SEQ ID NO: 71906 - DNA, 15 bp, Homo sapiens
atgtgcccatttgtg

SEQ ID NO: 71907 - DNA, 15 bp, Homo sapiens
tatgtgcccatttgt

SEQ ID NO: 71908 - DNA, 15 bp, Homo sapiens
ctatgtgcccatttg

SEQ ID NO: 71909 - DNA, 15 bp, Homo sapiens
actatgtgcccattt

SEQ ID NO: 71910 - DNA, 15 bp, Homo sapiens
tactatgtgcccatt

SEQ ID NO: 71911 - DNA, 15 bp, Homo sapiens
ctactatgtgcccat

SEQ ID NO: 71912 - DNA, 15 bp, Homo sapiens
cctactatgtgccca

SEQ ID NO: 71913 - DNA, 15 bp, Homo sapiens
acctactatgtgccc

SEQ ID NO: 71914 - DNA, 15 bp, Homo sapiens
tacctactatgtgcc

SEQ ID NO: 71915 - DNA, 15 bp, Homo sapiens
ctacctactatgtgc

SEQ ID NO: 71916 - DNA, 15 bp, Homo sapiens
actacctactatgtg

SEQ ID NO: 71917 - DNA, 15 bp, Homo sapiens
tactacctactatgt

SEQ ID NO: 71918 - DNA, 15 bp, Homo sapiens
atactacctactatg

SEQ ID NO: 71919 - DNA, 15 bp, Homo sapiens
tatactacctactat

SEQ ID NO: 71920 - DNA, 15 bp, Homo sapiens
atatactacctacta

SEQ ID NO: 71921 - DNA, 15 bp, Homo sapiens
aatatactacctact

SEQ ID NO: 71922 - DNA, 15 bp, Homo sapiens
gaatatactacctac

SEQ ID NO: 71923 - DNA, 15 bp, Homo sapiens
agaatatactaccta

SEQ ID NO: 71924 - DNA, 15 bp, Homo sapiens
cagaatatactacct

SEQ ID NO: 71925 - DNA, 15 bp, Homo sapiens
tcagaatatactacc

SEQ ID NO: 71926 - DNA, 15 bp, Homo sapiens
atcagaatatactac

SEQ ID NO: 71927 - DNA, 15 bp, Homo sapiens
aatcagaatatacta

SEQ ID NO: 71928 - DNA, 15 bp, Homo sapiens
taatcagaatatact

SEQ ID NO: 71929 - DNA, 15 bp, Homo sapiens
ttaatcagaatatac

SEQ ID NO: 71930 - DNA, 15 bp, Homo sapiens
tttaatcagaatata

SEQ ID NO: 71931 - DNA, 15 bp, Homo sapiens
atttaatcagaatat

SEQ ID NO: 71932 - DNA, 15 bp, Homo sapiens
gatttaatcagaata

SEQ ID NO: 71933 - DNA, 15 bp, Homo sapiens
agatttaatcagaat

SEQ ID NO: 71934 - DNA, 15 bp, Homo sapiens
cagatttaatcagaa

SEQ ID NO: 71935 - DNA, 15 bp, Homo sapiens
acagatttaatcaga

SEQ ID NO: 71936 - DNA, 15 bp, Homo sapiens
gacagatttaatcag

SEQ ID NO: 71937 - DNA, 15 bp, Homo sapiens
agacagatttaatca

SEQ ID NO: 71938 - DNA, 15 bp, Homo sapiens
tagacagatttaatc

SEQ ID NO: 71939 - DNA, 15 bp, Homo sapiens
gtagacagatttaat

SEQ ID NO: 71940 - DNA, 15 bp, Homo sapiens
tgtagacagatttaa

SEQ ID NO: 71941 - DNA, 15 bp, Homo sapiens
ttgtagacagattta

SEQ ID NO: 71942 - DNA, 15 bp, Homo sapiens
tttgtagacagattt

SEQ ID NO: 71943 - DNA, 15 bp, Homo sapiens
atttgtagacagatt

SEQ ID NO: 71944 - DNA, 15 bp, Homo sapiens
gatttgtagacagat

SEQ ID NO: 71945 - DNA, 15 bp, Homo sapiens
ggatttgtagacaga

SEQ ID NO: 71946 - DNA, 15 bp, Homo sapiens
aggatttgtagacag

SEQ ID NO: 71947 - DNA, 15 bp, Homo sapiens
taggatttgtagaca

SEQ ID NO: 71948 - DNA, 15 bp, Homo sapiens
ataggatttgtagac

SEQ ID NO: 71949 - DNA, 15 bp, Homo sapiens
aataggatttgtaga

SEQ ID NO: 71950 - DNA, 15 bp, Homo sapiens
aaataggatttgtag

SEQ ID NO: 71951 - DNA, 15 bp, Homo sapiens
gaaataggatttgta

SEQ ID NO: 71952 - DNA, 15 bp, Homo sapiens
tgaaataggatttgt

SEQ ID NO: 71953 - DNA, 15 bp, Homo sapiens
ctgaaataggatttg

SEQ ID NO: 71954 - DNA, 15 bp, Homo sapiens
actgaaataggattt

SEQ ID NO: 71955 - DNA, 15 bp, Homo sapiens
tactgaaataggatt

SEQ ID NO: 71956 - DNA, 15 bp, Homo sapiens
atactgaaataggat

SEQ ID NO: 71957 - DNA, 15 bp, Homo sapiens
gatactgaaatagga

SEQ ID NO: 71958 - DNA, 15 bp, Homo sapiens
agatactgaaatagg

SEQ ID NO: 71959 - DNA, 15 bp, Homo sapiens
gagatactgaaatag

SEQ ID NO: 71960 - DNA, 15 bp, Homo sapiens
ggagatactgaaata

SEQ ID NO: 71961 - DNA, 15 bp, Homo sapiens
aggagatactgaaat

SEQ ID NO: 71962 - DNA, 15 bp, Homo sapiens
taggagatactgaaa

SEQ ID NO: 71963 - DNA, 15 bp, Homo sapiens
ttaggagatactgaa

SEQ ID NO: 71964 - DNA, 15 bp, Homo sapiens
tttaggagatactga

SEQ ID NO: 71965 - DNA, 15 bp, Homo sapiens
gtttaggagatactg

SEQ ID NO: 71966 - DNA, 15 bp, Homo sapiens
agtttaggagatact

SEQ ID NO: 71967 - DNA, 15 bp, Homo sapiens
gagtttaggagatac

SEQ ID NO: 71968 - DNA, 15 bp, Homo sapiens
agagtttaggagata

SEQ ID NO: 71969 - DNA, 15 bp, Homo sapiens
aagagtttaggagat

SEQ ID NO: 71970 - DNA, 15 bp, Homo sapiens
caagagtttaggaga

SEQ ID NO: 71971 - DNA, 15 bp, Homo sapiens
gcaagagtttaggag

SEQ ID NO: 71972 - DNA, 15 bp, Homo sapiens
agcaagagtttagga

SEQ ID NO: 71973 - DNA, 15 bp, Homo sapiens
tagcaagagtttagg

SEQ ID NO: 71974 - DNA, 15 bp, Homo sapiens
atagcaagagtttag

SEQ ID NO: 71975 - DNA, 15 bp, Homo sapiens
catagcaagagttta

SEQ ID NO: 71976 - DNA, 15 bp, Homo sapiens
gcatagcaagagttt

SEQ ID NO: 71977 - DNA, 15 bp, Homo sapiens
tgcatagcaagagtt

SEQ ID NO: 71978 - DNA, 15 bp, Homo sapiens
ctgcatagcaagagt

SEQ ID NO: 71979 - DNA, 15 bp, Homo sapiens
cctgcatagcaagag

SEQ ID NO: 71980 - DNA, 15 bp, Homo sapiens
tcctgcatagcaaga

SEQ ID NO: 71981 - DNA, 15 bp, Homo sapiens
ttcctgcatagcaag

SEQ ID NO: 71982 - DNA, 15 bp, Homo sapiens
tttcctgcatagcaa

SEQ ID NO: 71983 - DNA, 15 bp, Homo sapiens
ttttcctgcatagca

SEQ ID NO: 71984 - DNA, 15 bp, Homo sapiens
tttttcctgcatagc

SEQ ID NO: 71985 - DNA, 15 bp, Homo sapiens
atttttcctgcatag

SEQ ID NO: 71986 - DNA, 15 bp, Homo sapiens
aatttttcctgcata

SEQ ID NO: 71987 - DNA, 15 bp, Homo sapiens
taatttttcctgcat

SEQ ID NO: 71988 - DNA, 15 bp, Homo sapiens
ataatttttcctgca

SEQ ID NO: 71989 - DNA, 15 bp, Homo sapiens
aataatttttcctgc

SEQ ID NO: 71990 - DNA, 15 bp, Homo sapiens
aaataatttttcctg

SEQ ID NO: 71991 - DNA, 15 bp, Homo sapiens
aaaataatttttcct

SEQ ID NO: 71992 - DNA, 15 bp, Homo sapiens
taaaataatttttcc

SEQ ID NO: 71993 - DNA, 15 bp, Homo sapiens
ataaaataatttttc

SEQ ID NO: 71994 - DNA, 15 bp, Homo sapiens
cataaaataattttt

SEQ ID NO: 71995 - DNA, 15 bp, Homo sapiens
acataaaataatttt

SEQ ID NO: 71996 - DNA, 15 bp, Homo sapiens
cacataaaataattt

SEQ ID NO: 71997 - DNA, 15 bp, Homo sapiens
tcacataaaataatt

SEQ ID NO: 71998 - DNA, 15 bp, Homo sapiens
ttcacataaaataat

SEQ ID NO: 71999 - DNA, 15 bp, Homo sapiens
cttcacataaaataa

SEQ ID NO: 72000 - DNA, 15 bp, Homo sapiens
ccttcacataaaata

SEQ ID NO: 72001 - DNA, 15 bp, Homo sapiens
accttcacataaaat

SEQ ID NO: 72002 - DNA, 15 bp, Homo sapiens
taccttcacataaaa

SEQ ID NO: 72003 - DNA, 15 bp, Homo sapiens
ttaccttcacataaa

SEQ ID NO: 72004 - DNA, 15 bp, Homo sapiens
tttaccttcacataa

SEQ ID NO: 72005 - DNA, 15 bp, Homo sapiens
ttttaccttcacata

SEQ ID NO: 72006 - DNA, 15 bp, Homo sapiens
cttttaccttcacat

SEQ ID NO: 72007 - DNA, 15 bp, Homo sapiens
tcttttaccttcaca

SEQ ID NO: 72008 - DNA, 15 bp, Homo sapiens
atcttttaccttcac

SEQ ID NO: 72009 - DNA, 15 bp, Homo sapiens
catcttttaccttca

SEQ ID NO: 72010 - DNA, 15 bp, Homo sapiens
gcatcttttaccttc

SEQ ID NO: 72011 - DNA, 15 bp, Homo sapiens
ggcatcttttacctt

SEQ ID NO: 72012 - DNA, 15 bp, Homo sapiens
tggcatcttttacct

SEQ ID NO: 72013 - DNA, 15 bp, Homo sapiens
atggcatcttttacc

SEQ ID NO: 72014 - DNA, 15 bp, Homo sapiens
catggcatcttttac

SEQ ID NO: 72015 - DNA, 15 bp, Homo sapiens
ccatggcatctttta

SEQ ID NO: 72016 - DNA, 15 bp, Homo sapiens
tccatggcatctttt

SEQ ID NO: 72017 - DNA, 15 bp, Homo sapiens
atccatggcatcttt

SEQ ID NO: 72018 - DNA, 15 bp, Homo sapiens
catccatggcatctt

SEQ ID NO: 72019 - DNA, 15 bp, Homo sapiens
tcatccatggcatct

SEQ ID NO: 72020 - DNA, 15 bp, Homo sapiens
ctcatccatggcatc

SEQ ID NO: 72021 - DNA, 15 bp, Homo sapiens
actcatccatggcat

SEQ ID NO: 72022 - DNA, 15 bp, Homo sapiens
tactcatccatggca

SEQ ID NO: 72023 - DNA, 15 bp, Homo sapiens
ctactcatccatggc

SEQ ID NO: 72024 - DNA, 15 bp, Homo sapiens
gctactcatccatgg

SEQ ID NO: 72025 - DNA, 15 bp, Homo sapiens
agctactcatccatg

SEQ ID NO: 72026 - DNA, 15 bp, Homo sapiens
aagctactcatccat

SEQ ID NO: 72027 - DNA, 15 bp, Homo sapiens
taagctactcatcca

SEQ ID NO: 72028 - DNA, 15 bp, Homo sapiens
gtaagctactcatcc

SEQ ID NO: 72029 - DNA, 15 bp, Homo sapiens
tgtaagctactcatc

SEQ ID NO: 72030 - DNA, 15 bp, Homo sapiens
ttgtaagctactcat

SEQ ID NO: 72031 - DNA, 15 bp, Homo sapiens
attgtaagctactca

SEQ ID NO: 72032 - DNA, 15 bp, Homo sapiens
aattgtaagctactc

SEQ ID NO: 72033 - DNA, 15 bp, Homo sapiens
taattgtaagctact

SEQ ID NO: 72034 - DNA, 15 bp, Homo sapiens
ttaattgtaagctac

SEQ ID NO: 72035 - DNA, 15 bp, Homo sapiens
tttaattgtaagcta

SEQ ID NO: 72036 - DNA, 15 bp, Homo sapiens
ttttaattgtaagct

SEQ ID NO: 72037 - DNA, 15 bp, Homo sapiens
attttaattgtaagc

SEQ ID NO: 72038 - DNA, 15 bp, Homo sapiens
aattttaattgtaag

SEQ ID NO: 72039 - DNA, 15 bp, Homo sapiens
taattttaattgtaa

SEQ ID NO: 72040 - DNA, 15 bp, Homo sapiens
ttaattttaattgta

SEQ ID NO: 72041 - DNA, 15 bp, Homo sapiens
cttaattttaattgt

SEQ ID NO: 72042 - DNA, 15 bp, Homo sapiens
acttaattttaattg

SEQ ID NO: 72043 - DNA, 15 bp, Homo sapiens
gacttaattttaatt

SEQ ID NO: 72044 - DNA, 15 bp, Homo sapiens
agacttaattttaat

SEQ ID NO: 72045 - DNA, 15 bp, Homo sapiens
gagacttaattttaa

SEQ ID NO: 72046 - DNA, 15 bp, Homo sapiens
tgagacttaatttta

SEQ ID NO: 72047 - DNA, 15 bp, Homo sapiens
ctgagacttaatttt

SEQ ID NO: 72048 - DNA, 15 bp, Homo sapiens
tctgagacttaattt

SEQ ID NO: 72049 - DNA, 15 bp, Homo sapiens
gtctgagacttaatt

SEQ ID NO: 72050 - DNA, 15 bp, Homo sapiens
tgtctgagacttaat

SEQ ID NO: 72051 - DNA, 15 bp, Homo sapiens
atgtctgagacttaa

SEQ ID NO: 72052 - DNA, 15 bp, Homo sapiens
catgtctgagactta

SEQ ID NO: 72053 - DNA, 15 bp, Homo sapiens
gcatgtctgagactt

SEQ ID NO: 72054 - DNA, 15 bp, Homo sapiens
agcatgtctgagact

SEQ ID NO: 72055 - DNA, 15 bp, Homo sapiens
aagcatgtctgagac

SEQ ID NO: 72056 - DNA, 15 bp, Homo sapiens
gaagcatgtctgaga

SEQ ID NO: 72057 - DNA, 15 bp, Homo sapiens
agaagcatgtctgag

SEQ ID NO: 72058 - DNA, 15 bp, Homo sapiens
aagaagcatgtctga

SEQ ID NO: 72059 - DNA, 15 bp, Homo sapiens
aaagaagcatgtctg

SEQ ID NO: 72060 - DNA, 15 bp, Homo sapiens
aaaagaagcatgtct

SEQ ID NO: 72061 - DNA, 15 bp, Homo sapiens
aaaaagaagcatgtc

SEQ ID NO: 72062 - DNA, 15 bp, Homo sapiens
aaaaaagaagcatgt

SEQ ID NO: 72063 - DNA, 15 bp, Homo sapiens
aaaaaaagaagcatg

SEQ ID NO: 72064 - DNA, 15 bp, Homo sapiens
taaaaaaagaagcat

SEQ ID NO: 72065 - DNA, 15 bp, Homo sapiens
ataaaaaaagaagca

SEQ ID NO: 72066 - DNA, 15 bp, Homo sapiens
gataaaaaaagaagc

SEQ ID NO: 72067 - DNA, 15 bp, Homo sapiens
ggataaaaaaagaag

SEQ ID NO: 72068 - DNA, 15 bp, Homo sapiens
gggataaaaaaagaa

SEQ ID NO: 72069 - DNA, 15 bp, Homo sapiens
agggataaaaaaaga

SEQ ID NO: 72070 - DNA, 15 bp, Homo sapiens
cagggataaaaaaag

SEQ ID NO: 72071 - DNA, 15 bp, Homo sapiens
acagggataaaaaaa

SEQ ID NO: 72072 - DNA, 15 bp, Homo sapiens
cacagggataaaaaa

SEQ ID NO: 72073 - DNA, 15 bp, Homo sapiens
ccacagggataaaaa

SEQ ID NO: 72074 - DNA, 15 bp, Homo sapiens
gccacagggataaaa

SEQ ID NO: 72075 - DNA, 15 bp, Homo sapiens
agccacagggataaa

SEQ ID NO: 72076 - DNA, 15 bp, Homo sapiens
tagccacagggataa

SEQ ID NO: 72077 - DNA, 15 bp, Homo sapiens
ttagccacagggata

SEQ ID NO: 72078 - DNA, 15 bp, Homo sapiens
gttagccacagggat

SEQ ID NO: 72079 - DNA, 15 bp, Homo sapiens
agttagccacaggga

SEQ ID NO: 72080 - DNA, 15 bp, Homo sapiens
cagttagccacaggg

SEQ ID NO: 72081 - DNA, 15 bp, Homo sapiens
ccagttagccacagg

SEQ ID NO: 72082 - DNA, 15 bp, Homo sapiens
tccagttagccacag

SEQ ID NO: 72083 - DNA, 15 bp, Homo sapiens
ctccagttagccaca

SEQ ID NO: 72084 - DNA, 15 bp, Homo sapiens
tctccagttagccac

SEQ ID NO: 72085 - DNA, 15 bp, Homo sapiens
atctccagttagcca

SEQ ID NO: 72086 - DNA, 15 bp, Homo sapiens
gatctccagttagcc

SEQ ID NO: 72087 - DNA, 15 bp, Homo sapiens
tgatctccagttagc

SEQ ID NO: 72088 - DNA, 15 bp, Homo sapiens
ctgatctccagttag

SEQ ID NO: 72089 - DNA, 15 bp, Homo sapiens
tctgatctccagtta

SEQ ID NO: 72090 - DNA, 15 bp, Homo sapiens
gtctgatctccagtt

SEQ ID NO: 72091 - DNA, 15 bp, Homo sapiens
tgtctgatctccagt

SEQ ID NO: 72092 - DNA, 15 bp, Homo sapiens
gtgtctgatctccag

SEQ ID NO: 72093 - DNA, 15 bp, Homo sapiens
tgtgtctgatctcca

SEQ ID NO: 72094 - DNA, 15 bp, Homo sapiens
gtgtgtctgatctcc

SEQ ID NO: 72095 - DNA, 15 bp, Homo sapiens
agtgtgtctgatctc

SEQ ID NO: 72096 - DNA, 15 bp, Homo sapiens
aagtgtgtctgatct

SEQ ID NO: 72097 - DNA, 15 bp, Homo sapiens
aaagtgtgtctgatc

SEQ ID NO: 72098 - DNA, 15 bp, Homo sapiens
gaaagtgtgtctgat

SEQ ID NO: 72099 - DNA, 15 bp, Homo sapiens
tgaaagtgtgtctga

SEQ ID NO: 72100 - DNA, 15 bp, Homo sapiens
ttgaaagtgtgtctg

SEQ ID NO: 72101 - DNA, 15 bp, Homo sapiens
attgaaagtgtgtct

SEQ ID NO: 72102 - DNA, 15 bp, Homo sapiens
gattgaaagtgtgtc

SEQ ID NO: 72103 - DNA, 15 bp, Homo sapiens
tgattgaaagtgtgt

SEQ ID NO: 72104 - DNA, 15 bp, Homo sapiens
ctgattgaaagtgtg

SEQ ID NO: 72105 - DNA, 15 bp, Homo sapiens
actgattgaaagtgt

SEQ ID NO: 72106 - DNA, 15 bp, Homo sapiens
cactgattgaaagtg

SEQ ID NO: 72107 - DNA, 15 bp, Homo sapiens
acactgattgaaagt

SEQ ID NO: 72108 - DNA, 15 bp, Homo sapiens
aacactgattgaaag

SEQ ID NO: 72109 - DNA, 15 bp, Homo sapiens
aaacactgattgaaa

SEQ ID NO: 72110 - DNA, 15 bp, Homo sapiens
taaacactgattgaa

SEQ ID NO: 72111 - DNA, 15 bp, Homo sapiens
ttaaacactgattga

SEQ ID NO: 72112 - DNA, 15 bp, Homo sapiens
gttaaacactgattg

SEQ ID NO: 72113 - DNA, 15 bp, Homo sapiens
tgttaaacactgatt

SEQ ID NO: 72114 - DNA, 15 bp, Homo sapiens
ttgttaaacactgat

SEQ ID NO: 72115 - DNA, 15 bp, Homo sapiens
tttgttaaacactga

SEQ ID NO: 72116 - DNA, 15 bp, Homo sapiens
ttttgttaaacactg

SEQ ID NO: 72117 - DNA, 15 bp, Homo sapiens
tttttgttaaacact

SEQ ID NO: 72118 - DNA, 15 bp, Homo sapiens
ttttttgttaaacac

SEQ ID NO: 72119 - DNA, 15 bp, Homo sapiens
attttttgttaaaca

SEQ ID NO: 72120 - DNA, 15 bp, Homo sapiens
gattttttgttaaac

SEQ ID NO: 72121 - DNA, 15 bp, Homo sapiens
tgattttttgttaaa

SEQ ID NO: 72122 - DNA, 15 bp, Homo sapiens
ttgattttttgttaa

SEQ ID NO: 72123 - DNA, 15 bp, Homo sapiens
tttgattttttgtta

SEQ ID NO: 72124 - DNA, 15 bp, Homo sapiens
gtttgattttttgtt

SEQ ID NO: 72125 - DNA, 15 bp, Homo sapiens
tgtttgattttttgt

SEQ ID NO: 72126 - DNA, 15 bp, Homo sapiens
ttgtttgattttttg

SEQ ID NO: 72127 - DNA, 15 bp, Homo sapiens
tttgtttgatttttt

SEQ ID NO: 72128 - DNA, 15 bp, Homo sapiens
ttttgtttgattttt

SEQ ID NO: 72129 - DNA, 15 bp, Homo sapiens
cttttgtttgatttt

SEQ ID NO: 72130 - DNA, 15 bp, Homo sapiens
gcttttgtttgattt

SEQ ID NO: 72131 - DNA, 15 bp, Homo sapiens
agcttttgtttgatt

SEQ ID NO: 72132 - DNA, 15 bp, Homo sapiens
aagcttttgtttgat

SEQ ID NO: 72133 - DNA, 15 bp, Homo sapiens
caagcttttgtttga

SEQ ID NO: 72134 - DNA, 15 bp, Homo sapiens
ccaagcttttgtttg

SEQ ID NO: 72135 - DNA, 15 bp, Homo sapiens
accaagcttttgttt

SEQ ID NO: 72136 - DNA, 15 bp, Homo sapiens
caccaagcttttgtt

SEQ ID NO: 72137 - DNA, 15 bp, Homo sapiens
tcaccaagcttttgt

SEQ ID NO: 72138 - DNA, 15 bp, Homo sapiens
ctcaccaagcttttg

SEQ ID NO: 72139 - DNA, 15 bp, Homo sapiens
tctcaccaagctttt

SEQ ID NO: 72140 - DNA, 15 bp, Homo sapiens
ttctcaccaagcttt

SEQ ID NO: 72141 - DNA, 15 bp, Homo sapiens
tttctcaccaagctt

SEQ ID NO: 72142 - DNA, 15 bp, Homo sapiens
gtttctcaccaagct

SEQ ID NO: 72143 - DNA, 15 bp, Homo sapiens
ggtttctcaccaagc

SEQ ID NO: 72144 - DNA, 15 bp, Homo sapiens
tggtttctcaccaag

SEQ ID NO: 72145 - DNA, 15 bp, Homo sapiens
ctggtttctcaccaa

SEQ ID NO: 72146 - DNA, 15 bp, Homo sapiens
actggtttctcacca

SEQ ID NO: 72147 - DNA, 15 bp, Homo sapiens
cactggtttctcacc

SEQ ID NO: 72148 - DNA, 15 bp, Homo sapiens
gcactggtttctcac

SEQ ID NO: 72149 - DNA, 15 bp, Homo sapiens
agcactggtttctca

SEQ ID NO: 72150 - DNA, 15 bp, Homo sapiens
aagcactggtttctc

SEQ ID NO: 72151 - DNA, 15 bp, Homo sapiens
taagcactggtttct

SEQ ID NO: 72152 - DNA, 15 bp, Homo sapiens
ataagcactggtttc

SEQ ID NO: 72153 - DNA, 15 bp, Homo sapiens
aataagcactggttt

SEQ ID NO: 72154 - DNA, 15 bp, Homo sapiens
aaataagcactggtt

SEQ ID NO: 72155 - DNA, 15 bp, Homo sapiens
aaaataagcactggt

SEQ ID NO: 72156 - DNA, 15 bp, Homo sapiens
gaaaataagcactgg

SEQ ID NO: 72157 - DNA, 15 bp, Homo sapiens
agaaaataagcactg

SEQ ID NO: 72158 - DNA, 15 bp, Homo sapiens
gagaaaataagcact

SEQ ID NO: 72159 - DNA, 15 bp, Homo sapiens
ggagaaaataagcac

SEQ ID NO: 72160 - DNA, 15 bp, Homo sapiens
aggagaaaataagca

SEQ ID NO: 72161 - DNA, 15 bp, Homo sapiens
caggagaaaataagc

SEQ ID NO: 72162 - DNA, 15 bp, Homo sapiens
gcaggagaaaataag

SEQ ID NO: 72163 - DNA, 15 bp, Homo sapiens
ggcaggagaaaataa

SEQ ID NO: 72164 - DNA, 15 bp, Homo sapiens
aggcaggagaaaata

SEQ ID NO: 72165 - DNA, 15 bp, Homo sapiens
taggcaggagaaaat

SEQ ID NO: 72166 - DNA, 15 bp, Homo sapiens
ctaggcaggagaaaa

SEQ ID NO: 72167 - DNA, 15 bp, Homo sapiens
tctaggcaggagaaa

SEQ ID NO: 72168 - DNA, 15 bp, Homo sapiens
ttctaggcaggagaa

SEQ ID NO: 72169 - DNA, 15 bp, Homo sapiens
attctaggcaggaga

SEQ ID NO: 72170 - DNA, 15 bp, Homo sapiens
gattctaggcaggag

SEQ ID NO: 72171 - DNA, 15 bp, Homo sapiens
agattctaggcagga

SEQ ID NO: 72172 - DNA, 15 bp, Homo sapiens
tagattctaggcagg

SEQ ID NO: 72173 - DNA, 15 bp, Homo sapiens
atagattctaggcag

SEQ ID NO: 72174 - DNA, 15 bp, Homo sapiens
gatagattctaggca

SEQ ID NO: 72175 - DNA, 15 bp, Homo sapiens
tgatagattctaggc

SEQ ID NO: 72176 - DNA, 15 bp, Homo sapiens
ctgatagattctagg

SEQ ID NO: 72177 - DNA, 15 bp, Homo sapiens
tctgatagattctag

SEQ ID NO: 72178 - DNA, 15 bp, Homo sapiens
ttctgatagattcta

SEQ ID NO: 72179 - DNA, 15 bp, Homo sapiens
gttctgatagattct

SEQ ID NO: 72180 - DNA, 15 bp, Homo sapiens
tgttctgatagattc

SEQ ID NO: 72181 - DNA, 15 bp, Homo sapiens
ttgttctgatagatt

SEQ ID NO: 72182 - DNA, 15 bp, Homo sapiens
gttgttctgatagat

SEQ ID NO: 72183 - DNA, 15 bp, Homo sapiens
tgttgttctgataga

SEQ ID NO: 72184 - DNA, 15 bp, Homo sapiens
atgttgttctgatag

SEQ ID NO: 72185 - DNA, 15 bp, Homo sapiens
catgttgttctgata

SEQ ID NO: 72186 - DNA, 15 bp, Homo sapiens
acatgttgttctgat

SEQ ID NO: 72187 - DNA, 15 bp, Homo sapiens
gacatgttgttctga

SEQ ID NO: 72188 - DNA, 15 bp, Homo sapiens
ggacatgttgttctg

SEQ ID NO: 72189 - DNA, 15 bp, Homo sapiens
tggacatgttgttct

SEQ ID NO: 72190 - DNA, 15 bp, Homo sapiens
ttggacatgttgttc

SEQ ID NO: 72191 - DNA, 15 bp, Homo sapiens
cttggacatgttgtt

SEQ ID NO: 72192 - DNA, 15 bp, Homo sapiens
tcttggacatgttgt

SEQ ID NO: 72193 - DNA, 15 bp, Homo sapiens
gtcttggacatgttg

SEQ ID NO: 72194 - DNA, 15 bp, Homo sapiens
tgtcttggacatgtt

SEQ ID NO: 72195 - DNA, 15 bp, Homo sapiens
ctgtcttggacatgt

SEQ ID NO: 72196 - DNA, 15 bp, Homo sapiens
gctgtcttggacatg

SEQ ID NO: 72197 - DNA, 15 bp, Homo sapiens
agctgtcttggacat

SEQ ID NO: 72198 - DNA, 15 bp, Homo sapiens
gagctgtcttggaca

SEQ ID NO: 72199 - DNA, 15 bp, Homo sapiens
ggagctgtcttggac

SEQ ID NO: 72200 - DNA, 15 bp, Homo sapiens
tggagctgtcttgga

SEQ ID NO: 72201 - DNA, 15 bp, Homo sapiens
gtggagctgtcttgg

SEQ ID NO: 72202 - DNA, 15 bp, Homo sapiens
ggtggagctgtcttg

SEQ ID NO: 72203 - DNA, 15 bp, Homo sapiens
tggtggagctgtctt

SEQ ID NO: 72204 - DNA, 15 bp, Homo sapiens
gtggtggagctgtct

SEQ ID NO: 72205 - DNA, 15 bp, Homo sapiens
ggtggtggagctgtc

SEQ ID NO: 72206 - DNA, 15 bp, Homo sapiens
gggtggtggagctgt

SEQ ID NO: 72207 - DNA, 15 bp, Homo sapiens
agggtggtggagctg

SEQ ID NO: 72208 - DNA, 15 bp, Homo sapiens
aagggtggtggagct

SEQ ID NO: 72209 - DNA, 15 bp, Homo sapiens
aaagggtggtggagc

SEQ ID NO: 72210 - DNA, 15 bp, Homo sapiens
taaagggtggtggag

SEQ ID NO: 72211 - DNA, 15 bp, Homo sapiens
ataaagggtggtgga

SEQ ID NO: 72212 - DNA, 15 bp, Homo sapiens
cataaagggtggtgg

SEQ ID NO: 72213 - DNA, 15 bp, Homo sapiens
tcataaagggtggtg

SEQ ID NO: 72214 - DNA, 15 bp, Homo sapiens
ctcataaagggtggt

SEQ ID NO: 72215 - DNA, 15 bp, Homo sapiens
tctcataaagggtgg

SEQ ID NO: 72216 - DNA, 15 bp, Homo sapiens
ctctcataaagggtg

SEQ ID NO: 72217 - DNA, 15 bp, Homo sapiens
tctctcataaagggt

SEQ ID NO: 72218 - DNA, 15 bp, Homo sapiens
gtctctcataaaggg

SEQ ID NO: 72219 - DNA, 15 bp, Homo sapiens
tgtctctcataaagg

SEQ ID NO: 72220 - DNA, 15 bp, Homo sapiens
ttgtctctcataaag

SEQ ID NO: 72221 - DNA, 15 bp, Homo sapiens
gttgtctctcataaa

SEQ ID NO: 72222 - DNA, 15 bp, Homo sapiens
tgttgtctctcataa

SEQ ID NO: 72223 - DNA, 15 bp, Homo sapiens
gtgttgtctctcata

SEQ ID NO: 72224 - DNA, 15 bp, Homo sapiens
ggtgttgtctctcat

SEQ ID NO: 72225 - DNA, 15 bp, Homo sapiens
tggtgttgtctctca

SEQ ID NO: 72226 - DNA, 15 bp, Homo sapiens
atggtgttgtctctc

SEQ ID NO: 72227 - DNA, 15 bp, Homo sapiens
tatggtgttgtctct

SEQ ID NO: 72228 - DNA, 15 bp, Homo sapiens
atatggtgttgtctc

SEQ ID NO: 72229 - DNA, 15 bp, Homo sapiens
gatatggtgttgtct

SEQ ID NO: 72230 - DNA, 15 bp, Homo sapiens
tgatatggtgttgtc

SEQ ID NO: 72231 - DNA, 15 bp, Homo sapiens
ctgatatggtgttgt

SEQ ID NO: 72232 - DNA, 15 bp, Homo sapiens
cctgatatggtgttg

SEQ ID NO: 72233 - DNA, 15 bp, Homo sapiens
ccctgatatggtgtt

SEQ ID NO: 72234 - DNA, 15 bp, Homo sapiens
gccctgatatggtgt

SEQ ID NO: 72235 - DNA, 15 bp, Homo sapiens
tgccctgatatggtg

SEQ ID NO: 72236 - DNA, 15 bp, Homo sapiens
ctgccctgatatggt

SEQ ID NO: 72237 - DNA, 15 bp, Homo sapiens
tctgccctgatatgg

SEQ ID NO: 72238 - DNA, 15 bp, Homo sapiens
ttctgccctgatatg

SEQ ID NO: 72239 - DNA, 15 bp, Homo sapiens
cttctgccctgatat

SEQ ID NO: 72240 - DNA, 15 bp, Homo sapiens
acttctgccctgata

SEQ ID NO: 72241 - DNA, 15 bp, Homo sapiens
cacttctgccctgat

SEQ ID NO: 72242 - DNA, 15 bp, Homo sapiens
acacttctgccctga

SEQ ID NO: 72243 - DNA, 15 bp, Homo sapiens
gacacttctgccctg

SEQ ID NO: 72244 - DNA, 15 bp, Homo sapiens
ggacacttctgccct

SEQ ID NO: 72245 - DNA, 15 bp, Homo sapiens
tggacacttctgccc

SEQ ID NO: 72246 - DNA, 15 bp, Homo sapiens
atggacacttctgcc

SEQ ID NO: 72247 - DNA, 15 bp, Homo sapiens
tatggacacttctgc

SEQ ID NO: 72248 - DNA, 15 bp, Homo sapiens
ctatggacacttctg

SEQ ID NO: 72249 - DNA, 15 bp, Homo sapiens
actatggacacttct

SEQ ID NO: 72250 - DNA, 15 bp, Homo sapiens
cactatggacacttc

SEQ ID NO: 72251 - DNA, 15 bp, Homo sapiens
tcactatggacactt

SEQ ID NO: 72252 - DNA, 15 bp, Homo sapiens
ttcactatggacact

SEQ ID NO: 72253 - DNA, 15 bp, Homo sapiens
tttcactatggacac

SEQ ID NO: 72254 - DNA, 15 bp, Homo sapiens
ctttcactatggaca

SEQ ID NO: 72255 - DNA, 15 bp, Homo sapiens
tctttcactatggac

SEQ ID NO: 72256 - DNA, 15 bp, Homo sapiens
gtctttcactatgga

SEQ ID NO: 72257 - DNA, 15 bp, Homo sapiens
ggtctttcactatgg

SEQ ID NO: 72258 - DNA, 15 bp, Homo sapiens
aggtctttcactatg

SEQ ID NO: 72259 - DNA, 15 bp, Homo sapiens
caggtctttcactat

SEQ ID NO: 72260 - DNA, 15 bp, Homo sapiens
tcaggtctttcacta

SEQ ID NO: 72261 - DNA, 15 bp, Homo sapiens
atcaggtctttcact

SEQ ID NO: 72262 - DNA, 15 bp, Homo sapiens
catcaggtctttcac

SEQ ID NO: 72263 - DNA, 15 bp, Homo sapiens
tcatcaggtctttca

SEQ ID NO: 72264 - DNA, 15 bp, Homo sapiens
atcatcaggtctttc

SEQ ID NO: 72265 - DNA, 15 bp, Homo sapiens
aatcatcaggtcttt

SEQ ID NO: 72266 - DNA, 15 bp, Homo sapiens
caatcatcaggtctt

SEQ ID NO: 72267 - DNA, 15 bp, Homo sapiens
ccaatcatcaggtct

SEQ ID NO: 72268 - DNA, 15 bp, Homo sapiens
cccaatcatcaggtc

SEQ ID NO: 72269 - DNA, 15 bp, Homo sapiens
acccaatcatcaggt

SEQ ID NO: 72270 - DNA, 15 bp, Homo sapiens
cacccaatcatcagg

SEQ ID NO: 72271 - DNA, 15 bp, Homo sapiens
tcacccaatcatcag

SEQ ID NO: 72272 - DNA, 15 bp, Homo sapiens
ttcacccaatcatca

SEQ ID NO: 72273 - DNA, 15 bp, Homo sapiens
attcacccaatcatc

SEQ ID NO: 72274 - DNA, 15 bp, Homo sapiens
cattcacccaatcat

SEQ ID NO: 72275 - DNA, 15 bp, Homo sapiens
ccattcacccaatca

SEQ ID NO: 72276 - DNA, 15 bp, Homo sapiens
tccattcacccaatc

SEQ ID NO: 72277 - DNA, 15 bp, Homo sapiens
ttccattcacccaat

SEQ ID NO: 72278 - DNA, 15 bp, Homo sapiens
attccattcacccaa

SEQ ID NO: 72279 - DNA, 15 bp, Homo sapiens
cattccattcaccca

SEQ ID NO: 72280 - DNA, 15 bp, Homo sapiens
gcattccattcaccc

SEQ ID NO: 72281 - DNA, 15 bp, Homo sapiens
ggcattccattcacc

SEQ ID NO: 72282 - DNA, 15 bp, Homo sapiens
aggcattccattcac

SEQ ID NO: 72283 - DNA, 15 bp, Homo sapiens
taggcattccattca

SEQ ID NO: 72284 - DNA, 15 bp, Homo sapiens
gtaggcattccattc

SEQ ID NO: 72285 - DNA, 15 bp, Homo sapiens
ggtaggcattccatt

SEQ ID NO: 72286 - DNA, 15 bp, Homo sapiens
tggtaggcattccat

SEQ ID NO: 72287 - DNA, 15 bp, Homo sapiens
ctggtaggcattcca

SEQ ID NO: 72288 - DNA, 15 bp, Homo sapiens
gctggtaggcattcc

SEQ ID NO: 72289 - DNA, 15 bp, Homo sapiens
ggctggtaggcattc

SEQ ID NO: 72290 - DNA, 15 bp, Homo sapiens
aggctggtaggcatt

SEQ ID NO: 72291 - DNA, 15 bp, Homo sapiens
gaggctggtaggcat

SEQ ID NO: 72292 - DNA, 15 bp, Homo sapiens
ggaggctggtaggca

SEQ ID NO: 72293 - DNA, 15 bp, Homo sapiens
gggaggctggtaggc

SEQ ID NO: 72294 - DNA, 15 bp, Homo sapiens
tgggaggctggtagg

SEQ ID NO: 72295 - DNA, 15 bp, Homo sapiens
ctgggaggctggtag

SEQ ID NO: 72296 - DNA, 15 bp, Homo sapiens
gctgggaggctggta

SEQ ID NO: 72297 - DNA, 15 bp, Homo sapiens
ggctgggaggctggt

SEQ ID NO: 72298 - DNA, 15 bp, Homo sapiens
aggctgggaggctgg

SEQ ID NO: 72299 - DNA, 15 bp, Homo sapiens
aaggctgggaggctg

SEQ ID NO: 72300 - DNA, 15 bp, Homo sapiens
caaggctgggaggct

SEQ ID NO: 72301 - DNA, 15 bp, Homo sapiens
ccaaggctgggaggc

SEQ ID NO: 72302 - DNA, 15 bp, Homo sapiens
cccaaggctgggagg

SEQ ID NO: 72303 - DNA, 15 bp, Homo sapiens
tcccaaggctgggag

SEQ ID NO: 72304 - DNA, 15 bp, Homo sapiens
ctcccaaggctggga

SEQ ID NO: 72305 - DNA, 15 bp, Homo sapiens
cctcccaaggctggg

SEQ ID NO: 72306 - DNA, 15 bp, Homo sapiens
tcctcccaaggctgg

SEQ ID NO: 72307 - DNA, 15 bp, Homo sapiens
ctcctcccaaggctg

SEQ ID NO: 72308 - DNA, 15 bp, Homo sapiens
gctcctcccaaggct

SEQ ID NO: 72309 - DNA, 15 bp, Homo sapiens
agctcctcccaaggc

SEQ ID NO: 72310 - DNA, 15 bp, Homo sapiens
cagctcctcccaagg

SEQ ID NO: 72311 - DNA, 15 bp, Homo sapiens
ccagctcctcccaag

SEQ ID NO: 72312 - DNA, 15 bp, Homo sapiens
gccagctcctcccaa

SEQ ID NO: 72313 - DNA, 15 bp, Homo sapiens
tgccagctcctccca

SEQ ID NO: 72314 - DNA, 15 bp, Homo sapiens
ttgccagctcctccc

SEQ ID NO: 72315 - DNA, 15 bp, Homo sapiens
cttgccagctcctcc

SEQ ID NO: 72316 - DNA, 15 bp, Homo sapiens
ccttgccagctcctc

SEQ ID NO: 72317 - DNA, 15 bp, Homo sapiens
tccttgccagctcct

SEQ ID NO: 72318 - DNA, 15 bp, Homo sapiens
ctccttgccagctcc

SEQ ID NO: 72319 - DNA, 15 bp, Homo sapiens
gctccttgccagctc

SEQ ID NO: 72320 - DNA, 15 bp, Homo sapiens
tgctccttgccagct

SEQ ID NO: 72321 - DNA, 15 bp, Homo sapiens
atgctccttgccagc

SEQ ID NO: 72322 - DNA, 15 bp, Homo sapiens
catgctccttgccag

SEQ ID NO: 72323 - DNA, 15 bp, Homo sapiens
ccatgctccttgcca

SEQ ID NO: 72324 - DNA, 15 bp, Homo sapiens
gccatgctccttgcc

SEQ ID NO: 72325 - DNA, 15 bp, Homo sapiens
tgccatgctccttgc

SEQ ID NO: 72326 - DNA, 15 bp, Homo sapiens
ctgccatgctccttg

SEQ ID NO: 72327 - DNA, 15 bp, Homo sapiens
gctgccatgctcctt

SEQ ID NO: 72328 - DNA, 15 bp, Homo sapiens
ggctgccatgctcct

SEQ ID NO: 72329 - DNA, 15 bp, Homo sapiens
tggctgccatgctcc

SEQ ID NO: 72330 - DNA, 15 bp, Homo sapiens
atggctgccatgctc

SEQ ID NO: 72331 - DNA, 15 bp, Homo sapiens
gatggctgccatgct

SEQ ID NO: 72332 - DNA, 15 bp, Homo sapiens
agatggctgccatgc

SEQ ID NO: 72333 - DNA, 15 bp, Homo sapiens
cagatggctgccatg

SEQ ID NO: 72334 - DNA, 15 bp, Homo sapiens
ccagatggctgccat

SEQ ID NO: 72335 - DNA, 15 bp, Homo sapiens
cccagatggctgcca

SEQ ID NO: 72336 - DNA, 15 bp, Homo sapiens
acccagatggctgcc

SEQ ID NO: 72337 - DNA, 15 bp, Homo sapiens
cacccagatggctgc

SEQ ID NO: 72338 - DNA, 15 bp, Homo sapiens
tcacccagatggctg

SEQ ID NO: 72339 - DNA, 15 bp, Homo sapiens
ctcacccagatggct

SEQ ID NO: 72340 - DNA, 15 bp, Homo sapiens
gctcacccagatggc

SEQ ID NO: 72341 - DNA, 15 bp, Homo sapiens
ggctcacccagatgg

SEQ ID NO: 72342 - DNA, 15 bp, Homo sapiens
gggctcacccagatg

SEQ ID NO: 72343 - DNA, 15 bp, Homo sapiens
agggctcacccagat

SEQ ID NO: 72344 - DNA, 15 bp, Homo sapiens
cagggctcacccaga

SEQ ID NO: 72345 - DNA, 15 bp, Homo sapiens
gcagggctcacccag

SEQ ID NO: 72346 - DNA, 15 bp, Homo sapiens
ggcagggctcaccca

SEQ ID NO: 72347 - DNA, 15 bp, Homo sapiens
gggcagggctcaccc

SEQ ID NO: 72348 - DNA, 15 bp, Homo sapiens
ggggcagggctcacc

SEQ ID NO: 72349 - DNA, 15 bp, Homo sapiens
gggggcagggctcac

SEQ ID NO: 72350 - DNA, 15 bp, Homo sapiens
ggggggcagggctca

SEQ ID NO: 72351 - DNA, 15 bp, Homo sapiens
aggggggcagggctc

SEQ ID NO: 72352 - DNA, 15 bp, Homo sapiens
taggggggcagggct

SEQ ID NO: 72353 - DNA, 15 bp, Homo sapiens
ctaggggggcagggc

SEQ ID NO: 72354 - DNA, 15 bp, Homo sapiens
tctaggggggcaggg

SEQ ID NO: 72355 - DNA, 15 bp, Homo sapiens
gtctaggggggcagg

SEQ ID NO: 72356 - DNA, 15 bp, Homo sapiens
ggtctaggggggcag

SEQ ID NO: 72357 - DNA, 15 bp, Homo sapiens
tggtctaggggggca

SEQ ID NO: 72358 - DNA, 15 bp, Homo sapiens
ctggtctaggggggc

SEQ ID NO: 72359 - DNA, 15 bp, Homo sapiens
tctggtctagggggg

SEQ ID NO: 72360 - DNA, 15 bp, Homo sapiens
ctctggtctaggggg

SEQ ID NO: 72361 - DNA, 15 bp, Homo sapiens
tctctggtctagggg

SEQ ID NO: 72362 - DNA, 15 bp, Homo sapiens
atctctggtctaggg

SEQ ID NO: 72363 - DNA, 15 bp, Homo sapiens
catctctggtctagg

SEQ ID NO: 72364 - DNA, 15 bp, Homo sapiens
gcatctctggtctag

SEQ ID NO: 72365 - DNA, 15 bp, Homo sapiens
ggcatctctggtcta

SEQ ID NO: 72366 - DNA, 15 bp, Homo sapiens
gggcatctctggtct

SEQ ID NO: 72367 - DNA, 15 bp, Homo sapiens
agggcatctctggtc

SEQ ID NO: 72368 - DNA, 15 bp, Homo sapiens
gagggcatctctggt

SEQ ID NO: 72369 - DNA, 15 bp, Homo sapiens
ggagggcatctctgg

SEQ ID NO: 72370 - DNA, 15 bp, Homo sapiens
gggagggcatctctg

SEQ ID NO: 72371 - DNA, 15 bp, Homo sapiens
agggagggcatctct

SEQ ID NO: 72372 - DNA, 15 bp, Homo sapiens
cagggagggcatctc

SEQ ID NO: 72373 - DNA, 15 bp, Homo sapiens
gcagggagggcatct

SEQ ID NO: 72374 - DNA, 15 bp, Homo sapiens
agcagggagggcatc

SEQ ID NO: 72375 - DNA, 15 bp, Homo sapiens
tagcagggagggcat

SEQ ID NO: 72376 - DNA, 15 bp, Homo sapiens
gtagcagggagggca

SEQ ID NO: 72377 - DNA, 15 bp, Homo sapiens
ggtagcagggagggc

SEQ ID NO: 72378 - DNA, 15 bp, Homo sapiens
tggtagcagggaggg

SEQ ID NO: 72379 - DNA, 15 bp, Homo sapiens
gtggtagcagggagg

SEQ ID NO: 72380 - DNA, 15 bp, Homo sapiens
tgtggtagcagggag

SEQ ID NO: 72381 - DNA, 15 bp, Homo sapiens
ctgtggtagcaggga

SEQ ID NO: 72382 - DNA, 15 bp, Homo sapiens
tctgtggtagcaggg

SEQ ID NO: 72383 - DNA, 15 bp, Homo sapiens
ctctgtggtagcagg

SEQ ID NO: 72384 - DNA, 15 bp, Homo sapiens
gctctgtggtagcag

SEQ ID NO: 72385 - DNA, 15 bp, Homo sapiens
tgctctgtggtagca

SEQ ID NO: 72386 - DNA, 15 bp, Homo sapiens
ctgctctgtggtagc

SEQ ID NO: 72387 - DNA, 15 bp, Homo sapiens
actgctctgtggtag

SEQ ID NO: 72388 - DNA, 15 bp, Homo sapiens
gactgctctgtggta

SEQ ID NO: 72389 - DNA, 15 bp, Homo sapiens
tgactgctctgtggt

SEQ ID NO: 72390 - DNA, 15 bp, Homo sapiens
ctgactgctctgtgg

SEQ ID NO: 72391 - DNA, 15 bp, Homo sapiens
cctgactgctctgtg

SEQ ID NO: 72392 - DNA, 15 bp, Homo sapiens
tcctgactgctctgt

SEQ ID NO: 72393 - DNA, 15 bp, Homo sapiens
ttcctgactgctctg

SEQ ID NO: 72394 - DNA, 15 bp, Homo sapiens
cttcctgactgctct

SEQ ID NO: 72395 - DNA, 15 bp, Homo sapiens
gcttcctgactgctc

SEQ ID NO: 72396 - DNA, 15 bp, Homo sapiens
agcttcctgactgct

SEQ ID NO: 72397 - DNA, 15 bp, Homo sapiens
cagcttcctgactgc

SEQ ID NO: 72398 - DNA, 15 bp, Homo sapiens
ccagcttcctgactg

SEQ ID NO: 72399 - DNA, 15 bp, Homo sapiens
cccagcttcctgact

SEQ ID NO: 72400 - DNA, 15 bp, Homo sapiens
acccagcttcctgac

SEQ ID NO: 72401 - DNA, 15 bp, Homo sapiens
aacccagcttcctga

SEQ ID NO: 72402 - DNA, 15 bp, Homo sapiens
gaacccagcttcctg

SEQ ID NO: 72403 - DNA, 15 bp, Homo sapiens
agaacccagcttcct

SEQ ID NO: 72404 - DNA, 15 bp, Homo sapiens
cagaacccagcttcc

SEQ ID NO: 72405 - DNA, 15 bp, Homo sapiens
gcagaacccagcttc

SEQ ID NO: 72406 - DNA, 15 bp, Homo sapiens
agcagaacccagctt

SEQ ID NO: 72407 - DNA, 15 bp, Homo sapiens
tagcagaacccagct

SEQ ID NO: 72408 - DNA, 15 bp, Homo sapiens
ctagcagaacccagc

SEQ ID NO: 72409 - DNA, 15 bp, Homo sapiens
tctagcagaacccag

SEQ ID NO: 72410 - DNA, 15 bp, Homo sapiens
atctagcagaaccca

SEQ ID NO: 72411 - DNA, 15 bp, Homo sapiens
aatctagcagaaccc

SEQ ID NO: 72412 - DNA, 15 bp, Homo sapiens
gaatctagcagaacc

SEQ ID NO: 72413 - DNA, 15 bp, Homo sapiens
agaatctagcagaac

SEQ ID NO: 72414 - DNA, 15 bp, Homo sapiens
cagaatctagcagaa

SEQ ID NO: 72415 - DNA, 15 bp, Homo sapiens
ccagaatctagcaga

SEQ ID NO: 72416 - DNA, 15 bp, Homo sapiens
cccagaatctagcag

SEQ ID NO: 72417 - DNA, 15 bp, Homo sapiens
ccccagaatctagca

SEQ ID NO: 72418 - DNA, 15 bp, Homo sapiens
cccccagaatctagc

SEQ ID NO: 72419 - DNA, 15 bp, Homo sapiens
acccccagaatctag

SEQ ID NO: 72420 - DNA, 15 bp, Homo sapiens
cacccccagaatcta

SEQ ID NO: 72421 - DNA, 15 bp, Homo sapiens
acacccccagaatct

SEQ ID NO: 72422 - DNA, 15 bp, Homo sapiens
cacacccccagaatc

SEQ ID NO: 72423 - DNA, 15 bp, Homo sapiens
acacacccccagaat

SEQ ID NO: 72424 - DNA, 15 bp, Homo sapiens
cacacacccccagaa

SEQ ID NO: 72425 - DNA, 15 bp, Homo sapiens
gcacacacccccaga

SEQ ID NO: 72426 - DNA, 15 bp, Homo sapiens
agcacacacccccag

SEQ ID NO: 72427 - DNA, 15 bp, Homo sapiens
gagcacacaccccca

SEQ ID NO: 72428 - DNA, 15 bp, Homo sapiens
tgagcacacaccccc

SEQ ID NO: 72429 - DNA, 15 bp, Homo sapiens
ctgagcacacacccc

SEQ ID NO: 72430 - DNA, 15 bp, Homo sapiens
tctgagcacacaccc

SEQ ID NO: 72431 - DNA, 15 bp, Homo sapiens
ctctgagcacacacc

SEQ ID NO: 72432 - DNA, 15 bp, Homo sapiens
gctctgagcacacac

SEQ ID NO: 72433 - DNA, 15 bp, Homo sapiens
tgctctgagcacaca

SEQ ID NO: 72434 - DNA, 15 bp, Homo sapiens
ttgctctgagcacac

SEQ ID NO: 72435 - DNA, 15 bp, Homo sapiens
cttgctctgagcaca

SEQ ID NO: 72436 - DNA, 15 bp, Homo sapiens
ccttgctctgagcac

SEQ ID NO: 72437 - DNA, 15 bp, Homo sapiens
gccttgctctgagca

SEQ ID NO: 72438 - DNA, 15 bp, Homo sapiens
ggccttgctctgagc

SEQ ID NO: 72439 - DNA, 15 bp, Homo sapiens
tggccttgctctgag

SEQ ID NO: 72440 - DNA, 15 bp, Homo sapiens
ctggccttgctctga

SEQ ID NO: 72441 - DNA, 15 bp, Homo sapiens
cctggccttgctctg

SEQ ID NO: 72442 - DNA, 15 bp, Homo sapiens
ccctggccttgctct

SEQ ID NO: 72443 - DNA, 15 bp, Homo sapiens
tccctggccttgctc

SEQ ID NO: 72444 - DNA, 15 bp, Homo sapiens
gtccctggccttgct

SEQ ID NO: 72445 - DNA, 15 bp, Homo sapiens
agtccctggccttgc

SEQ ID NO: 72446 - DNA, 15 bp, Homo sapiens
gagtccctggccttg

SEQ ID NO: 72447 - DNA, 15 bp, Homo sapiens
agagtccctggcctt

SEQ ID NO: 72448 - DNA, 15 bp, Homo sapiens
tagagtccctggcct

SEQ ID NO: 72449 - DNA, 15 bp, Homo sapiens
gtagagtccctggcc

SEQ ID NO: 72450 - DNA, 15 bp, Homo sapiens
tgtagagtccctggc

SEQ ID NO: 72451 - DNA, 15 bp, Homo sapiens
gtgtagagtccctgg

SEQ ID NO: 72452 - DNA, 15 bp, Homo sapiens
agtgtagagtccctg

SEQ ID NO: 72453 - DNA, 15 bp, Homo sapiens
cagtgtagagtccct

SEQ ID NO: 72454 - DNA, 15 bp, Homo sapiens
gcagtgtagagtccc

SEQ ID NO: 72455 - DNA, 15 bp, Homo sapiens
tgcagtgtagagtcc

SEQ ID NO: 72456 - DNA, 15 bp, Homo sapiens
atgcagtgtagagtc

SEQ ID NO: 72457 - DNA, 15 bp, Homo sapiens
tatgcagtgtagagt

SEQ ID NO: 72458 - DNA, 15 bp, Homo sapiens
atatgcagtgtagag

SEQ ID NO: 72459 - DNA, 15 bp, Homo sapiens
catatgcagtgtaga

SEQ ID NO: 72460 - DNA, 15 bp, Homo sapiens
tcatatgcagtgtag

SEQ ID NO: 72461 - DNA, 15 bp, Homo sapiens
ctcatatgcagtgta

SEQ ID NO: 72462 - DNA, 15 bp, Homo sapiens
cctcatatgcagtgt

SEQ ID NO: 72463 - DNA, 15 bp, Homo sapiens
acctcatatgcagtg

SEQ ID NO: 72464 - DNA, 15 bp, Homo sapiens
gacctcatatgcagt

SEQ ID NO: 72465 - DNA, 15 bp, Homo sapiens
agacctcatatgcag

SEQ ID NO: 72466 - DNA, 15 bp, Homo sapiens
gagacctcatatgca

SEQ ID NO: 72467 - DNA, 15 bp, Homo sapiens
ggagacctcatatgc

SEQ ID NO: 72468 - DNA, 15 bp, Homo sapiens
gggagacctcatatg

SEQ ID NO: 72469 - DNA, 15 bp, Homo sapiens
ggggagacctcatat

SEQ ID NO: 72470 - DNA, 15 bp, Homo sapiens
aggggagacctcata

SEQ ID NO: 72471 - DNA, 15 bp, Homo sapiens
taggggagacctcat

SEQ ID NO: 72472 - DNA, 15 bp, Homo sapiens
ttaggggagacctca

SEQ ID NO: 72473 - DNA, 15 bp, Homo sapiens
tttaggggagacctc

SEQ ID NO: 72474 - DNA, 15 bp, Homo sapiens
atttaggggagacct

SEQ ID NO: 72475 - DNA, 15 bp, Homo sapiens
aatttaggggagacc

SEQ ID NO: 72476 - DNA, 15 bp, Homo sapiens
aaatttaggggagac

SEQ ID NO: 72477 - DNA, 15 bp, Homo sapiens
gaaatttaggggaga

SEQ ID NO: 72478 - DNA, 15 bp, Homo sapiens
ggaaatttaggggag

SEQ ID NO: 72479 - DNA, 15 bp, Homo sapiens
aggaaatttagggga

SEQ ID NO: 72480 - DNA, 15 bp, Homo sapiens
gaggaaatttagggg

SEQ ID NO: 72481 - DNA, 15 bp, Homo sapiens
tgaggaaatttaggg

SEQ ID NO: 72482 - DNA, 15 bp, Homo sapiens
ctgaggaaatttagg

SEQ ID NO: 72483 - DNA, 15 bp, Homo sapiens
gctgaggaaatttag

SEQ ID NO: 72484 - DNA, 15 bp, Homo sapiens
tgctgaggaaattta

SEQ ID NO: 72485 - DNA, 15 bp, Homo sapiens
atgctgaggaaattt

SEQ ID NO: 72486 - DNA, 15 bp, Homo sapiens
aatgctgaggaaatt

SEQ ID NO: 72487 - DNA, 15 bp, Homo sapiens
caatgctgaggaaat

SEQ ID NO: 72488 - DNA, 15 bp, Homo sapiens
ccaatgctgaggaaa

SEQ ID NO: 72489 - DNA, 15 bp, Homo sapiens
tccaatgctgaggaa

SEQ ID NO: 72490 - DNA, 15 bp, Homo sapiens
ctccaatgctgagga

SEQ ID NO: 72491 - DNA, 15 bp, Homo sapiens
gctccaatgctgagg

SEQ ID NO: 72492 - DNA, 15 bp, Homo sapiens
agctccaatgctgag

SEQ ID NO: 72493 - DNA, 15 bp, Homo sapiens
aagctccaatgctga

SEQ ID NO: 72494 - DNA, 15 bp, Homo sapiens
aaagctccaatgctg

SEQ ID NO: 72495 - DNA, 15 bp, Homo sapiens
caaagctccaatgct

SEQ ID NO: 72496 - DNA, 15 bp, Homo sapiens
ccaaagctccaatgc

SEQ ID NO: 72497 - DNA, 15 bp, Homo sapiens
cccaaagctccaatg

SEQ ID NO: 72498 - DNA, 15 bp, Homo sapiens
tcccaaagctccaat

SEQ ID NO: 72499 - DNA, 15 bp, Homo sapiens
ctcccaaagctccaa

SEQ ID NO: 72500 - DNA, 15 bp, Homo sapiens
cctcccaaagctcca

SEQ ID NO: 72501 - DNA, 15 bp, Homo sapiens
gcctcccaaagctcc

SEQ ID NO: 72502 - DNA, 15 bp, Homo sapiens
agcctcccaaagctc

SEQ ID NO: 72503 - DNA, 15 bp, Homo sapiens
aagcctcccaaagct

SEQ ID NO: 72504 - DNA, 15 bp, Homo sapiens
aaagcctcccaaagc

SEQ ID NO: 72505 - DNA, 15 bp, Homo sapiens
caaagcctcccaaag

SEQ ID NO: 72506 - DNA, 15 bp, Homo sapiens
acaaagcctcccaaa

SEQ ID NO: 72507 - DNA, 15 bp, Homo sapiens
gacaaagcctcccaa

SEQ ID NO: 72508 - DNA, 15 bp, Homo sapiens
agacaaagcctccca

SEQ ID NO: 72509 - DNA, 15 bp, Homo sapiens
cagacaaagcctccc

SEQ ID NO: 72510 - DNA, 15 bp, Homo sapiens
ccagacaaagcctcc

SEQ ID NO: 72511 - DNA, 15 bp, Homo sapiens
accagacaaagcctc

SEQ ID NO: 72512 - DNA, 15 bp, Homo sapiens
aaccagacaaagcct

SEQ ID NO: 72513 - DNA, 15 bp, Homo sapiens
aaaccagacaaagcc

SEQ ID NO: 72514 - DNA, 15 bp, Homo sapiens
aaaaccagacaaagc

SEQ ID NO: 72515 - DNA, 15 bp, Homo sapiens
gaaaaccagacaaag

SEQ ID NO: 72516 - DNA, 15 bp, Homo sapiens
agaaaaccagacaaa

SEQ ID NO: 72517 - DNA, 15 bp, Homo sapiens
aagaaaaccagacaa

SEQ ID NO: 72518 - DNA, 15 bp, Homo sapiens
aaagaaaaccagaca

SEQ ID NO: 72519 - DNA, 15 bp, Homo sapiens
caaagaaaaccagac

SEQ ID NO: 72520 - DNA, 15 bp, Homo sapiens
gcaaagaaaaccaga

SEQ ID NO: 72521 - DNA, 15 bp, Homo sapiens
agcaaagaaaaccag

SEQ ID NO: 72522 - DNA, 15 bp, Homo sapiens
aagcaaagaaaacca

SEQ ID NO: 72523 - DNA, 15 bp, Homo sapiens
caagcaaagaaaacc

SEQ ID NO: 72524 - DNA, 15 bp, Homo sapiens
acaagcaaagaaaac

SEQ ID NO: 72525 - DNA, 15 bp, Homo sapiens
aacaagcaaagaaaa

SEQ ID NO: 72526 - DNA, 15 bp, Homo sapiens
aaacaagcaaagaaa

SEQ ID NO: 72527 - DNA, 15 bp, Homo sapiens
aaaacaagcaaagaa

SEQ ID NO: 72528 - DNA, 15 bp, Homo sapiens
taaaacaagcaaaga

SEQ ID NO: 72529 - DNA, 15 bp, Homo sapiens
ttaaaacaagcaaag

SEQ ID NO: 72530 - DNA, 15 bp, Homo sapiens
attaaaacaagcaaa

SEQ ID NO: 72531 - DNA, 15 bp, Homo sapiens
aattaaaacaagcaa

SEQ ID NO: 72532 - DNA, 15 bp, Homo sapiens
aaattaaaacaagca

SEQ ID NO: 72533 - DNA, 15 bp, Homo sapiens
aaaattaaaacaagc

SEQ ID NO: 72534 - DNA, 15 bp, Homo sapiens
caaaattaaaacaag

SEQ ID NO: 72535 - DNA, 15 bp, Homo sapiens
tcaaaattaaaacaa

SEQ ID NO: 72536 - DNA, 15 bp, Homo sapiens
ttcaaaattaaaaca

SEQ ID NO: 72537 - DNA, 15 bp, Homo sapiens
gttcaaaattaaaac

SEQ ID NO: 72538 - DNA, 15 bp, Homo sapiens
agttcaaaattaaaa

SEQ ID NO: 72539 - DNA, 15 bp, Homo sapiens
tagttcaaaattaaa

SEQ ID NO: 72540 - DNA, 15 bp, Homo sapiens
ttagttcaaaattaa

SEQ ID NO: 72541 - DNA, 15 bp, Homo sapiens
gttagttcaaaatta

SEQ ID NO: 72542 - DNA, 15 bp, Homo sapiens
tgttagttcaaaatt

SEQ ID NO: 72543 - DNA, 15 bp, Homo sapiens
atgttagttcaaaat

SEQ ID NO: 72544 - DNA, 15 bp, Homo sapiens
tatgttagttcaaaa

SEQ ID NO: 72545 - DNA, 15 bp, Homo sapiens
ttatgttagttcaaa

SEQ ID NO: 72546 - DNA, 15 bp, Homo sapiens
tttatgttagttcaa

SEQ ID NO: 72547 - DNA, 15 bp, Homo sapiens
gtttatgttagttca

SEQ ID NO: 72548 - DNA, 15 bp, Homo sapiens
cgtttatgttagttc

SEQ ID NO: 72549 - DNA, 15 bp, Homo sapiens
acgtttatgttagtt

SEQ ID NO: 72550 - DNA, 15 bp, Homo sapiens
cacgtttatgttagt

SEQ ID NO: 72551 - DNA, 15 bp, Homo sapiens
acacgtttatgttag

SEQ ID NO: 72552 - DNA, 15 bp, Homo sapiens
tacacgtttatgtta

SEQ ID NO: 72553 - DNA, 15 bp, Homo sapiens
atacacgtttatgtt

SEQ ID NO: 72554 - DNA, 15 bp, Homo sapiens
aatacacgtttatgt

SEQ ID NO: 72555 - DNA, 15 bp, Homo sapiens
aaatacacgtttatg

SEQ ID NO: 72556 - DNA, 15 bp, Homo sapiens
aaaatacacgtttat

SEQ ID NO: 72557 - DNA, 15 bp, Homo sapiens
taaaatacacgttta

SEQ ID NO: 72558 - DNA, 15 bp, Homo sapiens
ataaaatacacgttt

SEQ ID NO: 72559 - DNA, 15 bp, Homo sapiens
cataaaatacacgtt

SEQ ID NO: 72560 - DNA, 15 bp, Homo sapiens
gcataaaatacacgt

SEQ ID NO: 72561 - DNA, 15 bp, Homo sapiens
ggcataaaatacacg

SEQ ID NO: 72562 - DNA, 15 bp, Homo sapiens
tggcataaaatacac

SEQ ID NO: 72563 - DNA, 15 bp, Homo sapiens
atggcataaaataca

SEQ ID NO: 72564 - DNA, 15 bp, Homo sapiens
tatggcataaaatac

SEQ ID NO: 72565 - DNA, 15 bp, Homo sapiens
ctatggcataaaata

SEQ ID NO: 72566 - DNA, 15 bp, Homo sapiens
cctatggcataaaat

SEQ ID NO: 72567 - DNA, 15 bp, Homo sapiens
tcctatggcataaaa

SEQ ID NO: 72568 - DNA, 15 bp, Homo sapiens
gtcctatggcataaa

SEQ ID NO: 72569 - DNA, 15 bp, Homo sapiens
tgtcctatggcataa

SEQ ID NO: 72570 - DNA, 15 bp, Homo sapiens
atgtcctatggcata

SEQ ID NO: 72571 - DNA, 15 bp, Homo sapiens
catgtcctatggcat

SEQ ID NO: 72572 - DNA, 15 bp, Homo sapiens
tcatgtcctatggca

SEQ ID NO: 72573 - DNA, 15 bp, Homo sapiens
ctcatgtcctatggc

SEQ ID NO: 72574 - DNA, 15 bp, Homo sapiens
gctcatgtcctatgg

SEQ ID NO: 72575 - DNA, 15 bp, Homo sapiens
agctcatgtcctatg

SEQ ID NO: 72576 - DNA, 15 bp, Homo sapiens
cagctcatgtcctat

SEQ ID NO: 72577 - DNA, 15 bp, Homo sapiens
ccagctcatgtccta

SEQ ID NO: 72578 - DNA, 15 bp, Homo sapiens
accagctcatgtcct

SEQ ID NO: 72579 - DNA, 15 bp, Homo sapiens
aaccagctcatgtcc

SEQ ID NO: 72580 - DNA, 15 bp, Homo sapiens
aaaccagctcatgtc

SEQ ID NO: 72581 - DNA, 15 bp, Homo sapiens
caaaccagctcatgt

SEQ ID NO: 72582 - DNA, 15 bp, Homo sapiens
tcaaaccagctcatg

SEQ ID NO: 72583 - DNA, 15 bp, Homo sapiens
atcaaaccagctcat

SEQ ID NO: 72584 - DNA, 15 bp, Homo sapiens
catcaaaccagctca

SEQ ID NO: 72585 - DNA, 15 bp, Homo sapiens
tcatcaaaccagctc

SEQ ID NO: 72586 - DNA, 15 bp, Homo sapiens
gtcatcaaaccagct

SEQ ID NO: 72587 - DNA, 15 bp, Homo sapiens
ggtcatcaaaccagc

SEQ ID NO: 72588 - DNA, 15 bp, Homo sapiens
tggtcatcaaaccag

SEQ ID NO: 72589 - DNA, 15 bp, Homo sapiens
atggtcatcaaacca

SEQ ID NO: 72590 - DNA, 15 bp, Homo sapiens
tatggtcatcaaacc

SEQ ID NO: 72591 - DNA, 15 bp, Homo sapiens
ttatggtcatcaaac

SEQ ID NO: 72592 - DNA, 15 bp, Homo sapiens
tttatggtcatcaaa

SEQ ID NO: 72593 - DNA, 15 bp, Homo sapiens
ttttatggtcatcaa

SEQ ID NO: 72594 - DNA, 15 bp, Homo sapiens
tttttatggtcatca

SEQ ID NO: 72595 - DNA, 15 bp, Homo sapiens
gtttttatggtcatc

SEQ ID NO: 72596 - DNA, 15 bp, Homo sapiens
tgtttttatggtcat

SEQ ID NO: 72597 - DNA, 15 bp, Homo sapiens
ctgtttttatggtca

SEQ ID NO: 72598 - DNA, 15 bp, Homo sapiens
actgtttttatggtc

SEQ ID NO: 72599 - DNA, 15 bp, Homo sapiens
tactgtttttatggt

SEQ ID NO: 72600 - DNA, 15 bp, Homo sapiens
gtactgtttttatgg

SEQ ID NO: 72601 - DNA, 15 bp, Homo sapiens
agtactgtttttatg

SEQ ID NO: 72602 - DNA, 15 bp, Homo sapiens
cagtactgtttttat

SEQ ID NO: 72603 - DNA, 15 bp, Homo sapiens
ccagtactgttttta

SEQ ID NO: 72604 - DNA, 15 bp, Homo sapiens
accagtactgttttt

SEQ ID NO: 72605 - DNA, 15 bp, Homo sapiens
caccagtactgtttt

SEQ ID NO: 72606 - DNA, 15 bp, Homo sapiens
gcaccagtactgttt

SEQ ID NO: 72607 - DNA, 15 bp, Homo sapiens
tgcaccagtactgtt

SEQ ID NO: 72608 - DNA, 15 bp, Homo sapiens
gtgcaccagtactgt

SEQ ID NO: 72609 - DNA, 15 bp, Homo sapiens
agtgcaccagtactg

SEQ ID NO: 72610 - DNA, 15 bp, Homo sapiens
aagtgcaccagtact

SEQ ID NO: 72611 - DNA, 15 bp, Homo sapiens
aaagtgcaccagtac

SEQ ID NO: 72612 - DNA, 15 bp, Homo sapiens
gaaagtgcaccagta

SEQ ID NO: 72613 - DNA, 15 bp, Homo sapiens
agaaagtgcaccagt

SEQ ID NO: 72614 - DNA, 15 bp, Homo sapiens
tagaaagtgcaccag

SEQ ID NO: 72615 - DNA, 15 bp, Homo sapiens
gtagaaagtgcacca

SEQ ID NO: 72616 - DNA, 15 bp, Homo sapiens
tgtagaaagtgcacc

SEQ ID NO: 72617 - DNA, 15 bp, Homo sapiens
ttgtagaaagtgcac

SEQ ID NO: 72618 - DNA, 15 bp, Homo sapiens
cttgtagaaagtgca

SEQ ID NO: 72619 - DNA, 15 bp, Homo sapiens
tcttgtagaaagtgc

SEQ ID NO: 72620 - DNA, 15 bp, Homo sapiens
gtcttgtagaaagtg

SEQ ID NO: 72621 - DNA, 15 bp, Homo sapiens
agtcttgtagaaagt

SEQ ID NO: 72622 - DNA, 15 bp, Homo sapiens
aagtcttgtagaaag

SEQ ID NO: 72623 - DNA, 15 bp, Homo sapiens
caagtcttgtagaaa

SEQ ID NO: 72624 - DNA, 15 bp, Homo sapiens
gcaagtcttgtagaa

SEQ ID NO: 72625 - DNA, 15 bp, Homo sapiens
ggcaagtcttgtaga

SEQ ID NO: 72626 - DNA, 15 bp, Homo sapiens
tggcaagtcttgtag

SEQ ID NO: 72627 - DNA, 15 bp, Homo sapiens
gtggcaagtcttgta

SEQ ID NO: 72628 - DNA, 15 bp, Homo sapiens
tgtggcaagtcttgt

SEQ ID NO: 72629 - DNA, 15 bp, Homo sapiens
ctgtggcaagtcttg

SEQ ID NO: 72630 - DNA, 15 bp, Homo sapiens
tctgtggcaagtctt

SEQ ID NO: 72631 - DNA, 15 bp, Homo sapiens
atctgtggcaagtct

SEQ ID NO: 72632 - DNA, 15 bp, Homo sapiens
catctgtggcaagtc

SEQ ID NO: 72633 - DNA, 15 bp, Homo sapiens
gcatctgtggcaagt

SEQ ID NO: 72634 - DNA, 15 bp, Homo sapiens
agcatctgtggcaag

SEQ ID NO: 72635 - DNA, 15 bp, Homo sapiens
cagcatctgtggcaa

SEQ ID NO: 72636 - DNA, 15 bp, Homo sapiens
gcagcatctgtggca

SEQ ID NO: 72637 - DNA, 15 bp, Homo sapiens
ggcagcatctgtggc

SEQ ID NO: 72638 - DNA, 15 bp, Homo sapiens
gggcagcatctgtgg

SEQ ID NO: 72639 - DNA, 15 bp, Homo sapiens
tgggcagcatctgtg

SEQ ID NO: 72640 - DNA, 15 bp, Homo sapiens
ttgggcagcatctgt

SEQ ID NO: 72641 - DNA, 15 bp, Homo sapiens
cttgggcagcatctg

SEQ ID NO: 72642 - DNA, 15 bp, Homo sapiens
acttgggcagcatct

SEQ ID NO: 72643 - DNA, 15 bp, Homo sapiens
gacttgggcagcatc

SEQ ID NO: 72644 - DNA, 15 bp, Homo sapiens
ggacttgggcagcat

SEQ ID NO: 72645 - DNA, 15 bp, Homo sapiens
tggacttgggcagca

SEQ ID NO: 72646 - DNA, 15 bp, Homo sapiens
ttggacttgggcagc

SEQ ID NO: 72647 - DNA, 15 bp, Homo sapiens
cttggacttgggcag

SEQ ID NO: 72648 - DNA, 15 bp, Homo sapiens
ccttggacttgggca

SEQ ID NO: 72649 - DNA, 15 bp, Homo sapiens
tccttggacttgggc

SEQ ID NO: 72650 - DNA, 15 bp, Homo sapiens
ctccttggacttggg

SEQ ID NO: 72651 - DNA, 15 bp, Homo sapiens
actccttggacttgg

SEQ ID NO: 72652 - DNA, 15 bp, Homo sapiens
tactccttggacttg

SEQ ID NO: 72653 - DNA, 15 bp, Homo sapiens
ctactccttggactt

SEQ ID NO: 72654 - DNA, 15 bp, Homo sapiens
cctactccttggact

SEQ ID NO: 72655 - DNA, 15 bp, Homo sapiens
acctactccttggac

SEQ ID NO: 72656 - DNA, 15 bp, Homo sapiens
tacctactccttgga

SEQ ID NO: 72657 - DNA, 15 bp, Homo sapiens
ctacctactccttgg

SEQ ID NO: 72658 - DNA, 15 bp, Homo sapiens
tctacctactccttg

SEQ ID NO: 72659 - DNA, 15 bp, Homo sapiens
gtctacctactcctt

SEQ ID NO: 72660 - DNA, 15 bp, Homo sapiens
agtctacctactcct

SEQ ID NO: 72661 - DNA, 15 bp, Homo sapiens
cagtctacctactcc

SEQ ID NO: 72662 - DNA, 15 bp, Homo sapiens
gcagtctacctactc

SEQ ID NO: 72663 - DNA, 15 bp, Homo sapiens
tgcagtctacctact

SEQ ID NO: 72664 - DNA, 15 bp, Homo sapiens
gtgcagtctacctac

SEQ ID NO: 72665 - DNA, 15 bp, Homo sapiens
agtgcagtctaccta

SEQ ID NO: 72666 - DNA, 15 bp, Homo sapiens
gagtgcagtctacct

SEQ ID NO: 72667 - DNA, 15 bp, Homo sapiens
agagtgcagtctacc

SEQ ID NO: 72668 - DNA, 15 bp, Homo sapiens
tagagtgcagtctac

SEQ ID NO: 72669 - DNA, 15 bp, Homo sapiens
gtagagtgcagtcta

SEQ ID NO: 72670 - DNA, 15 bp, Homo sapiens
agtagagtgcagtct

SEQ ID NO: 72671 - DNA, 15 bp, Homo sapiens
aagtagagtgcagtc

SEQ ID NO: 72672 - DNA, 15 bp, Homo sapiens
caagtagagtgcagt

SEQ ID NO: 72673 - DNA, 15 bp, Homo sapiens
acaagtagagtgcag

SEQ ID NO: 72674 - DNA, 15 bp, Homo sapiens
tacaagtagagtgca

SEQ ID NO: 72675 - DNA, 15 bp, Homo sapiens
ctacaagtagagtgc

SEQ ID NO: 72676 - DNA, 15 bp, Homo sapiens
actacaagtagagtg

SEQ ID NO: 72677 - DNA, 15 bp, Homo sapiens
aactacaagtagagt

SEQ ID NO: 72678 - DNA, 15 bp, Homo sapiens
aaactacaagtagag

SEQ ID NO: 72679 - DNA, 15 bp, Homo sapiens
aaaactacaagtaga

SEQ ID NO: 72680 - DNA, 15 bp, Homo sapiens
aaaaactacaagtag

SEQ ID NO: 72681 - DNA, 15 bp, Homo sapiens
aaaaaactacaagta

SEQ ID NO: 72682 - DNA, 15 bp, Homo sapiens
taaaaaactacaagt

SEQ ID NO: 72683 - DNA, 15 bp, Homo sapiens
gtaaaaaactacaag

SEQ ID NO: 72684 - DNA, 15 bp, Homo sapiens
tgtaaaaaactacaa

SEQ ID NO: 72685 - DNA, 15 bp, Homo sapiens
atgtaaaaaactaca

SEQ ID NO: 72686 - DNA, 15 bp, Homo sapiens
tatgtaaaaaactac

SEQ ID NO: 72687 - DNA, 15 bp, Homo sapiens
ttatgtaaaaaacta

SEQ ID NO: 72688 - DNA, 15 bp, Homo sapiens
gttatgtaaaaaact

SEQ ID NO: 72689 - DNA, 15 bp, Homo sapiens
tgttatgtaaaaaac

SEQ ID NO: 72690 - DNA, 15 bp, Homo sapiens
atgttatgtaaaaaa

SEQ ID NO: 72691 - DNA, 15 bp, Homo sapiens
catgttatgtaaaaa

SEQ ID NO: 72692 - DNA, 15 bp, Homo sapiens
ccatgttatgtaaaa

SEQ ID NO: 72693 - DNA, 15 bp, Homo sapiens
accatgttatgtaaa

SEQ ID NO: 72694 - DNA, 15 bp, Homo sapiens
aaccatgttatgtaa

SEQ ID NO: 72695 - DNA, 15 bp, Homo sapiens
aaaccatgttatgta

SEQ ID NO: 72696 - DNA, 15 bp, Homo sapiens
aaaaccatgttatgt

SEQ ID NO: 72697 - DNA, 15 bp, Homo sapiens
taaaaccatgttatg

SEQ ID NO: 72698 - DNA, 15 bp, Homo sapiens
ctaaaaccatgttat

SEQ ID NO: 72699 - DNA, 15 bp, Homo sapiens
tctaaaaccatgtta

SEQ ID NO: 72700 - DNA, 15 bp, Homo sapiens
atctaaaaccatgtt

SEQ ID NO: 72701 - DNA, 15 bp, Homo sapiens
tatctaaaaccatgt

SEQ ID NO: 72702 - DNA, 15 bp, Homo sapiens
ttatctaaaaccatg

SEQ ID NO: 72703 - DNA, 15 bp, Homo sapiens
cttatctaaaaccat

SEQ ID NO: 72704 - DNA, 15 bp, Homo sapiens
gcttatctaaaacca

SEQ ID NO: 72705 - DNA, 15 bp, Homo sapiens
tgcttatctaaaacc

SEQ ID NO: 72706 - DNA, 15 bp, Homo sapiens
atgcttatctaaaac

SEQ ID NO: 72707 - DNA, 15 bp, Homo sapiens
catgcttatctaaaa

SEQ ID NO: 72708 - DNA, 15 bp, Homo sapiens
acatgcttatctaaa

SEQ ID NO: 72709 - DNA, 15 bp, Homo sapiens
tacatgcttatctaa

SEQ ID NO: 72710 - DNA, 15 bp, Homo sapiens
ctacatgcttatcta

SEQ ID NO: 72711 - DNA, 15 bp, Homo sapiens
gctacatgcttatct

SEQ ID NO: 72712 - DNA, 15 bp, Homo sapiens
tgctacatgcttatc

SEQ ID NO: 72713 - DNA, 15 bp, Homo sapiens
atgctacatgcttat

SEQ ID NO: 72714 - DNA, 15 bp, Homo sapiens
tatgctacatgctta

SEQ ID NO: 72715 - DNA, 15 bp, Homo sapiens
gtatgctacatgctt

SEQ ID NO: 72716 - DNA, 15 bp, Homo sapiens
ggtatgctacatgct

SEQ ID NO: 72717 - DNA, 15 bp, Homo sapiens
gggtatgctacatgc

SEQ ID NO: 72718 - DNA, 15 bp, Homo sapiens
tgggtatgctacatg

SEQ ID NO: 72719 - DNA, 15 bp, Homo sapiens
gtgggtatgctacat

SEQ ID NO: 72720 - DNA, 15 bp, Homo sapiens
tgtgggtatgctaca

SEQ ID NO: 72721 - DNA, 15 bp, Homo sapiens
gtgtgggtatgctac

SEQ ID NO: 72722 - DNA, 15 bp, Homo sapiens
agtgtgggtatgcta

SEQ ID NO: 72723 - DNA, 15 bp, Homo sapiens
aagtgtgggtatgct

SEQ ID NO: 72724 - DNA, 15 bp, Homo sapiens
caagtgtgggtatgc

SEQ ID NO: 72725 - DNA, 15 bp, Homo sapiens
acaagtgtgggtatg

SEQ ID NO: 72726 - DNA, 15 bp, Homo sapiens
aacaagtgtgggtat

SEQ ID NO: 72727 - DNA, 15 bp, Homo sapiens
taacaagtgtgggta

SEQ ID NO: 72728 - DNA, 15 bp, Homo sapiens
ttaacaagtgtgggt

SEQ ID NO: 72729 - DNA, 15 bp, Homo sapiens
cttaacaagtgtggg

SEQ ID NO: 72730 - DNA, 15 bp, Homo sapiens
tcttaacaagtgtgg

SEQ ID NO: 72731 - DNA, 15 bp, Homo sapiens
atcttaacaagtgtg

SEQ ID NO: 72732 - DNA, 15 bp, Homo sapiens
catcttaacaagtgt

SEQ ID NO: 72733 - DNA, 15 bp, Homo sapiens
gcatcttaacaagtg

SEQ ID NO: 72734 - DNA, 15 bp, Homo sapiens
agcatcttaacaagt

SEQ ID NO: 72735 - DNA, 15 bp, Homo sapiens
aagcatcttaacaag

SEQ ID NO: 72736 - DNA, 15 bp, Homo sapiens
gaagcatcttaacaa

SEQ ID NO: 72737 - DNA, 15 bp, Homo sapiens
ggaagcatcttaaca

SEQ ID NO: 72738 - DNA, 15 bp, Homo sapiens
tggaagcatcttaac

SEQ ID NO: 72739 - DNA, 15 bp, Homo sapiens
ctggaagcatcttaa

SEQ ID NO: 72740 - DNA, 15 bp, Homo sapiens
gctggaagcatctta

SEQ ID NO: 72741 - DNA, 15 bp, Homo sapiens
agctggaagcatctt

SEQ ID NO: 72742 - DNA, 15 bp, Homo sapiens
tagctggaagcatct

SEQ ID NO: 72743 - DNA, 15 bp, Homo sapiens
ctagctggaagcatc

SEQ ID NO: 72744 - DNA, 15 bp, Homo sapiens
tctagctggaagcat

SEQ ID NO: 72745 - DNA, 15 bp, Homo sapiens
ttctagctggaagca

SEQ ID NO: 72746 - DNA, 15 bp, Homo sapiens
tttctagctggaagc

SEQ ID NO: 72747 - DNA, 15 bp, Homo sapiens
atttctagctggaag

SEQ ID NO: 72748 - DNA, 15 bp, Homo sapiens
tatttctagctggaa

SEQ ID NO: 72749 - DNA, 15 bp, Homo sapiens
ctatttctagctgga

SEQ ID NO: 72750 - DNA, 15 bp, Homo sapiens
gctatttctagctgg

SEQ ID NO: 72751 - DNA, 15 bp, Homo sapiens
tgctatttctagctg

SEQ ID NO: 72752 - DNA, 15 bp, Homo sapiens
ctgctatttctagct

SEQ ID NO: 72753 - DNA, 15 bp, Homo sapiens
tctgctatttctagc

SEQ ID NO: 72754 - DNA, 15 bp, Homo sapiens
ttctgctatttctag

SEQ ID NO: 72755 - DNA, 15 bp, Homo sapiens
tttctgctatttcta

SEQ ID NO: 72756 - DNA, 15 bp, Homo sapiens
ctttctgctatttct

SEQ ID NO: 72757 - DNA, 15 bp, Homo sapiens
gctttctgctatttc

SEQ ID NO: 72758 - DNA, 15 bp, Homo sapiens
agctttctgctattt

SEQ ID NO: 72759 - DNA, 15 bp, Homo sapiens
gagctttctgctatt

SEQ ID NO: 72760 - DNA, 15 bp, Homo sapiens
tgagctttctgctat

SEQ ID NO: 72761 - DNA, 15 bp, Homo sapiens
ttgagctttctgcta

SEQ ID NO: 72762 - DNA, 15 bp, Homo sapiens
tttgagctttctgct

SEQ ID NO: 72763 - DNA, 15 bp, Homo sapiens
atttgagctttctgc

SEQ ID NO: 72764 - DNA, 15 bp, Homo sapiens
gatttgagctttctg

SEQ ID NO: 72765 - DNA, 15 bp, Homo sapiens
tgatttgagctttct

SEQ ID NO: 72766 - DNA, 15 bp, Homo sapiens
ttgatttgagctttc

SEQ ID NO: 72767 - DNA, 15 bp, Homo sapiens
tttgatttgagcttt

SEQ ID NO: 72768 - DNA, 15 bp, Homo sapiens
ttttgatttgagctt

SEQ ID NO: 72769 - DNA, 15 bp, Homo sapiens
gttttgatttgagct

SEQ ID NO: 72770 - DNA, 15 bp, Homo sapiens
agttttgatttgagc

SEQ ID NO: 72771 - DNA, 15 bp, Homo sapiens
cagttttgatttgag

SEQ ID NO: 72772 - DNA, 15 bp, Homo sapiens
gcagttttgatttga

SEQ ID NO: 72773 - DNA, 15 bp, Homo sapiens
agcagttttgatttg

SEQ ID NO: 72774 - DNA, 15 bp, Homo sapiens
cagcagttttgattt

SEQ ID NO: 72775 - DNA, 15 bp, Homo sapiens
acagcagttttgatt

SEQ ID NO: 72776 - DNA, 15 bp, Homo sapiens
tacagcagttttgat

SEQ ID NO: 72777 - DNA, 15 bp, Homo sapiens
ttacagcagttttga

SEQ ID NO: 72778 - DNA, 15 bp, Homo sapiens
tttacagcagttttg

SEQ ID NO: 72779 - DNA, 15 bp, Homo sapiens
gtttacagcagtttt

SEQ ID NO: 72780 - DNA, 15 bp, Homo sapiens
tgtttacagcagttt

SEQ ID NO: 72781 - DNA, 15 bp, Homo sapiens
ttgtttacagcagtt

SEQ ID NO: 72782 - DNA, 15 bp, Homo sapiens
attgtttacagcagt

SEQ ID NO: 72783 - DNA, 15 bp, Homo sapiens
tattgtttacagcag

SEQ ID NO: 72784 - DNA, 15 bp, Homo sapiens
ttattgtttacagca

SEQ ID NO: 72785 - DNA, 15 bp, Homo sapiens
cttattgtttacagc

SEQ ID NO: 72786 - DNA, 15 bp, Homo sapiens
gcttattgtttacag

SEQ ID NO: 72787 - DNA, 15 bp, Homo sapiens
tgcttattgtttaca

SEQ ID NO: 72788 - DNA, 15 bp, Homo sapiens
ctgcttattgtttac

SEQ ID NO: 72789 - DNA, 15 bp, Homo sapiens
tctgcttattgttta

SEQ ID NO: 72790 - DNA, 15 bp, Homo sapiens
ttctgcttattgttt

SEQ ID NO: 72791 - DNA, 15 bp, Homo sapiens
cttctgcttattgtt

SEQ ID NO: 72792 - DNA, 15 bp, Homo sapiens
tcttctgcttattgt

SEQ ID NO: 72793 - DNA, 15 bp, Homo sapiens
atcttctgcttattg

SEQ ID NO: 72794 - DNA, 15 bp, Homo sapiens
aatcttctgcttatt

SEQ ID NO: 72795 - DNA, 15 bp, Homo sapiens
taatcttctgcttat

SEQ ID NO: 72796 - DNA, 15 bp, Homo sapiens
ttaatcttctgctta

SEQ ID NO: 72797 - DNA, 15 bp, Homo sapiens
tttaatcttctgctt

SEQ ID NO: 72798 - DNA, 15 bp, Homo sapiens
gtttaatcttctgct

SEQ ID NO: 72799 - DNA, 15 bp, Homo sapiens
agtttaatcttctgc

SEQ ID NO: 72800 - DNA, 15 bp, Homo sapiens
aagtttaatcttctg

SEQ ID NO: 72801 - DNA, 15 bp, Homo sapiens
gaagtttaatcttct

SEQ ID NO: 72802 - DNA, 15 bp, Homo sapiens
tgaagtttaatcttc

SEQ ID NO: 72803 - DNA, 15 bp, Homo sapiens
ttgaagtttaatctt

SEQ ID NO: 72804 - DNA, 15 bp, Homo sapiens
cttgaagtttaatct

SEQ ID NO: 72805 - DNA, 15 bp, Homo sapiens
ccttgaagtttaatc

SEQ ID NO: 72806 - DNA, 15 bp, Homo sapiens
accttgaagtttaat

SEQ ID NO: 72807 - DNA, 15 bp, Homo sapiens
aaccttgaagtttaa

SEQ ID NO: 72808 - DNA, 15 bp, Homo sapiens
caaccttgaagttta

SEQ ID NO: 72809 - DNA, 15 bp, Homo sapiens
tcaaccttgaagttt

SEQ ID NO: 72810 - DNA, 15 bp, Homo sapiens
atcaaccttgaagtt

SEQ ID NO: 72811 - DNA, 15 bp, Homo sapiens
aatcaaccttgaagt

SEQ ID NO: 72812 - DNA, 15 bp, Homo sapiens
caatcaaccttgaag

SEQ ID NO: 72813 - DNA, 15 bp, Homo sapiens
tcaatcaaccttgaa

SEQ ID NO: 72814 - DNA, 15 bp, Homo sapiens
gtcaatcaaccttga

SEQ ID NO: 72815 - DNA, 15 bp, Homo sapiens
ggtcaatcaaccttg

SEQ ID NO: 72816 - DNA, 15 bp, Homo sapiens
gggtcaatcaacctt

SEQ ID NO: 72817 - DNA, 15 bp, Homo sapiens
tgggtcaatcaacct

SEQ ID NO: 72818 - DNA, 15 bp, Homo sapiens
gtgggtcaatcaacc

SEQ ID NO: 72819 - DNA, 15 bp, Homo sapiens
agtgggtcaatcaac

SEQ ID NO: 72820 - DNA, 15 bp, Homo sapiens
cagtgggtcaatcaa

SEQ ID NO: 72821 - DNA, 15 bp, Homo sapiens
gcagtgggtcaatca

SEQ ID NO: 72822 - DNA, 15 bp, Homo sapiens
ggcagtgggtcaatc

SEQ ID NO: 72823 - DNA, 15 bp, Homo sapiens
gggcagtgggtcaat

SEQ ID NO: 72824 - DNA, 15 bp, Homo sapiens
ggggcagtgggtcaa

SEQ ID NO: 72825 - DNA, 15 bp, Homo sapiens
gggggcagtgggtca

SEQ ID NO: 72826 - DNA, 15 bp, Homo sapiens
agggggcagtgggtc

SEQ ID NO: 72827 - DNA, 15 bp, Homo sapiens
gagggggcagtgggt

SEQ ID NO: 72828 - DNA, 15 bp, Homo sapiens
ggagggggcagtggg

SEQ ID NO: 72829 - DNA, 15 bp, Homo sapiens
tggagggggcagtgg

SEQ ID NO: 72830 - DNA, 15 bp, Homo sapiens
ctggagggggcagtg

SEQ ID NO: 72831 - DNA, 15 bp, Homo sapiens
tctggagggggcagt

SEQ ID NO: 72832 - DNA, 15 bp, Homo sapiens
atctggagggggcag

SEQ ID NO: 72833 - DNA, 15 bp, Homo sapiens
aatctggagggggca

SEQ ID NO: 72834 - DNA, 15 bp, Homo sapiens
aaatctggagggggc

SEQ ID NO: 72835 - DNA, 15 bp, Homo sapiens
taaatctggaggggg

SEQ ID NO: 72836 - DNA, 15 bp, Homo sapiens
ttaaatctggagggg

SEQ ID NO: 72837 - DNA, 15 bp, Homo sapiens
attaaatctggaggg

SEQ ID NO: 72838 - DNA, 15 bp, Homo sapiens
gattaaatctggagg

SEQ ID NO: 72839 - DNA, 15 bp, Homo sapiens
ggattaaatctggag

SEQ ID NO: 72840 - DNA, 15 bp, Homo sapiens
tggattaaatctgga

SEQ ID NO: 72841 - DNA, 15 bp, Homo sapiens
ctggattaaatctgg

SEQ ID NO: 72842 - DNA, 15 bp, Homo sapiens
tctggattaaatctg

SEQ ID NO: 72843 - DNA, 15 bp, Homo sapiens
ttctggattaaatct

SEQ ID NO: 72844 - DNA, 15 bp, Homo sapiens
attctggattaaatc

SEQ ID NO: 72845 - DNA, 15 bp, Homo sapiens
gattctggattaaat

SEQ ID NO: 72846 - DNA, 15 bp, Homo sapiens
ggattctggattaaa

SEQ ID NO: 72847 - DNA, 15 bp, Homo sapiens
tggattctggattaa

SEQ ID NO: 72848 - DNA, 15 bp, Homo sapiens
ctggattctggatta

SEQ ID NO: 72849 - DNA, 15 bp, Homo sapiens
cctggattctggatt

SEQ ID NO: 72850 - DNA, 15 bp, Homo sapiens
acctggattctggat

SEQ ID NO: 72851 - DNA, 15 bp, Homo sapiens
aacctggattctgga

SEQ ID NO: 72852 - DNA, 15 bp, Homo sapiens
gaacctggattctgg

SEQ ID NO: 72853 - DNA, 15 bp, Homo sapiens
ggaacctggattctg

SEQ ID NO: 72854 - DNA, 15 bp, Homo sapiens
gggaacctggattct

SEQ ID NO: 72855 - DNA, 15 bp, Homo sapiens
agggaacctggattc

SEQ ID NO: 72856 - DNA, 15 bp, Homo sapiens
gagggaacctggatt

SEQ ID NO: 72857 - DNA, 15 bp, Homo sapiens
tgagggaacctggat

SEQ ID NO: 72858 - DNA, 15 bp, Homo sapiens
atgagggaacctgga

SEQ ID NO: 72859 - DNA, 15 bp, Homo sapiens
aatgagggaacctgg

SEQ ID NO: 72860 - DNA, 15 bp, Homo sapiens
caatgagggaacctg

SEQ ID NO: 72861 - DNA, 15 bp, Homo sapiens
ccaatgagggaacct

SEQ ID NO: 72862 - DNA, 15 bp, Homo sapiens
gccaatgagggaacc

SEQ ID NO: 72863 - DNA, 15 bp, Homo sapiens
agccaatgagggaac

SEQ ID NO: 72864 - DNA, 15 bp, Homo sapiens
aagccaatgagggaa

SEQ ID NO: 72865 - DNA, 15 bp, Homo sapiens
aaagccaatgaggga

SEQ ID NO: 72866 - DNA, 15 bp, Homo sapiens
caaagccaatgaggg

SEQ ID NO: 72867 - DNA, 15 bp, Homo sapiens
ccaaagccaatgagg

SEQ ID NO: 72868 - DNA, 15 bp, Homo sapiens
gccaaagccaatgag

SEQ ID NO: 72869 - DNA, 15 bp, Homo sapiens
agccaaagccaatga

SEQ ID NO: 72870 - DNA, 15 bp, Homo sapiens
aagccaaagccaatg

SEQ ID NO: 72871 - DNA, 15 bp, Homo sapiens
aaagccaaagccaat

SEQ ID NO: 72872 - DNA, 15 bp, Homo sapiens
taaagccaaagccaa

SEQ ID NO: 72873 - DNA, 15 bp, Homo sapiens
ataaagccaaagcca

SEQ ID NO: 72874 - DNA, 15 bp, Homo sapiens
gataaagccaaagcc

SEQ ID NO: 72875 - DNA, 15 bp, Homo sapiens
ggataaagccaaagc

SEQ ID NO: 72876 - DNA, 15 bp, Homo sapiens
gggataaagccaaag

SEQ ID NO: 72877 - DNA, 15 bp, Homo sapiens
tgggataaagccaaa

SEQ ID NO: 72878 - DNA, 15 bp, Homo sapiens
ttgggataaagccaa

SEQ ID NO: 72879 - DNA, 15 bp, Homo sapiens
cttgggataaagcca

SEQ ID NO: 72880 - DNA, 15 bp, Homo sapiens
ccttgggataaagcc

SEQ ID NO: 72881 - DNA, 15 bp, Homo sapiens
gccttgggataaagc

SEQ ID NO: 72882 - DNA, 15 bp, Homo sapiens
agccttgggataaag

SEQ ID NO: 72883 - DNA, 15 bp, Homo sapiens
cagccttgggataaa

SEQ ID NO: 72884 - DNA, 15 bp, Homo sapiens
tcagccttgggataa

SEQ ID NO: 72885 - DNA, 15 bp, Homo sapiens
atcagccttgggata

SEQ ID NO: 72886 - DNA, 15 bp, Homo sapiens
aatcagccttgggat

SEQ ID NO: 72887 - DNA, 15 bp, Homo sapiens
gaatcagccttggga

SEQ ID NO: 72888 - DNA, 15 bp, Homo sapiens
ggaatcagccttggg

SEQ ID NO: 72889 - DNA, 15 bp, Homo sapiens
gggaatcagccttgg

SEQ ID NO: 72890 - DNA, 15 bp, Homo sapiens
agggaatcagccttg

SEQ ID NO: 72891 - DNA, 15 bp, Homo sapiens
cagggaatcagcctt

SEQ ID NO: 72892 - DNA, 15 bp, Homo sapiens
gcagggaatcagcct

SEQ ID NO: 72893 - DNA, 15 bp, Homo sapiens
tgcagggaatcagcc

SEQ ID NO: 72894 - DNA, 15 bp, Homo sapiens
ctgcagggaatcagc

SEQ ID NO: 72895 - DNA, 15 bp, Homo sapiens
actgcagggaatcag

SEQ ID NO: 72896 - DNA, 15 bp, Homo sapiens
gactgcagggaatca

SEQ ID NO: 72897 - DNA, 15 bp, Homo sapiens
tgactgcagggaatc

SEQ ID NO: 72898 - DNA, 15 bp, Homo sapiens
gtgactgcagggaat

SEQ ID NO: 72899 - DNA, 15 bp, Homo sapiens
tgtgactgcagggaa

SEQ ID NO: 72900 - DNA, 15 bp, Homo sapiens
ctgtgactgcaggga

SEQ ID NO: 72901 - DNA, 15 bp, Homo sapiens
cctgtgactgcaggg

SEQ ID NO: 72902 - DNA, 15 bp, Homo sapiens
tcctgtgactgcagg

SEQ ID NO: 72903 - DNA, 15 bp, Homo sapiens
atcctgtgactgcag

SEQ ID NO: 72904 - DNA, 15 bp, Homo sapiens
catcctgtgactgca

SEQ ID NO: 72905 - DNA, 15 bp, Homo sapiens
ccatcctgtgactgc

SEQ ID NO: 72906 - DNA, 15 bp, Homo sapiens
gccatcctgtgactg

SEQ ID NO: 72907 - DNA, 15 bp, Homo sapiens
agccatcctgtgact

SEQ ID NO: 72908 - DNA, 15 bp, Homo sapiens
cagccatcctgtgac

SEQ ID NO: 72909 - DNA, 15 bp, Homo sapiens
gcagccatcctgtga

SEQ ID NO: 72910 - DNA, 15 bp, Homo sapiens
agcagccatcctgtg

SEQ ID NO: 72911 - DNA, 15 bp, Homo sapiens
tagcagccatcctgt

SEQ ID NO: 72912 - DNA, 15 bp, Homo sapiens
ttagcagccatcctg

SEQ ID NO: 72913 - DNA, 15 bp, Homo sapiens
attagcagccatcct

SEQ ID NO: 72914 - DNA, 15 bp, Homo sapiens
tattagcagccatcc

SEQ ID NO: 72915 - DNA, 15 bp, Homo sapiens
ctattagcagccatc

SEQ ID NO: 72916 - DNA, 15 bp, Homo sapiens
actattagcagccat

SEQ ID NO: 72917 - DNA, 15 bp, Homo sapiens
tactattagcagcca

SEQ ID NO: 72918 - DNA, 15 bp, Homo sapiens
ttactattagcagcc

SEQ ID NO: 72919 - DNA, 15 bp, Homo sapiens
attactattagcagc

SEQ ID NO: 72920 - DNA, 15 bp, Homo sapiens
aattactattagcag

SEQ ID NO: 72921 - DNA, 15 bp, Homo sapiens
taattactattagca

SEQ ID NO: 72922 - DNA, 15 bp, Homo sapiens
ctaattactattagc

SEQ ID NO: 72923 - DNA, 15 bp, Homo sapiens
tctaattactattag

SEQ ID NO: 72924 - DNA, 15 bp, Homo sapiens
ttctaattactatta

SEQ ID NO: 72925 - DNA, 15 bp, Homo sapiens
gttctaattactatt

SEQ ID NO: 72926 - DNA, 15 bp, Homo sapiens
agttctaattactat

SEQ ID NO: 72927 - DNA, 15 bp, Homo sapiens
tagttctaattacta

SEQ ID NO: 72928 - DNA, 15 bp, Homo sapiens
gtagttctaattact

SEQ ID NO: 72929 - DNA, 15 bp, Homo sapiens
tgtagttctaattac

SEQ ID NO: 72930 - DNA, 15 bp, Homo sapiens
ctgtagttctaatta

SEQ ID NO: 72931 - DNA, 15 bp, Homo sapiens
cctgtagttctaatt

SEQ ID NO: 72932 - DNA, 15 bp, Homo sapiens
gcctgtagttctaat

SEQ ID NO: 72933 - DNA, 15 bp, Homo sapiens
agcctgtagttctaa

SEQ ID NO: 72934 - DNA, 15 bp, Homo sapiens
aagcctgtagttcta

SEQ ID NO: 72935 - DNA, 15 bp, Homo sapiens
gaagcctgtagttct

SEQ ID NO: 72936 - DNA, 15 bp, Homo sapiens
ggaagcctgtagttc

SEQ ID NO: 72937 - DNA, 15 bp, Homo sapiens
aggaagcctgtagtt

SEQ ID NO: 72938 - DNA, 15 bp, Homo sapiens
aaggaagcctgtagt

SEQ ID NO: 72939 - DNA, 15 bp, Homo sapiens
taaggaagcctgtag

SEQ ID NO: 72940 - DNA, 15 bp, Homo sapiens
ataaggaagcctgta

SEQ ID NO: 72941 - DNA, 15 bp, Homo sapiens
aataaggaagcctgt

SEQ ID NO: 72942 - DNA, 15 bp, Homo sapiens
aaataaggaagcctg

SEQ ID NO: 72943 - DNA, 15 bp, Homo sapiens
gaaataaggaagcct

SEQ ID NO: 72944 - DNA, 15 bp, Homo sapiens
ggaaataaggaagcc

SEQ ID NO: 72945 - DNA, 15 bp, Homo sapiens
gggaaataaggaagc

SEQ ID NO: 72946 - DNA, 15 bp, Homo sapiens
tgggaaataaggaag

SEQ ID NO: 72947 - DNA, 15 bp, Homo sapiens
atgggaaataaggaa

SEQ ID NO: 72948 - DNA, 15 bp, Homo sapiens
gatgggaaataagga

SEQ ID NO: 72949 - DNA, 15 bp, Homo sapiens
ggatgggaaataagg

SEQ ID NO: 72950 - DNA, 15 bp, Homo sapiens
tggatgggaaataag

SEQ ID NO: 72951 - DNA, 15 bp, Homo sapiens
ctggatgggaaataa

SEQ ID NO: 72952 - DNA, 15 bp, Homo sapiens
actggatgggaaata

SEQ ID NO: 72953 - DNA, 15 bp, Homo sapiens
cactggatgggaaat

SEQ ID NO: 72954 - DNA, 15 bp, Homo sapiens
tcactggatgggaaa

SEQ ID NO: 72955 - DNA, 15 bp, Homo sapiens
ttcactggatgggaa

SEQ ID NO: 72956 - DNA, 15 bp, Homo sapiens
tttcactggatggga

SEQ ID NO: 72957 - DNA, 15 bp, Homo sapiens
ctttcactggatggg

SEQ ID NO: 72958 - DNA, 15 bp, Homo sapiens
tctttcactggatgg

SEQ ID NO: 72959 - DNA, 15 bp, Homo sapiens
ctctttcactggatg

SEQ ID NO: 72960 - DNA, 15 bp, Homo sapiens
tctctttcactggat

SEQ ID NO: 72961 - DNA, 15 bp, Homo sapiens
ctctctttcactgga

SEQ ID NO: 72962 - DNA, 15 bp, Homo sapiens
gctctctttcactgg

SEQ ID NO: 72963 - DNA, 15 bp, Homo sapiens
tgctctctttcactg

SEQ ID NO: 72964 - DNA, 15 bp, Homo sapiens
gtgctctctttcact

SEQ ID NO: 72965 - DNA, 15 bp, Homo sapiens
tgtgctctctttcac

SEQ ID NO: 72966 - DNA, 15 bp, Homo sapiens
gtgtgctctctttca

SEQ ID NO: 72967 - DNA, 15 bp, Homo sapiens
tgtgtgctctctttc

SEQ ID NO: 72968 - DNA, 15 bp, Homo sapiens
gtgtgtgctctcttt

SEQ ID NO: 72969 - DNA, 15 bp, Homo sapiens
ggtgtgtgctctctt

SEQ ID NO: 72970 - DNA, 15 bp, Homo sapiens
aggtgtgtgctctct

SEQ ID NO: 72971 - DNA, 15 bp, Homo sapiens
gaggtgtgtgctctc

SEQ ID NO: 72972 - DNA, 15 bp, Homo sapiens
agaggtgtgtgctct

SEQ ID NO: 72973 - DNA, 15 bp, Homo sapiens
tagaggtgtgtgctc

SEQ ID NO: 72974 - DNA, 15 bp, Homo sapiens
gtagaggtgtgtgct

SEQ ID NO: 72975 - DNA, 15 bp, Homo sapiens
ggtagaggtgtgtgc

SEQ ID NO: 72976 - DNA, 15 bp, Homo sapiens
aggtagaggtgtgtg

SEQ ID NO: 72977 - DNA, 15 bp, Homo sapiens
gaggtagaggtgtgt

SEQ ID NO: 72978 - DNA, 15 bp, Homo sapiens
tgaggtagaggtgtg

SEQ ID NO: 72979 - DNA, 15 bp, Homo sapiens
ttgaggtagaggtgt

SEQ ID NO: 72980 - DNA, 15 bp, Homo sapiens
gttgaggtagaggtg

SEQ ID NO: 72981 - DNA, 15 bp, Homo sapiens
ggttgaggtagaggt

SEQ ID NO: 72982 - DNA, 15 bp, Homo sapiens
tggttgaggtagagg

SEQ ID NO: 72983 - DNA, 15 bp, Homo sapiens
gtggttgaggtagag

SEQ ID NO: 72984 - DNA, 15 bp, Homo sapiens
ggtggttgaggtaga

SEQ ID NO: 72985 - DNA, 15 bp, Homo sapiens
tggtggttgaggtag

SEQ ID NO: 72986 - DNA, 15 bp, Homo sapiens
ttggtggttgaggta

SEQ ID NO: 72987 - DNA, 15 bp, Homo sapiens
tttggtggttgaggt

SEQ ID NO: 72988 - DNA, 15 bp, Homo sapiens
gtttggtggttgagg

SEQ ID NO: 72989 - DNA, 15 bp, Homo sapiens
tgtttggtggttgag

SEQ ID NO: 72990 - DNA, 15 bp, Homo sapiens
ttgtttggtggttga

SEQ ID NO: 72991 - DNA, 15 bp, Homo sapiens
tttgtttggtggttg

SEQ ID NO: 72992 - DNA, 15 bp, Homo sapiens
ttttgtttggtggtt

SEQ ID NO: 72993 - DNA, 15 bp, Homo sapiens
tttttgtttggtggt

SEQ ID NO: 72994 - DNA, 15 bp, Homo sapiens
gtttttgtttggtgg

SEQ ID NO: 72995 - DNA, 15 bp, Homo sapiens
ggtttttgtttggtg

SEQ ID NO: 72996 - DNA, 15 bp, Homo sapiens
gggtttttgtttggt

SEQ ID NO: 72997 - DNA, 15 bp, Homo sapiens
agggtttttgtttgg

SEQ ID NO: 72998 - DNA, 15 bp, Homo sapiens
aagggtttttgtttg

SEQ ID NO: 72999 - DNA, 15 bp, Homo sapiens
aaagggtttttgttt

SEQ ID NO: 73000 - DNA, 15 bp, Homo sapiens
caaagggtttttgtt

SEQ ID NO: 73001 - DNA, 15 bp, Homo sapiens
gcaaagggtttttgt

SEQ ID NO: 73002 - DNA, 15 bp, Homo sapiens
agcaaagggtttttg

SEQ ID NO: 73003 - DNA, 15 bp, Homo sapiens
cagcaaagggttttt

SEQ ID NO: 73004 - DNA, 15 bp, Homo sapiens
tcagcaaagggtttt

SEQ ID NO: 73005 - DNA, 15 bp, Homo sapiens
ttcagcaaagggttt

SEQ ID NO: 73006 - DNA, 15 bp, Homo sapiens
tttcagcaaagggtt

SEQ ID NO: 73007 - DNA, 15 bp, Homo sapiens
atttcagcaaagggt

SEQ ID NO: 73008 - DNA, 15 bp, Homo sapiens
gatttcagcaaaggg

SEQ ID NO: 73009 - DNA, 15 bp, Homo sapiens
agatttcagcaaagg

SEQ ID NO: 73010 - DNA, 15 bp, Homo sapiens
tagatttcagcaaag

SEQ ID NO: 73011 - DNA, 15 bp, Homo sapiens
ttagatttcagcaaa

SEQ ID NO: 73012 - DNA, 15 bp, Homo sapiens
attagatttcagcaa

SEQ ID NO: 73013 - DNA, 15 bp, Homo sapiens
aattagatttcagca

SEQ ID NO: 73014 - DNA, 15 bp, Homo sapiens
aaattagatttcagc

SEQ ID NO: 73015 - DNA, 15 bp, Homo sapiens
caaattagatttcag

SEQ ID NO: 73016 - DNA, 15 bp, Homo sapiens
ccaaattagatttca

SEQ ID NO: 73017 - DNA, 15 bp, Homo sapiens
cccaaattagatttc

SEQ ID NO: 73018 - DNA, 15 bp, Homo sapiens
gcccaaattagattt

SEQ ID NO: 73019 - DNA, 15 bp, Homo sapiens
agcccaaattagatt

SEQ ID NO: 73020 - DNA, 15 bp, Homo sapiens
tagcccaaattagat

SEQ ID NO: 73021 - DNA, 15 bp, Homo sapiens
ttagcccaaattaga

SEQ ID NO: 73022 - DNA, 15 bp, Homo sapiens
attagcccaaattag

SEQ ID NO: 73023 - DNA, 15 bp, Homo sapiens
aattagcccaaatta

SEQ ID NO: 73024 - DNA, 15 bp, Homo sapiens
aaattagcccaaatt

SEQ ID NO: 73025 - DNA, 15 bp, Homo sapiens
caaattagcccaaat

SEQ ID NO: 73026 - DNA, 15 bp, Homo sapiens
ccaaattagcccaaa

SEQ ID NO: 73027 - DNA, 15 bp, Homo sapiens
cccaaattagcccaa

SEQ ID NO: 73028 - DNA, 15 bp, Homo sapiens
acccaaattagccca

SEQ ID NO: 73029 - DNA, 15 bp, Homo sapiens
gacccaaattagccc

SEQ ID NO: 73030 - DNA, 15 bp, Homo sapiens
tgacccaaattagcc

SEQ ID NO: 73031 - DNA, 15 bp, Homo sapiens
gtgacccaaattagc

SEQ ID NO: 73032 - DNA, 15 bp, Homo sapiens
tgtgacccaaattag

SEQ ID NO: 73033 - DNA, 15 bp, Homo sapiens
atgtgacccaaatta

SEQ ID NO: 73034 - DNA, 15 bp, Homo sapiens
catgtgacccaaatt

SEQ ID NO: 73035 - DNA, 15 bp, Homo sapiens
gcatgtgacccaaat

SEQ ID NO: 73036 - DNA, 15 bp, Homo sapiens
ggcatgtgacccaaa

SEQ ID NO: 73037 - DNA, 15 bp, Homo sapiens
gggcatgtgacccaa

SEQ ID NO: 73038 - DNA, 15 bp, Homo sapiens
ggggcatgtgaccca

SEQ ID NO: 73039 - DNA, 15 bp, Homo sapiens
tggggcatgtgaccc

SEQ ID NO: 73040 - DNA, 15 bp, Homo sapiens
gtggggcatgtgacc

SEQ ID NO: 73041 - DNA, 15 bp, Homo sapiens
ggtggggcatgtgac

SEQ ID NO: 73042 - DNA, 15 bp, Homo sapiens
gggtggggcatgtga

SEQ ID NO: 73043 - DNA, 15 bp, Homo sapiens
agggtggggcatgtg

SEQ ID NO: 73044 - DNA, 15 bp, Homo sapiens
cagggtggggcatgt

SEQ ID NO: 73045 - DNA, 15 bp, Homo sapiens
tcagggtggggcatg

SEQ ID NO: 73046 - DNA, 15 bp, Homo sapiens
ttcagggtggggcat

SEQ ID NO: 73047 - DNA, 15 bp, Homo sapiens
gttcagggtggggca

SEQ ID NO: 73048 - DNA, 15 bp, Homo sapiens
ggttcagggtggggc

SEQ ID NO: 73049 - DNA, 15 bp, Homo sapiens
tggttcagggtgggg

SEQ ID NO: 73050 - DNA, 15 bp, Homo sapiens
gtggttcagggtggg

SEQ ID NO: 73051 - DNA, 15 bp, Homo sapiens
agtggttcagggtgg

SEQ ID NO: 73052 - DNA, 15 bp, Homo sapiens
cagtggttcagggtg

SEQ ID NO: 73053 - DNA, 15 bp, Homo sapiens
acagtggttcagggt

SEQ ID NO: 73054 - DNA, 15 bp, Homo sapiens
gacagtggttcaggg

SEQ ID NO: 73055 - DNA, 15 bp, Homo sapiens
agacagtggttcagg

SEQ ID NO: 73056 - DNA, 15 bp, Homo sapiens
gagacagtggttcag

SEQ ID NO: 73057 - DNA, 15 bp, Homo sapiens
ggagacagtggttca

SEQ ID NO: 73058 - DNA, 15 bp, Homo sapiens
tggagacagtggttc

SEQ ID NO: 73059 - DNA, 15 bp, Homo sapiens
ctggagacagtggtt

SEQ ID NO: 73060 - DNA, 15 bp, Homo sapiens
cctggagacagtggt

SEQ ID NO: 73061 - DNA, 15 bp, Homo sapiens
ccctggagacagtgg

SEQ ID NO: 73062 - DNA, 15 bp, Homo sapiens
cccctggagacagtg

SEQ ID NO: 73063 - DNA, 15 bp, Homo sapiens
tcccctggagacagt

SEQ ID NO: 73064 - DNA, 15 bp, Homo sapiens
atcccctggagacag

SEQ ID NO: 73065 - DNA, 15 bp, Homo sapiens
catcccctggagaca

SEQ ID NO: 73066 - DNA, 15 bp, Homo sapiens
ccatcccctggagac

SEQ ID NO: 73067 - DNA, 15 bp, Homo sapiens
accatcccctggaga

SEQ ID NO: 73068 - DNA, 15 bp, Homo sapiens
caccatcccctggag

SEQ ID NO: 73069 - DNA, 15 bp, Homo sapiens
ccaccatcccctgga

SEQ ID NO: 73070 - DNA, 15 bp, Homo sapiens
accaccatcccctgg

SEQ ID NO: 73071 - DNA, 15 bp, Homo sapiens
caccaccatcccctg

SEQ ID NO: 73072 - DNA, 15 bp, Homo sapiens
acaccaccatcccct

SEQ ID NO: 73073 - DNA, 15 bp, Homo sapiens
aacaccaccatcccc

SEQ ID NO: 73074 - DNA, 15 bp, Homo sapiens
gaacaccaccatccc

SEQ ID NO: 73075 - DNA, 15 bp, Homo sapiens
agaacaccaccatcc

SEQ ID NO: 73076 - DNA, 15 bp, Homo sapiens
cagaacaccaccatc

SEQ ID NO: 73077 - DNA, 15 bp, Homo sapiens
tcagaacaccaccat

SEQ ID NO: 73078 - DNA, 15 bp, Homo sapiens
ctcagaacaccacca

SEQ ID NO: 73079 - DNA, 15 bp, Homo sapiens
actcagaacaccacc

SEQ ID NO: 73080 - DNA, 15 bp, Homo sapiens
cactcagaacaccac

SEQ ID NO: 73081 - DNA, 15 bp, Homo sapiens
ccactcagaacacca

SEQ ID NO: 73082 - DNA, 15 bp, Homo sapiens
gccactcagaacacc

SEQ ID NO: 73083 - DNA, 15 bp, Homo sapiens
ggccactcagaacac

SEQ ID NO: 73084 - DNA, 15 bp, Homo sapiens
aggccactcagaaca

SEQ ID NO: 73085 - DNA, 15 bp, Homo sapiens
taggccactcagaac

SEQ ID NO: 73086 - DNA, 15 bp, Homo sapiens
gtaggccactcagaa

SEQ ID NO: 73087 - DNA, 15 bp, Homo sapiens
cgtaggccactcaga

SEQ ID NO: 73088 - DNA, 15 bp, Homo sapiens
acgtaggccactcag

SEQ ID NO: 73089 - DNA, 15 bp, Homo sapiens
gacgtaggccactca

SEQ ID NO: 73090 - DNA, 15 bp, Homo sapiens
ggacgtaggccactc

SEQ ID NO: 73091 - DNA, 15 bp, Homo sapiens
gggacgtaggccact

SEQ ID NO: 73092 - DNA, 15 bp, Homo sapiens
ggggacgtaggccac

SEQ ID NO: 73093 - DNA, 15 bp, Homo sapiens
gggggacgtaggcca

SEQ ID NO: 73094 - DNA, 15 bp, Homo sapiens
tgggggacgtaggcc

SEQ ID NO: 73095 - DNA, 15 bp, Homo sapiens
gtgggggacgtaggc

SEQ ID NO: 73096 - DNA, 15 bp, Homo sapiens
ggtgggggacgtagg

SEQ ID NO: 73097 - DNA, 15 bp, Homo sapiens
gggtgggggacgtag

SEQ ID NO: 73098 - DNA, 15 bp, Homo sapiens
ggggtgggggacgta

SEQ ID NO: 73099 - DNA, 15 bp, Homo sapiens
aggggtgggggacgt

SEQ ID NO: 73100 - DNA, 15 bp, Homo sapiens
aaggggtgggggacg

SEQ ID NO: 73101 - DNA, 15 bp, Homo sapiens
aaaggggtgggggac

SEQ ID NO: 73102 - DNA, 15 bp, Homo sapiens
taaaggggtggggga

SEQ ID NO: 73103 - DNA, 15 bp, Homo sapiens
ctaaaggggtggggg

SEQ ID NO: 73104 - DNA, 15 bp, Homo sapiens
gctaaaggggtgggg

SEQ ID NO: 73105 - DNA, 15 bp, Homo sapiens
agctaaaggggtggg

SEQ ID NO: 73106 - DNA, 15 bp, Homo sapiens
cagctaaaggggtgg

SEQ ID NO: 73107 - DNA, 15 bp, Homo sapiens
tcagctaaaggggtg

SEQ ID NO: 73108 - DNA, 15 bp, Homo sapiens
ctcagctaaaggggt

SEQ ID NO: 73109 - DNA, 15 bp, Homo sapiens
cctcagctaaagggg

SEQ ID NO: 73110 - DNA, 15 bp, Homo sapiens
acctcagctaaaggg

SEQ ID NO: 73111 - DNA, 15 bp, Homo sapiens
cacctcagctaaagg

SEQ ID NO: 73112 - DNA, 15 bp, Homo sapiens
ccacctcagctaaag

SEQ ID NO: 73113 - DNA, 15 bp, Homo sapiens
cccacctcagctaaa

SEQ ID NO: 73114 - DNA, 15 bp, Homo sapiens
acccacctcagctaa

SEQ ID NO: 73115 - DNA, 15 bp, Homo sapiens
aacccacctcagcta

SEQ ID NO: 73116 - DNA, 15 bp, Homo sapiens
taacccacctcagct

SEQ ID NO: 73117 - DNA, 15 bp, Homo sapiens
gtaacccacctcagc

SEQ ID NO: 73118 - DNA, 15 bp, Homo sapiens
agtaacccacctcag

SEQ ID NO: 73119 - DNA, 15 bp, Homo sapiens
aagtaacccacctca

SEQ ID NO: 73120 - DNA, 15 bp, Homo sapiens
aaagtaacccacctc

SEQ ID NO: 73121 - DNA, 15 bp, Homo sapiens
caaagtaacccacct

SEQ ID NO: 73122 - DNA, 15 bp, Homo sapiens
gcaaagtaacccacc

SEQ ID NO: 73123 - DNA, 15 bp, Homo sapiens
tgcaaagtaacccac

SEQ ID NO: 73124 - DNA, 15 bp, Homo sapiens
ctgcaaagtaaccca

SEQ ID NO: 73125 - DNA, 15 bp, Homo sapiens
gctgcaaagtaaccc

SEQ ID NO: 73126 - DNA, 15 bp, Homo sapiens
agctgcaaagtaacc

SEQ ID NO: 73127 - DNA, 15 bp, Homo sapiens
gagctgcaaagtaac

SEQ ID NO: 73128 - DNA, 15 bp, Homo sapiens
tgagctgcaaagtaa

SEQ ID NO: 73129 - DNA, 15 bp, Homo sapiens
gtgagctgcaaagta

SEQ ID NO: 73130 - DNA, 15 bp, Homo sapiens
agtgagctgcaaagt

SEQ ID NO: 73131 - DNA, 15 bp, Homo sapiens
cagtgagctgcaaag

SEQ ID NO: 73132 - DNA, 15 bp, Homo sapiens
gcagtgagctgcaaa

SEQ ID NO: 73133 - DNA, 15 bp, Homo sapiens
agcagtgagctgcaa

SEQ ID NO: 73134 - DNA, 15 bp, Homo sapiens
aagcagtgagctgca

SEQ ID NO: 73135 - DNA, 15 bp, Homo sapiens
gaagcagtgagctgc

SEQ ID NO: 73136 - DNA, 15 bp, Homo sapiens
ggaagcagtgagctg

SEQ ID NO: 73137 - DNA, 15 bp, Homo sapiens
tggaagcagtgagct

SEQ ID NO: 73138 - DNA, 15 bp, Homo sapiens
gtggaagcagtgagc

SEQ ID NO: 73139 - DNA, 15 bp, Homo sapiens
tgtggaagcagtgag

SEQ ID NO: 73140 - DNA, 15 bp, Homo sapiens
gtgtggaagcagtga

SEQ ID NO: 73141 - DNA, 15 bp, Homo sapiens
tgtgtggaagcagtg

SEQ ID NO: 73142 - DNA, 15 bp, Homo sapiens
ttgtgtggaagcagt

SEQ ID NO: 73143 - DNA, 15 bp, Homo sapiens
gttgtgtggaagcag

SEQ ID NO: 73144 - DNA, 15 bp, Homo sapiens
tgttgtgtggaagca

SEQ ID NO: 73145 - DNA, 15 bp, Homo sapiens
ctgttgtgtggaagc

SEQ ID NO: 73146 - DNA, 15 bp, Homo sapiens
cctgttgtgtggaag

SEQ ID NO: 73147 - DNA, 15 bp, Homo sapiens
tcctgttgtgtggaa

SEQ ID NO: 73148 - DNA, 15 bp, Homo sapiens
ctcctgttgtgtgga

SEQ ID NO: 73149 - DNA, 15 bp, Homo sapiens
tctcctgttgtgtgg

SEQ ID NO: 73150 - DNA, 15 bp, Homo sapiens
ttctcctgttgtgtg

SEQ ID NO: 73151 - DNA, 15 bp, Homo sapiens
cttctcctgttgtgt

SEQ ID NO: 73152 - DNA, 15 bp, Homo sapiens
ccttctcctgttgtg

SEQ ID NO: 73153 - DNA, 15 bp, Homo sapiens
tccttctcctgttgt

SEQ ID NO: 73154 - DNA, 15 bp, Homo sapiens
ctccttctcctgttg

SEQ ID NO: 73155 - DNA, 15 bp, Homo sapiens
cctccttctcctgtt

SEQ ID NO: 73156 - DNA, 15 bp, Homo sapiens
tcctccttctcctgt

SEQ ID NO: 73157 - DNA, 15 bp, Homo sapiens
ttcctccttctcctg

SEQ ID NO: 73158 - DNA, 15 bp, Homo sapiens
attcctccttctcct

SEQ ID NO: 73159 - DNA, 15 bp, Homo sapiens
cattcctccttctcc

SEQ ID NO: 73160 - DNA, 15 bp, Homo sapiens
ccattcctccttctc

SEQ ID NO: 73161 - DNA, 15 bp, Homo sapiens
tccattcctccttct

SEQ ID NO: 73162 - DNA, 15 bp, Homo sapiens
atccattcctccttc

SEQ ID NO: 73163 - DNA, 15 bp, Homo sapiens
catccattcctcctt

SEQ ID NO: 73164 - DNA, 15 bp, Homo sapiens
gcatccattcctcct

SEQ ID NO: 73165 - DNA, 15 bp, Homo sapiens
tgcatccattcctcc

SEQ ID NO: 73166 - DNA, 15 bp, Homo sapiens
ctgcatccattcctc

SEQ ID NO: 73167 - DNA, 15 bp, Homo sapiens
tctgcatccattcct

SEQ ID NO: 73168 - DNA, 15 bp, Homo sapiens
ctctgcatccattcc

SEQ ID NO: 73169 - DNA, 15 bp, Homo sapiens
tctctgcatccattc

SEQ ID NO: 73170 - DNA, 15 bp, Homo sapiens
ctctctgcatccatt

SEQ ID NO: 73171 - DNA, 15 bp, Homo sapiens
gctctctgcatccat

SEQ ID NO: 73172 - DNA, 15 bp, Homo sapiens
agctctctgcatcca

SEQ ID NO: 73173 - DNA, 15 bp, Homo sapiens
cagctctctgcatcc

SEQ ID NO: 73174 - DNA, 15 bp, Homo sapiens
tcagctctctgcatc

SEQ ID NO: 73175 - DNA, 15 bp, Homo sapiens
gtcagctctctgcat

SEQ ID NO: 73176 - DNA, 15 bp, Homo sapiens
agtcagctctctgca

SEQ ID NO: 73177 - DNA, 15 bp, Homo sapiens
cagtcagctctctgc

SEQ ID NO: 73178 - DNA, 15 bp, Homo sapiens
gcagtcagctctctg

SEQ ID NO: 73179 - DNA, 15 bp, Homo sapiens
tgcagtcagctctct

SEQ ID NO: 73180 - DNA, 15 bp, Homo sapiens
ttgcagtcagctctc

SEQ ID NO: 73181 - DNA, 15 bp, Homo sapiens
attgcagtcagctct

SEQ ID NO: 73182 - DNA, 15 bp, Homo sapiens
cattgcagtcagctc

SEQ ID NO: 73183 - DNA, 15 bp, Homo sapiens
acattgcagtcagct

SEQ ID NO: 73184 - DNA, 15 bp, Homo sapiens
aacattgcagtcagc

SEQ ID NO: 73185 - DNA, 15 bp, Homo sapiens
caacattgcagtcag

SEQ ID NO: 73186 - DNA, 15 bp, Homo sapiens
gcaacattgcagtca

SEQ ID NO: 73187 - DNA, 15 bp, Homo sapiens
agcaacattgcagtc

SEQ ID NO: 73188 - DNA, 15 bp, Homo sapiens
tagcaacattgcagt

SEQ ID NO: 73189 - DNA, 15 bp, Homo sapiens
gtagcaacattgcag

SEQ ID NO: 73190 - DNA, 15 bp, Homo sapiens
tgtagcaacattgca

SEQ ID NO: 73191 - DNA, 15 bp, Homo sapiens
ctgtagcaacattgc

SEQ ID NO: 73192 - DNA, 15 bp, Homo sapiens
gctgtagcaacattg

SEQ ID NO: 73193 - DNA, 15 bp, Homo sapiens
ggctgtagcaacatt

SEQ ID NO: 73194 - DNA, 15 bp, Homo sapiens
tggctgtagcaacat

SEQ ID NO: 73195 - DNA, 15 bp, Homo sapiens
gtggctgtagcaaca

SEQ ID NO: 73196 - DNA, 15 bp, Homo sapiens
ggtggctgtagcaac

SEQ ID NO: 73197 - DNA, 15 bp, Homo sapiens
aggtggctgtagcaa

SEQ ID NO: 73198 - DNA, 15 bp, Homo sapiens
aaggtggctgtagca

SEQ ID NO: 73199 - DNA, 15 bp, Homo sapiens
aaaggtggctgtagc

SEQ ID NO: 73200 - DNA, 15 bp, Homo sapiens
caaaggtggctgtag

SEQ ID NO: 73201 - DNA, 15 bp, Homo sapiens
acaaaggtggctgta

SEQ ID NO: 73202 - DNA, 15 bp, Homo sapiens
aacaaaggtggctgt

SEQ ID NO: 73203 - DNA, 15 bp, Homo sapiens
aaacaaaggtggctg

SEQ ID NO: 73204 - DNA, 15 bp, Homo sapiens
aaaacaaaggtggct

SEQ ID NO: 73205 - DNA, 15 bp, Homo sapiens
gaaaacaaaggtggc

SEQ ID NO: 73206 - DNA, 15 bp, Homo sapiens
agaaaacaaaggtgg

SEQ ID NO: 73207 - DNA, 15 bp, Homo sapiens
cagaaaacaaaggtg

SEQ ID NO: 73208 - DNA, 15 bp, Homo sapiens
tcagaaaacaaaggt

SEQ ID NO: 73209 - DNA, 15 bp, Homo sapiens
ctcagaaaacaaagg

SEQ ID NO: 73210 - DNA, 15 bp, Homo sapiens
actcagaaaacaaag

SEQ ID NO: 73211 - DNA, 15 bp, Homo sapiens
cactcagaaaacaaa

SEQ ID NO: 73212 - DNA, 15 bp, Homo sapiens
ccactcagaaaacaa

SEQ ID NO: 73213 - DNA, 15 bp, Homo sapiens
accactcagaaaaca

SEQ ID NO: 73214 - DNA, 15 bp, Homo sapiens
taccactcagaaaac

SEQ ID NO: 73215 - DNA, 15 bp, Homo sapiens
gtaccactcagaaaa

SEQ ID NO: 73216 - DNA, 15 bp, Homo sapiens
tgtaccactcagaaa

SEQ ID NO: 73217 - DNA, 15 bp, Homo sapiens
ttgtaccactcagaa

SEQ ID NO: 73218 - DNA, 15 bp, Homo sapiens
gttgtaccactcaga

SEQ ID NO: 73219 - DNA, 15 bp, Homo sapiens
tgttgtaccactcag

SEQ ID NO: 73220 - DNA, 15 bp, Homo sapiens
gtgttgtaccactca

SEQ ID NO: 73221 - DNA, 15 bp, Homo sapiens
agtgttgtaccactc

SEQ ID NO: 73222 - DNA, 15 bp, Homo sapiens
tagtgttgtaccact

SEQ ID NO: 73223 - DNA, 15 bp, Homo sapiens
ttagtgttgtaccac

SEQ ID NO: 73224 - DNA, 15 bp, Homo sapiens
attagtgttgtacca

SEQ ID NO: 73225 - DNA, 15 bp, Homo sapiens
aattagtgttgtacc

SEQ ID NO: 73226 - DNA, 15 bp, Homo sapiens
gaattagtgttgtac

SEQ ID NO: 73227 - DNA, 15 bp, Homo sapiens
tgaattagtgttgta

SEQ ID NO: 73228 - DNA, 15 bp, Homo sapiens
atgaattagtgttgt

SEQ ID NO: 73229 - DNA, 15 bp, Homo sapiens
gatgaattagtgttg

SEQ ID NO: 73230 - DNA, 15 bp, Homo sapiens
ggatgaattagtgtt

SEQ ID NO: 73231 - DNA, 15 bp, Homo sapiens
aggatgaattagtgt

SEQ ID NO: 73232 - DNA, 15 bp, Homo sapiens
aaggatgaattagtg

SEQ ID NO: 73233 - DNA, 15 bp, Homo sapiens
taaggatgaattagt

SEQ ID NO: 73234 - DNA, 15 bp, Homo sapiens
ataaggatgaattag

SEQ ID NO: 73235 - DNA, 15 bp, Homo sapiens
tataaggatgaatta

SEQ ID NO: 73236 - DNA, 15 bp, Homo sapiens
atataaggatgaatt

SEQ ID NO: 73237 - DNA, 15 bp, Homo sapiens
catataaggatgaat

SEQ ID NO: 73238 - DNA, 15 bp, Homo sapiens
acatataaggatgaa

SEQ ID NO: 73239 - DNA, 15 bp, Homo sapiens
cacatataaggatga

SEQ ID NO: 73240 - DNA, 15 bp, Homo sapiens
gcacatataaggatg

SEQ ID NO: 73241 - DNA, 15 bp, Homo sapiens
agcacatataaggat

SEQ ID NO: 73242 - DNA, 15 bp, Homo sapiens
aagcacatataagga

SEQ ID NO: 73243 - DNA, 15 bp, Homo sapiens
aaagcacatataagg

SEQ ID NO: 73244 - DNA, 15 bp, Homo sapiens
caaagcacatataag

SEQ ID NO: 73245 - DNA, 15 bp, Homo sapiens
acaaagcacatataa

SEQ ID NO: 73246 - DNA, 15 bp, Homo sapiens
cacaaagcacatata

SEQ ID NO: 73247 - DNA, 15 bp, Homo sapiens
ccacaaagcacatat

SEQ ID NO: 73248 - DNA, 15 bp, Homo sapiens
accacaaagcacata

SEQ ID NO: 73249 - DNA, 15 bp, Homo sapiens
caccacaaagcacat

SEQ ID NO: 73250 - DNA, 15 bp, Homo sapiens
ccaccacaaagcaca

SEQ ID NO: 73251 - DNA, 15 bp, Homo sapiens
tccaccacaaagcac

SEQ ID NO: 73252 - DNA, 15 bp, Homo sapiens
atccaccacaaagca

SEQ ID NO: 73253 - DNA, 15 bp, Homo sapiens
catccaccacaaagc

SEQ ID NO: 73254 - DNA, 15 bp, Homo sapiens
acatccaccacaaag

SEQ ID NO: 73255 - DNA, 15 bp, Homo sapiens
gacatccaccacaaa

SEQ ID NO: 73256 - DNA, 15 bp, Homo sapiens
agacatccaccacaa

SEQ ID NO: 73257 - DNA, 15 bp, Homo sapiens
gagacatccaccaca

SEQ ID NO: 73258 - DNA, 15 bp, Homo sapiens
agagacatccaccac

SEQ ID NO: 73259 - DNA, 15 bp, Homo sapiens
aagagacatccacca

SEQ ID NO: 73260 - DNA, 15 bp, Homo sapiens
taagagacatccacc

SEQ ID NO: 73261 - DNA, 15 bp, Homo sapiens
ctaagagacatccac

SEQ ID NO: 73262 - DNA, 15 bp, Homo sapiens
cctaagagacatcca

SEQ ID NO: 73263 - DNA, 15 bp, Homo sapiens
tcctaagagacatcc

SEQ ID NO: 73264 - DNA, 15 bp, Homo sapiens
gtcctaagagacatc

SEQ ID NO: 73265 - DNA, 15 bp, Homo sapiens
tgtcctaagagacat

SEQ ID NO: 73266 - DNA, 15 bp, Homo sapiens
gtgtcctaagagaca

SEQ ID NO: 73267 - DNA, 15 bp, Homo sapiens
cgtgtcctaagagac

SEQ ID NO: 73268 - DNA, 15 bp, Homo sapiens
acgtgtcctaagaga

SEQ ID NO: 73269 - DNA, 15 bp, Homo sapiens
tacgtgtcctaagag

SEQ ID NO: 73270 - DNA, 15 bp, Homo sapiens
gtacgtgtcctaaga

SEQ ID NO: 73271 - DNA, 15 bp, Homo sapiens
ggtacgtgtcctaag

SEQ ID NO: 73272 - DNA, 15 bp, Homo sapiens
gggtacgtgtcctaa

SEQ ID NO: 73273 - DNA, 15 bp, Homo sapiens
agggtacgtgtccta

SEQ ID NO: 73274 - DNA, 15 bp, Homo sapiens
aagggtacgtgtcct

SEQ ID NO: 73275 - DNA, 15 bp, Homo sapiens
aaagggtacgtgtcc

SEQ ID NO: 73276 - DNA, 15 bp, Homo sapiens
caaagggtacgtgtc

SEQ ID NO: 73277 - DNA, 15 bp, Homo sapiens
acaaagggtacgtgt

SEQ ID NO: 73278 - DNA, 15 bp, Homo sapiens
tacaaagggtacgtg

SEQ ID NO: 73279 - DNA, 15 bp, Homo sapiens
ttacaaagggtacgt

SEQ ID NO: 73280 - DNA, 15 bp, Homo sapiens
gttacaaagggtacg

SEQ ID NO: 73281 - DNA, 15 bp, Homo sapiens
tgttacaaagggtac

SEQ ID NO: 73282 - DNA, 15 bp, Homo sapiens
ttgttacaaagggta

SEQ ID NO: 73283 - DNA, 15 bp, Homo sapiens
gttgttacaaagggt

SEQ ID NO: 73284 - DNA, 15 bp, Homo sapiens
tgttgttacaaaggg

SEQ ID NO: 73285 - DNA, 15 bp, Homo sapiens
ctgttgttacaaagg

SEQ ID NO: 73286 - DNA, 15 bp, Homo sapiens
tctgttgttacaaag

SEQ ID NO: 73287 - DNA, 15 bp, Homo sapiens
atctgttgttacaaa

SEQ ID NO: 73288 - DNA, 15 bp, Homo sapiens
catctgttgttacaa

SEQ ID NO: 73289 - DNA, 15 bp, Homo sapiens
ccatctgttgttaca

SEQ ID NO: 73290 - DNA, 15 bp, Homo sapiens
accatctgttgttac

SEQ ID NO: 73291 - DNA, 15 bp, Homo sapiens
gaccatctgttgtta

SEQ ID NO: 73292 - DNA, 15 bp, Homo sapiens
agaccatctgttgtt

SEQ ID NO: 73293 - DNA, 15 bp, Homo sapiens
gagaccatctgttgt

SEQ ID NO: 73294 - DNA, 15 bp, Homo sapiens
agagaccatctgttg

SEQ ID NO: 73295 - DNA, 15 bp, Homo sapiens
aagagaccatctgtt

SEQ ID NO: 73296 - DNA, 15 bp, Homo sapiens
aaagagaccatctgt

SEQ ID NO: 73297 - DNA, 15 bp, Homo sapiens
gaaagagaccatctg

SEQ ID NO: 73298 - DNA, 15 bp, Homo sapiens
ggaaagagaccatct

SEQ ID NO: 73299 - DNA, 15 bp, Homo sapiens
gggaaagagaccatc

SEQ ID NO: 73300 - DNA, 15 bp, Homo sapiens
agggaaagagaccat

SEQ ID NO: 73301 - DNA, 15 bp, Homo sapiens
aagggaaagagacca

SEQ ID NO: 73302 - DNA, 15 bp, Homo sapiens
aaagggaaagagacc

SEQ ID NO: 73303 - DNA, 15 bp, Homo sapiens
aaaagggaaagagac

SEQ ID NO: 73304 - DNA, 15 bp, Homo sapiens
taaaagggaaagaga

SEQ ID NO: 73305 - DNA, 15 bp, Homo sapiens
gtaaaagggaaagag

SEQ ID NO: 73306 - DNA, 15 bp, Homo sapiens
tgtaaaagggaaaga

SEQ ID NO: 73307 - DNA, 15 bp, Homo sapiens
gtgtaaaagggaaag

SEQ ID NO: 73308 - DNA, 15 bp, Homo sapiens
agtgtaaaagggaaa

SEQ ID NO: 73309 - DNA, 15 bp, Homo sapiens
aagtgtaaaagggaa

SEQ ID NO: 73310 - DNA, 15 bp, Homo sapiens
aaagtgtaaaaggga

SEQ ID NO: 73311 - DNA, 15 bp, Homo sapiens
aaaagtgtaaaaggg

SEQ ID NO: 73312 - DNA, 15 bp, Homo sapiens
caaaagtgtaaaagg

SEQ ID NO: 73313 - DNA, 15 bp, Homo sapiens
tcaaaagtgtaaaag

SEQ ID NO: 73314 - DNA, 15 bp, Homo sapiens
ttcaaaagtgtaaaa

SEQ ID NO: 73315 - DNA, 15 bp, Homo sapiens
attcaaaagtgtaaa

SEQ ID NO: 73316 - DNA, 15 bp, Homo sapiens
aattcaaaagtgtaa

SEQ ID NO: 73317 - DNA, 15 bp, Homo sapiens
taattcaaaagtgta

SEQ ID NO: 73318 - DNA, 15 bp, Homo sapiens
ttaattcaaaagtgt

SEQ ID NO: 73319 - DNA, 15 bp, Homo sapiens
tttaattcaaaagtg

SEQ ID NO: 73320 - DNA, 15 bp, Homo sapiens
atttaattcaaaagt

SEQ ID NO: 73321 - DNA, 15 bp, Homo sapiens
catttaattcaaaag

SEQ ID NO: 73322 - DNA, 15 bp, Homo sapiens
ccatttaattcaaaa

SEQ ID NO: 73323 - DNA, 15 bp, Homo sapiens
accatttaattcaaa

SEQ ID NO: 73324 - DNA, 15 bp, Homo sapiens
gaccatttaattcaa

SEQ ID NO: 73325 - DNA, 15 bp, Homo sapiens
agaccatttaattca

SEQ ID NO: 73326 - DNA, 15 bp, Homo sapiens
aagaccatttaattc

SEQ ID NO: 73327 - DNA, 15 bp, Homo sapiens
aaagaccatttaatt

SEQ ID NO: 73328 - DNA, 15 bp, Homo sapiens
taaagaccatttaat

SEQ ID NO: 73329 - DNA, 15 bp, Homo sapiens
ttaaagaccatttaa

SEQ ID NO: 73330 - DNA, 15 bp, Homo sapiens
tttaaagaccattta

SEQ ID NO: 73331 - DNA, 15 bp, Homo sapiens
ttttaaagaccattt

SEQ ID NO: 73332 - DNA, 15 bp, Homo sapiens
attttaaagaccatt

SEQ ID NO: 73333 - DNA, 15 bp, Homo sapiens
aattttaaagaccat

SEQ ID NO: 73334 - DNA, 15 bp, Homo sapiens
taattttaaagacca

SEQ ID NO: 73335 - DNA, 15 bp, Homo sapiens
gtaattttaaagacc

SEQ ID NO: 73336 - DNA, 15 bp, Homo sapiens
ggtaattttaaagac

SEQ ID NO: 73337 - DNA, 15 bp, Homo sapiens
gggtaattttaaaga

SEQ ID NO: 73338 - DNA, 15 bp, Homo sapiens
tgggtaattttaaag

SEQ ID NO: 73339 - DNA, 15 bp, Homo sapiens
ctgggtaattttaaa

SEQ ID NO: 73340 - DNA, 15 bp, Homo sapiens
cctgggtaattttaa

SEQ ID NO: 73341 - DNA, 15 bp, Homo sapiens
acctgggtaatttta

SEQ ID NO: 73342 - DNA, 15 bp, Homo sapiens
tacctgggtaatttt

SEQ ID NO: 73343 - DNA, 15 bp, Homo sapiens
gtacctgggtaattt

SEQ ID NO: 73344 - DNA, 15 bp, Homo sapiens
tgtacctgggtaatt

SEQ ID NO: 73345 - DNA, 15 bp, Homo sapiens
atgtacctgggtaat

SEQ ID NO: 73346 - DNA, 15 bp, Homo sapiens
aatgtacctgggtaa

SEQ ID NO: 73347 - DNA, 15 bp, Homo sapiens
caatgtacctgggta

SEQ ID NO: 73348 - DNA, 15 bp, Homo sapiens
ccaatgtacctgggt

SEQ ID NO: 73349 - DNA, 15 bp, Homo sapiens
tccaatgtacctggg

SEQ ID NO: 73350 - DNA, 15 bp, Homo sapiens
ctccaatgtacctgg

SEQ ID NO: 73351 - DNA, 15 bp, Homo sapiens
actccaatgtacctg

SEQ ID NO: 73352 - DNA, 15 bp, Homo sapiens
aactccaatgtacct

SEQ ID NO: 73353 - DNA, 15 bp, Homo sapiens
taactccaatgtacc

SEQ ID NO: 73354 - DNA, 15 bp, Homo sapiens
ctaactccaatgtac

SEQ ID NO: 73355 - DNA, 15 bp, Homo sapiens
actaactccaatgta

SEQ ID NO: 73356 - DNA, 15 bp, Homo sapiens
aactaactccaatgt

SEQ ID NO: 73357 - DNA, 15 bp, Homo sapiens
aaactaactccaatg

SEQ ID NO: 73358 - DNA, 15 bp, Homo sapiens
gaaactaactccaat

SEQ ID NO: 73359 - DNA, 15 bp, Homo sapiens
ggaaactaactccaa

SEQ ID NO: 73360 - DNA, 15 bp, Homo sapiens
aggaaactaactcca

SEQ ID NO: 73361 - DNA, 15 bp, Homo sapiens
gaggaaactaactcc

SEQ ID NO: 73362 - DNA, 15 bp, Homo sapiens
agaggaaactaactc

SEQ ID NO: 73363 - DNA, 15 bp, Homo sapiens
aagaggaaactaact

SEQ ID NO: 73364 - DNA, 15 bp, Homo sapiens
aaagaggaaactaac

SEQ ID NO: 73365 - DNA, 15 bp, Homo sapiens
caaagaggaaactaa

SEQ ID NO: 73366 - DNA, 15 bp, Homo sapiens
tcaaagaggaaacta

SEQ ID NO: 73367 - DNA, 15 bp, Homo sapiens
ttcaaagaggaaact

SEQ ID NO: 73368 - DNA, 15 bp, Homo sapiens
gttcaaagaggaaac

SEQ ID NO: 73369 - DNA, 15 bp, Homo sapiens
tgttcaaagaggaaa

SEQ ID NO: 73370 - DNA, 15 bp, Homo sapiens
atgttcaaagaggaa

SEQ ID NO: 73371 - DNA, 15 bp, Homo sapiens
aatgttcaaagagga

SEQ ID NO: 73372 - DNA, 15 bp, Homo sapiens
caatgttcaaagagg

SEQ ID NO: 73373 - DNA, 15 bp, Homo sapiens
gcaatgttcaaagag

SEQ ID NO: 73374 - DNA, 15 bp, Homo sapiens
tgcaatgttcaaaga

SEQ ID NO: 73375 - DNA, 15 bp, Homo sapiens
atgcaatgttcaaag

SEQ ID NO: 73376 - DNA, 15 bp, Homo sapiens
gatgcaatgttcaaa

SEQ ID NO: 73377 - DNA, 15 bp, Homo sapiens
agatgcaatgttcaa

SEQ ID NO: 73378 - DNA, 15 bp, Homo sapiens
tagatgcaatgttca

SEQ ID NO: 73379 - DNA, 15 bp, Homo sapiens
atagatgcaatgttc

SEQ ID NO: 73380 - DNA, 15 bp, Homo sapiens
catagatgcaatgtt

SEQ ID NO: 73381 - DNA, 15 bp, Homo sapiens
tcatagatgcaatgt

SEQ ID NO: 73382 - DNA, 15 bp, Homo sapiens
ttcatagatgcaatg

SEQ ID NO: 73383 - DNA, 15 bp, Homo sapiens
tttcatagatgcaat

SEQ ID NO: 73384 - DNA, 15 bp, Homo sapiens
ttttcatagatgcaa

SEQ ID NO: 73385 - DNA, 15 bp, Homo sapiens
tttttcatagatgca

SEQ ID NO: 73386 - DNA, 15 bp, Homo sapiens
ttttttcatagatgc

SEQ ID NO: 73387 - DNA, 15 bp, Homo sapiens
attttttcatagatg

SEQ ID NO: 73388 - DNA, 15 bp, Homo sapiens
tattttttcatagat

SEQ ID NO: 73389 - DNA, 15 bp, Homo sapiens
gtattttttcataga

SEQ ID NO: 73390 - DNA, 15 bp, Homo sapiens
tgtattttttcatag

SEQ ID NO: 73391 - DNA, 15 bp, Homo sapiens
atgtattttttcata

SEQ ID NO: 73392 - DNA, 15 bp, Homo sapiens
catgtattttttcat

SEQ ID NO: 73393 - DNA, 15 bp, Homo sapiens
gcatgtattttttca

SEQ ID NO: 73394 - DNA, 15 bp, Homo sapiens
tgcatgtattttttc

SEQ ID NO: 73395 - DNA, 15 bp, Homo sapiens
gtgcatgtatttttt

SEQ ID NO: 73396 - DNA, 15 bp, Homo sapiens
ggtgcatgtattttt

SEQ ID NO: 73397 - DNA, 15 bp, Homo sapiens
gggtgcatgtatttt

SEQ ID NO: 73398 - DNA, 15 bp, Homo sapiens
ggggtgcatgtattt

SEQ ID NO: 73399 - DNA, 15 bp, Homo sapiens
gggggtgcatgtatt

SEQ ID NO: 73400 - DNA, 15 bp, Homo sapiens
tgggggtgcatgtat

SEQ ID NO: 73401 - DNA, 15 bp, Homo sapiens
ctgggggtgcatgta

SEQ ID NO: 73402 - DNA, 15 bp, Homo sapiens
actgggggtgcatgt

SEQ ID NO: 73403 - DNA, 15 bp, Homo sapiens
cactgggggtgcatg

SEQ ID NO: 73404 - DNA, 15 bp, Homo sapiens
gcactgggggtgcat

SEQ ID NO: 73405 - DNA, 15 bp, Homo sapiens
ggcactgggggtgca

SEQ ID NO: 73406 - DNA, 15 bp, Homo sapiens
gggcactgggggtgc

SEQ ID NO: 73407 - DNA, 15 bp, Homo sapiens
tgggcactgggggtg

SEQ ID NO: 73408 - DNA, 15 bp, Homo sapiens
atgggcactgggggt

SEQ ID NO: 73409 - DNA, 15 bp, Homo sapiens
gatgggcactggggg

SEQ ID NO: 73410 - DNA, 15 bp, Homo sapiens
ggatgggcactgggg

SEQ ID NO: 73411 - DNA, 15 bp, Homo sapiens
tggatgggcactggg

SEQ ID NO: 73412 - DNA, 15 bp, Homo sapiens
gtggatgggcactgg

SEQ ID NO: 73413 - DNA, 15 bp, Homo sapiens
tgtggatgggcactg

SEQ ID NO: 73414 - DNA, 15 bp, Homo sapiens
ttgtggatgggcact

SEQ ID NO: 73415 - DNA, 15 bp, Homo sapiens
tttgtggatgggcac

SEQ ID NO: 73416 - DNA, 15 bp, Homo sapiens
ctttgtggatgggca

SEQ ID NO: 73417 - DNA, 15 bp, Homo sapiens
gctttgtggatgggc

SEQ ID NO: 73418 - DNA, 15 bp, Homo sapiens
tgctttgtggatggg

SEQ ID NO: 73419 - DNA, 15 bp, Homo sapiens
ctgctttgtggatgg

SEQ ID NO: 73420 - DNA, 15 bp, Homo sapiens
tctgctttgtggatg

SEQ ID NO: 73421 - DNA, 15 bp, Homo sapiens
ctctgctttgtggat

SEQ ID NO: 73422 - DNA, 15 bp, Homo sapiens
tctctgctttgtgga

SEQ ID NO: 73423 - DNA, 15 bp, Homo sapiens
ttctctgctttgtgg

SEQ ID NO: 73424 - DNA, 15 bp, Homo sapiens
cttctctgctttgtg

SEQ ID NO: 73425 - DNA, 15 bp, Homo sapiens
acttctctgctttgt

SEQ ID NO: 73426 - DNA, 15 bp, Homo sapiens
aacttctctgctttg

SEQ ID NO: 73427 - DNA, 15 bp, Homo sapiens
caacttctctgcttt

SEQ ID NO: 73428 - DNA, 15 bp, Homo sapiens
tcaacttctctgctt

SEQ ID NO: 73429 - DNA, 15 bp, Homo sapiens
atcaacttctctgct

SEQ ID NO: 73430 - DNA, 15 bp, Homo sapiens
aatcaacttctctgc

SEQ ID NO: 73431 - DNA, 15 bp, Homo sapiens
taatcaacttctctg

SEQ ID NO: 73432 - DNA, 15 bp, Homo sapiens
gtaatcaacttctct

SEQ ID NO: 73433 - DNA, 15 bp, Homo sapiens
agtaatcaacttctc

SEQ ID NO: 73434 - DNA, 15 bp, Homo sapiens
aagtaatcaacttct

SEQ ID NO: 73435 - DNA, 15 bp, Homo sapiens
caagtaatcaacttc

SEQ ID NO: 73436 - DNA, 15 bp, Homo sapiens
ccaagtaatcaactt

SEQ ID NO: 73437 - DNA, 15 bp, Homo sapiens
accaagtaatcaact

SEQ ID NO: 73438 - DNA, 15 bp, Homo sapiens
aaccaagtaatcaac

SEQ ID NO: 73439 - DNA, 15 bp, Homo sapiens
gaaccaagtaatcaa

SEQ ID NO: 73440 - DNA, 15 bp, Homo sapiens
agaaccaagtaatca

SEQ ID NO: 73441 - DNA, 15 bp, Homo sapiens
tagaaccaagtaatc

SEQ ID NO: 73442 - DNA, 15 bp, Homo sapiens
ctagaaccaagtaat

SEQ ID NO: 73443 - DNA, 15 bp, Homo sapiens
tctagaaccaagtaa

SEQ ID NO: 73444 - DNA, 15 bp, Homo sapiens
ttctagaaccaagta

SEQ ID NO: 73445 - DNA, 15 bp, Homo sapiens
attctagaaccaagt

SEQ ID NO: 73446 - DNA, 15 bp, Homo sapiens
cattctagaaccaag

SEQ ID NO: 73447 - DNA, 15 bp, Homo sapiens
acattctagaaccaa

SEQ ID NO: 73448 - DNA, 15 bp, Homo sapiens
aacattctagaacca

SEQ ID NO: 73449 - DNA, 15 bp, Homo sapiens
caacattctagaacc

SEQ ID NO: 73450 - DNA, 15 bp, Homo sapiens
ccaacattctagaac

SEQ ID NO: 73451 - DNA, 15 bp, Homo sapiens
accaacattctagaa

SEQ ID NO: 73452 - DNA, 15 bp, Homo sapiens
aaccaacattctaga

SEQ ID NO: 73453 - DNA, 15 bp, Homo sapiens
gaaccaacattctag

SEQ ID NO: 73454 - DNA, 15 bp, Homo sapiens
tgaaccaacattcta

SEQ ID NO: 73455 - DNA, 15 bp, Homo sapiens
ctgaaccaacattct

SEQ ID NO: 73456 - DNA, 15 bp, Homo sapiens
cctgaaccaacattc

SEQ ID NO: 73457 - DNA, 15 bp, Homo sapiens
acctgaaccaacatt

SEQ ID NO: 73458 - DNA, 15 bp, Homo sapiens
cacctgaaccaacat

SEQ ID NO: 73459 - DNA, 15 bp, Homo sapiens
ccacctgaaccaaca

SEQ ID NO: 73460 - DNA, 15 bp, Homo sapiens
cccacctgaaccaac

SEQ ID NO: 73461 - DNA, 15 bp, Homo sapiens
gcccacctgaaccaa

SEQ ID NO: 73462 - DNA, 15 bp, Homo sapiens
tgcccacctgaacca

SEQ ID NO: 73463 - DNA, 15 bp, Homo sapiens
ctgcccacctgaacc

SEQ ID NO: 73464 - DNA, 15 bp, Homo sapiens
cctgcccacctgaac

SEQ ID NO: 73465 - DNA, 15 bp, Homo sapiens
tcctgcccacctgaa

SEQ ID NO: 73466 - DNA, 15 bp, Homo sapiens
ctcctgcccacctga

SEQ ID NO: 73467 - DNA, 15 bp, Homo sapiens
tctcctgcccacctg

SEQ ID NO: 73468 - DNA, 15 bp, Homo sapiens
ctctcctgcccacct

SEQ ID NO: 73469 - DNA, 15 bp, Homo sapiens
cctctcctgcccacc

SEQ ID NO: 73470 - DNA, 15 bp, Homo sapiens
tcctctcctgcccac

SEQ ID NO: 73471 - DNA, 15 bp, Homo sapiens
ttcctctcctgccca

SEQ ID NO: 73472 - DNA, 15 bp, Homo sapiens
attcctctcctgccc

SEQ ID NO: 73473 - DNA, 15 bp, Homo sapiens
cattcctctcctgcc

SEQ ID NO: 73474 - DNA, 15 bp, Homo sapiens
tcattcctctcctgc

SEQ ID NO: 73475 - DNA, 15 bp, Homo sapiens
ctcattcctctcctg

SEQ ID NO: 73476 - DNA, 15 bp, Homo sapiens
tctcattcctctcct

SEQ ID NO: 73477 - DNA, 15 bp, Homo sapiens
ctctcattcctctcc

SEQ ID NO: 73478 - DNA, 15 bp, Homo sapiens
actctcattcctctc

SEQ ID NO: 73479 - DNA, 15 bp, Homo sapiens
cactctcattcctct

SEQ ID NO: 73480 - DNA, 15 bp, Homo sapiens
acactctcattcctc

SEQ ID NO: 73481 - DNA, 15 bp, Homo sapiens
tacactctcattcct

SEQ ID NO: 73482 - DNA, 15 bp, Homo sapiens
ttacactctcattcc

SEQ ID NO: 73483 - DNA, 15 bp, Homo sapiens
tttacactctcattc

SEQ ID NO: 73484 - DNA, 15 bp, Homo sapiens
ctttacactctcatt

SEQ ID NO: 73485 - DNA, 15 bp, Homo sapiens
cctttacactctcat

SEQ ID NO: 73486 - DNA, 15 bp, Homo sapiens
gcctttacactctca

SEQ ID NO: 73487 - DNA, 15 bp, Homo sapiens
tgcctttacactctc

SEQ ID NO: 73488 - DNA, 15 bp, Homo sapiens
gtgcctttacactct

SEQ ID NO: 73489 - DNA, 15 bp, Homo sapiens
tgtgcctttacactc

SEQ ID NO: 73490 - DNA, 15 bp, Homo sapiens
ttgtgcctttacact

SEQ ID NO: 73491 - DNA, 15 bp, Homo sapiens
attgtgcctttacac

SEQ ID NO: 73492 - DNA, 15 bp, Homo sapiens
cattgtgcctttaca

SEQ ID NO: 73493 - DNA, 15 bp, Homo sapiens
tcattgtgcctttac

SEQ ID NO: 73494 - DNA, 15 bp, Homo sapiens
ttcattgtgccttta

SEQ ID NO: 73495 - DNA, 15 bp, Homo sapiens
cttcattgtgccttt

SEQ ID NO: 73496 - DNA, 15 bp, Homo sapiens
tcttcattgtgcctt

SEQ ID NO: 73497 - DNA, 15 bp, Homo sapiens
ttcttcattgtgcct

SEQ ID NO: 73498 - DNA, 15 bp, Homo sapiens
tttcttcattgtgcc

SEQ ID NO: 73499 - DNA, 15 bp, Homo sapiens
atttcttcattgtgc

SEQ ID NO: 73500 - DNA, 15 bp, Homo sapiens
catttcttcattgtg

SEQ ID NO: 73501 - DNA, 15 bp, Homo sapiens
acatttcttcattgt

SEQ ID NO: 73502 - DNA, 15 bp, Homo sapiens
gacatttcttcattg

SEQ ID NO: 73503 - DNA, 15 bp, Homo sapiens
agacatttcttcatt

SEQ ID NO: 73504 - DNA, 15 bp, Homo sapiens
cagacatttcttcat

SEQ ID NO: 73505 - DNA, 15 bp, Homo sapiens
gcagacatttcttca

SEQ ID NO: 73506 - DNA, 15 bp, Homo sapiens
tgcagacatttcttc

SEQ ID NO: 73507 - DNA, 15 bp, Homo sapiens
ctgcagacatttctt

SEQ ID NO: 73508 - DNA, 15 bp, Homo sapiens
tctgcagacatttct

SEQ ID NO: 73509 - DNA, 15 bp, Homo sapiens
ctctgcagacatttc

SEQ ID NO: 73510 - DNA, 15 bp, Homo sapiens
gctctgcagacattt

SEQ ID NO: 73511 - DNA, 15 bp, Homo sapiens
ggctctgcagacatt

SEQ ID NO: 73512 - DNA, 15 bp, Homo sapiens
aggctctgcagacat

SEQ ID NO: 73513 - DNA, 15 bp, Homo sapiens
gaggctctgcagaca

SEQ ID NO: 73514 - DNA, 15 bp, Homo sapiens
tgaggctctgcagac

SEQ ID NO: 73515 - DNA, 15 bp, Homo sapiens
atgaggctctgcaga

SEQ ID NO: 73516 - DNA, 15 bp, Homo sapiens
catgaggctctgcag

SEQ ID NO: 73517 - DNA, 15 bp, Homo sapiens
tcatgaggctctgca

SEQ ID NO: 73518 - DNA, 15 bp, Homo sapiens
ctcatgaggctctgc

SEQ ID NO: 73519 - DNA, 15 bp, Homo sapiens
actcatgaggctctg

SEQ ID NO: 73520 - DNA, 15 bp, Homo sapiens
aactcatgaggctct

SEQ ID NO: 73521 - DNA, 15 bp, Homo sapiens
taactcatgaggctc

SEQ ID NO: 73522 - DNA, 15 bp, Homo sapiens
ttaactcatgaggct

SEQ ID NO: 73523 - DNA, 15 bp, Homo sapiens
cttaactcatgaggc

SEQ ID NO: 73524 - DNA, 15 bp, Homo sapiens
gcttaactcatgagg

SEQ ID NO: 73525 - DNA, 15 bp, Homo sapiens
tgcttaactcatgag

SEQ ID NO: 73526 - DNA, 15 bp, Homo sapiens
gtgcttaactcatga

SEQ ID NO: 73527 - DNA, 15 bp, Homo sapiens
tgtgcttaactcatg

SEQ ID NO: 73528 - DNA, 15 bp, Homo sapiens
ctgtgcttaactcat

SEQ ID NO: 73529 - DNA, 15 bp, Homo sapiens
cctgtgcttaactca

SEQ ID NO: 73530 - DNA, 15 bp, Homo sapiens
acctgtgcttaactc

SEQ ID NO: 73531 - DNA, 15 bp, Homo sapiens
cacctgtgcttaact

SEQ ID NO: 73532 - DNA, 15 bp, Homo sapiens
acacctgtgcttaac

SEQ ID NO: 73533 - DNA, 15 bp, Homo sapiens
aacacctgtgcttaa

SEQ ID NO: 73534 - DNA, 15 bp, Homo sapiens
caacacctgtgctta

SEQ ID NO: 73535 - DNA, 15 bp, Homo sapiens
acaacacctgtgctt

SEQ ID NO: 73536 - DNA, 15 bp, Homo sapiens
cacaacacctgtgct

SEQ ID NO: 73537 - DNA, 15 bp, Homo sapiens
ccacaacacctgtgc

SEQ ID NO: 73538 - DNA, 15 bp, Homo sapiens
cccacaacacctgtg

SEQ ID NO: 73539 - DNA, 15 bp, Homo sapiens
acccacaacacctgt

SEQ ID NO: 73540 - DNA, 15 bp, Homo sapiens
aacccacaacacctg

SEQ ID NO: 73541 - DNA, 15 bp, Homo sapiens
aaacccacaacacct

SEQ ID NO: 73542 - DNA, 15 bp, Homo sapiens
taaacccacaacacc

SEQ ID NO: 73543 - DNA, 15 bp, Homo sapiens
ataaacccacaacac

SEQ ID NO: 73544 - DNA, 15 bp, Homo sapiens
aataaacccacaaca

SEQ ID NO: 73545 - DNA, 15 bp, Homo sapiens
caataaacccacaac

SEQ ID NO: 73546 - DNA, 15 bp, Homo sapiens
acaataaacccacaa

SEQ ID NO: 73547 - DNA, 15 bp, Homo sapiens
tacaataaacccaca

SEQ ID NO: 73548 - DNA, 15 bp, Homo sapiens
ttacaataaacccac

SEQ ID NO: 73549 - DNA, 15 bp, Homo sapiens
attacaataaaccca

SEQ ID NO: 73550 - DNA, 15 bp, Homo sapiens
cattacaataaaccc

SEQ ID NO: 73551 - DNA, 15 bp, Homo sapiens
tcattacaataaacc

SEQ ID NO: 73552 - DNA, 15 bp, Homo sapiens
ttcattacaataaac

SEQ ID NO: 73553 - DNA, 15 bp, Homo sapiens
tttcattacaataaa

SEQ ID NO: 73554 - DNA, 15 bp, Homo sapiens
ctttcattacaataa

SEQ ID NO: 73555 - DNA, 15 bp, Homo sapiens
actttcattacaata

SEQ ID NO: 73556 - DNA, 15 bp, Homo sapiens
tactttcattacaat

SEQ ID NO: 73557 - DNA, 15 bp, Homo sapiens
ttactttcattacaa

SEQ ID NO: 73558 - DNA, 15 bp, Homo sapiens
cttactttcattaca

SEQ ID NO: 73559 - DNA, 15 bp, Homo sapiens
gcttactttcattac

SEQ ID NO: 73560 - DNA, 15 bp, Homo sapiens
ggcttactttcatta

SEQ ID NO: 73561 - DNA, 15 bp, Homo sapiens
tggcttactttcatt

SEQ ID NO: 73562 - DNA, 15 bp, Homo sapiens
ttggcttactttcat

SEQ ID NO: 73563 - DNA, 15 bp, Homo sapiens
attggcttactttca

SEQ ID NO: 73564 - DNA, 15 bp, Homo sapiens
cattggcttactttc

SEQ ID NO: 73565 - DNA, 15 bp, Homo sapiens
acattggcttacttt

SEQ ID NO: 73566 - DNA, 15 bp, Homo sapiens
tacattggcttactt

SEQ ID NO: 73567 - DNA, 15 bp, Homo sapiens
ctacattggcttact

SEQ ID NO: 73568 - DNA, 15 bp, Homo sapiens
gctacattggcttac

SEQ ID NO: 73569 - DNA, 15 bp, Homo sapiens
agctacattggctta

SEQ ID NO: 73570 - DNA, 15 bp, Homo sapiens
gagctacattggctt

SEQ ID NO: 73571 - DNA, 15 bp, Homo sapiens
tgagctacattggct

SEQ ID NO: 73572 - DNA, 15 bp, Homo sapiens
ctgagctacattggc

SEQ ID NO: 73573 - DNA, 15 bp, Homo sapiens
cctgagctacattgg

SEQ ID NO: 73574 - DNA, 15 bp, Homo sapiens
gcctgagctacattg

SEQ ID NO: 73575 - DNA, 15 bp, Homo sapiens
tgcctgagctacatt

SEQ ID NO: 73576 - DNA, 15 bp, Homo sapiens
atgcctgagctacat

SEQ ID NO: 73577 - DNA, 15 bp, Homo sapiens
tatgcctgagctaca

SEQ ID NO: 73578 - DNA, 15 bp, Homo sapiens
ctatgcctgagctac

SEQ ID NO: 73579 - DNA, 15 bp, Homo sapiens
tctatgcctgagcta

SEQ ID NO: 73580 - DNA, 15 bp, Homo sapiens
ttctatgcctgagct

SEQ ID NO: 73581 - DNA, 15 bp, Homo sapiens
gttctatgcctgagc

SEQ ID NO: 73582 - DNA, 15 bp, Homo sapiens
ggttctatgcctgag

SEQ ID NO: 73583 - DNA, 15 bp, Homo sapiens
gggttctatgcctga

SEQ ID NO: 73584 - DNA, 15 bp, Homo sapiens
tgggttctatgcctg

SEQ ID NO: 73585 - DNA, 15 bp, Homo sapiens
gtgggttctatgcct

SEQ ID NO: 73586 - DNA, 15 bp, Homo sapiens
agtgggttctatgcc

SEQ ID NO: 73587 - DNA, 15 bp, Homo sapiens
gagtgggttctatgc

SEQ ID NO: 73588 - DNA, 15 bp, Homo sapiens
tgagtgggttctatg

SEQ ID NO: 73589 - DNA, 15 bp, Homo sapiens
atgagtgggttctat

SEQ ID NO: 73590 - DNA, 15 bp, Homo sapiens
gatgagtgggttcta

SEQ ID NO: 73591 - DNA, 15 bp, Homo sapiens
tgatgagtgggttct

SEQ ID NO: 73592 - DNA, 15 bp, Homo sapiens
atgatgagtgggttc

SEQ ID NO: 73593 - DNA, 15 bp, Homo sapiens
aatgatgagtgggtt

SEQ ID NO: 73594 - DNA, 15 bp, Homo sapiens
gaatgatgagtgggt

SEQ ID NO: 73595 - DNA, 15 bp, Homo sapiens
agaatgatgagtggg

SEQ ID NO: 73596 - DNA, 15 bp, Homo sapiens
cagaatgatgagtgg

SEQ ID NO: 73597 - DNA, 15 bp, Homo sapiens
tcagaatgatgagtg

SEQ ID NO: 73598 - DNA, 15 bp, Homo sapiens
gtcagaatgatgagt

SEQ ID NO: 73599 - DNA, 15 bp, Homo sapiens
ggtcagaatgatgag

SEQ ID NO: 73600 - DNA, 15 bp, Homo sapiens
tggtcagaatgatga

SEQ ID NO: 73601 - DNA, 15 bp, Homo sapiens
ttggtcagaatgatg

SEQ ID NO: 73602 - DNA, 15 bp, Homo sapiens
cttggtcagaatgat

SEQ ID NO: 73603 - DNA, 15 bp, Homo sapiens
tcttggtcagaatga

SEQ ID NO: 73604 - DNA, 15 bp, Homo sapiens
ctcttggtcagaatg

SEQ ID NO: 73605 - DNA, 15 bp, Homo sapiens
cctcttggtcagaat

SEQ ID NO: 73606 - DNA, 15 bp, Homo sapiens
gcctcttggtcagaa

SEQ ID NO: 73607 - DNA, 15 bp, Homo sapiens
agcctcttggtcaga

SEQ ID NO: 73608 - DNA, 15 bp, Homo sapiens
tagcctcttggtcag

SEQ ID NO: 73609 - DNA, 15 bp, Homo sapiens
ttagcctcttggtca

SEQ ID NO: 73610 - DNA, 15 bp, Homo sapiens
cttagcctcttggtc

SEQ ID NO: 73611 - DNA, 15 bp, Homo sapiens
ccttagcctcttggt

SEQ ID NO: 73612 - DNA, 15 bp, Homo sapiens
gccttagcctcttgg

SEQ ID NO: 73613 - DNA, 15 bp, Homo sapiens
agccttagcctcttg

SEQ ID NO: 73614 - DNA, 15 bp, Homo sapiens
cagccttagcctctt

SEQ ID NO: 73615 - DNA, 15 bp, Homo sapiens
ccagccttagcctct

SEQ ID NO: 73616 - DNA, 15 bp, Homo sapiens
tccagccttagcctc

SEQ ID NO: 73617 - DNA, 15 bp, Homo sapiens
ctccagccttagcct

SEQ ID NO: 73618 - DNA, 15 bp, Homo sapiens
gctccagccttagcc

SEQ ID NO: 73619 - DNA, 15 bp, Homo sapiens
cgctccagccttagc

SEQ ID NO: 73620 - DNA, 15 bp, Homo sapiens
gcgctccagccttag

SEQ ID NO: 73621 - DNA, 15 bp, Homo sapiens
tgcgctccagcctta

SEQ ID NO: 73622 - DNA, 15 bp, Homo sapiens
atgcgctccagcctt

SEQ ID NO: 73623 - DNA, 15 bp, Homo sapiens
catgcgctccagcct

SEQ ID NO: 73624 - DNA, 15 bp, Homo sapiens
gcatgcgctccagcc

SEQ ID NO: 73625 - DNA, 15 bp, Homo sapiens
tgcatgcgctccagc

SEQ ID NO: 73626 - DNA, 15 bp, Homo sapiens
atgcatgcgctccag

SEQ ID NO: 73627 - DNA, 15 bp, Homo sapiens
aatgcatgcgctcca

SEQ ID NO: 73628 - DNA, 15 bp, Homo sapiens
aaatgcatgcgctcc

SEQ ID NO: 73629 - DNA, 15 bp, Homo sapiens
caaatgcatgcgctc

SEQ ID NO: 73630 - DNA, 15 bp, Homo sapiens
ccaaatgcatgcgct

SEQ ID NO: 73631 - DNA, 15 bp, Homo sapiens
tccaaatgcatgcgc

SEQ ID NO: 73632 - DNA, 15 bp, Homo sapiens
ctccaaatgcatgcg

SEQ ID NO: 73633 - DNA, 15 bp, Homo sapiens
gctccaaatgcatgc

SEQ ID NO: 73634 - DNA, 15 bp, Homo sapiens
agctccaaatgcatg

SEQ ID NO: 73635 - DNA, 15 bp, Homo sapiens
aagctccaaatgcat

SEQ ID NO: 73636 - DNA, 15 bp, Homo sapiens
taagctccaaatgca

SEQ ID NO: 73637 - DNA, 15 bp, Homo sapiens
ttaagctccaaatgc

SEQ ID NO: 73638 - DNA, 15 bp, Homo sapiens
tttaagctccaaatg

SEQ ID NO: 73639 - DNA, 15 bp, Homo sapiens
ttttaagctccaaat

SEQ ID NO: 73640 - DNA, 15 bp, Homo sapiens
gttttaagctccaaa

SEQ ID NO: 73641 - DNA, 15 bp, Homo sapiens
agttttaagctccaa

SEQ ID NO: 73642 - DNA, 15 bp, Homo sapiens
tagttttaagctcca

SEQ ID NO: 73643 - DNA, 15 bp, Homo sapiens
gtagttttaagctcc

SEQ ID NO: 73644 - DNA, 15 bp, Homo sapiens
tgtagttttaagctc

SEQ ID NO: 73645 - DNA, 15 bp, Homo sapiens
ctgtagttttaagct

SEQ ID NO: 73646 - DNA, 15 bp, Homo sapiens
actgtagttttaagc

SEQ ID NO: 73647 - DNA, 15 bp, Homo sapiens
aactgtagttttaag

SEQ ID NO: 73648 - DNA, 15 bp, Homo sapiens
caactgtagttttaa

SEQ ID NO: 73649 - DNA, 15 bp, Homo sapiens
gcaactgtagtttta

SEQ ID NO: 73650 - DNA, 15 bp, Homo sapiens
agcaactgtagtttt

SEQ ID NO: 73651 - DNA, 15 bp, Homo sapiens
aagcaactgtagttt

SEQ ID NO: 73652 - DNA, 15 bp, Homo sapiens
aaagcaactgtagtt

SEQ ID NO: 73653 - DNA, 15 bp, Homo sapiens
caaagcaactgtagt

SEQ ID NO: 73654 - DNA, 15 bp, Homo sapiens
acaaagcaactgtag

SEQ ID NO: 73655 - DNA, 15 bp, Homo sapiens
cacaaagcaactgta

SEQ ID NO: 73656 - DNA, 15 bp, Homo sapiens
gcacaaagcaactgt

SEQ ID NO: 73657 - DNA, 15 bp, Homo sapiens
agcacaaagcaactg

SEQ ID NO: 73658 - DNA, 15 bp, Homo sapiens
aagcacaaagcaact

SEQ ID NO: 73659 - DNA, 15 bp, Homo sapiens
aaagcacaaagcaac

SEQ ID NO: 73660 - DNA, 15 bp, Homo sapiens
aaaagcacaaagcaa

SEQ ID NO: 73661 - DNA, 15 bp, Homo sapiens
aaaaagcacaaagca

SEQ ID NO: 73662 - DNA, 15 bp, Homo sapiens
gaaaaagcacaaagc

SEQ ID NO: 73663 - DNA, 15 bp, Homo sapiens
agaaaaagcacaaag

SEQ ID NO: 73664 - DNA, 15 bp, Homo sapiens
gagaaaaagcacaaa

SEQ ID NO: 73665 - DNA, 15 bp, Homo sapiens
agagaaaaagcacaa

SEQ ID NO: 73666 - DNA, 15 bp, Homo sapiens
gagagaaaaagcaca

SEQ ID NO: 73667 - DNA, 15 bp, Homo sapiens
ggagagaaaaagcac

SEQ ID NO: 73668 - DNA, 15 bp, Homo sapiens
gggagagaaaaagca

SEQ ID NO: 73669 - DNA, 15 bp, Homo sapiens
tgggagagaaaaagc

SEQ ID NO: 73670 - DNA, 15 bp, Homo sapiens
ctgggagagaaaaag

SEQ ID NO: 73671 - DNA, 15 bp, Homo sapiens
cctgggagagaaaaa

SEQ ID NO: 73672 - DNA, 15 bp, Homo sapiens
gcctgggagagaaaa

SEQ ID NO: 73673 - DNA, 15 bp, Homo sapiens
ggcctgggagagaaa

SEQ ID NO: 73674 - DNA, 15 bp, Homo sapiens
tggcctgggagagaa

SEQ ID NO: 73675 - DNA, 15 bp, Homo sapiens
gtggcctgggagaga

SEQ ID NO: 73676 - DNA, 15 bp, Homo sapiens
tgtggcctgggagag

SEQ ID NO: 73677 - DNA, 15 bp, Homo sapiens
ctgtggcctgggaga

SEQ ID NO: 73678 - DNA, 15 bp, Homo sapiens
cctgtggcctgggag

SEQ ID NO: 73679 - DNA, 15 bp, Homo sapiens
tcctgtggcctggga

SEQ ID NO: 73680 - DNA, 15 bp, Homo sapiens
ttcctgtggcctggg

SEQ ID NO: 73681 - DNA, 15 bp, Homo sapiens
gttcctgtggcctgg

SEQ ID NO: 73682 - DNA, 15 bp, Homo sapiens
ggttcctgtggcctg

SEQ ID NO: 73683 - DNA, 15 bp, Homo sapiens
tggttcctgtggcct

SEQ ID NO: 73684 - DNA, 15 bp, Homo sapiens
ctggttcctgtggcc

SEQ ID NO: 73685 - DNA, 15 bp, Homo sapiens
cctggttcctgtggc

SEQ ID NO: 73686 - DNA, 15 bp, Homo sapiens
acctggttcctgtgg

SEQ ID NO: 73687 - DNA, 15 bp, Homo sapiens
aacctggttcctgtg

SEQ ID NO: 73688 - DNA, 15 bp, Homo sapiens
caacctggttcctgt

SEQ ID NO: 73689 - DNA, 15 bp, Homo sapiens
ccaacctggttcctg

SEQ ID NO: 73690 - DNA, 15 bp, Homo sapiens
gccaacctggttcct

SEQ ID NO: 73691 - DNA, 15 bp, Homo sapiens
agccaacctggttcc

SEQ ID NO: 73692 - DNA, 15 bp, Homo sapiens
aagccaacctggttc

SEQ ID NO: 73693 - DNA, 15 bp, Homo sapiens
aaagccaacctggtt

SEQ ID NO: 73694 - DNA, 15 bp, Homo sapiens
taaagccaacctggt

SEQ ID NO: 73695 - DNA, 15 bp, Homo sapiens
ttaaagccaacctgg

SEQ ID NO: 73696 - DNA, 15 bp, Homo sapiens
attaaagccaacctg

SEQ ID NO: 73697 - DNA, 15 bp, Homo sapiens
aattaaagccaacct

SEQ ID NO: 73698 - DNA, 15 bp, Homo sapiens
caattaaagccaacc

SEQ ID NO: 73699 - DNA, 15 bp, Homo sapiens
gcaattaaagccaac

SEQ ID NO: 73700 - DNA, 15 bp, Homo sapiens
tgcaattaaagccaa

SEQ ID NO: 73701 - DNA, 15 bp, Homo sapiens
gtgcaattaaagcca

SEQ ID NO: 73702 - DNA, 15 bp, Homo sapiens
tgtgcaattaaagcc

SEQ ID NO: 73703 - DNA, 15 bp, Homo sapiens
ctgtgcaattaaagc

SEQ ID NO: 73704 - DNA, 15 bp, Homo sapiens
tctgtgcaattaaag

SEQ ID NO: 73705 - DNA, 15 bp, Homo sapiens
ttctgtgcaattaaa

SEQ ID NO: 73706 - DNA, 15 bp, Homo sapiens
attctgtgcaattaa

SEQ ID NO: 73707 - DNA, 15 bp, Homo sapiens
tattctgtgcaatta

SEQ ID NO: 73708 - DNA, 15 bp, Homo sapiens
atattctgtgcaatt

SEQ ID NO: 73709 - DNA, 15 bp, Homo sapiens
tatattctgtgcaat

SEQ ID NO: 73710 - DNA, 15 bp, Homo sapiens
ctatattctgtgcaa

SEQ ID NO: 73711 - DNA, 15 bp, Homo sapiens
gctatattctgtgca

SEQ ID NO: 73712 - DNA, 15 bp, Homo sapiens
agctatattctgtgc

SEQ ID NO: 73713 - DNA, 15 bp, Homo sapiens
tagctatattctgtg

SEQ ID NO: 73714 - DNA, 15 bp, Homo sapiens
ttagctatattctgt

SEQ ID NO: 73715 - DNA, 15 bp, Homo sapiens
gttagctatattctg

SEQ ID NO: 73716 - DNA, 15 bp, Homo sapiens
ggttagctatattct

SEQ ID NO: 73717 - DNA, 15 bp, Homo sapiens
aggttagctatattc

SEQ ID NO: 73718 - DNA, 15 bp, Homo sapiens
aaggttagctatatt

SEQ ID NO: 73719 - DNA, 15 bp, Homo sapiens
caaggttagctatat

SEQ ID NO: 73720 - DNA, 15 bp, Homo sapiens
ccaaggttagctata

SEQ ID NO: 73721 - DNA, 15 bp, Homo sapiens
tccaaggttagctat

SEQ ID NO: 73722 - DNA, 15 bp, Homo sapiens
ttccaaggttagcta

SEQ ID NO: 73723 - DNA, 15 bp, Homo sapiens
gttccaaggttagct

SEQ ID NO: 73724 - DNA, 15 bp, Homo sapiens
agttccaaggttagc

SEQ ID NO: 73725 - DNA, 15 bp, Homo sapiens
cagttccaaggttag

SEQ ID NO: 73726 - DNA, 15 bp, Homo sapiens
ccagttccaaggtta

SEQ ID NO: 73727 - DNA, 15 bp, Homo sapiens
accagttccaaggtt

SEQ ID NO: 73728 - DNA, 15 bp, Homo sapiens
taccagttccaaggt

SEQ ID NO: 73729 - DNA, 15 bp, Homo sapiens
ataccagttccaagg

SEQ ID NO: 73730 - DNA, 15 bp, Homo sapiens
aataccagttccaag

SEQ ID NO: 73731 - DNA, 15 bp, Homo sapiens
taataccagttccaa

SEQ ID NO: 73732 - DNA, 15 bp, Homo sapiens
ataataccagttcca

SEQ ID NO: 73733 - DNA, 15 bp, Homo sapiens
gataataccagttcc

SEQ ID NO: 73734 - DNA, 15 bp, Homo sapiens
tgataataccagttc

SEQ ID NO: 73735 - DNA, 15 bp, Homo sapiens
atgataataccagtt

SEQ ID NO: 73736 - DNA, 15 bp, Homo sapiens
tatgataataccagt

SEQ ID NO: 73737 - DNA, 15 bp, Homo sapiens
atatgataataccag

SEQ ID NO: 73738 - DNA, 15 bp, Homo sapiens
gatatgataatacca

SEQ ID NO: 73739 - DNA, 15 bp, Homo sapiens
tgatatgataatacc

SEQ ID NO: 73740 - DNA, 15 bp, Homo sapiens
atgatatgataatac

SEQ ID NO: 73741 - DNA, 15 bp, Homo sapiens
aatgatatgataata

SEQ ID NO: 73742 - DNA, 15 bp, Homo sapiens
aaatgatatgataat

SEQ ID NO: 73743 - DNA, 15 bp, Homo sapiens
taaatgatatgataa

SEQ ID NO: 73744 - DNA, 15 bp, Homo sapiens
ataaatgatatgata

SEQ ID NO: 73745 - DNA, 15 bp, Homo sapiens
gataaatgatatgat

SEQ ID NO: 73746 - DNA, 15 bp, Homo sapiens
agataaatgatatga

SEQ ID NO: 73747 - DNA, 15 bp, Homo sapiens
tagataaatgatatg

SEQ ID NO: 73748 - DNA, 15 bp, Homo sapiens
gtagataaatgatat

SEQ ID NO: 73749 - DNA, 15 bp, Homo sapiens
cgtagataaatgata

SEQ ID NO: 73750 - DNA, 15 bp, Homo sapiens
ccgtagataaatgat

SEQ ID NO: 73751 - DNA, 15 bp, Homo sapiens
accgtagataaatga

SEQ ID NO: 73752 - DNA, 15 bp, Homo sapiens
aaccgtagataaatg

SEQ ID NO: 73753 - DNA, 15 bp, Homo sapiens
caaccgtagataaat

SEQ ID NO: 73754 - DNA, 15 bp, Homo sapiens
ccaaccgtagataaa

SEQ ID NO: 73755 - DNA, 15 bp, Homo sapiens
gccaaccgtagataa

SEQ ID NO: 73756 - DNA, 15 bp, Homo sapiens
tgccaaccgtagata

SEQ ID NO: 73757 - DNA, 15 bp, Homo sapiens
ctgccaaccgtagat

SEQ ID NO: 73758 - DNA, 15 bp, Homo sapiens
actgccaaccgtaga

SEQ ID NO: 73759 - DNA, 15 bp, Homo sapiens
aactgccaaccgtag

SEQ ID NO: 73760 - DNA, 15 bp, Homo sapiens
taactgccaaccgta

SEQ ID NO: 73761 - DNA, 15 bp, Homo sapiens
ttaactgccaaccgt

SEQ ID NO: 73762 - DNA, 15 bp, Homo sapiens
gttaactgccaaccg

SEQ ID NO: 73763 - DNA, 15 bp, Homo sapiens
ggttaactgccaacc

SEQ ID NO: 73764 - DNA, 15 bp, Homo sapiens
gggttaactgccaac

SEQ ID NO: 73765 - DNA, 15 bp, Homo sapiens
agggttaactgccaa

SEQ ID NO: 73766 - DNA, 15 bp, Homo sapiens
tagggttaactgcca

SEQ ID NO: 73767 - DNA, 15 bp, Homo sapiens
atagggttaactgcc

SEQ ID NO: 73768 - DNA, 15 bp, Homo sapiens
aatagggttaactgc

SEQ ID NO: 73769 - DNA, 15 bp, Homo sapiens
caatagggttaactg

SEQ ID NO: 73770 - DNA, 15 bp, Homo sapiens
gcaatagggttaact

SEQ ID NO: 73771 - DNA, 15 bp, Homo sapiens
agcaatagggttaac

SEQ ID NO: 73772 - DNA, 15 bp, Homo sapiens
tagcaatagggttaa

SEQ ID NO: 73773 - DNA, 15 bp, Homo sapiens
atagcaatagggtta

SEQ ID NO: 73774 - DNA, 15 bp, Homo sapiens
aatagcaatagggtt

SEQ ID NO: 73775 - DNA, 15 bp, Homo sapiens
taatagcaatagggt

SEQ ID NO: 73776 - DNA, 15 bp, Homo sapiens
ctaatagcaataggg

SEQ ID NO: 73777 - DNA, 15 bp, Homo sapiens
gctaatagcaatagg

SEQ ID NO: 73778 - DNA, 15 bp, Homo sapiens
tgctaatagcaatag

SEQ ID NO: 73779 - DNA, 15 bp, Homo sapiens
ctgctaatagcaata

SEQ ID NO: 73780 - DNA, 15 bp, Homo sapiens
actgctaatagcaat

SEQ ID NO: 73781 - DNA, 15 bp, Homo sapiens
aactgctaatagcaa

SEQ ID NO: 73782 - DNA, 15 bp, Homo sapiens
caactgctaatagca

SEQ ID NO: 73783 - DNA, 15 bp, Homo sapiens
acaactgctaatagc

SEQ ID NO: 73784 - DNA, 15 bp, Homo sapiens
aacaactgctaatag

SEQ ID NO: 73785 - DNA, 15 bp, Homo sapiens
gaacaactgctaata

SEQ ID NO: 73786 - DNA, 15 bp, Homo sapiens
ggaacaactgctaat

SEQ ID NO: 73787 - DNA, 15 bp, Homo sapiens
tggaacaactgctaa

SEQ ID NO: 73788 - DNA, 15 bp, Homo sapiens
ttggaacaactgcta

SEQ ID NO: 73789 - DNA, 15 bp, Homo sapiens
attggaacaactgct

SEQ ID NO: 73790 - DNA, 15 bp, Homo sapiens
aattggaacaactgc

SEQ ID NO: 73791 - DNA, 15 bp, Homo sapiens
taattggaacaactg

SEQ ID NO: 73792 - DNA, 15 bp, Homo sapiens
ataattggaacaact

SEQ ID NO: 73793 - DNA, 15 bp, Homo sapiens
aataattggaacaac

SEQ ID NO: 73794 - DNA, 15 bp, Homo sapiens
caataattggaacaa

SEQ ID NO: 73795 - DNA, 15 bp, Homo sapiens
gcaataattggaaca

SEQ ID NO: 73796 - DNA, 15 bp, Homo sapiens
agcaataattggaac

SEQ ID NO: 73797 - DNA, 15 bp, Homo sapiens
cagcaataattggaa

SEQ ID NO: 73798 - DNA, 15 bp, Homo sapiens
acagcaataattgga

SEQ ID NO: 73799 - DNA, 15 bp, Homo sapiens
cacagcaataattgg

SEQ ID NO: 73800 - DNA, 15 bp, Homo sapiens
acacagcaataattg

SEQ ID NO: 73801 - DNA, 15 bp, Homo sapiens
gacacagcaataatt

SEQ ID NO: 73802 - DNA, 15 bp, Homo sapiens
tgacacagcaataat

SEQ ID NO: 73803 - DNA, 15 bp, Homo sapiens
ctgacacagcaataa

SEQ ID NO: 73804 - DNA, 15 bp, Homo sapiens
cctgacacagcaata

SEQ ID NO: 73805 - DNA, 15 bp, Homo sapiens
tcctgacacagcaat

SEQ ID NO: 73806 - DNA, 15 bp, Homo sapiens
ttcctgacacagcaa

SEQ ID NO: 73807 - DNA, 15 bp, Homo sapiens
attcctgacacagca

SEQ ID NO: 73808 - DNA, 15 bp, Homo sapiens
aattcctgacacagc

SEQ ID NO: 73809 - DNA, 15 bp, Homo sapiens
caattcctgacacag

SEQ ID NO: 73810 - DNA, 15 bp, Homo sapiens
acaattcctgacaca

SEQ ID NO: 73811 - DNA, 15 bp, Homo sapiens
aacaattcctgacac

SEQ ID NO: 73812 - DNA, 15 bp, Homo sapiens
caacaattcctgaca

SEQ ID NO: 73813 - DNA, 15 bp, Homo sapiens
tcaacaattcctgac

SEQ ID NO: 73814 - DNA, 15 bp, Homo sapiens
ttcaacaattcctga

SEQ ID NO: 73815 - DNA, 15 bp, Homo sapiens
tttcaacaattcctg

SEQ ID NO: 73816 - DNA, 15 bp, Homo sapiens
atttcaacaattcct

SEQ ID NO: 73817 - DNA, 15 bp, Homo sapiens
catttcaacaattcc

SEQ ID NO: 73818 - DNA, 15 bp, Homo sapiens
tcatttcaacaattc

SEQ ID NO: 73819 - DNA, 15 bp, Homo sapiens
ttcatttcaacaatt

SEQ ID NO: 73820 - DNA, 15 bp, Homo sapiens
tttcatttcaacaat

SEQ ID NO: 73821 - DNA, 15 bp, Homo sapiens
atttcatttcaacaa

SEQ ID NO: 73822 - DNA, 15 bp, Homo sapiens
aatttcatttcaaca

SEQ ID NO: 73823 - DNA, 15 bp, Homo sapiens
caatttcatttcaac

SEQ ID NO: 73824 - DNA, 15 bp, Homo sapiens
acaatttcatttcaa

SEQ ID NO: 73825 - DNA, 15 bp, Homo sapiens
aacaatttcatttca

SEQ ID NO: 73826 - DNA, 15 bp, Homo sapiens
caacaatttcatttc

SEQ ID NO: 73827 - DNA, 15 bp, Homo sapiens
ccaacaatttcattt

SEQ ID NO: 73828 - DNA, 15 bp, Homo sapiens
gccaacaatttcatt

SEQ ID NO: 73829 - DNA, 15 bp, Homo sapiens
agccaacaatttcat

SEQ ID NO: 73830 - DNA, 15 bp, Homo sapiens
cagccaacaatttca

SEQ ID NO: 73831 - DNA, 15 bp, Homo sapiens
ccagccaacaatttc

SEQ ID NO: 73832 - DNA, 15 bp, Homo sapiens
tccagccaacaattt

SEQ ID NO: 73833 - DNA, 15 bp, Homo sapiens
ttccagccaacaatt

SEQ ID NO: 73834 - DNA, 15 bp, Homo sapiens
tttccagccaacaat

SEQ ID NO: 73835 - DNA, 15 bp, Homo sapiens
atttccagccaacaa

SEQ ID NO: 73836 - DNA, 15 bp, Homo sapiens
catttccagccaaca

SEQ ID NO: 73837 - DNA, 15 bp, Homo sapiens
gcatttccagccaac

SEQ ID NO: 73838 - DNA, 15 bp, Homo sapiens
ggcatttccagccaa

SEQ ID NO: 73839 - DNA, 15 bp, Homo sapiens
tggcatttccagcca

SEQ ID NO: 73840 - DNA, 15 bp, Homo sapiens
ttggcatttccagcc

SEQ ID NO: 73841 - DNA, 15 bp, Homo sapiens
tttggcatttccagc

SEQ ID NO: 73842 - DNA, 15 bp, Homo sapiens
ttttggcatttccag

SEQ ID NO: 73843 - DNA, 15 bp, Homo sapiens
cttttggcatttcca

SEQ ID NO: 73844 - DNA, 15 bp, Homo sapiens
tcttttggcatttcc

SEQ ID NO: 73845 - DNA, 15 bp, Homo sapiens
ctcttttggcatttc

SEQ ID NO: 73846 - DNA, 15 bp, Homo sapiens
tctcttttggcattt

SEQ ID NO: 73847 - DNA, 15 bp, Homo sapiens
atctcttttggcatt

SEQ ID NO: 73848 - DNA, 15 bp, Homo sapiens
tatctcttttggcat

SEQ ID NO: 73849 - DNA, 15 bp, Homo sapiens
ttatctcttttggca

SEQ ID NO: 73850 - DNA, 15 bp, Homo sapiens
tttatctcttttggc

SEQ ID NO: 73851 - DNA, 15 bp, Homo sapiens
ttttatctcttttgg

SEQ ID NO: 73852 - DNA, 15 bp, Homo sapiens
tttttatctcttttg

SEQ ID NO: 73853 - DNA, 15 bp, Homo sapiens
ttttttatctctttt

SEQ ID NO: 73854 - DNA, 15 bp, Homo sapiens
cttttttatctcttt

SEQ ID NO: 73855 - DNA, 15 bp, Homo sapiens
tcttttttatctctt

SEQ ID NO: 73856 - DNA, 15 bp, Homo sapiens
ttcttttttatctct

SEQ ID NO: 73857 - DNA, 15 bp, Homo sapiens
gttcttttttatctc

SEQ ID NO: 73858 - DNA, 15 bp, Homo sapiens
agttcttttttatct

SEQ ID NO: 73859 - DNA, 15 bp, Homo sapiens
cagttcttttttatc

SEQ ID NO: 73860 - DNA, 15 bp, Homo sapiens
ccagttcttttttat

SEQ ID NO: 73861 - DNA, 15 bp, Homo sapiens
tccagttctttttta

SEQ ID NO: 73862 - DNA, 15 bp, Homo sapiens
ttccagttctttttt

SEQ ID NO: 73863 - DNA, 15 bp, Homo sapiens
cttccagttcttttt

SEQ ID NO: 73864 - DNA, 15 bp, Homo sapiens
gcttccagttctttt

SEQ ID NO: 73865 - DNA, 15 bp, Homo sapiens
agcttccagttcttt

SEQ ID NO: 73866 - DNA, 15 bp, Homo sapiens
cagcttccagttctt

SEQ ID NO: 73867 - DNA, 15 bp, Homo sapiens
gcagcttccagttct

SEQ ID NO: 73868 - DNA, 15 bp, Homo sapiens
agcagcttccagttc

SEQ ID NO: 73869 - DNA, 15 bp, Homo sapiens
cagcagcttccagtt

SEQ ID NO: 73870 - DNA, 15 bp, Homo sapiens
ccagcagcttccagt

SEQ ID NO: 73871 - DNA, 15 bp, Homo sapiens
tccagcagcttccag

SEQ ID NO: 73872 - DNA, 15 bp, Homo sapiens
ttccagcagcttcca

SEQ ID NO: 73873 - DNA, 15 bp, Homo sapiens
tttccagcagcttcc

SEQ ID NO: 73874 - DNA, 15 bp, Homo sapiens
ctttccagcagcttc

SEQ ID NO: 73875 - DNA, 15 bp, Homo sapiens
cctttccagcagctt

SEQ ID NO: 73876 - DNA, 15 bp, Homo sapiens
acctttccagcagct

SEQ ID NO: 73877 - DNA, 15 bp, Homo sapiens
tacctttccagcagc

SEQ ID NO: 73878 - DNA, 15 bp, Homo sapiens
ctacctttccagcag

SEQ ID NO: 73879 - DNA, 15 bp, Homo sapiens
cctacctttccagca

SEQ ID NO: 73880 - DNA, 15 bp, Homo sapiens
acctacctttccagc

SEQ ID NO: 73881 - DNA, 15 bp, Homo sapiens
gacctacctttccag

SEQ ID NO: 73882 - DNA, 15 bp, Homo sapiens
tgacctacctttcca

SEQ ID NO: 73883 - DNA, 15 bp, Homo sapiens
ttgacctacctttcc

SEQ ID NO: 73884 - DNA, 15 bp, Homo sapiens
tttgacctacctttc

SEQ ID NO: 73885 - DNA, 15 bp, Homo sapiens
atttgacctaccttt

SEQ ID NO: 73886 - DNA, 15 bp, Homo sapiens
tatttgacctacctt

SEQ ID NO: 73887 - DNA, 15 bp, Homo sapiens
ttatttgacctacct

SEQ ID NO: 73888 - DNA, 15 bp, Homo sapiens
cttatttgacctacc

SEQ ID NO: 73889 - DNA, 15 bp, Homo sapiens
tcttatttgacctac

SEQ ID NO: 73890 - DNA, 15 bp, Homo sapiens
atcttatttgaccta

SEQ ID NO: 73891 - DNA, 15 bp, Homo sapiens
aatcttatttgacct

SEQ ID NO: 73892 - DNA, 15 bp, Homo sapiens
aaatcttatttgacc

SEQ ID NO: 73893 - DNA, 15 bp, Homo sapiens
gaaatcttatttgac

SEQ ID NO: 73894 - DNA, 15 bp, Homo sapiens
tgaaatcttatttga

SEQ ID NO: 73895 - DNA, 15 bp, Homo sapiens
ttgaaatcttatttg

SEQ ID NO: 73896 - DNA, 15 bp, Homo sapiens
attgaaatcttattt

SEQ ID NO: 73897 - DNA, 15 bp, Homo sapiens
aattgaaatcttatt

SEQ ID NO: 73898 - DNA, 15 bp, Homo sapiens
caattgaaatcttat

SEQ ID NO: 73899 - DNA, 15 bp, Homo sapiens
ccaattgaaatctta

SEQ ID NO: 73900 - DNA, 15 bp, Homo sapiens
accaattgaaatctt

SEQ ID NO: 73901 - DNA, 15 bp, Homo sapiens
caccaattgaaatct

SEQ ID NO: 73902 - DNA, 15 bp, Homo sapiens
acaccaattgaaatc

SEQ ID NO: 73903 - DNA, 15 bp, Homo sapiens
aacaccaattgaaat

SEQ ID NO: 73904 - DNA, 15 bp, Homo sapiens
taacaccaattgaaa

SEQ ID NO: 73905 - DNA, 15 bp, Homo sapiens
ttaacaccaattgaa

SEQ ID NO: 73906 - DNA, 15 bp, Homo sapiens
cttaacaccaattga

SEQ ID NO: 73907 - DNA, 15 bp, Homo sapiens
acttaacaccaattg

SEQ ID NO: 73908 - DNA, 15 bp, Homo sapiens
cacttaacaccaatt

SEQ ID NO: 73909 - DNA, 15 bp, Homo sapiens
acacttaacaccaat

SEQ ID NO: 73910 - DNA, 15 bp, Homo sapiens
aacacttaacaccaa

SEQ ID NO: 73911 - DNA, 15 bp, Homo sapiens
caacacttaacacca

SEQ ID NO: 73912 - DNA, 15 bp, Homo sapiens
acaacacttaacacc

SEQ ID NO: 73913 - DNA, 15 bp, Homo sapiens
aacaacacttaacac

SEQ ID NO: 73914 - DNA, 15 bp, Homo sapiens
aaacaacacttaaca

SEQ ID NO: 73915 - DNA, 15 bp, Homo sapiens
aaaacaacacttaac

SEQ ID NO: 73916 - DNA, 15 bp, Homo sapiens
aaaaacaacacttaa

SEQ ID NO: 73917 - DNA, 15 bp, Homo sapiens
taaaaacaacactta

SEQ ID NO: 73918 - DNA, 15 bp, Homo sapiens
ctaaaaacaacactt

SEQ ID NO: 73919 - DNA, 15 bp, Homo sapiens
tctaaaaacaacact

SEQ ID NO: 73920 - DNA, 15 bp, Homo sapiens
gtctaaaaacaacac

SEQ ID NO: 73921 - DNA, 15 bp, Homo sapiens
tgtctaaaaacaaca

SEQ ID NO: 73922 - DNA, 15 bp, Homo sapiens
atgtctaaaaacaac

SEQ ID NO: 73923 - DNA, 15 bp, Homo sapiens
catgtctaaaaacaa

SEQ ID NO: 73924 - DNA, 15 bp, Homo sapiens
acatgtctaaaaaca

SEQ ID NO: 73925 - DNA, 15 bp, Homo sapiens
cacatgtctaaaaac

SEQ ID NO: 73926 - DNA, 15 bp, Homo sapiens
acacatgtctaaaaa

SEQ ID NO: 73927 - DNA, 15 bp, Homo sapiens
aacacatgtctaaaa

SEQ ID NO: 73928 - DNA, 15 bp, Homo sapiens
aaacacatgtctaaa

SEQ ID NO: 73929 - DNA, 15 bp, Homo sapiens
aaaacacatgtctaa

SEQ ID NO: 73930 - DNA, 15 bp, Homo sapiens
taaaacacatgtcta

SEQ ID NO: 73931 - DNA, 15 bp, Homo sapiens
ataaaacacatgtct

SEQ ID NO: 73932 - DNA, 15 bp, Homo sapiens
aataaaacacatgtc

SEQ ID NO: 73933 - DNA, 15 bp, Homo sapiens
aaataaaacacatgt

SEQ ID NO: 73934 - DNA, 15 bp, Homo sapiens
caaataaaacacatg

SEQ ID NO: 73935 - DNA, 15 bp, Homo sapiens
tcaaataaaacacat

SEQ ID NO: 73936 - DNA, 15 bp, Homo sapiens
ttcaaataaaacaca

SEQ ID NO: 73937 - DNA, 15 bp, Homo sapiens
attcaaataaaacac

SEQ ID NO: 73938 - DNA, 15 bp, Homo sapiens
aattcaaataaaaca

SEQ ID NO: 73939 - DNA, 15 bp, Homo sapiens
taattcaaataaaac

SEQ ID NO: 73940 - DNA, 15 bp, Homo sapiens
ataattcaaataaaa

SEQ ID NO: 73941 - DNA, 15 bp, Homo sapiens
aataattcaaataaa

SEQ ID NO: 73942 - DNA, 15 bp, Homo sapiens
aaataattcaaataa

SEQ ID NO: 73943 - DNA, 15 bp, Homo sapiens
taaataattcaaata

SEQ ID NO: 73944 - DNA, 15 bp, Homo sapiens
ataaataattcaaat

SEQ ID NO: 73945 - DNA, 15 bp, Homo sapiens
gataaataattcaaa

SEQ ID NO: 73946 - DNA, 15 bp, Homo sapiens
tgataaataattcaa

SEQ ID NO: 73947 - DNA, 15 bp, Homo sapiens
atgataaataattca

SEQ ID NO: 73948 - DNA, 15 bp, Homo sapiens
catgataaataattc

SEQ ID NO: 73949 - DNA, 15 bp, Homo sapiens
tcatgataaataatt

SEQ ID NO: 73950 - DNA, 15 bp, Homo sapiens
atcatgataaataat

SEQ ID NO: 73951 - DNA, 15 bp, Homo sapiens
tatcatgataaataa

SEQ ID NO: 73952 - DNA, 15 bp, Homo sapiens
atatcatgataaata

SEQ ID NO: 73953 - DNA, 15 bp, Homo sapiens
catatcatgataaat

SEQ ID NO: 73954 - DNA, 15 bp, Homo sapiens
gcatatcatgataaa

SEQ ID NO: 73955 - DNA, 15 bp, Homo sapiens
tgcatatcatgataa

SEQ ID NO: 73956 - DNA, 15 bp, Homo sapiens
ctgcatatcatgata

SEQ ID NO: 73957 - DNA, 15 bp, Homo sapiens
cctgcatatcatgat

SEQ ID NO: 73958 - DNA, 15 bp, Homo sapiens
gcctgcatatcatga

SEQ ID NO: 73959 - DNA, 15 bp, Homo sapiens
agcctgcatatcatg

SEQ ID NO: 73960 - DNA, 15 bp, Homo sapiens
aagcctgcatatcat

SEQ ID NO: 73961 - DNA, 15 bp, Homo sapiens
aaagcctgcatatca

SEQ ID NO: 73962 - DNA, 15 bp, Homo sapiens
taaagcctgcatatc

SEQ ID NO: 73963 - DNA, 15 bp, Homo sapiens
ttaaagcctgcatat

SEQ ID NO: 73964 - DNA, 15 bp, Homo sapiens
attaaagcctgcata

SEQ ID NO: 73965 - DNA, 15 bp, Homo sapiens
tattaaagcctgcat

SEQ ID NO: 73966 - DNA, 15 bp, Homo sapiens
ttattaaagcctgca

SEQ ID NO: 73967 - DNA, 15 bp, Homo sapiens
attattaaagcctgc

SEQ ID NO: 73968 - DNA, 15 bp, Homo sapiens
aattattaaagcctg

SEQ ID NO: 73969 - DNA, 15 bp, Homo sapiens
taattattaaagcct

SEQ ID NO: 73970 - DNA, 15 bp, Homo sapiens
ttaattattaaagcc

SEQ ID NO: 73971 - DNA, 15 bp, Homo sapiens
tttaattattaaagc

SEQ ID NO: 73972 - DNA, 15 bp, Homo sapiens
atttaattattaaag

SEQ ID NO: 73973 - DNA, 15 bp, Homo sapiens
catttaattattaaa

SEQ ID NO: 73974 - DNA, 15 bp, Homo sapiens
acatttaattattaa

SEQ ID NO: 73975 - DNA, 15 bp, Homo sapiens
aacatttaattatta

SEQ ID NO: 73976 - DNA, 15 bp, Homo sapiens
aaacatttaattatt

SEQ ID NO: 73977 - DNA, 15 bp, Homo sapiens
caaacatttaattat

SEQ ID NO: 73978 - DNA, 15 bp, Homo sapiens
acaaacatttaatta

SEQ ID NO: 73979 - DNA, 15 bp, Homo sapiens
cacaaacatttaatt

SEQ ID NO: 73980 - DNA, 15 bp, Homo sapiens
gcacaaacatttaat

SEQ ID NO: 73981 - DNA, 15 bp, Homo sapiens
ggcacaaacatttaa

SEQ ID NO: 73982 - DNA, 15 bp, Homo sapiens
gggcacaaacattta

SEQ ID NO: 73983 - DNA, 15 bp, Homo sapiens
tgggcacaaacattt

SEQ ID NO: 73984 - DNA, 15 bp, Homo sapiens
gtgggcacaaacatt

SEQ ID NO: 73985 - DNA, 15 bp, Homo sapiens
agtgggcacaaacat

SEQ ID NO: 73986 - DNA, 15 bp, Homo sapiens
tagtgggcacaaaca

SEQ ID NO: 73987 - DNA, 15 bp, Homo sapiens
gtagtgggcacaaac

SEQ ID NO: 73988 - DNA, 15 bp, Homo sapiens
tgtagtgggcacaaa

SEQ ID NO: 73989 - DNA, 15 bp, Homo sapiens
ttgtagtgggcacaa

SEQ ID NO: 73990 - DNA, 15 bp, Homo sapiens
gttgtagtgggcaca

SEQ ID NO: 73991 - DNA, 15 bp, Homo sapiens
agttgtagtgggcac

SEQ ID NO: 73992 - DNA, 15 bp, Homo sapiens
tagttgtagtgggca

SEQ ID NO: 73993 - DNA, 15 bp, Homo sapiens
ttagttgtagtgggc

SEQ ID NO: 73994 - DNA, 15 bp, Homo sapiens
attagttgtagtggg

SEQ ID NO: 73995 - DNA, 15 bp, Homo sapiens
tattagttgtagtgg

SEQ ID NO: 73996 - DNA, 15 bp, Homo sapiens
ttattagttgtagtg

SEQ ID NO: 73997 - DNA, 15 bp, Homo sapiens
attattagttgtagt

SEQ ID NO: 73998 - DNA, 15 bp, Homo sapiens
aattattagttgtag

SEQ ID NO: 73999 - DNA, 15 bp, Homo sapiens
caattattagttgta

SEQ ID NO: 74000 - DNA, 15 bp, Homo sapiens
acaattattagttgt

SEQ ID NO: 74001 - DNA, 15 bp, Homo sapiens
gacaattattagttg

SEQ ID NO: 74002 - DNA, 15 bp, Homo sapiens
tgacaattattagtt

SEQ ID NO: 74003 - DNA, 15 bp, Homo sapiens
ttgacaattattagt

SEQ ID NO: 74004 - DNA, 15 bp, Homo sapiens
attgacaattattag

SEQ ID NO: 74005 - DNA, 15 bp, Homo sapiens
aattgacaattatta

SEQ ID NO: 74006 - DNA, 15 bp, Homo sapiens
caattgacaattatt

SEQ ID NO: 74007 - DNA, 15 bp, Homo sapiens
acaattgacaattat

SEQ ID NO: 74008 - DNA, 15 bp, Homo sapiens
cacaattgacaatta

SEQ ID NO: 74009 - DNA, 15 bp, Homo sapiens
acacaattgacaatt

SEQ ID NO: 74010 - DNA, 15 bp, Homo sapiens
tacacaattgacaat

SEQ ID NO: 74011 - DNA, 15 bp, Homo sapiens
atacacaattgacaa

SEQ ID NO: 74012 - DNA, 15 bp, Homo sapiens
catacacaattgaca

SEQ ID NO: 74013 - DNA, 15 bp, Homo sapiens
tcatacacaattgac

SEQ ID NO: 74014 - DNA, 15 bp, Homo sapiens
ttcatacacaattga

SEQ ID NO: 74015 - DNA, 15 bp, Homo sapiens
tttcatacacaattg

SEQ ID NO: 74016 - DNA, 15 bp, Homo sapiens
atttcatacacaatt

SEQ ID NO: 74017 - DNA, 15 bp, Homo sapiens
tatttcatacacaat

SEQ ID NO: 74018 - DNA, 15 bp, Homo sapiens
atatttcatacacaa

SEQ ID NO: 74019 - DNA, 15 bp, Homo sapiens
aatatttcatacaca

SEQ ID NO: 74020 - DNA, 15 bp, Homo sapiens
aaatatttcatacac

SEQ ID NO: 74021 - DNA, 15 bp, Homo sapiens
aaaatatttcataca

SEQ ID NO: 74022 - DNA, 15 bp, Homo sapiens
taaaatatttcatac

SEQ ID NO: 74023 - DNA, 15 bp, Homo sapiens
gtaaaatatttcata

SEQ ID NO: 74024 - DNA, 15 bp, Homo sapiens
agtaaaatatttcat

SEQ ID NO: 74025 - DNA, 15 bp, Homo sapiens
cagtaaaatatttca

SEQ ID NO: 74026 - DNA, 15 bp, Homo sapiens
acagtaaaatatttc

SEQ ID NO: 74027 - DNA, 15 bp, Homo sapiens
tacagtaaaatattt

SEQ ID NO: 74028 - DNA, 15 bp, Homo sapiens
atacagtaaaatatt

SEQ ID NO: 74029 - DNA, 15 bp, Homo sapiens
aatacagtaaaatat

SEQ ID NO: 74030 - DNA, 15 bp, Homo sapiens
taatacagtaaaata

SEQ ID NO: 74031 - DNA, 15 bp, Homo sapiens
ttaatacagtaaaat

SEQ ID NO: 74032 - DNA, 15 bp, Homo sapiens
attaatacagtaaaa

SEQ ID NO: 74033 - DNA, 15 bp, Homo sapiens
cattaatacagtaaa

SEQ ID NO: 74034 - DNA, 15 bp, Homo sapiens
acattaatacagtaa

SEQ ID NO: 74035 - DNA, 15 bp, Homo sapiens
gacattaatacagta

SEQ ID NO: 74036 - DNA, 15 bp, Homo sapiens
agacattaatacagt

SEQ ID NO: 74037 - DNA, 15 bp, Homo sapiens
tagacattaatacag

SEQ ID NO: 74038 - DNA, 15 bp, Homo sapiens
ctagacattaataca

SEQ ID NO: 74039 - DNA, 15 bp, Homo sapiens
tctagacattaatac

SEQ ID NO: 74040 - DNA, 15 bp, Homo sapiens
ttctagacattaata

SEQ ID NO: 74041 - DNA, 15 bp, Homo sapiens
gttctagacattaat

SEQ ID NO: 74042 - DNA, 15 bp, Homo sapiens
agttctagacattaa

SEQ ID NO: 74043 - DNA, 15 bp, Homo sapiens
aagttctagacatta

SEQ ID NO: 74044 - DNA, 15 bp, Homo sapiens
taagttctagacatt

SEQ ID NO: 74045 - DNA, 15 bp, Homo sapiens
ttaagttctagacat

SEQ ID NO: 74046 - DNA, 15 bp, Homo sapiens
tttaagttctagaca

SEQ ID NO: 74047 - DNA, 15 bp, Homo sapiens
atttaagttctagac

SEQ ID NO: 74048 - DNA, 15 bp, Homo sapiens
tatttaagttctaga

SEQ ID NO: 74049 - DNA, 15 bp, Homo sapiens
atatttaagttctag

SEQ ID NO: 74050 - DNA, 15 bp, Homo sapiens
tatatttaagttcta

SEQ ID NO: 74051 - DNA, 15 bp, Homo sapiens
ttatatttaagttct

SEQ ID NO: 74052 - DNA, 15 bp, Homo sapiens
cttatatttaagttc

SEQ ID NO: 74053 - DNA, 15 bp, Homo sapiens
ccttatatttaagtt

SEQ ID NO: 74054 - DNA, 15 bp, Homo sapiens
accttatatttaagt

SEQ ID NO: 74055 - DNA, 15 bp, Homo sapiens
caccttatatttaag

SEQ ID NO: 74056 - DNA, 15 bp, Homo sapiens
tcaccttatatttaa

SEQ ID NO: 74057 - DNA, 15 bp, Homo sapiens
atcaccttatattta

SEQ ID NO: 74058 - DNA, 15 bp, Homo sapiens
aatcaccttatattt

SEQ ID NO: 74059 - DNA, 15 bp, Homo sapiens
taatcaccttatatt

SEQ ID NO: 74060 - DNA, 15 bp, Homo sapiens
ttaatcaccttatat

SEQ ID NO: 74061 - DNA, 15 bp, Homo sapiens
gttaatcaccttata

SEQ ID NO: 74062 - DNA, 15 bp, Homo sapiens
tgttaatcaccttat

SEQ ID NO: 74063 - DNA, 15 bp, Homo sapiens
atgttaatcacctta

SEQ ID NO: 74064 - DNA, 15 bp, Homo sapiens
tatgttaatcacctt

SEQ ID NO: 74065 - DNA, 15 bp, Homo sapiens
ttatgttaatcacct

SEQ ID NO: 74066 - DNA, 15 bp, Homo sapiens
tttatgttaatcacc

SEQ ID NO: 74067 - DNA, 15 bp, Homo sapiens
ttttatgttaatcac

SEQ ID NO: 74068 - DNA, 15 bp, Homo sapiens
gttttatgttaatca

SEQ ID NO: 74069 - DNA, 15 bp, Homo sapiens
cgttttatgttaatc

SEQ ID NO: 74070 - DNA, 15 bp, Homo sapiens
acgttttatgttaat

SEQ ID NO: 74071 - DNA, 15 bp, Homo sapiens
aacgttttatgttaa

SEQ ID NO: 74072 - DNA, 15 bp, Homo sapiens
caacgttttatgtta

SEQ ID NO: 74073 - DNA, 15 bp, Homo sapiens
tcaacgttttatgtt

SEQ ID NO: 74074 - DNA, 15 bp, Homo sapiens
ctcaacgttttatgt

SEQ ID NO: 74075 - DNA, 15 bp, Homo sapiens
gctcaacgttttatg

SEQ ID NO: 74076 - DNA, 15 bp, Homo sapiens
ggctcaacgttttat

SEQ ID NO: 74077 - DNA, 15 bp, Homo sapiens
aggctcaacgtttta

SEQ ID NO: 74078 - DNA, 15 bp, Homo sapiens
taggctcaacgtttt

SEQ ID NO: 74079 - DNA, 15 bp, Homo sapiens
ataggctcaacgttt

SEQ ID NO: 74080 - DNA, 15 bp, Homo sapiens
tataggctcaacgtt

SEQ ID NO: 74081 - DNA, 15 bp, Homo sapiens
ctataggctcaacgt

SEQ ID NO: 74082 - DNA, 15 bp, Homo sapiens
tctataggctcaacg

SEQ ID NO: 74083 - DNA, 15 bp, Homo sapiens
ttctataggctcaac

SEQ ID NO: 74084 - DNA, 15 bp, Homo sapiens
tttctataggctcaa

SEQ ID NO: 74085 - DNA, 15 bp, Homo sapiens
ctttctataggctca

SEQ ID NO: 74086 - DNA, 15 bp, Homo sapiens
gctttctataggctc

SEQ ID NO: 74087 - DNA, 15 bp, Homo sapiens
tgctttctataggct

SEQ ID NO: 74088 - DNA, 15 bp, Homo sapiens
gtgctttctataggc

SEQ ID NO: 74089 - DNA, 15 bp, Homo sapiens
agtgctttctatagg

SEQ ID NO: 74090 - DNA, 15 bp, Homo sapiens
aagtgctttctatag

SEQ ID NO: 74091 - DNA, 15 bp, Homo sapiens
taagtgctttctata

SEQ ID NO: 74092 - DNA, 15 bp, Homo sapiens
ttaagtgctttctat

SEQ ID NO: 74093 - DNA, 15 bp, Homo sapiens
gttaagtgctttcta

SEQ ID NO: 74094 - DNA, 15 bp, Homo sapiens
tgttaagtgctttct

SEQ ID NO: 74095 - DNA, 15 bp, Homo sapiens
atgttaagtgctttc

SEQ ID NO: 74096 - DNA, 15 bp, Homo sapiens
tatgttaagtgcttt

SEQ ID NO: 74097 - DNA, 15 bp, Homo sapiens
ctatgttaagtgctt

SEQ ID NO: 74098 - DNA, 15 bp, Homo sapiens
actatgttaagtgct

SEQ ID NO: 74099 - DNA, 15 bp, Homo sapiens
aactatgttaagtgc

SEQ ID NO: 74100 - DNA, 15 bp, Homo sapiens
taactatgttaagtg

SEQ ID NO: 74101 - DNA, 15 bp, Homo sapiens
ataactatgttaagt

SEQ ID NO: 74102 - DNA, 15 bp, Homo sapiens
cataactatgttaag

SEQ ID NO: 74103 - DNA, 15 bp, Homo sapiens
tcataactatgttaa

SEQ ID NO: 74104 - DNA, 15 bp, Homo sapiens
atcataactatgtta

SEQ ID NO: 74105 - DNA, 15 bp, Homo sapiens
tatcataactatgtt

SEQ ID NO: 74106 - DNA, 15 bp, Homo sapiens
ttatcataactatgt

SEQ ID NO: 74107 - DNA, 15 bp, Homo sapiens
tttatcataactatg

SEQ ID NO: 74108 - DNA, 15 bp, Homo sapiens
ctttatcataactat

SEQ ID NO: 74109 - DNA, 15 bp, Homo sapiens
tctttatcataacta

SEQ ID NO: 74110 - DNA, 15 bp, Homo sapiens
ttctttatcataact

SEQ ID NO: 74111 - DNA, 15 bp, Homo sapiens
gttctttatcataac

SEQ ID NO: 74112 - DNA, 15 bp, Homo sapiens
agttctttatcataa

SEQ ID NO: 74113 - DNA, 15 bp, Homo sapiens
aagttctttatcata

SEQ ID NO: 74114 - DNA, 15 bp, Homo sapiens
gaagttctttatcat

SEQ ID NO: 74115 - DNA, 15 bp, Homo sapiens
agaagttctttatca

SEQ ID NO: 74116 - DNA, 15 bp, Homo sapiens
cagaagttctttatc

SEQ ID NO: 74117 - DNA, 15 bp, Homo sapiens
tcagaagttctttat

SEQ ID NO: 74118 - DNA, 15 bp, Homo sapiens
ttcagaagttcttta

SEQ ID NO: 74119 - DNA, 15 bp, Homo sapiens
attcagaagttcttt

SEQ ID NO: 74120 - DNA, 15 bp, Homo sapiens
tattcagaagttctt

SEQ ID NO: 74121 - DNA, 15 bp, Homo sapiens
atattcagaagttct

SEQ ID NO: 74122 - DNA, 15 bp, Homo sapiens
aatattcagaagttc

SEQ ID NO: 74123 - DNA, 15 bp, Homo sapiens
gaatattcagaagtt

SEQ ID NO: 74124 - DNA, 15 bp, Homo sapiens
tgaatattcagaagt

SEQ ID NO: 74125 - DNA, 15 bp, Homo sapiens
ttgaatattcagaag

SEQ ID NO: 74126 - DNA, 15 bp, Homo sapiens
tttgaatattcagaa

SEQ ID NO: 74127 - DNA, 15 bp, Homo sapiens
ctttgaatattcaga

SEQ ID NO: 74128 - DNA, 15 bp, Homo sapiens
actttgaatattcag

SEQ ID NO: 74129 - DNA, 15 bp, Homo sapiens
cactttgaatattca

SEQ ID NO: 74130 - DNA, 15 bp, Homo sapiens
gcactttgaatattc

SEQ ID NO: 74131 - DNA, 15 bp, Homo sapiens
tgcactttgaatatt

SEQ ID NO: 74132 - DNA, 15 bp, Homo sapiens
atgcactttgaatat

SEQ ID NO: 74133 - DNA, 15 bp, Homo sapiens
aatgcactttgaata

SEQ ID NO: 74134 - DNA, 15 bp, Homo sapiens
aaatgcactttgaat

SEQ ID NO: 74135 - DNA, 15 bp, Homo sapiens
gaaatgcactttgaa

SEQ ID NO: 74136 - DNA, 15 bp, Homo sapiens
tgaaatgcactttga

SEQ ID NO: 74137 - DNA, 15 bp, Homo sapiens
atgaaatgcactttg

SEQ ID NO: 74138 - DNA, 15 bp, Homo sapiens
aatgaaatgcacttt

SEQ ID NO: 74139 - DNA, 15 bp, Homo sapiens
aaatgaaatgcactt

SEQ ID NO: 74140 - DNA, 15 bp, Homo sapiens
aaaatgaaatgcact

SEQ ID NO: 74141 - DNA, 15 bp, Homo sapiens
taaaatgaaatgcac

SEQ ID NO: 74142 - DNA, 15 bp, Homo sapiens
gtaaaatgaaatgca

SEQ ID NO: 74143 - DNA, 15 bp, Homo sapiens
agtaaaatgaaatgc

SEQ ID NO: 74144 - DNA, 15 bp, Homo sapiens
aagtaaaatgaaatg

SEQ ID NO: 74145 - DNA, 15 bp, Homo sapiens
gaagtaaaatgaaat

SEQ ID NO: 74146 - DNA, 15 bp, Homo sapiens
tgaagtaaaatgaaa

SEQ ID NO: 74147 - DNA, 15 bp, Homo sapiens
atgaagtaaaatgaa

SEQ ID NO: 74148 - DNA, 15 bp, Homo sapiens
catgaagtaaaatga

SEQ ID NO: 74149 - DNA, 15 bp, Homo sapiens
acatgaagtaaaatg

SEQ ID NO: 74150 - DNA, 15 bp, Homo sapiens
gacatgaagtaaaat

SEQ ID NO: 74151 - DNA, 15 bp, Homo sapiens
ggacatgaagtaaaa

SEQ ID NO: 74152 - DNA, 15 bp, Homo sapiens
tggacatgaagtaaa

SEQ ID NO: 74153 - DNA, 15 bp, Homo sapiens
ttggacatgaagtaa

SEQ ID NO: 74154 - DNA, 15 bp, Homo sapiens
tttggacatgaagta

SEQ ID NO: 74155 - DNA, 15 bp, Homo sapiens
atttggacatgaagt

SEQ ID NO: 74156 - DNA, 15 bp, Homo sapiens
catttggacatgaag

SEQ ID NO: 74157 - DNA, 15 bp, Homo sapiens
gcatttggacatgaa

SEQ ID NO: 74158 - DNA, 15 bp, Homo sapiens
agcatttggacatga

SEQ ID NO: 74159 - DNA, 15 bp, Homo sapiens
tagcatttggacatg

SEQ ID NO: 74160 - DNA, 15 bp, Homo sapiens
gtagcatttggacat

SEQ ID NO: 74161 - DNA, 15 bp, Homo sapiens
agtagcatttggaca

SEQ ID NO: 74162 - DNA, 15 bp, Homo sapiens
cagtagcatttggac

SEQ ID NO: 74163 - DNA, 15 bp, Homo sapiens
acagtagcatttgga

SEQ ID NO: 74164 - DNA, 15 bp, Homo sapiens
aacagtagcatttgg

SEQ ID NO: 74165 - DNA, 15 bp, Homo sapiens
aaacagtagcatttg

SEQ ID NO: 74166 - DNA, 15 bp, Homo sapiens
caaacagtagcattt

SEQ ID NO: 74167 - DNA, 15 bp, Homo sapiens
ccaaacagtagcatt

SEQ ID NO: 74168 - DNA, 15 bp, Homo sapiens
tccaaacagtagcat

SEQ ID NO: 74169 - DNA, 15 bp, Homo sapiens
gtccaaacagtagca

SEQ ID NO: 74170 - DNA, 15 bp, Homo sapiens
tgtccaaacagtagc

SEQ ID NO: 74171 - DNA, 15 bp, Homo sapiens
ttgtccaaacagtag

SEQ ID NO: 74172 - DNA, 15 bp, Homo sapiens
tttgtccaaacagta

SEQ ID NO: 74173 - DNA, 15 bp, Homo sapiens
atttgtccaaacagt

SEQ ID NO: 74174 - DNA, 15 bp, Homo sapiens
catttgtccaaacag

SEQ ID NO: 74175 - DNA, 15 bp, Homo sapiens
acatttgtccaaaca

SEQ ID NO: 74176 - DNA, 15 bp, Homo sapiens
gacatttgtccaaac

SEQ ID NO: 74177 - DNA, 15 bp, Homo sapiens
tgacatttgtccaaa

SEQ ID NO: 74178 - DNA, 15 bp, Homo sapiens
atgacatttgtccaa

SEQ ID NO: 74179 - DNA, 15 bp, Homo sapiens
gatgacatttgtcca

SEQ ID NO: 74180 - DNA, 15 bp, Homo sapiens
ggatgacatttgtcc

SEQ ID NO: 74181 - DNA, 15 bp, Homo sapiens
gggatgacatttgtc

SEQ ID NO: 74182 - DNA, 15 bp, Homo sapiens
agggatgacatttgt

SEQ ID NO: 74183 - DNA, 15 bp, Homo sapiens
cagggatgacatttg

SEQ ID NO: 74184 - DNA, 15 bp, Homo sapiens
acagggatgacattt

SEQ ID NO: 74185 - DNA, 15 bp, Homo sapiens
aacagggatgacatt

SEQ ID NO: 74186 - DNA, 15 bp, Homo sapiens
aaacagggatgacat

SEQ ID NO: 74187 - DNA, 15 bp, Homo sapiens
gaaacagggatgaca

SEQ ID NO: 74188 - DNA, 15 bp, Homo sapiens
tgaaacagggatgac

SEQ ID NO: 74189 - DNA, 15 bp, Homo sapiens
gtgaaacagggatga

SEQ ID NO: 74190 - DNA, 15 bp, Homo sapiens
tgtgaaacagggatg

SEQ ID NO: 74191 - DNA, 15 bp, Homo sapiens
ttgtgaaacagggat

SEQ ID NO: 74192 - DNA, 15 bp, Homo sapiens
tttgtgaaacaggga

SEQ ID NO: 74193 - DNA, 15 bp, Homo sapiens
gtttgtgaaacaggg

SEQ ID NO: 74194 - DNA, 15 bp, Homo sapiens
ggtttgtgaaacagg

SEQ ID NO: 74195 - DNA, 15 bp, Homo sapiens
aggtttgtgaaacag

SEQ ID NO: 74196 - DNA, 15 bp, Homo sapiens
aaggtttgtgaaaca

SEQ ID NO: 74197 - DNA, 15 bp, Homo sapiens
gaaggtttgtgaaac

SEQ ID NO: 74198 - DNA, 15 bp, Homo sapiens
tgaaggtttgtgaaa

SEQ ID NO: 74199 - DNA, 15 bp, Homo sapiens
atgaaggtttgtgaa

SEQ ID NO: 74200 - DNA, 15 bp, Homo sapiens
catgaaggtttgtga

SEQ ID NO: 74201 - DNA, 15 bp, Homo sapiens
gcatgaaggtttgtg

SEQ ID NO: 74202 - DNA, 15 bp, Homo sapiens
tgcatgaaggtttgt

SEQ ID NO: 74203 - DNA, 15 bp, Homo sapiens
ctgcatgaaggtttg

SEQ ID NO: 74204 - DNA, 15 bp, Homo sapiens
tctgcatgaaggttt

SEQ ID NO: 74205 - DNA, 15 bp, Homo sapiens
ttctgcatgaaggtt

SEQ ID NO: 74206 - DNA, 15 bp, Homo sapiens
cttctgcatgaaggt

SEQ ID NO: 74207 - DNA, 15 bp, Homo sapiens
tcttctgcatgaagg

SEQ ID NO: 74208 - DNA, 15 bp, Homo sapiens
gtcttctgcatgaag

SEQ ID NO: 74209 - DNA, 15 bp, Homo sapiens
agtcttctgcatgaa

SEQ ID NO: 74210 - DNA, 15 bp, Homo sapiens
cagtcttctgcatga

SEQ ID NO: 74211 - DNA, 15 bp, Homo sapiens
acagtcttctgcatg

SEQ ID NO: 74212 - DNA, 15 bp, Homo sapiens
tacagtcttctgcat

SEQ ID NO: 74213 - DNA, 15 bp, Homo sapiens
ttacagtcttctgca

SEQ ID NO: 74214 - DNA, 15 bp, Homo sapiens
cttacagtcttctgc

SEQ ID NO: 74215 - DNA, 15 bp, Homo sapiens
acttacagtcttctg

SEQ ID NO: 74216 - DNA, 15 bp, Homo sapiens
cacttacagtcttct

SEQ ID NO: 74217 - DNA, 15 bp, Homo sapiens
tcacttacagtcttc

SEQ ID NO: 74218 - DNA, 15 bp, Homo sapiens
ttcacttacagtctt

SEQ ID NO: 74219 - DNA, 15 bp, Homo sapiens
attcacttacagtct

SEQ ID NO: 74220 - DNA, 15 bp, Homo sapiens
aattcacttacagtc

SEQ ID NO: 74221 - DNA, 15 bp, Homo sapiens
caattcacttacagt

SEQ ID NO: 74222 - DNA, 15 bp, Homo sapiens
acaattcacttacag

SEQ ID NO: 74223 - DNA, 15 bp, Homo sapiens
aacaattcacttaca

SEQ ID NO: 74224 - DNA, 15 bp, Homo sapiens
gaacaattcacttac

SEQ ID NO: 74225 - DNA, 15 bp, Homo sapiens
tgaacaattcactta

SEQ ID NO: 74226 - DNA, 15 bp, Homo sapiens
ctgaacaattcactt

SEQ ID NO: 74227 - DNA, 15 bp, Homo sapiens
cctgaacaattcact

SEQ ID NO: 74228 - DNA, 15 bp, Homo sapiens
ccctgaacaattcac

SEQ ID NO: 74229 - DNA, 15 bp, Homo sapiens
accctgaacaattca

SEQ ID NO: 74230 - DNA, 15 bp, Homo sapiens
gaccctgaacaattc

SEQ ID NO: 74231 - DNA, 15 bp, Homo sapiens
cgaccctgaacaatt

SEQ ID NO: 74232 - DNA, 15 bp, Homo sapiens
ccgaccctgaacaat

SEQ ID NO: 74233 - DNA, 15 bp, Homo sapiens
tccgaccctgaacaa

SEQ ID NO: 74234 - DNA, 15 bp, Homo sapiens
gtccgaccctgaaca

SEQ ID NO: 74235 - DNA, 15 bp, Homo sapiens
tgtccgaccctgaac

SEQ ID NO: 74236 - DNA, 15 bp, Homo sapiens
atgtccgaccctgaa

SEQ ID NO: 74237 - DNA, 15 bp, Homo sapiens
catgtccgaccctga

SEQ ID NO: 74238 - DNA, 15 bp, Homo sapiens
acatgtccgaccctg

SEQ ID NO: 74239 - DNA, 15 bp, Homo sapiens
cacatgtccgaccct

SEQ ID NO: 74240 - DNA, 15 bp, Homo sapiens
gcacatgtccgaccc

SEQ ID NO: 74241 - DNA, 15 bp, Homo sapiens
agcacatgtccgacc

SEQ ID NO: 74242 - DNA, 15 bp, Homo sapiens
cagcacatgtccgac

SEQ ID NO: 74243 - DNA, 15 bp, Homo sapiens
ccagcacatgtccga

SEQ ID NO: 74244 - DNA, 15 bp, Homo sapiens
gccagcacatgtccg

SEQ ID NO: 74245 - DNA, 15 bp, Homo sapiens
tgccagcacatgtcc

SEQ ID NO: 74246 - DNA, 15 bp, Homo sapiens
atgccagcacatgtc

SEQ ID NO: 74247 - DNA, 15 bp, Homo sapiens
aatgccagcacatgt

SEQ ID NO: 74248 - DNA, 15 bp, Homo sapiens
aaatgccagcacatg

SEQ ID NO: 74249 - DNA, 15 bp, Homo sapiens
taaatgccagcacat

SEQ ID NO: 74250 - DNA, 15 bp, Homo sapiens
ttaaatgccagcaca

SEQ ID NO: 74251 - DNA, 15 bp, Homo sapiens
cttaaatgccagcac

SEQ ID NO: 74252 - DNA, 15 bp, Homo sapiens
tcttaaatgccagca

SEQ ID NO: 74253 - DNA, 15 bp, Homo sapiens
ctcttaaatgccagc

SEQ ID NO: 74254 - DNA, 15 bp, Homo sapiens
tctcttaaatgccag

SEQ ID NO: 74255 - DNA, 15 bp, Homo sapiens
atctcttaaatgcca

SEQ ID NO: 74256 - DNA, 15 bp, Homo sapiens
gatctcttaaatgcc

SEQ ID NO: 74257 - DNA, 15 bp, Homo sapiens
ggatctcttaaatgc

SEQ ID NO: 74258 - DNA, 15 bp, Homo sapiens
aggatctcttaaatg

SEQ ID NO: 74259 - DNA, 15 bp, Homo sapiens
gaggatctcttaaat

SEQ ID NO: 74260 - DNA, 15 bp, Homo sapiens
agaggatctcttaaa

SEQ ID NO: 74261 - DNA, 15 bp, Homo sapiens
aagaggatctcttaa

SEQ ID NO: 74262 - DNA, 15 bp, Homo sapiens
gaagaggatctctta

SEQ ID NO: 74263 - DNA, 15 bp, Homo sapiens
agaagaggatctctt

SEQ ID NO: 74264 - DNA, 15 bp, Homo sapiens
aagaagaggatctct

SEQ ID NO: 74265 - DNA, 15 bp, Homo sapiens
aaagaagaggatctc

SEQ ID NO: 74266 - DNA, 15 bp, Homo sapiens
aaaagaagaggatct

SEQ ID NO: 74267 - DNA, 15 bp, Homo sapiens
aaaaagaagaggatc

SEQ ID NO: 74268 - DNA, 15 bp, Homo sapiens
caaaaagaagaggat

SEQ ID NO: 74269 - DNA, 15 bp, Homo sapiens
ccaaaaagaagagga

SEQ ID NO: 74270 - DNA, 15 bp, Homo sapiens
gccaaaaagaagagg

SEQ ID NO: 74271 - DNA, 15 bp, Homo sapiens
agccaaaaagaagag

SEQ ID NO: 74272 - DNA, 15 bp, Homo sapiens
cagccaaaaagaaga

SEQ ID NO: 74273 - DNA, 15 bp, Homo sapiens
acagccaaaaagaag

SEQ ID NO: 74274 - DNA, 15 bp, Homo sapiens
cacagccaaaaagaa

SEQ ID NO: 74275 - DNA, 15 bp, Homo sapiens
tcacagccaaaaaga

SEQ ID NO: 74276 - DNA, 15 bp, Homo sapiens
atcacagccaaaaag

SEQ ID NO: 74277 - DNA, 15 bp, Homo sapiens
aatcacagccaaaaa

SEQ ID NO: 74278 - DNA, 15 bp, Homo sapiens
aaatcacagccaaaa

SEQ ID NO: 74279 - DNA, 15 bp, Homo sapiens
gaaatcacagccaaa

SEQ ID NO: 74280 - DNA, 15 bp, Homo sapiens
agaaatcacagccaa

SEQ ID NO: 74281 - DNA, 15 bp, Homo sapiens
tagaaatcacagcca

SEQ ID NO: 74282 - DNA, 15 bp, Homo sapiens
atagaaatcacagcc

SEQ ID NO: 74283 - DNA, 15 bp, Homo sapiens
tatagaaatcacagc

SEQ ID NO: 74284 - DNA, 15 bp, Homo sapiens
ttatagaaatcacag

SEQ ID NO: 74285 - DNA, 15 bp, Homo sapiens
attatagaaatcaca

SEQ ID NO: 74286 - DNA, 15 bp, Homo sapiens
aattatagaaatcac

SEQ ID NO: 74287 - DNA, 15 bp, Homo sapiens
taattatagaaatca

SEQ ID NO: 74288 - DNA, 15 bp, Homo sapiens
ttaattatagaaatc

SEQ ID NO: 74289 - DNA, 15 bp, Homo sapiens
cttaattatagaaat

SEQ ID NO: 74290 - DNA, 15 bp, Homo sapiens
tcttaattatagaaa

SEQ ID NO: 74291 - DNA, 15 bp, Homo sapiens
atcttaattatagaa

SEQ ID NO: 74292 - DNA, 15 bp, Homo sapiens
catcttaattataga

SEQ ID NO: 74293 - DNA, 15 bp, Homo sapiens
ccatcttaattatag

SEQ ID NO: 74294 - DNA, 15 bp, Homo sapiens
gccatcttaattata

SEQ ID NO: 74295 - DNA, 15 bp, Homo sapiens
tgccatcttaattat

SEQ ID NO: 74296 - DNA, 15 bp, Homo sapiens
ctgccatcttaatta

SEQ ID NO: 74297 - DNA, 15 bp, Homo sapiens
gctgccatcttaatt

SEQ ID NO: 74298 - DNA, 15 bp, Homo sapiens
ggctgccatcttaat

SEQ ID NO: 74299 - DNA, 15 bp, Homo sapiens
tggctgccatcttaa

SEQ ID NO: 74300 - DNA, 15 bp, Homo sapiens
gtggctgccatctta

SEQ ID NO: 74301 - DNA, 15 bp, Homo sapiens
ggtggctgccatctt

SEQ ID NO: 74302 - DNA, 15 bp, Homo sapiens
tggtggctgccatct

SEQ ID NO: 74303 - DNA, 15 bp, Homo sapiens
ctggtggctgccatc

SEQ ID NO: 74304 - DNA, 15 bp, Homo sapiens
tctggtggctgccat

SEQ ID NO: 74305 - DNA, 15 bp, Homo sapiens
atctggtggctgcca

SEQ ID NO: 74306 - DNA, 15 bp, Homo sapiens
catctggtggctgcc

SEQ ID NO: 74307 - DNA, 15 bp, Homo sapiens
ccatctggtggctgc

SEQ ID NO: 74308 - DNA, 15 bp, Homo sapiens
gccatctggtggctg

SEQ ID NO: 74309 - DNA, 15 bp, Homo sapiens
tgccatctggtggct

SEQ ID NO: 74310 - DNA, 15 bp, Homo sapiens
ctgccatctggtggc

SEQ ID NO: 74311 - DNA, 15 bp, Homo sapiens
actgccatctggtgg

SEQ ID NO: 74312 - DNA, 15 bp, Homo sapiens
tactgccatctggtg

SEQ ID NO: 74313 - DNA, 15 bp, Homo sapiens
ttactgccatctggt

SEQ ID NO: 74314 - DNA, 15 bp, Homo sapiens
attactgccatctgg

SEQ ID NO: 74315 - DNA, 15 bp, Homo sapiens
cattactgccatctg

SEQ ID NO: 74316 - DNA, 15 bp, Homo sapiens
gcattactgccatct

SEQ ID NO: 74317 - DNA, 15 bp, Homo sapiens
ggcattactgccatc

SEQ ID NO: 74318 - DNA, 15 bp, Homo sapiens
aggcattactgccat

SEQ ID NO: 74319 - DNA, 15 bp, Homo sapiens
gaggcattactgcca

SEQ ID NO: 74320 - DNA, 15 bp, Homo sapiens
tgaggcattactgcc

SEQ ID NO: 74321 - DNA, 15 bp, Homo sapiens
ttgaggcattactgc

SEQ ID NO: 74322 - DNA, 15 bp, Homo sapiens
attgaggcattactg

SEQ ID NO: 74323 - DNA, 15 bp, Homo sapiens
aattgaggcattact

SEQ ID NO: 74324 - DNA, 15 bp, Homo sapiens
aaattgaggcattac

SEQ ID NO: 74325 - DNA, 15 bp, Homo sapiens
aaaattgaggcatta

SEQ ID NO: 74326 - DNA, 15 bp, Homo sapiens
caaaattgaggcatt

SEQ ID NO: 74327 - DNA, 15 bp, Homo sapiens
acaaaattgaggcat

SEQ ID NO: 74328 - DNA, 15 bp, Homo sapiens
cacaaaattgaggca

SEQ ID NO: 74329 - DNA, 15 bp, Homo sapiens
ccacaaaattgaggc

SEQ ID NO: 74330 - DNA, 15 bp, Homo sapiens
accacaaaattgagg

SEQ ID NO: 74331 - DNA, 15 bp, Homo sapiens
aaccacaaaattgag

SEQ ID NO: 74332 - DNA, 15 bp, Homo sapiens
gaaccacaaaattga

SEQ ID NO: 74333 - DNA, 15 bp, Homo sapiens
agaaccacaaaattg

SEQ ID NO: 74334 - DNA, 15 bp, Homo sapiens
gagaaccacaaaatt

SEQ ID NO: 74335 - DNA, 15 bp, Homo sapiens
tgagaaccacaaaat

SEQ ID NO: 74336 - DNA, 15 bp, Homo sapiens
gtgagaaccacaaaa

SEQ ID NO: 74337 - DNA, 15 bp, Homo sapiens
agtgagaaccacaaa

SEQ ID NO: 74338 - DNA, 15 bp, Homo sapiens
tagtgagaaccacaa

SEQ ID NO: 74339 - DNA, 15 bp, Homo sapiens
atagtgagaaccaca

SEQ ID NO: 74340 - DNA, 15 bp, Homo sapiens
tatagtgagaaccac

SEQ ID NO: 74341 - DNA, 15 bp, Homo sapiens
ttatagtgagaacca

SEQ ID NO: 74342 - DNA, 15 bp, Homo sapiens
attatagtgagaacc

SEQ ID NO: 74343 - DNA, 15 bp, Homo sapiens
cattatagtgagaac

SEQ ID NO: 74344 - DNA, 15 bp, Homo sapiens
ccattatagtgagaa

SEQ ID NO: 74345 - DNA, 15 bp, Homo sapiens
gccattatagtgaga

SEQ ID NO: 74346 - DNA, 15 bp, Homo sapiens
tgccattatagtgag

SEQ ID NO: 74347 - DNA, 15 bp, Homo sapiens
ttgccattatagtga

SEQ ID NO: 74348 - DNA, 15 bp, Homo sapiens
attgccattatagtg

SEQ ID NO: 74349 - DNA, 15 bp, Homo sapiens
aattgccattatagt

SEQ ID NO: 74350 - DNA, 15 bp, Homo sapiens
caattgccattatag

SEQ ID NO: 74351 - DNA, 15 bp, Homo sapiens
ccaattgccattata

SEQ ID NO: 74352 - DNA, 15 bp, Homo sapiens
cccaattgccattat

SEQ ID NO: 74353 - DNA, 15 bp, Homo sapiens
gcccaattgccatta

SEQ ID NO: 74354 - DNA, 15 bp, Homo sapiens
agcccaattgccatt

SEQ ID NO: 74355 - DNA, 15 bp, Homo sapiens
aagcccaattgccat

SEQ ID NO: 74356 - DNA, 15 bp, Homo sapiens
taagcccaattgcca

SEQ ID NO: 74357 - DNA, 15 bp, Homo sapiens
ttaagcccaattgcc

SEQ ID NO: 74358 - DNA, 15 bp, Homo sapiens
gttaagcccaattgc

SEQ ID NO: 74359 - DNA, 15 bp, Homo sapiens
tgttaagcccaattg

SEQ ID NO: 74360 - DNA, 15 bp, Homo sapiens
atgttaagcccaatt

SEQ ID NO: 74361 - DNA, 15 bp, Homo sapiens
aatgttaagcccaat

SEQ ID NO: 74362 - DNA, 15 bp, Homo sapiens
aaatgttaagcccaa

SEQ ID NO: 74363 - DNA, 15 bp, Homo sapiens
taaatgttaagccca

SEQ ID NO: 74364 - DNA, 15 bp, Homo sapiens
gtaaatgttaagccc

SEQ ID NO: 74365 - DNA, 15 bp, Homo sapiens
agtaaatgttaagcc

SEQ ID NO: 74366 - DNA, 15 bp, Homo sapiens
aagtaaatgttaagc

SEQ ID NO: 74367 - DNA, 15 bp, Homo sapiens
caagtaaatgttaag

SEQ ID NO: 74368 - DNA, 15 bp, Homo sapiens
tcaagtaaatgttaa

SEQ ID NO: 74369 - DNA, 15 bp, Homo sapiens
ctcaagtaaatgtta

SEQ ID NO: 74370 - DNA, 15 bp, Homo sapiens
gctcaagtaaatgtt

SEQ ID NO: 74371 - DNA, 15 bp, Homo sapiens
ggctcaagtaaatgt

SEQ ID NO: 74372 - DNA, 15 bp, Homo sapiens
aggctcaagtaaatg

SEQ ID NO: 74373 - DNA, 15 bp, Homo sapiens
aaggctcaagtaaat

SEQ ID NO: 74374 - DNA, 15 bp, Homo sapiens
taaggctcaagtaaa

SEQ ID NO: 74375 - DNA, 15 bp, Homo sapiens
gtaaggctcaagtaa

SEQ ID NO: 74376 - DNA, 15 bp, Homo sapiens
agtaaggctcaagta

SEQ ID NO: 74377 - DNA, 15 bp, Homo sapiens
tagtaaggctcaagt

SEQ ID NO: 74378 - DNA, 15 bp, Homo sapiens
gtagtaaggctcaag

SEQ ID NO: 74379 - DNA, 15 bp, Homo sapiens
cgtagtaaggctcaa

SEQ ID NO: 74380 - DNA, 15 bp, Homo sapiens
acgtagtaaggctca

SEQ ID NO: 74381 - DNA, 15 bp, Homo sapiens
cacgtagtaaggctc

SEQ ID NO: 74382 - DNA, 15 bp, Homo sapiens
gcacgtagtaaggct

SEQ ID NO: 74383 - DNA, 15 bp, Homo sapiens
ggcacgtagtaaggc

SEQ ID NO: 74384 - DNA, 15 bp, Homo sapiens
tggcacgtagtaagg

SEQ ID NO: 74385 - DNA, 15 bp, Homo sapiens
ctggcacgtagtaag

SEQ ID NO: 74386 - DNA, 15 bp, Homo sapiens
actggcacgtagtaa

SEQ ID NO: 74387 - DNA, 15 bp, Homo sapiens
aactggcacgtagta

SEQ ID NO: 74388 - DNA, 15 bp, Homo sapiens
taactggcacgtagt

SEQ ID NO: 74389 - DNA, 15 bp, Homo sapiens
ataactggcacgtag

SEQ ID NO: 74390 - DNA, 15 bp, Homo sapiens
aataactggcacgta

SEQ ID NO: 74391 - DNA, 15 bp, Homo sapiens
caataactggcacgt

SEQ ID NO: 74392 - DNA, 15 bp, Homo sapiens
acaataactggcacg

SEQ ID NO: 74393 - DNA, 15 bp, Homo sapiens
cacaataactggcac

SEQ ID NO: 74394 - DNA, 15 bp, Homo sapiens
gcacaataactggca

SEQ ID NO: 74395 - DNA, 15 bp, Homo sapiens
agcacaataactggc

SEQ ID NO: 74396 - DNA, 15 bp, Homo sapiens
tagcacaataactgg

SEQ ID NO: 74397 - DNA, 15 bp, Homo sapiens
gtagcacaataactg

SEQ ID NO: 74398 - DNA, 15 bp, Homo sapiens
tgtagcacaataact

SEQ ID NO: 74399 - DNA, 15 bp, Homo sapiens
atgtagcacaataac

SEQ ID NO: 74400 - DNA, 15 bp, Homo sapiens
tatgtagcacaataa

SEQ ID NO: 74401 - DNA, 15 bp, Homo sapiens
atatgtagcacaata

SEQ ID NO: 74402 - DNA, 15 bp, Homo sapiens
aatatgtagcacaat

SEQ ID NO: 74403 - DNA, 15 bp, Homo sapiens
aaatatgtagcacaa

SEQ ID NO: 74404 - DNA, 15 bp, Homo sapiens
taaatatgtagcaca

SEQ ID NO: 74405 - DNA, 15 bp, Homo sapiens
ataaatatgtagcac

SEQ ID NO: 74406 - DNA, 15 bp, Homo sapiens
tataaatatgtagca

SEQ ID NO: 74407 - DNA, 15 bp, Homo sapiens
atataaatatgtagc

SEQ ID NO: 74408 - DNA, 15 bp, Homo sapiens
catataaatatgtag

SEQ ID NO: 74409 - DNA, 15 bp, Homo sapiens
gcatataaatatgta

SEQ ID NO: 74410 - DNA, 15 bp, Homo sapiens
tgcatataaatatgt

SEQ ID NO: 74411 - DNA, 15 bp, Homo sapiens
gtgcatataaatatg

SEQ ID NO: 74412 - DNA, 15 bp, Homo sapiens
ggtgcatataaatat

SEQ ID NO: 74413 - DNA, 15 bp, Homo sapiens
tggtgcatataaata

SEQ ID NO: 74414 - DNA, 15 bp, Homo sapiens
ttggtgcatataaat

SEQ ID NO: 74415 - DNA, 15 bp, Homo sapiens
attggtgcatataaa

SEQ ID NO: 74416 - DNA, 15 bp, Homo sapiens
aattggtgcatataa

SEQ ID NO: 74417 - DNA, 15 bp, Homo sapiens
aaattggtgcatata

SEQ ID NO: 74418 - DNA, 15 bp, Homo sapiens
taaattggtgcatat

SEQ ID NO: 74419 - DNA, 15 bp, Homo sapiens
ataaattggtgcata

SEQ ID NO: 74420 - DNA, 15 bp, Homo sapiens
aataaattggtgcat

SEQ ID NO: 74421 - DNA, 15 bp, Homo sapiens
taataaattggtgca

SEQ ID NO: 74422 - DNA, 15 bp, Homo sapiens
gtaataaattggtgc

SEQ ID NO: 74423 - DNA, 15 bp, Homo sapiens
tgtaataaattggtg

SEQ ID NO: 74424 - DNA, 15 bp, Homo sapiens
atgtaataaattggt

SEQ ID NO: 74425 - DNA, 15 bp, Homo sapiens
gatgtaataaattgg

SEQ ID NO: 74426 - DNA, 15 bp, Homo sapiens
agatgtaataaattg

SEQ ID NO: 74427 - DNA, 15 bp, Homo sapiens
aagatgtaataaatt

SEQ ID NO: 74428 - DNA, 15 bp, Homo sapiens
gaagatgtaataaat

SEQ ID NO: 74429 - DNA, 15 bp, Homo sapiens
tgaagatgtaataaa

SEQ ID NO: 74430 - DNA, 15 bp, Homo sapiens
gtgaagatgtaataa

SEQ ID NO: 74431 - DNA, 15 bp, Homo sapiens
tgtgaagatgtaata

SEQ ID NO: 74432 - DNA, 15 bp, Homo sapiens
ttgtgaagatgtaat

SEQ ID NO: 74433 - DNA, 15 bp, Homo sapiens
attgtgaagatgtaa

SEQ ID NO: 74434 - DNA, 15 bp, Homo sapiens
tattgtgaagatgta

SEQ ID NO: 74435 - DNA, 15 bp, Homo sapiens
ttattgtgaagatgt

SEQ ID NO: 74436 - DNA, 15 bp, Homo sapiens
attattgtgaagatg

SEQ ID NO: 74437 - DNA, 15 bp, Homo sapiens
gattattgtgaagat

SEQ ID NO: 74438 - DNA, 15 bp, Homo sapiens
ggattattgtgaaga

SEQ ID NO: 74439 - DNA, 15 bp, Homo sapiens
aggattattgtgaag

SEQ ID NO: 74440 - DNA, 15 bp, Homo sapiens
taggattattgtgaa

SEQ ID NO: 74441 - DNA, 15 bp, Homo sapiens
ataggattattgtga

SEQ ID NO: 74442 - DNA, 15 bp, Homo sapiens
tataggattattgtg

SEQ ID NO: 74443 - DNA, 15 bp, Homo sapiens
ttataggattattgt

SEQ ID NO: 74444 - DNA, 15 bp, Homo sapiens
cttataggattattg

SEQ ID NO: 74445 - DNA, 15 bp, Homo sapiens
ccttataggattatt

SEQ ID NO: 74446 - DNA, 15 bp, Homo sapiens
gccttataggattat

SEQ ID NO: 74447 - DNA, 15 bp, Homo sapiens
tgccttataggatta

SEQ ID NO: 74448 - DNA, 15 bp, Homo sapiens
ctgccttataggatt

SEQ ID NO: 74449 - DNA, 15 bp, Homo sapiens
cctgccttataggat

SEQ ID NO: 74450 - DNA, 15 bp, Homo sapiens
gcctgccttatagga

SEQ ID NO: 74451 - DNA, 15 bp, Homo sapiens
tgcctgccttatagg

SEQ ID NO: 74452 - DNA, 15 bp, Homo sapiens
gtgcctgccttatag

SEQ ID NO: 74453 - DNA, 15 bp, Homo sapiens
agtgcctgccttata

SEQ ID NO: 74454 - DNA, 15 bp, Homo sapiens
tagtgcctgccttat

SEQ ID NO: 74455 - DNA, 15 bp, Homo sapiens
atagtgcctgcctta

SEQ ID NO: 74456 - DNA, 15 bp, Homo sapiens
aatagtgcctgcctt

SEQ ID NO: 74457 - DNA, 15 bp, Homo sapiens
caatagtgcctgcct

SEQ ID NO: 74458 - DNA, 15 bp, Homo sapiens
acaatagtgcctgcc

SEQ ID NO: 74459 - DNA, 15 bp, Homo sapiens
aacaatagtgcctgc

SEQ ID NO: 74460 - DNA, 15 bp, Homo sapiens
taacaatagtgcctg

SEQ ID NO: 74461 - DNA, 15 bp, Homo sapiens
ataacaatagtgcct

SEQ ID NO: 74462 - DNA, 15 bp, Homo sapiens
gataacaatagtgcc

SEQ ID NO: 74463 - DNA, 15 bp, Homo sapiens
ggataacaatagtgc

SEQ ID NO: 74464 - DNA, 15 bp, Homo sapiens
gggataacaatagtg

SEQ ID NO: 74465 - DNA, 15 bp, Homo sapiens
tgggataacaatagt

SEQ ID NO: 74466 - DNA, 15 bp, Homo sapiens
ttgggataacaatag

SEQ ID NO: 74467 - DNA, 15 bp, Homo sapiens
attgggataacaata

SEQ ID NO: 74468 - DNA, 15 bp, Homo sapiens
aattgggataacaat

SEQ ID NO: 74469 - DNA, 15 bp, Homo sapiens
aaattgggataacaa

SEQ ID NO: 74470 - DNA, 15 bp, Homo sapiens
gaaattgggataaca

SEQ ID NO: 74471 - DNA, 15 bp, Homo sapiens
tgaaattgggataac

SEQ ID NO: 74472 - DNA, 15 bp, Homo sapiens
ctgaaattgggataa

SEQ ID NO: 74473 - DNA, 15 bp, Homo sapiens
tctgaaattgggata

SEQ ID NO: 74474 - DNA, 15 bp, Homo sapiens
ttctgaaattgggat

SEQ ID NO: 74475 - DNA, 15 bp, Homo sapiens
tttctgaaattggga

SEQ ID NO: 74476 - DNA, 15 bp, Homo sapiens
atttctgaaattggg

SEQ ID NO: 74477 - DNA, 15 bp, Homo sapiens
tatttctgaaattgg

SEQ ID NO: 74478 - DNA, 15 bp, Homo sapiens
gtatttctgaaattg

SEQ ID NO: 74479 - DNA, 15 bp, Homo sapiens
tgtatttctgaaatt

SEQ ID NO: 74480 - DNA, 15 bp, Homo sapiens
ctgtatttctgaaat

SEQ ID NO: 74481 - DNA, 15 bp, Homo sapiens
tctgtatttctgaaa

SEQ ID NO: 74482 - DNA, 15 bp, Homo sapiens
ttctgtatttctgaa

SEQ ID NO: 74483 - DNA, 15 bp, Homo sapiens
gttctgtatttctga

SEQ ID NO: 74484 - DNA, 15 bp, Homo sapiens
ggttctgtatttctg

SEQ ID NO: 74485 - DNA, 15 bp, Homo sapiens
aggttctgtatttct

SEQ ID NO: 74486 - DNA, 15 bp, Homo sapiens
caggttctgtatttc

SEQ ID NO: 74487 - DNA, 15 bp, Homo sapiens
tcaggttctgtattt

SEQ ID NO: 74488 - DNA, 15 bp, Homo sapiens
ctcaggttctgtatt

SEQ ID NO: 74489 - DNA, 15 bp, Homo sapiens
tctcaggttctgtat

SEQ ID NO: 74490 - DNA, 15 bp, Homo sapiens
atctcaggttctgta

SEQ ID NO: 74491 - DNA, 15 bp, Homo sapiens
aatctcaggttctgt

SEQ ID NO: 74492 - DNA, 15 bp, Homo sapiens
gaatctcaggttctg

SEQ ID NO: 74493 - DNA, 15 bp, Homo sapiens
tgaatctcaggttct

SEQ ID NO: 74494 - DNA, 15 bp, Homo sapiens
ttgaatctcaggttc

SEQ ID NO: 74495 - DNA, 15 bp, Homo sapiens
tttgaatctcaggtt

SEQ ID NO: 74496 - DNA, 15 bp, Homo sapiens
gtttgaatctcaggt

SEQ ID NO: 74497 - DNA, 15 bp, Homo sapiens
tgtttgaatctcagg

SEQ ID NO: 74498 - DNA, 15 bp, Homo sapiens
ctgtttgaatctcag

SEQ ID NO: 74499 - DNA, 15 bp, Homo sapiens
tctgtttgaatctca

SEQ ID NO: 74500 - DNA, 15 bp, Homo sapiens
ttctgtttgaatctc

SEQ ID NO: 74501 - DNA, 15 bp, Homo sapiens
cttctgtttgaatct

SEQ ID NO: 74502 - DNA, 15 bp, Homo sapiens
acttctgtttgaatc

SEQ ID NO: 74503 - DNA, 15 bp, Homo sapiens
aacttctgtttgaat

SEQ ID NO: 74504 - DNA, 15 bp, Homo sapiens
taacttctgtttgaa

SEQ ID NO: 74505 - DNA, 15 bp, Homo sapiens
ctaacttctgtttga

SEQ ID NO: 74506 - DNA, 15 bp, Homo sapiens
tctaacttctgtttg

SEQ ID NO: 74507 - DNA, 15 bp, Homo sapiens
ctctaacttctgttt

SEQ ID NO: 74508 - DNA, 15 bp, Homo sapiens
tctctaacttctgtt

SEQ ID NO: 74509 - DNA, 15 bp, Homo sapiens
atctctaacttctgt

SEQ ID NO: 74510 - DNA, 15 bp, Homo sapiens
aatctctaacttctg

SEQ ID NO: 74511 - DNA, 15 bp, Homo sapiens
aaatctctaacttct

SEQ ID NO: 74512 - DNA, 15 bp, Homo sapiens
caaatctctaacttc

SEQ ID NO: 74513 - DNA, 15 bp, Homo sapiens
ccaaatctctaactt

SEQ ID NO: 74514 - DNA, 15 bp, Homo sapiens
gccaaatctctaact

SEQ ID NO: 74515 - DNA, 15 bp, Homo sapiens
agccaaatctctaac

SEQ ID NO: 74516 - DNA, 15 bp, Homo sapiens
cagccaaatctctaa

SEQ ID NO: 74517 - DNA, 15 bp, Homo sapiens
ccagccaaatctcta

SEQ ID NO: 74518 - DNA, 15 bp, Homo sapiens
cccagccaaatctct

SEQ ID NO: 74519 - DNA, 15 bp, Homo sapiens
tcccagccaaatctc

SEQ ID NO: 74520 - DNA, 15 bp, Homo sapiens
atcccagccaaatct

SEQ ID NO: 74521 - DNA, 15 bp, Homo sapiens
aatcccagccaaatc

SEQ ID NO: 74522 - DNA, 15 bp, Homo sapiens
aaatcccagccaaat

SEQ ID NO: 74523 - DNA, 15 bp, Homo sapiens
taaatcccagccaaa

SEQ ID NO: 74524 - DNA, 15 bp, Homo sapiens
ttaaatcccagccaa

SEQ ID NO: 74525 - DNA, 15 bp, Homo sapiens
cttaaatcccagcca

SEQ ID NO: 74526 - DNA, 15 bp, Homo sapiens
acttaaatcccagcc

SEQ ID NO: 74527 - DNA, 15 bp, Homo sapiens
aacttaaatcccagc

SEQ ID NO: 74528 - DNA, 15 bp, Homo sapiens
gaacttaaatcccag

SEQ ID NO: 74529 - DNA, 15 bp, Homo sapiens
tgaacttaaatccca

SEQ ID NO: 74530 - DNA, 15 bp, Homo sapiens
ctgaacttaaatccc

SEQ ID NO: 74531 - DNA, 15 bp, Homo sapiens
cctgaacttaaatcc

SEQ ID NO: 74532 - DNA, 15 bp, Homo sapiens
acctgaacttaaatc

SEQ ID NO: 74533 - DNA, 15 bp, Homo sapiens
gacctgaacttaaat

SEQ ID NO: 74534 - DNA, 15 bp, Homo sapiens
agacctgaacttaaa

SEQ ID NO: 74535 - DNA, 15 bp, Homo sapiens
tagacctgaacttaa

SEQ ID NO: 74536 - DNA, 15 bp, Homo sapiens
ctagacctgaactta

SEQ ID NO: 74537 - DNA, 15 bp, Homo sapiens
actagacctgaactt

SEQ ID NO: 74538 - DNA, 15 bp, Homo sapiens
aactagacctgaact

SEQ ID NO: 74539 - DNA, 15 bp, Homo sapiens
aaactagacctgaac

SEQ ID NO: 74540 - DNA, 15 bp, Homo sapiens
gaaactagacctgaa

SEQ ID NO: 74541 - DNA, 15 bp, Homo sapiens
tgaaactagacctga

SEQ ID NO: 74542 - DNA, 15 bp, Homo sapiens
ttgaaactagacctg

SEQ ID NO: 74543 - DNA, 15 bp, Homo sapiens
tttgaaactagacct

SEQ ID NO: 74544 - DNA, 15 bp, Homo sapiens
ctttgaaactagacc

SEQ ID NO: 74545 - DNA, 15 bp, Homo sapiens
gctttgaaactagac

SEQ ID NO: 74546 - DNA, 15 bp, Homo sapiens
agctttgaaactaga

SEQ ID NO: 74547 - DNA, 15 bp, Homo sapiens
gagctttgaaactag

SEQ ID NO: 74548 - DNA, 15 bp, Homo sapiens
agagctttgaaacta

SEQ ID NO: 74549 - DNA, 15 bp, Homo sapiens
aagagctttgaaact

SEQ ID NO: 74550 - DNA, 15 bp, Homo sapiens
taagagctttgaaac

SEQ ID NO: 74551 - DNA, 15 bp, Homo sapiens
gtaagagctttgaaa

SEQ ID NO: 74552 - DNA, 15 bp, Homo sapiens
ggtaagagctttgaa

SEQ ID NO: 74553 - DNA, 15 bp, Homo sapiens
aggtaagagctttga

SEQ ID NO: 74554 - DNA, 15 bp, Homo sapiens
gaggtaagagctttg

SEQ ID NO: 74555 - DNA, 15 bp, Homo sapiens
agaggtaagagcttt

SEQ ID NO: 74556 - DNA, 15 bp, Homo sapiens
tagaggtaagagctt

SEQ ID NO: 74557 - DNA, 15 bp, Homo sapiens
gtagaggtaagagct

SEQ ID NO: 74558 - DNA, 15 bp, Homo sapiens
agtagaggtaagagc

SEQ ID NO: 74559 - DNA, 15 bp, Homo sapiens
tagtagaggtaagag

SEQ ID NO: 74560 - DNA, 15 bp, Homo sapiens
atagtagaggtaaga

SEQ ID NO: 74561 - DNA, 15 bp, Homo sapiens
tatagtagaggtaag

SEQ ID NO: 74562 - DNA, 15 bp, Homo sapiens
atatagtagaggtaa

SEQ ID NO: 74563 - DNA, 15 bp, Homo sapiens
catatagtagaggta

SEQ ID NO: 74564 - DNA, 15 bp, Homo sapiens
ccatatagtagaggt

SEQ ID NO: 74565 - DNA, 15 bp, Homo sapiens
accatatagtagagg

SEQ ID NO: 74566 - DNA, 15 bp, Homo sapiens
gaccatatagtagag

SEQ ID NO: 74567 - DNA, 15 bp, Homo sapiens
agaccatatagtaga

SEQ ID NO: 74568 - DNA, 15 bp, Homo sapiens
gagaccatatagtag

SEQ ID NO: 74569 - DNA, 15 bp, Homo sapiens
agagaccatatagta

SEQ ID NO: 74570 - DNA, 15 bp, Homo sapiens
aagagaccatatagt

SEQ ID NO: 74571 - DNA, 15 bp, Homo sapiens
aaagagaccatatag

SEQ ID NO: 74572 - DNA, 15 bp, Homo sapiens
taaagagaccatata

SEQ ID NO: 74573 - DNA, 15 bp, Homo sapiens
ataaagagaccatat

SEQ ID NO: 74574 - DNA, 15 bp, Homo sapiens
tataaagagaccata

SEQ ID NO: 74575 - DNA, 15 bp, Homo sapiens
atataaagagaccat

SEQ ID NO: 74576 - DNA, 15 bp, Homo sapiens
catataaagagacca

SEQ ID NO: 74577 - DNA, 15 bp, Homo sapiens
acatataaagagacc

SEQ ID NO: 74578 - DNA, 15 bp, Homo sapiens
cacatataaagagac

SEQ ID NO: 74579 - DNA, 15 bp, Homo sapiens
acacatataaagaga

SEQ ID NO: 74580 - DNA, 15 bp, Homo sapiens
aacacatataaagag

SEQ ID NO: 74581 - DNA, 15 bp, Homo sapiens
aaacacatataaaga

SEQ ID NO: 74582 - DNA, 15 bp, Homo sapiens
taaacacatataaag

SEQ ID NO: 74583 - DNA, 15 bp, Homo sapiens
ttaaacacatataaa

SEQ ID NO: 74584 - DNA, 15 bp, Homo sapiens
cttaaacacatataa

SEQ ID NO: 74585 - DNA, 15 bp, Homo sapiens
acttaaacacatata

SEQ ID NO: 74586 - DNA, 15 bp, Homo sapiens
cacttaaacacatat

SEQ ID NO: 74587 - DNA, 15 bp, Homo sapiens
acacttaaacacata

SEQ ID NO: 74588 - DNA, 15 bp, Homo sapiens
gacacttaaacacat

SEQ ID NO: 74589 - DNA, 15 bp, Homo sapiens
agacacttaaacaca

SEQ ID NO: 74590 - DNA, 15 bp, Homo sapiens
tagacacttaaacac

SEQ ID NO: 74591 - DNA, 15 bp, Homo sapiens
ttagacacttaaaca

SEQ ID NO: 74592 - DNA, 15 bp, Homo sapiens
tttagacacttaaac

SEQ ID NO: 74593 - DNA, 15 bp, Homo sapiens
atttagacacttaaa

SEQ ID NO: 74594 - DNA, 15 bp, Homo sapiens
gatttagacacttaa

SEQ ID NO: 74595 - DNA, 15 bp, Homo sapiens
agatttagacactta

SEQ ID NO: 74596 - DNA, 15 bp, Homo sapiens
tagatttagacactt

SEQ ID NO: 74597 - DNA, 15 bp, Homo sapiens
gtagatttagacact

SEQ ID NO: 74598 - DNA, 15 bp, Homo sapiens
tgtagatttagacac

SEQ ID NO: 74599 - DNA, 15 bp, Homo sapiens
gtgtagatttagaca

SEQ ID NO: 74600 - DNA, 15 bp, Homo sapiens
tgtgtagatttagac

SEQ ID NO: 74601 - DNA, 15 bp, Homo sapiens
atgtgtagatttaga

SEQ ID NO: 74602 - DNA, 15 bp, Homo sapiens
tatgtgtagatttag

SEQ ID NO: 74603 - DNA, 15 bp, Homo sapiens
ttatgtgtagattta

SEQ ID NO: 74604 - DNA, 15 bp, Homo sapiens
tttatgtgtagattt

SEQ ID NO: 74605 - DNA, 15 bp, Homo sapiens
gtttatgtgtagatt

SEQ ID NO: 74606 - DNA, 15 bp, Homo sapiens
tgtttatgtgtagat

SEQ ID NO: 74607 - DNA, 15 bp, Homo sapiens
atgtttatgtgtaga

SEQ ID NO: 74608 - DNA, 15 bp, Homo sapiens
aatgtttatgtgtag

SEQ ID NO: 74609 - DNA, 15 bp, Homo sapiens
aaatgtttatgtgta

SEQ ID NO: 74610 - DNA, 15 bp, Homo sapiens
aaaatgtttatgtgt

SEQ ID NO: 74611 - DNA, 15 bp, Homo sapiens
taaaatgtttatgtg

SEQ ID NO: 74612 - DNA, 15 bp, Homo sapiens
ataaaatgtttatgt

SEQ ID NO: 74613 - DNA, 15 bp, Homo sapiens
aataaaatgtttatg

SEQ ID NO: 74614 - DNA, 15 bp, Homo sapiens
aaataaaatgtttat

SEQ ID NO: 74615 - DNA, 15 bp, Homo sapiens
taaataaaatgttta

SEQ ID NO: 74616 - DNA, 15 bp, Homo sapiens
gtaaataaaatgttt

SEQ ID NO: 74617 - DNA, 15 bp, Homo sapiens
tgtaaataaaatgtt

SEQ ID NO: 74618 - DNA, 15 bp, Homo sapiens
ttgtaaataaaatgt

SEQ ID NO: 74619 - DNA, 15 bp, Homo sapiens
cttgtaaataaaatg

SEQ ID NO: 74620 - DNA, 15 bp, Homo sapiens
acttgtaaataaaat

SEQ ID NO: 74621 - DNA, 15 bp, Homo sapiens
tacttgtaaataaaa

SEQ ID NO: 74622 - DNA, 15 bp, Homo sapiens
gtacttgtaaataaa

SEQ ID NO: 74623 - DNA, 15 bp, Homo sapiens
tgtacttgtaaataa

SEQ ID NO: 74624 - DNA, 15 bp, Homo sapiens
atgtacttgtaaata

SEQ ID NO: 74625 - DNA, 15 bp, Homo sapiens
catgtacttgtaaat

SEQ ID NO: 74626 - DNA, 15 bp, Homo sapiens
gcatgtacttgtaaa

SEQ ID NO: 74627 - DNA, 15 bp, Homo sapiens
tgcatgtacttgtaa

SEQ ID NO: 74628 - DNA, 15 bp, Homo sapiens
gtgcatgtacttgta

SEQ ID NO: 74629 - DNA, 15 bp, Homo sapiens
agtgcatgtacttgt

SEQ ID NO: 74630 - DNA, 15 bp, Homo sapiens
cagtgcatgtacttg

SEQ ID NO: 74631 - DNA, 15 bp, Homo sapiens
tcagtgcatgtactt

SEQ ID NO: 74632 - DNA, 15 bp, Homo sapiens
ttcagtgcatgtact

SEQ ID NO: 74633 - DNA, 15 bp, Homo sapiens
tttcagtgcatgtac

SEQ ID NO: 74634 - DNA, 15 bp, Homo sapiens
atttcagtgcatgta

SEQ ID NO: 74635 - DNA, 15 bp, Homo sapiens
catttcagtgcatgt

SEQ ID NO: 74636 - DNA, 15 bp, Homo sapiens
acatttcagtgcatg

SEQ ID NO: 74637 - DNA, 15 bp, Homo sapiens
aacatttcagtgcat

SEQ ID NO: 74638 - DNA, 15 bp, Homo sapiens
gaacatttcagtgca

SEQ ID NO: 74639 - DNA, 15 bp, Homo sapiens
tgaacatttcagtgc

SEQ ID NO: 74640 - DNA, 15 bp, Homo sapiens
gtgaacatttcagtg

SEQ ID NO: 74641 - DNA, 15 bp, Homo sapiens
tgtgaacatttcagt

SEQ ID NO: 74642 - DNA, 15 bp, Homo sapiens
atgtgaacatttcag

SEQ ID NO: 74643 - DNA, 15 bp, Homo sapiens
catgtgaacatttca

SEQ ID NO: 74644 - DNA, 15 bp, Homo sapiens
acatgtgaacatttc

SEQ ID NO: 74645 - DNA, 15 bp, Homo sapiens
tacatgtgaacattt

SEQ ID NO: 74646 - DNA, 15 bp, Homo sapiens
ctacatgtgaacatt

SEQ ID NO: 74647 - DNA, 15 bp, Homo sapiens
tctacatgtgaacat

SEQ ID NO: 74648 - DNA, 15 bp, Homo sapiens
atctacatgtgaaca

SEQ ID NO: 74649 - DNA, 15 bp, Homo sapiens
aatctacatgtgaac

SEQ ID NO: 74650 - DNA, 15 bp, Homo sapiens
taatctacatgtgaa

SEQ ID NO: 74651 - DNA, 15 bp, Homo sapiens
ataatctacatgtga

SEQ ID NO: 74652 - DNA, 15 bp, Homo sapiens
tataatctacatgtg

SEQ ID NO: 74653 - DNA, 15 bp, Homo sapiens
ttataatctacatgt

SEQ ID NO: 74654 - DNA, 15 bp, Homo sapiens
gttataatctacatg

SEQ ID NO: 74655 - DNA, 15 bp, Homo sapiens
ggttataatctacat

SEQ ID NO: 74656 - DNA, 15 bp, Homo sapiens
tggttataatctaca

SEQ ID NO: 74657 - DNA, 15 bp, Homo sapiens
atggttataatctac

SEQ ID NO: 74658 - DNA, 15 bp, Homo sapiens
catggttataatcta

SEQ ID NO: 74659 - DNA, 15 bp, Homo sapiens
tcatggttataatct

SEQ ID NO: 74660 - DNA, 15 bp, Homo sapiens
ttcatggttataatc

SEQ ID NO: 74661 - DNA, 15 bp, Homo sapiens
gttcatggttataat

SEQ ID NO: 74662 - DNA, 15 bp, Homo sapiens
tgttcatggttataa

SEQ ID NO: 74663 - DNA, 15 bp, Homo sapiens
atgttcatggttata

SEQ ID NO: 74664 - DNA, 15 bp, Homo sapiens
aatgttcatggttat

SEQ ID NO: 74665 - DNA, 15 bp, Homo sapiens
gaatgttcatggtta

SEQ ID NO: 74666 - DNA, 15 bp, Homo sapiens
agaatgttcatggtt

SEQ ID NO: 74667 - DNA, 15 bp, Homo sapiens
aagaatgttcatggt

SEQ ID NO: 74668 - DNA, 15 bp, Homo sapiens
taagaatgttcatgg

SEQ ID NO: 74669 - DNA, 15 bp, Homo sapiens
ctaagaatgttcatg

SEQ ID NO: 74670 - DNA, 15 bp, Homo sapiens
actaagaatgttcat

SEQ ID NO: 74671 - DNA, 15 bp, Homo sapiens
gactaagaatgttca

SEQ ID NO: 74672 - DNA, 15 bp, Homo sapiens
agactaagaatgttc

SEQ ID NO: 74673 - DNA, 15 bp, Homo sapiens
aagactaagaatgtt

SEQ ID NO: 74674 - DNA, 15 bp, Homo sapiens
taagactaagaatgt

SEQ ID NO: 74675 - DNA, 15 bp, Homo sapiens
ataagactaagaatg

SEQ ID NO: 74676 - DNA, 15 bp, Homo sapiens
aataagactaagaat

SEQ ID NO: 74677 - DNA, 15 bp, Homo sapiens
aaataagactaagaa

SEQ ID NO: 74678 - DNA, 15 bp, Homo sapiens
taaataagactaaga

SEQ ID NO: 74679 - DNA, 15 bp, Homo sapiens
ataaataagactaag

SEQ ID NO: 74680 - DNA, 15 bp, Homo sapiens
cataaataagactaa

SEQ ID NO: 74681 - DNA, 15 bp, Homo sapiens
acataaataagacta

SEQ ID NO: 74682 - DNA, 15 bp, Homo sapiens
tacataaataagact

SEQ ID NO: 74683 - DNA, 15 bp, Homo sapiens
ttacataaataagac

SEQ ID NO: 74684 - DNA, 15 bp, Homo sapiens
attacataaataaga

SEQ ID NO: 74685 - DNA, 15 bp, Homo sapiens
aattacataaataag

SEQ ID NO: 74686 - DNA, 15 bp, Homo sapiens
taattacataaataa

SEQ ID NO: 74687 - DNA, 15 bp, Homo sapiens
ataattacataaata

SEQ ID NO: 74688 - DNA, 15 bp, Homo sapiens
aataattacataaat

SEQ ID NO: 74689 - DNA, 15 bp, Homo sapiens
taataattacataaa

SEQ ID NO: 74690 - DNA, 15 bp, Homo sapiens
ataataattacataa

SEQ ID NO: 74691 - DNA, 15 bp, Homo sapiens
gataataattacata

SEQ ID NO: 74692 - DNA, 15 bp, Homo sapiens
ggataataattacat

SEQ ID NO: 74693 - DNA, 15 bp, Homo sapiens
aggataataattaca

SEQ ID NO: 74694 - DNA, 15 bp, Homo sapiens
aaggataataattac

SEQ ID NO: 74695 - DNA, 15 bp, Homo sapiens
aaaggataataatta

SEQ ID NO: 74696 - DNA, 15 bp, Homo sapiens
taaaggataataatt

SEQ ID NO: 74697 - DNA, 15 bp, Homo sapiens
ataaaggataataat

SEQ ID NO: 74698 - DNA, 15 bp, Homo sapiens
aataaaggataataa

SEQ ID NO: 74699 - DNA, 15 bp, Homo sapiens
caataaaggataata

SEQ ID NO: 74700 - DNA, 15 bp, Homo sapiens
tcaataaaggataat

SEQ ID NO: 74701 - DNA, 15 bp, Homo sapiens
ttcaataaaggataa

SEQ ID NO: 74702 - DNA, 15 bp, Homo sapiens
tttcaataaaggata

SEQ ID NO: 74703 - DNA, 15 bp, Homo sapiens
gtttcaataaaggat

SEQ ID NO: 74704 - DNA, 15 bp, Homo sapiens
tgtttcaataaagga

SEQ ID NO: 74705 - DNA, 15 bp, Homo sapiens
atgtttcaataaagg

SEQ ID NO: 74706 - DNA, 15 bp, Homo sapiens
catgtttcaataaag

SEQ ID NO: 74707 - DNA, 15 bp, Homo sapiens
tcatgtttcaataaa

SEQ ID NO: 74708 - DNA, 15 bp, Homo sapiens
ctcatgtttcaataa

SEQ ID NO: 74709 - DNA, 15 bp, Homo sapiens
cctcatgtttcaata

SEQ ID NO: 74710 - DNA, 15 bp, Homo sapiens
tcctcatgtttcaat

SEQ ID NO: 74711 - DNA, 15 bp, Homo sapiens
ttcctcatgtttcaa

SEQ ID NO: 74712 - DNA, 15 bp, Homo sapiens
cttcctcatgtttca

SEQ ID NO: 74713 - DNA, 15 bp, Homo sapiens
acttcctcatgtttc

SEQ ID NO: 74714 - DNA, 15 bp, Homo sapiens
cacttcctcatgttt

SEQ ID NO: 74715 - DNA, 15 bp, Homo sapiens
tcacttcctcatgtt

SEQ ID NO: 74716 - DNA, 15 bp, Homo sapiens
ttcacttcctcatgt

SEQ ID NO: 74717 - DNA, 15 bp, Homo sapiens
cttcacttcctcatg

SEQ ID NO: 74718 - DNA, 15 bp, Homo sapiens
gcttcacttcctcat

SEQ ID NO: 74719 - DNA, 15 bp, Homo sapiens
tgcttcacttcctca

SEQ ID NO: 74720 - DNA, 15 bp, Homo sapiens
ctgcttcacttcctc

SEQ ID NO: 74721 - DNA, 15 bp, Homo sapiens
tctgcttcacttcct

SEQ ID NO: 74722 - DNA, 15 bp, Homo sapiens
atctgcttcacttcc

SEQ ID NO: 74723 - DNA, 15 bp, Homo sapiens
tatctgcttcacttc

SEQ ID NO: 74724 - DNA, 15 bp, Homo sapiens
ttatctgcttcactt

SEQ ID NO: 74725 - DNA, 15 bp, Homo sapiens
attatctgcttcact

SEQ ID NO: 74726 - DNA, 15 bp, Homo sapiens
tattatctgcttcac

SEQ ID NO: 74727 - DNA, 15 bp, Homo sapiens
ttattatctgcttca

SEQ ID NO: 74728 - DNA, 15 bp, Homo sapiens
tttattatctgcttc

SEQ ID NO: 74729 - DNA, 15 bp, Homo sapiens
atttattatctgctt

SEQ ID NO: 74730 - DNA, 15 bp, Homo sapiens
tatttattatctgct

SEQ ID NO: 74731 - DNA, 15 bp, Homo sapiens
atatttattatctgc

SEQ ID NO: 74732 - DNA, 15 bp, Homo sapiens
tatatttattatctg

SEQ ID NO: 74733 - DNA, 15 bp, Homo sapiens
ttatatttattatct

SEQ ID NO: 74734 - DNA, 15 bp, Homo sapiens
tttatatttattatc

SEQ ID NO: 74735 - DNA, 15 bp, Homo sapiens
atttatatttattat

SEQ ID NO: 74736 - DNA, 15 bp, Homo sapiens
aatttatatttatta

SEQ ID NO: 74737 - DNA, 15 bp, Homo sapiens
caatttatatttatt

SEQ ID NO: 74738 - DNA, 15 bp, Homo sapiens
acaatttatatttat

SEQ ID NO: 74739 - DNA, 15 bp, Homo sapiens
cacaatttatattta

SEQ ID NO: 74740 - DNA, 15 bp, Homo sapiens
tcacaatttatattt

SEQ ID NO: 74741 - DNA, 15 bp, Homo sapiens
atcacaatttatatt

SEQ ID NO: 74742 - DNA, 15 bp, Homo sapiens
tatcacaatttatat

SEQ ID NO: 74743 - DNA, 15 bp, Homo sapiens
atatcacaatttata

SEQ ID NO: 74744 - DNA, 15 bp, Homo sapiens
tatatcacaatttat

SEQ ID NO: 74745 - DNA, 15 bp, Homo sapiens
ctatatcacaattta

SEQ ID NO: 74746 - DNA, 15 bp, Homo sapiens
cctatatcacaattt

SEQ ID NO: 74747 - DNA, 15 bp, Homo sapiens
acctatatcacaatt

SEQ ID NO: 74748 - DNA, 15 bp, Homo sapiens
aacctatatcacaat

SEQ ID NO: 74749 - DNA, 15 bp, Homo sapiens
aaacctatatcacaa

SEQ ID NO: 74750 - DNA, 15 bp, Homo sapiens
aaaacctatatcaca

SEQ ID NO: 74751 - DNA, 15 bp, Homo sapiens
taaaacctatatcac

SEQ ID NO: 74752 - DNA, 15 bp, Homo sapiens
ataaaacctatatca

SEQ ID NO: 74753 - DNA, 15 bp, Homo sapiens
tataaaacctatatc

SEQ ID NO: 74754 - DNA, 15 bp, Homo sapiens
ctataaaacctatat

SEQ ID NO: 74755 - DNA, 15 bp, Homo sapiens
gctataaaacctata

SEQ ID NO: 74756 - DNA, 15 bp, Homo sapiens
tgctataaaacctat

SEQ ID NO: 74757 - DNA, 15 bp, Homo sapiens
atgctataaaaccta

SEQ ID NO: 74758 - DNA, 15 bp, Homo sapiens
aatgctataaaacct

SEQ ID NO: 74759 - DNA, 15 bp, Homo sapiens
caatgctataaaacc

SEQ ID NO: 74760 - DNA, 15 bp, Homo sapiens
gcaatgctataaaac

SEQ ID NO: 74761 - DNA, 15 bp, Homo sapiens
tgcaatgctataaaa

SEQ ID NO: 74762 - DNA, 15 bp, Homo sapiens
gtgcaatgctataaa

SEQ ID NO: 74763 - DNA, 15 bp, Homo sapiens
agtgcaatgctataa

SEQ ID NO: 74764 - DNA, 15 bp, Homo sapiens
aagtgcaatgctata

SEQ ID NO: 74765 - DNA, 15 bp, Homo sapiens
aaagtgcaatgctat

SEQ ID NO: 74766 - DNA, 15 bp, Homo sapiens
taaagtgcaatgcta

SEQ ID NO: 74767 - DNA, 15 bp, Homo sapiens
gtaaagtgcaatgct

SEQ ID NO: 74768 - DNA, 15 bp, Homo sapiens
tgtaaagtgcaatgc

SEQ ID NO: 74769 - DNA, 15 bp, Homo sapiens
ttgtaaagtgcaatg

SEQ ID NO: 74770 - DNA, 15 bp, Homo sapiens
tttgtaaagtgcaat

SEQ ID NO: 74771 - DNA, 15 bp, Homo sapiens
ctttgtaaagtgcaa

SEQ ID NO: 74772 - DNA, 15 bp, Homo sapiens
gctttgtaaagtgca

SEQ ID NO: 74773 - DNA, 15 bp, Homo sapiens
ggctttgtaaagtgc

SEQ ID NO: 74774 - DNA, 15 bp, Homo sapiens
gggctttgtaaagtg

SEQ ID NO: 74775 - DNA, 15 bp, Homo sapiens
agggctttgtaaagt

SEQ ID NO: 74776 - DNA, 15 bp, Homo sapiens
aagggctttgtaaag

SEQ ID NO: 74777 - DNA, 15 bp, Homo sapiens
aaagggctttgtaaa

SEQ ID NO: 74778 - DNA, 15 bp, Homo sapiens
aaaagggctttgtaa

SEQ ID NO: 74779 - DNA, 15 bp, Homo sapiens
taaaagggctttgta

SEQ ID NO: 74780 - DNA, 15 bp, Homo sapiens
gtaaaagggctttgt

SEQ ID NO: 74781 - DNA, 15 bp, Homo sapiens
tgtaaaagggctttg

SEQ ID NO: 74782 - DNA, 15 bp, Homo sapiens
ttgtaaaagggcttt

SEQ ID NO: 74783 - DNA, 15 bp, Homo sapiens
cttgtaaaagggctt

SEQ ID NO: 74784 - DNA, 15 bp, Homo sapiens
gcttgtaaaagggct

SEQ ID NO: 74785 - DNA, 15 bp, Homo sapiens
tgcttgtaaaagggc

SEQ ID NO: 74786 - DNA, 15 bp, Homo sapiens
atgcttgtaaaaggg

SEQ ID NO: 74787 - DNA, 15 bp, Homo sapiens
aatgcttgtaaaagg

SEQ ID NO: 74788 - DNA, 15 bp, Homo sapiens
taatgcttgtaaaag

SEQ ID NO: 74789 - DNA, 15 bp, Homo sapiens
gtaatgcttgtaaaa

SEQ ID NO: 74790 - DNA, 15 bp, Homo sapiens
agtaatgcttgtaaa

SEQ ID NO: 74791 - DNA, 15 bp, Homo sapiens
cagtaatgcttgtaa

SEQ ID NO: 74792 - DNA, 15 bp, Homo sapiens
gcagtaatgcttgta

SEQ ID NO: 74793 - DNA, 15 bp, Homo sapiens
tgcagtaatgcttgt

SEQ ID NO: 74794 - DNA, 15 bp, Homo sapiens
ttgcagtaatgcttg

SEQ ID NO: 74795 - DNA, 15 bp, Homo sapiens
gttgcagtaatgctt

SEQ ID NO: 74796 - DNA, 15 bp, Homo sapiens
agttgcagtaatgct

SEQ ID NO: 74797 - DNA, 15 bp, Homo sapiens
cagttgcagtaatgc

SEQ ID NO: 74798 - DNA, 15 bp, Homo sapiens
tcagttgcagtaatg

SEQ ID NO: 74799 - DNA, 15 bp, Homo sapiens
gtcagttgcagtaat

SEQ ID NO: 74800 - DNA, 15 bp, Homo sapiens
ggtcagttgcagtaa

SEQ ID NO: 74801 - DNA, 15 bp, Homo sapiens
aggtcagttgcagta

SEQ ID NO: 74802 - DNA, 15 bp, Homo sapiens
aaggtcagttgcagt

SEQ ID NO: 74803 - DNA, 15 bp, Homo sapiens
taaggtcagttgcag

SEQ ID NO: 74804 - DNA, 15 bp, Homo sapiens
ttaaggtcagttgca

SEQ ID NO: 74805 - DNA, 15 bp, Homo sapiens
gttaaggtcagttgc

SEQ ID NO: 74806 - DNA, 15 bp, Homo sapiens
agttaaggtcagttg

SEQ ID NO: 74807 - DNA, 15 bp, Homo sapiens
tagttaaggtcagtt

SEQ ID NO: 74808 - DNA, 15 bp, Homo sapiens
ctagttaaggtcagt

SEQ ID NO: 74809 - DNA, 15 bp, Homo sapiens
actagttaaggtcag

SEQ ID NO: 74810 - DNA, 15 bp, Homo sapiens
aactagttaaggtca

SEQ ID NO: 74811 - DNA, 15 bp, Homo sapiens
taactagttaaggtc

SEQ ID NO: 74812 - DNA, 15 bp, Homo sapiens
ataactagttaaggt

SEQ ID NO: 74813 - DNA, 15 bp, Homo sapiens
cataactagttaagg

SEQ ID NO: 74814 - DNA, 15 bp, Homo sapiens
tcataactagttaag

SEQ ID NO: 74815 - DNA, 15 bp, Homo sapiens
ctcataactagttaa

SEQ ID NO: 74816 - DNA, 15 bp, Homo sapiens
tctcataactagtta

SEQ ID NO: 74817 - DNA, 15 bp, Homo sapiens
ttctcataactagtt

SEQ ID NO: 74818 - DNA, 15 bp, Homo sapiens
cttctcataactagt

SEQ ID NO: 74819 - DNA, 15 bp, Homo sapiens
acttctcataactag

SEQ ID NO: 74820 - DNA, 15 bp, Homo sapiens
cacttctcataacta

SEQ ID NO: 74821 - DNA, 15 bp, Homo sapiens
ccacttctcataact

SEQ ID NO: 74822 - DNA, 15 bp, Homo sapiens
tccacttctcataac

SEQ ID NO: 74823 - DNA, 15 bp, Homo sapiens
ttccacttctcataa

SEQ ID NO: 74824 - DNA, 15 bp, Homo sapiens
gttccacttctcata

SEQ ID NO: 74825 - DNA, 15 bp, Homo sapiens
tgttccacttctcat

SEQ ID NO: 74826 - DNA, 15 bp, Homo sapiens
ctgttccacttctca

SEQ ID NO: 74827 - DNA, 15 bp, Homo sapiens
tctgttccacttctc

SEQ ID NO: 74828 - DNA, 15 bp, Homo sapiens
gtctgttccacttct

SEQ ID NO: 74829 - DNA, 15 bp, Homo sapiens
tgtctgttccacttc

SEQ ID NO: 74830 - DNA, 15 bp, Homo sapiens
ctgtctgttccactt

SEQ ID NO: 74831 - DNA, 15 bp, Homo sapiens
actgtctgttccact

SEQ ID NO: 74832 - DNA, 15 bp, Homo sapiens
tactgtctgttccac

SEQ ID NO: 74833 - DNA, 15 bp, Homo sapiens
atactgtctgttcca

SEQ ID NO: 74834 - DNA, 15 bp, Homo sapiens
gatactgtctgttcc

SEQ ID NO: 74835 - DNA, 15 bp, Homo sapiens
agatactgtctgttc

SEQ ID NO: 74836 - DNA, 15 bp, Homo sapiens
gagatactgtctgtt

SEQ ID NO: 74837 - DNA, 15 bp, Homo sapiens
agagatactgtctgt

SEQ ID NO: 74838 - DNA, 15 bp, Homo sapiens
tagagatactgtctg

SEQ ID NO: 74839 - DNA, 15 bp, Homo sapiens
atagagatactgtct

SEQ ID NO: 74840 - DNA, 15 bp, Homo sapiens
tatagagatactgtc

SEQ ID NO: 74841 - DNA, 15 bp, Homo sapiens
ctatagagatactgt

SEQ ID NO: 74842 - DNA, 15 bp, Homo sapiens
cctatagagatactg

SEQ ID NO: 74843 - DNA, 15 bp, Homo sapiens
ccctatagagatact

SEQ ID NO: 74844 - DNA, 15 bp, Homo sapiens
tccctatagagatac

SEQ ID NO: 74845 - DNA, 15 bp, Homo sapiens
ttccctatagagata

SEQ ID NO: 74846 - DNA, 15 bp, Homo sapiens
cttccctatagagat

SEQ ID NO: 74847 - DNA, 15 bp, Homo sapiens
tcttccctatagaga

SEQ ID NO: 74848 - DNA, 15 bp, Homo sapiens
ttcttccctatagag

SEQ ID NO: 74849 - DNA, 15 bp, Homo sapiens
cttcttccctataga

SEQ ID NO: 74850 - DNA, 15 bp, Homo sapiens
ccttcttccctatag

SEQ ID NO: 74851 - DNA, 15 bp, Homo sapiens
gccttcttccctata

SEQ ID NO: 74852 - DNA, 15 bp, Homo sapiens
cgccttcttccctat

SEQ ID NO: 74853 - DNA, 15 bp, Homo sapiens
acgccttcttcccta

SEQ ID NO: 74854 - DNA, 15 bp, Homo sapiens
gacgccttcttccct

SEQ ID NO: 74855 - DNA, 15 bp, Homo sapiens
tgacgccttcttccc

SEQ ID NO: 74856 - DNA, 15 bp, Homo sapiens
ctgacgccttcttcc

SEQ ID NO: 74857 - DNA, 15 bp, Homo sapiens
tctgacgccttcttc

SEQ ID NO: 74858 - DNA, 15 bp, Homo sapiens
ctctgacgccttctt

SEQ ID NO: 74859 - DNA, 15 bp, Homo sapiens
tctctgacgccttct

SEQ ID NO: 74860 - DNA, 15 bp, Homo sapiens
gtctctgacgccttc

SEQ ID NO: 74861 - DNA, 15 bp, Homo sapiens
agtctctgacgcctt

SEQ ID NO: 74862 - DNA, 15 bp, Homo sapiens
cagtctctgacgcct

SEQ ID NO: 74863 - DNA, 15 bp, Homo sapiens
ccagtctctgacgcc

SEQ ID NO: 74864 - DNA, 15 bp, Homo sapiens
cccagtctctgacgc

SEQ ID NO: 74865 - DNA, 15 bp, Homo sapiens
acccagtctctgacg

SEQ ID NO: 74866 - DNA, 15 bp, Homo sapiens
cacccagtctctgac

SEQ ID NO: 74867 - DNA, 15 bp, Homo sapiens
tcacccagtctctga

SEQ ID NO: 74868 - DNA, 15 bp, Homo sapiens
ctcacccagtctctg

SEQ ID NO: 74869 - DNA, 15 bp, Homo sapiens
actcacccagtctct

SEQ ID NO: 74870 - DNA, 15 bp, Homo sapiens
cactcacccagtctc

SEQ ID NO: 74871 - DNA, 15 bp, Homo sapiens
tcactcacccagtct

SEQ ID NO: 74872 - DNA, 15 bp, Homo sapiens
gtcactcacccagtc

SEQ ID NO: 74873 - DNA, 15 bp, Homo sapiens
agtcactcacccagt

SEQ ID NO: 74874 - DNA, 15 bp, Homo sapiens
tagtcactcacccag

SEQ ID NO: 74875 - DNA, 15 bp, Homo sapiens
ctagtcactcaccca

SEQ ID NO: 74876 - DNA, 15 bp, Homo sapiens
gctagtcactcaccc

SEQ ID NO: 74877 - DNA, 15 bp, Homo sapiens
agctagtcactcacc

SEQ ID NO: 74878 - DNA, 15 bp, Homo sapiens
aagctagtcactcac

SEQ ID NO: 74879 - DNA, 15 bp, Homo sapiens
gaagctagtcactca

SEQ ID NO: 74880 - DNA, 15 bp, Homo sapiens
tgaagctagtcactc

SEQ ID NO: 74881 - DNA, 15 bp, Homo sapiens
ctgaagctagtcact

SEQ ID NO: 74882 - DNA, 15 bp, Homo sapiens
tctgaagctagtcac

SEQ ID NO: 74883 - DNA, 15 bp, Homo sapiens
ctctgaagctagtca

SEQ ID NO: 74884 - DNA, 15 bp, Homo sapiens
cctctgaagctagtc

SEQ ID NO: 74885 - DNA, 15 bp, Homo sapiens
gcctctgaagctagt

SEQ ID NO: 74886 - DNA, 15 bp, Homo sapiens
tgcctctgaagctag

SEQ ID NO: 74887 - DNA, 15 bp, Homo sapiens
gtgcctctgaagcta

SEQ ID NO: 74888 - DNA, 15 bp, Homo sapiens
ggtgcctctgaagct

SEQ ID NO: 74889 - DNA, 15 bp, Homo sapiens
tggtgcctctgaagc

SEQ ID NO: 74890 - DNA, 15 bp, Homo sapiens
atggtgcctctgaag

SEQ ID NO: 74891 - DNA, 15 bp, Homo sapiens
tatggtgcctctgaa

SEQ ID NO: 74892 - DNA, 15 bp, Homo sapiens
atatggtgcctctga

SEQ ID NO: 74893 - DNA, 15 bp, Homo sapiens
aatatggtgcctctg

SEQ ID NO: 74894 - DNA, 15 bp, Homo sapiens
taatatggtgcctct

SEQ ID NO: 74895 - DNA, 15 bp, Homo sapiens
ttaatatggtgcctc

SEQ ID NO: 74896 - DNA, 15 bp, Homo sapiens
cttaatatggtgcct

SEQ ID NO: 74897 - DNA, 15 bp, Homo sapiens
tcttaatatggtgcc

SEQ ID NO: 74898 - DNA, 15 bp, Homo sapiens
ctcttaatatggtgc

SEQ ID NO: 74899 - DNA, 15 bp, Homo sapiens
cctcttaatatggtg

SEQ ID NO: 74900 - DNA, 15 bp, Homo sapiens
ccctcttaatatggt

SEQ ID NO: 74901 - DNA, 15 bp, Homo sapiens
tccctcttaatatgg

SEQ ID NO: 74902 - DNA, 15 bp, Homo sapiens
ttccctcttaatatg

SEQ ID NO: 74903 - DNA, 15 bp, Homo sapiens
cttccctcttaatat

SEQ ID NO: 74904 - DNA, 15 bp, Homo sapiens
tcttccctcttaata

SEQ ID NO: 74905 - DNA, 15 bp, Homo sapiens
atcttccctcttaat

SEQ ID NO: 74906 - DNA, 15 bp, Homo sapiens
aatcttccctcttaa

SEQ ID NO: 74907 - DNA, 15 bp, Homo sapiens
taatcttccctctta

SEQ ID NO: 74908 - DNA, 15 bp, Homo sapiens
ttaatcttccctctt

SEQ ID NO: 74909 - DNA, 15 bp, Homo sapiens
gttaatcttccctct

SEQ ID NO: 74910 - DNA, 15 bp, Homo sapiens
tgttaatcttccctc

SEQ ID NO: 74911 - DNA, 15 bp, Homo sapiens
atgttaatcttccct

SEQ ID NO: 74912 - DNA, 15 bp, Homo sapiens
aatgttaatcttccc

SEQ ID NO: 74913 - DNA, 15 bp, Homo sapiens
gaatgttaatcttcc

SEQ ID NO: 74914 - DNA, 15 bp, Homo sapiens
cgaatgttaatcttc

SEQ ID NO: 74915 - DNA, 15 bp, Homo sapiens
ccgaatgttaatctt

SEQ ID NO: 74916 - DNA, 15 bp, Homo sapiens
tccgaatgttaatct

SEQ ID NO: 74917 - DNA, 15 bp, Homo sapiens
gtccgaatgttaatc

SEQ ID NO: 74918 - DNA, 15 bp, Homo sapiens
agtccgaatgttaat

SEQ ID NO: 74919 - DNA, 15 bp, Homo sapiens
tagtccgaatgttaa

SEQ ID NO: 74920 - DNA, 15 bp, Homo sapiens
ttagtccgaatgtta

SEQ ID NO: 74921 - DNA, 15 bp, Homo sapiens
gttagtccgaatgtt

SEQ ID NO: 74922 - DNA, 15 bp, Homo sapiens
ggttagtccgaatgt

SEQ ID NO: 74923 - DNA, 15 bp, Homo sapiens
tggttagtccgaatg

SEQ ID NO: 74924 - DNA, 15 bp, Homo sapiens
atggttagtccgaat

SEQ ID NO: 74925 - DNA, 15 bp, Homo sapiens
catggttagtccgaa

SEQ ID NO: 74926 - DNA, 15 bp, Homo sapiens
acatggttagtccga

SEQ ID NO: 74927 - DNA, 15 bp, Homo sapiens
aacatggttagtccg

SEQ ID NO: 74928 - DNA, 15 bp, Homo sapiens
aaacatggttagtcc

SEQ ID NO: 74929 - DNA, 15 bp, Homo sapiens
gaaacatggttagtc

SEQ ID NO: 74930 - DNA, 15 bp, Homo sapiens
ggaaacatggttagt

SEQ ID NO: 74931 - DNA, 15 bp, Homo sapiens
tggaaacatggttag

SEQ ID NO: 74932 - DNA, 15 bp, Homo sapiens
gtggaaacatggtta

SEQ ID NO: 74933 - DNA, 15 bp, Homo sapiens
agtggaaacatggtt

SEQ ID NO: 74934 - DNA, 15 bp, Homo sapiens
tagtggaaacatggt

SEQ ID NO: 74935 - DNA, 15 bp, Homo sapiens
ttagtggaaacatgg

SEQ ID NO: 74936 - DNA, 15 bp, Homo sapiens
tttagtggaaacatg

SEQ ID NO: 74937 - DNA, 15 bp, Homo sapiens
gtttagtggaaacat

SEQ ID NO: 74938 - DNA, 15 bp, Homo sapiens
ggtttagtggaaaca

SEQ ID NO: 74939 - DNA, 15 bp, Homo sapiens
tggtttagtggaaac

SEQ ID NO: 74940 - DNA, 15 bp, Homo sapiens
ttggtttagtggaaa

SEQ ID NO: 74941 - DNA, 15 bp, Homo sapiens
attggtttagtggaa

SEQ ID NO: 74942 - DNA, 15 bp, Homo sapiens
aattggtttagtgga

SEQ ID NO: 74943 - DNA, 15 bp, Homo sapiens
taattggtttagtgg

SEQ ID NO: 74944 - DNA, 15 bp, Homo sapiens
ataattggtttagtg

SEQ ID NO: 74945 - DNA, 15 bp, Homo sapiens
cataattggtttagt

SEQ ID NO: 74946 - DNA, 15 bp, Homo sapiens
acataattggtttag

SEQ ID NO: 74947 - DNA, 15 bp, Homo sapiens
gacataattggttta

SEQ ID NO: 74948 - DNA, 15 bp, Homo sapiens
agacataattggttt

SEQ ID NO: 74949 - DNA, 15 bp, Homo sapiens
cagacataattggtt

SEQ ID NO: 74950 - DNA, 15 bp, Homo sapiens
ccagacataattggt

SEQ ID NO: 74951 - DNA, 15 bp, Homo sapiens
accagacataattgg

SEQ ID NO: 74952 - DNA, 15 bp, Homo sapiens
caccagacataattg

SEQ ID NO: 74953 - DNA, 15 bp, Homo sapiens
tcaccagacataatt

SEQ ID NO: 74954 - DNA, 15 bp, Homo sapiens
ttcaccagacataat

SEQ ID NO: 74955 - DNA, 15 bp, Homo sapiens
tttcaccagacataa

SEQ ID NO: 74956 - DNA, 15 bp, Homo sapiens
atttcaccagacata

SEQ ID NO: 74957 - DNA, 15 bp, Homo sapiens
gatttcaccagacat

SEQ ID NO: 74958 - DNA, 15 bp, Homo sapiens
ggatttcaccagaca

SEQ ID NO: 74959 - DNA, 15 bp, Homo sapiens
aggatttcaccagac

SEQ ID NO: 74960 - DNA, 15 bp, Homo sapiens
aaggatttcaccaga

SEQ ID NO: 74961 - DNA, 15 bp, Homo sapiens
aaaggatttcaccag

SEQ ID NO: 74962 - DNA, 15 bp, Homo sapiens
gaaaggatttcacca

SEQ ID NO: 74963 - DNA, 15 bp, Homo sapiens
agaaaggatttcacc

SEQ ID NO: 74964 - DNA, 15 bp, Homo sapiens
aagaaaggatttcac

SEQ ID NO: 74965 - DNA, 15 bp, Homo sapiens
caagaaaggatttca

SEQ ID NO: 74966 - DNA, 15 bp, Homo sapiens
acaagaaaggatttc

SEQ ID NO: 74967 - DNA, 15 bp, Homo sapiens
gacaagaaaggattt

SEQ ID NO: 74968 - DNA, 15 bp, Homo sapiens
ggacaagaaaggatt

SEQ ID NO: 74969 - DNA, 15 bp, Homo sapiens
aggacaagaaaggat

SEQ ID NO: 74970 - DNA, 15 bp, Homo sapiens
gaggacaagaaagga

SEQ ID NO: 74971 - DNA, 15 bp, Homo sapiens
agaggacaagaaagg

SEQ ID NO: 74972 - DNA, 15 bp, Homo sapiens
aagaggacaagaaag

SEQ ID NO: 74973 - DNA, 15 bp, Homo sapiens
caagaggacaagaaa

SEQ ID NO: 74974 - DNA, 15 bp, Homo sapiens
acaagaggacaagaa

SEQ ID NO: 74975 - DNA, 15 bp, Homo sapiens
tacaagaggacaaga

SEQ ID NO: 74976 - DNA, 15 bp, Homo sapiens
ttacaagaggacaag

SEQ ID NO: 74977 - DNA, 15 bp, Homo sapiens
attacaagaggacaa

SEQ ID NO: 74978 - DNA, 15 bp, Homo sapiens
gattacaagaggaca

SEQ ID NO: 74979 - DNA, 15 bp, Homo sapiens
tgattacaagaggac

SEQ ID NO: 74980 - DNA, 15 bp, Homo sapiens
ctgattacaagagga

SEQ ID NO: 74981 - DNA, 15 bp, Homo sapiens
gctgattacaagagg

SEQ ID NO: 74982 - DNA, 15 bp, Homo sapiens
tgctgattacaagag

SEQ ID NO: 74983 - DNA, 15 bp, Homo sapiens
atgctgattacaaga

SEQ ID NO: 74984 - DNA, 15 bp, Homo sapiens
gatgctgattacaag

SEQ ID NO: 74985 - DNA, 15 bp, Homo sapiens
tgatgctgattacaa

SEQ ID NO: 74986 - DNA, 15 bp, Homo sapiens
ctgatgctgattaca

SEQ ID NO: 74987 - DNA, 15 bp, Homo sapiens
gctgatgctgattac

SEQ ID NO: 74988 - DNA, 15 bp, Homo sapiens
agctgatgctgatta

SEQ ID NO: 74989 - DNA, 15 bp, Homo sapiens
cagctgatgctgatt

SEQ ID NO: 74990 - DNA, 15 bp, Homo sapiens
gcagctgatgctgat

SEQ ID NO: 74991 - DNA, 15 bp, Homo sapiens
ggcagctgatgctga

SEQ ID NO: 74992 - DNA, 15 bp, Homo sapiens
cggcagctgatgctg

SEQ ID NO: 74993 - DNA, 15 bp, Homo sapiens
gcggcagctgatgct

SEQ ID NO: 74994 - DNA, 15 bp, Homo sapiens
agcggcagctgatgc

SEQ ID NO: 74995 - DNA, 15 bp, Homo sapiens
cagcggcagctgatg

SEQ ID NO: 74996 - DNA, 15 bp, Homo sapiens
gcagcggcagctgat

SEQ ID NO: 74997 - DNA, 15 bp, Homo sapiens
tgcagcggcagctga

SEQ ID NO: 74998 - DNA, 15 bp, Homo sapiens
atgcagcggcagctg

SEQ ID NO: 74999 - DNA, 15 bp, Homo sapiens
catgcagcggcagct

SEQ ID NO: 75000 - DNA, 15 bp, Homo sapiens
gcatgcagcggcagc

SEQ ID NO: 75001 - DNA, 15 bp, Homo sapiens
tgcatgcagcggcag

SEQ ID NO: 75002 - DNA, 15 bp, Homo sapiens
ctgcatgcagcggca

SEQ ID NO: 75003 - DNA, 15 bp, Homo sapiens
gctgcatgcagcggc

SEQ ID NO: 75004 - DNA, 15 bp, Homo sapiens
cgctgcatgcagcgg

SEQ ID NO: 75005 - DNA, 15 bp, Homo sapiens
acgctgcatgcagcg

SEQ ID NO: 75006 - DNA, 15 bp, Homo sapiens
aacgctgcatgcagc

SEQ ID NO: 75007 - DNA, 15 bp, Homo sapiens
taacgctgcatgcag

SEQ ID NO: 75008 - DNA, 15 bp, Homo sapiens
ctaacgctgcatgca

SEQ ID NO: 75009 - DNA, 15 bp, Homo sapiens
cctaacgctgcatgc

SEQ ID NO: 75010 - DNA, 15 bp, Homo sapiens
acctaacgctgcatg

SEQ ID NO: 75011 - DNA, 15 bp, Homo sapiens
tacctaacgctgcat

SEQ ID NO: 75012 - DNA, 15 bp, Homo sapiens
atacctaacgctgca

SEQ ID NO: 75013 - DNA, 15 bp, Homo sapiens
tatacctaacgctgc

SEQ ID NO: 75014 - DNA, 15 bp, Homo sapiens
ttatacctaacgctg

SEQ ID NO: 75015 - DNA, 15 bp, Homo sapiens
attatacctaacgct

SEQ ID NO: 75016 - DNA, 15 bp, Homo sapiens
tattatacctaacgc

SEQ ID NO: 75017 - DNA, 15 bp, Homo sapiens
ctattatacctaacg

SEQ ID NO: 75018 - DNA, 15 bp, Homo sapiens
actattatacctaac

SEQ ID NO: 75019 - DNA, 15 bp, Homo sapiens
tactattatacctaa

SEQ ID NO: 75020 - DNA, 15 bp, Homo sapiens
atactattataccta

SEQ ID NO: 75021 - DNA, 15 bp, Homo sapiens
gatactattatacct

SEQ ID NO: 75022 - DNA, 15 bp, Homo sapiens
agatactattatacc

SEQ ID NO: 75023 - DNA, 15 bp, Homo sapiens
gagatactattatac

SEQ ID NO: 75024 - DNA, 15 bp, Homo sapiens
ggagatactattata

SEQ ID NO: 75025 - DNA, 15 bp, Homo sapiens
tggagatactattat

SEQ ID NO: 75026 - DNA, 15 bp, Homo sapiens
ctggagatactatta

SEQ ID NO: 75027 - DNA, 15 bp, Homo sapiens
cctggagatactatt

SEQ ID NO: 75028 - DNA, 15 bp, Homo sapiens
acctggagatactat

SEQ ID NO: 75029 - DNA, 15 bp, Homo sapiens
aacctggagatacta

SEQ ID NO: 75030 - DNA, 15 bp, Homo sapiens
aaacctggagatact

SEQ ID NO: 75031 - DNA, 15 bp, Homo sapiens
gaaacctggagatac

SEQ ID NO: 75032 - DNA, 15 bp, Homo sapiens
ggaaacctggagata

SEQ ID NO: 75033 - DNA, 15 bp, Homo sapiens
tggaaacctggagat

SEQ ID NO: 75034 - DNA, 15 bp, Homo sapiens
atggaaacctggaga

SEQ ID NO: 75035 - DNA, 15 bp, Homo sapiens
gatggaaacctggag

SEQ ID NO: 75036 - DNA, 15 bp, Homo sapiens
tgatggaaacctgga

SEQ ID NO: 75037 - DNA, 15 bp, Homo sapiens
ctgatggaaacctgg

SEQ ID NO: 75038 - DNA, 15 bp, Homo sapiens
tctgatggaaacctg

SEQ ID NO: 75039 - DNA, 15 bp, Homo sapiens
ttctgatggaaacct

SEQ ID NO: 75040 - DNA, 15 bp, Homo sapiens
attctgatggaaacc

SEQ ID NO: 75041 - DNA, 15 bp, Homo sapiens
aattctgatggaaac

SEQ ID NO: 75042 - DNA, 15 bp, Homo sapiens
gaattctgatggaaa

SEQ ID NO: 75043 - DNA, 15 bp, Homo sapiens
tgaattctgatggaa

SEQ ID NO: 75044 - DNA, 15 bp, Homo sapiens
gtgaattctgatgga

SEQ ID NO: 75045 - DNA, 15 bp, Homo sapiens
agtgaattctgatgg

SEQ ID NO: 75046 - DNA, 15 bp, Homo sapiens
gagtgaattctgatg

SEQ ID NO: 75047 - DNA, 15 bp, Homo sapiens
agagtgaattctgat

SEQ ID NO: 75048 - DNA, 15 bp, Homo sapiens
gagagtgaattctga

SEQ ID NO: 75049 - DNA, 15 bp, Homo sapiens
ggagagtgaattctg

SEQ ID NO: 75050 - DNA, 15 bp, Homo sapiens
aggagagtgaattct

SEQ ID NO: 75051 - DNA, 15 bp, Homo sapiens
gaggagagtgaattc

SEQ ID NO: 75052 - DNA, 15 bp, Homo sapiens
tgaggagagtgaatt

SEQ ID NO: 75053 - DNA, 15 bp, Homo sapiens
atgaggagagtgaat

SEQ ID NO: 75054 - DNA, 15 bp, Homo sapiens
aatgaggagagtgaa

SEQ ID NO: 75055 - DNA, 15 bp, Homo sapiens
aaatgaggagagtga

SEQ ID NO: 75056 - DNA, 15 bp, Homo sapiens
aaaatgaggagagtg

SEQ ID NO: 75057 - DNA, 15 bp, Homo sapiens
gaaaatgaggagagt

SEQ ID NO: 75058 - DNA, 15 bp, Homo sapiens
tgaaaatgaggagag

SEQ ID NO: 75059 - DNA, 15 bp, Homo sapiens
gtgaaaatgaggaga

SEQ ID NO: 75060 - DNA, 15 bp, Homo sapiens
cgtgaaaatgaggag

SEQ ID NO: 75061 - DNA, 15 bp, Homo sapiens
gcgtgaaaatgagga

SEQ ID NO: 75062 - DNA, 15 bp, Homo sapiens
agcgtgaaaatgagg

SEQ ID NO: 75063 - DNA, 15 bp, Homo sapiens
cagcgtgaaaatgag

SEQ ID NO: 75064 - DNA, 15 bp, Homo sapiens
gcagcgtgaaaatga

SEQ ID NO: 75065 - DNA, 15 bp, Homo sapiens
tgcagcgtgaaaatg

SEQ ID NO: 75066 - DNA, 15 bp, Homo sapiens
atgcagcgtgaaaat

SEQ ID NO: 75067 - DNA, 15 bp, Homo sapiens
gatgcagcgtgaaaa

SEQ ID NO: 75068 - DNA, 15 bp, Homo sapiens
ggatgcagcgtgaaa

SEQ ID NO: 75069 - DNA, 15 bp, Homo sapiens
aggatgcagcgtgaa

SEQ ID NO: 75070 - DNA, 15 bp, Homo sapiens
gaggatgcagcgtga

SEQ ID NO: 75071 - DNA, 15 bp, Homo sapiens
agaggatgcagcgtg

SEQ ID NO: 75072 - DNA, 15 bp, Homo sapiens
gagaggatgcagcgt

SEQ ID NO: 75073 - DNA, 15 bp, Homo sapiens
ggagaggatgcagcg

SEQ ID NO: 75074 - DNA, 15 bp, Homo sapiens
tggagaggatgcagc

SEQ ID NO: 75075 - DNA, 15 bp, Homo sapiens
ttggagaggatgcag

SEQ ID NO: 75076 - DNA, 15 bp, Homo sapiens
cttggagaggatgca

SEQ ID NO: 75077 - DNA, 15 bp, Homo sapiens
tcttggagaggatgc

SEQ ID NO: 75078 - DNA, 15 bp, Homo sapiens
gtcttggagaggatg

SEQ ID NO: 75079 - DNA, 15 bp, Homo sapiens
agtcttggagaggat

SEQ ID NO: 75080 - DNA, 15 bp, Homo sapiens
aagtcttggagagga

SEQ ID NO: 75081 - DNA, 15 bp, Homo sapiens
caagtcttggagagg

SEQ ID NO: 75082 - DNA, 15 bp, Homo sapiens
ccaagtcttggagag

SEQ ID NO: 75083 - DNA, 15 bp, Homo sapiens
tccaagtcttggaga

SEQ ID NO: 75084 - DNA, 15 bp, Homo sapiens
ctccaagtcttggag

SEQ ID NO: 75085 - DNA, 15 bp, Homo sapiens
gctccaagtcttgga

SEQ ID NO: 75086 - DNA, 15 bp, Homo sapiens
agctccaagtcttgg

SEQ ID NO: 75087 - DNA, 15 bp, Homo sapiens
aagctccaagtcttg

SEQ ID NO: 75088 - DNA, 15 bp, Homo sapiens
caagctccaagtctt

SEQ ID NO: 75089 - DNA, 15 bp, Homo sapiens
gcaagctccaagtct

SEQ ID NO: 75090 - DNA, 15 bp, Homo sapiens
agcaagctccaagtc

SEQ ID NO: 75091 - DNA, 15 bp, Homo sapiens
tagcaagctccaagt

SEQ ID NO: 75092 - DNA, 15 bp, Homo sapiens
ctagcaagctccaag

SEQ ID NO: 75093 - DNA, 15 bp, Homo sapiens
cctagcaagctccaa

SEQ ID NO: 75094 - DNA, 15 bp, Homo sapiens
tcctagcaagctcca

SEQ ID NO: 75095 - DNA, 15 bp, Homo sapiens
gtcctagcaagctcc

SEQ ID NO: 75096 - DNA, 15 bp, Homo sapiens
tgtcctagcaagctc

SEQ ID NO: 75097 - DNA, 15 bp, Homo sapiens
ttgtcctagcaagct

SEQ ID NO: 75098 - DNA, 15 bp, Homo sapiens
attgtcctagcaagc

SEQ ID NO: 75099 - DNA, 15 bp, Homo sapiens
tattgtcctagcaag

SEQ ID NO: 75100 - DNA, 15 bp, Homo sapiens
atattgtcctagcaa

SEQ ID NO: 75101 - DNA, 15 bp, Homo sapiens
catattgtcctagca

SEQ ID NO: 75102 - DNA, 15 bp, Homo sapiens
acatattgtcctagc

SEQ ID NO: 75103 - DNA, 15 bp, Homo sapiens
cacatattgtcctag

SEQ ID NO: 75104 - DNA, 15 bp, Homo sapiens
ccacatattgtccta

SEQ ID NO: 75105 - DNA, 15 bp, Homo sapiens
accacatattgtcct

SEQ ID NO: 75106 - DNA, 15 bp, Homo sapiens
aaccacatattgtcc

SEQ ID NO: 75107 - DNA, 15 bp, Homo sapiens
gaaccacatattgtc

SEQ ID NO: 75108 - DNA, 15 bp, Homo sapiens
ggaaccacatattgt

SEQ ID NO: 75109 - DNA, 15 bp, Homo sapiens
gggaaccacatattg

SEQ ID NO: 75110 - DNA, 15 bp, Homo sapiens
tgggaaccacatatt

SEQ ID NO: 75111 - DNA, 15 bp, Homo sapiens
ctgggaaccacatat

SEQ ID NO: 75112 - DNA, 15 bp, Homo sapiens
cctgggaaccacata

SEQ ID NO: 75113 - DNA, 15 bp, Homo sapiens
tcctgggaaccacat

SEQ ID NO: 75114 - DNA, 15 bp, Homo sapiens
gtcctgggaaccaca

SEQ ID NO: 75115 - DNA, 15 bp, Homo sapiens
agtcctgggaaccac

SEQ ID NO: 75116 - DNA, 15 bp, Homo sapiens
aagtcctgggaacca

SEQ ID NO: 75117 - DNA, 15 bp, Homo sapiens
caagtcctgggaacc

SEQ ID NO: 75118 - DNA, 15 bp, Homo sapiens
ccaagtcctgggaac

SEQ ID NO: 75119 - DNA, 15 bp, Homo sapiens
cccaagtcctgggaa

SEQ ID NO: 75120 - DNA, 15 bp, Homo sapiens
tcccaagtcctggga

SEQ ID NO: 75121 - DNA, 15 bp, Homo sapiens
ttcccaagtcctggg

SEQ ID NO: 75122 - DNA, 15 bp, Homo sapiens
gttcccaagtcctgg

SEQ ID NO: 75123 - DNA, 15 bp, Homo sapiens
ggttcccaagtcctg

SEQ ID NO: 75124 - DNA, 15 bp, Homo sapiens
gggttcccaagtcct

SEQ ID NO: 75125 - DNA, 15 bp, Homo sapiens
ggggttcccaagtcc

SEQ ID NO: 75126 - DNA, 15 bp, Homo sapiens
aggggttcccaagtc

SEQ ID NO: 75127 - DNA, 15 bp, Homo sapiens
caggggttcccaagt

SEQ ID NO: 75128 - DNA, 15 bp, Homo sapiens
ccaggggttcccaag

SEQ ID NO: 75129 - DNA, 15 bp, Homo sapiens
cccaggggttcccaa

SEQ ID NO: 75130 - DNA, 15 bp, Homo sapiens
acccaggggttccca

SEQ ID NO: 75131 - DNA, 15 bp, Homo sapiens
cacccaggggttccc

SEQ ID NO: 75132 - DNA, 15 bp, Homo sapiens
acacccaggggttcc

SEQ ID NO: 75133 - DNA, 15 bp, Homo sapiens
gacacccaggggttc

SEQ ID NO: 75134 - DNA, 15 bp, Homo sapiens
agacacccaggggtt

SEQ ID NO: 75135 - DNA, 15 bp, Homo sapiens
tagacacccaggggt

SEQ ID NO: 75136 - DNA, 15 bp, Homo sapiens
ctagacacccagggg

SEQ ID NO: 75137 - DNA, 15 bp, Homo sapiens
tctagacacccaggg

SEQ ID NO: 75138 - DNA, 15 bp, Homo sapiens
ctctagacacccagg

SEQ ID NO: 75139 - DNA, 15 bp, Homo sapiens
actctagacacccag

SEQ ID NO: 75140 - DNA, 15 bp, Homo sapiens
aactctagacaccca

SEQ ID NO: 75141 - DNA, 15 bp, Homo sapiens
gaactctagacaccc

SEQ ID NO: 75142 - DNA, 15 bp, Homo sapiens
agaactctagacacc

SEQ ID NO: 75143 - DNA, 15 bp, Homo sapiens
aagaactctagacac

SEQ ID NO: 75144 - DNA, 15 bp, Homo sapiens
caagaactctagaca

SEQ ID NO: 75145 - DNA, 15 bp, Homo sapiens
tcaagaactctagac

SEQ ID NO: 75146 - DNA, 15 bp, Homo sapiens
ttcaagaactctaga

SEQ ID NO: 75147 - DNA, 15 bp, Homo sapiens
cttcaagaactctag

SEQ ID NO: 75148 - DNA, 15 bp, Homo sapiens
tcttcaagaactcta

SEQ ID NO: 75149 - DNA, 15 bp, Homo sapiens
atcttcaagaactct

SEQ ID NO: 75150 - DNA, 15 bp, Homo sapiens
aatcttcaagaactc

SEQ ID NO: 75151 - DNA, 15 bp, Homo sapiens
gaatcttcaagaact

SEQ ID NO: 75152 - DNA, 15 bp, Homo sapiens
agaatcttcaagaac

SEQ ID NO: 75153 - DNA, 15 bp, Homo sapiens
gagaatcttcaagaa

SEQ ID NO: 75154 - DNA, 15 bp, Homo sapiens
agagaatcttcaaga

SEQ ID NO: 75155 - DNA, 15 bp, Homo sapiens
aagagaatcttcaag

SEQ ID NO: 75156 - DNA, 15 bp, Homo sapiens
caagagaatcttcaa

SEQ ID NO: 75157 - DNA, 15 bp, Homo sapiens
ccaagagaatcttca

SEQ ID NO: 75158 - DNA, 15 bp, Homo sapiens
gccaagagaatcttc

SEQ ID NO: 75159 - DNA, 15 bp, Homo sapiens
agccaagagaatctt

SEQ ID NO: 75160 - DNA, 15 bp, Homo sapiens
cagccaagagaatct

SEQ ID NO: 75161 - DNA, 15 bp, Homo sapiens
gcagccaagagaatc

SEQ ID NO: 75162 - DNA, 15 bp, Homo sapiens
agcagccaagagaat

SEQ ID NO: 75163 - DNA, 15 bp, Homo sapiens
cagcagccaagagaa

SEQ ID NO: 75164 - DNA, 15 bp, Homo sapiens
ccagcagccaagaga

SEQ ID NO: 75165 - DNA, 15 bp, Homo sapiens
gccagcagccaagag

SEQ ID NO: 75166 - DNA, 15 bp, Homo sapiens
agccagcagccaaga

SEQ ID NO: 75167 - DNA, 15 bp, Homo sapiens
cagccagcagccaag

SEQ ID NO: 75168 - DNA, 15 bp, Homo sapiens
acagccagcagccaa

SEQ ID NO: 75169 - DNA, 15 bp, Homo sapiens
cacagccagcagcca

SEQ ID NO: 75170 - DNA, 15 bp, Homo sapiens
ccacagccagcagcc

SEQ ID NO: 75171 - DNA, 15 bp, Homo sapiens
cccacagccagcagc

SEQ ID NO: 75172 - DNA, 15 bp, Homo sapiens
acccacagccagcag

SEQ ID NO: 75173 - DNA, 15 bp, Homo sapiens
tacccacagccagca

SEQ ID NO: 75174 - DNA, 15 bp, Homo sapiens
gtacccacagccagc

SEQ ID NO: 75175 - DNA, 15 bp, Homo sapiens
agtacccacagccag

SEQ ID NO: 75176 - DNA, 15 bp, Homo sapiens
aagtacccacagcca

SEQ ID NO: 75177 - DNA, 15 bp, Homo sapiens
aaagtacccacagcc

SEQ ID NO: 75178 - DNA, 15 bp, Homo sapiens
taaagtacccacagc

SEQ ID NO: 75179 - DNA, 15 bp, Homo sapiens
ctaaagtacccacag

SEQ ID NO: 75180 - DNA, 15 bp, Homo sapiens
cctaaagtacccaca

SEQ ID NO: 75181 - DNA, 15 bp, Homo sapiens
ccctaaagtacccac

SEQ ID NO: 75182 - DNA, 15 bp, Homo sapiens
gccctaaagtaccca

SEQ ID NO: 75183 - DNA, 15 bp, Homo sapiens
tgccctaaagtaccc

SEQ ID NO: 75184 - DNA, 15 bp, Homo sapiens
atgccctaaagtacc

SEQ ID NO: 75185 - DNA, 15 bp, Homo sapiens
gatgccctaaagtac

SEQ ID NO: 75186 - DNA, 15 bp, Homo sapiens
tgatgccctaaagta

SEQ ID NO: 75187 - DNA, 15 bp, Homo sapiens
atgatgccctaaagt

SEQ ID NO: 75188 - DNA, 15 bp, Homo sapiens
aatgatgccctaaag

SEQ ID NO: 75189 - DNA, 15 bp, Homo sapiens
aaatgatgccctaaa

SEQ ID NO: 75190 - DNA, 15 bp, Homo sapiens
gaaatgatgccctaa

SEQ ID NO: 75191 - DNA, 15 bp, Homo sapiens
ggaaatgatgcccta

SEQ ID NO: 75192 - DNA, 15 bp, Homo sapiens
aggaaatgatgccct

SEQ ID NO: 75193 - DNA, 15 bp, Homo sapiens
aaggaaatgatgccc

SEQ ID NO: 75194 - DNA, 15 bp, Homo sapiens
caaggaaatgatgcc

SEQ ID NO: 75195 - DNA, 15 bp, Homo sapiens
tcaaggaaatgatgc

SEQ ID NO: 75196 - DNA, 15 bp, Homo sapiens
gtcaaggaaatgatg

SEQ ID NO: 75197 - DNA, 15 bp, Homo sapiens
agtcaaggaaatgat

SEQ ID NO: 75198 - DNA, 15 bp, Homo sapiens
aagtcaaggaaatga

SEQ ID NO: 75199 - DNA, 15 bp, Homo sapiens
gaagtcaaggaaatg

SEQ ID NO: 75200 - DNA, 15 bp, Homo sapiens
agaagtcaaggaaat

SEQ ID NO: 75201 - DNA, 15 bp, Homo sapiens
cagaagtcaaggaaa

SEQ ID NO: 75202 - DNA, 15 bp, Homo sapiens
tcagaagtcaaggaa

SEQ ID NO: 75203 - DNA, 15 bp, Homo sapiens
ctcagaagtcaagga

SEQ ID NO: 75204 - DNA, 15 bp, Homo sapiens
actcagaagtcaagg

SEQ ID NO: 75205 - DNA, 15 bp, Homo sapiens
cactcagaagtcaag

SEQ ID NO: 75206 - DNA, 15 bp, Homo sapiens
acactcagaagtcaa

SEQ ID NO: 75207 - DNA, 15 bp, Homo sapiens
gacactcagaagtca

SEQ ID NO: 75208 - DNA, 15 bp, Homo sapiens
agacactcagaagtc

SEQ ID NO: 75209 - DNA, 15 bp, Homo sapiens
gagacactcagaagt

SEQ ID NO: 75210 - DNA, 15 bp, Homo sapiens
tgagacactcagaag

SEQ ID NO: 75211 - DNA, 15 bp, Homo sapiens
ttgagacactcagaa

SEQ ID NO: 75212 - DNA, 15 bp, Homo sapiens
gttgagacactcaga

SEQ ID NO: 75213 - DNA, 15 bp, Homo sapiens
agttgagacactcag

SEQ ID NO: 75214 - DNA, 15 bp, Homo sapiens
tagttgagacactca

SEQ ID NO: 75215 - DNA, 15 bp, Homo sapiens
ttagttgagacactc

SEQ ID NO: 75216 - DNA, 15 bp, Homo sapiens
gttagttgagacact

SEQ ID NO: 75217 - DNA, 15 bp, Homo sapiens
agttagttgagacac

SEQ ID NO: 75218 - DNA, 15 bp, Homo sapiens
cagttagttgagaca

SEQ ID NO: 75219 - DNA, 15 bp, Homo sapiens
gcagttagttgagac

SEQ ID NO: 75220 - DNA, 15 bp, Homo sapiens
agcagttagttgaga

SEQ ID NO: 75221 - DNA, 15 bp, Homo sapiens
cagcagttagttgag

SEQ ID NO: 75222 - DNA, 15 bp, Homo sapiens
tcagcagttagttga

SEQ ID NO: 75223 - DNA, 15 bp, Homo sapiens
ttcagcagttagttg

SEQ ID NO: 75224 - DNA, 15 bp, Homo sapiens
cttcagcagttagtt

SEQ ID NO: 75225 - DNA, 15 bp, Homo sapiens
tcttcagcagttagt

SEQ ID NO: 75226 - DNA, 15 bp, Homo sapiens
ttcttcagcagttag

SEQ ID NO: 75227 - DNA, 15 bp, Homo sapiens
tttcttcagcagtta

SEQ ID NO: 75228 - DNA, 15 bp, Homo sapiens
gtttcttcagcagtt

SEQ ID NO: 75229 - DNA, 15 bp, Homo sapiens
tgtttcttcagcagt

SEQ ID NO: 75230 - DNA, 15 bp, Homo sapiens
gtgtttcttcagcag

SEQ ID NO: 75231 - DNA, 15 bp, Homo sapiens
agtgtttcttcagca

SEQ ID NO: 75232 - DNA, 15 bp, Homo sapiens
cagtgtttcttcagc

SEQ ID NO: 75233 - DNA, 15 bp, Homo sapiens
acagtgtttcttcag

SEQ ID NO: 75234 - DNA, 15 bp, Homo sapiens
cacagtgtttcttca

SEQ ID NO: 75235 - DNA, 15 bp, Homo sapiens
acacagtgtttcttc

SEQ ID NO: 75236 - DNA, 15 bp, Homo sapiens
tacacagtgtttctt

SEQ ID NO: 75237 - DNA, 15 bp, Homo sapiens
ctacacagtgtttct

SEQ ID NO: 75238 - DNA, 15 bp, Homo sapiens
gctacacagtgtttc

SEQ ID NO: 75239 - DNA, 15 bp, Homo sapiens
agctacacagtgttt

SEQ ID NO: 75240 - DNA, 15 bp, Homo sapiens
gagctacacagtgtt

SEQ ID NO: 75241 - DNA, 15 bp, Homo sapiens
agagctacacagtgt

SEQ ID NO: 75242 - DNA, 15 bp, Homo sapiens
cagagctacacagtg

SEQ ID NO: 75243 - DNA, 15 bp, Homo sapiens
acagagctacacagt

SEQ ID NO: 75244 - DNA, 15 bp, Homo sapiens
aacagagctacacag

SEQ ID NO: 75245 - DNA, 15 bp, Homo sapiens
aaacagagctacaca

SEQ ID NO: 75246 - DNA, 15 bp, Homo sapiens
gaaacagagctacac

SEQ ID NO: 75247 - DNA, 15 bp, Homo sapiens
ggaaacagagctaca

SEQ ID NO: 75248 - DNA, 15 bp, Homo sapiens
aggaaacagagctac

SEQ ID NO: 75249 - DNA, 15 bp, Homo sapiens
gaggaaacagagcta

SEQ ID NO: 75250 - DNA, 15 bp, Homo sapiens
ggaggaaacagagct

SEQ ID NO: 75251 - DNA, 15 bp, Homo sapiens
gggaggaaacagagc

SEQ ID NO: 75252 - DNA, 15 bp, Homo sapiens
ggggaggaaacagag

SEQ ID NO: 75253 - DNA, 15 bp, Homo sapiens
aggggaggaaacaga

SEQ ID NO: 75254 - DNA, 15 bp, Homo sapiens
caggggaggaaacag

SEQ ID NO: 75255 - DNA, 15 bp, Homo sapiens
gcaggggaggaaaca

SEQ ID NO: 75256 - DNA, 15 bp, Homo sapiens
ggcaggggaggaaac

SEQ ID NO: 75257 - DNA, 15 bp, Homo sapiens
gggcaggggaggaaa

SEQ ID NO: 75258 - DNA, 15 bp, Homo sapiens
ggggcaggggaggaa

SEQ ID NO: 75259 - DNA, 15 bp, Homo sapiens
aggggcaggggagga

SEQ ID NO: 75260 - DNA, 15 bp, Homo sapiens
gaggggcaggggagg

SEQ ID NO: 75261 - DNA, 15 bp, Homo sapiens
tgaggggcaggggag

SEQ ID NO: 75262 - DNA, 15 bp, Homo sapiens
ttgaggggcagggga

SEQ ID NO: 75263 - DNA, 15 bp, Homo sapiens
attgaggggcagggg

SEQ ID NO: 75264 - DNA, 15 bp, Homo sapiens
gattgaggggcaggg

SEQ ID NO: 75265 - DNA, 15 bp, Homo sapiens
ggattgaggggcagg

SEQ ID NO: 75266 - DNA, 15 bp, Homo sapiens
aggattgaggggcag

SEQ ID NO: 75267 - DNA, 15 bp, Homo sapiens
caggattgaggggca

SEQ ID NO: 75268 - DNA, 15 bp, Homo sapiens
gcaggattgaggggc

SEQ ID NO: 75269 - DNA, 15 bp, Homo sapiens
agcaggattgagggg

SEQ ID NO: 75270 - DNA, 15 bp, Homo sapiens
aagcaggattgaggg

SEQ ID NO: 75271 - DNA, 15 bp, Homo sapiens
gaagcaggattgagg

SEQ ID NO: 75272 - DNA, 15 bp, Homo sapiens
agaagcaggattgag

SEQ ID NO: 75273 - DNA, 15 bp, Homo sapiens
aagaagcaggattga

SEQ ID NO: 75274 - DNA, 15 bp, Homo sapiens
aaagaagcaggattg

SEQ ID NO: 75275 - DNA, 15 bp, Homo sapiens
gaaagaagcaggatt

SEQ ID NO: 75276 - DNA, 15 bp, Homo sapiens
ggaaagaagcaggat

SEQ ID NO: 75277 - DNA, 15 bp, Homo sapiens
tggaaagaagcagga

SEQ ID NO: 75278 - DNA, 15 bp, Homo sapiens
gtggaaagaagcagg

SEQ ID NO: 75279 - DNA, 15 bp, Homo sapiens
tgtggaaagaagcag

SEQ ID NO: 75280 - DNA, 15 bp, Homo sapiens
atgtggaaagaagca

SEQ ID NO: 75281 - DNA, 15 bp, Homo sapiens
aatgtggaaagaagc

SEQ ID NO: 75282 - DNA, 15 bp, Homo sapiens
aaatgtggaaagaag

SEQ ID NO: 75283 - DNA, 15 bp, Homo sapiens
gaaatgtggaaagaa

SEQ ID NO: 75284 - DNA, 15 bp, Homo sapiens
tgaaatgtggaaaga

SEQ ID NO: 75285 - DNA, 15 bp, Homo sapiens
atgaaatgtggaaag

SEQ ID NO: 75286 - DNA, 15 bp, Homo sapiens
tatgaaatgtggaaa

SEQ ID NO: 75287 - DNA, 15 bp, Homo sapiens
atatgaaatgtggaa

SEQ ID NO: 75288 - DNA, 15 bp, Homo sapiens
catatgaaatgtgga

SEQ ID NO: 75289 - DNA, 15 bp, Homo sapiens
ccatatgaaatgtgg

SEQ ID NO: 75290 - DNA, 15 bp, Homo sapiens
cccatatgaaatgtg

SEQ ID NO: 75291 - DNA, 15 bp, Homo sapiens
tcccatatgaaatgt

SEQ ID NO: 75292 - DNA, 15 bp, Homo sapiens
ctcccatatgaaatg

SEQ ID NO: 75293 - DNA, 15 bp, Homo sapiens
tctcccatatgaaat

SEQ ID NO: 75294 - DNA, 15 bp, Homo sapiens
ttctcccatatgaaa

SEQ ID NO: 75295 - DNA, 15 bp, Homo sapiens
attctcccatatgaa

SEQ ID NO: 75296 - DNA, 15 bp, Homo sapiens
cattctcccatatga

SEQ ID NO: 75297 - DNA, 15 bp, Homo sapiens
ccattctcccatatg

SEQ ID NO: 75298 - DNA, 15 bp, Homo sapiens
accattctcccatat

SEQ ID NO: 75299 - DNA, 15 bp, Homo sapiens
gaccattctcccata

SEQ ID NO: 75300 - DNA, 15 bp, Homo sapiens
tgaccattctcccat

SEQ ID NO: 75301 - DNA, 15 bp, Homo sapiens
ctgaccattctccca

SEQ ID NO: 75302 - DNA, 15 bp, Homo sapiens
actgaccattctccc

SEQ ID NO: 75303 - DNA, 15 bp, Homo sapiens
aactgaccattctcc

SEQ ID NO: 75304 - DNA, 15 bp, Homo sapiens
caactgaccattctc

SEQ ID NO: 75305 - DNA, 15 bp, Homo sapiens
ccaactgaccattct

SEQ ID NO: 75306 - DNA, 15 bp, Homo sapiens
tccaactgaccattc

SEQ ID NO: 75307 - DNA, 15 bp, Homo sapiens
atccaactgaccatt

SEQ ID NO: 75308 - DNA, 15 bp, Homo sapiens
catccaactgaccat

SEQ ID NO: 75309 - DNA, 15 bp, Homo sapiens
ccatccaactgacca

SEQ ID NO: 75310 - DNA, 15 bp, Homo sapiens
tccatccaactgacc

SEQ ID NO: 75311 - DNA, 15 bp, Homo sapiens
ttccatccaactgac

SEQ ID NO: 75312 - DNA, 15 bp, Homo sapiens
attccatccaactga

SEQ ID NO: 75313 - DNA, 15 bp, Homo sapiens
cattccatccaactg

SEQ ID NO: 75314 - DNA, 15 bp, Homo sapiens
tcattccatccaact

SEQ ID NO: 75315 - DNA, 15 bp, Homo sapiens
ttcattccatccaac

SEQ ID NO: 75316 - DNA, 15 bp, Homo sapiens
tttcattccatccaa

SEQ ID NO: 75317 - DNA, 15 bp, Homo sapiens
ttttcattccatcca

SEQ ID NO: 75318 - DNA, 15 bp, Homo sapiens
attttcattccatcc

SEQ ID NO: 75319 - DNA, 15 bp, Homo sapiens
tattttcattccatc

SEQ ID NO: 75320 - DNA, 15 bp, Homo sapiens
ttattttcattccat

SEQ ID NO: 75321 - DNA, 15 bp, Homo sapiens
tttattttcattcca

SEQ ID NO: 75322 - DNA, 15 bp, Homo sapiens
gtttattttcattcc

SEQ ID NO: 75323 - DNA, 15 bp, Homo sapiens
agtttattttcattc

SEQ ID NO: 75324 - DNA, 15 bp, Homo sapiens
aagtttattttcatt

SEQ ID NO: 75325 - DNA, 15 bp, Homo sapiens
aaagtttattttcat

SEQ ID NO: 75326 - DNA, 15 bp, Homo sapiens
aaaagtttattttca

SEQ ID NO: 75327 - DNA, 15 bp, Homo sapiens
gaaaagtttattttc

SEQ ID NO: 75328 - DNA, 15 bp, Homo sapiens
agaaaagtttatttt

SEQ ID NO: 75329 - DNA, 15 bp, Homo sapiens
aagaaaagtttattt

SEQ ID NO: 75330 - DNA, 15 bp, Homo sapiens
taagaaaagtttatt

SEQ ID NO: 75331 - DNA, 15 bp, Homo sapiens
ctaagaaaagtttat

SEQ ID NO: 75332 - DNA, 15 bp, Homo sapiens
tctaagaaaagttta

SEQ ID NO: 75333 - DNA, 15 bp, Homo sapiens
gtctaagaaaagttt

SEQ ID NO: 75334 - DNA, 15 bp, Homo sapiens
tgtctaagaaaagtt

SEQ ID NO: 75335 - DNA, 15 bp, Homo sapiens
ttgtctaagaaaagt

SEQ ID NO: 75336 - DNA, 15 bp, Homo sapiens
cttgtctaagaaaag

SEQ ID NO: 75337 - DNA, 15 bp, Homo sapiens
acttgtctaagaaaa

SEQ ID NO: 75338 - DNA, 15 bp, Homo sapiens
aacttgtctaagaaa

SEQ ID NO: 75339 - DNA, 15 bp, Homo sapiens
taacttgtctaagaa

SEQ ID NO: 75340 - DNA, 15 bp, Homo sapiens
gtaacttgtctaaga

SEQ ID NO: 75341 - DNA, 15 bp, Homo sapiens
tgtaacttgtctaag

SEQ ID NO: 75342 - DNA, 15 bp, Homo sapiens
atgtaacttgtctaa

SEQ ID NO: 75343 - DNA, 15 bp, Homo sapiens
catgtaacttgtcta

SEQ ID NO: 75344 - DNA, 15 bp, Homo sapiens
tcatgtaacttgtct

SEQ ID NO: 75345 - DNA, 15 bp, Homo sapiens
atcatgtaacttgtc

SEQ ID NO: 75346 - DNA, 15 bp, Homo sapiens
tatcatgtaacttgt

SEQ ID NO: 75347 - DNA, 15 bp, Homo sapiens
ctatcatgtaacttg

SEQ ID NO: 75348 - DNA, 15 bp, Homo sapiens
tctatcatgtaactt

SEQ ID NO: 75349 - DNA, 15 bp, Homo sapiens
ttctatcatgtaact

SEQ ID NO: 75350 - DNA, 15 bp, Homo sapiens
tttctatcatgtaac

SEQ ID NO: 75351 - DNA, 15 bp, Homo sapiens
ttttctatcatgtaa

SEQ ID NO: 75352 - DNA, 15 bp, Homo sapiens
gttttctatcatgta

SEQ ID NO: 75353 - DNA, 15 bp, Homo sapiens
tgttttctatcatgt

SEQ ID NO: 75354 - DNA, 15 bp, Homo sapiens
atgttttctatcatg

SEQ ID NO: 75355 - DNA, 15 bp, Homo sapiens
gatgttttctatcat

SEQ ID NO: 75356 - DNA, 15 bp, Homo sapiens
agatgttttctatca

SEQ ID NO: 75357 - DNA, 15 bp, Homo sapiens
aagatgttttctatc

SEQ ID NO: 75358 - DNA, 15 bp, Homo sapiens
caagatgttttctat

SEQ ID NO: 75359 - DNA, 15 bp, Homo sapiens
tcaagatgttttcta

SEQ ID NO: 75360 - DNA, 15 bp, Homo sapiens
ttcaagatgttttct

SEQ ID NO: 75361 - DNA, 15 bp, Homo sapiens
attcaagatgttttc

SEQ ID NO: 75362 - DNA, 15 bp, Homo sapiens
gattcaagatgtttt

SEQ ID NO: 75363 - DNA, 15 bp, Homo sapiens
agattcaagatgttt

SEQ ID NO: 75364 - DNA, 15 bp, Homo sapiens
tagattcaagatgtt

SEQ ID NO: 75365 - DNA, 15 bp, Homo sapiens
ctagattcaagatgt

SEQ ID NO: 75366 - DNA, 15 bp, Homo sapiens
actagattcaagatg

SEQ ID NO: 75367 - DNA, 15 bp, Homo sapiens
aactagattcaagat

SEQ ID NO: 75368 - DNA, 15 bp, Homo sapiens
taactagattcaaga

SEQ ID NO: 75369 - DNA, 15 bp, Homo sapiens
ttaactagattcaag

SEQ ID NO: 75370 - DNA, 15 bp, Homo sapiens
attaactagattcaa

SEQ ID NO: 75371 - DNA, 15 bp, Homo sapiens
tattaactagattca

SEQ ID NO: 75372 - DNA, 15 bp, Homo sapiens
ctattaactagattc

SEQ ID NO: 75373 - DNA, 15 bp, Homo sapiens
actattaactagatt

SEQ ID NO: 75374 - DNA, 15 bp, Homo sapiens
gactattaactagat

SEQ ID NO: 75375 - DNA, 15 bp, Homo sapiens
agactattaactaga

SEQ ID NO: 75376 - DNA, 15 bp, Homo sapiens
aagactattaactag

SEQ ID NO: 75377 - DNA, 15 bp, Homo sapiens
taagactattaacta

SEQ ID NO: 75378 - DNA, 15 bp, Homo sapiens
ctaagactattaact

SEQ ID NO: 75379 - DNA, 15 bp, Homo sapiens
gctaagactattaac

SEQ ID NO: 75380 - DNA, 15 bp, Homo sapiens
agctaagactattaa

SEQ ID NO: 75381 - DNA, 15 bp, Homo sapiens
gagctaagactatta

SEQ ID NO: 75382 - DNA, 15 bp, Homo sapiens
ggagctaagactatt

SEQ ID NO: 75383 - DNA, 15 bp, Homo sapiens
tggagctaagactat

SEQ ID NO: 75384 - DNA, 15 bp, Homo sapiens
atggagctaagacta

SEQ ID NO: 75385 - DNA, 15 bp, Homo sapiens
aatggagctaagact

SEQ ID NO: 75386 - DNA, 15 bp, Homo sapiens
taatggagctaagac

SEQ ID NO: 75387 - DNA, 15 bp, Homo sapiens
ttaatggagctaaga

SEQ ID NO: 75388 - DNA, 15 bp, Homo sapiens
attaatggagctaag

SEQ ID NO: 75389 - DNA, 15 bp, Homo sapiens
aattaatggagctaa

SEQ ID NO: 75390 - DNA, 15 bp, Homo sapiens
caattaatggagcta

SEQ ID NO: 75391 - DNA, 15 bp, Homo sapiens
acaattaatggagct

SEQ ID NO: 75392 - DNA, 15 bp, Homo sapiens
aacaattaatggagc

SEQ ID NO: 75393 - DNA, 15 bp, Homo sapiens
taacaattaatggag

SEQ ID NO: 75394 - DNA, 15 bp, Homo sapiens
ctaacaattaatgga

SEQ ID NO: 75395 - DNA, 15 bp, Homo sapiens
tctaacaattaatgg

SEQ ID NO: 75396 - DNA, 15 bp, Homo sapiens
ttctaacaattaatg

SEQ ID NO: 75397 - DNA, 15 bp, Homo sapiens
attctaacaattaat

SEQ ID NO: 75398 - DNA, 15 bp, Homo sapiens
aattctaacaattaa

SEQ ID NO: 75399 - DNA, 15 bp, Homo sapiens
aaattctaacaatta

SEQ ID NO: 75400 - DNA, 15 bp, Homo sapiens
aaaattctaacaatt

SEQ ID NO: 75401 - DNA, 15 bp, Homo sapiens
caaaattctaacaat

SEQ ID NO: 75402 - DNA, 15 bp, Homo sapiens
acaaaattctaacaa

SEQ ID NO: 75403 - DNA, 15 bp, Homo sapiens
gacaaaattctaaca

SEQ ID NO: 75404 - DNA, 15 bp, Homo sapiens
tgacaaaattctaac

SEQ ID NO: 75405 - DNA, 15 bp, Homo sapiens
ctgacaaaattctaa

SEQ ID NO: 75406 - DNA, 15 bp, Homo sapiens
tctgacaaaattcta

SEQ ID NO: 75407 - DNA, 15 bp, Homo sapiens
ctctgacaaaattct

SEQ ID NO: 75408 - DNA, 15 bp, Homo sapiens
actctgacaaaattc

SEQ ID NO: 75409 - DNA, 15 bp, Homo sapiens
tactctgacaaaatt

SEQ ID NO: 75410 - DNA, 15 bp, Homo sapiens
ctactctgacaaaat

SEQ ID NO: 75411 - DNA, 15 bp, Homo sapiens
tctactctgacaaaa

SEQ ID NO: 75412 - DNA, 15 bp, Homo sapiens
ctctactctgacaaa

SEQ ID NO: 75413 - DNA, 15 bp, Homo sapiens
gctctactctgacaa

SEQ ID NO: 75414 - DNA, 15 bp, Homo sapiens
tgctctactctgaca

SEQ ID NO: 75415 - DNA, 15 bp, Homo sapiens
ctgctctactctgac

SEQ ID NO: 75416 - DNA, 15 bp, Homo sapiens
cctgctctactctga

SEQ ID NO: 75417 - DNA, 15 bp, Homo sapiens
acctgctctactctg

SEQ ID NO: 75418 - DNA, 15 bp, Homo sapiens
tacctgctctactct

SEQ ID NO: 75419 - DNA, 15 bp, Homo sapiens
ctacctgctctactc

SEQ ID NO: 75420 - DNA, 15 bp, Homo sapiens
tctacctgctctact

SEQ ID NO: 75421 - DNA, 15 bp, Homo sapiens
ttctacctgctctac

SEQ ID NO: 75422 - DNA, 15 bp, Homo sapiens
attctacctgctcta

SEQ ID NO: 75423 - DNA, 15 bp, Homo sapiens
aattctacctgctct

SEQ ID NO: 75424 - DNA, 15 bp, Homo sapiens
caattctacctgctc

SEQ ID NO: 75425 - DNA, 15 bp, Homo sapiens
tcaattctacctgct

SEQ ID NO: 75426 - DNA, 15 bp, Homo sapiens
ctcaattctacctgc

SEQ ID NO: 75427 - DNA, 15 bp, Homo sapiens
gctcaattctacctg

SEQ ID NO: 75428 - DNA, 15 bp, Homo sapiens
tgctcaattctacct

SEQ ID NO: 75429 - DNA, 15 bp, Homo sapiens
ctgctcaattctacc

SEQ ID NO: 75430 - DNA, 15 bp, Homo sapiens
actgctcaattctac

SEQ ID NO: 75431 - DNA, 15 bp, Homo sapiens
tactgctcaattcta

SEQ ID NO: 75432 - DNA, 15 bp, Homo sapiens
atactgctcaattct

SEQ ID NO: 75433 - DNA, 15 bp, Homo sapiens
aatactgctcaattc

SEQ ID NO: 75434 - DNA, 15 bp, Homo sapiens
caatactgctcaatt

SEQ ID NO: 75435 - DNA, 15 bp, Homo sapiens
tcaatactgctcaat

SEQ ID NO: 75436 - DNA, 15 bp, Homo sapiens
ttcaatactgctcaa

SEQ ID NO: 75437 - DNA, 15 bp, Homo sapiens
tttcaatactgctca

SEQ ID NO: 75438 - DNA, 15 bp, Homo sapiens
gtttcaatactgctc

SEQ ID NO: 75439 - DNA, 15 bp, Homo sapiens
tgtttcaatactgct

SEQ ID NO: 75440 - DNA, 15 bp, Homo sapiens
ttgtttcaatactgc

SEQ ID NO: 75441 - DNA, 15 bp, Homo sapiens
tttgtttcaatactg

SEQ ID NO: 75442 - DNA, 15 bp, Homo sapiens
ttttgtttcaatact

SEQ ID NO: 75443 - DNA, 15 bp, Homo sapiens
gttttgtttcaatac

SEQ ID NO: 75444 - DNA, 15 bp, Homo sapiens
tgttttgtttcaata

SEQ ID NO: 75445 - DNA, 15 bp, Homo sapiens
ttgttttgtttcaat

SEQ ID NO: 75446 - DNA, 15 bp, Homo sapiens
tttgttttgtttcaa

SEQ ID NO: 75447 - DNA, 15 bp, Homo sapiens
ttttgttttgtttca

SEQ ID NO: 75448 - DNA, 15 bp, Homo sapiens
attttgttttgtttc

SEQ ID NO: 75449 - DNA, 15 bp, Homo sapiens
gattttgttttgttt

SEQ ID NO: 75450 - DNA, 15 bp, Homo sapiens
agattttgttttgtt

SEQ ID NO: 75451 - DNA, 15 bp, Homo sapiens
aagattttgttttgt

SEQ ID NO: 75452 - DNA, 15 bp, Homo sapiens
caagattttgttttg

SEQ ID NO: 75453 - DNA, 15 bp, Homo sapiens
ccaagattttgtttt

SEQ ID NO: 75454 - DNA, 15 bp, Homo sapiens
cccaagattttgttt

SEQ ID NO: 75455 - DNA, 15 bp, Homo sapiens
acccaagattttgtt

SEQ ID NO: 75456 - DNA, 15 bp, Homo sapiens
aacccaagattttgt

SEQ ID NO: 75457 - DNA, 15 bp, Homo sapiens
taacccaagattttg

SEQ ID NO: 75458 - DNA, 15 bp, Homo sapiens
ataacccaagatttt

SEQ ID NO: 75459 - DNA, 15 bp, Homo sapiens
aataacccaagattt

SEQ ID NO: 75460 - DNA, 15 bp, Homo sapiens
taataacccaagatt

SEQ ID NO: 75461 - DNA, 15 bp, Homo sapiens
ctaataacccaagat

SEQ ID NO: 75462 - DNA, 15 bp, Homo sapiens
gctaataacccaaga

SEQ ID NO: 75463 - DNA, 15 bp, Homo sapiens
agctaataacccaag

SEQ ID NO: 75464 - DNA, 15 bp, Homo sapiens
aagctaataacccaa

SEQ ID NO: 75465 - DNA, 15 bp, Homo sapiens
aaagctaataaccca

SEQ ID NO: 75466 - DNA, 15 bp, Homo sapiens
caaagctaataaccc

SEQ ID NO: 75467 - DNA, 15 bp, Homo sapiens
ccaaagctaataacc

SEQ ID NO: 75468 - DNA, 15 bp, Homo sapiens
accaaagctaataac

SEQ ID NO: 75469 - DNA, 15 bp, Homo sapiens
gaccaaagctaataa

SEQ ID NO: 75470 - DNA, 15 bp, Homo sapiens
agaccaaagctaata

SEQ ID NO: 75471 - DNA, 15 bp, Homo sapiens
aagaccaaagctaat

SEQ ID NO: 75472 - DNA, 15 bp, Homo sapiens
caagaccaaagctaa

SEQ ID NO: 75473 - DNA, 15 bp, Homo sapiens
gcaagaccaaagcta

SEQ ID NO: 75474 - DNA, 15 bp, Homo sapiens
agcaagaccaaagct

SEQ ID NO: 75475 - DNA, 15 bp, Homo sapiens
tagcaagaccaaagc

SEQ ID NO: 75476 - DNA, 15 bp, Homo sapiens
atagcaagaccaaag

SEQ ID NO: 75477 - DNA, 15 bp, Homo sapiens
aatagcaagaccaaa

SEQ ID NO: 75478 - DNA, 15 bp, Homo sapiens
gaatagcaagaccaa

SEQ ID NO: 75479 - DNA, 15 bp, Homo sapiens
tgaatagcaagacca

SEQ ID NO: 75480 - DNA, 15 bp, Homo sapiens
gtgaatagcaagacc

SEQ ID NO: 75481 - DNA, 15 bp, Homo sapiens
tgtgaatagcaagac

SEQ ID NO: 75482 - DNA, 15 bp, Homo sapiens
ctgtgaatagcaaga

SEQ ID NO: 75483 - DNA, 15 bp, Homo sapiens
actgtgaatagcaag

SEQ ID NO: 75484 - DNA, 15 bp, Homo sapiens
cactgtgaatagcaa

SEQ ID NO: 75485 - DNA, 15 bp, Homo sapiens
acactgtgaatagca

SEQ ID NO: 75486 - DNA, 15 bp, Homo sapiens
cacactgtgaatagc

SEQ ID NO: 75487 - DNA, 15 bp, Homo sapiens
acacactgtgaatag

SEQ ID NO: 75488 - DNA, 15 bp, Homo sapiens
cacacactgtgaata

SEQ ID NO: 75489 - DNA, 15 bp, Homo sapiens
tcacacactgtgaat

SEQ ID NO: 75490 - DNA, 15 bp, Homo sapiens
ctcacacactgtgaa

SEQ ID NO: 75491 - DNA, 15 bp, Homo sapiens
cctcacacactgtga

SEQ ID NO: 75492 - DNA, 15 bp, Homo sapiens
gcctcacacactgtg

SEQ ID NO: 75493 - DNA, 15 bp, Homo sapiens
agcctcacacactgt

SEQ ID NO: 75494 - DNA, 15 bp, Homo sapiens
cagcctcacacactg

SEQ ID NO: 75495 - DNA, 15 bp, Homo sapiens
ccagcctcacacact

SEQ ID NO: 75496 - DNA, 15 bp, Homo sapiens
tccagcctcacacac

SEQ ID NO: 75497 - DNA, 15 bp, Homo sapiens
ctccagcctcacaca

SEQ ID NO: 75498 - DNA, 15 bp, Homo sapiens
tctccagcctcacac

SEQ ID NO: 75499 - DNA, 15 bp, Homo sapiens
ttctccagcctcaca

SEQ ID NO: 75500 - DNA, 15 bp, Homo sapiens
cttctccagcctcac

SEQ ID NO: 75501 - DNA, 15 bp, Homo sapiens
tcttctccagcctca

SEQ ID NO: 75502 - DNA, 15 bp, Homo sapiens
atcttctccagcctc

SEQ ID NO: 75503 - DNA, 15 bp, Homo sapiens
gatcttctccagcct

SEQ ID NO: 75504 - DNA, 15 bp, Homo sapiens
ggatcttctccagcc

SEQ ID NO: 75505 - DNA, 15 bp, Homo sapiens
gggatcttctccagc

SEQ ID NO: 75506 - DNA, 15 bp, Homo sapiens
ggggatcttctccag

SEQ ID NO: 75507 - DNA, 15 bp, Homo sapiens
tggggatcttctcca

SEQ ID NO: 75508 - DNA, 15 bp, Homo sapiens
ttggggatcttctcc

SEQ ID NO: 75509 - DNA, 15 bp, Homo sapiens
gttggggatcttctc

SEQ ID NO: 75510 - DNA, 15 bp, Homo sapiens
agttggggatcttct

SEQ ID NO: 75511 - DNA, 15 bp, Homo sapiens
aagttggggatcttc

SEQ ID NO: 75512 - DNA, 15 bp, Homo sapiens
gaagttggggatctt

SEQ ID NO: 75513 - DNA, 15 bp, Homo sapiens
agaagttggggatct

SEQ ID NO: 75514 - DNA, 15 bp, Homo sapiens
gagaagttggggatc

SEQ ID NO: 75515 - DNA, 15 bp, Homo sapiens
agagaagttggggat

SEQ ID NO: 75516 - DNA, 15 bp, Homo sapiens
tagagaagttgggga

SEQ ID NO: 75517 - DNA, 15 bp, Homo sapiens
ctagagaagttgggg

SEQ ID NO: 75518 - DNA, 15 bp, Homo sapiens
actagagaagttggg

SEQ ID NO: 75519 - DNA, 15 bp, Homo sapiens
gactagagaagttgg

SEQ ID NO: 75520 - DNA, 15 bp, Homo sapiens
ggactagagaagttg

SEQ ID NO: 75521 - DNA, 15 bp, Homo sapiens
aggactagagaagtt

SEQ ID NO: 75522 - DNA, 15 bp, Homo sapiens
gaggactagagaagt

SEQ ID NO: 75523 - DNA, 15 bp, Homo sapiens
tgaggactagagaag

SEQ ID NO: 75524 - DNA, 15 bp, Homo sapiens
atgaggactagagaa

SEQ ID NO: 75525 - DNA, 15 bp, Homo sapiens
catgaggactagaga

SEQ ID NO: 75526 - DNA, 15 bp, Homo sapiens
acatgaggactagag

SEQ ID NO: 75527 - DNA, 15 bp, Homo sapiens
gacatgaggactaga

SEQ ID NO: 75528 - DNA, 15 bp, Homo sapiens
ggacatgaggactag

SEQ ID NO: 75529 - DNA, 15 bp, Homo sapiens
aggacatgaggacta

SEQ ID NO: 75530 - DNA, 15 bp, Homo sapiens
taggacatgaggact

SEQ ID NO: 75531 - DNA, 15 bp, Homo sapiens
gtaggacatgaggac

SEQ ID NO: 75532 - DNA, 15 bp, Homo sapiens
ggtaggacatgagga

SEQ ID NO: 75533 - DNA, 15 bp, Homo sapiens
aggtaggacatgagg

SEQ ID NO: 75534 - DNA, 15 bp, Homo sapiens
aaggtaggacatgag

SEQ ID NO: 75535 - DNA, 15 bp, Homo sapiens
taaggtaggacatga

SEQ ID NO: 75536 - DNA, 15 bp, Homo sapiens
ctaaggtaggacatg

SEQ ID NO: 75537 - DNA, 15 bp, Homo sapiens
actaaggtaggacat

SEQ ID NO: 75538 - DNA, 15 bp, Homo sapiens
tactaaggtaggaca

SEQ ID NO: 75539 - DNA, 15 bp, Homo sapiens
ttactaaggtaggac

SEQ ID NO: 75540 - DNA, 15 bp, Homo sapiens
tttactaaggtagga

SEQ ID NO: 75541 - DNA, 15 bp, Homo sapiens
ttttactaaggtagg

SEQ ID NO: 75542 - DNA, 15 bp, Homo sapiens
attttactaaggtag

SEQ ID NO: 75543 - DNA, 15 bp, Homo sapiens
cattttactaaggta

SEQ ID NO: 75544 - DNA, 15 bp, Homo sapiens
tcattttactaaggt

SEQ ID NO: 75545 - DNA, 15 bp, Homo sapiens
ctcattttactaagg

SEQ ID NO: 75546 - DNA, 15 bp, Homo sapiens
tctcattttactaag

SEQ ID NO: 75547 - DNA, 15 bp, Homo sapiens
ttctcattttactaa

SEQ ID NO: 75548 - DNA, 15 bp, Homo sapiens
tttctcattttacta

SEQ ID NO: 75549 - DNA, 15 bp, Homo sapiens
atttctcattttact

SEQ ID NO: 75550 - DNA, 15 bp, Homo sapiens
aatttctcattttac

SEQ ID NO: 75551 - DNA, 15 bp, Homo sapiens
caatttctcatttta

SEQ ID NO: 75552 - DNA, 15 bp, Homo sapiens
acaatttctcatttt

SEQ ID NO: 75553 - DNA, 15 bp, Homo sapiens
tacaatttctcattt

SEQ ID NO: 75554 - DNA, 15 bp, Homo sapiens
gtacaatttctcatt

SEQ ID NO: 75555 - DNA, 15 bp, Homo sapiens
ggtacaatttctcat

SEQ ID NO: 75556 - DNA, 15 bp, Homo sapiens
tggtacaatttctca

SEQ ID NO: 75557 - DNA, 15 bp, Homo sapiens
ctggtacaatttctc

SEQ ID NO: 75558 - DNA, 15 bp, Homo sapiens
tctggtacaatttct

SEQ ID NO: 75559 - DNA, 15 bp, Homo sapiens
atctggtacaatttc

SEQ ID NO: 75560 - DNA, 15 bp, Homo sapiens
tatctggtacaattt

SEQ ID NO: 75561 - DNA, 15 bp, Homo sapiens
gtatctggtacaatt

SEQ ID NO: 75562 - DNA, 15 bp, Homo sapiens
agtatctggtacaat

SEQ ID NO: 75563 - DNA, 15 bp, Homo sapiens
cagtatctggtacaa

SEQ ID NO: 75564 - DNA, 15 bp, Homo sapiens
gcagtatctggtaca

SEQ ID NO: 75565 - DNA, 15 bp, Homo sapiens
ggcagtatctggtac

SEQ ID NO: 75566 - DNA, 15 bp, Homo sapiens
gggcagtatctggta

SEQ ID NO: 75567 - DNA, 15 bp, Homo sapiens
ggggcagtatctggt

SEQ ID NO: 75568 - DNA, 15 bp, Homo sapiens
tggggcagtatctgg

SEQ ID NO: 75569 - DNA, 15 bp, Homo sapiens
ttggggcagtatctg

SEQ ID NO: 75570 - DNA, 15 bp, Homo sapiens
cttggggcagtatct

SEQ ID NO: 75571 - DNA, 15 bp, Homo sapiens
acttggggcagtatc

SEQ ID NO: 75572 - DNA, 15 bp, Homo sapiens
aacttggggcagtat

SEQ ID NO: 75573 - DNA, 15 bp, Homo sapiens
gaacttggggcagta

SEQ ID NO: 75574 - DNA, 15 bp, Homo sapiens
ggaacttggggcagt

SEQ ID NO: 75575 - DNA, 15 bp, Homo sapiens
aggaacttggggcag

SEQ ID NO: 75576 - DNA, 15 bp, Homo sapiens
aaggaacttggggca

SEQ ID NO: 75577 - DNA, 15 bp, Homo sapiens
gaaggaacttggggc

SEQ ID NO: 75578 - DNA, 15 bp, Homo sapiens
ggaaggaacttgggg

SEQ ID NO: 75579 - DNA, 15 bp, Homo sapiens
tggaaggaacttggg

SEQ ID NO: 75580 - DNA, 15 bp, Homo sapiens
ctggaaggaacttgg

SEQ ID NO: 75581 - DNA, 15 bp, Homo sapiens
gctggaaggaacttg

SEQ ID NO: 75582 - DNA, 15 bp, Homo sapiens
agctggaaggaactt

SEQ ID NO: 75583 - DNA, 15 bp, Homo sapiens
tagctggaaggaact

SEQ ID NO: 75584 - DNA, 15 bp, Homo sapiens
ttagctggaaggaac

SEQ ID NO: 75585 - DNA, 15 bp, Homo sapiens
tttagctggaaggaa

SEQ ID NO: 75586 - DNA, 15 bp, Homo sapiens
ttttagctggaagga

SEQ ID NO: 75587 - DNA, 15 bp, Homo sapiens
gttttagctggaagg

SEQ ID NO: 75588 - DNA, 15 bp, Homo sapiens
ggttttagctggaag

SEQ ID NO: 75589 - DNA, 15 bp, Homo sapiens
gggttttagctggaa

SEQ ID NO: 75590 - DNA, 15 bp, Homo sapiens
agggttttagctgga

SEQ ID NO: 75591 - DNA, 15 bp, Homo sapiens
cagggttttagctgg

SEQ ID NO: 75592 - DNA, 15 bp, Homo sapiens
acagggttttagctg

SEQ ID NO: 75593 - DNA, 15 bp, Homo sapiens
aacagggttttagct

SEQ ID NO: 75594 - DNA, 15 bp, Homo sapiens
taacagggttttagc

SEQ ID NO: 75595 - DNA, 15 bp, Homo sapiens
ataacagggttttag

SEQ ID NO: 75596 - DNA, 15 bp, Homo sapiens
aataacagggtttta

SEQ ID NO: 75597 - DNA, 15 bp, Homo sapiens
gaataacagggtttt

SEQ ID NO: 75598 - DNA, 15 bp, Homo sapiens
agaataacagggttt

SEQ ID NO: 75599 - DNA, 15 bp, Homo sapiens
tagaataacagggtt

SEQ ID NO: 75600 - DNA, 15 bp, Homo sapiens
ttagaataacagggt

SEQ ID NO: 75601 - DNA, 15 bp, Homo sapiens
cttagaataacaggg

SEQ ID NO: 75602 - DNA, 15 bp, Homo sapiens
gcttagaataacagg

SEQ ID NO: 75603 - DNA, 15 bp, Homo sapiens
tgcttagaataacag

SEQ ID NO: 75604 - DNA, 15 bp, Homo sapiens
atgcttagaataaca

SEQ ID NO: 75605 - DNA, 15 bp, Homo sapiens
gatgcttagaataac

SEQ ID NO: 75606 - DNA, 15 bp, Homo sapiens
tgatgcttagaataa

SEQ ID NO: 75607 - DNA, 15 bp, Homo sapiens
ctgatgcttagaata

SEQ ID NO: 75608 - DNA, 15 bp, Homo sapiens
tctgatgcttagaat

SEQ ID NO: 75609 - DNA, 15 bp, Homo sapiens
ctctgatgcttagaa

SEQ ID NO: 75610 - DNA, 15 bp, Homo sapiens
tctctgatgcttaga

SEQ ID NO: 75611 - DNA, 15 bp, Homo sapiens
atctctgatgcttag

SEQ ID NO: 75612 - DNA, 15 bp, Homo sapiens
aatctctgatgctta

SEQ ID NO: 75613 - DNA, 15 bp, Homo sapiens
caatctctgatgctt

SEQ ID NO: 75614 - DNA, 15 bp, Homo sapiens
tcaatctctgatgct

SEQ ID NO: 75615 - DNA, 15 bp, Homo sapiens
ttcaatctctgatgc

SEQ ID NO: 75616 - DNA, 15 bp, Homo sapiens
attcaatctctgatg

SEQ ID NO: 75617 - DNA, 15 bp, Homo sapiens
tattcaatctctgat

SEQ ID NO: 75618 - DNA, 15 bp, Homo sapiens
ttattcaatctctga

SEQ ID NO: 75619 - DNA, 15 bp, Homo sapiens
gttattcaatctctg

SEQ ID NO: 75620 - DNA, 15 bp, Homo sapiens
agttattcaatctct

SEQ ID NO: 75621 - DNA, 15 bp, Homo sapiens
gagttattcaatctc

SEQ ID NO: 75622 - DNA, 15 bp, Homo sapiens
tgagttattcaatct

SEQ ID NO: 75623 - DNA, 15 bp, Homo sapiens
ctgagttattcaatc

SEQ ID NO: 75624 - DNA, 15 bp, Homo sapiens
tctgagttattcaat

SEQ ID NO: 75625 - DNA, 15 bp, Homo sapiens
gtctgagttattcaa

SEQ ID NO: 75626 - DNA, 15 bp, Homo sapiens
agtctgagttattca

SEQ ID NO: 75627 - DNA, 15 bp, Homo sapiens
cagtctgagttattc

SEQ ID NO: 75628 - DNA, 15 bp, Homo sapiens
ccagtctgagttatt

SEQ ID NO: 75629 - DNA, 15 bp, Homo sapiens
gccagtctgagttat

SEQ ID NO: 75630 - DNA, 15 bp, Homo sapiens
ggccagtctgagtta

SEQ ID NO: 75631 - DNA, 15 bp, Homo sapiens
tggccagtctgagtt

SEQ ID NO: 75632 - DNA, 15 bp, Homo sapiens
ctggccagtctgagt

SEQ ID NO: 75633 - DNA, 15 bp, Homo sapiens
actggccagtctgag

SEQ ID NO: 75634 - DNA, 15 bp, Homo sapiens
aactggccagtctga

SEQ ID NO: 75635 - DNA, 15 bp, Homo sapiens
aaactggccagtctg

SEQ ID NO: 75636 - DNA, 15 bp, Homo sapiens
taaactggccagtct

SEQ ID NO: 75637 - DNA, 15 bp, Homo sapiens
ttaaactggccagtc

SEQ ID NO: 75638 - DNA, 15 bp, Homo sapiens
tttaaactggccagt

SEQ ID NO: 75639 - DNA, 15 bp, Homo sapiens
atttaaactggccag

SEQ ID NO: 75640 - DNA, 15 bp, Homo sapiens
aatttaaactggcca

SEQ ID NO: 75641 - DNA, 15 bp, Homo sapiens
aaatttaaactggcc

SEQ ID NO: 75642 - DNA, 15 bp, Homo sapiens
aaaatttaaactggc

SEQ ID NO: 75643 - DNA, 15 bp, Homo sapiens
aaaaatttaaactgg

SEQ ID NO: 75644 - DNA, 15 bp, Homo sapiens
aaaaaatttaaactg

SEQ ID NO: 75645 - DNA, 15 bp, Homo sapiens
aaaaaaatttaaact

SEQ ID NO: 75646 - DNA, 15 bp, Homo sapiens
taaaaaaatttaaac

SEQ ID NO: 75647 - DNA, 15 bp, Homo sapiens
ctaaaaaaatttaaa

SEQ ID NO: 75648 - DNA, 15 bp, Homo sapiens
actaaaaaaatttaa

SEQ ID NO: 75649 - DNA, 15 bp, Homo sapiens
tactaaaaaaattta

SEQ ID NO: 75650 - DNA, 15 bp, Homo sapiens
ctactaaaaaaattt

SEQ ID NO: 75651 - DNA, 15 bp, Homo sapiens
gctactaaaaaaatt

SEQ ID NO: 75652 - DNA, 15 bp, Homo sapiens
agctactaaaaaaat

SEQ ID NO: 75653 - DNA, 15 bp, Homo sapiens
tagctactaaaaaaa

SEQ ID NO: 75654 - DNA, 15 bp, Homo sapiens
gtagctactaaaaaa

SEQ ID NO: 75655 - DNA, 15 bp, Homo sapiens
agtagctactaaaaa

SEQ ID NO: 75656 - DNA, 15 bp, Homo sapiens
aagtagctactaaaa

SEQ ID NO: 75657 - DNA, 15 bp, Homo sapiens
aaagtagctactaaa

SEQ ID NO: 75658 - DNA, 15 bp, Homo sapiens
taaagtagctactaa

SEQ ID NO: 75659 - DNA, 15 bp, Homo sapiens
ttaaagtagctacta

SEQ ID NO: 75660 - DNA, 15 bp, Homo sapiens
gttaaagtagctact

SEQ ID NO: 75661 - DNA, 15 bp, Homo sapiens
ggttaaagtagctac

SEQ ID NO: 75662 - DNA, 15 bp, Homo sapiens
aggttaaagtagcta

SEQ ID NO: 75663 - DNA, 15 bp, Homo sapiens
taggttaaagtagct

SEQ ID NO: 75664 - DNA, 15 bp, Homo sapiens
ttaggttaaagtagc

SEQ ID NO: 75665 - DNA, 15 bp, Homo sapiens
attaggttaaagtag

SEQ ID NO: 75666 - DNA, 15 bp, Homo sapiens
tattaggttaaagta

SEQ ID NO: 75667 - DNA, 15 bp, Homo sapiens
ctattaggttaaagt

SEQ ID NO: 75668 - DNA, 15 bp, Homo sapiens
cctattaggttaaag

SEQ ID NO: 75669 - DNA, 15 bp, Homo sapiens
ccctattaggttaaa

SEQ ID NO: 75670 - DNA, 15 bp, Homo sapiens
accctattaggttaa

SEQ ID NO: 75671 - DNA, 15 bp, Homo sapiens
aaccctattaggtta

SEQ ID NO: 75672 - DNA, 15 bp, Homo sapiens
taaccctattaggtt

SEQ ID NO: 75673 - DNA, 15 bp, Homo sapiens
ataaccctattaggt

SEQ ID NO: 75674 - DNA, 15 bp, Homo sapiens
cataaccctattagg

SEQ ID NO: 75675 - DNA, 15 bp, Homo sapiens
tcataaccctattag

SEQ ID NO: 75676 - DNA, 15 bp, Homo sapiens
ttcataaccctatta

SEQ ID NO: 75677 - DNA, 15 bp, Homo sapiens
tttcataaccctatt

SEQ ID NO: 75678 - DNA, 15 bp, Homo sapiens
atttcataaccctat

SEQ ID NO: 75679 - DNA, 15 bp, Homo sapiens
tatttcataacccta

SEQ ID NO: 75680 - DNA, 15 bp, Homo sapiens
atatttcataaccct

SEQ ID NO: 75681 - DNA, 15 bp, Homo sapiens
catatttcataaccc

SEQ ID NO: 75682 - DNA, 15 bp, Homo sapiens
tcatatttcataacc

SEQ ID NO: 75683 - DNA, 15 bp, Homo sapiens
ttcatatttcataac

SEQ ID NO: 75684 - DNA, 15 bp, Homo sapiens
tttcatatttcataa

SEQ ID NO: 75685 - DNA, 15 bp, Homo sapiens
ctttcatatttcata

SEQ ID NO: 75686 - DNA, 15 bp, Homo sapiens
tctttcatatttcat

SEQ ID NO: 75687 - DNA, 15 bp, Homo sapiens
atctttcatatttca

SEQ ID NO: 75688 - DNA, 15 bp, Homo sapiens
aatctttcatatttc

SEQ ID NO: 75689 - DNA, 15 bp, Homo sapiens
taatctttcatattt

SEQ ID NO: 75690 - DNA, 15 bp, Homo sapiens
ttaatctttcatatt

SEQ ID NO: 75691 - DNA, 15 bp, Homo sapiens
tttaatctttcatat

SEQ ID NO: 75692 - DNA, 15 bp, Homo sapiens
atttaatctttcata

SEQ ID NO: 75693 - DNA, 15 bp, Homo sapiens
tatttaatctttcat

SEQ ID NO: 75694 - DNA, 15 bp, Homo sapiens
atatttaatctttca

SEQ ID NO: 75695 - DNA, 15 bp, Homo sapiens
catatttaatctttc

SEQ ID NO: 75696 - DNA, 15 bp, Homo sapiens
tcatatttaatcttt

SEQ ID NO: 75697 - DNA, 15 bp, Homo sapiens
ttcatatttaatctt

SEQ ID NO: 75698 - DNA, 15 bp, Homo sapiens
tttcatatttaatct

SEQ ID NO: 75699 - DNA, 15 bp, Homo sapiens
atttcatatttaatc

SEQ ID NO: 75700 - DNA, 15 bp, Homo sapiens
tatttcatatttaat

SEQ ID NO: 75701 - DNA, 15 bp, Homo sapiens
atatttcatatttaa

SEQ ID NO: 75702 - DNA, 15 bp, Homo sapiens
catatttcatattta

SEQ ID NO: 75703 - DNA, 15 bp, Homo sapiens
tcatatttcatattt

SEQ ID NO: 75704 - DNA, 15 bp, Homo sapiens
ttcatatttcatatt

SEQ ID NO: 75705 - DNA, 15 bp, Homo sapiens
tttcatatttcatat

SEQ ID NO: 75706 - DNA, 15 bp, Homo sapiens
aaatctttcatattt

SEQ ID NO: 75707 - DNA, 15 bp, Homo sapiens
aaaatctttcatatt

SEQ ID NO: 75708 - DNA, 15 bp, Homo sapiens
taaaatctttcatat

SEQ ID NO: 75709 - DNA, 15 bp, Homo sapiens
ttaaaatctttcata

SEQ ID NO: 75710 - DNA, 15 bp, Homo sapiens
tttaaaatctttcat

SEQ ID NO: 75711 - DNA, 15 bp, Homo sapiens
atttaaaatctttca

SEQ ID NO: 75712 - DNA, 15 bp, Homo sapiens
tatttaaaatctttc

SEQ ID NO: 75713 - DNA, 15 bp, Homo sapiens
atatttaaaatcttt

SEQ ID NO: 75714 - DNA, 15 bp, Homo sapiens
catatttaaaatctt

SEQ ID NO: 75715 - DNA, 15 bp, Homo sapiens
tcatatttaaaatct

SEQ ID NO: 75716 - DNA, 15 bp, Homo sapiens
ttcatatttaaaatc

SEQ ID NO: 75717 - DNA, 15 bp, Homo sapiens
tttcatatttaaaat

SEQ ID NO: 75718 - DNA, 15 bp, Homo sapiens
ctttcatatttaaaa

SEQ ID NO: 75719 - DNA, 15 bp, Homo sapiens
tctttcatatttaaa

SEQ ID NO: 75720 - DNA, 15 bp, Homo sapiens
atctttcatatttaa

SEQ ID NO: 75721 - DNA, 15 bp, Homo sapiens
aatctttcatattta

SEQ ID NO: 75722 - DNA, 15 bp, Homo sapiens
ttttaatctttcata

SEQ ID NO: 75723 - DNA, 15 bp, Homo sapiens
tttttaatctttcat

SEQ ID NO: 75724 - DNA, 15 bp, Homo sapiens
atttttaatctttca

SEQ ID NO: 75725 - DNA, 15 bp, Homo sapiens
catttttaatctttc

SEQ ID NO: 75726 - DNA, 15 bp, Homo sapiens
acatttttaatcttt

SEQ ID NO: 75727 - DNA, 15 bp, Homo sapiens
aacatttttaatctt

SEQ ID NO: 75728 - DNA, 15 bp, Homo sapiens
aaacatttttaatct

SEQ ID NO: 75729 - DNA, 15 bp, Homo sapiens
aaaacatttttaatc

SEQ ID NO: 75730 - DNA, 15 bp, Homo sapiens
taaaacatttttaat

SEQ ID NO: 75731 - DNA, 15 bp, Homo sapiens
ttaaaacatttttaa

SEQ ID NO: 75732 - DNA, 15 bp, Homo sapiens
tttaaaacattttta

SEQ ID NO: 75733 - DNA, 15 bp, Homo sapiens
atttaaaacattttt

SEQ ID NO: 75734 - DNA, 15 bp, Homo sapiens
catttaaaacatttt

SEQ ID NO: 75735 - DNA, 15 bp, Homo sapiens
acatttaaaacattt

SEQ ID NO: 75736 - DNA, 15 bp, Homo sapiens
aacatttaaaacatt

SEQ ID NO: 75737 - DNA, 15 bp, Homo sapiens
taacatttaaaacat

SEQ ID NO: 75738 - DNA, 15 bp, Homo sapiens
ttaacatttaaaaca

SEQ ID NO: 75739 - DNA, 15 bp, Homo sapiens
attaacatttaaaac

SEQ ID NO: 75740 - DNA, 15 bp, Homo sapiens
tattaacatttaaaa

SEQ ID NO: 75741 - DNA, 15 bp, Homo sapiens
atattaacatttaaa

SEQ ID NO: 75742 - DNA, 15 bp, Homo sapiens
gatattaacatttaa

SEQ ID NO: 75743 - DNA, 15 bp, Homo sapiens
tgatattaacattta

SEQ ID NO: 75744 - DNA, 15 bp, Homo sapiens
ctgatattaacattt

SEQ ID NO: 75745 - DNA, 15 bp, Homo sapiens
gctgatattaacatt

SEQ ID NO: 75746 - DNA, 15 bp, Homo sapiens
tgctgatattaacat

SEQ ID NO: 75747 - DNA, 15 bp, Homo sapiens
ctgctgatattaaca

SEQ ID NO: 75748 - DNA, 15 bp, Homo sapiens
actgctgatattaac

SEQ ID NO: 75749 - DNA, 15 bp, Homo sapiens
aactgctgatattaa

SEQ ID NO: 75750 - DNA, 15 bp, Homo sapiens
gaactgctgatatta

SEQ ID NO: 75751 - DNA, 15 bp, Homo sapiens
tgaactgctgatatt

SEQ ID NO: 75752 - DNA, 15 bp, Homo sapiens
ttgaactgctgatat

SEQ ID NO: 75753 - DNA, 15 bp, Homo sapiens
attgaactgctgata

SEQ ID NO: 75754 - DNA, 15 bp, Homo sapiens
gattgaactgctgat

SEQ ID NO: 75755 - DNA, 15 bp, Homo sapiens
tgattgaactgctga

SEQ ID NO: 75756 - DNA, 15 bp, Homo sapiens
atgattgaactgctg

SEQ ID NO: 75757 - DNA, 15 bp, Homo sapiens
tatgattgaactgct

SEQ ID NO: 75758 - DNA, 15 bp, Homo sapiens
ctatgattgaactgc

SEQ ID NO: 75759 - DNA, 15 bp, Homo sapiens
actatgattgaactg

SEQ ID NO: 75760 - DNA, 15 bp, Homo sapiens
aactatgattgaact

SEQ ID NO: 75761 - DNA, 15 bp, Homo sapiens
aaactatgattgaac

SEQ ID NO: 75762 - DNA, 15 bp, Homo sapiens
taaactatgattgaa

SEQ ID NO: 75763 - DNA, 15 bp, Homo sapiens
ttaaactatgattga

SEQ ID NO: 75764 - DNA, 15 bp, Homo sapiens
attaaactatgattg

SEQ ID NO: 75765 - DNA, 15 bp, Homo sapiens
tattaaactatgatt

SEQ ID NO: 75766 - DNA, 15 bp, Homo sapiens
atattaaactatgat

SEQ ID NO: 75767 - DNA, 15 bp, Homo sapiens
aatattaaactatga

SEQ ID NO: 75768 - DNA, 15 bp, Homo sapiens
caatattaaactatg

SEQ ID NO: 75769 - DNA, 15 bp, Homo sapiens
acaatattaaactat

SEQ ID NO: 75770 - DNA, 15 bp, Homo sapiens
aacaatattaaacta

SEQ ID NO: 75771 - DNA, 15 bp, Homo sapiens
aaacaatattaaact

SEQ ID NO: 75772 - DNA, 15 bp, Homo sapiens
taaacaatattaaac

SEQ ID NO: 75773 - DNA, 15 bp, Homo sapiens
gtaaacaatattaaa

SEQ ID NO: 75774 - DNA, 15 bp, Homo sapiens
agtaaacaatattaa

SEQ ID NO: 75775 - DNA, 15 bp, Homo sapiens
gagtaaacaatatta

SEQ ID NO: 75776 - DNA, 15 bp, Homo sapiens
tgagtaaacaatatt

SEQ ID NO: 75777 - DNA, 15 bp, Homo sapiens
ctgagtaaacaatat

SEQ ID NO: 75778 - DNA, 15 bp, Homo sapiens
actgagtaaacaata

SEQ ID NO: 75779 - DNA, 15 bp, Homo sapiens
gactgagtaaacaat

SEQ ID NO: 75780 - DNA, 15 bp, Homo sapiens
tgactgagtaaacaa

SEQ ID NO: 75781 - DNA, 15 bp, Homo sapiens
ctgactgagtaaaca

SEQ ID NO: 75782 - DNA, 15 bp, Homo sapiens
gctgactgagtaaac

SEQ ID NO: 75783 - DNA, 15 bp, Homo sapiens
tgctgactgagtaaa

SEQ ID NO: 75784 - DNA, 15 bp, Homo sapiens
gtgctgactgagtaa

SEQ ID NO: 75785 - DNA, 15 bp, Homo sapiens
agtgctgactgagta

SEQ ID NO: 75786 - DNA, 15 bp, Homo sapiens
aagtgctgactgagt

SEQ ID NO: 75787 - DNA, 15 bp, Homo sapiens
caagtgctgactgag

SEQ ID NO: 75788 - DNA, 15 bp, Homo sapiens
gcaagtgctgactga

SEQ ID NO: 75789 - DNA, 15 bp, Homo sapiens
agcaagtgctgactg

SEQ ID NO: 75790 - DNA, 15 bp, Homo sapiens
aagcaagtgctgact

SEQ ID NO: 75791 - DNA, 15 bp, Homo sapiens
taagcaagtgctgac

SEQ ID NO: 75792 - DNA, 15 bp, Homo sapiens
ttaagcaagtgctga

SEQ ID NO: 75793 - DNA, 15 bp, Homo sapiens
cttaagcaagtgctg

SEQ ID NO: 75794 - DNA, 15 bp, Homo sapiens
tcttaagcaagtgct

SEQ ID NO: 75795 - DNA, 15 bp, Homo sapiens
ctcttaagcaagtgc

SEQ ID NO: 75796 - DNA, 15 bp, Homo sapiens
actcttaagcaagtg

SEQ ID NO: 75797 - DNA, 15 bp, Homo sapiens
gactcttaagcaagt

SEQ ID NO: 75798 - DNA, 15 bp, Homo sapiens
cgactcttaagcaag

SEQ ID NO: 75799 - DNA, 15 bp, Homo sapiens
ccgactcttaagcaa

SEQ ID NO: 75800 - DNA, 15 bp, Homo sapiens
tccgactcttaagca

SEQ ID NO: 75801 - DNA, 15 bp, Homo sapiens
ttccgactcttaagc

SEQ ID NO: 75802 - DNA, 15 bp, Homo sapiens
tttccgactcttaag

SEQ ID NO: 75803 - DNA, 15 bp, Homo sapiens
ctttccgactcttaa

SEQ ID NO: 75804 - DNA, 15 bp, Homo sapiens
tctttccgactctta

SEQ ID NO: 75805 - DNA, 15 bp, Homo sapiens
ttctttccgactctt

SEQ ID NO: 75806 - DNA, 15 bp, Homo sapiens
cttctttccgactct

SEQ ID NO: 75807 - DNA, 15 bp, Homo sapiens
ccttctttccgactc

SEQ ID NO: 75808 - DNA, 15 bp, Homo sapiens
accttctttccgact

SEQ ID NO: 75809 - DNA, 15 bp, Homo sapiens
aaccttctttccgac

SEQ ID NO: 75810 - DNA, 15 bp, Homo sapiens
gaaccttctttccga

SEQ ID NO: 75811 - DNA, 15 bp, Homo sapiens
agaaccttctttccg

SEQ ID NO: 75812 - DNA, 15 bp, Homo sapiens
tagaaccttctttcc

SEQ ID NO: 75813 - DNA, 15 bp, Homo sapiens
ctagaaccttctttc

SEQ ID NO: 75814 - DNA, 15 bp, Homo sapiens
tctagaaccttcttt

SEQ ID NO: 75815 - DNA, 15 bp, Homo sapiens
ttctagaaccttctt

SEQ ID NO: 75816 - DNA, 15 bp, Homo sapiens
tttctagaaccttct

SEQ ID NO: 75817 - DNA, 15 bp, Homo sapiens
ttttctagaaccttc

SEQ ID NO: 75818 - DNA, 15 bp, Homo sapiens
tttttctagaacctt

SEQ ID NO: 75819 - DNA, 15 bp, Homo sapiens
gtttttctagaacct

SEQ ID NO: 75820 - DNA, 15 bp, Homo sapiens
ggtttttctagaacc

SEQ ID NO: 75821 - DNA, 15 bp, Homo sapiens
gggtttttctagaac

SEQ ID NO: 75822 - DNA, 15 bp, Homo sapiens
ggggtttttctagaa

SEQ ID NO: 75823 - DNA, 15 bp, Homo sapiens
tggggtttttctaga

SEQ ID NO: 75824 - DNA, 15 bp, Homo sapiens
ttggggtttttctag

SEQ ID NO: 75825 - DNA, 15 bp, Homo sapiens
tttggggtttttcta

SEQ ID NO: 75826 - DNA, 15 bp, Homo sapiens
atttggggtttttct

SEQ ID NO: 75827 - DNA, 15 bp, Homo sapiens
gatttggggtttttc

SEQ ID NO: 75828 - DNA, 15 bp, Homo sapiens
tgatttggggttttt

SEQ ID NO: 75829 - DNA, 15 bp, Homo sapiens
gtgatttggggtttt

SEQ ID NO: 75830 - DNA, 15 bp, Homo sapiens
agtgatttggggttt

SEQ ID NO: 75831 - DNA, 15 bp, Homo sapiens
tagtgatttggggtt

SEQ ID NO: 75832 - DNA, 15 bp, Homo sapiens
atagtgatttggggt

SEQ ID NO: 75833 - DNA, 15 bp, Homo sapiens
aatagtgatttgggg

SEQ ID NO: 75834 - DNA, 15 bp, Homo sapiens
aaatagtgatttggg

SEQ ID NO: 75835 - DNA, 15 bp, Homo sapiens
taaatagtgatttgg

SEQ ID NO: 75836 - DNA, 15 bp, Homo sapiens
ttaaatagtgatttg

SEQ ID NO: 75837 - DNA, 15 bp, Homo sapiens
tttaaatagtgattt

SEQ ID NO: 75838 - DNA, 15 bp, Homo sapiens
ttttaaatagtgatt

SEQ ID NO: 75839 - DNA, 15 bp, Homo sapiens
tttttaaatagtgat

SEQ ID NO: 75840 - DNA, 15 bp, Homo sapiens
ctttttaaatagtga

SEQ ID NO: 75841 - DNA, 15 bp, Homo sapiens
tctttttaaatagtg

SEQ ID NO: 75842 - DNA, 15 bp, Homo sapiens
ttctttttaaatagt

SEQ ID NO: 75843 - DNA, 15 bp, Homo sapiens
tttctttttaaatag

SEQ ID NO: 75844 - DNA, 15 bp, Homo sapiens
gtttctttttaaata

SEQ ID NO: 75845 - DNA, 15 bp, Homo sapiens
tgtttctttttaaat

SEQ ID NO: 75846 - DNA, 15 bp, Homo sapiens
gtgtttctttttaaa

SEQ ID NO: 75847 - DNA, 15 bp, Homo sapiens
agtgtttctttttaa

SEQ ID NO: 75848 - DNA, 15 bp, Homo sapiens
gagtgtttcttttta

SEQ ID NO: 75849 - DNA, 15 bp, Homo sapiens
agagtgtttcttttt

SEQ ID NO: 75850 - DNA, 15 bp, Homo sapiens
gagagtgtttctttt

SEQ ID NO: 75851 - DNA, 15 bp, Homo sapiens
tgagagtgtttcttt

SEQ ID NO: 75852 - DNA, 15 bp, Homo sapiens
atgagagtgtttctt

SEQ ID NO: 75853 - DNA, 15 bp, Homo sapiens
aatgagagtgtttct

SEQ ID NO: 75854 - DNA, 15 bp, Homo sapiens
aaatgagagtgtttc

SEQ ID NO: 75855 - DNA, 15 bp, Homo sapiens
taaatgagagtgttt

SEQ ID NO: 75856 - DNA, 15 bp, Homo sapiens
gtaaatgagagtgtt

SEQ ID NO: 75857 - DNA, 15 bp, Homo sapiens
ggtaaatgagagtgt

SEQ ID NO: 75858 - DNA, 15 bp, Homo sapiens
aggtaaatgagagtg

SEQ ID NO: 75859 - DNA, 15 bp, Homo sapiens
caggtaaatgagagt

SEQ ID NO: 75860 - DNA, 15 bp, Homo sapiens
ccaggtaaatgagag

SEQ ID NO: 75861 - DNA, 15 bp, Homo sapiens
cccaggtaaatgaga

SEQ ID NO: 75862 - DNA, 15 bp, Homo sapiens
acccaggtaaatgag

SEQ ID NO: 75863 - DNA, 15 bp, Homo sapiens
tacccaggtaaatga

SEQ ID NO: 75864 - DNA, 15 bp, Homo sapiens
gtacccaggtaaatg

SEQ ID NO: 75865 - DNA, 15 bp, Homo sapiens
tgtacccaggtaaat

SEQ ID NO: 75866 - DNA, 15 bp, Homo sapiens
ctgtacccaggtaaa

SEQ ID NO: 75867 - DNA, 15 bp, Homo sapiens
actgtacccaggtaa

SEQ ID NO: 75868 - DNA, 15 bp, Homo sapiens
aactgtacccaggta

SEQ ID NO: 75869 - DNA, 15 bp, Homo sapiens
aaactgtacccaggt

SEQ ID NO: 75870 - DNA, 15 bp, Homo sapiens
gaaactgtacccagg

SEQ ID NO: 75871 - DNA, 15 bp, Homo sapiens
tgaaactgtacccag

SEQ ID NO: 75872 - DNA, 15 bp, Homo sapiens
atgaaactgtaccca

SEQ ID NO: 75873 - DNA, 15 bp, Homo sapiens
gatgaaactgtaccc

SEQ ID NO: 75874 - DNA, 15 bp, Homo sapiens
tgatgaaactgtacc

SEQ ID NO: 75875 - DNA, 15 bp, Homo sapiens
atgatgaaactgtac

SEQ ID NO: 75876 - DNA, 15 bp, Homo sapiens
gatgatgaaactgta

SEQ ID NO: 75877 - DNA, 15 bp, Homo sapiens
tgatgatgaaactgt

SEQ ID NO: 75878 - DNA, 15 bp, Homo sapiens
atgatgatgaaactg

SEQ ID NO: 75879 - DNA, 15 bp, Homo sapiens
aatgatgatgaaact

SEQ ID NO: 75880 - DNA, 15 bp, Homo sapiens
taatgatgatgaaac

SEQ ID NO: 75881 - DNA, 15 bp, Homo sapiens
ttaatgatgatgaaa

SEQ ID NO: 75882 - DNA, 15 bp, Homo sapiens
tttaatgatgatgaa

SEQ ID NO: 75883 - DNA, 15 bp, Homo sapiens
ctttaatgatgatga

SEQ ID NO: 75884 - DNA, 15 bp, Homo sapiens
actttaatgatgatg

SEQ ID NO: 75885 - DNA, 15 bp, Homo sapiens
tactttaatgatgat

SEQ ID NO: 75886 - DNA, 15 bp, Homo sapiens
gtactttaatgatga

SEQ ID NO: 75887 - DNA, 15 bp, Homo sapiens
tgtactttaatgatg

SEQ ID NO: 75888 - DNA, 15 bp, Homo sapiens
ttgtactttaatgat

SEQ ID NO: 75889 - DNA, 15 bp, Homo sapiens
gttgtactttaatga

SEQ ID NO: 75890 - DNA, 15 bp, Homo sapiens
tgttgtactttaatg

SEQ ID NO: 75891 - DNA, 15 bp, Homo sapiens
ctgttgtactttaat

SEQ ID NO: 75892 - DNA, 15 bp, Homo sapiens
cctgttgtactttaa

SEQ ID NO: 75893 - DNA, 15 bp, Homo sapiens
ccctgttgtacttta

SEQ ID NO: 75894 - DNA, 15 bp, Homo sapiens
accctgttgtacttt

SEQ ID NO: 75895 - DNA, 15 bp, Homo sapiens
aaccctgttgtactt

SEQ ID NO: 75896 - DNA, 15 bp, Homo sapiens
aaaccctgttgtact

SEQ ID NO: 75897 - DNA, 15 bp, Homo sapiens
caaaccctgttgtac

SEQ ID NO: 75898 - DNA, 15 bp, Homo sapiens
tcaaaccctgttgta

SEQ ID NO: 75899 - DNA, 15 bp, Homo sapiens
ctcaaaccctgttgt

SEQ ID NO: 75900 - DNA, 15 bp, Homo sapiens
cctcaaaccctgttg

SEQ ID NO: 75901 - DNA, 15 bp, Homo sapiens
acctcaaaccctgtt

SEQ ID NO: 75902 - DNA, 15 bp, Homo sapiens
tacctcaaaccctgt

SEQ ID NO: 75903 - DNA, 15 bp, Homo sapiens
atacctcaaaccctg

SEQ ID NO: 75904 - DNA, 15 bp, Homo sapiens
aatacctcaaaccct

SEQ ID NO: 75905 - DNA, 15 bp, Homo sapiens
gaatacctcaaaccc

SEQ ID NO: 75906 - DNA, 15 bp, Homo sapiens
ggaatacctcaaacc

SEQ ID NO: 75907 - DNA, 15 bp, Homo sapiens
gggaatacctcaaac

SEQ ID NO: 75908 - DNA, 15 bp, Homo sapiens
tgggaatacctcaaa

SEQ ID NO: 75909 - DNA, 15 bp, Homo sapiens
atgggaatacctcaa

SEQ ID NO: 75910 - DNA, 15 bp, Homo sapiens
gatgggaatacctca

SEQ ID NO: 75911 - DNA, 15 bp, Homo sapiens
ggatgggaatacctc

SEQ ID NO: 75912 - DNA, 15 bp, Homo sapiens
gggatgggaatacct

SEQ ID NO: 75913 - DNA, 15 bp, Homo sapiens
tgggatgggaatacc

SEQ ID NO: 75914 - DNA, 15 bp, Homo sapiens
ttgggatgggaatac

SEQ ID NO: 75915 - DNA, 15 bp, Homo sapiens
attgggatgggaata

SEQ ID NO: 75916 - DNA, 15 bp, Homo sapiens
aattgggatgggaat

SEQ ID NO: 75917 - DNA, 15 bp, Homo sapiens
aaattgggatgggaa

SEQ ID NO: 75918 - DNA, 15 bp, Homo sapiens
aaaattgggatggga

SEQ ID NO: 75919 - DNA, 15 bp, Homo sapiens
gaaaattgggatggg

SEQ ID NO: 75920 - DNA, 15 bp, Homo sapiens
ggaaaattgggatgg

SEQ ID NO: 75921 - DNA, 15 bp, Homo sapiens
tggaaaattgggatg

SEQ ID NO: 75922 - DNA, 15 bp, Homo sapiens
ttggaaaattgggat

SEQ ID NO: 75923 - DNA, 15 bp, Homo sapiens
tttggaaaattggga

SEQ ID NO: 75924 - DNA, 15 bp, Homo sapiens
ttttggaaaattggg

SEQ ID NO: 75925 - DNA, 15 bp, Homo sapiens
tttttggaaaattgg

SEQ ID NO: 75926 - DNA, 15 bp, Homo sapiens
ctttttggaaaattg

SEQ ID NO: 75927 - DNA, 15 bp, Homo sapiens
cctttttggaaaatt

SEQ ID NO: 75928 - DNA, 15 bp, Homo sapiens
ccctttttggaaaat

SEQ ID NO: 75929 - DNA, 15 bp, Homo sapiens
gccctttttggaaaa

SEQ ID NO: 75930 - DNA, 15 bp, Homo sapiens
agccctttttggaaa

SEQ ID NO: 75931 - DNA, 15 bp, Homo sapiens
aagccctttttggaa

SEQ ID NO: 75932 - DNA, 15 bp, Homo sapiens
caagccctttttgga

SEQ ID NO: 75933 - DNA, 15 bp, Homo sapiens
ccaagccctttttgg

SEQ ID NO: 75934 - DNA, 15 bp, Homo sapiens
accaagccctttttg

SEQ ID NO: 75935 - DNA, 15 bp, Homo sapiens
taccaagcccttttt

SEQ ID NO: 75936 - DNA, 15 bp, Homo sapiens
ctaccaagccctttt

SEQ ID NO: 75937 - DNA, 15 bp, Homo sapiens
actaccaagcccttt

SEQ ID NO: 75938 - DNA, 15 bp, Homo sapiens
cactaccaagccctt

SEQ ID NO: 75939 - DNA, 15 bp, Homo sapiens
tcactaccaagccct

SEQ ID NO: 75940 - DNA, 15 bp, Homo sapiens
ctcactaccaagccc

SEQ ID NO: 75941 - DNA, 15 bp, Homo sapiens
cctcactaccaagcc

SEQ ID NO: 75942 - DNA, 15 bp, Homo sapiens
ccctcactaccaagc

SEQ ID NO: 75943 - DNA, 15 bp, Homo sapiens
accctcactaccaag

SEQ ID NO: 75944 - DNA, 15 bp, Homo sapiens
caccctcactaccaa

SEQ ID NO: 75945 - DNA, 15 bp, Homo sapiens
acaccctcactacca

SEQ ID NO: 75946 - DNA, 15 bp, Homo sapiens
aacaccctcactacc

SEQ ID NO: 75947 - DNA, 15 bp, Homo sapiens
caacaccctcactac

SEQ ID NO: 75948 - DNA, 15 bp, Homo sapiens
ccaacaccctcacta

SEQ ID NO: 75949 - DNA, 15 bp, Homo sapiens
accaacaccctcact

SEQ ID NO: 75950 - DNA, 15 bp, Homo sapiens
aaccaacaccctcac

SEQ ID NO: 75951 - DNA, 15 bp, Homo sapiens
taaccaacaccctca

SEQ ID NO: 75952 - DNA, 15 bp, Homo sapiens
gtaaccaacaccctc

SEQ ID NO: 75953 - DNA, 15 bp, Homo sapiens
agtaaccaacaccct

SEQ ID NO: 75954 - DNA, 15 bp, Homo sapiens
cagtaaccaacaccc

SEQ ID NO: 75955 - DNA, 15 bp, Homo sapiens
ccagtaaccaacacc

SEQ ID NO: 75956 - DNA, 15 bp, Homo sapiens
cccagtaaccaacac

SEQ ID NO: 75957 - DNA, 15 bp, Homo sapiens
gcccagtaaccaaca

SEQ ID NO: 75958 - DNA, 15 bp, Homo sapiens
tgcccagtaaccaac

SEQ ID NO: 75959 - DNA, 15 bp, Homo sapiens
ctgcccagtaaccaa

SEQ ID NO: 75960 - DNA, 15 bp, Homo sapiens
cctgcccagtaacca

SEQ ID NO: 75961 - DNA, 15 bp, Homo sapiens
ccctgcccagtaacc

SEQ ID NO: 75962 - DNA, 15 bp, Homo sapiens
tccctgcccagtaac

SEQ ID NO: 75963 - DNA, 15 bp, Homo sapiens
ctccctgcccagtaa

SEQ ID NO: 75964 - DNA, 15 bp, Homo sapiens
actccctgcccagta

SEQ ID NO: 75965 - DNA, 15 bp, Homo sapiens
cactccctgcccagt

SEQ ID NO: 75966 - DNA, 15 bp, Homo sapiens
ccactccctgcccag

SEQ ID NO: 75967 - DNA, 15 bp, Homo sapiens
cccactccctgccca

SEQ ID NO: 75968 - DNA, 15 bp, Homo sapiens
ccccactccctgccc

SEQ ID NO: 75969 - DNA, 15 bp, Homo sapiens
tccccactccctgcc

SEQ ID NO: 75970 - DNA, 15 bp, Homo sapiens
ctccccactccctgc

SEQ ID NO: 75971 - DNA, 15 bp, Homo sapiens
cctccccactccctg

SEQ ID NO: 75972 - DNA, 15 bp, Homo sapiens
ccctccccactccct

SEQ ID NO: 75973 - DNA, 15 bp, Homo sapiens
tccctccccactccc

SEQ ID NO: 75974 - DNA, 15 bp, Homo sapiens
ttccctccccactcc

SEQ ID NO: 75975 - DNA, 15 bp, Homo sapiens
cttccctccccactc

SEQ ID NO: 75976 - DNA, 15 bp, Homo sapiens
tcttccctccccact

SEQ ID NO: 75977 - DNA, 15 bp, Homo sapiens
gtcttccctccccac

SEQ ID NO: 75978 - DNA, 15 bp, Homo sapiens
agtcttccctcccca

SEQ ID NO: 75979 - DNA, 15 bp, Homo sapiens
cagtcttccctcccc

SEQ ID NO: 75980 - DNA, 15 bp, Homo sapiens
gcagtcttccctccc

SEQ ID NO: 75981 - DNA, 15 bp, Homo sapiens
ggcagtcttccctcc

SEQ ID NO: 75982 - DNA, 15 bp, Homo sapiens
aggcagtcttccctc

SEQ ID NO: 75983 - DNA, 15 bp, Homo sapiens
gaggcagtcttccct

SEQ ID NO: 75984 - DNA, 15 bp, Homo sapiens
tgaggcagtcttccc

SEQ ID NO: 75985 - DNA, 15 bp, Homo sapiens
atgaggcagtcttcc

SEQ ID NO: 75986 - DNA, 15 bp, Homo sapiens
tatgaggcagtcttc

SEQ ID NO: 75987 - DNA, 15 bp, Homo sapiens
ttatgaggcagtctt

SEQ ID NO: 75988 - DNA, 15 bp, Homo sapiens
gttatgaggcagtct

SEQ ID NO: 75989 - DNA, 15 bp, Homo sapiens
ggttatgaggcagtc

SEQ ID NO: 75990 - DNA, 15 bp, Homo sapiens
tggttatgaggcagt

SEQ ID NO: 75991 - DNA, 15 bp, Homo sapiens
atggttatgaggcag

SEQ ID NO: 75992 - DNA, 15 bp, Homo sapiens
gatggttatgaggca

SEQ ID NO: 75993 - DNA, 15 bp, Homo sapiens
agatggttatgaggc

SEQ ID NO: 75994 - DNA, 15 bp, Homo sapiens
aagatggttatgagg

SEQ ID NO: 75995 - DNA, 15 bp, Homo sapiens
caagatggttatgag

SEQ ID NO: 75996 - DNA, 15 bp, Homo sapiens
tcaagatggttatga

SEQ ID NO: 75997 - DNA, 15 bp, Homo sapiens
gtcaagatggttatg

SEQ ID NO: 75998 - DNA, 15 bp, Homo sapiens
ggtcaagatggttat

SEQ ID NO: 75999 - DNA, 15 bp, Homo sapiens
gggtcaagatggtta

SEQ ID NO: 76000 - DNA, 15 bp, Homo sapiens
tgggtcaagatggtt

SEQ ID NO: 76001 - DNA, 15 bp, Homo sapiens
ctgggtcaagatggt

SEQ ID NO: 76002 - DNA, 15 bp, Homo sapiens
cctgggtcaagatgg

SEQ ID NO: 76003 - DNA, 15 bp, Homo sapiens
ccctgggtcaagatg

SEQ ID NO: 76004 - DNA, 15 bp, Homo sapiens
gccctgggtcaagat

SEQ ID NO: 76005 - DNA, 15 bp, Homo sapiens
agccctgggtcaaga

SEQ ID NO: 76006 - DNA, 15 bp, Homo sapiens
aagccctgggtcaag

SEQ ID NO: 76007 - DNA, 15 bp, Homo sapiens
caagccctgggtcaa

SEQ ID NO: 76008 - DNA, 15 bp, Homo sapiens
acaagccctgggtca

SEQ ID NO: 76009 - DNA, 15 bp, Homo sapiens
gacaagccctgggtc

SEQ ID NO: 76010 - DNA, 15 bp, Homo sapiens
agacaagccctgggt

SEQ ID NO: 76011 - DNA, 15 bp, Homo sapiens
cagacaagccctggg

SEQ ID NO: 76012 - DNA, 15 bp, Homo sapiens
ccagacaagccctgg

SEQ ID NO: 76013 - DNA, 15 bp, Homo sapiens
accagacaagccctg

SEQ ID NO: 76014 - DNA, 15 bp, Homo sapiens
gaccagacaagccct

SEQ ID NO: 76015 - DNA, 15 bp, Homo sapiens
tgaccagacaagccc

SEQ ID NO: 76016 - DNA, 15 bp, Homo sapiens
gtgaccagacaagcc

SEQ ID NO: 76017 - DNA, 15 bp, Homo sapiens
agtgaccagacaagc

SEQ ID NO: 76018 - DNA, 15 bp, Homo sapiens
cagtgaccagacaag

SEQ ID NO: 76019 - DNA, 15 bp, Homo sapiens
tcagtgaccagacaa

SEQ ID NO: 76020 - DNA, 15 bp, Homo sapiens
ctcagtgaccagaca

SEQ ID NO: 76021 - DNA, 15 bp, Homo sapiens
tctcagtgaccagac

SEQ ID NO: 76022 - DNA, 15 bp, Homo sapiens
atctcagtgaccaga

SEQ ID NO: 76023 - DNA, 15 bp, Homo sapiens
aatctcagtgaccag

SEQ ID NO: 76024 - DNA, 15 bp, Homo sapiens
taatctcagtgacca

SEQ ID NO: 76025 - DNA, 15 bp, Homo sapiens
ttaatctcagtgacc

SEQ ID NO: 76026 - DNA, 15 bp, Homo sapiens
cttaatctcagtgac

SEQ ID NO: 76027 - DNA, 15 bp, Homo sapiens
ccttaatctcagtga

SEQ ID NO: 76028 - DNA, 15 bp, Homo sapiens
cccttaatctcagtg

SEQ ID NO: 76029 - DNA, 15 bp, Homo sapiens
gcccttaatctcagt

SEQ ID NO: 76030 - DNA, 15 bp, Homo sapiens
ggcccttaatctcag

SEQ ID NO: 76031 - DNA, 15 bp, Homo sapiens
gggcccttaatctca

SEQ ID NO: 76032 - DNA, 15 bp, Homo sapiens
agggcccttaatctc

SEQ ID NO: 76033 - DNA, 15 bp, Homo sapiens
gagggcccttaatct

SEQ ID NO: 76034 - DNA, 15 bp, Homo sapiens
agagggcccttaatc

SEQ ID NO: 76035 - DNA, 15 bp, Homo sapiens
cagagggcccttaat

SEQ ID NO: 76036 - DNA, 15 bp, Homo sapiens
acagagggcccttaa

SEQ ID NO: 76037 - DNA, 15 bp, Homo sapiens
cacagagggccctta

SEQ ID NO: 76038 - DNA, 15 bp, Homo sapiens
gcacagagggccctt

SEQ ID NO: 76039 - DNA, 15 bp, Homo sapiens
ggcacagagggccct

SEQ ID NO: 76040 - DNA, 15 bp, Homo sapiens
tggcacagagggccc

SEQ ID NO: 76041 - DNA, 15 bp, Homo sapiens
gtggcacagagggcc

SEQ ID NO: 76042 - DNA, 15 bp, Homo sapiens
tgtggcacagagggc

SEQ ID NO: 76043 - DNA, 15 bp, Homo sapiens
ctgtggcacagaggg

SEQ ID NO: 76044 - DNA, 15 bp, Homo sapiens
gctgtggcacagagg

SEQ ID NO: 76045 - DNA, 15 bp, Homo sapiens
agctgtggcacagag

SEQ ID NO: 76046 - DNA, 15 bp, Homo sapiens
tagctgtggcacaga

SEQ ID NO: 76047 - DNA, 15 bp, Homo sapiens
ttagctgtggcacag

SEQ ID NO: 76048 - DNA, 15 bp, Homo sapiens
gttagctgtggcaca

SEQ ID NO: 76049 - DNA, 15 bp, Homo sapiens
ggttagctgtggcac

SEQ ID NO: 76050 - DNA, 15 bp, Homo sapiens
gggttagctgtggca

SEQ ID NO: 76051 - DNA, 15 bp, Homo sapiens
cgggttagctgtggc

SEQ ID NO: 76052 - DNA, 15 bp, Homo sapiens
acgggttagctgtgg

SEQ ID NO: 76053 - DNA, 15 bp, Homo sapiens
tacgggttagctgtg

SEQ ID NO: 76054 - DNA, 15 bp, Homo sapiens
ttacgggttagctgt

SEQ ID NO: 76055 - DNA, 15 bp, Homo sapiens
cttacgggttagctg

SEQ ID NO: 76056 - DNA, 15 bp, Homo sapiens
ccttacgggttagct

SEQ ID NO: 76057 - DNA, 15 bp, Homo sapiens
cccttacgggttagc

SEQ ID NO: 76058 - DNA, 15 bp, Homo sapiens
tcccttacgggttag

SEQ ID NO: 76059 - DNA, 15 bp, Homo sapiens
ctcccttacgggtta

SEQ ID NO: 76060 - DNA, 15 bp, Homo sapiens
actcccttacgggtt

SEQ ID NO: 76061 - DNA, 15 bp, Homo sapiens
aactcccttacgggt

SEQ ID NO: 76062 - DNA, 15 bp, Homo sapiens
caactcccttacggg

SEQ ID NO: 76063 - DNA, 15 bp, Homo sapiens
tcaactcccttacgg

SEQ ID NO: 76064 - DNA, 15 bp, Homo sapiens
atcaactcccttacg

SEQ ID NO: 76065 - DNA, 15 bp, Homo sapiens
gatcaactcccttac

SEQ ID NO: 76066 - DNA, 15 bp, Homo sapiens
ggatcaactccctta

SEQ ID NO: 76067 - DNA, 15 bp, Homo sapiens
tggatcaactccctt

SEQ ID NO: 76068 - DNA, 15 bp, Homo sapiens
atggatcaactccct

SEQ ID NO: 76069 - DNA, 15 bp, Homo sapiens
catggatcaactccc

SEQ ID NO: 76070 - DNA, 15 bp, Homo sapiens
tcatggatcaactcc

SEQ ID NO: 76071 - DNA, 15 bp, Homo sapiens
gtcatggatcaactc

SEQ ID NO: 76072 - DNA, 15 bp, Homo sapiens
agtcatggatcaact

SEQ ID NO: 76073 - DNA, 15 bp, Homo sapiens
tagtcatggatcaac

SEQ ID NO: 76074 - DNA, 15 bp, Homo sapiens
ctagtcatggatcaa

SEQ ID NO: 76075 - DNA, 15 bp, Homo sapiens
tctagtcatggatca

SEQ ID NO: 76076 - DNA, 15 bp, Homo sapiens
ttctagtcatggatc

SEQ ID NO: 76077 - DNA, 15 bp, Homo sapiens
attctagtcatggat

SEQ ID NO: 76078 - DNA, 15 bp, Homo sapiens
cattctagtcatgga

SEQ ID NO: 76079 - DNA, 15 bp, Homo sapiens
acattctagtcatgg

SEQ ID NO: 76080 - DNA, 15 bp, Homo sapiens
gacattctagtcatg

SEQ ID NO: 76081 - DNA, 15 bp, Homo sapiens
tgacattctagtcat

SEQ ID NO: 76082 - DNA, 15 bp, Homo sapiens
ttgacattctagtca

SEQ ID NO: 76083 - DNA, 15 bp, Homo sapiens
cttgacattctagtc

SEQ ID NO: 76084 - DNA, 15 bp, Homo sapiens
tcttgacattctagt

SEQ ID NO: 76085 - DNA, 15 bp, Homo sapiens
ctcttgacattctag

SEQ ID NO: 76086 - DNA, 15 bp, Homo sapiens
cctcttgacattcta

SEQ ID NO: 76087 - DNA, 15 bp, Homo sapiens
tcctcttgacattct

SEQ ID NO: 76088 - DNA, 15 bp, Homo sapiens
ctcctcttgacattc

SEQ ID NO: 76089 - DNA, 15 bp, Homo sapiens
actcctcttgacatt

SEQ ID NO: 76090 - DNA, 15 bp, Homo sapiens
cactcctcttgacat

SEQ ID NO: 76091 - DNA, 15 bp, Homo sapiens
acactcctcttgaca

SEQ ID NO: 76092 - DNA, 15 bp, Homo sapiens
gacactcctcttgac

SEQ ID NO: 76093 - DNA, 15 bp, Homo sapiens
tgacactcctcttga

SEQ ID NO: 76094 - DNA, 15 bp, Homo sapiens
ttgacactcctcttg

SEQ ID NO: 76095 - DNA, 15 bp, Homo sapiens
cttgacactcctctt

SEQ ID NO: 76096 - DNA, 15 bp, Homo sapiens
acttgacactcctct

SEQ ID NO: 76097 - DNA, 15 bp, Homo sapiens
gacttgacactcctc

SEQ ID NO: 76098 - DNA, 15 bp, Homo sapiens
tgacttgacactcct

SEQ ID NO: 76099 - DNA, 15 bp, Homo sapiens
atgacttgacactcc

SEQ ID NO: 76100 - DNA, 15 bp, Homo sapiens
aatgacttgacactc

SEQ ID NO: 76101 - DNA, 15 bp, Homo sapiens
taatgacttgacact

SEQ ID NO: 76102 - DNA, 15 bp, Homo sapiens
gtaatgacttgacac

SEQ ID NO: 76103 - DNA, 15 bp, Homo sapiens
agtaatgacttgaca

SEQ ID NO: 76104 - DNA, 15 bp, Homo sapiens
cagtaatgacttgac

SEQ ID NO: 76105 - DNA, 15 bp, Homo sapiens
ccagtaatgacttga

SEQ ID NO: 76106 - DNA, 15 bp, Homo sapiens
accagtaatgacttg

SEQ ID NO: 76107 - DNA, 15 bp, Homo sapiens
aaccagtaatgactt

SEQ ID NO: 76108 - DNA, 15 bp, Homo sapiens
aaaccagtaatgact

SEQ ID NO: 76109 - DNA, 15 bp, Homo sapiens
gaaaccagtaatgac

SEQ ID NO: 76110 - DNA, 15 bp, Homo sapiens
agaaaccagtaatga

SEQ ID NO: 76111 - DNA, 15 bp, Homo sapiens
gagaaaccagtaatg

SEQ ID NO: 76112 - DNA, 15 bp, Homo sapiens
ggagaaaccagtaat

SEQ ID NO: 76113 - DNA, 15 bp, Homo sapiens
aggagaaaccagtaa

SEQ ID NO: 76114 - DNA, 15 bp, Homo sapiens
aaggagaaaccagta

SEQ ID NO: 76115 - DNA, 15 bp, Homo sapiens
caaggagaaaccagt

SEQ ID NO: 76116 - DNA, 15 bp, Homo sapiens
acaaggagaaaccag

SEQ ID NO: 76117 - DNA, 15 bp, Homo sapiens
cacaaggagaaacca

SEQ ID NO: 76118 - DNA, 15 bp, Homo sapiens
acacaaggagaaacc

SEQ ID NO: 76119 - DNA, 15 bp, Homo sapiens
tacacaaggagaaac

SEQ ID NO: 76120 - DNA, 15 bp, Homo sapiens
ttacacaaggagaaa

SEQ ID NO: 76121 - DNA, 15 bp, Homo sapiens
tttacacaaggagaa

SEQ ID NO: 76122 - DNA, 15 bp, Homo sapiens
atttacacaaggaga

SEQ ID NO: 76123 - DNA, 15 bp, Homo sapiens
aatttacacaaggag

SEQ ID NO: 76124 - DNA, 15 bp, Homo sapiens
taatttacacaagga

SEQ ID NO: 76125 - DNA, 15 bp, Homo sapiens
gtaatttacacaagg

SEQ ID NO: 76126 - DNA, 15 bp, Homo sapiens
tgtaatttacacaag

SEQ ID NO: 76127 - DNA, 15 bp, Homo sapiens
gtgtaatttacacaa

SEQ ID NO: 76128 - DNA, 15 bp, Homo sapiens
tgtgtaatttacaca

SEQ ID NO: 76129 - DNA, 15 bp, Homo sapiens
ctgtgtaatttacac

SEQ ID NO: 76130 - DNA, 15 bp, Homo sapiens
gctgtgtaatttaca

SEQ ID NO: 76131 - DNA, 15 bp, Homo sapiens
tgctgtgtaatttac

SEQ ID NO: 76132 - DNA, 15 bp, Homo sapiens
ctgctgtgtaattta

SEQ ID NO: 76133 - DNA, 15 bp, Homo sapiens
cctgctgtgtaattt

SEQ ID NO: 76134 - DNA, 15 bp, Homo sapiens
ccctgctgtgtaatt

SEQ ID NO: 76135 - DNA, 15 bp, Homo sapiens
cccctgctgtgtaat

SEQ ID NO: 76136 - DNA, 15 bp, Homo sapiens
acccctgctgtgtaa

SEQ ID NO: 76137 - DNA, 15 bp, Homo sapiens
tacccctgctgtgta

SEQ ID NO: 76138 - DNA, 15 bp, Homo sapiens
ctacccctgctgtgt

SEQ ID NO: 76139 - DNA, 15 bp, Homo sapiens
gctacccctgctgtg

SEQ ID NO: 76140 - DNA, 15 bp, Homo sapiens
tgctacccctgctgt

SEQ ID NO: 76141 - DNA, 15 bp, Homo sapiens
ctgctacccctgctg

SEQ ID NO: 76142 - DNA, 15 bp, Homo sapiens
tctgctacccctgct

SEQ ID NO: 76143 - DNA, 15 bp, Homo sapiens
ttctgctacccctgc

SEQ ID NO: 76144 - DNA, 15 bp, Homo sapiens
attctgctacccctg

SEQ ID NO: 76145 - DNA, 15 bp, Homo sapiens
tattctgctacccct

SEQ ID NO: 76146 - DNA, 15 bp, Homo sapiens
ctattctgctacccc

SEQ ID NO: 76147 - DNA, 15 bp, Homo sapiens
gctattctgctaccc

SEQ ID NO: 76148 - DNA, 15 bp, Homo sapiens
tgctattctgctacc

SEQ ID NO: 76149 - DNA, 15 bp, Homo sapiens
atgctattctgctac

SEQ ID NO: 76150 - DNA, 15 bp, Homo sapiens
aatgctattctgcta

SEQ ID NO: 76151 - DNA, 15 bp, Homo sapiens
taatgctattctgct

SEQ ID NO: 76152 - DNA, 15 bp, Homo sapiens
ataatgctattctgc

SEQ ID NO: 76153 - DNA, 15 bp, Homo sapiens
cataatgctattctg

SEQ ID NO: 76154 - DNA, 15 bp, Homo sapiens
ccataatgctattct

SEQ ID NO: 76155 - DNA, 15 bp, Homo sapiens
gccataatgctattc

SEQ ID NO: 76156 - DNA, 15 bp, Homo sapiens
agccataatgctatt

SEQ ID NO: 76157 - DNA, 15 bp, Homo sapiens
aagccataatgctat

SEQ ID NO: 76158 - DNA, 15 bp, Homo sapiens
taagccataatgcta

SEQ ID NO: 76159 - DNA, 15 bp, Homo sapiens
ctaagccataatgct

SEQ ID NO: 76160 - DNA, 15 bp, Homo sapiens
cctaagccataatgc

SEQ ID NO: 76161 - DNA, 15 bp, Homo sapiens
tcctaagccataatg

SEQ ID NO: 76162 - DNA, 15 bp, Homo sapiens
ttcctaagccataat

SEQ ID NO: 76163 - DNA, 15 bp, Homo sapiens
gttcctaagccataa

SEQ ID NO: 76164 - DNA, 15 bp, Homo sapiens
tgttcctaagccata

SEQ ID NO: 76165 - DNA, 15 bp, Homo sapiens
atgttcctaagccat

SEQ ID NO: 76166 - DNA, 15 bp, Homo sapiens
catgttcctaagcca

SEQ ID NO: 76167 - DNA, 15 bp, Homo sapiens
ccatgttcctaagcc

SEQ ID NO: 76168 - DNA, 15 bp, Homo sapiens
tccatgttcctaagc

SEQ ID NO: 76169 - DNA, 15 bp, Homo sapiens
gtccatgttcctaag

SEQ ID NO: 76170 - DNA, 15 bp, Homo sapiens
agtccatgttcctaa

SEQ ID NO: 76171 - DNA, 15 bp, Homo sapiens
gagtccatgttccta

SEQ ID NO: 76172 - DNA, 15 bp, Homo sapiens
ggagtccatgttcct

SEQ ID NO: 76173 - DNA, 15 bp, Homo sapiens
tggagtccatgttcc

SEQ ID NO: 76174 - DNA, 15 bp, Homo sapiens
gtggagtccatgttc

SEQ ID NO: 76175 - DNA, 15 bp, Homo sapiens
tgtggagtccatgtt

SEQ ID NO: 76176 - DNA, 15 bp, Homo sapiens
atgtggagtccatgt

SEQ ID NO: 76177 - DNA, 15 bp, Homo sapiens
gatgtggagtccatg

SEQ ID NO: 76178 - DNA, 15 bp, Homo sapiens
tgatgtggagtccat

SEQ ID NO: 76179 - DNA, 15 bp, Homo sapiens
ctgatgtggagtcca

SEQ ID NO: 76180 - DNA, 15 bp, Homo sapiens
tctgatgtggagtcc

SEQ ID NO: 76181 - DNA, 15 bp, Homo sapiens
atctgatgtggagtc

SEQ ID NO: 76182 - DNA, 15 bp, Homo sapiens
tatctgatgtggagt

SEQ ID NO: 76183 - DNA, 15 bp, Homo sapiens
ctatctgatgtggag

SEQ ID NO: 76184 - DNA, 15 bp, Homo sapiens
actatctgatgtgga

SEQ ID NO: 76185 - DNA, 15 bp, Homo sapiens
gactatctgatgtgg

SEQ ID NO: 76186 - DNA, 15 bp, Homo sapiens
agactatctgatgtg

SEQ ID NO: 76187 - DNA, 15 bp, Homo sapiens
gagactatctgatgt

SEQ ID NO: 76188 - DNA, 15 bp, Homo sapiens
tgagactatctgatg

SEQ ID NO: 76189 - DNA, 15 bp, Homo sapiens
ctgagactatctgat

SEQ ID NO: 76190 - DNA, 15 bp, Homo sapiens
actgagactatctga

SEQ ID NO: 76191 - DNA, 15 bp, Homo sapiens
aactgagactatctg

SEQ ID NO: 76192 - DNA, 15 bp, Homo sapiens
caactgagactatct

SEQ ID NO: 76193 - DNA, 15 bp, Homo sapiens
ccaactgagactatc

SEQ ID NO: 76194 - DNA, 15 bp, Homo sapiens
tccaactgagactat

SEQ ID NO: 76195 - DNA, 15 bp, Homo sapiens
ttccaactgagacta

SEQ ID NO: 76196 - DNA, 15 bp, Homo sapiens
attccaactgagact

SEQ ID NO: 76197 - DNA, 15 bp, Homo sapiens
aattccaactgagac

SEQ ID NO: 76198 - DNA, 15 bp, Homo sapiens
gaattccaactgaga

SEQ ID NO: 76199 - DNA, 15 bp, Homo sapiens
agaattccaactgag

SEQ ID NO: 76200 - DNA, 15 bp, Homo sapiens
aagaattccaactga

SEQ ID NO: 76201 - DNA, 15 bp, Homo sapiens
caagaattccaactg

SEQ ID NO: 76202 - DNA, 15 bp, Homo sapiens
gcaagaattccaact

SEQ ID NO: 76203 - DNA, 15 bp, Homo sapiens
agcaagaattccaac

SEQ ID NO: 76204 - DNA, 15 bp, Homo sapiens
aagcaagaattccaa

SEQ ID NO: 76205 - DNA, 15 bp, Homo sapiens
aaagcaagaattcca

SEQ ID NO: 76206 - DNA, 15 bp, Homo sapiens
caaagcaagaattcc

SEQ ID NO: 76207 - DNA, 15 bp, Homo sapiens
gcaaagcaagaattc

SEQ ID NO: 76208 - DNA, 15 bp, Homo sapiens
agcaaagcaagaatt

SEQ ID NO: 76209 - DNA, 15 bp, Homo sapiens
tagcaaagcaagaat

SEQ ID NO: 76210 - DNA, 15 bp, Homo sapiens
gtagcaaagcaagaa

SEQ ID NO: 76211 - DNA, 15 bp, Homo sapiens
agtagcaaagcaaga

SEQ ID NO: 76212 - DNA, 15 bp, Homo sapiens
aagtagcaaagcaag

SEQ ID NO: 76213 - DNA, 15 bp, Homo sapiens
taagtagcaaagcaa

SEQ ID NO: 76214 - DNA, 15 bp, Homo sapiens
ataagtagcaaagca

SEQ ID NO: 76215 - DNA, 15 bp, Homo sapiens
aataagtagcaaagc

SEQ ID NO: 76216 - DNA, 15 bp, Homo sapiens
taataagtagcaaag

SEQ ID NO: 76217 - DNA, 15 bp, Homo sapiens
ttaataagtagcaaa

SEQ ID NO: 76218 - DNA, 15 bp, Homo sapiens
gttaataagtagcaa

SEQ ID NO: 76219 - DNA, 15 bp, Homo sapiens
agttaataagtagca

SEQ ID NO: 76220 - DNA, 15 bp, Homo sapiens
aagttaataagtagc

SEQ ID NO: 76221 - DNA, 15 bp, Homo sapiens
aaagttaataagtag

SEQ ID NO: 76222 - DNA, 15 bp, Homo sapiens
taaagttaataagta

SEQ ID NO: 76223 - DNA, 15 bp, Homo sapiens
ctaaagttaataagt

SEQ ID NO: 76224 - DNA, 15 bp, Homo sapiens
tctaaagttaataag

SEQ ID NO: 76225 - DNA, 15 bp, Homo sapiens
ttctaaagttaataa

SEQ ID NO: 76226 - DNA, 15 bp, Homo sapiens
gttctaaagttaata

SEQ ID NO: 76227 - DNA, 15 bp, Homo sapiens
agttctaaagttaat

SEQ ID NO: 76228 - DNA, 15 bp, Homo sapiens
aagttctaaagttaa

SEQ ID NO: 76229 - DNA, 15 bp, Homo sapiens
taagttctaaagtta

SEQ ID NO: 76230 - DNA, 15 bp, Homo sapiens
ttaagttctaaagtt

SEQ ID NO: 76231 - DNA, 15 bp, Homo sapiens
cttaagttctaaagt

SEQ ID NO: 76232 - DNA, 15 bp, Homo sapiens
ccttaagttctaaag

SEQ ID NO: 76233 - DNA, 15 bp, Homo sapiens
gccttaagttctaaa

SEQ ID NO: 76234 - DNA, 15 bp, Homo sapiens
tgccttaagttctaa

SEQ ID NO: 76235 - DNA, 15 bp, Homo sapiens
ttgccttaagttcta

SEQ ID NO: 76236 - DNA, 15 bp, Homo sapiens
attgccttaagttct

SEQ ID NO: 76237 - DNA, 15 bp, Homo sapiens
aattgccttaagttc

SEQ ID NO: 76238 - DNA, 15 bp, Homo sapiens
gaattgccttaagtt

SEQ ID NO: 76239 - DNA, 15 bp, Homo sapiens
tgaattgccttaagt

SEQ ID NO: 76240 - DNA, 15 bp, Homo sapiens
ctgaattgccttaag

SEQ ID NO: 76241 - DNA, 15 bp, Homo sapiens
actgaattgccttaa

SEQ ID NO: 76242 - DNA, 15 bp, Homo sapiens
aactgaattgcctta

SEQ ID NO: 76243 - DNA, 15 bp, Homo sapiens
taactgaattgcctt

SEQ ID NO: 76244 - DNA, 15 bp, Homo sapiens
ttaactgaattgcct

SEQ ID NO: 76245 - DNA, 15 bp, Homo sapiens
gttaactgaattgcc

SEQ ID NO: 76246 - DNA, 15 bp, Homo sapiens
agttaactgaattgc

SEQ ID NO: 76247 - DNA, 15 bp, Homo sapiens
aagttaactgaattg

SEQ ID NO: 76248 - DNA, 15 bp, Homo sapiens
gaagttaactgaatt

SEQ ID NO: 76249 - DNA, 15 bp, Homo sapiens
agaagttaactgaat

SEQ ID NO: 76250 - DNA, 15 bp, Homo sapiens
gagaagttaactgaa

SEQ ID NO: 76251 - DNA, 15 bp, Homo sapiens
agagaagttaactga

SEQ ID NO: 76252 - DNA, 15 bp, Homo sapiens
cagagaagttaactg

SEQ ID NO: 76253 - DNA, 15 bp, Homo sapiens
acagagaagttaact

SEQ ID NO: 76254 - DNA, 15 bp, Homo sapiens
cacagagaagttaac

SEQ ID NO: 76255 - DNA, 15 bp, Homo sapiens
gcacagagaagttaa

SEQ ID NO: 76256 - DNA, 15 bp, Homo sapiens
ggcacagagaagtta

SEQ ID NO: 76257 - DNA, 15 bp, Homo sapiens
aggcacagagaagtt

SEQ ID NO: 76258 - DNA, 15 bp, Homo sapiens
gaggcacagagaagt

SEQ ID NO: 76259 - DNA, 15 bp, Homo sapiens
cgaggcacagagaag

SEQ ID NO: 76260 - DNA, 15 bp, Homo sapiens
ccgaggcacagagaa

SEQ ID NO: 76261 - DNA, 15 bp, Homo sapiens
accgaggcacagaga

SEQ ID NO: 76262 - DNA, 15 bp, Homo sapiens
aaccgaggcacagag

SEQ ID NO: 76263 - DNA, 15 bp, Homo sapiens
gaaccgaggcacaga

SEQ ID NO: 76264 - DNA, 15 bp, Homo sapiens
agaaccgaggcacag

SEQ ID NO: 76265 - DNA, 15 bp, Homo sapiens
gagaaccgaggcaca

SEQ ID NO: 76266 - DNA, 15 bp, Homo sapiens
agagaaccgaggcac

SEQ ID NO: 76267 - DNA, 15 bp, Homo sapiens
gagagaaccgaggca

SEQ ID NO: 76268 - DNA, 15 bp, Homo sapiens
tgagagaaccgaggc

SEQ ID NO: 76269 - DNA, 15 bp, Homo sapiens
atgagagaaccgagg

SEQ ID NO: 76270 - DNA, 15 bp, Homo sapiens
gatgagagaaccgag

SEQ ID NO: 76271 - DNA, 15 bp, Homo sapiens
agatgagagaaccga

SEQ ID NO: 76272 - DNA, 15 bp, Homo sapiens
cagatgagagaaccg

SEQ ID NO: 76273 - DNA, 15 bp, Homo sapiens
acagatgagagaacc

SEQ ID NO: 76274 - DNA, 15 bp, Homo sapiens
cacagatgagagaac

SEQ ID NO: 76275 - DNA, 15 bp, Homo sapiens
acacagatgagagaa

SEQ ID NO: 76276 - DNA, 15 bp, Homo sapiens
tacacagatgagaga

SEQ ID NO: 76277 - DNA, 15 bp, Homo sapiens
ttacacagatgagag

SEQ ID NO: 76278 - DNA, 15 bp, Homo sapiens
tttacacagatgaga

SEQ ID NO: 76279 - DNA, 15 bp, Homo sapiens
atttacacagatgag

SEQ ID NO: 76280 - DNA, 15 bp, Homo sapiens
tatttacacagatga

SEQ ID NO: 76281 - DNA, 15 bp, Homo sapiens
ctatttacacagatg

SEQ ID NO: 76282 - DNA, 15 bp, Homo sapiens
cctatttacacagat

SEQ ID NO: 76283 - DNA, 15 bp, Homo sapiens
tcctatttacacaga

SEQ ID NO: 76284 - DNA, 15 bp, Homo sapiens
ttcctatttacacag

SEQ ID NO: 76285 - DNA, 15 bp, Homo sapiens
attcctatttacaca

SEQ ID NO: 76286 - DNA, 15 bp, Homo sapiens
tattcctatttacac

SEQ ID NO: 76287 - DNA, 15 bp, Homo sapiens
gtattcctatttaca

SEQ ID NO: 76288 - DNA, 15 bp, Homo sapiens
agtattcctatttac

SEQ ID NO: 76289 - DNA, 15 bp, Homo sapiens
tagtattcctattta

SEQ ID NO: 76290 - DNA, 15 bp, Homo sapiens
atagtattcctattt

SEQ ID NO: 76291 - DNA, 15 bp, Homo sapiens
aatagtattcctatt

SEQ ID NO: 76292 - DNA, 15 bp, Homo sapiens
aaatagtattcctat

SEQ ID NO: 76293 - DNA, 15 bp, Homo sapiens
gaaatagtattccta

SEQ ID NO: 76294 - DNA, 15 bp, Homo sapiens
ggaaatagtattcct

SEQ ID NO: 76295 - DNA, 15 bp, Homo sapiens
gggaaatagtattcc

SEQ ID NO: 76296 - DNA, 15 bp, Homo sapiens
agggaaatagtattc

SEQ ID NO: 76297 - DNA, 15 bp, Homo sapiens
aagggaaatagtatt

SEQ ID NO: 76298 - DNA, 15 bp, Homo sapiens
aaagggaaatagtat

SEQ ID NO: 76299 - DNA, 15 bp, Homo sapiens
gaaagggaaatagta

SEQ ID NO: 76300 - DNA, 15 bp, Homo sapiens
tgaaagggaaatagt

SEQ ID NO: 76301 - DNA, 15 bp, Homo sapiens
ttgaaagggaaatag

SEQ ID NO: 76302 - DNA, 15 bp, Homo sapiens
cttgaaagggaaata

SEQ ID NO: 76303 - DNA, 15 bp, Homo sapiens
ccttgaaagggaaat

SEQ ID NO: 76304 - DNA, 15 bp, Homo sapiens
accttgaaagggaaa

SEQ ID NO: 76305 - DNA, 15 bp, Homo sapiens
aaccttgaaagggaa

SEQ ID NO: 76306 - DNA, 15 bp, Homo sapiens
caaccttgaaaggga

SEQ ID NO: 76307 - DNA, 15 bp, Homo sapiens
acaaccttgaaaggg

SEQ ID NO: 76308 - DNA, 15 bp, Homo sapiens
cacaaccttgaaagg

SEQ ID NO: 76309 - DNA, 15 bp, Homo sapiens
tcacaaccttgaaag

SEQ ID NO: 76310 - DNA, 15 bp, Homo sapiens
ctcacaaccttgaaa

SEQ ID NO: 76311 - DNA, 15 bp, Homo sapiens
cctcacaaccttgaa

SEQ ID NO: 76312 - DNA, 15 bp, Homo sapiens
gcctcacaaccttga

SEQ ID NO: 76313 - DNA, 15 bp, Homo sapiens
agcctcacaaccttg

SEQ ID NO: 76314 - DNA, 15 bp, Homo sapiens
tagcctcacaacctt

SEQ ID NO: 76315 - DNA, 15 bp, Homo sapiens
ttagcctcacaacct

SEQ ID NO: 76316 - DNA, 15 bp, Homo sapiens
tttagcctcacaacc

SEQ ID NO: 76317 - DNA, 15 bp, Homo sapiens
atttagcctcacaac

SEQ ID NO: 76318 - DNA, 15 bp, Homo sapiens
catttagcctcacaa

SEQ ID NO: 76319 - DNA, 15 bp, Homo sapiens
tcatttagcctcaca

SEQ ID NO: 76320 - DNA, 15 bp, Homo sapiens
ctcatttagcctcac

SEQ ID NO: 76321 - DNA, 15 bp, Homo sapiens
tctcatttagcctca

SEQ ID NO: 76322 - DNA, 15 bp, Homo sapiens
atctcatttagcctc

SEQ ID NO: 76323 - DNA, 15 bp, Homo sapiens
gatctcatttagcct

SEQ ID NO: 76324 - DNA, 15 bp, Homo sapiens
tgatctcatttagcc

SEQ ID NO: 76325 - DNA, 15 bp, Homo sapiens
atgatctcatttagc

SEQ ID NO: 76326 - DNA, 15 bp, Homo sapiens
tatgatctcatttag

SEQ ID NO: 76327 - DNA, 15 bp, Homo sapiens
atatgatctcattta

SEQ ID NO: 76328 - DNA, 15 bp, Homo sapiens
aatatgatctcattt

SEQ ID NO: 76329 - DNA, 15 bp, Homo sapiens
caatatgatctcatt

SEQ ID NO: 76330 - DNA, 15 bp, Homo sapiens
ccaatatgatctcat

SEQ ID NO: 76331 - DNA, 15 bp, Homo sapiens
accaatatgatctca

SEQ ID NO: 76332 - DNA, 15 bp, Homo sapiens
caccaatatgatctc

SEQ ID NO: 76333 - DNA, 15 bp, Homo sapiens
tcaccaatatgatct

SEQ ID NO: 76334 - DNA, 15 bp, Homo sapiens
ttcaccaatatgatc

SEQ ID NO: 76335 - DNA, 15 bp, Homo sapiens
attcaccaatatgat

SEQ ID NO: 76336 - DNA, 15 bp, Homo sapiens
cattcaccaatatga

SEQ ID NO: 76337 - DNA, 15 bp, Homo sapiens
tcattcaccaatatg

SEQ ID NO: 76338 - DNA, 15 bp, Homo sapiens
ctcattcaccaatat

SEQ ID NO: 76339 - DNA, 15 bp, Homo sapiens
cctcattcaccaata

SEQ ID NO: 76340 - DNA, 15 bp, Homo sapiens
acctcattcaccaat

SEQ ID NO: 76341 - DNA, 15 bp, Homo sapiens
tacctcattcaccaa

SEQ ID NO: 76342 - DNA, 15 bp, Homo sapiens
ttacctcattcacca

SEQ ID NO: 76343 - DNA, 15 bp, Homo sapiens
attacctcattcacc

SEQ ID NO: 76344 - DNA, 15 bp, Homo sapiens
tattacctcattcac

SEQ ID NO: 76345 - DNA, 15 bp, Homo sapiens
gtattacctcattca

SEQ ID NO: 76346 - DNA, 15 bp, Homo sapiens
agtattacctcattc

SEQ ID NO: 76347 - DNA, 15 bp, Homo sapiens
aagtattacctcatt

SEQ ID NO: 76348 - DNA, 15 bp, Homo sapiens
caagtattacctcat

SEQ ID NO: 76349 - DNA, 15 bp, Homo sapiens
ccaagtattacctca

SEQ ID NO: 76350 - DNA, 15 bp, Homo sapiens
tccaagtattacctc

SEQ ID NO: 76351 - DNA, 15 bp, Homo sapiens
gtccaagtattacct

SEQ ID NO: 76352 - DNA, 15 bp, Homo sapiens
tgtccaagtattacc

SEQ ID NO: 76353 - DNA, 15 bp, Homo sapiens
atgtccaagtattac

SEQ ID NO: 76354 - DNA, 15 bp, Homo sapiens
tatgtccaagtatta

SEQ ID NO: 76355 - DNA, 15 bp, Homo sapiens
ctatgtccaagtatt

SEQ ID NO: 76356 - DNA, 15 bp, Homo sapiens
actatgtccaagtat

SEQ ID NO: 76357 - DNA, 15 bp, Homo sapiens
tactatgtccaagta

SEQ ID NO: 76358 - DNA, 15 bp, Homo sapiens
ttactatgtccaagt

SEQ ID NO: 76359 - DNA, 15 bp, Homo sapiens
tttactatgtccaag

SEQ ID NO: 76360 - DNA, 15 bp, Homo sapiens
ttttactatgtccaa

SEQ ID NO: 76361 - DNA, 15 bp, Homo sapiens
cttttactatgtcca

SEQ ID NO: 76362 - DNA, 15 bp, Homo sapiens
gcttttactatgtcc

SEQ ID NO: 76363 - DNA, 15 bp, Homo sapiens
agcttttactatgtc

SEQ ID NO: 76364 - DNA, 15 bp, Homo sapiens
gagcttttactatgt

SEQ ID NO: 76365 - DNA, 15 bp, Homo sapiens
tgagcttttactatg

SEQ ID NO: 76366 - DNA, 15 bp, Homo sapiens
ctgagcttttactat

SEQ ID NO: 76367 - DNA, 15 bp, Homo sapiens
actgagcttttacta

SEQ ID NO: 76368 - DNA, 15 bp, Homo sapiens
tactgagcttttact

SEQ ID NO: 76369 - DNA, 15 bp, Homo sapiens
ttactgagcttttac

SEQ ID NO: 76370 - DNA, 15 bp, Homo sapiens
attactgagctttta

SEQ ID NO: 76371 - DNA, 15 bp, Homo sapiens
aattactgagctttt

SEQ ID NO: 76372 - DNA, 15 bp, Homo sapiens
aaattactgagcttt

SEQ ID NO: 76373 - DNA, 15 bp, Homo sapiens
aaaattactgagctt

SEQ ID NO: 76374 - DNA, 15 bp, Homo sapiens
aaaaattactgagct

SEQ ID NO: 76375 - DNA, 15 bp, Homo sapiens
gaaaaattactgagc

SEQ ID NO: 76376 - DNA, 15 bp, Homo sapiens
agaaaaattactgag

SEQ ID NO: 76377 - DNA, 15 bp, Homo sapiens
gagaaaaattactga

SEQ ID NO: 76378 - DNA, 15 bp, Homo sapiens
agagaaaaattactg

SEQ ID NO: 76379 - DNA, 15 bp, Homo sapiens
tagagaaaaattact

SEQ ID NO: 76380 - DNA, 15 bp, Homo sapiens
atagagaaaaattac

SEQ ID NO: 76381 - DNA, 15 bp, Homo sapiens
aatagagaaaaatta

SEQ ID NO: 76382 - DNA, 15 bp, Homo sapiens
gaatagagaaaaatt

SEQ ID NO: 76383 - DNA, 15 bp, Homo sapiens
agaatagagaaaaat

SEQ ID NO: 76384 - DNA, 15 bp, Homo sapiens
aagaatagagaaaaa

SEQ ID NO: 76385 - DNA, 15 bp, Homo sapiens
caagaatagagaaaa

SEQ ID NO: 76386 - DNA, 15 bp, Homo sapiens
acaagaatagagaaa

SEQ ID NO: 76387 - DNA, 15 bp, Homo sapiens
tacaagaatagagaa

SEQ ID NO: 76388 - DNA, 15 bp, Homo sapiens
ttacaagaatagaga

SEQ ID NO: 76389 - DNA, 15 bp, Homo sapiens
attacaagaatagag

SEQ ID NO: 76390 - DNA, 15 bp, Homo sapiens
aattacaagaataga

SEQ ID NO: 76391 - DNA, 15 bp, Homo sapiens
caattacaagaatag

SEQ ID NO: 76392 - DNA, 15 bp, Homo sapiens
gcaattacaagaata

SEQ ID NO: 76393 - DNA, 15 bp, Homo sapiens
agcaattacaagaat

SEQ ID NO: 76394 - DNA, 15 bp, Homo sapiens
tagcaattacaagaa

SEQ ID NO: 76395 - DNA, 15 bp, Homo sapiens
atagcaattacaaga

SEQ ID NO: 76396 - DNA, 15 bp, Homo sapiens
gatagcaattacaag

SEQ ID NO: 76397 - DNA, 15 bp, Homo sapiens
agatagcaattacaa

SEQ ID NO: 76398 - DNA, 15 bp, Homo sapiens
cagatagcaattaca

SEQ ID NO: 76399 - DNA, 15 bp, Homo sapiens
acagatagcaattac

SEQ ID NO: 76400 - DNA, 15 bp, Homo sapiens
aacagatagcaatta

SEQ ID NO: 76401 - DNA, 15 bp, Homo sapiens
taacagatagcaatt

SEQ ID NO: 76402 - DNA, 15 bp, Homo sapiens
ataacagatagcaat

SEQ ID NO: 76403 - DNA, 15 bp, Homo sapiens
tataacagatagcaa

SEQ ID NO: 76404 - DNA, 15 bp, Homo sapiens
atataacagatagca

SEQ ID NO: 76405 - DNA, 15 bp, Homo sapiens
gatataacagatagc

SEQ ID NO: 76406 - DNA, 15 bp, Homo sapiens
agatataacagatag

SEQ ID NO: 76407 - DNA, 15 bp, Homo sapiens
aagatataacagata

SEQ ID NO: 76408 - DNA, 15 bp, Homo sapiens
aaagatataacagat

SEQ ID NO: 76409 - DNA, 15 bp, Homo sapiens
taaagatataacaga

SEQ ID NO: 76410 - DNA, 15 bp, Homo sapiens
ataaagatataacag

SEQ ID NO: 76411 - DNA, 15 bp, Homo sapiens
aataaagatataaca

SEQ ID NO: 76412 - DNA, 15 bp, Homo sapiens
taataaagatataac

SEQ ID NO: 76413 - DNA, 15 bp, Homo sapiens
gtaataaagatataa

SEQ ID NO: 76414 - DNA, 15 bp, Homo sapiens
tgtaataaagatata

SEQ ID NO: 76415 - DNA, 15 bp, Homo sapiens
ttgtaataaagatat

SEQ ID NO: 76416 - DNA, 15 bp, Homo sapiens
tttgtaataaagata

SEQ ID NO: 76417 - DNA, 15 bp, Homo sapiens
atttgtaataaagat

SEQ ID NO: 76418 - DNA, 15 bp, Homo sapiens
catttgtaataaaga

SEQ ID NO: 76419 - DNA, 15 bp, Homo sapiens
tcatttgtaataaag

SEQ ID NO: 76420 - DNA, 15 bp, Homo sapiens
ttcatttgtaataaa

SEQ ID NO: 76421 - DNA, 15 bp, Homo sapiens
tttcatttgtaataa

SEQ ID NO: 76422 - DNA, 15 bp, Homo sapiens
ttttcatttgtaata

SEQ ID NO: 76423 - DNA, 15 bp, Homo sapiens
tttttcatttgtaat

SEQ ID NO: 76424 - DNA, 15 bp, Homo sapiens
atttttcatttgtaa

SEQ ID NO: 76425 - DNA, 15 bp, Homo sapiens
gatttttcatttgta

SEQ ID NO: 76426 - DNA, 15 bp, Homo sapiens
agatttttcatttgt

SEQ ID NO: 76427 - DNA, 15 bp, Homo sapiens
tagatttttcatttg

SEQ ID NO: 76428 - DNA, 15 bp, Homo sapiens
atagatttttcattt

SEQ ID NO: 76429 - DNA, 15 bp, Homo sapiens
catagatttttcatt

SEQ ID NO: 76430 - DNA, 15 bp, Homo sapiens
ccatagatttttcat

SEQ ID NO: 76431 - DNA, 15 bp, Homo sapiens
accatagatttttca

SEQ ID NO: 76432 - DNA, 15 bp, Homo sapiens
aaccatagatttttc

SEQ ID NO: 76433 - DNA, 15 bp, Homo sapiens
taaccatagattttt

SEQ ID NO: 76434 - DNA, 15 bp, Homo sapiens
ataaccatagatttt

SEQ ID NO: 76435 - DNA, 15 bp, Homo sapiens
aataaccatagattt

SEQ ID NO: 76436 - DNA, 15 bp, Homo sapiens
gaataaccatagatt

SEQ ID NO: 76437 - DNA, 15 bp, Homo sapiens
tgaataaccatagat

SEQ ID NO: 76438 - DNA, 15 bp, Homo sapiens
ctgaataaccataga

SEQ ID NO: 76439 - DNA, 15 bp, Homo sapiens
actgaataaccatag

SEQ ID NO: 76440 - DNA, 15 bp, Homo sapiens
gactgaataaccata

SEQ ID NO: 76441 - DNA, 15 bp, Homo sapiens
agactgaataaccat

SEQ ID NO: 76442 - DNA, 15 bp, Homo sapiens
gagactgaataacca

SEQ ID NO: 76443 - DNA, 15 bp, Homo sapiens
tgagactgaataacc

SEQ ID NO: 76444 - DNA, 15 bp, Homo sapiens
ttgagactgaataac

SEQ ID NO: 76445 - DNA, 15 bp, Homo sapiens
cttgagactgaataa

SEQ ID NO: 76446 - DNA, 15 bp, Homo sapiens
gcttgagactgaata

SEQ ID NO: 76447 - DNA, 15 bp, Homo sapiens
tgcttgagactgaat

SEQ ID NO: 76448 - DNA, 15 bp, Homo sapiens
atgcttgagactgaa

SEQ ID NO: 76449 - DNA, 15 bp, Homo sapiens
gatgcttgagactga

SEQ ID NO: 76450 - DNA, 15 bp, Homo sapiens
tgatgcttgagactg

SEQ ID NO: 76451 - DNA, 15 bp, Homo sapiens
gtgatgcttgagact

SEQ ID NO: 76452 - DNA, 15 bp, Homo sapiens
tgtgatgcttgagac

SEQ ID NO: 76453 - DNA, 15 bp, Homo sapiens
atgtgatgcttgaga

SEQ ID NO: 76454 - DNA, 15 bp, Homo sapiens
tatgtgatgcttgag

SEQ ID NO: 76455 - DNA, 15 bp, Homo sapiens
atatgtgatgcttga

SEQ ID NO: 76456 - DNA, 15 bp, Homo sapiens
gatatgtgatgcttg

SEQ ID NO: 76457 - DNA, 15 bp, Homo sapiens
agatatgtgatgctt

SEQ ID NO: 76458 - DNA, 15 bp, Homo sapiens
aagatatgtgatgct

SEQ ID NO: 76459 - DNA, 15 bp, Homo sapiens
gaagatatgtgatgc

SEQ ID NO: 76460 - DNA, 15 bp, Homo sapiens
ggaagatatgtgatg

SEQ ID NO: 76461 - DNA, 15 bp, Homo sapiens
aggaagatatgtgat

SEQ ID NO: 76462 - DNA, 15 bp, Homo sapiens
aaggaagatatgtga

SEQ ID NO: 76463 - DNA, 15 bp, Homo sapiens
aaaggaagatatgtg

SEQ ID NO: 76464 - DNA, 15 bp, Homo sapiens
gaaaggaagatatgt

SEQ ID NO: 76465 - DNA, 15 bp, Homo sapiens
tgaaaggaagatatg

SEQ ID NO: 76466 - DNA, 15 bp, Homo sapiens
ctgaaaggaagatat

SEQ ID NO: 76467 - DNA, 15 bp, Homo sapiens
gctgaaaggaagata

SEQ ID NO: 76468 - DNA, 15 bp, Homo sapiens
agctgaaaggaagat

SEQ ID NO: 76469 - DNA, 15 bp, Homo sapiens
gagctgaaaggaaga

SEQ ID NO: 76470 - DNA, 15 bp, Homo sapiens
tgagctgaaaggaag

SEQ ID NO: 76471 - DNA, 15 bp, Homo sapiens
atgagctgaaaggaa

SEQ ID NO: 76472 - DNA, 15 bp, Homo sapiens
aatgagctgaaagga

SEQ ID NO: 76473 - DNA, 15 bp, Homo sapiens
caatgagctgaaagg

SEQ ID NO: 76474 - DNA, 15 bp, Homo sapiens
gcaatgagctgaaag

SEQ ID NO: 76475 - DNA, 15 bp, Homo sapiens
tgcaatgagctgaaa

SEQ ID NO: 76476 - DNA, 15 bp, Homo sapiens
ctgcaatgagctgaa

SEQ ID NO: 76477 - DNA, 15 bp, Homo sapiens
tctgcaatgagctga

SEQ ID NO: 76478 - DNA, 15 bp, Homo sapiens
ttctgcaatgagctg

SEQ ID NO: 76479 - DNA, 15 bp, Homo sapiens
cttctgcaatgagct

SEQ ID NO: 76480 - DNA, 15 bp, Homo sapiens
gcttctgcaatgagc

SEQ ID NO: 76481 - DNA, 15 bp, Homo sapiens
agcttctgcaatgag

SEQ ID NO: 76482 - DNA, 15 bp, Homo sapiens
tagcttctgcaatga

SEQ ID NO: 76483 - DNA, 15 bp, Homo sapiens
ttagcttctgcaatg

SEQ ID NO: 76484 - DNA, 15 bp, Homo sapiens
cttagcttctgcaat

SEQ ID NO: 76485 - DNA, 15 bp, Homo sapiens
tcttagcttctgcaa

SEQ ID NO: 76486 - DNA, 15 bp, Homo sapiens
ttcttagcttctgca

SEQ ID NO: 76487 - DNA, 15 bp, Homo sapiens
gttcttagcttctgc

SEQ ID NO: 76488 - DNA, 15 bp, Homo sapiens
agttcttagcttctg

SEQ ID NO: 76489 - DNA, 15 bp, Homo sapiens
cagttcttagcttct

SEQ ID NO: 76490 - DNA, 15 bp, Homo sapiens
tcagttcttagcttc

SEQ ID NO: 76491 - DNA, 15 bp, Homo sapiens
ctcagttcttagctt

SEQ ID NO: 76492 - DNA, 15 bp, Homo sapiens
cctcagttcttagct

SEQ ID NO: 76493 - DNA, 15 bp, Homo sapiens
acctcagttcttagc

SEQ ID NO: 76494 - DNA, 15 bp, Homo sapiens
tacctcagttcttag

SEQ ID NO: 76495 - DNA, 15 bp, Homo sapiens
ttacctcagttctta

SEQ ID NO: 76496 - DNA, 15 bp, Homo sapiens
tttacctcagttctt

SEQ ID NO: 76497 - DNA, 15 bp, Homo sapiens
ttttacctcagttct

SEQ ID NO: 76498 - DNA, 15 bp, Homo sapiens
tttttacctcagttc

SEQ ID NO: 76499 - DNA, 15 bp, Homo sapiens
ttttttacctcagtt

SEQ ID NO: 76500 - DNA, 15 bp, Homo sapiens
tttttttacctcagt

SEQ ID NO: 76501 - DNA, 15 bp, Homo sapiens
ttttttttacctcag

SEQ ID NO: 76502 - DNA, 15 bp, Homo sapiens
tttttttttacctca

SEQ ID NO: 76503 - DNA, 15 bp, Homo sapiens
ttttttttttacctc

SEQ ID NO: 76504 - DNA, 15 bp, Homo sapiens
cttttttttttacct

SEQ ID NO: 76505 - DNA, 15 bp, Homo sapiens
acttttttttttacc

SEQ ID NO: 76506 - DNA, 15 bp, Homo sapiens
gacttttttttttac

SEQ ID NO: 76507 - DNA, 15 bp, Homo sapiens
agactttttttttta

SEQ ID NO: 76508 - DNA, 15 bp, Homo sapiens
aagactttttttttt

SEQ ID NO: 76509 - DNA, 15 bp, Homo sapiens
taagacttttttttt

SEQ ID NO: 76510 - DNA, 15 bp, Homo sapiens
ttaagactttttttt

SEQ ID NO: 76511 - DNA, 15 bp, Homo sapiens
tttaagacttttttt

SEQ ID NO: 76512 - DNA, 15 bp, Homo sapiens
ctttaagactttttt

SEQ ID NO: 76513 - DNA, 15 bp, Homo sapiens
gctttaagacttttt

SEQ ID NO: 76514 - DNA, 15 bp, Homo sapiens
agctttaagactttt

SEQ ID NO: 76515 - DNA, 15 bp, Homo sapiens
cagctttaagacttt

SEQ ID NO: 76516 - DNA, 15 bp, Homo sapiens
acagctttaagactt

SEQ ID NO: 76517 - DNA, 15 bp, Homo sapiens
aacagctttaagact

SEQ ID NO: 76518 - DNA, 15 bp, Homo sapiens
taacagctttaagac

SEQ ID NO: 76519 - DNA, 15 bp, Homo sapiens
ttaacagctttaaga

SEQ ID NO: 76520 - DNA, 15 bp, Homo sapiens
tttaacagctttaag

SEQ ID NO: 76521 - DNA, 15 bp, Homo sapiens
ttttaacagctttaa

SEQ ID NO: 76522 - DNA, 15 bp, Homo sapiens
tttttaacagcttta

SEQ ID NO: 76523 - DNA, 15 bp, Homo sapiens
gtttttaacagcttt

SEQ ID NO: 76524 - DNA, 15 bp, Homo sapiens
ggtttttaacagctt

SEQ ID NO: 76525 - DNA, 15 bp, Homo sapiens
aggtttttaacagct

SEQ ID NO: 76526 - DNA, 15 bp, Homo sapiens
taggtttttaacagc

SEQ ID NO: 76527 - DNA, 15 bp, Homo sapiens
ttaggtttttaacag

SEQ ID NO: 76528 - DNA, 15 bp, Homo sapiens
tttaggtttttaaca

SEQ ID NO: 76529 - DNA, 15 bp, Homo sapiens
ttttaggtttttaac

SEQ ID NO: 76530 - DNA, 15 bp, Homo sapiens
attttaggtttttaa

SEQ ID NO: 76531 - DNA, 15 bp, Homo sapiens
aattttaggttttta

SEQ ID NO: 76532 - DNA, 15 bp, Homo sapiens
taattttaggttttt

SEQ ID NO: 76533 - DNA, 15 bp, Homo sapiens
ttaattttaggtttt

SEQ ID NO: 76534 - DNA, 15 bp, Homo sapiens
cttaattttaggttt

SEQ ID NO: 76535 - DNA, 15 bp, Homo sapiens
tcttaattttaggtt

SEQ ID NO: 76536 - DNA, 15 bp, Homo sapiens
atcttaattttaggt

SEQ ID NO: 76537 - DNA, 15 bp, Homo sapiens
gatcttaattttagg

SEQ ID NO: 76538 - DNA, 15 bp, Homo sapiens
agatcttaattttag

SEQ ID NO: 76539 - DNA, 15 bp, Homo sapiens
aagatcttaatttta

SEQ ID NO: 76540 - DNA, 15 bp, Homo sapiens
taagatcttaatttt

SEQ ID NO: 76541 - DNA, 15 bp, Homo sapiens
ataagatcttaattt

SEQ ID NO: 76542 - DNA, 15 bp, Homo sapiens
cataagatcttaatt

SEQ ID NO: 76543 - DNA, 15 bp, Homo sapiens
gcataagatcttaat

SEQ ID NO: 76544 - DNA, 15 bp, Homo sapiens
agcataagatcttaa

SEQ ID NO: 76545 - DNA, 15 bp, Homo sapiens
gagcataagatctta

SEQ ID NO: 76546 - DNA, 15 bp, Homo sapiens
ggagcataagatctt

SEQ ID NO: 76547 - DNA, 15 bp, Homo sapiens
tggagcataagatct

SEQ ID NO: 76548 - DNA, 15 bp, Homo sapiens
atggagcataagatc

SEQ ID NO: 76549 - DNA, 15 bp, Homo sapiens
catggagcataagat

SEQ ID NO: 76550 - DNA, 15 bp, Homo sapiens
acatggagcataaga

SEQ ID NO: 76551 - DNA, 15 bp, Homo sapiens
cacatggagcataag

SEQ ID NO: 76552 - DNA, 15 bp, Homo sapiens
gcacatggagcataa

SEQ ID NO: 76553 - DNA, 15 bp, Homo sapiens
agcacatggagcata

SEQ ID NO: 76554 - DNA, 15 bp, Homo sapiens
cagcacatggagcat

SEQ ID NO: 76555 - DNA, 15 bp, Homo sapiens
acagcacatggagca

SEQ ID NO: 76556 - DNA, 15 bp, Homo sapiens
aacagcacatggagc

SEQ ID NO: 76557 - DNA, 15 bp, Homo sapiens
caacagcacatggag

SEQ ID NO: 76558 - DNA, 15 bp, Homo sapiens
ccaacagcacatgga

SEQ ID NO: 76559 - DNA, 15 bp, Homo sapiens
accaacagcacatgg

SEQ ID NO: 76560 - DNA, 15 bp, Homo sapiens
aaccaacagcacatg

SEQ ID NO: 76561 - DNA, 15 bp, Homo sapiens
aaaccaacagcacat

SEQ ID NO: 76562 - DNA, 15 bp, Homo sapiens
taaaccaacagcaca

SEQ ID NO: 76563 - DNA, 15 bp, Homo sapiens
ctaaaccaacagcac

SEQ ID NO: 76564 - DNA, 15 bp, Homo sapiens
tctaaaccaacagca

SEQ ID NO: 76565 - DNA, 15 bp, Homo sapiens
atctaaaccaacagc

SEQ ID NO: 76566 - DNA, 15 bp, Homo sapiens
catctaaaccaacag

SEQ ID NO: 76567 - DNA, 15 bp, Homo sapiens
tcatctaaaccaaca

SEQ ID NO: 76568 - DNA, 15 bp, Homo sapiens
gtcatctaaaccaac

SEQ ID NO: 76569 - DNA, 15 bp, Homo sapiens
agtcatctaaaccaa

SEQ ID NO: 76570 - DNA, 15 bp, Homo sapiens
gagtcatctaaacca

SEQ ID NO: 76571 - DNA, 15 bp, Homo sapiens
tgagtcatctaaacc

SEQ ID NO: 76572 - DNA, 15 bp, Homo sapiens
ttgagtcatctaaac

SEQ ID NO: 76573 - DNA, 15 bp, Homo sapiens
gttgagtcatctaaa

SEQ ID NO: 76574 - DNA, 15 bp, Homo sapiens
agttgagtcatctaa

SEQ ID NO: 76575 - DNA, 15 bp, Homo sapiens
tagttgagtcatcta

SEQ ID NO: 76576 - DNA, 15 bp, Homo sapiens
gtagttgagtcatct

SEQ ID NO: 76577 - DNA, 15 bp, Homo sapiens
tgtagttgagtcatc

SEQ ID NO: 76578 - DNA, 15 bp, Homo sapiens
ctgtagttgagtcat

SEQ ID NO: 76579 - DNA, 15 bp, Homo sapiens
tctgtagttgagtca

SEQ ID NO: 76580 - DNA, 15 bp, Homo sapiens
ttctgtagttgagtc

SEQ ID NO: 76581 - DNA, 15 bp, Homo sapiens
gttctgtagttgagt

SEQ ID NO: 76582 - DNA, 15 bp, Homo sapiens
agttctgtagttgag

SEQ ID NO: 76583 - DNA, 15 bp, Homo sapiens
tagttctgtagttga

SEQ ID NO: 76584 - DNA, 15 bp, Homo sapiens
ttagttctgtagttg

SEQ ID NO: 76585 - DNA, 15 bp, Homo sapiens
cttagttctgtagtt

SEQ ID NO: 76586 - DNA, 15 bp, Homo sapiens
tcttagttctgtagt

SEQ ID NO: 76587 - DNA, 15 bp, Homo sapiens
atcttagttctgtag

SEQ ID NO: 76588 - DNA, 15 bp, Homo sapiens
aatcttagttctgta

SEQ ID NO: 76589 - DNA, 15 bp, Homo sapiens
aaatcttagttctgt

SEQ ID NO: 76590 - DNA, 15 bp, Homo sapiens
taaatcttagttctg

SEQ ID NO: 76591 - DNA, 15 bp, Homo sapiens
ctaaatcttagttct

SEQ ID NO: 76592 - DNA, 15 bp, Homo sapiens
tctaaatcttagttc

SEQ ID NO: 76593 - DNA, 15 bp, Homo sapiens
gtctaaatcttagtt

SEQ ID NO: 76594 - DNA, 15 bp, Homo sapiens
agtctaaatcttagt

SEQ ID NO: 76595 - DNA, 15 bp, Homo sapiens
tagtctaaatcttag

SEQ ID NO: 76596 - DNA, 15 bp, Homo sapiens
ttagtctaaatctta

SEQ ID NO: 76597 - DNA, 15 bp, Homo sapiens
tttagtctaaatctt

SEQ ID NO: 76598 - DNA, 15 bp, Homo sapiens
atttagtctaaatct

SEQ ID NO: 76599 - DNA, 15 bp, Homo sapiens
tatttagtctaaatc

SEQ ID NO: 76600 - DNA, 15 bp, Homo sapiens
ctatttagtctaaat

SEQ ID NO: 76601 - DNA, 15 bp, Homo sapiens
gctatttagtctaaa

SEQ ID NO: 76602 - DNA, 15 bp, Homo sapiens
agctatttagtctaa

SEQ ID NO: 76603 - DNA, 15 bp, Homo sapiens
tagctatttagtcta

SEQ ID NO: 76604 - DNA, 15 bp, Homo sapiens
ttagctatttagtct

SEQ ID NO: 76605 - DNA, 15 bp, Homo sapiens
cttagctatttagtc

SEQ ID NO: 76606 - DNA, 15 bp, Homo sapiens
acttagctatttagt

SEQ ID NO: 76607 - DNA, 15 bp, Homo sapiens
gacttagctatttag

SEQ ID NO: 76608 - DNA, 15 bp, Homo sapiens
tgacttagctattta

SEQ ID NO: 76609 - DNA, 15 bp, Homo sapiens
gtgacttagctattt

SEQ ID NO: 76610 - DNA, 15 bp, Homo sapiens
tgtgacttagctatt

SEQ ID NO: 76611 - DNA, 15 bp, Homo sapiens
ctgtgacttagctat

SEQ ID NO: 76612 - DNA, 15 bp, Homo sapiens
tctgtgacttagcta

SEQ ID NO: 76613 - DNA, 15 bp, Homo sapiens
gtctgtgacttagct

SEQ ID NO: 76614 - DNA, 15 bp, Homo sapiens
tgtctgtgacttagc

SEQ ID NO: 76615 - DNA, 15 bp, Homo sapiens
ttgtctgtgacttag

SEQ ID NO: 76616 - DNA, 15 bp, Homo sapiens
attgtctgtgactta

SEQ ID NO: 76617 - DNA, 15 bp, Homo sapiens
gattgtctgtgactt

SEQ ID NO: 76618 - DNA, 15 bp, Homo sapiens
tgattgtctgtgact

SEQ ID NO: 76619 - DNA, 15 bp, Homo sapiens
ttgattgtctgtgac

SEQ ID NO: 76620 - DNA, 15 bp, Homo sapiens
gttgattgtctgtga

SEQ ID NO: 76621 - DNA, 15 bp, Homo sapiens
tgttgattgtctgtg

SEQ ID NO: 76622 - DNA, 15 bp, Homo sapiens
atgttgattgtctgt

SEQ ID NO: 76623 - DNA, 15 bp, Homo sapiens
aatgttgattgtctg

SEQ ID NO: 76624 - DNA, 15 bp, Homo sapiens
aaatgttgattgtct

SEQ ID NO: 76625 - DNA, 15 bp, Homo sapiens
caaatgttgattgtc

SEQ ID NO: 76626 - DNA, 15 bp, Homo sapiens
acaaatgttgattgt

SEQ ID NO: 76627 - DNA, 15 bp, Homo sapiens
gacaaatgttgattg

SEQ ID NO: 76628 - DNA, 15 bp, Homo sapiens
tgacaaatgttgatt

SEQ ID NO: 76629 - DNA, 15 bp, Homo sapiens
ttgacaaatgttgat

SEQ ID NO: 76630 - DNA, 15 bp, Homo sapiens
cttgacaaatgttga

SEQ ID NO: 76631 - DNA, 15 bp, Homo sapiens
ccttgacaaatgttg

SEQ ID NO: 76632 - DNA, 15 bp, Homo sapiens
cccttgacaaatgtt

SEQ ID NO: 76633 - DNA, 15 bp, Homo sapiens
acccttgacaaatgt

SEQ ID NO: 76634 - DNA, 15 bp, Homo sapiens
cacccttgacaaatg

SEQ ID NO: 76635 - DNA, 15 bp, Homo sapiens
ccacccttgacaaat

SEQ ID NO: 76636 - DNA, 15 bp, Homo sapiens
accacccttgacaaa

SEQ ID NO: 76637 - DNA, 15 bp, Homo sapiens
aaccacccttgacaa

SEQ ID NO: 76638 - DNA, 15 bp, Homo sapiens
aaaccacccttgaca

SEQ ID NO: 76639 - DNA, 15 bp, Homo sapiens
caaaccacccttgac

SEQ ID NO: 76640 - DNA, 15 bp, Homo sapiens
ccaaaccacccttga

SEQ ID NO: 76641 - DNA, 15 bp, Homo sapiens
gccaaaccacccttg

SEQ ID NO: 76642 - DNA, 15 bp, Homo sapiens
agccaaaccaccctt

SEQ ID NO: 76643 - DNA, 15 bp, Homo sapiens
cagccaaaccaccct

SEQ ID NO: 76644 - DNA, 15 bp, Homo sapiens
acagccaaaccaccc

SEQ ID NO: 76645 - DNA, 15 bp, Homo sapiens
tacagccaaaccacc

SEQ ID NO: 76646 - DNA, 15 bp, Homo sapiens
ttacagccaaaccac

SEQ ID NO: 76647 - DNA, 15 bp, Homo sapiens
cttacagccaaacca

SEQ ID NO: 76648 - DNA, 15 bp, Homo sapiens
tcttacagccaaacc

SEQ ID NO: 76649 - DNA, 15 bp, Homo sapiens
ttcttacagccaaac

SEQ ID NO: 76650 - DNA, 15 bp, Homo sapiens
attcttacagccaaa

SEQ ID NO: 76651 - DNA, 15 bp, Homo sapiens
gattcttacagccaa

SEQ ID NO: 76652 - DNA, 15 bp, Homo sapiens
tgattcttacagcca

SEQ ID NO: 76653 - DNA, 15 bp, Homo sapiens
ctgattcttacagcc

SEQ ID NO: 76654 - DNA, 15 bp, Homo sapiens
tctgattcttacagc

SEQ ID NO: 76655 - DNA, 15 bp, Homo sapiens
ctctgattcttacag

SEQ ID NO: 76656 - DNA, 15 bp, Homo sapiens
tctctgattcttaca

SEQ ID NO: 76657 - DNA, 15 bp, Homo sapiens
ttctctgattcttac

SEQ ID NO: 76658 - DNA, 15 bp, Homo sapiens
gttctctgattctta

SEQ ID NO: 76659 - DNA, 15 bp, Homo sapiens
agttctctgattctt

SEQ ID NO: 76660 - DNA, 15 bp, Homo sapiens
cagttctctgattct

SEQ ID NO: 76661 - DNA, 15 bp, Homo sapiens
gcagttctctgattc

SEQ ID NO: 76662 - DNA, 15 bp, Homo sapiens
agcagttctctgatt

SEQ ID NO: 76663 - DNA, 15 bp, Homo sapiens
gagcagttctctgat

SEQ ID NO: 76664 - DNA, 15 bp, Homo sapiens
agagcagttctctga

SEQ ID NO: 76665 - DNA, 15 bp, Homo sapiens
cagagcagttctctg

SEQ ID NO: 76666 - DNA, 15 bp, Homo sapiens
ccagagcagttctct

SEQ ID NO: 76667 - DNA, 15 bp, Homo sapiens
gccagagcagttctc

SEQ ID NO: 76668 - DNA, 15 bp, Homo sapiens
agccagagcagttct

SEQ ID NO: 76669 - DNA, 15 bp, Homo sapiens
cagccagagcagttc

SEQ ID NO: 76670 - DNA, 15 bp, Homo sapiens
ccagccagagcagtt

SEQ ID NO: 76671 - DNA, 15 bp, Homo sapiens
accagccagagcagt

SEQ ID NO: 76672 - DNA, 15 bp, Homo sapiens
aaccagccagagcag

SEQ ID NO: 76673 - DNA, 15 bp, Homo sapiens
aaaccagccagagca

SEQ ID NO: 76674 - DNA, 15 bp, Homo sapiens
caaaccagccagagc

SEQ ID NO: 76675 - DNA, 15 bp, Homo sapiens
ccaaaccagccagag

SEQ ID NO: 76676 - DNA, 15 bp, Homo sapiens
cccaaaccagccaga

SEQ ID NO: 76677 - DNA, 15 bp, Homo sapiens
acccaaaccagccag

SEQ ID NO: 76678 - DNA, 15 bp, Homo sapiens
tacccaaaccagcca

SEQ ID NO: 76679 - DNA, 15 bp, Homo sapiens
ttacccaaaccagcc

SEQ ID NO: 76680 - DNA, 15 bp, Homo sapiens
tttacccaaaccagc

SEQ ID NO: 76681 - DNA, 15 bp, Homo sapiens
ttttacccaaaccag

SEQ ID NO: 76682 - DNA, 15 bp, Homo sapiens
cttttacccaaacca

SEQ ID NO: 76683 - DNA, 15 bp, Homo sapiens
gcttttacccaaacc

SEQ ID NO: 76684 - DNA, 15 bp, Homo sapiens
cgcttttacccaaac

SEQ ID NO: 76685 - DNA, 15 bp, Homo sapiens
tcgcttttacccaaa

SEQ ID NO: 76686 - DNA, 15 bp, Homo sapiens
atcgcttttacccaa

SEQ ID NO: 76687 - DNA, 15 bp, Homo sapiens
aatcgcttttaccca

SEQ ID NO: 76688 - DNA, 15 bp, Homo sapiens
aaatcgcttttaccc

SEQ ID NO: 76689 - DNA, 15 bp, Homo sapiens
caaatcgcttttacc

SEQ ID NO: 76690 - DNA, 15 bp, Homo sapiens
tcaaatcgcttttac

SEQ ID NO: 76691 - DNA, 15 bp, Homo sapiens
atcaaatcgctttta

SEQ ID NO: 76692 - DNA, 15 bp, Homo sapiens
tatcaaatcgctttt

SEQ ID NO: 76693 - DNA, 15 bp, Homo sapiens
atatcaaatcgcttt

SEQ ID NO: 76694 - DNA, 15 bp, Homo sapiens
tatatcaaatcgctt

SEQ ID NO: 76695 - DNA, 15 bp, Homo sapiens
ttatatcaaatcgct

SEQ ID NO: 76696 - DNA, 15 bp, Homo sapiens
cttatatcaaatcgc

SEQ ID NO: 76697 - DNA, 15 bp, Homo sapiens
ccttatatcaaatcg

SEQ ID NO: 76698 - DNA, 15 bp, Homo sapiens
tccttatatcaaatc

SEQ ID NO: 76699 - DNA, 15 bp, Homo sapiens
gtccttatatcaaat

SEQ ID NO: 76700 - DNA, 15 bp, Homo sapiens
tgtccttatatcaaa

SEQ ID NO: 76701 - DNA, 15 bp, Homo sapiens
gtgtccttatatcaa

SEQ ID NO: 76702 - DNA, 15 bp, Homo sapiens
agtgtccttatatca

SEQ ID NO: 76703 - DNA, 15 bp, Homo sapiens
gagtgtccttatatc

SEQ ID NO: 76704 - DNA, 15 bp, Homo sapiens
ggagtgtccttatat

SEQ ID NO: 76705 - DNA, 15 bp, Homo sapiens
tggagtgtccttata

SEQ ID NO: 76706 - DNA, 15 bp, Homo sapiens
ttggagtgtccttat

SEQ ID NO: 76707 - DNA, 15 bp, Homo sapiens
tttggagtgtcctta

SEQ ID NO: 76708 - DNA, 15 bp, Homo sapiens
ctttggagtgtcctt

SEQ ID NO: 76709 - DNA, 15 bp, Homo sapiens
actttggagtgtcct

SEQ ID NO: 76710 - DNA, 15 bp, Homo sapiens
cactttggagtgtcc

SEQ ID NO: 76711 - DNA, 15 bp, Homo sapiens
gcactttggagtgtc

SEQ ID NO: 76712 - DNA, 15 bp, Homo sapiens
tgcactttggagtgt

SEQ ID NO: 76713 - DNA, 15 bp, Homo sapiens
ttgcactttggagtg

SEQ ID NO: 76714 - DNA, 15 bp, Homo sapiens
cttgcactttggagt

SEQ ID NO: 76715 - DNA, 15 bp, Homo sapiens
tcttgcactttggag

SEQ ID NO: 76716 - DNA, 15 bp, Homo sapiens
ttcttgcactttgga

SEQ ID NO: 76717 - DNA, 15 bp, Homo sapiens
tttcttgcactttgg

SEQ ID NO: 76718 - DNA, 15 bp, Homo sapiens
atttcttgcactttg

SEQ ID NO: 76719 - DNA, 15 bp, Homo sapiens
tatttcttgcacttt

SEQ ID NO: 76720 - DNA, 15 bp, Homo sapiens
gtatttcttgcactt

SEQ ID NO: 76721 - DNA, 15 bp, Homo sapiens
tgtatttcttgcact

SEQ ID NO: 76722 - DNA, 15 bp, Homo sapiens
ctgtatttcttgcac

SEQ ID NO: 76723 - DNA, 15 bp, Homo sapiens
cctgtatttcttgca

SEQ ID NO: 76724 - DNA, 15 bp, Homo sapiens
gcctgtatttcttgc

SEQ ID NO: 76725 - DNA, 15 bp, Homo sapiens
tgcctgtatttcttg

SEQ ID NO: 76726 - DNA, 15 bp, Homo sapiens
ctgcctgtatttctt

SEQ ID NO: 76727 - DNA, 15 bp, Homo sapiens
actgcctgtatttct

SEQ ID NO: 76728 - DNA, 15 bp, Homo sapiens
aactgcctgtatttc

SEQ ID NO: 76729 - DNA, 15 bp, Homo sapiens
aaactgcctgtattt

SEQ ID NO: 76730 - DNA, 15 bp, Homo sapiens
caaactgcctgtatt

SEQ ID NO: 76731 - DNA, 15 bp, Homo sapiens
acaaactgcctgtat

SEQ ID NO: 76732 - DNA, 15 bp, Homo sapiens
cacaaactgcctgta

SEQ ID NO: 76733 - DNA, 15 bp, Homo sapiens
acacaaactgcctgt

SEQ ID NO: 76734 - DNA, 15 bp, Homo sapiens
cacacaaactgcctg

SEQ ID NO: 76735 - DNA, 15 bp, Homo sapiens
acacacaaactgcct

SEQ ID NO: 76736 - DNA, 15 bp, Homo sapiens
tacacacaaactgcc

SEQ ID NO: 76737 - DNA, 15 bp, Homo sapiens
ttacacacaaactgc

SEQ ID NO: 76738 - DNA, 15 bp, Homo sapiens
gttacacacaaactg

SEQ ID NO: 76739 - DNA, 15 bp, Homo sapiens
agttacacacaaact

SEQ ID NO: 76740 - DNA, 15 bp, Homo sapiens
cagttacacacaaac

SEQ ID NO: 76741 - DNA, 15 bp, Homo sapiens
ccagttacacacaaa

SEQ ID NO: 76742 - DNA, 15 bp, Homo sapiens
gccagttacacacaa

SEQ ID NO: 76743 - DNA, 15 bp, Homo sapiens
agccagttacacaca

SEQ ID NO: 76744 - DNA, 15 bp, Homo sapiens
gagccagttacacac

SEQ ID NO: 76745 - DNA, 15 bp, Homo sapiens
agagccagttacaca

SEQ ID NO: 76746 - DNA, 15 bp, Homo sapiens
aagagccagttacac

SEQ ID NO: 76747 - DNA, 15 bp, Homo sapiens
taagagccagttaca

SEQ ID NO: 76748 - DNA, 15 bp, Homo sapiens
gtaagagccagttac

SEQ ID NO: 76749 - DNA, 15 bp, Homo sapiens
tgtaagagccagtta

SEQ ID NO: 76750 - DNA, 15 bp, Homo sapiens
ctgtaagagccagtt

SEQ ID NO: 76751 - DNA, 15 bp, Homo sapiens
gctgtaagagccagt

SEQ ID NO: 76752 - DNA, 15 bp, Homo sapiens
ggctgtaagagccag

SEQ ID NO: 76753 - DNA, 15 bp, Homo sapiens
tggctgtaagagcca

SEQ ID NO: 76754 - DNA, 15 bp, Homo sapiens
gtggctgtaagagcc

SEQ ID NO: 76755 - DNA, 15 bp, Homo sapiens
tgtggctgtaagagc

SEQ ID NO: 76756 - DNA, 15 bp, Homo sapiens
ctgtggctgtaagag

SEQ ID NO: 76757 - DNA, 15 bp, Homo sapiens
cctgtggctgtaaga

SEQ ID NO: 76758 - DNA, 15 bp, Homo sapiens
gcctgtggctgtaag

SEQ ID NO: 76759 - DNA, 15 bp, Homo sapiens
agcctgtggctgtaa

SEQ ID NO: 76760 - DNA, 15 bp, Homo sapiens
gagcctgtggctgta

SEQ ID NO: 76761 - DNA, 15 bp, Homo sapiens
agagcctgtggctgt

SEQ ID NO: 76762 - DNA, 15 bp, Homo sapiens
tagagcctgtggctg

SEQ ID NO: 76763 - DNA, 15 bp, Homo sapiens
ttagagcctgtggct

SEQ ID NO: 76764 - DNA, 15 bp, Homo sapiens
attagagcctgtggc

SEQ ID NO: 76765 - DNA, 15 bp, Homo sapiens
tattagagcctgtgg

SEQ ID NO: 76766 - DNA, 15 bp, Homo sapiens
atattagagcctgtg

SEQ ID NO: 76767 - DNA, 15 bp, Homo sapiens
gatattagagcctgt

SEQ ID NO: 76768 - DNA, 15 bp, Homo sapiens
agatattagagcctg

SEQ ID NO: 76769 - DNA, 15 bp, Homo sapiens
cagatattagagcct

SEQ ID NO: 76770 - DNA, 15 bp, Homo sapiens
tcagatattagagcc

SEQ ID NO: 76771 - DNA, 15 bp, Homo sapiens
ctcagatattagagc

SEQ ID NO: 76772 - DNA, 15 bp, Homo sapiens
actcagatattagag

SEQ ID NO: 76773 - DNA, 15 bp, Homo sapiens
gactcagatattaga

SEQ ID NO: 76774 - DNA, 15 bp, Homo sapiens
agactcagatattag

SEQ ID NO: 76775 - DNA, 15 bp, Homo sapiens
aagactcagatatta

SEQ ID NO: 76776 - DNA, 15 bp, Homo sapiens
gaagactcagatatt

SEQ ID NO: 76777 - DNA, 15 bp, Homo sapiens
ggaagactcagatat

SEQ ID NO: 76778 - DNA, 15 bp, Homo sapiens
aggaagactcagata

SEQ ID NO: 76779 - DNA, 15 bp, Homo sapiens
taggaagactcagat

SEQ ID NO: 76780 - DNA, 15 bp, Homo sapiens
ataggaagactcaga

SEQ ID NO: 76781 - DNA, 15 bp, Homo sapiens
tataggaagactcag

SEQ ID NO: 76782 - DNA, 15 bp, Homo sapiens
gtataggaagactca

SEQ ID NO: 76783 - DNA, 15 bp, Homo sapiens
tgtataggaagactc

SEQ ID NO: 76784 - DNA, 15 bp, Homo sapiens
atgtataggaagact

SEQ ID NO: 76785 - DNA, 15 bp, Homo sapiens
gatgtataggaagac

SEQ ID NO: 76786 - DNA, 15 bp, Homo sapiens
agatgtataggaaga

SEQ ID NO: 76787 - DNA, 15 bp, Homo sapiens
tagatgtataggaag

SEQ ID NO: 76788 - DNA, 15 bp, Homo sapiens
atagatgtataggaa

SEQ ID NO: 76789 - DNA, 15 bp, Homo sapiens
aatagatgtatagga

SEQ ID NO: 76790 - DNA, 15 bp, Homo sapiens
gaatagatgtatagg

SEQ ID NO: 76791 - DNA, 15 bp, Homo sapiens
ggaatagatgtatag

SEQ ID NO: 76792 - DNA, 15 bp, Homo sapiens
tggaatagatgtata

SEQ ID NO: 76793 - DNA, 15 bp, Homo sapiens
atggaatagatgtat

SEQ ID NO: 76794 - DNA, 15 bp, Homo sapiens
aatggaatagatgta

SEQ ID NO: 76795 - DNA, 15 bp, Homo sapiens
gaatggaatagatgt

SEQ ID NO: 76796 - DNA, 15 bp, Homo sapiens
ggaatggaatagatg

SEQ ID NO: 76797 - DNA, 15 bp, Homo sapiens
aggaatggaatagat

SEQ ID NO: 76798 - DNA, 15 bp, Homo sapiens
gaggaatggaataga

SEQ ID NO: 76799 - DNA, 15 bp, Homo sapiens
cgaggaatggaatag

SEQ ID NO: 76800 - DNA, 15 bp, Homo sapiens
ccgaggaatggaata

SEQ ID NO: 76801 - DNA, 15 bp, Homo sapiens
tccgaggaatggaat

SEQ ID NO: 76802 - DNA, 15 bp, Homo sapiens
atccgaggaatggaa

SEQ ID NO: 76803 - DNA, 15 bp, Homo sapiens
catccgaggaatgga

SEQ ID NO: 76804 - DNA, 15 bp, Homo sapiens
gcatccgaggaatgg

SEQ ID NO: 76805 - DNA, 15 bp, Homo sapiens
agcatccgaggaatg

SEQ ID NO: 76806 - DNA, 15 bp, Homo sapiens
cagcatccgaggaat

SEQ ID NO: 76807 - DNA, 15 bp, Homo sapiens
acagcatccgaggaa

SEQ ID NO: 76808 - DNA, 15 bp, Homo sapiens
tacagcatccgagga

SEQ ID NO: 76809 - DNA, 15 bp, Homo sapiens
atacagcatccgagg

SEQ ID NO: 76810 - DNA, 15 bp, Homo sapiens
tatacagcatccgag

SEQ ID NO: 76811 - DNA, 15 bp, Homo sapiens
atatacagcatccga

SEQ ID NO: 76812 - DNA, 15 bp, Homo sapiens
aatatacagcatccg

SEQ ID NO: 76813 - DNA, 15 bp, Homo sapiens
gaatatacagcatcc

SEQ ID NO: 76814 - DNA, 15 bp, Homo sapiens
tgaatatacagcatc

SEQ ID NO: 76815 - DNA, 15 bp, Homo sapiens
ctgaatatacagcat

SEQ ID NO: 76816 - DNA, 15 bp, Homo sapiens
tctgaatatacagca

SEQ ID NO: 76817 - DNA, 15 bp, Homo sapiens
gtctgaatatacagc

SEQ ID NO: 76818 - DNA, 15 bp, Homo sapiens
ggtctgaatatacag

SEQ ID NO: 76819 - DNA, 15 bp, Homo sapiens
tggtctgaatataca

SEQ ID NO: 76820 - DNA, 15 bp, Homo sapiens
ctggtctgaatatac

SEQ ID NO: 76821 - DNA, 15 bp, Homo sapiens
gctggtctgaatata

SEQ ID NO: 76822 - DNA, 15 bp, Homo sapiens
agctggtctgaatat

SEQ ID NO: 76823 - DNA, 15 bp, Homo sapiens
aagctggtctgaata

SEQ ID NO: 76824 - DNA, 15 bp, Homo sapiens
gaagctggtctgaat

SEQ ID NO: 76825 - DNA, 15 bp, Homo sapiens
agaagctggtctgaa

SEQ ID NO: 76826 - DNA, 15 bp, Homo sapiens
aagaagctggtctga

SEQ ID NO: 76827 - DNA, 15 bp, Homo sapiens
taagaagctggtctg

SEQ ID NO: 76828 - DNA, 15 bp, Homo sapiens
gtaagaagctggtct

SEQ ID NO: 76829 - DNA, 15 bp, Homo sapiens
tgtaagaagctggtc

SEQ ID NO: 76830 - DNA, 15 bp, Homo sapiens
gtgtaagaagctggt

SEQ ID NO: 76831 - DNA, 15 bp, Homo sapiens
tgtgtaagaagctgg

SEQ ID NO: 76832 - DNA, 15 bp, Homo sapiens
atgtgtaagaagctg

SEQ ID NO: 76833 - DNA, 15 bp, Homo sapiens
tatgtgtaagaagct

SEQ ID NO: 76834 - DNA, 15 bp, Homo sapiens
gtatgtgtaagaagc

SEQ ID NO: 76835 - DNA, 15 bp, Homo sapiens
ggtatgtgtaagaag

SEQ ID NO: 76836 - DNA, 15 bp, Homo sapiens
gggtatgtgtaagaa

SEQ ID NO: 76837 - DNA, 15 bp, Homo sapiens
tgggtatgtgtaaga

SEQ ID NO: 76838 - DNA, 15 bp, Homo sapiens
ttgggtatgtgtaag

SEQ ID NO: 76839 - DNA, 15 bp, Homo sapiens
attgggtatgtgtaa

SEQ ID NO: 76840 - DNA, 15 bp, Homo sapiens
cattgggtatgtgta

SEQ ID NO: 76841 - DNA, 15 bp, Homo sapiens
acattgggtatgtgt

SEQ ID NO: 76842 - DNA, 15 bp, Homo sapiens
cacattgggtatgtg

SEQ ID NO: 76843 - DNA, 15 bp, Homo sapiens
tcacattgggtatgt

SEQ ID NO: 76844 - DNA, 15 bp, Homo sapiens
gtcacattgggtatg

SEQ ID NO: 76845 - DNA, 15 bp, Homo sapiens
tgtcacattgggtat

SEQ ID NO: 76846 - DNA, 15 bp, Homo sapiens
atgtcacattgggta

SEQ ID NO: 76847 - DNA, 15 bp, Homo sapiens
gatgtcacattgggt

SEQ ID NO: 76848 - DNA, 15 bp, Homo sapiens
tgatgtcacattggg

SEQ ID NO: 76849 - DNA, 15 bp, Homo sapiens
ctgatgtcacattgg

SEQ ID NO: 76850 - DNA, 15 bp, Homo sapiens
gctgatgtcacattg

SEQ ID NO: 76851 - DNA, 15 bp, Homo sapiens
ggctgatgtcacatt

SEQ ID NO: 76852 - DNA, 15 bp, Homo sapiens
aggctgatgtcacat

SEQ ID NO: 76853 - DNA, 15 bp, Homo sapiens
gaggctgatgtcaca

SEQ ID NO: 76854 - DNA, 15 bp, Homo sapiens
agaggctgatgtcac

SEQ ID NO: 76855 - DNA, 15 bp, Homo sapiens
cagaggctgatgtca

SEQ ID NO: 76856 - DNA, 15 bp, Homo sapiens
tcagaggctgatgtc

SEQ ID NO: 76857 - DNA, 15 bp, Homo sapiens
ttcagaggctgatgt

SEQ ID NO: 76858 - DNA, 15 bp, Homo sapiens
cttcagaggctgatg

SEQ ID NO: 76859 - DNA, 15 bp, Homo sapiens
gcttcagaggctgat

SEQ ID NO: 76860 - DNA, 15 bp, Homo sapiens
ggcttcagaggctga

SEQ ID NO: 76861 - DNA, 15 bp, Homo sapiens
gggcttcagaggctg

SEQ ID NO: 76862 - DNA, 15 bp, Homo sapiens
ggggcttcagaggct

SEQ ID NO: 76863 - DNA, 15 bp, Homo sapiens
tggggcttcagaggc

SEQ ID NO: 76864 - DNA, 15 bp, Homo sapiens
ctggggcttcagagg

SEQ ID NO: 76865 - DNA, 15 bp, Homo sapiens
cctggggcttcagag

SEQ ID NO: 76866 - DNA, 15 bp, Homo sapiens
ccctggggcttcaga

SEQ ID NO: 76867 - DNA, 15 bp, Homo sapiens
gccctggggcttcag

SEQ ID NO: 76868 - DNA, 15 bp, Homo sapiens
ggccctggggcttca

SEQ ID NO: 76869 - DNA, 15 bp, Homo sapiens
aggccctggggcttc

SEQ ID NO: 76870 - DNA, 15 bp, Homo sapiens
gaggccctggggctt

SEQ ID NO: 76871 - DNA, 15 bp, Homo sapiens
tgaggccctggggct

SEQ ID NO: 76872 - DNA, 15 bp, Homo sapiens
gtgaggccctggggc

SEQ ID NO: 76873 - DNA, 15 bp, Homo sapiens
cgtgaggccctgggg

SEQ ID NO: 76874 - DNA, 15 bp, Homo sapiens
ccgtgaggccctggg

SEQ ID NO: 76875 - DNA, 15 bp, Homo sapiens
accgtgaggccctgg

SEQ ID NO: 76876 - DNA, 15 bp, Homo sapiens
aaccgtgaggccctg

SEQ ID NO: 76877 - DNA, 15 bp, Homo sapiens
gaaccgtgaggccct

SEQ ID NO: 76878 - DNA, 15 bp, Homo sapiens
tgaaccgtgaggccc

SEQ ID NO: 76879 - DNA, 15 bp, Homo sapiens
ttgaaccgtgaggcc

SEQ ID NO: 76880 - DNA, 15 bp, Homo sapiens
tttgaaccgtgaggc

SEQ ID NO: 76881 - DNA, 15 bp, Homo sapiens
gtttgaaccgtgagg

SEQ ID NO: 76882 - DNA, 15 bp, Homo sapiens
agtttgaaccgtgag

SEQ ID NO: 76883 - DNA, 15 bp, Homo sapiens
aagtttgaaccgtga

SEQ ID NO: 76884 - DNA, 15 bp, Homo sapiens
caagtttgaaccgtg

SEQ ID NO: 76885 - DNA, 15 bp, Homo sapiens
acaagtttgaaccgt

SEQ ID NO: 76886 - DNA, 15 bp, Homo sapiens
cacaagtttgaaccg

SEQ ID NO: 76887 - DNA, 15 bp, Homo sapiens
acacaagtttgaacc

SEQ ID NO: 76888 - DNA, 15 bp, Homo sapiens
gacacaagtttgaac

SEQ ID NO: 76889 - DNA, 15 bp, Homo sapiens
ggacacaagtttgaa

SEQ ID NO: 76890 - DNA, 15 bp, Homo sapiens
tggacacaagtttga

SEQ ID NO: 76891 - DNA, 15 bp, Homo sapiens
ctggacacaagtttg

SEQ ID NO: 76892 - DNA, 15 bp, Homo sapiens
cctggacacaagttt

SEQ ID NO: 76893 - DNA, 15 bp, Homo sapiens
ccctggacacaagtt

SEQ ID NO: 76894 - DNA, 15 bp, Homo sapiens
gccctggacacaagt

SEQ ID NO: 76895 - DNA, 15 bp, Homo sapiens
ggccctggacacaag

SEQ ID NO: 76896 - DNA, 15 bp, Homo sapiens
tggccctggacacaa

SEQ ID NO: 76897 - DNA, 15 bp, Homo sapiens
ctggccctggacaca

SEQ ID NO: 76898 - DNA, 15 bp, Homo sapiens
cctggccctggacac

SEQ ID NO: 76899 - DNA, 15 bp, Homo sapiens
tcctggccctggaca

SEQ ID NO: 76900 - DNA, 15 bp, Homo sapiens
ttcctggccctggac

SEQ ID NO: 76901 - DNA, 15 bp, Homo sapiens
tttcctggccctgga

SEQ ID NO: 76902 - DNA, 15 bp, Homo sapiens
gtttcctggccctgg

SEQ ID NO: 76903 - DNA, 15 bp, Homo sapiens
ggtttcctggccctg

SEQ ID NO: 76904 - DNA, 15 bp, Homo sapiens
tggtttcctggccct

SEQ ID NO: 76905 - DNA, 15 bp, Homo sapiens
ttggtttcctggccc

SEQ ID NO: 76906 - DNA, 15 bp, Homo sapiens
tttggtttcctggcc

SEQ ID NO: 76907 - DNA, 15 bp, Homo sapiens
atttggtttcctggc

SEQ ID NO: 76908 - DNA, 15 bp, Homo sapiens
gatttggtttcctgg

SEQ ID NO: 76909 - DNA, 15 bp, Homo sapiens
agatttggtttcctg

SEQ ID NO: 76910 - DNA, 15 bp, Homo sapiens
cagatttggtttcct

SEQ ID NO: 76911 - DNA, 15 bp, Homo sapiens
tcagatttggtttcc

SEQ ID NO: 76912 - DNA, 15 bp, Homo sapiens
atcagatttggtttc

SEQ ID NO: 76913 - DNA, 15 bp, Homo sapiens
aatcagatttggttt

SEQ ID NO: 76914 - DNA, 15 bp, Homo sapiens
caatcagatttggtt

SEQ ID NO: 76915 - DNA, 15 bp, Homo sapiens
tcaatcagatttggt

SEQ ID NO: 76916 - DNA, 15 bp, Homo sapiens
gtcaatcagatttgg

SEQ ID NO: 76917 - DNA, 15 bp, Homo sapiens
ggtcaatcagatttg

SEQ ID NO: 76918 - DNA, 15 bp, Homo sapiens
gggtcaatcagattt

SEQ ID NO: 76919 - DNA, 15 bp, Homo sapiens
tgggtcaatcagatt

SEQ ID NO: 76920 - DNA, 15 bp, Homo sapiens
ctgggtcaatcagat

SEQ ID NO: 76921 - DNA, 15 bp, Homo sapiens
tctgggtcaatcaga

SEQ ID NO: 76922 - DNA, 15 bp, Homo sapiens
atctgggtcaatcag

SEQ ID NO: 76923 - DNA, 15 bp, Homo sapiens
aatctgggtcaatca

SEQ ID NO: 76924 - DNA, 15 bp, Homo sapiens
taatctgggtcaatc

SEQ ID NO: 76925 - DNA, 15 bp, Homo sapiens
ctaatctgggtcaat

SEQ ID NO: 76926 - DNA, 15 bp, Homo sapiens
actaatctgggtcaa

SEQ ID NO: 76927 - DNA, 15 bp, Homo sapiens
gactaatctgggtca

SEQ ID NO: 76928 - DNA, 15 bp, Homo sapiens
tgactaatctgggtc

SEQ ID NO: 76929 - DNA, 15 bp, Homo sapiens
ctgactaatctgggt

SEQ ID NO: 76930 - DNA, 15 bp, Homo sapiens
tctgactaatctggg

SEQ ID NO: 76931 - DNA, 15 bp, Homo sapiens
atctgactaatctgg

SEQ ID NO: 76932 - DNA, 15 bp, Homo sapiens
catctgactaatctg

SEQ ID NO: 76933 - DNA, 15 bp, Homo sapiens
acatctgactaatct

SEQ ID NO: 76934 - DNA, 15 bp, Homo sapiens
gacatctgactaatc

SEQ ID NO: 76935 - DNA, 15 bp, Homo sapiens
agacatctgactaat

SEQ ID NO: 76936 - DNA, 15 bp, Homo sapiens
cagacatctgactaa

SEQ ID NO: 76937 - DNA, 15 bp, Homo sapiens
tcagacatctgacta

SEQ ID NO: 76938 - DNA, 15 bp, Homo sapiens
gtcagacatctgact

SEQ ID NO: 76939 - DNA, 15 bp, Homo sapiens
agtcagacatctgac

SEQ ID NO: 76940 - DNA, 15 bp, Homo sapiens
gagtcagacatctga

SEQ ID NO: 76941 - DNA, 15 bp, Homo sapiens
agagtcagacatctg

SEQ ID NO: 76942 - DNA, 15 bp, Homo sapiens
cagagtcagacatct

SEQ ID NO: 76943 - DNA, 15 bp, Homo sapiens
tcagagtcagacatc

SEQ ID NO: 76944 - DNA, 15 bp, Homo sapiens
atcagagtcagacat

SEQ ID NO: 76945 - DNA, 15 bp, Homo sapiens
aatcagagtcagaca

SEQ ID NO: 76946 - DNA, 15 bp, Homo sapiens
aaatcagagtcagac

SEQ ID NO: 76947 - DNA, 15 bp, Homo sapiens
taaatcagagtcaga

SEQ ID NO: 76948 - DNA, 15 bp, Homo sapiens
ttaaatcagagtcag

SEQ ID NO: 76949 - DNA, 15 bp, Homo sapiens
attaaatcagagtca

SEQ ID NO: 76950 - DNA, 15 bp, Homo sapiens
gattaaatcagagtc

SEQ ID NO: 76951 - DNA, 15 bp, Homo sapiens
tgattaaatcagagt

SEQ ID NO: 76952 - DNA, 15 bp, Homo sapiens
gtgattaaatcagag

SEQ ID NO: 76953 - DNA, 15 bp, Homo sapiens
cgtgattaaatcaga

SEQ ID NO: 76954 - DNA, 15 bp, Homo sapiens
ccgtgattaaatcag

SEQ ID NO: 76955 - DNA, 15 bp, Homo sapiens
tccgtgattaaatca

SEQ ID NO: 76956 - DNA, 15 bp, Homo sapiens
atccgtgattaaatc

SEQ ID NO: 76957 - DNA, 15 bp, Homo sapiens
aatccgtgattaaat

SEQ ID NO: 76958 - DNA, 15 bp, Homo sapiens
aaatccgtgattaaa

SEQ ID NO: 76959 - DNA, 15 bp, Homo sapiens
taaatccgtgattaa

SEQ ID NO: 76960 - DNA, 15 bp, Homo sapiens
ttaaatccgtgatta

SEQ ID NO: 76961 - DNA, 15 bp, Homo sapiens
tttaaatccgtgatt

SEQ ID NO: 76962 - DNA, 15 bp, Homo sapiens
ctttaaatccgtgat

SEQ ID NO: 76963 - DNA, 15 bp, Homo sapiens
gctttaaatccgtga

SEQ ID NO: 76964 - DNA, 15 bp, Homo sapiens
tgctttaaatccgtg

SEQ ID NO: 76965 - DNA, 15 bp, Homo sapiens
atgctttaaatccgt

SEQ ID NO: 76966 - DNA, 15 bp, Homo sapiens
catgctttaaatccg

SEQ ID NO: 76967 - DNA, 15 bp, Homo sapiens
gcatgctttaaatcc

SEQ ID NO: 76968 - DNA, 15 bp, Homo sapiens
agcatgctttaaatc

SEQ ID NO: 76969 - DNA, 15 bp, Homo sapiens
gagcatgctttaaat

SEQ ID NO: 76970 - DNA, 15 bp, Homo sapiens
tgagcatgctttaaa

SEQ ID NO: 76971 - DNA, 15 bp, Homo sapiens
atgagcatgctttaa

SEQ ID NO: 76972 - DNA, 15 bp, Homo sapiens
catgagcatgcttta

SEQ ID NO: 76973 - DNA, 15 bp, Homo sapiens
acatgagcatgcttt

SEQ ID NO: 76974 - DNA, 15 bp, Homo sapiens
aacatgagcatgctt

SEQ ID NO: 76975 - DNA, 15 bp, Homo sapiens
caacatgagcatgct

SEQ ID NO: 76976 - DNA, 15 bp, Homo sapiens
acaacatgagcatgc

SEQ ID NO: 76977 - DNA, 15 bp, Homo sapiens
aacaacatgagcatg

SEQ ID NO: 76978 - DNA, 15 bp, Homo sapiens
caacaacatgagcat

SEQ ID NO: 76979 - DNA, 15 bp, Homo sapiens
tcaacaacatgagca

SEQ ID NO: 76980 - DNA, 15 bp, Homo sapiens
gtcaacaacatgagc

SEQ ID NO: 76981 - DNA, 15 bp, Homo sapiens
tgtcaacaacatgag

SEQ ID NO: 76982 - DNA, 15 bp, Homo sapiens
ttgtcaacaacatga

SEQ ID NO: 76983 - DNA, 15 bp, Homo sapiens
attgtcaacaacatg

SEQ ID NO: 76984 - DNA, 15 bp, Homo sapiens
aattgtcaacaacat

SEQ ID NO: 76985 - DNA, 15 bp, Homo sapiens
caattgtcaacaaca

SEQ ID NO: 76986 - DNA, 15 bp, Homo sapiens
ccaattgtcaacaac

SEQ ID NO: 76987 - DNA, 15 bp, Homo sapiens
cccaattgtcaacaa

SEQ ID NO: 76988 - DNA, 15 bp, Homo sapiens
tcccaattgtcaaca

SEQ ID NO: 76989 - DNA, 15 bp, Homo sapiens
atcccaattgtcaac

SEQ ID NO: 76990 - DNA, 15 bp, Homo sapiens
gatcccaattgtcaa

SEQ ID NO: 76991 - DNA, 15 bp, Homo sapiens
agatcccaattgtca

SEQ ID NO: 76992 - DNA, 15 bp, Homo sapiens
gagatcccaattgtc

SEQ ID NO: 76993 - DNA, 15 bp, Homo sapiens
ggagatcccaattgt

SEQ ID NO: 76994 - DNA, 15 bp, Homo sapiens
aggagatcccaattg

SEQ ID NO: 76995 - DNA, 15 bp, Homo sapiens
aaggagatcccaatt

SEQ ID NO: 76996 - DNA, 15 bp, Homo sapiens
gaaggagatcccaat

SEQ ID NO: 76997 - DNA, 15 bp, Homo sapiens
ggaaggagatcccaa

SEQ ID NO: 76998 - DNA, 15 bp, Homo sapiens
gggaaggagatccca

SEQ ID NO: 76999 - DNA, 15 bp, Homo sapiens
tgggaaggagatccc

SEQ ID NO: 77000 - DNA, 15 bp, Homo sapiens
atgggaaggagatcc

SEQ ID NO: 77001 - DNA, 15 bp, Homo sapiens
aatgggaaggagatc

SEQ ID NO: 77002 - DNA, 15 bp, Homo sapiens
caatgggaaggagat

SEQ ID NO: 77003 - DNA, 15 bp, Homo sapiens
acaatgggaaggaga

SEQ ID NO: 77004 - DNA, 15 bp, Homo sapiens
cacaatgggaaggag

SEQ ID NO: 77005 - DNA, 15 bp, Homo sapiens
ccacaatgggaagga

SEQ ID NO: 77006 - DNA, 15 bp, Homo sapiens
cccacaatgggaagg

SEQ ID NO: 77007 - DNA, 15 bp, Homo sapiens
acccacaatgggaag

SEQ ID NO: 77008 - DNA, 15 bp, Homo sapiens
cacccacaatgggaa

SEQ ID NO: 77009 - DNA, 15 bp, Homo sapiens
ccacccacaatggga

SEQ ID NO: 77010 - DNA, 15 bp, Homo sapiens
tccacccacaatggg

SEQ ID NO: 77011 - DNA, 15 bp, Homo sapiens
gtccacccacaatgg

SEQ ID NO: 77012 - DNA, 15 bp, Homo sapiens
tgtccacccacaatg

SEQ ID NO: 77013 - DNA, 15 bp, Homo sapiens
ctgtccacccacaat

SEQ ID NO: 77014 - DNA, 15 bp, Homo sapiens
gctgtccacccacaa

SEQ ID NO: 77015 - DNA, 15 bp, Homo sapiens
agctgtccacccaca

SEQ ID NO: 77016 - DNA, 15 bp, Homo sapiens
aagctgtccacccac

SEQ ID NO: 77017 - DNA, 15 bp, Homo sapiens
aaagctgtccaccca

SEQ ID NO: 77018 - DNA, 15 bp, Homo sapiens
aaaagctgtccaccc

SEQ ID NO: 77019 - DNA, 15 bp, Homo sapiens
taaaagctgtccacc

SEQ ID NO: 77020 - DNA, 15 bp, Homo sapiens
ataaaagctgtccac

SEQ ID NO: 77021 - DNA, 15 bp, Homo sapiens
tataaaagctgtcca

SEQ ID NO: 77022 - DNA, 15 bp, Homo sapiens
ttataaaagctgtcc

SEQ ID NO: 77023 - DNA, 15 bp, Homo sapiens
cttataaaagctgtc

SEQ ID NO: 77024 - DNA, 15 bp, Homo sapiens
tcttataaaagctgt

SEQ ID NO: 77025 - DNA, 15 bp, Homo sapiens
ttcttataaaagctg

SEQ ID NO: 77026 - DNA, 15 bp, Homo sapiens
cttcttataaaagct

SEQ ID NO: 77027 - DNA, 15 bp, Homo sapiens
acttcttataaaagc

SEQ ID NO: 77028 - DNA, 15 bp, Homo sapiens
aacttcttataaaag

SEQ ID NO: 77029 - DNA, 15 bp, Homo sapiens
taacttcttataaaa

SEQ ID NO: 77030 - DNA, 15 bp, Homo sapiens
ataacttcttataaa

SEQ ID NO: 77031 - DNA, 15 bp, Homo sapiens
tataacttcttataa

SEQ ID NO: 77032 - DNA, 15 bp, Homo sapiens
gtataacttcttata

SEQ ID NO: 77033 - DNA, 15 bp, Homo sapiens
agtataacttcttat

SEQ ID NO: 77034 - DNA, 15 bp, Homo sapiens
gagtataacttctta

SEQ ID NO: 77035 - DNA, 15 bp, Homo sapiens
tgagtataacttctt

SEQ ID NO: 77036 - DNA, 15 bp, Homo sapiens
ctgagtataacttct

SEQ ID NO: 77037 - DNA, 15 bp, Homo sapiens
cctgagtataacttc

SEQ ID NO: 77038 - DNA, 15 bp, Homo sapiens
ccctgagtataactt

SEQ ID NO: 77039 - DNA, 15 bp, Homo sapiens
tccctgagtataact

SEQ ID NO: 77040 - DNA, 15 bp, Homo sapiens
ctccctgagtataac

SEQ ID NO: 77041 - DNA, 15 bp, Homo sapiens
cctccctgagtataa

SEQ ID NO: 77042 - DNA, 15 bp, Homo sapiens
tcctccctgagtata

SEQ ID NO: 77043 - DNA, 15 bp, Homo sapiens
ttcctccctgagtat

SEQ ID NO: 77044 - DNA, 15 bp, Homo sapiens
tttcctccctgagta

SEQ ID NO: 77045 - DNA, 15 bp, Homo sapiens
atttcctccctgagt

SEQ ID NO: 77046 - DNA, 15 bp, Homo sapiens
tatttcctccctgag

SEQ ID NO: 77047 - DNA, 15 bp, Homo sapiens
ttatttcctccctga

SEQ ID NO: 77048 - DNA, 15 bp, Homo sapiens
attatttcctccctg

SEQ ID NO: 77049 - DNA, 15 bp, Homo sapiens
aattatttcctccct

SEQ ID NO: 77050 - DNA, 15 bp, Homo sapiens
caattatttcctccc

SEQ ID NO: 77051 - DNA, 15 bp, Homo sapiens
ccaattatttcctcc

SEQ ID NO: 77052 - DNA, 15 bp, Homo sapiens
gccaattatttcctc

SEQ ID NO: 77053 - DNA, 15 bp, Homo sapiens
tgccaattatttcct

SEQ ID NO: 77054 - DNA, 15 bp, Homo sapiens
ctgccaattatttcc

SEQ ID NO: 77055 - DNA, 15 bp, Homo sapiens
gctgccaattatttc

SEQ ID NO: 77056 - DNA, 15 bp, Homo sapiens
agctgccaattattt

SEQ ID NO: 77057 - DNA, 15 bp, Homo sapiens
gagctgccaattatt

SEQ ID NO: 77058 - DNA, 15 bp, Homo sapiens
ggagctgccaattat

SEQ ID NO: 77059 - DNA, 15 bp, Homo sapiens
tggagctgccaatta

SEQ ID NO: 77060 - DNA, 15 bp, Homo sapiens
ttggagctgccaatt

SEQ ID NO: 77061 - DNA, 15 bp, Homo sapiens
attggagctgccaat

SEQ ID NO: 77062 - DNA, 15 bp, Homo sapiens
tattggagctgccaa

SEQ ID NO: 77063 - DNA, 15 bp, Homo sapiens
ctattggagctgcca

SEQ ID NO: 77064 - DNA, 15 bp, Homo sapiens
cctattggagctgcc

SEQ ID NO: 77065 - DNA, 15 bp, Homo sapiens
gcctattggagctgc

SEQ ID NO: 77066 - DNA, 15 bp, Homo sapiens
ggcctattggagctg

SEQ ID NO: 77067 - DNA, 15 bp, Homo sapiens
gggcctattggagct

SEQ ID NO: 77068 - DNA, 15 bp, Homo sapiens
agggcctattggagc

SEQ ID NO: 77069 - DNA, 15 bp, Homo sapiens
aagggcctattggag

SEQ ID NO: 77070 - DNA, 15 bp, Homo sapiens
taagggcctattgga

SEQ ID NO: 77071 - DNA, 15 bp, Homo sapiens
ctaagggcctattgg

SEQ ID NO: 77072 - DNA, 15 bp, Homo sapiens
tctaagggcctattg

SEQ ID NO: 77073 - DNA, 15 bp, Homo sapiens
ttctaagggcctatt

SEQ ID NO: 77074 - DNA, 15 bp, Homo sapiens
tttctaagggcctat

SEQ ID NO: 77075 - DNA, 15 bp, Homo sapiens
atttctaagggccta

SEQ ID NO: 77076 - DNA, 15 bp, Homo sapiens
gatttctaagggcct

SEQ ID NO: 77077 - DNA, 15 bp, Homo sapiens
tgatttctaagggcc

SEQ ID NO: 77078 - DNA, 15 bp, Homo sapiens
gtgatttctaagggc

SEQ ID NO: 77079 - DNA, 15 bp, Homo sapiens
tgtgatttctaaggg

SEQ ID NO: 77080 - DNA, 15 bp, Homo sapiens
ctgtgatttctaagg

SEQ ID NO: 77081 - DNA, 15 bp, Homo sapiens
gctgtgatttctaag

SEQ ID NO: 77082 - DNA, 15 bp, Homo sapiens
ggctgtgatttctaa

SEQ ID NO: 77083 - DNA, 15 bp, Homo sapiens
aggctgtgatttcta

SEQ ID NO: 77084 - DNA, 15 bp, Homo sapiens
taggctgtgatttct

SEQ ID NO: 77085 - DNA, 15 bp, Homo sapiens
ttaggctgtgatttc

SEQ ID NO: 77086 - DNA, 15 bp, Homo sapiens
attaggctgtgattt

SEQ ID NO: 77087 - DNA, 15 bp, Homo sapiens
gattaggctgtgatt

SEQ ID NO: 77088 - DNA, 15 bp, Homo sapiens
ggattaggctgtgat

SEQ ID NO: 77089 - DNA, 15 bp, Homo sapiens
aggattaggctgtga

SEQ ID NO: 77090 - DNA, 15 bp, Homo sapiens
aaggattaggctgtg

SEQ ID NO: 77091 - DNA, 15 bp, Homo sapiens
aaaggattaggctgt

SEQ ID NO: 77092 - DNA, 15 bp, Homo sapiens
gaaaggattaggctg

SEQ ID NO: 77093 - DNA, 15 bp, Homo sapiens
agaaaggattaggct

SEQ ID NO: 77094 - DNA, 15 bp, Homo sapiens
aagaaaggattaggc

SEQ ID NO: 77095 - DNA, 15 bp, Homo sapiens
aaagaaaggattagg

SEQ ID NO: 77096 - DNA, 15 bp, Homo sapiens
aaaagaaaggattag

SEQ ID NO: 77097 - DNA, 15 bp, Homo sapiens
taaaagaaaggatta

SEQ ID NO: 77098 - DNA, 15 bp, Homo sapiens
ctaaaagaaaggatt

SEQ ID NO: 77099 - DNA, 15 bp, Homo sapiens
cctaaaagaaaggat

SEQ ID NO: 77100 - DNA, 15 bp, Homo sapiens
tcctaaaagaaagga

SEQ ID NO: 77101 - DNA, 15 bp, Homo sapiens
gtcctaaaagaaagg

SEQ ID NO: 77102 - DNA, 15 bp, Homo sapiens
agtcctaaaagaaag

SEQ ID NO: 77103 - DNA, 15 bp, Homo sapiens
gagtcctaaaagaaa

SEQ ID NO: 77104 - DNA, 15 bp, Homo sapiens
agagtcctaaaagaa

SEQ ID NO: 77105 - DNA, 15 bp, Homo sapiens
cagagtcctaaaaga

SEQ ID NO: 77106 - DNA, 15 bp, Homo sapiens
gcagagtcctaaaag

SEQ ID NO: 77107 - DNA, 15 bp, Homo sapiens
ggcagagtcctaaaa

SEQ ID NO: 77108 - DNA, 15 bp, Homo sapiens
aggcagagtcctaaa

SEQ ID NO: 77109 - DNA, 15 bp, Homo sapiens
aaggcagagtcctaa

SEQ ID NO: 77110 - DNA, 15 bp, Homo sapiens
caaggcagagtccta

SEQ ID NO: 77111 - DNA, 15 bp, Homo sapiens
acaaggcagagtcct

SEQ ID NO: 77112 - DNA, 15 bp, Homo sapiens
cacaaggcagagtcc

SEQ ID NO: 77113 - DNA, 15 bp, Homo sapiens
tcacaaggcagagtc

SEQ ID NO: 77114 - DNA, 15 bp, Homo sapiens
ttcacaaggcagagt

SEQ ID NO: 77115 - DNA, 15 bp, Homo sapiens
cttcacaaggcagag

SEQ ID NO: 77116 - DNA, 15 bp, Homo sapiens
tcttcacaaggcaga

SEQ ID NO: 77117 - DNA, 15 bp, Homo sapiens
ttcttcacaaggcag

SEQ ID NO: 77118 - DNA, 15 bp, Homo sapiens
tttcttcacaaggca

SEQ ID NO: 77119 - DNA, 15 bp, Homo sapiens
ctttcttcacaaggc

SEQ ID NO: 77120 - DNA, 15 bp, Homo sapiens
gctttcttcacaagg

SEQ ID NO: 77121 - DNA, 15 bp, Homo sapiens
ggctttcttcacaag

SEQ ID NO: 77122 - DNA, 15 bp, Homo sapiens
tggctttcttcacaa

SEQ ID NO: 77123 - DNA, 15 bp, Homo sapiens
ctggctttcttcaca

SEQ ID NO: 77124 - DNA, 15 bp, Homo sapiens
cctggctttcttcac

SEQ ID NO: 77125 - DNA, 15 bp, Homo sapiens
gcctggctttcttca

SEQ ID NO: 77126 - DNA, 15 bp, Homo sapiens
ggcctggctttcttc

SEQ ID NO: 77127 - DNA, 15 bp, Homo sapiens
tggcctggctttctt

SEQ ID NO: 77128 - DNA, 15 bp, Homo sapiens
gtggcctggctttct

SEQ ID NO: 77129 - DNA, 15 bp, Homo sapiens
tgtggcctggctttc

SEQ ID NO: 77130 - DNA, 15 bp, Homo sapiens
ttgtggcctggcttt

SEQ ID NO: 77131 - DNA, 15 bp, Homo sapiens
tttgtggcctggctt

SEQ ID NO: 77132 - DNA, 15 bp, Homo sapiens
ctttgtggcctggct

SEQ ID NO: 77133 - DNA, 15 bp, Homo sapiens
cctttgtggcctggc

SEQ ID NO: 77134 - DNA, 15 bp, Homo sapiens
ccctttgtggcctgg

SEQ ID NO: 77135 - DNA, 15 bp, Homo sapiens
cccctttgtggcctg

SEQ ID NO: 77136 - DNA, 15 bp, Homo sapiens
acccctttgtggcct

SEQ ID NO: 77137 - DNA, 15 bp, Homo sapiens
aacccctttgtggcc

SEQ ID NO: 77138 - DNA, 15 bp, Homo sapiens
caacccctttgtggc

SEQ ID NO: 77139 - DNA, 15 bp, Homo sapiens
acaacccctttgtgg

SEQ ID NO: 77140 - DNA, 15 bp, Homo sapiens
cacaacccctttgtg

SEQ ID NO: 77141 - DNA, 15 bp, Homo sapiens
tcacaacccctttgt

SEQ ID NO: 77142 - DNA, 15 bp, Homo sapiens
gtcacaacccctttg

SEQ ID NO: 77143 - DNA, 15 bp, Homo sapiens
agtcacaaccccttt

SEQ ID NO: 77144 - DNA, 15 bp, Homo sapiens
tagtcacaacccctt

SEQ ID NO: 77145 - DNA, 15 bp, Homo sapiens
ttagtcacaacccct

SEQ ID NO: 77146 - DNA, 15 bp, Homo sapiens
cttagtcacaacccc

SEQ ID NO: 77147 - DNA, 15 bp, Homo sapiens
ccttagtcacaaccc

SEQ ID NO: 77148 - DNA, 15 bp, Homo sapiens
gccttagtcacaacc

SEQ ID NO: 77149 - DNA, 15 bp, Homo sapiens
ggccttagtcacaac

SEQ ID NO: 77150 - DNA, 15 bp, Homo sapiens
tggccttagtcacaa

SEQ ID NO: 77151 - DNA, 15 bp, Homo sapiens
ctggccttagtcaca

SEQ ID NO: 77152 - DNA, 15 bp, Homo sapiens
actggccttagtcac

SEQ ID NO: 77153 - DNA, 15 bp, Homo sapiens
gactggccttagtca

SEQ ID NO: 77154 - DNA, 15 bp, Homo sapiens
tgactggccttagtc

SEQ ID NO: 77155 - DNA, 15 bp, Homo sapiens
atgactggccttagt

SEQ ID NO: 77156 - DNA, 15 bp, Homo sapiens
catgactggccttag

SEQ ID NO: 77157 - DNA, 15 bp, Homo sapiens
acatgactggcctta

SEQ ID NO: 77158 - DNA, 15 bp, Homo sapiens
tacatgactggcctt

SEQ ID NO: 77159 - DNA, 15 bp, Homo sapiens
ttacatgactggcct

SEQ ID NO: 77160 - DNA, 15 bp, Homo sapiens
gttacatgactggcc

SEQ ID NO: 77161 - DNA, 15 bp, Homo sapiens
agttacatgactggc

SEQ ID NO: 77162 - DNA, 15 bp, Homo sapiens
cagttacatgactgg

SEQ ID NO: 77163 - DNA, 15 bp, Homo sapiens
gcagttacatgactg

SEQ ID NO: 77164 - DNA, 15 bp, Homo sapiens
ggcagttacatgact

SEQ ID NO: 77165 - DNA, 15 bp, Homo sapiens
aggcagttacatgac

SEQ ID NO: 77166 - DNA, 15 bp, Homo sapiens
caggcagttacatga

SEQ ID NO: 77167 - DNA, 15 bp, Homo sapiens
ccaggcagttacatg

SEQ ID NO: 77168 - DNA, 15 bp, Homo sapiens
accaggcagttacat

SEQ ID NO: 77169 - DNA, 15 bp, Homo sapiens
caccaggcagttaca

SEQ ID NO: 77170 - DNA, 15 bp, Homo sapiens
ccaccaggcagttac

SEQ ID NO: 77171 - DNA, 15 bp, Homo sapiens
gccaccaggcagtta

SEQ ID NO: 77172 - DNA, 15 bp, Homo sapiens
tgccaccaggcagtt

SEQ ID NO: 77173 - DNA, 15 bp, Homo sapiens
ctgccaccaggcagt

SEQ ID NO: 77174 - DNA, 15 bp, Homo sapiens
cctgccaccaggcag

SEQ ID NO: 77175 - DNA, 15 bp, Homo sapiens
gcctgccaccaggca

SEQ ID NO: 77176 - DNA, 15 bp, Homo sapiens
agcctgccaccaggc

SEQ ID NO: 77177 - DNA, 15 bp, Homo sapiens
cagcctgccaccagg

SEQ ID NO: 77178 - DNA, 15 bp, Homo sapiens
ccagcctgccaccag

SEQ ID NO: 77179 - DNA, 15 bp, Homo sapiens
cccagcctgccacca

SEQ ID NO: 77180 - DNA, 15 bp, Homo sapiens
tcccagcctgccacc

SEQ ID NO: 77181 - DNA, 15 bp, Homo sapiens
ttcccagcctgccac

SEQ ID NO: 77182 - DNA, 15 bp, Homo sapiens
attcccagcctgcca

SEQ ID NO: 77183 - DNA, 15 bp, Homo sapiens
tattcccagcctgcc

SEQ ID NO: 77184 - DNA, 15 bp, Homo sapiens
ctattcccagcctgc

SEQ ID NO: 77185 - DNA, 15 bp, Homo sapiens
tctattcccagcctg

SEQ ID NO: 77186 - DNA, 15 bp, Homo sapiens
ttctattcccagcct

SEQ ID NO: 77187 - DNA, 15 bp, Homo sapiens
gttctattcccagcc

SEQ ID NO: 77188 - DNA, 15 bp, Homo sapiens
ggttctattcccagc

SEQ ID NO: 77189 - DNA, 15 bp, Homo sapiens
tggttctattcccag

SEQ ID NO: 77190 - DNA, 15 bp, Homo sapiens
ctggttctattccca

SEQ ID NO: 77191 - DNA, 15 bp, Homo sapiens
cctggttctattccc

SEQ ID NO: 77192 - DNA, 15 bp, Homo sapiens
gcctggttctattcc

SEQ ID NO: 77193 - DNA, 15 bp, Homo sapiens
ggcctggttctattc

SEQ ID NO: 77194 - DNA, 15 bp, Homo sapiens
gggcctggttctatt

SEQ ID NO: 77195 - DNA, 15 bp, Homo sapiens
agggcctggttctat

SEQ ID NO: 77196 - DNA, 15 bp, Homo sapiens
aagggcctggttcta

SEQ ID NO: 77197 - DNA, 15 bp, Homo sapiens
caagggcctggttct

SEQ ID NO: 77198 - DNA, 15 bp, Homo sapiens
ccaagggcctggttc

SEQ ID NO: 77199 - DNA, 15 bp, Homo sapiens
accaagggcctggtt

SEQ ID NO: 77200 - DNA, 15 bp, Homo sapiens
aaccaagggcctggt

SEQ ID NO: 77201 - DNA, 15 bp, Homo sapiens
gaaccaagggcctgg

SEQ ID NO: 77202 - DNA, 15 bp, Homo sapiens
ggaaccaagggcctg

SEQ ID NO: 77203 - DNA, 15 bp, Homo sapiens
gggaaccaagggcct

SEQ ID NO: 77204 - DNA, 15 bp, Homo sapiens
tgggaaccaagggcc

SEQ ID NO: 77205 - DNA, 15 bp, Homo sapiens
ctgggaaccaagggc

SEQ ID NO: 77206 - DNA, 15 bp, Homo sapiens
cctgggaaccaaggg

SEQ ID NO: 77207 - DNA, 15 bp, Homo sapiens
gcctgggaaccaagg

SEQ ID NO: 77208 - DNA, 15 bp, Homo sapiens
ggcctgggaaccaag

SEQ ID NO: 77209 - DNA, 15 bp, Homo sapiens
tggcctgggaaccaa

SEQ ID NO: 77210 - DNA, 15 bp, Homo sapiens
gtggcctgggaacca

SEQ ID NO: 77211 - DNA, 15 bp, Homo sapiens
tgtggcctgggaacc

SEQ ID NO: 77212 - DNA, 15 bp, Homo sapiens
ctgtggcctgggaac

SEQ ID NO: 77213 - DNA, 15 bp, Homo sapiens
actgtggcctgggaa

SEQ ID NO: 77214 - DNA, 15 bp, Homo sapiens
aactgtggcctggga

SEQ ID NO: 77215 - DNA, 15 bp, Homo sapiens
gaactgtggcctggg

SEQ ID NO: 77216 - DNA, 15 bp, Homo sapiens
agaactgtggcctgg

SEQ ID NO: 77217 - DNA, 15 bp, Homo sapiens
aagaactgtggcctg

SEQ ID NO: 77218 - DNA, 15 bp, Homo sapiens
caagaactgtggcct

SEQ ID NO: 77219 - DNA, 15 bp, Homo sapiens
gcaagaactgtggcc

SEQ ID NO: 77220 - DNA, 15 bp, Homo sapiens
ggcaagaactgtggc

SEQ ID NO: 77221 - DNA, 15 bp, Homo sapiens
gggcaagaactgtgg

SEQ ID NO: 77222 - DNA, 15 bp, Homo sapiens
agggcaagaactgtg

SEQ ID NO: 77223 - DNA, 15 bp, Homo sapiens
aagggcaagaactgt

SEQ ID NO: 77224 - DNA, 15 bp, Homo sapiens
taagggcaagaactg

SEQ ID NO: 77225 - DNA, 15 bp, Homo sapiens
ctaagggcaagaact

SEQ ID NO: 77226 - DNA, 15 bp, Homo sapiens
gctaagggcaagaac

SEQ ID NO: 77227 - DNA, 15 bp, Homo sapiens
agctaagggcaagaa

SEQ ID NO: 77228 - DNA, 15 bp, Homo sapiens
cagctaagggcaaga

SEQ ID NO: 77229 - DNA, 15 bp, Homo sapiens
tcagctaagggcaag

SEQ ID NO: 77230 - DNA, 15 bp, Homo sapiens
atcagctaagggcaa

SEQ ID NO: 77231 - DNA, 15 bp, Homo sapiens
gatcagctaagggca

SEQ ID NO: 77232 - DNA, 15 bp, Homo sapiens
tgatcagctaagggc

SEQ ID NO: 77233 - DNA, 15 bp, Homo sapiens
ctgatcagctaaggg

SEQ ID NO: 77234 - DNA, 15 bp, Homo sapiens
gctgatcagctaagg

SEQ ID NO: 77235 - DNA, 15 bp, Homo sapiens
ggctgatcagctaag

SEQ ID NO: 77236 - DNA, 15 bp, Homo sapiens
aggctgatcagctaa

SEQ ID NO: 77237 - DNA, 15 bp, Homo sapiens
aaggctgatcagcta

SEQ ID NO: 77238 - DNA, 15 bp, Homo sapiens
gaaggctgatcagct

SEQ ID NO: 77239 - DNA, 15 bp, Homo sapiens
ggaaggctgatcagc

SEQ ID NO: 77240 - DNA, 15 bp, Homo sapiens
aggaaggctgatcag

SEQ ID NO: 77241 - DNA, 15 bp, Homo sapiens
caggaaggctgatca

SEQ ID NO: 77242 - DNA, 15 bp, Homo sapiens
tcaggaaggctgatc

SEQ ID NO: 77243 - DNA, 15 bp, Homo sapiens
ctcaggaaggctgat

SEQ ID NO: 77244 - DNA, 15 bp, Homo sapiens
gctcaggaaggctga

SEQ ID NO: 77245 - DNA, 15 bp, Homo sapiens
tgctcaggaaggctg

SEQ ID NO: 77246 - DNA, 15 bp, Homo sapiens
atgctcaggaaggct

SEQ ID NO: 77247 - DNA, 15 bp, Homo sapiens
tatgctcaggaaggc

SEQ ID NO: 77248 - DNA, 15 bp, Homo sapiens
gtatgctcaggaagg

SEQ ID NO: 77249 - DNA, 15 bp, Homo sapiens
tgtatgctcaggaag

SEQ ID NO: 77250 - DNA, 15 bp, Homo sapiens
ttgtatgctcaggaa

SEQ ID NO: 77251 - DNA, 15 bp, Homo sapiens
tttgtatgctcagga

SEQ ID NO: 77252 - DNA, 15 bp, Homo sapiens
ctttgtatgctcagg

SEQ ID NO: 77253 - DNA, 15 bp, Homo sapiens
tctttgtatgctcag

SEQ ID NO: 77254 - DNA, 15 bp, Homo sapiens
gtctttgtatgctca

SEQ ID NO: 77255 - DNA, 15 bp, Homo sapiens
agtctttgtatgctc

SEQ ID NO: 77256 - DNA, 15 bp, Homo sapiens
aagtctttgtatgct

SEQ ID NO: 77257 - DNA, 15 bp, Homo sapiens
caagtctttgtatgc

SEQ ID NO: 77258 - DNA, 15 bp, Homo sapiens
gcaagtctttgtatg

SEQ ID NO: 77259 - DNA, 15 bp, Homo sapiens
ggcaagtctttgtat

SEQ ID NO: 77260 - DNA, 15 bp, Homo sapiens
aggcaagtctttgta

SEQ ID NO: 77261 - DNA, 15 bp, Homo sapiens
taggcaagtctttgt

SEQ ID NO: 77262 - DNA, 15 bp, Homo sapiens
gtaggcaagtctttg

SEQ ID NO: 77263 - DNA, 15 bp, Homo sapiens
ggtaggcaagtcttt

SEQ ID NO: 77264 - DNA, 15 bp, Homo sapiens
tggtaggcaagtctt

SEQ ID NO: 77265 - DNA, 15 bp, Homo sapiens
atggtaggcaagtct

SEQ ID NO: 77266 - DNA, 15 bp, Homo sapiens
tatggtaggcaagtc

SEQ ID NO: 77267 - DNA, 15 bp, Homo sapiens
gtatggtaggcaagt

SEQ ID NO: 77268 - DNA, 15 bp, Homo sapiens
agtatggtaggcaag

SEQ ID NO: 77269 - DNA, 15 bp, Homo sapiens
aagtatggtaggcaa

SEQ ID NO: 77270 - DNA, 15 bp, Homo sapiens
taagtatggtaggca

SEQ ID NO: 77271 - DNA, 15 bp, Homo sapiens
ctaagtatggtaggc

SEQ ID NO: 77272 - DNA, 15 bp, Homo sapiens
gctaagtatggtagg

SEQ ID NO: 77273 - DNA, 15 bp, Homo sapiens
tgctaagtatggtag

SEQ ID NO: 77274 - DNA, 15 bp, Homo sapiens
gtgctaagtatggta

SEQ ID NO: 77275 - DNA, 15 bp, Homo sapiens
tgtgctaagtatggt

SEQ ID NO: 77276 - DNA, 15 bp, Homo sapiens
ctgtgctaagtatgg

SEQ ID NO: 77277 - DNA, 15 bp, Homo sapiens
gctgtgctaagtatg

SEQ ID NO: 77278 - DNA, 15 bp, Homo sapiens
ggctgtgctaagtat

SEQ ID NO: 77279 - DNA, 15 bp, Homo sapiens
tggctgtgctaagta

SEQ ID NO: 77280 - DNA, 15 bp, Homo sapiens
ctggctgtgctaagt

SEQ ID NO: 77281 - DNA, 15 bp, Homo sapiens
tctggctgtgctaag

SEQ ID NO: 77282 - DNA, 15 bp, Homo sapiens
ttctggctgtgctaa

SEQ ID NO: 77283 - DNA, 15 bp, Homo sapiens
cttctggctgtgcta

SEQ ID NO: 77284 - DNA, 15 bp, Homo sapiens
acttctggctgtgct

SEQ ID NO: 77285 - DNA, 15 bp, Homo sapiens
tacttctggctgtgc

SEQ ID NO: 77286 - DNA, 15 bp, Homo sapiens
gtacttctggctgtg

SEQ ID NO: 77287 - DNA, 15 bp, Homo sapiens
ggtacttctggctgt

SEQ ID NO: 77288 - DNA, 15 bp, Homo sapiens
tggtacttctggctg

SEQ ID NO: 77289 - DNA, 15 bp, Homo sapiens
ctggtacttctggct

SEQ ID NO: 77290 - DNA, 15 bp, Homo sapiens
actggtacttctggc

SEQ ID NO: 77291 - DNA, 15 bp, Homo sapiens
aactggtacttctgg

SEQ ID NO: 77292 - DNA, 15 bp, Homo sapiens
aaactggtacttctg

SEQ ID NO: 77293 - DNA, 15 bp, Homo sapiens
aaaactggtacttct

SEQ ID NO: 77294 - DNA, 15 bp, Homo sapiens
caaaactggtacttc

SEQ ID NO: 77295 - DNA, 15 bp, Homo sapiens
acaaaactggtactt

SEQ ID NO: 77296 - DNA, 15 bp, Homo sapiens
gacaaaactggtact

SEQ ID NO: 77297 - DNA, 15 bp, Homo sapiens
tgacaaaactggtac

SEQ ID NO: 77298 - DNA, 15 bp, Homo sapiens
atgacaaaactggta

SEQ ID NO: 77299 - DNA, 15 bp, Homo sapiens
tatgacaaaactggt

SEQ ID NO: 77300 - DNA, 15 bp, Homo sapiens
ttatgacaaaactgg

SEQ ID NO: 77301 - DNA, 15 bp, Homo sapiens
tttatgacaaaactg

SEQ ID NO: 77302 - DNA, 15 bp, Homo sapiens
ctttatgacaaaact

SEQ ID NO: 77303 - DNA, 15 bp, Homo sapiens
gctttatgacaaaac

SEQ ID NO: 77304 - DNA, 15 bp, Homo sapiens
agctttatgacaaaa

SEQ ID NO: 77305 - DNA, 15 bp, Homo sapiens
tagctttatgacaaa

SEQ ID NO: 77306 - DNA, 15 bp, Homo sapiens
ctagctttatgacaa

SEQ ID NO: 77307 - DNA, 15 bp, Homo sapiens
actagctttatgaca

SEQ ID NO: 77308 - DNA, 15 bp, Homo sapiens
gactagctttatgac

SEQ ID NO: 77309 - DNA, 15 bp, Homo sapiens
agactagctttatga

SEQ ID NO: 77310 - DNA, 15 bp, Homo sapiens
aagactagctttatg

SEQ ID NO: 77311 - DNA, 15 bp, Homo sapiens
caagactagctttat

SEQ ID NO: 77312 - DNA, 15 bp, Homo sapiens
tcaagactagcttta

SEQ ID NO: 77313 - DNA, 15 bp, Homo sapiens
ttcaagactagcttt

SEQ ID NO: 77314 - DNA, 15 bp, Homo sapiens
gttcaagactagctt

SEQ ID NO: 77315 - DNA, 15 bp, Homo sapiens
tgttcaagactagct

SEQ ID NO: 77316 - DNA, 15 bp, Homo sapiens
ctgttcaagactagc

SEQ ID NO: 77317 - DNA, 15 bp, Homo sapiens
tctgttcaagactag

SEQ ID NO: 77318 - DNA, 15 bp, Homo sapiens
atctgttcaagacta

SEQ ID NO: 77319 - DNA, 15 bp, Homo sapiens
aatctgttcaagact

SEQ ID NO: 77320 - DNA, 15 bp, Homo sapiens
taatctgttcaagac

SEQ ID NO: 77321 - DNA, 15 bp, Homo sapiens
ataatctgttcaaga

SEQ ID NO: 77322 - DNA, 15 bp, Homo sapiens
cataatctgttcaag

SEQ ID NO: 77323 - DNA, 15 bp, Homo sapiens
gcataatctgttcaa

SEQ ID NO: 77324 - DNA, 15 bp, Homo sapiens
ggcataatctgttca

SEQ ID NO: 77325 - DNA, 15 bp, Homo sapiens
aggcataatctgttc

SEQ ID NO: 77326 - DNA, 15 bp, Homo sapiens
aaggcataatctgtt

SEQ ID NO: 77327 - DNA, 15 bp, Homo sapiens
aaaggcataatctgt

SEQ ID NO: 77328 - DNA, 15 bp, Homo sapiens
caaaggcataatctg

SEQ ID NO: 77329 - DNA, 15 bp, Homo sapiens
ccaaaggcataatct

SEQ ID NO: 77330 - DNA, 15 bp, Homo sapiens
accaaaggcataatc

SEQ ID NO: 77331 - DNA, 15 bp, Homo sapiens
aaccaaaggcataat

SEQ ID NO: 77332 - DNA, 15 bp, Homo sapiens
aaaccaaaggcataa

SEQ ID NO: 77333 - DNA, 15 bp, Homo sapiens
aaaaccaaaggcata

SEQ ID NO: 77334 - DNA, 15 bp, Homo sapiens
aaaaaccaaaggcat

SEQ ID NO: 77335 - DNA, 15 bp, Homo sapiens
taaaaaccaaaggca

SEQ ID NO: 77336 - DNA, 15 bp, Homo sapiens
ttaaaaaccaaaggc

SEQ ID NO: 77337 - DNA, 15 bp, Homo sapiens
attaaaaaccaaagg

SEQ ID NO: 77338 - DNA, 15 bp, Homo sapiens
aattaaaaaccaaag

SEQ ID NO: 77339 - DNA, 15 bp, Homo sapiens
aaattaaaaaccaaa

SEQ ID NO: 77340 - DNA, 15 bp, Homo sapiens
taaattaaaaaccaa

SEQ ID NO: 77341 - DNA, 15 bp, Homo sapiens
ttaaattaaaaacca

SEQ ID NO: 77342 - DNA, 15 bp, Homo sapiens
tttaaattaaaaacc

SEQ ID NO: 77343 - DNA, 15 bp, Homo sapiens
ctttaaattaaaaac

SEQ ID NO: 77344 - DNA, 15 bp, Homo sapiens
cctttaaattaaaaa

SEQ ID NO: 77345 - DNA, 15 bp, Homo sapiens
tcctttaaattaaaa

SEQ ID NO: 77346 - DNA, 15 bp, Homo sapiens
ttcctttaaattaaa

SEQ ID NO: 77347 - DNA, 15 bp, Homo sapiens
tttcctttaaattaa

SEQ ID NO: 77348 - DNA, 15 bp, Homo sapiens
atttcctttaaatta

SEQ ID NO: 77349 - DNA, 15 bp, Homo sapiens
aatttcctttaaatt

SEQ ID NO: 77350 - DNA, 15 bp, Homo sapiens
taatttcctttaaat

SEQ ID NO: 77351 - DNA, 15 bp, Homo sapiens
ttaatttcctttaaa

SEQ ID NO: 77352 - DNA, 15 bp, Homo sapiens
tttaatttcctttaa

SEQ ID NO: 77353 - DNA, 15 bp, Homo sapiens
ctttaatttccttta

SEQ ID NO: 77354 - DNA, 15 bp, Homo sapiens
gctttaatttccttt

SEQ ID NO: 77355 - DNA, 15 bp, Homo sapiens
ggctttaatttcctt

SEQ ID NO: 77356 - DNA, 15 bp, Homo sapiens
aggctttaatttcct

SEQ ID NO: 77357 - DNA, 15 bp, Homo sapiens
taggctttaatttcc

SEQ ID NO: 77358 - DNA, 15 bp, Homo sapiens
ataggctttaatttc

SEQ ID NO: 77359 - DNA, 15 bp, Homo sapiens
gataggctttaattt

SEQ ID NO: 77360 - DNA, 15 bp, Homo sapiens
tgataggctttaatt

SEQ ID NO: 77361 - DNA, 15 bp, Homo sapiens
ttgataggctttaat

SEQ ID NO: 77362 - DNA, 15 bp, Homo sapiens
gttgataggctttaa

SEQ ID NO: 77363 - DNA, 15 bp, Homo sapiens
cgttgataggcttta

SEQ ID NO: 77364 - DNA, 15 bp, Homo sapiens
acgttgataggcttt

SEQ ID NO: 77365 - DNA, 15 bp, Homo sapiens
tacgttgataggctt

SEQ ID NO: 77366 - DNA, 15 bp, Homo sapiens
ttacgttgataggct

SEQ ID NO: 77367 - DNA, 15 bp, Homo sapiens
gttacgttgataggc

SEQ ID NO: 77368 - DNA, 15 bp, Homo sapiens
ggttacgttgatagg

SEQ ID NO: 77369 - DNA, 15 bp, Homo sapiens
aggttacgttgatag

SEQ ID NO: 77370 - DNA, 15 bp, Homo sapiens
aaggttacgttgata

SEQ ID NO: 77371 - DNA, 15 bp, Homo sapiens
gaaggttacgttgat

SEQ ID NO: 77372 - DNA, 15 bp, Homo sapiens
tgaaggttacgttga

SEQ ID NO: 77373 - DNA, 15 bp, Homo sapiens
ctgaaggttacgttg

SEQ ID NO: 77374 - DNA, 15 bp, Homo sapiens
cctgaaggttacgtt

SEQ ID NO: 77375 - DNA, 15 bp, Homo sapiens
tcctgaaggttacgt

SEQ ID NO: 77376 - DNA, 15 bp, Homo sapiens
atcctgaaggttacg

SEQ ID NO: 77377 - DNA, 15 bp, Homo sapiens
tatcctgaaggttac

SEQ ID NO: 77378 - DNA, 15 bp, Homo sapiens
gtatcctgaaggtta

SEQ ID NO: 77379 - DNA, 15 bp, Homo sapiens
agtatcctgaaggtt

SEQ ID NO: 77380 - DNA, 15 bp, Homo sapiens
aagtatcctgaaggt

SEQ ID NO: 77381 - DNA, 15 bp, Homo sapiens
aaagtatcctgaagg

SEQ ID NO: 77382 - DNA, 15 bp, Homo sapiens
aaaagtatcctgaag

SEQ ID NO: 77383 - DNA, 15 bp, Homo sapiens
caaaagtatcctgaa

SEQ ID NO: 77384 - DNA, 15 bp, Homo sapiens
tcaaaagtatcctga

SEQ ID NO: 77385 - DNA, 15 bp, Homo sapiens
gtcaaaagtatcctg

SEQ ID NO: 77386 - DNA, 15 bp, Homo sapiens
tgtcaaaagtatcct

SEQ ID NO: 77387 - DNA, 15 bp, Homo sapiens
ctgtcaaaagtatcc

SEQ ID NO: 77388 - DNA, 15 bp, Homo sapiens
tctgtcaaaagtatc

SEQ ID NO: 77389 - DNA, 15 bp, Homo sapiens
ctctgtcaaaagtat

SEQ ID NO: 77390 - DNA, 15 bp, Homo sapiens
gctctgtcaaaagta

SEQ ID NO: 77391 - DNA, 15 bp, Homo sapiens
ggctctgtcaaaagt

SEQ ID NO: 77392 - DNA, 15 bp, Homo sapiens
gggctctgtcaaaag

SEQ ID NO: 77393 - DNA, 15 bp, Homo sapiens
agggctctgtcaaaa

SEQ ID NO: 77394 - DNA, 15 bp, Homo sapiens
tagggctctgtcaaa

SEQ ID NO: 77395 - DNA, 15 bp, Homo sapiens
ctagggctctgtcaa

SEQ ID NO: 77396 - DNA, 15 bp, Homo sapiens
cctagggctctgtca

SEQ ID NO: 77397 - DNA, 15 bp, Homo sapiens
ccctagggctctgtc

SEQ ID NO: 77398 - DNA, 15 bp, Homo sapiens
gccctagggctctgt

SEQ ID NO: 77399 - DNA, 15 bp, Homo sapiens
agccctagggctctg

SEQ ID NO: 77400 - DNA, 15 bp, Homo sapiens
aagccctagggctct

SEQ ID NO: 77401 - DNA, 15 bp, Homo sapiens
taagccctagggctc

SEQ ID NO: 77402 - DNA, 15 bp, Homo sapiens
ataagccctagggct

SEQ ID NO: 77403 - DNA, 15 bp, Homo sapiens
aataagccctagggc

SEQ ID NO: 77404 - DNA, 15 bp, Homo sapiens
aaataagccctaggg

SEQ ID NO: 77405 - DNA, 15 bp, Homo sapiens
aaaataagccctagg

SEQ ID NO: 77406 - DNA, 15 bp, Homo sapiens
aaaaataagccctag

SEQ ID NO: 77407 - DNA, 15 bp, Homo sapiens
gaaaaataagcccta

SEQ ID NO: 77408 - DNA, 15 bp, Homo sapiens
tgaaaaataagccct

SEQ ID NO: 77409 - DNA, 15 bp, Homo sapiens
atgaaaaataagccc

SEQ ID NO: 77410 - DNA, 15 bp, Homo sapiens
aatgaaaaataagcc

SEQ ID NO: 77411 - DNA, 15 bp, Homo sapiens
taatgaaaaataagc

SEQ ID NO: 77412 - DNA, 15 bp, Homo sapiens
ataatgaaaaataag

SEQ ID NO: 77413 - DNA, 15 bp, Homo sapiens
aataatgaaaaataa

SEQ ID NO: 77414 - DNA, 15 bp, Homo sapiens
aaataatgaaaaata

SEQ ID NO: 77415 - DNA, 15 bp, Homo sapiens
gaaataatgaaaaat

SEQ ID NO: 77416 - DNA, 15 bp, Homo sapiens
tgaaataatgaaaaa

SEQ ID NO: 77417 - DNA, 15 bp, Homo sapiens
ctgaaataatgaaaa

SEQ ID NO: 77418 - DNA, 15 bp, Homo sapiens
tctgaaataatgaaa

SEQ ID NO: 77419 - DNA, 15 bp, Homo sapiens
ttctgaaataatgaa

SEQ ID NO: 77420 - DNA, 15 bp, Homo sapiens
cttctgaaataatga

SEQ ID NO: 77421 - DNA, 15 bp, Homo sapiens
acttctgaaataatg

SEQ ID NO: 77422 - DNA, 15 bp, Homo sapiens
cacttctgaaataat

SEQ ID NO: 77423 - DNA, 15 bp, Homo sapiens
tcacttctgaaataa

SEQ ID NO: 77424 - DNA, 15 bp, Homo sapiens
ttcacttctgaaata

SEQ ID NO: 77425 - DNA, 15 bp, Homo sapiens
tttcacttctgaaat

SEQ ID NO: 77426 - DNA, 15 bp, Homo sapiens
ttttcacttctgaaa

SEQ ID NO: 77427 - DNA, 15 bp, Homo sapiens
gttttcacttctgaa

SEQ ID NO: 77428 - DNA, 15 bp, Homo sapiens
tgttttcacttctga

SEQ ID NO: 77429 - DNA, 15 bp, Homo sapiens
gtgttttcacttctg

SEQ ID NO: 77430 - DNA, 15 bp, Homo sapiens
ggtgttttcacttct

SEQ ID NO: 77431 - DNA, 15 bp, Homo sapiens
tggtgttttcacttc

SEQ ID NO: 77432 - DNA, 15 bp, Homo sapiens
gtggtgttttcactt

SEQ ID NO: 77433 - DNA, 15 bp, Homo sapiens
agtggtgttttcact

SEQ ID NO: 77434 - DNA, 15 bp, Homo sapiens
aagtggtgttttcac

SEQ ID NO: 77435 - DNA, 15 bp, Homo sapiens
gaagtggtgttttca

SEQ ID NO: 77436 - DNA, 15 bp, Homo sapiens
agaagtggtgttttc

SEQ ID NO: 77437 - DNA, 15 bp, Homo sapiens
tagaagtggtgtttt

SEQ ID NO: 77438 - DNA, 15 bp, Homo sapiens
ttagaagtggtgttt

SEQ ID NO: 77439 - DNA, 15 bp, Homo sapiens
attagaagtggtgtt

SEQ ID NO: 77440 - DNA, 15 bp, Homo sapiens
cattagaagtggtgt

SEQ ID NO: 77441 - DNA, 15 bp, Homo sapiens
tcattagaagtggtg

SEQ ID NO: 77442 - DNA, 15 bp, Homo sapiens
ttcattagaagtggt

SEQ ID NO: 77443 - DNA, 15 bp, Homo sapiens
cttcattagaagtgg

SEQ ID NO: 77444 - DNA, 15 bp, Homo sapiens
ccttcattagaagtg

SEQ ID NO: 77445 - DNA, 15 bp, Homo sapiens
accttcattagaagt

SEQ ID NO: 77446 - DNA, 15 bp, Homo sapiens
gaccttcattagaag

SEQ ID NO: 77447 - DNA, 15 bp, Homo sapiens
agaccttcattagaa

SEQ ID NO: 77448 - DNA, 15 bp, Homo sapiens
tagaccttcattaga

SEQ ID NO: 77449 - DNA, 15 bp, Homo sapiens
atagaccttcattag

SEQ ID NO: 77450 - DNA, 15 bp, Homo sapiens
aatagaccttcatta

SEQ ID NO: 77451 - DNA, 15 bp, Homo sapiens
gaatagaccttcatt

SEQ ID NO: 77452 - DNA, 15 bp, Homo sapiens
agaatagaccttcat

SEQ ID NO: 77453 - DNA, 15 bp, Homo sapiens
cagaatagaccttca

SEQ ID NO: 77454 - DNA, 15 bp, Homo sapiens
acagaatagaccttc

SEQ ID NO: 77455 - DNA, 15 bp, Homo sapiens
cacagaatagacctt

SEQ ID NO: 77456 - DNA, 15 bp, Homo sapiens
acacagaatagacct

SEQ ID NO: 77457 - DNA, 15 bp, Homo sapiens
aacacagaatagacc

SEQ ID NO: 77458 - DNA, 15 bp, Homo sapiens
taacacagaatagac

SEQ ID NO: 77459 - DNA, 15 bp, Homo sapiens
gtaacacagaataga

SEQ ID NO: 77460 - DNA, 15 bp, Homo sapiens
tgtaacacagaatag

SEQ ID NO: 77461 - DNA, 15 bp, Homo sapiens
ctgtaacacagaata

SEQ ID NO: 77462 - DNA, 15 bp, Homo sapiens
tctgtaacacagaat

SEQ ID NO: 77463 - DNA, 15 bp, Homo sapiens
atctgtaacacagaa

SEQ ID NO: 77464 - DNA, 15 bp, Homo sapiens
aatctgtaacacaga

SEQ ID NO: 77465 - DNA, 15 bp, Homo sapiens
caatctgtaacacag

SEQ ID NO: 77466 - DNA, 15 bp, Homo sapiens
gcaatctgtaacaca

SEQ ID NO: 77467 - DNA, 15 bp, Homo sapiens
tgcaatctgtaacac

SEQ ID NO: 77468 - DNA, 15 bp, Homo sapiens
ttgcaatctgtaaca

SEQ ID NO: 77469 - DNA, 15 bp, Homo sapiens
gttgcaatctgtaac

SEQ ID NO: 77470 - DNA, 15 bp, Homo sapiens
tgttgcaatctgtaa

SEQ ID NO: 77471 - DNA, 15 bp, Homo sapiens
ctgttgcaatctgta

SEQ ID NO: 77472 - DNA, 15 bp, Homo sapiens
tctgttgcaatctgt

SEQ ID NO: 77473 - DNA, 15 bp, Homo sapiens
ctctgttgcaatctg

SEQ ID NO: 77474 - DNA, 15 bp, Homo sapiens
cctctgttgcaatct

SEQ ID NO: 77475 - DNA, 15 bp, Homo sapiens
gcctctgttgcaatc

SEQ ID NO: 77476 - DNA, 15 bp, Homo sapiens
tgcctctgttgcaat

SEQ ID NO: 77477 - DNA, 15 bp, Homo sapiens
ttgcctctgttgcaa

SEQ ID NO: 77478 - DNA, 15 bp, Homo sapiens
attgcctctgttgca

SEQ ID NO: 77479 - DNA, 15 bp, Homo sapiens
tattgcctctgttgc

SEQ ID NO: 77480 - DNA, 15 bp, Homo sapiens
ctattgcctctgttg

SEQ ID NO: 77481 - DNA, 15 bp, Homo sapiens
tctattgcctctgtt

SEQ ID NO: 77482 - DNA, 15 bp, Homo sapiens
ttctattgcctctgt

SEQ ID NO: 77483 - DNA, 15 bp, Homo sapiens
tttctattgcctctg

SEQ ID NO: 77484 - DNA, 15 bp, Homo sapiens
ttttctattgcctct

SEQ ID NO: 77485 - DNA, 15 bp, Homo sapiens
attttctattgcctc

SEQ ID NO: 77486 - DNA, 15 bp, Homo sapiens
tattttctattgcct

SEQ ID NO: 77487 - DNA, 15 bp, Homo sapiens
atattttctattgcc

SEQ ID NO: 77488 - DNA, 15 bp, Homo sapiens
aatattttctattgc

SEQ ID NO: 77489 - DNA, 15 bp, Homo sapiens
taatattttctattg

SEQ ID NO: 77490 - DNA, 15 bp, Homo sapiens
ctaatattttctatt

SEQ ID NO: 77491 - DNA, 15 bp, Homo sapiens
cctaatattttctat

SEQ ID NO: 77492 - DNA, 15 bp, Homo sapiens
tcctaatattttcta

SEQ ID NO: 77493 - DNA, 15 bp, Homo sapiens
gtcctaatattttct

SEQ ID NO: 77494 - DNA, 15 bp, Homo sapiens
tgtcctaatattttc

SEQ ID NO: 77495 - DNA, 15 bp, Homo sapiens
ctgtcctaatatttt

SEQ ID NO: 77496 - DNA, 15 bp, Homo sapiens
actgtcctaatattt

SEQ ID NO: 77497 - DNA, 15 bp, Homo sapiens
aactgtcctaatatt

SEQ ID NO: 77498 - DNA, 15 bp, Homo sapiens
caactgtcctaatat

SEQ ID NO: 77499 - DNA, 15 bp, Homo sapiens
acaactgtcctaata

SEQ ID NO: 77500 - DNA, 15 bp, Homo sapiens
cacaactgtcctaat

SEQ ID NO: 77501 - DNA, 15 bp, Homo sapiens
acacaactgtcctaa

SEQ ID NO: 77502 - DNA, 15 bp, Homo sapiens
gacacaactgtccta

SEQ ID NO: 77503 - DNA, 15 bp, Homo sapiens
agacacaactgtcct

SEQ ID NO: 77504 - DNA, 15 bp, Homo sapiens
aagacacaactgtcc

SEQ ID NO: 77505 - DNA, 15 bp, Homo sapiens
aaagacacaactgtc

SEQ ID NO: 77506 - DNA, 15 bp, Homo sapiens
caaagacacaactgt

SEQ ID NO: 77507 - DNA, 15 bp, Homo sapiens
tcaaagacacaactg

SEQ ID NO: 77508 - DNA, 15 bp, Homo sapiens
gtcaaagacacaact

SEQ ID NO: 77509 - DNA, 15 bp, Homo sapiens
ggtcaaagacacaac

SEQ ID NO: 77510 - DNA, 15 bp, Homo sapiens
gggtcaaagacacaa

SEQ ID NO: 77511 - DNA, 15 bp, Homo sapiens
tgggtcaaagacaca

SEQ ID NO: 77512 - DNA, 15 bp, Homo sapiens
ctgggtcaaagacac

SEQ ID NO: 77513 - DNA, 15 bp, Homo sapiens
cctgggtcaaagaca

SEQ ID NO: 77514 - DNA, 15 bp, Homo sapiens
tcctgggtcaaagac

SEQ ID NO: 77515 - DNA, 15 bp, Homo sapiens
ttcctgggtcaaaga

SEQ ID NO: 77516 - DNA, 15 bp, Homo sapiens
tttcctgggtcaaag

SEQ ID NO: 77517 - DNA, 15 bp, Homo sapiens
ctttcctgggtcaaa

SEQ ID NO: 77518 - DNA, 15 bp, Homo sapiens
tctttcctgggtcaa

SEQ ID NO: 77519 - DNA, 15 bp, Homo sapiens
ttctttcctgggtca

SEQ ID NO: 77520 - DNA, 15 bp, Homo sapiens
tttctttcctgggtc

SEQ ID NO: 77521 - DNA, 15 bp, Homo sapiens
ttttctttcctgggt

SEQ ID NO: 77522 - DNA, 15 bp, Homo sapiens
attttctttcctggg

SEQ ID NO: 77523 - DNA, 15 bp, Homo sapiens
aattttctttcctgg

SEQ ID NO: 77524 - DNA, 15 bp, Homo sapiens
aaattttctttcctg

SEQ ID NO: 77525 - DNA, 15 bp, Homo sapiens
caaattttctttcct

SEQ ID NO: 77526 - DNA, 15 bp, Homo sapiens
tcaaattttctttcc

SEQ ID NO: 77527 - DNA, 15 bp, Homo sapiens
ttcaaattttctttc

SEQ ID NO: 77528 - DNA, 15 bp, Homo sapiens
attcaaattttcttt

SEQ ID NO: 77529 - DNA, 15 bp, Homo sapiens
gattcaaattttctt

SEQ ID NO: 77530 - DNA, 15 bp, Homo sapiens
tgattcaaattttct

SEQ ID NO: 77531 - DNA, 15 bp, Homo sapiens
ttgattcaaattttc

SEQ ID NO: 77532 - DNA, 15 bp, Homo sapiens
attgattcaaatttt

SEQ ID NO: 77533 - DNA, 15 bp, Homo sapiens
cattgattcaaattt

SEQ ID NO: 77534 - DNA, 15 bp, Homo sapiens
acattgattcaaatt

SEQ ID NO: 77535 - DNA, 15 bp, Homo sapiens
tacattgattcaaat

SEQ ID NO: 77536 - DNA, 15 bp, Homo sapiens
atacattgattcaaa

SEQ ID NO: 77537 - DNA, 15 bp, Homo sapiens
catacattgattcaa

SEQ ID NO: 77538 - DNA, 15 bp, Homo sapiens
acatacattgattca

SEQ ID NO: 77539 - DNA, 15 bp, Homo sapiens
aacatacattgattc

SEQ ID NO: 77540 - DNA, 15 bp, Homo sapiens
caacatacattgatt

SEQ ID NO: 77541 - DNA, 15 bp, Homo sapiens
tcaacatacattgat

SEQ ID NO: 77542 - DNA, 15 bp, Homo sapiens
ttcaacatacattga

SEQ ID NO: 77543 - DNA, 15 bp, Homo sapiens
tttcaacatacattg

SEQ ID NO: 77544 - DNA, 15 bp, Homo sapiens
ttttcaacatacatt

SEQ ID NO: 77545 - DNA, 15 bp, Homo sapiens
tttttcaacatacat

SEQ ID NO: 77546 - DNA, 15 bp, Homo sapiens
atttttcaacataca

SEQ ID NO: 77547 - DNA, 15 bp, Homo sapiens
aatttttcaacatac

SEQ ID NO: 77548 - DNA, 15 bp, Homo sapiens
caatttttcaacata

SEQ ID NO: 77549 - DNA, 15 bp, Homo sapiens
acaatttttcaacat

SEQ ID NO: 77550 - DNA, 15 bp, Homo sapiens
tacaatttttcaaca

SEQ ID NO: 77551 - DNA, 15 bp, Homo sapiens
atacaatttttcaac

SEQ ID NO: 77552 - DNA, 15 bp, Homo sapiens
catacaatttttcaa

SEQ ID NO: 77553 - DNA, 15 bp, Homo sapiens
ccatacaatttttca

SEQ ID NO: 77554 - DNA, 15 bp, Homo sapiens
tccatacaatttttc

SEQ ID NO: 77555 - DNA, 15 bp, Homo sapiens
gtccatacaattttt

SEQ ID NO: 77556 - DNA, 15 bp, Homo sapiens
ggtccatacaatttt

SEQ ID NO: 77557 - DNA, 15 bp, Homo sapiens
aggtccatacaattt

SEQ ID NO: 77558 - DNA, 15 bp, Homo sapiens
aaggtccatacaatt

SEQ ID NO: 77559 - DNA, 15 bp, Homo sapiens
taaggtccatacaat

SEQ ID NO: 77560 - DNA, 15 bp, Homo sapiens
gtaaggtccatacaa

SEQ ID NO: 77561 - DNA, 15 bp, Homo sapiens
tgtaaggtccataca

SEQ ID NO: 77562 - DNA, 15 bp, Homo sapiens
ctgtaaggtccatac

SEQ ID NO: 77563 - DNA, 15 bp, Homo sapiens
cctgtaaggtccata

SEQ ID NO: 77564 - DNA, 15 bp, Homo sapiens
acctgtaaggtccat

SEQ ID NO: 77565 - DNA, 15 bp, Homo sapiens
tacctgtaaggtcca

SEQ ID NO: 77566 - DNA, 15 bp, Homo sapiens
ttacctgtaaggtcc

SEQ ID NO: 77567 - DNA, 15 bp, Homo sapiens
attacctgtaaggtc

SEQ ID NO: 77568 - DNA, 15 bp, Homo sapiens
cattacctgtaaggt

SEQ ID NO: 77569 - DNA, 15 bp, Homo sapiens
tcattacctgtaagg

SEQ ID NO: 77570 - DNA, 15 bp, Homo sapiens
ttcattacctgtaag

SEQ ID NO: 77571 - DNA, 15 bp, Homo sapiens
gttcattacctgtaa

SEQ ID NO: 77572 - DNA, 15 bp, Homo sapiens
ggttcattacctgta

SEQ ID NO: 77573 - DNA, 15 bp, Homo sapiens
tggttcattacctgt

SEQ ID NO: 77574 - DNA, 15 bp, Homo sapiens
atggttcattacctg

SEQ ID NO: 77575 - DNA, 15 bp, Homo sapiens
tatggttcattacct

SEQ ID NO: 77576 - DNA, 15 bp, Homo sapiens
atatggttcattacc

SEQ ID NO: 77577 - DNA, 15 bp, Homo sapiens
catatggttcattac

SEQ ID NO: 77578 - DNA, 15 bp, Homo sapiens
tcatatggttcatta

SEQ ID NO: 77579 - DNA, 15 bp, Homo sapiens
atcatatggttcatt

SEQ ID NO: 77580 - DNA, 15 bp, Homo sapiens
aatcatatggttcat

SEQ ID NO: 77581 - DNA, 15 bp, Homo sapiens
gaatcatatggttca

SEQ ID NO: 77582 - DNA, 15 bp, Homo sapiens
ggaatcatatggttc

SEQ ID NO: 77583 - DNA, 15 bp, Homo sapiens
aggaatcatatggtt

SEQ ID NO: 77584 - DNA, 15 bp, Homo sapiens
caggaatcatatggt

SEQ ID NO: 77585 - DNA, 15 bp, Homo sapiens
gcaggaatcatatgg

SEQ ID NO: 77586 - DNA, 15 bp, Homo sapiens
agcaggaatcatatg

SEQ ID NO: 77587 - DNA, 15 bp, Homo sapiens
tagcaggaatcatat

SEQ ID NO: 77588 - DNA, 15 bp, Homo sapiens
ttagcaggaatcata

SEQ ID NO: 77589 - DNA, 15 bp, Homo sapiens
cttagcaggaatcat

SEQ ID NO: 77590 - DNA, 15 bp, Homo sapiens
tcttagcaggaatca

SEQ ID NO: 77591 - DNA, 15 bp, Homo sapiens
ttcttagcaggaatc

SEQ ID NO: 77592 - DNA, 15 bp, Homo sapiens
gttcttagcaggaat

SEQ ID NO: 77593 - DNA, 15 bp, Homo sapiens
ggttcttagcaggaa

SEQ ID NO: 77594 - DNA, 15 bp, Homo sapiens
aggttcttagcagga

SEQ ID NO: 77595 - DNA, 15 bp, Homo sapiens
taggttcttagcagg

SEQ ID NO: 77596 - DNA, 15 bp, Homo sapiens
ctaggttcttagcag

SEQ ID NO: 77597 - DNA, 15 bp, Homo sapiens
actaggttcttagca

SEQ ID NO: 77598 - DNA, 15 bp, Homo sapiens
cactaggttcttagc

SEQ ID NO: 77599 - DNA, 15 bp, Homo sapiens
gcactaggttcttag

SEQ ID NO: 77600 - DNA, 15 bp, Homo sapiens
agcactaggttctta

SEQ ID NO: 77601 - DNA, 15 bp, Homo sapiens
aagcactaggttctt

SEQ ID NO: 77602 - DNA, 15 bp, Homo sapiens
aaagcactaggttct

SEQ ID NO: 77603 - DNA, 15 bp, Homo sapiens
gaaagcactaggttc

SEQ ID NO: 77604 - DNA, 15 bp, Homo sapiens
ggaaagcactaggtt

SEQ ID NO: 77605 - DNA, 15 bp, Homo sapiens
aggaaagcactaggt

SEQ ID NO: 77606 - DNA, 15 bp, Homo sapiens
taggaaagcactagg

SEQ ID NO: 77607 - DNA, 15 bp, Homo sapiens
ttaggaaagcactag

SEQ ID NO: 77608 - DNA, 15 bp, Homo sapiens
cttaggaaagcacta

SEQ ID NO: 77609 - DNA, 15 bp, Homo sapiens
ccttaggaaagcact

SEQ ID NO: 77610 - DNA, 15 bp, Homo sapiens
gccttaggaaagcac

SEQ ID NO: 77611 - DNA, 15 bp, Homo sapiens
agccttaggaaagca

SEQ ID NO: 77612 - DNA, 15 bp, Homo sapiens
cagccttaggaaagc

SEQ ID NO: 77613 - DNA, 15 bp, Homo sapiens
tcagccttaggaaag

SEQ ID NO: 77614 - DNA, 15 bp, Homo sapiens
ttcagccttaggaaa

SEQ ID NO: 77615 - DNA, 15 bp, Homo sapiens
attcagccttaggaa

SEQ ID NO: 77616 - DNA, 15 bp, Homo sapiens
aattcagccttagga

SEQ ID NO: 77617 - DNA, 15 bp, Homo sapiens
taattcagccttagg

SEQ ID NO: 77618 - DNA, 15 bp, Homo sapiens
ataattcagccttag

SEQ ID NO: 77619 - DNA, 15 bp, Homo sapiens
aataattcagcctta

SEQ ID NO: 77620 - DNA, 15 bp, Homo sapiens
caataattcagcctt

SEQ ID NO: 77621 - DNA, 15 bp, Homo sapiens
acaataattcagcct

SEQ ID NO: 77622 - DNA, 15 bp, Homo sapiens
gacaataattcagcc

SEQ ID NO: 77623 - DNA, 15 bp, Homo sapiens
ggacaataattcagc

SEQ ID NO: 77624 - DNA, 15 bp, Homo sapiens
gggacaataattcag

SEQ ID NO: 77625 - DNA, 15 bp, Homo sapiens
tgggacaataattca

SEQ ID NO: 77626 - DNA, 15 bp, Homo sapiens
ttgggacaataattc

SEQ ID NO: 77627 - DNA, 15 bp, Homo sapiens
tttgggacaataatt

SEQ ID NO: 77628 - DNA, 15 bp, Homo sapiens
ttttgggacaataat

SEQ ID NO: 77629 - DNA, 15 bp, Homo sapiens
tttttgggacaataa

SEQ ID NO: 77630 - DNA, 15 bp, Homo sapiens
ctttttgggacaata

SEQ ID NO: 77631 - DNA, 15 bp, Homo sapiens
tctttttgggacaat

SEQ ID NO: 77632 - DNA, 15 bp, Homo sapiens
atctttttgggacaa

SEQ ID NO: 77633 - DNA, 15 bp, Homo sapiens
tatctttttgggaca

SEQ ID NO: 77634 - DNA, 15 bp, Homo sapiens
ttatctttttgggac

SEQ ID NO: 77635 - DNA, 15 bp, Homo sapiens
attatctttttggga

SEQ ID NO: 77636 - DNA, 15 bp, Homo sapiens
tattatctttttggg

SEQ ID NO: 77637 - DNA, 15 bp, Homo sapiens
ttattatctttttgg

SEQ ID NO: 77638 - DNA, 15 bp, Homo sapiens
tttattatctttttg

SEQ ID NO: 77639 - DNA, 15 bp, Homo sapiens
ttttattatcttttt

SEQ ID NO: 77640 - DNA, 15 bp, Homo sapiens
cttttattatctttt

SEQ ID NO: 77641 - DNA, 15 bp, Homo sapiens
gcttttattatcttt

SEQ ID NO: 77642 - DNA, 15 bp, Homo sapiens
agcttttattatctt

SEQ ID NO: 77643 - DNA, 15 bp, Homo sapiens
gagcttttattatct

SEQ ID NO: 77644 - DNA, 15 bp, Homo sapiens
agagcttttattatc

SEQ ID NO: 77645 - DNA, 15 bp, Homo sapiens
cagagcttttattat

SEQ ID NO: 77646 - DNA, 15 bp, Homo sapiens
gcagagcttttatta

SEQ ID NO: 77647 - DNA, 15 bp, Homo sapiens
agcagagcttttatt

SEQ ID NO: 77648 - DNA, 15 bp, Homo sapiens
cagcagagcttttat

SEQ ID NO: 77649 - DNA, 15 bp, Homo sapiens
gcagcagagctttta

SEQ ID NO: 77650 - DNA, 15 bp, Homo sapiens
agcagcagagctttt

SEQ ID NO: 77651 - DNA, 15 bp, Homo sapiens
gagcagcagagcttt

SEQ ID NO: 77652 - DNA, 15 bp, Homo sapiens
ggagcagcagagctt

SEQ ID NO: 77653 - DNA, 15 bp, Homo sapiens
tggagcagcagagct

SEQ ID NO: 77654 - DNA, 15 bp, Homo sapiens
ttggagcagcagagc

SEQ ID NO: 77655 - DNA, 15 bp, Homo sapiens
tttggagcagcagag

SEQ ID NO: 77656 - DNA, 15 bp, Homo sapiens
gtttggagcagcaga

SEQ ID NO: 77657 - DNA, 15 bp, Homo sapiens
tgtttggagcagcag

SEQ ID NO: 77658 - DNA, 15 bp, Homo sapiens
ttgtttggagcagca

SEQ ID NO: 77659 - DNA, 15 bp, Homo sapiens
attgtttggagcagc

SEQ ID NO: 77660 - DNA, 15 bp, Homo sapiens
cattgtttggagcag

SEQ ID NO: 77661 - DNA, 15 bp, Homo sapiens
tcattgtttggagca

SEQ ID NO: 77662 - DNA, 15 bp, Homo sapiens
atcattgtttggagc

SEQ ID NO: 77663 - DNA, 15 bp, Homo sapiens
tatcattgtttggag

SEQ ID NO: 77664 - DNA, 15 bp, Homo sapiens
atatcattgtttgga

SEQ ID NO: 77665 - DNA, 15 bp, Homo sapiens
catatcattgtttgg

SEQ ID NO: 77666 - DNA, 15 bp, Homo sapiens
tcatatcattgtttg

SEQ ID NO: 77667 - DNA, 15 bp, Homo sapiens
gtcatatcattgttt

SEQ ID NO: 77668 - DNA, 15 bp, Homo sapiens
agtcatatcattgtt

SEQ ID NO: 77669 - DNA, 15 bp, Homo sapiens
tagtcatatcattgt

SEQ ID NO: 77670 - DNA, 15 bp, Homo sapiens
atagtcatatcattg

SEQ ID NO: 77671 - DNA, 15 bp, Homo sapiens
tatagtcatatcatt

SEQ ID NO: 77672 - DNA, 15 bp, Homo sapiens
ttatagtcatatcat

SEQ ID NO: 77673 - DNA, 15 bp, Homo sapiens
cttatagtcatatca

SEQ ID NO: 77674 - DNA, 15 bp, Homo sapiens
ccttatagtcatatc

SEQ ID NO: 77675 - DNA, 15 bp, Homo sapiens
cccttatagtcatat

SEQ ID NO: 77676 - DNA, 15 bp, Homo sapiens
acccttatagtcata

SEQ ID NO: 77677 - DNA, 15 bp, Homo sapiens
cacccttatagtcat

SEQ ID NO: 77678 - DNA, 15 bp, Homo sapiens
ccacccttatagtca

SEQ ID NO: 77679 - DNA, 15 bp, Homo sapiens
gccacccttatagtc

SEQ ID NO: 77680 - DNA, 15 bp, Homo sapiens
ggccacccttatagt

SEQ ID NO: 77681 - DNA, 15 bp, Homo sapiens
aggccacccttatag

SEQ ID NO: 77682 - DNA, 15 bp, Homo sapiens
aaggccacccttata

SEQ ID NO: 77683 - DNA, 15 bp, Homo sapiens
aaaggccacccttat

SEQ ID NO: 77684 - DNA, 15 bp, Homo sapiens
aaaaggccaccctta

SEQ ID NO: 77685 - DNA, 15 bp, Homo sapiens
aaaaaggccaccctt

SEQ ID NO: 77686 - DNA, 15 bp, Homo sapiens
aaaaaaggccaccct

SEQ ID NO: 77687 - DNA, 15 bp, Homo sapiens
gaaaaaaggccaccc

SEQ ID NO: 77688 - DNA, 15 bp, Homo sapiens
tgaaaaaaggccacc

SEQ ID NO: 77689 - DNA, 15 bp, Homo sapiens
ttgaaaaaaggccac

SEQ ID NO: 77690 - DNA, 15 bp, Homo sapiens
gttgaaaaaaggcca

SEQ ID NO: 77691 - DNA, 15 bp, Homo sapiens
tgttgaaaaaaggcc

SEQ ID NO: 77692 - DNA, 15 bp, Homo sapiens
ttgttgaaaaaaggc

SEQ ID NO: 77693 - DNA, 15 bp, Homo sapiens
attgttgaaaaaagg

SEQ ID NO: 77694 - DNA, 15 bp, Homo sapiens
aattgttgaaaaaag

SEQ ID NO: 77695 - DNA, 15 bp, Homo sapiens
gaattgttgaaaaaa

SEQ ID NO: 77696 - DNA, 15 bp, Homo sapiens
agaattgttgaaaaa

SEQ ID NO: 77697 - DNA, 15 bp, Homo sapiens
cagaattgttgaaaa

SEQ ID NO: 77698 - DNA, 15 bp, Homo sapiens
acagaattgttgaaa

SEQ ID NO: 77699 - DNA, 15 bp, Homo sapiens
gacagaattgttgaa

SEQ ID NO: 77700 - DNA, 15 bp, Homo sapiens
tgacagaattgttga

SEQ ID NO: 77701 - DNA, 15 bp, Homo sapiens
gtgacagaattgttg

SEQ ID NO: 77702 - DNA, 15 bp, Homo sapiens
agtgacagaattgtt

SEQ ID NO: 77703 - DNA, 15 bp, Homo sapiens
cagtgacagaattgt

SEQ ID NO: 77704 - DNA, 15 bp, Homo sapiens
tcagtgacagaattg

SEQ ID NO: 77705 - DNA, 15 bp, Homo sapiens
ttcagtgacagaatt

SEQ ID NO: 77706 - DNA, 15 bp, Homo sapiens
tttcagtgacagaat

SEQ ID NO: 77707 - DNA, 15 bp, Homo sapiens
ttttcagtgacagaa

SEQ ID NO: 77708 - DNA, 15 bp, Homo sapiens
attttcagtgacaga

SEQ ID NO: 77709 - DNA, 15 bp, Homo sapiens
tattttcagtgacag

SEQ ID NO: 77710 - DNA, 15 bp, Homo sapiens
ttattttcagtgaca

SEQ ID NO: 77711 - DNA, 15 bp, Homo sapiens
cttattttcagtgac

SEQ ID NO: 77712 - DNA, 15 bp, Homo sapiens
acttattttcagtga

SEQ ID NO: 77713 - DNA, 15 bp, Homo sapiens
tacttattttcagtg

SEQ ID NO: 77714 - DNA, 15 bp, Homo sapiens
ctacttattttcagt

SEQ ID NO: 77715 - DNA, 15 bp, Homo sapiens
gctacttattttcag

SEQ ID NO: 77716 - DNA, 15 bp, Homo sapiens
agctacttattttca

SEQ ID NO: 77717 - DNA, 15 bp, Homo sapiens
aagctacttattttc

SEQ ID NO: 77718 - DNA, 15 bp, Homo sapiens
aaagctacttatttt

SEQ ID NO: 77719 - DNA, 15 bp, Homo sapiens
aaaagctacttattt

SEQ ID NO: 77720 - DNA, 15 bp, Homo sapiens
aaaaagctacttatt

SEQ ID NO: 77721 - DNA, 15 bp, Homo sapiens
caaaaagctacttat

SEQ ID NO: 77722 - DNA, 15 bp, Homo sapiens
tcaaaaagctactta

SEQ ID NO: 77723 - DNA, 15 bp, Homo sapiens
atcaaaaagctactt

SEQ ID NO: 77724 - DNA, 15 bp, Homo sapiens
catcaaaaagctact

SEQ ID NO: 77725 - DNA, 15 bp, Homo sapiens
acatcaaaaagctac

SEQ ID NO: 77726 - DNA, 15 bp, Homo sapiens
cacatcaaaaagcta

SEQ ID NO: 77727 - DNA, 15 bp, Homo sapiens
tcacatcaaaaagct

SEQ ID NO: 77728 - DNA, 15 bp, Homo sapiens
gtcacatcaaaaagc

SEQ ID NO: 77729 - DNA, 15 bp, Homo sapiens
agtcacatcaaaaag

SEQ ID NO: 77730 - DNA, 15 bp, Homo sapiens
tagtcacatcaaaaa

SEQ ID NO: 77731 - DNA, 15 bp, Homo sapiens
ctagtcacatcaaaa

SEQ ID NO: 77732 - DNA, 15 bp, Homo sapiens
cctagtcacatcaaa

SEQ ID NO: 77733 - DNA, 15 bp, Homo sapiens
tcctagtcacatcaa

SEQ ID NO: 77734 - DNA, 15 bp, Homo sapiens
gtcctagtcacatca

SEQ ID NO: 77735 - DNA, 15 bp, Homo sapiens
tgtcctagtcacatc

SEQ ID NO: 77736 - DNA, 15 bp, Homo sapiens
gtgtcctagtcacat

SEQ ID NO: 77737 - DNA, 15 bp, Homo sapiens
tgtgtcctagtcaca

SEQ ID NO: 77738 - DNA, 15 bp, Homo sapiens
ctgtgtcctagtcac

SEQ ID NO: 77739 - DNA, 15 bp, Homo sapiens
tctgtgtcctagtca

SEQ ID NO: 77740 - DNA, 15 bp, Homo sapiens
ttctgtgtcctagtc

SEQ ID NO: 77741 - DNA, 15 bp, Homo sapiens
attctgtgtcctagt

SEQ ID NO: 77742 - DNA, 15 bp, Homo sapiens
aattctgtgtcctag

SEQ ID NO: 77743 - DNA, 15 bp, Homo sapiens
taattctgtgtccta

SEQ ID NO: 77744 - DNA, 15 bp, Homo sapiens
ataattctgtgtcct

SEQ ID NO: 77745 - DNA, 15 bp, Homo sapiens
tataattctgtgtcc

SEQ ID NO: 77746 - DNA, 15 bp, Homo sapiens
atataattctgtgtc

SEQ ID NO: 77747 - DNA, 15 bp, Homo sapiens
aatataattctgtgt

SEQ ID NO: 77748 - DNA, 15 bp, Homo sapiens
aaatataattctgtg

SEQ ID NO: 77749 - DNA, 15 bp, Homo sapiens
aaaatataattctgt

SEQ ID NO: 77750 - DNA, 15 bp, Homo sapiens
aaaaatataattctg

SEQ ID NO: 77751 - DNA, 15 bp, Homo sapiens
aaaaaatataattct

SEQ ID NO: 77752 - DNA, 15 bp, Homo sapiens
taaaaaatataattc

SEQ ID NO: 77753 - DNA, 15 bp, Homo sapiens
gtaaaaaatataatt

SEQ ID NO: 77754 - DNA, 15 bp, Homo sapiens
tgtaaaaaatataat

SEQ ID NO: 77755 - DNA, 15 bp, Homo sapiens
atgtaaaaaatataa

SEQ ID NO: 77756 - DNA, 15 bp, Homo sapiens
gatgtaaaaaatata

SEQ ID NO: 77757 - DNA, 15 bp, Homo sapiens
agatgtaaaaaatat

SEQ ID NO: 77758 - DNA, 15 bp, Homo sapiens
aagatgtaaaaaata

SEQ ID NO: 77759 - DNA, 15 bp, Homo sapiens
taagatgtaaaaaat

SEQ ID NO: 77760 - DNA, 15 bp, Homo sapiens
ataagatgtaaaaaa

SEQ ID NO: 77761 - DNA, 15 bp, Homo sapiens
cataagatgtaaaaa

SEQ ID NO: 77762 - DNA, 15 bp, Homo sapiens
gcataagatgtaaaa

SEQ ID NO: 77763 - DNA, 15 bp, Homo sapiens
tgcataagatgtaaa

SEQ ID NO: 77764 - DNA, 15 bp, Homo sapiens
ttgcataagatgtaa

SEQ ID NO: 77765 - DNA, 15 bp, Homo sapiens
tttgcataagatgta

SEQ ID NO: 77766 - DNA, 15 bp, Homo sapiens
gtttgcataagatgt

SEQ ID NO: 77767 - DNA, 15 bp, Homo sapiens
tgtttgcataagatg

SEQ ID NO: 77768 - DNA, 15 bp, Homo sapiens
ttgtttgcataagat

SEQ ID NO: 77769 - DNA, 15 bp, Homo sapiens
gttgtttgcataaga

SEQ ID NO: 77770 - DNA, 15 bp, Homo sapiens
tgttgtttgcataag

SEQ ID NO: 77771 - DNA, 15 bp, Homo sapiens
ttgttgtttgcataa

SEQ ID NO: 77772 - DNA, 15 bp, Homo sapiens
cttgttgtttgcata

SEQ ID NO: 77773 - DNA, 15 bp, Homo sapiens
tcttgttgtttgcat

SEQ ID NO: 77774 - DNA, 15 bp, Homo sapiens
ttcttgttgtttgca

SEQ ID NO: 77775 - DNA, 15 bp, Homo sapiens
attcttgttgtttgc

SEQ ID NO: 77776 - DNA, 15 bp, Homo sapiens
tattcttgttgtttg

SEQ ID NO: 77777 - DNA, 15 bp, Homo sapiens
ctattcttgttgttt

SEQ ID NO: 77778 - DNA, 15 bp, Homo sapiens
cctattcttgttgtt

SEQ ID NO: 77779 - DNA, 15 bp, Homo sapiens
acctattcttgttgt

SEQ ID NO: 77780 - DNA, 15 bp, Homo sapiens
gacctattcttgttg

SEQ ID NO: 77781 - DNA, 15 bp, Homo sapiens
agacctattcttgtt

SEQ ID NO: 77782 - DNA, 15 bp, Homo sapiens
gagacctattcttgt

SEQ ID NO: 77783 - DNA, 15 bp, Homo sapiens
ggagacctattcttg

SEQ ID NO: 77784 - DNA, 15 bp, Homo sapiens
tggagacctattctt

SEQ ID NO: 77785 - DNA, 15 bp, Homo sapiens
ttggagacctattct

SEQ ID NO: 77786 - DNA, 15 bp, Homo sapiens
cttggagacctattc

SEQ ID NO: 77787 - DNA, 15 bp, Homo sapiens
tcttggagacctatt

SEQ ID NO: 77788 - DNA, 15 bp, Homo sapiens
gtcttggagacctat

SEQ ID NO: 77789 - DNA, 15 bp, Homo sapiens
cgtcttggagaccta

SEQ ID NO: 77790 - DNA, 15 bp, Homo sapiens
acgtcttggagacct

SEQ ID NO: 77791 - DNA, 15 bp, Homo sapiens
tacgtcttggagacc

SEQ ID NO: 77792 - DNA, 15 bp, Homo sapiens
ttacgtcttggagac

SEQ ID NO: 77793 - DNA, 15 bp, Homo sapiens
tttacgtcttggaga

SEQ ID NO: 77794 - DNA, 15 bp, Homo sapiens
ttttacgtcttggag

SEQ ID NO: 77795 - DNA, 15 bp, Homo sapiens
cttttacgtcttgga

SEQ ID NO: 77796 - DNA, 15 bp, Homo sapiens
tcttttacgtcttgg

SEQ ID NO: 77797 - DNA, 15 bp, Homo sapiens
atcttttacgtcttg

SEQ ID NO: 77798 - DNA, 15 bp, Homo sapiens
tatcttttacgtctt

SEQ ID NO: 77799 - DNA, 15 bp, Homo sapiens
atatcttttacgtct

SEQ ID NO: 77800 - DNA, 15 bp, Homo sapiens
tatatcttttacgtc

SEQ ID NO: 77801 - DNA, 15 bp, Homo sapiens
ctatatcttttacgt

SEQ ID NO: 77802 - DNA, 15 bp, Homo sapiens
tctatatcttttacg

SEQ ID NO: 77803 - DNA, 15 bp, Homo sapiens
ctctatatcttttac

SEQ ID NO: 77804 - DNA, 15 bp, Homo sapiens
tctctatatctttta

SEQ ID NO: 77805 - DNA, 15 bp, Homo sapiens
ttctctatatctttt

SEQ ID NO: 77806 - DNA, 15 bp, Homo sapiens
attctctatatcttt

SEQ ID NO: 77807 - DNA, 15 bp, Homo sapiens
aattctctatatctt

SEQ ID NO: 77808 - DNA, 15 bp, Homo sapiens
caattctctatatct

SEQ ID NO: 77809 - DNA, 15 bp, Homo sapiens
gcaattctctatatc

SEQ ID NO: 77810 - DNA, 15 bp, Homo sapiens
tgcaattctctatat

SEQ ID NO: 77811 - DNA, 15 bp, Homo sapiens
gtgcaattctctata

SEQ ID NO: 77812 - DNA, 15 bp, Homo sapiens
tgtgcaattctctat

SEQ ID NO: 77813 - DNA, 15 bp, Homo sapiens
ctgtgcaattctcta

SEQ ID NO: 77814 - DNA, 15 bp, Homo sapiens
actgtgcaattctct

SEQ ID NO: 77815 - DNA, 15 bp, Homo sapiens
gactgtgcaattctc

SEQ ID NO: 77816 - DNA, 15 bp, Homo sapiens
agactgtgcaattct

SEQ ID NO: 77817 - DNA, 15 bp, Homo sapiens
aagactgtgcaattc

SEQ ID NO: 77818 - DNA, 15 bp, Homo sapiens
aaagactgtgcaatt

SEQ ID NO: 77819 - DNA, 15 bp, Homo sapiens
caaagactgtgcaat

SEQ ID NO: 77820 - DNA, 15 bp, Homo sapiens
ccaaagactgtgcaa

SEQ ID NO: 77821 - DNA, 15 bp, Homo sapiens
accaaagactgtgca

SEQ ID NO: 77822 - DNA, 15 bp, Homo sapiens
aaccaaagactgtgc

SEQ ID NO: 77823 - DNA, 15 bp, Homo sapiens
taaccaaagactgtg

SEQ ID NO: 77824 - DNA, 15 bp, Homo sapiens
ataaccaaagactgt

SEQ ID NO: 77825 - DNA, 15 bp, Homo sapiens
gataaccaaagactg

SEQ ID NO: 77826 - DNA, 15 bp, Homo sapiens
tgataaccaaagact

SEQ ID NO: 77827 - DNA, 15 bp, Homo sapiens
ctgataaccaaagac

SEQ ID NO: 77828 - DNA, 15 bp, Homo sapiens
actgataaccaaaga

SEQ ID NO: 77829 - DNA, 15 bp, Homo sapiens
cactgataaccaaag

SEQ ID NO: 77830 - DNA, 15 bp, Homo sapiens
gcactgataaccaaa

SEQ ID NO: 77831 - DNA, 15 bp, Homo sapiens
tgcactgataaccaa

SEQ ID NO: 77832 - DNA, 15 bp, Homo sapiens
ctgcactgataacca

SEQ ID NO: 77833 - DNA, 15 bp, Homo sapiens
cctgcactgataacc

SEQ ID NO: 77834 - DNA, 15 bp, Homo sapiens
gcctgcactgataac

SEQ ID NO: 77835 - DNA, 15 bp, Homo sapiens
tgcctgcactgataa

SEQ ID NO: 77836 - DNA, 15 bp, Homo sapiens
ttgcctgcactgata

SEQ ID NO: 77837 - DNA, 15 bp, Homo sapiens
gttgcctgcactgat

SEQ ID NO: 77838 - DNA, 15 bp, Homo sapiens
tgttgcctgcactga

SEQ ID NO: 77839 - DNA, 15 bp, Homo sapiens
atgttgcctgcactg

SEQ ID NO: 77840 - DNA, 15 bp, Homo sapiens
tatgttgcctgcact

SEQ ID NO: 77841 - DNA, 15 bp, Homo sapiens
ttatgttgcctgcac

SEQ ID NO: 77842 - DNA, 15 bp, Homo sapiens
tttatgttgcctgca

SEQ ID NO: 77843 - DNA, 15 bp, Homo sapiens
atttatgttgcctgc

SEQ ID NO: 77844 - DNA, 15 bp, Homo sapiens
tatttatgttgcctg

SEQ ID NO: 77845 - DNA, 15 bp, Homo sapiens
ttatttatgttgcct

SEQ ID NO: 77846 - DNA, 15 bp, Homo sapiens
gttatttatgttgcc

SEQ ID NO: 77847 - DNA, 15 bp, Homo sapiens
ggttatttatgttgc

SEQ ID NO: 77848 - DNA, 15 bp, Homo sapiens
aggttatttatgttg

SEQ ID NO: 77849 - DNA, 15 bp, Homo sapiens
taggttatttatgtt

SEQ ID NO: 77850 - DNA, 15 bp, Homo sapiens
ataggttatttatgt

SEQ ID NO: 77851 - DNA, 15 bp, Homo sapiens
gataggttatttatg

SEQ ID NO: 77852 - DNA, 15 bp, Homo sapiens
agataggttatttat

SEQ ID NO: 77853 - DNA, 15 bp, Homo sapiens
cagataggttattta

SEQ ID NO: 77854 - DNA, 15 bp, Homo sapiens
ccagataggttattt

SEQ ID NO: 77855 - DNA, 15 bp, Homo sapiens
cccagataggttatt

SEQ ID NO: 77856 - DNA, 15 bp, Homo sapiens
acccagataggttat

SEQ ID NO: 77857 - DNA, 15 bp, Homo sapiens
cacccagataggtta

SEQ ID NO: 77858 - DNA, 15 bp, Homo sapiens
tcacccagataggtt

SEQ ID NO: 77859 - DNA, 15 bp, Homo sapiens
gtcacccagataggt

SEQ ID NO: 77860 - DNA, 15 bp, Homo sapiens
agtcacccagatagg

SEQ ID NO: 77861 - DNA, 15 bp, Homo sapiens
aagtcacccagatag

SEQ ID NO: 77862 - DNA, 15 bp, Homo sapiens
taagtcacccagata

SEQ ID NO: 77863 - DNA, 15 bp, Homo sapiens
ttaagtcacccagat

SEQ ID NO: 77864 - DNA, 15 bp, Homo sapiens
cttaagtcacccaga

SEQ ID NO: 77865 - DNA, 15 bp, Homo sapiens
tcttaagtcacccag

SEQ ID NO: 77866 - DNA, 15 bp, Homo sapiens
gtcttaagtcaccca

SEQ ID NO: 77867 - DNA, 15 bp, Homo sapiens
tgtcttaagtcaccc

SEQ ID NO: 77868 - DNA, 15 bp, Homo sapiens
ttgtcttaagtcacc

SEQ ID NO: 77869 - DNA, 15 bp, Homo sapiens
tttgtcttaagtcac

SEQ ID NO: 77870 - DNA, 15 bp, Homo sapiens
gtttgtcttaagtca

SEQ ID NO: 77871 - DNA, 15 bp, Homo sapiens
tgtttgtcttaagtc

SEQ ID NO: 77872 - DNA, 15 bp, Homo sapiens
atgtttgtcttaagt

SEQ ID NO: 77873 - DNA, 15 bp, Homo sapiens
aatgtttgtcttaag

SEQ ID NO: 77874 - DNA, 15 bp, Homo sapiens
gaatgtttgtcttaa

SEQ ID NO: 77875 - DNA, 15 bp, Homo sapiens
ggaatgtttgtctta

SEQ ID NO: 77876 - DNA, 15 bp, Homo sapiens
aggaatgtttgtctt

SEQ ID NO: 77877 - DNA, 15 bp, Homo sapiens
aaggaatgtttgtct

SEQ ID NO: 77878 - DNA, 15 bp, Homo sapiens
aaaggaatgtttgtc

SEQ ID NO: 77879 - DNA, 15 bp, Homo sapiens
taaaggaatgtttgt

SEQ ID NO: 77880 - DNA, 15 bp, Homo sapiens
ttaaaggaatgtttg

SEQ ID NO: 77881 - DNA, 15 bp, Homo sapiens
cttaaaggaatgttt

SEQ ID NO: 77882 - DNA, 15 bp, Homo sapiens
ccttaaaggaatgtt

SEQ ID NO: 77883 - DNA, 15 bp, Homo sapiens
tccttaaaggaatgt

SEQ ID NO: 77884 - DNA, 15 bp, Homo sapiens
ttccttaaaggaatg

SEQ ID NO: 77885 - DNA, 15 bp, Homo sapiens
attccttaaaggaat

SEQ ID NO: 77886 - DNA, 15 bp, Homo sapiens
aattccttaaaggaa

SEQ ID NO: 77887 - DNA, 15 bp, Homo sapiens
caattccttaaagga

SEQ ID NO: 77888 - DNA, 15 bp, Homo sapiens
gcaattccttaaagg

SEQ ID NO: 77889 - DNA, 15 bp, Homo sapiens
agcaattccttaaag

SEQ ID NO: 77890 - DNA, 15 bp, Homo sapiens
gagcaattccttaaa

SEQ ID NO: 77891 - DNA, 15 bp, Homo sapiens
tgagcaattccttaa

SEQ ID NO: 77892 - DNA, 15 bp, Homo sapiens
ttgagcaattcctta

SEQ ID NO: 77893 - DNA, 15 bp, Homo sapiens
tttgagcaattcctt

SEQ ID NO: 77894 - DNA, 15 bp, Homo sapiens
gtttgagcaattcct

SEQ ID NO: 77895 - DNA, 15 bp, Homo sapiens
ggtttgagcaattcc

SEQ ID NO: 77896 - DNA, 15 bp, Homo sapiens
aggtttgagcaattc

SEQ ID NO: 77897 - DNA, 15 bp, Homo sapiens
aaggtttgagcaatt

SEQ ID NO: 77898 - DNA, 15 bp, Homo sapiens
aaaggtttgagcaat

SEQ ID NO: 77899 - DNA, 15 bp, Homo sapiens
gaaaggtttgagcaa

SEQ ID NO: 77900 - DNA, 15 bp, Homo sapiens
agaaaggtttgagca

SEQ ID NO: 77901 - DNA, 15 bp, Homo sapiens
aagaaaggtttgagc

SEQ ID NO: 77902 - DNA, 15 bp, Homo sapiens
aaagaaaggtttgag

SEQ ID NO: 77903 - DNA, 15 bp, Homo sapiens
caaagaaaggtttga

SEQ ID NO: 77904 - DNA, 15 bp, Homo sapiens
gcaaagaaaggtttg

SEQ ID NO: 77905 - DNA, 15 bp, Homo sapiens
tgcaaagaaaggttt

SEQ ID NO: 77906 - DNA, 15 bp, Homo sapiens
ctgcaaagaaaggtt

SEQ ID NO: 77907 - DNA, 15 bp, Homo sapiens
actgcaaagaaaggt

SEQ ID NO: 77908 - DNA, 15 bp, Homo sapiens
cactgcaaagaaagg

SEQ ID NO: 77909 - DNA, 15 bp, Homo sapiens
acactgcaaagaaag

SEQ ID NO: 77910 - DNA, 15 bp, Homo sapiens
cacactgcaaagaaa

SEQ ID NO: 77911 - DNA, 15 bp, Homo sapiens
acacactgcaaagaa

SEQ ID NO: 77912 - DNA, 15 bp, Homo sapiens
tacacactgcaaaga

SEQ ID NO: 77913 - DNA, 15 bp, Homo sapiens
ctacacactgcaaag

SEQ ID NO: 77914 - DNA, 15 bp, Homo sapiens
tctacacactgcaaa

SEQ ID NO: 77915 - DNA, 15 bp, Homo sapiens
gtctacacactgcaa

SEQ ID NO: 77916 - DNA, 15 bp, Homo sapiens
agtctacacactgca

SEQ ID NO: 77917 - DNA, 15 bp, Homo sapiens
cagtctacacactgc

SEQ ID NO: 77918 - DNA, 15 bp, Homo sapiens
tcagtctacacactg

SEQ ID NO: 77919 - DNA, 15 bp, Homo sapiens
ttcagtctacacact

SEQ ID NO: 77920 - DNA, 15 bp, Homo sapiens
gttcagtctacacac

SEQ ID NO: 77921 - DNA, 15 bp, Homo sapiens
ggttcagtctacaca

SEQ ID NO: 77922 - DNA, 15 bp, Homo sapiens
tggttcagtctacac

SEQ ID NO: 77923 - DNA, 15 bp, Homo sapiens
ttggttcagtctaca

SEQ ID NO: 77924 - DNA, 15 bp, Homo sapiens
tttggttcagtctac

SEQ ID NO: 77925 - DNA, 15 bp, Homo sapiens
ttttggttcagtcta

SEQ ID NO: 77926 - DNA, 15 bp, Homo sapiens
cttttggttcagtct

SEQ ID NO: 77927 - DNA, 15 bp, Homo sapiens
acttttggttcagtc

SEQ ID NO: 77928 - DNA, 15 bp, Homo sapiens
cacttttggttcagt

SEQ ID NO: 77929 - DNA, 15 bp, Homo sapiens
tcacttttggttcag

SEQ ID NO: 77930 - DNA, 15 bp, Homo sapiens
ctcacttttggttca

SEQ ID NO: 77931 - DNA, 15 bp, Homo sapiens
tctcacttttggttc

SEQ ID NO: 77932 - DNA, 15 bp, Homo sapiens
gtctcacttttggtt

SEQ ID NO: 77933 - DNA, 15 bp, Homo sapiens
agtctcacttttggt

SEQ ID NO: 77934 - DNA, 15 bp, Homo sapiens
aagtctcacttttgg

SEQ ID NO: 77935 - DNA, 15 bp, Homo sapiens
caagtctcacttttg

SEQ ID NO: 77936 - DNA, 15 bp, Homo sapiens
gcaagtctcactttt

SEQ ID NO: 77937 - DNA, 15 bp, Homo sapiens
agcaagtctcacttt

SEQ ID NO: 77938 - DNA, 15 bp, Homo sapiens
tagcaagtctcactt

SEQ ID NO: 77939 - DNA, 15 bp, Homo sapiens
atagcaagtctcact

SEQ ID NO: 77940 - DNA, 15 bp, Homo sapiens
aatagcaagtctcac

SEQ ID NO: 77941 - DNA, 15 bp, Homo sapiens
caatagcaagtctca

SEQ ID NO: 77942 - DNA, 15 bp, Homo sapiens
ccaatagcaagtctc

SEQ ID NO: 77943 - DNA, 15 bp, Homo sapiens
cccaatagcaagtct

SEQ ID NO: 77944 - DNA, 15 bp, Homo sapiens
acccaatagcaagtc

SEQ ID NO: 77945 - DNA, 15 bp, Homo sapiens
tacccaatagcaagt

SEQ ID NO: 77946 - DNA, 15 bp, Homo sapiens
atacccaatagcaag

SEQ ID NO: 77947 - DNA, 15 bp, Homo sapiens
catacccaatagcaa

SEQ ID NO: 77948 - DNA, 15 bp, Homo sapiens
acatacccaatagca

SEQ ID NO: 77949 - DNA, 15 bp, Homo sapiens
aacatacccaatagc

SEQ ID NO: 77950 - DNA, 15 bp, Homo sapiens
gaacatacccaatag

SEQ ID NO: 77951 - DNA, 15 bp, Homo sapiens
ggaacatacccaata

SEQ ID NO: 77952 - DNA, 15 bp, Homo sapiens
tggaacatacccaat

SEQ ID NO: 77953 - DNA, 15 bp, Homo sapiens
ctggaacatacccaa

SEQ ID NO: 77954 - DNA, 15 bp, Homo sapiens
tctggaacataccca

SEQ ID NO: 77955 - DNA, 15 bp, Homo sapiens
ctctggaacataccc

SEQ ID NO: 77956 - DNA, 15 bp, Homo sapiens
cctctggaacatacc

SEQ ID NO: 77957 - DNA, 15 bp, Homo sapiens
tcctctggaacatac

SEQ ID NO: 77958 - DNA, 15 bp, Homo sapiens
ttcctctggaacata

SEQ ID NO: 77959 - DNA, 15 bp, Homo sapiens
tttcctctggaacat

SEQ ID NO: 77960 - DNA, 15 bp, Homo sapiens
ctttcctctggaaca

SEQ ID NO: 77961 - DNA, 15 bp, Homo sapiens
actttcctctggaac

SEQ ID NO: 77962 - DNA, 15 bp, Homo sapiens
tactttcctctggaa

SEQ ID NO: 77963 - DNA, 15 bp, Homo sapiens
atactttcctctgga

SEQ ID NO: 77964 - DNA, 15 bp, Homo sapiens
aatactttcctctgg

SEQ ID NO: 77965 - DNA, 15 bp, Homo sapiens
aaatactttcctctg

SEQ ID NO: 77966 - DNA, 15 bp, Homo sapiens
gaaatactttcctct

SEQ ID NO: 77967 - DNA, 15 bp, Homo sapiens
tgaaatactttcctc

SEQ ID NO: 77968 - DNA, 15 bp, Homo sapiens
atgaaatactttcct

SEQ ID NO: 77969 - DNA, 15 bp, Homo sapiens
aatgaaatactttcc

SEQ ID NO: 77970 - DNA, 15 bp, Homo sapiens
aaatgaaatactttc

SEQ ID NO: 77971 - DNA, 15 bp, Homo sapiens
caaatgaaatacttt

SEQ ID NO: 77972 - DNA, 15 bp, Homo sapiens
acaaatgaaatactt

SEQ ID NO: 77973 - DNA, 15 bp, Homo sapiens
aacaaatgaaatact

SEQ ID NO: 77974 - DNA, 15 bp, Homo sapiens
gaacaaatgaaatac

SEQ ID NO: 77975 - DNA, 15 bp, Homo sapiens
agaacaaatgaaata

SEQ ID NO: 77976 - DNA, 15 bp, Homo sapiens
gagaacaaatgaaat

SEQ ID NO: 77977 - DNA, 15 bp, Homo sapiens
agagaacaaatgaaa

SEQ ID NO: 77978 - DNA, 15 bp, Homo sapiens
cagagaacaaatgaa

SEQ ID NO: 77979 - DNA, 15 bp, Homo sapiens
tcagagaacaaatga

SEQ ID NO: 77980 - DNA, 15 bp, Homo sapiens
ttcagagaacaaatg

SEQ ID NO: 77981 - DNA, 15 bp, Homo sapiens
attcagagaacaaat

SEQ ID NO: 77982 - DNA, 15 bp, Homo sapiens
cattcagagaacaaa

SEQ ID NO: 77983 - DNA, 15 bp, Homo sapiens
tcattcagagaacaa

SEQ ID NO: 77984 - DNA, 15 bp, Homo sapiens
ctcattcagagaaca

SEQ ID NO: 77985 - DNA, 15 bp, Homo sapiens
cctcattcagagaac

SEQ ID NO: 77986 - DNA, 15 bp, Homo sapiens
tcctcattcagagaa

SEQ ID NO: 77987 - DNA, 15 bp, Homo sapiens
gtcctcattcagaga

SEQ ID NO: 77988 - DNA, 15 bp, Homo sapiens
ggtcctcattcagag

SEQ ID NO: 77989 - DNA, 15 bp, Homo sapiens
tggtcctcattcaga

SEQ ID NO: 77990 - DNA, 15 bp, Homo sapiens
ctggtcctcattcag

SEQ ID NO: 77991 - DNA, 15 bp, Homo sapiens
tctggtcctcattca

SEQ ID NO: 77992 - DNA, 15 bp, Homo sapiens
atctggtcctcattc

SEQ ID NO: 77993 - DNA, 15 bp, Homo sapiens
gatctggtcctcatt

SEQ ID NO: 77994 - DNA, 15 bp, Homo sapiens
ggatctggtcctcat

SEQ ID NO: 77995 - DNA, 15 bp, Homo sapiens
tggatctggtcctca

SEQ ID NO: 77996 - DNA, 15 bp, Homo sapiens
ttggatctggtcctc

SEQ ID NO: 77997 - DNA, 15 bp, Homo sapiens
gttggatctggtcct

SEQ ID NO: 77998 - DNA, 15 bp, Homo sapiens
ggttggatctggtcc

SEQ ID NO: 77999 - DNA, 15 bp, Homo sapiens
aggttggatctggtc

SEQ ID NO: 78000 - DNA, 15 bp, Homo sapiens
taggttggatctggt

SEQ ID NO: 78001 - DNA, 15 bp, Homo sapiens
gtaggttggatctgg

SEQ ID NO: 78002 - DNA, 15 bp, Homo sapiens
agtaggttggatctg

SEQ ID NO: 78003 - DNA, 15 bp, Homo sapiens
gagtaggttggatct

SEQ ID NO: 78004 - DNA, 15 bp, Homo sapiens
agagtaggttggatc

SEQ ID NO: 78005 - DNA, 15 bp, Homo sapiens
cagagtaggttggat

SEQ ID NO: 78006 - DNA, 15 bp, Homo sapiens
tcagagtaggttgga

SEQ ID NO: 78007 - DNA, 15 bp, Homo sapiens
ttcagagtaggttgg

SEQ ID NO: 78008 - DNA, 15 bp, Homo sapiens
cttcagagtaggttg

SEQ ID NO: 78009 - DNA, 15 bp, Homo sapiens
tcttcagagtaggtt

SEQ ID NO: 78010 - DNA, 15 bp, Homo sapiens
tgtgatacaacccgg

SEQ ID NO: 78011 - DNA, 15 bp, Homo sapiens
ctgtgatacaacccg

SEQ ID NO: 78012 - DNA, 15 bp, Homo sapiens
cctgtgatacaaccc

SEQ ID NO: 78013 - DNA, 15 bp, Homo sapiens
tcctgtgatacaacc

SEQ ID NO: 78014 - DNA, 15 bp, Homo sapiens
atcctgtgatacaac

SEQ ID NO: 78015 - DNA, 15 bp, Homo sapiens
catcctgtgatacaa

SEQ ID NO: 78016 - DNA, 15 bp, Homo sapiens
tcatcctgtgataca

SEQ ID NO: 78017 - DNA, 15 bp, Homo sapiens
ttcatcctgtgatac

SEQ ID NO: 78018 - DNA, 15 bp, Homo sapiens
tttcatcctgtgata

SEQ ID NO: 78019 - DNA, 15 bp, Homo sapiens
atttcatcctgtgat

SEQ ID NO: 78020 - DNA, 15 bp, Homo sapiens
aatttcatcctgtga

SEQ ID NO: 78021 - DNA, 15 bp, Homo sapiens
caatttcatcctgtg

SEQ ID NO: 78022 - DNA, 15 bp, Homo sapiens
acaatttcatcctgt

SEQ ID NO: 78023 - DNA, 15 bp, Homo sapiens
cacaatttcatcctg

SEQ ID NO: 78024 - DNA, 15 bp, Homo sapiens
tcacaatttcatcct

SEQ ID NO: 78025 - DNA, 15 bp, Homo sapiens
ctcacaatttcatcc

SEQ ID NO: 78026 - DNA, 15 bp, Homo sapiens
actcacaatttcatc

SEQ ID NO: 78027 - DNA, 15 bp, Homo sapiens
cactcacaatttcat

SEQ ID NO: 78028 - DNA, 15 bp, Homo sapiens
gcactcacaatttca

SEQ ID NO: 78029 - DNA, 15 bp, Homo sapiens
tgcactcacaatttc

SEQ ID NO: 78030 - DNA, 15 bp, Homo sapiens
ctgcactcacaattt

SEQ ID NO: 78031 - DNA, 15 bp, Homo sapiens
gctgcactcacaatt

SEQ ID NO: 78032 - DNA, 15 bp, Homo sapiens
ggctgcactcacaat

SEQ ID NO: 78033 - DNA, 15 bp, Homo sapiens
tggctgcactcacaa

SEQ ID NO: 78034 - DNA, 15 bp, Homo sapiens
ttggctgcactcaca

SEQ ID NO: 78035 - DNA, 15 bp, Homo sapiens
tttggctgcactcac

SEQ ID NO: 78036 - DNA, 15 bp, Homo sapiens
ctttggctgcactca

SEQ ID NO: 78037 - DNA, 15 bp, Homo sapiens
gctttggctgcactc

SEQ ID NO: 78038 - DNA, 15 bp, Homo sapiens
agctttggctgcact

SEQ ID NO: 78039 - DNA, 15 bp, Homo sapiens
cagctttggctgcac

SEQ ID NO: 78040 - DNA, 15 bp, Homo sapiens
gcagctttggctgca

SEQ ID NO: 78041 - DNA, 15 bp, Homo sapiens
ggcagctttggctgc

SEQ ID NO: 78042 - DNA, 15 bp, Homo sapiens
tggcagctttggctg

SEQ ID NO: 78043 - DNA, 15 bp, Homo sapiens
ttggcagctttggct

SEQ ID NO: 78044 - DNA, 15 bp, Homo sapiens
gttggcagctttggc

SEQ ID NO: 78045 - DNA, 15 bp, Homo sapiens
tgttggcagctttgg

SEQ ID NO: 78046 - DNA, 15 bp, Homo sapiens
atgttggcagctttg

SEQ ID NO: 78047 - DNA, 15 bp, Homo sapiens
tatgttggcagcttt

SEQ ID NO: 78048 - DNA, 15 bp, Homo sapiens
gtatgttggcagctt

SEQ ID NO: 78049 - DNA, 15 bp, Homo sapiens
tgtatgttggcagct

SEQ ID NO: 78050 - DNA, 15 bp, Homo sapiens
atgtatgttggcagc

SEQ ID NO: 78051 - DNA, 15 bp, Homo sapiens
gatgtatgttggcag

SEQ ID NO: 78052 - DNA, 15 bp, Homo sapiens
ggatgtatgttggca

SEQ ID NO: 78053 - DNA, 15 bp, Homo sapiens
aggatgtatgttggc

SEQ ID NO: 78054 - DNA, 15 bp, Homo sapiens
aaggatgtatgttgg

SEQ ID NO: 78055 - DNA, 15 bp, Homo sapiens
aaaggatgtatgttg

SEQ ID NO: 78056 - DNA, 15 bp, Homo sapiens
gaaaggatgtatgtt

SEQ ID NO: 78057 - DNA, 15 bp, Homo sapiens
tgaaaggatgtatgt

SEQ ID NO: 78058 - DNA, 15 bp, Homo sapiens
atgaaaggatgtatg

SEQ ID NO: 78059 - DNA, 15 bp, Homo sapiens
gatgaaaggatgtat

SEQ ID NO: 78060 - DNA, 15 bp, Homo sapiens
cgatgaaaggatgta

SEQ ID NO: 78061 - DNA, 15 bp, Homo sapiens
tcgatgaaaggatgt

SEQ ID NO: 78062 - DNA, 15 bp, Homo sapiens
ctcgatgaaaggatg

SEQ ID NO: 78063 - DNA, 15 bp, Homo sapiens
tctcgatgaaaggat

SEQ ID NO: 78064 - DNA, 15 bp, Homo sapiens
gtctcgatgaaagga

SEQ ID NO: 78065 - DNA, 15 bp, Homo sapiens
cgtctcgatgaaagg

SEQ ID NO: 78066 - DNA, 15 bp, Homo sapiens
acgtctcgatgaaag

SEQ ID NO: 78067 - DNA, 15 bp, Homo sapiens
aacgtctcgatgaaa

SEQ ID NO: 78068 - DNA, 15 bp, Homo sapiens
taacgtctcgatgaa

SEQ ID NO: 78069 - DNA, 15 bp, Homo sapiens
gtaacgtctcgatga

SEQ ID NO: 78070 - DNA, 15 bp, Homo sapiens
ggtaacgtctcgatg

SEQ ID NO: 78071 - DNA, 15 bp, Homo sapiens
gggtaacgtctcgat

SEQ ID NO: 78072 - DNA, 15 bp, Homo sapiens
ggggtaacgtctcga

SEQ ID NO: 78073 - DNA, 15 bp, Homo sapiens
tggggtaacgtctcg

SEQ ID NO: 78074 - DNA, 15 bp, Homo sapiens
gtggggtaacgtctc

SEQ ID NO: 78075 - DNA, 15 bp, Homo sapiens
cgtggggtaacgtct

SEQ ID NO: 78076 - DNA, 15 bp, Homo sapiens
acgtggggtaacgtc

SEQ ID NO: 78077 - DNA, 15 bp, Homo sapiens
tacgtggggtaacgt

SEQ ID NO: 78078 - DNA, 15 bp, Homo sapiens
ttacgtggggtaacg

SEQ ID NO: 78079 - DNA, 15 bp, Homo sapiens
cttacgtggggtaac

SEQ ID NO: 78080 - DNA, 15 bp, Homo sapiens
acttacgtggggtaa

SEQ ID NO: 78081 - DNA, 15 bp, Homo sapiens
aacttacgtggggta

SEQ ID NO: 78082 - DNA, 15 bp, Homo sapiens
taacttacgtggggt

SEQ ID NO: 78083 - DNA, 15 bp, Homo sapiens
ttaacttacgtgggg

SEQ ID NO: 78084 - DNA, 15 bp, Homo sapiens
tttaacttacgtggg

SEQ ID NO: 78085 - DNA, 15 bp, Homo sapiens
ctttaacttacgtgg

SEQ ID NO: 78086 - DNA, 15 bp, Homo sapiens
tctttaacttacgtg

SEQ ID NO: 78087 - DNA, 15 bp, Homo sapiens
ctctttaacttacgt

SEQ ID NO: 78088 - DNA, 15 bp, Homo sapiens
actctttaacttacg

SEQ ID NO: 78089 - DNA, 15 bp, Homo sapiens
tactctttaacttac

SEQ ID NO: 78090 - DNA, 15 bp, Homo sapiens
ctactctttaactta

SEQ ID NO: 78091 - DNA, 15 bp, Homo sapiens
gctactctttaactt

SEQ ID NO: 78092 - DNA, 15 bp, Homo sapiens
agctactctttaact

SEQ ID NO: 78093 - DNA, 15 bp, Homo sapiens
cagctactctttaac

SEQ ID NO: 78094 - DNA, 15 bp, Homo sapiens
tcagctactctttaa

SEQ ID NO: 78095 - DNA, 15 bp, Homo sapiens
ttcagctactcttta

SEQ ID NO: 78096 - DNA, 15 bp, Homo sapiens
tttcagctactcttt

SEQ ID NO: 78097 - DNA, 15 bp, Homo sapiens
atttcagctactctt

SEQ ID NO: 78098 - DNA, 15 bp, Homo sapiens
gatttcagctactct

SEQ ID NO: 78099 - DNA, 15 bp, Homo sapiens
tgatttcagctactc

SEQ ID NO: 78100 - DNA, 15 bp, Homo sapiens
ctgatttcagctact

SEQ ID NO: 78101 - DNA, 15 bp, Homo sapiens
tctgatttcagctac

SEQ ID NO: 78102 - DNA, 15 bp, Homo sapiens
ttctgatttcagcta

SEQ ID NO: 78103 - DNA, 15 bp, Homo sapiens
cttctgatttcagct

SEQ ID NO: 78104 - DNA, 15 bp, Homo sapiens
tcttctgatttcagc

SEQ ID NO: 78105 - DNA, 15 bp, Homo sapiens
ctcttctgatttcag

SEQ ID NO: 78106 - DNA, 15 bp, Homo sapiens
tctcttctgatttca

SEQ ID NO: 78107 - DNA, 15 bp, Homo sapiens
gtctcttctgatttc

SEQ ID NO: 78108 - DNA, 15 bp, Homo sapiens
agtctcttctgattt

SEQ ID NO: 78109 - DNA, 15 bp, Homo sapiens
tagtctcttctgatt

SEQ ID NO: 78110 - DNA, 15 bp, Homo sapiens
gtagtctcttctgat

SEQ ID NO: 78111 - DNA, 15 bp, Homo sapiens
agtagtctcttctga

SEQ ID NO: 78112 - DNA, 15 bp, Homo sapiens
aagtagtctcttctg

SEQ ID NO: 78113 - DNA, 15 bp, Homo sapiens
aaagtagtctcttct

SEQ ID NO: 78114 - DNA, 15 bp, Homo sapiens
aaaagtagtctcttc

SEQ ID NO: 78115 - DNA, 15 bp, Homo sapiens
aaaaagtagtctctt

SEQ ID NO: 78116 - DNA, 15 bp, Homo sapiens
taaaaagtagtctct

SEQ ID NO: 78117 - DNA, 15 bp, Homo sapiens
ataaaaagtagtctc

SEQ ID NO: 78118 - DNA, 15 bp, Homo sapiens
gataaaaagtagtct

SEQ ID NO: 78119 - DNA, 15 bp, Homo sapiens
ggataaaaagtagtc

SEQ ID NO: 78120 - DNA, 15 bp, Homo sapiens
gggataaaaagtagt

SEQ ID NO: 78121 - DNA, 15 bp, Homo sapiens
ggggataaaaagtag

SEQ ID NO: 78122 - DNA, 15 bp, Homo sapiens
gggggataaaaagta

SEQ ID NO: 78123 - DNA, 15 bp, Homo sapiens
tgggggataaaaagt

SEQ ID NO: 78124 - DNA, 15 bp, Homo sapiens
ttgggggataaaaag

SEQ ID NO: 78125 - DNA, 15 bp, Homo sapiens
tttgggggataaaaa

SEQ ID NO: 78126 - DNA, 15 bp, Homo sapiens
gtttgggggataaaa

SEQ ID NO: 78127 - DNA, 15 bp, Homo sapiens
tgtttgggggataaa

SEQ ID NO: 78128 - DNA, 15 bp, Homo sapiens
ttgtttgggggataa

SEQ ID NO: 78129 - DNA, 15 bp, Homo sapiens
attgtttgggggata

SEQ ID NO: 78130 - DNA, 15 bp, Homo sapiens
aattgtttgggggat

SEQ ID NO: 78131 - DNA, 15 bp, Homo sapiens
taattgtttggggga

SEQ ID NO: 78132 - DNA, 15 bp, Homo sapiens
gtaattgtttggggg

SEQ ID NO: 78133 - DNA, 15 bp, Homo sapiens
ggtaattgtttgggg

SEQ ID NO: 78134 - DNA, 15 bp, Homo sapiens
tggtaattgtttggg

SEQ ID NO: 78135 - DNA, 15 bp, Homo sapiens
ttggtaattgtttgg

SEQ ID NO: 78136 - DNA, 15 bp, Homo sapiens
tttggtaattgtttg

SEQ ID NO: 78137 - DNA, 15 bp, Homo sapiens
ctttggtaattgttt

SEQ ID NO: 78138 - DNA, 15 bp, Homo sapiens
actttggtaattgtt

SEQ ID NO: 78139 - DNA, 15 bp, Homo sapiens
aactttggtaattgt

SEQ ID NO: 78140 - DNA, 15 bp, Homo sapiens
taactttggtaattg

SEQ ID NO: 78141 - DNA, 15 bp, Homo sapiens
ataactttggtaatt

SEQ ID NO: 78142 - DNA, 15 bp, Homo sapiens
cataactttggtaat

SEQ ID NO: 78143 - DNA, 15 bp, Homo sapiens
gcataactttggtaa

SEQ ID NO: 78144 - DNA, 15 bp, Homo sapiens
ggcataactttggta

SEQ ID NO: 78145 - DNA, 15 bp, Homo sapiens
tggcataactttggt

SEQ ID NO: 78146 - DNA, 15 bp, Homo sapiens
ttggcataactttgg

SEQ ID NO: 78147 - DNA, 15 bp, Homo sapiens
gttggcataactttg

SEQ ID NO: 78148 - DNA, 15 bp, Homo sapiens
tgttggcataacttt

SEQ ID NO: 78149 - DNA, 15 bp, Homo sapiens
ttgttggcataactt

SEQ ID NO: 78150 - DNA, 15 bp, Homo sapiens
tttgttggcataact

SEQ ID NO: 78151 - DNA, 15 bp, Homo sapiens
ttttgttggcataac

SEQ ID NO: 78152 - DNA, 15 bp, Homo sapiens
attttgttggcataa

SEQ ID NO: 78153 - DNA, 15 bp, Homo sapiens
gattttgttggcata

SEQ ID NO: 78154 - DNA, 15 bp, Homo sapiens
agattttgttggcat

SEQ ID NO: 78155 - DNA, 15 bp, Homo sapiens
aagattttgttggca

SEQ ID NO: 78156 - DNA, 15 bp, Homo sapiens
caagattttgttggc

SEQ ID NO: 78157 - DNA, 15 bp, Homo sapiens
acaagattttgttgg

SEQ ID NO: 78158 - DNA, 15 bp, Homo sapiens
tacaagattttgttg

SEQ ID NO: 78159 - DNA, 15 bp, Homo sapiens
ttacaagattttgtt

SEQ ID NO: 78160 - DNA, 15 bp, Homo sapiens
gttacaagattttgt

SEQ ID NO: 78161 - DNA, 15 bp, Homo sapiens
tgttacaagattttg

SEQ ID NO: 78162 - DNA, 15 bp, Homo sapiens
ttgttacaagatttt

SEQ ID NO: 78163 - DNA, 15 bp, Homo sapiens
tttgttacaagattt

SEQ ID NO: 78164 - DNA, 15 bp, Homo sapiens
ttttgttacaagatt

SEQ ID NO: 78165 - DNA, 15 bp, Homo sapiens
attttgttacaagat

SEQ ID NO: 78166 - DNA, 15 bp, Homo sapiens
tattttgttacaaga

SEQ ID NO: 78167 - DNA, 15 bp, Homo sapiens
atattttgttacaag

SEQ ID NO: 78168 - DNA, 15 bp, Homo sapiens
catattttgttacaa

SEQ ID NO: 78169 - DNA, 15 bp, Homo sapiens
acatattttgttaca

SEQ ID NO: 78170 - DNA, 15 bp, Homo sapiens
aacatattttgttac

SEQ ID NO: 78171 - DNA, 15 bp, Homo sapiens
caacatattttgtta

SEQ ID NO: 78172 - DNA, 15 bp, Homo sapiens
tcaacatattttgtt

SEQ ID NO: 78173 - DNA, 15 bp, Homo sapiens
atcaacatattttgt

SEQ ID NO: 78174 - DNA, 15 bp, Homo sapiens
aatcaacatattttg

SEQ ID NO: 78175 - DNA, 15 bp, Homo sapiens
aaatcaacatatttt

SEQ ID NO: 78176 - DNA, 15 bp, Homo sapiens
taaatcaacatattt

SEQ ID NO: 78177 - DNA, 15 bp, Homo sapiens
gtaaatcaacatatt

SEQ ID NO: 78178 - DNA, 15 bp, Homo sapiens
agtaaatcaacatat

SEQ ID NO: 78179 - DNA, 15 bp, Homo sapiens
tagtaaatcaacata

SEQ ID NO: 78180 - DNA, 15 bp, Homo sapiens
ttagtaaatcaacat

SEQ ID NO: 78181 - DNA, 15 bp, Homo sapiens
gttagtaaatcaaca

SEQ ID NO: 78182 - DNA, 15 bp, Homo sapiens
tgttagtaaatcaac

SEQ ID NO: 78183 - DNA, 15 bp, Homo sapiens
atgttagtaaatcaa

SEQ ID NO: 78184 - DNA, 15 bp, Homo sapiens
aatgttagtaaatca

SEQ ID NO: 78185 - DNA, 15 bp, Homo sapiens
taatgttagtaaatc

SEQ ID NO: 78186 - DNA, 15 bp, Homo sapiens
ttaatgttagtaaat

SEQ ID NO: 78187 - DNA, 15 bp, Homo sapiens
gttaatgttagtaaa

SEQ ID NO: 78188 - DNA, 15 bp, Homo sapiens
tgttaatgttagtaa

SEQ ID NO: 78189 - DNA, 15 bp, Homo sapiens
ttgttaatgttagta

SEQ ID NO: 78190 - DNA, 15 bp, Homo sapiens
gttgttaatgttagt

SEQ ID NO: 78191 - DNA, 15 bp, Homo sapiens
agttgttaatgttag

SEQ ID NO: 78192 - DNA, 15 bp, Homo sapiens
aagttgttaatgtta

SEQ ID NO: 78193 - DNA, 15 bp, Homo sapiens
caagttgttaatgtt

SEQ ID NO: 78194 - DNA, 15 bp, Homo sapiens
ccaagttgttaatgt

SEQ ID NO: 78195 - DNA, 15 bp, Homo sapiens
tccaagttgttaatg

SEQ ID NO: 78196 - DNA, 15 bp, Homo sapiens
gtccaagttgttaat

SEQ ID NO: 78197 - DNA, 15 bp, Homo sapiens
tgtccaagttgttaa

SEQ ID NO: 78198 - DNA, 15 bp, Homo sapiens
ttgtccaagttgtta

SEQ ID NO: 78199 - DNA, 15 bp, Homo sapiens
cttgtccaagttgtt

SEQ ID NO: 78200 - DNA, 15 bp, Homo sapiens
ccttgtccaagttgt

SEQ ID NO: 78201 - DNA, 15 bp, Homo sapiens
gccttgtccaagttg

SEQ ID NO: 78202 - DNA, 15 bp, Homo sapiens
tgccttgtccaagtt

SEQ ID NO: 78203 - DNA, 15 bp, Homo sapiens
gtgccttgtccaagt

SEQ ID NO: 78204 - DNA, 15 bp, Homo sapiens
agtgccttgtccaag

SEQ ID NO: 78205 - DNA, 15 bp, Homo sapiens
aagtgccttgtccaa

SEQ ID NO: 78206 - DNA, 15 bp, Homo sapiens
gaagtgccttgtcca

SEQ ID NO: 78207 - DNA, 15 bp, Homo sapiens
tgaagtgccttgtcc

SEQ ID NO: 78208 - DNA, 15 bp, Homo sapiens
ctgaagtgccttgtc

SEQ ID NO: 78209 - DNA, 15 bp, Homo sapiens
cctgaagtgccttgt

SEQ ID NO: 78210 - DNA, 15 bp, Homo sapiens
tcctgaagtgccttg

SEQ ID NO: 78211 - DNA, 15 bp, Homo sapiens
atcctgaagtgcctt

SEQ ID NO: 78212 - DNA, 15 bp, Homo sapiens
tatcctgaagtgcct

SEQ ID NO: 78213 - DNA, 15 bp, Homo sapiens
gtatcctgaagtgcc

SEQ ID NO: 78214 - DNA, 15 bp, Homo sapiens
ggtatcctgaagtgc

SEQ ID NO: 78215 - DNA, 15 bp, Homo sapiens
tggtatcctgaagtg

SEQ ID NO: 78216 - DNA, 15 bp, Homo sapiens
ttggtatcctgaagt

SEQ ID NO: 78217 - DNA, 15 bp, Homo sapiens
cttggtatcctgaag

SEQ ID NO: 78218 - DNA, 15 bp, Homo sapiens
gcttggtatcctgaa

SEQ ID NO: 78219 - DNA, 15 bp, Homo sapiens
agcttggtatcctga

SEQ ID NO: 78220 - DNA, 15 bp, Homo sapiens
aagcttggtatcctg

SEQ ID NO: 78221 - DNA, 15 bp, Homo sapiens
gaagcttggtatcct

SEQ ID NO: 78222 - DNA, 15 bp, Homo sapiens
ggaagcttggtatcc

SEQ ID NO: 78223 - DNA, 15 bp, Homo sapiens
aggaagcttggtatc

SEQ ID NO: 78224 - DNA, 15 bp, Homo sapiens
aaggaagcttggtat

SEQ ID NO: 78225 - DNA, 15 bp, Homo sapiens
taaggaagcttggta

SEQ ID NO: 78226 - DNA, 15 bp, Homo sapiens
ataaggaagcttggt

SEQ ID NO: 78227 - DNA, 15 bp, Homo sapiens
aataaggaagcttgg

SEQ ID NO: 78228 - DNA, 15 bp, Homo sapiens
aaataaggaagcttg

SEQ ID NO: 78229 - DNA, 15 bp, Homo sapiens
caaataaggaagctt

SEQ ID NO: 78230 - DNA, 15 bp, Homo sapiens
acaaataaggaagct

SEQ ID NO: 78231 - DNA, 15 bp, Homo sapiens
tacaaataaggaagc

SEQ ID NO: 78232 - DNA, 15 bp, Homo sapiens
ttacaaataaggaag

SEQ ID NO: 78233 - DNA, 15 bp, Homo sapiens
tttacaaataaggaa

SEQ ID NO: 78234 - DNA, 15 bp, Homo sapiens
atttacaaataagga

SEQ ID NO: 78235 - DNA, 15 bp, Homo sapiens
catttacaaataagg

SEQ ID NO: 78236 - DNA, 15 bp, Homo sapiens
ccatttacaaataag

SEQ ID NO: 78237 - DNA, 15 bp, Homo sapiens
cccatttacaaataa

SEQ ID NO: 78238 - DNA, 15 bp, Homo sapiens
tcccatttacaaata

SEQ ID NO: 78239 - DNA, 15 bp, Homo sapiens
ttcccatttacaaat

SEQ ID NO: 78240 - DNA, 15 bp, Homo sapiens
attcccatttacaaa

SEQ ID NO: 78241 - DNA, 15 bp, Homo sapiens
tattcccatttacaa

SEQ ID NO: 78242 - DNA, 15 bp, Homo sapiens
gtattcccatttaca

SEQ ID NO: 78243 - DNA, 15 bp, Homo sapiens
tgtattcccatttac

SEQ ID NO: 78244 - DNA, 15 bp, Homo sapiens
atgtattcccattta

SEQ ID NO: 78245 - DNA, 15 bp, Homo sapiens
aatgtattcccattt

SEQ ID NO: 78246 - DNA, 15 bp, Homo sapiens
taatgtattcccatt

SEQ ID NO: 78247 - DNA, 15 bp, Homo sapiens
ataatgtattcccat

SEQ ID NO: 78248 - DNA, 15 bp, Homo sapiens
cataatgtattccca

SEQ ID NO: 78249 - DNA, 15 bp, Homo sapiens
gcataatgtattccc

SEQ ID NO: 78250 - DNA, 15 bp, Homo sapiens
ggcataatgtattcc

SEQ ID NO: 78251 - DNA, 15 bp, Homo sapiens
aggcataatgtattc

SEQ ID NO: 78252 - DNA, 15 bp, Homo sapiens
taggcataatgtatt

SEQ ID NO: 78253 - DNA, 15 bp, Homo sapiens
gtaggcataatgtat

SEQ ID NO: 78254 - DNA, 15 bp, Homo sapiens
ggtaggcataatgta

SEQ ID NO: 78255 - DNA, 15 bp, Homo sapiens
aggtaggcataatgt

SEQ ID NO: 78256 - DNA, 15 bp, Homo sapiens
gaggtaggcataatg

SEQ ID NO: 78257 - DNA, 15 bp, Homo sapiens
tgaggtaggcataat

SEQ ID NO: 78258 - DNA, 15 bp, Homo sapiens
atgaggtaggcataa

SEQ ID NO: 78259 - DNA, 15 bp, Homo sapiens
tatgaggtaggcata

SEQ ID NO: 78260 - DNA, 15 bp, Homo sapiens
gtatgaggtaggcat

SEQ ID NO: 78261 - DNA, 15 bp, Homo sapiens
tgtatgaggtaggca

SEQ ID NO: 78262 - DNA, 15 bp, Homo sapiens
ttgtatgaggtaggc

SEQ ID NO: 78263 - DNA, 15 bp, Homo sapiens
tttgtatgaggtagg

SEQ ID NO: 78264 - DNA, 15 bp, Homo sapiens
atttgtatgaggtag

SEQ ID NO: 78265 - DNA, 15 bp, Homo sapiens
catttgtatgaggta

SEQ ID NO: 78266 - DNA, 15 bp, Homo sapiens
acatttgtatgaggt

SEQ ID NO: 78267 - DNA, 15 bp, Homo sapiens
tacatttgtatgagg

SEQ ID NO: 78268 - DNA, 15 bp, Homo sapiens
ctacatttgtatgag

SEQ ID NO: 78269 - DNA, 15 bp, Homo sapiens
actacatttgtatga

SEQ ID NO: 78270 - DNA, 15 bp, Homo sapiens
cactacatttgtatg

SEQ ID NO: 78271 - DNA, 15 bp, Homo sapiens
tcactacatttgtat

SEQ ID NO: 78272 - DNA, 15 bp, Homo sapiens
ctcactacatttgta

SEQ ID NO: 78273 - DNA, 15 bp, Homo sapiens
tctcactacatttgt

SEQ ID NO: 78274 - DNA, 15 bp, Homo sapiens
ttctcactacatttg

SEQ ID NO: 78275 - DNA, 15 bp, Homo sapiens
cttctcactacattt

SEQ ID NO: 78276 - DNA, 15 bp, Homo sapiens
gcttctcactacatt

SEQ ID NO: 78277 - DNA, 15 bp, Homo sapiens
agcttctcactacat

SEQ ID NO: 78278 - DNA, 15 bp, Homo sapiens
gagcttctcactaca

SEQ ID NO: 78279 - DNA, 15 bp, Homo sapiens
tgagcttctcactac

SEQ ID NO: 78280 - DNA, 15 bp, Homo sapiens
ttgagcttctcacta

SEQ ID NO: 78281 - DNA, 15 bp, Homo sapiens
tttgagcttctcact

SEQ ID NO: 78282 - DNA, 15 bp, Homo sapiens
ttttgagcttctcac

SEQ ID NO: 78283 - DNA, 15 bp, Homo sapiens
gttttgagcttctca

SEQ ID NO: 78284 - DNA, 15 bp, Homo sapiens
ggttttgagcttctc

SEQ ID NO: 78285 - DNA, 15 bp, Homo sapiens
tggttttgagcttct

SEQ ID NO: 78286 - DNA, 15 bp, Homo sapiens
gtggttttgagcttc

SEQ ID NO: 78287 - DNA, 15 bp, Homo sapiens
ggtggttttgagctt

SEQ ID NO: 78288 - DNA, 15 bp, Homo sapiens
tggtggttttgagct

SEQ ID NO: 78289 - DNA, 15 bp, Homo sapiens
atggtggttttgagc

SEQ ID NO: 78290 - DNA, 15 bp, Homo sapiens
tatggtggttttgag

SEQ ID NO: 78291 - DNA, 15 bp, Homo sapiens
gtatggtggttttga

SEQ ID NO: 78292 - DNA, 15 bp, Homo sapiens
agtatggtggttttg

SEQ ID NO: 78293 - DNA, 15 bp, Homo sapiens
aagtatggtggtttt

SEQ ID NO: 78294 - DNA, 15 bp, Homo sapiens
gaagtatggtggttt

SEQ ID NO: 78295 - DNA, 15 bp, Homo sapiens
tgaagtatggtggtt

SEQ ID NO: 78296 - DNA, 15 bp, Homo sapiens
ctgaagtatggtggt

SEQ ID NO: 78297 - DNA, 15 bp, Homo sapiens
cctgaagtatggtgg

SEQ ID NO: 78298 - DNA, 15 bp, Homo sapiens
acctgaagtatggtg

SEQ ID NO: 78299 - DNA, 15 bp, Homo sapiens
aacctgaagtatggt

SEQ ID NO: 78300 - DNA, 15 bp, Homo sapiens
taacctgaagtatgg

SEQ ID NO: 78301 - DNA, 15 bp, Homo sapiens
gtaacctgaagtatg

SEQ ID NO: 78302 - DNA, 15 bp, Homo sapiens
tgtaacctgaagtat

SEQ ID NO: 78303 - DNA, 15 bp, Homo sapiens
ctgtaacctgaagta

SEQ ID NO: 78304 - DNA, 15 bp, Homo sapiens
tctgtaacctgaagt

SEQ ID NO: 78305 - DNA, 15 bp, Homo sapiens
gtctgtaacctgaag

SEQ ID NO: 78306 - DNA, 15 bp, Homo sapiens
agtctgtaacctgaa

SEQ ID NO: 78307 - DNA, 15 bp, Homo sapiens
cagtctgtaacctga

SEQ ID NO: 78308 - DNA, 15 bp, Homo sapiens
ccagtctgtaacctg

SEQ ID NO: 78309 - DNA, 15 bp, Homo sapiens
accagtctgtaacct

SEQ ID NO: 78310 - DNA, 15 bp, Homo sapiens
caccagtctgtaacc

SEQ ID NO: 78311 - DNA, 15 bp, Homo sapiens
ccaccagtctgtaac

SEQ ID NO: 78312 - DNA, 15 bp, Homo sapiens
accaccagtctgtaa

SEQ ID NO: 78313 - DNA, 15 bp, Homo sapiens
aaccaccagtctgta

SEQ ID NO: 78314 - DNA, 15 bp, Homo sapiens
caaccaccagtctgt

SEQ ID NO: 78315 - DNA, 15 bp, Homo sapiens
tcaaccaccagtctg

SEQ ID NO: 78316 - DNA, 15 bp, Homo sapiens
ctcaaccaccagtct

SEQ ID NO: 78317 - DNA, 15 bp, Homo sapiens
cctcaaccaccagtc

SEQ ID NO: 78318 - DNA, 15 bp, Homo sapiens
ccctcaaccaccagt

SEQ ID NO: 78319 - DNA, 15 bp, Homo sapiens
gccctcaaccaccag

SEQ ID NO: 78320 - DNA, 15 bp, Homo sapiens
agccctcaaccacca

SEQ ID NO: 78321 - DNA, 15 bp, Homo sapiens
cagccctcaaccacc

SEQ ID NO: 78322 - DNA, 15 bp, Homo sapiens
gcagccctcaaccac

SEQ ID NO: 78323 - DNA, 15 bp, Homo sapiens
tgcagccctcaacca

SEQ ID NO: 78324 - DNA, 15 bp, Homo sapiens
atgcagccctcaacc

SEQ ID NO: 78325 - DNA, 15 bp, Homo sapiens
aatgcagccctcaac

SEQ ID NO: 78326 - DNA, 15 bp, Homo sapiens
aaatgcagccctcaa

SEQ ID NO: 78327 - DNA, 15 bp, Homo sapiens
taaatgcagccctca

SEQ ID NO: 78328 - DNA, 15 bp, Homo sapiens
ctaaatgcagccctc

SEQ ID NO: 78329 - DNA, 15 bp, Homo sapiens
tctaaatgcagccct

SEQ ID NO: 78330 - DNA, 15 bp, Homo sapiens
gtctaaatgcagccc

SEQ ID NO: 78331 - DNA, 15 bp, Homo sapiens
agtctaaatgcagcc

SEQ ID NO: 78332 - DNA, 15 bp, Homo sapiens
cagtctaaatgcagc

SEQ ID NO: 78333 - DNA, 15 bp, Homo sapiens
gcagtctaaatgcag

SEQ ID NO: 78334 - DNA, 15 bp, Homo sapiens
tgcagtctaaatgca

SEQ ID NO: 78335 - DNA, 15 bp, Homo sapiens
ctgcagtctaaatgc

SEQ ID NO: 78336 - DNA, 15 bp, Homo sapiens
actgcagtctaaatg

SEQ ID NO: 78337 - DNA, 15 bp, Homo sapiens
gactgcagtctaaat

SEQ ID NO: 78338 - DNA, 15 bp, Homo sapiens
tgactgcagtctaaa

SEQ ID NO: 78339 - DNA, 15 bp, Homo sapiens
atgactgcagtctaa

SEQ ID NO: 78340 - DNA, 15 bp, Homo sapiens
catgactgcagtcta

SEQ ID NO: 78341 - DNA, 15 bp, Homo sapiens
acatgactgcagtct

SEQ ID NO: 78342 - DNA, 15 bp, Homo sapiens
aacatgactgcagtc

SEQ ID NO: 78343 - DNA, 15 bp, Homo sapiens
aaacatgactgcagt

SEQ ID NO: 78344 - DNA, 15 bp, Homo sapiens
caaacatgactgcag

SEQ ID NO: 78345 - DNA, 15 bp, Homo sapiens
ccaaacatgactgca

SEQ ID NO: 78346 - DNA, 15 bp, Homo sapiens
accaaacatgactgc

SEQ ID NO: 78347 - DNA, 15 bp, Homo sapiens
aaccaaacatgactg

SEQ ID NO: 78348 - DNA, 15 bp, Homo sapiens
aaaccaaacatgact

SEQ ID NO: 78349 - DNA, 15 bp, Homo sapiens
taaaccaaacatgac

SEQ ID NO: 78350 - DNA, 15 bp, Homo sapiens
ctaaaccaaacatga

SEQ ID NO: 78351 - DNA, 15 bp, Homo sapiens
gctaaaccaaacatg

SEQ ID NO: 78352 - DNA, 15 bp, Homo sapiens
ggctaaaccaaacat

SEQ ID NO: 78353 - DNA, 15 bp, Homo sapiens
gggctaaaccaaaca

SEQ ID NO: 78354 - DNA, 15 bp, Homo sapiens
agggctaaaccaaac

SEQ ID NO: 78355 - DNA, 15 bp, Homo sapiens
tagggctaaaccaaa

SEQ ID NO: 78356 - DNA, 15 bp, Homo sapiens
atagggctaaaccaa

SEQ ID NO: 78357 - DNA, 15 bp, Homo sapiens
catagggctaaacca

SEQ ID NO: 78358 - DNA, 15 bp, Homo sapiens
ccatagggctaaacc

SEQ ID NO: 78359 - DNA, 15 bp, Homo sapiens
accatagggctaaac

SEQ ID NO: 78360 - DNA, 15 bp, Homo sapiens
taccatagggctaaa

SEQ ID NO: 78361 - DNA, 15 bp, Homo sapiens
gtaccatagggctaa

SEQ ID NO: 78362 - DNA, 15 bp, Homo sapiens
agtaccatagggcta

SEQ ID NO: 78363 - DNA, 15 bp, Homo sapiens
aagtaccatagggct

SEQ ID NO: 78364 - DNA, 15 bp, Homo sapiens
aaagtaccatagggc

SEQ ID NO: 78365 - DNA, 15 bp, Homo sapiens
aaaagtaccataggg

SEQ ID NO: 78366 - DNA, 15 bp, Homo sapiens
taaaagtaccatagg

SEQ ID NO: 78367 - DNA, 15 bp, Homo sapiens
ttaaaagtaccatag

SEQ ID NO: 78368 - DNA, 15 bp, Homo sapiens
tttaaaagtaccata

SEQ ID NO: 78369 - DNA, 15 bp, Homo sapiens
ttttaaaagtaccat

SEQ ID NO: 78370 - DNA, 15 bp, Homo sapiens
gttttaaaagtacca

SEQ ID NO: 78371 - DNA, 15 bp, Homo sapiens
tgttttaaaagtacc

SEQ ID NO: 78372 - DNA, 15 bp, Homo sapiens
ttgttttaaaagtac

SEQ ID NO: 78373 - DNA, 15 bp, Homo sapiens
attgttttaaaagta

SEQ ID NO: 78374 - DNA, 15 bp, Homo sapiens
aattgttttaaaagt

SEQ ID NO: 78375 - DNA, 15 bp, Homo sapiens
taattgttttaaaag

SEQ ID NO: 78376 - DNA, 15 bp, Homo sapiens
ataattgttttaaaa

SEQ ID NO: 78377 - DNA, 15 bp, Homo sapiens
tataattgttttaaa

SEQ ID NO: 78378 - DNA, 15 bp, Homo sapiens
ctataattgttttaa

SEQ ID NO: 78379 - DNA, 15 bp, Homo sapiens
actataattgtttta

SEQ ID NO: 78380 - DNA, 15 bp, Homo sapiens
aactataattgtttt

SEQ ID NO: 78381 - DNA, 15 bp, Homo sapiens
aaactataattgttt

SEQ ID NO: 78382 - DNA, 15 bp, Homo sapiens
aaaactataattgtt

SEQ ID NO: 78383 - DNA, 15 bp, Homo sapiens
aaaaactataattgt

SEQ ID NO: 78384 - DNA, 15 bp, Homo sapiens
taaaaactataattg

SEQ ID NO: 78385 - DNA, 15 bp, Homo sapiens
ataaaaactataatt

SEQ ID NO: 78386 - DNA, 15 bp, Homo sapiens
aataaaaactataat

SEQ ID NO: 78387 - DNA, 15 bp, Homo sapiens
aaataaaaactataa

SEQ ID NO: 78388 - DNA, 15 bp, Homo sapiens
aaaataaaaactata

SEQ ID NO: 78389 - DNA, 15 bp, Homo sapiens
caaaataaaaactat

SEQ ID NO: 78390 - DNA, 15 bp, Homo sapiens
tcaaaataaaaacta

SEQ ID NO: 78391 - DNA, 15 bp, Homo sapiens
ctcaaaataaaaact

SEQ ID NO: 78392 - DNA, 15 bp, Homo sapiens
tctcaaaataaaaac

SEQ ID NO: 78393 - DNA, 15 bp, Homo sapiens
atctcaaaataaaaa

SEQ ID NO: 78394 - DNA, 15 bp, Homo sapiens
tatctcaaaataaaa

SEQ ID NO: 78395 - DNA, 15 bp, Homo sapiens
ttatctcaaaataaa

SEQ ID NO: 78396 - DNA, 15 bp, Homo sapiens
attatctcaaaataa

SEQ ID NO: 78397 - DNA, 15 bp, Homo sapiens
aattatctcaaaata

SEQ ID NO: 78398 - DNA, 15 bp, Homo sapiens
taattatctcaaaat

SEQ ID NO: 78399 - DNA, 15 bp, Homo sapiens
ataattatctcaaaa

SEQ ID NO: 78400 - DNA, 15 bp, Homo sapiens
cataattatctcaaa

SEQ ID NO: 78401 - DNA, 15 bp, Homo sapiens
ccataattatctcaa

SEQ ID NO: 78402 - DNA, 15 bp, Homo sapiens
tccataattatctca

SEQ ID NO: 78403 - DNA, 15 bp, Homo sapiens
atccataattatctc

SEQ ID NO: 78404 - DNA, 15 bp, Homo sapiens
aatccataattatct

SEQ ID NO: 78405 - DNA, 15 bp, Homo sapiens
aaatccataattatc

SEQ ID NO: 78406 - DNA, 15 bp, Homo sapiens
taaatccataattat

SEQ ID NO: 78407 - DNA, 15 bp, Homo sapiens
gtaaatccataatta

SEQ ID NO: 78408 - DNA, 15 bp, Homo sapiens
tgtaaatccataatt

SEQ ID NO: 78409 - DNA, 15 bp, Homo sapiens
atgtaaatccataat

SEQ ID NO: 78410 - DNA, 15 bp, Homo sapiens
catgtaaatccataa

SEQ ID NO: 78411 - DNA, 15 bp, Homo sapiens
acatgtaaatccata

SEQ ID NO: 78412 - DNA, 15 bp, Homo sapiens
tacatgtaaatccat

SEQ ID NO: 78413 - DNA, 15 bp, Homo sapiens
ttacatgtaaatcca

SEQ ID NO: 78414 - DNA, 15 bp, Homo sapiens
attacatgtaaatcc

SEQ ID NO: 78415 - DNA, 15 bp, Homo sapiens
aattacatgtaaatc

SEQ ID NO: 78416 - DNA, 15 bp, Homo sapiens
caattacatgtaaat

SEQ ID NO: 78417 - DNA, 15 bp, Homo sapiens
acaattacatgtaaa

SEQ ID NO: 78418 - DNA, 15 bp, Homo sapiens
tacaattacatgtaa

SEQ ID NO: 78419 - DNA, 15 bp, Homo sapiens
ttacaattacatgta

SEQ ID NO: 78420 - DNA, 15 bp, Homo sapiens
cttacaattacatgt

SEQ ID NO: 78421 - DNA, 15 bp, Homo sapiens
ccttacaattacatg

SEQ ID NO: 78422 - DNA, 15 bp, Homo sapiens
tccttacaattacat

SEQ ID NO: 78423 - DNA, 15 bp, Homo sapiens
ttccttacaattaca

SEQ ID NO: 78424 - DNA, 15 bp, Homo sapiens
attccttacaattac

SEQ ID NO: 78425 - DNA, 15 bp, Homo sapiens
tattccttacaatta

SEQ ID NO: 78426 - DNA, 15 bp, Homo sapiens
gtattccttacaatt

SEQ ID NO: 78427 - DNA, 15 bp, Homo sapiens
tgtattccttacaat

SEQ ID NO: 78428 - DNA, 15 bp, Homo sapiens
ctgtattccttacaa

SEQ ID NO: 78429 - DNA, 15 bp, Homo sapiens
tctgtattccttaca

SEQ ID NO: 78430 - DNA, 15 bp, Homo sapiens
ctctgtattccttac

SEQ ID NO: 78431 - DNA, 15 bp, Homo sapiens
tctctgtattcctta

SEQ ID NO: 78432 - DNA, 15 bp, Homo sapiens
atctctgtattcctt

SEQ ID NO: 78433 - DNA, 15 bp, Homo sapiens
gatctctgtattcct

SEQ ID NO: 78434 - DNA, 15 bp, Homo sapiens
agatctctgtattcc

SEQ ID NO: 78435 - DNA, 15 bp, Homo sapiens
aagatctctgtattc

SEQ ID NO: 78436 - DNA, 15 bp, Homo sapiens
taagatctctgtatt

SEQ ID NO: 78437 - DNA, 15 bp, Homo sapiens
ataagatctctgtat

SEQ ID NO: 78438 - DNA, 15 bp, Homo sapiens
cataagatctctgta

SEQ ID NO: 78439 - DNA, 15 bp, Homo sapiens
acataagatctctgt

SEQ ID NO: 78440 - DNA, 15 bp, Homo sapiens
tacataagatctctg

SEQ ID NO: 78441 - DNA, 15 bp, Homo sapiens
gtacataagatctct

SEQ ID NO: 78442 - DNA, 15 bp, Homo sapiens
ggtacataagatctc

SEQ ID NO: 78443 - DNA, 15 bp, Homo sapiens
gggtacataagatct

SEQ ID NO: 78444 - DNA, 15 bp, Homo sapiens
agggtacataagatc

SEQ ID NO: 78445 - DNA, 15 bp, Homo sapiens
aagggtacataagat

SEQ ID NO: 78446 - DNA, 15 bp, Homo sapiens
aaagggtacataaga

SEQ ID NO: 78447 - DNA, 15 bp, Homo sapiens
taaagggtacataag

SEQ ID NO: 78448 - DNA, 15 bp, Homo sapiens
gtaaagggtacataa

SEQ ID NO: 78449 - DNA, 15 bp, Homo sapiens
ggtaaagggtacata

SEQ ID NO: 78450 - DNA, 15 bp, Homo sapiens
aggtaaagggtacat

SEQ ID NO: 78451 - DNA, 15 bp, Homo sapiens
taggtaaagggtaca

SEQ ID NO: 78452 - DNA, 15 bp, Homo sapiens
ctaggtaaagggtac

SEQ ID NO: 78453 - DNA, 15 bp, Homo sapiens
actaggtaaagggta

SEQ ID NO: 78454 - DNA, 15 bp, Homo sapiens
aactaggtaaagggt

SEQ ID NO: 78455 - DNA, 15 bp, Homo sapiens
aaactaggtaaaggg

SEQ ID NO: 78456 - DNA, 15 bp, Homo sapiens
gaaactaggtaaagg

SEQ ID NO: 78457 - DNA, 15 bp, Homo sapiens
agaaactaggtaaag

SEQ ID NO: 78458 - DNA, 15 bp, Homo sapiens
cagaaactaggtaaa

SEQ ID NO: 78459 - DNA, 15 bp, Homo sapiens
gcagaaactaggtaa

SEQ ID NO: 78460 - DNA, 15 bp, Homo sapiens
ggcagaaactaggta

SEQ ID NO: 78461 - DNA, 15 bp, Homo sapiens
tggcagaaactaggt

SEQ ID NO: 78462 - DNA, 15 bp, Homo sapiens
ttggcagaaactagg

SEQ ID NO: 78463 - DNA, 15 bp, Homo sapiens
attggcagaaactag

SEQ ID NO: 78464 - DNA, 15 bp, Homo sapiens
cattggcagaaacta

SEQ ID NO: 78465 - DNA, 15 bp, Homo sapiens
tcattggcagaaact

SEQ ID NO: 78466 - DNA, 15 bp, Homo sapiens
gtcattggcagaaac

SEQ ID NO: 78467 - DNA, 15 bp, Homo sapiens
tgtcattggcagaaa

SEQ ID NO: 78468 - DNA, 15 bp, Homo sapiens
ttgtcattggcagaa

SEQ ID NO: 78469 - DNA, 15 bp, Homo sapiens
attgtcattggcaga

SEQ ID NO: 78470 - DNA, 15 bp, Homo sapiens
tattgtcattggcag

SEQ ID NO: 78471 - DNA, 15 bp, Homo sapiens
atattgtcattggca

SEQ ID NO: 78472 - DNA, 15 bp, Homo sapiens
gatattgtcattggc

SEQ ID NO: 78473 - DNA, 15 bp, Homo sapiens
agatattgtcattgg

SEQ ID NO: 78474 - DNA, 15 bp, Homo sapiens
aagatattgtcattg

SEQ ID NO: 78475 - DNA, 15 bp, Homo sapiens
caagatattgtcatt

SEQ ID NO: 78476 - DNA, 15 bp, Homo sapiens
gcaagatattgtcat

SEQ ID NO: 78477 - DNA, 15 bp, Homo sapiens
tgcaagatattgtca

SEQ ID NO: 78478 - DNA, 15 bp, Homo sapiens
ttgcaagatattgtc

SEQ ID NO: 78479 - DNA, 15 bp, Homo sapiens
tttgcaagatattgt

SEQ ID NO: 78480 - DNA, 15 bp, Homo sapiens
ttttgcaagatattg

SEQ ID NO: 78481 - DNA, 15 bp, Homo sapiens
gttttgcaagatatt

SEQ ID NO: 78482 - DNA, 15 bp, Homo sapiens
agttttgcaagatat

SEQ ID NO: 78483 - DNA, 15 bp, Homo sapiens
tagttttgcaagata

SEQ ID NO: 78484 - DNA, 15 bp, Homo sapiens
ctagttttgcaagat

SEQ ID NO: 78485 - DNA, 15 bp, Homo sapiens
actagttttgcaaga

SEQ ID NO: 78486 - DNA, 15 bp, Homo sapiens
tactagttttgcaag

SEQ ID NO: 78487 - DNA, 15 bp, Homo sapiens
atactagttttgcaa

SEQ ID NO: 78488 - DNA, 15 bp, Homo sapiens
tatactagttttgca

SEQ ID NO: 78489 - DNA, 15 bp, Homo sapiens
gtatactagttttgc

SEQ ID NO: 78490 - DNA, 15 bp, Homo sapiens
tgtatactagttttg

SEQ ID NO: 78491 - DNA, 15 bp, Homo sapiens
ctgtatactagtttt

SEQ ID NO: 78492 - DNA, 15 bp, Homo sapiens
actgtatactagttt

SEQ ID NO: 78493 - DNA, 15 bp, Homo sapiens
tactgtatactagtt

SEQ ID NO: 78494 - DNA, 15 bp, Homo sapiens
atactgtatactagt

SEQ ID NO: 78495 - DNA, 15 bp, Homo sapiens
gatactgtatactag

SEQ ID NO: 78496 - DNA, 15 bp, Homo sapiens
tgatactgtatacta

SEQ ID NO: 78497 - DNA, 15 bp, Homo sapiens
gtgatactgtatact

SEQ ID NO: 78498 - DNA, 15 bp, Homo sapiens
tgtgatactgtatac

SEQ ID NO: 78499 - DNA, 15 bp, Homo sapiens
ttgtgatactgtata

SEQ ID NO: 78500 - DNA, 15 bp, Homo sapiens
cttgtgatactgtat

SEQ ID NO: 78501 - DNA, 15 bp, Homo sapiens
gcttgtgatactgta

SEQ ID NO: 78502 - DNA, 15 bp, Homo sapiens
tgcttgtgatactgt

SEQ ID NO: 78503 - DNA, 15 bp, Homo sapiens
ctgcttgtgatactg

SEQ ID NO: 78504 - DNA, 15 bp, Homo sapiens
cctgcttgtgatact

SEQ ID NO: 78505 - DNA, 15 bp, Homo sapiens
tcctgcttgtgatac

SEQ ID NO: 78506 - DNA, 15 bp, Homo sapiens
atcctgcttgtgata

SEQ ID NO: 78507 - DNA, 15 bp, Homo sapiens
tatcctgcttgtgat

SEQ ID NO: 78508 - DNA, 15 bp, Homo sapiens
gtatcctgcttgtga

SEQ ID NO: 78509 - DNA, 15 bp, Homo sapiens
agtatcctgcttgtg

SEQ ID NO: 78510 - DNA, 15 bp, Homo sapiens
cagtatcctgcttgt

SEQ ID NO: 78511 - DNA, 15 bp, Homo sapiens
tcagtatcctgcttg

SEQ ID NO: 78512 - DNA, 15 bp, Homo sapiens
atcagtatcctgctt

SEQ ID NO: 78513 - DNA, 15 bp, Homo sapiens
tatcagtatcctgct

SEQ ID NO: 78514 - DNA, 15 bp, Homo sapiens
atatcagtatcctgc

SEQ ID NO: 78515 - DNA, 15 bp, Homo sapiens
aatatcagtatcctg

SEQ ID NO: 78516 - DNA, 15 bp, Homo sapiens
caatatcagtatcct

SEQ ID NO: 78517 - DNA, 15 bp, Homo sapiens
tcaatatcagtatcc

SEQ ID NO: 78518 - DNA, 15 bp, Homo sapiens
atcaatatcagtatc

SEQ ID NO: 78519 - DNA, 15 bp, Homo sapiens
tatcaatatcagtat

SEQ ID NO: 78520 - DNA, 15 bp, Homo sapiens
gtatcaatatcagta

SEQ ID NO: 78521 - DNA, 15 bp, Homo sapiens
tgtatcaatatcagt

SEQ ID NO: 78522 - DNA, 15 bp, Homo sapiens
gtgtatcaatatcag

SEQ ID NO: 78523 - DNA, 15 bp, Homo sapiens
agtgtatcaatatca

SEQ ID NO: 78524 - DNA, 15 bp, Homo sapiens
gagtgtatcaatatc

SEQ ID NO: 78525 - DNA, 15 bp, Homo sapiens
ggagtgtatcaatat

SEQ ID NO: 78526 - DNA, 15 bp, Homo sapiens
tggagtgtatcaata

SEQ ID NO: 78527 - DNA, 15 bp, Homo sapiens
gtggagtgtatcaat

SEQ ID NO: 78528 - DNA, 15 bp, Homo sapiens
agtggagtgtatcaa

SEQ ID NO: 78529 - DNA, 15 bp, Homo sapiens
gagtggagtgtatca

SEQ ID NO: 78530 - DNA, 15 bp, Homo sapiens
tgagtggagtgtatc

SEQ ID NO: 78531 - DNA, 15 bp, Homo sapiens
atgagtggagtgtat

SEQ ID NO: 78532 - DNA, 15 bp, Homo sapiens
gatgagtggagtgta

SEQ ID NO: 78533 - DNA, 15 bp, Homo sapiens
agatgagtggagtgt

SEQ ID NO: 78534 - DNA, 15 bp, Homo sapiens
aagatgagtggagtg

SEQ ID NO: 78535 - DNA, 15 bp, Homo sapiens
taagatgagtggagt

SEQ ID NO: 78536 - DNA, 15 bp, Homo sapiens
ataagatgagtggag

SEQ ID NO: 78537 - DNA, 15 bp, Homo sapiens
aataagatgagtgga

SEQ ID NO: 78538 - DNA, 15 bp, Homo sapiens
gaataagatgagtgg

SEQ ID NO: 78539 - DNA, 15 bp, Homo sapiens
tgaataagatgagtg

SEQ ID NO: 78540 - DNA, 15 bp, Homo sapiens
ctgaataagatgagt

SEQ ID NO: 78541 - DNA, 15 bp, Homo sapiens
tctgaataagatgag

SEQ ID NO: 78542 - DNA, 15 bp, Homo sapiens
gtctgaataagatga

SEQ ID NO: 78543 - DNA, 15 bp, Homo sapiens
agtctgaataagatg

SEQ ID NO: 78544 - DNA, 15 bp, Homo sapiens
aagtctgaataagat

SEQ ID NO: 78545 - DNA, 15 bp, Homo sapiens
gaagtctgaataaga

SEQ ID NO: 78546 - DNA, 15 bp, Homo sapiens
ggaagtctgaataag

SEQ ID NO: 78547 - DNA, 15 bp, Homo sapiens
gggaagtctgaataa

SEQ ID NO: 78548 - DNA, 15 bp, Homo sapiens
agggaagtctgaata

SEQ ID NO: 78549 - DNA, 15 bp, Homo sapiens
aagggaagtctgaat

SEQ ID NO: 78550 - DNA, 15 bp, Homo sapiens
caagggaagtctgaa

SEQ ID NO: 78551 - DNA, 15 bp, Homo sapiens
acaagggaagtctga

SEQ ID NO: 78552 - DNA, 15 bp, Homo sapiens
aacaagggaagtctg

SEQ ID NO: 78553 - DNA, 15 bp, Homo sapiens
aaacaagggaagtct

SEQ ID NO: 78554 - DNA, 15 bp, Homo sapiens
aaaacaagggaagtc

SEQ ID NO: 78555 - DNA, 15 bp, Homo sapiens
taaaacaagggaagt

SEQ ID NO: 78556 - DNA, 15 bp, Homo sapiens
gtaaaacaagggaag

SEQ ID NO: 78557 - DNA, 15 bp, Homo sapiens
agtaaaacaagggaa

SEQ ID NO: 78558 - DNA, 15 bp, Homo sapiens
aagtaaaacaaggga

SEQ ID NO: 78559 - DNA, 15 bp, Homo sapiens
caagtaaaacaaggg

SEQ ID NO: 78560 - DNA, 15 bp, Homo sapiens
gcaagtaaaacaagg

SEQ ID NO: 78561 - DNA, 15 bp, Homo sapiens
tgcaagtaaaacaag

SEQ ID NO: 78562 - DNA, 15 bp, Homo sapiens
atgcaagtaaaacaa

SEQ ID NO: 78563 - DNA, 15 bp, Homo sapiens
aatgcaagtaaaaca

SEQ ID NO: 78564 - DNA, 15 bp, Homo sapiens
gaatgcaagtaaaac

SEQ ID NO: 78565 - DNA, 15 bp, Homo sapiens
tgaatgcaagtaaaa

SEQ ID NO: 78566 - DNA, 15 bp, Homo sapiens
atgaatgcaagtaaa

SEQ ID NO: 78567 - DNA, 15 bp, Homo sapiens
aatgaatgcaagtaa

SEQ ID NO: 78568 - DNA, 15 bp, Homo sapiens
aaatgaatgcaagta

SEQ ID NO: 78569 - DNA, 15 bp, Homo sapiens
caaatgaatgcaagt

SEQ ID NO: 78570 - DNA, 15 bp, Homo sapiens
gcaaatgaatgcaag

SEQ ID NO: 78571 - DNA, 15 bp, Homo sapiens
tgcaaatgaatgcaa

SEQ ID NO: 78572 - DNA, 15 bp, Homo sapiens
atgcaaatgaatgca

SEQ ID NO: 78573 - DNA, 15 bp, Homo sapiens
tatgcaaatgaatgc

SEQ ID NO: 78574 - DNA, 15 bp, Homo sapiens
atatgcaaatgaatg

SEQ ID NO: 78575 - DNA, 15 bp, Homo sapiens
catatgcaaatgaat

SEQ ID NO: 78576 - DNA, 15 bp, Homo sapiens
ccatatgcaaatgaa

SEQ ID NO: 78577 - DNA, 15 bp, Homo sapiens
tccatatgcaaatga

SEQ ID NO: 78578 - DNA, 15 bp, Homo sapiens
atccatatgcaaatg

SEQ ID NO: 78579 - DNA, 15 bp, Homo sapiens
aatccatatgcaaat

SEQ ID NO: 78580 - DNA, 15 bp, Homo sapiens
aaatccatatgcaaa

SEQ ID NO: 78581 - DNA, 15 bp, Homo sapiens
taaatccatatgcaa

SEQ ID NO: 78582 - DNA, 15 bp, Homo sapiens
ctaaatccatatgca

SEQ ID NO: 78583 - DNA, 15 bp, Homo sapiens
actaaatccatatgc

SEQ ID NO: 78584 - DNA, 15 bp, Homo sapiens
aactaaatccatatg

SEQ ID NO: 78585 - DNA, 15 bp, Homo sapiens
gaactaaatccatat

SEQ ID NO: 78586 - DNA, 15 bp, Homo sapiens
agaactaaatccata

SEQ ID NO: 78587 - DNA, 15 bp, Homo sapiens
cagaactaaatccat

SEQ ID NO: 78588 - DNA, 15 bp, Homo sapiens
acagaactaaatcca

SEQ ID NO: 78589 - DNA, 15 bp, Homo sapiens
cacagaactaaatcc

SEQ ID NO: 78590 - DNA, 15 bp, Homo sapiens
gcacagaactaaatc

SEQ ID NO: 78591 - DNA, 15 bp, Homo sapiens
tgcacagaactaaat

SEQ ID NO: 78592 - DNA, 15 bp, Homo sapiens
ctgcacagaactaaa

SEQ ID NO: 78593 - DNA, 15 bp, Homo sapiens
gctgcacagaactaa

SEQ ID NO: 78594 - DNA, 15 bp, Homo sapiens
agctgcacagaacta

SEQ ID NO: 78595 - DNA, 15 bp, Homo sapiens
cagctgcacagaact

SEQ ID NO: 78596 - DNA, 15 bp, Homo sapiens
acagctgcacagaac

SEQ ID NO: 78597 - DNA, 15 bp, Homo sapiens
tacagctgcacagaa

SEQ ID NO: 78598 - DNA, 15 bp, Homo sapiens
atacagctgcacaga

SEQ ID NO: 78599 - DNA, 15 bp, Homo sapiens
aatacagctgcacag

SEQ ID NO: 78600 - DNA, 15 bp, Homo sapiens
caatacagctgcaca

SEQ ID NO: 78601 - DNA, 15 bp, Homo sapiens
gcaatacagctgcac

SEQ ID NO: 78602 - DNA, 15 bp, Homo sapiens
tgcaatacagctgca

SEQ ID NO: 78603 - DNA, 15 bp, Homo sapiens
ctgcaatacagctgc

SEQ ID NO: 78604 - DNA, 15 bp, Homo sapiens
tctgcaatacagctg

SEQ ID NO: 78605 - DNA, 15 bp, Homo sapiens
atctgcaatacagct

SEQ ID NO: 78606 - DNA, 15 bp, Homo sapiens
catctgcaatacagc

SEQ ID NO: 78607 - DNA, 15 bp, Homo sapiens
tccccatctgcaata

SEQ ID NO: 78608 - DNA, 15 bp, Homo sapiens
atccccatctgcaat

SEQ ID NO: 78609 - DNA, 15 bp, Homo sapiens
aatccccatctgcaa

SEQ ID NO: 78610 - DNA, 15 bp, Homo sapiens
gaatccccatctgca

SEQ ID NO: 78611 - DNA, 15 bp, Homo sapiens
tgaatccccatctgc

SEQ ID NO: 78612 - DNA, 15 bp, Homo sapiens
atgaatccccatctg

SEQ ID NO: 78613 - DNA, 15 bp, Homo sapiens
tatgaatccccatct

SEQ ID NO: 78614 - DNA, 15 bp, Homo sapiens
ctatgaatccccatc

SEQ ID NO: 78615 - DNA, 15 bp, Homo sapiens
tctatgaatccccat

SEQ ID NO: 78616 - DNA, 15 bp, Homo sapiens
atctatgaatcccca

SEQ ID NO: 78617 - DNA, 15 bp, Homo sapiens
gatctatgaatcccc

SEQ ID NO: 78618 - DNA, 15 bp, Homo sapiens
ggatctatgaatccc

SEQ ID NO: 78619 - DNA, 15 bp, Homo sapiens
tggatctatgaatcc

SEQ ID NO: 78620 - DNA, 15 bp, Homo sapiens
gtggatctatgaatc

SEQ ID NO: 78621 - DNA, 15 bp, Homo sapiens
agtggatctatgaat

SEQ ID NO: 78622 - DNA, 15 bp, Homo sapiens
tagtggatctatgaa

SEQ ID NO: 78623 - DNA, 15 bp, Homo sapiens
ttagtggatctatga

SEQ ID NO: 78624 - DNA, 15 bp, Homo sapiens
attagtggatctatg

SEQ ID NO: 78625 - DNA, 15 bp, Homo sapiens
aattagtggatctat

SEQ ID NO: 78626 - DNA, 15 bp, Homo sapiens
taattagtggatcta

SEQ ID NO: 78627 - DNA, 15 bp, Homo sapiens
ttaattagtggatct

SEQ ID NO: 78628 - DNA, 15 bp, Homo sapiens
cttaattagtggatc

SEQ ID NO: 78629 - DNA, 15 bp, Homo sapiens
tcttaattagtggat

SEQ ID NO: 78630 - DNA, 15 bp, Homo sapiens
ttcttaattagtgga

SEQ ID NO: 78631 - DNA, 15 bp, Homo sapiens
gttcttaattagtgg

SEQ ID NO: 78632 - DNA, 15 bp, Homo sapiens
tgttcttaattagtg

SEQ ID NO: 78633 - DNA, 15 bp, Homo sapiens
gtgttcttaattagt

SEQ ID NO: 78634 - DNA, 15 bp, Homo sapiens
agtgttcttaattag

SEQ ID NO: 78635 - DNA, 15 bp, Homo sapiens
cagtgttcttaatta

SEQ ID NO: 78636 - DNA, 15 bp, Homo sapiens
ccagtgttcttaatt

SEQ ID NO: 78637 - DNA, 15 bp, Homo sapiens
gccagtgttcttaat

SEQ ID NO: 78638 - DNA, 15 bp, Homo sapiens
ggccagtgttcttaa

SEQ ID NO: 78639 - DNA, 15 bp, Homo sapiens
tggccagtgttctta

SEQ ID NO: 78640 - DNA, 15 bp, Homo sapiens
ctggccagtgttctt

SEQ ID NO: 78641 - DNA, 15 bp, Homo sapiens
cctggccagtgttct

SEQ ID NO: 78642 - DNA, 15 bp, Homo sapiens
gcctggccagtgttc

SEQ ID NO: 78643 - DNA, 15 bp, Homo sapiens
tgcctggccagtgtt

SEQ ID NO: 78644 - DNA, 15 bp, Homo sapiens
gtgcctggccagtgt

SEQ ID NO: 78645 - DNA, 15 bp, Homo sapiens
cgtgcctggccagtg

SEQ ID NO: 78646 - DNA, 15 bp, Homo sapiens
ccgtgcctggccagt

SEQ ID NO: 78647 - DNA, 15 bp, Homo sapiens
accgtgcctggccag

SEQ ID NO: 78648 - DNA, 15 bp, Homo sapiens
caccgtgcctggcca

SEQ ID NO: 78649 - DNA, 15 bp, Homo sapiens
ccaccgtgcctggcc

SEQ ID NO: 78650 - DNA, 15 bp, Homo sapiens
gccaccgtgcctggc

SEQ ID NO: 78651 - DNA, 15 bp, Homo sapiens
agccaccgtgcctgg

SEQ ID NO: 78652 - DNA, 15 bp, Homo sapiens
gagccaccgtgcctg

SEQ ID NO: 78653 - DNA, 15 bp, Homo sapiens
tgagccaccgtgcct

SEQ ID NO: 78654 - DNA, 15 bp, Homo sapiens
gtgagccaccgtgcc

SEQ ID NO: 78655 - DNA, 15 bp, Homo sapiens
tgtgagccaccgtgc

SEQ ID NO: 78656 - DNA, 15 bp, Homo sapiens
gtgtgagccaccgtg

SEQ ID NO: 78657 - DNA, 15 bp, Homo sapiens
ggtgtgagccaccgt

SEQ ID NO: 78658 - DNA, 15 bp, Homo sapiens
aggtgtgagccaccg

SEQ ID NO: 78659 - DNA, 15 bp, Homo sapiens
caggtgtgagccacc

SEQ ID NO: 78660 - DNA, 15 bp, Homo sapiens
acaggtgtgagccac

SEQ ID NO: 78661 - DNA, 15 bp, Homo sapiens
tacaggtgtgagcca

SEQ ID NO: 78662 - DNA, 15 bp, Homo sapiens
ttacaggtgtgagcc

SEQ ID NO: 78663 - DNA, 15 bp, Homo sapiens
attacaggtgtgagc

SEQ ID NO: 78664 - DNA, 15 bp, Homo sapiens
gattacaggtgtgag

SEQ ID NO: 78665 - DNA, 15 bp, Homo sapiens
agattacaggtgtga

SEQ ID NO: 78666 - DNA, 15 bp, Homo sapiens
gagattacaggtgtg

SEQ ID NO: 78667 - DNA, 15 bp, Homo sapiens
tgagattacaggtgt

SEQ ID NO: 78668 - DNA, 15 bp, Homo sapiens
ctgagattacaggtg

SEQ ID NO: 78669 - DNA, 15 bp, Homo sapiens
gctgagattacaggt

SEQ ID NO: 78670 - DNA, 15 bp, Homo sapiens
tgctgagattacagg

SEQ ID NO: 78671 - DNA, 15 bp, Homo sapiens
gtgctgagattacag

SEQ ID NO: 78672 - DNA, 15 bp, Homo sapiens
agtgctgagattaca

SEQ ID NO: 78673 - DNA, 15 bp, Homo sapiens
aagtgctgagattac

SEQ ID NO: 78674 - DNA, 15 bp, Homo sapiens
aaagtgctgagatta

SEQ ID NO: 78675 - DNA, 15 bp, Homo sapiens
caaagtgctgagatt

SEQ ID NO: 78676 - DNA, 15 bp, Homo sapiens
cccaccttggcctcc

SEQ ID NO: 78677 - DNA, 15 bp, Homo sapiens
acccaccttggcctc

SEQ ID NO: 78678 - DNA, 15 bp, Homo sapiens
cacccaccttggcct

SEQ ID NO: 78679 - DNA, 15 bp, Homo sapiens
ccacccaccttggcc

SEQ ID NO: 78680 - DNA, 15 bp, Homo sapiens
tccacccaccttggc

SEQ ID NO: 78681 - DNA, 15 bp, Homo sapiens
atccacccaccttgg

SEQ ID NO: 78682 - DNA, 15 bp, Homo sapiens
aatccacccaccttg

SEQ ID NO: 78683 - DNA, 15 bp, Homo sapiens
taatccacccacctt

SEQ ID NO: 78684 - DNA, 15 bp, Homo sapiens
gtaatccacccacct

SEQ ID NO: 78685 - DNA, 15 bp, Homo sapiens
cgtaatccacccacc

SEQ ID NO: 78686 - DNA, 15 bp, Homo sapiens
tcgtaatccacccac

SEQ ID NO: 78687 - DNA, 15 bp, Homo sapiens
ctcgtaatccaccca

SEQ ID NO: 78688 - DNA, 15 bp, Homo sapiens
cctcgtaatccaccc

SEQ ID NO: 78689 - DNA, 15 bp, Homo sapiens
acctcgtaatccacc

SEQ ID NO: 78690 - DNA, 15 bp, Homo sapiens
gacctcgtaatccac

SEQ ID NO: 78691 - DNA, 15 bp, Homo sapiens
tgacctcgtaatcca

SEQ ID NO: 78692 - DNA, 15 bp, Homo sapiens
ctgacctcgtaatcc

SEQ ID NO: 78693 - DNA, 15 bp, Homo sapiens
cctgacctcgtaatc

SEQ ID NO: 78694 - DNA, 15 bp, Homo sapiens
tcctgacctcgtaat

SEQ ID NO: 78695 - DNA, 15 bp, Homo sapiens
ctcctgacctcgtaa

SEQ ID NO: 78696 - DNA, 15 bp, Homo sapiens
tctcctgacctcgta

SEQ ID NO: 78697 - DNA, 15 bp, Homo sapiens
gtttttagtagagac

SEQ ID NO: 78698 - DNA, 15 bp, Homo sapiens
tgtttttagtagaga

SEQ ID NO: 78699 - DNA, 15 bp, Homo sapiens
gtgtttttagtagag

SEQ ID NO: 78700 - DNA, 15 bp, Homo sapiens
tgtgtttttagtaga

SEQ ID NO: 78701 - DNA, 15 bp, Homo sapiens
ttgtgtttttagtag

SEQ ID NO: 78702 - DNA, 15 bp, Homo sapiens
tttgtgtttttagta

SEQ ID NO: 78703 - DNA, 15 bp, Homo sapiens
ttttgtgtttttagt

SEQ ID NO: 78704 - DNA, 15 bp, Homo sapiens
tttttgtgtttttag

SEQ ID NO: 78705 - DNA, 15 bp, Homo sapiens
atttttgtgttttta

SEQ ID NO: 78706 - DNA, 15 bp, Homo sapiens
gatttttgtgttttt

SEQ ID NO: 78707 - DNA, 15 bp, Homo sapiens
tgatttttgtgtttt

SEQ ID NO: 78708 - DNA, 15 bp, Homo sapiens
ttgatttttgtgttt

SEQ ID NO: 78709 - DNA, 15 bp, Homo sapiens
gttgatttttgtgtt

SEQ ID NO: 78710 - DNA, 15 bp, Homo sapiens
ggttgatttttgtgt

SEQ ID NO: 78711 - DNA, 15 bp, Homo sapiens
tggttgatttttgtg

SEQ ID NO: 78712 - DNA, 15 bp, Homo sapiens
ctggttgatttttgt

SEQ ID NO: 78713 - DNA, 15 bp, Homo sapiens
cctggttgatttttg

SEQ ID NO: 78714 - DNA, 15 bp, Homo sapiens
gcctggttgattttt

SEQ ID NO: 78715 - DNA, 15 bp, Homo sapiens
cgcctggttgatttt

SEQ ID NO: 78716 - DNA, 15 bp, Homo sapiens
acgcctggttgattt

SEQ ID NO: 78717 - DNA, 15 bp, Homo sapiens
gacgcctggttgatt

SEQ ID NO: 78718 - DNA, 15 bp, Homo sapiens
cgacgcctggttgat

SEQ ID NO: 78719 - DNA, 15 bp, Homo sapiens
acgacgcctggttga

SEQ ID NO: 78720 - DNA, 15 bp, Homo sapiens
cacgacgcctggttg

SEQ ID NO: 78721 - DNA, 15 bp, Homo sapiens
ccacgacgcctggtt

SEQ ID NO: 78722 - DNA, 15 bp, Homo sapiens
accacgacgcctggt

SEQ ID NO: 78723 - DNA, 15 bp, Homo sapiens
caccacgacgcctgg

SEQ ID NO: 78724 - DNA, 15 bp, Homo sapiens
ccaccacgacgcctg

SEQ ID NO: 78725 - DNA, 15 bp, Homo sapiens
cccaccacgacgcct

SEQ ID NO: 78726 - DNA, 15 bp, Homo sapiens
gcccaccacgacgcc

SEQ ID NO: 78727 - DNA, 15 bp, Homo sapiens
tgcccaccacgacgc

SEQ ID NO: 78728 - DNA, 15 bp, Homo sapiens
gtgcccaccacgacg

SEQ ID NO: 78729 - DNA, 15 bp, Homo sapiens
ggtgcccaccacgac

SEQ ID NO: 78730 - DNA, 15 bp, Homo sapiens
aggtgcccaccacga

SEQ ID NO: 78731 - DNA, 15 bp, Homo sapiens
caggtgcccaccacg

SEQ ID NO: 78732 - DNA, 15 bp, Homo sapiens
acaggtgcccaccac

SEQ ID NO: 78733 - DNA, 15 bp, Homo sapiens
tacaggtgcccacca

SEQ ID NO: 78734 - DNA, 15 bp, Homo sapiens
ctacaggtgcccacc

SEQ ID NO: 78735 - DNA, 15 bp, Homo sapiens
actacaggtgcccac

SEQ ID NO: 78736 - DNA, 15 bp, Homo sapiens
aactacaggtgccca

SEQ ID NO: 78737 - DNA, 15 bp, Homo sapiens
caactacaggtgccc

SEQ ID NO: 78738 - DNA, 15 bp, Homo sapiens
gcaactacaggtgcc

SEQ ID NO: 78739 - DNA, 15 bp, Homo sapiens
tgcaactacaggtgc

SEQ ID NO: 78740 - DNA, 15 bp, Homo sapiens
ctgcaactacaggtg

SEQ ID NO: 78741 - DNA, 15 bp, Homo sapiens
gctgcaactacaggt

SEQ ID NO: 78742 - DNA, 15 bp, Homo sapiens
agctgcaactacagg

SEQ ID NO: 78743 - DNA, 15 bp, Homo sapiens
tagctgcaactacag

SEQ ID NO: 78744 - DNA, 15 bp, Homo sapiens
gtagctgcaactaca

SEQ ID NO: 78745 - DNA, 15 bp, Homo sapiens
agtagctgcaactac

SEQ ID NO: 78746 - DNA, 15 bp, Homo sapiens
gagtagctgcaacta

SEQ ID NO: 78747 - DNA, 15 bp, Homo sapiens
tgagtagctgcaact

SEQ ID NO: 78748 - DNA, 15 bp, Homo sapiens
ctgagtagctgcaac

SEQ ID NO: 78749 - DNA, 15 bp, Homo sapiens
cctgagtagctgcaa

SEQ ID NO: 78750 - DNA, 15 bp, Homo sapiens
tcctgagtagctgca

SEQ ID NO: 78751 - DNA, 15 bp, Homo sapiens
ctcctgagtagctgc

SEQ ID NO: 78752 - DNA, 15 bp, Homo sapiens
cgcctcagcctcctg

SEQ ID NO: 78753 - DNA, 15 bp, Homo sapiens
ccgcctcagcctcct

SEQ ID NO: 78754 - DNA, 15 bp, Homo sapiens
cccgcctcagcctcc

SEQ ID NO: 78755 - DNA, 15 bp, Homo sapiens
tcccgcctcagcctc

SEQ ID NO: 78756 - DNA, 15 bp, Homo sapiens
ctcccgcctcagcct

SEQ ID NO: 78757 - DNA, 15 bp, Homo sapiens
tctcccgcctcagcc

SEQ ID NO: 78758 - DNA, 15 bp, Homo sapiens
ttctcccgcctcagc

SEQ ID NO: 78759 - DNA, 15 bp, Homo sapiens
attctcccgcctcag

SEQ ID NO: 78760 - DNA, 15 bp, Homo sapiens
gattctcccgcctca

SEQ ID NO: 78761 - DNA, 15 bp, Homo sapiens
cgattctcccgcctc

SEQ ID NO: 78762 - DNA, 15 bp, Homo sapiens
gcgattctcccgcct

SEQ ID NO: 78763 - DNA, 15 bp, Homo sapiens
ggcgattctcccgcc

SEQ ID NO: 78764 - DNA, 15 bp, Homo sapiens
aggcgattctcccgc

SEQ ID NO: 78765 - DNA, 15 bp, Homo sapiens
caggcgattctcccg

SEQ ID NO: 78766 - DNA, 15 bp, Homo sapiens
tcaggcgattctccc

SEQ ID NO: 78767 - DNA, 15 bp, Homo sapiens
ttcaggcgattctcc

SEQ ID NO: 78768 - DNA, 15 bp, Homo sapiens
gttcaggcgattctc

SEQ ID NO: 78769 - DNA, 15 bp, Homo sapiens
ggttcaggcgattct

SEQ ID NO: 78770 - DNA, 15 bp, Homo sapiens
aggttcaggcgattc

SEQ ID NO: 78771 - DNA, 15 bp, Homo sapiens
caggttcaggcgatt

SEQ ID NO: 78772 - DNA, 15 bp, Homo sapiens
tcaggttcaggcgat

SEQ ID NO: 78773 - DNA, 15 bp, Homo sapiens
ctcaggttcaggcga

SEQ ID NO: 78774 - DNA, 15 bp, Homo sapiens
tctcaggttcaggcg

SEQ ID NO: 78775 - DNA, 15 bp, Homo sapiens
ttctcaggttcaggc

SEQ ID NO: 78776 - DNA, 15 bp, Homo sapiens
tttctcaggttcagg

SEQ ID NO: 78777 - DNA, 15 bp, Homo sapiens
gtttctcaggttcag

SEQ ID NO: 78778 - DNA, 15 bp, Homo sapiens
cgtttctcaggttca

SEQ ID NO: 78779 - DNA, 15 bp, Homo sapiens
ccgtttctcaggttc

SEQ ID NO: 78780 - DNA, 15 bp, Homo sapiens
tccgtttctcaggtt

SEQ ID NO: 78781 - DNA, 15 bp, Homo sapiens
ctccgtttctcaggt

SEQ ID NO: 78782 - DNA, 15 bp, Homo sapiens
cctccgtttctcagg

SEQ ID NO: 78783 - DNA, 15 bp, Homo sapiens
acctccgtttctcag

SEQ ID NO: 78784 - DNA, 15 bp, Homo sapiens
aacctccgtttctca

SEQ ID NO: 78785 - DNA, 15 bp, Homo sapiens
taacctccgtttctc

SEQ ID NO: 78786 - DNA, 15 bp, Homo sapiens
ttaacctccgtttct

SEQ ID NO: 78787 - DNA, 15 bp, Homo sapiens
tttaacctccgtttc

SEQ ID NO: 78788 - DNA, 15 bp, Homo sapiens
ctttaacctccgttt

SEQ ID NO: 78789 - DNA, 15 bp, Homo sapiens
actttaacctccgtt

SEQ ID NO: 78790 - DNA, 15 bp, Homo sapiens
cactttaacctccgt

SEQ ID NO: 78791 - DNA, 15 bp, Homo sapiens
tcactttaacctccg

SEQ ID NO: 78792 - DNA, 15 bp, Homo sapiens
atcactttaacctcc

SEQ ID NO: 78793 - DNA, 15 bp, Homo sapiens
gatcactttaacctc

SEQ ID NO: 78794 - DNA, 15 bp, Homo sapiens
ggatcactttaacct

SEQ ID NO: 78795 - DNA, 15 bp, Homo sapiens
tggatcactttaacc

SEQ ID NO: 78796 - DNA, 15 bp, Homo sapiens
ttggatcactttaac

SEQ ID NO: 78797 - DNA, 15 bp, Homo sapiens
cttggatcactttaa

SEQ ID NO: 78798 - DNA, 15 bp, Homo sapiens
tcttggatcacttta

SEQ ID NO: 78799 - DNA, 15 bp, Homo sapiens
atcttggatcacttt

SEQ ID NO: 78800 - DNA, 15 bp, Homo sapiens
gatcttggatcactt

SEQ ID NO: 78801 - DNA, 15 bp, Homo sapiens
tgatcttggatcact

SEQ ID NO: 78802 - DNA, 15 bp, Homo sapiens
gtgatcttggatcac

SEQ ID NO: 78803 - DNA, 15 bp, Homo sapiens
tgtgatcttggatca

SEQ ID NO: 78804 - DNA, 15 bp, Homo sapiens
gtgtgatcttggatc

SEQ ID NO: 78805 - DNA, 15 bp, Homo sapiens
ggtgtgatcttggat

SEQ ID NO: 78806 - DNA, 15 bp, Homo sapiens
tggtgtgatcttgga

SEQ ID NO: 78807 - DNA, 15 bp, Homo sapiens
atggtgtgatcttgg

SEQ ID NO: 78808 - DNA, 15 bp, Homo sapiens
aatggtgtgatcttg

SEQ ID NO: 78809 - DNA, 15 bp, Homo sapiens
caatggtgtgatctt

SEQ ID NO: 78810 - DNA, 15 bp, Homo sapiens
gcaatggtgtgatct

SEQ ID NO: 78811 - DNA, 15 bp, Homo sapiens
tgcaatggtgtgatc

SEQ ID NO: 78812 - DNA, 15 bp, Homo sapiens
gtgcaatggtgtgat

SEQ ID NO: 78813 - DNA, 15 bp, Homo sapiens
agtgcaatggtgtga

SEQ ID NO: 78814 - DNA, 15 bp, Homo sapiens
gagtgcaatggtgtg

SEQ ID NO: 78815 - DNA, 15 bp, Homo sapiens
ggagtgcaatggtgt

SEQ ID NO: 78816 - DNA, 15 bp, Homo sapiens
tggagtgcaatggtg

SEQ ID NO: 78817 - DNA, 15 bp, Homo sapiens
ctggagtgcaatggt

SEQ ID NO: 78818 - DNA, 15 bp, Homo sapiens
gctggagtgcaatgg

SEQ ID NO: 78819 - DNA, 15 bp, Homo sapiens
ggctggagtgcaatg

SEQ ID NO: 78820 - DNA, 15 bp, Homo sapiens
aggctggagtgcaat

SEQ ID NO: 78821 - DNA, 15 bp, Homo sapiens
caggctggagtgcaa

SEQ ID NO: 78822 - DNA, 15 bp, Homo sapiens
actctgtcgcccagg

SEQ ID NO: 78823 - DNA, 15 bp, Homo sapiens
cactctgtcgcccag

SEQ ID NO: 78824 - DNA, 15 bp, Homo sapiens
tcactctgtcgccca

SEQ ID NO: 78825 - DNA, 15 bp, Homo sapiens
ctcactctgtcgccc

SEQ ID NO: 78826 - DNA, 15 bp, Homo sapiens
tctcactctgtcgcc

SEQ ID NO: 78827 - DNA, 15 bp, Homo sapiens
gtctcactctgtcgc

SEQ ID NO: 78828 - DNA, 15 bp, Homo sapiens
agtctcactctgtcg

SEQ ID NO: 78829 - DNA, 15 bp, Homo sapiens
ggagtctcactctgt

SEQ ID NO: 78830 - DNA, 15 bp, Homo sapiens
cggagtctcactctg

SEQ ID NO: 78831 - DNA, 15 bp, Homo sapiens
acggagtctcactct

SEQ ID NO: 78832 - DNA, 15 bp, Homo sapiens
gacggagtctcactc

SEQ ID NO: 78833 - DNA, 15 bp, Homo sapiens
agacggagtctcact

SEQ ID NO: 78834 - DNA, 15 bp, Homo sapiens
gagacggagtctcac

SEQ ID NO: 78835 - DNA, 15 bp, Homo sapiens
tgagacggagtctca

SEQ ID NO: 78836 - DNA, 15 bp, Homo sapiens
ttgagacggagtctc

SEQ ID NO: 78837 - DNA, 15 bp, Homo sapiens
tttgagacggagtct

SEQ ID NO: 78838 - DNA, 15 bp, Homo sapiens
ttttgagacggagtc

SEQ ID NO: 78839 - DNA, 15 bp, Homo sapiens
tttttgagacggagt

SEQ ID NO: 78840 - DNA, 15 bp, Homo sapiens
ttttttgagacggag

SEQ ID NO: 78841 - DNA, 15 bp, Homo sapiens
tttttttgagacgga

SEQ ID NO: 78842 - DNA, 15 bp, Homo sapiens
tcttttttttttttt

SEQ ID NO: 78843 - DNA, 15 bp, Homo sapiens
atctttttttttttt

SEQ ID NO: 78844 - DNA, 15 bp, Homo sapiens
tatcttttttttttt

SEQ ID NO: 78845 - DNA, 15 bp, Homo sapiens
gtatctttttttttt

SEQ ID NO: 78846 - DNA, 15 bp, Homo sapiens
tgtatcttttttttt

SEQ ID NO: 78847 - DNA, 15 bp, Homo sapiens
ctgtatctttttttt

SEQ ID NO: 78848 - DNA, 15 bp, Homo sapiens
tctgtatcttttttt

SEQ ID NO: 78849 - DNA, 15 bp, Homo sapiens
ttctgtatctttttt

SEQ ID NO: 78850 - DNA, 15 bp, Homo sapiens
gttctgtatcttttt

SEQ ID NO: 78851 - DNA, 15 bp, Homo sapiens
tgttctgtatctttt

SEQ ID NO: 78852 - DNA, 15 bp, Homo sapiens
atgttctgtatcttt

SEQ ID NO: 78853 - DNA, 15 bp, Homo sapiens
aatgttctgtatctt

SEQ ID NO: 78854 - DNA, 15 bp, Homo sapiens
gaatgttctgtatct

SEQ ID NO: 78855 - DNA, 15 bp, Homo sapiens
agaatgttctgtatc

SEQ ID NO: 78856 - DNA, 15 bp, Homo sapiens
gagaatgttctgtat

SEQ ID NO: 78857 - DNA, 15 bp, Homo sapiens
tgagaatgttctgta

SEQ ID NO: 78858 - DNA, 15 bp, Homo sapiens
atgagaatgttctgt

SEQ ID NO: 78859 - DNA, 15 bp, Homo sapiens
gatgagaatgttctg

SEQ ID NO: 78860 - DNA, 15 bp, Homo sapiens
agatgagaatgttct

SEQ ID NO: 78861 - DNA, 15 bp, Homo sapiens
gagatgagaatgttc

SEQ ID NO: 78862 - DNA, 15 bp, Homo sapiens
ggagatgagaatgtt

SEQ ID NO: 78863 - DNA, 15 bp, Homo sapiens
tggagatgagaatgt

SEQ ID NO: 78864 - DNA, 15 bp, Homo sapiens
atggagatgagaatg

SEQ ID NO: 78865 - DNA, 15 bp, Homo sapiens
tatggagatgagaat

SEQ ID NO: 78866 - DNA, 15 bp, Homo sapiens
ttatggagatgagaa

SEQ ID NO: 78867 - DNA, 15 bp, Homo sapiens
tttatggagatgaga

SEQ ID NO: 78868 - DNA, 15 bp, Homo sapiens
ctttatggagatgag

SEQ ID NO: 78869 - DNA, 15 bp, Homo sapiens
tctttatggagatga

SEQ ID NO: 78870 - DNA, 15 bp, Homo sapiens
atctttatggagatg

SEQ ID NO: 78871 - DNA, 15 bp, Homo sapiens
gatctttatggagat

SEQ ID NO: 78872 - DNA, 15 bp, Homo sapiens
ggatctttatggaga

SEQ ID NO: 78873 - DNA, 15 bp, Homo sapiens
gggatctttatggag

SEQ ID NO: 78874 - DNA, 15 bp, Homo sapiens
agggatctttatgga

SEQ ID NO: 78875 - DNA, 15 bp, Homo sapiens
gagggatctttatgg

SEQ ID NO: 78876 - DNA, 15 bp, Homo sapiens
tgagggatctttatg

SEQ ID NO: 78877 - DNA, 15 bp, Homo sapiens
atgagggatctttat

SEQ ID NO: 78878 - DNA, 15 bp, Homo sapiens
tatgagggatcttta

SEQ ID NO: 78879 - DNA, 15 bp, Homo sapiens
atatgagggatcttt

SEQ ID NO: 78880 - DNA, 15 bp, Homo sapiens
aatatgagggatctt

SEQ ID NO: 78881 - DNA, 15 bp, Homo sapiens
caatatgagggatct

SEQ ID NO: 78882 - DNA, 15 bp, Homo sapiens
gcaatatgagggatc

SEQ ID NO: 78883 - DNA, 15 bp, Homo sapiens
ggcaatatgagggat

SEQ ID NO: 78884 - DNA, 15 bp, Homo sapiens
gggcaatatgaggga

SEQ ID NO: 78885 - DNA, 15 bp, Homo sapiens
agggcaatatgaggg

SEQ ID NO: 78886 - DNA, 15 bp, Homo sapiens
aagggcaatatgagg

SEQ ID NO: 78887 - DNA, 15 bp, Homo sapiens
aaagggcaatatgag

SEQ ID NO: 78888 - DNA, 15 bp, Homo sapiens
aaaagggcaatatga

SEQ ID NO: 78889 - DNA, 15 bp, Homo sapiens
taaaagggcaatatg

SEQ ID NO: 78890 - DNA, 15 bp, Homo sapiens
ctaaaagggcaatat

SEQ ID NO: 78891 - DNA, 15 bp, Homo sapiens
tctaaaagggcaata

SEQ ID NO: 78892 - DNA, 15 bp, Homo sapiens
ctctaaaagggcaat

SEQ ID NO: 78893 - DNA, 15 bp, Homo sapiens
gctctaaaagggcaa

SEQ ID NO: 78894 - DNA, 15 bp, Homo sapiens
ggctctaaaagggca

SEQ ID NO: 78895 - DNA, 15 bp, Homo sapiens
tggctctaaaagggc

SEQ ID NO: 78896 - DNA, 15 bp, Homo sapiens
atggctctaaaaggg

SEQ ID NO: 78897 - DNA, 15 bp, Homo sapiens
catggctctaaaagg

SEQ ID NO: 78898 - DNA, 15 bp, Homo sapiens
gcatggctctaaaag

SEQ ID NO: 78899 - DNA, 15 bp, Homo sapiens
tgcatggctctaaaa

SEQ ID NO: 78900 - DNA, 15 bp, Homo sapiens
atgcatggctctaaa

SEQ ID NO: 78901 - DNA, 15 bp, Homo sapiens
tatgcatggctctaa

SEQ ID NO: 78902 - DNA, 15 bp, Homo sapiens
atatgcatggctcta

SEQ ID NO: 78903 - DNA, 15 bp, Homo sapiens
tatatgcatggctct

SEQ ID NO: 78904 - DNA, 15 bp, Homo sapiens
atatatgcatggctc

SEQ ID NO: 78905 - DNA, 15 bp, Homo sapiens
gatatatgcatggct

SEQ ID NO: 78906 - DNA, 15 bp, Homo sapiens
ggatatatgcatggc

SEQ ID NO: 78907 - DNA, 15 bp, Homo sapiens
gggatatatgcatgg

SEQ ID NO: 78908 - DNA, 15 bp, Homo sapiens
agggatatatgcatg

SEQ ID NO: 78909 - DNA, 15 bp, Homo sapiens
aagggatatatgcat

SEQ ID NO: 78910 - DNA, 15 bp, Homo sapiens
gaagggatatatgca

SEQ ID NO: 78911 - DNA, 15 bp, Homo sapiens
ggaagggatatatgc

SEQ ID NO: 78912 - DNA, 15 bp, Homo sapiens
aggaagggatatatg

SEQ ID NO: 78913 - DNA, 15 bp, Homo sapiens
gaggaagggatatat

SEQ ID NO: 78914 - DNA, 15 bp, Homo sapiens
ggaggaagggatata

SEQ ID NO: 78915 - DNA, 15 bp, Homo sapiens
gggaggaagggatat

SEQ ID NO: 78916 - DNA, 15 bp, Homo sapiens
tgggaggaagggata

SEQ ID NO: 78917 - DNA, 15 bp, Homo sapiens
gtgggaggaagggat

SEQ ID NO: 78918 - DNA, 15 bp, Homo sapiens
ggtgggaggaaggga

SEQ ID NO: 78919 - DNA, 15 bp, Homo sapiens
gggtgggaggaaggg

SEQ ID NO: 78920 - DNA, 15 bp, Homo sapiens
agggtgggaggaagg

SEQ ID NO: 78921 - DNA, 15 bp, Homo sapiens
gagggtgggaggaag

SEQ ID NO: 78922 - DNA, 15 bp, Homo sapiens
tgagggtgggaggaa

SEQ ID NO: 78923 - DNA, 15 bp, Homo sapiens
atgagggtgggagga

SEQ ID NO: 78924 - DNA, 15 bp, Homo sapiens
aatgagggtgggagg

SEQ ID NO: 78925 - DNA, 15 bp, Homo sapiens
gaatgagggtgggag

SEQ ID NO: 78926 - DNA, 15 bp, Homo sapiens
ggaatgagggtggga

SEQ ID NO: 78927 - DNA, 15 bp, Homo sapiens
aggaatgagggtggg

SEQ ID NO: 78928 - DNA, 15 bp, Homo sapiens
gaggaatgagggtgg

SEQ ID NO: 78929 - DNA, 15 bp, Homo sapiens
agaggaatgagggtg

SEQ ID NO: 78930 - DNA, 15 bp, Homo sapiens
gagaggaatgagggt

SEQ ID NO: 78931 - DNA, 15 bp, Homo sapiens
tgagaggaatgaggg

SEQ ID NO: 78932 - DNA, 15 bp, Homo sapiens
ttgagaggaatgagg

SEQ ID NO: 78933 - DNA, 15 bp, Homo sapiens
tttgagaggaatgag

SEQ ID NO: 78934 - DNA, 15 bp, Homo sapiens
gtttgagaggaatga

SEQ ID NO: 78935 - DNA, 15 bp, Homo sapiens
agtttgagaggaatg

SEQ ID NO: 78936 - DNA, 15 bp, Homo sapiens
gagtttgagaggaat

SEQ ID NO: 78937 - DNA, 15 bp, Homo sapiens
agagtttgagaggaa

SEQ ID NO: 78938 - DNA, 15 bp, Homo sapiens
cagagtttgagagga

SEQ ID NO: 78939 - DNA, 15 bp, Homo sapiens
ccagagtttgagagg

SEQ ID NO: 78940 - DNA, 15 bp, Homo sapiens
gccagagtttgagag

SEQ ID NO: 78941 - DNA, 15 bp, Homo sapiens
tgccagagtttgaga

SEQ ID NO: 78942 - DNA, 15 bp, Homo sapiens
ttgccagagtttgag

SEQ ID NO: 78943 - DNA, 15 bp, Homo sapiens
tttgccagagtttga

SEQ ID NO: 78944 - DNA, 15 bp, Homo sapiens
gtttgccagagtttg

SEQ ID NO: 78945 - DNA, 15 bp, Homo sapiens
tgtttgccagagttt

SEQ ID NO: 78946 - DNA, 15 bp, Homo sapiens
atgtttgccagagtt

SEQ ID NO: 78947 - DNA, 15 bp, Homo sapiens
catgtttgccagagt

SEQ ID NO: 78948 - DNA, 15 bp, Homo sapiens
tcatgtttgccagag

SEQ ID NO: 78949 - DNA, 15 bp, Homo sapiens
ttcatgtttgccaga

SEQ ID NO: 78950 - DNA, 15 bp, Homo sapiens
attcatgtttgccag

SEQ ID NO: 78951 - DNA, 15 bp, Homo sapiens
gattcatgtttgcca

SEQ ID NO: 78952 - DNA, 15 bp, Homo sapiens
agattcatgtttgcc

SEQ ID NO: 78953 - DNA, 15 bp, Homo sapiens
cagattcatgtttgc

SEQ ID NO: 78954 - DNA, 15 bp, Homo sapiens
acagattcatgtttg

SEQ ID NO: 78955 - DNA, 15 bp, Homo sapiens
aacagattcatgttt

SEQ ID NO: 78956 - DNA, 15 bp, Homo sapiens
gaacagattcatgtt

SEQ ID NO: 78957 - DNA, 15 bp, Homo sapiens
agaacagattcatgt

SEQ ID NO: 78958 - DNA, 15 bp, Homo sapiens
gagaacagattcatg

SEQ ID NO: 78959 - DNA, 15 bp, Homo sapiens
ggagaacagattcat

SEQ ID NO: 78960 - DNA, 15 bp, Homo sapiens
cggagaacagattca

SEQ ID NO: 78961 - DNA, 15 bp, Homo sapiens
acggagaacagattc

SEQ ID NO: 78962 - DNA, 15 bp, Homo sapiens
aacggagaacagatt

SEQ ID NO: 78963 - DNA, 15 bp, Homo sapiens
aaacggagaacagat

SEQ ID NO: 78964 - DNA, 15 bp, Homo sapiens
caaacggagaacaga

SEQ ID NO: 78965 - DNA, 15 bp, Homo sapiens
acaaacggagaacag

SEQ ID NO: 78966 - DNA, 15 bp, Homo sapiens
tacaaacggagaaca

SEQ ID NO: 78967 - DNA, 15 bp, Homo sapiens
atacaaacggagaac

SEQ ID NO: 78968 - DNA, 15 bp, Homo sapiens
tatacaaacggagaa

SEQ ID NO: 78969 - DNA, 15 bp, Homo sapiens
ttatacaaacggaga

SEQ ID NO: 78970 - DNA, 15 bp, Homo sapiens
attatacaaacggag

SEQ ID NO: 78971 - DNA, 15 bp, Homo sapiens
aattatacaaacgga

SEQ ID NO: 78972 - DNA, 15 bp, Homo sapiens
aaattatacaaacgg

SEQ ID NO: 78973 - DNA, 15 bp, Homo sapiens
aaaattatacaaacg

SEQ ID NO: 78974 - DNA, 15 bp, Homo sapiens
taaaattatacaaac

SEQ ID NO: 78975 - DNA, 15 bp, Homo sapiens
ataaaattatacaaa

SEQ ID NO: 78976 - DNA, 15 bp, Homo sapiens
tataaaattatacaa

SEQ ID NO: 78977 - DNA, 15 bp, Homo sapiens
atataaaattataca

SEQ ID NO: 78978 - DNA, 15 bp, Homo sapiens
aatataaaattatac

SEQ ID NO: 78979 - DNA, 15 bp, Homo sapiens
aaatataaaattata

SEQ ID NO: 78980 - DNA, 15 bp, Homo sapiens
aaaatataaaattat

SEQ ID NO: 78981 - DNA, 15 bp, Homo sapiens
taaaatataaaatta

SEQ ID NO: 78982 - DNA, 15 bp, Homo sapiens
ttaaaatataaaatt

SEQ ID NO: 78983 - DNA, 15 bp, Homo sapiens
tttaaaatataaaat

SEQ ID NO: 78984 - DNA, 15 bp, Homo sapiens
ttttaaaatataaaa

SEQ ID NO: 78985 - DNA, 15 bp, Homo sapiens
tttttaaaatataaa

SEQ ID NO: 78986 - DNA, 15 bp, Homo sapiens
atttttaaaatataa

SEQ ID NO: 78987 - DNA, 15 bp, Homo sapiens
catttttaaaatata

SEQ ID NO: 78988 - DNA, 15 bp, Homo sapiens
acatttttaaaatat

SEQ ID NO: 78989 - DNA, 15 bp, Homo sapiens
aacatttttaaaata

SEQ ID NO: 78990 - DNA, 15 bp, Homo sapiens
aaacatttttaaaat

SEQ ID NO: 78991 - DNA, 15 bp, Homo sapiens
aaaacatttttaaaa

SEQ ID NO: 78992 - DNA, 15 bp, Homo sapiens
taaaacatttttaaa

SEQ ID NO: 78993 - DNA, 15 bp, Homo sapiens
ataaaacatttttaa

SEQ ID NO: 78994 - DNA, 15 bp, Homo sapiens
tataaaacattttta

SEQ ID NO: 78995 - DNA, 15 bp, Homo sapiens
ttataaaacattttt

SEQ ID NO: 78996 - DNA, 15 bp, Homo sapiens
tttataaaacatttt

SEQ ID NO: 78997 - DNA, 15 bp, Homo sapiens
ttttataaaacattt

SEQ ID NO: 78998 - DNA, 15 bp, Homo sapiens
tttttataaaacatt

SEQ ID NO: 78999 - DNA, 15 bp, Homo sapiens
atttttataaaacat

SEQ ID NO: 79000 - DNA, 15 bp, Homo sapiens
tatttttataaaaca

SEQ ID NO: 79001 - DNA, 15 bp, Homo sapiens
atatttttataaaac

SEQ ID NO: 79002 - DNA, 15 bp, Homo sapiens
tatatttttataaaa

SEQ ID NO: 79003 - DNA, 15 bp, Homo sapiens
atatatttttataaa

SEQ ID NO: 79004 - DNA, 15 bp, Homo sapiens
tatatatttttataa

SEQ ID NO: 79005 - DNA, 15 bp, Homo sapiens
gtatatatttttata

SEQ ID NO: 79006 - DNA, 15 bp, Homo sapiens
tgtatatatttttat

SEQ ID NO: 79007 - DNA, 15 bp, Homo sapiens
ctgtatatattttta

SEQ ID NO: 79008 - DNA, 15 bp, Homo sapiens
actgtatatattttt

SEQ ID NO: 79009 - DNA, 15 bp, Homo sapiens
tactgtatatatttt

SEQ ID NO: 79010 - DNA, 15 bp, Homo sapiens
atactgtatatattt

SEQ ID NO: 79011 - DNA, 15 bp, Homo sapiens
catactgtatatatt

SEQ ID NO: 79012 - DNA, 15 bp, Homo sapiens
acatactgtatatat

SEQ ID NO: 79013 - DNA, 15 bp, Homo sapiens
tacatactgtatata

SEQ ID NO: 79014 - DNA, 15 bp, Homo sapiens
ttacatactgtatat

SEQ ID NO: 79015 - DNA, 15 bp, Homo sapiens
tttacatactgtata

SEQ ID NO: 79016 - DNA, 15 bp, Homo sapiens
gtttacatactgtat

SEQ ID NO: 79017 - DNA, 15 bp, Homo sapiens
agtttacatactgta

SEQ ID NO: 79018 - DNA, 15 bp, Homo sapiens
aagtttacatactgt

SEQ ID NO: 79019 - DNA, 15 bp, Homo sapiens
aaagtttacatactg

SEQ ID NO: 79020 - DNA, 15 bp, Homo sapiens
aaaagtttacatact

SEQ ID NO: 79021 - DNA, 15 bp, Homo sapiens
caaaagtttacatac

SEQ ID NO: 79022 - DNA, 15 bp, Homo sapiens
ccaaaagtttacata

SEQ ID NO: 79023 - DNA, 15 bp, Homo sapiens
cccaaaagtttacat

SEQ ID NO: 79024 - DNA, 15 bp, Homo sapiens
tcccaaaagtttaca

SEQ ID NO: 79025 - DNA, 15 bp, Homo sapiens
atcccaaaagtttac

SEQ ID NO: 79026 - DNA, 15 bp, Homo sapiens
aatcccaaaagttta

SEQ ID NO: 79027 - DNA, 15 bp, Homo sapiens
taatcccaaaagttt

SEQ ID NO: 79028 - DNA, 15 bp, Homo sapiens
ttaatcccaaaagtt

SEQ ID NO: 79029 - DNA, 15 bp, Homo sapiens
gttaatcccaaaagt

SEQ ID NO: 79030 - DNA, 15 bp, Homo sapiens
agttaatcccaaaag

SEQ ID NO: 79031 - DNA, 15 bp, Homo sapiens
aagttaatcccaaaa

SEQ ID NO: 79032 - DNA, 15 bp, Homo sapiens
aaagttaatcccaaa

SEQ ID NO: 79033 - DNA, 15 bp, Homo sapiens
aaaagttaatcccaa

SEQ ID NO: 79034 - DNA, 15 bp, Homo sapiens
caaaagttaatccca

SEQ ID NO: 79035 - DNA, 15 bp, Homo sapiens
acaaaagttaatccc

SEQ ID NO: 79036 - DNA, 15 bp, Homo sapiens
gacaaaagttaatcc

SEQ ID NO: 79037 - DNA, 15 bp, Homo sapiens
agacaaaagttaatc

SEQ ID NO: 79038 - DNA, 15 bp, Homo sapiens
aagacaaaagttaat

SEQ ID NO: 79039 - DNA, 15 bp, Homo sapiens
aaagacaaaagttaa

SEQ ID NO: 79040 - DNA, 15 bp, Homo sapiens
gaaagacaaaagtta

SEQ ID NO: 79041 - DNA, 15 bp, Homo sapiens
tgaaagacaaaagtt

SEQ ID NO: 79042 - DNA, 15 bp, Homo sapiens
ctgaaagacaaaagt

SEQ ID NO: 79043 - DNA, 15 bp, Homo sapiens
gctgaaagacaaaag

SEQ ID NO: 79044 - DNA, 15 bp, Homo sapiens
agctgaaagacaaaa

SEQ ID NO: 79045 - DNA, 15 bp, Homo sapiens
tagctgaaagacaaa

SEQ ID NO: 79046 - DNA, 15 bp, Homo sapiens
ttagctgaaagacaa

SEQ ID NO: 79047 - DNA, 15 bp, Homo sapiens
attagctgaaagaca

SEQ ID NO: 79048 - DNA, 15 bp, Homo sapiens
aattagctgaaagac

SEQ ID NO: 79049 - DNA, 15 bp, Homo sapiens
gaattagctgaaaga

SEQ ID NO: 79050 - DNA, 15 bp, Homo sapiens
ggaattagctgaaag

SEQ ID NO: 79051 - DNA, 15 bp, Homo sapiens
gggaattagctgaaa

SEQ ID NO: 79052 - DNA, 15 bp, Homo sapiens
agggaattagctgaa

SEQ ID NO: 79053 - DNA, 15 bp, Homo sapiens
cagggaattagctga

SEQ ID NO: 79054 - DNA, 15 bp, Homo sapiens
tcagggaattagctg

SEQ ID NO: 79055 - DNA, 15 bp, Homo sapiens
ttcagggaattagct

SEQ ID NO: 79056 - DNA, 15 bp, Homo sapiens
cttcagggaattagc

SEQ ID NO: 79057 - DNA, 15 bp, Homo sapiens
acttcagggaattag

SEQ ID NO: 79058 - DNA, 15 bp, Homo sapiens
aacttcagggaatta

SEQ ID NO: 79059 - DNA, 15 bp, Homo sapiens
caacttcagggaatt

SEQ ID NO: 79060 - DNA, 15 bp, Homo sapiens
acaacttcagggaat

SEQ ID NO: 79061 - DNA, 15 bp, Homo sapiens
cacaacttcagggaa

SEQ ID NO: 79062 - DNA, 15 bp, Homo sapiens
acacaacttcaggga

SEQ ID NO: 79063 - DNA, 15 bp, Homo sapiens
cacacaacttcaggg

SEQ ID NO: 79064 - DNA, 15 bp, Homo sapiens
acacacaacttcagg

SEQ ID NO: 79065 - DNA, 15 bp, Homo sapiens
tacacacaacttcag

SEQ ID NO: 79066 - DNA, 15 bp, Homo sapiens
atacacacaacttca

SEQ ID NO: 79067 - DNA, 15 bp, Homo sapiens
aatacacacaacttc

SEQ ID NO: 79068 - DNA, 15 bp, Homo sapiens
gaatacacacaactt

SEQ ID NO: 79069 - DNA, 15 bp, Homo sapiens
tgaatacacacaact

SEQ ID NO: 79070 - DNA, 15 bp, Homo sapiens
atgaatacacacaac

SEQ ID NO: 79071 - DNA, 15 bp, Homo sapiens
tatgaatacacacaa

SEQ ID NO: 79072 - DNA, 15 bp, Homo sapiens
ctatgaatacacaca

SEQ ID NO: 79073 - DNA, 15 bp, Homo sapiens
cctatgaatacacac

SEQ ID NO: 79074 - DNA, 15 bp, Homo sapiens
gcctatgaatacaca

SEQ ID NO: 79075 - DNA, 15 bp, Homo sapiens
tgcctatgaatacac

SEQ ID NO: 79076 - DNA, 15 bp, Homo sapiens
atgcctatgaataca

SEQ ID NO: 79077 - DNA, 15 bp, Homo sapiens
aatgcctatgaatac

SEQ ID NO: 79078 - DNA, 15 bp, Homo sapiens
caatgcctatgaata

SEQ ID NO: 79079 - DNA, 15 bp, Homo sapiens
gcaatgcctatgaat

SEQ ID NO: 79080 - DNA, 15 bp, Homo sapiens
agcaatgcctatgaa

SEQ ID NO: 79081 - DNA, 15 bp, Homo sapiens
aagcaatgcctatga

SEQ ID NO: 79082 - DNA, 15 bp, Homo sapiens
aaagcaatgcctatg

SEQ ID NO: 79083 - DNA, 15 bp, Homo sapiens
aaaagcaatgcctat

SEQ ID NO: 79084 - DNA, 15 bp, Homo sapiens
aaaaagcaatgccta

SEQ ID NO: 79085 - DNA, 15 bp, Homo sapiens
taaaaagcaatgcct

SEQ ID NO: 79086 - DNA, 15 bp, Homo sapiens
ataaaaagcaatgcc

SEQ ID NO: 79087 - DNA, 15 bp, Homo sapiens
aataaaaagcaatgc

SEQ ID NO: 79088 - DNA, 15 bp, Homo sapiens
taataaaaagcaatg

SEQ ID NO: 79089 - DNA, 15 bp, Homo sapiens
gtaataaaaagcaat

SEQ ID NO: 79090 - DNA, 15 bp, Homo sapiens
agtaataaaaagcaa

SEQ ID NO: 79091 - DNA, 15 bp, Homo sapiens
cagtaataaaaagca

SEQ ID NO: 79092 - DNA, 15 bp, Homo sapiens
tcagtaataaaaagc

SEQ ID NO: 79093 - DNA, 15 bp, Homo sapiens
ctcagtaataaaaag

SEQ ID NO: 79094 - DNA, 15 bp, Homo sapiens
actcagtaataaaaa

SEQ ID NO: 79095 - DNA, 15 bp, Homo sapiens
cactcagtaataaaa

SEQ ID NO: 79096 - DNA, 15 bp, Homo sapiens
tcactcagtaataaa

SEQ ID NO: 79097 - DNA, 15 bp, Homo sapiens
atcactcagtaataa

SEQ ID NO: 79098 - DNA, 15 bp, Homo sapiens
tatcactcagtaata

SEQ ID NO: 79099 - DNA, 15 bp, Homo sapiens
atatcactcagtaat

SEQ ID NO: 79100 - DNA, 15 bp, Homo sapiens
aatatcactcagtaa

SEQ ID NO: 79101 - DNA, 15 bp, Homo sapiens
gaatatcactcagta

SEQ ID NO: 79102 - DNA, 15 bp, Homo sapiens
ggaatatcactcagt

SEQ ID NO: 79103 - DNA, 15 bp, Homo sapiens
tggaatatcactcag

SEQ ID NO: 79104 - DNA, 15 bp, Homo sapiens
gtggaatatcactca

SEQ ID NO: 79105 - DNA, 15 bp, Homo sapiens
tgtggaatatcactc

SEQ ID NO: 79106 - DNA, 15 bp, Homo sapiens
ctgtggaatatcact

SEQ ID NO: 79107 - DNA, 15 bp, Homo sapiens
actgtggaatatcac

SEQ ID NO: 79108 - DNA, 15 bp, Homo sapiens
cactgtggaatatca

SEQ ID NO: 79109 - DNA, 15 bp, Homo sapiens
acactgtggaatatc

SEQ ID NO: 79110 - DNA, 15 bp, Homo sapiens
cacactgtggaatat

SEQ ID NO: 79111 - DNA, 15 bp, Homo sapiens
ccacactgtggaata

SEQ ID NO: 79112 - DNA, 15 bp, Homo sapiens
tccacactgtggaat

SEQ ID NO: 79113 - DNA, 15 bp, Homo sapiens
atccacactgtggaa

SEQ ID NO: 79114 - DNA, 15 bp, Homo sapiens
catccacactgtgga

SEQ ID NO: 79115 - DNA, 15 bp, Homo sapiens
acatccacactgtgg

SEQ ID NO: 79116 - DNA, 15 bp, Homo sapiens
tacatccacactgtg

SEQ ID NO: 79117 - DNA, 15 bp, Homo sapiens
gtacatccacactgt

SEQ ID NO: 79118 - DNA, 15 bp, Homo sapiens
ggtacatccacactg

SEQ ID NO: 79119 - DNA, 15 bp, Homo sapiens
tggtacatccacact

SEQ ID NO: 79120 - DNA, 15 bp, Homo sapiens
gtggtacatccacac

SEQ ID NO: 79121 - DNA, 15 bp, Homo sapiens
tgtggtacatccaca

SEQ ID NO: 79122 - DNA, 15 bp, Homo sapiens
ctgtggtacatccac

SEQ ID NO: 79123 - DNA, 15 bp, Homo sapiens
actgtggtacatcca

SEQ ID NO: 79124 - DNA, 15 bp, Homo sapiens
aactgtggtacatcc

SEQ ID NO: 79125 - DNA, 15 bp, Homo sapiens
aaactgtggtacatc

SEQ ID NO: 79126 - DNA, 15 bp, Homo sapiens
taaactgtggtacat

SEQ ID NO: 79127 - DNA, 15 bp, Homo sapiens
ttaaactgtggtaca

SEQ ID NO: 79128 - DNA, 15 bp, Homo sapiens
gttaaactgtggtac

SEQ ID NO: 79129 - DNA, 15 bp, Homo sapiens
ggttaaactgtggta

SEQ ID NO: 79130 - DNA, 15 bp, Homo sapiens
tggttaaactgtggt

SEQ ID NO: 79131 - DNA, 15 bp, Homo sapiens
atggttaaactgtgg

SEQ ID NO: 79132 - DNA, 15 bp, Homo sapiens
aatggttaaactgtg

SEQ ID NO: 79133 - DNA, 15 bp, Homo sapiens
gaatggttaaactgt

SEQ ID NO: 79134 - DNA, 15 bp, Homo sapiens
tgaatggttaaactg

SEQ ID NO: 79135 - DNA, 15 bp, Homo sapiens
gtgaatggttaaact

SEQ ID NO: 79136 - DNA, 15 bp, Homo sapiens
ggtgaatggttaaac

SEQ ID NO: 79137 - DNA, 15 bp, Homo sapiens
aggtgaatggttaaa

SEQ ID NO: 79138 - DNA, 15 bp, Homo sapiens
caggtgaatggttaa

SEQ ID NO: 79139 - DNA, 15 bp, Homo sapiens
acaggtgaatggtta

SEQ ID NO: 79140 - DNA, 15 bp, Homo sapiens
aacaggtgaatggtt

SEQ ID NO: 79141 - DNA, 15 bp, Homo sapiens
caacaggtgaatggt

SEQ ID NO: 79142 - DNA, 15 bp, Homo sapiens
tcaacaggtgaatgg

SEQ ID NO: 79143 - DNA, 15 bp, Homo sapiens
ttcaacaggtgaatg

SEQ ID NO: 79144 - DNA, 15 bp, Homo sapiens
cttcaacaggtgaat

SEQ ID NO: 79145 - DNA, 15 bp, Homo sapiens
ccttcaacaggtgaa

SEQ ID NO: 79146 - DNA, 15 bp, Homo sapiens
tccttcaacaggtga

SEQ ID NO: 79147 - DNA, 15 bp, Homo sapiens
atccttcaacaggtg

SEQ ID NO: 79148 - DNA, 15 bp, Homo sapiens
tatccttcaacaggt

SEQ ID NO: 79149 - DNA, 15 bp, Homo sapiens
ctatccttcaacagg

SEQ ID NO: 79150 - DNA, 15 bp, Homo sapiens
gctatccttcaacag

SEQ ID NO: 79151 - DNA, 15 bp, Homo sapiens
agctatccttcaaca

SEQ ID NO: 79152 - DNA, 15 bp, Homo sapiens
cagctatccttcaac

SEQ ID NO: 79153 - DNA, 15 bp, Homo sapiens
ccagctatccttcaa

SEQ ID NO: 79154 - DNA, 15 bp, Homo sapiens
cccagctatccttca

SEQ ID NO: 79155 - DNA, 15 bp, Homo sapiens
acccagctatccttc

SEQ ID NO: 79156 - DNA, 15 bp, Homo sapiens
aacccagctatcctt

SEQ ID NO: 79157 - DNA, 15 bp, Homo sapiens
taacccagctatcct

SEQ ID NO: 79158 - DNA, 15 bp, Homo sapiens
ataacccagctatcc

SEQ ID NO: 79159 - DNA, 15 bp, Homo sapiens
aataacccagctatc

SEQ ID NO: 79160 - DNA, 15 bp, Homo sapiens
aaataacccagctat

SEQ ID NO: 79161 - DNA, 15 bp, Homo sapiens
gaaataacccagcta

SEQ ID NO: 79162 - DNA, 15 bp, Homo sapiens
ggaaataacccagct

SEQ ID NO: 79163 - DNA, 15 bp, Homo sapiens
aggaaataacccagc

SEQ ID NO: 79164 - DNA, 15 bp, Homo sapiens
caggaaataacccag

SEQ ID NO: 79165 - DNA, 15 bp, Homo sapiens
acaggaaataaccca

SEQ ID NO: 79166 - DNA, 15 bp, Homo sapiens
aacaggaaataaccc

SEQ ID NO: 79167 - DNA, 15 bp, Homo sapiens
aaacaggaaataacc

SEQ ID NO: 79168 - DNA, 15 bp, Homo sapiens
gaaacaggaaataac

SEQ ID NO: 79169 - DNA, 15 bp, Homo sapiens
agaaacaggaaataa

SEQ ID NO: 79170 - DNA, 15 bp, Homo sapiens
cagaaacaggaaata

SEQ ID NO: 79171 - DNA, 15 bp, Homo sapiens
ccagaaacaggaaat

SEQ ID NO: 79172 - DNA, 15 bp, Homo sapiens
gccagaaacaggaaa

SEQ ID NO: 79173 - DNA, 15 bp, Homo sapiens
agccagaaacaggaa

SEQ ID NO: 79174 - DNA, 15 bp, Homo sapiens
tagccagaaacagga

SEQ ID NO: 79175 - DNA, 15 bp, Homo sapiens
atagccagaaacagg

SEQ ID NO: 79176 - DNA, 15 bp, Homo sapiens
aatagccagaaacag

SEQ ID NO: 79177 - DNA, 15 bp, Homo sapiens
caatagccagaaaca

SEQ ID NO: 79178 - DNA, 15 bp, Homo sapiens
gcaatagccagaaac

SEQ ID NO: 79179 - DNA, 15 bp, Homo sapiens
tgcaatagccagaaa

SEQ ID NO: 79180 - DNA, 15 bp, Homo sapiens
ttgcaatagccagaa

SEQ ID NO: 79181 - DNA, 15 bp, Homo sapiens
tttgcaatagccaga

SEQ ID NO: 79182 - DNA, 15 bp, Homo sapiens
atttgcaatagccag

SEQ ID NO: 79183 - DNA, 15 bp, Homo sapiens
tatttgcaatagcca

SEQ ID NO: 79184 - DNA, 15 bp, Homo sapiens
ttatttgcaatagcc

SEQ ID NO: 79185 - DNA, 15 bp, Homo sapiens
tttatttgcaatagc

SEQ ID NO: 79186 - DNA, 15 bp, Homo sapiens
ctttatttgcaatag

SEQ ID NO: 79187 - DNA, 15 bp, Homo sapiens
gctttatttgcaata

SEQ ID NO: 79188 - DNA, 15 bp, Homo sapiens
agctttatttgcaat

SEQ ID NO: 79189 - DNA, 15 bp, Homo sapiens
cagctttatttgcaa

SEQ ID NO: 79190 - DNA, 15 bp, Homo sapiens
gcagctttatttgca

SEQ ID NO: 79191 - DNA, 15 bp, Homo sapiens
agcagctttatttgc

SEQ ID NO: 79192 - DNA, 15 bp, Homo sapiens
cagcagctttatttg

SEQ ID NO: 79193 - DNA, 15 bp, Homo sapiens
acagcagctttattt

SEQ ID NO: 79194 - DNA, 15 bp, Homo sapiens
tacagcagctttatt

SEQ ID NO: 79195 - DNA, 15 bp, Homo sapiens
ttacagcagctttat

SEQ ID NO: 79196 - DNA, 15 bp, Homo sapiens
tttacagcagcttta

SEQ ID NO: 79197 - DNA, 15 bp, Homo sapiens
atttacagcagcttt

SEQ ID NO: 79198 - DNA, 15 bp, Homo sapiens
tatttacagcagctt

SEQ ID NO: 79199 - DNA, 15 bp, Homo sapiens
gtatttacagcagct

SEQ ID NO: 79200 - DNA, 15 bp, Homo sapiens
agtatttacagcagc

SEQ ID NO: 79201 - DNA, 15 bp, Homo sapiens
aagtatttacagcag

SEQ ID NO: 79202 - DNA, 15 bp, Homo sapiens
caagtatttacagca

SEQ ID NO: 79203 - DNA, 15 bp, Homo sapiens
acaagtatttacagc

SEQ ID NO: 79204 - DNA, 15 bp, Homo sapiens
tacaagtatttacag

SEQ ID NO: 79205 - DNA, 15 bp, Homo sapiens
atacaagtatttaca

SEQ ID NO: 79206 - DNA, 15 bp, Homo sapiens
tatacaagtatttac

SEQ ID NO: 79207 - DNA, 15 bp, Homo sapiens
gtatacaagtattta

SEQ ID NO: 79208 - DNA, 15 bp, Homo sapiens
tgtatacaagtattt

SEQ ID NO: 79209 - DNA, 15 bp, Homo sapiens
ctgtatacaagtatt

SEQ ID NO: 79210 - DNA, 15 bp, Homo sapiens
cctgtatacaagtat

SEQ ID NO: 79211 - DNA, 15 bp, Homo sapiens
acctgtatacaagta

SEQ ID NO: 79212 - DNA, 15 bp, Homo sapiens
aacctgtatacaagt

SEQ ID NO: 79213 - DNA, 15 bp, Homo sapiens
aaacctgtatacaag

SEQ ID NO: 79214 - DNA, 15 bp, Homo sapiens
gaaacctgtatacaa

SEQ ID NO: 79215 - DNA, 15 bp, Homo sapiens
agaaacctgtataca

SEQ ID NO: 79216 - DNA, 15 bp, Homo sapiens
cagaaacctgtatac

SEQ ID NO: 79217 - DNA, 15 bp, Homo sapiens
acagaaacctgtata

SEQ ID NO: 79218 - DNA, 15 bp, Homo sapiens
tacagaaacctgtat

SEQ ID NO: 79219 - DNA, 15 bp, Homo sapiens
atacagaaacctgta

SEQ ID NO: 79220 - DNA, 15 bp, Homo sapiens
catacagaaacctgt

SEQ ID NO: 79221 - DNA, 15 bp, Homo sapiens
tcatacagaaacctg

SEQ ID NO: 79222 - DNA, 15 bp, Homo sapiens
ttcatacagaaacct

SEQ ID NO: 79223 - DNA, 15 bp, Homo sapiens
attcatacagaaacc

SEQ ID NO: 79224 - DNA, 15 bp, Homo sapiens
aattcatacagaaac

SEQ ID NO: 79225 - DNA, 15 bp, Homo sapiens
gaattcatacagaaa

SEQ ID NO: 79226 - DNA, 15 bp, Homo sapiens
tgaattcatacagaa

SEQ ID NO: 79227 - DNA, 15 bp, Homo sapiens
ttgaattcatacaga

SEQ ID NO: 79228 - DNA, 15 bp, Homo sapiens
cttgaattcatacag

SEQ ID NO: 79229 - DNA, 15 bp, Homo sapiens
acttgaattcataca

SEQ ID NO: 79230 - DNA, 15 bp, Homo sapiens
aacttgaattcatac

SEQ ID NO: 79231 - DNA, 15 bp, Homo sapiens
aaacttgaattcata

SEQ ID NO: 79232 - DNA, 15 bp, Homo sapiens
aaaacttgaattcat

SEQ ID NO: 79233 - DNA, 15 bp, Homo sapiens
aaaaacttgaattca

SEQ ID NO: 79234 - DNA, 15 bp, Homo sapiens
taaaaacttgaattc

SEQ ID NO: 79235 - DNA, 15 bp, Homo sapiens
ataaaaacttgaatt

SEQ ID NO: 79236 - DNA, 15 bp, Homo sapiens
aataaaaacttgaat

SEQ ID NO: 79237 - DNA, 15 bp, Homo sapiens
aaataaaaacttgaa

SEQ ID NO: 79238 - DNA, 15 bp, Homo sapiens
gaaataaaaacttga

SEQ ID NO: 79239 - DNA, 15 bp, Homo sapiens
agaaataaaaacttg

SEQ ID NO: 79240 - DNA, 15 bp, Homo sapiens
aagaaataaaaactt

SEQ ID NO: 79241 - DNA, 15 bp, Homo sapiens
aaagaaataaaaact

SEQ ID NO: 79242 - DNA, 15 bp, Homo sapiens
caaagaaataaaaac

SEQ ID NO: 79243 - DNA, 15 bp, Homo sapiens
ccaaagaaataaaaa

SEQ ID NO: 79244 - DNA, 15 bp, Homo sapiens
cccaaagaaataaaa

SEQ ID NO: 79245 - DNA, 15 bp, Homo sapiens
tcccaaagaaataaa

SEQ ID NO: 79246 - DNA, 15 bp, Homo sapiens
atcccaaagaaataa

SEQ ID NO: 79247 - DNA, 15 bp, Homo sapiens
tatcccaaagaaata

SEQ ID NO: 79248 - DNA, 15 bp, Homo sapiens
ttatcccaaagaaat

SEQ ID NO: 79249 - DNA, 15 bp, Homo sapiens
tttatcccaaagaaa

SEQ ID NO: 79250 - DNA, 15 bp, Homo sapiens
gtttatcccaaagaa

SEQ ID NO: 79251 - DNA, 15 bp, Homo sapiens
tgtttatcccaaaga

SEQ ID NO: 79252 - DNA, 15 bp, Homo sapiens
gtgtttatcccaaag

SEQ ID NO: 79253 - DNA, 15 bp, Homo sapiens
ggtgtttatcccaaa

SEQ ID NO: 79254 - DNA, 15 bp, Homo sapiens
gggtgtttatcccaa

SEQ ID NO: 79255 - DNA, 15 bp, Homo sapiens
tgggtgtttatccca

SEQ ID NO: 79256 - DNA, 15 bp, Homo sapiens
ctgggtgtttatccc

SEQ ID NO: 79257 - DNA, 15 bp, Homo sapiens
cctgggtgtttatcc

SEQ ID NO: 79258 - DNA, 15 bp, Homo sapiens
tcctgggtgtttatc

SEQ ID NO: 79259 - DNA, 15 bp, Homo sapiens
ctcctgggtgtttat

SEQ ID NO: 79260 - DNA, 15 bp, Homo sapiens
actcctgggtgttta

SEQ ID NO: 79261 - DNA, 15 bp, Homo sapiens
tactcctgggtgttt

SEQ ID NO: 79262 - DNA, 15 bp, Homo sapiens
ctactcctgggtgtt

SEQ ID NO: 79263 - DNA, 15 bp, Homo sapiens
tctactcctgggtgt

SEQ ID NO: 79264 - DNA, 15 bp, Homo sapiens
ttctactcctgggtg

SEQ ID NO: 79265 - DNA, 15 bp, Homo sapiens
attctactcctgggt

SEQ ID NO: 79266 - DNA, 15 bp, Homo sapiens
aattctactcctggg

SEQ ID NO: 79267 - DNA, 15 bp, Homo sapiens
caattctactcctgg

SEQ ID NO: 79268 - DNA, 15 bp, Homo sapiens
acaattctactcctg

SEQ ID NO: 79269 - DNA, 15 bp, Homo sapiens
cacaattctactcct

SEQ ID NO: 79270 - DNA, 15 bp, Homo sapiens
ccacaattctactcc

SEQ ID NO: 79271 - DNA, 15 bp, Homo sapiens
tccacaattctactc

SEQ ID NO: 79272 - DNA, 15 bp, Homo sapiens
ctccacaattctact

SEQ ID NO: 79273 - DNA, 15 bp, Homo sapiens
gctccacaattctac

SEQ ID NO: 79274 - DNA, 15 bp, Homo sapiens
tgctccacaattcta

SEQ ID NO: 79275 - DNA, 15 bp, Homo sapiens
ctgctccacaattct

SEQ ID NO: 79276 - DNA, 15 bp, Homo sapiens
actgctccacaattc

SEQ ID NO: 79277 - DNA, 15 bp, Homo sapiens
tactgctccacaatt

SEQ ID NO: 79278 - DNA, 15 bp, Homo sapiens
atactgctccacaat

SEQ ID NO: 79279 - DNA, 15 bp, Homo sapiens
catactgctccacaa

SEQ ID NO: 79280 - DNA, 15 bp, Homo sapiens
ccatactgctccaca

SEQ ID NO: 79281 - DNA, 15 bp, Homo sapiens
gccatactgctccac

SEQ ID NO: 79282 - DNA, 15 bp, Homo sapiens
tgccatactgctcca

SEQ ID NO: 79283 - DNA, 15 bp, Homo sapiens
ttgccatactgctcc

SEQ ID NO: 79284 - DNA, 15 bp, Homo sapiens
attgccatactgctc

SEQ ID NO: 79285 - DNA, 15 bp, Homo sapiens
aattgccatactgct

SEQ ID NO: 79286 - DNA, 15 bp, Homo sapiens
aaattgccatactgc

SEQ ID NO: 79287 - DNA, 15 bp, Homo sapiens
gaaattgccatactg

SEQ ID NO: 79288 - DNA, 15 bp, Homo sapiens
tgaaattgccatact

SEQ ID NO: 79289 - DNA, 15 bp, Homo sapiens
atgaaattgccatac

SEQ ID NO: 79290 - DNA, 15 bp, Homo sapiens
catgaaattgccata

SEQ ID NO: 79291 - DNA, 15 bp, Homo sapiens
acatgaaattgccat

SEQ ID NO: 79292 - DNA, 15 bp, Homo sapiens
aacatgaaattgcca

SEQ ID NO: 79293 - DNA, 15 bp, Homo sapiens
aaacatgaaattgcc

SEQ ID NO: 79294 - DNA, 15 bp, Homo sapiens
taaacatgaaattgc

SEQ ID NO: 79295 - DNA, 15 bp, Homo sapiens
ctaaacatgaaattg

SEQ ID NO: 79296 - DNA, 15 bp, Homo sapiens
actaaacatgaaatt

SEQ ID NO: 79297 - DNA, 15 bp, Homo sapiens
aactaaacatgaaat

SEQ ID NO: 79298 - DNA, 15 bp, Homo sapiens
aaactaaacatgaaa

SEQ ID NO: 79299 - DNA, 15 bp, Homo sapiens
taaactaaacatgaa

SEQ ID NO: 79300 - DNA, 15 bp, Homo sapiens
ataaactaaacatga

SEQ ID NO: 79301 - DNA, 15 bp, Homo sapiens
tataaactaaacatg

SEQ ID NO: 79302 - DNA, 15 bp, Homo sapiens
ttataaactaaacat

SEQ ID NO: 79303 - DNA, 15 bp, Homo sapiens
cttataaactaaaca

SEQ ID NO: 79304 - DNA, 15 bp, Homo sapiens
gcttataaactaaac

SEQ ID NO: 79305 - DNA, 15 bp, Homo sapiens
ggcttataaactaaa

SEQ ID NO: 79306 - DNA, 15 bp, Homo sapiens
tggcttataaactaa

SEQ ID NO: 79307 - DNA, 15 bp, Homo sapiens
gtggcttataaacta

SEQ ID NO: 79308 - DNA, 15 bp, Homo sapiens
agtggcttataaact

SEQ ID NO: 79309 - DNA, 15 bp, Homo sapiens
cagtggcttataaac

SEQ ID NO: 79310 - DNA, 15 bp, Homo sapiens
gcagtggcttataaa

SEQ ID NO: 79311 - DNA, 15 bp, Homo sapiens
agcagtggcttataa

SEQ ID NO: 79312 - DNA, 15 bp, Homo sapiens
tagcagtggcttata

SEQ ID NO: 79313 - DNA, 15 bp, Homo sapiens
ttagcagtggcttat

SEQ ID NO: 79314 - DNA, 15 bp, Homo sapiens
tttagcagtggctta

SEQ ID NO: 79315 - DNA, 15 bp, Homo sapiens
gtttagcagtggctt

SEQ ID NO: 79316 - DNA, 15 bp, Homo sapiens
agtttagcagtggct

SEQ ID NO: 79317 - DNA, 15 bp, Homo sapiens
cagtttagcagtggc

SEQ ID NO: 79318 - DNA, 15 bp, Homo sapiens
acagtttagcagtgg

SEQ ID NO: 79319 - DNA, 15 bp, Homo sapiens
aacagtttagcagtg

SEQ ID NO: 79320 - DNA, 15 bp, Homo sapiens
aaacagtttagcagt

SEQ ID NO: 79321 - DNA, 15 bp, Homo sapiens
aaaacagtttagcag

SEQ ID NO: 79322 - DNA, 15 bp, Homo sapiens
gaaaacagtttagca

SEQ ID NO: 79323 - DNA, 15 bp, Homo sapiens
ggaaaacagtttagc

SEQ ID NO: 79324 - DNA, 15 bp, Homo sapiens
tggaaaacagtttag

SEQ ID NO: 79325 - DNA, 15 bp, Homo sapiens
ctggaaaacagttta

SEQ ID NO: 79326 - DNA, 15 bp, Homo sapiens
tctggaaaacagttt

SEQ ID NO: 79327 - DNA, 15 bp, Homo sapiens
ctctggaaaacagtt

SEQ ID NO: 79328 - DNA, 15 bp, Homo sapiens
actctggaaaacagt

SEQ ID NO: 79329 - DNA, 15 bp, Homo sapiens
cactctggaaaacag

SEQ ID NO: 79330 - DNA, 15 bp, Homo sapiens
ccactctggaaaaca

SEQ ID NO: 79331 - DNA, 15 bp, Homo sapiens
gccactctggaaaac

SEQ ID NO: 79332 - DNA, 15 bp, Homo sapiens
ggccactctggaaaa

SEQ ID NO: 79333 - DNA, 15 bp, Homo sapiens
tggccactctggaaa

SEQ ID NO: 79334 - DNA, 15 bp, Homo sapiens
atggccactctggaa

SEQ ID NO: 79335 - DNA, 15 bp, Homo sapiens
gatggccactctgga

SEQ ID NO: 79336 - DNA, 15 bp, Homo sapiens
ggatggccactctgg

SEQ ID NO: 79337 - DNA, 15 bp, Homo sapiens
gggatggccactctg

SEQ ID NO: 79338 - DNA, 15 bp, Homo sapiens
tgggatggccactct

SEQ ID NO: 79339 - DNA, 15 bp, Homo sapiens
atgggatggccactc

SEQ ID NO: 79340 - DNA, 15 bp, Homo sapiens
aatgggatggccact

SEQ ID NO: 79341 - DNA, 15 bp, Homo sapiens
aaatgggatggccac

SEQ ID NO: 79342 - DNA, 15 bp, Homo sapiens
aaaatgggatggcca

SEQ ID NO: 79343 - DNA, 15 bp, Homo sapiens
taaaatgggatggcc

SEQ ID NO: 79344 - DNA, 15 bp, Homo sapiens
gtaaaatgggatggc

SEQ ID NO: 79345 - DNA, 15 bp, Homo sapiens
tgtaaaatgggatgg

SEQ ID NO: 79346 - DNA, 15 bp, Homo sapiens
atgtaaaatgggatg

SEQ ID NO: 79347 - DNA, 15 bp, Homo sapiens
aatgtaaaatgggat

SEQ ID NO: 79348 - DNA, 15 bp, Homo sapiens
gaatgtaaaatggga

SEQ ID NO: 79349 - DNA, 15 bp, Homo sapiens
ggaatgtaaaatggg

SEQ ID NO: 79350 - DNA, 15 bp, Homo sapiens
aggaatgtaaaatgg

SEQ ID NO: 79351 - DNA, 15 bp, Homo sapiens
taggaatgtaaaatg

SEQ ID NO: 79352 - DNA, 15 bp, Homo sapiens
gtaggaatgtaaaat

SEQ ID NO: 79353 - DNA, 15 bp, Homo sapiens
ggtaggaatgtaaaa

SEQ ID NO: 79354 - DNA, 15 bp, Homo sapiens
tggtaggaatgtaaa

SEQ ID NO: 79355 - DNA, 15 bp, Homo sapiens
ctggtaggaatgtaa

SEQ ID NO: 79356 - DNA, 15 bp, Homo sapiens
gctggtaggaatgta

SEQ ID NO: 79357 - DNA, 15 bp, Homo sapiens
tgctggtaggaatgt

SEQ ID NO: 79358 - DNA, 15 bp, Homo sapiens
ttgctggtaggaatg

SEQ ID NO: 79359 - DNA, 15 bp, Homo sapiens
attgctggtaggaat

SEQ ID NO: 79360 - DNA, 15 bp, Homo sapiens
cattgctggtaggaa

SEQ ID NO: 79361 - DNA, 15 bp, Homo sapiens
acattgctggtagga

SEQ ID NO: 79362 - DNA, 15 bp, Homo sapiens
cacattgctggtagg

SEQ ID NO: 79363 - DNA, 15 bp, Homo sapiens
acacattgctggtag

SEQ ID NO: 79364 - DNA, 15 bp, Homo sapiens
tacacattgctggta

SEQ ID NO: 79365 - DNA, 15 bp, Homo sapiens
ttacacattgctggt

SEQ ID NO: 79366 - DNA, 15 bp, Homo sapiens
cttacacattgctgg

SEQ ID NO: 79367 - DNA, 15 bp, Homo sapiens
acttacacattgctg

SEQ ID NO: 79368 - DNA, 15 bp, Homo sapiens
cacttacacattgct

SEQ ID NO: 79369 - DNA, 15 bp, Homo sapiens
tcacttacacattgc

SEQ ID NO: 79370 - DNA, 15 bp, Homo sapiens
atcacttacacattg

SEQ ID NO: 79371 - DNA, 15 bp, Homo sapiens
catcacttacacatt

SEQ ID NO: 79372 - DNA, 15 bp, Homo sapiens
acatcacttacacat

SEQ ID NO: 79373 - DNA, 15 bp, Homo sapiens
tacatcacttacaca

SEQ ID NO: 79374 - DNA, 15 bp, Homo sapiens
ctacatcacttacac

SEQ ID NO: 79375 - DNA, 15 bp, Homo sapiens
actacatcacttaca

SEQ ID NO: 79376 - DNA, 15 bp, Homo sapiens
aactacatcacttac

SEQ ID NO: 79377 - DNA, 15 bp, Homo sapiens
aaactacatcactta

SEQ ID NO: 79378 - DNA, 15 bp, Homo sapiens
gaaactacatcactt

SEQ ID NO: 79379 - DNA, 15 bp, Homo sapiens
agaaactacatcact

SEQ ID NO: 79380 - DNA, 15 bp, Homo sapiens
gagaaactacatcac

SEQ ID NO: 79381 - DNA, 15 bp, Homo sapiens
agagaaactacatca

SEQ ID NO: 79382 - DNA, 15 bp, Homo sapiens
cagagaaactacatc

SEQ ID NO: 79383 - DNA, 15 bp, Homo sapiens
tcagagaaactacat

SEQ ID NO: 79384 - DNA, 15 bp, Homo sapiens
ttcagagaaactaca

SEQ ID NO: 79385 - DNA, 15 bp, Homo sapiens
attcagagaaactac

SEQ ID NO: 79386 - DNA, 15 bp, Homo sapiens
gattcagagaaacta

SEQ ID NO: 79387 - DNA, 15 bp, Homo sapiens
agattcagagaaact

SEQ ID NO: 79388 - DNA, 15 bp, Homo sapiens
aagattcagagaaac

SEQ ID NO: 79389 - DNA, 15 bp, Homo sapiens
aaagattcagagaaa

SEQ ID NO: 79390 - DNA, 15 bp, Homo sapiens
caaagattcagagaa

SEQ ID NO: 79391 - DNA, 15 bp, Homo sapiens
gcaaagattcagaga

SEQ ID NO: 79392 - DNA, 15 bp, Homo sapiens
ggcaaagattcagag

SEQ ID NO: 79393 - DNA, 15 bp, Homo sapiens
tggcaaagattcaga

SEQ ID NO: 79394 - DNA, 15 bp, Homo sapiens
ctggcaaagattcag

SEQ ID NO: 79395 - DNA, 15 bp, Homo sapiens
gctggcaaagattca

SEQ ID NO: 79396 - DNA, 15 bp, Homo sapiens
tgctggcaaagattc

SEQ ID NO: 79397 - DNA, 15 bp, Homo sapiens
atgctggcaaagatt

SEQ ID NO: 79398 - DNA, 15 bp, Homo sapiens
aatgctggcaaagat

SEQ ID NO: 79399 - DNA, 15 bp, Homo sapiens
aaatgctggcaaaga

SEQ ID NO: 79400 - DNA, 15 bp, Homo sapiens
taaatgctggcaaag

SEQ ID NO: 79401 - DNA, 15 bp, Homo sapiens
gtaaatgctggcaaa

SEQ ID NO: 79402 - DNA, 15 bp, Homo sapiens
agtaaatgctggcaa

SEQ ID NO: 79403 - DNA, 15 bp, Homo sapiens
cagtaaatgctggca

SEQ ID NO: 79404 - DNA, 15 bp, Homo sapiens
acagtaaatgctggc

SEQ ID NO: 79405 - DNA, 15 bp, Homo sapiens
aacagtaaatgctgg

SEQ ID NO: 79406 - DNA, 15 bp, Homo sapiens
caacagtaaatgctg

SEQ ID NO: 79407 - DNA, 15 bp, Homo sapiens
acaacagtaaatgct

SEQ ID NO: 79408 - DNA, 15 bp, Homo sapiens
gacaacagtaaatgc

SEQ ID NO: 79409 - DNA, 15 bp, Homo sapiens
tgacaacagtaaatg

SEQ ID NO: 79410 - DNA, 15 bp, Homo sapiens
atgacaacagtaaat

SEQ ID NO: 79411 - DNA, 15 bp, Homo sapiens
aatgacaacagtaaa

SEQ ID NO: 79412 - DNA, 15 bp, Homo sapiens
taatgacaacagtaa

SEQ ID NO: 79413 - DNA, 15 bp, Homo sapiens
ctaatgacaacagta

SEQ ID NO: 79414 - DNA, 15 bp, Homo sapiens
actaatgacaacagt

SEQ ID NO: 79415 - DNA, 15 bp, Homo sapiens
aactaatgacaacag

SEQ ID NO: 79416 - DNA, 15 bp, Homo sapiens
aaactaatgacaaca

SEQ ID NO: 79417 - DNA, 15 bp, Homo sapiens
aaaactaatgacaac

SEQ ID NO: 79418 - DNA, 15 bp, Homo sapiens
aaaaactaatgacaa

SEQ ID NO: 79419 - DNA, 15 bp, Homo sapiens
taaaaactaatgaca

SEQ ID NO: 79420 - DNA, 15 bp, Homo sapiens
ataaaaactaatgac

SEQ ID NO: 79421 - DNA, 15 bp, Homo sapiens
aataaaaactaatga

SEQ ID NO: 79422 - DNA, 15 bp, Homo sapiens
aaataaaaactaatg

SEQ ID NO: 79423 - DNA, 15 bp, Homo sapiens
aaaataaaaactaat

SEQ ID NO: 79424 - DNA, 15 bp, Homo sapiens
aaaaataaaaactaa

SEQ ID NO: 79425 - DNA, 15 bp, Homo sapiens
taaaaataaaaacta

SEQ ID NO: 79426 - DNA, 15 bp, Homo sapiens
gtaaaaataaaaact

SEQ ID NO: 79427 - DNA, 15 bp, Homo sapiens
ggtaaaaataaaaac

SEQ ID NO: 79428 - DNA, 15 bp, Homo sapiens
tggtaaaaataaaaa

SEQ ID NO: 79429 - DNA, 15 bp, Homo sapiens
gtggtaaaaataaaa

SEQ ID NO: 79430 - DNA, 15 bp, Homo sapiens
agtggtaaaaataaa

SEQ ID NO: 79431 - DNA, 15 bp, Homo sapiens
gagtggtaaaaataa

SEQ ID NO: 79432 - DNA, 15 bp, Homo sapiens
agagtggtaaaaata

SEQ ID NO: 79433 - DNA, 15 bp, Homo sapiens
cagagtggtaaaaat

SEQ ID NO: 79434 - DNA, 15 bp, Homo sapiens
tcagagtggtaaaaa

SEQ ID NO: 79435 - DNA, 15 bp, Homo sapiens
atcagagtggtaaaa

SEQ ID NO: 79436 - DNA, 15 bp, Homo sapiens
tatcagagtggtaaa

SEQ ID NO: 79437 - DNA, 15 bp, Homo sapiens
ttatcagagtggtaa

SEQ ID NO: 79438 - DNA, 15 bp, Homo sapiens
cttatcagagtggta

SEQ ID NO: 79439 - DNA, 15 bp, Homo sapiens
tcttatcagagtggt

SEQ ID NO: 79440 - DNA, 15 bp, Homo sapiens
ctcttatcagagtgg

SEQ ID NO: 79441 - DNA, 15 bp, Homo sapiens
actcttatcagagtg

SEQ ID NO: 79442 - DNA, 15 bp, Homo sapiens
cactcttatcagagt

SEQ ID NO: 79443 - DNA, 15 bp, Homo sapiens
acactcttatcagag

SEQ ID NO: 79444 - DNA, 15 bp, Homo sapiens
tacactcttatcaga

SEQ ID NO: 79445 - DNA, 15 bp, Homo sapiens
ctacactcttatcag

SEQ ID NO: 79446 - DNA, 15 bp, Homo sapiens
actacactcttatca

SEQ ID NO: 79447 - DNA, 15 bp, Homo sapiens
cactacactcttatc

SEQ ID NO: 79448 - DNA, 15 bp, Homo sapiens
tcactacactcttat

SEQ ID NO: 79449 - DNA, 15 bp, Homo sapiens
atcactacactctta

SEQ ID NO: 79450 - DNA, 15 bp, Homo sapiens
tatcactacactctt

SEQ ID NO: 79451 - DNA, 15 bp, Homo sapiens
gtatcactacactct

SEQ ID NO: 79452 - DNA, 15 bp, Homo sapiens
tgtatcactacactc

SEQ ID NO: 79453 - DNA, 15 bp, Homo sapiens
atgtatcactacact

SEQ ID NO: 79454 - DNA, 15 bp, Homo sapiens
gatgtatcactacac

SEQ ID NO: 79455 - DNA, 15 bp, Homo sapiens
tgatgtatcactaca

SEQ ID NO: 79456 - DNA, 15 bp, Homo sapiens
gtgatgtatcactac

SEQ ID NO: 79457 - DNA, 15 bp, Homo sapiens
agtgatgtatcacta

SEQ ID NO: 79458 - DNA, 15 bp, Homo sapiens
cagtgatgtatcact

SEQ ID NO: 79459 - DNA, 15 bp, Homo sapiens
acagtgatgtatcac

SEQ ID NO: 79460 - DNA, 15 bp, Homo sapiens
cacagtgatgtatca

SEQ ID NO: 79461 - DNA, 15 bp, Homo sapiens
ccacagtgatgtatc

SEQ ID NO: 79462 - DNA, 15 bp, Homo sapiens
gccacagtgatgtat

SEQ ID NO: 79463 - DNA, 15 bp, Homo sapiens
agccacagtgatgta

SEQ ID NO: 79464 - DNA, 15 bp, Homo sapiens
aagccacagtgatgt

SEQ ID NO: 79465 - DNA, 15 bp, Homo sapiens
aaagccacagtgatg

SEQ ID NO: 79466 - DNA, 15 bp, Homo sapiens
taaagccacagtgat

SEQ ID NO: 79467 - DNA, 15 bp, Homo sapiens
ttaaagccacagtga

SEQ ID NO: 79468 - DNA, 15 bp, Homo sapiens
attaaagccacagtg

SEQ ID NO: 79469 - DNA, 15 bp, Homo sapiens
tattaaagccacagt

SEQ ID NO: 79470 - DNA, 15 bp, Homo sapiens
atattaaagccacag

SEQ ID NO: 79471 - DNA, 15 bp, Homo sapiens
catattaaagccaca

SEQ ID NO: 79472 - DNA, 15 bp, Homo sapiens
gcatattaaagccac

SEQ ID NO: 79473 - DNA, 15 bp, Homo sapiens
tgcatattaaagcca

SEQ ID NO: 79474 - DNA, 15 bp, Homo sapiens
atgcatattaaagcc

SEQ ID NO: 79475 - DNA, 15 bp, Homo sapiens
aatgcatattaaagc

SEQ ID NO: 79476 - DNA, 15 bp, Homo sapiens
aaatgcatattaaag

SEQ ID NO: 79477 - DNA, 15 bp, Homo sapiens
gaaatgcatattaaa

SEQ ID NO: 79478 - DNA, 15 bp, Homo sapiens
ggaaatgcatattaa

SEQ ID NO: 79479 - DNA, 15 bp, Homo sapiens
gggaaatgcatatta

SEQ ID NO: 79480 - DNA, 15 bp, Homo sapiens
tgggaaatgcatatt

SEQ ID NO: 79481 - DNA, 15 bp, Homo sapiens
ttgggaaatgcatat

SEQ ID NO: 79482 - DNA, 15 bp, Homo sapiens
attgggaaatgcata

SEQ ID NO: 79483 - DNA, 15 bp, Homo sapiens
cattgggaaatgcat

SEQ ID NO: 79484 - DNA, 15 bp, Homo sapiens
ccattgggaaatgca

SEQ ID NO: 79485 - DNA, 15 bp, Homo sapiens
gccattgggaaatgc

SEQ ID NO: 79486 - DNA, 15 bp, Homo sapiens
tgccattgggaaatg

SEQ ID NO: 79487 - DNA, 15 bp, Homo sapiens
ttgccattgggaaat

SEQ ID NO: 79488 - DNA, 15 bp, Homo sapiens
tttgccattgggaaa

SEQ ID NO: 79489 - DNA, 15 bp, Homo sapiens
atttgccattgggaa

SEQ ID NO: 79490 - DNA, 15 bp, Homo sapiens
catttgccattggga

SEQ ID NO: 79491 - DNA, 15 bp, Homo sapiens
tcatttgccattggg

SEQ ID NO: 79492 - DNA, 15 bp, Homo sapiens
atcatttgccattgg

SEQ ID NO: 79493 - DNA, 15 bp, Homo sapiens
catcatttgccattg

SEQ ID NO: 79494 - DNA, 15 bp, Homo sapiens
acatcatttgccatt

SEQ ID NO: 79495 - DNA, 15 bp, Homo sapiens
aacatcatttgccat

SEQ ID NO: 79496 - DNA, 15 bp, Homo sapiens
caacatcatttgcca

SEQ ID NO: 79497 - DNA, 15 bp, Homo sapiens
tcaacatcatttgcc

SEQ ID NO: 79498 - DNA, 15 bp, Homo sapiens
ttcaacatcatttgc

SEQ ID NO: 79499 - DNA, 15 bp, Homo sapiens
gttcaacatcatttg

SEQ ID NO: 79500 - DNA, 15 bp, Homo sapiens
tgttcaacatcattt

SEQ ID NO: 79501 - DNA, 15 bp, Homo sapiens
atgttcaacatcatt

SEQ ID NO: 79502 - DNA, 15 bp, Homo sapiens
tatgttcaacatcat

SEQ ID NO: 79503 - DNA, 15 bp, Homo sapiens
ctatgttcaacatca

SEQ ID NO: 79504 - DNA, 15 bp, Homo sapiens
actatgttcaacatc

SEQ ID NO: 79505 - DNA, 15 bp, Homo sapiens
aactatgttcaacat

SEQ ID NO: 79506 - DNA, 15 bp, Homo sapiens
aaactatgttcaaca

SEQ ID NO: 79507 - DNA, 15 bp, Homo sapiens
aaaactatgttcaac

SEQ ID NO: 79508 - DNA, 15 bp, Homo sapiens
aaaaactatgttcaa

SEQ ID NO: 79509 - DNA, 15 bp, Homo sapiens
aaaaaactatgttca

SEQ ID NO: 79510 - DNA, 15 bp, Homo sapiens
taaaaaactatgttc

SEQ ID NO: 79511 - DNA, 15 bp, Homo sapiens
ataaaaaactatgtt

SEQ ID NO: 79512 - DNA, 15 bp, Homo sapiens
tataaaaaactatgt

SEQ ID NO: 79513 - DNA, 15 bp, Homo sapiens
atataaaaaactatg

SEQ ID NO: 79514 - DNA, 15 bp, Homo sapiens
catataaaaaactat

SEQ ID NO: 79515 - DNA, 15 bp, Homo sapiens
gcatataaaaaacta

SEQ ID NO: 79516 - DNA, 15 bp, Homo sapiens
agcatataaaaaact

SEQ ID NO: 79517 - DNA, 15 bp, Homo sapiens
aagcatataaaaaac

SEQ ID NO: 79518 - DNA, 15 bp, Homo sapiens
taagcatataaaaaa

SEQ ID NO: 79519 - DNA, 15 bp, Homo sapiens
ataagcatataaaaa

SEQ ID NO: 79520 - DNA, 15 bp, Homo sapiens
aataagcatataaaa

SEQ ID NO: 79521 - DNA, 15 bp, Homo sapiens
aaataagcatataaa

SEQ ID NO: 79522 - DNA, 15 bp, Homo sapiens
taaataagcatataa

SEQ ID NO: 79523 - DNA, 15 bp, Homo sapiens
gtaaataagcatata

SEQ ID NO: 79524 - DNA, 15 bp, Homo sapiens
ggtaaataagcatat

SEQ ID NO: 79525 - DNA, 15 bp, Homo sapiens
tggtaaataagcata

SEQ ID NO: 79526 - DNA, 15 bp, Homo sapiens
atggtaaataagcat

SEQ ID NO: 79527 - DNA, 15 bp, Homo sapiens
gatggtaaataagca

SEQ ID NO: 79528 - DNA, 15 bp, Homo sapiens
agatggtaaataagc

SEQ ID NO: 79529 - DNA, 15 bp, Homo sapiens
tagatggtaaataag

SEQ ID NO: 79530 - DNA, 15 bp, Homo sapiens
atagatggtaaataa

SEQ ID NO: 79531 - DNA, 15 bp, Homo sapiens
tatagatggtaaata

SEQ ID NO: 79532 - DNA, 15 bp, Homo sapiens
atatagatggtaaat

SEQ ID NO: 79533 - DNA, 15 bp, Homo sapiens
tatatagatggtaaa

SEQ ID NO: 79534 - DNA, 15 bp, Homo sapiens
atatatagatggtaa

SEQ ID NO: 79535 - DNA, 15 bp, Homo sapiens
gatatatagatggta

SEQ ID NO: 79536 - DNA, 15 bp, Homo sapiens
ggatatatagatggt

SEQ ID NO: 79537 - DNA, 15 bp, Homo sapiens
aggatatatagatgg

SEQ ID NO: 79538 - DNA, 15 bp, Homo sapiens
gaggatatatagatg

SEQ ID NO: 79539 - DNA, 15 bp, Homo sapiens
agaggatatatagat

SEQ ID NO: 79540 - DNA, 15 bp, Homo sapiens
aagaggatatataga

SEQ ID NO: 79541 - DNA, 15 bp, Homo sapiens
caagaggatatatag

SEQ ID NO: 79542 - DNA, 15 bp, Homo sapiens
ccaagaggatatata

SEQ ID NO: 79543 - DNA, 15 bp, Homo sapiens
accaagaggatatat

SEQ ID NO: 79544 - DNA, 15 bp, Homo sapiens
caccaagaggatata

SEQ ID NO: 79545 - DNA, 15 bp, Homo sapiens
tcaccaagaggatat

SEQ ID NO: 79546 - DNA, 15 bp, Homo sapiens
ttcaccaagaggata

SEQ ID NO: 79547 - DNA, 15 bp, Homo sapiens
tttcaccaagaggat

SEQ ID NO: 79548 - DNA, 15 bp, Homo sapiens
atttcaccaagagga

SEQ ID NO: 79549 - DNA, 15 bp, Homo sapiens
catttcaccaagagg

SEQ ID NO: 79550 - DNA, 15 bp, Homo sapiens
acatttcaccaagag

SEQ ID NO: 79551 - DNA, 15 bp, Homo sapiens
gacatttcaccaaga

SEQ ID NO: 79552 - DNA, 15 bp, Homo sapiens
agacatttcaccaag

SEQ ID NO: 79553 - DNA, 15 bp, Homo sapiens
gagacatttcaccaa

SEQ ID NO: 79554 - DNA, 15 bp, Homo sapiens
ggagacatttcacca

SEQ ID NO: 79555 - DNA, 15 bp, Homo sapiens
tggagacatttcacc

SEQ ID NO: 79556 - DNA, 15 bp, Homo sapiens
atggagacatttcac

SEQ ID NO: 79557 - DNA, 15 bp, Homo sapiens
catggagacatttca

SEQ ID NO: 79558 - DNA, 15 bp, Homo sapiens
acatggagacatttc

SEQ ID NO: 79559 - DNA, 15 bp, Homo sapiens
aacatggagacattt

SEQ ID NO: 79560 - DNA, 15 bp, Homo sapiens
caacatggagacatt

SEQ ID NO: 79561 - DNA, 15 bp, Homo sapiens
acaacatggagacat

SEQ ID NO: 79562 - DNA, 15 bp, Homo sapiens
aacaacatggagaca

SEQ ID NO: 79563 - DNA, 15 bp, Homo sapiens
aaacaacatggagac

SEQ ID NO: 79564 - DNA, 15 bp, Homo sapiens
caaacaacatggaga

SEQ ID NO: 79565 - DNA, 15 bp, Homo sapiens
gcaaacaacatggag

SEQ ID NO: 79566 - DNA, 15 bp, Homo sapiens
ggcaaacaacatgga

SEQ ID NO: 79567 - DNA, 15 bp, Homo sapiens
gggcaaacaacatgg

SEQ ID NO: 79568 - DNA, 15 bp, Homo sapiens
tgggcaaacaacatg

SEQ ID NO: 79569 - DNA, 15 bp, Homo sapiens
atgggcaaacaacat

SEQ ID NO: 79570 - DNA, 15 bp, Homo sapiens
tatgggcaaacaaca

SEQ ID NO: 79571 - DNA, 15 bp, Homo sapiens
atatgggcaaacaac

SEQ ID NO: 79572 - DNA, 15 bp, Homo sapiens
aatatgggcaaacaa

SEQ ID NO: 79573 - DNA, 15 bp, Homo sapiens
gaatatgggcaaaca

SEQ ID NO: 79574 - DNA, 15 bp, Homo sapiens
agaatatgggcaaac

SEQ ID NO: 79575 - DNA, 15 bp, Homo sapiens
tagaatatgggcaaa

SEQ ID NO: 79576 - DNA, 15 bp, Homo sapiens
ttagaatatgggcaa

SEQ ID NO: 79577 - DNA, 15 bp, Homo sapiens
attagaatatgggca

SEQ ID NO: 79578 - DNA, 15 bp, Homo sapiens
aattagaatatgggc

SEQ ID NO: 79579 - DNA, 15 bp, Homo sapiens
caattagaatatggg

SEQ ID NO: 79580 - DNA, 15 bp, Homo sapiens
ccaattagaatatgg

SEQ ID NO: 79581 - DNA, 15 bp, Homo sapiens
tccaattagaatatg

SEQ ID NO: 79582 - DNA, 15 bp, Homo sapiens
atccaattagaatat

SEQ ID NO: 79583 - DNA, 15 bp, Homo sapiens
aatccaattagaata

SEQ ID NO: 79584 - DNA, 15 bp, Homo sapiens
aaatccaattagaat

SEQ ID NO: 79585 - DNA, 15 bp, Homo sapiens
aaaatccaattagaa

SEQ ID NO: 79586 - DNA, 15 bp, Homo sapiens
aaaaatccaattaga

SEQ ID NO: 79587 - DNA, 15 bp, Homo sapiens
taaaaatccaattag

SEQ ID NO: 79588 - DNA, 15 bp, Homo sapiens
ataaaaatccaatta

SEQ ID NO: 79589 - DNA, 15 bp, Homo sapiens
gataaaaatccaatt

SEQ ID NO: 79590 - DNA, 15 bp, Homo sapiens
agataaaaatccaat

SEQ ID NO: 79591 - DNA, 15 bp, Homo sapiens
aagataaaaatccaa

SEQ ID NO: 79592 - DNA, 15 bp, Homo sapiens
aaagataaaaatcca

SEQ ID NO: 79593 - DNA, 15 bp, Homo sapiens
aaaagataaaaatcc

SEQ ID NO: 79594 - DNA, 15 bp, Homo sapiens
taaaagataaaaatc

SEQ ID NO: 79595 - DNA, 15 bp, Homo sapiens
gtaaaagataaaaat

SEQ ID NO: 79596 - DNA, 15 bp, Homo sapiens
agtaaaagataaaaa

SEQ ID NO: 79597 - DNA, 15 bp, Homo sapiens
cagtaaaagataaaa

SEQ ID NO: 79598 - DNA, 15 bp, Homo sapiens
gcagtaaaagataaa

SEQ ID NO: 79599 - DNA, 15 bp, Homo sapiens
agcagtaaaagataa

SEQ ID NO: 79600 - DNA, 15 bp, Homo sapiens
cagcagtaaaagata

SEQ ID NO: 79601 - DNA, 15 bp, Homo sapiens
tcagcagtaaaagat

SEQ ID NO: 79602 - DNA, 15 bp, Homo sapiens
ctcagcagtaaaaga

SEQ ID NO: 79603 - DNA, 15 bp, Homo sapiens
actcagcagtaaaag

SEQ ID NO: 79604 - DNA, 15 bp, Homo sapiens
aactcagcagtaaaa

SEQ ID NO: 79605 - DNA, 15 bp, Homo sapiens
aaactcagcagtaaa

SEQ ID NO: 79606 - DNA, 15 bp, Homo sapiens
aaaactcagcagtaa

SEQ ID NO: 79607 - DNA, 15 bp, Homo sapiens
gaaaactcagcagta

SEQ ID NO: 79608 - DNA, 15 bp, Homo sapiens
tgaaaactcagcagt

SEQ ID NO: 79609 - DNA, 15 bp, Homo sapiens
ctgaaaactcagcag

SEQ ID NO: 79610 - DNA, 15 bp, Homo sapiens
tctgaaaactcagca

SEQ ID NO: 79611 - DNA, 15 bp, Homo sapiens
ttctgaaaactcagc

SEQ ID NO: 79612 - DNA, 15 bp, Homo sapiens
cttctgaaaactcag

SEQ ID NO: 79613 - DNA, 15 bp, Homo sapiens
acttctgaaaactca

SEQ ID NO: 79614 - DNA, 15 bp, Homo sapiens
aacttctgaaaactc

SEQ ID NO: 79615 - DNA, 15 bp, Homo sapiens
aaacttctgaaaact

SEQ ID NO: 79616 - DNA, 15 bp, Homo sapiens
aaaacttctgaaaac

SEQ ID NO: 79617 - DNA, 15 bp, Homo sapiens
aaaaacttctgaaaa

SEQ ID NO: 79618 - DNA, 15 bp, Homo sapiens
aaaaaacttctgaaa

SEQ ID NO: 79619 - DNA, 15 bp, Homo sapiens
aaaaaaacttctgaa

SEQ ID NO: 79620 - DNA, 15 bp, Homo sapiens
aaaaaaaacttctga

SEQ ID NO: 79621 - DNA, 15 bp, Homo sapiens
caaaaaaaacttctg

SEQ ID NO: 79622 - DNA, 15 bp, Homo sapiens
acaaaaaaaacttct

SEQ ID NO: 79623 - DNA, 15 bp, Homo sapiens
aacaaaaaaaacttc

SEQ ID NO: 79624 - DNA, 15 bp, Homo sapiens
aaacaaaaaaaactt

SEQ ID NO: 79625 - DNA, 15 bp, Homo sapiens
caaacaaaaaaaact

SEQ ID NO: 79626 - DNA, 15 bp, Homo sapiens
acaaacaaaaaaaac

SEQ ID NO: 79627 - DNA, 15 bp, Homo sapiens
aacaaacaaaaaaaa

SEQ ID NO: 79628 - DNA, 15 bp, Homo sapiens
aaacaaacaaaaaaa

SEQ ID NO: 79629 - DNA, 15 bp, Homo sapiens
caaacaaacaaaaaa

SEQ ID NO: 79630 - DNA, 15 bp, Homo sapiens
acaaacaaacaaaaa

SEQ ID NO: 79631 - DNA, 15 bp, Homo sapiens
aacaaacaaacaaaa

SEQ ID NO: 79632 - DNA, 15 bp, Homo sapiens
aaacaaacaaacaaa

SEQ ID NO: 79633 - DNA, 15 bp, Homo sapiens
taaacaaacaaacaa

SEQ ID NO: 79634 - DNA, 15 bp, Homo sapiens
ttaaacaaacaaaca

SEQ ID NO: 79635 - DNA, 15 bp, Homo sapiens
gttaaacaaacaaac

SEQ ID NO: 79636 - DNA, 15 bp, Homo sapiens
tgttaaacaaacaaa

SEQ ID NO: 79637 - DNA, 15 bp, Homo sapiens
atgttaaacaaacaa

SEQ ID NO: 79638 - DNA, 15 bp, Homo sapiens
tatgttaaacaaaca

SEQ ID NO: 79639 - DNA, 15 bp, Homo sapiens
atatgttaaacaaac

SEQ ID NO: 79640 - DNA, 15 bp, Homo sapiens
aatatgttaaacaaa

SEQ ID NO: 79641 - DNA, 15 bp, Homo sapiens
caatatgttaaacaa

SEQ ID NO: 79642 - DNA, 15 bp, Homo sapiens
acaatatgttaaaca

SEQ ID NO: 79643 - DNA, 15 bp, Homo sapiens
tacaatatgttaaac

SEQ ID NO: 79644 - DNA, 15 bp, Homo sapiens
ttacaatatgttaaa

SEQ ID NO: 79645 - DNA, 15 bp, Homo sapiens
attacaatatgttaa

SEQ ID NO: 79646 - DNA, 15 bp, Homo sapiens
aattacaatatgtta

SEQ ID NO: 79647 - DNA, 15 bp, Homo sapiens
taattacaatatgtt

SEQ ID NO: 79648 - DNA, 15 bp, Homo sapiens
gtaattacaatatgt

SEQ ID NO: 79649 - DNA, 15 bp, Homo sapiens
agtaattacaatatg

SEQ ID NO: 79650 - DNA, 15 bp, Homo sapiens
cagtaattacaatat

SEQ ID NO: 79651 - DNA, 15 bp, Homo sapiens
acagtaattacaata

SEQ ID NO: 79652 - DNA, 15 bp, Homo sapiens
aacagtaattacaat

SEQ ID NO: 79653 - DNA, 15 bp, Homo sapiens
caacagtaattacaa

SEQ ID NO: 79654 - DNA, 15 bp, Homo sapiens
ccaacagtaattaca

SEQ ID NO: 79655 - DNA, 15 bp, Homo sapiens
tccaacagtaattac

SEQ ID NO: 79656 - DNA, 15 bp, Homo sapiens
atccaacagtaatta

SEQ ID NO: 79657 - DNA, 15 bp, Homo sapiens
tatccaacagtaatt

SEQ ID NO: 79658 - DNA, 15 bp, Homo sapiens
atatccaacagtaat

SEQ ID NO: 79659 - DNA, 15 bp, Homo sapiens
catatccaacagtaa

SEQ ID NO: 79660 - DNA, 15 bp, Homo sapiens
acatatccaacagta

SEQ ID NO: 79661 - DNA, 15 bp, Homo sapiens
tacatatccaacagt

SEQ ID NO: 79662 - DNA, 15 bp, Homo sapiens
ctacatatccaacag

SEQ ID NO: 79663 - DNA, 15 bp, Homo sapiens
actacatatccaaca

SEQ ID NO: 79664 - DNA, 15 bp, Homo sapiens
aactacatatccaac

SEQ ID NO: 79665 - DNA, 15 bp, Homo sapiens
aaactacatatccaa

SEQ ID NO: 79666 - DNA, 15 bp, Homo sapiens
caaactacatatcca

SEQ ID NO: 79667 - DNA, 15 bp, Homo sapiens
acaaactacatatcc

SEQ ID NO: 79668 - DNA, 15 bp, Homo sapiens
tacaaactacatatc

SEQ ID NO: 79669 - DNA, 15 bp, Homo sapiens
ttacaaactacatat

SEQ ID NO: 79670 - DNA, 15 bp, Homo sapiens
tttacaaactacata

SEQ ID NO: 79671 - DNA, 15 bp, Homo sapiens
atttacaaactacat

SEQ ID NO: 79672 - DNA, 15 bp, Homo sapiens
catttacaaactaca

SEQ ID NO: 79673 - DNA, 15 bp, Homo sapiens
acatttacaaactac

SEQ ID NO: 79674 - DNA, 15 bp, Homo sapiens
aacatttacaaacta

SEQ ID NO: 79675 - DNA, 15 bp, Homo sapiens
aaacatttacaaact

SEQ ID NO: 79676 - DNA, 15 bp, Homo sapiens
aaaacatttacaaac

SEQ ID NO: 79677 - DNA, 15 bp, Homo sapiens
gaaaacatttacaaa

SEQ ID NO: 79678 - DNA, 15 bp, Homo sapiens
agaaaacatttacaa

SEQ ID NO: 79679 - DNA, 15 bp, Homo sapiens
gagaaaacatttaca

SEQ ID NO: 79680 - DNA, 15 bp, Homo sapiens
ggagaaaacatttac

SEQ ID NO: 79681 - DNA, 15 bp, Homo sapiens
gggagaaaacattta

SEQ ID NO: 79682 - DNA, 15 bp, Homo sapiens
tgggagaaaacattt

SEQ ID NO: 79683 - DNA, 15 bp, Homo sapiens
ctgggagaaaacatt

SEQ ID NO: 79684 - DNA, 15 bp, Homo sapiens
actgggagaaaacat

SEQ ID NO: 79685 - DNA, 15 bp, Homo sapiens
gactgggagaaaaca

SEQ ID NO: 79686 - DNA, 15 bp, Homo sapiens
agactgggagaaaac

SEQ ID NO: 79687 - DNA, 15 bp, Homo sapiens
cagactgggagaaaa

SEQ ID NO: 79688 - DNA, 15 bp, Homo sapiens
acagactgggagaaa

SEQ ID NO: 79689 - DNA, 15 bp, Homo sapiens
tacagactgggagaa

SEQ ID NO: 79690 - DNA, 15 bp, Homo sapiens
ctacagactgggaga

SEQ ID NO: 79691 - DNA, 15 bp, Homo sapiens
gctacagactgggag

SEQ ID NO: 79692 - DNA, 15 bp, Homo sapiens
agctacagactggga

SEQ ID NO: 79693 - DNA, 15 bp, Homo sapiens
aagctacagactggg

SEQ ID NO: 79694 - DNA, 15 bp, Homo sapiens
caagctacagactgg

SEQ ID NO: 79695 - DNA, 15 bp, Homo sapiens
acaagctacagactg

SEQ ID NO: 79696 - DNA, 15 bp, Homo sapiens
aacaagctacagact

SEQ ID NO: 79697 - DNA, 15 bp, Homo sapiens
aaacaagctacagac

SEQ ID NO: 79698 - DNA, 15 bp, Homo sapiens
taaacaagctacaga

SEQ ID NO: 79699 - DNA, 15 bp, Homo sapiens
ataaacaagctacag

SEQ ID NO: 79700 - DNA, 15 bp, Homo sapiens
aataaacaagctaca

SEQ ID NO: 79701 - DNA, 15 bp, Homo sapiens
gaataaacaagctac

SEQ ID NO: 79702 - DNA, 15 bp, Homo sapiens
tgaataaacaagcta

SEQ ID NO: 79703 - DNA, 15 bp, Homo sapiens
atgaataaacaagct

SEQ ID NO: 79704 - DNA, 15 bp, Homo sapiens
gatgaataaacaagc

SEQ ID NO: 79705 - DNA, 15 bp, Homo sapiens
ggatgaataaacaag

SEQ ID NO: 79706 - DNA, 15 bp, Homo sapiens
aggatgaataaacaa

SEQ ID NO: 79707 - DNA, 15 bp, Homo sapiens
taggatgaataaaca

SEQ ID NO: 79708 - DNA, 15 bp, Homo sapiens
ataggatgaataaac

SEQ ID NO: 79709 - DNA, 15 bp, Homo sapiens
tataggatgaataaa

SEQ ID NO: 79710 - DNA, 15 bp, Homo sapiens
ttataggatgaataa

SEQ ID NO: 79711 - DNA, 15 bp, Homo sapiens
cttataggatgaata

SEQ ID NO: 79712 - DNA, 15 bp, Homo sapiens
tcttataggatgaat

SEQ ID NO: 79713 - DNA, 15 bp, Homo sapiens
ttcttataggatgaa

SEQ ID NO: 79714 - DNA, 15 bp, Homo sapiens
cttcttataggatga

SEQ ID NO: 79715 - DNA, 15 bp, Homo sapiens
ccttcttataggatg

SEQ ID NO: 79716 - DNA, 15 bp, Homo sapiens
accttcttataggat

SEQ ID NO: 79717 - DNA, 15 bp, Homo sapiens
gaccttcttatagga

SEQ ID NO: 79718 - DNA, 15 bp, Homo sapiens
agaccttcttatagg

SEQ ID NO: 79719 - DNA, 15 bp, Homo sapiens
aagaccttcttatag

SEQ ID NO: 79720 - DNA, 15 bp, Homo sapiens
aaagaccttcttata

SEQ ID NO: 79721 - DNA, 15 bp, Homo sapiens
caaagaccttcttat

SEQ ID NO: 79722 - DNA, 15 bp, Homo sapiens
gcaaagaccttctta

SEQ ID NO: 79723 - DNA, 15 bp, Homo sapiens
tgcaaagaccttctt

SEQ ID NO: 79724 - DNA, 15 bp, Homo sapiens
ctgcaaagaccttct

SEQ ID NO: 79725 - DNA, 15 bp, Homo sapiens
tctgcaaagaccttc

SEQ ID NO: 79726 - DNA, 15 bp, Homo sapiens
ctctgcaaagacctt

SEQ ID NO: 79727 - DNA, 15 bp, Homo sapiens
gctctgcaaagacct

SEQ ID NO: 79728 - DNA, 15 bp, Homo sapiens
tgctctgcaaagacc

SEQ ID NO: 79729 - DNA, 15 bp, Homo sapiens
ttgctctgcaaagac

SEQ ID NO: 79730 - DNA, 15 bp, Homo sapiens
tttgctctgcaaaga

SEQ ID NO: 79731 - DNA, 15 bp, Homo sapiens
ttttgctctgcaaag

SEQ ID NO: 79732 - DNA, 15 bp, Homo sapiens
cttttgctctgcaaa

SEQ ID NO: 79733 - DNA, 15 bp, Homo sapiens
acttttgctctgcaa

SEQ ID NO: 79734 - DNA, 15 bp, Homo sapiens
aacttttgctctgca

SEQ ID NO: 79735 - DNA, 15 bp, Homo sapiens
aaacttttgctctgc

SEQ ID NO: 79736 - DNA, 15 bp, Homo sapiens
aaaacttttgctctg

SEQ ID NO: 79737 - DNA, 15 bp, Homo sapiens
taaaacttttgctct

SEQ ID NO: 79738 - DNA, 15 bp, Homo sapiens
gtaaaacttttgctc

SEQ ID NO: 79739 - DNA, 15 bp, Homo sapiens
agtaaaacttttgct

SEQ ID NO: 79740 - DNA, 15 bp, Homo sapiens
aagtaaaacttttgc

SEQ ID NO: 79741 - DNA, 15 bp, Homo sapiens
aaagtaaaacttttg

SEQ ID NO: 79742 - DNA, 15 bp, Homo sapiens
aaaagtaaaactttt

SEQ ID NO: 79743 - DNA, 15 bp, Homo sapiens
caaaagtaaaacttt

SEQ ID NO: 79744 - DNA, 15 bp, Homo sapiens
tcaaaagtaaaactt

SEQ ID NO: 79745 - DNA, 15 bp, Homo sapiens
atcaaaagtaaaact

SEQ ID NO: 79746 - DNA, 15 bp, Homo sapiens
catcaaaagtaaaac

SEQ ID NO: 79747 - DNA, 15 bp, Homo sapiens
tcatcaaaagtaaaa

SEQ ID NO: 79748 - DNA, 15 bp, Homo sapiens
ctcatcaaaagtaaa

SEQ ID NO: 79749 - DNA, 15 bp, Homo sapiens
cctcatcaaaagtaa

SEQ ID NO: 79750 - DNA, 15 bp, Homo sapiens
acctcatcaaaagta

SEQ ID NO: 79751 - DNA, 15 bp, Homo sapiens
gacctcatcaaaagt

SEQ ID NO: 79752 - DNA, 15 bp, Homo sapiens
ggacctcatcaaaag

SEQ ID NO: 79753 - DNA, 15 bp, Homo sapiens
tggacctcatcaaaa

SEQ ID NO: 79754 - DNA, 15 bp, Homo sapiens
ttggacctcatcaaa

SEQ ID NO: 79755 - DNA, 15 bp, Homo sapiens
attggacctcatcaa

SEQ ID NO: 79756 - DNA, 15 bp, Homo sapiens
aattggacctcatca

SEQ ID NO: 79757 - DNA, 15 bp, Homo sapiens
aaattggacctcatc

SEQ ID NO: 79758 - DNA, 15 bp, Homo sapiens
taaattggacctcat

SEQ ID NO: 79759 - DNA, 15 bp, Homo sapiens
gtaaattggacctca

SEQ ID NO: 79760 - DNA, 15 bp, Homo sapiens
ggtaaattggacctc

SEQ ID NO: 79761 - DNA, 15 bp, Homo sapiens
tggtaaattggacct

SEQ ID NO: 79762 - DNA, 15 bp, Homo sapiens
ttggtaaattggacc

SEQ ID NO: 79763 - DNA, 15 bp, Homo sapiens
attggtaaattggac

SEQ ID NO: 79764 - DNA, 15 bp, Homo sapiens
aattggtaaattgga

SEQ ID NO: 79765 - DNA, 15 bp, Homo sapiens
gaattggtaaattgg

SEQ ID NO: 79766 - DNA, 15 bp, Homo sapiens
agaattggtaaattg

SEQ ID NO: 79767 - DNA, 15 bp, Homo sapiens
aagaattggtaaatt

SEQ ID NO: 79768 - DNA, 15 bp, Homo sapiens
gaagaattggtaaat

SEQ ID NO: 79769 - DNA, 15 bp, Homo sapiens
ggaagaattggtaaa

SEQ ID NO: 79770 - DNA, 15 bp, Homo sapiens
aggaagaattggtaa

SEQ ID NO: 79771 - DNA, 15 bp, Homo sapiens
aaggaagaattggta

SEQ ID NO: 79772 - DNA, 15 bp, Homo sapiens
aaaggaagaattggt

SEQ ID NO: 79773 - DNA, 15 bp, Homo sapiens
aaaaggaagaattgg

SEQ ID NO: 79774 - DNA, 15 bp, Homo sapiens
taaaaggaagaattg

SEQ ID NO: 79775 - DNA, 15 bp, Homo sapiens
ataaaaggaagaatt

SEQ ID NO: 79776 - DNA, 15 bp, Homo sapiens
cataaaaggaagaat

SEQ ID NO: 79777 - DNA, 15 bp, Homo sapiens
ccataaaaggaagaa

SEQ ID NO: 79778 - DNA, 15 bp, Homo sapiens
tccataaaaggaaga

SEQ ID NO: 79779 - DNA, 15 bp, Homo sapiens
atccataaaaggaag

SEQ ID NO: 79780 - DNA, 15 bp, Homo sapiens
aatccataaaaggaa

SEQ ID NO: 79781 - DNA, 15 bp, Homo sapiens
taatccataaaagga

SEQ ID NO: 79782 - DNA, 15 bp, Homo sapiens
ataatccataaaagg

SEQ ID NO: 79783 - DNA, 15 bp, Homo sapiens
cataatccataaaag

SEQ ID NO: 79784 - DNA, 15 bp, Homo sapiens
gcataatccataaaa

SEQ ID NO: 79785 - DNA, 15 bp, Homo sapiens
agcataatccataaa

SEQ ID NO: 79786 - DNA, 15 bp, Homo sapiens
aagcataatccataa

SEQ ID NO: 79787 - DNA, 15 bp, Homo sapiens
aaagcataatccata

SEQ ID NO: 79788 - DNA, 15 bp, Homo sapiens
gaaagcataatccat

SEQ ID NO: 79789 - DNA, 15 bp, Homo sapiens
tgaaagcataatcca

SEQ ID NO: 79790 - DNA, 15 bp, Homo sapiens
ctgaaagcataatcc

SEQ ID NO: 79791 - DNA, 15 bp, Homo sapiens
actgaaagcataatc

SEQ ID NO: 79792 - DNA, 15 bp, Homo sapiens
cactgaaagcataat

SEQ ID NO: 79793 - DNA, 15 bp, Homo sapiens
acactgaaagcataa

SEQ ID NO: 79794 - DNA, 15 bp, Homo sapiens
gacactgaaagcata

SEQ ID NO: 79795 - DNA, 15 bp, Homo sapiens
tgacactgaaagcat

SEQ ID NO: 79796 - DNA, 15 bp, Homo sapiens
ttgacactgaaagca

SEQ ID NO: 79797 - DNA, 15 bp, Homo sapiens
cttgacactgaaagc

SEQ ID NO: 79798 - DNA, 15 bp, Homo sapiens
acttgacactgaaag

SEQ ID NO: 79799 - DNA, 15 bp, Homo sapiens
gacttgacactgaaa

SEQ ID NO: 79800 - DNA, 15 bp, Homo sapiens
agacttgacactgaa

SEQ ID NO: 79801 - DNA, 15 bp, Homo sapiens
tagacttgacactga

SEQ ID NO: 79802 - DNA, 15 bp, Homo sapiens
ttagacttgacactg

SEQ ID NO: 79803 - DNA, 15 bp, Homo sapiens
cttagacttgacact

SEQ ID NO: 79804 - DNA, 15 bp, Homo sapiens
tcttagacttgacac

SEQ ID NO: 79805 - DNA, 15 bp, Homo sapiens
ttcttagacttgaca

SEQ ID NO: 79806 - DNA, 15 bp, Homo sapiens
gttcttagacttgac

SEQ ID NO: 79807 - DNA, 15 bp, Homo sapiens
agttcttagacttga

SEQ ID NO: 79808 - DNA, 15 bp, Homo sapiens
gagttcttagacttg

SEQ ID NO: 79809 - DNA, 15 bp, Homo sapiens
cgagttcttagactt

SEQ ID NO: 79810 - DNA, 15 bp, Homo sapiens
acgagttcttagact

SEQ ID NO: 79811 - DNA, 15 bp, Homo sapiens
aacgagttcttagac

SEQ ID NO: 79812 - DNA, 15 bp, Homo sapiens
caacgagttcttaga

SEQ ID NO: 79813 - DNA, 15 bp, Homo sapiens
gcaacgagttcttag

SEQ ID NO: 79814 - DNA, 15 bp, Homo sapiens
ggcaacgagttctta

SEQ ID NO: 79815 - DNA, 15 bp, Homo sapiens
aggcaacgagttctt

SEQ ID NO: 79816 - DNA, 15 bp, Homo sapiens
taggcaacgagttct

SEQ ID NO: 79817 - DNA, 15 bp, Homo sapiens
ctaggcaacgagttc

SEQ ID NO: 79818 - DNA, 15 bp, Homo sapiens
gctaggcaacgagtt

SEQ ID NO: 79819 - DNA, 15 bp, Homo sapiens
ggctaggcaacgagt

SEQ ID NO: 79820 - DNA, 15 bp, Homo sapiens
gggctaggcaacgag

SEQ ID NO: 79821 - DNA, 15 bp, Homo sapiens
agggctaggcaacga

SEQ ID NO: 79822 - DNA, 15 bp, Homo sapiens
tagggctaggcaacg

SEQ ID NO: 79823 - DNA, 15 bp, Homo sapiens
ctagggctaggcaac

SEQ ID NO: 79824 - DNA, 15 bp, Homo sapiens
cctagggctaggcaa

SEQ ID NO: 79825 - DNA, 15 bp, Homo sapiens
gcctagggctaggca

SEQ ID NO: 79826 - DNA, 15 bp, Homo sapiens
ggcctagggctaggc

SEQ ID NO: 79827 - DNA, 15 bp, Homo sapiens
gggcctagggctagg

SEQ ID NO: 79828 - DNA, 15 bp, Homo sapiens
tgggcctagggctag

SEQ ID NO: 79829 - DNA, 15 bp, Homo sapiens
ttgggcctagggcta

SEQ ID NO: 79830 - DNA, 15 bp, Homo sapiens
tttgggcctagggct

SEQ ID NO: 79831 - DNA, 15 bp, Homo sapiens
ttttgggcctagggc

SEQ ID NO: 79832 - DNA, 15 bp, Homo sapiens
attttgggcctaggg

SEQ ID NO: 79833 - DNA, 15 bp, Homo sapiens
tattttgggcctagg

SEQ ID NO: 79834 - DNA, 15 bp, Homo sapiens
atattttgggcctag

SEQ ID NO: 79835 - DNA, 15 bp, Homo sapiens
aatattttgggccta

SEQ ID NO: 79836 - DNA, 15 bp, Homo sapiens
aaatattttgggcct

SEQ ID NO: 79837 - DNA, 15 bp, Homo sapiens
aaaatattttgggcc

SEQ ID NO: 79838 - DNA, 15 bp, Homo sapiens
gaaaatattttgggc

SEQ ID NO: 79839 - DNA, 15 bp, Homo sapiens
agaaaatattttggg

SEQ ID NO: 79840 - DNA, 15 bp, Homo sapiens
gagaaaatattttgg

SEQ ID NO: 79841 - DNA, 15 bp, Homo sapiens
ggagaaaatattttg

SEQ ID NO: 79842 - DNA, 15 bp, Homo sapiens
tggagaaaatatttt

SEQ ID NO: 79843 - DNA, 15 bp, Homo sapiens
atggagaaaatattt

SEQ ID NO: 79844 - DNA, 15 bp, Homo sapiens
catggagaaaatatt

SEQ ID NO: 79845 - DNA, 15 bp, Homo sapiens
acatggagaaaatat

SEQ ID NO: 79846 - DNA, 15 bp, Homo sapiens
aacatggagaaaata

SEQ ID NO: 79847 - DNA, 15 bp, Homo sapiens
aaacatggagaaaat

SEQ ID NO: 79848 - DNA, 15 bp, Homo sapiens
aaaacatggagaaaa

SEQ ID NO: 79849 - DNA, 15 bp, Homo sapiens
aaaaacatggagaaa

SEQ ID NO: 79850 - DNA, 15 bp, Homo sapiens
aaaaaacatggagaa

SEQ ID NO: 79851 - DNA, 15 bp, Homo sapiens
aaaaaaacatggaga

SEQ ID NO: 79852 - DNA, 15 bp, Homo sapiens
gaaaaaaacatggag

SEQ ID NO: 79853 - DNA, 15 bp, Homo sapiens
agaaaaaaacatgga

SEQ ID NO: 79854 - DNA, 15 bp, Homo sapiens
tagaaaaaaacatgg

SEQ ID NO: 79855 - DNA, 15 bp, Homo sapiens
ttagaaaaaaacatg

SEQ ID NO: 79856 - DNA, 15 bp, Homo sapiens
tttagaaaaaaacat

SEQ ID NO: 79857 - DNA, 15 bp, Homo sapiens
ttttagaaaaaaaca

SEQ ID NO: 79858 - DNA, 15 bp, Homo sapiens
cttttagaaaaaaac

SEQ ID NO: 79859 - DNA, 15 bp, Homo sapiens
acttttagaaaaaaa

SEQ ID NO: 79860 - DNA, 15 bp, Homo sapiens
aacttttagaaaaaa

SEQ ID NO: 79861 - DNA, 15 bp, Homo sapiens
aaacttttagaaaaa

SEQ ID NO: 79862 - DNA, 15 bp, Homo sapiens
aaaacttttagaaaa

SEQ ID NO: 79863 - DNA, 15 bp, Homo sapiens
taaaacttttagaaa

SEQ ID NO: 79864 - DNA, 15 bp, Homo sapiens
ataaaacttttagaa

SEQ ID NO: 79865 - DNA, 15 bp, Homo sapiens
tataaaacttttaga

SEQ ID NO: 79866 - DNA, 15 bp, Homo sapiens
ctataaaacttttag

SEQ ID NO: 79867 - DNA, 15 bp, Homo sapiens
gctataaaactttta

SEQ ID NO: 79868 - DNA, 15 bp, Homo sapiens
agctataaaactttt

SEQ ID NO: 79869 - DNA, 15 bp, Homo sapiens
aagctataaaacttt

SEQ ID NO: 79870 - DNA, 15 bp, Homo sapiens
aaagctataaaactt

SEQ ID NO: 79871 - DNA, 15 bp, Homo sapiens
taaagctataaaact

SEQ ID NO: 79872 - DNA, 15 bp, Homo sapiens
gtaaagctataaaac

SEQ ID NO: 79873 - DNA, 15 bp, Homo sapiens
tgtaaagctataaaa

SEQ ID NO: 79874 - DNA, 15 bp, Homo sapiens
atgtaaagctataaa

SEQ ID NO: 79875 - DNA, 15 bp, Homo sapiens
aatgtaaagctataa

SEQ ID NO: 79876 - DNA, 15 bp, Homo sapiens
aaatgtaaagctata

SEQ ID NO: 79877 - DNA, 15 bp, Homo sapiens
aaaatgtaaagctat

SEQ ID NO: 79878 - DNA, 15 bp, Homo sapiens
taaaatgtaaagcta

SEQ ID NO: 79879 - DNA, 15 bp, Homo sapiens
ttaaaatgtaaagct

SEQ ID NO: 79880 - DNA, 15 bp, Homo sapiens
tttaaaatgtaaagc

SEQ ID NO: 79881 - DNA, 15 bp, Homo sapiens
atttaaaatgtaaag

SEQ ID NO: 79882 - DNA, 15 bp, Homo sapiens
aatttaaaatgtaaa

SEQ ID NO: 79883 - DNA, 15 bp, Homo sapiens
aaatttaaaatgtaa

SEQ ID NO: 79884 - DNA, 15 bp, Homo sapiens
gaaatttaaaatgta

SEQ ID NO: 79885 - DNA, 15 bp, Homo sapiens
tgaaatttaaaatgt

SEQ ID NO: 79886 - DNA, 15 bp, Homo sapiens
ctgaaatttaaaatg

SEQ ID NO: 79887 - DNA, 15 bp, Homo sapiens
actgaaatttaaaat

SEQ ID NO: 79888 - DNA, 15 bp, Homo sapiens
gactgaaatttaaaa

SEQ ID NO: 79889 - DNA, 15 bp, Homo sapiens
ggactgaaatttaaa

SEQ ID NO: 79890 - DNA, 15 bp, Homo sapiens
tggactgaaatttaa

SEQ ID NO: 79891 - DNA, 15 bp, Homo sapiens
atggactgaaattta

SEQ ID NO: 79892 - DNA, 15 bp, Homo sapiens
catggactgaaattt

SEQ ID NO: 79893 - DNA, 15 bp, Homo sapiens
tcatggactgaaatt

SEQ ID NO: 79894 - DNA, 15 bp, Homo sapiens
atcatggactgaaat

SEQ ID NO: 79895 - DNA, 15 bp, Homo sapiens
gatcatggactgaaa

SEQ ID NO: 79896 - DNA, 15 bp, Homo sapiens
ggatcatggactgaa

SEQ ID NO: 79897 - DNA, 15 bp, Homo sapiens
tggatcatggactga

SEQ ID NO: 79898 - DNA, 15 bp, Homo sapiens
atggatcatggactg

SEQ ID NO: 79899 - DNA, 15 bp, Homo sapiens
aatggatcatggact

SEQ ID NO: 79900 - DNA, 15 bp, Homo sapiens
aaatggatcatggac

SEQ ID NO: 79901 - DNA, 15 bp, Homo sapiens
aaaatggatcatgga

SEQ ID NO: 79902 - DNA, 15 bp, Homo sapiens
aaaaatggatcatgg

SEQ ID NO: 79903 - DNA, 15 bp, Homo sapiens
taaaaatggatcatg

SEQ ID NO: 79904 - DNA, 15 bp, Homo sapiens
ctaaaaatggatcat

SEQ ID NO: 79905 - DNA, 15 bp, Homo sapiens
actaaaaatggatca

SEQ ID NO: 79906 - DNA, 15 bp, Homo sapiens
aactaaaaatggatc

SEQ ID NO: 79907 - DNA, 15 bp, Homo sapiens
gaactaaaaatggat

SEQ ID NO: 79908 - DNA, 15 bp, Homo sapiens
tgaactaaaaatgga

SEQ ID NO: 79909 - DNA, 15 bp, Homo sapiens
gtgaactaaaaatgg

SEQ ID NO: 79910 - DNA, 15 bp, Homo sapiens
agtgaactaaaaatg

SEQ ID NO: 79911 - DNA, 15 bp, Homo sapiens
aagtgaactaaaaat

SEQ ID NO: 79912 - DNA, 15 bp, Homo sapiens
aaagtgaactaaaaa

SEQ ID NO: 79913 - DNA, 15 bp, Homo sapiens
taaagtgaactaaaa

SEQ ID NO: 79914 - DNA, 15 bp, Homo sapiens
ttaaagtgaactaaa

SEQ ID NO: 79915 - DNA, 15 bp, Homo sapiens
tttaaagtgaactaa

SEQ ID NO: 79916 - DNA, 15 bp, Homo sapiens
gtttaaagtgaacta

SEQ ID NO: 79917 - DNA, 15 bp, Homo sapiens
tgtttaaagtgaact

SEQ ID NO: 79918 - DNA, 15 bp, Homo sapiens
atgtttaaagtgaac

SEQ ID NO: 79919 - DNA, 15 bp, Homo sapiens
catgtttaaagtgaa

SEQ ID NO: 79920 - DNA, 15 bp, Homo sapiens
acatgtttaaagtga

SEQ ID NO: 79921 - DNA, 15 bp, Homo sapiens
cacatgtttaaagtg

SEQ ID NO: 79922 - DNA, 15 bp, Homo sapiens
acacatgtttaaagt

SEQ ID NO: 79923 - DNA, 15 bp, Homo sapiens
tacacatgtttaaag

SEQ ID NO: 79924 - DNA, 15 bp, Homo sapiens
ctacacatgtttaaa

SEQ ID NO: 79925 - DNA, 15 bp, Homo sapiens
gctacacatgtttaa

SEQ ID NO: 79926 - DNA, 15 bp, Homo sapiens
ggctacacatgttta

SEQ ID NO: 79927 - DNA, 15 bp, Homo sapiens
gggctacacatgttt

SEQ ID NO: 79928 - DNA, 15 bp, Homo sapiens
agggctacacatgtt

SEQ ID NO: 79929 - DNA, 15 bp, Homo sapiens
cagggctacacatgt

SEQ ID NO: 79930 - DNA, 15 bp, Homo sapiens
ccagggctacacatg

SEQ ID NO: 79931 - DNA, 15 bp, Homo sapiens
tccagggctacacat

SEQ ID NO: 79932 - DNA, 15 bp, Homo sapiens
ttccagggctacaca

SEQ ID NO: 79933 - DNA, 15 bp, Homo sapiens
cttccagggctacac

SEQ ID NO: 79934 - DNA, 15 bp, Homo sapiens
ccttccagggctaca

SEQ ID NO: 79935 - DNA, 15 bp, Homo sapiens
tccttccagggctac

SEQ ID NO: 79936 - DNA, 15 bp, Homo sapiens
atccttccagggcta

SEQ ID NO: 79937 - DNA, 15 bp, Homo sapiens
catccttccagggct

SEQ ID NO: 79938 - DNA, 15 bp, Homo sapiens
ccatccttccagggc

SEQ ID NO: 79939 - DNA, 15 bp, Homo sapiens
gccatccttccaggg

SEQ ID NO: 79940 - DNA, 15 bp, Homo sapiens
agccatccttccagg

SEQ ID NO: 79941 - DNA, 15 bp, Homo sapiens
aagccatccttccag

SEQ ID NO: 79942 - DNA, 15 bp, Homo sapiens
caagccatccttcca

SEQ ID NO: 79943 - DNA, 15 bp, Homo sapiens
tcaagccatccttcc

SEQ ID NO: 79944 - DNA, 15 bp, Homo sapiens
ctcaagccatccttc

SEQ ID NO: 79945 - DNA, 15 bp, Homo sapiens
cctcaagccatcctt

SEQ ID NO: 79946 - DNA, 15 bp, Homo sapiens
acctcaagccatcct

SEQ ID NO: 79947 - DNA, 15 bp, Homo sapiens
gacctcaagccatcc

SEQ ID NO: 79948 - DNA, 15 bp, Homo sapiens
ggacctcaagccatc

SEQ ID NO: 79949 - DNA, 15 bp, Homo sapiens
gggacctcaagccat

SEQ ID NO: 79950 - DNA, 15 bp, Homo sapiens
agggacctcaagcca

SEQ ID NO: 79951 - DNA, 15 bp, Homo sapiens
tagggacctcaagcc

SEQ ID NO: 79952 - DNA, 15 bp, Homo sapiens
ttagggacctcaagc

SEQ ID NO: 79953 - DNA, 15 bp, Homo sapiens
tttagggacctcaag

SEQ ID NO: 79954 - DNA, 15 bp, Homo sapiens
ttttagggacctcaa

SEQ ID NO: 79955 - DNA, 15 bp, Homo sapiens
cttttagggacctca

SEQ ID NO: 79956 - DNA, 15 bp, Homo sapiens
acttttagggacctc

SEQ ID NO: 79957 - DNA, 15 bp, Homo sapiens
cacttttagggacct

SEQ ID NO: 79958 - DNA, 15 bp, Homo sapiens
tcacttttagggacc

SEQ ID NO: 79959 - DNA, 15 bp, Homo sapiens
atcacttttagggac

SEQ ID NO: 79960 - DNA, 15 bp, Homo sapiens
catcacttttaggga

SEQ ID NO: 79961 - DNA, 15 bp, Homo sapiens
ccatcacttttaggg

SEQ ID NO: 79962 - DNA, 15 bp, Homo sapiens
accatcacttttagg

SEQ ID NO: 79963 - DNA, 15 bp, Homo sapiens
taccatcacttttag

SEQ ID NO: 79964 - DNA, 15 bp, Homo sapiens
ctaccatcactttta

SEQ ID NO: 79965 - DNA, 15 bp, Homo sapiens
cctaccatcactttt

SEQ ID NO: 79966 - DNA, 15 bp, Homo sapiens
ccctaccatcacttt

SEQ ID NO: 79967 - DNA, 15 bp, Homo sapiens
tccctaccatcactt

SEQ ID NO: 79968 - DNA, 15 bp, Homo sapiens
gtccctaccatcact

SEQ ID NO: 79969 - DNA, 15 bp, Homo sapiens
tgtccctaccatcac

SEQ ID NO: 79970 - DNA, 15 bp, Homo sapiens
ttgtccctaccatca

SEQ ID NO: 79971 - DNA, 15 bp, Homo sapiens
attgtccctaccatc

SEQ ID NO: 79972 - DNA, 15 bp, Homo sapiens
aattgtccctaccat

SEQ ID NO: 79973 - DNA, 15 bp, Homo sapiens
gaattgtccctacca

SEQ ID NO: 79974 - DNA, 15 bp, Homo sapiens
tgaattgtccctacc

SEQ ID NO: 79975 - DNA, 15 bp, Homo sapiens
atgaattgtccctac

SEQ ID NO: 79976 - DNA, 15 bp, Homo sapiens
aatgaattgtcccta

SEQ ID NO: 79977 - DNA, 15 bp, Homo sapiens
aaatgaattgtccct

SEQ ID NO: 79978 - DNA, 15 bp, Homo sapiens
aaaatgaattgtccc

SEQ ID NO: 79979 - DNA, 15 bp, Homo sapiens
taaaatgaattgtcc

SEQ ID NO: 79980 - DNA, 15 bp, Homo sapiens
ataaaatgaattgtc

SEQ ID NO: 79981 - DNA, 15 bp, Homo sapiens
cataaaatgaattgt

SEQ ID NO: 79982 - DNA, 15 bp, Homo sapiens
ccataaaatgaattg

SEQ ID NO: 79983 - DNA, 15 bp, Homo sapiens
gccataaaatgaatt

SEQ ID NO: 79984 - DNA, 15 bp, Homo sapiens
tgccataaaatgaat

SEQ ID NO: 79985 - DNA, 15 bp, Homo sapiens
atgccataaaatgaa

SEQ ID NO: 79986 - DNA, 15 bp, Homo sapiens
aatgccataaaatga

SEQ ID NO: 79987 - DNA, 15 bp, Homo sapiens
gaatgccataaaatg

SEQ ID NO: 79988 - DNA, 15 bp, Homo sapiens
agaatgccataaaat

SEQ ID NO: 79989 - DNA, 15 bp, Homo sapiens
aagaatgccataaaa

SEQ ID NO: 79990 - DNA, 15 bp, Homo sapiens
gaagaatgccataaa

SEQ ID NO: 79991 - DNA, 15 bp, Homo sapiens
ggaagaatgccataa

SEQ ID NO: 79992 - DNA, 15 bp, Homo sapiens
tggaagaatgccata

SEQ ID NO: 79993 - DNA, 15 bp, Homo sapiens
ctggaagaatgccat

SEQ ID NO: 79994 - DNA, 15 bp, Homo sapiens
gctggaagaatgcca

SEQ ID NO: 79995 - DNA, 15 bp, Homo sapiens
tgctggaagaatgcc

SEQ ID NO: 79996 - DNA, 15 bp, Homo sapiens
atgctggaagaatgc

SEQ ID NO: 79997 - DNA, 15 bp, Homo sapiens
aatgctggaagaatg

SEQ ID NO: 79998 - DNA, 15 bp, Homo sapiens
gaatgctggaagaat

SEQ ID NO: 79999 - DNA, 15 bp, Homo sapiens
cgaatgctggaagaa

SEQ ID NO: 80000 - DNA, 15 bp, Homo sapiens
ccgaatgctggaaga

SEQ ID NO: 80001 - DNA, 15 bp, Homo sapiens
cccgaatgctggaag

SEQ ID NO: 80002 - DNA, 15 bp, Homo sapiens
ccccgaatgctggaa

SEQ ID NO: 80003 - DNA, 15 bp, Homo sapiens
accccgaatgctgga

SEQ ID NO: 80004 - DNA, 15 bp, Homo sapiens
aaccccgaatgctgg

SEQ ID NO: 80005 - DNA, 15 bp, Homo sapiens
gaaccccgaatgctg

SEQ ID NO: 80006 - DNA, 15 bp, Homo sapiens
ggaaccccgaatgct

SEQ ID NO: 80007 - DNA, 15 bp, Homo sapiens
tggaaccccgaatgc

SEQ ID NO: 80008 - DNA, 15 bp, Homo sapiens
gtggaaccccgaatg

SEQ ID NO: 80009 - DNA, 15 bp, Homo sapiens
agtggaaccccgaat

SEQ ID NO: 80010 - DNA, 15 bp, Homo sapiens
cagtggaaccccgaa

SEQ ID NO: 80011 - DNA, 15 bp, Homo sapiens
ccagtggaaccccga

SEQ ID NO: 80012 - DNA, 15 bp, Homo sapiens
cccagtggaaccccg

SEQ ID NO: 80013 - DNA, 15 bp, Homo sapiens
acccagtggaacccc

SEQ ID NO: 80014 - DNA, 15 bp, Homo sapiens
aacccagtggaaccc

SEQ ID NO: 80015 - DNA, 15 bp, Homo sapiens
taacccagtggaacc

SEQ ID NO: 80016 - DNA, 15 bp, Homo sapiens
gtaacccagtggaac

SEQ ID NO: 80017 - DNA, 15 bp, Homo sapiens
tgtaacccagtggaa

SEQ ID NO: 80018 - DNA, 15 bp, Homo sapiens
gtgtaacccagtgga

SEQ ID NO: 80019 - DNA, 15 bp, Homo sapiens
agtgtaacccagtgg

SEQ ID NO: 80020 - DNA, 15 bp, Homo sapiens
cagtgtaacccagtg

SEQ ID NO: 80021 - DNA, 15 bp, Homo sapiens
tcagtgtaacccagt

SEQ ID NO: 80022 - DNA, 15 bp, Homo sapiens
gtcagtgtaacccag

SEQ ID NO: 80023 - DNA, 15 bp, Homo sapiens
cgtcagtgtaaccca

SEQ ID NO: 80024 - DNA, 15 bp, Homo sapiens
acgtcagtgtaaccc

SEQ ID NO: 80025 - DNA, 15 bp, Homo sapiens
tacgtcagtgtaacc

SEQ ID NO: 80026 - DNA, 15 bp, Homo sapiens
ctacgtcagtgtaac

SEQ ID NO: 80027 - DNA, 15 bp, Homo sapiens
tctacgtcagtgtaa

SEQ ID NO: 80028 - DNA, 15 bp, Homo sapiens
ctctacgtcagtgta

SEQ ID NO: 80029 - DNA, 15 bp, Homo sapiens
gctctacgtcagtgt

SEQ ID NO: 80030 - DNA, 15 bp, Homo sapiens
agctctacgtcagtg

SEQ ID NO: 80031 - DNA, 15 bp, Homo sapiens
aagctctacgtcagt

SEQ ID NO: 80032 - DNA, 15 bp, Homo sapiens
taagctctacgtcag

SEQ ID NO: 80033 - DNA, 15 bp, Homo sapiens
ttaagctctacgtca

SEQ ID NO: 80034 - DNA, 15 bp, Homo sapiens
attaagctctacgtc

SEQ ID NO: 80035 - DNA, 15 bp, Homo sapiens
aattaagctctacgt

SEQ ID NO: 80036 - DNA, 15 bp, Homo sapiens
taattaagctctacg

SEQ ID NO: 80037 - DNA, 15 bp, Homo sapiens
ataattaagctctac

SEQ ID NO: 80038 - DNA, 15 bp, Homo sapiens
aataattaagctcta

SEQ ID NO: 80039 - DNA, 15 bp, Homo sapiens
aaataattaagctct

SEQ ID NO: 80040 - DNA, 15 bp, Homo sapiens
aaaataattaagctc

SEQ ID NO: 80041 - DNA, 15 bp, Homo sapiens
aaaaataattaagct

SEQ ID NO: 80042 - DNA, 15 bp, Homo sapiens
caaaaataattaagc

SEQ ID NO: 80043 - DNA, 15 bp, Homo sapiens
gcaaaaataattaag

SEQ ID NO: 80044 - DNA, 15 bp, Homo sapiens
agcaaaaataattaa

SEQ ID NO: 80045 - DNA, 15 bp, Homo sapiens
aagcaaaaataatta

SEQ ID NO: 80046 - DNA, 15 bp, Homo sapiens
aaagcaaaaataatt

SEQ ID NO: 80047 - DNA, 15 bp, Homo sapiens
aaaagcaaaaataat

SEQ ID NO: 80048 - DNA, 15 bp, Homo sapiens
taaaagcaaaaataa

SEQ ID NO: 80049 - DNA, 15 bp, Homo sapiens
ataaaagcaaaaata

SEQ ID NO: 80050 - DNA, 15 bp, Homo sapiens
aataaaagcaaaaat

SEQ ID NO: 80051 - DNA, 15 bp, Homo sapiens
aaataaaagcaaaaa

SEQ ID NO: 80052 - DNA, 15 bp, Homo sapiens
aaaataaaagcaaaa

SEQ ID NO: 80053 - DNA, 15 bp, Homo sapiens
gaaaataaaagcaaa

SEQ ID NO: 80054 - DNA, 15 bp, Homo sapiens
agaaaataaaagcaa

SEQ ID NO: 80055 - DNA, 15 bp, Homo sapiens
cagaaaataaaagca

SEQ ID NO: 80056 - DNA, 15 bp, Homo sapiens
gcagaaaataaaagc

SEQ ID NO: 80057 - DNA, 15 bp, Homo sapiens
agcagaaaataaaag

SEQ ID NO: 80058 - DNA, 15 bp, Homo sapiens
tagcagaaaataaaa

SEQ ID NO: 80059 - DNA, 15 bp, Homo sapiens
atagcagaaaataaa

SEQ ID NO: 80060 - DNA, 15 bp, Homo sapiens
tatagcagaaaataa

SEQ ID NO: 80061 - DNA, 15 bp, Homo sapiens
ctatagcagaaaata

SEQ ID NO: 80062 - DNA, 15 bp, Homo sapiens
actatagcagaaaat

SEQ ID NO: 80063 - DNA, 15 bp, Homo sapiens
aactatagcagaaaa

SEQ ID NO: 80064 - DNA, 15 bp, Homo sapiens
taactatagcagaaa

SEQ ID NO: 80065 - DNA, 15 bp, Homo sapiens
ctaactatagcagaa

SEQ ID NO: 80066 - DNA, 15 bp, Homo sapiens
tctaactatagcaga

SEQ ID NO: 80067 - DNA, 15 bp, Homo sapiens
ttctaactatagcag

SEQ ID NO: 80068 - DNA, 15 bp, Homo sapiens
tttctaactatagca

SEQ ID NO: 80069 - DNA, 15 bp, Homo sapiens
atttctaactatagc

SEQ ID NO: 80070 - DNA, 15 bp, Homo sapiens
gatttctaactatag

SEQ ID NO: 80071 - DNA, 15 bp, Homo sapiens
tgatttctaactata

SEQ ID NO: 80072 - DNA, 15 bp, Homo sapiens
gtgatttctaactat

SEQ ID NO: 80073 - DNA, 15 bp, Homo sapiens
agtgatttctaacta

SEQ ID NO: 80074 - DNA, 15 bp, Homo sapiens
gagtgatttctaact

SEQ ID NO: 80075 - DNA, 15 bp, Homo sapiens
tgagtgatttctaac

SEQ ID NO: 80076 - DNA, 15 bp, Homo sapiens
gtgagtgatttctaa

SEQ ID NO: 80077 - DNA, 15 bp, Homo sapiens
tgtgagtgatttcta

SEQ ID NO: 80078 - DNA, 15 bp, Homo sapiens
gtgtgagtgatttct

SEQ ID NO: 80079 - DNA, 15 bp, Homo sapiens
ggtgtgagtgatttc

SEQ ID NO: 80080 - DNA, 15 bp, Homo sapiens
gggtgtgagtgattt

SEQ ID NO: 80081 - DNA, 15 bp, Homo sapiens
tgggtgtgagtgatt

SEQ ID NO: 80082 - DNA, 15 bp, Homo sapiens
gtgggtgtgagtgat

SEQ ID NO: 80083 - DNA, 15 bp, Homo sapiens
tgtgggtgtgagtga

SEQ ID NO: 80084 - DNA, 15 bp, Homo sapiens
ttgtgggtgtgagtg

SEQ ID NO: 80085 - DNA, 15 bp, Homo sapiens
tttgtgggtgtgagt

SEQ ID NO: 80086 - DNA, 15 bp, Homo sapiens
atttgtgggtgtgag

SEQ ID NO: 80087 - DNA, 15 bp, Homo sapiens
tatttgtgggtgtga

SEQ ID NO: 80088 - DNA, 15 bp, Homo sapiens
ttatttgtgggtgtg

SEQ ID NO: 80089 - DNA, 15 bp, Homo sapiens
tttatttgtgggtgt

SEQ ID NO: 80090 - DNA, 15 bp, Homo sapiens
ttttatttgtgggtg

SEQ ID NO: 80091 - DNA, 15 bp, Homo sapiens
attttatttgtgggt

SEQ ID NO: 80092 - DNA, 15 bp, Homo sapiens
aattttatttgtggg

SEQ ID NO: 80093 - DNA, 15 bp, Homo sapiens
aaattttatttgtgg

SEQ ID NO: 80094 - DNA, 15 bp, Homo sapiens
aaaattttatttgtg

SEQ ID NO: 80095 - DNA, 15 bp, Homo sapiens
taaaattttatttgt

SEQ ID NO: 80096 - DNA, 15 bp, Homo sapiens
ttaaaattttatttg

SEQ ID NO: 80097 - DNA, 15 bp, Homo sapiens
tttaaaattttattt

SEQ ID NO: 80098 - DNA, 15 bp, Homo sapiens
ttttaaaattttatt

SEQ ID NO: 80099 - DNA, 15 bp, Homo sapiens
gttttaaaattttat

SEQ ID NO: 80100 - DNA, 15 bp, Homo sapiens
ggttttaaaatttta

SEQ ID NO: 80101 - DNA, 15 bp, Homo sapiens
gggttttaaaatttt

SEQ ID NO: 80102 - DNA, 15 bp, Homo sapiens
agggttttaaaattt

SEQ ID NO: 80103 - DNA, 15 bp, Homo sapiens
aagggttttaaaatt

SEQ ID NO: 80104 - DNA, 15 bp, Homo sapiens
aaagggttttaaaat

SEQ ID NO: 80105 - DNA, 15 bp, Homo sapiens
gaaagggttttaaaa

SEQ ID NO: 80106 - DNA, 15 bp, Homo sapiens
tgaaagggttttaaa

SEQ ID NO: 80107 - DNA, 15 bp, Homo sapiens
atgaaagggttttaa

SEQ ID NO: 80108 - DNA, 15 bp, Homo sapiens
aatgaaagggtttta

SEQ ID NO: 80109 - DNA, 15 bp, Homo sapiens
aaatgaaagggtttt

SEQ ID NO: 80110 - DNA, 15 bp, Homo sapiens
aaaatgaaagggttt

SEQ ID NO: 80111 - DNA, 15 bp, Homo sapiens
caaaatgaaagggtt

SEQ ID NO: 80112 - DNA, 15 bp, Homo sapiens
ccaaaatgaaagggt

SEQ ID NO: 80113 - DNA, 15 bp, Homo sapiens
accaaaatgaaaggg

SEQ ID NO: 80114 - DNA, 15 bp, Homo sapiens
aaccaaaatgaaagg

SEQ ID NO: 80115 - DNA, 15 bp, Homo sapiens
taaccaaaatgaaag

SEQ ID NO: 80116 - DNA, 15 bp, Homo sapiens
ctaaccaaaatgaaa

SEQ ID NO: 80117 - DNA, 15 bp, Homo sapiens
gctaaccaaaatgaa

SEQ ID NO: 80118 - DNA, 15 bp, Homo sapiens
ggctaaccaaaatga

SEQ ID NO: 80119 - DNA, 15 bp, Homo sapiens
aggctaaccaaaatg

SEQ ID NO: 80120 - DNA, 15 bp, Homo sapiens
aaggctaaccaaaat

SEQ ID NO: 80121 - DNA, 15 bp, Homo sapiens
taaggctaaccaaaa

SEQ ID NO: 80122 - DNA, 15 bp, Homo sapiens
gtaaggctaaccaaa

SEQ ID NO: 80123 - DNA, 15 bp, Homo sapiens
ggtaaggctaaccaa

SEQ ID NO: 80124 - DNA, 15 bp, Homo sapiens
tggtaaggctaacca

SEQ ID NO: 80125 - DNA, 15 bp, Homo sapiens
ttggtaaggctaacc

SEQ ID NO: 80126 - DNA, 15 bp, Homo sapiens
gttggtaaggctaac

SEQ ID NO: 80127 - DNA, 15 bp, Homo sapiens
ggttggtaaggctaa

SEQ ID NO: 80128 - DNA, 15 bp, Homo sapiens
aggttggtaaggcta

SEQ ID NO: 80129 - DNA, 15 bp, Homo sapiens
aaggttggtaaggct

SEQ ID NO: 80130 - DNA, 15 bp, Homo sapiens
aaaggttggtaaggc

SEQ ID NO: 80131 - DNA, 15 bp, Homo sapiens
taaaggttggtaagg

SEQ ID NO: 80132 - DNA, 15 bp, Homo sapiens
ttaaaggttggtaag

SEQ ID NO: 80133 - DNA, 15 bp, Homo sapiens
attaaaggttggtaa

SEQ ID NO: 80134 - DNA, 15 bp, Homo sapiens
cattaaaggttggta

SEQ ID NO: 80135 - DNA, 15 bp, Homo sapiens
gcattaaaggttggt

SEQ ID NO: 80136 - DNA, 15 bp, Homo sapiens
tgcattaaaggttgg

SEQ ID NO: 80137 - DNA, 15 bp, Homo sapiens
gtgcattaaaggttg

SEQ ID NO: 80138 - DNA, 15 bp, Homo sapiens
tgtgcattaaaggtt

SEQ ID NO: 80139 - DNA, 15 bp, Homo sapiens
atgtgcattaaaggt

SEQ ID NO: 80140 - DNA, 15 bp, Homo sapiens
aatgtgcattaaagg

SEQ ID NO: 80141 - DNA, 15 bp, Homo sapiens
caatgtgcattaaag

SEQ ID NO: 80142 - DNA, 15 bp, Homo sapiens
tcaatgtgcattaaa

SEQ ID NO: 80143 - DNA, 15 bp, Homo sapiens
gtcaatgtgcattaa

SEQ ID NO: 80144 - DNA, 15 bp, Homo sapiens
ggtcaatgtgcatta

SEQ ID NO: 80145 - DNA, 15 bp, Homo sapiens
aggtcaatgtgcatt

SEQ ID NO: 80146 - DNA, 15 bp, Homo sapiens
caggtcaatgtgcat

SEQ ID NO: 80147 - DNA, 15 bp, Homo sapiens
tcaggtcaatgtgca

SEQ ID NO: 80148 - DNA, 15 bp, Homo sapiens
ttcaggtcaatgtgc

SEQ ID NO: 80149 - DNA, 15 bp, Homo sapiens
attcaggtcaatgtg

SEQ ID NO: 80150 - DNA, 15 bp, Homo sapiens
gattcaggtcaatgt

SEQ ID NO: 80151 - DNA, 15 bp, Homo sapiens
tgattcaggtcaatg

SEQ ID NO: 80152 - DNA, 15 bp, Homo sapiens
ttgattcaggtcaat

SEQ ID NO: 80153 - DNA, 15 bp, Homo sapiens
tttgattcaggtcaa

SEQ ID NO: 80154 - DNA, 15 bp, Homo sapiens
atttgattcaggtca

SEQ ID NO: 80155 - DNA, 15 bp, Homo sapiens
tatttgattcaggtc

SEQ ID NO: 80156 - DNA, 15 bp, Homo sapiens
atatttgattcaggt

SEQ ID NO: 80157 - DNA, 15 bp, Homo sapiens
aatatttgattcagg

SEQ ID NO: 80158 - DNA, 15 bp, Homo sapiens
caatatttgattcag

SEQ ID NO: 80159 - DNA, 15 bp, Homo sapiens
ccaatatttgattca

SEQ ID NO: 80160 - DNA, 15 bp, Homo sapiens
tccaatatttgattc

SEQ ID NO: 80161 - DNA, 15 bp, Homo sapiens
atccaatatttgatt

SEQ ID NO: 80162 - DNA, 15 bp, Homo sapiens
aatccaatatttgat

SEQ ID NO: 80163 - DNA, 15 bp, Homo sapiens
aaatccaatatttga

SEQ ID NO: 80164 - DNA, 15 bp, Homo sapiens
caaatccaatatttg

SEQ ID NO: 80165 - DNA, 15 bp, Homo sapiens
tcaaatccaatattt

SEQ ID NO: 80166 - DNA, 15 bp, Homo sapiens
gtcaaatccaatatt

SEQ ID NO: 80167 - DNA, 15 bp, Homo sapiens
agtcaaatccaatat

SEQ ID NO: 80168 - DNA, 15 bp, Homo sapiens
cagtcaaatccaata

SEQ ID NO: 80169 - DNA, 15 bp, Homo sapiens
acagtcaaatccaat

SEQ ID NO: 80170 - DNA, 15 bp, Homo sapiens
cacagtcaaatccaa

SEQ ID NO: 80171 - DNA, 15 bp, Homo sapiens
tcacagtcaaatcca

SEQ ID NO: 80172 - DNA, 15 bp, Homo sapiens
ttcacagtcaaatcc

SEQ ID NO: 80173 - DNA, 15 bp, Homo sapiens
attcacagtcaaatc

SEQ ID NO: 80174 - DNA, 15 bp, Homo sapiens
tattcacagtcaaat

SEQ ID NO: 80175 - DNA, 15 bp, Homo sapiens
ctattcacagtcaaa

SEQ ID NO: 80176 - DNA, 15 bp, Homo sapiens
tctattcacagtcaa

SEQ ID NO: 80177 - DNA, 15 bp, Homo sapiens
ttctattcacagtca

SEQ ID NO: 80178 - DNA, 15 bp, Homo sapiens
tttctattcacagtc

SEQ ID NO: 80179 - DNA, 15 bp, Homo sapiens
ttttctattcacagt

SEQ ID NO: 80180 - DNA, 15 bp, Homo sapiens
tttttctattcacag

SEQ ID NO: 80181 - DNA, 15 bp, Homo sapiens
atttttctattcaca

SEQ ID NO: 80182 - DNA, 15 bp, Homo sapiens
aatttttctattcac

SEQ ID NO: 80183 - DNA, 15 bp, Homo sapiens
aaatttttctattca

SEQ ID NO: 80184 - DNA, 15 bp, Homo sapiens
taaatttttctattc

SEQ ID NO: 80185 - DNA, 15 bp, Homo sapiens
gtaaatttttctatt

SEQ ID NO: 80186 - DNA, 15 bp, Homo sapiens
tgtaaatttttctat

SEQ ID NO: 80187 - DNA, 15 bp, Homo sapiens
ctgtaaatttttcta

SEQ ID NO: 80188 - DNA, 15 bp, Homo sapiens
gctgtaaatttttct

SEQ ID NO: 80189 - DNA, 15 bp, Homo sapiens
agctgtaaatttttc

SEQ ID NO: 80190 - DNA, 15 bp, Homo sapiens
aagctgtaaattttt

SEQ ID NO: 80191 - DNA, 15 bp, Homo sapiens
gaagctgtaaatttt

SEQ ID NO: 80192 - DNA, 15 bp, Homo sapiens
tgaagctgtaaattt

SEQ ID NO: 80193 - DNA, 15 bp, Homo sapiens
ctgaagctgtaaatt

SEQ ID NO: 80194 - DNA, 15 bp, Homo sapiens
gctgaagctgtaaat

SEQ ID NO: 80195 - DNA, 15 bp, Homo sapiens
agctgaagctgtaaa

SEQ ID NO: 80196 - DNA, 15 bp, Homo sapiens
gagctgaagctgtaa

SEQ ID NO: 80197 - DNA, 15 bp, Homo sapiens
agagctgaagctgta

SEQ ID NO: 80198 - DNA, 15 bp, Homo sapiens
aagagctgaagctgt

SEQ ID NO: 80199 - DNA, 15 bp, Homo sapiens
taagagctgaagctg

SEQ ID NO: 80200 - DNA, 15 bp, Homo sapiens
ttaagagctgaagct

SEQ ID NO: 80201 - DNA, 15 bp, Homo sapiens
attaagagctgaagc

SEQ ID NO: 80202 - DNA, 15 bp, Homo sapiens
tattaagagctgaag

SEQ ID NO: 80203 - DNA, 15 bp, Homo sapiens
atattaagagctgaa

SEQ ID NO: 80204 - DNA, 15 bp, Homo sapiens
tatattaagagctga

SEQ ID NO: 80205 - DNA, 15 bp, Homo sapiens
ttatattaagagctg

SEQ ID NO: 80206 - DNA, 15 bp, Homo sapiens
cttatattaagagct

SEQ ID NO: 80207 - DNA, 15 bp, Homo sapiens
acttatattaagagc

SEQ ID NO: 80208 - DNA, 15 bp, Homo sapiens
cacttatattaagag

SEQ ID NO: 80209 - DNA, 15 bp, Homo sapiens
tcacttatattaaga

SEQ ID NO: 80210 - DNA, 15 bp, Homo sapiens
gtcacttatattaag

SEQ ID NO: 80211 - DNA, 15 bp, Homo sapiens
ggtcacttatattaa

SEQ ID NO: 80212 - DNA, 15 bp, Homo sapiens
tggtcacttatatta

SEQ ID NO: 80213 - DNA, 15 bp, Homo sapiens
gtggtcacttatatt

SEQ ID NO: 80214 - DNA, 15 bp, Homo sapiens
agtggtcacttatat

SEQ ID NO: 80215 - DNA, 15 bp, Homo sapiens
cagtggtcacttata

SEQ ID NO: 80216 - DNA, 15 bp, Homo sapiens
ccagtggtcacttat

SEQ ID NO: 80217 - DNA, 15 bp, Homo sapiens
tccagtggtcactta

SEQ ID NO: 80218 - DNA, 15 bp, Homo sapiens
gtccagtggtcactt

SEQ ID NO: 80219 - DNA, 15 bp, Homo sapiens
ggtccagtggtcact

SEQ ID NO: 80220 - DNA, 15 bp, Homo sapiens
aggtccagtggtcac

SEQ ID NO: 80221 - DNA, 15 bp, Homo sapiens
aaggtccagtggtca

SEQ ID NO: 80222 - DNA, 15 bp, Homo sapiens
taaggtccagtggtc

SEQ ID NO: 80223 - DNA, 15 bp, Homo sapiens
ctaaggtccagtggt

SEQ ID NO: 80224 - DNA, 15 bp, Homo sapiens
cctaaggtccagtgg

SEQ ID NO: 80225 - DNA, 15 bp, Homo sapiens
tcctaaggtccagtg

SEQ ID NO: 80226 - DNA, 15 bp, Homo sapiens
ttcctaaggtccagt

SEQ ID NO: 80227 - DNA, 15 bp, Homo sapiens
tttcctaaggtccag

SEQ ID NO: 80228 - DNA, 15 bp, Homo sapiens
atttcctaaggtcca

SEQ ID NO: 80229 - DNA, 15 bp, Homo sapiens
aatttcctaaggtcc

SEQ ID NO: 80230 - DNA, 15 bp, Homo sapiens
taatttcctaaggtc

SEQ ID NO: 80231 - DNA, 15 bp, Homo sapiens
ttaatttcctaaggt

SEQ ID NO: 80232 - DNA, 15 bp, Homo sapiens
attaatttcctaagg

SEQ ID NO: 80233 - DNA, 15 bp, Homo sapiens
aattaatttcctaag

SEQ ID NO: 80234 - DNA, 15 bp, Homo sapiens
gaattaatttcctaa

SEQ ID NO: 80235 - DNA, 15 bp, Homo sapiens
tgaattaatttccta

SEQ ID NO: 80236 - DNA, 15 bp, Homo sapiens
gtgaattaatttcct

SEQ ID NO: 80237 - DNA, 15 bp, Homo sapiens
tgtgaattaatttcc

SEQ ID NO: 80238 - DNA, 15 bp, Homo sapiens
atgtgaattaatttc

SEQ ID NO: 80239 - DNA, 15 bp, Homo sapiens
catgtgaattaattt

SEQ ID NO: 80240 - DNA, 15 bp, Homo sapiens
tcatgtgaattaatt

SEQ ID NO: 80241 - DNA, 15 bp, Homo sapiens
atcatgtgaattaat

SEQ ID NO: 80242 - DNA, 15 bp, Homo sapiens
tatcatgtgaattaa

SEQ ID NO: 80243 - DNA, 15 bp, Homo sapiens
atatcatgtgaatta

SEQ ID NO: 80244 - DNA, 15 bp, Homo sapiens
tatatcatgtgaatt

SEQ ID NO: 80245 - DNA, 15 bp, Homo sapiens
gtatatcatgtgaat

SEQ ID NO: 80246 - DNA, 15 bp, Homo sapiens
tgtatatcatgtgaa

SEQ ID NO: 80247 - DNA, 15 bp, Homo sapiens
atgtatatcatgtga

SEQ ID NO: 80248 - DNA, 15 bp, Homo sapiens
gatgtatatcatgtg

SEQ ID NO: 80249 - DNA, 15 bp, Homo sapiens
tgatgtatatcatgt

SEQ ID NO: 80250 - DNA, 15 bp, Homo sapiens
gtgatgtatatcatg

SEQ ID NO: 80251 - DNA, 15 bp, Homo sapiens
agtgatgtatatcat

SEQ ID NO: 80252 - DNA, 15 bp, Homo sapiens
cagtgatgtatatca

SEQ ID NO: 80253 - DNA, 15 bp, Homo sapiens
gcagtgatgtatatc

SEQ ID NO: 80254 - DNA, 15 bp, Homo sapiens
tgcagtgatgtatat

SEQ ID NO: 80255 - DNA, 15 bp, Homo sapiens
atgcagtgatgtata

SEQ ID NO: 80256 - DNA, 15 bp, Homo sapiens
tatgcagtgatgtat

SEQ ID NO: 80257 - DNA, 15 bp, Homo sapiens
ttatgcagtgatgta

SEQ ID NO: 80258 - DNA, 15 bp, Homo sapiens
cttatgcagtgatgt

SEQ ID NO: 80259 - DNA, 15 bp, Homo sapiens
gcttatgcagtgatg

SEQ ID NO: 80260 - DNA, 15 bp, Homo sapiens
ggcttatgcagtgat

SEQ ID NO: 80261 - DNA, 15 bp, Homo sapiens
gggcttatgcagtga

SEQ ID NO: 80262 - DNA, 15 bp, Homo sapiens
agggcttatgcagtg

SEQ ID NO: 80263 - DNA, 15 bp, Homo sapiens
cagggcttatgcagt

SEQ ID NO: 80264 - DNA, 15 bp, Homo sapiens
gcagggcttatgcag

SEQ ID NO: 80265 - DNA, 15 bp, Homo sapiens
tgcagggcttatgca

SEQ ID NO: 80266 - DNA, 15 bp, Homo sapiens
ttgcagggcttatgc

SEQ ID NO: 80267 - DNA, 15 bp, Homo sapiens
tttgcagggcttatg

SEQ ID NO: 80268 - DNA, 15 bp, Homo sapiens
gtttgcagggcttat

SEQ ID NO: 80269 - DNA, 15 bp, Homo sapiens
agtttgcagggctta

SEQ ID NO: 80270 - DNA, 15 bp, Homo sapiens
cagtttgcagggctt

SEQ ID NO: 80271 - DNA, 15 bp, Homo sapiens
tcagtttgcagggct

SEQ ID NO: 80272 - DNA, 15 bp, Homo sapiens
ttcagtttgcagggc

SEQ ID NO: 80273 - DNA, 15 bp, Homo sapiens
gttcagtttgcaggg

SEQ ID NO: 80274 - DNA, 15 bp, Homo sapiens
agttcagtttgcagg

SEQ ID NO: 80275 - DNA, 15 bp, Homo sapiens
cagttcagtttgcag

SEQ ID NO: 80276 - DNA, 15 bp, Homo sapiens
tcagttcagtttgca

SEQ ID NO: 80277 - DNA, 15 bp, Homo sapiens
gtcagttcagtttgc

SEQ ID NO: 80278 - DNA, 15 bp, Homo sapiens
agtcagttcagtttg

SEQ ID NO: 80279 - DNA, 15 bp, Homo sapiens
gagtcagttcagttt

SEQ ID NO: 80280 - DNA, 15 bp, Homo sapiens
tgagtcagttcagtt

SEQ ID NO: 80281 - DNA, 15 bp, Homo sapiens
ttgagtcagttcagt

SEQ ID NO: 80282 - DNA, 15 bp, Homo sapiens
attgagtcagttcag

SEQ ID NO: 80283 - DNA, 15 bp, Homo sapiens
aattgagtcagttca

SEQ ID NO: 80284 - DNA, 15 bp, Homo sapiens
aaattgagtcagttc

SEQ ID NO: 80285 - DNA, 15 bp, Homo sapiens
taaattgagtcagtt

SEQ ID NO: 80286 - DNA, 15 bp, Homo sapiens
gtaaattgagtcagt

SEQ ID NO: 80287 - DNA, 15 bp, Homo sapiens
tgtaaattgagtcag

SEQ ID NO: 80288 - DNA, 15 bp, Homo sapiens
atgtaaattgagtca

SEQ ID NO: 80289 - DNA, 15 bp, Homo sapiens
gatgtaaattgagtc

SEQ ID NO: 80290 - DNA, 15 bp, Homo sapiens
agatgtaaattgagt

SEQ ID NO: 80291 - DNA, 15 bp, Homo sapiens
gagatgtaaattgag

SEQ ID NO: 80292 - DNA, 15 bp, Homo sapiens
agagatgtaaattga

SEQ ID NO: 80293 - DNA, 15 bp, Homo sapiens
tagagatgtaaattg

SEQ ID NO: 80294 - DNA, 15 bp, Homo sapiens
atagagatgtaaatt

SEQ ID NO: 80295 - DNA, 15 bp, Homo sapiens
aatagagatgtaaat

SEQ ID NO: 80296 - DNA, 15 bp, Homo sapiens
gaatagagatgtaaa

SEQ ID NO: 80297 - DNA, 15 bp, Homo sapiens
tgaatagagatgtaa

SEQ ID NO: 80298 - DNA, 15 bp, Homo sapiens
atgaatagagatgta

SEQ ID NO: 80299 - DNA, 15 bp, Homo sapiens
tatgaatagagatgt

SEQ ID NO: 80300 - DNA, 15 bp, Homo sapiens
atatgaatagagatg

SEQ ID NO: 80301 - DNA, 15 bp, Homo sapiens
catatgaatagagat

SEQ ID NO: 80302 - DNA, 15 bp, Homo sapiens
gcatatgaatagaga

SEQ ID NO: 80303 - DNA, 15 bp, Homo sapiens
agcatatgaatagag

SEQ ID NO: 80304 - DNA, 15 bp, Homo sapiens
gagcatatgaataga

SEQ ID NO: 80305 - DNA, 15 bp, Homo sapiens
agagcatatgaatag

SEQ ID NO: 80306 - DNA, 15 bp, Homo sapiens
aagagcatatgaata

SEQ ID NO: 80307 - DNA, 15 bp, Homo sapiens
aaagagcatatgaat

SEQ ID NO: 80308 - DNA, 15 bp, Homo sapiens
gaaagagcatatgaa

SEQ ID NO: 80309 - DNA, 15 bp, Homo sapiens
agaaagagcatatga

SEQ ID NO: 80310 - DNA, 15 bp, Homo sapiens
gagaaagagcatatg

SEQ ID NO: 80311 - DNA, 15 bp, Homo sapiens
tgagaaagagcatat

SEQ ID NO: 80312 - DNA, 15 bp, Homo sapiens
ctgagaaagagcata

SEQ ID NO: 80313 - DNA, 15 bp, Homo sapiens
gctgagaaagagcat

SEQ ID NO: 80314 - DNA, 15 bp, Homo sapiens
ggctgagaaagagca

SEQ ID NO: 80315 - DNA, 15 bp, Homo sapiens
aggctgagaaagagc

SEQ ID NO: 80316 - DNA, 15 bp, Homo sapiens
taggctgagaaagag

SEQ ID NO: 80317 - DNA, 15 bp, Homo sapiens
ctaggctgagaaaga

SEQ ID NO: 80318 - DNA, 15 bp, Homo sapiens
tctaggctgagaaag

SEQ ID NO: 80319 - DNA, 15 bp, Homo sapiens
ttctaggctgagaaa

SEQ ID NO: 80320 - DNA, 15 bp, Homo sapiens
attctaggctgagaa

SEQ ID NO: 80321 - DNA, 15 bp, Homo sapiens
cattctaggctgaga

SEQ ID NO: 80322 - DNA, 15 bp, Homo sapiens
gcattctaggctgag

SEQ ID NO: 80323 - DNA, 15 bp, Homo sapiens
agcattctaggctga

SEQ ID NO: 80324 - DNA, 15 bp, Homo sapiens
gagcattctaggctg

SEQ ID NO: 80325 - DNA, 15 bp, Homo sapiens
agagcattctaggct

SEQ ID NO: 80326 - DNA, 15 bp, Homo sapiens
gagagcattctaggc

SEQ ID NO: 80327 - DNA, 15 bp, Homo sapiens
agagagcattctagg

SEQ ID NO: 80328 - DNA, 15 bp, Homo sapiens
gagagagcattctag

SEQ ID NO: 80329 - DNA, 15 bp, Homo sapiens
tgagagagcattcta

SEQ ID NO: 80330 - DNA, 15 bp, Homo sapiens
ttgagagagcattct

SEQ ID NO: 80331 - DNA, 15 bp, Homo sapiens
tttgagagagcattc

SEQ ID NO: 80332 - DNA, 15 bp, Homo sapiens
ttttgagagagcatt

SEQ ID NO: 80333 - DNA, 15 bp, Homo sapiens
attttgagagagcat

SEQ ID NO: 80334 - DNA, 15 bp, Homo sapiens
gattttgagagagca

SEQ ID NO: 80335 - DNA, 15 bp, Homo sapiens
agattttgagagagc

SEQ ID NO: 80336 - DNA, 15 bp, Homo sapiens
tagattttgagagag

SEQ ID NO: 80337 - DNA, 15 bp, Homo sapiens
ctagattttgagaga

SEQ ID NO: 80338 - DNA, 15 bp, Homo sapiens
gctagattttgagag

SEQ ID NO: 80339 - DNA, 15 bp, Homo sapiens
agctagattttgaga

SEQ ID NO: 80340 - DNA, 15 bp, Homo sapiens
gagctagattttgag

SEQ ID NO: 80341 - DNA, 15 bp, Homo sapiens
ggagctagattttga

SEQ ID NO: 80342 - DNA, 15 bp, Homo sapiens
gggagctagattttg

SEQ ID NO: 80343 - DNA, 15 bp, Homo sapiens
ggggagctagatttt

SEQ ID NO: 80344 - DNA, 15 bp, Homo sapiens
tggggagctagattt

SEQ ID NO: 80345 - DNA, 15 bp, Homo sapiens
ttggggagctagatt

SEQ ID NO: 80346 - DNA, 15 bp, Homo sapiens
tttggggagctagat

SEQ ID NO: 80347 - DNA, 15 bp, Homo sapiens
gtttggggagctaga

SEQ ID NO: 80348 - DNA, 15 bp, Homo sapiens
agtttggggagctag

SEQ ID NO: 80349 - DNA, 15 bp, Homo sapiens
aagtttggggagcta

SEQ ID NO: 80350 - DNA, 15 bp, Homo sapiens
gaagtttggggagct

SEQ ID NO: 80351 - DNA, 15 bp, Homo sapiens
agaagtttggggagc

SEQ ID NO: 80352 - DNA, 15 bp, Homo sapiens
gagaagtttggggag

SEQ ID NO: 80353 - DNA, 15 bp, Homo sapiens
agagaagtttgggga

SEQ ID NO: 80354 - DNA, 15 bp, Homo sapiens
tagagaagtttgggg

SEQ ID NO: 80355 - DNA, 15 bp, Homo sapiens
ttagagaagtttggg

SEQ ID NO: 80356 - DNA, 15 bp, Homo sapiens
tttagagaagtttgg

SEQ ID NO: 80357 - DNA, 15 bp, Homo sapiens
ttttagagaagtttg

SEQ ID NO: 80358 - DNA, 15 bp, Homo sapiens
tttttagagaagttt

SEQ ID NO: 80359 - DNA, 15 bp, Homo sapiens
ctttttagagaagtt

SEQ ID NO: 80360 - DNA, 15 bp, Homo sapiens
tctttttagagaagt

SEQ ID NO: 80361 - DNA, 15 bp, Homo sapiens
atctttttagagaag

SEQ ID NO: 80362 - DNA, 15 bp, Homo sapiens
aatctttttagagaa

SEQ ID NO: 80363 - DNA, 15 bp, Homo sapiens
aaatctttttagaga

SEQ ID NO: 80364 - DNA, 15 bp, Homo sapiens
gaaatctttttagag

SEQ ID NO: 80365 - DNA, 15 bp, Homo sapiens
agaaatctttttaga

SEQ ID NO: 80366 - DNA, 15 bp, Homo sapiens
aagaaatctttttag

SEQ ID NO: 80367 - DNA, 15 bp, Homo sapiens
aaagaaatcttttta

SEQ ID NO: 80368 - DNA, 15 bp, Homo sapiens
gaaagaaatcttttt

SEQ ID NO: 80369 - DNA, 15 bp, Homo sapiens
tgaaagaaatctttt

SEQ ID NO: 80370 - DNA, 15 bp, Homo sapiens
atgaaagaaatcttt

SEQ ID NO: 80371 - DNA, 15 bp, Homo sapiens
aatgaaagaaatctt

SEQ ID NO: 80372 - DNA, 15 bp, Homo sapiens
aaatgaaagaaatct

SEQ ID NO: 80373 - DNA, 15 bp, Homo sapiens
taaatgaaagaaatc

SEQ ID NO: 80374 - DNA, 15 bp, Homo sapiens
ataaatgaaagaaat

SEQ ID NO: 80375 - DNA, 15 bp, Homo sapiens
aataaatgaaagaaa

SEQ ID NO: 80376 - DNA, 15 bp, Homo sapiens
aaataaatgaaagaa

SEQ ID NO: 80377 - DNA, 15 bp, Homo sapiens
gaaataaatgaaaga

SEQ ID NO: 80378 - DNA, 15 bp, Homo sapiens
ggaaataaatgaaag

SEQ ID NO: 80379 - DNA, 15 bp, Homo sapiens
gggaaataaatgaaa

SEQ ID NO: 80380 - DNA, 15 bp, Homo sapiens
ggggaaataaatgaa

SEQ ID NO: 80381 - DNA, 15 bp, Homo sapiens
aggggaaataaatga

SEQ ID NO: 80382 - DNA, 15 bp, Homo sapiens
aaggggaaataaatg

SEQ ID NO: 80383 - DNA, 15 bp, Homo sapiens
aaaggggaaataaat

SEQ ID NO: 80384 - DNA, 15 bp, Homo sapiens
aaaaggggaaataaa

SEQ ID NO: 80385 - DNA, 15 bp, Homo sapiens
aaaaaggggaaataa

SEQ ID NO: 80386 - DNA, 15 bp, Homo sapiens
aaaaaaggggaaata

SEQ ID NO: 80387 - DNA, 15 bp, Homo sapiens
gaaaaaaggggaaat

SEQ ID NO: 80388 - DNA, 15 bp, Homo sapiens
agaaaaaaggggaaa

SEQ ID NO: 80389 - DNA, 15 bp, Homo sapiens
gagaaaaaaggggaa

SEQ ID NO: 80390 - DNA, 15 bp, Homo sapiens
ggagaaaaaagggga

SEQ ID NO: 80391 - DNA, 15 bp, Homo sapiens
aggagaaaaaagggg

SEQ ID NO: 80392 - DNA, 15 bp, Homo sapiens
aaggagaaaaaaggg

SEQ ID NO: 80393 - DNA, 15 bp, Homo sapiens
gaaggagaaaaaagg

SEQ ID NO: 80394 - DNA, 15 bp, Homo sapiens
agaaggagaaaaaag

SEQ ID NO: 80395 - DNA, 15 bp, Homo sapiens
tagaaggagaaaaaa

SEQ ID NO: 80396 - DNA, 15 bp, Homo sapiens
gtagaaggagaaaaa

SEQ ID NO: 80397 - DNA, 15 bp, Homo sapiens
ggtagaaggagaaaa

SEQ ID NO: 80398 - DNA, 15 bp, Homo sapiens
gggtagaaggagaaa

SEQ ID NO: 80399 - DNA, 15 bp, Homo sapiens
agggtagaaggagaa

SEQ ID NO: 80400 - DNA, 15 bp, Homo sapiens
cagggtagaaggaga

SEQ ID NO: 80401 - DNA, 15 bp, Homo sapiens
acagggtagaaggag

SEQ ID NO: 80402 - DNA, 15 bp, Homo sapiens
gacagggtagaagga

SEQ ID NO: 80403 - DNA, 15 bp, Homo sapiens
agacagggtagaagg

SEQ ID NO: 80404 - DNA, 15 bp, Homo sapiens
gagacagggtagaag

SEQ ID NO: 80405 - DNA, 15 bp, Homo sapiens
ggagacagggtagaa

SEQ ID NO: 80406 - DNA, 15 bp, Homo sapiens
tggagacagggtaga

SEQ ID NO: 80407 - DNA, 15 bp, Homo sapiens
atggagacagggtag

SEQ ID NO: 80408 - DNA, 15 bp, Homo sapiens
tatggagacagggta

SEQ ID NO: 80409 - DNA, 15 bp, Homo sapiens
ttatggagacagggt

SEQ ID NO: 80410 - DNA, 15 bp, Homo sapiens
gttatggagacaggg

SEQ ID NO: 80411 - DNA, 15 bp, Homo sapiens
tgttatggagacagg

SEQ ID NO: 80412 - DNA, 15 bp, Homo sapiens
ttgttatggagacag

SEQ ID NO: 80413 - DNA, 15 bp, Homo sapiens
gttgttatggagaca

SEQ ID NO: 80414 - DNA, 15 bp, Homo sapiens
agttgttatggagac

SEQ ID NO: 80415 - DNA, 15 bp, Homo sapiens
aagttgttatggaga

SEQ ID NO: 80416 - DNA, 15 bp, Homo sapiens
gaagttgttatggag

SEQ ID NO: 80417 - DNA, 15 bp, Homo sapiens
agaagttgttatgga

SEQ ID NO: 80418 - DNA, 15 bp, Homo sapiens
tagaagttgttatgg

SEQ ID NO: 80419 - DNA, 15 bp, Homo sapiens
atagaagttgttatg

SEQ ID NO: 80420 - DNA, 15 bp, Homo sapiens
gatagaagttgttat

SEQ ID NO: 80421 - DNA, 15 bp, Homo sapiens
agatagaagttgtta

SEQ ID NO: 80422 - DNA, 15 bp, Homo sapiens
gagatagaagttgtt

SEQ ID NO: 80423 - DNA, 15 bp, Homo sapiens
ggagatagaagttgt

SEQ ID NO: 80424 - DNA, 15 bp, Homo sapiens
aggagatagaagttg

SEQ ID NO: 80425 - DNA, 15 bp, Homo sapiens
aaggagatagaagtt

SEQ ID NO: 80426 - DNA, 15 bp, Homo sapiens
gaaggagatagaagt

SEQ ID NO: 80427 - DNA, 15 bp, Homo sapiens
agaaggagatagaag

SEQ ID NO: 80428 - DNA, 15 bp, Homo sapiens
aagaaggagatagaa

SEQ ID NO: 80429 - DNA, 15 bp, Homo sapiens
gaagaaggagataga

SEQ ID NO: 80430 - DNA, 15 bp, Homo sapiens
agaagaaggagatag

SEQ ID NO: 80431 - DNA, 15 bp, Homo sapiens
cagaagaaggagata

SEQ ID NO: 80432 - DNA, 15 bp, Homo sapiens
tcagaagaaggagat

SEQ ID NO: 80433 - DNA, 15 bp, Homo sapiens
atcagaagaaggaga

SEQ ID NO: 80434 - DNA, 15 bp, Homo sapiens
gatcagaagaaggag

SEQ ID NO: 80435 - DNA, 15 bp, Homo sapiens
agatcagaagaagga

SEQ ID NO: 80436 - DNA, 15 bp, Homo sapiens
aagatcagaagaagg

SEQ ID NO: 80437 - DNA, 15 bp, Homo sapiens
aaagatcagaagaag

SEQ ID NO: 80438 - DNA, 15 bp, Homo sapiens
gaaagatcagaagaa

SEQ ID NO: 80439 - DNA, 15 bp, Homo sapiens
tgaaagatcagaaga

SEQ ID NO: 80440 - DNA, 15 bp, Homo sapiens
atgaaagatcagaag

SEQ ID NO: 80441 - DNA, 15 bp, Homo sapiens
tatgaaagatcagaa

SEQ ID NO: 80442 - DNA, 15 bp, Homo sapiens
ctatgaaagatcaga

SEQ ID NO: 80443 - DNA, 15 bp, Homo sapiens
actatgaaagatcag

SEQ ID NO: 80444 - DNA, 15 bp, Homo sapiens
cactatgaaagatca

SEQ ID NO: 80445 - DNA, 15 bp, Homo sapiens
acactatgaaagatc

SEQ ID NO: 80446 - DNA, 15 bp, Homo sapiens
cacactatgaaagat

SEQ ID NO: 80447 - DNA, 15 bp, Homo sapiens
gcacactatgaaaga

SEQ ID NO: 80448 - DNA, 15 bp, Homo sapiens
agcacactatgaaag

SEQ ID NO: 80449 - DNA, 15 bp, Homo sapiens
cagcacactatgaaa

SEQ ID NO: 80450 - DNA, 15 bp, Homo sapiens
acagcacactatgaa

SEQ ID NO: 80451 - DNA, 15 bp, Homo sapiens
cacagcacactatga

SEQ ID NO: 80452 - DNA, 15 bp, Homo sapiens
acacagcacactatg

SEQ ID NO: 80453 - DNA, 15 bp, Homo sapiens
tacacagcacactat

SEQ ID NO: 80454 - DNA, 15 bp, Homo sapiens
atacacagcacacta

SEQ ID NO: 80455 - DNA, 15 bp, Homo sapiens
tatacacagcacact

SEQ ID NO: 80456 - DNA, 15 bp, Homo sapiens
gtatacacagcacac

SEQ ID NO: 80457 - DNA, 15 bp, Homo sapiens
agtatacacagcaca

SEQ ID NO: 80458 - DNA, 15 bp, Homo sapiens
tagtatacacagcac

SEQ ID NO: 80459 - DNA, 15 bp, Homo sapiens
gtagtatacacagca

SEQ ID NO: 80460 - DNA, 15 bp, Homo sapiens
agtagtatacacagc

SEQ ID NO: 80461 - DNA, 15 bp, Homo sapiens
tagtagtatacacag

SEQ ID NO: 80462 - DNA, 15 bp, Homo sapiens
gtagtagtatacaca

SEQ ID NO: 80463 - DNA, 15 bp, Homo sapiens
tgtagtagtatacac

SEQ ID NO: 80464 - DNA, 15 bp, Homo sapiens
ctgtagtagtataca

SEQ ID NO: 80465 - DNA, 15 bp, Homo sapiens
actgtagtagtatac

SEQ ID NO: 80466 - DNA, 15 bp, Homo sapiens
gactgtagtagtata

SEQ ID NO: 80467 - DNA, 15 bp, Homo sapiens
ggactgtagtagtat

SEQ ID NO: 80468 - DNA, 15 bp, Homo sapiens
aggactgtagtagta

SEQ ID NO: 80469 - DNA, 15 bp, Homo sapiens
caggactgtagtagt

SEQ ID NO: 80470 - DNA, 15 bp, Homo sapiens
acaggactgtagtag

SEQ ID NO: 80471 - DNA, 15 bp, Homo sapiens
cacaggactgtagta

SEQ ID NO: 80472 - DNA, 15 bp, Homo sapiens
acacaggactgtagt

SEQ ID NO: 80473 - DNA, 15 bp, Homo sapiens
aacacaggactgtag

SEQ ID NO: 80474 - DNA, 15 bp, Homo sapiens
taacacaggactgta

SEQ ID NO: 80475 - DNA, 15 bp, Homo sapiens
gtaacacaggactgt

SEQ ID NO: 80476 - DNA, 15 bp, Homo sapiens
tgtaacacaggactg

SEQ ID NO: 80477 - DNA, 15 bp, Homo sapiens
atgtaacacaggact

SEQ ID NO: 80478 - DNA, 15 bp, Homo sapiens
tatgtaacacaggac

SEQ ID NO: 80479 - DNA, 15 bp, Homo sapiens
ttatgtaacacagga

SEQ ID NO: 80480 - DNA, 15 bp, Homo sapiens
gttatgtaacacagg

SEQ ID NO: 80481 - DNA, 15 bp, Homo sapiens
tgttatgtaacacag

SEQ ID NO: 80482 - DNA, 15 bp, Homo sapiens
ttgttatgtaacaca

SEQ ID NO: 80483 - DNA, 15 bp, Homo sapiens
gttgttatgtaacac

SEQ ID NO: 80484 - DNA, 15 bp, Homo sapiens
tttcaacataaataa

SEQ ID NO: 80485 - DNA, 15 bp, Homo sapiens
atttcaacataaata

SEQ ID NO: 80486 - DNA, 15 bp, Homo sapiens
catttcaacataaat

SEQ ID NO: 80487 - DNA, 15 bp, Homo sapiens
tcatttcaacataaa

SEQ ID NO: 80488 - DNA, 15 bp, Homo sapiens
atcatttcaacataa

SEQ ID NO: 80489 - DNA, 15 bp, Homo sapiens
catcatttcaacata

SEQ ID NO: 80490 - DNA, 15 bp, Homo sapiens
ccatcatttcaacat

SEQ ID NO: 80491 - DNA, 15 bp, Homo sapiens
cccatcatttcaaca

SEQ ID NO: 80492 - DNA, 15 bp, Homo sapiens
gcccatcatttcaac

SEQ ID NO: 80493 - DNA, 15 bp, Homo sapiens
tgcccatcatttcaa

SEQ ID NO: 80494 - DNA, 15 bp, Homo sapiens
ttgcccatcatttca

SEQ ID NO: 80495 - DNA, 15 bp, Homo sapiens
tttgcccatcatttc

SEQ ID NO: 80496 - DNA, 15 bp, Homo sapiens
atttgcccatcattt

SEQ ID NO: 80497 - DNA, 15 bp, Homo sapiens
catttgcccatcatt

SEQ ID NO: 80498 - DNA, 15 bp, Homo sapiens
gcatttgcccatcat

SEQ ID NO: 80499 - DNA, 15 bp, Homo sapiens
tgcatttgcccatca

SEQ ID NO: 80500 - DNA, 15 bp, Homo sapiens
ctgcatttgcccatc

SEQ ID NO: 80501 - DNA, 15 bp, Homo sapiens
gctgcatttgcccat

SEQ ID NO: 80502 - DNA, 15 bp, Homo sapiens
agctgcatttgccca

SEQ ID NO: 80503 - DNA, 15 bp, Homo sapiens
tagctgcatttgccc

SEQ ID NO: 80504 - DNA, 15 bp, Homo sapiens
gtagctgcatttgcc

SEQ ID NO: 80505 - DNA, 15 bp, Homo sapiens
tgtagctgcatttgc

SEQ ID NO: 80506 - DNA, 15 bp, Homo sapiens
ctgtagctgcatttg

SEQ ID NO: 80507 - DNA, 15 bp, Homo sapiens
tctgtagctgcattt

SEQ ID NO: 80508 - DNA, 15 bp, Homo sapiens
atctgtagctgcatt

SEQ ID NO: 80509 - DNA, 15 bp, Homo sapiens
gatctgtagctgcat

SEQ ID NO: 80510 - DNA, 15 bp, Homo sapiens
agatctgtagctgca

SEQ ID NO: 80511 - DNA, 15 bp, Homo sapiens
gagatctgtagctgc

SEQ ID NO: 80512 - DNA, 15 bp, Homo sapiens
tgagatctgtagctg

SEQ ID NO: 80513 - DNA, 15 bp, Homo sapiens
ttgagatctgtagct

SEQ ID NO: 80514 - DNA, 15 bp, Homo sapiens
attgagatctgtagc

SEQ ID NO: 80515 - DNA, 15 bp, Homo sapiens
gattgagatctgtag

SEQ ID NO: 80516 - DNA, 15 bp, Homo sapiens
agattgagatctgta

SEQ ID NO: 80517 - DNA, 15 bp, Homo sapiens
tagattgagatctgt

SEQ ID NO: 80518 - DNA, 15 bp, Homo sapiens
atagattgagatctg

SEQ ID NO: 80519 - DNA, 15 bp, Homo sapiens
catagattgagatct

SEQ ID NO: 80520 - DNA, 15 bp, Homo sapiens
tcatagattgagatc

SEQ ID NO: 80521 - DNA, 15 bp, Homo sapiens
atcatagattgagat

SEQ ID NO: 80522 - DNA, 15 bp, Homo sapiens
tatcatagattgaga

SEQ ID NO: 80523 - DNA, 15 bp, Homo sapiens
gtatcatagattgag

SEQ ID NO: 80524 - DNA, 15 bp, Homo sapiens
agtatcatagattga

SEQ ID NO: 80525 - DNA, 15 bp, Homo sapiens
aagtatcatagattg

SEQ ID NO: 80526 - DNA, 15 bp, Homo sapiens
taagtatcatagatt

SEQ ID NO: 80527 - DNA, 15 bp, Homo sapiens
ataagtatcatagat

SEQ ID NO: 80528 - DNA, 15 bp, Homo sapiens
gataagtatcataga

SEQ ID NO: 80529 - DNA, 15 bp, Homo sapiens
tgataagtatcatag

SEQ ID NO: 80530 - DNA, 15 bp, Homo sapiens
ttgataagtatcata

SEQ ID NO: 80531 - DNA, 15 bp, Homo sapiens
cttgataagtatcat

SEQ ID NO: 80532 - DNA, 15 bp, Homo sapiens
gcttgataagtatca

SEQ ID NO: 80533 - DNA, 15 bp, Homo sapiens
tgcttgataagtatc

SEQ ID NO: 80534 - DNA, 15 bp, Homo sapiens
ttgcttgataagtat

SEQ ID NO: 80535 - DNA, 15 bp, Homo sapiens
tttgcttgataagta

SEQ ID NO: 80536 - DNA, 15 bp, Homo sapiens
atttgcttgataagt

SEQ ID NO: 80537 - DNA, 15 bp, Homo sapiens
gatttgcttgataag

SEQ ID NO: 80538 - DNA, 15 bp, Homo sapiens
tgatttgcttgataa

SEQ ID NO: 80539 - DNA, 15 bp, Homo sapiens
ttgatttgcttgata

SEQ ID NO: 80540 - DNA, 15 bp, Homo sapiens
gttgatttgcttgat

SEQ ID NO: 80541 - DNA, 15 bp, Homo sapiens
agttgatttgcttga

SEQ ID NO: 80542 - DNA, 15 bp, Homo sapiens
gagttgatttgcttg

SEQ ID NO: 80543 - DNA, 15 bp, Homo sapiens
agagttgatttgctt

SEQ ID NO: 80544 - DNA, 15 bp, Homo sapiens
aagagttgatttgct

SEQ ID NO: 80545 - DNA, 15 bp, Homo sapiens
aaagagttgatttgc

SEQ ID NO: 80546 - DNA, 15 bp, Homo sapiens
gaaagagttgatttg

SEQ ID NO: 80547 - DNA, 15 bp, Homo sapiens
agaaagagttgattt

SEQ ID NO: 80548 - DNA, 15 bp, Homo sapiens
aagaaagagttgatt

SEQ ID NO: 80549 - DNA, 15 bp, Homo sapiens
caagaaagagttgat

SEQ ID NO: 80550 - DNA, 15 bp, Homo sapiens
acaagaaagagttga

SEQ ID NO: 80551 - DNA, 15 bp, Homo sapiens
tacaagaaagagttg

SEQ ID NO: 80552 - DNA, 15 bp, Homo sapiens
ttacaagaaagagtt

SEQ ID NO: 80553 - DNA, 15 bp, Homo sapiens
attacaagaaagagt

SEQ ID NO: 80554 - DNA, 15 bp, Homo sapiens
cattacaagaaagag

SEQ ID NO: 80555 - DNA, 15 bp, Homo sapiens
acattacaagaaaga

SEQ ID NO: 80556 - DNA, 15 bp, Homo sapiens
gacattacaagaaag

SEQ ID NO: 80557 - DNA, 15 bp, Homo sapiens
tgacattacaagaaa

SEQ ID NO: 80558 - DNA, 15 bp, Homo sapiens
atgacattacaagaa

SEQ ID NO: 80559 - DNA, 15 bp, Homo sapiens
catgacattacaaga

SEQ ID NO: 80560 - DNA, 15 bp, Homo sapiens
tcatgacattacaag

SEQ ID NO: 80561 - DNA, 15 bp, Homo sapiens
gtcatgacattacaa

SEQ ID NO: 80562 - DNA, 15 bp, Homo sapiens
agtcatgacattaca

SEQ ID NO: 80563 - DNA, 15 bp, Homo sapiens
aagtcatgacattac

SEQ ID NO: 80564 - DNA, 15 bp, Homo sapiens
aaagtcatgacatta

SEQ ID NO: 80565 - DNA, 15 bp, Homo sapiens
aaaagtcatgacatt

SEQ ID NO: 80566 - DNA, 15 bp, Homo sapiens
gaaaagtcatgacat

SEQ ID NO: 80567 - DNA, 15 bp, Homo sapiens
agaaaagtcatgaca

SEQ ID NO: 80568 - DNA, 15 bp, Homo sapiens
gagaaaagtcatgac

SEQ ID NO: 80569 - DNA, 15 bp, Homo sapiens
agagaaaagtcatga

SEQ ID NO: 80570 - DNA, 15 bp, Homo sapiens
cagagaaaagtcatg

SEQ ID NO: 80571 - DNA, 15 bp, Homo sapiens
gcagagaaaagtcat

SEQ ID NO: 80572 - DNA, 15 bp, Homo sapiens
agcagagaaaagtca

SEQ ID NO: 80573 - DNA, 15 bp, Homo sapiens
aagcagagaaaagtc

SEQ ID NO: 80574 - DNA, 15 bp, Homo sapiens
gaagcagagaaaagt

SEQ ID NO: 80575 - DNA, 15 bp, Homo sapiens
agaagcagagaaaag

SEQ ID NO: 80576 - DNA, 15 bp, Homo sapiens
aagaagcagagaaaa

SEQ ID NO: 80577 - DNA, 15 bp, Homo sapiens
caagaagcagagaaa

SEQ ID NO: 80578 - DNA, 15 bp, Homo sapiens
ccaagaagcagagaa

SEQ ID NO: 80579 - DNA, 15 bp, Homo sapiens
cccaagaagcagaga

SEQ ID NO: 80580 - DNA, 15 bp, Homo sapiens
tcccaagaagcagag

SEQ ID NO: 80581 - DNA, 15 bp, Homo sapiens
ctcccaagaagcaga

SEQ ID NO: 80582 - DNA, 15 bp, Homo sapiens
gctcccaagaagcag

SEQ ID NO: 80583 - DNA, 15 bp, Homo sapiens
tgctcccaagaagca

SEQ ID NO: 80584 - DNA, 15 bp, Homo sapiens
gtgctcccaagaagc

SEQ ID NO: 80585 - DNA, 15 bp, Homo sapiens
agtgctcccaagaag

SEQ ID NO: 80586 - DNA, 15 bp, Homo sapiens
aagtgctcccaagaa

SEQ ID NO: 80587 - DNA, 15 bp, Homo sapiens
caagtgctcccaaga

SEQ ID NO: 80588 - DNA, 15 bp, Homo sapiens
gcaagtgctcccaag

SEQ ID NO: 80589 - DNA, 15 bp, Homo sapiens
tgcaagtgctcccaa

SEQ ID NO: 80590 - DNA, 15 bp, Homo sapiens
ctgcaagtgctccca

SEQ ID NO: 80591 - DNA, 15 bp, Homo sapiens
actgcaagtgctccc

SEQ ID NO: 80592 - DNA, 15 bp, Homo sapiens
tactgcaagtgctcc

SEQ ID NO: 80593 - DNA, 15 bp, Homo sapiens
atactgcaagtgctc

SEQ ID NO: 80594 - DNA, 15 bp, Homo sapiens
gatactgcaagtgct

SEQ ID NO: 80595 - DNA, 15 bp, Homo sapiens
tgatactgcaagtgc

SEQ ID NO: 80596 - DNA, 15 bp, Homo sapiens
gtgatactgcaagtg

SEQ ID NO: 80597 - DNA, 15 bp, Homo sapiens
agtgatactgcaagt

SEQ ID NO: 80598 - DNA, 15 bp, Homo sapiens
tagtgatactgcaag

SEQ ID NO: 80599 - DNA, 15 bp, Homo sapiens
ctagtgatactgcaa

SEQ ID NO: 80600 - DNA, 15 bp, Homo sapiens
tctagtgatactgca

SEQ ID NO: 80601 - DNA, 15 bp, Homo sapiens
ttctagtgatactgc

SEQ ID NO: 80602 - DNA, 15 bp, Homo sapiens
cttctagtgatactg

SEQ ID NO: 80603 - DNA, 15 bp, Homo sapiens
gcttctagtgatact

SEQ ID NO: 80604 - DNA, 15 bp, Homo sapiens
tgcttctagtgatac

SEQ ID NO: 80605 - DNA, 15 bp, Homo sapiens
gtgcttctagtgata

SEQ ID NO: 80606 - DNA, 15 bp, Homo sapiens
agtgcttctagtgat

SEQ ID NO: 80607 - DNA, 15 bp, Homo sapiens
tagtgcttctagtga

SEQ ID NO: 80608 - DNA, 15 bp, Homo sapiens
gtagtgcttctagtg

SEQ ID NO: 80609 - DNA, 15 bp, Homo sapiens
tgtagtgcttctagt

SEQ ID NO: 80610 - DNA, 15 bp, Homo sapiens
atgtagtgcttctag

SEQ ID NO: 80611 - DNA, 15 bp, Homo sapiens
catgtagtgcttcta

SEQ ID NO: 80612 - DNA, 15 bp, Homo sapiens
acatgtagtgcttct

SEQ ID NO: 80613 - DNA, 15 bp, Homo sapiens
cacatgtagtgcttc

SEQ ID NO: 80614 - DNA, 15 bp, Homo sapiens
ccacatgtagtgctt

SEQ ID NO: 80615 - DNA, 15 bp, Homo sapiens
cccacatgtagtgct

SEQ ID NO: 80616 - DNA, 15 bp, Homo sapiens
acccacatgtagtgc

SEQ ID NO: 80617 - DNA, 15 bp, Homo sapiens
gacccacatgtagtg

SEQ ID NO: 80618 - DNA, 15 bp, Homo sapiens
ggacccacatgtagt

SEQ ID NO: 80619 - DNA, 15 bp, Homo sapiens
gggacccacatgtag

SEQ ID NO: 80620 - DNA, 15 bp, Homo sapiens
tgggacccacatgta

SEQ ID NO: 80621 - DNA, 15 bp, Homo sapiens
atgggacccacatgt

SEQ ID NO: 80622 - DNA, 15 bp, Homo sapiens
catgggacccacatg

SEQ ID NO: 80623 - DNA, 15 bp, Homo sapiens
ccatgggacccacat

SEQ ID NO: 80624 - DNA, 15 bp, Homo sapiens
accatgggacccaca

SEQ ID NO: 80625 - DNA, 15 bp, Homo sapiens
taccatgggacccac

SEQ ID NO: 80626 - DNA, 15 bp, Homo sapiens
ataccatgggaccca

SEQ ID NO: 80627 - DNA, 15 bp, Homo sapiens
aataccatgggaccc

SEQ ID NO: 80628 - DNA, 15 bp, Homo sapiens
taataccatgggacc

SEQ ID NO: 80629 - DNA, 15 bp, Homo sapiens
ataataccatgggac

SEQ ID NO: 80630 - DNA, 15 bp, Homo sapiens
aataataccatggga

SEQ ID NO: 80631 - DNA, 15 bp, Homo sapiens
gaataataccatggg

SEQ ID NO: 80632 - DNA, 15 bp, Homo sapiens
tgaataataccatgg

SEQ ID NO: 80633 - DNA, 15 bp, Homo sapiens
ttgaataataccatg

SEQ ID NO: 80634 - DNA, 15 bp, Homo sapiens
attgaataataccat

SEQ ID NO: 80635 - DNA, 15 bp, Homo sapiens
cattgaataatacca

SEQ ID NO: 80636 - DNA, 15 bp, Homo sapiens
acattgaataatacc

SEQ ID NO: 80637 - DNA, 15 bp, Homo sapiens
aacattgaataatac

SEQ ID NO: 80638 - DNA, 15 bp, Homo sapiens
aaacattgaataata

SEQ ID NO: 80639 - DNA, 15 bp, Homo sapiens
taaacattgaataat

SEQ ID NO: 80640 - DNA, 15 bp, Homo sapiens
gtaaacattgaataa

SEQ ID NO: 80641 - DNA, 15 bp, Homo sapiens
tgtaaacattgaata

SEQ ID NO: 80642 - DNA, 15 bp, Homo sapiens
ttgtaaacattgaat

SEQ ID NO: 80643 - DNA, 15 bp, Homo sapiens
attgtaaacattgaa

SEQ ID NO: 80644 - DNA, 15 bp, Homo sapiens
tattgtaaacattga

SEQ ID NO: 80645 - DNA, 15 bp, Homo sapiens
gtattgtaaacattg

SEQ ID NO: 80646 - DNA, 15 bp, Homo sapiens
agtattgtaaacatt

SEQ ID NO: 80647 - DNA, 15 bp, Homo sapiens
cagtattgtaaacat

SEQ ID NO: 80648 - DNA, 15 bp, Homo sapiens
acagtattgtaaaca

SEQ ID NO: 80649 - DNA, 15 bp, Homo sapiens
tacagtattgtaaac

SEQ ID NO: 80650 - DNA, 15 bp, Homo sapiens
gtacagtattgtaaa

SEQ ID NO: 80651 - DNA, 15 bp, Homo sapiens
agtacagtattgtaa

SEQ ID NO: 80652 - DNA, 15 bp, Homo sapiens
tagtacagtattgta

SEQ ID NO: 80653 - DNA, 15 bp, Homo sapiens
gtagtacagtattgt

SEQ ID NO: 80654 - DNA, 15 bp, Homo sapiens
ggtagtacagtattg

SEQ ID NO: 80655 - DNA, 15 bp, Homo sapiens
gggtagtacagtatt

SEQ ID NO: 80656 - DNA, 15 bp, Homo sapiens
tgggtagtacagtat

SEQ ID NO: 80657 - DNA, 15 bp, Homo sapiens
gtgggtagtacagta

SEQ ID NO: 80658 - DNA, 15 bp, Homo sapiens
tgtgggtagtacagt

SEQ ID NO: 80659 - DNA, 15 bp, Homo sapiens
ttgtgggtagtacag

SEQ ID NO: 80660 - DNA, 15 bp, Homo sapiens
attgtgggtagtaca

SEQ ID NO: 80661 - DNA, 15 bp, Homo sapiens
cattgtgggtagtac

SEQ ID NO: 80662 - DNA, 15 bp, Homo sapiens
tcattgtgggtagta

SEQ ID NO: 80663 - DNA, 15 bp, Homo sapiens
ttcattgtgggtagt

SEQ ID NO: 80664 - DNA, 15 bp, Homo sapiens
tttcattgtgggtag

SEQ ID NO: 80665 - DNA, 15 bp, Homo sapiens
ttttcattgtgggta

SEQ ID NO: 80666 - DNA, 15 bp, Homo sapiens
tttttcattgtgggt

SEQ ID NO: 80667 - DNA, 15 bp, Homo sapiens
atttttcattgtggg

SEQ ID NO: 80668 - DNA, 15 bp, Homo sapiens
tatttttcattgtgg

SEQ ID NO: 80669 - DNA, 15 bp, Homo sapiens
gtatttttcattgtg

SEQ ID NO: 80670 - DNA, 15 bp, Homo sapiens
tgtatttttcattgt

SEQ ID NO: 80671 - DNA, 15 bp, Homo sapiens
atgtatttttcattg

SEQ ID NO: 80672 - DNA, 15 bp, Homo sapiens
catgtatttttcatt

SEQ ID NO: 80673 - DNA, 15 bp, Homo sapiens
tcatgtatttttcat

SEQ ID NO: 80674 - DNA, 15 bp, Homo sapiens
ctcatgtatttttca

SEQ ID NO: 80675 - DNA, 15 bp, Homo sapiens
tctcatgtatttttc

SEQ ID NO: 80676 - DNA, 15 bp, Homo sapiens
ttctcatgtattttt

SEQ ID NO: 80677 - DNA, 15 bp, Homo sapiens
attctcatgtatttt

SEQ ID NO: 80678 - DNA, 15 bp, Homo sapiens
tattctcatgtattt

SEQ ID NO: 80679 - DNA, 15 bp, Homo sapiens
ttattctcatgtatt

SEQ ID NO: 80680 - DNA, 15 bp, Homo sapiens
tttattctcatgtat

SEQ ID NO: 80681 - DNA, 15 bp, Homo sapiens
gtttattctcatgta

SEQ ID NO: 80682 - DNA, 15 bp, Homo sapiens
ggtttattctcatgt

SEQ ID NO: 80683 - DNA, 15 bp, Homo sapiens
tggtttattctcatg

SEQ ID NO: 80684 - DNA, 15 bp, Homo sapiens
gtggtttattctcat

SEQ ID NO: 80685 - DNA, 15 bp, Homo sapiens
cgtggtttattctca

SEQ ID NO: 80686 - DNA, 15 bp, Homo sapiens
tcgtggtttattctc

SEQ ID NO: 80687 - DNA, 15 bp, Homo sapiens
ttcgtggtttattct

SEQ ID NO: 80688 - DNA, 15 bp, Homo sapiens
tttcgtggtttattc

SEQ ID NO: 80689 - DNA, 15 bp, Homo sapiens
ctttcgtggtttatt

SEQ ID NO: 80690 - DNA, 15 bp, Homo sapiens
tctttcgtggtttat

SEQ ID NO: 80691 - DNA, 15 bp, Homo sapiens
atctttcgtggttta

SEQ ID NO: 80692 - DNA, 15 bp, Homo sapiens
gatctttcgtggttt

SEQ ID NO: 80693 - DNA, 15 bp, Homo sapiens
tgatctttcgtggtt

SEQ ID NO: 80694 - DNA, 15 bp, Homo sapiens
gtgatctttcgtggt

SEQ ID NO: 80695 - DNA, 15 bp, Homo sapiens
agtgatctttcgtgg

SEQ ID NO: 80696 - DNA, 15 bp, Homo sapiens
aagtgatctttcgtg

SEQ ID NO: 80697 - DNA, 15 bp, Homo sapiens
aaagtgatctttcgt

SEQ ID NO: 80698 - DNA, 15 bp, Homo sapiens
aaaagtgatctttcg

SEQ ID NO: 80699 - DNA, 15 bp, Homo sapiens
aaaaagtgatctttc

SEQ ID NO: 80700 - DNA, 15 bp, Homo sapiens
caaaaagtgatcttt

SEQ ID NO: 80701 - DNA, 15 bp, Homo sapiens
acaaaaagtgatctt

SEQ ID NO: 80702 - DNA, 15 bp, Homo sapiens
cacaaaaagtgatct

SEQ ID NO: 80703 - DNA, 15 bp, Homo sapiens
tcacaaaaagtgatc

SEQ ID NO: 80704 - DNA, 15 bp, Homo sapiens
atcacaaaaagtgat

SEQ ID NO: 80705 - DNA, 15 bp, Homo sapiens
gatcacaaaaagtga

SEQ ID NO: 80706 - DNA, 15 bp, Homo sapiens
agatcacaaaaagtg

SEQ ID NO: 80707 - DNA, 15 bp, Homo sapiens
cagatcacaaaaagt

SEQ ID NO: 80708 - DNA, 15 bp, Homo sapiens
gcagatcacaaaaag

SEQ ID NO: 80709 - DNA, 15 bp, Homo sapiens
agcagatcacaaaaa

SEQ ID NO: 80710 - DNA, 15 bp, Homo sapiens
tagcagatcacaaaa

SEQ ID NO: 80711 - DNA, 15 bp, Homo sapiens
ttagcagatcacaaa

SEQ ID NO: 80712 - DNA, 15 bp, Homo sapiens
tttagcagatcacaa

SEQ ID NO: 80713 - DNA, 15 bp, Homo sapiens
ctttagcagatcaca

SEQ ID NO: 80714 - DNA, 15 bp, Homo sapiens
tctttagcagatcac

SEQ ID NO: 80715 - DNA, 15 bp, Homo sapiens
ctctttagcagatca

SEQ ID NO: 80716 - DNA, 15 bp, Homo sapiens
tctctttagcagatc

SEQ ID NO: 80717 - DNA, 15 bp, Homo sapiens
gtctctttagcagat

SEQ ID NO: 80718 - DNA, 15 bp, Homo sapiens
tgtctctttagcaga

SEQ ID NO: 80719 - DNA, 15 bp, Homo sapiens
ttgtctctttagcag

SEQ ID NO: 80720 - DNA, 15 bp, Homo sapiens
tttgtctctttagca

SEQ ID NO: 80721 - DNA, 15 bp, Homo sapiens
gtttgtctctttagc

SEQ ID NO: 80722 - DNA, 15 bp, Homo sapiens
agtttgtctctttag

SEQ ID NO: 80723 - DNA, 15 bp, Homo sapiens
cagtttgtctcttta

SEQ ID NO: 80724 - DNA, 15 bp, Homo sapiens
gcagtttgtctcttt

SEQ ID NO: 80725 - DNA, 15 bp, Homo sapiens
agcagtttgtctctt

SEQ ID NO: 80726 - DNA, 15 bp, Homo sapiens
aagcagtttgtctct

SEQ ID NO: 80727 - DNA, 15 bp, Homo sapiens
gaagcagtttgtctc

SEQ ID NO: 80728 - DNA, 15 bp, Homo sapiens
agaagcagtttgtct

SEQ ID NO: 80729 - DNA, 15 bp, Homo sapiens
cagaagcagtttgtc

SEQ ID NO: 80730 - DNA, 15 bp, Homo sapiens
gcagaagcagtttgt

SEQ ID NO: 80731 - DNA, 15 bp, Homo sapiens
tgcagaagcagtttg

SEQ ID NO: 80732 - DNA, 15 bp, Homo sapiens
ctgcagaagcagttt

SEQ ID NO: 80733 - DNA, 15 bp, Homo sapiens
tctgcagaagcagtt

SEQ ID NO: 80734 - DNA, 15 bp, Homo sapiens
ctctgcagaagcagt

SEQ ID NO: 80735 - DNA, 15 bp, Homo sapiens
tctctgcagaagcag

SEQ ID NO: 80736 - DNA, 15 bp, Homo sapiens
atctctgcagaagca

SEQ ID NO: 80737 - DNA, 15 bp, Homo sapiens
catctctgcagaagc

SEQ ID NO: 80738 - DNA, 15 bp, Homo sapiens
tcatctctgcagaag

SEQ ID NO: 80739 - DNA, 15 bp, Homo sapiens
atcatctctgcagaa

SEQ ID NO: 80740 - DNA, 15 bp, Homo sapiens
aatcatctctgcaga

SEQ ID NO: 80741 - DNA, 15 bp, Homo sapiens
taatcatctctgcag

SEQ ID NO: 80742 - DNA, 15 bp, Homo sapiens
ctaatcatctctgca

SEQ ID NO: 80743 - DNA, 15 bp, Homo sapiens
gctaatcatctctgc

SEQ ID NO: 80744 - DNA, 15 bp, Homo sapiens
tgctaatcatctctg

SEQ ID NO: 80745 - DNA, 15 bp, Homo sapiens
atgctaatcatctct

SEQ ID NO: 80746 - DNA, 15 bp, Homo sapiens
aatgctaatcatctc

SEQ ID NO: 80747 - DNA, 15 bp, Homo sapiens
taatgctaatcatct

SEQ ID NO: 80748 - DNA, 15 bp, Homo sapiens
ataatgctaatcatc

SEQ ID NO: 80749 - DNA, 15 bp, Homo sapiens
cataatgctaatcat

SEQ ID NO: 80750 - DNA, 15 bp, Homo sapiens
acataatgctaatca

SEQ ID NO: 80751 - DNA, 15 bp, Homo sapiens
cacataatgctaatc

SEQ ID NO: 80752 - DNA, 15 bp, Homo sapiens
tcacataatgctaat

SEQ ID NO: 80753 - DNA, 15 bp, Homo sapiens
gtcacataatgctaa

SEQ ID NO: 80754 - DNA, 15 bp, Homo sapiens
tgtcacataatgcta

SEQ ID NO: 80755 - DNA, 15 bp, Homo sapiens
atgtcacataatgct

SEQ ID NO: 80756 - DNA, 15 bp, Homo sapiens
gatgtcacataatgc

SEQ ID NO: 80757 - DNA, 15 bp, Homo sapiens
agatgtcacataatg

SEQ ID NO: 80758 - DNA, 15 bp, Homo sapiens
aagatgtcacataat

SEQ ID NO: 80759 - DNA, 15 bp, Homo sapiens
taagatgtcacataa

SEQ ID NO: 80760 - DNA, 15 bp, Homo sapiens
ttaagatgtcacata

SEQ ID NO: 80761 - DNA, 15 bp, Homo sapiens
cttaagatgtcacat

SEQ ID NO: 80762 - DNA, 15 bp, Homo sapiens
ccttaagatgtcaca

SEQ ID NO: 80763 - DNA, 15 bp, Homo sapiens
tccttaagatgtcac

SEQ ID NO: 80764 - DNA, 15 bp, Homo sapiens
ctccttaagatgtca

SEQ ID NO: 80765 - DNA, 15 bp, Homo sapiens
tctccttaagatgtc

SEQ ID NO: 80766 - DNA, 15 bp, Homo sapiens
atctccttaagatgt

SEQ ID NO: 80767 - DNA, 15 bp, Homo sapiens
tatctccttaagatg

SEQ ID NO: 80768 - DNA, 15 bp, Homo sapiens
gtatctccttaagat

SEQ ID NO: 80769 - DNA, 15 bp, Homo sapiens
agtatctccttaaga

SEQ ID NO: 80770 - DNA, 15 bp, Homo sapiens
aagtatctccttaag

SEQ ID NO: 80771 - DNA, 15 bp, Homo sapiens
caagtatctccttaa

SEQ ID NO: 80772 - DNA, 15 bp, Homo sapiens
gcaagtatctcctta

SEQ ID NO: 80773 - DNA, 15 bp, Homo sapiens
tgcaagtatctcctt

SEQ ID NO: 80774 - DNA, 15 bp, Homo sapiens
ttgcaagtatctcct

SEQ ID NO: 80775 - DNA, 15 bp, Homo sapiens
gttgcaagtatctcc

SEQ ID NO: 80776 - DNA, 15 bp, Homo sapiens
agttgcaagtatctc

SEQ ID NO: 80777 - DNA, 15 bp, Homo sapiens
gagttgcaagtatct

SEQ ID NO: 80778 - DNA, 15 bp, Homo sapiens
agagttgcaagtatc

SEQ ID NO: 80779 - DNA, 15 bp, Homo sapiens
aagagttgcaagtat

SEQ ID NO: 80780 - DNA, 15 bp, Homo sapiens
aaagagttgcaagta

SEQ ID NO: 80781 - DNA, 15 bp, Homo sapiens
taaagagttgcaagt

SEQ ID NO: 80782 - DNA, 15 bp, Homo sapiens
ctaaagagttgcaag

SEQ ID NO: 80783 - DNA, 15 bp, Homo sapiens
gctaaagagttgcaa

SEQ ID NO: 80784 - DNA, 15 bp, Homo sapiens
agctaaagagttgca

SEQ ID NO: 80785 - DNA, 15 bp, Homo sapiens
gagctaaagagttgc

SEQ ID NO: 80786 - DNA, 15 bp, Homo sapiens
tgagctaaagagttg

SEQ ID NO: 80787 - DNA, 15 bp, Homo sapiens
gtgagctaaagagtt

SEQ ID NO: 80788 - DNA, 15 bp, Homo sapiens
ggtgagctaaagagt

SEQ ID NO: 80789 - DNA, 15 bp, Homo sapiens
tggtgagctaaagag

SEQ ID NO: 80790 - DNA, 15 bp, Homo sapiens
gtggtgagctaaaga

SEQ ID NO: 80791 - DNA, 15 bp, Homo sapiens
tgtggtgagctaaag

SEQ ID NO: 80792 - DNA, 15 bp, Homo sapiens
ctgtggtgagctaaa

SEQ ID NO: 80793 - DNA, 15 bp, Homo sapiens
actgtggtgagctaa

SEQ ID NO: 80794 - DNA, 15 bp, Homo sapiens
tactgtggtgagcta

SEQ ID NO: 80795 - DNA, 15 bp, Homo sapiens
ctactgtggtgagct

SEQ ID NO: 80796 - DNA, 15 bp, Homo sapiens
gctactgtggtgagc

SEQ ID NO: 80797 - DNA, 15 bp, Homo sapiens
tgctactgtggtgag

SEQ ID NO: 80798 - DNA, 15 bp, Homo sapiens
ttgctactgtggtga

SEQ ID NO: 80799 - DNA, 15 bp, Homo sapiens
gttgctactgtggtg

SEQ ID NO: 80800 - DNA, 15 bp, Homo sapiens
tgttgctactgtggt

SEQ ID NO: 80801 - DNA, 15 bp, Homo sapiens
atgttgctactgtgg

SEQ ID NO: 80802 - DNA, 15 bp, Homo sapiens
catgttgctactgtg

SEQ ID NO: 80803 - DNA, 15 bp, Homo sapiens
tcatgttgctactgt

SEQ ID NO: 80804 - DNA, 15 bp, Homo sapiens
ctcatgttgctactg

SEQ ID NO: 80805 - DNA, 15 bp, Homo sapiens
cctcatgttgctact

SEQ ID NO: 80806 - DNA, 15 bp, Homo sapiens
acctcatgttgctac

SEQ ID NO: 80807 - DNA, 15 bp, Homo sapiens
tacctcatgttgcta

SEQ ID NO: 80808 - DNA, 15 bp, Homo sapiens
ctacctcatgttgct

SEQ ID NO: 80809 - DNA, 15 bp, Homo sapiens
gctacctcatgttgc

SEQ ID NO: 80810 - DNA, 15 bp, Homo sapiens
agctacctcatgttg

SEQ ID NO: 80811 - DNA, 15 bp, Homo sapiens
tagctacctcatgtt

SEQ ID NO: 80812 - DNA, 15 bp, Homo sapiens
gtagctacctcatgt

SEQ ID NO: 80813 - DNA, 15 bp, Homo sapiens
tgtagctacctcatg

SEQ ID NO: 80814 - DNA, 15 bp, Homo sapiens
ttgtagctacctcat

SEQ ID NO: 80815 - DNA, 15 bp, Homo sapiens
tttgtagctacctca

SEQ ID NO: 80816 - DNA, 15 bp, Homo sapiens
ttttgtagctacctc

SEQ ID NO: 80817 - DNA, 15 bp, Homo sapiens
attttgtagctacct

SEQ ID NO: 80818 - DNA, 15 bp, Homo sapiens
aattttgtagctacc

SEQ ID NO: 80819 - DNA, 15 bp, Homo sapiens
taattttgtagctac

SEQ ID NO: 80820 - DNA, 15 bp, Homo sapiens
ataattttgtagcta

SEQ ID NO: 80821 - DNA, 15 bp, Homo sapiens
aataattttgtagct

SEQ ID NO: 80822 - DNA, 15 bp, Homo sapiens
taataattttgtagc

SEQ ID NO: 80823 - DNA, 15 bp, Homo sapiens
ataataattttgtag

SEQ ID NO: 80824 - DNA, 15 bp, Homo sapiens
tataataattttgta

SEQ ID NO: 80825 - DNA, 15 bp, Homo sapiens
ctataataattttgt

SEQ ID NO: 80826 - DNA, 15 bp, Homo sapiens
actataataattttg

SEQ ID NO: 80827 - DNA, 15 bp, Homo sapiens
tactataataatttt

SEQ ID NO: 80828 - DNA, 15 bp, Homo sapiens
ctactataataattt

SEQ ID NO: 80829 - DNA, 15 bp, Homo sapiens
actactataataatt

SEQ ID NO: 80830 - DNA, 15 bp, Homo sapiens
tactactataataat

SEQ ID NO: 80831 - DNA, 15 bp, Homo sapiens
gtactactataataa

SEQ ID NO: 80832 - DNA, 15 bp, Homo sapiens
tgtactactataata

SEQ ID NO: 80833 - DNA, 15 bp, Homo sapiens
ctgtactactataat

SEQ ID NO: 80834 - DNA, 15 bp, Homo sapiens
actgtactactataa

SEQ ID NO: 80835 - DNA, 15 bp, Homo sapiens
cactgtactactata

SEQ ID NO: 80836 - DNA, 15 bp, Homo sapiens
acactgtactactat

SEQ ID NO: 80837 - DNA, 15 bp, Homo sapiens
cacactgtactacta

SEQ ID NO: 80838 - DNA, 15 bp, Homo sapiens
acacactgtactact

SEQ ID NO: 80839 - DNA, 15 bp, Homo sapiens
tacacactgtactac

SEQ ID NO: 80840 - DNA, 15 bp, Homo sapiens
gtacacactgtacta

SEQ ID NO: 80841 - DNA, 15 bp, Homo sapiens
ggtacacactgtact

SEQ ID NO: 80842 - DNA, 15 bp, Homo sapiens
tggtacacactgtac

SEQ ID NO: 80843 - DNA, 15 bp, Homo sapiens
gtggtacacactgta

SEQ ID NO: 80844 - DNA, 15 bp, Homo sapiens
tgtggtacacactgt

SEQ ID NO: 80845 - DNA, 15 bp, Homo sapiens
ctgtggtacacactg

SEQ ID NO: 80846 - DNA, 15 bp, Homo sapiens
actgtggtacacact

SEQ ID NO: 80847 - DNA, 15 bp, Homo sapiens
aactgtggtacacac

SEQ ID NO: 80848 - DNA, 15 bp, Homo sapiens
taactgtggtacaca

SEQ ID NO: 80849 - DNA, 15 bp, Homo sapiens
ttaactgtggtacac

SEQ ID NO: 80850 - DNA, 15 bp, Homo sapiens
attaactgtggtaca

SEQ ID NO: 80851 - DNA, 15 bp, Homo sapiens
aattaactgtggtac

SEQ ID NO: 80852 - DNA, 15 bp, Homo sapiens
aaattaactgtggta

SEQ ID NO: 80853 - DNA, 15 bp, Homo sapiens
taaattaactgtggt

SEQ ID NO: 80854 - DNA, 15 bp, Homo sapiens
ttaaattaactgtgg

SEQ ID NO: 80855 - DNA, 15 bp, Homo sapiens
attaaattaactgtg

SEQ ID NO: 80856 - DNA, 15 bp, Homo sapiens
cattaaattaactgt

SEQ ID NO: 80857 - DNA, 15 bp, Homo sapiens
gcattaaattaactg

SEQ ID NO: 80858 - DNA, 15 bp, Homo sapiens
tgcattaaattaact

SEQ ID NO: 80859 - DNA, 15 bp, Homo sapiens
ttgcattaaattaac

SEQ ID NO: 80860 - DNA, 15 bp, Homo sapiens
attgcattaaattaa

SEQ ID NO: 80861 - DNA, 15 bp, Homo sapiens
aattgcattaaatta

SEQ ID NO: 80862 - DNA, 15 bp, Homo sapiens
taattgcattaaatt

SEQ ID NO: 80863 - DNA, 15 bp, Homo sapiens
ataattgcattaaat

SEQ ID NO: 80864 - DNA, 15 bp, Homo sapiens
cataattgcattaaa

SEQ ID NO: 80865 - DNA, 15 bp, Homo sapiens
tcataattgcattaa

SEQ ID NO: 80866 - DNA, 15 bp, Homo sapiens
atcataattgcatta

SEQ ID NO: 80867 - DNA, 15 bp, Homo sapiens
aatcataattgcatt

SEQ ID NO: 80868 - DNA, 15 bp, Homo sapiens
caatcataattgcat

SEQ ID NO: 80869 - DNA, 15 bp, Homo sapiens
tcaatcataattgca

SEQ ID NO: 80870 - DNA, 15 bp, Homo sapiens
ttcaatcataattgc

SEQ ID NO: 80871 - DNA, 15 bp, Homo sapiens
tttcaatcataattg

SEQ ID NO: 80872 - DNA, 15 bp, Homo sapiens
ttttcaatcataatt

SEQ ID NO: 80873 - DNA, 15 bp, Homo sapiens
gttttcaatcataat

SEQ ID NO: 80874 - DNA, 15 bp, Homo sapiens
agttttcaatcataa

SEQ ID NO: 80875 - DNA, 15 bp, Homo sapiens
cagttttcaatcata

SEQ ID NO: 80876 - DNA, 15 bp, Homo sapiens
gcagttttcaatcat

SEQ ID NO: 80877 - DNA, 15 bp, Homo sapiens
tgcagttttcaatca

SEQ ID NO: 80878 - DNA, 15 bp, Homo sapiens
atgcagttttcaatc

SEQ ID NO: 80879 - DNA, 15 bp, Homo sapiens
gatgcagttttcaat

SEQ ID NO: 80880 - DNA, 15 bp, Homo sapiens
agatgcagttttcaa

SEQ ID NO: 80881 - DNA, 15 bp, Homo sapiens
aagatgcagttttca

SEQ ID NO: 80882 - DNA, 15 bp, Homo sapiens
aaagatgcagttttc

SEQ ID NO: 80883 - DNA, 15 bp, Homo sapiens
taaagatgcagtttt

SEQ ID NO: 80884 - DNA, 15 bp, Homo sapiens
gtaaagatgcagttt

SEQ ID NO: 80885 - DNA, 15 bp, Homo sapiens
tgtaaagatgcagtt

SEQ ID NO: 80886 - DNA, 15 bp, Homo sapiens
atgtaaagatgcagt

SEQ ID NO: 80887 - DNA, 15 bp, Homo sapiens
aatgtaaagatgcag

SEQ ID NO: 80888 - DNA, 15 bp, Homo sapiens
aaatgtaaagatgca

SEQ ID NO: 80889 - DNA, 15 bp, Homo sapiens
caaatgtaaagatgc

SEQ ID NO: 80890 - DNA, 15 bp, Homo sapiens
acaaatgtaaagatg

SEQ ID NO: 80891 - DNA, 15 bp, Homo sapiens
aacaaatgtaaagat

SEQ ID NO: 80892 - DNA, 15 bp, Homo sapiens
aaacaaatgtaaaga

SEQ ID NO: 80893 - DNA, 15 bp, Homo sapiens
taaacaaatgtaaag

SEQ ID NO: 80894 - DNA, 15 bp, Homo sapiens
gtaaacaaatgtaaa

SEQ ID NO: 80895 - DNA, 15 bp, Homo sapiens
tgtaaacaaatgtaa

SEQ ID NO: 80896 - DNA, 15 bp, Homo sapiens
atgtaaacaaatgta

SEQ ID NO: 80897 - DNA, 15 bp, Homo sapiens
aatgtaaacaaatgt

SEQ ID NO: 80898 - DNA, 15 bp, Homo sapiens
aaatgtaaacaaatg

SEQ ID NO: 80899 - DNA, 15 bp, Homo sapiens
gaaatgtaaacaaat

SEQ ID NO: 80900 - DNA, 15 bp, Homo sapiens
agaaatgtaaacaaa

SEQ ID NO: 80901 - DNA, 15 bp, Homo sapiens
gagaaatgtaaacaa

SEQ ID NO: 80902 - DNA, 15 bp, Homo sapiens
agagaaatgtaaaca

SEQ ID NO: 80903 - DNA, 15 bp, Homo sapiens
aagagaaatgtaaac

SEQ ID NO: 80904 - DNA, 15 bp, Homo sapiens
caagagaaatgtaaa

SEQ ID NO: 80905 - DNA, 15 bp, Homo sapiens
tcaagagaaatgtaa

SEQ ID NO: 80906 - DNA, 15 bp, Homo sapiens
gtcaagagaaatgta

SEQ ID NO: 80907 - DNA, 15 bp, Homo sapiens
agtcaagagaaatgt

SEQ ID NO: 80908 - DNA, 15 bp, Homo sapiens
cagtcaagagaaatg

SEQ ID NO: 80909 - DNA, 15 bp, Homo sapiens
gcagtcaagagaaat

SEQ ID NO: 80910 - DNA, 15 bp, Homo sapiens
tgcagtcaagagaaa

SEQ ID NO: 80911 - DNA, 15 bp, Homo sapiens
ttgcagtcaagagaa

SEQ ID NO: 80912 - DNA, 15 bp, Homo sapiens
tttgcagtcaagaga

SEQ ID NO: 80913 - DNA, 15 bp, Homo sapiens
atttgcagtcaagag

SEQ ID NO: 80914 - DNA, 15 bp, Homo sapiens
catttgcagtcaaga

SEQ ID NO: 80915 - DNA, 15 bp, Homo sapiens
ccatttgcagtcaag

SEQ ID NO: 80916 - DNA, 15 bp, Homo sapiens
gccatttgcagtcaa

SEQ ID NO: 80917 - DNA, 15 bp, Homo sapiens
tgccatttgcagtca

SEQ ID NO: 80918 - DNA, 15 bp, Homo sapiens
gtgccatttgcagtc

SEQ ID NO: 80919 - DNA, 15 bp, Homo sapiens
ggtgccatttgcagt

SEQ ID NO: 80920 - DNA, 15 bp, Homo sapiens
tggtgccatttgcag

SEQ ID NO: 80921 - DNA, 15 bp, Homo sapiens
atggtgccatttgca

SEQ ID NO: 80922 - DNA, 15 bp, Homo sapiens
tatggtgccatttgc

SEQ ID NO: 80923 - DNA, 15 bp, Homo sapiens
atatggtgccatttg

SEQ ID NO: 80924 - DNA, 15 bp, Homo sapiens
tatatggtgccattt

SEQ ID NO: 80925 - DNA, 15 bp, Homo sapiens
ttatatggtgccatt

SEQ ID NO: 80926 - DNA, 15 bp, Homo sapiens
tttatatggtgccat

SEQ ID NO: 80927 - DNA, 15 bp, Homo sapiens
ctttatatggtgcca

SEQ ID NO: 80928 - DNA, 15 bp, Homo sapiens
actttatatggtgcc

SEQ ID NO: 80929 - DNA, 15 bp, Homo sapiens
gactttatatggtgc

SEQ ID NO: 80930 - DNA, 15 bp, Homo sapiens
agactttatatggtg

SEQ ID NO: 80931 - DNA, 15 bp, Homo sapiens
cagactttatatggt

SEQ ID NO: 80932 - DNA, 15 bp, Homo sapiens
acagactttatatgg

SEQ ID NO: 80933 - DNA, 15 bp, Homo sapiens
tacagactttatatg

SEQ ID NO: 80934 - DNA, 15 bp, Homo sapiens
ttacagactttatat

SEQ ID NO: 80935 - DNA, 15 bp, Homo sapiens
cttacagactttata

SEQ ID NO: 80936 - DNA, 15 bp, Homo sapiens
ccttacagactttat

SEQ ID NO: 80937 - DNA, 15 bp, Homo sapiens
cccttacagacttta

SEQ ID NO: 80938 - DNA, 15 bp, Homo sapiens
gcccttacagacttt

SEQ ID NO: 80939 - DNA, 15 bp, Homo sapiens
agcccttacagactt

SEQ ID NO: 80940 - DNA, 15 bp, Homo sapiens
aagcccttacagact

SEQ ID NO: 80941 - DNA, 15 bp, Homo sapiens
taagcccttacagac

SEQ ID NO: 80942 - DNA, 15 bp, Homo sapiens
ataagcccttacaga

SEQ ID NO: 80943 - DNA, 15 bp, Homo sapiens
cataagcccttacag

SEQ ID NO: 80944 - DNA, 15 bp, Homo sapiens
acataagcccttaca

SEQ ID NO: 80945 - DNA, 15 bp, Homo sapiens
aacataagcccttac

SEQ ID NO: 80946 - DNA, 15 bp, Homo sapiens
gaacataagccctta

SEQ ID NO: 80947 - DNA, 15 bp, Homo sapiens
tgaacataagccctt

SEQ ID NO: 80948 - DNA, 15 bp, Homo sapiens
atgaacataagccct

SEQ ID NO: 80949 - DNA, 15 bp, Homo sapiens
tatgaacataagccc

SEQ ID NO: 80950 - DNA, 15 bp, Homo sapiens
atatgaacataagcc

SEQ ID NO: 80951 - DNA, 15 bp, Homo sapiens
tatatgaacataagc

SEQ ID NO: 80952 - DNA, 15 bp, Homo sapiens
atatatgaacataag

SEQ ID NO: 80953 - DNA, 15 bp, Homo sapiens
aatatatgaacataa

SEQ ID NO: 80954 - DNA, 15 bp, Homo sapiens
aaatatatgaacata

SEQ ID NO: 80955 - DNA, 15 bp, Homo sapiens
aaaatatatgaacat

SEQ ID NO: 80956 - DNA, 15 bp, Homo sapiens
caaaatatatgaaca

SEQ ID NO: 80957 - DNA, 15 bp, Homo sapiens
tcaaaatatatgaac

SEQ ID NO: 80958 - DNA, 15 bp, Homo sapiens
atcaaaatatatgaa

SEQ ID NO: 80959 - DNA, 15 bp, Homo sapiens
tatcaaaatatatga

SEQ ID NO: 80960 - DNA, 15 bp, Homo sapiens
ttatcaaaatatatg

SEQ ID NO: 80961 - DNA, 15 bp, Homo sapiens
tttatcaaaatatat

SEQ ID NO: 80962 - DNA, 15 bp, Homo sapiens
atttatcaaaatata

SEQ ID NO: 80963 - DNA, 15 bp, Homo sapiens
aatttatcaaaatat

SEQ ID NO: 80964 - DNA, 15 bp, Homo sapiens
aaatttatcaaaata

SEQ ID NO: 80965 - DNA, 15 bp, Homo sapiens
gaaatttatcaaaat

SEQ ID NO: 80966 - DNA, 15 bp, Homo sapiens
tgaaatttatcaaaa

SEQ ID NO: 80967 - DNA, 15 bp, Homo sapiens
ttgaaatttatcaaa

SEQ ID NO: 80968 - DNA, 15 bp, Homo sapiens
gttgaaatttatcaa

SEQ ID NO: 80969 - DNA, 15 bp, Homo sapiens
agttgaaatttatca

SEQ ID NO: 80970 - DNA, 15 bp, Homo sapiens
aagttgaaatttatc

SEQ ID NO: 80971 - DNA, 15 bp, Homo sapiens
aaagttgaaatttat

SEQ ID NO: 80972 - DNA, 15 bp, Homo sapiens
caaagttgaaattta

SEQ ID NO: 80973 - DNA, 15 bp, Homo sapiens
acaaagttgaaattt

SEQ ID NO: 80974 - DNA, 15 bp, Homo sapiens
tacaaagttgaaatt

SEQ ID NO: 80975 - DNA, 15 bp, Homo sapiens
atacaaagttgaaat

SEQ ID NO: 80976 - DNA, 15 bp, Homo sapiens
tatacaaagttgaaa

SEQ ID NO: 80977 - DNA, 15 bp, Homo sapiens
ctatacaaagttgaa

SEQ ID NO: 80978 - DNA, 15 bp, Homo sapiens
actatacaaagttga

SEQ ID NO: 80979 - DNA, 15 bp, Homo sapiens
tactatacaaagttg

SEQ ID NO: 80980 - DNA, 15 bp, Homo sapiens
ctactatacaaagtt

SEQ ID NO: 80981 - DNA, 15 bp, Homo sapiens
tctactatacaaagt

SEQ ID NO: 80982 - DNA, 15 bp, Homo sapiens
atctactatacaaag

SEQ ID NO: 80983 - DNA, 15 bp, Homo sapiens
aatctactatacaaa

SEQ ID NO: 80984 - DNA, 15 bp, Homo sapiens
aaatctactatacaa

SEQ ID NO: 80985 - DNA, 15 bp, Homo sapiens
caaatctactataca

SEQ ID NO: 80986 - DNA, 15 bp, Homo sapiens
acaaatctactatac

SEQ ID NO: 80987 - DNA, 15 bp, Homo sapiens
cacaaatctactata

SEQ ID NO: 80988 - DNA, 15 bp, Homo sapiens
acacaaatctactat

SEQ ID NO: 80989 - DNA, 15 bp, Homo sapiens
tacacaaatctacta

SEQ ID NO: 80990 - DNA, 15 bp, Homo sapiens
atacacaaatctact

SEQ ID NO: 80991 - DNA, 15 bp, Homo sapiens
tatacacaaatctac

SEQ ID NO: 80992 - DNA, 15 bp, Homo sapiens
atatacacaaatcta

SEQ ID NO: 80993 - DNA, 15 bp, Homo sapiens
aatatacacaaatct

SEQ ID NO: 80994 - DNA, 15 bp, Homo sapiens
aaatatacacaaatc

SEQ ID NO: 80995 - DNA, 15 bp, Homo sapiens
aaaatatacacaaat

SEQ ID NO: 80996 - DNA, 15 bp, Homo sapiens
taaaatatacacaaa

SEQ ID NO: 80997 - DNA, 15 bp, Homo sapiens
ataaaatatacacaa

SEQ ID NO: 80998 - DNA, 15 bp, Homo sapiens
cataaaatatacaca

SEQ ID NO: 80999 - DNA, 15 bp, Homo sapiens
ccataaaatatacac

SEQ ID NO: 81000 - DNA, 15 bp, Homo sapiens
accataaaatataca

SEQ ID NO: 81001 - DNA, 15 bp, Homo sapiens
taccataaaatatac

SEQ ID NO: 81002 - DNA, 15 bp, Homo sapiens
ctaccataaaatata

SEQ ID NO: 81003 - DNA, 15 bp, Homo sapiens
actaccataaaatat

SEQ ID NO: 81004 - DNA, 15 bp, Homo sapiens
tactaccataaaata

SEQ ID NO: 81005 - DNA, 15 bp, Homo sapiens
ttactaccataaaat

SEQ ID NO: 81006 - DNA, 15 bp, Homo sapiens
tttactaccataaaa

SEQ ID NO: 81007 - DNA, 15 bp, Homo sapiens
atttactaccataaa

SEQ ID NO: 81008 - DNA, 15 bp, Homo sapiens
catttactaccataa

SEQ ID NO: 81009 - DNA, 15 bp, Homo sapiens
tcatttactaccata

SEQ ID NO: 81010 - DNA, 15 bp, Homo sapiens
atcatttactaccat

SEQ ID NO: 81011 - DNA, 15 bp, Homo sapiens
catcatttactacca

SEQ ID NO: 81012 - DNA, 15 bp, Homo sapiens
tcatcatttactacc

SEQ ID NO: 81013 - DNA, 15 bp, Homo sapiens
ttcatcatttactac

SEQ ID NO: 81014 - DNA, 15 bp, Homo sapiens
tttcatcatttacta

SEQ ID NO: 81015 - DNA, 15 bp, Homo sapiens
atttcatcatttact

SEQ ID NO: 81016 - DNA, 15 bp, Homo sapiens
tatttcatcatttac

SEQ ID NO: 81017 - DNA, 15 bp, Homo sapiens
ctatttcatcattta

SEQ ID NO: 81018 - DNA, 15 bp, Homo sapiens
tctatttcatcattt

SEQ ID NO: 81019 - DNA, 15 bp, Homo sapiens
gtctatttcatcatt

SEQ ID NO: 81020 - DNA, 15 bp, Homo sapiens
agtctatttcatcat

SEQ ID NO: 81021 - DNA, 15 bp, Homo sapiens
tagtctatttcatca

SEQ ID NO: 81022 - DNA, 15 bp, Homo sapiens
ctagtctatttcatc

SEQ ID NO: 81023 - DNA, 15 bp, Homo sapiens
actagtctatttcat

SEQ ID NO: 81024 - DNA, 15 bp, Homo sapiens
tactagtctatttca

SEQ ID NO: 81025 - DNA, 15 bp, Homo sapiens
atactagtctatttc

SEQ ID NO: 81026 - DNA, 15 bp, Homo sapiens
gatactagtctattt

SEQ ID NO: 81027 - DNA, 15 bp, Homo sapiens
agatactagtctatt

SEQ ID NO: 81028 - DNA, 15 bp, Homo sapiens
cagatactagtctat

SEQ ID NO: 81029 - DNA, 15 bp, Homo sapiens
acagatactagtcta

SEQ ID NO: 81030 - DNA, 15 bp, Homo sapiens
tacagatactagtct

SEQ ID NO: 81031 - DNA, 15 bp, Homo sapiens
atacagatactagtc

SEQ ID NO: 81032 - DNA, 15 bp, Homo sapiens
tatacagatactagt

SEQ ID NO: 81033 - DNA, 15 bp, Homo sapiens
atatacagatactag

SEQ ID NO: 81034 - DNA, 15 bp, Homo sapiens
tatatacagatacta

SEQ ID NO: 81035 - DNA, 15 bp, Homo sapiens
atatatacagatact

SEQ ID NO: 81036 - DNA, 15 bp, Homo sapiens
aatatatacagatac

SEQ ID NO: 81037 - DNA, 15 bp, Homo sapiens
aaatatatacagata

SEQ ID NO: 81038 - DNA, 15 bp, Homo sapiens
aaaatatatacagat

SEQ ID NO: 81039 - DNA, 15 bp, Homo sapiens
taaaatatatacaga

SEQ ID NO: 81040 - DNA, 15 bp, Homo sapiens
ataaaatatatacag

SEQ ID NO: 81041 - DNA, 15 bp, Homo sapiens
cataaaatatataca

SEQ ID NO: 81042 - DNA, 15 bp, Homo sapiens
gcataaaatatatac

SEQ ID NO: 81043 - DNA, 15 bp, Homo sapiens
tgcataaaatatata

SEQ ID NO: 81044 - DNA, 15 bp, Homo sapiens
atgcataaaatatat

SEQ ID NO: 81045 - DNA, 15 bp, Homo sapiens
aatgcataaaatata

SEQ ID NO: 81046 - DNA, 15 bp, Homo sapiens
gaatgcataaaatat

SEQ ID NO: 81047 - DNA, 15 bp, Homo sapiens
tgaatgcataaaata

SEQ ID NO: 81048 - DNA, 15 bp, Homo sapiens
atgaatgcataaaat

SEQ ID NO: 81049 - DNA, 15 bp, Homo sapiens
catgaatgcataaaa

SEQ ID NO: 81050 - DNA, 15 bp, Homo sapiens
tcatgaatgcataaa

SEQ ID NO: 81051 - DNA, 15 bp, Homo sapiens
ttcatgaatgcataa

SEQ ID NO: 81052 - DNA, 15 bp, Homo sapiens
attcatgaatgcata

SEQ ID NO: 81053 - DNA, 15 bp, Homo sapiens
tattcatgaatgcat

SEQ ID NO: 81054 - DNA, 15 bp, Homo sapiens
gtattcatgaatgca

SEQ ID NO: 81055 - DNA, 15 bp, Homo sapiens
agtattcatgaatgc

SEQ ID NO: 81056 - DNA, 15 bp, Homo sapiens
aagtattcatgaatg

SEQ ID NO: 81057 - DNA, 15 bp, Homo sapiens
aaagtattcatgaat

SEQ ID NO: 81058 - DNA, 15 bp, Homo sapiens
taaagtattcatgaa

SEQ ID NO: 81059 - DNA, 15 bp, Homo sapiens
ctaaagtattcatga

SEQ ID NO: 81060 - DNA, 15 bp, Homo sapiens
actaaagtattcatg

SEQ ID NO: 81061 - DNA, 15 bp, Homo sapiens
aactaaagtattcat

SEQ ID NO: 81062 - DNA, 15 bp, Homo sapiens
aaactaaagtattca

SEQ ID NO: 81063 - DNA, 15 bp, Homo sapiens
aaaactaaagtattc

SEQ ID NO: 81064 - DNA, 15 bp, Homo sapiens
aaaaactaaagtatt

SEQ ID NO: 81065 - DNA, 15 bp, Homo sapiens
caaaaactaaagtat

SEQ ID NO: 81066 - DNA, 15 bp, Homo sapiens
tcaaaaactaaagta

SEQ ID NO: 81067 - DNA, 15 bp, Homo sapiens
ttcaaaaactaaagt

SEQ ID NO: 81068 - DNA, 15 bp, Homo sapiens
attcaaaaactaaag

SEQ ID NO: 81069 - DNA, 15 bp, Homo sapiens
tattcaaaaactaaa

SEQ ID NO: 81070 - DNA, 15 bp, Homo sapiens
atattcaaaaactaa

SEQ ID NO: 81071 - DNA, 15 bp, Homo sapiens
aatattcaaaaacta

SEQ ID NO: 81072 - DNA, 15 bp, Homo sapiens
aaatattcaaaaact

SEQ ID NO: 81073 - DNA, 15 bp, Homo sapiens
gaaatattcaaaaac

SEQ ID NO: 81074 - DNA, 15 bp, Homo sapiens
agaaatattcaaaaa

SEQ ID NO: 81075 - DNA, 15 bp, Homo sapiens
tagaaatattcaaaa

SEQ ID NO: 81076 - DNA, 15 bp, Homo sapiens
gtagaaatattcaaa

SEQ ID NO: 81077 - DNA, 15 bp, Homo sapiens
tgtagaaatattcaa

SEQ ID NO: 81078 - DNA, 15 bp, Homo sapiens
gtgtagaaatattca

SEQ ID NO: 81079 - DNA, 15 bp, Homo sapiens
agtgtagaaatattc

SEQ ID NO: 81080 - DNA, 15 bp, Homo sapiens
tagtgtagaaatatt

SEQ ID NO: 81081 - DNA, 15 bp, Homo sapiens
gtagtgtagaaatat

SEQ ID NO: 81082 - DNA, 15 bp, Homo sapiens
tgtagtgtagaaata

SEQ ID NO: 81083 - DNA, 15 bp, Homo sapiens
gtgtagtgtagaaat

SEQ ID NO: 81084 - DNA, 15 bp, Homo sapiens
tgtgtagtgtagaaa

SEQ ID NO: 81085 - DNA, 15 bp, Homo sapiens
ctgtgtagtgtagaa

SEQ ID NO: 81086 - DNA, 15 bp, Homo sapiens
actgtgtagtgtaga

SEQ ID NO: 81087 - DNA, 15 bp, Homo sapiens
aactgtgtagtgtag

SEQ ID NO: 81088 - DNA, 15 bp, Homo sapiens
aaactgtgtagtgta

SEQ ID NO: 81089 - DNA, 15 bp, Homo sapiens
aaaactgtgtagtgt

SEQ ID NO: 81090 - DNA, 15 bp, Homo sapiens
caaaactgtgtagtg

SEQ ID NO: 81091 - DNA, 15 bp, Homo sapiens
tcaaaactgtgtagt

SEQ ID NO: 81092 - DNA, 15 bp, Homo sapiens
ctcaaaactgtgtag

SEQ ID NO: 81093 - DNA, 15 bp, Homo sapiens
actcaaaactgtgta

SEQ ID NO: 81094 - DNA, 15 bp, Homo sapiens
aactcaaaactgtgt

SEQ ID NO: 81095 - DNA, 15 bp, Homo sapiens
aaactcaaaactgtg

SEQ ID NO: 81096 - DNA, 15 bp, Homo sapiens
aaaactcaaaactgt

SEQ ID NO: 81097 - DNA, 15 bp, Homo sapiens
aaaaactcaaaactg

SEQ ID NO: 81098 - DNA, 15 bp, Homo sapiens
aaaaaactcaaaact

SEQ ID NO: 81099 - DNA, 15 bp, Homo sapiens
gaaaaaactcaaaac

SEQ ID NO: 81100 - DNA, 15 bp, Homo sapiens
tgaaaaaactcaaaa

SEQ ID NO: 81101 - DNA, 15 bp, Homo sapiens
ttgaaaaaactcaaa

SEQ ID NO: 81102 - DNA, 15 bp, Homo sapiens
tttgaaaaaactcaa

SEQ ID NO: 81103 - DNA, 15 bp, Homo sapiens
atttgaaaaaactca

SEQ ID NO: 81104 - DNA, 15 bp, Homo sapiens
aatttgaaaaaactc

SEQ ID NO: 81105 - DNA, 15 bp, Homo sapiens
caatttgaaaaaact

SEQ ID NO: 81106 - DNA, 15 bp, Homo sapiens
acaatttgaaaaaac

SEQ ID NO: 81107 - DNA, 15 bp, Homo sapiens
gacaatttgaaaaaa

SEQ ID NO: 81108 - DNA, 15 bp, Homo sapiens
agacaatttgaaaaa

SEQ ID NO: 81109 - DNA, 15 bp, Homo sapiens
gagacaatttgaaaa

SEQ ID NO: 81110 - DNA, 15 bp, Homo sapiens
tgagacaatttgaaa

SEQ ID NO: 81111 - DNA, 15 bp, Homo sapiens
ttgagacaatttgaa

SEQ ID NO: 81112 - DNA, 15 bp, Homo sapiens
attgagacaatttga

SEQ ID NO: 81113 - DNA, 15 bp, Homo sapiens
gattgagacaatttg

SEQ ID NO: 81114 - DNA, 15 bp, Homo sapiens
agattgagacaattt

SEQ ID NO: 81115 - DNA, 15 bp, Homo sapiens
gagattgagacaatt

SEQ ID NO: 81116 - DNA, 15 bp, Homo sapiens
ggagattgagacaat

SEQ ID NO: 81117 - DNA, 15 bp, Homo sapiens
tggagattgagacaa

SEQ ID NO: 81118 - DNA, 15 bp, Homo sapiens
ttggagattgagaca

SEQ ID NO: 81119 - DNA, 15 bp, Homo sapiens
tttggagattgagac

SEQ ID NO: 81120 - DNA, 15 bp, Homo sapiens
ttttggagattgaga

SEQ ID NO: 81121 - DNA, 15 bp, Homo sapiens
tttttggagattgag

SEQ ID NO: 81122 - DNA, 15 bp, Homo sapiens
ttttttggagattga

SEQ ID NO: 81123 - DNA, 15 bp, Homo sapiens
attttttggagattg

SEQ ID NO: 81124 - DNA, 15 bp, Homo sapiens
aattttttggagatt

SEQ ID NO: 81125 - DNA, 15 bp, Homo sapiens
aaattttttggagat

SEQ ID NO: 81126 - DNA, 15 bp, Homo sapiens
aaaattttttggaga

SEQ ID NO: 81127 - DNA, 15 bp, Homo sapiens
gaaaattttttggag

SEQ ID NO: 81128 - DNA, 15 bp, Homo sapiens
agaaaattttttgga

SEQ ID NO: 81129 - DNA, 15 bp, Homo sapiens
gagaaaattttttgg

SEQ ID NO: 81130 - DNA, 15 bp, Homo sapiens
tgagaaaattttttg

SEQ ID NO: 81131 - DNA, 15 bp, Homo sapiens
atgagaaaatttttt

SEQ ID NO: 81132 - DNA, 15 bp, Homo sapiens
aatgagaaaattttt

SEQ ID NO: 81133 - DNA, 15 bp, Homo sapiens
aaatgagaaaatttt

SEQ ID NO: 81134 - DNA, 15 bp, Homo sapiens
taaatgagaaaattt

SEQ ID NO: 81135 - DNA, 15 bp, Homo sapiens
ataaatgagaaaatt

SEQ ID NO: 81136 - DNA, 15 bp, Homo sapiens
aataaatgagaaaat

SEQ ID NO: 81137 - DNA, 15 bp, Homo sapiens
aaataaatgagaaaa

SEQ ID NO: 81138 - DNA, 15 bp, Homo sapiens
taaataaatgagaaa

SEQ ID NO: 81139 - DNA, 15 bp, Homo sapiens
ttaaataaatgagaa

SEQ ID NO: 81140 - DNA, 15 bp, Homo sapiens
tttaaataaatgaga

SEQ ID NO: 81141 - DNA, 15 bp, Homo sapiens
ttttaaataaatgag

SEQ ID NO: 81142 - DNA, 15 bp, Homo sapiens
attttaaataaatga

SEQ ID NO: 81143 - DNA, 15 bp, Homo sapiens
gattttaaataaatg

SEQ ID NO: 81144 - DNA, 15 bp, Homo sapiens
agattttaaataaat

SEQ ID NO: 81145 - DNA, 15 bp, Homo sapiens
cagattttaaataaa

SEQ ID NO: 81146 - DNA, 15 bp, Homo sapiens
gcagattttaaataa

SEQ ID NO: 81147 - DNA, 15 bp, Homo sapiens
tgcagattttaaata

SEQ ID NO: 81148 - DNA, 15 bp, Homo sapiens
atgcagattttaaat

SEQ ID NO: 81149 - DNA, 15 bp, Homo sapiens
catgcagattttaaa

SEQ ID NO: 81150 - DNA, 15 bp, Homo sapiens
acatgcagattttaa

SEQ ID NO: 81151 - DNA, 15 bp, Homo sapiens
tacatgcagatttta

SEQ ID NO: 81152 - DNA, 15 bp, Homo sapiens
ttacatgcagatttt

SEQ ID NO: 81153 - DNA, 15 bp, Homo sapiens
cttacatgcagattt

SEQ ID NO: 81154 - DNA, 15 bp, Homo sapiens
acttacatgcagatt

SEQ ID NO: 81155 - DNA, 15 bp, Homo sapiens
cacttacatgcagat

SEQ ID NO: 81156 - DNA, 15 bp, Homo sapiens
acacttacatgcaga

SEQ ID NO: 81157 - DNA, 15 bp, Homo sapiens
cacacttacatgcag

SEQ ID NO: 81158 - DNA, 15 bp, Homo sapiens
gcacacttacatgca

SEQ ID NO: 81159 - DNA, 15 bp, Homo sapiens
ggcacacttacatgc

SEQ ID NO: 81160 - DNA, 15 bp, Homo sapiens
gggcacacttacatg

SEQ ID NO: 81161 - DNA, 15 bp, Homo sapiens
tgggcacacttacat

SEQ ID NO: 81162 - DNA, 15 bp, Homo sapiens
atgggcacacttaca

SEQ ID NO: 81163 - DNA, 15 bp, Homo sapiens
catgggcacacttac

SEQ ID NO: 81164 - DNA, 15 bp, Homo sapiens
gcatgggcacactta

SEQ ID NO: 81165 - DNA, 15 bp, Homo sapiens
tgcatgggcacactt

SEQ ID NO: 81166 - DNA, 15 bp, Homo sapiens
ctgcatgggcacact

SEQ ID NO: 81167 - DNA, 15 bp, Homo sapiens
actgcatgggcacac

SEQ ID NO: 81168 - DNA, 15 bp, Homo sapiens
aactgcatgggcaca

SEQ ID NO: 81169 - DNA, 15 bp, Homo sapiens
gaactgcatgggcac

SEQ ID NO: 81170 - DNA, 15 bp, Homo sapiens
tgaactgcatgggca

SEQ ID NO: 81171 - DNA, 15 bp, Homo sapiens
ttgaactgcatgggc

SEQ ID NO: 81172 - DNA, 15 bp, Homo sapiens
tttgaactgcatggg

SEQ ID NO: 81173 - DNA, 15 bp, Homo sapiens
gtttgaactgcatgg

SEQ ID NO: 81174 - DNA, 15 bp, Homo sapiens
ggtttgaactgcatg

SEQ ID NO: 81175 - DNA, 15 bp, Homo sapiens
gggtttgaactgcat

SEQ ID NO: 81176 - DNA, 15 bp, Homo sapiens
tgggtttgaactgca

SEQ ID NO: 81177 - DNA, 15 bp, Homo sapiens
atgggtttgaactgc

SEQ ID NO: 81178 - DNA, 15 bp, Homo sapiens
catgggtttgaactg

SEQ ID NO: 81179 - DNA, 15 bp, Homo sapiens
acatgggtttgaact

SEQ ID NO: 81180 - DNA, 15 bp, Homo sapiens
aacatgggtttgaac

SEQ ID NO: 81181 - DNA, 15 bp, Homo sapiens
caacatgggtttgaa

SEQ ID NO: 81182 - DNA, 15 bp, Homo sapiens
acaacatgggtttga

SEQ ID NO: 81183 - DNA, 15 bp, Homo sapiens
aacaacatgggtttg

SEQ ID NO: 81184 - DNA, 15 bp, Homo sapiens
gaacaacatgggttt

SEQ ID NO: 81185 - DNA, 15 bp, Homo sapiens
tgaacaacatgggtt

SEQ ID NO: 81186 - DNA, 15 bp, Homo sapiens
ttgaacaacatgggt

SEQ ID NO: 81187 - DNA, 15 bp, Homo sapiens
cttgaacaacatggg

SEQ ID NO: 81188 - DNA, 15 bp, Homo sapiens
ccttgaacaacatgg

SEQ ID NO: 81189 - DNA, 15 bp, Homo sapiens
cccttgaacaacatg

SEQ ID NO: 81190 - DNA, 15 bp, Homo sapiens
acccttgaacaacat

SEQ ID NO: 81191 - DNA, 15 bp, Homo sapiens
gacccttgaacaaca

SEQ ID NO: 81192 - DNA, 15 bp, Homo sapiens
tgacccttgaacaac

SEQ ID NO: 81193 - DNA, 15 bp, Homo sapiens
ctgacccttgaacaa

SEQ ID NO: 81194 - DNA, 15 bp, Homo sapiens
actgacccttgaaca

SEQ ID NO: 81195 - DNA, 15 bp, Homo sapiens
aactgacccttgaac

SEQ ID NO: 81196 - DNA, 15 bp, Homo sapiens
caactgacccttgaa

SEQ ID NO: 81197 - DNA, 15 bp, Homo sapiens
acaactgacccttga

SEQ ID NO: 81198 - DNA, 15 bp, Homo sapiens
tacaactgacccttg

SEQ ID NO: 81199 - DNA, 15 bp, Homo sapiens
atacaactgaccctt

SEQ ID NO: 81200 - DNA, 15 bp, Homo sapiens
aatacaactgaccct

SEQ ID NO: 81201 - DNA, 15 bp, Homo sapiens
taatacaactgaccc

SEQ ID NO: 81202 - DNA, 15 bp, Homo sapiens
ctaatacaactgacc

SEQ ID NO: 81203 - DNA, 15 bp, Homo sapiens
tctaatacaactgac

SEQ ID NO: 81204 - DNA, 15 bp, Homo sapiens
ttctaatacaactga

SEQ ID NO: 81205 - DNA, 15 bp, Homo sapiens
tttctaatacaactg

SEQ ID NO: 81206 - DNA, 15 bp, Homo sapiens
gtttctaatacaact

SEQ ID NO: 81207 - DNA, 15 bp, Homo sapiens
agtttctaatacaac

SEQ ID NO: 81208 - DNA, 15 bp, Homo sapiens
cagtttctaatacaa

SEQ ID NO: 81209 - DNA, 15 bp, Homo sapiens
tcagtttctaataca

SEQ ID NO: 81210 - DNA, 15 bp, Homo sapiens
ttcagtttctaatac

SEQ ID NO: 81211 - DNA, 15 bp, Homo sapiens
tttcagtttctaata

SEQ ID NO: 81212 - DNA, 15 bp, Homo sapiens
atttcagtttctaat

SEQ ID NO: 81213 - DNA, 15 bp, Homo sapiens
tatttcagtttctaa

SEQ ID NO: 81214 - DNA, 15 bp, Homo sapiens
atatttcagtttcta

SEQ ID NO: 81215 - DNA, 15 bp, Homo sapiens
catatttcagtttct

SEQ ID NO: 81216 - DNA, 15 bp, Homo sapiens
acatatttcagtttc

SEQ ID NO: 81217 - DNA, 15 bp, Homo sapiens
gacatatttcagttt

SEQ ID NO: 81218 - DNA, 15 bp, Homo sapiens
tgacatatttcagtt

SEQ ID NO: 81219 - DNA, 15 bp, Homo sapiens
atgacatatttcagt

SEQ ID NO: 81220 - DNA, 15 bp, Homo sapiens
catgacatatttcag

SEQ ID NO: 81221 - DNA, 15 bp, Homo sapiens
gcatgacatatttca

SEQ ID NO: 81222 - DNA, 15 bp, Homo sapiens
tgcatgacatatttc

SEQ ID NO: 81223 - DNA, 15 bp, Homo sapiens
atgcatgacatattt

SEQ ID NO: 81224 - DNA, 15 bp, Homo sapiens
tatgcatgacatatt

SEQ ID NO: 81225 - DNA, 15 bp, Homo sapiens
atatgcatgacatat

SEQ ID NO: 81226 - DNA, 15 bp, Homo sapiens
aatatgcatgacata

SEQ ID NO: 81227 - DNA, 15 bp, Homo sapiens
taatatgcatgacat

SEQ ID NO: 81228 - DNA, 15 bp, Homo sapiens
gtaatatgcatgaca

SEQ ID NO: 81229 - DNA, 15 bp, Homo sapiens
agtaatatgcatgac

SEQ ID NO: 81230 - DNA, 15 bp, Homo sapiens
tagtaatatgcatga

SEQ ID NO: 81231 - DNA, 15 bp, Homo sapiens
atagtaatatgcatg

SEQ ID NO: 81232 - DNA, 15 bp, Homo sapiens
aatagtaatatgcat

SEQ ID NO: 81233 - DNA, 15 bp, Homo sapiens
gaatagtaatatgca

SEQ ID NO: 81234 - DNA, 15 bp, Homo sapiens
ggaatagtaatatgc

SEQ ID NO: 81235 - DNA, 15 bp, Homo sapiens
tggaatagtaatatg

SEQ ID NO: 81236 - DNA, 15 bp, Homo sapiens
ttggaatagtaatat

SEQ ID NO: 81237 - DNA, 15 bp, Homo sapiens
attggaatagtaata

SEQ ID NO: 81238 - DNA, 15 bp, Homo sapiens
aattggaatagtaat

SEQ ID NO: 81239 - DNA, 15 bp, Homo sapiens
aaattggaatagtaa

SEQ ID NO: 81240 - DNA, 15 bp, Homo sapiens
aaaattggaatagta

SEQ ID NO: 81241 - DNA, 15 bp, Homo sapiens
aaaaattggaatagt

SEQ ID NO: 81242 - DNA, 15 bp, Homo sapiens
gaaaaattggaatag

SEQ ID NO: 81243 - DNA, 15 bp, Homo sapiens
tgaaaaattggaata

SEQ ID NO: 81244 - DNA, 15 bp, Homo sapiens
gtgaaaaattggaat

SEQ ID NO: 81245 - DNA, 15 bp, Homo sapiens
tgtgaaaaattggaa

SEQ ID NO: 81246 - DNA, 15 bp, Homo sapiens
atgtgaaaaattgga

SEQ ID NO: 81247 - DNA, 15 bp, Homo sapiens
aatgtgaaaaattgg

SEQ ID NO: 81248 - DNA, 15 bp, Homo sapiens
gaatgtgaaaaattg

SEQ ID NO: 81249 - DNA, 15 bp, Homo sapiens
agaatgtgaaaaatt

SEQ ID NO: 81250 - DNA, 15 bp, Homo sapiens
tagaatgtgaaaaat

SEQ ID NO: 81251 - DNA, 15 bp, Homo sapiens
atagaatgtgaaaaa

SEQ ID NO: 81252 - DNA, 15 bp, Homo sapiens
gatagaatgtgaaaa

SEQ ID NO: 81253 - DNA, 15 bp, Homo sapiens
agatagaatgtgaaa

SEQ ID NO: 81254 - DNA, 15 bp, Homo sapiens
cagatagaatgtgaa

SEQ ID NO: 81255 - DNA, 15 bp, Homo sapiens
tcagatagaatgtga

SEQ ID NO: 81256 - DNA, 15 bp, Homo sapiens
ttcagatagaatgtg

SEQ ID NO: 81257 - DNA, 15 bp, Homo sapiens
cttcagatagaatgt

SEQ ID NO: 81258 - DNA, 15 bp, Homo sapiens
acttcagatagaatg

SEQ ID NO: 81259 - DNA, 15 bp, Homo sapiens
cacttcagatagaat

SEQ ID NO: 81260 - DNA, 15 bp, Homo sapiens
gcacttcagatagaa

SEQ ID NO: 81261 - DNA, 15 bp, Homo sapiens
ggcacttcagataga

SEQ ID NO: 81262 - DNA, 15 bp, Homo sapiens
aggcacttcagatag

SEQ ID NO: 81263 - DNA, 15 bp, Homo sapiens
gaggcacttcagata

SEQ ID NO: 81264 - DNA, 15 bp, Homo sapiens
ggaggcacttcagat

SEQ ID NO: 81265 - DNA, 15 bp, Homo sapiens
tggaggcacttcaga

SEQ ID NO: 81266 - DNA, 15 bp, Homo sapiens
ttggaggcacttcag

SEQ ID NO: 81267 - DNA, 15 bp, Homo sapiens
cttggaggcacttca

SEQ ID NO: 81268 - DNA, 15 bp, Homo sapiens
gcttggaggcacttc

SEQ ID NO: 81269 - DNA, 15 bp, Homo sapiens
ggcttggaggcactt

SEQ ID NO: 81270 - DNA, 15 bp, Homo sapiens
aggcttggaggcact

SEQ ID NO: 81271 - DNA, 15 bp, Homo sapiens
caggcttggaggcac

SEQ ID NO: 81272 - DNA, 15 bp, Homo sapiens
gcaggcttggaggca

SEQ ID NO: 81273 - DNA, 15 bp, Homo sapiens
ggcaggcttggaggc

SEQ ID NO: 81274 - DNA, 15 bp, Homo sapiens
gggcaggcttggagg

SEQ ID NO: 81275 - DNA, 15 bp, Homo sapiens
agggcaggcttggag

SEQ ID NO: 81276 - DNA, 15 bp, Homo sapiens
gagggcaggcttgga

SEQ ID NO: 81277 - DNA, 15 bp, Homo sapiens
agagggcaggcttgg

SEQ ID NO: 81278 - DNA, 15 bp, Homo sapiens
aagagggcaggcttg

SEQ ID NO: 81279 - DNA, 15 bp, Homo sapiens
gaagagggcaggctt

SEQ ID NO: 81280 - DNA, 15 bp, Homo sapiens
agaagagggcaggct

SEQ ID NO: 81281 - DNA, 15 bp, Homo sapiens
aagaagagggcaggc

SEQ ID NO: 81282 - DNA, 15 bp, Homo sapiens
taagaagagggcagg

SEQ ID NO: 81283 - DNA, 15 bp, Homo sapiens
ataagaagagggcag

SEQ ID NO: 81284 - DNA, 15 bp, Homo sapiens
aataagaagagggca

SEQ ID NO: 81285 - DNA, 15 bp, Homo sapiens
gaataagaagagggc

SEQ ID NO: 81286 - DNA, 15 bp, Homo sapiens
tgaataagaagaggg

SEQ ID NO: 81287 - DNA, 15 bp, Homo sapiens
gtgaataagaagagg

SEQ ID NO: 81288 - DNA, 15 bp, Homo sapiens
tgtgaataagaagag

SEQ ID NO: 81289 - DNA, 15 bp, Homo sapiens
atgtgaataagaaga

SEQ ID NO: 81290 - DNA, 15 bp, Homo sapiens
tatgtgaataagaag

SEQ ID NO: 81291 - DNA, 15 bp, Homo sapiens
ctatgtgaataagaa

SEQ ID NO: 81292 - DNA, 15 bp, Homo sapiens
actatgtgaataaga

SEQ ID NO: 81293 - DNA, 15 bp, Homo sapiens
cactatgtgaataag

SEQ ID NO: 81294 - DNA, 15 bp, Homo sapiens
gcactatgtgaataa

SEQ ID NO: 81295 - DNA, 15 bp, Homo sapiens
agcactatgtgaata

SEQ ID NO: 81296 - DNA, 15 bp, Homo sapiens
tagcactatgtgaat

SEQ ID NO: 81297 - DNA, 15 bp, Homo sapiens
ttagcactatgtgaa

SEQ ID NO: 81298 - DNA, 15 bp, Homo sapiens
tttagcactatgtga

SEQ ID NO: 81299 - DNA, 15 bp, Homo sapiens
atttagcactatgtg

SEQ ID NO: 81300 - DNA, 15 bp, Homo sapiens
catttagcactatgt

SEQ ID NO: 81301 - DNA, 15 bp, Homo sapiens
acatttagcactatg

SEQ ID NO: 81302 - DNA, 15 bp, Homo sapiens
tacatttagcactat

SEQ ID NO: 81303 - DNA, 15 bp, Homo sapiens
ctacatttagcacta

SEQ ID NO: 81304 - DNA, 15 bp, Homo sapiens
actacatttagcact

SEQ ID NO: 81305 - DNA, 15 bp, Homo sapiens
gactacatttagcac

SEQ ID NO: 81306 - DNA, 15 bp, Homo sapiens
tgactacatttagca

SEQ ID NO: 81307 - DNA, 15 bp, Homo sapiens
gtgactacatttagc

SEQ ID NO: 81308 - DNA, 15 bp, Homo sapiens
cgtgactacatttag

SEQ ID NO: 81309 - DNA, 15 bp, Homo sapiens
acgtgactacattta

SEQ ID NO: 81310 - DNA, 15 bp, Homo sapiens
tacgtgactacattt

SEQ ID NO: 81311 - DNA, 15 bp, Homo sapiens
ttacgtgactacatt

SEQ ID NO: 81312 - DNA, 15 bp, Homo sapiens
attacgtgactacat

SEQ ID NO: 81313 - DNA, 15 bp, Homo sapiens
aattacgtgactaca

SEQ ID NO: 81314 - DNA, 15 bp, Homo sapiens
aaattacgtgactac

SEQ ID NO: 81315 - DNA, 15 bp, Homo sapiens
aaaattacgtgacta

SEQ ID NO: 81316 - DNA, 15 bp, Homo sapiens
aaaaattacgtgact

SEQ ID NO: 81317 - DNA, 15 bp, Homo sapiens
taaaaattacgtgac

SEQ ID NO: 81318 - DNA, 15 bp, Homo sapiens
ataaaaattacgtga

SEQ ID NO: 81319 - DNA, 15 bp, Homo sapiens
cataaaaattacgtg

SEQ ID NO: 81320 - DNA, 15 bp, Homo sapiens
tcataaaaattacgt

SEQ ID NO: 81321 - DNA, 15 bp, Homo sapiens
ttcataaaaattacg

SEQ ID NO: 81322 - DNA, 15 bp, Homo sapiens
cttcataaaaattac

SEQ ID NO: 81323 - DNA, 15 bp, Homo sapiens
gcttcataaaaatta

SEQ ID NO: 81324 - DNA, 15 bp, Homo sapiens
ggcttcataaaaatt

SEQ ID NO: 81325 - DNA, 15 bp, Homo sapiens
tggcttcataaaaat

SEQ ID NO: 81326 - DNA, 15 bp, Homo sapiens
ttggcttcataaaaa

SEQ ID NO: 81327 - DNA, 15 bp, Homo sapiens
gttggcttcataaaa

SEQ ID NO: 81328 - DNA, 15 bp, Homo sapiens
agttggcttcataaa

SEQ ID NO: 81329 - DNA, 15 bp, Homo sapiens
tagttggcttcataa

SEQ ID NO: 81330 - DNA, 15 bp, Homo sapiens
atagttggcttcata

SEQ ID NO: 81331 - DNA, 15 bp, Homo sapiens
catagttggcttcat

SEQ ID NO: 81332 - DNA, 15 bp, Homo sapiens
gcatagttggcttca

SEQ ID NO: 81333 - DNA, 15 bp, Homo sapiens
agcatagttggcttc

SEQ ID NO: 81334 - DNA, 15 bp, Homo sapiens
aagcatagttggctt

SEQ ID NO: 81335 - DNA, 15 bp, Homo sapiens
aaagcatagttggct

SEQ ID NO: 81336 - DNA, 15 bp, Homo sapiens
caaagcatagttggc

SEQ ID NO: 81337 - DNA, 15 bp, Homo sapiens
tcaaagcatagttgg

SEQ ID NO: 81338 - DNA, 15 bp, Homo sapiens
ttcaaagcatagttg

SEQ ID NO: 81339 - DNA, 15 bp, Homo sapiens
tttcaaagcatagtt

SEQ ID NO: 81340 - DNA, 15 bp, Homo sapiens
ttttcaaagcatagt

SEQ ID NO: 81341 - DNA, 15 bp, Homo sapiens
cttttcaaagcatag

SEQ ID NO: 81342 - DNA, 15 bp, Homo sapiens
gcttttcaaagcata

SEQ ID NO: 81343 - DNA, 15 bp, Homo sapiens
ggcttttcaaagcat

SEQ ID NO: 81344 - DNA, 15 bp, Homo sapiens
gggcttttcaaagca

SEQ ID NO: 81345 - DNA, 15 bp, Homo sapiens
ggggcttttcaaagc

SEQ ID NO: 81346 - DNA, 15 bp, Homo sapiens
aggggcttttcaaag

SEQ ID NO: 81347 - DNA, 15 bp, Homo sapiens
caggggcttttcaaa

SEQ ID NO: 81348 - DNA, 15 bp, Homo sapiens
acaggggcttttcaa

SEQ ID NO: 81349 - DNA, 15 bp, Homo sapiens
tacaggggcttttca

SEQ ID NO: 81350 - DNA, 15 bp, Homo sapiens
ttacaggggcttttc

SEQ ID NO: 81351 - DNA, 15 bp, Homo sapiens
tttacaggggctttt

SEQ ID NO: 81352 - DNA, 15 bp, Homo sapiens
ctttacaggggcttt

SEQ ID NO: 81353 - DNA, 15 bp, Homo sapiens
tctttacaggggctt

SEQ ID NO: 81354 - DNA, 15 bp, Homo sapiens
ctctttacaggggct

SEQ ID NO: 81355 - DNA, 15 bp, Homo sapiens
tctctttacaggggc

SEQ ID NO: 81356 - DNA, 15 bp, Homo sapiens
gtctctttacagggg

SEQ ID NO: 81357 - DNA, 15 bp, Homo sapiens
agtctctttacaggg

SEQ ID NO: 81358 - DNA, 15 bp, Homo sapiens
cagtctctttacagg

SEQ ID NO: 81359 - DNA, 15 bp, Homo sapiens
gcagtctctttacag

SEQ ID NO: 81360 - DNA, 15 bp, Homo sapiens
ggcagtctctttaca

SEQ ID NO: 81361 - DNA, 15 bp, Homo sapiens
tggcagtctctttac

SEQ ID NO: 81362 - DNA, 15 bp, Homo sapiens
ctggcagtctcttta

SEQ ID NO: 81363 - DNA, 15 bp, Homo sapiens
tctggcagtctcttt

SEQ ID NO: 81364 - DNA, 15 bp, Homo sapiens
gtctggcagtctctt

SEQ ID NO: 81365 - DNA, 15 bp, Homo sapiens
agtctggcagtctct

SEQ ID NO: 81366 - DNA, 15 bp, Homo sapiens
cagtctggcagtctc

SEQ ID NO: 81367 - DNA, 15 bp, Homo sapiens
acagtctggcagtct

SEQ ID NO: 81368 - DNA, 15 bp, Homo sapiens
tacagtctggcagtc

SEQ ID NO: 81369 - DNA, 15 bp, Homo sapiens
ctacagtctggcagt

SEQ ID NO: 81370 - DNA, 15 bp, Homo sapiens
tctacagtctggcag

SEQ ID NO: 81371 - DNA, 15 bp, Homo sapiens
atctacagtctggca

SEQ ID NO: 81372 - DNA, 15 bp, Homo sapiens
tatctacagtctggc

SEQ ID NO: 81373 - DNA, 15 bp, Homo sapiens
ttatctacagtctgg

SEQ ID NO: 81374 - DNA, 15 bp, Homo sapiens
cttatctacagtctg

SEQ ID NO: 81375 - DNA, 15 bp, Homo sapiens
ccttatctacagtct

SEQ ID NO: 81376 - DNA, 15 bp, Homo sapiens
tccttatctacagtc

SEQ ID NO: 81377 - DNA, 15 bp, Homo sapiens
gtccttatctacagt

SEQ ID NO: 81378 - DNA, 15 bp, Homo sapiens
ggtccttatctacag

SEQ ID NO: 81379 - DNA, 15 bp, Homo sapiens
aggtccttatctaca

SEQ ID NO: 81380 - DNA, 15 bp, Homo sapiens
aaggtccttatctac

SEQ ID NO: 81381 - DNA, 15 bp, Homo sapiens
taaggtccttatcta

SEQ ID NO: 81382 - DNA, 15 bp, Homo sapiens
gtaaggtccttatct

SEQ ID NO: 81383 - DNA, 15 bp, Homo sapiens
tgtaaggtccttatc

SEQ ID NO: 81384 - DNA, 15 bp, Homo sapiens
ttgtaaggtccttat

SEQ ID NO: 81385 - DNA, 15 bp, Homo sapiens
cttgtaaggtcctta

SEQ ID NO: 81386 - DNA, 15 bp, Homo sapiens
gcttgtaaggtcctt

SEQ ID NO: 81387 - DNA, 15 bp, Homo sapiens
ggcttgtaaggtcct

SEQ ID NO: 81388 - DNA, 15 bp, Homo sapiens
aggcttgtaaggtcc

SEQ ID NO: 81389 - DNA, 15 bp, Homo sapiens
aaggcttgtaaggtc

SEQ ID NO: 81390 - DNA, 15 bp, Homo sapiens
caaggcttgtaaggt

SEQ ID NO: 81391 - DNA, 15 bp, Homo sapiens
gcaaggcttgtaagg

SEQ ID NO: 81392 - DNA, 15 bp, Homo sapiens
agcaaggcttgtaag

SEQ ID NO: 81393 - DNA, 15 bp, Homo sapiens
tagcaaggcttgtaa

SEQ ID NO: 81394 - DNA, 15 bp, Homo sapiens
atagcaaggcttgta

SEQ ID NO: 81395 - DNA, 15 bp, Homo sapiens
gatagcaaggcttgt

SEQ ID NO: 81396 - DNA, 15 bp, Homo sapiens
tgatagcaaggcttg

SEQ ID NO: 81397 - DNA, 15 bp, Homo sapiens
gtgatagcaaggctt

SEQ ID NO: 81398 - DNA, 15 bp, Homo sapiens
agtgatagcaaggct

SEQ ID NO: 81399 - DNA, 15 bp, Homo sapiens
aagtgatagcaaggc

SEQ ID NO: 81400 - DNA, 15 bp, Homo sapiens
aaagtgatagcaagg

SEQ ID NO: 81401 - DNA, 15 bp, Homo sapiens
gaaagtgatagcaag

SEQ ID NO: 81402 - DNA, 15 bp, Homo sapiens
tgaaagtgatagcaa

SEQ ID NO: 81403 - DNA, 15 bp, Homo sapiens
atgaaagtgatagca

SEQ ID NO: 81404 - DNA, 15 bp, Homo sapiens
aatgaaagtgatagc

SEQ ID NO: 81405 - DNA, 15 bp, Homo sapiens
aaatgaaagtgatag

SEQ ID NO: 81406 - DNA, 15 bp, Homo sapiens
aaaatgaaagtgata

SEQ ID NO: 81407 - DNA, 15 bp, Homo sapiens
taaaatgaaagtgat

SEQ ID NO: 81408 - DNA, 15 bp, Homo sapiens
ataaaatgaaagtga

SEQ ID NO: 81409 - DNA, 15 bp, Homo sapiens
gataaaatgaaagtg

SEQ ID NO: 81410 - DNA, 15 bp, Homo sapiens
agataaaatgaaagt

SEQ ID NO: 81411 - DNA, 15 bp, Homo sapiens
aagataaaatgaaag

SEQ ID NO: 81412 - DNA, 15 bp, Homo sapiens
caagataaaatgaaa

SEQ ID NO: 81413 - DNA, 15 bp, Homo sapiens
acaagataaaatgaa

SEQ ID NO: 81414 - DNA, 15 bp, Homo sapiens
aacaagataaaatga

SEQ ID NO: 81415 - DNA, 15 bp, Homo sapiens
gaacaagataaaatg

SEQ ID NO: 81416 - DNA, 15 bp, Homo sapiens
agaacaagataaaat

SEQ ID NO: 81417 - DNA, 15 bp, Homo sapiens
gagaacaagataaaa

SEQ ID NO: 81418 - DNA, 15 bp, Homo sapiens
ggagaacaagataaa

SEQ ID NO: 81419 - DNA, 15 bp, Homo sapiens
tggagaacaagataa

SEQ ID NO: 81420 - DNA, 15 bp, Homo sapiens
gtggagaacaagata

SEQ ID NO: 81421 - DNA, 15 bp, Homo sapiens
agtggagaacaagat

SEQ ID NO: 81422 - DNA, 15 bp, Homo sapiens
tagtggagaacaaga

SEQ ID NO: 81423 - DNA, 15 bp, Homo sapiens
gtagtggagaacaag

SEQ ID NO: 81424 - DNA, 15 bp, Homo sapiens
agtagtggagaacaa

SEQ ID NO: 81425 - DNA, 15 bp, Homo sapiens
gagtagtggagaaca

SEQ ID NO: 81426 - DNA, 15 bp, Homo sapiens
agagtagtggagaac

SEQ ID NO: 81427 - DNA, 15 bp, Homo sapiens
aagagtagtggagaa

SEQ ID NO: 81428 - DNA, 15 bp, Homo sapiens
aaagagtagtggaga

SEQ ID NO: 81429 - DNA, 15 bp, Homo sapiens
aaaagagtagtggag

SEQ ID NO: 81430 - DNA, 15 bp, Homo sapiens
aaaaagagtagtgga

SEQ ID NO: 81431 - DNA, 15 bp, Homo sapiens
aaaaaagagtagtgg

SEQ ID NO: 81432 - DNA, 15 bp, Homo sapiens
taaaaaagagtagtg

SEQ ID NO: 81433 - DNA, 15 bp, Homo sapiens
ataaaaaagagtagt

SEQ ID NO: 81434 - DNA, 15 bp, Homo sapiens
tataaaaaagagtag

SEQ ID NO: 81435 - DNA, 15 bp, Homo sapiens
gtataaaaaagagta

SEQ ID NO: 81436 - DNA, 15 bp, Homo sapiens
ggtataaaaaagagt

SEQ ID NO: 81437 - DNA, 15 bp, Homo sapiens
tggtataaaaaagag

SEQ ID NO: 81438 - DNA, 15 bp, Homo sapiens
ctggtataaaaaaga

SEQ ID NO: 81439 - DNA, 15 bp, Homo sapiens
cctggtataaaaaag

SEQ ID NO: 81440 - DNA, 15 bp, Homo sapiens
acctggtataaaaaa

SEQ ID NO: 81441 - DNA, 15 bp, Homo sapiens
aacctggtataaaaa

SEQ ID NO: 81442 - DNA, 15 bp, Homo sapiens
aaacctggtataaaa

SEQ ID NO: 81443 - DNA, 15 bp, Homo sapiens
aaaacctggtataaa

SEQ ID NO: 81444 - DNA, 15 bp, Homo sapiens
caaaacctggtataa

SEQ ID NO: 81445 - DNA, 15 bp, Homo sapiens
tcaaaacctggtata

SEQ ID NO: 81446 - DNA, 15 bp, Homo sapiens
atcaaaacctggtat

SEQ ID NO: 81447 - DNA, 15 bp, Homo sapiens
gatcaaaacctggta

SEQ ID NO: 81448 - DNA, 15 bp, Homo sapiens
agatcaaaacctggt

SEQ ID NO: 81449 - DNA, 15 bp, Homo sapiens
aagatcaaaacctgg

SEQ ID NO: 81450 - DNA, 15 bp, Homo sapiens
aaagatcaaaacctg

SEQ ID NO: 81451 - DNA, 15 bp, Homo sapiens
aaaagatcaaaacct

SEQ ID NO: 81452 - DNA, 15 bp, Homo sapiens
gaaaagatcaaaacc

SEQ ID NO: 81453 - DNA, 15 bp, Homo sapiens
agaaaagatcaaaac

SEQ ID NO: 81454 - DNA, 15 bp, Homo sapiens
aagaaaagatcaaaa

SEQ ID NO: 81455 - DNA, 15 bp, Homo sapiens
aaagaaaagatcaaa

SEQ ID NO: 81456 - DNA, 15 bp, Homo sapiens
gaaagaaaagatcaa

SEQ ID NO: 81457 - DNA, 15 bp, Homo sapiens
agaaagaaaagatca

SEQ ID NO: 81458 - DNA, 15 bp, Homo sapiens
gagaaagaaaagatc

SEQ ID NO: 81459 - DNA, 15 bp, Homo sapiens
tgagaaagaaaagat

SEQ ID NO: 81460 - DNA, 15 bp, Homo sapiens
atgagaaagaaaaga

SEQ ID NO: 81461 - DNA, 15 bp, Homo sapiens
aatgagaaagaaaag

SEQ ID NO: 81462 - DNA, 15 bp, Homo sapiens
gaatgagaaagaaaa

SEQ ID NO: 81463 - DNA, 15 bp, Homo sapiens
agaatgagaaagaaa

SEQ ID NO: 81464 - DNA, 15 bp, Homo sapiens
aagaatgagaaagaa

SEQ ID NO: 81465 - DNA, 15 bp, Homo sapiens
aaagaatgagaaaga

SEQ ID NO: 81466 - DNA, 15 bp, Homo sapiens
gaaagaatgagaaag

SEQ ID NO: 81467 - DNA, 15 bp, Homo sapiens
ggaaagaatgagaaa

SEQ ID NO: 81468 - DNA, 15 bp, Homo sapiens
tggaaagaatgagaa

SEQ ID NO: 81469 - DNA, 15 bp, Homo sapiens
atggaaagaatgaga

SEQ ID NO: 81470 - DNA, 15 bp, Homo sapiens
tatggaaagaatgag

SEQ ID NO: 81471 - DNA, 15 bp, Homo sapiens
ttatggaaagaatga

SEQ ID NO: 81472 - DNA, 15 bp, Homo sapiens
tttatggaaagaatg

SEQ ID NO: 81473 - DNA, 15 bp, Homo sapiens
gtttatggaaagaat

SEQ ID NO: 81474 - DNA, 15 bp, Homo sapiens
tgtttatggaaagaa

SEQ ID NO: 81475 - DNA, 15 bp, Homo sapiens
atgtttatggaaaga

SEQ ID NO: 81476 - DNA, 15 bp, Homo sapiens
tatgtttatggaaag

SEQ ID NO: 81477 - DNA, 15 bp, Homo sapiens
ttatgtttatggaaa

SEQ ID NO: 81478 - DNA, 15 bp, Homo sapiens
cttatgtttatggaa

SEQ ID NO: 81479 - DNA, 15 bp, Homo sapiens
acttatgtttatgga

SEQ ID NO: 81480 - DNA, 15 bp, Homo sapiens
gacttatgtttatgg

SEQ ID NO: 81481 - DNA, 15 bp, Homo sapiens
tgacttatgtttatg

SEQ ID NO: 81482 - DNA, 15 bp, Homo sapiens
ttgacttatgtttat

SEQ ID NO: 81483 - DNA, 15 bp, Homo sapiens
tttgacttatgttta

SEQ ID NO: 81484 - DNA, 15 bp, Homo sapiens
gtttgacttatgttt

SEQ ID NO: 81485 - DNA, 15 bp, Homo sapiens
agtttgacttatgtt

SEQ ID NO: 81486 - DNA, 15 bp, Homo sapiens
gagtttgacttatgt

SEQ ID NO: 81487 - DNA, 15 bp, Homo sapiens
ggagtttgacttatg

SEQ ID NO: 81488 - DNA, 15 bp, Homo sapiens
tggagtttgacttat

SEQ ID NO: 81489 - DNA, 15 bp, Homo sapiens
gtggagtttgactta

SEQ ID NO: 81490 - DNA, 15 bp, Homo sapiens
tgtggagtttgactt

SEQ ID NO: 81491 - DNA, 15 bp, Homo sapiens
gtgtggagtttgact

SEQ ID NO: 81492 - DNA, 15 bp, Homo sapiens
tgtgtggagtttgac

SEQ ID NO: 81493 - DNA, 15 bp, Homo sapiens
ctgtgtggagtttga

SEQ ID NO: 81494 - DNA, 15 bp, Homo sapiens
gctgtgtggagtttg

SEQ ID NO: 81495 - DNA, 15 bp, Homo sapiens
ggctgtgtggagttt

SEQ ID NO: 81496 - DNA, 15 bp, Homo sapiens
gggctgtgtggagtt

SEQ ID NO: 81497 - DNA, 15 bp, Homo sapiens
tgggctgtgtggagt

SEQ ID NO: 81498 - DNA, 15 bp, Homo sapiens
ttgggctgtgtggag

SEQ ID NO: 81499 - DNA, 15 bp, Homo sapiens
cttgggctgtgtgga

SEQ ID NO: 81500 - DNA, 15 bp, Homo sapiens
acttgggctgtgtgg

SEQ ID NO: 81501 - DNA, 15 bp, Homo sapiens
cacttgggctgtgtg

SEQ ID NO: 81502 - DNA, 15 bp, Homo sapiens
tcacttgggctgtgt

SEQ ID NO: 81503 - DNA, 15 bp, Homo sapiens
ttcacttgggctgtg

SEQ ID NO: 81504 - DNA, 15 bp, Homo sapiens
gttcacttgggctgt

SEQ ID NO: 81505 - DNA, 15 bp, Homo sapiens
agttcacttgggctg

SEQ ID NO: 81506 - DNA, 15 bp, Homo sapiens
cagttcacttgggct

SEQ ID NO: 81507 - DNA, 15 bp, Homo sapiens
gcagttcacttgggc

SEQ ID NO: 81508 - DNA, 15 bp, Homo sapiens
tgcagttcacttggg

SEQ ID NO: 81509 - DNA, 15 bp, Homo sapiens
atgcagttcacttgg

SEQ ID NO: 81510 - DNA, 15 bp, Homo sapiens
gatgcagttcacttg

SEQ ID NO: 81511 - DNA, 15 bp, Homo sapiens
agatgcagttcactt

SEQ ID NO: 81512 - DNA, 15 bp, Homo sapiens
cagatgcagttcact

SEQ ID NO: 81513 - DNA, 15 bp, Homo sapiens
tcagatgcagttcac

SEQ ID NO: 81514 - DNA, 15 bp, Homo sapiens
ttcagatgcagttca

SEQ ID NO: 81515 - DNA, 15 bp, Homo sapiens
attcagatgcagttc

SEQ ID NO: 81516 - DNA, 15 bp, Homo sapiens
aattcagatgcagtt

SEQ ID NO: 81517 - DNA, 15 bp, Homo sapiens
caattcagatgcagt

SEQ ID NO: 81518 - DNA, 15 bp, Homo sapiens
ccaattcagatgcag

SEQ ID NO: 81519 - DNA, 15 bp, Homo sapiens
accaattcagatgca

SEQ ID NO: 81520 - DNA, 15 bp, Homo sapiens
taccaattcagatgc

SEQ ID NO: 81521 - DNA, 15 bp, Homo sapiens
ttaccaattcagatg

SEQ ID NO: 81522 - DNA, 15 bp, Homo sapiens
tttaccaattcagat

SEQ ID NO: 81523 - DNA, 15 bp, Homo sapiens
ttttaccaattcaga

SEQ ID NO: 81524 - DNA, 15 bp, Homo sapiens
gttttaccaattcag

SEQ ID NO: 81525 - DNA, 15 bp, Homo sapiens
agttttaccaattca

SEQ ID NO: 81526 - DNA, 15 bp, Homo sapiens
cagttttaccaattc

SEQ ID NO: 81527 - DNA, 15 bp, Homo sapiens
acagttttaccaatt

SEQ ID NO: 81528 - DNA, 15 bp, Homo sapiens
aacagttttaccaat

SEQ ID NO: 81529 - DNA, 15 bp, Homo sapiens
aaacagttttaccaa

SEQ ID NO: 81530 - DNA, 15 bp, Homo sapiens
aaaacagttttacca

SEQ ID NO: 81531 - DNA, 15 bp, Homo sapiens
taaaacagttttacc

SEQ ID NO: 81532 - DNA, 15 bp, Homo sapiens
ttaaaacagttttac

SEQ ID NO: 81533 - DNA, 15 bp, Homo sapiens
tttaaaacagtttta

SEQ ID NO: 81534 - DNA, 15 bp, Homo sapiens
ttttaaaacagtttt

SEQ ID NO: 81535 - DNA, 15 bp, Homo sapiens
tttttaaaacagttt

SEQ ID NO: 81536 - DNA, 15 bp, Homo sapiens
ctttttaaaacagtt

SEQ ID NO: 81537 - DNA, 15 bp, Homo sapiens
actttttaaaacagt

SEQ ID NO: 81538 - DNA, 15 bp, Homo sapiens
tactttttaaaacag

SEQ ID NO: 81539 - DNA, 15 bp, Homo sapiens
atactttttaaaaca

SEQ ID NO: 81540 - DNA, 15 bp, Homo sapiens
tatactttttaaaac

SEQ ID NO: 81541 - DNA, 15 bp, Homo sapiens
ttatactttttaaaa

SEQ ID NO: 81542 - DNA, 15 bp, Homo sapiens
attatactttttaaa

SEQ ID NO: 81543 - DNA, 15 bp, Homo sapiens
aattatactttttaa

SEQ ID NO: 81544 - DNA, 15 bp, Homo sapiens
aaattatacttttta

SEQ ID NO: 81545 - DNA, 15 bp, Homo sapiens
taaattatacttttt

SEQ ID NO: 81546 - DNA, 15 bp, Homo sapiens
gtaaattatactttt

SEQ ID NO: 81547 - DNA, 15 bp, Homo sapiens
ggtaaattatacttt

SEQ ID NO: 81548 - DNA, 15 bp, Homo sapiens
gggtaaattatactt

SEQ ID NO: 81549 - DNA, 15 bp, Homo sapiens
tgggtaaattatact

SEQ ID NO: 81550 - DNA, 15 bp, Homo sapiens
ttgggtaaattatac

SEQ ID NO: 81551 - DNA, 15 bp, Homo sapiens
attgggtaaattata

SEQ ID NO: 81552 - DNA, 15 bp, Homo sapiens
gattgggtaaattat

SEQ ID NO: 81553 - DNA, 15 bp, Homo sapiens
agattgggtaaatta

SEQ ID NO: 81554 - DNA, 15 bp, Homo sapiens
gagattgggtaaatt

SEQ ID NO: 81555 - DNA, 15 bp, Homo sapiens
agagattgggtaaat

SEQ ID NO: 81556 - DNA, 15 bp, Homo sapiens
aagagattgggtaaa

SEQ ID NO: 81557 - DNA, 15 bp, Homo sapiens
aaagagattgggtaa

SEQ ID NO: 81558 - DNA, 15 bp, Homo sapiens
aaaagagattgggta

SEQ ID NO: 81559 - DNA, 15 bp, Homo sapiens
gaaaagagattgggt

SEQ ID NO: 81560 - DNA, 15 bp, Homo sapiens
agaaaagagattggg

SEQ ID NO: 81561 - DNA, 15 bp, Homo sapiens
gagaaaagagattgg

SEQ ID NO: 81562 - DNA, 15 bp, Homo sapiens
agagaaaagagattg

SEQ ID NO: 81563 - DNA, 15 bp, Homo sapiens
tagagaaaagagatt

SEQ ID NO: 81564 - DNA, 15 bp, Homo sapiens
atagagaaaagagat

SEQ ID NO: 81565 - DNA, 15 bp, Homo sapiens
gatagagaaaagaga

SEQ ID NO: 81566 - DNA, 15 bp, Homo sapiens
agatagagaaaagag

SEQ ID NO: 81567 - DNA, 15 bp, Homo sapiens
gagatagagaaaaga

SEQ ID NO: 81568 - DNA, 15 bp, Homo sapiens
tgagatagagaaaag

SEQ ID NO: 81569 - DNA, 15 bp, Homo sapiens
atgagatagagaaaa

SEQ ID NO: 81570 - DNA, 15 bp, Homo sapiens
aatgagatagagaaa

SEQ ID NO: 81571 - DNA, 15 bp, Homo sapiens
taatgagatagagaa

SEQ ID NO: 81572 - DNA, 15 bp, Homo sapiens
ttaatgagatagaga

SEQ ID NO: 81573 - DNA, 15 bp, Homo sapiens
attaatgagatagag

SEQ ID NO: 81574 - DNA, 15 bp, Homo sapiens
tattaatgagataga

SEQ ID NO: 81575 - DNA, 15 bp, Homo sapiens
atattaatgagatag

SEQ ID NO: 81576 - DNA, 15 bp, Homo sapiens
aatattaatgagata

SEQ ID NO: 81577 - DNA, 15 bp, Homo sapiens
caatattaatgagat

SEQ ID NO: 81578 - DNA, 15 bp, Homo sapiens
acaatattaatgaga

SEQ ID NO: 81579 - DNA, 15 bp, Homo sapiens
gacaatattaatgag

SEQ ID NO: 81580 - DNA, 15 bp, Homo sapiens
agacaatattaatga

SEQ ID NO: 81581 - DNA, 15 bp, Homo sapiens
tagacaatattaatg

SEQ ID NO: 81582 - DNA, 15 bp, Homo sapiens
atagacaatattaat

SEQ ID NO: 81583 - DNA, 15 bp, Homo sapiens
catagacaatattaa

SEQ ID NO: 81584 - DNA, 15 bp, Homo sapiens
tcatagacaatatta

SEQ ID NO: 81585 - DNA, 15 bp, Homo sapiens
gtcatagacaatatt

SEQ ID NO: 81586 - DNA, 15 bp, Homo sapiens
agtcatagacaatat

SEQ ID NO: 81587 - DNA, 15 bp, Homo sapiens
tagtcatagacaata

SEQ ID NO: 81588 - DNA, 15 bp, Homo sapiens
gtagtcatagacaat

SEQ ID NO: 81589 - DNA, 15 bp, Homo sapiens
tgtagtcatagacaa

SEQ ID NO: 81590 - DNA, 15 bp, Homo sapiens
atgtagtcatagaca

SEQ ID NO: 81591 - DNA, 15 bp, Homo sapiens
catgtagtcatagac

SEQ ID NO: 81592 - DNA, 15 bp, Homo sapiens
tcatgtagtcataga

SEQ ID NO: 81593 - DNA, 15 bp, Homo sapiens
ttcatgtagtcatag

SEQ ID NO: 81594 - DNA, 15 bp, Homo sapiens
gttcatgtagtcata

SEQ ID NO: 81595 - DNA, 15 bp, Homo sapiens
ggttcatgtagtcat

SEQ ID NO: 81596 - DNA, 15 bp, Homo sapiens
tggttcatgtagtca

SEQ ID NO: 81597 - DNA, 15 bp, Homo sapiens
gtggttcatgtagtc

SEQ ID NO: 81598 - DNA, 15 bp, Homo sapiens
ggtggttcatgtagt

SEQ ID NO: 81599 - DNA, 15 bp, Homo sapiens
tggtggttcatgtag

SEQ ID NO: 81600 - DNA, 15 bp, Homo sapiens
atggtggttcatgta

SEQ ID NO: 81601 - DNA, 15 bp, Homo sapiens
tatggtggttcatgt

SEQ ID NO: 81602 - DNA, 15 bp, Homo sapiens
atatggtggttcatg

SEQ ID NO: 81603 - DNA, 15 bp, Homo sapiens
tatatggtggttcat

SEQ ID NO: 81604 - DNA, 15 bp, Homo sapiens
atatatggtggttca

SEQ ID NO: 81605 - DNA, 15 bp, Homo sapiens
aatatatggtggttc

SEQ ID NO: 81606 - DNA, 15 bp, Homo sapiens
aaatatatggtggtt

SEQ ID NO: 81607 - DNA, 15 bp, Homo sapiens
taaatatatggtggt

SEQ ID NO: 81608 - DNA, 15 bp, Homo sapiens
ttaaatatatggtgg

SEQ ID NO: 81609 - DNA, 15 bp, Homo sapiens
tttaaatatatggtg

SEQ ID NO: 81610 - DNA, 15 bp, Homo sapiens
gtttaaatatatggt

SEQ ID NO: 81611 - DNA, 15 bp, Homo sapiens
tgtttaaatatatgg

SEQ ID NO: 81612 - DNA, 15 bp, Homo sapiens
atgtttaaatatatg

SEQ ID NO: 81613 - DNA, 15 bp, Homo sapiens
aatgtttaaatatat

SEQ ID NO: 81614 - DNA, 15 bp, Homo sapiens
aaatgtttaaatata

SEQ ID NO: 81615 - DNA, 15 bp, Homo sapiens
aaaatgtttaaatat

SEQ ID NO: 81616 - DNA, 15 bp, Homo sapiens
taaaatgtttaaata

SEQ ID NO: 81617 - DNA, 15 bp, Homo sapiens
ataaaatgtttaaat

SEQ ID NO: 81618 - DNA, 15 bp, Homo sapiens
gataaaatgtttaaa

SEQ ID NO: 81619 - DNA, 15 bp, Homo sapiens
agataaaatgtttaa

SEQ ID NO: 81620 - DNA, 15 bp, Homo sapiens
cagataaaatgttta

SEQ ID NO: 81621 - DNA, 15 bp, Homo sapiens
tcagataaaatgttt

SEQ ID NO: 81622 - DNA, 15 bp, Homo sapiens
ctcagataaaatgtt

SEQ ID NO: 81623 - DNA, 15 bp, Homo sapiens
gctcagataaaatgt

SEQ ID NO: 81624 - DNA, 15 bp, Homo sapiens
agctcagataaaatg

SEQ ID NO: 81625 - DNA, 15 bp, Homo sapiens
aagctcagataaaat

SEQ ID NO: 81626 - DNA, 15 bp, Homo sapiens
taagctcagataaaa

SEQ ID NO: 81627 - DNA, 15 bp, Homo sapiens
ataagctcagataaa

SEQ ID NO: 81628 - DNA, 15 bp, Homo sapiens
aataagctcagataa

SEQ ID NO: 81629 - DNA, 15 bp, Homo sapiens
taataagctcagata

SEQ ID NO: 81630 - DNA, 15 bp, Homo sapiens
ataataagctcagat

SEQ ID NO: 81631 - DNA, 15 bp, Homo sapiens
tataataagctcaga

SEQ ID NO: 81632 - DNA, 15 bp, Homo sapiens
ttataataagctcag

SEQ ID NO: 81633 - DNA, 15 bp, Homo sapiens
tttataataagctca

SEQ ID NO: 81634 - DNA, 15 bp, Homo sapiens
ttttataataagctc

SEQ ID NO: 81635 - DNA, 15 bp, Homo sapiens
attttataataagct

SEQ ID NO: 81636 - DNA, 15 bp, Homo sapiens
tattttataataagc

SEQ ID NO: 81637 - DNA, 15 bp, Homo sapiens
gtattttataataag

SEQ ID NO: 81638 - DNA, 15 bp, Homo sapiens
ggtattttataataa

SEQ ID NO: 81639 - DNA, 15 bp, Homo sapiens
aggtattttataata

SEQ ID NO: 81640 - DNA, 15 bp, Homo sapiens
aaggtattttataat

SEQ ID NO: 81641 - DNA, 15 bp, Homo sapiens
caaggtattttataa

SEQ ID NO: 81642 - DNA, 15 bp, Homo sapiens
acaaggtattttata

SEQ ID NO: 81643 - DNA, 15 bp, Homo sapiens
tacaaggtattttat

SEQ ID NO: 81644 - DNA, 15 bp, Homo sapiens
gtacaaggtatttta

SEQ ID NO: 81645 - DNA, 15 bp, Homo sapiens
tgtacaaggtatttt

SEQ ID NO: 81646 - DNA, 15 bp, Homo sapiens
ttgtacaaggtattt

SEQ ID NO: 81647 - DNA, 15 bp, Homo sapiens
tttgtacaaggtatt

SEQ ID NO: 81648 - DNA, 15 bp, Homo sapiens
gtttgtacaaggtat

SEQ ID NO: 81649 - DNA, 15 bp, Homo sapiens
ggtttgtacaaggta

SEQ ID NO: 81650 - DNA, 15 bp, Homo sapiens
tggtttgtacaaggt

SEQ ID NO: 81651 - DNA, 15 bp, Homo sapiens
ttggtttgtacaagg

SEQ ID NO: 81652 - DNA, 15 bp, Homo sapiens
tttggtttgtacaag

SEQ ID NO: 81653 - DNA, 15 bp, Homo sapiens
atttggtttgtacaa

SEQ ID NO: 81654 - DNA, 15 bp, Homo sapiens
tatttggtttgtaca

SEQ ID NO: 81655 - DNA, 15 bp, Homo sapiens
atatttggtttgtac

SEQ ID NO: 81656 - DNA, 15 bp, Homo sapiens
catatttggtttgta

SEQ ID NO: 81657 - DNA, 15 bp, Homo sapiens
acatatttggtttgt

SEQ ID NO: 81658 - DNA, 15 bp, Homo sapiens
aacatatttggtttg

SEQ ID NO: 81659 - DNA, 15 bp, Homo sapiens
gaacatatttggttt

SEQ ID NO: 81660 - DNA, 15 bp, Homo sapiens
tgaacatatttggtt

SEQ ID NO: 81661 - DNA, 15 bp, Homo sapiens
atgaacatatttggt

SEQ ID NO: 81662 - DNA, 15 bp, Homo sapiens
catgaacatatttgg

SEQ ID NO: 81663 - DNA, 15 bp, Homo sapiens
ccatgaacatatttg

SEQ ID NO: 81664 - DNA, 15 bp, Homo sapiens
cccatgaacatattt

SEQ ID NO: 81665 - DNA, 15 bp, Homo sapiens
acccatgaacatatt

SEQ ID NO: 81666 - DNA, 15 bp, Homo sapiens
cacccatgaacatat

SEQ ID NO: 81667 - DNA, 15 bp, Homo sapiens
acacccatgaacata

SEQ ID NO: 81668 - DNA, 15 bp, Homo sapiens
tacacccatgaacat

SEQ ID NO: 81669 - DNA, 15 bp, Homo sapiens
gtacacccatgaaca

SEQ ID NO: 81670 - DNA, 15 bp, Homo sapiens
agtacacccatgaac

SEQ ID NO: 81671 - DNA, 15 bp, Homo sapiens
cagtacacccatgaa

SEQ ID NO: 81672 - DNA, 15 bp, Homo sapiens
tcagtacacccatga

SEQ ID NO: 81673 - DNA, 15 bp, Homo sapiens
atcagtacacccatg

SEQ ID NO: 81674 - DNA, 15 bp, Homo sapiens
aatcagtacacccat

SEQ ID NO: 81675 - DNA, 15 bp, Homo sapiens
aaatcagtacaccca

SEQ ID NO: 81676 - DNA, 15 bp, Homo sapiens
aaaatcagtacaccc

SEQ ID NO: 81677 - DNA, 15 bp, Homo sapiens
caaaatcagtacacc

SEQ ID NO: 81678 - DNA, 15 bp, Homo sapiens
tcaaaatcagtacac

SEQ ID NO: 81679 - DNA, 15 bp, Homo sapiens
ctcaaaatcagtaca

SEQ ID NO: 81680 - DNA, 15 bp, Homo sapiens
cctcaaaatcagtac

SEQ ID NO: 81681 - DNA, 15 bp, Homo sapiens
tcctcaaaatcagta

SEQ ID NO: 81682 - DNA, 15 bp, Homo sapiens
atcctcaaaatcagt

SEQ ID NO: 81683 - DNA, 15 bp, Homo sapiens
catcctcaaaatcag

SEQ ID NO: 81684 - DNA, 15 bp, Homo sapiens
tcatcctcaaaatca

SEQ ID NO: 81685 - DNA, 15 bp, Homo sapiens
atcatcctcaaaatc

SEQ ID NO: 81686 - DNA, 15 bp, Homo sapiens
catcatcctcaaaat

SEQ ID NO: 81687 - DNA, 15 bp, Homo sapiens
tcatcatcctcaaaa

SEQ ID NO: 81688 - DNA, 15 bp, Homo sapiens
atcatcatcctcaaa

SEQ ID NO: 81689 - DNA, 15 bp, Homo sapiens
tatcatcatcctcaa

SEQ ID NO: 81690 - DNA, 15 bp, Homo sapiens
atatcatcatcctca

SEQ ID NO: 81691 - DNA, 15 bp, Homo sapiens
catatcatcatcctc

SEQ ID NO: 81692 - DNA, 15 bp, Homo sapiens
tcatatcatcatcct

SEQ ID NO: 81693 - DNA, 15 bp, Homo sapiens
atcatatcatcatcc

SEQ ID NO: 81694 - DNA, 15 bp, Homo sapiens
aatcatatcatcatc

SEQ ID NO: 81695 - DNA, 15 bp, Homo sapiens
caatcatatcatcat

SEQ ID NO: 81696 - DNA, 15 bp, Homo sapiens
gcaatcatatcatca

SEQ ID NO: 81697 - DNA, 15 bp, Homo sapiens
ggcaatcatatcatc

SEQ ID NO: 81698 - DNA, 15 bp, Homo sapiens
cggcaatcatatcat

SEQ ID NO: 81699 - DNA, 15 bp, Homo sapiens
tcggcaatcatatca

SEQ ID NO: 81700 - DNA, 15 bp, Homo sapiens
ttcggcaatcatatc

SEQ ID NO: 81701 - DNA, 15 bp, Homo sapiens
attcggcaatcatat

SEQ ID NO: 81702 - DNA, 15 bp, Homo sapiens
gattcggcaatcata

SEQ ID NO: 81703 - DNA, 15 bp, Homo sapiens
cgattcggcaatcat

SEQ ID NO: 81704 - DNA, 15 bp, Homo sapiens
tcgattcggcaatca

SEQ ID NO: 81705 - DNA, 15 bp, Homo sapiens
gtcgattcggcaatc

SEQ ID NO: 81706 - DNA, 15 bp, Homo sapiens
agtcgattcggcaat

SEQ ID NO: 81707 - DNA, 15 bp, Homo sapiens
aagtcgattcggcaa

SEQ ID NO: 81708 - DNA, 15 bp, Homo sapiens
caagtcgattcggca

SEQ ID NO: 81709 - DNA, 15 bp, Homo sapiens
tcaagtcgattcggc

SEQ ID NO: 81710 - DNA, 15 bp, Homo sapiens
ttcaagtcgattcgg

SEQ ID NO: 81711 - DNA, 15 bp, Homo sapiens
tttcaagtcgattcg

SEQ ID NO: 81712 - DNA, 15 bp, Homo sapiens
gtttcaagtcgattc

SEQ ID NO: 81713 - DNA, 15 bp, Homo sapiens
tgtttcaagtcgatt

SEQ ID NO: 81714 - DNA, 15 bp, Homo sapiens
ctgtttcaagtcgat

SEQ ID NO: 81715 - DNA, 15 bp, Homo sapiens
actgtttcaagtcga

SEQ ID NO: 81716 - DNA, 15 bp, Homo sapiens
cactgtttcaagtcg

SEQ ID NO: 81717 - DNA, 15 bp, Homo sapiens
acactgtttcaagtc

SEQ ID NO: 81718 - DNA, 15 bp, Homo sapiens
aacactgtttcaagt

SEQ ID NO: 81719 - DNA, 15 bp, Homo sapiens
gaacactgtttcaag

SEQ ID NO: 81720 - DNA, 15 bp, Homo sapiens
agaacactgtttcaa

SEQ ID NO: 81721 - DNA, 15 bp, Homo sapiens
cagaacactgtttca

SEQ ID NO: 81722 - DNA, 15 bp, Homo sapiens
gcagaacactgtttc

SEQ ID NO: 81723 - DNA, 15 bp, Homo sapiens
tgcagaacactgttt

SEQ ID NO: 81724 - DNA, 15 bp, Homo sapiens
atgcagaacactgtt

SEQ ID NO: 81725 - DNA, 15 bp, Homo sapiens
tatgcagaacactgt

SEQ ID NO: 81726 - DNA, 15 bp, Homo sapiens
ttatgcagaacactg

SEQ ID NO: 81727 - DNA, 15 bp, Homo sapiens
tttatgcagaacact

SEQ ID NO: 81728 - DNA, 15 bp, Homo sapiens
ctttatgcagaacac

SEQ ID NO: 81729 - DNA, 15 bp, Homo sapiens
tctttatgcagaaca

SEQ ID NO: 81730 - DNA, 15 bp, Homo sapiens
gtctttatgcagaac

SEQ ID NO: 81731 - DNA, 15 bp, Homo sapiens
tgtctttatgcagaa

SEQ ID NO: 81732 - DNA, 15 bp, Homo sapiens
gtgtctttatgcaga

SEQ ID NO: 81733 - DNA, 15 bp, Homo sapiens
ggtgtctttatgcag

SEQ ID NO: 81734 - DNA, 15 bp, Homo sapiens
aggtgtctttatgca

SEQ ID NO: 81735 - DNA, 15 bp, Homo sapiens
taggtgtctttatgc

SEQ ID NO: 81736 - DNA, 15 bp, Homo sapiens
ttaggtgtctttatg

SEQ ID NO: 81737 - DNA, 15 bp, Homo sapiens
cttaggtgtctttat

SEQ ID NO: 81738 - DNA, 15 bp, Homo sapiens
ccttaggtgtcttta

SEQ ID NO: 81739 - DNA, 15 bp, Homo sapiens
cccttaggtgtcttt

SEQ ID NO: 81740 - DNA, 15 bp, Homo sapiens
tcccttaggtgtctt

SEQ ID NO: 81741 - DNA, 15 bp, Homo sapiens
gtcccttaggtgtct

SEQ ID NO: 81742 - DNA, 15 bp, Homo sapiens
agtcccttaggtgtc

SEQ ID NO: 81743 - DNA, 15 bp, Homo sapiens
tagtcccttaggtgt

SEQ ID NO: 81744 - DNA, 15 bp, Homo sapiens
ttagtcccttaggtg

SEQ ID NO: 81745 - DNA, 15 bp, Homo sapiens
attagtcccttaggt

SEQ ID NO: 81746 - DNA, 15 bp, Homo sapiens
gattagtcccttagg

SEQ ID NO: 81747 - DNA, 15 bp, Homo sapiens
agattagtcccttag

SEQ ID NO: 81748 - DNA, 15 bp, Homo sapiens
cagattagtccctta

SEQ ID NO: 81749 - DNA, 15 bp, Homo sapiens
tcagattagtccctt

SEQ ID NO: 81750 - DNA, 15 bp, Homo sapiens
gtcagattagtccct

SEQ ID NO: 81751 - DNA, 15 bp, Homo sapiens
tgtcagattagtccc

SEQ ID NO: 81752 - DNA, 15 bp, Homo sapiens
ttgtcagattagtcc

SEQ ID NO: 81753 - DNA, 15 bp, Homo sapiens
cttgtcagattagtc

SEQ ID NO: 81754 - DNA, 15 bp, Homo sapiens
acttgtcagattagt

SEQ ID NO: 81755 - DNA, 15 bp, Homo sapiens
cacttgtcagattag

SEQ ID NO: 81756 - DNA, 15 bp, Homo sapiens
acacttgtcagatta

SEQ ID NO: 81757 - DNA, 15 bp, Homo sapiens
gacacttgtcagatt

SEQ ID NO: 81758 - DNA, 15 bp, Homo sapiens
agacacttgtcagat

SEQ ID NO: 81759 - DNA, 15 bp, Homo sapiens
gagacacttgtcaga

SEQ ID NO: 81760 - DNA, 15 bp, Homo sapiens
tgagacacttgtcag

SEQ ID NO: 81761 - DNA, 15 bp, Homo sapiens
ttgagacacttgtca

SEQ ID NO: 81762 - DNA, 15 bp, Homo sapiens
tttgagacacttgtc

SEQ ID NO: 81763 - DNA, 15 bp, Homo sapiens
ttttgagacacttgt

SEQ ID NO: 81764 - DNA, 15 bp, Homo sapiens
cttttgagacacttg

SEQ ID NO: 81765 - DNA, 15 bp, Homo sapiens
gcttttgagacactt

SEQ ID NO: 81766 - DNA, 15 bp, Homo sapiens
tgcttttgagacact

SEQ ID NO: 81767 - DNA, 15 bp, Homo sapiens
ctgcttttgagacac

SEQ ID NO: 81768 - DNA, 15 bp, Homo sapiens
cctgcttttgagaca

SEQ ID NO: 81769 - DNA, 15 bp, Homo sapiens
tcctgcttttgagac

SEQ ID NO: 81770 - DNA, 15 bp, Homo sapiens
gtcctgcttttgaga

SEQ ID NO: 81771 - DNA, 15 bp, Homo sapiens
tgtcctgcttttgag

SEQ ID NO: 81772 - DNA, 15 bp, Homo sapiens
ctgtcctgcttttga

SEQ ID NO: 81773 - DNA, 15 bp, Homo sapiens
tctgtcctgcttttg

SEQ ID NO: 81774 - DNA, 15 bp, Homo sapiens
ctctgtcctgctttt

SEQ ID NO: 81775 - DNA, 15 bp, Homo sapiens
tctctgtcctgcttt

SEQ ID NO: 81776 - DNA, 15 bp, Homo sapiens
ttctctgtcctgctt

SEQ ID NO: 81777 - DNA, 15 bp, Homo sapiens
tttctctgtcctgct

SEQ ID NO: 81778 - DNA, 15 bp, Homo sapiens
gtttctctgtcctgc

SEQ ID NO: 81779 - DNA, 15 bp, Homo sapiens
tgtttctctgtcctg

SEQ ID NO: 81780 - DNA, 15 bp, Homo sapiens
atgtttctctgtcct

SEQ ID NO: 81781 - DNA, 15 bp, Homo sapiens
catgtttctctgtcc

SEQ ID NO: 81782 - DNA, 15 bp, Homo sapiens
tcatgtttctctgtc

SEQ ID NO: 81783 - DNA, 15 bp, Homo sapiens
ttcatgtttctctgt

SEQ ID NO: 81784 - DNA, 15 bp, Homo sapiens
attcatgtttctctg

SEQ ID NO: 81785 - DNA, 15 bp, Homo sapiens
tattcatgtttctct

SEQ ID NO: 81786 - DNA, 15 bp, Homo sapiens
atattcatgtttctc

SEQ ID NO: 81787 - DNA, 15 bp, Homo sapiens
catattcatgtttct

SEQ ID NO: 81788 - DNA, 15 bp, Homo sapiens
gcatattcatgtttc

SEQ ID NO: 81789 - DNA, 15 bp, Homo sapiens
tgcatattcatgttt

SEQ ID NO: 81790 - DNA, 15 bp, Homo sapiens
atgcatattcatgtt

SEQ ID NO: 81791 - DNA, 15 bp, Homo sapiens
aatgcatattcatgt

SEQ ID NO: 81792 - DNA, 15 bp, Homo sapiens
taatgcatattcatg

SEQ ID NO: 81793 - DNA, 15 bp, Homo sapiens
ttaatgcatattcat

SEQ ID NO: 81794 - DNA, 15 bp, Homo sapiens
tttaatgcatattca

SEQ ID NO: 81795 - DNA, 15 bp, Homo sapiens
atttaatgcatattc

SEQ ID NO: 81796 - DNA, 15 bp, Homo sapiens
catttaatgcatatt

SEQ ID NO: 81797 - DNA, 15 bp, Homo sapiens
gcatttaatgcatat

SEQ ID NO: 81798 - DNA, 15 bp, Homo sapiens
ggcatttaatgcata

SEQ ID NO: 81799 - DNA, 15 bp, Homo sapiens
aggcatttaatgcat

SEQ ID NO: 81800 - DNA, 15 bp, Homo sapiens
taggcatttaatgca

SEQ ID NO: 81801 - DNA, 15 bp, Homo sapiens
ttaggcatttaatgc

SEQ ID NO: 81802 - DNA, 15 bp, Homo sapiens
cttaggcatttaatg

SEQ ID NO: 81803 - DNA, 15 bp, Homo sapiens
acttaggcatttaat

SEQ ID NO: 81804 - DNA, 15 bp, Homo sapiens
cacttaggcatttaa

SEQ ID NO: 81805 - DNA, 15 bp, Homo sapiens
ccacttaggcattta

SEQ ID NO: 81806 - DNA, 15 bp, Homo sapiens
tccacttaggcattt

SEQ ID NO: 81807 - DNA, 15 bp, Homo sapiens
ttccacttaggcatt

SEQ ID NO: 81808 - DNA, 15 bp, Homo sapiens
tttccacttaggcat

SEQ ID NO: 81809 - DNA, 15 bp, Homo sapiens
ttttccacttaggca

SEQ ID NO: 81810 - DNA, 15 bp, Homo sapiens
tttttccacttaggc

SEQ ID NO: 81811 - DNA, 15 bp, Homo sapiens
ttttttccacttagg

SEQ ID NO: 81812 - DNA, 15 bp, Homo sapiens
tttttttccacttag

SEQ ID NO: 81813 - DNA, 15 bp, Homo sapiens
atttttttccactta

SEQ ID NO: 81814 - DNA, 15 bp, Homo sapiens
tatttttttccactt

SEQ ID NO: 81815 - DNA, 15 bp, Homo sapiens
ctatttttttccact

SEQ ID NO: 81816 - DNA, 15 bp, Homo sapiens
actatttttttccac

SEQ ID NO: 81817 - DNA, 15 bp, Homo sapiens
aactatttttttcca

SEQ ID NO: 81818 - DNA, 15 bp, Homo sapiens
taactatttttttcc

SEQ ID NO: 81819 - DNA, 15 bp, Homo sapiens
gtaactatttttttc

SEQ ID NO: 81820 - DNA, 15 bp, Homo sapiens
agtaactattttttt

SEQ ID NO: 81821 - DNA, 15 bp, Homo sapiens
aagtaactatttttt

SEQ ID NO: 81822 - DNA, 15 bp, Homo sapiens
taagtaactattttt

SEQ ID NO: 81823 - DNA, 15 bp, Homo sapiens
ataagtaactatttt

SEQ ID NO: 81824 - DNA, 15 bp, Homo sapiens
cataagtaactattt

SEQ ID NO: 81825 - DNA, 15 bp, Homo sapiens
acataagtaactatt

SEQ ID NO: 81826 - DNA, 15 bp, Homo sapiens
tacataagtaactat

SEQ ID NO: 81827 - DNA, 15 bp, Homo sapiens
ctacataagtaacta

SEQ ID NO: 81828 - DNA, 15 bp, Homo sapiens
gctacataagtaact

SEQ ID NO: 81829 - DNA, 15 bp, Homo sapiens
tgctacataagtaac

SEQ ID NO: 81830 - DNA, 15 bp, Homo sapiens
ttgctacataagtaa

SEQ ID NO: 81831 - DNA, 15 bp, Homo sapiens
cttgctacataagta

SEQ ID NO: 81832 - DNA, 15 bp, Homo sapiens
acttgctacataagt

SEQ ID NO: 81833 - DNA, 15 bp, Homo sapiens
cacttgctacataag

SEQ ID NO: 81834 - DNA, 15 bp, Homo sapiens
tcacttgctacataa

SEQ ID NO: 81835 - DNA, 15 bp, Homo sapiens
gtcacttgctacata

SEQ ID NO: 81836 - DNA, 15 bp, Homo sapiens
tgtcacttgctacat

SEQ ID NO: 81837 - DNA, 15 bp, Homo sapiens
ctgtcacttgctaca

SEQ ID NO: 81838 - DNA, 15 bp, Homo sapiens
tctgtcacttgctac

SEQ ID NO: 81839 - DNA, 15 bp, Homo sapiens
atctgtcacttgcta

SEQ ID NO: 81840 - DNA, 15 bp, Homo sapiens
catctgtcacttgct

SEQ ID NO: 81841 - DNA, 15 bp, Homo sapiens
ccatctgtcacttgc

SEQ ID NO: 81842 - DNA, 15 bp, Homo sapiens
gccatctgtcacttg

SEQ ID NO: 81843 - DNA, 15 bp, Homo sapiens
tgccatctgtcactt

SEQ ID NO: 81844 - DNA, 15 bp, Homo sapiens
ttgccatctgtcact

SEQ ID NO: 81845 - DNA, 15 bp, Homo sapiens
attgccatctgtcac

SEQ ID NO: 81846 - DNA, 15 bp, Homo sapiens
tattgccatctgtca

SEQ ID NO: 81847 - DNA, 15 bp, Homo sapiens
atattgccatctgtc

SEQ ID NO: 81848 - DNA, 15 bp, Homo sapiens
tatattgccatctgt

SEQ ID NO: 81849 - DNA, 15 bp, Homo sapiens
ttatattgccatctg

SEQ ID NO: 81850 - DNA, 15 bp, Homo sapiens
cttatattgccatct

SEQ ID NO: 81851 - DNA, 15 bp, Homo sapiens
tcttatattgccatc

SEQ ID NO: 81852 - DNA, 15 bp, Homo sapiens
ttcttatattgccat

SEQ ID NO: 81853 - DNA, 15 bp, Homo sapiens
attcttatattgcca

SEQ ID NO: 81854 - DNA, 15 bp, Homo sapiens
gattcttatattgcc

SEQ ID NO: 81855 - DNA, 15 bp, Homo sapiens
tgattcttatattgc

SEQ ID NO: 81856 - DNA, 15 bp, Homo sapiens
gtgattcttatattg

SEQ ID NO: 81857 - DNA, 15 bp, Homo sapiens
tgtgattcttatatt

SEQ ID NO: 81858 - DNA, 15 bp, Homo sapiens
ctgtgattcttatat

SEQ ID NO: 81859 - DNA, 15 bp, Homo sapiens
actgtgattcttata

SEQ ID NO: 81860 - DNA, 15 bp, Homo sapiens
cactgtgattcttat

SEQ ID NO: 81861 - DNA, 15 bp, Homo sapiens
acactgtgattctta

SEQ ID NO: 81862 - DNA, 15 bp, Homo sapiens
tacactgtgattctt

SEQ ID NO: 81863 - DNA, 15 bp, Homo sapiens
ctacactgtgattct

SEQ ID NO: 81864 - DNA, 15 bp, Homo sapiens
cctacactgtgattc

SEQ ID NO: 81865 - DNA, 15 bp, Homo sapiens
tcctacactgtgatt

SEQ ID NO: 81866 - DNA, 15 bp, Homo sapiens
ttcctacactgtgat

SEQ ID NO: 81867 - DNA, 15 bp, Homo sapiens
tttcctacactgtga

SEQ ID NO: 81868 - DNA, 15 bp, Homo sapiens
ctttcctacactgtg

SEQ ID NO: 81869 - DNA, 15 bp, Homo sapiens
cctttcctacactgt

SEQ ID NO: 81870 - DNA, 15 bp, Homo sapiens
gcctttcctacactg

SEQ ID NO: 81871 - DNA, 15 bp, Homo sapiens
tgcctttcctacact

SEQ ID NO: 81872 - DNA, 15 bp, Homo sapiens
atgcctttcctacac

SEQ ID NO: 81873 - DNA, 15 bp, Homo sapiens
aatgcctttcctaca

SEQ ID NO: 81874 - DNA, 15 bp, Homo sapiens
aaatgcctttcctac

SEQ ID NO: 81875 - DNA, 15 bp, Homo sapiens
taaatgcctttccta

SEQ ID NO: 81876 - DNA, 15 bp, Homo sapiens
ttaaatgcctttcct

SEQ ID NO: 81877 - DNA, 15 bp, Homo sapiens
tttaaatgcctttcc

SEQ ID NO: 81878 - DNA, 15 bp, Homo sapiens
ttttaaatgcctttc

SEQ ID NO: 81879 - DNA, 15 bp, Homo sapiens
tttttaaatgccttt

SEQ ID NO: 81880 - DNA, 15 bp, Homo sapiens
gtttttaaatgcctt

SEQ ID NO: 81881 - DNA, 15 bp, Homo sapiens
tgtttttaaatgcct

SEQ ID NO: 81882 - DNA, 15 bp, Homo sapiens
ttgtttttaaatgcc

SEQ ID NO: 81883 - DNA, 15 bp, Homo sapiens
tttgtttttaaatgc

SEQ ID NO: 81884 - DNA, 15 bp, Homo sapiens
ttttgtttttaaatg

SEQ ID NO: 81885 - DNA, 15 bp, Homo sapiens
cttttgtttttaaat

SEQ ID NO: 81886 - DNA, 15 bp, Homo sapiens
acttttgtttttaaa

SEQ ID NO: 81887 - DNA, 15 bp, Homo sapiens
tacttttgtttttaa

SEQ ID NO: 81888 - DNA, 15 bp, Homo sapiens
ttacttttgttttta

SEQ ID NO: 81889 - DNA, 15 bp, Homo sapiens
attacttttgttttt

SEQ ID NO: 81890 - DNA, 15 bp, Homo sapiens
tattacttttgtttt

SEQ ID NO: 81891 - DNA, 15 bp, Homo sapiens
gtattacttttgttt

SEQ ID NO: 81892 - DNA, 15 bp, Homo sapiens
ggtattacttttgtt

SEQ ID NO: 81893 - DNA, 15 bp, Homo sapiens
aggtattacttttgt

SEQ ID NO: 81894 - DNA, 15 bp, Homo sapiens
aaggtattacttttg

SEQ ID NO: 81895 - DNA, 15 bp, Homo sapiens
aaaggtattactttt

SEQ ID NO: 81896 - DNA, 15 bp, Homo sapiens
gaaaggtattacttt

SEQ ID NO: 81897 - DNA, 15 bp, Homo sapiens
ggaaaggtattactt

SEQ ID NO: 81898 - DNA, 15 bp, Homo sapiens
aggaaaggtattact

SEQ ID NO: 81899 - DNA, 15 bp, Homo sapiens
taggaaaggtattac

SEQ ID NO: 81900 - DNA, 15 bp, Homo sapiens
gtaggaaaggtatta

SEQ ID NO: 81901 - DNA, 15 bp, Homo sapiens
agtaggaaaggtatt

SEQ ID NO: 81902 - DNA, 15 bp, Homo sapiens
gagtaggaaaggtat

SEQ ID NO: 81903 - DNA, 15 bp, Homo sapiens
agagtaggaaaggta

SEQ ID NO: 81904 - DNA, 15 bp, Homo sapiens
tagagtaggaaaggt

SEQ ID NO: 81905 - DNA, 15 bp, Homo sapiens
atagagtaggaaagg

SEQ ID NO: 81906 - DNA, 15 bp, Homo sapiens
tatagagtaggaaag

SEQ ID NO: 81907 - DNA, 15 bp, Homo sapiens
ctatagagtaggaaa

SEQ ID NO: 81908 - DNA, 15 bp, Homo sapiens
gctatagagtaggaa

SEQ ID NO: 81909 - DNA, 15 bp, Homo sapiens
tgctatagagtagga

SEQ ID NO: 81910 - DNA, 15 bp, Homo sapiens
gtgctatagagtagg

SEQ ID NO: 81911 - DNA, 15 bp, Homo sapiens
tgtgctatagagtag

SEQ ID NO: 81912 - DNA, 15 bp, Homo sapiens
ctgtgctatagagta

SEQ ID NO: 81913 - DNA, 15 bp, Homo sapiens
tctgtgctatagagt

SEQ ID NO: 81914 - DNA, 15 bp, Homo sapiens
ttctgtgctatagag

SEQ ID NO: 81915 - DNA, 15 bp, Homo sapiens
tttctgtgctataga

SEQ ID NO: 81916 - DNA, 15 bp, Homo sapiens
ctttctgtgctatag

SEQ ID NO: 81917 - DNA, 15 bp, Homo sapiens
tctttctgtgctata

SEQ ID NO: 81918 - DNA, 15 bp, Homo sapiens
ttctttctgtgctat

SEQ ID NO: 81919 - DNA, 15 bp, Homo sapiens
attctttctgtgcta

SEQ ID NO: 81920 - DNA, 15 bp, Homo sapiens
tattctttctgtgct

SEQ ID NO: 81921 - DNA, 15 bp, Homo sapiens
ttattctttctgtgc

SEQ ID NO: 81922 - DNA, 15 bp, Homo sapiens
tttattctttctgtg

SEQ ID NO: 81923 - DNA, 15 bp, Homo sapiens
ttttattctttctgt

SEQ ID NO: 81924 - DNA, 15 bp, Homo sapiens
tttttattctttctg

SEQ ID NO: 81925 - DNA, 15 bp, Homo sapiens
ttttttattctttct

SEQ ID NO: 81926 - DNA, 15 bp, Homo sapiens
cttttttattctttc

SEQ ID NO: 81927 - DNA, 15 bp, Homo sapiens
tcttttttattcttt

SEQ ID NO: 81928 - DNA, 15 bp, Homo sapiens
ctcttttttattctt

SEQ ID NO: 81929 - DNA, 15 bp, Homo sapiens
tctcttttttattct

SEQ ID NO: 81930 - DNA, 15 bp, Homo sapiens
ttctcttttttattc

SEQ ID NO: 81931 - DNA, 15 bp, Homo sapiens
cttctcttttttatt

SEQ ID NO: 81932 - DNA, 15 bp, Homo sapiens
gcttctcttttttat

SEQ ID NO: 81933 - DNA, 15 bp, Homo sapiens
ggcttctctttttta

SEQ ID NO: 81934 - DNA, 15 bp, Homo sapiens
aggcttctctttttt

SEQ ID NO: 81935 - DNA, 15 bp, Homo sapiens
gaggcttctcttttt

SEQ ID NO: 81936 - DNA, 15 bp, Homo sapiens
tgaggcttctctttt

SEQ ID NO: 81937 - DNA, 15 bp, Homo sapiens
gtgaggcttctcttt

SEQ ID NO: 81938 - DNA, 15 bp, Homo sapiens
ggtgaggcttctctt

SEQ ID NO: 81939 - DNA, 15 bp, Homo sapiens
aggtgaggcttctct

SEQ ID NO: 81940 - DNA, 15 bp, Homo sapiens
caggtgaggcttctc

SEQ ID NO: 81941 - DNA, 15 bp, Homo sapiens
acaggtgaggcttct

SEQ ID NO: 81942 - DNA, 15 bp, Homo sapiens
gacaggtgaggcttc

SEQ ID NO: 81943 - DNA, 15 bp, Homo sapiens
tgacaggtgaggctt

SEQ ID NO: 81944 - DNA, 15 bp, Homo sapiens
atgacaggtgaggct

SEQ ID NO: 81945 - DNA, 15 bp, Homo sapiens
gatgacaggtgaggc

SEQ ID NO: 81946 - DNA, 15 bp, Homo sapiens
agatgacaggtgagg

SEQ ID NO: 81947 - DNA, 15 bp, Homo sapiens
gagatgacaggtgag

SEQ ID NO: 81948 - DNA, 15 bp, Homo sapiens
agagatgacaggtga

SEQ ID NO: 81949 - DNA, 15 bp, Homo sapiens
cagagatgacaggtg

SEQ ID NO: 81950 - DNA, 15 bp, Homo sapiens
tcagagatgacaggt

SEQ ID NO: 81951 - DNA, 15 bp, Homo sapiens
atcagagatgacagg

SEQ ID NO: 81952 - DNA, 15 bp, Homo sapiens
tatcagagatgacag

SEQ ID NO: 81953 - DNA, 15 bp, Homo sapiens
atatcagagatgaca

SEQ ID NO: 81954 - DNA, 15 bp, Homo sapiens
catatcagagatgac

SEQ ID NO: 81955 - DNA, 15 bp, Homo sapiens
ccatatcagagatga

SEQ ID NO: 81956 - DNA, 15 bp, Homo sapiens
accatatcagagatg

SEQ ID NO: 81957 - DNA, 15 bp, Homo sapiens
taccatatcagagat

SEQ ID NO: 81958 - DNA, 15 bp, Homo sapiens
ctaccatatcagaga

SEQ ID NO: 81959 - DNA, 15 bp, Homo sapiens
tctaccatatcagag

SEQ ID NO: 81960 - DNA, 15 bp, Homo sapiens
ttctaccatatcaga

SEQ ID NO: 81961 - DNA, 15 bp, Homo sapiens
tttctaccatatcag

SEQ ID NO: 81962 - DNA, 15 bp, Homo sapiens
ttttctaccatatca

SEQ ID NO: 81963 - DNA, 15 bp, Homo sapiens
tttttctaccatatc

SEQ ID NO: 81964 - DNA, 15 bp, Homo sapiens
atttttctaccatat

SEQ ID NO: 81965 - DNA, 15 bp, Homo sapiens
gatttttctaccata

SEQ ID NO: 81966 - DNA, 15 bp, Homo sapiens
ggatttttctaccat

SEQ ID NO: 81967 - DNA, 15 bp, Homo sapiens
tggatttttctacca

SEQ ID NO: 81968 - DNA, 15 bp, Homo sapiens
atggatttttctacc

SEQ ID NO: 81969 - DNA, 15 bp, Homo sapiens
tatggatttttctac

SEQ ID NO: 81970 - DNA, 15 bp, Homo sapiens
ttatggatttttcta

SEQ ID NO: 81971 - DNA, 15 bp, Homo sapiens
gttatggatttttct

SEQ ID NO: 81972 - DNA, 15 bp, Homo sapiens
ggttatggatttttc

SEQ ID NO: 81973 - DNA, 15 bp, Homo sapiens
tggttatggattttt

SEQ ID NO: 81974 - DNA, 15 bp, Homo sapiens
atggttatggatttt

SEQ ID NO: 81975 - DNA, 15 bp, Homo sapiens
aatggttatggattt

SEQ ID NO: 81976 - DNA, 15 bp, Homo sapiens
caatggttatggatt

SEQ ID NO: 81977 - DNA, 15 bp, Homo sapiens
acaatggttatggat

SEQ ID NO: 81978 - DNA, 15 bp, Homo sapiens
cacaatggttatgga

SEQ ID NO: 81979 - DNA, 15 bp, Homo sapiens
acacaatggttatgg

SEQ ID NO: 81980 - DNA, 15 bp, Homo sapiens
tacacaatggttatg

SEQ ID NO: 81981 - DNA, 15 bp, Homo sapiens
gtacacaatggttat

SEQ ID NO: 81982 - DNA, 15 bp, Homo sapiens
ggtacacaatggtta

SEQ ID NO: 81983 - DNA, 15 bp, Homo sapiens
tggtacacaatggtt

SEQ ID NO: 81984 - DNA, 15 bp, Homo sapiens
atggtacacaatggt

SEQ ID NO: 81985 - DNA, 15 bp, Homo sapiens
catggtacacaatgg

SEQ ID NO: 81986 - DNA, 15 bp, Homo sapiens
ccatggtacacaatg

SEQ ID NO: 81987 - DNA, 15 bp, Homo sapiens
cccatggtacacaat

SEQ ID NO: 81988 - DNA, 15 bp, Homo sapiens
tcccatggtacacaa

SEQ ID NO: 81989 - DNA, 15 bp, Homo sapiens
ttcccatggtacaca

SEQ ID NO: 81990 - DNA, 15 bp, Homo sapiens
gttcccatggtacac

SEQ ID NO: 81991 - DNA, 15 bp, Homo sapiens
agttcccatggtaca

SEQ ID NO: 81992 - DNA, 15 bp, Homo sapiens
tagttcccatggtac

SEQ ID NO: 81993 - DNA, 15 bp, Homo sapiens
gtagttcccatggta

SEQ ID NO: 81994 - DNA, 15 bp, Homo sapiens
ggtagttcccatggt

SEQ ID NO: 81995 - DNA, 15 bp, Homo sapiens
tggtagttcccatgg

SEQ ID NO: 81996 - DNA, 15 bp, Homo sapiens
gtggtagttcccatg

SEQ ID NO: 81997 - DNA, 15 bp, Homo sapiens
agtggtagttcccat

SEQ ID NO: 81998 - DNA, 15 bp, Homo sapiens
gagtggtagttccca

SEQ ID NO: 81999 - DNA, 15 bp, Homo sapiens
ggagtggtagttccc

SEQ ID NO: 82000 - DNA, 15 bp, Homo sapiens
gggagtggtagttcc

SEQ ID NO: 82001 - DNA, 15 bp, Homo sapiens
agggagtggtagttc

SEQ ID NO: 82002 - DNA, 15 bp, Homo sapiens
cagggagtggtagtt

SEQ ID NO: 82003 - DNA, 15 bp, Homo sapiens
ccagggagtggtagt

SEQ ID NO: 82004 - DNA, 15 bp, Homo sapiens
tccagggagtggtag

SEQ ID NO: 82005 - DNA, 15 bp, Homo sapiens
gtccagggagtggta

SEQ ID NO: 82006 - DNA, 15 bp, Homo sapiens
agtccagggagtggt

SEQ ID NO: 82007 - DNA, 15 bp, Homo sapiens
gagtccagggagtgg

SEQ ID NO: 82008 - DNA, 15 bp, Homo sapiens
cgagtccagggagtg

SEQ ID NO: 82009 - DNA, 15 bp, Homo sapiens
acgagtccagggagt

SEQ ID NO: 82010 - DNA, 15 bp, Homo sapiens
tacgagtccagggag

SEQ ID NO: 82011 - DNA, 15 bp, Homo sapiens
ttacgagtccaggga

SEQ ID NO: 82012 - DNA, 15 bp, Homo sapiens
tttacgagtccaggg

SEQ ID NO: 82013 - DNA, 15 bp, Homo sapiens
atttacgagtccagg

SEQ ID NO: 82014 - DNA, 15 bp, Homo sapiens
tatttacgagtccag

SEQ ID NO: 82015 - DNA, 15 bp, Homo sapiens
ctatttacgagtcca

SEQ ID NO: 82016 - DNA, 15 bp, Homo sapiens
gctatttacgagtcc

SEQ ID NO: 82017 - DNA, 15 bp, Homo sapiens
ggctatttacgagtc

SEQ ID NO: 82018 - DNA, 15 bp, Homo sapiens
tggctatttacgagt

SEQ ID NO: 82019 - DNA, 15 bp, Homo sapiens
ttggctatttacgag

SEQ ID NO: 82020 - DNA, 15 bp, Homo sapiens
gttggctatttacga

SEQ ID NO: 82021 - DNA, 15 bp, Homo sapiens
ggttggctatttacg

SEQ ID NO: 82022 - DNA, 15 bp, Homo sapiens
tggttggctatttac

SEQ ID NO: 82023 - DNA, 15 bp, Homo sapiens
ctggttggctattta

SEQ ID NO: 82024 - DNA, 15 bp, Homo sapiens
tctggttggctattt

SEQ ID NO: 82025 - DNA, 15 bp, Homo sapiens
gtctggttggctatt

SEQ ID NO: 82026 - DNA, 15 bp, Homo sapiens
agtctggttggctat

SEQ ID NO: 82027 - DNA, 15 bp, Homo sapiens
aagtctggttggcta

SEQ ID NO: 82028 - DNA, 15 bp, Homo sapiens
caagtctggttggct

SEQ ID NO: 82029 - DNA, 15 bp, Homo sapiens
acaagtctggttggc

SEQ ID NO: 82030 - DNA, 15 bp, Homo sapiens
aacaagtctggttgg

SEQ ID NO: 82031 - DNA, 15 bp, Homo sapiens
caacaagtctggttg

SEQ ID NO: 82032 - DNA, 15 bp, Homo sapiens
tcaacaagtctggtt

SEQ ID NO: 82033 - DNA, 15 bp, Homo sapiens
ctcaacaagtctggt

SEQ ID NO: 82034 - DNA, 15 bp, Homo sapiens
tctcaacaagtctgg

SEQ ID NO: 82035 - DNA, 15 bp, Homo sapiens
ctctcaacaagtctg

SEQ ID NO: 82036 - DNA, 15 bp, Homo sapiens
tctctcaacaagtct

SEQ ID NO: 82037 - DNA, 15 bp, Homo sapiens
ttctctcaacaagtc

SEQ ID NO: 82038 - DNA, 15 bp, Homo sapiens
gttctctcaacaagt

SEQ ID NO: 82039 - DNA, 15 bp, Homo sapiens
tgttctctcaacaag

SEQ ID NO: 82040 - DNA, 15 bp, Homo sapiens
ttgttctctcaacaa

SEQ ID NO: 82041 - DNA, 15 bp, Homo sapiens
tttgttctctcaaca

SEQ ID NO: 82042 - DNA, 15 bp, Homo sapiens
ttttgttctctcaac

SEQ ID NO: 82043 - DNA, 15 bp, Homo sapiens
attttgttctctcaa

SEQ ID NO: 82044 - DNA, 15 bp, Homo sapiens
aattttgttctctca

SEQ ID NO: 82045 - DNA, 15 bp, Homo sapiens
aaattttgttctctc

SEQ ID NO: 82046 - DNA, 15 bp, Homo sapiens
gaaattttgttctct

SEQ ID NO: 82047 - DNA, 15 bp, Homo sapiens
ggaaattttgttctc

SEQ ID NO: 82048 - DNA, 15 bp, Homo sapiens
tggaaattttgttct

SEQ ID NO: 82049 - DNA, 15 bp, Homo sapiens
gtggaaattttgttc

SEQ ID NO: 82050 - DNA, 15 bp, Homo sapiens
ggtggaaattttgtt

SEQ ID NO: 82051 - DNA, 15 bp, Homo sapiens
aggtggaaattttgt

SEQ ID NO: 82052 - DNA, 15 bp, Homo sapiens
gaggtggaaattttg

SEQ ID NO: 82053 - DNA, 15 bp, Homo sapiens
ggaggtggaaatttt

SEQ ID NO: 82054 - DNA, 15 bp, Homo sapiens
aggaggtggaaattt

SEQ ID NO: 82055 - DNA, 15 bp, Homo sapiens
gaggaggtggaaatt

SEQ ID NO: 82056 - DNA, 15 bp, Homo sapiens
ggaggaggtggaaat

SEQ ID NO: 82057 - DNA, 15 bp, Homo sapiens
cggaggaggtggaaa

SEQ ID NO: 82058 - DNA, 15 bp, Homo sapiens
gcggaggaggtggaa

SEQ ID NO: 82059 - DNA, 15 bp, Homo sapiens
agcggaggaggtgga

SEQ ID NO: 82060 - DNA, 15 bp, Homo sapiens
cagcggaggaggtgg

SEQ ID NO: 82061 - DNA, 15 bp, Homo sapiens
acagcggaggaggtg

SEQ ID NO: 82062 - DNA, 15 bp, Homo sapiens
cacagcggaggaggt

SEQ ID NO: 82063 - DNA, 15 bp, Homo sapiens
acacagcggaggagg

SEQ ID NO: 82064 - DNA, 15 bp, Homo sapiens
cacacagcggaggag

SEQ ID NO: 82065 - DNA, 15 bp, Homo sapiens
ccacacagcggagga

SEQ ID NO: 82066 - DNA, 15 bp, Homo sapiens
gccacacagcggagg

SEQ ID NO: 82067 - DNA, 15 bp, Homo sapiens
tgccacacagcggag

SEQ ID NO: 82068 - DNA, 15 bp, Homo sapiens
gtgccacacagcgga

SEQ ID NO: 82069 - DNA, 15 bp, Homo sapiens
tgtgccacacagcgg

SEQ ID NO: 82070 - DNA, 15 bp, Homo sapiens
ttgtgccacacagcg

SEQ ID NO: 82071 - DNA, 15 bp, Homo sapiens
attgtgccacacagc

SEQ ID NO: 82072 - DNA, 15 bp, Homo sapiens
tattgtgccacacag

SEQ ID NO: 82073 - DNA, 15 bp, Homo sapiens
ttattgtgccacaca

SEQ ID NO: 82074 - DNA, 15 bp, Homo sapiens
tttattgtgccacac

SEQ ID NO: 82075 - DNA, 15 bp, Homo sapiens
ttttattgtgccaca

SEQ ID NO: 82076 - DNA, 15 bp, Homo sapiens
cttttattgtgccac

SEQ ID NO: 82077 - DNA, 15 bp, Homo sapiens
tcttttattgtgcca

SEQ ID NO: 82078 - DNA, 15 bp, Homo sapiens
ttcttttattgtgcc

SEQ ID NO: 82079 - DNA, 15 bp, Homo sapiens
gttcttttattgtgc

SEQ ID NO: 82080 - DNA, 15 bp, Homo sapiens
tgttcttttattgtg

SEQ ID NO: 82081 - DNA, 15 bp, Homo sapiens
atgttcttttattgt

SEQ ID NO: 82082 - DNA, 15 bp, Homo sapiens
aatgttcttttattg

SEQ ID NO: 82083 - DNA, 15 bp, Homo sapiens
aaatgttcttttatt

SEQ ID NO: 82084 - DNA, 15 bp, Homo sapiens
aaaatgttcttttat

SEQ ID NO: 82085 - DNA, 15 bp, Homo sapiens
taaaatgttctttta

SEQ ID NO: 82086 - DNA, 15 bp, Homo sapiens
gtaaaatgttctttt

SEQ ID NO: 82087 - DNA, 15 bp, Homo sapiens
agtaaaatgttcttt

SEQ ID NO: 82088 - DNA, 15 bp, Homo sapiens
tagtaaaatgttctt

SEQ ID NO: 82089 - DNA, 15 bp, Homo sapiens
ctagtaaaatgttct

SEQ ID NO: 82090 - DNA, 15 bp, Homo sapiens
cctagtaaaatgttc

SEQ ID NO: 82091 - DNA, 15 bp, Homo sapiens
gcctagtaaaatgtt

SEQ ID NO: 82092 - DNA, 15 bp, Homo sapiens
ggcctagtaaaatgt

SEQ ID NO: 82093 - DNA, 15 bp, Homo sapiens
aggcctagtaaaatg

SEQ ID NO: 82094 - DNA, 15 bp, Homo sapiens
taggcctagtaaaat

SEQ ID NO: 82095 - DNA, 15 bp, Homo sapiens
gtaggcctagtaaaa

SEQ ID NO: 82096 - DNA, 15 bp, Homo sapiens
tgtaggcctagtaaa

SEQ ID NO: 82097 - DNA, 15 bp, Homo sapiens
ctgtaggcctagtaa

SEQ ID NO: 82098 - DNA, 15 bp, Homo sapiens
tctgtaggcctagta

SEQ ID NO: 82099 - DNA, 15 bp, Homo sapiens
atctgtaggcctagt

SEQ ID NO: 82100 - DNA, 15 bp, Homo sapiens
catctgtaggcctag

SEQ ID NO: 82101 - DNA, 15 bp, Homo sapiens
gcatctgtaggccta

SEQ ID NO: 82102 - DNA, 15 bp, Homo sapiens
agcatctgtaggcct

SEQ ID NO: 82103 - DNA, 15 bp, Homo sapiens
aagcatctgtaggcc

SEQ ID NO: 82104 - DNA, 15 bp, Homo sapiens
taagcatctgtaggc

SEQ ID NO: 82105 - DNA, 15 bp, Homo sapiens
ataagcatctgtagg

SEQ ID NO: 82106 - DNA, 15 bp, Homo sapiens
tataagcatctgtag

SEQ ID NO: 82107 - DNA, 15 bp, Homo sapiens
atataagcatctgta

SEQ ID NO: 82108 - DNA, 15 bp, Homo sapiens
aatataagcatctgt

SEQ ID NO: 82109 - DNA, 15 bp, Homo sapiens
caatataagcatctg

SEQ ID NO: 82110 - DNA, 15 bp, Homo sapiens
acaatataagcatct

SEQ ID NO: 82111 - DNA, 15 bp, Homo sapiens
aacaatataagcatc

SEQ ID NO: 82112 - DNA, 15 bp, Homo sapiens
aaacaatataagcat

SEQ ID NO: 82113 - DNA, 15 bp, Homo sapiens
gaaacaatataagca

SEQ ID NO: 82114 - DNA, 15 bp, Homo sapiens
agaaacaatataagc

SEQ ID NO: 82115 - DNA, 15 bp, Homo sapiens
tagaaacaatataag

SEQ ID NO: 82116 - DNA, 15 bp, Homo sapiens
ttagaaacaatataa

SEQ ID NO: 82117 - DNA, 15 bp, Homo sapiens
tttagaaacaatata

SEQ ID NO: 82118 - DNA, 15 bp, Homo sapiens
ttttagaaacaatat

SEQ ID NO: 82119 - DNA, 15 bp, Homo sapiens
tttttagaaacaata

SEQ ID NO: 82120 - DNA, 15 bp, Homo sapiens
gtttttagaaacaat

SEQ ID NO: 82121 - DNA, 15 bp, Homo sapiens
ggtttttagaaacaa

SEQ ID NO: 82122 - DNA, 15 bp, Homo sapiens
tggtttttagaaaca

SEQ ID NO: 82123 - DNA, 15 bp, Homo sapiens
atggtttttagaaac

SEQ ID NO: 82124 - DNA, 15 bp, Homo sapiens
aatggtttttagaaa

SEQ ID NO: 82125 - DNA, 15 bp, Homo sapiens
aaatggtttttagaa

SEQ ID NO: 82126 - DNA, 15 bp, Homo sapiens
taaatggtttttaga

SEQ ID NO: 82127 - DNA, 15 bp, Homo sapiens
ttaaatggtttttag

SEQ ID NO: 82128 - DNA, 15 bp, Homo sapiens
attaaatggttttta

SEQ ID NO: 82129 - DNA, 15 bp, Homo sapiens
tattaaatggttttt

SEQ ID NO: 82130 - DNA, 15 bp, Homo sapiens
atattaaatggtttt

SEQ ID NO: 82131 - DNA, 15 bp, Homo sapiens
tatattaaatggttt

SEQ ID NO: 82132 - DNA, 15 bp, Homo sapiens
gtatattaaatggtt

SEQ ID NO: 82133 - DNA, 15 bp, Homo sapiens
tgtatattaaatggt

SEQ ID NO: 82134 - DNA, 15 bp, Homo sapiens
ttgtatattaaatgg

SEQ ID NO: 82135 - DNA, 15 bp, Homo sapiens
tttgtatattaaatg

SEQ ID NO: 82136 - DNA, 15 bp, Homo sapiens
ttttgtatattaaat

SEQ ID NO: 82137 - DNA, 15 bp, Homo sapiens
tttttgtatattaaa

SEQ ID NO: 82138 - DNA, 15 bp, Homo sapiens
ctttttgtatattaa

SEQ ID NO: 82139 - DNA, 15 bp, Homo sapiens
tctttttgtatatta

SEQ ID NO: 82140 - DNA, 15 bp, Homo sapiens
ctctttttgtatatt

SEQ ID NO: 82141 - DNA, 15 bp, Homo sapiens
cctctttttgtatat

SEQ ID NO: 82142 - DNA, 15 bp, Homo sapiens
tcctctttttgtata

SEQ ID NO: 82143 - DNA, 15 bp, Homo sapiens
ttcctctttttgtat

SEQ ID NO: 82144 - DNA, 15 bp, Homo sapiens
cttcctctttttgta

SEQ ID NO: 82145 - DNA, 15 bp, Homo sapiens
gcttcctctttttgt

SEQ ID NO: 82146 - DNA, 15 bp, Homo sapiens
ggcttcctctttttg

SEQ ID NO: 82147 - DNA, 15 bp, Homo sapiens
tggcttcctcttttt

SEQ ID NO: 82148 - DNA, 15 bp, Homo sapiens
ttggcttcctctttt

SEQ ID NO: 82149 - DNA, 15 bp, Homo sapiens
attggcttcctcttt

SEQ ID NO: 82150 - DNA, 15 bp, Homo sapiens
aattggcttcctctt

SEQ ID NO: 82151 - DNA, 15 bp, Homo sapiens
caattggcttcctct

SEQ ID NO: 82152 - DNA, 15 bp, Homo sapiens
tcaattggcttcctc

SEQ ID NO: 82153 - DNA, 15 bp, Homo sapiens
atcaattggcttcct

SEQ ID NO: 82154 - DNA, 15 bp, Homo sapiens
catcaattggcttcc

SEQ ID NO: 82155 - DNA, 15 bp, Homo sapiens
tcatcaattggcttc

SEQ ID NO: 82156 - DNA, 15 bp, Homo sapiens
ttcatcaattggctt

SEQ ID NO: 82157 - DNA, 15 bp, Homo sapiens
cttcatcaattggct

SEQ ID NO: 82158 - DNA, 15 bp, Homo sapiens
gcttcatcaattggc

SEQ ID NO: 82159 - DNA, 15 bp, Homo sapiens
agcttcatcaattgg

SEQ ID NO: 82160 - DNA, 15 bp, Homo sapiens
cagcttcatcaattg

SEQ ID NO: 82161 - DNA, 15 bp, Homo sapiens
acagcttcatcaatt

SEQ ID NO: 82162 - DNA, 15 bp, Homo sapiens
tacagcttcatcaat

SEQ ID NO: 82163 - DNA, 15 bp, Homo sapiens
ttacagcttcatcaa

SEQ ID NO: 82164 - DNA, 15 bp, Homo sapiens
tttacagcttcatca

SEQ ID NO: 82165 - DNA, 15 bp, Homo sapiens
ttttacagcttcatc

SEQ ID NO: 82166 - DNA, 15 bp, Homo sapiens
gttttacagcttcat

SEQ ID NO: 82167 - DNA, 15 bp, Homo sapiens
tgttttacagcttca

SEQ ID NO: 82168 - DNA, 15 bp, Homo sapiens
gtgttttacagcttc

SEQ ID NO: 82169 - DNA, 15 bp, Homo sapiens
agtgttttacagctt

SEQ ID NO: 82170 - DNA, 15 bp, Homo sapiens
tagtgttttacagct

SEQ ID NO: 82171 - DNA, 15 bp, Homo sapiens
gtagtgttttacagc

SEQ ID NO: 82172 - DNA, 15 bp, Homo sapiens
tgtagtgttttacag

SEQ ID NO: 82173 - DNA, 15 bp, Homo sapiens
gtgtagtgttttaca

SEQ ID NO: 82174 - DNA, 15 bp, Homo sapiens
agtgtagtgttttac

SEQ ID NO: 82175 - DNA, 15 bp, Homo sapiens
tagtgtagtgtttta

SEQ ID NO: 82176 - DNA, 15 bp, Homo sapiens
atagtgtagtgtttt

SEQ ID NO: 82177 - DNA, 15 bp, Homo sapiens
tatagtgtagtgttt

SEQ ID NO: 82178 - DNA, 15 bp, Homo sapiens
atatagtgtagtgtt

SEQ ID NO: 82179 - DNA, 15 bp, Homo sapiens
aatatagtgtagtgt

SEQ ID NO: 82180 - DNA, 15 bp, Homo sapiens
taatatagtgtagtg

SEQ ID NO: 82181 - DNA, 15 bp, Homo sapiens
gtaatatagtgtagt

SEQ ID NO: 82182 - DNA, 15 bp, Homo sapiens
ggtaatatagtgtag

SEQ ID NO: 82183 - DNA, 15 bp, Homo sapiens
aggtaatatagtgta

SEQ ID NO: 82184 - DNA, 15 bp, Homo sapiens
aaggtaatatagtgt

SEQ ID NO: 82185 - DNA, 15 bp, Homo sapiens
aaaggtaatatagtg

SEQ ID NO: 82186 - DNA, 15 bp, Homo sapiens
aaaaggtaatatagt

SEQ ID NO: 82187 - DNA, 15 bp, Homo sapiens
caaaaggtaatatag

SEQ ID NO: 82188 - DNA, 15 bp, Homo sapiens
ccaaaaggtaatata

SEQ ID NO: 82189 - DNA, 15 bp, Homo sapiens
tccaaaaggtaatat

SEQ ID NO: 82190 - DNA, 15 bp, Homo sapiens
ttccaaaaggtaata

SEQ ID NO: 82191 - DNA, 15 bp, Homo sapiens
tttccaaaaggtaat

SEQ ID NO: 82192 - DNA, 15 bp, Homo sapiens
ttttccaaaaggtaa

SEQ ID NO: 82193 - DNA, 15 bp, Homo sapiens
tttttccaaaaggta

SEQ ID NO: 82194 - DNA, 15 bp, Homo sapiens
ttttttccaaaaggt

SEQ ID NO: 82195 - DNA, 15 bp, Homo sapiens
cttttttccaaaagg

SEQ ID NO: 82196 - DNA, 15 bp, Homo sapiens
acttttttccaaaag

SEQ ID NO: 82197 - DNA, 15 bp, Homo sapiens
cacttttttccaaaa

SEQ ID NO: 82198 - DNA, 15 bp, Homo sapiens
ccacttttttccaaa

SEQ ID NO: 82199 - DNA, 15 bp, Homo sapiens
cccacttttttccaa

SEQ ID NO: 82200 - DNA, 15 bp, Homo sapiens
acccacttttttcca

SEQ ID NO: 82201 - DNA, 15 bp, Homo sapiens
gacccacttttttcc

SEQ ID NO: 82202 - DNA, 15 bp, Homo sapiens
ggacccacttttttc

SEQ ID NO: 82203 - DNA, 15 bp, Homo sapiens
cggacccactttttt

SEQ ID NO: 82204 - DNA, 15 bp, Homo sapiens
acggacccacttttt

SEQ ID NO: 82205 - DNA, 15 bp, Homo sapiens
tacggacccactttt

SEQ ID NO: 82206 - DNA, 15 bp, Homo sapiens
ttacggacccacttt

SEQ ID NO: 82207 - DNA, 15 bp, Homo sapiens
tttacggacccactt

SEQ ID NO: 82208 - DNA, 15 bp, Homo sapiens
ctttacggacccact

SEQ ID NO: 82209 - DNA, 15 bp, Homo sapiens
tctttacggacccac

SEQ ID NO: 82210 - DNA, 15 bp, Homo sapiens
ctctttacggaccca

SEQ ID NO: 82211 - DNA, 15 bp, Homo sapiens
actctttacggaccc

SEQ ID NO: 82212 - DNA, 15 bp, Homo sapiens
aactctttacggacc

SEQ ID NO: 82213 - DNA, 15 bp, Homo sapiens
gaactctttacggac

SEQ ID NO: 82214 - DNA, 15 bp, Homo sapiens
agaactctttacgga

SEQ ID NO: 82215 - DNA, 15 bp, Homo sapiens
cagaactctttacgg

SEQ ID NO: 82216 - DNA, 15 bp, Homo sapiens
ccagaactctttacg

SEQ ID NO: 82217 - DNA, 15 bp, Homo sapiens
tccagaactctttac

SEQ ID NO: 82218 - DNA, 15 bp, Homo sapiens
ttccagaactcttta

SEQ ID NO: 82219 - DNA, 15 bp, Homo sapiens
gttccagaactcttt

SEQ ID NO: 82220 - DNA, 15 bp, Homo sapiens
tgttccagaactctt

SEQ ID NO: 82221 - DNA, 15 bp, Homo sapiens
ctgttccagaactct

SEQ ID NO: 82222 - DNA, 15 bp, Homo sapiens
cctgttccagaactc

SEQ ID NO: 82223 - DNA, 15 bp, Homo sapiens
tcctgttccagaact

SEQ ID NO: 82224 - DNA, 15 bp, Homo sapiens
ttcctgttccagaac

SEQ ID NO: 82225 - DNA, 15 bp, Homo sapiens
cttcctgttccagaa

SEQ ID NO: 82226 - DNA, 15 bp, Homo sapiens
tcttcctgttccaga

SEQ ID NO: 82227 - DNA, 15 bp, Homo sapiens
gtcttcctgttccag

SEQ ID NO: 82228 - DNA, 15 bp, Homo sapiens
ggtcttcctgttcca

SEQ ID NO: 82229 - DNA, 15 bp, Homo sapiens
aggtcttcctgttcc

SEQ ID NO: 82230 - DNA, 15 bp, Homo sapiens
aaggtcttcctgttc

SEQ ID NO: 82231 - DNA, 15 bp, Homo sapiens
gaaggtcttcctgtt

SEQ ID NO: 82232 - DNA, 15 bp, Homo sapiens
ggaaggtcttcctgt

SEQ ID NO: 82233 - DNA, 15 bp, Homo sapiens
aggaaggtcttcctg

SEQ ID NO: 82234 - DNA, 15 bp, Homo sapiens
gaggaaggtcttcct

SEQ ID NO: 82235 - DNA, 15 bp, Homo sapiens
agaggaaggtcttcc

SEQ ID NO: 82236 - DNA, 15 bp, Homo sapiens
aagaggaaggtcttc

SEQ ID NO: 82237 - DNA, 15 bp, Homo sapiens
aaagaggaaggtctt

SEQ ID NO: 82238 - DNA, 15 bp, Homo sapiens
aaaagaggaaggtct

SEQ ID NO: 82239 - DNA, 15 bp, Homo sapiens
caaaagaggaaggtc

SEQ ID NO: 82240 - DNA, 15 bp, Homo sapiens
gcaaaagaggaaggt

SEQ ID NO: 82241 - DNA, 15 bp, Homo sapiens
agcaaaagaggaagg

SEQ ID NO: 82242 - DNA, 15 bp, Homo sapiens
tagcaaaagaggaag

SEQ ID NO: 82243 - DNA, 15 bp, Homo sapiens
atagcaaaagaggaa

SEQ ID NO: 82244 - DNA, 15 bp, Homo sapiens
catagcaaaagagga

SEQ ID NO: 82245 - DNA, 15 bp, Homo sapiens
tcatagcaaaagagg

SEQ ID NO: 82246 - DNA, 15 bp, Homo sapiens
ctcatagcaaaagag

SEQ ID NO: 82247 - DNA, 15 bp, Homo sapiens
actcatagcaaaaga

SEQ ID NO: 82248 - DNA, 15 bp, Homo sapiens
tactcatagcaaaag

SEQ ID NO: 82249 - DNA, 15 bp, Homo sapiens
ttactcatagcaaaa

SEQ ID NO: 82250 - DNA, 15 bp, Homo sapiens
cttactcatagcaaa

SEQ ID NO: 82251 - DNA, 15 bp, Homo sapiens
tcttactcatagcaa

SEQ ID NO: 82252 - DNA, 15 bp, Homo sapiens
ctcttactcatagca

SEQ ID NO: 82253 - DNA, 15 bp, Homo sapiens
tctcttactcatagc

SEQ ID NO: 82254 - DNA, 15 bp, Homo sapiens
gtctcttactcatag

SEQ ID NO: 82255 - DNA, 15 bp, Homo sapiens
ggtctcttactcata

SEQ ID NO: 82256 - DNA, 15 bp, Homo sapiens
aggtctcttactcat

SEQ ID NO: 82257 - DNA, 15 bp, Homo sapiens
taggtctcttactca

SEQ ID NO: 82258 - DNA, 15 bp, Homo sapiens
ttaggtctcttactc

SEQ ID NO: 82259 - DNA, 15 bp, Homo sapiens
tttaggtctcttact

SEQ ID NO: 82260 - DNA, 15 bp, Homo sapiens
ttttaggtctcttac

SEQ ID NO: 82261 - DNA, 15 bp, Homo sapiens
cttttaggtctctta

SEQ ID NO: 82262 - DNA, 15 bp, Homo sapiens
ccttttaggtctctt

SEQ ID NO: 82263 - DNA, 15 bp, Homo sapiens
accttttaggtctct

SEQ ID NO: 82264 - DNA, 15 bp, Homo sapiens
caccttttaggtctc

SEQ ID NO: 82265 - DNA, 15 bp, Homo sapiens
tcaccttttaggtct

SEQ ID NO: 82266 - DNA, 15 bp, Homo sapiens
gtcaccttttaggtc

SEQ ID NO: 82267 - DNA, 15 bp, Homo sapiens
cgtcaccttttaggt

SEQ ID NO: 82268 - DNA, 15 bp, Homo sapiens
tcgtcaccttttagg

SEQ ID NO: 82269 - DNA, 15 bp, Homo sapiens
atcgtcaccttttag

SEQ ID NO: 82270 - DNA, 15 bp, Homo sapiens
gatcgtcacctttta

SEQ ID NO: 82271 - DNA, 15 bp, Homo sapiens
tgatcgtcacctttt

SEQ ID NO: 82272 - DNA, 15 bp, Homo sapiens
ttgatcgtcaccttt

SEQ ID NO: 82273 - DNA, 15 bp, Homo sapiens
tttgatcgtcacctt

SEQ ID NO: 82274 - DNA, 15 bp, Homo sapiens
atttgatcgtcacct

SEQ ID NO: 82275 - DNA, 15 bp, Homo sapiens
gatttgatcgtcacc

SEQ ID NO: 82276 - DNA, 15 bp, Homo sapiens
ggatttgatcgtcac

SEQ ID NO: 82277 - DNA, 15 bp, Homo sapiens
aggatttgatcgtca

SEQ ID NO: 82278 - DNA, 15 bp, Homo sapiens
caggatttgatcgtc

SEQ ID NO: 82279 - DNA, 15 bp, Homo sapiens
gcaggatttgatcgt

SEQ ID NO: 82280 - DNA, 15 bp, Homo sapiens
tgcaggatttgatcg

SEQ ID NO: 82281 - DNA, 15 bp, Homo sapiens
ttgcaggatttgatc

SEQ ID NO: 82282 - DNA, 15 bp, Homo sapiens
attgcaggatttgat

SEQ ID NO: 82283 - DNA, 15 bp, Homo sapiens
cattgcaggatttga

SEQ ID NO: 82284 - DNA, 15 bp, Homo sapiens
tcattgcaggatttg

SEQ ID NO: 82285 - DNA, 15 bp, Homo sapiens
ttcattgcaggattt

SEQ ID NO: 82286 - DNA, 15 bp, Homo sapiens
tttcattgcaggatt

SEQ ID NO: 82287 - DNA, 15 bp, Homo sapiens
gtttcattgcaggat

SEQ ID NO: 82288 - DNA, 15 bp, Homo sapiens
ggtttcattgcagga

SEQ ID NO: 82289 - DNA, 15 bp, Homo sapiens
gggtttcattgcagg

SEQ ID NO: 82290 - DNA, 15 bp, Homo sapiens
ggggtttcattgcag

SEQ ID NO: 82291 - DNA, 15 bp, Homo sapiens
tggggtttcattgca

SEQ ID NO: 82292 - DNA, 15 bp, Homo sapiens
ttggggtttcattgc

SEQ ID NO: 82293 - DNA, 15 bp, Homo sapiens
tttggggtttcattg

SEQ ID NO: 82294 - DNA, 15 bp, Homo sapiens
atttggggtttcatt

SEQ ID NO: 82295 - DNA, 15 bp, Homo sapiens
gatttggggtttcat

SEQ ID NO: 82296 - DNA, 15 bp, Homo sapiens
agatttggggtttca

SEQ ID NO: 82297 - DNA, 15 bp, Homo sapiens
gagatttggggtttc

SEQ ID NO: 82298 - DNA, 15 bp, Homo sapiens
tgagatttggggttt

SEQ ID NO: 82299 - DNA, 15 bp, Homo sapiens
ctgagatttggggtt

SEQ ID NO: 82300 - DNA, 15 bp, Homo sapiens
cctgagatttggggt

SEQ ID NO: 82301 - DNA, 15 bp, Homo sapiens
acctgagatttgggg

SEQ ID NO: 82302 - DNA, 15 bp, Homo sapiens
aacctgagatttggg

SEQ ID NO: 82303 - DNA, 15 bp, Homo sapiens
taacctgagatttgg

SEQ ID NO: 82304 - DNA, 15 bp, Homo sapiens
ctaacctgagatttg

SEQ ID NO: 82305 - DNA, 15 bp, Homo sapiens
tctaacctgagattt

SEQ ID NO: 82306 - DNA, 15 bp, Homo sapiens
ttctaacctgagatt

SEQ ID NO: 82307 - DNA, 15 bp, Homo sapiens
tttctaacctgagat

SEQ ID NO: 82308 - DNA, 15 bp, Homo sapiens
ttttctaacctgaga

SEQ ID NO: 82309 - DNA, 15 bp, Homo sapiens
tttttctaacctgag

SEQ ID NO: 82310 - DNA, 15 bp, Homo sapiens
ttttttctaacctga

SEQ ID NO: 82311 - DNA, 15 bp, Homo sapiens
tttttttctaacctg

SEQ ID NO: 82312 - DNA, 15 bp, Homo sapiens
atttttttctaacct

SEQ ID NO: 82313 - DNA, 15 bp, Homo sapiens
aatttttttctaacc

SEQ ID NO: 82314 - DNA, 15 bp, Homo sapiens
aaatttttttctaac

SEQ ID NO: 82315 - DNA, 15 bp, Homo sapiens
aaaatttttttctaa

SEQ ID NO: 82316 - DNA, 15 bp, Homo sapiens
aaaaatttttttcta

SEQ ID NO: 82317 - DNA, 15 bp, Homo sapiens
gaaaaatttttttct

SEQ ID NO: 82318 - DNA, 15 bp, Homo sapiens
tgaaaaatttttttc

SEQ ID NO: 82319 - DNA, 15 bp, Homo sapiens
gtgaaaaattttttt

SEQ ID NO: 82320 - DNA, 15 bp, Homo sapiens
ggtgaaaaatttttt

SEQ ID NO: 82321 - DNA, 15 bp, Homo sapiens
tggtgaaaaattttt

SEQ ID NO: 82322 - DNA, 15 bp, Homo sapiens
atggtgaaaaatttt

SEQ ID NO: 82323 - DNA, 15 bp, Homo sapiens
catggtgaaaaattt

SEQ ID NO: 82324 - DNA, 15 bp, Homo sapiens
tcatggtgaaaaatt

SEQ ID NO: 82325 - DNA, 15 bp, Homo sapiens
ctcatggtgaaaaat

SEQ ID NO: 82326 - DNA, 15 bp, Homo sapiens
tctcatggtgaaaaa

SEQ ID NO: 82327 - DNA, 15 bp, Homo sapiens
ctctcatggtgaaaa

SEQ ID NO: 82328 - DNA, 15 bp, Homo sapiens
tctctcatggtgaaa

SEQ ID NO: 82329 - DNA, 15 bp, Homo sapiens
atctctcatggtgaa

SEQ ID NO: 82330 - DNA, 15 bp, Homo sapiens
aatctctcatggtga

SEQ ID NO: 82331 - DNA, 15 bp, Homo sapiens
aaatctctcatggtg

SEQ ID NO: 82332 - DNA, 15 bp, Homo sapiens
aaaatctctcatggt

SEQ ID NO: 82333 - DNA, 15 bp, Homo sapiens
aaaaatctctcatgg

SEQ ID NO: 82334 - DNA, 15 bp, Homo sapiens
taaaaatctctcatg

SEQ ID NO: 82335 - DNA, 15 bp, Homo sapiens
ttaaaaatctctcat

SEQ ID NO: 82336 - DNA, 15 bp, Homo sapiens
cttaaaaatctctca

SEQ ID NO: 82337 - DNA, 15 bp, Homo sapiens
acttaaaaatctctc

SEQ ID NO: 82338 - DNA, 15 bp, Homo sapiens
gacttaaaaatctct

SEQ ID NO: 82339 - DNA, 15 bp, Homo sapiens
tgacttaaaaatctc

SEQ ID NO: 82340 - DNA, 15 bp, Homo sapiens
ctgacttaaaaatct

SEQ ID NO: 82341 - DNA, 15 bp, Homo sapiens
tctgacttaaaaatc

SEQ ID NO: 82342 - DNA, 15 bp, Homo sapiens
ttctgacttaaaaat

SEQ ID NO: 82343 - DNA, 15 bp, Homo sapiens
tttctgacttaaaaa

SEQ ID NO: 82344 - DNA, 15 bp, Homo sapiens
ttttctgacttaaaa

SEQ ID NO: 82345 - DNA, 15 bp, Homo sapiens
tttttctgacttaaa

SEQ ID NO: 82346 - DNA, 15 bp, Homo sapiens
atttttctgacttaa

SEQ ID NO: 82347 - DNA, 15 bp, Homo sapiens
aatttttctgactta

SEQ ID NO: 82348 - DNA, 15 bp, Homo sapiens
aaatttttctgactt

SEQ ID NO: 82349 - DNA, 15 bp, Homo sapiens
aaaatttttctgact

SEQ ID NO: 82350 - DNA, 15 bp, Homo sapiens
taaaatttttctgac

SEQ ID NO: 82351 - DNA, 15 bp, Homo sapiens
ttaaaatttttctga

SEQ ID NO: 82352 - DNA, 15 bp, Homo sapiens
gttaaaatttttctg

SEQ ID NO: 82353 - DNA, 15 bp, Homo sapiens
agttaaaatttttct

SEQ ID NO: 82354 - DNA, 15 bp, Homo sapiens
aagttaaaatttttc

SEQ ID NO: 82355 - DNA, 15 bp, Homo sapiens
taagttaaaattttt

SEQ ID NO: 82356 - DNA, 15 bp, Homo sapiens
ttaagttaaaatttt

SEQ ID NO: 82357 - DNA, 15 bp, Homo sapiens
cttaagttaaaattt

SEQ ID NO: 82358 - DNA, 15 bp, Homo sapiens
acttaagttaaaatt

SEQ ID NO: 82359 - DNA, 15 bp, Homo sapiens
tacttaagttaaaat

SEQ ID NO: 82360 - DNA, 15 bp, Homo sapiens
gtacttaagttaaaa

SEQ ID NO: 82361 - DNA, 15 bp, Homo sapiens
ggtacttaagttaaa

SEQ ID NO: 82362 - DNA, 15 bp, Homo sapiens
aggtacttaagttaa

SEQ ID NO: 82363 - DNA, 15 bp, Homo sapiens
aaggtacttaagtta

SEQ ID NO: 82364 - DNA, 15 bp, Homo sapiens
aaaggtacttaagtt

SEQ ID NO: 82365 - DNA, 15 bp, Homo sapiens
aaaaggtacttaagt

SEQ ID NO: 82366 - DNA, 15 bp, Homo sapiens
gaaaaggtacttaag

SEQ ID NO: 82367 - DNA, 15 bp, Homo sapiens
ggaaaaggtacttaa

SEQ ID NO: 82368 - DNA, 15 bp, Homo sapiens
tggaaaaggtactta

SEQ ID NO: 82369 - DNA, 15 bp, Homo sapiens
ctggaaaaggtactt

SEQ ID NO: 82370 - DNA, 15 bp, Homo sapiens
gctggaaaaggtact

SEQ ID NO: 82371 - DNA, 15 bp, Homo sapiens
agctggaaaaggtac

SEQ ID NO: 82372 - DNA, 15 bp, Homo sapiens
cagctggaaaaggta

SEQ ID NO: 82373 - DNA, 15 bp, Homo sapiens
tcagctggaaaaggt

SEQ ID NO: 82374 - DNA, 15 bp, Homo sapiens
ttcagctggaaaagg

SEQ ID NO: 82375 - DNA, 15 bp, Homo sapiens
gttcagctggaaaag

SEQ ID NO: 82376 - DNA, 15 bp, Homo sapiens
tgttcagctggaaaa

SEQ ID NO: 82377 - DNA, 15 bp, Homo sapiens
ttgttcagctggaaa

SEQ ID NO: 82378 - DNA, 15 bp, Homo sapiens
attgttcagctggaa

SEQ ID NO: 82379 - DNA, 15 bp, Homo sapiens
gattgttcagctgga

SEQ ID NO: 82380 - DNA, 15 bp, Homo sapiens
agattgttcagctgg

SEQ ID NO: 82381 - DNA, 15 bp, Homo sapiens
aagattgttcagctg

SEQ ID NO: 82382 - DNA, 15 bp, Homo sapiens
aaagattgttcagct

SEQ ID NO: 82383 - DNA, 15 bp, Homo sapiens
gaaagattgttcagc

SEQ ID NO: 82384 - DNA, 15 bp, Homo sapiens
tgaaagattgttcag

SEQ ID NO: 82385 - DNA, 15 bp, Homo sapiens
atgaaagattgttca

SEQ ID NO: 82386 - DNA, 15 bp, Homo sapiens
gatgaaagattgttc

SEQ ID NO: 82387 - DNA, 15 bp, Homo sapiens
tgatgaaagattgtt

SEQ ID NO: 82388 - DNA, 15 bp, Homo sapiens
atgatgaaagattgt

SEQ ID NO: 82389 - DNA, 15 bp, Homo sapiens
aatgatgaaagattg

SEQ ID NO: 82390 - DNA, 15 bp, Homo sapiens
aaatgatgaaagatt

SEQ ID NO: 82391 - DNA, 15 bp, Homo sapiens
aaaatgatgaaagat

SEQ ID NO: 82392 - DNA, 15 bp, Homo sapiens
taaaatgatgaaaga

SEQ ID NO: 82393 - DNA, 15 bp, Homo sapiens
ataaaatgatgaaag

SEQ ID NO: 82394 - DNA, 15 bp, Homo sapiens
aataaaatgatgaaa

SEQ ID NO: 82395 - DNA, 15 bp, Homo sapiens
taataaaatgatgaa

SEQ ID NO: 82396 - DNA, 15 bp, Homo sapiens
ataataaaatgatga

SEQ ID NO: 82397 - DNA, 15 bp, Homo sapiens
cataataaaatgatg

SEQ ID NO: 82398 - DNA, 15 bp, Homo sapiens
gcataataaaatgat

SEQ ID NO: 82399 - DNA, 15 bp, Homo sapiens
agcataataaaatga

SEQ ID NO: 82400 - DNA, 15 bp, Homo sapiens
aagcataataaaatg

SEQ ID NO: 82401 - DNA, 15 bp, Homo sapiens
aaagcataataaaat

SEQ ID NO: 82402 - DNA, 15 bp, Homo sapiens
caaagcataataaaa

SEQ ID NO: 82403 - DNA, 15 bp, Homo sapiens
gcaaagcataataaa

SEQ ID NO: 82404 - DNA, 15 bp, Homo sapiens
tgcaaagcataataa

SEQ ID NO: 82405 - DNA, 15 bp, Homo sapiens
ttgcaaagcataata

SEQ ID NO: 82406 - DNA, 15 bp, Homo sapiens
tttgcaaagcataat

SEQ ID NO: 82407 - DNA, 15 bp, Homo sapiens
ttttgcaaagcataa

SEQ ID NO: 82408 - DNA, 15 bp, Homo sapiens
cttttgcaaagcata

SEQ ID NO: 82409 - DNA, 15 bp, Homo sapiens
gcttttgcaaagcat

SEQ ID NO: 82410 - DNA, 15 bp, Homo sapiens
agcttttgcaaagca

SEQ ID NO: 82411 - DNA, 15 bp, Homo sapiens
aagcttttgcaaagc

SEQ ID NO: 82412 - DNA, 15 bp, Homo sapiens
caagcttttgcaaag

SEQ ID NO: 82413 - DNA, 15 bp, Homo sapiens
acaagcttttgcaaa

SEQ ID NO: 82414 - DNA, 15 bp, Homo sapiens
tacaagcttttgcaa

SEQ ID NO: 82415 - DNA, 15 bp, Homo sapiens
ttacaagcttttgca

SEQ ID NO: 82416 - DNA, 15 bp, Homo sapiens
gttacaagcttttgc

SEQ ID NO: 82417 - DNA, 15 bp, Homo sapiens
tgttacaagcttttg

SEQ ID NO: 82418 - DNA, 15 bp, Homo sapiens
atgttacaagctttt

SEQ ID NO: 82419 - DNA, 15 bp, Homo sapiens
gatgttacaagcttt

SEQ ID NO: 82420 - DNA, 15 bp, Homo sapiens
agatgttacaagctt

SEQ ID NO: 82421 - DNA, 15 bp, Homo sapiens
aagatgttacaagct

SEQ ID NO: 82422 - DNA, 15 bp, Homo sapiens
aaagatgttacaagc

SEQ ID NO: 82423 - DNA, 15 bp, Homo sapiens
aaaagatgttacaag

SEQ ID NO: 82424 - DNA, 15 bp, Homo sapiens
caaaagatgttacaa

SEQ ID NO: 82425 - DNA, 15 bp, Homo sapiens
gcaaaagatgttaca

SEQ ID NO: 82426 - DNA, 15 bp, Homo sapiens
agcaaaagatgttac

SEQ ID NO: 82427 - DNA, 15 bp, Homo sapiens
cagcaaaagatgtta

SEQ ID NO: 82428 - DNA, 15 bp, Homo sapiens
gcagcaaaagatgtt

SEQ ID NO: 82429 - DNA, 15 bp, Homo sapiens
ggcagcaaaagatgt

SEQ ID NO: 82430 - DNA, 15 bp, Homo sapiens
cggcagcaaaagatg

SEQ ID NO: 82431 - DNA, 15 bp, Homo sapiens
gcggcagcaaaagat

SEQ ID NO: 82432 - DNA, 15 bp, Homo sapiens
agcggcagcaaaaga

SEQ ID NO: 82433 - DNA, 15 bp, Homo sapiens
gagcggcagcaaaag

SEQ ID NO: 82434 - DNA, 15 bp, Homo sapiens
tgagcggcagcaaaa

SEQ ID NO: 82435 - DNA, 15 bp, Homo sapiens
gtgagcggcagcaaa

SEQ ID NO: 82436 - DNA, 15 bp, Homo sapiens
cgtgagcggcagcaa

SEQ ID NO: 82437 - DNA, 15 bp, Homo sapiens
tcgtgagcggcagca

SEQ ID NO: 82438 - DNA, 15 bp, Homo sapiens
ttcgtgagcggcagc

SEQ ID NO: 82439 - DNA, 15 bp, Homo sapiens
cttcgtgagcggcag

SEQ ID NO: 82440 - DNA, 15 bp, Homo sapiens
gcttcgtgagcggca

SEQ ID NO: 82441 - DNA, 15 bp, Homo sapiens
agcttcgtgagcggc

SEQ ID NO: 82442 - DNA, 15 bp, Homo sapiens
cagcttcgtgagcgg

SEQ ID NO: 82443 - DNA, 15 bp, Homo sapiens
acagcttcgtgagcg

SEQ ID NO: 82444 - DNA, 15 bp, Homo sapiens
tacagcttcgtgagc

SEQ ID NO: 82445 - DNA, 15 bp, Homo sapiens
atacagcttcgtgag

SEQ ID NO: 82446 - DNA, 15 bp, Homo sapiens
aatacagcttcgtga

SEQ ID NO: 82447 - DNA, 15 bp, Homo sapiens
taatacagcttcgtg

SEQ ID NO: 82448 - DNA, 15 bp, Homo sapiens
ttaatacagcttcgt

SEQ ID NO: 82449 - DNA, 15 bp, Homo sapiens
tttaatacagcttcg

SEQ ID NO: 82450 - DNA, 15 bp, Homo sapiens
ttttaatacagcttc

SEQ ID NO: 82451 - DNA, 15 bp, Homo sapiens
tttttaatacagctt

SEQ ID NO: 82452 - DNA, 15 bp, Homo sapiens
atttttaatacagct

SEQ ID NO: 82453 - DNA, 15 bp, Homo sapiens
gatttttaatacagc

SEQ ID NO: 82454 - DNA, 15 bp, Homo sapiens
cgatttttaatacag

SEQ ID NO: 82455 - DNA, 15 bp, Homo sapiens
tcgatttttaataca

SEQ ID NO: 82456 - DNA, 15 bp, Homo sapiens
ctcgatttttaatac

SEQ ID NO: 82457 - DNA, 15 bp, Homo sapiens
tctcgatttttaata

SEQ ID NO: 82458 - DNA, 15 bp, Homo sapiens
ctctcgatttttaat

SEQ ID NO: 82459 - DNA, 15 bp, Homo sapiens
tctctcgatttttaa

SEQ ID NO: 82460 - DNA, 15 bp, Homo sapiens
gtctctcgattttta

SEQ ID NO: 82461 - DNA, 15 bp, Homo sapiens
tgtctctcgattttt

SEQ ID NO: 82462 - DNA, 15 bp, Homo sapiens
gtgtctctcgatttt

SEQ ID NO: 82463 - DNA, 15 bp, Homo sapiens
agtgtctctcgattt

SEQ ID NO: 82464 - DNA, 15 bp, Homo sapiens
aagtgtctctcgatt

SEQ ID NO: 82465 - DNA, 15 bp, Homo sapiens
gaagtgtctctcgat

SEQ ID NO: 82466 - DNA, 15 bp, Homo sapiens
tgaagtgtctctcga

SEQ ID NO: 82467 - DNA, 15 bp, Homo sapiens
ttgaagtgtctctcg

SEQ ID NO: 82468 - DNA, 15 bp, Homo sapiens
attgaagtgtctctc

SEQ ID NO: 82469 - DNA, 15 bp, Homo sapiens
tattgaagtgtctct

SEQ ID NO: 82470 - DNA, 15 bp, Homo sapiens
ttattgaagtgtctc

SEQ ID NO: 82471 - DNA, 15 bp, Homo sapiens
gttattgaagtgtct

SEQ ID NO: 82472 - DNA, 15 bp, Homo sapiens
tgttattgaagtgtc

SEQ ID NO: 82473 - DNA, 15 bp, Homo sapiens
gtgttattgaagtgt

SEQ ID NO: 82474 - DNA, 15 bp, Homo sapiens
tgtgttattgaagtg

SEQ ID NO: 82475 - DNA, 15 bp, Homo sapiens
gtgtgttattgaagt

SEQ ID NO: 82476 - DNA, 15 bp, Homo sapiens
agtgtgttattgaag

SEQ ID NO: 82477 - DNA, 15 bp, Homo sapiens
cagtgtgttattgaa

SEQ ID NO: 82478 - DNA, 15 bp, Homo sapiens
acagtgtgttattga

SEQ ID NO: 82479 - DNA, 15 bp, Homo sapiens
cacagtgtgttattg

SEQ ID NO: 82480 - DNA, 15 bp, Homo sapiens
gcacagtgtgttatt

SEQ ID NO: 82481 - DNA, 15 bp, Homo sapiens
tgcacagtgtgttat

SEQ ID NO: 82482 - DNA, 15 bp, Homo sapiens
ttgcacagtgtgtta

SEQ ID NO: 82483 - DNA, 15 bp, Homo sapiens
tttgcacagtgtgtt

SEQ ID NO: 82484 - DNA, 15 bp, Homo sapiens
ttttgcacagtgtgt

SEQ ID NO: 82485 - DNA, 15 bp, Homo sapiens
gttttgcacagtgtg

SEQ ID NO: 82486 - DNA, 15 bp, Homo sapiens
ggttttgcacagtgt

SEQ ID NO: 82487 - DNA, 15 bp, Homo sapiens
gggttttgcacagtg

SEQ ID NO: 82488 - DNA, 15 bp, Homo sapiens
tgggttttgcacagt

SEQ ID NO: 82489 - DNA, 15 bp, Homo sapiens
ttgggttttgcacag

SEQ ID NO: 82490 - DNA, 15 bp, Homo sapiens
gttgggttttgcaca

SEQ ID NO: 82491 - DNA, 15 bp, Homo sapiens
agttgggttttgcac

SEQ ID NO: 82492 - DNA, 15 bp, Homo sapiens
tagttgggttttgca

SEQ ID NO: 82493 - DNA, 15 bp, Homo sapiens
ctagttgggttttgc

SEQ ID NO: 82494 - DNA, 15 bp, Homo sapiens
tctagttgggttttg

SEQ ID NO: 82495 - DNA, 15 bp, Homo sapiens
ttctagttgggtttt

SEQ ID NO: 82496 - DNA, 15 bp, Homo sapiens
tttctagttgggttt

SEQ ID NO: 82497 - DNA, 15 bp, Homo sapiens
ttttctagttgggtt

SEQ ID NO: 82498 - DNA, 15 bp, Homo sapiens
tttttctagttgggt

SEQ ID NO: 82499 - DNA, 15 bp, Homo sapiens
ttttttctagttggg

SEQ ID NO: 82500 - DNA, 15 bp, Homo sapiens
tttttttctagttgg

SEQ ID NO: 82501 - DNA, 15 bp, Homo sapiens
atttttttctagttg

SEQ ID NO: 82502 - DNA, 15 bp, Homo sapiens
gatttttttctagtt

SEQ ID NO: 82503 - DNA, 15 bp, Homo sapiens
ggatttttttctagt

SEQ ID NO: 82504 - DNA, 15 bp, Homo sapiens
aggatttttttctag

SEQ ID NO: 82505 - DNA, 15 bp, Homo sapiens
taggatttttttcta

SEQ ID NO: 82506 - DNA, 15 bp, Homo sapiens
ttaggatttttttct

SEQ ID NO: 82507 - DNA, 15 bp, Homo sapiens
cttaggatttttttc

SEQ ID NO: 82508 - DNA, 15 bp, Homo sapiens
gcttaggattttttt

SEQ ID NO: 82509 - DNA, 15 bp, Homo sapiens
agcttaggatttttt

SEQ ID NO: 82510 - DNA, 15 bp, Homo sapiens
gagcttaggattttt

SEQ ID NO: 82511 - DNA, 15 bp, Homo sapiens
tgagcttaggatttt

SEQ ID NO: 82512 - DNA, 15 bp, Homo sapiens
atgagcttaggattt

SEQ ID NO: 82513 - DNA, 15 bp, Homo sapiens
aatgagcttaggatt

SEQ ID NO: 82514 - DNA, 15 bp, Homo sapiens
caatgagcttaggat

SEQ ID NO: 82515 - DNA, 15 bp, Homo sapiens
acaatgagcttagga

SEQ ID NO: 82516 - DNA, 15 bp, Homo sapiens
tacaatgagcttagg

SEQ ID NO: 82517 - DNA, 15 bp, Homo sapiens
ttacaatgagcttag

SEQ ID NO: 82518 - DNA, 15 bp, Homo sapiens
attacaatgagctta

SEQ ID NO: 82519 - DNA, 15 bp, Homo sapiens
aattacaatgagctt

SEQ ID NO: 82520 - DNA, 15 bp, Homo sapiens
taattacaatgagct

SEQ ID NO: 82521 - DNA, 15 bp, Homo sapiens
ctaattacaatgagc

SEQ ID NO: 82522 - DNA, 15 bp, Homo sapiens
cctaattacaatgag

SEQ ID NO: 82523 - DNA, 15 bp, Homo sapiens
tcctaattacaatga

SEQ ID NO: 82524 - DNA, 15 bp, Homo sapiens
atcctaattacaatg

SEQ ID NO: 82525 - DNA, 15 bp, Homo sapiens
aatcctaattacaat

SEQ ID NO: 82526 - DNA, 15 bp, Homo sapiens
caatcctaattacaa

SEQ ID NO: 82527 - DNA, 15 bp, Homo sapiens
ccaatcctaattaca

SEQ ID NO: 82528 - DNA, 15 bp, Homo sapiens
cccaatcctaattac

SEQ ID NO: 82529 - DNA, 15 bp, Homo sapiens
ccccaatcctaatta

SEQ ID NO: 82530 - DNA, 15 bp, Homo sapiens
accccaatcctaatt

SEQ ID NO: 82531 - DNA, 15 bp, Homo sapiens
taccccaatcctaat

SEQ ID NO: 82532 - DNA, 15 bp, Homo sapiens
ttaccccaatcctaa

SEQ ID NO: 82533 - DNA, 15 bp, Homo sapiens
attaccccaatccta

SEQ ID NO: 82534 - DNA, 15 bp, Homo sapiens
aattaccccaatcct

SEQ ID NO: 82535 - DNA, 15 bp, Homo sapiens
aaattaccccaatcc

SEQ ID NO: 82536 - DNA, 15 bp, Homo sapiens
caaattaccccaatc

SEQ ID NO: 82537 - DNA, 15 bp, Homo sapiens
ccaaattaccccaat

SEQ ID NO: 82538 - DNA, 15 bp, Homo sapiens
cccaaattaccccaa

SEQ ID NO: 82539 - DNA, 15 bp, Homo sapiens
tcccaaattacccca

SEQ ID NO: 82540 - DNA, 15 bp, Homo sapiens
ctcccaaattacccc

SEQ ID NO: 82541 - DNA, 15 bp, Homo sapiens
tctcccaaattaccc

SEQ ID NO: 82542 - DNA, 15 bp, Homo sapiens
ctctcccaaattacc

SEQ ID NO: 82543 - DNA, 15 bp, Homo sapiens
cctctcccaaattac

SEQ ID NO: 82544 - DNA, 15 bp, Homo sapiens
tcctctcccaaatta

SEQ ID NO: 82545 - DNA, 15 bp, Homo sapiens
ttcctctcccaaatt

SEQ ID NO: 82546 - DNA, 15 bp, Homo sapiens
tttcctctcccaaat

SEQ ID NO: 82547 - DNA, 15 bp, Homo sapiens
ctttcctctcccaaa

SEQ ID NO: 82548 - DNA, 15 bp, Homo sapiens
tctttcctctcccaa

SEQ ID NO: 82549 - DNA, 15 bp, Homo sapiens
atctttcctctccca

SEQ ID NO: 82550 - DNA, 15 bp, Homo sapiens
aatctttcctctccc

SEQ ID NO: 82551 - DNA, 15 bp, Homo sapiens
aaatctttcctctcc

SEQ ID NO: 82552 - DNA, 15 bp, Homo sapiens
gaaatctttcctctc

SEQ ID NO: 82553 - DNA, 15 bp, Homo sapiens
agaaatctttcctct

SEQ ID NO: 82554 - DNA, 15 bp, Homo sapiens
tagaaatctttcctc

SEQ ID NO: 82555 - DNA, 15 bp, Homo sapiens
ctagaaatctttcct

SEQ ID NO: 82556 - DNA, 15 bp, Homo sapiens
cctagaaatctttcc

SEQ ID NO: 82557 - DNA, 15 bp, Homo sapiens
tcctagaaatctttc

SEQ ID NO: 82558 - DNA, 15 bp, Homo sapiens
ttcctagaaatcttt

SEQ ID NO: 82559 - DNA, 15 bp, Homo sapiens
cttcctagaaatctt

SEQ ID NO: 82560 - DNA, 15 bp, Homo sapiens
tcttcctagaaatct

SEQ ID NO: 82561 - DNA, 15 bp, Homo sapiens
atcttcctagaaatc

SEQ ID NO: 82562 - DNA, 15 bp, Homo sapiens
gatcttcctagaaat

SEQ ID NO: 82563 - DNA, 15 bp, Homo sapiens
agatcttcctagaaa

SEQ ID NO: 82564 - DNA, 15 bp, Homo sapiens
tagatcttcctagaa

SEQ ID NO: 82565 - DNA, 15 bp, Homo sapiens
atagatcttcctaga

SEQ ID NO: 82566 - DNA, 15 bp, Homo sapiens
tatagatcttcctag

SEQ ID NO: 82567 - DNA, 15 bp, Homo sapiens
ttatagatcttccta

SEQ ID NO: 82568 - DNA, 15 bp, Homo sapiens
gttatagatcttcct

SEQ ID NO: 82569 - DNA, 15 bp, Homo sapiens
tgttatagatcttcc

SEQ ID NO: 82570 - DNA, 15 bp, Homo sapiens
gtgttatagatcttc

SEQ ID NO: 82571 - DNA, 15 bp, Homo sapiens
tgtgttatagatctt

SEQ ID NO: 82572 - DNA, 15 bp, Homo sapiens
atgtgttatagatct

SEQ ID NO: 82573 - DNA, 15 bp, Homo sapiens
tatgtgttatagatc

SEQ ID NO: 82574 - DNA, 15 bp, Homo sapiens
gtatgtgttatagat

SEQ ID NO: 82575 - DNA, 15 bp, Homo sapiens
agtatgtgttataga

SEQ ID NO: 82576 - DNA, 15 bp, Homo sapiens
gagtatgtgttatag

SEQ ID NO: 82577 - DNA, 15 bp, Homo sapiens
ggagtatgtgttata

SEQ ID NO: 82578 - DNA, 15 bp, Homo sapiens
aggagtatgtgttat

SEQ ID NO: 82579 - DNA, 15 bp, Homo sapiens
taggagtatgtgtta

SEQ ID NO: 82580 - DNA, 15 bp, Homo sapiens
ataggagtatgtgtt

SEQ ID NO: 82581 - DNA, 15 bp, Homo sapiens
tataggagtatgtgt

SEQ ID NO: 82582 - DNA, 15 bp, Homo sapiens
atataggagtatgtg

SEQ ID NO: 82583 - DNA, 15 bp, Homo sapiens
gatataggagtatgt

SEQ ID NO: 82584 - DNA, 15 bp, Homo sapiens
agatataggagtatg

SEQ ID NO: 82585 - DNA, 15 bp, Homo sapiens
aagatataggagtat

SEQ ID NO: 82586 - DNA, 15 bp, Homo sapiens
aaagatataggagta

SEQ ID NO: 82587 - DNA, 15 bp, Homo sapiens
gaaagatataggagt

SEQ ID NO: 82588 - DNA, 15 bp, Homo sapiens
ggaaagatataggag

SEQ ID NO: 82589 - DNA, 15 bp, Homo sapiens
tggaaagatatagga

SEQ ID NO: 82590 - DNA, 15 bp, Homo sapiens
atggaaagatatagg

SEQ ID NO: 82591 - DNA, 15 bp, Homo sapiens
gatggaaagatatag

SEQ ID NO: 82592 - DNA, 15 bp, Homo sapiens
tgatggaaagatata

SEQ ID NO: 82593 - DNA, 15 bp, Homo sapiens
ctgatggaaagatat

SEQ ID NO: 82594 - DNA, 15 bp, Homo sapiens
actgatggaaagata

SEQ ID NO: 82595 - DNA, 15 bp, Homo sapiens
aactgatggaaagat

SEQ ID NO: 82596 - DNA, 15 bp, Homo sapiens
taactgatggaaaga

SEQ ID NO: 82597 - DNA, 15 bp, Homo sapiens
ataactgatggaaag

SEQ ID NO: 82598 - DNA, 15 bp, Homo sapiens
aataactgatggaaa

SEQ ID NO: 82599 - DNA, 15 bp, Homo sapiens
gaataactgatggaa

SEQ ID NO: 82600 - DNA, 15 bp, Homo sapiens
agaataactgatgga

SEQ ID NO: 82601 - DNA, 15 bp, Homo sapiens
tagaataactgatgg

SEQ ID NO: 82602 - DNA, 15 bp, Homo sapiens
atagaataactgatg

SEQ ID NO: 82603 - DNA, 15 bp, Homo sapiens
gatagaataactgat

SEQ ID NO: 82604 - DNA, 15 bp, Homo sapiens
cgatagaataactga

SEQ ID NO: 82605 - DNA, 15 bp, Homo sapiens
gcgatagaataactg

SEQ ID NO: 82606 - DNA, 15 bp, Homo sapiens
ggcgatagaataact

SEQ ID NO: 82607 - DNA, 15 bp, Homo sapiens
aggcgatagaataac

SEQ ID NO: 82608 - DNA, 15 bp, Homo sapiens
taggcgatagaataa

SEQ ID NO: 82609 - DNA, 15 bp, Homo sapiens
ctaggcgatagaata

SEQ ID NO: 82610 - DNA, 15 bp, Homo sapiens
actaggcgatagaat

SEQ ID NO: 82611 - DNA, 15 bp, Homo sapiens
gactaggcgatagaa

SEQ ID NO: 82612 - DNA, 15 bp, Homo sapiens
agactaggcgataga

SEQ ID NO: 82613 - DNA, 15 bp, Homo sapiens
aagactaggcgatag

SEQ ID NO: 82614 - DNA, 15 bp, Homo sapiens
gaagactaggcgata

SEQ ID NO: 82615 - DNA, 15 bp, Homo sapiens
ggaagactaggcgat

SEQ ID NO: 82616 - DNA, 15 bp, Homo sapiens
gggaagactaggcga

SEQ ID NO: 82617 - DNA, 15 bp, Homo sapiens
agggaagactaggcg

SEQ ID NO: 82618 - DNA, 15 bp, Homo sapiens
cagggaagactaggc

SEQ ID NO: 82619 - DNA, 15 bp, Homo sapiens
acagggaagactagg

SEQ ID NO: 82620 - DNA, 15 bp, Homo sapiens
tacagggaagactag

SEQ ID NO: 82621 - DNA, 15 bp, Homo sapiens
atacagggaagacta

SEQ ID NO: 82622 - DNA, 15 bp, Homo sapiens
tatacagggaagact

SEQ ID NO: 82623 - DNA, 15 bp, Homo sapiens
atatacagggaagac

SEQ ID NO: 82624 - DNA, 15 bp, Homo sapiens
gatatacagggaaga

SEQ ID NO: 82625 - DNA, 15 bp, Homo sapiens
ggatatacagggaag

SEQ ID NO: 82626 - DNA, 15 bp, Homo sapiens
aggatatacagggaa

SEQ ID NO: 82627 - DNA, 15 bp, Homo sapiens
caggatatacaggga

SEQ ID NO: 82628 - DNA, 15 bp, Homo sapiens
gcaggatatacaggg

SEQ ID NO: 82629 - DNA, 15 bp, Homo sapiens
agcaggatatacagg

SEQ ID NO: 82630 - DNA, 15 bp, Homo sapiens
aagcaggatatacag

SEQ ID NO: 82631 - DNA, 15 bp, Homo sapiens
gaagcaggatataca

SEQ ID NO: 82632 - DNA, 15 bp, Homo sapiens
agaagcaggatatac

SEQ ID NO: 82633 - DNA, 15 bp, Homo sapiens
aagaagcaggatata

SEQ ID NO: 82634 - DNA, 15 bp, Homo sapiens
taagaagcaggatat

SEQ ID NO: 82635 - DNA, 15 bp, Homo sapiens
ataagaagcaggata

SEQ ID NO: 82636 - DNA, 15 bp, Homo sapiens
aataagaagcaggat

SEQ ID NO: 82637 - DNA, 15 bp, Homo sapiens
aaataagaagcagga

SEQ ID NO: 82638 - DNA, 15 bp, Homo sapiens
gaaataagaagcagg

SEQ ID NO: 82639 - DNA, 15 bp, Homo sapiens
agaaataagaagcag

SEQ ID NO: 82640 - DNA, 15 bp, Homo sapiens
aagaaataagaagca

SEQ ID NO: 82641 - DNA, 15 bp, Homo sapiens
aaagaaataagaagc

SEQ ID NO: 82642 - DNA, 15 bp, Homo sapiens
gaaagaaataagaag

SEQ ID NO: 82643 - DNA, 15 bp, Homo sapiens
ggaaagaaataagaa

SEQ ID NO: 82644 - DNA, 15 bp, Homo sapiens
aggaaagaaataaga

SEQ ID NO: 82645 - DNA, 15 bp, Homo sapiens
caggaaagaaataag

SEQ ID NO: 82646 - DNA, 15 bp, Homo sapiens
ccaggaaagaaataa

SEQ ID NO: 82647 - DNA, 15 bp, Homo sapiens
tccaggaaagaaata

SEQ ID NO: 82648 - DNA, 15 bp, Homo sapiens
ttccaggaaagaaat

SEQ ID NO: 82649 - DNA, 15 bp, Homo sapiens
attccaggaaagaaa

SEQ ID NO: 82650 - DNA, 15 bp, Homo sapiens
tattccaggaaagaa

SEQ ID NO: 82651 - DNA, 15 bp, Homo sapiens
ctattccaggaaaga

SEQ ID NO: 82652 - DNA, 15 bp, Homo sapiens
cctattccaggaaag

SEQ ID NO: 82653 - DNA, 15 bp, Homo sapiens
tcctattccaggaaa

SEQ ID NO: 82654 - DNA, 15 bp, Homo sapiens
ttcctattccaggaa

SEQ ID NO: 82655 - DNA, 15 bp, Homo sapiens
tttcctattccagga

SEQ ID NO: 82656 - DNA, 15 bp, Homo sapiens
gtttcctattccagg

SEQ ID NO: 82657 - DNA, 15 bp, Homo sapiens
agtttcctattccag

SEQ ID NO: 82658 - DNA, 15 bp, Homo sapiens
tagtttcctattcca

SEQ ID NO: 82659 - DNA, 15 bp, Homo sapiens
atagtttcctattcc

SEQ ID NO: 82660 - DNA, 15 bp, Homo sapiens
catagtttcctattc

SEQ ID NO: 82661 - DNA, 15 bp, Homo sapiens
tcatagtttcctatt

SEQ ID NO: 82662 - DNA, 15 bp, Homo sapiens
ttcatagtttcctat

SEQ ID NO: 82663 - DNA, 15 bp, Homo sapiens
gttcatagtttccta

SEQ ID NO: 82664 - DNA, 15 bp, Homo sapiens
agttcatagtttcct

SEQ ID NO: 82665 - DNA, 15 bp, Homo sapiens
aagttcatagtttcc

SEQ ID NO: 82666 - DNA, 15 bp, Homo sapiens
caagttcatagtttc

SEQ ID NO: 82667 - DNA, 15 bp, Homo sapiens
acaagttcatagttt

SEQ ID NO: 82668 - DNA, 15 bp, Homo sapiens
cacaagttcatagtt

SEQ ID NO: 82669 - DNA, 15 bp, Homo sapiens
ccacaagttcatagt

SEQ ID NO: 82670 - DNA, 15 bp, Homo sapiens
cccacaagttcatag

SEQ ID NO: 82671 - DNA, 15 bp, Homo sapiens
gcccacaagttcata

SEQ ID NO: 82672 - DNA, 15 bp, Homo sapiens
tgcccacaagttcat

SEQ ID NO: 82673 - DNA, 15 bp, Homo sapiens
ctgcccacaagttca

SEQ ID NO: 82674 - DNA, 15 bp, Homo sapiens
gctgcccacaagttc

SEQ ID NO: 82675 - DNA, 15 bp, Homo sapiens
tgctgcccacaagtt

SEQ ID NO: 82676 - DNA, 15 bp, Homo sapiens
gtgctgcccacaagt

SEQ ID NO: 82677 - DNA, 15 bp, Homo sapiens
agtgctgcccacaag

SEQ ID NO: 82678 - DNA, 15 bp, Homo sapiens
cagtgctgcccacaa

SEQ ID NO: 82679 - DNA, 15 bp, Homo sapiens
tcagtgctgcccaca

SEQ ID NO: 82680 - DNA, 15 bp, Homo sapiens
ttcagtgctgcccac

SEQ ID NO: 82681 - DNA, 15 bp, Homo sapiens
cttcagtgctgccca

SEQ ID NO: 82682 - DNA, 15 bp, Homo sapiens
acttcagtgctgccc

SEQ ID NO: 82683 - DNA, 15 bp, Homo sapiens
cacttcagtgctgcc

SEQ ID NO: 82684 - DNA, 15 bp, Homo sapiens
tcacttcagtgctgc

SEQ ID NO: 82685 - DNA, 15 bp, Homo sapiens
gtcacttcagtgctg

SEQ ID NO: 82686 - DNA, 15 bp, Homo sapiens
tgtcacttcagtgct

SEQ ID NO: 82687 - DNA, 15 bp, Homo sapiens
gtgtcacttcagtgc

SEQ ID NO: 82688 - DNA, 15 bp, Homo sapiens
agtgtcacttcagtg

SEQ ID NO: 82689 - DNA, 15 bp, Homo sapiens
tagtgtcacttcagt

SEQ ID NO: 82690 - DNA, 15 bp, Homo sapiens
ttagtgtcacttcag

SEQ ID NO: 82691 - DNA, 15 bp, Homo sapiens
gttagtgtcacttca

SEQ ID NO: 82692 - DNA, 15 bp, Homo sapiens
tgttagtgtcacttc

SEQ ID NO: 82693 - DNA, 15 bp, Homo sapiens
ttgttagtgtcactt

SEQ ID NO: 82694 - DNA, 15 bp, Homo sapiens
cttgttagtgtcact

SEQ ID NO: 82695 - DNA, 15 bp, Homo sapiens
acttgttagtgtcac

SEQ ID NO: 82696 - DNA, 15 bp, Homo sapiens
tacttgttagtgtca

SEQ ID NO: 82697 - DNA, 15 bp, Homo sapiens
atacttgttagtgtc

SEQ ID NO: 82698 - DNA, 15 bp, Homo sapiens
tatacttgttagtgt

SEQ ID NO: 82699 - DNA, 15 bp, Homo sapiens
ttatacttgttagtg

SEQ ID NO: 82700 - DNA, 15 bp, Homo sapiens
tttatacttgttagt

SEQ ID NO: 82701 - DNA, 15 bp, Homo sapiens
ctttatacttgttag

SEQ ID NO: 82702 - DNA, 15 bp, Homo sapiens
tctttatacttgtta

SEQ ID NO: 82703 - DNA, 15 bp, Homo sapiens
atctttatacttgtt

SEQ ID NO: 82704 - DNA, 15 bp, Homo sapiens
tatctttatacttgt

SEQ ID NO: 82705 - DNA, 15 bp, Homo sapiens
ttatctttatacttg

SEQ ID NO: 82706 - DNA, 15 bp, Homo sapiens
tttatctttatactt

SEQ ID NO: 82707 - DNA, 15 bp, Homo sapiens
ttttatctttatact

SEQ ID NO: 82708 - DNA, 15 bp, Homo sapiens
cttttatctttatac

SEQ ID NO: 82709 - DNA, 15 bp, Homo sapiens
gcttttatctttata

SEQ ID NO: 82710 - DNA, 15 bp, Homo sapiens
tgcttttatctttat

SEQ ID NO: 82711 - DNA, 15 bp, Homo sapiens
ttgcttttatcttta

SEQ ID NO: 82712 - DNA, 15 bp, Homo sapiens
gttgcttttatcttt

SEQ ID NO: 82713 - DNA, 15 bp, Homo sapiens
ggttgcttttatctt

SEQ ID NO: 82714 - DNA, 15 bp, Homo sapiens
cggttgcttttatct

SEQ ID NO: 82715 - DNA, 15 bp, Homo sapiens
tcggttgcttttatc

SEQ ID NO: 82716 - DNA, 15 bp, Homo sapiens
atcggttgcttttat

SEQ ID NO: 82717 - DNA, 15 bp, Homo sapiens
tatcggttgctttta

SEQ ID NO: 82718 - DNA, 15 bp, Homo sapiens
atatcggttgctttt

SEQ ID NO: 82719 - DNA, 15 bp, Homo sapiens
aatatcggttgcttt

SEQ ID NO: 82720 - DNA, 15 bp, Homo sapiens
aaatatcggttgctt

SEQ ID NO: 82721 - DNA, 15 bp, Homo sapiens
gaaatatcggttgct

SEQ ID NO: 82722 - DNA, 15 bp, Homo sapiens
tgaaatatcggttgc

SEQ ID NO: 82723 - DNA, 15 bp, Homo sapiens
ttgaaatatcggttg

SEQ ID NO: 82724 - DNA, 15 bp, Homo sapiens
tttgaaatatcggtt

SEQ ID NO: 82725 - DNA, 15 bp, Homo sapiens
ttttgaaatatcggt

SEQ ID NO: 82726 - DNA, 15 bp, Homo sapiens
tttttgaaatatcgg

SEQ ID NO: 82727 - DNA, 15 bp, Homo sapiens
atttttgaaatatcg

SEQ ID NO: 82728 - DNA, 15 bp, Homo sapiens
catttttgaaatatc

SEQ ID NO: 82729 - DNA, 15 bp, Homo sapiens
tcatttttgaaatat

SEQ ID NO: 82730 - DNA, 15 bp, Homo sapiens
ttcatttttgaaata

SEQ ID NO: 82731 - DNA, 15 bp, Homo sapiens
tttcatttttgaaat

SEQ ID NO: 82732 - DNA, 15 bp, Homo sapiens
ctttcatttttgaaa

SEQ ID NO: 82733 - DNA, 15 bp, Homo sapiens
gctttcatttttgaa

SEQ ID NO: 82734 - DNA, 15 bp, Homo sapiens
tgctttcatttttga

SEQ ID NO: 82735 - DNA, 15 bp, Homo sapiens
atgctttcatttttg

SEQ ID NO: 82736 - DNA, 15 bp, Homo sapiens
tatgctttcattttt

SEQ ID NO: 82737 - DNA, 15 bp, Homo sapiens
ttatgctttcatttt

SEQ ID NO: 82738 - DNA, 15 bp, Homo sapiens
gttatgctttcattt

SEQ ID NO: 82739 - DNA, 15 bp, Homo sapiens
agttatgctttcatt

SEQ ID NO: 82740 - DNA, 15 bp, Homo sapiens
tagttatgctttcat

SEQ ID NO: 82741 - DNA, 15 bp, Homo sapiens
ttagttatgctttca

SEQ ID NO: 82742 - DNA, 15 bp, Homo sapiens
tttagttatgctttc

SEQ ID NO: 82743 - DNA, 15 bp, Homo sapiens
ttttagttatgcttt

SEQ ID NO: 82744 - DNA, 15 bp, Homo sapiens
tttttagttatgctt

SEQ ID NO: 82745 - DNA, 15 bp, Homo sapiens
atttttagttatgct

SEQ ID NO: 82746 - DNA, 15 bp, Homo sapiens
catttttagttatgc

SEQ ID NO: 82747 - DNA, 15 bp, Homo sapiens
tcatttttagttatg

SEQ ID NO: 82748 - DNA, 15 bp, Homo sapiens
gtcatttttagttat

SEQ ID NO: 82749 - DNA, 15 bp, Homo sapiens
tgtcatttttagtta

SEQ ID NO: 82750 - DNA, 15 bp, Homo sapiens
ttgtcatttttagtt

SEQ ID NO: 82751 - DNA, 15 bp, Homo sapiens
attgtcatttttagt

SEQ ID NO: 82752 - DNA, 15 bp, Homo sapiens
tattgtcatttttag

SEQ ID NO: 82753 - DNA, 15 bp, Homo sapiens
ttattgtcattttta

SEQ ID NO: 82754 - DNA, 15 bp, Homo sapiens
tttattgtcattttt

SEQ ID NO: 82755 - DNA, 15 bp, Homo sapiens
ctttattgtcatttt

SEQ ID NO: 82756 - DNA, 15 bp, Homo sapiens
gctttattgtcattt

SEQ ID NO: 82757 - DNA, 15 bp, Homo sapiens
tgctttattgtcatt

SEQ ID NO: 82758 - DNA, 15 bp, Homo sapiens
ctgctttattgtcat

SEQ ID NO: 82759 - DNA, 15 bp, Homo sapiens
actgctttattgtca

SEQ ID NO: 82760 - DNA, 15 bp, Homo sapiens
aactgctttattgtc

SEQ ID NO: 82761 - DNA, 15 bp, Homo sapiens
gaactgctttattgt

SEQ ID NO: 82762 - DNA, 15 bp, Homo sapiens
agaactgctttattg

SEQ ID NO: 82763 - DNA, 15 bp, Homo sapiens
tagaactgctttatt

SEQ ID NO: 82764 - DNA, 15 bp, Homo sapiens
atagaactgctttat

SEQ ID NO: 82765 - DNA, 15 bp, Homo sapiens
tatagaactgcttta

SEQ ID NO: 82766 - DNA, 15 bp, Homo sapiens
ttatagaactgcttt

SEQ ID NO: 82767 - DNA, 15 bp, Homo sapiens
tttatagaactgctt

SEQ ID NO: 82768 - DNA, 15 bp, Homo sapiens
ttttatagaactgct

SEQ ID NO: 82769 - DNA, 15 bp, Homo sapiens
attttatagaactgc

SEQ ID NO: 82770 - DNA, 15 bp, Homo sapiens
aattttatagaactg

SEQ ID NO: 82771 - DNA, 15 bp, Homo sapiens
taattttatagaact

SEQ ID NO: 82772 - DNA, 15 bp, Homo sapiens
ttaattttatagaac

SEQ ID NO: 82773 - DNA, 15 bp, Homo sapiens
cttaattttatagaa

SEQ ID NO: 82774 - DNA, 15 bp, Homo sapiens
tcttaattttataga

SEQ ID NO: 82775 - DNA, 15 bp, Homo sapiens
atcttaattttatag

SEQ ID NO: 82776 - DNA, 15 bp, Homo sapiens
tatcttaattttata

SEQ ID NO: 82777 - DNA, 15 bp, Homo sapiens
gtatcttaattttat

SEQ ID NO: 82778 - DNA, 15 bp, Homo sapiens
tgtatcttaatttta

SEQ ID NO: 82779 - DNA, 15 bp, Homo sapiens
ctgtatcttaatttt

SEQ ID NO: 82780 - DNA, 15 bp, Homo sapiens
cctgtatcttaattt

SEQ ID NO: 82781 - DNA, 15 bp, Homo sapiens
gcctgtatcttaatt

SEQ ID NO: 82782 - DNA, 15 bp, Homo sapiens
tgcctgtatcttaat

SEQ ID NO: 82783 - DNA, 15 bp, Homo sapiens
gtgcctgtatcttaa

SEQ ID NO: 82784 - DNA, 15 bp, Homo sapiens
agtgcctgtatctta

SEQ ID NO: 82785 - DNA, 15 bp, Homo sapiens
gagtgcctgtatctt

SEQ ID NO: 82786 - DNA, 15 bp, Homo sapiens
tgagtgcctgtatct

SEQ ID NO: 82787 - DNA, 15 bp, Homo sapiens
atgagtgcctgtatc

SEQ ID NO: 82788 - DNA, 15 bp, Homo sapiens
tatgagtgcctgtat

SEQ ID NO: 82789 - DNA, 15 bp, Homo sapiens
atatgagtgcctgta

SEQ ID NO: 82790 - DNA, 15 bp, Homo sapiens
tatatgagtgcctgt

SEQ ID NO: 82791 - DNA, 15 bp, Homo sapiens
atatatgagtgcctg

SEQ ID NO: 82792 - DNA, 15 bp, Homo sapiens
tatatatgagtgcct

SEQ ID NO: 82793 - DNA, 15 bp, Homo sapiens
ttatatatgagtgcc

SEQ ID NO: 82794 - DNA, 15 bp, Homo sapiens
gttatatatgagtgc

SEQ ID NO: 82795 - DNA, 15 bp, Homo sapiens
ggttatatatgagtg

SEQ ID NO: 82796 - DNA, 15 bp, Homo sapiens
tggttatatatgagt

SEQ ID NO: 82797 - DNA, 15 bp, Homo sapiens
gtggttatatatgag

SEQ ID NO: 82798 - DNA, 15 bp, Homo sapiens
tgtggttatatatga

SEQ ID NO: 82799 - DNA, 15 bp, Homo sapiens
atgtggttatatatg

SEQ ID NO: 82800 - DNA, 15 bp, Homo sapiens
gatgtggttatatat

SEQ ID NO: 82801 - DNA, 15 bp, Homo sapiens
agatgtggttatata

SEQ ID NO: 82802 - DNA, 15 bp, Homo sapiens
tagatgtggttatat

SEQ ID NO: 82803 - DNA, 15 bp, Homo sapiens
ctagatgtggttata

SEQ ID NO: 82804 - DNA, 15 bp, Homo sapiens
gctagatgtggttat

SEQ ID NO: 82805 - DNA, 15 bp, Homo sapiens
tgctagatgtggtta

SEQ ID NO: 82806 - DNA, 15 bp, Homo sapiens
ttgctagatgtggtt

SEQ ID NO: 82807 - DNA, 15 bp, Homo sapiens
tttgctagatgtggt

SEQ ID NO: 82808 - DNA, 15 bp, Homo sapiens
ttttgctagatgtgg

SEQ ID NO: 82809 - DNA, 15 bp, Homo sapiens
gttttgctagatgtg

SEQ ID NO: 82810 - DNA, 15 bp, Homo sapiens
agttttgctagatgt

SEQ ID NO: 82811 - DNA, 15 bp, Homo sapiens
tagttttgctagatg

SEQ ID NO: 82812 - DNA, 15 bp, Homo sapiens
ttagttttgctagat

SEQ ID NO: 82813 - DNA, 15 bp, Homo sapiens
tttagttttgctaga

SEQ ID NO: 82814 - DNA, 15 bp, Homo sapiens
ctttagttttgctag

SEQ ID NO: 82815 - DNA, 15 bp, Homo sapiens
tctttagttttgcta

SEQ ID NO: 82816 - DNA, 15 bp, Homo sapiens
ttctttagttttgct

SEQ ID NO: 82817 - DNA, 15 bp, Homo sapiens
tttctttagttttgc

SEQ ID NO: 82818 - DNA, 15 bp, Homo sapiens
gtttctttagttttg

SEQ ID NO: 82819 - DNA, 15 bp, Homo sapiens
tgtttctttagtttt

SEQ ID NO: 82820 - DNA, 15 bp, Homo sapiens
ttgtttctttagttt

SEQ ID NO: 82821 - DNA, 15 bp, Homo sapiens
tttgtttctttagtt

SEQ ID NO: 82822 - DNA, 15 bp, Homo sapiens
atttgtttctttagt

SEQ ID NO: 82823 - DNA, 15 bp, Homo sapiens
tatttgtttctttag

SEQ ID NO: 82824 - DNA, 15 bp, Homo sapiens
atatttgtttcttta

SEQ ID NO: 82825 - DNA, 15 bp, Homo sapiens
tatatttgtttcttt

SEQ ID NO: 82826 - DNA, 15 bp, Homo sapiens
ttatatttgtttctt

SEQ ID NO: 82827 - DNA, 15 bp, Homo sapiens
attatatttgtttct

SEQ ID NO: 82828 - DNA, 15 bp, Homo sapiens
tattatatttgtttc

SEQ ID NO: 82829 - DNA, 15 bp, Homo sapiens
gtattatatttgttt

SEQ ID NO: 82830 - DNA, 15 bp, Homo sapiens
agtattatatttgtt

SEQ ID NO: 82831 - DNA, 15 bp, Homo sapiens
tagtattatatttgt

SEQ ID NO: 82832 - DNA, 15 bp, Homo sapiens
ttagtattatatttg

SEQ ID NO: 82833 - DNA, 15 bp, Homo sapiens
tttagtattatattt

SEQ ID NO: 82834 - DNA, 15 bp, Homo sapiens
ttttagtattatatt

SEQ ID NO: 82835 - DNA, 15 bp, Homo sapiens
attttagtattatat

SEQ ID NO: 82836 - DNA, 15 bp, Homo sapiens
tattttagtattata

SEQ ID NO: 82837 - DNA, 15 bp, Homo sapiens
ttattttagtattat

SEQ ID NO: 82838 - DNA, 15 bp, Homo sapiens
gttattttagtatta

SEQ ID NO: 82839 - DNA, 15 bp, Homo sapiens
tgttattttagtatt

SEQ ID NO: 82840 - DNA, 15 bp, Homo sapiens
ctgttattttagtat

SEQ ID NO: 82841 - DNA, 15 bp, Homo sapiens
actgttattttagta

SEQ ID NO: 82842 - DNA, 15 bp, Homo sapiens
cactgttattttagt

SEQ ID NO: 82843 - DNA, 15 bp, Homo sapiens
tcactgttattttag

SEQ ID NO: 82844 - DNA, 15 bp, Homo sapiens
ctcactgttatttta

SEQ ID NO: 82845 - DNA, 15 bp, Homo sapiens
tctcactgttatttt

SEQ ID NO: 82846 - DNA, 15 bp, Homo sapiens
ttctcactgttattt

SEQ ID NO: 82847 - DNA, 15 bp, Homo sapiens
cttctcactgttatt

SEQ ID NO: 82848 - DNA, 15 bp, Homo sapiens
ccttctcactgttat

SEQ ID NO: 82849 - DNA, 15 bp, Homo sapiens
tccttctcactgtta

SEQ ID NO: 82850 - DNA, 15 bp, Homo sapiens
ttccttctcactgtt

SEQ ID NO: 82851 - DNA, 15 bp, Homo sapiens
tttccttctcactgt

SEQ ID NO: 82852 - DNA, 15 bp, Homo sapiens
atttccttctcactg

SEQ ID NO: 82853 - DNA, 15 bp, Homo sapiens
aatttccttctcact

SEQ ID NO: 82854 - DNA, 15 bp, Homo sapiens
aaatttccttctcac

SEQ ID NO: 82855 - DNA, 15 bp, Homo sapiens
caaatttccttctca

SEQ ID NO: 82856 - DNA, 15 bp, Homo sapiens
gcaaatttccttctc

SEQ ID NO: 82857 - DNA, 15 bp, Homo sapiens
agcaaatttccttct

SEQ ID NO: 82858 - DNA, 15 bp, Homo sapiens
cagcaaatttccttc

SEQ ID NO: 82859 - DNA, 15 bp, Homo sapiens
acagcaaatttcctt

SEQ ID NO: 82860 - DNA, 15 bp, Homo sapiens
aacagcaaatttcct

SEQ ID NO: 82861 - DNA, 15 bp, Homo sapiens
caacagcaaatttcc

SEQ ID NO: 82862 - DNA, 15 bp, Homo sapiens
acaacagcaaatttc

SEQ ID NO: 82863 - DNA, 15 bp, Homo sapiens
gacaacagcaaattt

SEQ ID NO: 82864 - DNA, 15 bp, Homo sapiens
agacaacagcaaatt

SEQ ID NO: 82865 - DNA, 15 bp, Homo sapiens
tagacaacagcaaat

SEQ ID NO: 82866 - DNA, 15 bp, Homo sapiens
ttagacaacagcaaa

SEQ ID NO: 82867 - DNA, 15 bp, Homo sapiens
tttagacaacagcaa

SEQ ID NO: 82868 - DNA, 15 bp, Homo sapiens
atttagacaacagca

SEQ ID NO: 82869 - DNA, 15 bp, Homo sapiens
catttagacaacagc

SEQ ID NO: 82870 - DNA, 15 bp, Homo sapiens
gcatttagacaacag

SEQ ID NO: 82871 - DNA, 15 bp, Homo sapiens
agcatttagacaaca

SEQ ID NO: 82872 - DNA, 15 bp, Homo sapiens
aagcatttagacaac

SEQ ID NO: 82873 - DNA, 15 bp, Homo sapiens
gaagcatttagacaa

SEQ ID NO: 82874 - DNA, 15 bp, Homo sapiens
tgaagcatttagaca

SEQ ID NO: 82875 - DNA, 15 bp, Homo sapiens
ttgaagcatttagac

SEQ ID NO: 82876 - DNA, 15 bp, Homo sapiens
tttgaagcatttaga

SEQ ID NO: 82877 - DNA, 15 bp, Homo sapiens
ttttgaagcatttag

SEQ ID NO: 82878 - DNA, 15 bp, Homo sapiens
tttttgaagcattta

SEQ ID NO: 82879 - DNA, 15 bp, Homo sapiens
ttttttgaagcattt

SEQ ID NO: 82880 - DNA, 15 bp, Homo sapiens
tttttttgaagcatt

SEQ ID NO: 82881 - DNA, 15 bp, Homo sapiens
ttttttttgaagcat

SEQ ID NO: 82882 - DNA, 15 bp, Homo sapiens
cttttttttgaagca

SEQ ID NO: 82883 - DNA, 15 bp, Homo sapiens
tcttttttttgaagc

SEQ ID NO: 82884 - DNA, 15 bp, Homo sapiens
ctcttttttttgaag

SEQ ID NO: 82885 - DNA, 15 bp, Homo sapiens
actcttttttttgaa

SEQ ID NO: 82886 - DNA, 15 bp, Homo sapiens
tactcttttttttga

SEQ ID NO: 82887 - DNA, 15 bp, Homo sapiens
atactcttttttttg

SEQ ID NO: 82888 - DNA, 15 bp, Homo sapiens
catactctttttttt

SEQ ID NO: 82889 - DNA, 15 bp, Homo sapiens
tcatactcttttttt

SEQ ID NO: 82890 - DNA, 15 bp, Homo sapiens
ttcatactctttttt

SEQ ID NO: 82891 - DNA, 15 bp, Homo sapiens
tttcatactcttttt

SEQ ID NO: 82892 - DNA, 15 bp, Homo sapiens
gtttcatactctttt

SEQ ID NO: 82893 - DNA, 15 bp, Homo sapiens
tgtttcatactcttt

SEQ ID NO: 82894 - DNA, 15 bp, Homo sapiens
ttgtttcatactctt

SEQ ID NO: 82895 - DNA, 15 bp, Homo sapiens
tttgtttcatactct

SEQ ID NO: 82896 - DNA, 15 bp, Homo sapiens
ctttgtttcatactc

SEQ ID NO: 82897 - DNA, 15 bp, Homo sapiens
gctttgtttcatact

SEQ ID NO: 82898 - DNA, 15 bp, Homo sapiens
tgctttgtttcatac

SEQ ID NO: 82899 - DNA, 15 bp, Homo sapiens
atgctttgtttcata

SEQ ID NO: 82900 - DNA, 15 bp, Homo sapiens
tatgctttgtttcat

SEQ ID NO: 82901 - DNA, 15 bp, Homo sapiens
gtatgctttgtttca

SEQ ID NO: 82902 - DNA, 15 bp, Homo sapiens
tgtatgctttgtttc

SEQ ID NO: 82903 - DNA, 15 bp, Homo sapiens
ttgtatgctttgttt

SEQ ID NO: 82904 - DNA, 15 bp, Homo sapiens
gttgtatgctttgtt

SEQ ID NO: 82905 - DNA, 15 bp, Homo sapiens
agttgtatgctttgt

SEQ ID NO: 82906 - DNA, 15 bp, Homo sapiens
cagttgtatgctttg

SEQ ID NO: 82907 - DNA, 15 bp, Homo sapiens
acagttgtatgcttt

SEQ ID NO: 82908 - DNA, 15 bp, Homo sapiens
gacagttgtatgctt

SEQ ID NO: 82909 - DNA, 15 bp, Homo sapiens
ggacagttgtatgct

SEQ ID NO: 82910 - DNA, 15 bp, Homo sapiens
aggacagttgtatgc

SEQ ID NO: 82911 - DNA, 15 bp, Homo sapiens
caggacagttgtatg

SEQ ID NO: 82912 - DNA, 15 bp, Homo sapiens
ccaggacagttgtat

SEQ ID NO: 82913 - DNA, 15 bp, Homo sapiens
accaggacagttgta

SEQ ID NO: 82914 - DNA, 15 bp, Homo sapiens
aaccaggacagttgt

SEQ ID NO: 82915 - DNA, 15 bp, Homo sapiens
gaaccaggacagttg

SEQ ID NO: 82916 - DNA, 15 bp, Homo sapiens
ggaaccaggacagtt

SEQ ID NO: 82917 - DNA, 15 bp, Homo sapiens
tggaaccaggacagt

SEQ ID NO: 82918 - DNA, 15 bp, Homo sapiens
gtggaaccaggacag

SEQ ID NO: 82919 - DNA, 15 bp, Homo sapiens
agtggaaccaggaca

SEQ ID NO: 82920 - DNA, 15 bp, Homo sapiens
tagtggaaccaggac

SEQ ID NO: 82921 - DNA, 15 bp, Homo sapiens
atagtggaaccagga

SEQ ID NO: 82922 - DNA, 15 bp, Homo sapiens
tatagtggaaccagg

SEQ ID NO: 82923 - DNA, 15 bp, Homo sapiens
atatagtggaaccag

SEQ ID NO: 82924 - DNA, 15 bp, Homo sapiens
catatagtggaacca

SEQ ID NO: 82925 - DNA, 15 bp, Homo sapiens
tcatatagtggaacc

SEQ ID NO: 82926 - DNA, 15 bp, Homo sapiens
ttcatatagtggaac

SEQ ID NO: 82927 - DNA, 15 bp, Homo sapiens
tttcatatagtggaa

SEQ ID NO: 82928 - DNA, 15 bp, Homo sapiens
gtttcatatagtgga

SEQ ID NO: 82929 - DNA, 15 bp, Homo sapiens
tgtttcatatagtgg

SEQ ID NO: 82930 - DNA, 15 bp, Homo sapiens
ttgtttcatatagtg

SEQ ID NO: 82931 - DNA, 15 bp, Homo sapiens
cttgtttcatatagt

SEQ ID NO: 82932 - DNA, 15 bp, Homo sapiens
tcttgtttcatatag

SEQ ID NO: 82933 - DNA, 15 bp, Homo sapiens
ttcttgtttcatata

SEQ ID NO: 82934 - DNA, 15 bp, Homo sapiens
attcttgtttcatat

SEQ ID NO: 82935 - DNA, 15 bp, Homo sapiens
gattcttgtttcata

SEQ ID NO: 82936 - DNA, 15 bp, Homo sapiens
agattcttgtttcat

SEQ ID NO: 82937 - DNA, 15 bp, Homo sapiens
cagattcttgtttca

SEQ ID NO: 82938 - DNA, 15 bp, Homo sapiens
acagattcttgtttc

SEQ ID NO: 82939 - DNA, 15 bp, Homo sapiens
gacagattcttgttt

SEQ ID NO: 82940 - DNA, 15 bp, Homo sapiens
tgacagattcttgtt

SEQ ID NO: 82941 - DNA, 15 bp, Homo sapiens
atgacagattcttgt

SEQ ID NO: 82942 - DNA, 15 bp, Homo sapiens
aatgacagattcttg

SEQ ID NO: 82943 - DNA, 15 bp, Homo sapiens
aaatgacagattctt

SEQ ID NO: 82944 - DNA, 15 bp, Homo sapiens
gaaatgacagattct

SEQ ID NO: 82945 - DNA, 15 bp, Homo sapiens
tgaaatgacagattc

SEQ ID NO: 82946 - DNA, 15 bp, Homo sapiens
ttgaaatgacagatt

SEQ ID NO: 82947 - DNA, 15 bp, Homo sapiens
tttgaaatgacagat

SEQ ID NO: 82948 - DNA, 15 bp, Homo sapiens
ttttgaaatgacaga

SEQ ID NO: 82949 - DNA, 15 bp, Homo sapiens
tttttgaaatgacag

SEQ ID NO: 82950 - DNA, 15 bp, Homo sapiens
gtttttgaaatgaca

SEQ ID NO: 82951 - DNA, 15 bp, Homo sapiens
tgtttttgaaatgac

SEQ ID NO: 82952 - DNA, 15 bp, Homo sapiens
atgtttttgaaatga

SEQ ID NO: 82953 - DNA, 15 bp, Homo sapiens
aatgtttttgaaatg

SEQ ID NO: 82954 - DNA, 15 bp, Homo sapiens
gaatgtttttgaaat

SEQ ID NO: 82955 - DNA, 15 bp, Homo sapiens
tgaatgtttttgaaa

SEQ ID NO: 82956 - DNA, 15 bp, Homo sapiens
ttgaatgtttttgaa

SEQ ID NO: 82957 - DNA, 15 bp, Homo sapiens
gttgaatgtttttga

SEQ ID NO: 82958 - DNA, 15 bp, Homo sapiens
ggttgaatgtttttg

SEQ ID NO: 82959 - DNA, 15 bp, Homo sapiens
tggttgaatgttttt

SEQ ID NO: 82960 - DNA, 15 bp, Homo sapiens
gtggttgaatgtttt

SEQ ID NO: 82961 - DNA, 15 bp, Homo sapiens
tgtggttgaatgttt

SEQ ID NO: 82962 - DNA, 15 bp, Homo sapiens
atgtggttgaatgtt

SEQ ID NO: 82963 - DNA, 15 bp, Homo sapiens
gatgtggttgaatgt

SEQ ID NO: 82964 - DNA, 15 bp, Homo sapiens
tgatgtggttgaatg

SEQ ID NO: 82965 - DNA, 15 bp, Homo sapiens
ttgatgtggttgaat

SEQ ID NO: 82966 - DNA, 15 bp, Homo sapiens
cttgatgtggttgaa

SEQ ID NO: 82967 - DNA, 15 bp, Homo sapiens
tcttgatgtggttga

SEQ ID NO: 82968 - DNA, 15 bp, Homo sapiens
ttcttgatgtggttg

SEQ ID NO: 82969 - DNA, 15 bp, Homo sapiens
tttcttgatgtggtt

SEQ ID NO: 82970 - DNA, 15 bp, Homo sapiens
ttttcttgatgtggt

SEQ ID NO: 82971 - DNA, 15 bp, Homo sapiens
gttttcttgatgtgg

SEQ ID NO: 82972 - DNA, 15 bp, Homo sapiens
ggttttcttgatgtg

SEQ ID NO: 82973 - DNA, 15 bp, Homo sapiens
aggttttcttgatgt

SEQ ID NO: 82974 - DNA, 15 bp, Homo sapiens
aaggttttcttgatg

SEQ ID NO: 82975 - DNA, 15 bp, Homo sapiens
gaaggttttcttgat

SEQ ID NO: 82976 - DNA, 15 bp, Homo sapiens
ggaaggttttcttga

SEQ ID NO: 82977 - DNA, 15 bp, Homo sapiens
aggaaggttttcttg

SEQ ID NO: 82978 - DNA, 15 bp, Homo sapiens
aaggaaggttttctt

SEQ ID NO: 82979 - DNA, 15 bp, Homo sapiens
aaaggaaggttttct

SEQ ID NO: 82980 - DNA, 15 bp, Homo sapiens
aaaaggaaggttttc

SEQ ID NO: 82981 - DNA, 15 bp, Homo sapiens
taaaaggaaggtttt

SEQ ID NO: 82982 - DNA, 15 bp, Homo sapiens
ttaaaaggaaggttt

SEQ ID NO: 82983 - DNA, 15 bp, Homo sapiens
tttaaaaggaaggtt

SEQ ID NO: 82984 - DNA, 15 bp, Homo sapiens
ctttaaaaggaaggt

SEQ ID NO: 82985 - DNA, 15 bp, Homo sapiens
cctttaaaaggaagg

SEQ ID NO: 82986 - DNA, 15 bp, Homo sapiens
gcctttaaaaggaag

SEQ ID NO: 82987 - DNA, 15 bp, Homo sapiens
tgcctttaaaaggaa

SEQ ID NO: 82988 - DNA, 15 bp, Homo sapiens
gtgcctttaaaagga

SEQ ID NO: 82989 - DNA, 15 bp, Homo sapiens
ggtgcctttaaaagg

SEQ ID NO: 82990 - DNA, 15 bp, Homo sapiens
aggtgcctttaaaag

SEQ ID NO: 82991 - DNA, 15 bp, Homo sapiens
aaggtgcctttaaaa

SEQ ID NO: 82992 - DNA, 15 bp, Homo sapiens
caaggtgcctttaaa

SEQ ID NO: 82993 - DNA, 15 bp, Homo sapiens
ccaaggtgcctttaa

SEQ ID NO: 82994 - DNA, 15 bp, Homo sapiens
cccaaggtgccttta

SEQ ID NO: 82995 - DNA, 15 bp, Homo sapiens
tcccaaggtgccttt

SEQ ID NO: 82996 - DNA, 15 bp, Homo sapiens
atcccaaggtgcctt

SEQ ID NO: 82997 - DNA, 15 bp, Homo sapiens
aatcccaaggtgcct

SEQ ID NO: 82998 - DNA, 15 bp, Homo sapiens
aaatcccaaggtgcc

SEQ ID NO: 82999 - DNA, 15 bp, Homo sapiens
gaaatcccaaggtgc

SEQ ID NO: 83000 - DNA, 15 bp, Homo sapiens
agaaatcccaaggtg

SEQ ID NO: 83001 - DNA, 15 bp, Homo sapiens
cagaaatcccaaggt

SEQ ID NO: 83002 - DNA, 15 bp, Homo sapiens
gcagaaatcccaagg

SEQ ID NO: 83003 - DNA, 15 bp, Homo sapiens
tgcagaaatcccaag

SEQ ID NO: 83004 - DNA, 15 bp, Homo sapiens
gtgcagaaatcccaa

SEQ ID NO: 83005 - DNA, 15 bp, Homo sapiens
agtgcagaaatccca

SEQ ID NO: 83006 - DNA, 15 bp, Homo sapiens
aagtgcagaaatccc

SEQ ID NO: 83007 - DNA, 15 bp, Homo sapiens
aaagtgcagaaatcc

SEQ ID NO: 83008 - DNA, 15 bp, Homo sapiens
caaagtgcagaaatc

SEQ ID NO: 83009 - DNA, 15 bp, Homo sapiens
acaaagtgcagaaat

SEQ ID NO: 83010 - DNA, 15 bp, Homo sapiens
aacaaagtgcagaaa

SEQ ID NO: 83011 - DNA, 15 bp, Homo sapiens
caacaaagtgcagaa

SEQ ID NO: 83012 - DNA, 15 bp, Homo sapiens
ccaacaaagtgcaga

SEQ ID NO: 83013 - DNA, 15 bp, Homo sapiens
accaacaaagtgcag

SEQ ID NO: 83014 - DNA, 15 bp, Homo sapiens
caccaacaaagtgca

SEQ ID NO: 83015 - DNA, 15 bp, Homo sapiens
acaccaacaaagtgc

SEQ ID NO: 83016 - DNA, 15 bp, Homo sapiens
aacaccaacaaagtg

SEQ ID NO: 83017 - DNA, 15 bp, Homo sapiens
caacaccaacaaagt

SEQ ID NO: 83018 - DNA, 15 bp, Homo sapiens
acaacaccaacaaag

SEQ ID NO: 83019 - DNA, 15 bp, Homo sapiens
aacaacaccaacaaa

SEQ ID NO: 83020 - DNA, 15 bp, Homo sapiens
gaacaacaccaacaa

SEQ ID NO: 83021 - DNA, 15 bp, Homo sapiens
agaacaacaccaaca

SEQ ID NO: 83022 - DNA, 15 bp, Homo sapiens
tagaacaacaccaac

SEQ ID NO: 83023 - DNA, 15 bp, Homo sapiens
ttagaacaacaccaa

SEQ ID NO: 83024 - DNA, 15 bp, Homo sapiens
tttagaacaacacca

SEQ ID NO: 83025 - DNA, 15 bp, Homo sapiens
ctttagaacaacacc

SEQ ID NO: 83026 - DNA, 15 bp, Homo sapiens
cctttagaacaacac

SEQ ID NO: 83027 - DNA, 15 bp, Homo sapiens
acctttagaacaaca

SEQ ID NO: 83028 - DNA, 15 bp, Homo sapiens
tacctttagaacaac

SEQ ID NO: 83029 - DNA, 15 bp, Homo sapiens
ctacctttagaacaa

SEQ ID NO: 83030 - DNA, 15 bp, Homo sapiens
tctacctttagaaca

SEQ ID NO: 83031 - DNA, 15 bp, Homo sapiens
atctacctttagaac

SEQ ID NO: 83032 - DNA, 15 bp, Homo sapiens
aatctacctttagaa

SEQ ID NO: 83033 - DNA, 15 bp, Homo sapiens
taatctacctttaga

SEQ ID NO: 83034 - DNA, 15 bp, Homo sapiens
ctaatctacctttag

SEQ ID NO: 83035 - DNA, 15 bp, Homo sapiens
tctaatctaccttta

SEQ ID NO: 83036 - DNA, 15 bp, Homo sapiens
ttctaatctaccttt

SEQ ID NO: 83037 - DNA, 15 bp, Homo sapiens
cttctaatctacctt

SEQ ID NO: 83038 - DNA, 15 bp, Homo sapiens
acttctaatctacct

SEQ ID NO: 83039 - DNA, 15 bp, Homo sapiens
gacttctaatctacc

SEQ ID NO: 83040 - DNA, 15 bp, Homo sapiens
ggacttctaatctac

SEQ ID NO: 83041 - DNA, 15 bp, Homo sapiens
aggacttctaatcta

SEQ ID NO: 83042 - DNA, 15 bp, Homo sapiens
caggacttctaatct

SEQ ID NO: 83043 - DNA, 15 bp, Homo sapiens
tcaggacttctaatc

SEQ ID NO: 83044 - DNA, 15 bp, Homo sapiens
ttcaggacttctaat

SEQ ID NO: 83045 - DNA, 15 bp, Homo sapiens
tttcaggacttctaa

SEQ ID NO: 83046 - DNA, 15 bp, Homo sapiens
atttcaggacttcta

SEQ ID NO: 83047 - DNA, 15 bp, Homo sapiens
tatttcaggacttct

SEQ ID NO: 83048 - DNA, 15 bp, Homo sapiens
gtatttcaggacttc

SEQ ID NO: 83049 - DNA, 15 bp, Homo sapiens
ggtatttcaggactt

SEQ ID NO: 83050 - DNA, 15 bp, Homo sapiens
aggtatttcaggact

SEQ ID NO: 83051 - DNA, 15 bp, Homo sapiens
taggtatttcaggac

SEQ ID NO: 83052 - DNA, 15 bp, Homo sapiens
ttaggtatttcagga

SEQ ID NO: 83053 - DNA, 15 bp, Homo sapiens
tttaggtatttcagg

SEQ ID NO: 83054 - DNA, 15 bp, Homo sapiens
ctttaggtatttcag

SEQ ID NO: 83055 - DNA, 15 bp, Homo sapiens
actttaggtatttca

SEQ ID NO: 83056 - DNA, 15 bp, Homo sapiens
tactttaggtatttc

SEQ ID NO: 83057 - DNA, 15 bp, Homo sapiens
gtactttaggtattt

SEQ ID NO: 83058 - DNA, 15 bp, Homo sapiens
agtactttaggtatt

SEQ ID NO: 83059 - DNA, 15 bp, Homo sapiens
cagtactttaggtat

SEQ ID NO: 83060 - DNA, 15 bp, Homo sapiens
tcagtactttaggta

SEQ ID NO: 83061 - DNA, 15 bp, Homo sapiens
ttcagtactttaggt

SEQ ID NO: 83062 - DNA, 15 bp, Homo sapiens
cttcagtactttagg

SEQ ID NO: 83063 - DNA, 15 bp, Homo sapiens
tcttcagtactttag

SEQ ID NO: 83064 - DNA, 15 bp, Homo sapiens
gtcttcagtacttta

SEQ ID NO: 83065 - DNA, 15 bp, Homo sapiens
ggtcttcagtacttt

SEQ ID NO: 83066 - DNA, 15 bp, Homo sapiens
gggtcttcagtactt

SEQ ID NO: 83067 - DNA, 15 bp, Homo sapiens
agggtcttcagtact

SEQ ID NO: 83068 - DNA, 15 bp, Homo sapiens
aagggtcttcagtac

SEQ ID NO: 83069 - DNA, 15 bp, Homo sapiens
aaagggtcttcagta

SEQ ID NO: 83070 - DNA, 15 bp, Homo sapiens
caaagggtcttcagt

SEQ ID NO: 83071 - DNA, 15 bp, Homo sapiens
gcaaagggtcttcag

SEQ ID NO: 83072 - DNA, 15 bp, Homo sapiens
ggcaaagggtcttca

SEQ ID NO: 83073 - DNA, 15 bp, Homo sapiens
aggcaaagggtcttc

SEQ ID NO: 83074 - DNA, 15 bp, Homo sapiens
taggcaaagggtctt

SEQ ID NO: 83075 - DNA, 15 bp, Homo sapiens
ctaggcaaagggtct

SEQ ID NO: 83076 - DNA, 15 bp, Homo sapiens
tctaggcaaagggtc

SEQ ID NO: 83077 - DNA, 15 bp, Homo sapiens
ttctaggcaaagggt

SEQ ID NO: 83078 - DNA, 15 bp, Homo sapiens
tttctaggcaaaggg

SEQ ID NO: 83079 - DNA, 15 bp, Homo sapiens
ttttctaggcaaagg

SEQ ID NO: 83080 - DNA, 15 bp, Homo sapiens
attttctaggcaaag

SEQ ID NO: 83081 - DNA, 15 bp, Homo sapiens
tattttctaggcaaa

SEQ ID NO: 83082 - DNA, 15 bp, Homo sapiens
ttattttctaggcaa

SEQ ID NO: 83083 - DNA, 15 bp, Homo sapiens
gttattttctaggca

SEQ ID NO: 83084 - DNA, 15 bp, Homo sapiens
tgttattttctaggc

SEQ ID NO: 83085 - DNA, 15 bp, Homo sapiens
gtgttattttctagg

SEQ ID NO: 83086 - DNA, 15 bp, Homo sapiens
tgtgttattttctag

SEQ ID NO: 83087 - DNA, 15 bp, Homo sapiens
ttgtgttattttcta

SEQ ID NO: 83088 - DNA, 15 bp, Homo sapiens
tttgtgttattttct

SEQ ID NO: 83089 - DNA, 15 bp, Homo sapiens
atttgtgttattttc

SEQ ID NO: 83090 - DNA, 15 bp, Homo sapiens
catttgtgttatttt

SEQ ID NO: 83091 - DNA, 15 bp, Homo sapiens
ccatttgtgttattt

SEQ ID NO: 83092 - DNA, 15 bp, Homo sapiens
cccatttgtgttatt

SEQ ID NO: 83093 - DNA, 15 bp, Homo sapiens
tcccatttgtgttat

SEQ ID NO: 83094 - DNA, 15 bp, Homo sapiens
atcccatttgtgtta

SEQ ID NO: 83095 - DNA, 15 bp, Homo sapiens
gatcccatttgtgtt

SEQ ID NO: 83096 - DNA, 15 bp, Homo sapiens
ggatcccatttgtgt

SEQ ID NO: 83097 - DNA, 15 bp, Homo sapiens
aggatcccatttgtg

SEQ ID NO: 83098 - DNA, 15 bp, Homo sapiens
aaggatcccatttgt

SEQ ID NO: 83099 - DNA, 15 bp, Homo sapiens
aaaggatcccatttg

SEQ ID NO: 83100 - DNA, 15 bp, Homo sapiens
aaaaggatcccattt

SEQ ID NO: 83101 - DNA, 15 bp, Homo sapiens
gaaaaggatcccatt

SEQ ID NO: 83102 - DNA, 15 bp, Homo sapiens
ggaaaaggatcccat

SEQ ID NO: 83103 - DNA, 15 bp, Homo sapiens
aggaaaaggatccca

SEQ ID NO: 83104 - DNA, 15 bp, Homo sapiens
caggaaaaggatccc

SEQ ID NO: 83105 - DNA, 15 bp, Homo sapiens
gcaggaaaaggatcc

SEQ ID NO: 83106 - DNA, 15 bp, Homo sapiens
ggcaggaaaaggatc

SEQ ID NO: 83107 - DNA, 15 bp, Homo sapiens
aggcaggaaaaggat

SEQ ID NO: 83108 - DNA, 15 bp, Homo sapiens
aaggcaggaaaagga

SEQ ID NO: 83109 - DNA, 15 bp, Homo sapiens
gaaggcaggaaaagg

SEQ ID NO: 83110 - DNA, 15 bp, Homo sapiens
ggaaggcaggaaaag

SEQ ID NO: 83111 - DNA, 15 bp, Homo sapiens
gggaaggcaggaaaa

SEQ ID NO: 83112 - DNA, 15 bp, Homo sapiens
agggaaggcaggaaa

SEQ ID NO: 83113 - DNA, 15 bp, Homo sapiens
cagggaaggcaggaa

SEQ ID NO: 83114 - DNA, 15 bp, Homo sapiens
acagggaaggcagga

SEQ ID NO: 83115 - DNA, 15 bp, Homo sapiens
aacagggaaggcagg

SEQ ID NO: 83116 - DNA, 15 bp, Homo sapiens
aaacagggaaggcag

SEQ ID NO: 83117 - DNA, 15 bp, Homo sapiens
gaaacagggaaggca

SEQ ID NO: 83118 - DNA, 15 bp, Homo sapiens
ggaaacagggaaggc

SEQ ID NO: 83119 - DNA, 15 bp, Homo sapiens
tggaaacagggaagg

SEQ ID NO: 83120 - DNA, 15 bp, Homo sapiens
ttggaaacagggaag

SEQ ID NO: 83121 - DNA, 15 bp, Homo sapiens
attggaaacagggaa

SEQ ID NO: 83122 - DNA, 15 bp, Homo sapiens
aattggaaacaggga

SEQ ID NO: 83123 - DNA, 15 bp, Homo sapiens
taattggaaacaggg

SEQ ID NO: 83124 - DNA, 15 bp, Homo sapiens
gtaattggaaacagg

SEQ ID NO: 83125 - DNA, 15 bp, Homo sapiens
tgtaattggaaacag

SEQ ID NO: 83126 - DNA, 15 bp, Homo sapiens
gtgtaattggaaaca

SEQ ID NO: 83127 - DNA, 15 bp, Homo sapiens
tgtgtaattggaaac

SEQ ID NO: 83128 - DNA, 15 bp, Homo sapiens
atgtgtaattggaaa

SEQ ID NO: 83129 - DNA, 15 bp, Homo sapiens
aatgtgtaattggaa

SEQ ID NO: 83130 - DNA, 15 bp, Homo sapiens
aaatgtgtaattgga

SEQ ID NO: 83131 - DNA, 15 bp, Homo sapiens
gaaatgtgtaattgg

SEQ ID NO: 83132 - DNA, 15 bp, Homo sapiens
tgaaatgtgtaattg

SEQ ID NO: 83133 - DNA, 15 bp, Homo sapiens
gtgaaatgtgtaatt

SEQ ID NO: 83134 - DNA, 15 bp, Homo sapiens
agtgaaatgtgtaat

SEQ ID NO: 83135 - DNA, 15 bp, Homo sapiens
cagtgaaatgtgtaa

SEQ ID NO: 83136 - DNA, 15 bp, Homo sapiens
ccagtgaaatgtgta

SEQ ID NO: 83137 - DNA, 15 bp, Homo sapiens
accagtgaaatgtgt

SEQ ID NO: 83138 - DNA, 15 bp, Homo sapiens
caccagtgaaatgtg

SEQ ID NO: 83139 - DNA, 15 bp, Homo sapiens
tcaccagtgaaatgt

SEQ ID NO: 83140 - DNA, 15 bp, Homo sapiens
ttcaccagtgaaatg

SEQ ID NO: 83141 - DNA, 15 bp, Homo sapiens
attcaccagtgaaat

SEQ ID NO: 83142 - DNA, 15 bp, Homo sapiens
cattcaccagtgaaa

SEQ ID NO: 83143 - DNA, 15 bp, Homo sapiens
tcattcaccagtgaa

SEQ ID NO: 83144 - DNA, 15 bp, Homo sapiens
ttcattcaccagtga

SEQ ID NO: 83145 - DNA, 15 bp, Homo sapiens
gttcattcaccagtg

SEQ ID NO: 83146 - DNA, 15 bp, Homo sapiens
tgttcattcaccagt

SEQ ID NO: 83147 - DNA, 15 bp, Homo sapiens
ttgttcattcaccag

SEQ ID NO: 83148 - DNA, 15 bp, Homo sapiens
tttgttcattcacca

SEQ ID NO: 83149 - DNA, 15 bp, Homo sapiens
atttgttcattcacc

SEQ ID NO: 83150 - DNA, 15 bp, Homo sapiens
catttgttcattcac

SEQ ID NO: 83151 - DNA, 15 bp, Homo sapiens
gcatttgttcattca

SEQ ID NO: 83152 - DNA, 15 bp, Homo sapiens
agcatttgttcattc

SEQ ID NO: 83153 - DNA, 15 bp, Homo sapiens
aagcatttgttcatt

SEQ ID NO: 83154 - DNA, 15 bp, Homo sapiens
aaagcatttgttcat

SEQ ID NO: 83155 - DNA, 15 bp, Homo sapiens
taaagcatttgttca

SEQ ID NO: 83156 - DNA, 15 bp, Homo sapiens
ttaaagcatttgttc

SEQ ID NO: 83157 - DNA, 15 bp, Homo sapiens
tttaaagcatttgtt

SEQ ID NO: 83158 - DNA, 15 bp, Homo sapiens
ttttaaagcatttgt

SEQ ID NO: 83159 - DNA, 15 bp, Homo sapiens
tttttaaagcatttg

SEQ ID NO: 83160 - DNA, 15 bp, Homo sapiens
gtttttaaagcattt

SEQ ID NO: 83161 - DNA, 15 bp, Homo sapiens
ggtttttaaagcatt

SEQ ID NO: 83162 - DNA, 15 bp, Homo sapiens
aggtttttaaagcat

SEQ ID NO: 83163 - DNA, 15 bp, Homo sapiens
gaggtttttaaagca

SEQ ID NO: 83164 - DNA, 15 bp, Homo sapiens
tgaggtttttaaagc

SEQ ID NO: 83165 - DNA, 15 bp, Homo sapiens
ctgaggtttttaaag

SEQ ID NO: 83166 - DNA, 15 bp, Homo sapiens
tctgaggtttttaaa

SEQ ID NO: 83167 - DNA, 15 bp, Homo sapiens
ttctgaggtttttaa

SEQ ID NO: 83168 - DNA, 15 bp, Homo sapiens
tttctgaggttttta

SEQ ID NO: 83169 - DNA, 15 bp, Homo sapiens
ttttctgaggttttt

SEQ ID NO: 83170 - DNA, 15 bp, Homo sapiens
cttttctgaggtttt

SEQ ID NO: 83171 - DNA, 15 bp, Homo sapiens
tcttttctgaggttt

SEQ ID NO: 83172 - DNA, 15 bp, Homo sapiens
atcttttctgaggtt

SEQ ID NO: 83173 - DNA, 15 bp, Homo sapiens
catcttttctgaggt

SEQ ID NO: 83174 - DNA, 15 bp, Homo sapiens
acatcttttctgagg

SEQ ID NO: 83175 - DNA, 15 bp, Homo sapiens
gacatcttttctgag

SEQ ID NO: 83176 - DNA, 15 bp, Homo sapiens
agacatcttttctga

SEQ ID NO: 83177 - DNA, 15 bp, Homo sapiens
gagacatcttttctg

SEQ ID NO: 83178 - DNA, 15 bp, Homo sapiens
tgagacatcttttct

SEQ ID NO: 83179 - DNA, 15 bp, Homo sapiens
ttgagacatcttttc

SEQ ID NO: 83180 - DNA, 15 bp, Homo sapiens
tttgagacatctttt

SEQ ID NO: 83181 - DNA, 15 bp, Homo sapiens
ctttgagacatcttt

SEQ ID NO: 83182 - DNA, 15 bp, Homo sapiens
actttgagacatctt

SEQ ID NO: 83183 - DNA, 15 bp, Homo sapiens
tactttgagacatct

SEQ ID NO: 83184 - DNA, 15 bp, Homo sapiens
atactttgagacatc

SEQ ID NO: 83185 - DNA, 15 bp, Homo sapiens
aatactttgagacat

SEQ ID NO: 83186 - DNA, 15 bp, Homo sapiens
aaatactttgagaca

SEQ ID NO: 83187 - DNA, 15 bp, Homo sapiens
aaaatactttgagac

SEQ ID NO: 83188 - DNA, 15 bp, Homo sapiens
taaaatactttgaga

SEQ ID NO: 83189 - DNA, 15 bp, Homo sapiens
ttaaaatactttgag

SEQ ID NO: 83190 - DNA, 15 bp, Homo sapiens
attaaaatactttga

SEQ ID NO: 83191 - DNA, 15 bp, Homo sapiens
cattaaaatactttg

SEQ ID NO: 83192 - DNA, 15 bp, Homo sapiens
tcattaaaatacttt

SEQ ID NO: 83193 - DNA, 15 bp, Homo sapiens
atcattaaaatactt

SEQ ID NO: 83194 - DNA, 15 bp, Homo sapiens
gatcattaaaatact

SEQ ID NO: 83195 - DNA, 15 bp, Homo sapiens
ggatcattaaaatac

SEQ ID NO: 83196 - DNA, 15 bp, Homo sapiens
tggatcattaaaata

SEQ ID NO: 83197 - DNA, 15 bp, Homo sapiens
ctggatcattaaaat

SEQ ID NO: 83198 - DNA, 15 bp, Homo sapiens
cctggatcattaaaa

SEQ ID NO: 83199 - DNA, 15 bp, Homo sapiens
ttcctggatcattaa

SEQ ID NO: 83200 - DNA, 15 bp, Homo sapiens
tttcctggatcatta

SEQ ID NO: 83201 - DNA, 15 bp, Homo sapiens
ttttcctggatcatt

SEQ ID NO: 83202 - DNA, 15 bp, Homo sapiens
gttttcctggatcat

SEQ ID NO: 83203 - DNA, 15 bp, Homo sapiens
agttttcctggatca

SEQ ID NO: 83204 - DNA, 15 bp, Homo sapiens
cagttttcctggatc

SEQ ID NO: 83205 - DNA, 15 bp, Homo sapiens
tcagttttcctggat

SEQ ID NO: 83206 - DNA, 15 bp, Homo sapiens
ttcagttttcctgga

SEQ ID NO: 83207 - DNA, 15 bp, Homo sapiens
cttcagttttcctgg

SEQ ID NO: 83208 - DNA, 15 bp, Homo sapiens
gcttcagttttcctg

SEQ ID NO: 83209 - DNA, 15 bp, Homo sapiens
tgcttcagttttcct

SEQ ID NO: 83210 - DNA, 15 bp, Homo sapiens
ttgcttcagttttcc

SEQ ID NO: 83211 - DNA, 15 bp, Homo sapiens
tttgcttcagttttc

SEQ ID NO: 83212 - DNA, 15 bp, Homo sapiens
ctttgcttcagtttt

SEQ ID NO: 83213 - DNA, 15 bp, Homo sapiens
tctttgcttcagttt

SEQ ID NO: 83214 - DNA, 15 bp, Homo sapiens
ttctttgcttcagtt

SEQ ID NO: 83215 - DNA, 15 bp, Homo sapiens
cttctttgcttcagt

SEQ ID NO: 83216 - DNA, 15 bp, Homo sapiens
acttctttgcttcag

SEQ ID NO: 83217 - DNA, 15 bp, Homo sapiens
aacttctttgcttca

SEQ ID NO: 83218 - DNA, 15 bp, Homo sapiens
taacttctttgcttc

SEQ ID NO: 83219 - DNA, 15 bp, Homo sapiens
ctaacttctttgctt

SEQ ID NO: 83220 - DNA, 15 bp, Homo sapiens
actaacttctttgct

SEQ ID NO: 83221 - DNA, 15 bp, Homo sapiens
aactaacttctttgc

SEQ ID NO: 83222 - DNA, 15 bp, Homo sapiens
taactaacttctttg

SEQ ID NO: 83223 - DNA, 15 bp, Homo sapiens
gtaactaacttcttt

SEQ ID NO: 83224 - DNA, 15 bp, Homo sapiens
agtaactaacttctt

SEQ ID NO: 83225 - DNA, 15 bp, Homo sapiens
gagtaactaacttct

SEQ ID NO: 83226 - DNA, 15 bp, Homo sapiens
tgagtaactaacttc

SEQ ID NO: 83227 - DNA, 15 bp, Homo sapiens
ttgagtaactaactt

SEQ ID NO: 83228 - DNA, 15 bp, Homo sapiens
tttgagtaactaact

SEQ ID NO: 83229 - DNA, 15 bp, Homo sapiens
ctttgagtaactaac

SEQ ID NO: 83230 - DNA, 15 bp, Homo sapiens
tctttgagtaactaa

SEQ ID NO: 83231 - DNA, 15 bp, Homo sapiens
gtctttgagtaacta

SEQ ID NO: 83232 - DNA, 15 bp, Homo sapiens
ggtctttgagtaact

SEQ ID NO: 83233 - DNA, 15 bp, Homo sapiens
tggtctttgagtaac

SEQ ID NO: 83234 - DNA, 15 bp, Homo sapiens
gtggtctttgagtaa

SEQ ID NO: 83235 - DNA, 15 bp, Homo sapiens
cgtggtctttgagta

SEQ ID NO: 83236 - DNA, 15 bp, Homo sapiens
ccgtggtctttgagt

SEQ ID NO: 83237 - DNA, 15 bp, Homo sapiens
accgtggtctttgag

SEQ ID NO: 83238 - DNA, 15 bp, Homo sapiens
aaccgtggtctttga

SEQ ID NO: 83239 - DNA, 15 bp, Homo sapiens
gaaccgtggtctttg

SEQ ID NO: 83240 - DNA, 15 bp, Homo sapiens
ggaaccgtggtcttt

SEQ ID NO: 83241 - DNA, 15 bp, Homo sapiens
aggaaccgtggtctt

SEQ ID NO: 83242 - DNA, 15 bp, Homo sapiens
aaggaaccgtggtct

SEQ ID NO: 83243 - DNA, 15 bp, Homo sapiens
aaaggaaccgtggtc

SEQ ID NO: 83244 - DNA, 15 bp, Homo sapiens
taaaggaaccgtggt

SEQ ID NO: 83245 - DNA, 15 bp, Homo sapiens
ctaaaggaaccgtgg

SEQ ID NO: 83246 - DNA, 15 bp, Homo sapiens
tctaaaggaaccgtg

SEQ ID NO: 83247 - DNA, 15 bp, Homo sapiens
ttctaaaggaaccgt

SEQ ID NO: 83248 - DNA, 15 bp, Homo sapiens
gttctaaaggaaccg

SEQ ID NO: 83249 - DNA, 15 bp, Homo sapiens
tgttctaaaggaacc

SEQ ID NO: 83250 - DNA, 15 bp, Homo sapiens
ttgttctaaaggaac

SEQ ID NO: 83251 - DNA, 15 bp, Homo sapiens
attgttctaaaggaa

SEQ ID NO: 83252 - DNA, 15 bp, Homo sapiens
aattgttctaaagga

SEQ ID NO: 83253 - DNA, 15 bp, Homo sapiens
taattgttctaaagg

SEQ ID NO: 83254 - DNA, 15 bp, Homo sapiens
ttaattgttctaaag

SEQ ID NO: 83255 - DNA, 15 bp, Homo sapiens
tttaattgttctaaa

SEQ ID NO: 83256 - DNA, 15 bp, Homo sapiens
gtttaattgttctaa

SEQ ID NO: 83257 - DNA, 15 bp, Homo sapiens
tgtttaattgttcta

SEQ ID NO: 83258 - DNA, 15 bp, Homo sapiens
ttgtttaattgttct

SEQ ID NO: 83259 - DNA, 15 bp, Homo sapiens
tttgtttaattgttc

SEQ ID NO: 83260 - DNA, 15 bp, Homo sapiens
atttgtttaattgtt

SEQ ID NO: 83261 - DNA, 15 bp, Homo sapiens
gatttgtttaattgt

SEQ ID NO: 83262 - DNA, 15 bp, Homo sapiens
agatttgtttaattg

SEQ ID NO: 83263 - DNA, 15 bp, Homo sapiens
aagatttgtttaatt

SEQ ID NO: 83264 - DNA, 15 bp, Homo sapiens
caagatttgtttaat

SEQ ID NO: 83265 - DNA, 15 bp, Homo sapiens
acaagatttgtttaa

SEQ ID NO: 83266 - DNA, 15 bp, Homo sapiens
cacaagatttgttta

SEQ ID NO: 83267 - DNA, 15 bp, Homo sapiens
tcacaagatttgttt

SEQ ID NO: 83268 - DNA, 15 bp, Homo sapiens
ctcacaagatttgtt

SEQ ID NO: 83269 - DNA, 15 bp, Homo sapiens
actcacaagatttgt

SEQ ID NO: 83270 - DNA, 15 bp, Homo sapiens
aactcacaagatttg

SEQ ID NO: 83271 - DNA, 15 bp, Homo sapiens
aaactcacaagattt

SEQ ID NO: 83272 - DNA, 15 bp, Homo sapiens
aaaactcacaagatt

SEQ ID NO: 83273 - DNA, 15 bp, Homo sapiens
aaaaactcacaagat

SEQ ID NO: 83274 - DNA, 15 bp, Homo sapiens
aaaaaactcacaaga

SEQ ID NO: 83275 - DNA, 15 bp, Homo sapiens
aaaaaaactcacaag

SEQ ID NO: 83276 - DNA, 15 bp, Homo sapiens
gaaaaaaactcacaa

SEQ ID NO: 83277 - DNA, 15 bp, Homo sapiens
ggaaaaaaactcaca

SEQ ID NO: 83278 - DNA, 15 bp, Homo sapiens
aggaaaaaaactcac

SEQ ID NO: 83279 - DNA, 15 bp, Homo sapiens
aaggaaaaaaactca

SEQ ID NO: 83280 - DNA, 15 bp, Homo sapiens
aaaggaaaaaaactc

SEQ ID NO: 83281 - DNA, 15 bp, Homo sapiens
gaaaggaaaaaaact

SEQ ID NO: 83282 - DNA, 15 bp, Homo sapiens
ggaaaggaaaaaaac

SEQ ID NO: 83283 - DNA, 15 bp, Homo sapiens
tggaaaggaaaaaaa

SEQ ID NO: 83284 - DNA, 15 bp, Homo sapiens
ttggaaaggaaaaaa

SEQ ID NO: 83285 - DNA, 15 bp, Homo sapiens
attggaaaggaaaaa

SEQ ID NO: 83286 - DNA, 15 bp, Homo sapiens
tattggaaaggaaaa

SEQ ID NO: 83287 - DNA, 15 bp, Homo sapiens
gtattggaaaggaaa

SEQ ID NO: 83288 - DNA, 15 bp, Homo sapiens
agtattggaaaggaa

SEQ ID NO: 83289 - DNA, 15 bp, Homo sapiens
gagtattggaaagga

SEQ ID NO: 83290 - DNA, 15 bp, Homo sapiens
tgagtattggaaagg

SEQ ID NO: 83291 - DNA, 15 bp, Homo sapiens
gtgagtattggaaag

SEQ ID NO: 83292 - DNA, 15 bp, Homo sapiens
tgtgagtattggaaa

SEQ ID NO: 83293 - DNA, 15 bp, Homo sapiens
atgtgagtattggaa

SEQ ID NO: 83294 - DNA, 15 bp, Homo sapiens
aatgtgagtattgga

SEQ ID NO: 83295 - DNA, 15 bp, Homo sapiens
caatgtgagtattgg

SEQ ID NO: 83296 - DNA, 15 bp, Homo sapiens
tcaatgtgagtattg

SEQ ID NO: 83297 - DNA, 15 bp, Homo sapiens
gtcaatgtgagtatt

SEQ ID NO: 83298 - DNA, 15 bp, Homo sapiens
tgtcaatgtgagtat

SEQ ID NO: 83299 - DNA, 15 bp, Homo sapiens
ctgtcaatgtgagta

SEQ ID NO: 83300 - DNA, 15 bp, Homo sapiens
tctgtcaatgtgagt

SEQ ID NO: 83301 - DNA, 15 bp, Homo sapiens
ttctgtcaatgtgag

SEQ ID NO: 83302 - DNA, 15 bp, Homo sapiens
cttctgtcaatgtga

SEQ ID NO: 83303 - DNA, 15 bp, Homo sapiens
ccttctgtcaatgtg

SEQ ID NO: 83304 - DNA, 15 bp, Homo sapiens
tccttctgtcaatgt

SEQ ID NO: 83305 - DNA, 15 bp, Homo sapiens
atccttctgtcaatg

SEQ ID NO: 83306 - DNA, 15 bp, Homo sapiens
gatccttctgtcaat

SEQ ID NO: 83307 - DNA, 15 bp, Homo sapiens
ggatccttctgtcaa

SEQ ID NO: 83308 - DNA, 15 bp, Homo sapiens
aggatccttctgtca

SEQ ID NO: 83309 - DNA, 15 bp, Homo sapiens
caggatccttctgtc

SEQ ID NO: 83310 - DNA, 15 bp, Homo sapiens
gcaggatccttctgt

SEQ ID NO: 83311 - DNA, 15 bp, Homo sapiens
tgcaggatccttctg

SEQ ID NO: 83312 - DNA, 15 bp, Homo sapiens
atgcaggatccttct

SEQ ID NO: 83313 - DNA, 15 bp, Homo sapiens
catgcaggatccttc

SEQ ID NO: 83314 - DNA, 15 bp, Homo sapiens
ccatgcaggatcctt

SEQ ID NO: 83315 - DNA, 15 bp, Homo sapiens
tccatgcaggatcct

SEQ ID NO: 83316 - DNA, 15 bp, Homo sapiens
gtccatgcaggatcc

SEQ ID NO: 83317 - DNA, 15 bp, Homo sapiens
agtccatgcaggatc

SEQ ID NO: 83318 - DNA, 15 bp, Homo sapiens
cagtccatgcaggat

SEQ ID NO: 83319 - DNA, 15 bp, Homo sapiens
ccagtccatgcagga

SEQ ID NO: 83320 - DNA, 15 bp, Homo sapiens
gccagtccatgcagg

SEQ ID NO: 83321 - DNA, 15 bp, Homo sapiens
tgccagtccatgcag

SEQ ID NO: 83322 - DNA, 15 bp, Homo sapiens
gtgccagtccatgca

SEQ ID NO: 83323 - DNA, 15 bp, Homo sapiens
ggtgccagtccatgc

SEQ ID NO: 83324 - DNA, 15 bp, Homo sapiens
tggtgccagtccatg

SEQ ID NO: 83325 - DNA, 15 bp, Homo sapiens
gtggtgccagtccat

SEQ ID NO: 83326 - DNA, 15 bp, Homo sapiens
ggtggtgccagtcca

SEQ ID NO: 83327 - DNA, 15 bp, Homo sapiens
aggtggtgccagtcc

SEQ ID NO: 83328 - DNA, 15 bp, Homo sapiens
gaggtggtgccagtc

SEQ ID NO: 83329 - DNA, 15 bp, Homo sapiens
tgaggtggtgccagt

SEQ ID NO: 83330 - DNA, 15 bp, Homo sapiens
gtgaggtggtgccag

SEQ ID NO: 83331 - DNA, 15 bp, Homo sapiens
agtgaggtggtgcca

SEQ ID NO: 83332 - DNA, 15 bp, Homo sapiens
cagtgaggtggtgcc

SEQ ID NO: 83333 - DNA, 15 bp, Homo sapiens
gcagtgaggtggtgc

SEQ ID NO: 83334 - DNA, 15 bp, Homo sapiens
agcagtgaggtggtg

SEQ ID NO: 83335 - DNA, 15 bp, Homo sapiens
aagcagtgaggtggt

SEQ ID NO: 83336 - DNA, 15 bp, Homo sapiens
gaagcagtgaggtgg

SEQ ID NO: 83337 - DNA, 15 bp, Homo sapiens
tgaagcagtgaggtg

SEQ ID NO: 83338 - DNA, 15 bp, Homo sapiens
ttgaagcagtgaggt

SEQ ID NO: 83339 - DNA, 15 bp, Homo sapiens
gttgaagcagtgagg

SEQ ID NO: 83340 - DNA, 15 bp, Homo sapiens
agttgaagcagtgag

SEQ ID NO: 83341 - DNA, 15 bp, Homo sapiens
cagttgaagcagtga

SEQ ID NO: 83342 - DNA, 15 bp, Homo sapiens
acagttgaagcagtg

SEQ ID NO: 83343 - DNA, 15 bp, Homo sapiens
cacagttgaagcagt

SEQ ID NO: 83344 - DNA, 15 bp, Homo sapiens
gcacagttgaagcag

SEQ ID NO: 83345 - DNA, 15 bp, Homo sapiens
tgcacagttgaagca

SEQ ID NO: 83346 - DNA, 15 bp, Homo sapiens
atgcacagttgaagc

SEQ ID NO: 83347 - DNA, 15 bp, Homo sapiens
catgcacagttgaag

SEQ ID NO: 83348 - DNA, 15 bp, Homo sapiens
tcatgcacagttgaa

SEQ ID NO: 83349 - DNA, 15 bp, Homo sapiens
atcatgcacagttga

SEQ ID NO: 83350 - DNA, 15 bp, Homo sapiens
gatcatgcacagttg

SEQ ID NO: 83351 - DNA, 15 bp, Homo sapiens
cgatcatgcacagtt

SEQ ID NO: 83352 - DNA, 15 bp, Homo sapiens
gcgatcatgcacagt

SEQ ID NO: 83353 - DNA, 15 bp, Homo sapiens
tgcgatcatgcacag

SEQ ID NO: 83354 - DNA, 15 bp, Homo sapiens
atgcgatcatgcaca

SEQ ID NO: 83355 - DNA, 15 bp, Homo sapiens
tatgcgatcatgcac

SEQ ID NO: 83356 - DNA, 15 bp, Homo sapiens
ctatgcgatcatgca

SEQ ID NO: 83357 - DNA, 15 bp, Homo sapiens
actatgcgatcatgc

SEQ ID NO: 83358 - DNA, 15 bp, Homo sapiens
gactatgcgatcatg

SEQ ID NO: 83359 - DNA, 15 bp, Homo sapiens
agactatgcgatcat

SEQ ID NO: 83360 - DNA, 15 bp, Homo sapiens
gagactatgcgatca

SEQ ID NO: 83361 - DNA, 15 bp, Homo sapiens
agagactatgcgatc

SEQ ID NO: 83362 - DNA, 15 bp, Homo sapiens
cagagactatgcgat

SEQ ID NO: 83363 - DNA, 15 bp, Homo sapiens
acagagactatgcga

SEQ ID NO: 83364 - DNA, 15 bp, Homo sapiens
tacagagactatgcg

SEQ ID NO: 83365 - DNA, 15 bp, Homo sapiens
gtacagagactatgc

SEQ ID NO: 83366 - DNA, 15 bp, Homo sapiens
cgtacagagactatg

SEQ ID NO: 83367 - DNA, 15 bp, Homo sapiens
ccgtacagagactat

SEQ ID NO: 83368 - DNA, 15 bp, Homo sapiens
gccgtacagagacta

SEQ ID NO: 83369 - DNA, 15 bp, Homo sapiens
ggccgtacagagact

SEQ ID NO: 83370 - DNA, 15 bp, Homo sapiens
tggccgtacagagac

SEQ ID NO: 83371 - DNA, 15 bp, Homo sapiens
atggccgtacagaga

SEQ ID NO: 83372 - DNA, 15 bp, Homo sapiens
catggccgtacagag

SEQ ID NO: 83373 - DNA, 15 bp, Homo sapiens
tcatggccgtacaga

SEQ ID NO: 83374 - DNA, 15 bp, Homo sapiens
atcatggccgtacag

SEQ ID NO: 83375 - DNA, 15 bp, Homo sapiens
tatcatggccgtaca

SEQ ID NO: 83376 - DNA, 15 bp, Homo sapiens
ttatcatggccgtac

SEQ ID NO: 83377 - DNA, 15 bp, Homo sapiens
tttatcatggccgta

SEQ ID NO: 83378 - DNA, 15 bp, Homo sapiens
ttttatcatggccgt

SEQ ID NO: 83379 - DNA, 15 bp, Homo sapiens
tttttatcatggccg

SEQ ID NO: 83380 - DNA, 15 bp, Homo sapiens
atttttatcatggcc

SEQ ID NO: 83381 - DNA, 15 bp, Homo sapiens
catttttatcatggc

SEQ ID NO: 83382 - DNA, 15 bp, Homo sapiens
acatttttatcatgg

SEQ ID NO: 83383 - DNA, 15 bp, Homo sapiens
gacatttttatcatg

SEQ ID NO: 83384 - DNA, 15 bp, Homo sapiens
agacatttttatcat

SEQ ID NO: 83385 - DNA, 15 bp, Homo sapiens
aagacatttttatca

SEQ ID NO: 83386 - DNA, 15 bp, Homo sapiens
caagacatttttatc

SEQ ID NO: 83387 - DNA, 15 bp, Homo sapiens
acaagacatttttat

SEQ ID NO: 83388 - DNA, 15 bp, Homo sapiens
gacaagacattttta

SEQ ID NO: 83389 - DNA, 15 bp, Homo sapiens
tgacaagacattttt

SEQ ID NO: 83390 - DNA, 15 bp, Homo sapiens
atgacaagacatttt

SEQ ID NO: 83391 - DNA, 15 bp, Homo sapiens
tatgacaagacattt

SEQ ID NO: 83392 - DNA, 15 bp, Homo sapiens
ctatgacaagacatt

SEQ ID NO: 83393 - DNA, 15 bp, Homo sapiens
gctatgacaagacat

SEQ ID NO: 83394 - DNA, 15 bp, Homo sapiens
agctatgacaagaca

SEQ ID NO: 83395 - DNA, 15 bp, Homo sapiens
cagctatgacaagac

SEQ ID NO: 83396 - DNA, 15 bp, Homo sapiens
acagctatgacaaga

SEQ ID NO: 83397 - DNA, 15 bp, Homo sapiens
aacagctatgacaag

SEQ ID NO: 83398 - DNA, 15 bp, Homo sapiens
aaacagctatgacaa

SEQ ID NO: 83399 - DNA, 15 bp, Homo sapiens
gaaacagctatgaca

SEQ ID NO: 83400 - DNA, 15 bp, Homo sapiens
tgaaacagctatgac

SEQ ID NO: 83401 - DNA, 15 bp, Homo sapiens
atgaaacagctatga

SEQ ID NO: 83402 - DNA, 15 bp, Homo sapiens
tatgaaacagctatg

SEQ ID NO: 83403 - DNA, 15 bp, Homo sapiens
ctatgaaacagctat

SEQ ID NO: 83404 - DNA, 15 bp, Homo sapiens
gctatgaaacagcta

SEQ ID NO: 83405 - DNA, 15 bp, Homo sapiens
tgctatgaaacagct

SEQ ID NO: 83406 - DNA, 15 bp, Homo sapiens
ttgctatgaaacagc

SEQ ID NO: 83407 - DNA, 15 bp, Homo sapiens
gttgctatgaaacag

SEQ ID NO: 83408 - DNA, 15 bp, Homo sapiens
tgttgctatgaaaca

SEQ ID NO: 83409 - DNA, 15 bp, Homo sapiens
ttgttgctatgaaac

SEQ ID NO: 83410 - DNA, 15 bp, Homo sapiens
gttgttgctatgaaa

SEQ ID NO: 83411 - DNA, 15 bp, Homo sapiens
ggttgttgctatgaa

SEQ ID NO: 83412 - DNA, 15 bp, Homo sapiens
tggttgttgctatga

SEQ ID NO: 83413 - DNA, 15 bp, Homo sapiens
ctggttgttgctatg

SEQ ID NO: 83414 - DNA, 15 bp, Homo sapiens
cctggttgttgctat

SEQ ID NO: 83415 - DNA, 15 bp, Homo sapiens
ccctggttgttgcta

SEQ ID NO: 83416 - DNA, 15 bp, Homo sapiens
gccctggttgttgct

SEQ ID NO: 83417 - DNA, 15 bp, Homo sapiens
agccctggttgttgc

SEQ ID NO: 83418 - DNA, 15 bp, Homo sapiens
tagccctggttgttg

SEQ ID NO: 83419 - DNA, 15 bp, Homo sapiens
gtagccctggttgtt

SEQ ID NO: 83420 - DNA, 15 bp, Homo sapiens
tgtagccctggttgt

SEQ ID NO: 83421 - DNA, 15 bp, Homo sapiens
ttgtagccctggttg

SEQ ID NO: 83422 - DNA, 15 bp, Homo sapiens
cttgtagccctggtt

SEQ ID NO: 83423 - DNA, 15 bp, Homo sapiens
tcttgtagccctggt

SEQ ID NO: 83424 - DNA, 15 bp, Homo sapiens
ttcttgtagccctgg

SEQ ID NO: 83425 - DNA, 15 bp, Homo sapiens
tttcttgtagccctg

SEQ ID NO: 83426 - DNA, 15 bp, Homo sapiens
ttttcttgtagccct

SEQ ID NO: 83427 - DNA, 15 bp, Homo sapiens
tttttcttgtagccc

SEQ ID NO: 83428 - DNA, 15 bp, Homo sapiens
ttttttcttgtagcc

SEQ ID NO: 83429 - DNA, 15 bp, Homo sapiens
attttttcttgtagc

SEQ ID NO: 83430 - DNA, 15 bp, Homo sapiens
aattttttcttgtag

SEQ ID NO: 83431 - DNA, 15 bp, Homo sapiens
taattttttcttgta

SEQ ID NO: 83432 - DNA, 15 bp, Homo sapiens
ttaattttttcttgt

SEQ ID NO: 83433 - DNA, 15 bp, Homo sapiens
tttaattttttcttg

SEQ ID NO: 83434 - DNA, 15 bp, Homo sapiens
ttttaattttttctt

SEQ ID NO: 83435 - DNA, 15 bp, Homo sapiens
cttttaattttttct

SEQ ID NO: 83436 - DNA, 15 bp, Homo sapiens
tcttttaattttttc

SEQ ID NO: 83437 - DNA, 15 bp, Homo sapiens
ctcttttaatttttt

SEQ ID NO: 83438 - DNA, 15 bp, Homo sapiens
actcttttaattttt

SEQ ID NO: 83439 - DNA, 15 bp, Homo sapiens
cactcttttaatttt

SEQ ID NO: 83440 - DNA, 15 bp, Homo sapiens
acactcttttaattt

SEQ ID NO: 83441 - DNA, 15 bp, Homo sapiens
tacactcttttaatt

SEQ ID NO: 83442 - DNA, 15 bp, Homo sapiens
atacactcttttaat

SEQ ID NO: 83443 - DNA, 15 bp, Homo sapiens
gatacactcttttaa

SEQ ID NO: 83444 - DNA, 15 bp, Homo sapiens
tgatacactctttta

SEQ ID NO: 83445 - DNA, 15 bp, Homo sapiens
atgatacactctttt

SEQ ID NO: 83446 - DNA, 15 bp, Homo sapiens
tatgatacactcttt

SEQ ID NO: 83447 - DNA, 15 bp, Homo sapiens
ttatgatacactctt

SEQ ID NO: 83448 - DNA, 15 bp, Homo sapiens
cttatgatacactct

SEQ ID NO: 83449 - DNA, 15 bp, Homo sapiens
tcttatgatacactc

SEQ ID NO: 83450 - DNA, 15 bp, Homo sapiens
ttcttatgatacact

SEQ ID NO: 83451 - DNA, 15 bp, Homo sapiens
tttcttatgatacac

SEQ ID NO: 83452 - DNA, 15 bp, Homo sapiens
ctttcttatgataca

SEQ ID NO: 83453 - DNA, 15 bp, Homo sapiens
tctttcttatgatac

SEQ ID NO: 83454 - DNA, 15 bp, Homo sapiens
ttctttcttatgata

SEQ ID NO: 83455 - DNA, 15 bp, Homo sapiens
tttctttcttatgat

SEQ ID NO: 83456 - DNA, 15 bp, Homo sapiens
ttttctttcttatga

SEQ ID NO: 83457 - DNA, 15 bp, Homo sapiens
attttctttcttatg

SEQ ID NO: 83458 - DNA, 15 bp, Homo sapiens
cattttctttcttat

SEQ ID NO: 83459 - DNA, 15 bp, Homo sapiens
gcattttctttctta

SEQ ID NO: 83460 - DNA, 15 bp, Homo sapiens
agcattttctttctt

SEQ ID NO: 83461 - DNA, 15 bp, Homo sapiens
gagcattttctttct

SEQ ID NO: 83462 - DNA, 15 bp, Homo sapiens
agagcattttctttc

SEQ ID NO: 83463 - DNA, 15 bp, Homo sapiens
tagagcattttcttt

SEQ ID NO: 83464 - DNA, 15 bp, Homo sapiens
ttagagcattttctt

SEQ ID NO: 83465 - DNA, 15 bp, Homo sapiens
attagagcattttct

SEQ ID NO: 83466 - DNA, 15 bp, Homo sapiens
tattagagcattttc

SEQ ID NO: 83467 - DNA, 15 bp, Homo sapiens
atattagagcatttt

SEQ ID NO: 83468 - DNA, 15 bp, Homo sapiens
gatattagagcattt

SEQ ID NO: 83469 - DNA, 15 bp, Homo sapiens
tgatattagagcatt

SEQ ID NO: 83470 - DNA, 15 bp, Homo sapiens
atgatattagagcat

SEQ ID NO: 83471 - DNA, 15 bp, Homo sapiens
aatgatattagagca

SEQ ID NO: 83472 - DNA, 15 bp, Homo sapiens
taatgatattagagc

SEQ ID NO: 83473 - DNA, 15 bp, Homo sapiens
gtaatgatattagag

SEQ ID NO: 83474 - DNA, 15 bp, Homo sapiens
tgtaatgatattaga

SEQ ID NO: 83475 - DNA, 15 bp, Homo sapiens
ctgtaatgatattag

SEQ ID NO: 83476 - DNA, 15 bp, Homo sapiens
tctgtaatgatatta

SEQ ID NO: 83477 - DNA, 15 bp, Homo sapiens
atctgtaatgatatt

SEQ ID NO: 83478 - DNA, 15 bp, Homo sapiens
tatctgtaatgatat

SEQ ID NO: 83479 - DNA, 15 bp, Homo sapiens
atatctgtaatgata

SEQ ID NO: 83480 - DNA, 15 bp, Homo sapiens
tatatctgtaatgat

SEQ ID NO: 83481 - DNA, 15 bp, Homo sapiens
ctatatctgtaatga

SEQ ID NO: 83482 - DNA, 15 bp, Homo sapiens
actatatctgtaatg

SEQ ID NO: 83483 - DNA, 15 bp, Homo sapiens
aactatatctgtaat

SEQ ID NO: 83484 - DNA, 15 bp, Homo sapiens
caactatatctgtaa

SEQ ID NO: 83485 - DNA, 15 bp, Homo sapiens
gcaactatatctgta

SEQ ID NO: 83486 - DNA, 15 bp, Homo sapiens
ggcaactatatctgt

SEQ ID NO: 83487 - DNA, 15 bp, Homo sapiens
aggcaactatatctg

SEQ ID NO: 83488 - DNA, 15 bp, Homo sapiens
taggcaactatatct

SEQ ID NO: 83489 - DNA, 15 bp, Homo sapiens
ttaggcaactatatc

SEQ ID NO: 83490 - DNA, 15 bp, Homo sapiens
attaggcaactatat

SEQ ID NO: 83491 - DNA, 15 bp, Homo sapiens
tattaggcaactata

SEQ ID NO: 83492 - DNA, 15 bp, Homo sapiens
ttattaggcaactat

SEQ ID NO: 83493 - DNA, 15 bp, Homo sapiens
tttattaggcaacta

SEQ ID NO: 83494 - DNA, 15 bp, Homo sapiens
ctttattaggcaact

SEQ ID NO: 83495 - DNA, 15 bp, Homo sapiens
gctttattaggcaac

SEQ ID NO: 83496 - DNA, 15 bp, Homo sapiens
agctttattaggcaa

SEQ ID NO: 83497 - DNA, 15 bp, Homo sapiens
tagctttattaggca

SEQ ID NO: 83498 - DNA, 15 bp, Homo sapiens
ctagctttattaggc

SEQ ID NO: 83499 - DNA, 15 bp, Homo sapiens
gctagctttattagg

SEQ ID NO: 83500 - DNA, 15 bp, Homo sapiens
agctagctttattag

SEQ ID NO: 83501 - DNA, 15 bp, Homo sapiens
aagctagctttatta

SEQ ID NO: 83502 - DNA, 15 bp, Homo sapiens
aaagctagctttatt

SEQ ID NO: 83503 - DNA, 15 bp, Homo sapiens
caaagctagctttat

SEQ ID NO: 83504 - DNA, 15 bp, Homo sapiens
acaaagctagcttta

SEQ ID NO: 83505 - DNA, 15 bp, Homo sapiens
aacaaagctagcttt

SEQ ID NO: 83506 - DNA, 15 bp, Homo sapiens
gaacaaagctagctt

SEQ ID NO: 83507 - DNA, 15 bp, Homo sapiens
tgaacaaagctagct

SEQ ID NO: 83508 - DNA, 15 bp, Homo sapiens
ctgaacaaagctagc

SEQ ID NO: 83509 - DNA, 15 bp, Homo sapiens
tctgaacaaagctag

SEQ ID NO: 83510 - DNA, 15 bp, Homo sapiens
ctctgaacaaagcta

SEQ ID NO: 83511 - DNA, 15 bp, Homo sapiens
tctctgaacaaagct

SEQ ID NO: 83512 - DNA, 15 bp, Homo sapiens
gtctctgaacaaagc

SEQ ID NO: 83513 - DNA, 15 bp, Homo sapiens
agtctctgaacaaag

SEQ ID NO: 83514 - DNA, 15 bp, Homo sapiens
tagtctctgaacaaa

SEQ ID NO: 83515 - DNA, 15 bp, Homo sapiens
ttagtctctgaacaa

SEQ ID NO: 83516 - DNA, 15 bp, Homo sapiens
cttagtctctgaaca

SEQ ID NO: 83517 - DNA, 15 bp, Homo sapiens
gcttagtctctgaac

SEQ ID NO: 83518 - DNA, 15 bp, Homo sapiens
ggcttagtctctgaa

SEQ ID NO: 83519 - DNA, 15 bp, Homo sapiens
gggcttagtctctga

SEQ ID NO: 83520 - DNA, 15 bp, Homo sapiens
agggcttagtctctg

SEQ ID NO: 83521 - DNA, 15 bp, Homo sapiens
aagggcttagtctct

SEQ ID NO: 83522 - DNA, 15 bp, Homo sapiens
aaagggcttagtctc

SEQ ID NO: 83523 - DNA, 15 bp, Homo sapiens
taaagggcttagtct

SEQ ID NO: 83524 - DNA, 15 bp, Homo sapiens
ttaaagggcttagtc

SEQ ID NO: 83525 - DNA, 15 bp, Homo sapiens
gttaaagggcttagt

SEQ ID NO: 83526 - DNA, 15 bp, Homo sapiens
tgttaaagggcttag

SEQ ID NO: 83527 - DNA, 15 bp, Homo sapiens
gtgttaaagggctta

SEQ ID NO: 83528 - DNA, 15 bp, Homo sapiens
tgtgttaaagggctt

SEQ ID NO: 83529 - DNA, 15 bp, Homo sapiens
ctgtgttaaagggct

SEQ ID NO: 83530 - DNA, 15 bp, Homo sapiens
tctgtgttaaagggc

SEQ ID NO: 83531 - DNA, 15 bp, Homo sapiens
atctgtgttaaaggg

SEQ ID NO: 83532 - DNA, 15 bp, Homo sapiens
tatctgtgttaaagg

SEQ ID NO: 83533 - DNA, 15 bp, Homo sapiens
ctatctgtgttaaag

SEQ ID NO: 83534 - DNA, 15 bp, Homo sapiens
cctatctgtgttaaa

SEQ ID NO: 83535 - DNA, 15 bp, Homo sapiens
acctatctgtgttaa

SEQ ID NO: 83536 - DNA, 15 bp, Homo sapiens
aacctatctgtgtta

SEQ ID NO: 83537 - DNA, 15 bp, Homo sapiens
caacctatctgtgtt

SEQ ID NO: 83538 - DNA, 15 bp, Homo sapiens
ccaacctatctgtgt

SEQ ID NO: 83539 - DNA, 15 bp, Homo sapiens
tccaacctatctgtg

SEQ ID NO: 83540 - DNA, 15 bp, Homo sapiens
ctccaacctatctgt

SEQ ID NO: 83541 - DNA, 15 bp, Homo sapiens
tctccaacctatctg

SEQ ID NO: 83542 - DNA, 15 bp, Homo sapiens
gtctccaacctatct

SEQ ID NO: 83543 - DNA, 15 bp, Homo sapiens
agtctccaacctatc

SEQ ID NO: 83544 - DNA, 15 bp, Homo sapiens
aagtctccaacctat

SEQ ID NO: 83545 - DNA, 15 bp, Homo sapiens
aaagtctccaaccta

SEQ ID NO: 83546 - DNA, 15 bp, Homo sapiens
gaaagtctccaacct

SEQ ID NO: 83547 - DNA, 15 bp, Homo sapiens
tgaaagtctccaacc

SEQ ID NO: 83548 - DNA, 15 bp, Homo sapiens
ttgaaagtctccaac

SEQ ID NO: 83549 - DNA, 15 bp, Homo sapiens
gttgaaagtctccaa

SEQ ID NO: 83550 - DNA, 15 bp, Homo sapiens
tgttgaaagtctcca

SEQ ID NO: 83551 - DNA, 15 bp, Homo sapiens
ttgttgaaagtctcc

SEQ ID NO: 83552 - DNA, 15 bp, Homo sapiens
tttgttgaaagtctc

SEQ ID NO: 83553 - DNA, 15 bp, Homo sapiens
ttttgttgaaagtct

SEQ ID NO: 83554 - DNA, 15 bp, Homo sapiens
tttttgttgaaagtc

SEQ ID NO: 83555 - DNA, 15 bp, Homo sapiens
ttttttgttgaaagt

SEQ ID NO: 83556 - DNA, 15 bp, Homo sapiens
cttttttgttgaaag

SEQ ID NO: 83557 - DNA, 15 bp, Homo sapiens
tcttttttgttgaaa

SEQ ID NO: 83558 - DNA, 15 bp, Homo sapiens
ctcttttttgttgaa

SEQ ID NO: 83559 - DNA, 15 bp, Homo sapiens
gctcttttttgttga

SEQ ID NO: 83560 - DNA, 15 bp, Homo sapiens
ggctcttttttgttg

SEQ ID NO: 83561 - DNA, 15 bp, Homo sapiens
aggctcttttttgtt

SEQ ID NO: 83562 - DNA, 15 bp, Homo sapiens
taggctcttttttgt

SEQ ID NO: 83563 - DNA, 15 bp, Homo sapiens
ataggctcttttttg

SEQ ID NO: 83564 - DNA, 15 bp, Homo sapiens
aataggctctttttt

SEQ ID NO: 83565 - DNA, 15 bp, Homo sapiens
aaataggctcttttt

SEQ ID NO: 83566 - DNA, 15 bp, Homo sapiens
gaaataggctctttt

SEQ ID NO: 83567 - DNA, 15 bp, Homo sapiens
ggaaataggctcttt

SEQ ID NO: 83568 - DNA, 15 bp, Homo sapiens
tggaaataggctctt

SEQ ID NO: 83569 - DNA, 15 bp, Homo sapiens
ttggaaataggctct

SEQ ID NO: 83570 - DNA, 15 bp, Homo sapiens
attggaaataggctc

SEQ ID NO: 83571 - DNA, 15 bp, Homo sapiens
tattggaaataggct

SEQ ID NO: 83572 - DNA, 15 bp, Homo sapiens
gtattggaaataggc

SEQ ID NO: 83573 - DNA, 15 bp, Homo sapiens
ggtattggaaatagg

SEQ ID NO: 83574 - DNA, 15 bp, Homo sapiens
tggtattggaaatag

SEQ ID NO: 83575 - DNA, 15 bp, Homo sapiens
ttggtattggaaata

SEQ ID NO: 83576 - DNA, 15 bp, Homo sapiens
tttggtattggaaat

SEQ ID NO: 83577 - DNA, 15 bp, Homo sapiens
ctttggtattggaaa

SEQ ID NO: 83578 - DNA, 15 bp, Homo sapiens
tctttggtattggaa

SEQ ID NO: 83579 - DNA, 15 bp, Homo sapiens
ctctttggtattgga

SEQ ID NO: 83580 - DNA, 15 bp, Homo sapiens
gctctttggtattgg

SEQ ID NO: 83581 - DNA, 15 bp, Homo sapiens
tgctctttggtattg

SEQ ID NO: 83582 - DNA, 15 bp, Homo sapiens
ttgctctttggtatt

SEQ ID NO: 83583 - DNA, 15 bp, Homo sapiens
tttgctctttggtat

SEQ ID NO: 83584 - DNA, 15 bp, Homo sapiens
ttttgctctttggta

SEQ ID NO: 83585 - DNA, 15 bp, Homo sapiens
tttttgctctttggt

SEQ ID NO: 83586 - DNA, 15 bp, Homo sapiens
ttttttgctctttgg

SEQ ID NO: 83587 - DNA, 15 bp, Homo sapiens
attttttgctctttg

SEQ ID NO: 83588 - DNA, 15 bp, Homo sapiens
tattttttgctcttt

SEQ ID NO: 83589 - DNA, 15 bp, Homo sapiens
gtattttttgctctt

SEQ ID NO: 83590 - DNA, 15 bp, Homo sapiens
agtattttttgctct

SEQ ID NO: 83591 - DNA, 15 bp, Homo sapiens
gagtattttttgctc

SEQ ID NO: 83592 - DNA, 15 bp, Homo sapiens
agagtattttttgct

SEQ ID NO: 83593 - DNA, 15 bp, Homo sapiens
cagagtattttttgc

SEQ ID NO: 83594 - DNA, 15 bp, Homo sapiens
tcagagtattttttg

SEQ ID NO: 83595 - DNA, 15 bp, Homo sapiens
atcagagtatttttt

SEQ ID NO: 83596 - DNA, 15 bp, Homo sapiens
tatcagagtattttt

SEQ ID NO: 83597 - DNA, 15 bp, Homo sapiens
ttatcagagtatttt

SEQ ID NO: 83598 - DNA, 15 bp, Homo sapiens
attatcagagtattt

SEQ ID NO: 83599 - DNA, 15 bp, Homo sapiens
cattatcagagtatt

SEQ ID NO: 83600 - DNA, 15 bp, Homo sapiens
acattatcagagtat

SEQ ID NO: 83601 - DNA, 15 bp, Homo sapiens
cacattatcagagta

SEQ ID NO: 83602 - DNA, 15 bp, Homo sapiens
ccacattatcagagt

SEQ ID NO: 83603 - DNA, 15 bp, Homo sapiens
cccacattatcagag

SEQ ID NO: 83604 - DNA, 15 bp, Homo sapiens
gcccacattatcaga

SEQ ID NO: 83605 - DNA, 15 bp, Homo sapiens
agcccacattatcag

SEQ ID NO: 83606 - DNA, 15 bp, Homo sapiens
cagcccacattatca

SEQ ID NO: 83607 - DNA, 15 bp, Homo sapiens
acagcccacattatc

SEQ ID NO: 83608 - DNA, 15 bp, Homo sapiens
aacagcccacattat

SEQ ID NO: 83609 - DNA, 15 bp, Homo sapiens
aaacagcccacatta

SEQ ID NO: 83610 - DNA, 15 bp, Homo sapiens
gaaacagcccacatt

SEQ ID NO: 83611 - DNA, 15 bp, Homo sapiens
tgaaacagcccacat

SEQ ID NO: 83612 - DNA, 15 bp, Homo sapiens
ttgaaacagcccaca

SEQ ID NO: 83613 - DNA, 15 bp, Homo sapiens
tttgaaacagcccac

SEQ ID NO: 83614 - DNA, 15 bp, Homo sapiens
ctttgaaacagccca

SEQ ID NO: 83615 - DNA, 15 bp, Homo sapiens
cctttgaaacagccc

SEQ ID NO: 83616 - DNA, 15 bp, Homo sapiens
gcctttgaaacagcc

SEQ ID NO: 83617 - DNA, 15 bp, Homo sapiens
cgcctttgaaacagc

SEQ ID NO: 83618 - DNA, 15 bp, Homo sapiens
acgcctttgaaacag

SEQ ID NO: 83619 - DNA, 15 bp, Homo sapiens
cacgcctttgaaaca

SEQ ID NO: 83620 - DNA, 15 bp, Homo sapiens
ccacgcctttgaaac

SEQ ID NO: 83621 - DNA, 15 bp, Homo sapiens
gccacgcctttgaaa

SEQ ID NO: 83622 - DNA, 15 bp, Homo sapiens
agccacgcctttgaa

SEQ ID NO: 83623 - DNA, 15 bp, Homo sapiens
cagccacgcctttga

SEQ ID NO: 83624 - DNA, 15 bp, Homo sapiens
gcagccacgcctttg

SEQ ID NO: 83625 - DNA, 15 bp, Homo sapiens
agcagccacgccttt

SEQ ID NO: 83626 - DNA, 15 bp, Homo sapiens
cagcagccacgcctt

SEQ ID NO: 83627 - DNA, 15 bp, Homo sapiens
acagcagccacgcct

SEQ ID NO: 83628 - DNA, 15 bp, Homo sapiens
gacagcagccacgcc

SEQ ID NO: 83629 - DNA, 15 bp, Homo sapiens
tgacagcagccacgc

SEQ ID NO: 83630 - DNA, 15 bp, Homo sapiens
ctgacagcagccacg

SEQ ID NO: 83631 - DNA, 15 bp, Homo sapiens
cctgacagcagccac

SEQ ID NO: 83632 - DNA, 15 bp, Homo sapiens
acctgacagcagcca

SEQ ID NO: 83633 - DNA, 15 bp, Homo sapiens
gacctgacagcagcc

SEQ ID NO: 83634 - DNA, 15 bp, Homo sapiens
tgacctgacagcagc

SEQ ID NO: 83635 - DNA, 15 bp, Homo sapiens
atgacctgacagcag

SEQ ID NO: 83636 - DNA, 15 bp, Homo sapiens
tatgacctgacagca

SEQ ID NO: 83637 - DNA, 15 bp, Homo sapiens
atatgacctgacagc

SEQ ID NO: 83638 - DNA, 15 bp, Homo sapiens
tatatgacctgacag

SEQ ID NO: 83639 - DNA, 15 bp, Homo sapiens
gtatatgacctgaca

SEQ ID NO: 83640 - DNA, 15 bp, Homo sapiens
tgtatatgacctgac

SEQ ID NO: 83641 - DNA, 15 bp, Homo sapiens
atgtatatgacctga

SEQ ID NO: 83642 - DNA, 15 bp, Homo sapiens
aatgtatatgacctg

SEQ ID NO: 83643 - DNA, 15 bp, Homo sapiens
taatgtatatgacct

SEQ ID NO: 83644 - DNA, 15 bp, Homo sapiens
gtaatgtatatgacc

SEQ ID NO: 83645 - DNA, 15 bp, Homo sapiens
tgtaatgtatatgac

SEQ ID NO: 83646 - DNA, 15 bp, Homo sapiens
ctgtaatgtatatga

SEQ ID NO: 83647 - DNA, 15 bp, Homo sapiens
gctgtaatgtatatg

SEQ ID NO: 83648 - DNA, 15 bp, Homo sapiens
ggctgtaatgtatat

SEQ ID NO: 83649 - DNA, 15 bp, Homo sapiens
aggctgtaatgtata

SEQ ID NO: 83650 - DNA, 15 bp, Homo sapiens
gaggctgtaatgtat

SEQ ID NO: 83651 - DNA, 15 bp, Homo sapiens
agaggctgtaatgta

SEQ ID NO: 83652 - DNA, 15 bp, Homo sapiens
tagaggctgtaatgt

SEQ ID NO: 83653 - DNA, 15 bp, Homo sapiens
ttagaggctgtaatg

SEQ ID NO: 83654 - DNA, 15 bp, Homo sapiens
cttagaggctgtaat

SEQ ID NO: 83655 - DNA, 15 bp, Homo sapiens
tcttagaggctgtaa

SEQ ID NO: 83656 - DNA, 15 bp, Homo sapiens
atcttagaggctgta

SEQ ID NO: 83657 - DNA, 15 bp, Homo sapiens
catcttagaggctgt

SEQ ID NO: 83658 - DNA, 15 bp, Homo sapiens
ccatcttagaggctg

SEQ ID NO: 83659 - DNA, 15 bp, Homo sapiens
gccatcttagaggct

SEQ ID NO: 83660 - DNA, 15 bp, Homo sapiens
ggccatcttagaggc

SEQ ID NO: 83661 - DNA, 15 bp, Homo sapiens
gggccatcttagagg

SEQ ID NO: 83662 - DNA, 15 bp, Homo sapiens
ggggccatcttagag

SEQ ID NO: 83663 - DNA, 15 bp, Homo sapiens
gggggccatcttaga

SEQ ID NO: 83664 - DNA, 15 bp, Homo sapiens
cgggggccatcttag

SEQ ID NO: 83665 - DNA, 15 bp, Homo sapiens
acgggggccatctta

SEQ ID NO: 83666 - DNA, 15 bp, Homo sapiens
cacgggggccatctt

SEQ ID NO: 83667 - DNA, 15 bp, Homo sapiens
tcacgggggccatct

SEQ ID NO: 83668 - DNA, 15 bp, Homo sapiens
atcacgggggccatc

SEQ ID NO: 83669 - DNA, 15 bp, Homo sapiens
aatcacgggggccat

SEQ ID NO: 83670 - DNA, 15 bp, Homo sapiens
gaatcacgggggcca

SEQ ID NO: 83671 - DNA, 15 bp, Homo sapiens
ggaatcacgggggcc

SEQ ID NO: 83672 - DNA, 15 bp, Homo sapiens
aggaatcacgggggc

SEQ ID NO: 83673 - DNA, 15 bp, Homo sapiens
caggaatcacggggg

SEQ ID NO: 83674 - DNA, 15 bp, Homo sapiens
gcaggaatcacgggg

SEQ ID NO: 83675 - DNA, 15 bp, Homo sapiens
ggcaggaatcacggg

SEQ ID NO: 83676 - DNA, 15 bp, Homo sapiens
aggcaggaatcacgg

SEQ ID NO: 83677 - DNA, 15 bp, Homo sapiens
gaggcaggaatcacg

SEQ ID NO: 83678 - DNA, 15 bp, Homo sapiens
ggaggcaggaatcac

SEQ ID NO: 83679 - DNA, 15 bp, Homo sapiens
aggaggcaggaatca

SEQ ID NO: 83680 - DNA, 15 bp, Homo sapiens
caggaggcaggaatc

SEQ ID NO: 83681 - DNA, 15 bp, Homo sapiens
gcaggaggcaggaat

SEQ ID NO: 83682 - DNA, 15 bp, Homo sapiens
agcaggaggcaggaa

SEQ ID NO: 83683 - DNA, 15 bp, Homo sapiens
tagcaggaggcagga

SEQ ID NO: 83684 - DNA, 15 bp, Homo sapiens
atagcaggaggcagg

SEQ ID NO: 83685 - DNA, 15 bp, Homo sapiens
aatagcaggaggcag

SEQ ID NO: 83686 - DNA, 15 bp, Homo sapiens
aaatagcaggaggca

SEQ ID NO: 83687 - DNA, 15 bp, Homo sapiens
taaatagcaggaggc

SEQ ID NO: 83688 - DNA, 15 bp, Homo sapiens
ataaatagcaggagg

SEQ ID NO: 83689 - DNA, 15 bp, Homo sapiens
cataaatagcaggag

SEQ ID NO: 83690 - DNA, 15 bp, Homo sapiens
gcataaatagcagga

SEQ ID NO: 83691 - DNA, 15 bp, Homo sapiens
agcataaatagcagg

SEQ ID NO: 83692 - DNA, 15 bp, Homo sapiens
gagcataaatagcag

SEQ ID NO: 83693 - DNA, 15 bp, Homo sapiens
agagcataaatagca

SEQ ID NO: 83694 - DNA, 15 bp, Homo sapiens
cagagcataaatagc

SEQ ID NO: 83695 - DNA, 15 bp, Homo sapiens
gcagagcataaatag

SEQ ID NO: 83696 - DNA, 15 bp, Homo sapiens
agcagagcataaata

SEQ ID NO: 83697 - DNA, 15 bp, Homo sapiens
cagcagagcataaat

SEQ ID NO: 83698 - DNA, 15 bp, Homo sapiens
acagcagagcataaa

SEQ ID NO: 83699 - DNA, 15 bp, Homo sapiens
tacagcagagcataa

SEQ ID NO: 83700 - DNA, 15 bp, Homo sapiens
ttacagcagagcata

SEQ ID NO: 83701 - DNA, 15 bp, Homo sapiens
gttacagcagagcat

SEQ ID NO: 83702 - DNA, 15 bp, Homo sapiens
ggttacagcagagca

SEQ ID NO: 83703 - DNA, 15 bp, Homo sapiens
gggttacagcagagc

SEQ ID NO: 83704 - DNA, 15 bp, Homo sapiens
ggggttacagcagag

SEQ ID NO: 83705 - DNA, 15 bp, Homo sapiens
aggggttacagcaga

SEQ ID NO: 83706 - DNA, 15 bp, Homo sapiens
gaggggttacagcag

SEQ ID NO: 83707 - DNA, 15 bp, Homo sapiens
tgaggggttacagca

SEQ ID NO: 83708 - DNA, 15 bp, Homo sapiens
gtgaggggttacagc

SEQ ID NO: 83709 - DNA, 15 bp, Homo sapiens
agtgaggggttacag

SEQ ID NO: 83710 - DNA, 15 bp, Homo sapiens
aagtgaggggttaca

SEQ ID NO: 83711 - DNA, 15 bp, Homo sapiens
aaagtgaggggttac

SEQ ID NO: 83712 - DNA, 15 bp, Homo sapiens
aaaagtgaggggtta

SEQ ID NO: 83713 - DNA, 15 bp, Homo sapiens
caaaagtgaggggtt

SEQ ID NO: 83714 - DNA, 15 bp, Homo sapiens
tcaaaagtgaggggt

SEQ ID NO: 83715 - DNA, 15 bp, Homo sapiens
ctcaaaagtgagggg

SEQ ID NO: 83716 - DNA, 15 bp, Homo sapiens
gctcaaaagtgaggg

SEQ ID NO: 83717 - DNA, 15 bp, Homo sapiens
cgctcaaaagtgagg

SEQ ID NO: 83718 - DNA, 15 bp, Homo sapiens
gcgctcaaaagtgag

SEQ ID NO: 83719 - DNA, 15 bp, Homo sapiens
tgcgctcaaaagtga

SEQ ID NO: 83720 - DNA, 15 bp, Homo sapiens
ctgcgctcaaaagtg

SEQ ID NO: 83721 - DNA, 15 bp, Homo sapiens
cctgcgctcaaaagt

SEQ ID NO: 83722 - DNA, 15 bp, Homo sapiens
gcctgcgctcaaaag

SEQ ID NO: 83723 - DNA, 15 bp, Homo sapiens
agcctgcgctcaaaa

SEQ ID NO: 83724 - DNA, 15 bp, Homo sapiens
tagcctgcgctcaaa

SEQ ID NO: 83725 - DNA, 15 bp, Homo sapiens
ctagcctgcgctcaa

SEQ ID NO: 83726 - DNA, 15 bp, Homo sapiens
tctagcctgcgctca

SEQ ID NO: 83727 - DNA, 15 bp, Homo sapiens
gtctagcctgcgctc

SEQ ID NO: 83728 - DNA, 15 bp, Homo sapiens
tgtctagcctgcgct

SEQ ID NO: 83729 - DNA, 15 bp, Homo sapiens
ctgtctagcctgcgc

SEQ ID NO: 83730 - DNA, 15 bp, Homo sapiens
actgtctagcctgcg

SEQ ID NO: 83731 - DNA, 15 bp, Homo sapiens
cactgtctagcctgc

SEQ ID NO: 83732 - DNA, 15 bp, Homo sapiens
tcactgtctagcctg

SEQ ID NO: 83733 - DNA, 15 bp, Homo sapiens
gtcactgtctagcct

SEQ ID NO: 83734 - DNA, 15 bp, Homo sapiens
agtcactgtctagcc

SEQ ID NO: 83735 - DNA, 15 bp, Homo sapiens
aagtcactgtctagc

SEQ ID NO: 83736 - DNA, 15 bp, Homo sapiens
caagtcactgtctag

SEQ ID NO: 83737 - DNA, 15 bp, Homo sapiens
gcaagtcactgtcta

SEQ ID NO: 83738 - DNA, 15 bp, Homo sapiens
tgcaagtcactgtct

SEQ ID NO: 83739 - DNA, 15 bp, Homo sapiens
atgcaagtcactgtc

SEQ ID NO: 83740 - DNA, 15 bp, Homo sapiens
gatgcaagtcactgt

SEQ ID NO: 83741 - DNA, 15 bp, Homo sapiens
agatgcaagtcactg

SEQ ID NO: 83742 - DNA, 15 bp, Homo sapiens
tagatgcaagtcact

SEQ ID NO: 83743 - DNA, 15 bp, Homo sapiens
ttagatgcaagtcac

SEQ ID NO: 83744 - DNA, 15 bp, Homo sapiens
attagatgcaagtca

SEQ ID NO: 83745 - DNA, 15 bp, Homo sapiens
cattagatgcaagtc

SEQ ID NO: 83746 - DNA, 15 bp, Homo sapiens
ccattagatgcaagt

SEQ ID NO: 83747 - DNA, 15 bp, Homo sapiens
cccattagatgcaag

SEQ ID NO: 83748 - DNA, 15 bp, Homo sapiens
ccccattagatgcaa

SEQ ID NO: 83749 - DNA, 15 bp, Homo sapiens
tccccattagatgca

SEQ ID NO: 83750 - DNA, 15 bp, Homo sapiens
ctccccattagatgc

SEQ ID NO: 83751 - DNA, 15 bp, Homo sapiens
tctccccattagatg

SEQ ID NO: 83752 - DNA, 15 bp, Homo sapiens
ctctccccattagat

SEQ ID NO: 83753 - DNA, 15 bp, Homo sapiens
actctccccattaga

SEQ ID NO: 83754 - DNA, 15 bp, Homo sapiens
tactctccccattag

SEQ ID NO: 83755 - DNA, 15 bp, Homo sapiens
gtactctccccatta

SEQ ID NO: 83756 - DNA, 15 bp, Homo sapiens
tgtactctccccatt

SEQ ID NO: 83757 - DNA, 15 bp, Homo sapiens
ctgtactctccccat

SEQ ID NO: 83758 - DNA, 15 bp, Homo sapiens
gctgtactctcccca

SEQ ID NO: 83759 - DNA, 15 bp, Homo sapiens
tgctgtactctcccc

SEQ ID NO: 83760 - DNA, 15 bp, Homo sapiens
gtgctgtactctccc

SEQ ID NO: 83761 - DNA, 15 bp, Homo sapiens
tgtgctgtactctcc

SEQ ID NO: 83762 - DNA, 15 bp, Homo sapiens
ttgtgctgtactctc

SEQ ID NO: 83763 - DNA, 15 bp, Homo sapiens
cttgtgctgtactct

SEQ ID NO: 83764 - DNA, 15 bp, Homo sapiens
acttgtgctgtactc

SEQ ID NO: 83765 - DNA, 15 bp, Homo sapiens
cacttgtgctgtact

SEQ ID NO: 83766 - DNA, 15 bp, Homo sapiens
tcacttgtgctgtac

SEQ ID NO: 83767 - DNA, 15 bp, Homo sapiens
atcacttgtgctgta

SEQ ID NO: 83768 - DNA, 15 bp, Homo sapiens
catcacttgtgctgt

SEQ ID NO: 83769 - DNA, 15 bp, Homo sapiens
ccatcacttgtgctg

SEQ ID NO: 83770 - DNA, 15 bp, Homo sapiens
cccatcacttgtgct

SEQ ID NO: 83771 - DNA, 15 bp, Homo sapiens
tcccatcacttgtgc

SEQ ID NO: 83772 - DNA, 15 bp, Homo sapiens
atcccatcacttgtg

SEQ ID NO: 83773 - DNA, 15 bp, Homo sapiens
tatcccatcacttgt

SEQ ID NO: 83774 - DNA, 15 bp, Homo sapiens
atatcccatcacttg

SEQ ID NO: 83775 - DNA, 15 bp, Homo sapiens
gatatcccatcactt

SEQ ID NO: 83776 - DNA, 15 bp, Homo sapiens
tgatatcccatcact

SEQ ID NO: 83777 - DNA, 15 bp, Homo sapiens
gtgatatcccatcac

SEQ ID NO: 83778 - DNA, 15 bp, Homo sapiens
tgtgatatcccatca

SEQ ID NO: 83779 - DNA, 15 bp, Homo sapiens
atgtgatatcccatc

SEQ ID NO: 83780 - DNA, 15 bp, Homo sapiens
gatgtgatatcccat

SEQ ID NO: 83781 - DNA, 15 bp, Homo sapiens
agatgtgatatccca

SEQ ID NO: 83782 - DNA, 15 bp, Homo sapiens
cagatgtgatatccc

SEQ ID NO: 83783 - DNA, 15 bp, Homo sapiens
gcagatgtgatatcc

SEQ ID NO: 83784 - DNA, 15 bp, Homo sapiens
tgcagatgtgatatc

SEQ ID NO: 83785 - DNA, 15 bp, Homo sapiens
ttgcagatgtgatat

SEQ ID NO: 83786 - DNA, 15 bp, Homo sapiens
attgcagatgtgata

SEQ ID NO: 83787 - DNA, 15 bp, Homo sapiens
aattgcagatgtgat

SEQ ID NO: 83788 - DNA, 15 bp, Homo sapiens
taattgcagatgtga

SEQ ID NO: 83789 - DNA, 15 bp, Homo sapiens
ctaattgcagatgtg

SEQ ID NO: 83790 - DNA, 15 bp, Homo sapiens
cctaattgcagatgt

SEQ ID NO: 83791 - DNA, 15 bp, Homo sapiens
acctaattgcagatg

SEQ ID NO: 83792 - DNA, 15 bp, Homo sapiens
aacctaattgcagat

SEQ ID NO: 83793 - DNA, 15 bp, Homo sapiens
taacctaattgcaga

SEQ ID NO: 83794 - DNA, 15 bp, Homo sapiens
gtaacctaattgcag

SEQ ID NO: 83795 - DNA, 15 bp, Homo sapiens
tgtaacctaattgca

SEQ ID NO: 83796 - DNA, 15 bp, Homo sapiens
ttgtaacctaattgc

SEQ ID NO: 83797 - DNA, 15 bp, Homo sapiens
tttgtaacctaattg

SEQ ID NO: 83798 - DNA, 15 bp, Homo sapiens
ctttgtaacctaatt

SEQ ID NO: 83799 - DNA, 15 bp, Homo sapiens
tctttgtaacctaat

SEQ ID NO: 83800 - DNA, 15 bp, Homo sapiens
ctctttgtaacctaa

SEQ ID NO: 83801 - DNA, 15 bp, Homo sapiens
tctctttgtaaccta

SEQ ID NO: 83802 - DNA, 15 bp, Homo sapiens
ctctctttgtaacct

SEQ ID NO: 83803 - DNA, 15 bp, Homo sapiens
gctctctttgtaacc

SEQ ID NO: 83804 - DNA, 15 bp, Homo sapiens
agctctctttgtaac

SEQ ID NO: 83805 - DNA, 15 bp, Homo sapiens
gagctctctttgtaa

SEQ ID NO: 83806 - DNA, 15 bp, Homo sapiens
agagctctctttgta

SEQ ID NO: 83807 - DNA, 15 bp, Homo sapiens
gagagctctctttgt

SEQ ID NO: 83808 - DNA, 15 bp, Homo sapiens
agagagctctctttg

SEQ ID NO: 83809 - DNA, 15 bp, Homo sapiens
gagagagctctcttt

SEQ ID NO: 83810 - DNA, 15 bp, Homo sapiens
agagagagctctctt

SEQ ID NO: 83811 - DNA, 15 bp, Homo sapiens
aagagagagctctct

SEQ ID NO: 83812 - DNA, 15 bp, Homo sapiens
caagagagagctctc

SEQ ID NO: 83813 - DNA, 15 bp, Homo sapiens
acaagagagagctct

SEQ ID NO: 83814 - DNA, 15 bp, Homo sapiens
aacaagagagagctc

SEQ ID NO: 83815 - DNA, 15 bp, Homo sapiens
gaacaagagagagct

SEQ ID NO: 83816 - DNA, 15 bp, Homo sapiens
agaacaagagagagc

SEQ ID NO: 83817 - DNA, 15 bp, Homo sapiens
gagaacaagagagag

SEQ ID NO: 83818 - DNA, 15 bp, Homo sapiens
agagaacaagagaga

SEQ ID NO: 83819 - DNA, 15 bp, Homo sapiens
aagagaacaagagag

SEQ ID NO: 83820 - DNA, 15 bp, Homo sapiens
taagagaacaagaga

SEQ ID NO: 83821 - DNA, 15 bp, Homo sapiens
ataagagaacaagag

SEQ ID NO: 83822 - DNA, 15 bp, Homo sapiens
aataagagaacaaga

SEQ ID NO: 83823 - DNA, 15 bp, Homo sapiens
aaataagagaacaag

SEQ ID NO: 83824 - DNA, 15 bp, Homo sapiens
gaaataagagaacaa

SEQ ID NO: 83825 - DNA, 15 bp, Homo sapiens
agaaataagagaaca

SEQ ID NO: 83826 - DNA, 15 bp, Homo sapiens
gagaaataagagaac

SEQ ID NO: 83827 - DNA, 15 bp, Homo sapiens
tgagaaataagagaa

SEQ ID NO: 83828 - DNA, 15 bp, Homo sapiens
atgagaaataagaga

SEQ ID NO: 83829 - DNA, 15 bp, Homo sapiens
gatgagaaataagag

SEQ ID NO: 83830 - DNA, 15 bp, Homo sapiens
agatgagaaataaga

SEQ ID NO: 83831 - DNA, 15 bp, Homo sapiens
cagatgagaaataag

SEQ ID NO: 83832 - DNA, 15 bp, Homo sapiens
tcagatgagaaataa

SEQ ID NO: 83833 - DNA, 15 bp, Homo sapiens
ttcagatgagaaata

SEQ ID NO: 83834 - DNA, 15 bp, Homo sapiens
cttcagatgagaaat

SEQ ID NO: 83835 - DNA, 15 bp, Homo sapiens
tcttcagatgagaaa

SEQ ID NO: 83836 - DNA, 15 bp, Homo sapiens
ttcttcagatgagaa

SEQ ID NO: 83837 - DNA, 15 bp, Homo sapiens
tttcttcagatgaga

SEQ ID NO: 83838 - DNA, 15 bp, Homo sapiens
ctttcttcagatgag

SEQ ID NO: 83839 - DNA, 15 bp, Homo sapiens
gctttcttcagatga

SEQ ID NO: 83840 - DNA, 15 bp, Homo sapiens
ggctttcttcagatg

SEQ ID NO: 83841 - DNA, 15 bp, Homo sapiens
tggctttcttcagat

SEQ ID NO: 83842 - DNA, 15 bp, Homo sapiens
ctggctttcttcaga

SEQ ID NO: 83843 - DNA, 15 bp, Homo sapiens
gctggctttcttcag

SEQ ID NO: 83844 - DNA, 15 bp, Homo sapiens
agctggctttcttca

SEQ ID NO: 83845 - DNA, 15 bp, Homo sapiens
cagctggctttcttc

SEQ ID NO: 83846 - DNA, 15 bp, Homo sapiens
gcagctggctttctt

SEQ ID NO: 83847 - DNA, 15 bp, Homo sapiens
ggcagctggctttct

SEQ ID NO: 83848 - DNA, 15 bp, Homo sapiens
tggcagctggctttc

SEQ ID NO: 83849 - DNA, 15 bp, Homo sapiens
atggcagctggcttt

SEQ ID NO: 83850 - DNA, 15 bp, Homo sapiens
catggcagctggctt

SEQ ID NO: 83851 - DNA, 15 bp, Homo sapiens
gcatggcagctggct

SEQ ID NO: 83852 - DNA, 15 bp, Homo sapiens
agcatggcagctggc

SEQ ID NO: 83853 - DNA, 15 bp, Homo sapiens
cagcatggcagctgg

SEQ ID NO: 83854 - DNA, 15 bp, Homo sapiens
tcagcatggcagctg

SEQ ID NO: 83855 - DNA, 15 bp, Homo sapiens
ctcagcatggcagct

SEQ ID NO: 83856 - DNA, 15 bp, Homo sapiens
cctcagcatggcagc

SEQ ID NO: 83857 - DNA, 15 bp, Homo sapiens
ccctcagcatggcag

SEQ ID NO: 83858 - DNA, 15 bp, Homo sapiens
gccctcagcatggca

SEQ ID NO: 83859 - DNA, 15 bp, Homo sapiens
agccctcagcatggc

SEQ ID NO: 83860 - DNA, 15 bp, Homo sapiens
cagccctcagcatgg

SEQ ID NO: 83861 - DNA, 15 bp, Homo sapiens
gcagccctcagcatg

SEQ ID NO: 83862 - DNA, 15 bp, Homo sapiens
ggcagccctcagcat

SEQ ID NO: 83863 - DNA, 15 bp, Homo sapiens
gggcagccctcagca

SEQ ID NO: 83864 - DNA, 15 bp, Homo sapiens
cgggcagccctcagc

SEQ ID NO: 83865 - DNA, 15 bp, Homo sapiens
tcgggcagccctcag

SEQ ID NO: 83866 - DNA, 15 bp, Homo sapiens
atcgggcagccctca

SEQ ID NO: 83867 - DNA, 15 bp, Homo sapiens
catcgggcagccctc

SEQ ID NO: 83868 - DNA, 15 bp, Homo sapiens
ccatcgggcagccct

SEQ ID NO: 83869 - DNA, 15 bp, Homo sapiens
tccatcgggcagccc

SEQ ID NO: 83870 - DNA, 15 bp, Homo sapiens
ctccatcgggcagcc

SEQ ID NO: 83871 - DNA, 15 bp, Homo sapiens
tctccatcgggcagc

SEQ ID NO: 83872 - DNA, 15 bp, Homo sapiens
ctctccatcgggcag

SEQ ID NO: 83873 - DNA, 15 bp, Homo sapiens
cctctccatcgggca

SEQ ID NO: 83874 - DNA, 15 bp, Homo sapiens
gcctctccatcgggc

SEQ ID NO: 83875 - DNA, 15 bp, Homo sapiens
ggcctctccatcggg

SEQ ID NO: 83876 - DNA, 15 bp, Homo sapiens
gggcctctccatcgg

SEQ ID NO: 83877 - DNA, 15 bp, Homo sapiens
agggcctctccatcg

SEQ ID NO: 83878 - DNA, 15 bp, Homo sapiens
tagggcctctccatc

SEQ ID NO: 83879 - DNA, 15 bp, Homo sapiens
ctagggcctctccat

SEQ ID NO: 83880 - DNA, 15 bp, Homo sapiens
gctagggcctctcca

SEQ ID NO: 83881 - DNA, 15 bp, Homo sapiens
cgctagggcctctcc

SEQ ID NO: 83882 - DNA, 15 bp, Homo sapiens
ccgctagggcctctc

SEQ ID NO: 83883 - DNA, 15 bp, Homo sapiens
gccgctagggcctct

SEQ ID NO: 83884 - DNA, 15 bp, Homo sapiens
tgccgctagggcctc

SEQ ID NO: 83885 - DNA, 15 bp, Homo sapiens
ctgccgctagggcct

SEQ ID NO: 83886 - DNA, 15 bp, Homo sapiens
tctgccgctagggcc

SEQ ID NO: 83887 - DNA, 15 bp, Homo sapiens
ttctgccgctagggc

SEQ ID NO: 83888 - DNA, 15 bp, Homo sapiens
tttctgccgctaggg

SEQ ID NO: 83889 - DNA, 15 bp, Homo sapiens
ttttctgccgctagg

SEQ ID NO: 83890 - DNA, 15 bp, Homo sapiens
gttttctgccgctag

SEQ ID NO: 83891 - DNA, 15 bp, Homo sapiens
agttttctgccgcta

SEQ ID NO: 83892 - DNA, 15 bp, Homo sapiens
cagttttctgccgct

SEQ ID NO: 83893 - DNA, 15 bp, Homo sapiens
tcagttttctgccgc

SEQ ID NO: 83894 - DNA, 15 bp, Homo sapiens
ctcagttttctgccg

SEQ ID NO: 83895 - DNA, 15 bp, Homo sapiens
cctcagttttctgcc

SEQ ID NO: 83896 - DNA, 15 bp, Homo sapiens
ccctcagttttctgc

SEQ ID NO: 83897 - DNA, 15 bp, Homo sapiens
accctcagttttctg

SEQ ID NO: 83898 - DNA, 15 bp, Homo sapiens
caccctcagttttct

SEQ ID NO: 83899 - DNA, 15 bp, Homo sapiens
tcaccctcagttttc

SEQ ID NO: 83900 - DNA, 15 bp, Homo sapiens
gtcaccctcagtttt

SEQ ID NO: 83901 - DNA, 15 bp, Homo sapiens
ggtcaccctcagttt

SEQ ID NO: 83902 - DNA, 15 bp, Homo sapiens
gggtcaccctcagtt

SEQ ID NO: 83903 - DNA, 15 bp, Homo sapiens
agggtcaccctcagt

SEQ ID NO: 83904 - DNA, 15 bp, Homo sapiens
gagggtcaccctcag

SEQ ID NO: 83905 - DNA, 15 bp, Homo sapiens
agagggtcaccctca

SEQ ID NO: 83906 - DNA, 15 bp, Homo sapiens
cagagggtcaccctc

SEQ ID NO: 83907 - DNA, 15 bp, Homo sapiens
ccagagggtcaccct

SEQ ID NO: 83908 - DNA, 15 bp, Homo sapiens
tccagagggtcaccc

SEQ ID NO: 83909 - DNA, 15 bp, Homo sapiens
gtccagagggtcacc

SEQ ID NO: 83910 - DNA, 15 bp, Homo sapiens
tgtccagagggtcac

SEQ ID NO: 83911 - DNA, 15 bp, Homo sapiens
ttgtccagagggtca

SEQ ID NO: 83912 - DNA, 15 bp, Homo sapiens
gttgtccagagggtc

SEQ ID NO: 83913 - DNA, 15 bp, Homo sapiens
tgttgtccagagggt

SEQ ID NO: 83914 - DNA, 15 bp, Homo sapiens
ctgttgtccagaggg

SEQ ID NO: 83915 - DNA, 15 bp, Homo sapiens
gctgttgtccagagg

SEQ ID NO: 83916 - DNA, 15 bp, Homo sapiens
agctgttgtccagag

SEQ ID NO: 83917 - DNA, 15 bp, Homo sapiens
tagctgttgtccaga

SEQ ID NO: 83918 - DNA, 15 bp, Homo sapiens
ctagctgttgtccag

SEQ ID NO: 83919 - DNA, 15 bp, Homo sapiens
cctagctgttgtcca

SEQ ID NO: 83920 - DNA, 15 bp, Homo sapiens
ccctagctgttgtcc

SEQ ID NO: 83921 - DNA, 15 bp, Homo sapiens
tccctagctgttgtc

SEQ ID NO: 83922 - DNA, 15 bp, Homo sapiens
ctccctagctgttgt

SEQ ID NO: 83923 - DNA, 15 bp, Homo sapiens
cctccctagctgttg

SEQ ID NO: 83924 - DNA, 15 bp, Homo sapiens
tcctccctagctgtt

SEQ ID NO: 83925 - DNA, 15 bp, Homo sapiens
ttcctccctagctgt

SEQ ID NO: 83926 - DNA, 15 bp, Homo sapiens
gttcctccctagctg

SEQ ID NO: 83927 - DNA, 15 bp, Homo sapiens
agttcctccctagct

SEQ ID NO: 83928 - DNA, 15 bp, Homo sapiens
cagttcctccctagc

SEQ ID NO: 83929 - DNA, 15 bp, Homo sapiens
tcagttcctccctag

SEQ ID NO: 83930 - DNA, 15 bp, Homo sapiens
ttcagttcctcccta

SEQ ID NO: 83931 - DNA, 15 bp, Homo sapiens
attcagttcctccct

SEQ ID NO: 83932 - DNA, 15 bp, Homo sapiens
cattcagttcctccc

SEQ ID NO: 83933 - DNA, 15 bp, Homo sapiens
gcattcagttcctcc

SEQ ID NO: 83934 - DNA, 15 bp, Homo sapiens
agcattcagttcctc

SEQ ID NO: 83935 - DNA, 15 bp, Homo sapiens
tagcattcagttcct

SEQ ID NO: 83936 - DNA, 15 bp, Homo sapiens
gtagcattcagttcc

SEQ ID NO: 83937 - DNA, 15 bp, Homo sapiens
agtagcattcagttc

SEQ ID NO: 83938 - DNA, 15 bp, Homo sapiens
tagtagcattcagtt

SEQ ID NO: 83939 - DNA, 15 bp, Homo sapiens
ctagtagcattcagt

SEQ ID NO: 83940 - DNA, 15 bp, Homo sapiens
actagtagcattcag

SEQ ID NO: 83941 - DNA, 15 bp, Homo sapiens
aactagtagcattca

SEQ ID NO: 83942 - DNA, 15 bp, Homo sapiens
gaactagtagcattc

SEQ ID NO: 83943 - DNA, 15 bp, Homo sapiens
ggaactagtagcatt

SEQ ID NO: 83944 - DNA, 15 bp, Homo sapiens
gggaactagtagcat

SEQ ID NO: 83945 - DNA, 15 bp, Homo sapiens
cgggaactagtagca

SEQ ID NO: 83946 - DNA, 15 bp, Homo sapiens
acgggaactagtagc

SEQ ID NO: 83947 - DNA, 15 bp, Homo sapiens
cacgggaactagtag

SEQ ID NO: 83948 - DNA, 15 bp, Homo sapiens
ccacgggaactagta

SEQ ID NO: 83949 - DNA, 15 bp, Homo sapiens
cccacgggaactagt

SEQ ID NO: 83950 - DNA, 15 bp, Homo sapiens
acccacgggaactag

SEQ ID NO: 83951 - DNA, 15 bp, Homo sapiens
cacccacgggaacta

SEQ ID NO: 83952 - DNA, 15 bp, Homo sapiens
tcacccacgggaact

SEQ ID NO: 83953 - DNA, 15 bp, Homo sapiens
ctcacccacgggaac

SEQ ID NO: 83954 - DNA, 15 bp, Homo sapiens
gctcacccacgggaa

SEQ ID NO: 83955 - DNA, 15 bp, Homo sapiens
agctcacccacggga

SEQ ID NO: 83956 - DNA, 15 bp, Homo sapiens
cagctcacccacggg

SEQ ID NO: 83957 - DNA, 15 bp, Homo sapiens
tcagctcacccacgg

SEQ ID NO: 83958 - DNA, 15 bp, Homo sapiens
ctcagctcacccacg

SEQ ID NO: 83959 - DNA, 15 bp, Homo sapiens
tctcagctcacccac

SEQ ID NO: 83960 - DNA, 15 bp, Homo sapiens
ttctcagctcaccca

SEQ ID NO: 83961 - DNA, 15 bp, Homo sapiens
cttctcagctcaccc

SEQ ID NO: 83962 - DNA, 15 bp, Homo sapiens
acttctcagctcacc

SEQ ID NO: 83963 - DNA, 15 bp, Homo sapiens
cacttctcagctcac

SEQ ID NO: 83964 - DNA, 15 bp, Homo sapiens
ccacttctcagctca

SEQ ID NO: 83965 - DNA, 15 bp, Homo sapiens
tccacttctcagctc

SEQ ID NO: 83966 - DNA, 15 bp, Homo sapiens
gtccacttctcagct

SEQ ID NO: 83967 - DNA, 15 bp, Homo sapiens
ggtccacttctcagc

SEQ ID NO: 83968 - DNA, 15 bp, Homo sapiens
aggtccacttctcag

SEQ ID NO: 83969 - DNA, 15 bp, Homo sapiens
taggtccacttctca

SEQ ID NO: 83970 - DNA, 15 bp, Homo sapiens
gtaggtccacttctc

SEQ ID NO: 83971 - DNA, 15 bp, Homo sapiens
ggtaggtccacttct

SEQ ID NO: 83972 - DNA, 15 bp, Homo sapiens
gggtaggtccacttc

SEQ ID NO: 83973 - DNA, 15 bp, Homo sapiens
agggtaggtccactt

SEQ ID NO: 83974 - DNA, 15 bp, Homo sapiens
gagggtaggtccact

SEQ ID NO: 83975 - DNA, 15 bp, Homo sapiens
tgagggtaggtccac

SEQ ID NO: 83976 - DNA, 15 bp, Homo sapiens
ctgagggtaggtcca

SEQ ID NO: 83977 - DNA, 15 bp, Homo sapiens
cctgagggtaggtcc

SEQ ID NO: 83978 - DNA, 15 bp, Homo sapiens
tcctgagggtaggtc

SEQ ID NO: 83979 - DNA, 15 bp, Homo sapiens
ctcctgagggtaggt

SEQ ID NO: 83980 - DNA, 15 bp, Homo sapiens
tctcctgagggtagg

SEQ ID NO: 83981 - DNA, 15 bp, Homo sapiens
ctctcctgagggtag

SEQ ID NO: 83982 - DNA, 15 bp, Homo sapiens
gctctcctgagggta

SEQ ID NO: 83983 - DNA, 15 bp, Homo sapiens
tgctctcctgagggt

SEQ ID NO: 83984 - DNA, 15 bp, Homo sapiens
ctgctctcctgaggg

SEQ ID NO: 83985 - DNA, 15 bp, Homo sapiens
tctgctctcctgagg

SEQ ID NO: 83986 - DNA, 15 bp, Homo sapiens
atctgctctcctgag

SEQ ID NO: 83987 - DNA, 15 bp, Homo sapiens
catctgctctcctga

SEQ ID NO: 83988 - DNA, 15 bp, Homo sapiens
tcatctgctctcctg

SEQ ID NO: 83989 - DNA, 15 bp, Homo sapiens
ttcatctgctctcct

SEQ ID NO: 83990 - DNA, 15 bp, Homo sapiens
tttcatctgctctcc

SEQ ID NO: 83991 - DNA, 15 bp, Homo sapiens
ttttcatctgctctc

SEQ ID NO: 83992 - DNA, 15 bp, Homo sapiens
gttttcatctgctct

SEQ ID NO: 83993 - DNA, 15 bp, Homo sapiens
tgttttcatctgctc

SEQ ID NO: 83994 - DNA, 15 bp, Homo sapiens
ctgttttcatctgct

SEQ ID NO: 83995 - DNA, 15 bp, Homo sapiens
gctgttttcatctgc

SEQ ID NO: 83996 - DNA, 15 bp, Homo sapiens
ggctgttttcatctg

SEQ ID NO: 83997 - DNA, 15 bp, Homo sapiens
aggctgttttcatct

SEQ ID NO: 83998 - DNA, 15 bp, Homo sapiens
aaggctgttttcatc

SEQ ID NO: 83999 - DNA, 15 bp, Homo sapiens
caaggctgttttcat

SEQ ID NO: 84000 - DNA, 15 bp, Homo sapiens
ccaaggctgttttca

SEQ ID NO: 84001 - DNA, 15 bp, Homo sapiens
gccaaggctgttttc

SEQ ID NO: 84002 - DNA, 15 bp, Homo sapiens
agccaaggctgtttt

SEQ ID NO: 84003 - DNA, 15 bp, Homo sapiens
cagccaaggctgttt

SEQ ID NO: 84004 - DNA, 15 bp, Homo sapiens
tcagccaaggctgtt

SEQ ID NO: 84005 - DNA, 15 bp, Homo sapiens
atcagccaaggctgt

SEQ ID NO: 84006 - DNA, 15 bp, Homo sapiens
tatcagccaaggctg

SEQ ID NO: 84007 - DNA, 15 bp, Homo sapiens
gtatcagccaaggct

SEQ ID NO: 84008 - DNA, 15 bp, Homo sapiens
agtatcagccaaggc

SEQ ID NO: 84009 - DNA, 15 bp, Homo sapiens
cagtatcagccaagg

SEQ ID NO: 84010 - DNA, 15 bp, Homo sapiens
tcagtatcagccaag

SEQ ID NO: 84011 - DNA, 15 bp, Homo sapiens
gtcagtatcagccaa

SEQ ID NO: 84012 - DNA, 15 bp, Homo sapiens
agtcagtatcagcca

SEQ ID NO: 84013 - DNA, 15 bp, Homo sapiens
tagtcagtatcagcc

SEQ ID NO: 84014 - DNA, 15 bp, Homo sapiens
gtagtcagtatcagc

SEQ ID NO: 84015 - DNA, 15 bp, Homo sapiens
tgtagtcagtatcag

SEQ ID NO: 84016 - DNA, 15 bp, Homo sapiens
ttgtagtcagtatca

SEQ ID NO: 84017 - DNA, 15 bp, Homo sapiens
gttgtagtcagtatc

SEQ ID NO: 84018 - DNA, 15 bp, Homo sapiens
ggttgtagtcagtat

SEQ ID NO: 84019 - DNA, 15 bp, Homo sapiens
aggttgtagtcagta

SEQ ID NO: 84020 - DNA, 15 bp, Homo sapiens
gaggttgtagtcagt

SEQ ID NO: 84021 - DNA, 15 bp, Homo sapiens
tgaggttgtagtcag

SEQ ID NO: 84022 - DNA, 15 bp, Homo sapiens
atgaggttgtagtca

SEQ ID NO: 84023 - DNA, 15 bp, Homo sapiens
catgaggttgtagtc

SEQ ID NO: 84024 - DNA, 15 bp, Homo sapiens
tcatgaggttgtagt

SEQ ID NO: 84025 - DNA, 15 bp, Homo sapiens
ttcatgaggttgtag

SEQ ID NO: 84026 - DNA, 15 bp, Homo sapiens
tttcatgaggttgta

SEQ ID NO: 84027 - DNA, 15 bp, Homo sapiens
ttttcatgaggttgt

SEQ ID NO: 84028 - DNA, 15 bp, Homo sapiens
tttttcatgaggttg

SEQ ID NO: 84029 - DNA, 15 bp, Homo sapiens
gtttttcatgaggtt

SEQ ID NO: 84030 - DNA, 15 bp, Homo sapiens
ggtttttcatgaggt

SEQ ID NO: 84031 - DNA, 15 bp, Homo sapiens
aggtttttcatgagg

SEQ ID NO: 84032 - DNA, 15 bp, Homo sapiens
aaggtttttcatgag

SEQ ID NO: 84033 - DNA, 15 bp, Homo sapiens
aaaggtttttcatga

SEQ ID NO: 84034 - DNA, 15 bp, Homo sapiens
taaaggtttttcatg

SEQ ID NO: 84035 - DNA, 15 bp, Homo sapiens
ataaaggtttttcat

SEQ ID NO: 84036 - DNA, 15 bp, Homo sapiens
aataaaggtttttca

SEQ ID NO: 84037 - DNA, 15 bp, Homo sapiens
taataaaggtttttc

SEQ ID NO: 84038 - DNA, 15 bp, Homo sapiens
ttaataaaggttttt

SEQ ID NO: 84039 - DNA, 15 bp, Homo sapiens
cttaataaaggtttt

SEQ ID NO: 84040 - DNA, 15 bp, Homo sapiens
acttaataaaggttt

SEQ ID NO: 84041 - DNA, 15 bp, Homo sapiens
gacttaataaaggtt

SEQ ID NO: 84042 - DNA, 15 bp, Homo sapiens
tgacttaataaaggt

SEQ ID NO: 84043 - DNA, 15 bp, Homo sapiens
ctgacttaataaagg

SEQ ID NO: 84044 - DNA, 15 bp, Homo sapiens
tctgacttaataaag

SEQ ID NO: 84045 - DNA, 15 bp, Homo sapiens
ctctgacttaataaa

SEQ ID NO: 84046 - DNA, 15 bp, Homo sapiens
actctgacttaataa

SEQ ID NO: 84047 - DNA, 15 bp, Homo sapiens
aactctgacttaata

SEQ ID NO: 84048 - DNA, 15 bp, Homo sapiens
taactctgacttaat

SEQ ID NO: 84049 - DNA, 15 bp, Homo sapiens
gtaactctgacttaa

SEQ ID NO: 84050 - DNA, 15 bp, Homo sapiens
agtaactctgactta

SEQ ID NO: 84051 - DNA, 15 bp, Homo sapiens
gagtaactctgactt

SEQ ID NO: 84052 - DNA, 15 bp, Homo sapiens
tgagtaactctgact

SEQ ID NO: 84053 - DNA, 15 bp, Homo sapiens
ttgagtaactctgac

SEQ ID NO: 84054 - DNA, 15 bp, Homo sapiens
gttgagtaactctga

SEQ ID NO: 84055 - DNA, 15 bp, Homo sapiens
agttgagtaactctg

SEQ ID NO: 84056 - DNA, 15 bp, Homo sapiens
tagttgagtaactct

SEQ ID NO: 84057 - DNA, 15 bp, Homo sapiens
ttagttgagtaactc

SEQ ID NO: 84058 - DNA, 15 bp, Homo sapiens
cttagttgagtaact

SEQ ID NO: 84059 - DNA, 15 bp, Homo sapiens
gcttagttgagtaac

SEQ ID NO: 84060 - DNA, 15 bp, Homo sapiens
agcttagttgagtaa

SEQ ID NO: 84061 - DNA, 15 bp, Homo sapiens
cagcttagttgagta

SEQ ID NO: 84062 - DNA, 15 bp, Homo sapiens
gcagcttagttgagt

SEQ ID NO: 84063 - DNA, 15 bp, Homo sapiens
tgcagcttagttgag

SEQ ID NO: 84064 - DNA, 15 bp, Homo sapiens
atgcagcttagttga

SEQ ID NO: 84065 - DNA, 15 bp, Homo sapiens
gatgcagcttagttg

SEQ ID NO: 84066 - DNA, 15 bp, Homo sapiens
tgatgcagcttagtt

SEQ ID NO: 84067 - DNA, 15 bp, Homo sapiens
gtgatgcagcttagt

SEQ ID NO: 84068 - DNA, 15 bp, Homo sapiens
tgtgatgcagcttag

SEQ ID NO: 84069 - DNA, 15 bp, Homo sapiens
ttgtgatgcagctta

SEQ ID NO: 84070 - DNA, 15 bp, Homo sapiens
tttgtgatgcagctt

SEQ ID NO: 84071 - DNA, 15 bp, Homo sapiens
ttttgtgatgcagct

SEQ ID NO: 84072 - DNA, 15 bp, Homo sapiens
tttttgtgatgcagc

SEQ ID NO: 84073 - DNA, 15 bp, Homo sapiens
ttttttgtgatgcag

SEQ ID NO: 84074 - DNA, 15 bp, Homo sapiens
attttttgtgatgca

SEQ ID NO: 84075 - DNA, 15 bp, Homo sapiens
cattttttgtgatgc

SEQ ID NO: 84076 - DNA, 15 bp, Homo sapiens
tcattttttgtgatg

SEQ ID NO: 84077 - DNA, 15 bp, Homo sapiens
gtcattttttgtgat

SEQ ID NO: 84078 - DNA, 15 bp, Homo sapiens
ggtcattttttgtga

SEQ ID NO: 84079 - DNA, 15 bp, Homo sapiens
gggtcattttttgtg

SEQ ID NO: 84080 - DNA, 15 bp, Homo sapiens
tgggtcattttttgt

SEQ ID NO: 84081 - DNA, 15 bp, Homo sapiens
gtgggtcattttttg

SEQ ID NO: 84082 - DNA, 15 bp, Homo sapiens
tgtgggtcatttttt

SEQ ID NO: 84083 - DNA, 15 bp, Homo sapiens
ttgtgggtcattttt

SEQ ID NO: 84084 - DNA, 15 bp, Homo sapiens
tttgtgggtcatttt

SEQ ID NO: 84085 - DNA, 15 bp, Homo sapiens
ttttgtgggtcattt

SEQ ID NO: 84086 - DNA, 15 bp, Homo sapiens
attttgtgggtcatt

SEQ ID NO: 84087 - DNA, 15 bp, Homo sapiens
aattttgtgggtcat

SEQ ID NO: 84088 - DNA, 15 bp, Homo sapiens
caattttgtgggtca

SEQ ID NO: 84089 - DNA, 15 bp, Homo sapiens
acaattttgtgggtc

SEQ ID NO: 84090 - DNA, 15 bp, Homo sapiens
cacaattttgtgggt

SEQ ID NO: 84091 - DNA, 15 bp, Homo sapiens
tcacaattttgtggg

SEQ ID NO: 84092 - DNA, 15 bp, Homo sapiens
atcacaattttgtgg

SEQ ID NO: 84093 - DNA, 15 bp, Homo sapiens
tatcacaattttgtg

SEQ ID NO: 84094 - DNA, 15 bp, Homo sapiens
atatcacaattttgt

SEQ ID NO: 84095 - DNA, 15 bp, Homo sapiens
tatatcacaattttg

SEQ ID NO: 84096 - DNA, 15 bp, Homo sapiens
ttatatcacaatttt

SEQ ID NO: 84097 - DNA, 15 bp, Homo sapiens
tttatatcacaattt

SEQ ID NO: 84098 - DNA, 15 bp, Homo sapiens
ttttatatcacaatt

SEQ ID NO: 84099 - DNA, 15 bp, Homo sapiens
attttatatcacaat

SEQ ID NO: 84100 - DNA, 15 bp, Homo sapiens
aattttatatcacaa

SEQ ID NO: 84101 - DNA, 15 bp, Homo sapiens
taattttatatcaca

SEQ ID NO: 84102 - DNA, 15 bp, Homo sapiens
gtaattttatatcac

SEQ ID NO: 84103 - DNA, 15 bp, Homo sapiens
agtaattttatatca

SEQ ID NO: 84104 - DNA, 15 bp, Homo sapiens
cagtaattttatatc

SEQ ID NO: 84105 - DNA, 15 bp, Homo sapiens
tcagtaattttatat

SEQ ID NO: 84106 - DNA, 15 bp, Homo sapiens
gtcagtaattttata

SEQ ID NO: 84107 - DNA, 15 bp, Homo sapiens
ggtcagtaattttat

SEQ ID NO: 84108 - DNA, 15 bp, Homo sapiens
gggtcagtaatttta

SEQ ID NO: 84109 - DNA, 15 bp, Homo sapiens
tgggtcagtaatttt

SEQ ID NO: 84110 - DNA, 15 bp, Homo sapiens
gtgggtcagtaattt

SEQ ID NO: 84111 - DNA, 15 bp, Homo sapiens
tgtgggtcagtaatt

SEQ ID NO: 84112 - DNA, 15 bp, Homo sapiens
ttgtgggtcagtaat

SEQ ID NO: 84113 - DNA, 15 bp, Homo sapiens
tttgtgggtcagtaa

SEQ ID NO: 84114 - DNA, 15 bp, Homo sapiens
ttttgtgggtcagta

SEQ ID NO: 84115 - DNA, 15 bp, Homo sapiens
attttgtgggtcagt

SEQ ID NO: 84116 - DNA, 15 bp, Homo sapiens
tattttgtgggtcag

SEQ ID NO: 84117 - DNA, 15 bp, Homo sapiens
atattttgtgggtca

SEQ ID NO: 84118 - DNA, 15 bp, Homo sapiens
catattttgtgggtc

SEQ ID NO: 84119 - DNA, 15 bp, Homo sapiens
acatattttgtgggt

SEQ ID NO: 84120 - DNA, 15 bp, Homo sapiens
cacatattttgtggg

SEQ ID NO: 84121 - DNA, 15 bp, Homo sapiens
tcacatattttgtgg

SEQ ID NO: 84122 - DNA, 15 bp, Homo sapiens
atcacatattttgtg

SEQ ID NO: 84123 - DNA, 15 bp, Homo sapiens
tatcacatattttgt

SEQ ID NO: 84124 - DNA, 15 bp, Homo sapiens
atatcacatattttg

SEQ ID NO: 84125 - DNA, 15 bp, Homo sapiens
tatatcacatatttt

SEQ ID NO: 84126 - DNA, 15 bp, Homo sapiens
ttatatcacatattt

SEQ ID NO: 84127 - DNA, 15 bp, Homo sapiens
tttatatcacatatt

SEQ ID NO: 84128 - DNA, 15 bp, Homo sapiens
ttttatatcacatat

SEQ ID NO: 84129 - DNA, 15 bp, Homo sapiens
attttatatcacata

SEQ ID NO: 84130 - DNA, 15 bp, Homo sapiens
aattttatatcacat

SEQ ID NO: 84131 - DNA, 15 bp, Homo sapiens
cattttgtgggtcag

SEQ ID NO: 84132 - DNA, 15 bp, Homo sapiens
acattttgtgggtca

SEQ ID NO: 84133 - DNA, 15 bp, Homo sapiens
cacattttgtgggtc

SEQ ID NO: 84134 - DNA, 15 bp, Homo sapiens
acacattttgtgggt

SEQ ID NO: 84135 - DNA, 15 bp, Homo sapiens
cacacattttgtggg

SEQ ID NO: 84136 - DNA, 15 bp, Homo sapiens
tcacacattttgtgg

SEQ ID NO: 84137 - DNA, 15 bp, Homo sapiens
atcacacattttgtg

SEQ ID NO: 84138 - DNA, 15 bp, Homo sapiens
tatcacacattttgt

SEQ ID NO: 84139 - DNA, 15 bp, Homo sapiens
atatcacacattttg

SEQ ID NO: 84140 - DNA, 15 bp, Homo sapiens
tatatcacacatttt

SEQ ID NO: 84141 - DNA, 15 bp, Homo sapiens
ttatatcacacattt

SEQ ID NO: 84142 - DNA, 15 bp, Homo sapiens
tttatatcacacatt

SEQ ID NO: 84143 - DNA, 15 bp, Homo sapiens
ttttatatcacacat

SEQ ID NO: 84144 - DNA, 15 bp, Homo sapiens
tttttatatcacaca

SEQ ID NO: 84145 - DNA, 15 bp, Homo sapiens
ttttttatatcacac

SEQ ID NO: 84146 - DNA, 15 bp, Homo sapiens
cttttttatatcaca

SEQ ID NO: 84147 - DNA, 15 bp, Homo sapiens
acttttttatatcac

SEQ ID NO: 84148 - DNA, 15 bp, Homo sapiens
tacttttttatatca

SEQ ID NO: 84149 - DNA, 15 bp, Homo sapiens
atacttttttatatc

SEQ ID NO: 84150 - DNA, 15 bp, Homo sapiens
catacttttttatat

SEQ ID NO: 84151 - DNA, 15 bp, Homo sapiens
acatacttttttata

SEQ ID NO: 84152 - DNA, 15 bp, Homo sapiens
cacatacttttttat

SEQ ID NO: 84153 - DNA, 15 bp, Homo sapiens
acacatactttttta

SEQ ID NO: 84154 - DNA, 15 bp, Homo sapiens
aacacatactttttt

SEQ ID NO: 84155 - DNA, 15 bp, Homo sapiens
aaacacatacttttt

SEQ ID NO: 84156 - DNA, 15 bp, Homo sapiens
aaaacacatactttt

SEQ ID NO: 84157 - DNA, 15 bp, Homo sapiens
taaaacacatacttt

SEQ ID NO: 84158 - DNA, 15 bp, Homo sapiens
ttaaaacacatactt

SEQ ID NO: 84159 - DNA, 15 bp, Homo sapiens
cttaaaacacatact

SEQ ID NO: 84160 - DNA, 15 bp, Homo sapiens
gcttaaaacacatac

SEQ ID NO: 84161 - DNA, 15 bp, Homo sapiens
ggcttaaaacacata

SEQ ID NO: 84162 - DNA, 15 bp, Homo sapiens
tggcttaaaacacat

SEQ ID NO: 84163 - DNA, 15 bp, Homo sapiens
gtggcttaaaacaca

SEQ ID NO: 84164 - DNA, 15 bp, Homo sapiens
agtggcttaaaacac

SEQ ID NO: 84165 - DNA, 15 bp, Homo sapiens
tagtggcttaaaaca

SEQ ID NO: 84166 - DNA, 15 bp, Homo sapiens
gtagtggcttaaaac

SEQ ID NO: 84167 - DNA, 15 bp, Homo sapiens
cgtagtggcttaaaa

SEQ ID NO: 84168 - DNA, 15 bp, Homo sapiens
acgtagtggcttaaa

SEQ ID NO: 84169 - DNA, 15 bp, Homo sapiens
aacgtagtggcttaa

SEQ ID NO: 84170 - DNA, 15 bp, Homo sapiens
aaacgtagtggctta

SEQ ID NO: 84171 - DNA, 15 bp, Homo sapiens
aaaacgtagtggctt

SEQ ID NO: 84172 - DNA, 15 bp, Homo sapiens
caaaacgtagtggct

SEQ ID NO: 84173 - DNA, 15 bp, Homo sapiens
ccaaaacgtagtggc

SEQ ID NO: 84174 - DNA, 15 bp, Homo sapiens
cccaaaacgtagtgg

SEQ ID NO: 84175 - DNA, 15 bp, Homo sapiens
ccccaaaacgtagtg

SEQ ID NO: 84176 - DNA, 15 bp, Homo sapiens
accccaaaacgtagt

SEQ ID NO: 84177 - DNA, 15 bp, Homo sapiens
taccccaaaacgtag

SEQ ID NO: 84178 - DNA, 15 bp, Homo sapiens
ttaccccaaaacgta

SEQ ID NO: 84179 - DNA, 15 bp, Homo sapiens
attaccccaaaacgt

SEQ ID NO: 84180 - DNA, 15 bp, Homo sapiens
aattaccccaaaacg

SEQ ID NO: 84181 - DNA, 15 bp, Homo sapiens
aaattaccccaaaac

SEQ ID NO: 84182 - DNA, 15 bp, Homo sapiens
taaattaccccaaaa

SEQ ID NO: 84183 - DNA, 15 bp, Homo sapiens
ataaattaccccaaa

SEQ ID NO: 84184 - DNA, 15 bp, Homo sapiens
aataaattaccccaa

SEQ ID NO: 84185 - DNA, 15 bp, Homo sapiens
taataaattacccca

SEQ ID NO: 84186 - DNA, 15 bp, Homo sapiens
gtaataaattacccc

SEQ ID NO: 84187 - DNA, 15 bp, Homo sapiens
tgtaataaattaccc

SEQ ID NO: 84188 - DNA, 15 bp, Homo sapiens
gtgtaataaattacc

SEQ ID NO: 84189 - DNA, 15 bp, Homo sapiens
tgtgtaataaattac

SEQ ID NO: 84190 - DNA, 15 bp, Homo sapiens
ctgtgtaataaatta

SEQ ID NO: 84191 - DNA, 15 bp, Homo sapiens
tctgtgtaataaatt

SEQ ID NO: 84192 - DNA, 15 bp, Homo sapiens
ttctgtgtaataaat

SEQ ID NO: 84193 - DNA, 15 bp, Homo sapiens
tttctgtgtaataaa

SEQ ID NO: 84194 - DNA, 15 bp, Homo sapiens
atttctgtgtaataa

SEQ ID NO: 84195 - DNA, 15 bp, Homo sapiens
tatttctgtgtaata

SEQ ID NO: 84196 - DNA, 15 bp, Homo sapiens
ctatttctgtgtaat

SEQ ID NO: 84197 - DNA, 15 bp, Homo sapiens
cctatttctgtgtaa

SEQ ID NO: 84198 - DNA, 15 bp, Homo sapiens
acctatttctgtgta

SEQ ID NO: 84199 - DNA, 15 bp, Homo sapiens
tacctatttctgtgt

SEQ ID NO: 84200 - DNA, 15 bp, Homo sapiens
ttacctatttctgtg

SEQ ID NO: 84201 - DNA, 15 bp, Homo sapiens
attacctatttctgt

SEQ ID NO: 84202 - DNA, 15 bp, Homo sapiens
tattacctatttctg

SEQ ID NO: 84203 - DNA, 15 bp, Homo sapiens
gtattacctatttct

SEQ ID NO: 84204 - DNA, 15 bp, Homo sapiens
tgtattacctatttc

SEQ ID NO: 84205 - DNA, 15 bp, Homo sapiens
ctgtattacctattt

SEQ ID NO: 84206 - DNA, 15 bp, Homo sapiens
tctgtattacctatt

SEQ ID NO: 84207 - DNA, 15 bp, Homo sapiens
ctctgtattacctat

SEQ ID NO: 84208 - DNA, 15 bp, Homo sapiens
actctgtattaccta

SEQ ID NO: 84209 - DNA, 15 bp, Homo sapiens
gactctgtattacct

SEQ ID NO: 84210 - DNA, 15 bp, Homo sapiens
ggactctgtattacc

SEQ ID NO: 84211 - DNA, 15 bp, Homo sapiens
aggactctgtattac

SEQ ID NO: 84212 - DNA, 15 bp, Homo sapiens
aaggactctgtatta

SEQ ID NO: 84213 - DNA, 15 bp, Homo sapiens
caaggactctgtatt

SEQ ID NO: 84214 - DNA, 15 bp, Homo sapiens
tcaaggactctgtat

SEQ ID NO: 84215 - DNA, 15 bp, Homo sapiens
gtcaaggactctgta

SEQ ID NO: 84216 - DNA, 15 bp, Homo sapiens
ggtcaaggactctgt

SEQ ID NO: 84217 - DNA, 15 bp, Homo sapiens
aggtcaaggactctg

SEQ ID NO: 84218 - DNA, 15 bp, Homo sapiens
aaggtcaaggactct

SEQ ID NO: 84219 - DNA, 15 bp, Homo sapiens
aaaggtcaaggactc

SEQ ID NO: 84220 - DNA, 15 bp, Homo sapiens
taaaggtcaaggact

SEQ ID NO: 84221 - DNA, 15 bp, Homo sapiens
ctaaaggtcaaggac

SEQ ID NO: 84222 - DNA, 15 bp, Homo sapiens
actaaaggtcaagga

SEQ ID NO: 84223 - DNA, 15 bp, Homo sapiens
cactaaaggtcaagg

SEQ ID NO: 84224 - DNA, 15 bp, Homo sapiens
gcactaaaggtcaag

SEQ ID NO: 84225 - DNA, 15 bp, Homo sapiens
ggcactaaaggtcaa

SEQ ID NO: 84226 - DNA, 15 bp, Homo sapiens
aggcactaaaggtca

SEQ ID NO: 84227 - DNA, 15 bp, Homo sapiens
gaggcactaaaggtc

SEQ ID NO: 84228 - DNA, 15 bp, Homo sapiens
ggaggcactaaaggt

SEQ ID NO: 84229 - DNA, 15 bp, Homo sapiens
tggaggcactaaagg

SEQ ID NO: 84230 - DNA, 15 bp, Homo sapiens
atggaggcactaaag

SEQ ID NO: 84231 - DNA, 15 bp, Homo sapiens
tatggaggcactaaa

SEQ ID NO: 84232 - DNA, 15 bp, Homo sapiens
atatggaggcactaa

SEQ ID NO: 84233 - DNA, 15 bp, Homo sapiens
tatatggaggcacta

SEQ ID NO: 84234 - DNA, 15 bp, Homo sapiens
ctatatggaggcact

SEQ ID NO: 84235 - DNA, 15 bp, Homo sapiens
tctatatggaggcac

SEQ ID NO: 84236 - DNA, 15 bp, Homo sapiens
ttctatatggaggca

SEQ ID NO: 84237 - DNA, 15 bp, Homo sapiens
gttctatatggaggc

SEQ ID NO: 84238 - DNA, 15 bp, Homo sapiens
tgttctatatggagg

SEQ ID NO: 84239 - DNA, 15 bp, Homo sapiens
atgttctatatggag

SEQ ID NO: 84240 - DNA, 15 bp, Homo sapiens
catgttctatatgga

SEQ ID NO: 84241 - DNA, 15 bp, Homo sapiens
tcatgttctatatgg

SEQ ID NO: 84242 - DNA, 15 bp, Homo sapiens
ttcatgttctatatg

SEQ ID NO: 84243 - DNA, 15 bp, Homo sapiens
cttcatgttctatat

SEQ ID NO: 84244 - DNA, 15 bp, Homo sapiens
ccttcatgttctata

SEQ ID NO: 84245 - DNA, 15 bp, Homo sapiens
tccttcatgttctat

SEQ ID NO: 84246 - DNA, 15 bp, Homo sapiens
gtccttcatgttcta

SEQ ID NO: 84247 - DNA, 15 bp, Homo sapiens
agtccttcatgttct

SEQ ID NO: 84248 - DNA, 15 bp, Homo sapiens
tagtccttcatgttc

SEQ ID NO: 84249 - DNA, 15 bp, Homo sapiens
ctagtccttcatgtt

SEQ ID NO: 84250 - DNA, 15 bp, Homo sapiens
tctagtccttcatgt

SEQ ID NO: 84251 - DNA, 15 bp, Homo sapiens
ttctagtccttcatg

SEQ ID NO: 84252 - DNA, 15 bp, Homo sapiens
attctagtccttcat

SEQ ID NO: 84253 - DNA, 15 bp, Homo sapiens
tattctagtccttca

SEQ ID NO: 84254 - DNA, 15 bp, Homo sapiens
ttattctagtccttc

SEQ ID NO: 84255 - DNA, 15 bp, Homo sapiens
tttattctagtcctt

SEQ ID NO: 84256 - DNA, 15 bp, Homo sapiens
ctttattctagtcct

SEQ ID NO: 84257 - DNA, 15 bp, Homo sapiens
actttattctagtcc

SEQ ID NO: 84258 - DNA, 15 bp, Homo sapiens
tactttattctagtc

SEQ ID NO: 84259 - DNA, 15 bp, Homo sapiens
ctactttattctagt

SEQ ID NO: 84260 - DNA, 15 bp, Homo sapiens
tctactttattctag

SEQ ID NO: 84261 - DNA, 15 bp, Homo sapiens
ttctactttattcta

SEQ ID NO: 84262 - DNA, 15 bp, Homo sapiens
cttctactttattct

SEQ ID NO: 84263 - DNA, 15 bp, Homo sapiens
acttctactttattc

SEQ ID NO: 84264 - DNA, 15 bp, Homo sapiens
tacttctactttatt

SEQ ID NO: 84265 - DNA, 15 bp, Homo sapiens
atacttctactttat

SEQ ID NO: 84266 - DNA, 15 bp, Homo sapiens
tatacttctacttta

SEQ ID NO: 84267 - DNA, 15 bp, Homo sapiens
ttatacttctacttt

SEQ ID NO: 84268 - DNA, 15 bp, Homo sapiens
attatacttctactt

SEQ ID NO: 84269 - DNA, 15 bp, Homo sapiens
aattatacttctact

SEQ ID NO: 84270 - DNA, 15 bp, Homo sapiens
aaattatacttctac

SEQ ID NO: 84271 - DNA, 15 bp, Homo sapiens
taaattatacttcta

SEQ ID NO: 84272 - DNA, 15 bp, Homo sapiens
ttaaattatacttct

SEQ ID NO: 84273 - DNA, 15 bp, Homo sapiens
cttaaattatacttc

SEQ ID NO: 84274 - DNA, 15 bp, Homo sapiens
tcttaaattatactt

SEQ ID NO: 84275 - DNA, 15 bp, Homo sapiens
ttcttaaattatact

SEQ ID NO: 84276 - DNA, 15 bp, Homo sapiens
cttcttaaattatac

SEQ ID NO: 84277 - DNA, 15 bp, Homo sapiens
acttcttaaattata

SEQ ID NO: 84278 - DNA, 15 bp, Homo sapiens
aacttcttaaattat

SEQ ID NO: 84279 - DNA, 15 bp, Homo sapiens
gaacttcttaaatta

SEQ ID NO: 84280 - DNA, 15 bp, Homo sapiens
ggaacttcttaaatt

SEQ ID NO: 84281 - DNA, 15 bp, Homo sapiens
gggaacttcttaaat

SEQ ID NO: 84282 - DNA, 15 bp, Homo sapiens
ggggaacttcttaaa

SEQ ID NO: 84283 - DNA, 15 bp, Homo sapiens
tggggaacttcttaa

SEQ ID NO: 84284 - DNA, 15 bp, Homo sapiens
ctggggaacttctta

SEQ ID NO: 84285 - DNA, 15 bp, Homo sapiens
cctggggaacttctt

SEQ ID NO: 84286 - DNA, 15 bp, Homo sapiens
ccctggggaacttct

SEQ ID NO: 84287 - DNA, 15 bp, Homo sapiens
accctggggaacttc

SEQ ID NO: 84288 - DNA, 15 bp, Homo sapiens
caccctggggaactt

SEQ ID NO: 84289 - DNA, 15 bp, Homo sapiens
tcaccctggggaact

SEQ ID NO: 84290 - DNA, 15 bp, Homo sapiens
atcaccctggggaac

SEQ ID NO: 84291 - DNA, 15 bp, Homo sapiens
tatcaccctggggaa

SEQ ID NO: 84292 - DNA, 15 bp, Homo sapiens
atatcaccctgggga

SEQ ID NO: 84293 - DNA, 15 bp, Homo sapiens
gatatcaccctgggg

SEQ ID NO: 84294 - DNA, 15 bp, Homo sapiens
agatatcaccctggg

SEQ ID NO: 84295 - DNA, 15 bp, Homo sapiens
cagatatcaccctgg

SEQ ID NO: 84296 - DNA, 15 bp, Homo sapiens
acagatatcaccctg

SEQ ID NO: 84297 - DNA, 15 bp, Homo sapiens
aacagatatcaccct

SEQ ID NO: 84298 - DNA, 15 bp, Homo sapiens
aaacagatatcaccc

SEQ ID NO: 84299 - DNA, 15 bp, Homo sapiens
aaaacagatatcacc

SEQ ID NO: 84300 - DNA, 15 bp, Homo sapiens
gaaaacagatatcac

SEQ ID NO: 84301 - DNA, 15 bp, Homo sapiens
ggaaaacagatatca

SEQ ID NO: 84302 - DNA, 15 bp, Homo sapiens
aggaaaacagatatc

SEQ ID NO: 84303 - DNA, 15 bp, Homo sapiens
caggaaaacagatat

SEQ ID NO: 84304 - DNA, 15 bp, Homo sapiens
ccaggaaaacagata

SEQ ID NO: 84305 - DNA, 15 bp, Homo sapiens
cccaggaaaacagat

SEQ ID NO: 84306 - DNA, 15 bp, Homo sapiens
acccaggaaaacaga

SEQ ID NO: 84307 - DNA, 15 bp, Homo sapiens
aacccaggaaaacag

SEQ ID NO: 84308 - DNA, 15 bp, Homo sapiens
caacccaggaaaaca

SEQ ID NO: 84309 - DNA, 15 bp, Homo sapiens
ccaacccaggaaaac

SEQ ID NO: 84310 - DNA, 15 bp, Homo sapiens
tccaacccaggaaaa

SEQ ID NO: 84311 - DNA, 15 bp, Homo sapiens
ctccaacccaggaaa

SEQ ID NO: 84312 - DNA, 15 bp, Homo sapiens
tctccaacccaggaa

SEQ ID NO: 84313 - DNA, 15 bp, Homo sapiens
ttctccaacccagga

SEQ ID NO: 84314 - DNA, 15 bp, Homo sapiens
attctccaacccagg

SEQ ID NO: 84315 - DNA, 15 bp, Homo sapiens
cattctccaacccag

SEQ ID NO: 84316 - DNA, 15 bp, Homo sapiens
tcattctccaaccca

SEQ ID NO: 84317 - DNA, 15 bp, Homo sapiens
atcattctccaaccc

SEQ ID NO: 84318 - DNA, 15 bp, Homo sapiens
tatcattctccaacc

SEQ ID NO: 84319 - DNA, 15 bp, Homo sapiens
atatcattctccaac

SEQ ID NO: 84320 - DNA, 15 bp, Homo sapiens
tatatcattctccaa

SEQ ID NO: 84321 - DNA, 15 bp, Homo sapiens
ctatatcattctcca

SEQ ID NO: 84322 - DNA, 15 bp, Homo sapiens
gctatatcattctcc

SEQ ID NO: 84323 - DNA, 15 bp, Homo sapiens
tgctatatcattctc

SEQ ID NO: 84324 - DNA, 15 bp, Homo sapiens
ttgctatatcattct

SEQ ID NO: 84325 - DNA, 15 bp, Homo sapiens
attgctatatcattc

SEQ ID NO: 84326 - DNA, 15 bp, Homo sapiens
aattgctatatcatt

SEQ ID NO: 84327 - DNA, 15 bp, Homo sapiens
aaattgctatatcat

SEQ ID NO: 84328 - DNA, 15 bp, Homo sapiens
aaaattgctatatca

SEQ ID NO: 84329 - DNA, 15 bp, Homo sapiens
taaaattgctatatc

SEQ ID NO: 84330 - DNA, 15 bp, Homo sapiens
ctaaaattgctatat

SEQ ID NO: 84331 - DNA, 15 bp, Homo sapiens
cctaaaattgctata

SEQ ID NO: 84332 - DNA, 15 bp, Homo sapiens
acctaaaattgctat

SEQ ID NO: 84333 - DNA, 15 bp, Homo sapiens
tacctaaaattgcta

SEQ ID NO: 84334 - DNA, 15 bp, Homo sapiens
atacctaaaattgct

SEQ ID NO: 84335 - DNA, 15 bp, Homo sapiens
tatacctaaaattgc

SEQ ID NO: 84336 - DNA, 15 bp, Homo sapiens
ttatacctaaaattg

SEQ ID NO: 84337 - DNA, 15 bp, Homo sapiens
tttatacctaaaatt

SEQ ID NO: 84338 - DNA, 15 bp, Homo sapiens
ttttatacctaaaat

SEQ ID NO: 84339 - DNA, 15 bp, Homo sapiens
gttttatacctaaaa

SEQ ID NO: 84340 - DNA, 15 bp, Homo sapiens
agttttatacctaaa

SEQ ID NO: 84341 - DNA, 15 bp, Homo sapiens
gagttttatacctaa

SEQ ID NO: 84342 - DNA, 15 bp, Homo sapiens
agagttttataccta

SEQ ID NO: 84343 - DNA, 15 bp, Homo sapiens
gagagttttatacct

SEQ ID NO: 84344 - DNA, 15 bp, Homo sapiens
agagagttttatacc

SEQ ID NO: 84345 - DNA, 15 bp, Homo sapiens
aagagagttttatac

SEQ ID NO: 84346 - DNA, 15 bp, Homo sapiens
taagagagttttata

SEQ ID NO: 84347 - DNA, 15 bp, Homo sapiens
gtaagagagttttat

SEQ ID NO: 84348 - DNA, 15 bp, Homo sapiens
agtaagagagtttta

SEQ ID NO: 84349 - DNA, 15 bp, Homo sapiens
aagtaagagagtttt

SEQ ID NO: 84350 - DNA, 15 bp, Homo sapiens
aaagtaagagagttt

SEQ ID NO: 84351 - DNA, 15 bp, Homo sapiens
gaaagtaagagagtt

SEQ ID NO: 84352 - DNA, 15 bp, Homo sapiens
agaaagtaagagagt

SEQ ID NO: 84353 - DNA, 15 bp, Homo sapiens
aagaaagtaagagag

SEQ ID NO: 84354 - DNA, 15 bp, Homo sapiens
taagaaagtaagaga

SEQ ID NO: 84355 - DNA, 15 bp, Homo sapiens
ataagaaagtaagag

SEQ ID NO: 84356 - DNA, 15 bp, Homo sapiens
aataagaaagtaaga

SEQ ID NO: 84357 - DNA, 15 bp, Homo sapiens
caataagaaagtaag

SEQ ID NO: 84358 - DNA, 15 bp, Homo sapiens
ccaataagaaagtaa

SEQ ID NO: 84359 - DNA, 15 bp, Homo sapiens
accaataagaaagta

SEQ ID NO: 84360 - DNA, 15 bp, Homo sapiens
aaccaataagaaagt

SEQ ID NO: 84361 - DNA, 15 bp, Homo sapiens
taaccaataagaaag

SEQ ID NO: 84362 - DNA, 15 bp, Homo sapiens
ctaaccaataagaaa

SEQ ID NO: 84363 - DNA, 15 bp, Homo sapiens
tctaaccaataagaa

SEQ ID NO: 84364 - DNA, 15 bp, Homo sapiens
ttctaaccaataaga

SEQ ID NO: 84365 - DNA, 15 bp, Homo sapiens
attctaaccaataag

SEQ ID NO: 84366 - DNA, 15 bp, Homo sapiens
aattctaaccaataa

SEQ ID NO: 84367 - DNA, 15 bp, Homo sapiens
aaattctaaccaata

SEQ ID NO: 84368 - DNA, 15 bp, Homo sapiens
taaattctaaccaat

SEQ ID NO: 84369 - DNA, 15 bp, Homo sapiens
ctaaattctaaccaa

SEQ ID NO: 84370 - DNA, 15 bp, Homo sapiens
tctaaattctaacca

SEQ ID NO: 84371 - DNA, 15 bp, Homo sapiens
ctctaaattctaacc

SEQ ID NO: 84372 - DNA, 15 bp, Homo sapiens
actctaaattctaac

SEQ ID NO: 84373 - DNA, 15 bp, Homo sapiens
gactctaaattctaa

SEQ ID NO: 84374 - DNA, 15 bp, Homo sapiens
tgactctaaattcta

SEQ ID NO: 84375 - DNA, 15 bp, Homo sapiens
ttgactctaaattct

SEQ ID NO: 84376 - DNA, 15 bp, Homo sapiens
tttgactctaaattc

SEQ ID NO: 84377 - DNA, 15 bp, Homo sapiens
ctttgactctaaatt

SEQ ID NO: 84378 - DNA, 15 bp, Homo sapiens
tctttgactctaaat

SEQ ID NO: 84379 - DNA, 15 bp, Homo sapiens
ctctttgactctaaa

SEQ ID NO: 84380 - DNA, 15 bp, Homo sapiens
tctctttgactctaa

SEQ ID NO: 84381 - DNA, 15 bp, Homo sapiens
atctctttgactcta

SEQ ID NO: 84382 - DNA, 15 bp, Homo sapiens
gatctctttgactct

SEQ ID NO: 84383 - DNA, 15 bp, Homo sapiens
tgatctctttgactc

SEQ ID NO: 84384 - DNA, 15 bp, Homo sapiens
ttgatctctttgact

SEQ ID NO: 84385 - DNA, 15 bp, Homo sapiens
tttgatctctttgac

SEQ ID NO: 84386 - DNA, 15 bp, Homo sapiens
atttgatctctttga

SEQ ID NO: 84387 - DNA, 15 bp, Homo sapiens
tatttgatctctttg

SEQ ID NO: 84388 - DNA, 15 bp, Homo sapiens
ttatttgatctcttt

SEQ ID NO: 84389 - DNA, 15 bp, Homo sapiens
tttatttgatctctt

SEQ ID NO: 84390 - DNA, 15 bp, Homo sapiens
ctttatttgatctct

SEQ ID NO: 84391 - DNA, 15 bp, Homo sapiens
actttatttgatctc

SEQ ID NO: 84392 - DNA, 15 bp, Homo sapiens
cactttatttgatct

SEQ ID NO: 84393 - DNA, 15 bp, Homo sapiens
tcactttatttgatc

SEQ ID NO: 84394 - DNA, 15 bp, Homo sapiens
ctcactttatttgat

SEQ ID NO: 84395 - DNA, 15 bp, Homo sapiens
tctcactttatttga

SEQ ID NO: 84396 - DNA, 15 bp, Homo sapiens
ctctcactttatttg

SEQ ID NO: 84397 - DNA, 15 bp, Homo sapiens
actctcactttattt

SEQ ID NO: 84398 - DNA, 15 bp, Homo sapiens
cactctcactttatt

SEQ ID NO: 84399 - DNA, 15 bp, Homo sapiens
tcactctcactttat

SEQ ID NO: 84400 - DNA, 15 bp, Homo sapiens
ttcactctcacttta

SEQ ID NO: 84401 - DNA, 15 bp, Homo sapiens
tttcactctcacttt

SEQ ID NO: 84402 - DNA, 15 bp, Homo sapiens
ttttcactctcactt

SEQ ID NO: 84403 - DNA, 15 bp, Homo sapiens
cttttcactctcact

SEQ ID NO: 84404 - DNA, 15 bp, Homo sapiens
acttttcactctcac

SEQ ID NO: 84405 - DNA, 15 bp, Homo sapiens
gacttttcactctca

SEQ ID NO: 84406 - DNA, 15 bp, Homo sapiens
agacttttcactctc

SEQ ID NO: 84407 - DNA, 15 bp, Homo sapiens
gagacttttcactct

SEQ ID NO: 84408 - DNA, 15 bp, Homo sapiens
agagacttttcactc

SEQ ID NO: 84409 - DNA, 15 bp, Homo sapiens
cagagacttttcact

SEQ ID NO: 84410 - DNA, 15 bp, Homo sapiens
tcagagacttttcac

SEQ ID NO: 84411 - DNA, 15 bp, Homo sapiens
ttcagagacttttca

SEQ ID NO: 84412 - DNA, 15 bp, Homo sapiens
attcagagacttttc

SEQ ID NO: 84413 - DNA, 15 bp, Homo sapiens
cattcagagactttt

SEQ ID NO: 84414 - DNA, 15 bp, Homo sapiens
acattcagagacttt

SEQ ID NO: 84415 - DNA, 15 bp, Homo sapiens
cacattcagagactt

SEQ ID NO: 84416 - DNA, 15 bp, Homo sapiens
ccacattcagagact

SEQ ID NO: 84417 - DNA, 15 bp, Homo sapiens
cccacattcagagac

SEQ ID NO: 84418 - DNA, 15 bp, Homo sapiens
acccacattcagaga

SEQ ID NO: 84419 - DNA, 15 bp, Homo sapiens
tacccacattcagag

SEQ ID NO: 84420 - DNA, 15 bp, Homo sapiens
gtacccacattcaga

SEQ ID NO: 84421 - DNA, 15 bp, Homo sapiens
agtacccacattcag

SEQ ID NO: 84422 - DNA, 15 bp, Homo sapiens
tagtacccacattca

SEQ ID NO: 84423 - DNA, 15 bp, Homo sapiens
ctagtacccacattc

SEQ ID NO: 84424 - DNA, 15 bp, Homo sapiens
cctagtacccacatt

SEQ ID NO: 84425 - DNA, 15 bp, Homo sapiens
tcctagtacccacat

SEQ ID NO: 84426 - DNA, 15 bp, Homo sapiens
ctcctagtacccaca

SEQ ID NO: 84427 - DNA, 15 bp, Homo sapiens
cctcctagtacccac

SEQ ID NO: 84428 - DNA, 15 bp, Homo sapiens
ccctcctagtaccca

SEQ ID NO: 84429 - DNA, 15 bp, Homo sapiens
gccctcctagtaccc

SEQ ID NO: 84430 - DNA, 15 bp, Homo sapiens
agccctcctagtacc

SEQ ID NO: 84431 - DNA, 15 bp, Homo sapiens
gagccctcctagtac

SEQ ID NO: 84432 - DNA, 15 bp, Homo sapiens
tgagccctcctagta

SEQ ID NO: 84433 - DNA, 15 bp, Homo sapiens
ttgagccctcctagt

SEQ ID NO: 84434 - DNA, 15 bp, Homo sapiens
tttgagccctcctag

SEQ ID NO: 84435 - DNA, 15 bp, Homo sapiens
gtttgagccctccta

SEQ ID NO: 84436 - DNA, 15 bp, Homo sapiens
tgtttgagccctcct

SEQ ID NO: 84437 - DNA, 15 bp, Homo sapiens
ctgtttgagccctcc

SEQ ID NO: 84438 - DNA, 15 bp, Homo sapiens
actgtttgagccctc

SEQ ID NO: 84439 - DNA, 15 bp, Homo sapiens
aactgtttgagccct

SEQ ID NO: 84440 - DNA, 15 bp, Homo sapiens
aaactgtttgagccc

SEQ ID NO: 84441 - DNA, 15 bp, Homo sapiens
aaaactgtttgagcc

SEQ ID NO: 84442 - DNA, 15 bp, Homo sapiens
gaaaactgtttgagc

SEQ ID NO: 84443 - DNA, 15 bp, Homo sapiens
tgaaaactgtttgag

SEQ ID NO: 84444 - DNA, 15 bp, Homo sapiens
ttgaaaactgtttga

SEQ ID NO: 84445 - DNA, 15 bp, Homo sapiens
cttgaaaactgtttg

SEQ ID NO: 84446 - DNA, 15 bp, Homo sapiens
gcttgaaaactgttt

SEQ ID NO: 84447 - DNA, 15 bp, Homo sapiens
ggcttgaaaactgtt

SEQ ID NO: 84448 - DNA, 15 bp, Homo sapiens
aggcttgaaaactgt

SEQ ID NO: 84449 - DNA, 15 bp, Homo sapiens
gaggcttgaaaactg

SEQ ID NO: 84450 - DNA, 15 bp, Homo sapiens
agaggcttgaaaact

SEQ ID NO: 84451 - DNA, 15 bp, Homo sapiens
aagaggcttgaaaac

SEQ ID NO: 84452 - DNA, 15 bp, Homo sapiens
gaagaggcttgaaaa

SEQ ID NO: 84453 - DNA, 15 bp, Homo sapiens
agaagaggcttgaaa

SEQ ID NO: 84454 - DNA, 15 bp, Homo sapiens
cagaagaggcttgaa

SEQ ID NO: 84455 - DNA, 15 bp, Homo sapiens
acagaagaggcttga

SEQ ID NO: 84456 - DNA, 15 bp, Homo sapiens
aacagaagaggcttg

SEQ ID NO: 84457 - DNA, 15 bp, Homo sapiens
gaacagaagaggctt

SEQ ID NO: 84458 - DNA, 15 bp, Homo sapiens
tgaacagaagaggct

SEQ ID NO: 84459 - DNA, 15 bp, Homo sapiens
ctgaacagaagaggc

SEQ ID NO: 84460 - DNA, 15 bp, Homo sapiens
actgaacagaagagg

SEQ ID NO: 84461 - DNA, 15 bp, Homo sapiens
cactgaacagaagag

SEQ ID NO: 84462 - DNA, 15 bp, Homo sapiens
acactgaacagaaga

SEQ ID NO: 84463 - DNA, 15 bp, Homo sapiens
aacactgaacagaag

SEQ ID NO: 84464 - DNA, 15 bp, Homo sapiens
aaacactgaacagaa

SEQ ID NO: 84465 - DNA, 15 bp, Homo sapiens
gaaacactgaacaga

SEQ ID NO: 84466 - DNA, 15 bp, Homo sapiens
agaaacactgaacag

SEQ ID NO: 84467 - DNA, 15 bp, Homo sapiens
cagaaacactgaaca

SEQ ID NO: 84468 - DNA, 15 bp, Homo sapiens
acagaaacactgaac

SEQ ID NO: 84469 - DNA, 15 bp, Homo sapiens
gacagaaacactgaa

SEQ ID NO: 84470 - DNA, 15 bp, Homo sapiens
agacagaaacactga

SEQ ID NO: 84471 - DNA, 15 bp, Homo sapiens
gagacagaaacactg

SEQ ID NO: 84472 - DNA, 15 bp, Homo sapiens
agagacagaaacact

SEQ ID NO: 84473 - DNA, 15 bp, Homo sapiens
gagagacagaaacac

SEQ ID NO: 84474 - DNA, 15 bp, Homo sapiens
agagagacagaaaca

SEQ ID NO: 84475 - DNA, 15 bp, Homo sapiens
cagagagacagaaac

SEQ ID NO: 84476 - DNA, 15 bp, Homo sapiens
ccagagagacagaaa

SEQ ID NO: 84477 - DNA, 15 bp, Homo sapiens
tccagagagacagaa

SEQ ID NO: 84478 - DNA, 15 bp, Homo sapiens
ctccagagagacaga

SEQ ID NO: 84479 - DNA, 15 bp, Homo sapiens
actccagagagacag

SEQ ID NO: 84480 - DNA, 15 bp, Homo sapiens
cactccagagagaca

SEQ ID NO: 84481 - DNA, 15 bp, Homo sapiens
tcactccagagagac

SEQ ID NO: 84482 - DNA, 15 bp, Homo sapiens
ttcactccagagaga

SEQ ID NO: 84483 - DNA, 15 bp, Homo sapiens
tttcactccagagag

SEQ ID NO: 84484 - DNA, 15 bp, Homo sapiens
atttcactccagaga

SEQ ID NO: 84485 - DNA, 15 bp, Homo sapiens
catttcactccagag

SEQ ID NO: 84486 - DNA, 15 bp, Homo sapiens
ccatttcactccaga

SEQ ID NO: 84487 - DNA, 15 bp, Homo sapiens
accatttcactccag

SEQ ID NO: 84488 - DNA, 15 bp, Homo sapiens
taccatttcactcca

SEQ ID NO: 84489 - DNA, 15 bp, Homo sapiens
ataccatttcactcc

SEQ ID NO: 84490 - DNA, 15 bp, Homo sapiens
gataccatttcactc

SEQ ID NO: 84491 - DNA, 15 bp, Homo sapiens
ggataccatttcact

SEQ ID NO: 84492 - DNA, 15 bp, Homo sapiens
gggataccatttcac

SEQ ID NO: 84493 - DNA, 15 bp, Homo sapiens
agggataccatttca

SEQ ID NO: 84494 - DNA, 15 bp, Homo sapiens
aagggataccatttc

SEQ ID NO: 84495 - DNA, 15 bp, Homo sapiens
gaagggataccattt

SEQ ID NO: 84496 - DNA, 15 bp, Homo sapiens
tgaagggataccatt

SEQ ID NO: 84497 - DNA, 15 bp, Homo sapiens
ttgaagggataccat

SEQ ID NO: 84498 - DNA, 15 bp, Homo sapiens
tttgaagggatacca

SEQ ID NO: 84499 - DNA, 15 bp, Homo sapiens
ctttgaagggatacc

SEQ ID NO: 84500 - DNA, 15 bp, Homo sapiens
actttgaagggatac

SEQ ID NO: 84501 - DNA, 15 bp, Homo sapiens
cactttgaagggata

SEQ ID NO: 84502 - DNA, 15 bp, Homo sapiens
acactttgaagggat

SEQ ID NO: 84503 - DNA, 15 bp, Homo sapiens
cacactttgaaggga

SEQ ID NO: 84504 - DNA, 15 bp, Homo sapiens
tcacactttgaaggg

SEQ ID NO: 84505 - DNA, 15 bp, Homo sapiens
ttcacactttgaagg

SEQ ID NO: 84506 - DNA, 15 bp, Homo sapiens
cttcacactttgaag

SEQ ID NO: 84507 - DNA, 15 bp, Homo sapiens
ccttcacactttgaa

SEQ ID NO: 84508 - DNA, 15 bp, Homo sapiens
tccttcacactttga

SEQ ID NO: 84509 - DNA, 15 bp, Homo sapiens
ctccttcacactttg

SEQ ID NO: 84510 - DNA, 15 bp, Homo sapiens
tctccttcacacttt

SEQ ID NO: 84511 - DNA, 15 bp, Homo sapiens
ttctccttcacactt

SEQ ID NO: 84512 - DNA, 15 bp, Homo sapiens
tttctccttcacact

SEQ ID NO: 84513 - DNA, 15 bp, Homo sapiens
ctttctccttcacac

SEQ ID NO: 84514 - DNA, 15 bp, Homo sapiens
actttctccttcaca

SEQ ID NO: 84515 - DNA, 15 bp, Homo sapiens
cactttctccttcac

SEQ ID NO: 84516 - DNA, 15 bp, Homo sapiens
acactttctccttca

SEQ ID NO: 84517 - DNA, 15 bp, Homo sapiens
cacactttctccttc

SEQ ID NO: 84518 - DNA, 15 bp, Homo sapiens
tcacactttctcctt

SEQ ID NO: 84519 - DNA, 15 bp, Homo sapiens
ttcacactttctcct

SEQ ID NO: 84520 - DNA, 15 bp, Homo sapiens
attcacactttctcc

SEQ ID NO: 84521 - DNA, 15 bp, Homo sapiens
tattcacactttctc

SEQ ID NO: 84522 - DNA, 15 bp, Homo sapiens
ttattcacactttct

SEQ ID NO: 84523 - DNA, 15 bp, Homo sapiens
attattcacactttc

SEQ ID NO: 84524 - DNA, 15 bp, Homo sapiens
tattattcacacttt

SEQ ID NO: 84525 - DNA, 15 bp, Homo sapiens
atattattcacactt

SEQ ID NO: 84526 - DNA, 15 bp, Homo sapiens
aatattattcacact

SEQ ID NO: 84527 - DNA, 15 bp, Homo sapiens
aaatattattcacac

SEQ ID NO: 84528 - DNA, 15 bp, Homo sapiens
aaaatattattcaca

SEQ ID NO: 84529 - DNA, 15 bp, Homo sapiens
aaaaatattattcac

SEQ ID NO: 84530 - DNA, 15 bp, Homo sapiens
taaaaatattattca

SEQ ID NO: 84531 - DNA, 15 bp, Homo sapiens
ttaaaaatattattc

SEQ ID NO: 84532 - DNA, 15 bp, Homo sapiens
tatacaacagtttta

SEQ ID NO: 84533 - DNA, 15 bp, Homo sapiens
ttatacaacagtttt

SEQ ID NO: 84534 - DNA, 15 bp, Homo sapiens
tttatacaacagttt

SEQ ID NO: 84535 - DNA, 15 bp, Homo sapiens
gtttatacaacagtt

SEQ ID NO: 84536 - DNA, 15 bp, Homo sapiens
tgtttatacaacagt

SEQ ID NO: 84537 - DNA, 15 bp, Homo sapiens
atgtttatacaacag

SEQ ID NO: 84538 - DNA, 15 bp, Homo sapiens
tatgtttatacaaca

SEQ ID NO: 84539 - DNA, 15 bp, Homo sapiens
ttatgtttatacaac

SEQ ID NO: 84540 - DNA, 15 bp, Homo sapiens
tttatgtttatacaa

SEQ ID NO: 84541 - DNA, 15 bp, Homo sapiens
ttttatgtttataca

SEQ ID NO: 84542 - DNA, 15 bp, Homo sapiens
gttttatgtttatac

SEQ ID NO: 84543 - DNA, 15 bp, Homo sapiens
tgttttatgtttata

SEQ ID NO: 84544 - DNA, 15 bp, Homo sapiens
ttgttttatgtttat

SEQ ID NO: 84545 - DNA, 15 bp, Homo sapiens
tttgttttatgttta

SEQ ID NO: 84546 - DNA, 15 bp, Homo sapiens
ttttgttttatgttt

SEQ ID NO: 84547 - DNA, 15 bp, Homo sapiens
attttgttttatgtt

SEQ ID NO: 84548 - DNA, 15 bp, Homo sapiens
cattttgttttatgt

SEQ ID NO: 84549 - DNA, 15 bp, Homo sapiens
gcattttgttttatg

SEQ ID NO: 84550 - DNA, 15 bp, Homo sapiens
cgcattttgttttat

SEQ ID NO: 84551 - DNA, 15 bp, Homo sapiens
acgcattttgtttta

SEQ ID NO: 84552 - DNA, 15 bp, Homo sapiens
cacgcattttgtttt

SEQ ID NO: 84553 - DNA, 15 bp, Homo sapiens
tcacgcattttgttt

SEQ ID NO: 84554 - DNA, 15 bp, Homo sapiens
ttcacgcattttgtt

SEQ ID NO: 84555 - DNA, 15 bp, Homo sapiens
gttcacgcattttgt

SEQ ID NO: 84556 - DNA, 15 bp, Homo sapiens
ggttcacgcattttg

SEQ ID NO: 84557 - DNA, 15 bp, Homo sapiens
aggttcacgcatttt

SEQ ID NO: 84558 - DNA, 15 bp, Homo sapiens
taggttcacgcattt

SEQ ID NO: 84559 - DNA, 15 bp, Homo sapiens
ataggttcacgcatt

SEQ ID NO: 84560 - DNA, 15 bp, Homo sapiens
tataggttcacgcat

SEQ ID NO: 84561 - DNA, 15 bp, Homo sapiens
ctataggttcacgca

SEQ ID NO: 84562 - DNA, 15 bp, Homo sapiens
tctataggttcacgc

SEQ ID NO: 84563 - DNA, 15 bp, Homo sapiens
ttctataggttcacg

SEQ ID NO: 84564 - DNA, 15 bp, Homo sapiens
tttctataggttcac

SEQ ID NO: 84565 - DNA, 15 bp, Homo sapiens
ttttctataggttca

SEQ ID NO: 84566 - DNA, 15 bp, Homo sapiens
tttttctataggttc

SEQ ID NO: 84567 - DNA, 15 bp, Homo sapiens
atttttctataggtt

SEQ ID NO: 84568 - DNA, 15 bp, Homo sapiens
catttttctataggt

SEQ ID NO: 84569 - DNA, 15 bp, Homo sapiens
acatttttctatagg

SEQ ID NO: 84570 - DNA, 15 bp, Homo sapiens
gacatttttctatag

SEQ ID NO: 84571 - DNA, 15 bp, Homo sapiens
agacatttttctata

SEQ ID NO: 84572 - DNA, 15 bp, Homo sapiens
gagacatttttctat

SEQ ID NO: 84573 - DNA, 15 bp, Homo sapiens
agagacatttttcta

SEQ ID NO: 84574 - DNA, 15 bp, Homo sapiens
cagagacatttttct

SEQ ID NO: 84575 - DNA, 15 bp, Homo sapiens
ccagagacatttttc

SEQ ID NO: 84576 - DNA, 15 bp, Homo sapiens
cccagagacattttt

SEQ ID NO: 84577 - DNA, 15 bp, Homo sapiens
tcccagagacatttt

SEQ ID NO: 84578 - DNA, 15 bp, Homo sapiens
gtcccagagacattt

SEQ ID NO: 84579 - DNA, 15 bp, Homo sapiens
agtcccagagacatt

SEQ ID NO: 84580 - DNA, 15 bp, Homo sapiens
gagtcccagagacat

SEQ ID NO: 84581 - DNA, 15 bp, Homo sapiens
agagtcccagagaca

SEQ ID NO: 84582 - DNA, 15 bp, Homo sapiens
aagagtcccagagac

SEQ ID NO: 84583 - DNA, 15 bp, Homo sapiens
aaagagtcccagaga

SEQ ID NO: 84584 - DNA, 15 bp, Homo sapiens
aaaagagtcccagag

SEQ ID NO: 84585 - DNA, 15 bp, Homo sapiens
aaaaagagtcccaga

SEQ ID NO: 84586 - DNA, 15 bp, Homo sapiens
taaaaagagtcccag

SEQ ID NO: 84587 - DNA, 15 bp, Homo sapiens
ttaaaaagagtccca

SEQ ID NO: 84588 - DNA, 15 bp, Homo sapiens
tttaaaaagagtccc

SEQ ID NO: 84589 - DNA, 15 bp, Homo sapiens
gtttaaaaagagtcc

SEQ ID NO: 84590 - DNA, 15 bp, Homo sapiens
agtttaaaaagagtc

SEQ ID NO: 84591 - DNA, 15 bp, Homo sapiens
tagtttaaaaagagt

SEQ ID NO: 84592 - DNA, 15 bp, Homo sapiens
atagtttaaaaagag

SEQ ID NO: 84593 - DNA, 15 bp, Homo sapiens
tatagtttaaaaaga

SEQ ID NO: 84594 - DNA, 15 bp, Homo sapiens
atatagtttaaaaag

SEQ ID NO: 84595 - DNA, 15 bp, Homo sapiens
aatatagtttaaaaa

SEQ ID NO: 84596 - DNA, 15 bp, Homo sapiens
aaatatagtttaaaa

SEQ ID NO: 84597 - DNA, 15 bp, Homo sapiens
aaaatatagtttaaa

SEQ ID NO: 84598 - DNA, 15 bp, Homo sapiens
caaaatatagtttaa

SEQ ID NO: 84599 - DNA, 15 bp, Homo sapiens
tcaaaatatagttta

SEQ ID NO: 84600 - DNA, 15 bp, Homo sapiens
ttcaaaatatagttt

SEQ ID NO: 84601 - DNA, 15 bp, Homo sapiens
tttcaaaatatagtt

SEQ ID NO: 84602 - DNA, 15 bp, Homo sapiens
atttcaaaatatagt

SEQ ID NO: 84603 - DNA, 15 bp, Homo sapiens
tatttcaaaatatag

SEQ ID NO: 84604 - DNA, 15 bp, Homo sapiens
ttatttcaaaatata

SEQ ID NO: 84605 - DNA, 15 bp, Homo sapiens
gttatttcaaaatat

SEQ ID NO: 84606 - DNA, 15 bp, Homo sapiens
agttatttcaaaata

SEQ ID NO: 84607 - DNA, 15 bp, Homo sapiens
aagttatttcaaaat

SEQ ID NO: 84608 - DNA, 15 bp, Homo sapiens
aaagttatttcaaaa

SEQ ID NO: 84609 - DNA, 15 bp, Homo sapiens
taaagttatttcaaa

SEQ ID NO: 84610 - DNA, 15 bp, Homo sapiens
ctaaagttatttcaa

SEQ ID NO: 84611 - DNA, 15 bp, Homo sapiens
tctaaagttatttca

SEQ ID NO: 84612 - DNA, 15 bp, Homo sapiens
atctaaagttatttc

SEQ ID NO: 84613 - DNA, 15 bp, Homo sapiens
aatctaaagttattt

SEQ ID NO: 84614 - DNA, 15 bp, Homo sapiens
aaatctaaagttatt

SEQ ID NO: 84615 - DNA, 15 bp, Homo sapiens
aaaatctaaagttat

SEQ ID NO: 84616 - DNA, 15 bp, Homo sapiens
caaaatctaaagtta

SEQ ID NO: 84617 - DNA, 15 bp, Homo sapiens
ccaaaatctaaagtt

SEQ ID NO: 84618 - DNA, 15 bp, Homo sapiens
tccaaaatctaaagt

SEQ ID NO: 84619 - DNA, 15 bp, Homo sapiens
ttccaaaatctaaag

SEQ ID NO: 84620 - DNA, 15 bp, Homo sapiens
tttccaaaatctaaa

SEQ ID NO: 84621 - DNA, 15 bp, Homo sapiens
ttttccaaaatctaa

SEQ ID NO: 84622 - DNA, 15 bp, Homo sapiens
tttttccaaaatcta

SEQ ID NO: 84623 - DNA, 15 bp, Homo sapiens
ttttttccaaaatct

SEQ ID NO: 84624 - DNA, 15 bp, Homo sapiens
attttttccaaaatc

SEQ ID NO: 84625 - DNA, 15 bp, Homo sapiens
aattttttccaaaat

SEQ ID NO: 84626 - DNA, 15 bp, Homo sapiens
caattttttccaaaa

SEQ ID NO: 84627 - DNA, 15 bp, Homo sapiens
gcaattttttccaaa

SEQ ID NO: 84628 - DNA, 15 bp, Homo sapiens
tgcaattttttccaa

SEQ ID NO: 84629 - DNA, 15 bp, Homo sapiens
ttgcaattttttcca

SEQ ID NO: 84630 - DNA, 15 bp, Homo sapiens
tttgcaattttttcc

SEQ ID NO: 84631 - DNA, 15 bp, Homo sapiens
ttttgcaattttttc

SEQ ID NO: 84632 - DNA, 15 bp, Homo sapiens
tttttgcaatttttt

SEQ ID NO: 84633 - DNA, 15 bp, Homo sapiens
atttttgcaattttt

SEQ ID NO: 84634 - DNA, 15 bp, Homo sapiens
tatttttgcaatttt

SEQ ID NO: 84635 - DNA, 15 bp, Homo sapiens
ttatttttgcaattt

SEQ ID NO: 84636 - DNA, 15 bp, Homo sapiens
gttatttttgcaatt

SEQ ID NO: 84637 - DNA, 15 bp, Homo sapiens
tgttatttttgcaat

SEQ ID NO: 84638 - DNA, 15 bp, Homo sapiens
gtgttatttttgcaa

SEQ ID NO: 84639 - DNA, 15 bp, Homo sapiens
tgtgttatttttgca

SEQ ID NO: 84640 - DNA, 15 bp, Homo sapiens
ctgtgttatttttgc

SEQ ID NO: 84641 - DNA, 15 bp, Homo sapiens
actgtgttatttttg

SEQ ID NO: 84642 - DNA, 15 bp, Homo sapiens
cactgtgttattttt

SEQ ID NO: 84643 - DNA, 15 bp, Homo sapiens
acactgtgttatttt

SEQ ID NO: 84644 - DNA, 15 bp, Homo sapiens
aacactgtgttattt

SEQ ID NO: 84645 - DNA, 15 bp, Homo sapiens
aaacactgtgttatt

SEQ ID NO: 84646 - DNA, 15 bp, Homo sapiens
gaaacactgtgttat

SEQ ID NO: 84647 - DNA, 15 bp, Homo sapiens
ggaaacactgtgtta

SEQ ID NO: 84648 - DNA, 15 bp, Homo sapiens
tggaaacactgtgtt

SEQ ID NO: 84649 - DNA, 15 bp, Homo sapiens
atggaaacactgtgt

SEQ ID NO: 84650 - DNA, 15 bp, Homo sapiens
tatggaaacactgtg

SEQ ID NO: 84651 - DNA, 15 bp, Homo sapiens
atatggaaacactgt

SEQ ID NO: 84652 - DNA, 15 bp, Homo sapiens
tatatggaaacactg

SEQ ID NO: 84653 - DNA, 15 bp, Homo sapiens
gtatatggaaacact

SEQ ID NO: 84654 - DNA, 15 bp, Homo sapiens
ggtatatggaaacac

SEQ ID NO: 84655 - DNA, 15 bp, Homo sapiens
gggtatatggaaaca

SEQ ID NO: 84656 - DNA, 15 bp, Homo sapiens
tgggtatatggaaac

SEQ ID NO: 84657 - DNA, 15 bp, Homo sapiens
atgggtatatggaaa

SEQ ID NO: 84658 - DNA, 15 bp, Homo sapiens
aatgggtatatggaa

SEQ ID NO: 84659 - DNA, 15 bp, Homo sapiens
caatgggtatatgga

SEQ ID NO: 84660 - DNA, 15 bp, Homo sapiens
acaatgggtatatgg

SEQ ID NO: 84661 - DNA, 15 bp, Homo sapiens
gacaatgggtatatg

SEQ ID NO: 84662 - DNA, 15 bp, Homo sapiens
ggacaatgggtatat

SEQ ID NO: 84663 - DNA, 15 bp, Homo sapiens
tggacaatgggtata

SEQ ID NO: 84664 - DNA, 15 bp, Homo sapiens
ctggacaatgggtat

SEQ ID NO: 84665 - DNA, 15 bp, Homo sapiens
gctggacaatgggta

SEQ ID NO: 84666 - DNA, 15 bp, Homo sapiens
agctggacaatgggt

SEQ ID NO: 84667 - DNA, 15 bp, Homo sapiens
aagctggacaatggg

SEQ ID NO: 84668 - DNA, 15 bp, Homo sapiens
gaagctggacaatgg

SEQ ID NO: 84669 - DNA, 15 bp, Homo sapiens
ggaagctggacaatg

SEQ ID NO: 84670 - DNA, 15 bp, Homo sapiens
gggaagctggacaat

SEQ ID NO: 84671 - DNA, 15 bp, Homo sapiens
ggggaagctggacaa

SEQ ID NO: 84672 - DNA, 15 bp, Homo sapiens
aggggaagctggaca

SEQ ID NO: 84673 - DNA, 15 bp, Homo sapiens
taggggaagctggac

SEQ ID NO: 84674 - DNA, 15 bp, Homo sapiens
ttaggggaagctgga

SEQ ID NO: 84675 - DNA, 15 bp, Homo sapiens
attaggggaagctgg

SEQ ID NO: 84676 - DNA, 15 bp, Homo sapiens
cattaggggaagctg

SEQ ID NO: 84677 - DNA, 15 bp, Homo sapiens
acattaggggaagct

SEQ ID NO: 84678 - DNA, 15 bp, Homo sapiens
aacattaggggaagc

SEQ ID NO: 84679 - DNA, 15 bp, Homo sapiens
taacattaggggaag

SEQ ID NO: 84680 - DNA, 15 bp, Homo sapiens
ttaacattaggggaa

SEQ ID NO: 84681 - DNA, 15 bp, Homo sapiens
gttaacattagggga

SEQ ID NO: 84682 - DNA, 15 bp, Homo sapiens
tgttaacattagggg

SEQ ID NO: 84683 - DNA, 15 bp, Homo sapiens
atgttaacattaggg

SEQ ID NO: 84684 - DNA, 15 bp, Homo sapiens
gatgttaacattagg

SEQ ID NO: 84685 - DNA, 15 bp, Homo sapiens
agatgttaacattag

SEQ ID NO: 84686 - DNA, 15 bp, Homo sapiens
aagatgttaacatta

SEQ ID NO: 84687 - DNA, 15 bp, Homo sapiens
caagatgttaacatt

SEQ ID NO: 84688 - DNA, 15 bp, Homo sapiens
gcaagatgttaacat

SEQ ID NO: 84689 - DNA, 15 bp, Homo sapiens
tgcaagatgttaaca

SEQ ID NO: 84690 - DNA, 15 bp, Homo sapiens
atgcaagatgttaac

SEQ ID NO: 84691 - DNA, 15 bp, Homo sapiens
tatgcaagatgttaa

SEQ ID NO: 84692 - DNA, 15 bp, Homo sapiens
gtatgcaagatgtta

SEQ ID NO: 84693 - DNA, 15 bp, Homo sapiens
ggtatgcaagatgtt

SEQ ID NO: 84694 - DNA, 15 bp, Homo sapiens
gggtatgcaagatgt

SEQ ID NO: 84695 - DNA, 15 bp, Homo sapiens
tgggtatgcaagatg

SEQ ID NO: 84696 - DNA, 15 bp, Homo sapiens
atgggtatgcaagat

SEQ ID NO: 84697 - DNA, 15 bp, Homo sapiens
tatgggtatgcaaga

SEQ ID NO: 84698 - DNA, 15 bp, Homo sapiens
ctatgggtatgcaag

SEQ ID NO: 84699 - DNA, 15 bp, Homo sapiens
actatgggtatgcaa

SEQ ID NO: 84700 - DNA, 15 bp, Homo sapiens
tactatgggtatgca

SEQ ID NO: 84701 - DNA, 15 bp, Homo sapiens
atactatgggtatgc

SEQ ID NO: 84702 - DNA, 15 bp, Homo sapiens
tatactatgggtatg

SEQ ID NO: 84703 - DNA, 15 bp, Homo sapiens
ttatactatgggtat

SEQ ID NO: 84704 - DNA, 15 bp, Homo sapiens
attatactatgggta

SEQ ID NO: 84705 - DNA, 15 bp, Homo sapiens
aattatactatgggt

SEQ ID NO: 84706 - DNA, 15 bp, Homo sapiens
taattatactatggg

SEQ ID NO: 84707 - DNA, 15 bp, Homo sapiens
ataattatactatgg

SEQ ID NO: 84708 - DNA, 15 bp, Homo sapiens
cataattatactatg

SEQ ID NO: 84709 - DNA, 15 bp, Homo sapiens
tcataattatactat

SEQ ID NO: 84710 - DNA, 15 bp, Homo sapiens
ttcataattatacta

SEQ ID NO: 84711 - DNA, 15 bp, Homo sapiens
gttcataattatact

SEQ ID NO: 84712 - DNA, 15 bp, Homo sapiens
tgttcataattatac

SEQ ID NO: 84713 - DNA, 15 bp, Homo sapiens
gtgttcataattata

SEQ ID NO: 84714 - DNA, 15 bp, Homo sapiens
agtgttcataattat

SEQ ID NO: 84715 - DNA, 15 bp, Homo sapiens
tagtgttcataatta

SEQ ID NO: 84716 - DNA, 15 bp, Homo sapiens
ttagtgttcataatt

SEQ ID NO: 84717 - DNA, 15 bp, Homo sapiens
cttagtgttcataat

SEQ ID NO: 84718 - DNA, 15 bp, Homo sapiens
tcttagtgttcataa

SEQ ID NO: 84719 - DNA, 15 bp, Homo sapiens
ttcttagtgttcata

SEQ ID NO: 84720 - DNA, 15 bp, Homo sapiens
tttcttagtgttcat

SEQ ID NO: 84721 - DNA, 15 bp, Homo sapiens
atttcttagtgttca

SEQ ID NO: 84722 - DNA, 15 bp, Homo sapiens
catttcttagtgttc

SEQ ID NO: 84723 - DNA, 15 bp, Homo sapiens
tcatttcttagtgtt

SEQ ID NO: 84724 - DNA, 15 bp, Homo sapiens
ttcatttcttagtgt

SEQ ID NO: 84725 - DNA, 15 bp, Homo sapiens
gttcatttcttagtg

SEQ ID NO: 84726 - DNA, 15 bp, Homo sapiens
tgttcatttcttagt

SEQ ID NO: 84727 - DNA, 15 bp, Homo sapiens
ttgttcatttcttag

SEQ ID NO: 84728 - DNA, 15 bp, Homo sapiens
attgttcatttctta

SEQ ID NO: 84729 - DNA, 15 bp, Homo sapiens
cattgttcatttctt

SEQ ID NO: 84730 - DNA, 15 bp, Homo sapiens
acattgttcatttct

SEQ ID NO: 84731 - DNA, 15 bp, Homo sapiens
tacattgttcatttc

SEQ ID NO: 84732 - DNA, 15 bp, Homo sapiens
gtacattgttcattt

SEQ ID NO: 84733 - DNA, 15 bp, Homo sapiens
tgtacattgttcatt

SEQ ID NO: 84734 - DNA, 15 bp, Homo sapiens
ttgtacattgttcat

SEQ ID NO: 84735 - DNA, 15 bp, Homo sapiens
attgtacattgttca

SEQ ID NO: 84736 - DNA, 15 bp, Homo sapiens
cattgtacattgttc

SEQ ID NO: 84737 - DNA, 15 bp, Homo sapiens
gcattgtacattgtt

SEQ ID NO: 84738 - DNA, 15 bp, Homo sapiens
agcattgtacattgt

SEQ ID NO: 84739 - DNA, 15 bp, Homo sapiens
tagcattgtacattg

SEQ ID NO: 84740 - DNA, 15 bp, Homo sapiens
atagcattgtacatt

SEQ ID NO: 84741 - DNA, 15 bp, Homo sapiens
aatagcattgtacat

SEQ ID NO: 84742 - DNA, 15 bp, Homo sapiens
taatagcattgtaca

SEQ ID NO: 84743 - DNA, 15 bp, Homo sapiens
ttaatagcattgtac

SEQ ID NO: 84744 - DNA, 15 bp, Homo sapiens
gttaatagcattgta

SEQ ID NO: 84745 - DNA, 15 bp, Homo sapiens
agttaatagcattgt

SEQ ID NO: 84746 - DNA, 15 bp, Homo sapiens
tagttaatagcattg

SEQ ID NO: 84747 - DNA, 15 bp, Homo sapiens
gtagttaatagcatt

SEQ ID NO: 84748 - DNA, 15 bp, Homo sapiens
tgtagttaatagcat

SEQ ID NO: 84749 - DNA, 15 bp, Homo sapiens
ctgtagttaatagca

SEQ ID NO: 84750 - DNA, 15 bp, Homo sapiens
tctgtagttaatagc

SEQ ID NO: 84751 - DNA, 15 bp, Homo sapiens
gtctgtagttaatag

SEQ ID NO: 84752 - DNA, 15 bp, Homo sapiens
agtctgtagttaata

SEQ ID NO: 84753 - DNA, 15 bp, Homo sapiens
aagtctgtagttaat

SEQ ID NO: 84754 - DNA, 15 bp, Homo sapiens
aaagtctgtagttaa

SEQ ID NO: 84755 - DNA, 15 bp, Homo sapiens
taaagtctgtagtta

SEQ ID NO: 84756 - DNA, 15 bp, Homo sapiens
ataaagtctgtagtt

SEQ ID NO: 84757 - DNA, 15 bp, Homo sapiens
aataaagtctgtagt

SEQ ID NO: 84758 - DNA, 15 bp, Homo sapiens
gaataaagtctgtag

SEQ ID NO: 84759 - DNA, 15 bp, Homo sapiens
tgaataaagtctgta

SEQ ID NO: 84760 - DNA, 15 bp, Homo sapiens
ctgaataaagtctgt

SEQ ID NO: 84761 - DNA, 15 bp, Homo sapiens
tctgaataaagtctg

SEQ ID NO: 84762 - DNA, 15 bp, Homo sapiens
atctgaataaagtct

SEQ ID NO: 84763 - DNA, 15 bp, Homo sapiens
aatctgaataaagtc

SEQ ID NO: 84764 - DNA, 15 bp, Homo sapiens
aaatctgaataaagt

SEQ ID NO: 84765 - DNA, 15 bp, Homo sapiens
gaaatctgaataaag

SEQ ID NO: 84766 - DNA, 15 bp, Homo sapiens
tgaaatctgaataaa

SEQ ID NO: 84767 - DNA, 15 bp, Homo sapiens
atgaaatctgaataa

SEQ ID NO: 84768 - DNA, 15 bp, Homo sapiens
aatgaaatctgaata

SEQ ID NO: 84769 - DNA, 15 bp, Homo sapiens
taatgaaatctgaat

SEQ ID NO: 84770 - DNA, 15 bp, Homo sapiens
ctaatgaaatctgaa

SEQ ID NO: 84771 - DNA, 15 bp, Homo sapiens
actaatgaaatctga

SEQ ID NO: 84772 - DNA, 15 bp, Homo sapiens
aactaatgaaatctg

SEQ ID NO: 84773 - DNA, 15 bp, Homo sapiens
taactaatgaaatct

SEQ ID NO: 84774 - DNA, 15 bp, Homo sapiens
ataactaatgaaatc

SEQ ID NO: 84775 - DNA, 15 bp, Homo sapiens
tataactaatgaaat

SEQ ID NO: 84776 - DNA, 15 bp, Homo sapiens
atataactaatgaaa

SEQ ID NO: 84777 - DNA, 15 bp, Homo sapiens
tatataactaatgaa

SEQ ID NO: 84778 - DNA, 15 bp, Homo sapiens
atatataactaatga

SEQ ID NO: 84779 - DNA, 15 bp, Homo sapiens
tatatataactaatg

SEQ ID NO: 84780 - DNA, 15 bp, Homo sapiens
atatatataactaat

SEQ ID NO: 84781 - DNA, 15 bp, Homo sapiens
tatatatataactaa

SEQ ID NO: 84782 - DNA, 15 bp, Homo sapiens
atatatatataacta

SEQ ID NO: 84783 - DNA, 15 bp, Homo sapiens
catatatatataact

SEQ ID NO: 84784 - DNA, 15 bp, Homo sapiens
acatatatatataac

SEQ ID NO: 84785 - DNA, 15 bp, Homo sapiens
cacatatatatataa

SEQ ID NO: 84786 - DNA, 15 bp, Homo sapiens
acacatatatatata

SEQ ID NO: 84787 - DNA, 15 bp, Homo sapiens
cacacatatatatat

SEQ ID NO: 84788 - DNA, 15 bp, Homo sapiens
acacacatatatata

SEQ ID NO: 84789 - DNA, 15 bp, Homo sapiens
cacacacatatatat

SEQ ID NO: 84790 - DNA, 15 bp, Homo sapiens
acacacacatatata

SEQ ID NO: 84791 - DNA, 15 bp, Homo sapiens
cacacacacatatat

SEQ ID NO: 84792 - DNA, 15 bp, Homo sapiens
acacacacacatata

SEQ ID NO: 84793 - DNA, 15 bp, Homo sapiens
cacacacacacatat

SEQ ID NO: 84794 - DNA, 15 bp, Homo sapiens
acacacacacacata

SEQ ID NO: 84795 - DNA, 15 bp, Homo sapiens
cacacacacacacat

SEQ ID NO: 84796 - DNA, 15 bp, Homo sapiens
acacacacacacaca

SEQ ID NO: 84797 - DNA, 15 bp, Homo sapiens
cacacacacacacac

SEQ ID NO: 84798 - DNA, 15 bp, Homo sapiens
tacacacacacacac

SEQ ID NO: 84799 - DNA, 15 bp, Homo sapiens
atacacacacacaca

SEQ ID NO: 84800 - DNA, 15 bp, Homo sapiens
tatacacacacacac

SEQ ID NO: 84801 - DNA, 15 bp, Homo sapiens
atatacacacacaca

SEQ ID NO: 84802 - DNA, 15 bp, Homo sapiens
tatatacacacacac

SEQ ID NO: 84803 - DNA, 15 bp, Homo sapiens
atatatacacacaca

SEQ ID NO: 84804 - DNA, 15 bp, Homo sapiens
tatatatacacacac

SEQ ID NO: 84805 - DNA, 15 bp, Homo sapiens
atatatatacacaca

SEQ ID NO: 84806 - DNA, 15 bp, Homo sapiens
tatatatatacacac

SEQ ID NO: 84807 - DNA, 15 bp, Homo sapiens
atatatatatacaca

SEQ ID NO: 84808 - DNA, 15 bp, Homo sapiens
tatatatatatacac

SEQ ID NO: 84809 - DNA, 15 bp, Homo sapiens
atatatatatataca

SEQ ID NO: 84810 - DNA, 15 bp, Homo sapiens
tatatatatatatac

SEQ ID NO: 84811 - DNA, 15 bp, Homo sapiens
atatatatatatata

SEQ ID NO: 84812 - DNA, 15 bp, Homo sapiens
tatatatatatatat

SEQ ID NO: 84813 - DNA, 15 bp, Homo sapiens
ttatatatatatata

SEQ ID NO: 84814 - DNA, 15 bp, Homo sapiens
attatatatatatat

SEQ ID NO: 84815 - DNA, 15 bp, Homo sapiens
aattatatatatata

SEQ ID NO: 84816 - DNA, 15 bp, Homo sapiens
aaattatatatatat

SEQ ID NO: 84817 - DNA, 15 bp, Homo sapiens
aaaattatatatata

SEQ ID NO: 84818 - DNA, 15 bp, Homo sapiens
aaaaattatatatat

SEQ ID NO: 84819 - DNA, 15 bp, Homo sapiens
aaaaaattatatata

SEQ ID NO: 84820 - DNA, 15 bp, Homo sapiens
aaaaaaattatatat

SEQ ID NO: 84821 - DNA, 15 bp, Homo sapiens
aaaaaaaattatata

SEQ ID NO: 84822 - DNA, 15 bp, Homo sapiens
aaaaaaaaattatat

SEQ ID NO: 84823 - DNA, 15 bp, Homo sapiens
aaaaaaaaaattata

SEQ ID NO: 84824 - DNA, 15 bp, Homo sapiens
caaaaaaaaaattat

SEQ ID NO: 84825 - DNA, 15 bp, Homo sapiens
acaaaaaaaaaatta

SEQ ID NO: 84826 - DNA, 15 bp, Homo sapiens
tacaaaaaaaaaatt

SEQ ID NO: 84827 - DNA, 15 bp, Homo sapiens
ttacaaaaaaaaaat

SEQ ID NO: 84828 - DNA, 15 bp, Homo sapiens
tttacaaaaaaaaaa

SEQ ID NO: 84829 - DNA, 15 bp, Homo sapiens
ttttacaaaaaaaaa

SEQ ID NO: 84830 - DNA, 15 bp, Homo sapiens
attttacaaaaaaaa

SEQ ID NO: 84831 - DNA, 15 bp, Homo sapiens
cattttacaaaaaaa

SEQ ID NO: 84832 - DNA, 15 bp, Homo sapiens
acattttacaaaaaa

SEQ ID NO: 84833 - DNA, 15 bp, Homo sapiens
tacattttacaaaaa

SEQ ID NO: 84834 - DNA, 15 bp, Homo sapiens
gtacattttacaaaa

SEQ ID NO: 84835 - DNA, 15 bp, Homo sapiens
agtacattttacaaa

SEQ ID NO: 84836 - DNA, 15 bp, Homo sapiens
tagtacattttacaa

SEQ ID NO: 84837 - DNA, 15 bp, Homo sapiens
atagtacattttaca

SEQ ID NO: 84838 - DNA, 15 bp, Homo sapiens
gatagtacattttac

SEQ ID NO: 84839 - DNA, 15 bp, Homo sapiens
ggatagtacatttta

SEQ ID NO: 84840 - DNA, 15 bp, Homo sapiens
gggatagtacatttt

SEQ ID NO: 84841 - DNA, 15 bp, Homo sapiens
agggatagtacattt

SEQ ID NO: 84842 - DNA, 15 bp, Homo sapiens
cagggatagtacatt

SEQ ID NO: 84843 - DNA, 15 bp, Homo sapiens
ccagggatagtacat

SEQ ID NO: 84844 - DNA, 15 bp, Homo sapiens
tccagggatagtaca

SEQ ID NO: 84845 - DNA, 15 bp, Homo sapiens
ctccagggatagtac

SEQ ID NO: 84846 - DNA, 15 bp, Homo sapiens
gctccagggatagta

SEQ ID NO: 84847 - DNA, 15 bp, Homo sapiens
agctccagggatagt

SEQ ID NO: 84848 - DNA, 15 bp, Homo sapiens
aagctccagggatag

SEQ ID NO: 84849 - DNA, 15 bp, Homo sapiens
taagctccagggata

SEQ ID NO: 84850 - DNA, 15 bp, Homo sapiens
ataagctccagggat

SEQ ID NO: 84851 - DNA, 15 bp, Homo sapiens
tataagctccaggga

SEQ ID NO: 84852 - DNA, 15 bp, Homo sapiens
ttataagctccaggg

SEQ ID NO: 84853 - DNA, 15 bp, Homo sapiens
tttataagctccagg

SEQ ID NO: 84854 - DNA, 15 bp, Homo sapiens
ttttataagctccag

SEQ ID NO: 84855 - DNA, 15 bp, Homo sapiens
gttttataagctcca

SEQ ID NO: 84856 - DNA, 15 bp, Homo sapiens
tgttttataagctcc

SEQ ID NO: 84857 - DNA, 15 bp, Homo sapiens
atgttttataagctc

SEQ ID NO: 84858 - DNA, 15 bp, Homo sapiens
gatgttttataagct

SEQ ID NO: 84859 - DNA, 15 bp, Homo sapiens
ggatgttttataagc

SEQ ID NO: 84860 - DNA, 15 bp, Homo sapiens
tggatgttttataag

SEQ ID NO: 84861 - DNA, 15 bp, Homo sapiens
ctggatgttttataa

SEQ ID NO: 84862 - DNA, 15 bp, Homo sapiens
tctggatgttttata

SEQ ID NO: 84863 - DNA, 15 bp, Homo sapiens
ctctggatgttttat

SEQ ID NO: 84864 - DNA, 15 bp, Homo sapiens
actctggatgtttta

SEQ ID NO: 84865 - DNA, 15 bp, Homo sapiens
cactctggatgtttt

SEQ ID NO: 84866 - DNA, 15 bp, Homo sapiens
gcactctggatgttt

SEQ ID NO: 84867 - DNA, 15 bp, Homo sapiens
tgcactctggatgtt

SEQ ID NO: 84868 - DNA, 15 bp, Homo sapiens
ttgcactctggatgt

SEQ ID NO: 84869 - DNA, 15 bp, Homo sapiens
tttgcactctggatg

SEQ ID NO: 84870 - DNA, 15 bp, Homo sapiens
ctttgcactctggat

SEQ ID NO: 84871 - DNA, 15 bp, Homo sapiens
tctttgcactctgga

SEQ ID NO: 84872 - DNA, 15 bp, Homo sapiens
gtctttgcactctgg

SEQ ID NO: 84873 - DNA, 15 bp, Homo sapiens
tgtctttgcactctg

SEQ ID NO: 84874 - DNA, 15 bp, Homo sapiens
ttgtctttgcactct

SEQ ID NO: 84875 - DNA, 15 bp, Homo sapiens
attgtctttgcactc

SEQ ID NO: 84876 - DNA, 15 bp, Homo sapiens
cattgtctttgcact

SEQ ID NO: 84877 - DNA, 15 bp, Homo sapiens
tcattgtctttgcac

SEQ ID NO: 84878 - DNA, 15 bp, Homo sapiens
gtcattgtctttgca

SEQ ID NO: 84879 - DNA, 15 bp, Homo sapiens
agtcattgtctttgc

SEQ ID NO: 84880 - DNA, 15 bp, Homo sapiens
cagtcattgtctttg

SEQ ID NO: 84881 - DNA, 15 bp, Homo sapiens
tcagtcattgtcttt

SEQ ID NO: 84882 - DNA, 15 bp, Homo sapiens
gtcagtcattgtctt

SEQ ID NO: 84883 - DNA, 15 bp, Homo sapiens
ggtcagtcattgtct

SEQ ID NO: 84884 - DNA, 15 bp, Homo sapiens
aggtcagtcattgtc

SEQ ID NO: 84885 - DNA, 15 bp, Homo sapiens
aaggtcagtcattgt

SEQ ID NO: 84886 - DNA, 15 bp, Homo sapiens
aaaggtcagtcattg

SEQ ID NO: 84887 - DNA, 15 bp, Homo sapiens
gaaaggtcagtcatt

SEQ ID NO: 84888 - DNA, 15 bp, Homo sapiens
tgaaaggtcagtcat

SEQ ID NO: 84889 - DNA, 15 bp, Homo sapiens
ctgaaaggtcagtca

SEQ ID NO: 84890 - DNA, 15 bp, Homo sapiens
tctgaaaggtcagtc

SEQ ID NO: 84891 - DNA, 15 bp, Homo sapiens
ctctgaaaggtcagt

SEQ ID NO: 84892 - DNA, 15 bp, Homo sapiens
cctctgaaaggtcag

SEQ ID NO: 84893 - DNA, 15 bp, Homo sapiens
gcctctgaaaggtca

SEQ ID NO: 84894 - DNA, 15 bp, Homo sapiens
tgcctctgaaaggtc

SEQ ID NO: 84895 - DNA, 15 bp, Homo sapiens
gtgcctctgaaaggt

SEQ ID NO: 84896 - DNA, 15 bp, Homo sapiens
ggtgcctctgaaagg

SEQ ID NO: 84897 - DNA, 15 bp, Homo sapiens
gggtgcctctgaaag

SEQ ID NO: 84898 - DNA, 15 bp, Homo sapiens
tgggtgcctctgaaa

SEQ ID NO: 84899 - DNA, 15 bp, Homo sapiens
ctgggtgcctctgaa

SEQ ID NO: 84900 - DNA, 15 bp, Homo sapiens
cctgggtgcctctga

SEQ ID NO: 84901 - DNA, 15 bp, Homo sapiens
tcctgggtgcctctg

SEQ ID NO: 84902 - DNA, 15 bp, Homo sapiens
ttcctgggtgcctct

SEQ ID NO: 84903 - DNA, 15 bp, Homo sapiens
gttcctgggtgcctc

SEQ ID NO: 84904 - DNA, 15 bp, Homo sapiens
ggttcctgggtgcct

SEQ ID NO: 84905 - DNA, 15 bp, Homo sapiens
gggttcctgggtgcc

SEQ ID NO: 84906 - DNA, 15 bp, Homo sapiens
ggggttcctgggtgc

SEQ ID NO: 84907 - DNA, 15 bp, Homo sapiens
gggggttcctgggtg

SEQ ID NO: 84908 - DNA, 15 bp, Homo sapiens
agggggttcctgggt

SEQ ID NO: 84909 - DNA, 15 bp, Homo sapiens
cagggggttcctggg

SEQ ID NO: 84910 - DNA, 15 bp, Homo sapiens
ccagggggttcctgg

SEQ ID NO: 84911 - DNA, 15 bp, Homo sapiens
accagggggttcctg

SEQ ID NO: 84912 - DNA, 15 bp, Homo sapiens
gaccagggggttcct

SEQ ID NO: 84913 - DNA, 15 bp, Homo sapiens
tgaccagggggttcc

SEQ ID NO: 84914 - DNA, 15 bp, Homo sapiens
ctgaccagggggttc

SEQ ID NO: 84915 - DNA, 15 bp, Homo sapiens
tctgaccagggggtt

SEQ ID NO: 84916 - DNA, 15 bp, Homo sapiens
atctgaccagggggt

SEQ ID NO: 84917 - DNA, 15 bp, Homo sapiens
aatctgaccaggggg

SEQ ID NO: 84918 - DNA, 15 bp, Homo sapiens
gaatctgaccagggg

SEQ ID NO: 84919 - DNA, 15 bp, Homo sapiens
tgaatctgaccaggg

SEQ ID NO: 84920 - DNA, 15 bp, Homo sapiens
ttgaatctgaccagg

SEQ ID NO: 84921 - DNA, 15 bp, Homo sapiens
cttgaatctgaccag

SEQ ID NO: 84922 - DNA, 15 bp, Homo sapiens
ccttgaatctgacca

SEQ ID NO: 84923 - DNA, 15 bp, Homo sapiens
tccttgaatctgacc

SEQ ID NO: 84924 - DNA, 15 bp, Homo sapiens
atccttgaatctgac

SEQ ID NO: 84925 - DNA, 15 bp, Homo sapiens
gatccttgaatctga

SEQ ID NO: 84926 - DNA, 15 bp, Homo sapiens
ggatccttgaatctg

SEQ ID NO: 84927 - DNA, 15 bp, Homo sapiens
tggatccttgaatct

SEQ ID NO: 84928 - DNA, 15 bp, Homo sapiens
atggatccttgaatc

SEQ ID NO: 84929 - DNA, 15 bp, Homo sapiens
tatggatccttgaat

SEQ ID NO: 84930 - DNA, 15 bp, Homo sapiens
atatggatccttgaa

SEQ ID NO: 84931 - DNA, 15 bp, Homo sapiens
aatatggatccttga

SEQ ID NO: 84932 - DNA, 15 bp, Homo sapiens
gaatatggatccttg

SEQ ID NO: 84933 - DNA, 15 bp, Homo sapiens
ggaatatggatcctt

SEQ ID NO: 84934 - DNA, 15 bp, Homo sapiens
gggaatatggatcct

SEQ ID NO: 84935 - DNA, 15 bp, Homo sapiens
tgggaatatggatcc

SEQ ID NO: 84936 - DNA, 15 bp, Homo sapiens
gtgggaatatggatc

SEQ ID NO: 84937 - DNA, 15 bp, Homo sapiens
tgtgggaatatggat

SEQ ID NO: 84938 - DNA, 15 bp, Homo sapiens
ctgtgggaatatgga

SEQ ID NO: 84939 - DNA, 15 bp, Homo sapiens
gctgtgggaatatgg

SEQ ID NO: 84940 - DNA, 15 bp, Homo sapiens
agctgtgggaatatg

SEQ ID NO: 84941 - DNA, 15 bp, Homo sapiens
gagctgtgggaatat

SEQ ID NO: 84942 - DNA, 15 bp, Homo sapiens
ggagctgtgggaata

SEQ ID NO: 84943 - DNA, 15 bp, Homo sapiens
gggagctgtgggaat

SEQ ID NO: 84944 - DNA, 15 bp, Homo sapiens
ggggagctgtgggaa

SEQ ID NO: 84945 - DNA, 15 bp, Homo sapiens
tggggagctgtggga

SEQ ID NO: 84946 - DNA, 15 bp, Homo sapiens
ctggggagctgtggg

SEQ ID NO: 84947 - DNA, 15 bp, Homo sapiens
cctggggagctgtgg

SEQ ID NO: 84948 - DNA, 15 bp, Homo sapiens
ccctggggagctgtg

SEQ ID NO: 84949 - DNA, 15 bp, Homo sapiens
tccctggggagctgt

SEQ ID NO: 84950 - DNA, 15 bp, Homo sapiens
gtccctggggagctg

SEQ ID NO: 84951 - DNA, 15 bp, Homo sapiens
ggtccctggggagct

SEQ ID NO: 84952 - DNA, 15 bp, Homo sapiens
gggtccctggggagc

SEQ ID NO: 84953 - DNA, 15 bp, Homo sapiens
tgggtccctggggag

SEQ ID NO: 84954 - DNA, 15 bp, Homo sapiens
ctgggtccctgggga

SEQ ID NO: 84955 - DNA, 15 bp, Homo sapiens
tctgggtccctgggg

SEQ ID NO: 84956 - DNA, 15 bp, Homo sapiens
atctgggtccctggg

SEQ ID NO: 84957 - DNA, 15 bp, Homo sapiens
catctgggtccctgg

SEQ ID NO: 84958 - DNA, 15 bp, Homo sapiens
ccatctgggtccctg

SEQ ID NO: 84959 - DNA, 15 bp, Homo sapiens
cccatctgggtccct

SEQ ID NO: 84960 - DNA, 15 bp, Homo sapiens
tcccatctgggtccc

SEQ ID NO: 84961 - DNA, 15 bp, Homo sapiens
gtcccatctgggtcc

SEQ ID NO: 84962 - DNA, 15 bp, Homo sapiens
tgtcccatctgggtc

SEQ ID NO: 84963 - DNA, 15 bp, Homo sapiens
atgtcccatctgggt

SEQ ID NO: 84964 - DNA, 15 bp, Homo sapiens
catgtcccatctggg

SEQ ID NO: 84965 - DNA, 15 bp, Homo sapiens
ccatgtcccatctgg

SEQ ID NO: 84966 - DNA, 15 bp, Homo sapiens
accatgtcccatctg

SEQ ID NO: 84967 - DNA, 15 bp, Homo sapiens
caccatgtcccatct

SEQ ID NO: 84968 - DNA, 15 bp, Homo sapiens
ccaccatgtcccatc

SEQ ID NO: 84969 - DNA, 15 bp, Homo sapiens
cccaccatgtcccat

SEQ ID NO: 84970 - DNA, 15 bp, Homo sapiens
ccccaccatgtccca

SEQ ID NO: 84971 - DNA, 15 bp, Homo sapiens
accccaccatgtccc

SEQ ID NO: 84972 - DNA, 15 bp, Homo sapiens
gaccccaccatgtcc

SEQ ID NO: 84973 - DNA, 15 bp, Homo sapiens
agaccccaccatgtc

SEQ ID NO: 84974 - DNA, 15 bp, Homo sapiens
cagaccccaccatgt

SEQ ID NO: 84975 - DNA, 15 bp, Homo sapiens
ccagaccccaccatg

SEQ ID NO: 84976 - DNA, 15 bp, Homo sapiens
cccagaccccaccat

SEQ ID NO: 84977 - DNA, 15 bp, Homo sapiens
tcccagaccccacca

SEQ ID NO: 84978 - DNA, 15 bp, Homo sapiens
atcccagaccccacc

SEQ ID NO: 84979 - DNA, 15 bp, Homo sapiens
catcccagaccccac

SEQ ID NO: 84980 - DNA, 15 bp, Homo sapiens
ccatcccagacccca

SEQ ID NO: 84981 - DNA, 15 bp, Homo sapiens
accatcccagacccc

SEQ ID NO: 84982 - DNA, 15 bp, Homo sapiens
caccatcccagaccc

SEQ ID NO: 84983 - DNA, 15 bp, Homo sapiens
tcaccatcccagacc

SEQ ID NO: 84984 - DNA, 15 bp, Homo sapiens
ttcaccatcccagac

SEQ ID NO: 84985 - DNA, 15 bp, Homo sapiens
gttcaccatcccaga

SEQ ID NO: 84986 - DNA, 15 bp, Homo sapiens
agttcaccatcccag

SEQ ID NO: 84987 - DNA, 15 bp, Homo sapiens
aagttcaccatccca

SEQ ID NO: 84988 - DNA, 15 bp, Homo sapiens
gaagttcaccatccc

SEQ ID NO: 84989 - DNA, 15 bp, Homo sapiens
tgaagttcaccatcc

SEQ ID NO: 84990 - DNA, 15 bp, Homo sapiens
ctgaagttcaccatc

SEQ ID NO: 84991 - DNA, 15 bp, Homo sapiens
tctgaagttcaccat

SEQ ID NO: 84992 - DNA, 15 bp, Homo sapiens
ctctgaagttcacca

SEQ ID NO: 84993 - DNA, 15 bp, Homo sapiens
cctctgaagttcacc

SEQ ID NO: 84994 - DNA, 15 bp, Homo sapiens
gcctctgaagttcac

SEQ ID NO: 84995 - DNA, 15 bp, Homo sapiens
ggcctctgaagttca

SEQ ID NO: 84996 - DNA, 15 bp, Homo sapiens
aggcctctgaagttc

SEQ ID NO: 84997 - DNA, 15 bp, Homo sapiens
caggcctctgaagtt

SEQ ID NO: 84998 - DNA, 15 bp, Homo sapiens
tcaggcctctgaagt

SEQ ID NO: 84999 - DNA, 15 bp, Homo sapiens
ctcaggcctctgaag

SEQ ID NO: 85000 - DNA, 15 bp, Homo sapiens
actcaggcctctgaa

SEQ ID NO: 85001 - DNA, 15 bp, Homo sapiens
gactcaggcctctga

SEQ ID NO: 85002 - DNA, 15 bp, Homo sapiens
agactcaggcctctg

SEQ ID NO: 85003 - DNA, 15 bp, Homo sapiens
cagactcaggcctct

SEQ ID NO: 85004 - DNA, 15 bp, Homo sapiens
ccagactcaggcctc

SEQ ID NO: 85005 - DNA, 15 bp, Homo sapiens
gccagactcaggcct

SEQ ID NO: 85006 - DNA, 15 bp, Homo sapiens
agccagactcaggcc

SEQ ID NO: 85007 - DNA, 15 bp, Homo sapiens
aagccagactcaggc

SEQ ID NO: 85008 - DNA, 15 bp, Homo sapiens
gaagccagactcagg

SEQ ID NO: 85009 - DNA, 15 bp, Homo sapiens
ggaagccagactcag

SEQ ID NO: 85010 - DNA, 15 bp, Homo sapiens
aggaagccagactca

SEQ ID NO: 85011 - DNA, 15 bp, Homo sapiens
caggaagccagactc

SEQ ID NO: 85012 - DNA, 15 bp, Homo sapiens
acaggaagccagact

SEQ ID NO: 85013 - DNA, 15 bp, Homo sapiens
cacaggaagccagac

SEQ ID NO: 85014 - DNA, 15 bp, Homo sapiens
ccacaggaagccaga

SEQ ID NO: 85015 - DNA, 15 bp, Homo sapiens
cccacaggaagccag

SEQ ID NO: 85016 - DNA, 15 bp, Homo sapiens
acccacaggaagcca

SEQ ID NO: 85017 - DNA, 15 bp, Homo sapiens
cacccacaggaagcc

SEQ ID NO: 85018 - DNA, 15 bp, Homo sapiens
acacccacaggaagc

SEQ ID NO: 85019 - DNA, 15 bp, Homo sapiens
cacacccacaggaag

SEQ ID NO: 85020 - DNA, 15 bp, Homo sapiens
tcacacccacaggaa

SEQ ID NO: 85021 - DNA, 15 bp, Homo sapiens
ctcacacccacagga

SEQ ID NO: 85022 - DNA, 15 bp, Homo sapiens
actcacacccacagg

SEQ ID NO: 85023 - DNA, 15 bp, Homo sapiens
aactcacacccacag

SEQ ID NO: 85024 - DNA, 15 bp, Homo sapiens
caactcacacccaca

SEQ ID NO: 85025 - DNA, 15 bp, Homo sapiens
ccaactcacacccac

SEQ ID NO: 85026 - DNA, 15 bp, Homo sapiens
cccaactcacaccca

SEQ ID NO: 85027 - DNA, 15 bp, Homo sapiens
tcccaactcacaccc

SEQ ID NO: 85028 - DNA, 15 bp, Homo sapiens
gtcccaactcacacc

SEQ ID NO: 85029 - DNA, 15 bp, Homo sapiens
tgtcccaactcacac

SEQ ID NO: 85030 - DNA, 15 bp, Homo sapiens
ttgtcccaactcaca

SEQ ID NO: 85031 - DNA, 15 bp, Homo sapiens
cttgtcccaactcac

SEQ ID NO: 85032 - DNA, 15 bp, Homo sapiens
gcttgtcccaactca

SEQ ID NO: 85033 - DNA, 15 bp, Homo sapiens
ggcttgtcccaactc

SEQ ID NO: 85034 - DNA, 15 bp, Homo sapiens
tggcttgtcccaact

SEQ ID NO: 85035 - DNA, 15 bp, Homo sapiens
ttggcttgtcccaac

SEQ ID NO: 85036 - DNA, 15 bp, Homo sapiens
attggcttgtcccaa

SEQ ID NO: 85037 - DNA, 15 bp, Homo sapiens
cattggcttgtccca

SEQ ID NO: 85038 - DNA, 15 bp, Homo sapiens
tcattggcttgtccc

SEQ ID NO: 85039 - DNA, 15 bp, Homo sapiens
ctcattggcttgtcc

SEQ ID NO: 85040 - DNA, 15 bp, Homo sapiens
gctcattggcttgtc

SEQ ID NO: 85041 - DNA, 15 bp, Homo sapiens
ggctcattggcttgt

SEQ ID NO: 85042 - DNA, 15 bp, Homo sapiens
aggctcattggcttg

SEQ ID NO: 85043 - DNA, 15 bp, Homo sapiens
aaggctcattggctt

SEQ ID NO: 85044 - DNA, 15 bp, Homo sapiens
aaaggctcattggct

SEQ ID NO: 85045 - DNA, 15 bp, Homo sapiens
gaaaggctcattggc

SEQ ID NO: 85046 - DNA, 15 bp, Homo sapiens
agaaaggctcattgg

SEQ ID NO: 85047 - DNA, 15 bp, Homo sapiens
gagaaaggctcattg

SEQ ID NO: 85048 - DNA, 15 bp, Homo sapiens
agagaaaggctcatt

SEQ ID NO: 85049 - DNA, 15 bp, Homo sapiens
cagagaaaggctcat

SEQ ID NO: 85050 - DNA, 15 bp, Homo sapiens
gcagagaaaggctca

SEQ ID NO: 85051 - DNA, 15 bp, Homo sapiens
agcagagaaaggctc

SEQ ID NO: 85052 - DNA, 15 bp, Homo sapiens
gagcagagaaaggct

SEQ ID NO: 85053 - DNA, 15 bp, Homo sapiens
agagcagagaaaggc

SEQ ID NO: 85054 - DNA, 15 bp, Homo sapiens
cagagcagagaaagg

SEQ ID NO: 85055 - DNA, 15 bp, Homo sapiens
gcagagcagagaaag

SEQ ID NO: 85056 - DNA, 15 bp, Homo sapiens
ggcagagcagagaaa

SEQ ID NO: 85057 - DNA, 15 bp, Homo sapiens
tggcagagcagagaa

SEQ ID NO: 85058 - DNA, 15 bp, Homo sapiens
gtggcagagcagaga

SEQ ID NO: 85059 - DNA, 15 bp, Homo sapiens
agtggcagagcagag

SEQ ID NO: 85060 - DNA, 15 bp, Homo sapiens
aagtggcagagcaga

SEQ ID NO: 85061 - DNA, 15 bp, Homo sapiens
taagtggcagagcag

SEQ ID NO: 85062 - DNA, 15 bp, Homo sapiens
gtaagtggcagagca

SEQ ID NO: 85063 - DNA, 15 bp, Homo sapiens
ggtaagtggcagagc

SEQ ID NO: 85064 - DNA, 15 bp, Homo sapiens
tggtaagtggcagag

SEQ ID NO: 85065 - DNA, 15 bp, Homo sapiens
ctggtaagtggcaga

SEQ ID NO: 85066 - DNA, 15 bp, Homo sapiens
gctggtaagtggcag

SEQ ID NO: 85067 - DNA, 15 bp, Homo sapiens
agctggtaagtggca

SEQ ID NO: 85068 - DNA, 15 bp, Homo sapiens
cagctggtaagtggc

SEQ ID NO: 85069 - DNA, 15 bp, Homo sapiens
acagctggtaagtgg

SEQ ID NO: 85070 - DNA, 15 bp, Homo sapiens
cacagctggtaagtg

SEQ ID NO: 85071 - DNA, 15 bp, Homo sapiens
acacagctggtaagt

SEQ ID NO: 85072 - DNA, 15 bp, Homo sapiens
cacacagctggtaag

SEQ ID NO: 85073 - DNA, 15 bp, Homo sapiens
tcacacagctggtaa

SEQ ID NO: 85074 - DNA, 15 bp, Homo sapiens
gtcacacagctggta

SEQ ID NO: 85075 - DNA, 15 bp, Homo sapiens
ggtcacacagctggt

SEQ ID NO: 85076 - DNA, 15 bp, Homo sapiens
aggtcacacagctgg

SEQ ID NO: 85077 - DNA, 15 bp, Homo sapiens
aaggtcacacagctg

SEQ ID NO: 85078 - DNA, 15 bp, Homo sapiens
caaggtcacacagct

SEQ ID NO: 85079 - DNA, 15 bp, Homo sapiens
tcaaggtcacacagc

SEQ ID NO: 85080 - DNA, 15 bp, Homo sapiens
ctcaaggtcacacag

SEQ ID NO: 85081 - DNA, 15 bp, Homo sapiens
gctcaaggtcacaca

SEQ ID NO: 85082 - DNA, 15 bp, Homo sapiens
tgctcaaggtcacac

SEQ ID NO: 85083 - DNA, 15 bp, Homo sapiens
ttgctcaaggtcaca

SEQ ID NO: 85084 - DNA, 15 bp, Homo sapiens
cttgctcaaggtcac

SEQ ID NO: 85085 - DNA, 15 bp, Homo sapiens
acttgctcaaggtca

SEQ ID NO: 85086 - DNA, 15 bp, Homo sapiens
aacttgctcaaggtc

SEQ ID NO: 85087 - DNA, 15 bp, Homo sapiens
caacttgctcaaggt

SEQ ID NO: 85088 - DNA, 15 bp, Homo sapiens
gcaacttgctcaagg

SEQ ID NO: 85089 - DNA, 15 bp, Homo sapiens
agcaacttgctcaag

SEQ ID NO: 85090 - DNA, 15 bp, Homo sapiens
aagcaacttgctcaa

SEQ ID NO: 85091 - DNA, 15 bp, Homo sapiens
taagcaacttgctca

SEQ ID NO: 85092 - DNA, 15 bp, Homo sapiens
ttaagcaacttgctc

SEQ ID NO: 85093 - DNA, 15 bp, Homo sapiens
gttaagcaacttgct

SEQ ID NO: 85094 - DNA, 15 bp, Homo sapiens
agttaagcaacttgc

SEQ ID NO: 85095 - DNA, 15 bp, Homo sapiens
cagttaagcaacttg

SEQ ID NO: 85096 - DNA, 15 bp, Homo sapiens
gcagttaagcaactt

SEQ ID NO: 85097 - DNA, 15 bp, Homo sapiens
ggcagttaagcaact

SEQ ID NO: 85098 - DNA, 15 bp, Homo sapiens
gggcagttaagcaac

SEQ ID NO: 85099 - DNA, 15 bp, Homo sapiens
agggcagttaagcaa

SEQ ID NO: 85100 - DNA, 15 bp, Homo sapiens
cagggcagttaagca

SEQ ID NO: 85101 - DNA, 15 bp, Homo sapiens
tcagggcagttaagc

SEQ ID NO: 85102 - DNA, 15 bp, Homo sapiens
ctcagggcagttaag

SEQ ID NO: 85103 - DNA, 15 bp, Homo sapiens
gctcagggcagttaa

SEQ ID NO: 85104 - DNA, 15 bp, Homo sapiens
ggctcagggcagtta

SEQ ID NO: 85105 - DNA, 15 bp, Homo sapiens
aggctcagggcagtt

SEQ ID NO: 85106 - DNA, 15 bp, Homo sapiens
gaggctcagggcagt

SEQ ID NO: 85107 - DNA, 15 bp, Homo sapiens
tgaggctcagggcag

SEQ ID NO: 85108 - DNA, 15 bp, Homo sapiens
atgaggctcagggca

SEQ ID NO: 85109 - DNA, 15 bp, Homo sapiens
gatgaggctcagggc

SEQ ID NO: 85110 - DNA, 15 bp, Homo sapiens
agatgaggctcaggg

SEQ ID NO: 85111 - DNA, 15 bp, Homo sapiens
cagatgaggctcagg

SEQ ID NO: 85112 - DNA, 15 bp, Homo sapiens
acagatgaggctcag

SEQ ID NO: 85113 - DNA, 15 bp, Homo sapiens
tacagatgaggctca

SEQ ID NO: 85114 - DNA, 15 bp, Homo sapiens
ttacagatgaggctc

SEQ ID NO: 85115 - DNA, 15 bp, Homo sapiens
tttacagatgaggct

SEQ ID NO: 85116 - DNA, 15 bp, Homo sapiens
ttttacagatgaggc

SEQ ID NO: 85117 - DNA, 15 bp, Homo sapiens
gttttacagatgagg

SEQ ID NO: 85118 - DNA, 15 bp, Homo sapiens
tgttttacagatgag

SEQ ID NO: 85119 - DNA, 15 bp, Homo sapiens
ttgttttacagatga

SEQ ID NO: 85120 - DNA, 15 bp, Homo sapiens
cttgttttacagatg

SEQ ID NO: 85121 - DNA, 15 bp, Homo sapiens
ccttgttttacagat

SEQ ID NO: 85122 - DNA, 15 bp, Homo sapiens
tccttgttttacaga

SEQ ID NO: 85123 - DNA, 15 bp, Homo sapiens
atccttgttttacag

SEQ ID NO: 85124 - DNA, 15 bp, Homo sapiens
aatccttgttttaca

SEQ ID NO: 85125 - DNA, 15 bp, Homo sapiens
gaatccttgttttac

SEQ ID NO: 85126 - DNA, 15 bp, Homo sapiens
agaatccttgtttta

SEQ ID NO: 85127 - DNA, 15 bp, Homo sapiens
cagaatccttgtttt

SEQ ID NO: 85128 - DNA, 15 bp, Homo sapiens
tcagaatccttgttt

SEQ ID NO: 85129 - DNA, 15 bp, Homo sapiens
ctcagaatccttgtt

SEQ ID NO: 85130 - DNA, 15 bp, Homo sapiens
gctcagaatccttgt

SEQ ID NO: 85131 - DNA, 15 bp, Homo sapiens
tgctcagaatccttg

SEQ ID NO: 85132 - DNA, 15 bp, Homo sapiens
atgctcagaatcctt

SEQ ID NO: 85133 - DNA, 15 bp, Homo sapiens
tatgctcagaatcct

SEQ ID NO: 85134 - DNA, 15 bp, Homo sapiens
atatgctcagaatcc

SEQ ID NO: 85135 - DNA, 15 bp, Homo sapiens
gatatgctcagaatc

SEQ ID NO: 85136 - DNA, 15 bp, Homo sapiens
agatatgctcagaat

SEQ ID NO: 85137 - DNA, 15 bp, Homo sapiens
tagatatgctcagaa

SEQ ID NO: 85138 - DNA, 15 bp, Homo sapiens
atagatatgctcaga

SEQ ID NO: 85139 - DNA, 15 bp, Homo sapiens
catagatatgctcag

SEQ ID NO: 85140 - DNA, 15 bp, Homo sapiens
acatagatatgctca

SEQ ID NO: 85141 - DNA, 15 bp, Homo sapiens
aacatagatatgctc

SEQ ID NO: 85142 - DNA, 15 bp, Homo sapiens
taacatagatatgct

SEQ ID NO: 85143 - DNA, 15 bp, Homo sapiens
ataacatagatatgc

SEQ ID NO: 85144 - DNA, 15 bp, Homo sapiens
tataacatagatatg

SEQ ID NO: 85145 - DNA, 15 bp, Homo sapiens
ctataacatagatat

SEQ ID NO: 85146 - DNA, 15 bp, Homo sapiens
tctataacatagata

SEQ ID NO: 85147 - DNA, 15 bp, Homo sapiens
atctataacatagat

SEQ ID NO: 85148 - DNA, 15 bp, Homo sapiens
aatctataacataga

SEQ ID NO: 85149 - DNA, 15 bp, Homo sapiens
aaatctataacatag

SEQ ID NO: 85150 - DNA, 15 bp, Homo sapiens
caaatctataacata

SEQ ID NO: 85151 - DNA, 15 bp, Homo sapiens
gcaaatctataacat

SEQ ID NO: 85152 - DNA, 15 bp, Homo sapiens
tgcaaatctataaca

SEQ ID NO: 85153 - DNA, 15 bp, Homo sapiens
ctgcaaatctataac

SEQ ID NO: 85154 - DNA, 15 bp, Homo sapiens
actgcaaatctataa

SEQ ID NO: 85155 - DNA, 15 bp, Homo sapiens
cactgcaaatctata

SEQ ID NO: 85156 - DNA, 15 bp, Homo sapiens
tcactgcaaatctat

SEQ ID NO: 85157 - DNA, 15 bp, Homo sapiens
ctcactgcaaatcta

SEQ ID NO: 85158 - DNA, 15 bp, Homo sapiens
cctcactgcaaatct

SEQ ID NO: 85159 - DNA, 15 bp, Homo sapiens
tcctcactgcaaatc

SEQ ID NO: 85160 - DNA, 15 bp, Homo sapiens
atcctcactgcaaat

SEQ ID NO: 85161 - DNA, 15 bp, Homo sapiens
aatcctcactgcaaa

SEQ ID NO: 85162 - DNA, 15 bp, Homo sapiens
caatcctcactgcaa

SEQ ID NO: 85163 - DNA, 15 bp, Homo sapiens
tcaatcctcactgca

SEQ ID NO: 85164 - DNA, 15 bp, Homo sapiens
ttcaatcctcactgc

SEQ ID NO: 85165 - DNA, 15 bp, Homo sapiens
attcaatcctcactg

SEQ ID NO: 85166 - DNA, 15 bp, Homo sapiens
tattcaatcctcact

SEQ ID NO: 85167 - DNA, 15 bp, Homo sapiens
ttattcaatcctcac

SEQ ID NO: 85168 - DNA, 15 bp, Homo sapiens
cttattcaatcctca

SEQ ID NO: 85169 - DNA, 15 bp, Homo sapiens
ccttattcaatcctc

SEQ ID NO: 85170 - DNA, 15 bp, Homo sapiens
accttattcaatcct

SEQ ID NO: 85171 - DNA, 15 bp, Homo sapiens
caccttattcaatcc

SEQ ID NO: 85172 - DNA, 15 bp, Homo sapiens
tcaccttattcaatc

SEQ ID NO: 85173 - DNA, 15 bp, Homo sapiens
atcaccttattcaat

SEQ ID NO: 85174 - DNA, 15 bp, Homo sapiens
catcaccttattcaa

SEQ ID NO: 85175 - DNA, 15 bp, Homo sapiens
ccatcaccttattca

SEQ ID NO: 85176 - DNA, 15 bp, Homo sapiens
tccatcaccttattc

SEQ ID NO: 85177 - DNA, 15 bp, Homo sapiens
atccatcaccttatt

SEQ ID NO: 85178 - DNA, 15 bp, Homo sapiens
catccatcaccttat

SEQ ID NO: 85179 - DNA, 15 bp, Homo sapiens
acatccatcacctta

SEQ ID NO: 85180 - DNA, 15 bp, Homo sapiens
aacatccatcacctt

SEQ ID NO: 85181 - DNA, 15 bp, Homo sapiens
taacatccatcacct

SEQ ID NO: 85182 - DNA, 15 bp, Homo sapiens
ttaacatccatcacc

SEQ ID NO: 85183 - DNA, 15 bp, Homo sapiens
cttaacatccatcac

SEQ ID NO: 85184 - DNA, 15 bp, Homo sapiens
acttaacatccatca

SEQ ID NO: 85185 - DNA, 15 bp, Homo sapiens
cacttaacatccatc

SEQ ID NO: 85186 - DNA, 15 bp, Homo sapiens
tcacttaacatccat

SEQ ID NO: 85187 - DNA, 15 bp, Homo sapiens
atcacttaacatcca

SEQ ID NO: 85188 - DNA, 15 bp, Homo sapiens
aatcacttaacatcc

SEQ ID NO: 85189 - DNA, 15 bp, Homo sapiens
taatcacttaacatc

SEQ ID NO: 85190 - DNA, 15 bp, Homo sapiens
ttaatcacttaacat

SEQ ID NO: 85191 - DNA, 15 bp, Homo sapiens
gttaatcacttaaca

SEQ ID NO: 85192 - DNA, 15 bp, Homo sapiens
tgttaatcacttaac

SEQ ID NO: 85193 - DNA, 15 bp, Homo sapiens
gtgttaatcacttaa

SEQ ID NO: 85194 - DNA, 15 bp, Homo sapiens
tgtgttaatcactta

SEQ ID NO: 85195 - DNA, 15 bp, Homo sapiens
ttgtgttaatcactt

SEQ ID NO: 85196 - DNA, 15 bp, Homo sapiens
attgtgttaatcact

SEQ ID NO: 85197 - DNA, 15 bp, Homo sapiens
cattgtgttaatcac

SEQ ID NO: 85198 - DNA, 15 bp, Homo sapiens
acattgtgttaatca

SEQ ID NO: 85199 - DNA, 15 bp, Homo sapiens
gacattgtgttaatc

SEQ ID NO: 85200 - DNA, 15 bp, Homo sapiens
agacattgtgttaat

SEQ ID NO: 85201 - DNA, 15 bp, Homo sapiens
aagacattgtgttaa

SEQ ID NO: 85202 - DNA, 15 bp, Homo sapiens
caagacattgtgtta

SEQ ID NO: 85203 - DNA, 15 bp, Homo sapiens
gcaagacattgtgtt

SEQ ID NO: 85204 - DNA, 15 bp, Homo sapiens
tgcaagacattgtgt

SEQ ID NO: 85205 - DNA, 15 bp, Homo sapiens
gtgcaagacattgtg

SEQ ID NO: 85206 - DNA, 15 bp, Homo sapiens
tgtgcaagacattgt

SEQ ID NO: 85207 - DNA, 15 bp, Homo sapiens
atgtgcaagacattg

SEQ ID NO: 85208 - DNA, 15 bp, Homo sapiens
tatgtgcaagacatt

SEQ ID NO: 85209 - DNA, 15 bp, Homo sapiens
ctatgtgcaagacat

SEQ ID NO: 85210 - DNA, 15 bp, Homo sapiens
actatgtgcaagaca

SEQ ID NO: 85211 - DNA, 15 bp, Homo sapiens
tactatgtgcaagac

SEQ ID NO: 85212 - DNA, 15 bp, Homo sapiens
ttactatgtgcaaga

SEQ ID NO: 85213 - DNA, 15 bp, Homo sapiens
tttactatgtgcaag

SEQ ID NO: 85214 - DNA, 15 bp, Homo sapiens
gtttactatgtgcaa

SEQ ID NO: 85215 - DNA, 15 bp, Homo sapiens
tgtttactatgtgca

SEQ ID NO: 85216 - DNA, 15 bp, Homo sapiens
atgtttactatgtgc

SEQ ID NO: 85217 - DNA, 15 bp, Homo sapiens
gatgtttactatgtg

SEQ ID NO: 85218 - DNA, 15 bp, Homo sapiens
agatgtttactatgt

SEQ ID NO: 85219 - DNA, 15 bp, Homo sapiens
cagatgtttactatg

SEQ ID NO: 85220 - DNA, 15 bp, Homo sapiens
tcagatgtttactat

SEQ ID NO: 85221 - DNA, 15 bp, Homo sapiens
atcagatgtttacta

SEQ ID NO: 85222 - DNA, 15 bp, Homo sapiens
tatcagatgtttact

SEQ ID NO: 85223 - DNA, 15 bp, Homo sapiens
ttatcagatgtttac

SEQ ID NO: 85224 - DNA, 15 bp, Homo sapiens
tttatcagatgttta

SEQ ID NO: 85225 - DNA, 15 bp, Homo sapiens
atttatcagatgttt

SEQ ID NO: 85226 - DNA, 15 bp, Homo sapiens
aatttatcagatgtt

SEQ ID NO: 85227 - DNA, 15 bp, Homo sapiens
taatttatcagatgt

SEQ ID NO: 85228 - DNA, 15 bp, Homo sapiens
ataatttatcagatg

SEQ ID NO: 85229 - DNA, 15 bp, Homo sapiens
aataatttatcagat

SEQ ID NO: 85230 - DNA, 15 bp, Homo sapiens
taataatttatcaga

SEQ ID NO: 85231 - DNA, 15 bp, Homo sapiens
ctaataatttatcag

SEQ ID NO: 85232 - DNA, 15 bp, Homo sapiens
actaataatttatca

SEQ ID NO: 85233 - DNA, 15 bp, Homo sapiens
tactaataatttatc

SEQ ID NO: 85234 - DNA, 15 bp, Homo sapiens
ttactaataatttat

SEQ ID NO: 85235 - DNA, 15 bp, Homo sapiens
tttactaataattta

SEQ ID NO: 85236 - DNA, 15 bp, Homo sapiens
atttactaataattt

SEQ ID NO: 85237 - DNA, 15 bp, Homo sapiens
aatttactaataatt

SEQ ID NO: 85238 - DNA, 15 bp, Homo sapiens
taatttactaataat

SEQ ID NO: 85239 - DNA, 15 bp, Homo sapiens
gtaatttactaataa

SEQ ID NO: 85240 - DNA, 15 bp, Homo sapiens
agtaatttactaata

SEQ ID NO: 85241 - DNA, 15 bp, Homo sapiens
tagtaatttactaat

SEQ ID NO: 85242 - DNA, 15 bp, Homo sapiens
ctagtaatttactaa

SEQ ID NO: 85243 - DNA, 15 bp, Homo sapiens
actagtaatttacta

SEQ ID NO: 85244 - DNA, 15 bp, Homo sapiens
tactagtaatttact

SEQ ID NO: 85245 - DNA, 15 bp, Homo sapiens
atactagtaatttac

SEQ ID NO: 85246 - DNA, 15 bp, Homo sapiens
gatactagtaattta

SEQ ID NO: 85247 - DNA, 15 bp, Homo sapiens
tgatactagtaattt

SEQ ID NO: 85248 - DNA, 15 bp, Homo sapiens
ttgatactagtaatt

SEQ ID NO: 85249 - DNA, 15 bp, Homo sapiens
cttgatactagtaat

SEQ ID NO: 85250 - DNA, 15 bp, Homo sapiens
acttgatactagtaa

SEQ ID NO: 85251 - DNA, 15 bp, Homo sapiens
cacttgatactagta

SEQ ID NO: 85252 - DNA, 15 bp, Homo sapiens
tcacttgatactagt

SEQ ID NO: 85253 - DNA, 15 bp, Homo sapiens
ttcacttgatactag

SEQ ID NO: 85254 - DNA, 15 bp, Homo sapiens
cttcacttgatacta

SEQ ID NO: 85255 - DNA, 15 bp, Homo sapiens
tcttcacttgatact

SEQ ID NO: 85256 - DNA, 15 bp, Homo sapiens
gtcttcacttgatac

SEQ ID NO: 85257 - DNA, 15 bp, Homo sapiens
tgtcttcacttgata

SEQ ID NO: 85258 - DNA, 15 bp, Homo sapiens
atgtcttcacttgat

SEQ ID NO: 85259 - DNA, 15 bp, Homo sapiens
aatgtcttcacttga

SEQ ID NO: 85260 - DNA, 15 bp, Homo sapiens
aaatgtcttcacttg

SEQ ID NO: 85261 - DNA, 15 bp, Homo sapiens
aaaatgtcttcactt

SEQ ID NO: 85262 - DNA, 15 bp, Homo sapiens
caaaatgtcttcact

SEQ ID NO: 85263 - DNA, 15 bp, Homo sapiens
gcaaaatgtcttcac

SEQ ID NO: 85264 - DNA, 15 bp, Homo sapiens
agcaaaatgtcttca

SEQ ID NO: 85265 - DNA, 15 bp, Homo sapiens
aagcaaaatgtcttc

SEQ ID NO: 85266 - DNA, 15 bp, Homo sapiens
gaagcaaaatgtctt

SEQ ID NO: 85267 - DNA, 15 bp, Homo sapiens
cgaagcaaaatgtct

SEQ ID NO: 85268 - DNA, 15 bp, Homo sapiens
acgaagcaaaatgtc

SEQ ID NO: 85269 - DNA, 15 bp, Homo sapiens
cacgaagcaaaatgt

SEQ ID NO: 85270 - DNA, 15 bp, Homo sapiens
acacgaagcaaaatg

SEQ ID NO: 85271 - DNA, 15 bp, Homo sapiens
aacacgaagcaaaat

SEQ ID NO: 85272 - DNA, 15 bp, Homo sapiens
aaacacgaagcaaaa

SEQ ID NO: 85273 - DNA, 15 bp, Homo sapiens
aaaacacgaagcaaa

SEQ ID NO: 85274 - DNA, 15 bp, Homo sapiens
taaaacacgaagcaa

SEQ ID NO: 85275 - DNA, 15 bp, Homo sapiens
ataaaacacgaagca

SEQ ID NO: 85276 - DNA, 15 bp, Homo sapiens
aataaaacacgaagc

SEQ ID NO: 85277 - DNA, 15 bp, Homo sapiens
aaataaaacacgaag

SEQ ID NO: 85278 - DNA, 15 bp, Homo sapiens
aaaataaaacacgaa

SEQ ID NO: 85279 - DNA, 15 bp, Homo sapiens
aaaaataaaacacga

SEQ ID NO: 85280 - DNA, 15 bp, Homo sapiens
taaaaataaaacacg

SEQ ID NO: 85281 - DNA, 15 bp, Homo sapiens
ataaaaataaaacac

SEQ ID NO: 85282 - DNA, 15 bp, Homo sapiens
aataaaaataaaaca

SEQ ID NO: 85283 - DNA, 15 bp, Homo sapiens
aaataaaaataaaac

SEQ ID NO: 85284 - DNA, 15 bp, Homo sapiens
gaaataaaaataaaa

SEQ ID NO: 85285 - DNA, 15 bp, Homo sapiens
agaaataaaaataaa

SEQ ID NO: 85286 - DNA, 15 bp, Homo sapiens
cagaaataaaaataa

SEQ ID NO: 85287 - DNA, 15 bp, Homo sapiens
acagaaataaaaata

SEQ ID NO: 85288 - DNA, 15 bp, Homo sapiens
tacagaaataaaaat

SEQ ID NO: 85289 - DNA, 15 bp, Homo sapiens
gtacagaaataaaaa

SEQ ID NO: 85290 - DNA, 15 bp, Homo sapiens
ggtacagaaataaaa

SEQ ID NO: 85291 - DNA, 15 bp, Homo sapiens
tggtacagaaataaa

SEQ ID NO: 85292 - DNA, 15 bp, Homo sapiens
gtggtacagaaataa

SEQ ID NO: 85293 - DNA, 15 bp, Homo sapiens
agtggtacagaaata

SEQ ID NO: 85294 - DNA, 15 bp, Homo sapiens
tagtggtacagaaat

SEQ ID NO: 85295 - DNA, 15 bp, Homo sapiens
atagtggtacagaaa

SEQ ID NO: 85296 - DNA, 15 bp, Homo sapiens
aatagtggtacagaa

SEQ ID NO: 85297 - DNA, 15 bp, Homo sapiens
caatagtggtacaga

SEQ ID NO: 85298 - DNA, 15 bp, Homo sapiens
gcaatagtggtacag

SEQ ID NO: 85299 - DNA, 15 bp, Homo sapiens
tgcaatagtggtaca

SEQ ID NO: 85300 - DNA, 15 bp, Homo sapiens
gtgcaatagtggtac

SEQ ID NO: 85301 - DNA, 15 bp, Homo sapiens
tgtgcaatagtggta

SEQ ID NO: 85302 - DNA, 15 bp, Homo sapiens
atgtgcaatagtggt

SEQ ID NO: 85303 - DNA, 15 bp, Homo sapiens
catgtgcaatagtgg

SEQ ID NO: 85304 - DNA, 15 bp, Homo sapiens
tcatgtgcaatagtg

SEQ ID NO: 85305 - DNA, 15 bp, Homo sapiens
atcatgtgcaatagt

SEQ ID NO: 85306 - DNA, 15 bp, Homo sapiens
aatcatgtgcaatag

SEQ ID NO: 85307 - DNA, 15 bp, Homo sapiens
aaatcatgtgcaata

SEQ ID NO: 85308 - DNA, 15 bp, Homo sapiens
aaaatcatgtgcaat

SEQ ID NO: 85309 - DNA, 15 bp, Homo sapiens
gaaaatcatgtgcaa

SEQ ID NO: 85310 - DNA, 15 bp, Homo sapiens
agaaaatcatgtgca

SEQ ID NO: 85311 - DNA, 15 bp, Homo sapiens
aagaaaatcatgtgc

SEQ ID NO: 85312 - DNA, 15 bp, Homo sapiens
aaagaaaatcatgtg

SEQ ID NO: 85313 - DNA, 15 bp, Homo sapiens
aaaagaaaatcatgt

SEQ ID NO: 85314 - DNA, 15 bp, Homo sapiens
aaaaagaaaatcatg

SEQ ID NO: 85315 - DNA, 15 bp, Homo sapiens
aaaaaagaaaatcat

SEQ ID NO: 85316 - DNA, 15 bp, Homo sapiens
gaaaaaagaaaatca

SEQ ID NO: 85317 - DNA, 15 bp, Homo sapiens
ggaaaaaagaaaatc

SEQ ID NO: 85318 - DNA, 15 bp, Homo sapiens
aggaaaaaagaaaat

SEQ ID NO: 85319 - DNA, 15 bp, Homo sapiens
aaggaaaaaagaaaa

SEQ ID NO: 85320 - DNA, 15 bp, Homo sapiens
taaggaaaaaagaaa

SEQ ID NO: 85321 - DNA, 15 bp, Homo sapiens
gtaaggaaaaaagaa

SEQ ID NO: 85322 - DNA, 15 bp, Homo sapiens
agtaaggaaaaaaga

SEQ ID NO: 85323 - DNA, 15 bp, Homo sapiens
aagtaaggaaaaaag

SEQ ID NO: 85324 - DNA, 15 bp, Homo sapiens
aaagtaaggaaaaaa

SEQ ID NO: 85325 - DNA, 15 bp, Homo sapiens
aaaagtaaggaaaaa

SEQ ID NO: 85326 - DNA, 15 bp, Homo sapiens
aaaaagtaaggaaaa

SEQ ID NO: 85327 - DNA, 15 bp, Homo sapiens
aaaaaagtaaggaaa

SEQ ID NO: 85328 - DNA, 15 bp, Homo sapiens
aaaaaaagtaaggaa

SEQ ID NO: 85329 - DNA, 15 bp, Homo sapiens
aaaaaaaagtaagga

SEQ ID NO: 85330 - DNA, 15 bp, Homo sapiens
aaaaaaaaagtaagg

SEQ ID NO: 85331 - DNA, 15 bp, Homo sapiens
aaaaaaaaaagtaag

SEQ ID NO: 85332 - DNA, 15 bp, Homo sapiens
caaaaaaaaaagtaa

SEQ ID NO: 85333 - DNA, 15 bp, Homo sapiens
tcaaaaaaaaaagta

SEQ ID NO: 85334 - DNA, 15 bp, Homo sapiens
ctcaaaaaaaaaagt

SEQ ID NO: 85335 - DNA, 15 bp, Homo sapiens
tctcaaaaaaaaaag

SEQ ID NO: 85336 - DNA, 15 bp, Homo sapiens
atctcaaaaaaaaaa

SEQ ID NO: 85337 - DNA, 15 bp, Homo sapiens
catctcaaaaaaaaa

SEQ ID NO: 85338 - DNA, 15 bp, Homo sapiens
ccatctcaaaaaaaa

SEQ ID NO: 85339 - DNA, 15 bp, Homo sapiens
tccatctcaaaaaaa

SEQ ID NO: 85340 - DNA, 15 bp, Homo sapiens
ctccatctcaaaaaa

SEQ ID NO: 85341 - DNA, 15 bp, Homo sapiens
actccatctcaaaaa

SEQ ID NO: 85342 - DNA, 15 bp, Homo sapiens
gactccatctcaaaa

SEQ ID NO: 85343 - DNA, 15 bp, Homo sapiens
agactccatctcaaa

SEQ ID NO: 85344 - DNA, 15 bp, Homo sapiens
atgagactccatctc

SEQ ID NO: 85345 - DNA, 15 bp, Homo sapiens
aatgagactccatct

SEQ ID NO: 85346 - DNA, 15 bp, Homo sapiens
gaatgagactccatc

SEQ ID NO: 85347 - DNA, 15 bp, Homo sapiens
agaatgagactccat

SEQ ID NO: 85348 - DNA, 15 bp, Homo sapiens
cagaatgagactcca

SEQ ID NO: 85349 - DNA, 15 bp, Homo sapiens
acagaatgagactcc

SEQ ID NO: 85350 - DNA, 15 bp, Homo sapiens
gacagaatgagactc

SEQ ID NO: 85351 - DNA, 15 bp, Homo sapiens
tgacagaatgagact

SEQ ID NO: 85352 - DNA, 15 bp, Homo sapiens
gtgacagaatgagac

SEQ ID NO: 85353 - DNA, 15 bp, Homo sapiens
ggtgacagaatgaga

SEQ ID NO: 85354 - DNA, 15 bp, Homo sapiens
gggtgacagaatgag

SEQ ID NO: 85355 - DNA, 15 bp, Homo sapiens
tgggtgacagaatga

SEQ ID NO: 85356 - DNA, 15 bp, Homo sapiens
ctgggtgacagaatg

SEQ ID NO: 85357 - DNA, 15 bp, Homo sapiens
cctgggtgacagaat

SEQ ID NO: 85358 - DNA, 15 bp, Homo sapiens
gcctgggtgacagaa

SEQ ID NO: 85359 - DNA, 15 bp, Homo sapiens
cccagcctgggtgac

SEQ ID NO: 85360 - DNA, 15 bp, Homo sapiens
tcccagcctgggtga

SEQ ID NO: 85361 - DNA, 15 bp, Homo sapiens
atcccagcctgggtg

SEQ ID NO: 85362 - DNA, 15 bp, Homo sapiens
catcccagcctgggt

SEQ ID NO: 85363 - DNA, 15 bp, Homo sapiens
gcatcccagcctggg

SEQ ID NO: 85364 - DNA, 15 bp, Homo sapiens
tgcatcccagcctgg

SEQ ID NO: 85365 - DNA, 15 bp, Homo sapiens
ctgcatcccagcctg

SEQ ID NO: 85366 - DNA, 15 bp, Homo sapiens
actgcatcccagcct

SEQ ID NO: 85367 - DNA, 15 bp, Homo sapiens
cactgcatcccagcc

SEQ ID NO: 85368 - DNA, 15 bp, Homo sapiens
ccactgcatcccagc

SEQ ID NO: 85369 - DNA, 15 bp, Homo sapiens
accactgcatcccag

SEQ ID NO: 85370 - DNA, 15 bp, Homo sapiens
caccactgcatccca

SEQ ID NO: 85371 - DNA, 15 bp, Homo sapiens
gcaccactgcatccc

SEQ ID NO: 85372 - DNA, 15 bp, Homo sapiens
tgcaccactgcatcc

SEQ ID NO: 85373 - DNA, 15 bp, Homo sapiens
ttgcaccactgcatc

SEQ ID NO: 85374 - DNA, 15 bp, Homo sapiens
attgcaccactgcat

SEQ ID NO: 85375 - DNA, 15 bp, Homo sapiens
gattgcaccactgca

SEQ ID NO: 85376 - DNA, 15 bp, Homo sapiens
agattgcaccactgc

SEQ ID NO: 85377 - DNA, 15 bp, Homo sapiens
aagattgcaccactg

SEQ ID NO: 85378 - DNA, 15 bp, Homo sapiens
caagattgcaccact

SEQ ID NO: 85379 - DNA, 15 bp, Homo sapiens
ccaagattgcaccac

SEQ ID NO: 85380 - DNA, 15 bp, Homo sapiens
gccaagattgcacca

SEQ ID NO: 85381 - DNA, 15 bp, Homo sapiens
agccaagattgcacc

SEQ ID NO: 85382 - DNA, 15 bp, Homo sapiens
cagccaagattgcac

SEQ ID NO: 85383 - DNA, 15 bp, Homo sapiens
tcagccaagattgca

SEQ ID NO: 85384 - DNA, 15 bp, Homo sapiens
gtcagccaagattgc

SEQ ID NO: 85385 - DNA, 15 bp, Homo sapiens
agtcagccaagattg

SEQ ID NO: 85386 - DNA, 15 bp, Homo sapiens
cagtcagccaagatt

SEQ ID NO: 85387 - DNA, 15 bp, Homo sapiens
gcagtcagccaagat

SEQ ID NO: 85388 - DNA, 15 bp, Homo sapiens
tgcagtcagccaaga

SEQ ID NO: 85389 - DNA, 15 bp, Homo sapiens
ttgcagtcagccaag

SEQ ID NO: 85390 - DNA, 15 bp, Homo sapiens
attgcagtcagccaa

SEQ ID NO: 85391 - DNA, 15 bp, Homo sapiens
gattgcagtcagcca

SEQ ID NO: 85392 - DNA, 15 bp, Homo sapiens
agattgcagtcagcc

SEQ ID NO: 85393 - DNA, 15 bp, Homo sapiens
gagattgcagtcagc

SEQ ID NO: 85394 - DNA, 15 bp, Homo sapiens
agagattgcagtcag

SEQ ID NO: 85395 - DNA, 15 bp, Homo sapiens
cagagattgcagtca

SEQ ID NO: 85396 - DNA, 15 bp, Homo sapiens
gcagagattgcagtc

SEQ ID NO: 85397 - DNA, 15 bp, Homo sapiens
ggcagagattgcagt

SEQ ID NO: 85398 - DNA, 15 bp, Homo sapiens
aggcagagattgcag

SEQ ID NO: 85399 - DNA, 15 bp, Homo sapiens
gaggcagagattgca

SEQ ID NO: 85400 - DNA, 15 bp, Homo sapiens
ggaggcagagattgc

SEQ ID NO: 85401 - DNA, 15 bp, Homo sapiens
gggaggcagagattg

SEQ ID NO: 85402 - DNA, 15 bp, Homo sapiens
tgggaggcagagatt

SEQ ID NO: 85403 - DNA, 15 bp, Homo sapiens
ttgggaggcagagat

SEQ ID NO: 85404 - DNA, 15 bp, Homo sapiens
tttgggaggcagaga

SEQ ID NO: 85405 - DNA, 15 bp, Homo sapiens
atttgggaggcagag

SEQ ID NO: 85406 - DNA, 15 bp, Homo sapiens
aatttgggaggcaga

SEQ ID NO: 85407 - DNA, 15 bp, Homo sapiens
gaatttgggaggcag

SEQ ID NO: 85408 - DNA, 15 bp, Homo sapiens
tgaatttgggaggca

SEQ ID NO: 85409 - DNA, 15 bp, Homo sapiens
ttgaatttgggaggc

SEQ ID NO: 85410 - DNA, 15 bp, Homo sapiens
cttgaatttgggagg

SEQ ID NO: 85411 - DNA, 15 bp, Homo sapiens
acttgaatttgggag

SEQ ID NO: 85412 - DNA, 15 bp, Homo sapiens
cacttgaatttggga

SEQ ID NO: 85413 - DNA, 15 bp, Homo sapiens
tcacttgaatttggg

SEQ ID NO: 85414 - DNA, 15 bp, Homo sapiens
atcacttgaatttgg

SEQ ID NO: 85415 - DNA, 15 bp, Homo sapiens
aatcacttgaatttg

SEQ ID NO: 85416 - DNA, 15 bp, Homo sapiens
gaatcacttgaattt

SEQ ID NO: 85417 - DNA, 15 bp, Homo sapiens
agaatcacttgaatt

SEQ ID NO: 85418 - DNA, 15 bp, Homo sapiens
gagaatcacttgaat

SEQ ID NO: 85419 - DNA, 15 bp, Homo sapiens
atcccagctacttgg

SEQ ID NO: 85420 - DNA, 15 bp, Homo sapiens
aatcccagctacttg

SEQ ID NO: 85421 - DNA, 15 bp, Homo sapiens
taatcccagctactt

SEQ ID NO: 85422 - DNA, 15 bp, Homo sapiens
ttgcctgtaatccca

SEQ ID NO: 85423 - DNA, 15 bp, Homo sapiens
gttgcctgtaatccc

SEQ ID NO: 85424 - DNA, 15 bp, Homo sapiens
ggttgcctgtaatcc

SEQ ID NO: 85425 - DNA, 15 bp, Homo sapiens
tggttgcctgtaatc

SEQ ID NO: 85426 - DNA, 15 bp, Homo sapiens
gtggttgcctgtaat

SEQ ID NO: 85427 - DNA, 15 bp, Homo sapiens
ggtggttgcctgtaa

SEQ ID NO: 85428 - DNA, 15 bp, Homo sapiens
tggtggttgcctgta

SEQ ID NO: 85429 - DNA, 15 bp, Homo sapiens
gtggtggttgcctgt

SEQ ID NO: 85430 - DNA, 15 bp, Homo sapiens
ggtggtggttgcctg

SEQ ID NO: 85431 - DNA, 15 bp, Homo sapiens
tggtggtggttgcct

SEQ ID NO: 85432 - DNA, 15 bp, Homo sapiens
atggtggtggttgcc

SEQ ID NO: 85433 - DNA, 15 bp, Homo sapiens
catggtggtggttgc

SEQ ID NO: 85434 - DNA, 15 bp, Homo sapiens
gcatggtggtggttg

SEQ ID NO: 85435 - DNA, 15 bp, Homo sapiens
ggcatggtggtggtt

SEQ ID NO: 85436 - DNA, 15 bp, Homo sapiens
aggcatggtggtggt

SEQ ID NO: 85437 - DNA, 15 bp, Homo sapiens
caggcatggtggtgg

SEQ ID NO: 85438 - DNA, 15 bp, Homo sapiens
attagccaggcatgg

SEQ ID NO: 85439 - DNA, 15 bp, Homo sapiens
aattagccaggcatg

SEQ ID NO: 85440 - DNA, 15 bp, Homo sapiens
aaattagccaggcat

SEQ ID NO: 85441 - DNA, 15 bp, Homo sapiens
aaaattagccaggca

SEQ ID NO: 85442 - DNA, 15 bp, Homo sapiens
taaaaatacaaaaat

SEQ ID NO: 85443 - DNA, 15 bp, Homo sapiens
cctctactaaaaata

SEQ ID NO: 85444 - DNA, 15 bp, Homo sapiens
gcctctactaaaaat

SEQ ID NO: 85445 - DNA, 15 bp, Homo sapiens
cgcctctactaaaaa

SEQ ID NO: 85446 - DNA, 15 bp, Homo sapiens
ccgcctctactaaaa

SEQ ID NO: 85447 - DNA, 15 bp, Homo sapiens
cccgcctctactaaa

SEQ ID NO: 85448 - DNA, 15 bp, Homo sapiens
ccccgcctctactaa

SEQ ID NO: 85449 - DNA, 15 bp, Homo sapiens
accccgcctctacta

SEQ ID NO: 85450 - DNA, 15 bp, Homo sapiens
aaccccgcctctact

SEQ ID NO: 85451 - DNA, 15 bp, Homo sapiens
aaaccccgcctctac

SEQ ID NO: 85452 - DNA, 15 bp, Homo sapiens
aaaaccccgcctcta

SEQ ID NO: 85453 - DNA, 15 bp, Homo sapiens
taaaaccccgcctct

SEQ ID NO: 85454 - DNA, 15 bp, Homo sapiens
gtaaaaccccgcctc

SEQ ID NO: 85455 - DNA, 15 bp, Homo sapiens
ggtaaaaccccgcct

SEQ ID NO: 85456 - DNA, 15 bp, Homo sapiens
tggtaaaaccccgcc

SEQ ID NO: 85457 - DNA, 15 bp, Homo sapiens
atggtaaaaccccgc

SEQ ID NO: 85458 - DNA, 15 bp, Homo sapiens
catggtaaaaccccg

SEQ ID NO: 85459 - DNA, 15 bp, Homo sapiens
acatggtaaaacccc

SEQ ID NO: 85460 - DNA, 15 bp, Homo sapiens
aacatggtaaaaccc

SEQ ID NO: 85461 - DNA, 15 bp, Homo sapiens
caacatggtaaaacc

SEQ ID NO: 85462 - DNA, 15 bp, Homo sapiens
ccaacatggtaaaac

SEQ ID NO: 85463 - DNA, 15 bp, Homo sapiens
gccaacatggtaaaa

SEQ ID NO: 85464 - DNA, 15 bp, Homo sapiens
ggccaacatggtaaa

SEQ ID NO: 85465 - DNA, 15 bp, Homo sapiens
tggccaacatggtaa

SEQ ID NO: 85466 - DNA, 15 bp, Homo sapiens
ctggccaacatggta

SEQ ID NO: 85467 - DNA, 15 bp, Homo sapiens
tgagaccagcctggc

SEQ ID NO: 85468 - DNA, 15 bp, Homo sapiens
gagtttgagaccagc

SEQ ID NO: 85469 - DNA, 15 bp, Homo sapiens
ggagtttgagaccag

SEQ ID NO: 85470 - DNA, 15 bp, Homo sapiens
aggagtttgagacca

SEQ ID NO: 85471 - DNA, 15 bp, Homo sapiens
caggagtttgagacc

SEQ ID NO: 85472 - DNA, 15 bp, Homo sapiens
tcaggagtttgagac

SEQ ID NO: 85473 - DNA, 15 bp, Homo sapiens
gtcaggagtttgaga

SEQ ID NO: 85474 - DNA, 15 bp, Homo sapiens
tggatcacctgaggt

SEQ ID NO: 85475 - DNA, 15 bp, Homo sapiens
gtggatcacctgagg

SEQ ID NO: 85476 - DNA, 15 bp, Homo sapiens
ggtggatcacctgag

SEQ ID NO: 85477 - DNA, 15 bp, Homo sapiens
aggtggatcacctga

SEQ ID NO: 85478 - DNA, 15 bp, Homo sapiens
caggtggatcacctg

SEQ ID NO: 85479 - DNA, 15 bp, Homo sapiens
gcaggtggatcacct

SEQ ID NO: 85480 - DNA, 15 bp, Homo sapiens
ggcaggtggatcacc

SEQ ID NO: 85481 - DNA, 15 bp, Homo sapiens
aggcaggtggatcac

SEQ ID NO: 85482 - DNA, 15 bp, Homo sapiens
gaggcaggtggatca

SEQ ID NO: 85483 - DNA, 15 bp, Homo sapiens
tgaggcaggtggatc

SEQ ID NO: 85484 - DNA, 15 bp, Homo sapiens
ctgaggcaggtggat

SEQ ID NO: 85485 - DNA, 15 bp, Homo sapiens
gctgaggcaggtgga

SEQ ID NO: 85486 - DNA, 15 bp, Homo sapiens
ggctgaggcaggtgg

SEQ ID NO: 85487 - DNA, 15 bp, Homo sapiens
aggctgaggcaggtg

SEQ ID NO: 85488 - DNA, 15 bp, Homo sapiens
aaggctgaggcaggt

SEQ ID NO: 85489 - DNA, 15 bp, Homo sapiens
gaaggctgaggcagg

SEQ ID NO: 85490 - DNA, 15 bp, Homo sapiens
ggaaggctgaggcag

SEQ ID NO: 85491 - DNA, 15 bp, Homo sapiens
tggaaggctgaggca

SEQ ID NO: 85492 - DNA, 15 bp, Homo sapiens
ttggaaggctgaggc

SEQ ID NO: 85493 - DNA, 15 bp, Homo sapiens
tttggaaggctgagg

SEQ ID NO: 85494 - DNA, 15 bp, Homo sapiens
ctttggaaggctgag

SEQ ID NO: 85495 - DNA, 15 bp, Homo sapiens
actttggaaggctga

SEQ ID NO: 85496 - DNA, 15 bp, Homo sapiens
cactttggaaggctg

SEQ ID NO: 85497 - DNA, 15 bp, Homo sapiens
gcactttggaaggct

SEQ ID NO: 85498 - DNA, 15 bp, Homo sapiens
tcagcactttggaag

SEQ ID NO: 85499 - DNA, 15 bp, Homo sapiens
ctcagcactttggaa

SEQ ID NO: 85500 - DNA, 15 bp, Homo sapiens
tctcagcactttgga

SEQ ID NO: 85501 - DNA, 15 bp, Homo sapiens
atctcagcactttgg

SEQ ID NO: 85502 - DNA, 15 bp, Homo sapiens
aatctcagcactttg

SEQ ID NO: 85503 - DNA, 15 bp, Homo sapiens
taatctcagcacttt

SEQ ID NO: 85504 - DNA, 15 bp, Homo sapiens
gtaatctcagcactt

SEQ ID NO: 85505 - DNA, 15 bp, Homo sapiens
tgtaatctcagcact

SEQ ID NO: 85506 - DNA, 15 bp, Homo sapiens
ctgtaatctcagcac

SEQ ID NO: 85507 - DNA, 15 bp, Homo sapiens
cctgtaatctcagca

SEQ ID NO: 85508 - DNA, 15 bp, Homo sapiens
atgcctgtaatctca

SEQ ID NO: 85509 - DNA, 15 bp, Homo sapiens
catgcctgtaatctc

SEQ ID NO: 85510 - DNA, 15 bp, Homo sapiens
tcatgcctgtaatct

SEQ ID NO: 85511 - DNA, 15 bp, Homo sapiens
tggtggctcatgcct

SEQ ID NO: 85512 - DNA, 15 bp, Homo sapiens
atggtggctcatgcc

SEQ ID NO: 85513 - DNA, 15 bp, Homo sapiens
catggtggctcatgc

SEQ ID NO: 85514 - DNA, 15 bp, Homo sapiens
gcatggtggctcatg

SEQ ID NO: 85515 - DNA, 15 bp, Homo sapiens
ggcatggtggctcat

SEQ ID NO: 85516 - DNA, 15 bp, Homo sapiens
aggcatggtggctca

SEQ ID NO: 85517 - DNA, 15 bp, Homo sapiens
caggcatggtggctc

SEQ ID NO: 85518 - DNA, 15 bp, Homo sapiens
ccaggcatggtggct

SEQ ID NO: 85519 - DNA, 15 bp, Homo sapiens
gccaggcatggtggc

SEQ ID NO: 85520 - DNA, 15 bp, Homo sapiens
ggccaggcatggtgg

SEQ ID NO: 85521 - DNA, 15 bp, Homo sapiens
aggccaggcatggtg

SEQ ID NO: 85522 - DNA, 15 bp, Homo sapiens
caggccaggcatggt

SEQ ID NO: 85523 - DNA, 15 bp, Homo sapiens
acaggccaggcatgg

SEQ ID NO: 85524 - DNA, 15 bp, Homo sapiens
tacaggccaggcatg

SEQ ID NO: 85525 - DNA, 15 bp, Homo sapiens
gtacaggccaggcat

SEQ ID NO: 85526 - DNA, 15 bp, Homo sapiens
tgtacaggccaggca

SEQ ID NO: 85527 - DNA, 15 bp, Homo sapiens
atgtacaggccaggc

SEQ ID NO: 85528 - DNA, 15 bp, Homo sapiens
catgtacaggccagg

SEQ ID NO: 85529 - DNA, 15 bp, Homo sapiens
gcatgtacaggccag

SEQ ID NO: 85530 - DNA, 15 bp, Homo sapiens
agcatgtacaggcca

SEQ ID NO: 85531 - DNA, 15 bp, Homo sapiens
aagcatgtacaggcc

SEQ ID NO: 85532 - DNA, 15 bp, Homo sapiens
aaagcatgtacaggc

SEQ ID NO: 85533 - DNA, 15 bp, Homo sapiens
aaaagcatgtacagg

SEQ ID NO: 85534 - DNA, 15 bp, Homo sapiens
gaaaagcatgtacag

SEQ ID NO: 85535 - DNA, 15 bp, Homo sapiens
tgaaaagcatgtaca

SEQ ID NO: 85536 - DNA, 15 bp, Homo sapiens
atgaaaagcatgtac

SEQ ID NO: 85537 - DNA, 15 bp, Homo sapiens
aatgaaaagcatgta

SEQ ID NO: 85538 - DNA, 15 bp, Homo sapiens
gaatgaaaagcatgt

SEQ ID NO: 85539 - DNA, 15 bp, Homo sapiens
agaatgaaaagcatg

SEQ ID NO: 85540 - DNA, 15 bp, Homo sapiens
aagaatgaaaagcat

SEQ ID NO: 85541 - DNA, 15 bp, Homo sapiens
gaagaatgaaaagca

SEQ ID NO: 85542 - DNA, 15 bp, Homo sapiens
agaagaatgaaaagc

SEQ ID NO: 85543 - DNA, 15 bp, Homo sapiens
aagaagaatgaaaag

SEQ ID NO: 85544 - DNA, 15 bp, Homo sapiens
taagaagaatgaaaa

SEQ ID NO: 85545 - DNA, 15 bp, Homo sapiens
ataagaagaatgaaa

SEQ ID NO: 85546 - DNA, 15 bp, Homo sapiens
gataagaagaatgaa

SEQ ID NO: 85547 - DNA, 15 bp, Homo sapiens
agataagaagaatga

SEQ ID NO: 85548 - DNA, 15 bp, Homo sapiens
aagataagaagaatg

SEQ ID NO: 85549 - DNA, 15 bp, Homo sapiens
gaagataagaagaat

SEQ ID NO: 85550 - DNA, 15 bp, Homo sapiens
tgaagataagaagaa

SEQ ID NO: 85551 - DNA, 15 bp, Homo sapiens
ctgaagataagaaga

SEQ ID NO: 85552 - DNA, 15 bp, Homo sapiens
tctgaagataagaag

SEQ ID NO: 85553 - DNA, 15 bp, Homo sapiens
gtctgaagataagaa

SEQ ID NO: 85554 - DNA, 15 bp, Homo sapiens
ggtctgaagataaga

SEQ ID NO: 85555 - DNA, 15 bp, Homo sapiens
aggtctgaagataag

SEQ ID NO: 85556 - DNA, 15 bp, Homo sapiens
taggtctgaagataa

SEQ ID NO: 85557 - DNA, 15 bp, Homo sapiens
ctaggtctgaagata

SEQ ID NO: 85558 - DNA, 15 bp, Homo sapiens
tctaggtctgaagat

SEQ ID NO: 85559 - DNA, 15 bp, Homo sapiens
ttctaggtctgaaga

SEQ ID NO: 85560 - DNA, 15 bp, Homo sapiens
tttctaggtctgaag

SEQ ID NO: 85561 - DNA, 15 bp, Homo sapiens
gtttctaggtctgaa

SEQ ID NO: 85562 - DNA, 15 bp, Homo sapiens
tgtttctaggtctga

SEQ ID NO: 85563 - DNA, 15 bp, Homo sapiens
ctgtttctaggtctg

SEQ ID NO: 85564 - DNA, 15 bp, Homo sapiens
gctgtttctaggtct

SEQ ID NO: 85565 - DNA, 15 bp, Homo sapiens
tgctgtttctaggtc

SEQ ID NO: 85566 - DNA, 15 bp, Homo sapiens
ctgctgtttctaggt

SEQ ID NO: 85567 - DNA, 15 bp, Homo sapiens
gctgctgtttctagg

SEQ ID NO: 85568 - DNA, 15 bp, Homo sapiens
agctgctgtttctag

SEQ ID NO: 85569 - DNA, 15 bp, Homo sapiens
tagctgctgtttcta

SEQ ID NO: 85570 - DNA, 15 bp, Homo sapiens
gtagctgctgtttct

SEQ ID NO: 85571 - DNA, 15 bp, Homo sapiens
tgtagctgctgtttc

SEQ ID NO: 85572 - DNA, 15 bp, Homo sapiens
ctgtagctgctgttt

SEQ ID NO: 85573 - DNA, 15 bp, Homo sapiens
cctgtagctgctgtt

SEQ ID NO: 85574 - DNA, 15 bp, Homo sapiens
acctgtagctgctgt

SEQ ID NO: 85575 - DNA, 15 bp, Homo sapiens
aacctgtagctgctg

SEQ ID NO: 85576 - DNA, 15 bp, Homo sapiens
gaacctgtagctgct

SEQ ID NO: 85577 - DNA, 15 bp, Homo sapiens
agaacctgtagctgc

SEQ ID NO: 85578 - DNA, 15 bp, Homo sapiens
gagaacctgtagctg

SEQ ID NO: 85579 - DNA, 15 bp, Homo sapiens
tgagaacctgtagct

SEQ ID NO: 85580 - DNA, 15 bp, Homo sapiens
ctgagaacctgtagc

SEQ ID NO: 85581 - DNA, 15 bp, Homo sapiens
gctgagaacctgtag

SEQ ID NO: 85582 - DNA, 15 bp, Homo sapiens
tgctgagaacctgta

SEQ ID NO: 85583 - DNA, 15 bp, Homo sapiens
atgctgagaacctgt

SEQ ID NO: 85584 - DNA, 15 bp, Homo sapiens
catgctgagaacctg

SEQ ID NO: 85585 - DNA, 15 bp, Homo sapiens
ccatgctgagaacct

SEQ ID NO: 85586 - DNA, 15 bp, Homo sapiens
cccatgctgagaacc

SEQ ID NO: 85587 - DNA, 15 bp, Homo sapiens
acccatgctgagaac

SEQ ID NO: 85588 - DNA, 15 bp, Homo sapiens
gacccatgctgagaa

SEQ ID NO: 85589 - DNA, 15 bp, Homo sapiens
ggacccatgctgaga

SEQ ID NO: 85590 - DNA, 15 bp, Homo sapiens
aggacccatgctgag

SEQ ID NO: 85591 - DNA, 15 bp, Homo sapiens
caggacccatgctga

SEQ ID NO: 85592 - DNA, 15 bp, Homo sapiens
gcaggacccatgctg

SEQ ID NO: 85593 - DNA, 15 bp, Homo sapiens
agcaggacccatgct

SEQ ID NO: 85594 - DNA, 15 bp, Homo sapiens
aagcaggacccatgc

SEQ ID NO: 85595 - DNA, 15 bp, Homo sapiens
gaagcaggacccatg

SEQ ID NO: 85596 - DNA, 15 bp, Homo sapiens
ggaagcaggacccat

SEQ ID NO: 85597 - DNA, 15 bp, Homo sapiens
cggaagcaggaccca

SEQ ID NO: 85598 - DNA, 15 bp, Homo sapiens
acggaagcaggaccc

SEQ ID NO: 85599 - DNA, 15 bp, Homo sapiens
cacggaagcaggacc

SEQ ID NO: 85600 - DNA, 15 bp, Homo sapiens
acacggaagcaggac

SEQ ID NO: 85601 - DNA, 15 bp, Homo sapiens
aacacggaagcagga

SEQ ID NO: 85602 - DNA, 15 bp, Homo sapiens
aaacacggaagcagg

SEQ ID NO: 85603 - DNA, 15 bp, Homo sapiens
caaacacggaagcag

SEQ ID NO: 85604 - DNA, 15 bp, Homo sapiens
ccaaacacggaagca

SEQ ID NO: 85605 - DNA, 15 bp, Homo sapiens
accaaacacggaagc

SEQ ID NO: 85606 - DNA, 15 bp, Homo sapiens
taccaaacacggaag

SEQ ID NO: 85607 - DNA, 15 bp, Homo sapiens
ctaccaaacacggaa

SEQ ID NO: 85608 - DNA, 15 bp, Homo sapiens
tctaccaaacacgga

SEQ ID NO: 85609 - DNA, 15 bp, Homo sapiens
ttctaccaaacacgg

SEQ ID NO: 85610 - DNA, 15 bp, Homo sapiens
gttctaccaaacacg

SEQ ID NO: 85611 - DNA, 15 bp, Homo sapiens
ggttctaccaaacac

SEQ ID NO: 85612 - DNA, 15 bp, Homo sapiens
aggttctaccaaaca

SEQ ID NO: 85613 - DNA, 15 bp, Homo sapiens
caggttctaccaaac

SEQ ID NO: 85614 - DNA, 15 bp, Homo sapiens
ccaggttctaccaaa

SEQ ID NO: 85615 - DNA, 15 bp, Homo sapiens
cccaggttctaccaa

SEQ ID NO: 85616 - DNA, 15 bp, Homo sapiens
acccaggttctacca

SEQ ID NO: 85617 - DNA, 15 bp, Homo sapiens
aacccaggttctacc

SEQ ID NO: 85618 - DNA, 15 bp, Homo sapiens
caacccaggttctac

SEQ ID NO: 85619 - DNA, 15 bp, Homo sapiens
ccaacccaggttcta

SEQ ID NO: 85620 - DNA, 15 bp, Homo sapiens
cccaacccaggttct

SEQ ID NO: 85621 - DNA, 15 bp, Homo sapiens
ccccaacccaggttc

SEQ ID NO: 85622 - DNA, 15 bp, Homo sapiens
gccccaacccaggtt

SEQ ID NO: 85623 - DNA, 15 bp, Homo sapiens
ggccccaacccaggt

SEQ ID NO: 85624 - DNA, 15 bp, Homo sapiens
aggccccaacccagg

SEQ ID NO: 85625 - DNA, 15 bp, Homo sapiens
taggccccaacccag

SEQ ID NO: 85626 - DNA, 15 bp, Homo sapiens
ataggccccaaccca

SEQ ID NO: 85627 - DNA, 15 bp, Homo sapiens
aataggccccaaccc

SEQ ID NO: 85628 - DNA, 15 bp, Homo sapiens
caataggccccaacc

SEQ ID NO: 85629 - DNA, 15 bp, Homo sapiens
acaataggccccaac

SEQ ID NO: 85630 - DNA, 15 bp, Homo sapiens
cacaataggccccaa

SEQ ID NO: 85631 - DNA, 15 bp, Homo sapiens
acacaataggcccca

SEQ ID NO: 85632 - DNA, 15 bp, Homo sapiens
cacacaataggcccc

SEQ ID NO: 85633 - DNA, 15 bp, Homo sapiens
acacacaataggccc

SEQ ID NO: 85634 - DNA, 15 bp, Homo sapiens
tacacacaataggcc

SEQ ID NO: 85635 - DNA, 15 bp, Homo sapiens
ctacacacaataggc

SEQ ID NO: 85636 - DNA, 15 bp, Homo sapiens
cctacacacaatagg

SEQ ID NO: 85637 - DNA, 15 bp, Homo sapiens
acctacacacaatag

SEQ ID NO: 85638 - DNA, 15 bp, Homo sapiens
cacctacacacaata

SEQ ID NO: 85639 - DNA, 15 bp, Homo sapiens
tcacctacacacaat

SEQ ID NO: 85640 - DNA, 15 bp, Homo sapiens
ctcacctacacacaa

SEQ ID NO: 85641 - DNA, 15 bp, Homo sapiens
cctcacctacacaca

SEQ ID NO: 85642 - DNA, 15 bp, Homo sapiens
tcctcacctacacac

SEQ ID NO: 85643 - DNA, 15 bp, Homo sapiens
gtcctcacctacaca

SEQ ID NO: 85644 - DNA, 15 bp, Homo sapiens
tgtcctcacctacac

SEQ ID NO: 85645 - DNA, 15 bp, Homo sapiens
atgtcctcacctaca

SEQ ID NO: 85646 - DNA, 15 bp, Homo sapiens
tatgtcctcacctac

SEQ ID NO: 85647 - DNA, 15 bp, Homo sapiens
atatgtcctcaccta

SEQ ID NO: 85648 - DNA, 15 bp, Homo sapiens
gatatgtcctcacct

SEQ ID NO: 85649 - DNA, 15 bp, Homo sapiens
ggatatgtcctcacc

SEQ ID NO: 85650 - DNA, 15 bp, Homo sapiens
aggatatgtcctcac

SEQ ID NO: 85651 - DNA, 15 bp, Homo sapiens
gaggatatgtcctca

SEQ ID NO: 85652 - DNA, 15 bp, Homo sapiens
agaggatatgtcctc

SEQ ID NO: 85653 - DNA, 15 bp, Homo sapiens
cagaggatatgtcct

SEQ ID NO: 85654 - DNA, 15 bp, Homo sapiens
acagaggatatgtcc

SEQ ID NO: 85655 - DNA, 15 bp, Homo sapiens
cacagaggatatgtc

SEQ ID NO: 85656 - DNA, 15 bp, Homo sapiens
ccacagaggatatgt

SEQ ID NO: 85657 - DNA, 15 bp, Homo sapiens
tccacagaggatatg

SEQ ID NO: 85658 - DNA, 15 bp, Homo sapiens
ctccacagaggatat

SEQ ID NO: 85659 - DNA, 15 bp, Homo sapiens
tctccacagaggata

SEQ ID NO: 85660 - DNA, 15 bp, Homo sapiens
ctctccacagaggat

SEQ ID NO: 85661 - DNA, 15 bp, Homo sapiens
cctctccacagagga

SEQ ID NO: 85662 - DNA, 15 bp, Homo sapiens
ccctctccacagagg

SEQ ID NO: 85663 - DNA, 15 bp, Homo sapiens
cccctctccacagag

SEQ ID NO: 85664 - DNA, 15 bp, Homo sapiens
gcccctctccacaga

SEQ ID NO: 85665 - DNA, 15 bp, Homo sapiens
ggcccctctccacag

SEQ ID NO: 85666 - DNA, 15 bp, Homo sapiens
tggcccctctccaca

SEQ ID NO: 85667 - DNA, 15 bp, Homo sapiens
gtggcccctctccac

SEQ ID NO: 85668 - DNA, 15 bp, Homo sapiens
ggtggcccctctcca

SEQ ID NO: 85669 - DNA, 15 bp, Homo sapiens
aggtggcccctctcc

SEQ ID NO: 85670 - DNA, 15 bp, Homo sapiens
caggtggcccctctc

SEQ ID NO: 85671 - DNA, 15 bp, Homo sapiens
ccaggtggcccctct

SEQ ID NO: 85672 - DNA, 15 bp, Homo sapiens
cccaggtggcccctc

SEQ ID NO: 85673 - DNA, 15 bp, Homo sapiens
ccccaggtggcccct

SEQ ID NO: 85674 - DNA, 15 bp, Homo sapiens
tccccaggtggcccc

SEQ ID NO: 85675 - DNA, 15 bp, Homo sapiens
ttccccaggtggccc

SEQ ID NO: 85676 - DNA, 15 bp, Homo sapiens
gttccccaggtggcc

SEQ ID NO: 85677 - DNA, 15 bp, Homo sapiens
cgttccccaggtggc

SEQ ID NO: 85678 - DNA, 15 bp, Homo sapiens
tcgttccccaggtgg

SEQ ID NO: 85679 - DNA, 15 bp, Homo sapiens
ttcgttccccaggtg

SEQ ID NO: 85680 - DNA, 15 bp, Homo sapiens
cttcgttccccaggt

SEQ ID NO: 85681 - DNA, 15 bp, Homo sapiens
tcttcgttccccagg

SEQ ID NO: 85682 - DNA, 15 bp, Homo sapiens
atcttcgttccccag

SEQ ID NO: 85683 - DNA, 15 bp, Homo sapiens
catcttcgttcccca

SEQ ID NO: 85684 - DNA, 15 bp, Homo sapiens
gcatcttcgttcccc

SEQ ID NO: 85685 - DNA, 15 bp, Homo sapiens
agcatcttcgttccc

SEQ ID NO: 85686 - DNA, 15 bp, Homo sapiens
cagcatcttcgttcc

SEQ ID NO: 85687 - DNA, 15 bp, Homo sapiens
tcagcatcttcgttc

SEQ ID NO: 85688 - DNA, 15 bp, Homo sapiens
ttcagcatcttcgtt

SEQ ID NO: 85689 - DNA, 15 bp, Homo sapiens
gttcagcatcttcgt

SEQ ID NO: 85690 - DNA, 15 bp, Homo sapiens
tgttcagcatcttcg

SEQ ID NO: 85691 - DNA, 15 bp, Homo sapiens
ctgttcagcatcttc

SEQ ID NO: 85692 - DNA, 15 bp, Homo sapiens
tctgttcagcatctt

SEQ ID NO: 85693 - DNA, 15 bp, Homo sapiens
ttctgttcagcatct

SEQ ID NO: 85694 - DNA, 15 bp, Homo sapiens
cttctgttcagcatc

SEQ ID NO: 85695 - DNA, 15 bp, Homo sapiens
acttctgttcagcat

SEQ ID NO: 85696 - DNA, 15 bp, Homo sapiens
aacttctgttcagca

SEQ ID NO: 85697 - DNA, 15 bp, Homo sapiens
caacttctgttcagc

SEQ ID NO: 85698 - DNA, 15 bp, Homo sapiens
gcaacttctgttcag

SEQ ID NO: 85699 - DNA, 15 bp, Homo sapiens
agcaacttctgttca

SEQ ID NO: 85700 - DNA, 15 bp, Homo sapiens
cagcaacttctgttc

SEQ ID NO: 85701 - DNA, 15 bp, Homo sapiens
tcagcaacttctgtt

SEQ ID NO: 85702 - DNA, 15 bp, Homo sapiens
ttcagcaacttctgt

SEQ ID NO: 85703 - DNA, 15 bp, Homo sapiens
cttcagcaacttctg

SEQ ID NO: 85704 - DNA, 15 bp, Homo sapiens
gcttcagcaacttct

SEQ ID NO: 85705 - DNA, 15 bp, Homo sapiens
ggcttcagcaacttc

SEQ ID NO: 85706 - DNA, 15 bp, Homo sapiens
gggcttcagcaactt

SEQ ID NO: 85707 - DNA, 15 bp, Homo sapiens
agggcttcagcaact

SEQ ID NO: 85708 - DNA, 15 bp, Homo sapiens
gagggcttcagcaac

SEQ ID NO: 85709 - DNA, 15 bp, Homo sapiens
agagggcttcagcaa

SEQ ID NO: 85710 - DNA, 15 bp, Homo sapiens
cagagggcttcagca

SEQ ID NO: 85711 - DNA, 15 bp, Homo sapiens
tcagagggcttcagc

SEQ ID NO: 85712 - DNA, 15 bp, Homo sapiens
ttcagagggcttcag

SEQ ID NO: 85713 - DNA, 15 bp, Homo sapiens
gttcagagggcttca

SEQ ID NO: 85714 - DNA, 15 bp, Homo sapiens
ggttcagagggcttc

SEQ ID NO: 85715 - DNA, 15 bp, Homo sapiens
tggttcagagggctt

SEQ ID NO: 85716 - DNA, 15 bp, Homo sapiens
atggttcagagggct

SEQ ID NO: 85717 - DNA, 15 bp, Homo sapiens
aatggttcagagggc

SEQ ID NO: 85718 - DNA, 15 bp, Homo sapiens
gaatggttcagaggg

SEQ ID NO: 85719 - DNA, 15 bp, Homo sapiens
tgaatggttcagagg

SEQ ID NO: 85720 - DNA, 15 bp, Homo sapiens
ctgaatggttcagag

SEQ ID NO: 85721 - DNA, 15 bp, Homo sapiens
gctgaatggttcaga

SEQ ID NO: 85722 - DNA, 15 bp, Homo sapiens
agctgaatggttcag

SEQ ID NO: 85723 - DNA, 15 bp, Homo sapiens
gagctgaatggttca

SEQ ID NO: 85724 - DNA, 15 bp, Homo sapiens
agagctgaatggttc

SEQ ID NO: 85725 - DNA, 15 bp, Homo sapiens
gagagctgaatggtt

SEQ ID NO: 85726 - DNA, 15 bp, Homo sapiens
agagagctgaatggt

SEQ ID NO: 85727 - DNA, 15 bp, Homo sapiens
tagagagctgaatgg

SEQ ID NO: 85728 - DNA, 15 bp, Homo sapiens
ttagagagctgaatg

SEQ ID NO: 85729 - DNA, 15 bp, Homo sapiens
cttagagagctgaat

SEQ ID NO: 85730 - DNA, 15 bp, Homo sapiens
ccttagagagctgaa

SEQ ID NO: 85731 - DNA, 15 bp, Homo sapiens
tccttagagagctga

SEQ ID NO: 85732 - DNA, 15 bp, Homo sapiens
ttccttagagagctg

SEQ ID NO: 85733 - DNA, 15 bp, Homo sapiens
gttccttagagagct

SEQ ID NO: 85734 - DNA, 15 bp, Homo sapiens
ggttccttagagagc

SEQ ID NO: 85735 - DNA, 15 bp, Homo sapiens
aggttccttagagag

SEQ ID NO: 85736 - DNA, 15 bp, Homo sapiens
aaggttccttagaga

SEQ ID NO: 85737 - DNA, 15 bp, Homo sapiens
gaaggttccttagag

SEQ ID NO: 85738 - DNA, 15 bp, Homo sapiens
agaaggttccttaga

SEQ ID NO: 85739 - DNA, 15 bp, Homo sapiens
cagaaggttccttag

SEQ ID NO: 85740 - DNA, 15 bp, Homo sapiens
tcagaaggttcctta

SEQ ID NO: 85741 - DNA, 15 bp, Homo sapiens
atcagaaggttcctt

SEQ ID NO: 85742 - DNA, 15 bp, Homo sapiens
tatcagaaggttcct

SEQ ID NO: 85743 - DNA, 15 bp, Homo sapiens
atatcagaaggttcc

SEQ ID NO: 85744 - DNA, 15 bp, Homo sapiens
gatatcagaaggttc

SEQ ID NO: 85745 - DNA, 15 bp, Homo sapiens
agatatcagaaggtt

SEQ ID NO: 85746 - DNA, 15 bp, Homo sapiens
gagatatcagaaggt

SEQ ID NO: 85747 - DNA, 15 bp, Homo sapiens
ggagatatcagaagg

SEQ ID NO: 85748 - DNA, 15 bp, Homo sapiens
gggagatatcagaag

SEQ ID NO: 85749 - DNA, 15 bp, Homo sapiens
ggggagatatcagaa

SEQ ID NO: 85750 - DNA, 15 bp, Homo sapiens
tggggagatatcaga

SEQ ID NO: 85751 - DNA, 15 bp, Homo sapiens
gtggggagatatcag

SEQ ID NO: 85752 - DNA, 15 bp, Homo sapiens
tgtggggagatatca

SEQ ID NO: 85753 - DNA, 15 bp, Homo sapiens
ctgtggggagatatc

SEQ ID NO: 85754 - DNA, 15 bp, Homo sapiens
cctgtggggagatat

SEQ ID NO: 85755 - DNA, 15 bp, Homo sapiens
acctgtggggagata

SEQ ID NO: 85756 - DNA, 15 bp, Homo sapiens
cacctgtggggagat

SEQ ID NO: 85757 - DNA, 15 bp, Homo sapiens
ccacctgtggggaga

SEQ ID NO: 85758 - DNA, 15 bp, Homo sapiens
tccacctgtggggag

SEQ ID NO: 85759 - DNA, 15 bp, Homo sapiens
gtccacctgtgggga

SEQ ID NO: 85760 - DNA, 15 bp, Homo sapiens
ggtccacctgtgggg

SEQ ID NO: 85761 - DNA, 15 bp, Homo sapiens
aggtccacctgtggg

SEQ ID NO: 85762 - DNA, 15 bp, Homo sapiens
caggtccacctgtgg

SEQ ID NO: 85763 - DNA, 15 bp, Homo sapiens
ccaggtccacctgtg

SEQ ID NO: 85764 - DNA, 15 bp, Homo sapiens
gccaggtccacctgt

SEQ ID NO: 85765 - DNA, 15 bp, Homo sapiens
ggccaggtccacctg

SEQ ID NO: 85766 - DNA, 15 bp, Homo sapiens
aggccaggtccacct

SEQ ID NO: 85767 - DNA, 15 bp, Homo sapiens
gaggccaggtccacc

SEQ ID NO: 85768 - DNA, 15 bp, Homo sapiens
agaggccaggtccac

SEQ ID NO: 85769 - DNA, 15 bp, Homo sapiens
gagaggccaggtcca

SEQ ID NO: 85770 - DNA, 15 bp, Homo sapiens
tgagaggccaggtcc

SEQ ID NO: 85771 - DNA, 15 bp, Homo sapiens
ctgagaggccaggtc

SEQ ID NO: 85772 - DNA, 15 bp, Homo sapiens
cctgagaggccaggt

SEQ ID NO: 85773 - DNA, 15 bp, Homo sapiens
acctgagaggccagg

SEQ ID NO: 85774 - DNA, 15 bp, Homo sapiens
gacctgagaggccag

SEQ ID NO: 85775 - DNA, 15 bp, Homo sapiens
ggacctgagaggcca

SEQ ID NO: 85776 - DNA, 15 bp, Homo sapiens
gggacctgagaggcc

SEQ ID NO: 85777 - DNA, 15 bp, Homo sapiens
agggacctgagaggc

SEQ ID NO: 85778 - DNA, 15 bp, Homo sapiens
aagggacctgagagg

SEQ ID NO: 85779 - DNA, 15 bp, Homo sapiens
caagggacctgagag

SEQ ID NO: 85780 - DNA, 15 bp, Homo sapiens
ccaagggacctgaga

SEQ ID NO: 85781 - DNA, 15 bp, Homo sapiens
accaagggacctgag

SEQ ID NO: 85782 - DNA, 15 bp, Homo sapiens
aaccaagggacctga

SEQ ID NO: 85783 - DNA, 15 bp, Homo sapiens
aaaccaagggacctg

SEQ ID NO: 85784 - DNA, 15 bp, Homo sapiens
caaaccaagggacct

SEQ ID NO: 85785 - DNA, 15 bp, Homo sapiens
tcaaaccaagggacc

SEQ ID NO: 85786 - DNA, 15 bp, Homo sapiens
ctcaaaccaagggac

SEQ ID NO: 85787 - DNA, 15 bp, Homo sapiens
gctcaaaccaaggga

SEQ ID NO: 85788 - DNA, 15 bp, Homo sapiens
tgctcaaaccaaggg

SEQ ID NO: 85789 - DNA, 15 bp, Homo sapiens
ctgctcaaaccaagg

SEQ ID NO: 85790 - DNA, 15 bp, Homo sapiens
gctgctcaaaccaag

SEQ ID NO: 85791 - DNA, 15 bp, Homo sapiens
agctgctcaaaccaa

SEQ ID NO: 85792 - DNA, 15 bp, Homo sapiens
cagctgctcaaacca

SEQ ID NO: 85793 - DNA, 15 bp, Homo sapiens
ccagctgctcaaacc

SEQ ID NO: 85794 - DNA, 15 bp, Homo sapiens
gccagctgctcaaac

SEQ ID NO: 85795 - DNA, 15 bp, Homo sapiens
agccagctgctcaaa

SEQ ID NO: 85796 - DNA, 15 bp, Homo sapiens
gagccagctgctcaa

SEQ ID NO: 85797 - DNA, 15 bp, Homo sapiens
tgagccagctgctca

SEQ ID NO: 85798 - DNA, 15 bp, Homo sapiens
ctgagccagctgctc

SEQ ID NO: 85799 - DNA, 15 bp, Homo sapiens
actgagccagctgct

SEQ ID NO: 85800 - DNA, 15 bp, Homo sapiens
aactgagccagctgc

SEQ ID NO: 85801 - DNA, 15 bp, Homo sapiens
gaactgagccagctg

SEQ ID NO: 85802 - DNA, 15 bp, Homo sapiens
tgaactgagccagct

SEQ ID NO: 85803 - DNA, 15 bp, Homo sapiens
ttgaactgagccagc

SEQ ID NO: 85804 - DNA, 15 bp, Homo sapiens
cttgaactgagccag

SEQ ID NO: 85805 - DNA, 15 bp, Homo sapiens
tcttgaactgagcca

SEQ ID NO: 85806 - DNA, 15 bp, Homo sapiens
atcttgaactgagcc

SEQ ID NO: 85807 - DNA, 15 bp, Homo sapiens
catcttgaactgagc

SEQ ID NO: 85808 - DNA, 15 bp, Homo sapiens
gcatcttgaactgag

SEQ ID NO: 85809 - DNA, 15 bp, Homo sapiens
ggcatcttgaactga

SEQ ID NO: 85810 - DNA, 15 bp, Homo sapiens
gggcatcttgaactg

SEQ ID NO: 85811 - DNA, 15 bp, Homo sapiens
agggcatcttgaact

SEQ ID NO: 85812 - DNA, 15 bp, Homo sapiens
cagggcatcttgaac

SEQ ID NO: 85813 - DNA, 15 bp, Homo sapiens
ccagggcatcttgaa

SEQ ID NO: 85814 - DNA, 15 bp, Homo sapiens
tccagggcatcttga

SEQ ID NO: 85815 - DNA, 15 bp, Homo sapiens
gtccagggcatcttg

SEQ ID NO: 85816 - DNA, 15 bp, Homo sapiens
tgtccagggcatctt

SEQ ID NO: 85817 - DNA, 15 bp, Homo sapiens
atgtccagggcatct

SEQ ID NO: 85818 - DNA, 15 bp, Homo sapiens
gatgtccagggcatc

SEQ ID NO: 85819 - DNA, 15 bp, Homo sapiens
agatgtccagggcat

SEQ ID NO: 85820 - DNA, 15 bp, Homo sapiens
gagatgtccagggca

SEQ ID NO: 85821 - DNA, 15 bp, Homo sapiens
ggagatgtccagggc

SEQ ID NO: 85822 - DNA, 15 bp, Homo sapiens
gggagatgtccaggg

SEQ ID NO: 85823 - DNA, 15 bp, Homo sapiens
tgggagatgtccagg

SEQ ID NO: 85824 - DNA, 15 bp, Homo sapiens
ctgggagatgtccag

SEQ ID NO: 85825 - DNA, 15 bp, Homo sapiens
gctgggagatgtcca

SEQ ID NO: 85826 - DNA, 15 bp, Homo sapiens
agctgggagatgtcc

SEQ ID NO: 85827 - DNA, 15 bp, Homo sapiens
cagctgggagatgtc

SEQ ID NO: 85828 - DNA, 15 bp, Homo sapiens
gcagctgggagatgt

SEQ ID NO: 85829 - DNA, 15 bp, Homo sapiens
ggcagctgggagatg

SEQ ID NO: 85830 - DNA, 15 bp, Homo sapiens
tggcagctgggagat

SEQ ID NO: 85831 - DNA, 15 bp, Homo sapiens
ctggcagctgggaga

SEQ ID NO: 85832 - DNA, 15 bp, Homo sapiens
tctggcagctgggag

SEQ ID NO: 85833 - DNA, 15 bp, Homo sapiens
ttctggcagctggga

SEQ ID NO: 85834 - DNA, 15 bp, Homo sapiens
attctggcagctggg

SEQ ID NO: 85835 - DNA, 15 bp, Homo sapiens
aattctggcagctgg

SEQ ID NO: 85836 - DNA, 15 bp, Homo sapiens
gaattctggcagctg

SEQ ID NO: 85837 - DNA, 15 bp, Homo sapiens
agaattctggcagct

SEQ ID NO: 85838 - DNA, 15 bp, Homo sapiens
aagaattctggcagc

SEQ ID NO: 85839 - DNA, 15 bp, Homo sapiens
caagaattctggcag

SEQ ID NO: 85840 - DNA, 15 bp, Homo sapiens
acaagaattctggca

SEQ ID NO: 85841 - DNA, 15 bp, Homo sapiens
cacaagaattctggc

SEQ ID NO: 85842 - DNA, 15 bp, Homo sapiens
tcacaagaattctgg

SEQ ID NO: 85843 - DNA, 15 bp, Homo sapiens
ctcacaagaattctg

SEQ ID NO: 85844 - DNA, 15 bp, Homo sapiens
gctcacaagaattct

SEQ ID NO: 85845 - DNA, 15 bp, Homo sapiens
agctcacaagaattc

SEQ ID NO: 85846 - DNA, 15 bp, Homo sapiens
cagctcacaagaatt

SEQ ID NO: 85847 - DNA, 15 bp, Homo sapiens
ccagctcacaagaat

SEQ ID NO: 85848 - DNA, 15 bp, Homo sapiens
cccagctcacaagaa

SEQ ID NO: 85849 - DNA, 15 bp, Homo sapiens
gcccagctcacaaga

SEQ ID NO: 85850 - DNA, 15 bp, Homo sapiens
tgcccagctcacaag

SEQ ID NO: 85851 - DNA, 15 bp, Homo sapiens
atgcccagctcacaa

SEQ ID NO: 85852 - DNA, 15 bp, Homo sapiens
gatgcccagctcaca

SEQ ID NO: 85853 - DNA, 15 bp, Homo sapiens
ggatgcccagctcac

SEQ ID NO: 85854 - DNA, 15 bp, Homo sapiens
tggatgcccagctca

SEQ ID NO: 85855 - DNA, 15 bp, Homo sapiens
ctggatgcccagctc

SEQ ID NO: 85856 - DNA, 15 bp, Homo sapiens
tctggatgcccagct

SEQ ID NO: 85857 - DNA, 15 bp, Homo sapiens
ttctggatgcccagc

SEQ ID NO: 85858 - DNA, 15 bp, Homo sapiens
gttctggatgcccag

SEQ ID NO: 85859 - DNA, 15 bp, Homo sapiens
ggttctggatgccca

SEQ ID NO: 85860 - DNA, 15 bp, Homo sapiens
aggttctggatgccc

SEQ ID NO: 85861 - DNA, 15 bp, Homo sapiens
taggttctggatgcc

SEQ ID NO: 85862 - DNA, 15 bp, Homo sapiens
ttaggttctggatgc

SEQ ID NO: 85863 - DNA, 15 bp, Homo sapiens
cttaggttctggatg

SEQ ID NO: 85864 - DNA, 15 bp, Homo sapiens
gcttaggttctggat

SEQ ID NO: 85865 - DNA, 15 bp, Homo sapiens
agcttaggttctgga

SEQ ID NO: 85866 - DNA, 15 bp, Homo sapiens
aagcttaggttctgg

SEQ ID NO: 85867 - DNA, 15 bp, Homo sapiens
gaagcttaggttctg

SEQ ID NO: 85868 - DNA, 15 bp, Homo sapiens
tgaagcttaggttct

SEQ ID NO: 85869 - DNA, 15 bp, Homo sapiens
ttgaagcttaggttc

SEQ ID NO: 85870 - DNA, 15 bp, Homo sapiens
tttgaagcttaggtt

SEQ ID NO: 85871 - DNA, 15 bp, Homo sapiens
ctttgaagcttaggt

SEQ ID NO: 85872 - DNA, 15 bp, Homo sapiens
actttgaagcttagg

SEQ ID NO: 85873 - DNA, 15 bp, Homo sapiens
cactttgaagcttag

SEQ ID NO: 85874 - DNA, 15 bp, Homo sapiens
tcactttgaagctta

SEQ ID NO: 85875 - DNA, 15 bp, Homo sapiens
ctcactttgaagctt

SEQ ID NO: 85876 - DNA, 15 bp, Homo sapiens
tctcactttgaagct

SEQ ID NO: 85877 - DNA, 15 bp, Homo sapiens
ttctcactttgaagc

SEQ ID NO: 85878 - DNA, 15 bp, Homo sapiens
cttctcactttgaag

SEQ ID NO: 85879 - DNA, 15 bp, Homo sapiens
acttctcactttgaa

SEQ ID NO: 85880 - DNA, 15 bp, Homo sapiens
cacttctcactttga

SEQ ID NO: 85881 - DNA, 15 bp, Homo sapiens
ccacttctcactttg

SEQ ID NO: 85882 - DNA, 15 bp, Homo sapiens
cccacttctcacttt

SEQ ID NO: 85883 - DNA, 15 bp, Homo sapiens
gcccacttctcactt

SEQ ID NO: 85884 - DNA, 15 bp, Homo sapiens
tgcccacttctcact

SEQ ID NO: 85885 - DNA, 15 bp, Homo sapiens
ctgcccacttctcac

SEQ ID NO: 85886 - DNA, 15 bp, Homo sapiens
tctgcccacttctca

SEQ ID NO: 85887 - DNA, 15 bp, Homo sapiens
atctgcccacttctc

SEQ ID NO: 85888 - DNA, 15 bp, Homo sapiens
catctgcccacttct

SEQ ID NO: 85889 - DNA, 15 bp, Homo sapiens
gcatctgcccacttc

SEQ ID NO: 85890 - DNA, 15 bp, Homo sapiens
agcatctgcccactt

SEQ ID NO: 85891 - DNA, 15 bp, Homo sapiens
cagcatctgcccact

SEQ ID NO: 85892 - DNA, 15 bp, Homo sapiens
ccagcatctgcccac

SEQ ID NO: 85893 - DNA, 15 bp, Homo sapiens
gccagcatctgccca

SEQ ID NO: 85894 - DNA, 15 bp, Homo sapiens
ggccagcatctgccc

SEQ ID NO: 85895 - DNA, 15 bp, Homo sapiens
tggccagcatctgcc

SEQ ID NO: 85896 - DNA, 15 bp, Homo sapiens
atggccagcatctgc

SEQ ID NO: 85897 - DNA, 15 bp, Homo sapiens
gatggccagcatctg

SEQ ID NO: 85898 - DNA, 15 bp, Homo sapiens
tgatggccagcatct

SEQ ID NO: 85899 - DNA, 15 bp, Homo sapiens
atgatggccagcatc

SEQ ID NO: 85900 - DNA, 15 bp, Homo sapiens
tatgatggccagcat

SEQ ID NO: 85901 - DNA, 15 bp, Homo sapiens
ctatgatggccagca

SEQ ID NO: 85902 - DNA, 15 bp, Homo sapiens
cctatgatggccagc

SEQ ID NO: 85903 - DNA, 15 bp, Homo sapiens
ccctatgatggccag

SEQ ID NO: 85904 - DNA, 15 bp, Homo sapiens
tccctatgatggcca

SEQ ID NO: 85905 - DNA, 15 bp, Homo sapiens
ctccctatgatggcc

SEQ ID NO: 85906 - DNA, 15 bp, Homo sapiens
gctccctatgatggc

SEQ ID NO: 85907 - DNA, 15 bp, Homo sapiens
agctccctatgatgg

SEQ ID NO: 85908 - DNA, 15 bp, Homo sapiens
gagctccctatgatg

SEQ ID NO: 85909 - DNA, 15 bp, Homo sapiens
tgagctccctatgat

SEQ ID NO: 85910 - DNA, 15 bp, Homo sapiens
ctgagctccctatga

SEQ ID NO: 85911 - DNA, 15 bp, Homo sapiens
cctgagctccctatg

SEQ ID NO: 85912 - DNA, 15 bp, Homo sapiens
acctgagctccctat

SEQ ID NO: 85913 - DNA, 15 bp, Homo sapiens
tacctgagctcccta

SEQ ID NO: 85914 - DNA, 15 bp, Homo sapiens
gtacctgagctccct

SEQ ID NO: 85915 - DNA, 15 bp, Homo sapiens
ggtacctgagctccc

SEQ ID NO: 85916 - DNA, 15 bp, Homo sapiens
cggtacctgagctcc

SEQ ID NO: 85917 - DNA, 15 bp, Homo sapiens
ccggtacctgagctc

SEQ ID NO: 85918 - DNA, 15 bp, Homo sapiens
tccggtacctgagct

SEQ ID NO: 85919 - DNA, 15 bp, Homo sapiens
ttccggtacctgagc

SEQ ID NO: 85920 - DNA, 15 bp, Homo sapiens
tttccggtacctgag

SEQ ID NO: 85921 - DNA, 15 bp, Homo sapiens
ctttccggtacctga

SEQ ID NO: 85922 - DNA, 15 bp, Homo sapiens
cctttccggtacctg

SEQ ID NO: 85923 - DNA, 15 bp, Homo sapiens
gcctttccggtacct

SEQ ID NO: 85924 - DNA, 15 bp, Homo sapiens
tgcctttccggtacc

SEQ ID NO: 85925 - DNA, 15 bp, Homo sapiens
ttgcctttccggtac

SEQ ID NO: 85926 - DNA, 15 bp, Homo sapiens
tttgcctttccggta

SEQ ID NO: 85927 - DNA, 15 bp, Homo sapiens
atttgcctttccggt

SEQ ID NO: 85928 - DNA, 15 bp, Homo sapiens
gatttgcctttccgg

SEQ ID NO: 85929 - DNA, 15 bp, Homo sapiens
cgatttgcctttccg

SEQ ID NO: 85930 - DNA, 15 bp, Homo sapiens
gcgatttgcctttcc

SEQ ID NO: 85931 - DNA, 15 bp, Homo sapiens
agcgatttgcctttc

SEQ ID NO: 85932 - DNA, 15 bp, Homo sapiens
cagcgatttgccttt

SEQ ID NO: 85933 - DNA, 15 bp, Homo sapiens
ccagcgatttgcctt

SEQ ID NO: 85934 - DNA, 15 bp, Homo sapiens
cccagcgatttgcct

SEQ ID NO: 85935 - DNA, 15 bp, Homo sapiens
gcccagcgatttgcc

SEQ ID NO: 85936 - DNA, 15 bp, Homo sapiens
tgcccagcgatttgc

SEQ ID NO: 85937 - DNA, 15 bp, Homo sapiens
ttgcccagcgatttg

SEQ ID NO: 85938 - DNA, 15 bp, Homo sapiens
attgcccagcgattt

SEQ ID NO: 85939 - DNA, 15 bp, Homo sapiens
cattgcccagcgatt

SEQ ID NO: 85940 - DNA, 15 bp, Homo sapiens
ccattgcccagcgat

SEQ ID NO: 85941 - DNA, 15 bp, Homo sapiens
accattgcccagcga

SEQ ID NO: 85942 - DNA, 15 bp, Homo sapiens
aaccattgcccagcg

SEQ ID NO: 85943 - DNA, 15 bp, Homo sapiens
aaaccattgcccagc

SEQ ID NO: 85944 - DNA, 15 bp, Homo sapiens
gaaaccattgcccag

SEQ ID NO: 85945 - DNA, 15 bp, Homo sapiens
agaaaccattgccca

SEQ ID NO: 85946 - DNA, 15 bp, Homo sapiens
gagaaaccattgccc

SEQ ID NO: 85947 - DNA, 15 bp, Homo sapiens
agagaaaccattgcc

SEQ ID NO: 85948 - DNA, 15 bp, Homo sapiens
gagagaaaccattgc

SEQ ID NO: 85949 - DNA, 15 bp, Homo sapiens
ggagagaaaccattg

SEQ ID NO: 85950 - DNA, 15 bp, Homo sapiens
aggagagaaaccatt

SEQ ID NO: 85951 - DNA, 15 bp, Homo sapiens
caggagagaaaccat

SEQ ID NO: 85952 - DNA, 15 bp, Homo sapiens
ccaggagagaaacca

SEQ ID NO: 85953 - DNA, 15 bp, Homo sapiens
cccaggagagaaacc

SEQ ID NO: 85954 - DNA, 15 bp, Homo sapiens
tcccaggagagaaac

SEQ ID NO: 85955 - DNA, 15 bp, Homo sapiens
atcccaggagagaaa

SEQ ID NO: 85956 - DNA, 15 bp, Homo sapiens
tatcccaggagagaa

SEQ ID NO: 85957 - DNA, 15 bp, Homo sapiens
gtatcccaggagaga

SEQ ID NO: 85958 - DNA, 15 bp, Homo sapiens
tgtatcccaggagag

SEQ ID NO: 85959 - DNA, 15 bp, Homo sapiens
ctgtatcccaggaga

SEQ ID NO: 85960 - DNA, 15 bp, Homo sapiens
tctgtatcccaggag

SEQ ID NO: 85961 - DNA, 15 bp, Homo sapiens
ttctgtatcccagga

SEQ ID NO: 85962 - DNA, 15 bp, Homo sapiens
attctgtatcccagg

SEQ ID NO: 85963 - DNA, 15 bp, Homo sapiens
cattctgtatcccag

SEQ ID NO: 85964 - DNA, 15 bp, Homo sapiens
ccattctgtatccca

SEQ ID NO: 85965 - DNA, 15 bp, Homo sapiens
accattctgtatccc

SEQ ID NO: 85966 - DNA, 15 bp, Homo sapiens
gaccattctgtatcc

SEQ ID NO: 85967 - DNA, 15 bp, Homo sapiens
ggaccattctgtatc

SEQ ID NO: 85968 - DNA, 15 bp, Homo sapiens
aggaccattctgtat

SEQ ID NO: 85969 - DNA, 15 bp, Homo sapiens
aaggaccattctgta

SEQ ID NO: 85970 - DNA, 15 bp, Homo sapiens
aaaggaccattctgt

SEQ ID NO: 85971 - DNA, 15 bp, Homo sapiens
caaaggaccattctg

SEQ ID NO: 85972 - DNA, 15 bp, Homo sapiens
ccaaaggaccattct

SEQ ID NO: 85973 - DNA, 15 bp, Homo sapiens
tccaaaggaccattc

SEQ ID NO: 85974 - DNA, 15 bp, Homo sapiens
gtccaaaggaccatt

SEQ ID NO: 85975 - DNA, 15 bp, Homo sapiens
tgtccaaaggaccat

SEQ ID NO: 85976 - DNA, 15 bp, Homo sapiens
ttgtccaaaggacca

SEQ ID NO: 85977 - DNA, 15 bp, Homo sapiens
tttgtccaaaggacc

SEQ ID NO: 85978 - DNA, 15 bp, Homo sapiens
atttgtccaaaggac

SEQ ID NO: 85979 - DNA, 15 bp, Homo sapiens
catttgtccaaagga

SEQ ID NO: 85980 - DNA, 15 bp, Homo sapiens
ccatttgtccaaagg

SEQ ID NO: 85981 - DNA, 15 bp, Homo sapiens
tccatttgtccaaag

SEQ ID NO: 85982 - DNA, 15 bp, Homo sapiens
atccatttgtccaaa

SEQ ID NO: 85983 - DNA, 15 bp, Homo sapiens
catccatttgtccaa

SEQ ID NO: 85984 - DNA, 15 bp, Homo sapiens
gcatccatttgtcca

SEQ ID NO: 85985 - DNA, 15 bp, Homo sapiens
agcatccatttgtcc

SEQ ID NO: 85986 - DNA, 15 bp, Homo sapiens
aagcatccatttgtc

SEQ ID NO: 85987 - DNA, 15 bp, Homo sapiens
gaagcatccatttgt

SEQ ID NO: 85988 - DNA, 15 bp, Homo sapiens
agaagcatccatttg

SEQ ID NO: 85989 - DNA, 15 bp, Homo sapiens
aagaagcatccattt

SEQ ID NO: 85990 - DNA, 15 bp, Homo sapiens
taagaagcatccatt

SEQ ID NO: 85991 - DNA, 15 bp, Homo sapiens
ataagaagcatccat

SEQ ID NO: 85992 - DNA, 15 bp, Homo sapiens
cataagaagcatcca

SEQ ID NO: 85993 - DNA, 15 bp, Homo sapiens
ccataagaagcatcc

SEQ ID NO: 85994 - DNA, 15 bp, Homo sapiens
tccataagaagcatc

SEQ ID NO: 85995 - DNA, 15 bp, Homo sapiens
ctccataagaagcat

SEQ ID NO: 85996 - DNA, 15 bp, Homo sapiens
gctccataagaagca

SEQ ID NO: 85997 - DNA, 15 bp, Homo sapiens
agctccataagaagc

SEQ ID NO: 85998 - DNA, 15 bp, Homo sapiens
gagctccataagaag

SEQ ID NO: 85999 - DNA, 15 bp, Homo sapiens
agagctccataagaa

SEQ ID NO: 86000 - DNA, 15 bp, Homo sapiens
aagagctccataaga

SEQ ID NO: 86001 - DNA, 15 bp, Homo sapiens
aaagagctccataag

SEQ ID NO: 86002 - DNA, 15 bp, Homo sapiens
caaagagctccataa

SEQ ID NO: 86003 - DNA, 15 bp, Homo sapiens
gcaaagagctccata

SEQ ID NO: 86004 - DNA, 15 bp, Homo sapiens
agcaaagagctccat

SEQ ID NO: 86005 - DNA, 15 bp, Homo sapiens
cagcaaagagctcca

SEQ ID NO: 86006 - DNA, 15 bp, Homo sapiens
tcagcaaagagctcc

SEQ ID NO: 86007 - DNA, 15 bp, Homo sapiens
gtcagcaaagagctc

SEQ ID NO: 86008 - DNA, 15 bp, Homo sapiens
agtcagcaaagagct

SEQ ID NO: 86009 - DNA, 15 bp, Homo sapiens
tagtcagcaaagagc

SEQ ID NO: 86010 - DNA, 15 bp, Homo sapiens
ctagtcagcaaagag

SEQ ID NO: 86011 - DNA, 15 bp, Homo sapiens
actagtcagcaaaga

SEQ ID NO: 86012 - DNA, 15 bp, Homo sapiens
tactagtcagcaaag

SEQ ID NO: 86013 - DNA, 15 bp, Homo sapiens
ctactagtcagcaaa

SEQ ID NO: 86014 - DNA, 15 bp, Homo sapiens
tctactagtcagcaa

SEQ ID NO: 86015 - DNA, 15 bp, Homo sapiens
ttctactagtcagca

SEQ ID NO: 86016 - DNA, 15 bp, Homo sapiens
attctactagtcagc

SEQ ID NO: 86017 - DNA, 15 bp, Homo sapiens
tattctactagtcag

SEQ ID NO: 86018 - DNA, 15 bp, Homo sapiens
ttattctactagtca

SEQ ID NO: 86019 - DNA, 15 bp, Homo sapiens
attattctactagtc

SEQ ID NO: 86020 - DNA, 15 bp, Homo sapiens
tattattctactagt

SEQ ID NO: 86021 - DNA, 15 bp, Homo sapiens
gtattattctactag

SEQ ID NO: 86022 - DNA, 15 bp, Homo sapiens
tgtattattctacta

SEQ ID NO: 86023 - DNA, 15 bp, Homo sapiens
ctgtattattctact

SEQ ID NO: 86024 - DNA, 15 bp, Homo sapiens
gctgtattattctac

SEQ ID NO: 86025 - DNA, 15 bp, Homo sapiens
tgctgtattattcta

SEQ ID NO: 86026 - DNA, 15 bp, Homo sapiens
ctgctgtattattct

SEQ ID NO: 86027 - DNA, 15 bp, Homo sapiens
tctgctgtattattc

SEQ ID NO: 86028 - DNA, 15 bp, Homo sapiens
ttctgctgtattatt

SEQ ID NO: 86029 - DNA, 15 bp, Homo sapiens
attctgctgtattat

SEQ ID NO: 86030 - DNA, 15 bp, Homo sapiens
cattctgctgtatta

SEQ ID NO: 86031 - DNA, 15 bp, Homo sapiens
ccattctgctgtatt

SEQ ID NO: 86032 - DNA, 15 bp, Homo sapiens
gccattctgctgtat

SEQ ID NO: 86033 - DNA, 15 bp, Homo sapiens
agccattctgctgta

SEQ ID NO: 86034 - DNA, 15 bp, Homo sapiens
cagccattctgctgt

SEQ ID NO: 86035 - DNA, 15 bp, Homo sapiens
tcagccattctgctg

SEQ ID NO: 86036 - DNA, 15 bp, Homo sapiens
ctcagccattctgct

SEQ ID NO: 86037 - DNA, 15 bp, Homo sapiens
tctcagccattctgc

SEQ ID NO: 86038 - DNA, 15 bp, Homo sapiens
ttctcagccattctg

SEQ ID NO: 86039 - DNA, 15 bp, Homo sapiens
gttctcagccattct

SEQ ID NO: 86040 - DNA, 15 bp, Homo sapiens
tgttctcagccattc

SEQ ID NO: 86041 - DNA, 15 bp, Homo sapiens
gtgttctcagccatt

SEQ ID NO: 86042 - DNA, 15 bp, Homo sapiens
tgtgttctcagccat

SEQ ID NO: 86043 - DNA, 15 bp, Homo sapiens
ctgtgttctcagcca

SEQ ID NO: 86044 - DNA, 15 bp, Homo sapiens
cctgtgttctcagcc

SEQ ID NO: 86045 - DNA, 15 bp, Homo sapiens
acctgtgttctcagc

SEQ ID NO: 86046 - DNA, 15 bp, Homo sapiens
aacctgtgttctcag

SEQ ID NO: 86047 - DNA, 15 bp, Homo sapiens
gaacctgtgttctca

SEQ ID NO: 86048 - DNA, 15 bp, Homo sapiens
agaacctgtgttctc

SEQ ID NO: 86049 - DNA, 15 bp, Homo sapiens
cagaacctgtgttct

SEQ ID NO: 86050 - DNA, 15 bp, Homo sapiens
ccagaacctgtgttc

SEQ ID NO: 86051 - DNA, 15 bp, Homo sapiens
cccagaacctgtgtt

SEQ ID NO: 86052 - DNA, 15 bp, Homo sapiens
acccagaacctgtgt

SEQ ID NO: 86053 - DNA, 15 bp, Homo sapiens
gacccagaacctgtg

SEQ ID NO: 86054 - DNA, 15 bp, Homo sapiens
tgacccagaacctgt

SEQ ID NO: 86055 - DNA, 15 bp, Homo sapiens
ctgacccagaacctg

SEQ ID NO: 86056 - DNA, 15 bp, Homo sapiens
tctgacccagaacct

SEQ ID NO: 86057 - DNA, 15 bp, Homo sapiens
gtctgacccagaacc

SEQ ID NO: 86058 - DNA, 15 bp, Homo sapiens
tgtctgacccagaac

SEQ ID NO: 86059 - DNA, 15 bp, Homo sapiens
ctgtctgacccagaa

SEQ ID NO: 86060 - DNA, 15 bp, Homo sapiens
tctgtctgacccaga

SEQ ID NO: 86061 - DNA, 15 bp, Homo sapiens
gtctgtctgacccag

SEQ ID NO: 86062 - DNA, 15 bp, Homo sapiens
ggtctgtctgaccca

SEQ ID NO: 86063 - DNA, 15 bp, Homo sapiens
aggtctgtctgaccc

SEQ ID NO: 86064 - DNA, 15 bp, Homo sapiens
caggtctgtctgacc

SEQ ID NO: 86065 - DNA, 15 bp, Homo sapiens
ccaggtctgtctgac

SEQ ID NO: 86066 - DNA, 15 bp, Homo sapiens
cccaggtctgtctga

SEQ ID NO: 86067 - DNA, 15 bp, Homo sapiens
gcccaggtctgtctg

SEQ ID NO: 86068 - DNA, 15 bp, Homo sapiens
agcccaggtctgtct

SEQ ID NO: 86069 - DNA, 15 bp, Homo sapiens
gagcccaggtctgtc

SEQ ID NO: 86070 - DNA, 15 bp, Homo sapiens
tgagcccaggtctgt

SEQ ID NO: 86071 - DNA, 15 bp, Homo sapiens
ttgagcccaggtctg

SEQ ID NO: 86072 - DNA, 15 bp, Homo sapiens
tttgagcccaggtct

SEQ ID NO: 86073 - DNA, 15 bp, Homo sapiens
atttgagcccaggtc

SEQ ID NO: 86074 - DNA, 15 bp, Homo sapiens
gatttgagcccaggt

SEQ ID NO: 86075 - DNA, 15 bp, Homo sapiens
ggatttgagcccagg

SEQ ID NO: 86076 - DNA, 15 bp, Homo sapiens
aggatttgagcccag

SEQ ID NO: 86077 - DNA, 15 bp, Homo sapiens
caggatttgagccca

SEQ ID NO: 86078 - DNA, 15 bp, Homo sapiens
ccaggatttgagccc

SEQ ID NO: 86079 - DNA, 15 bp, Homo sapiens
gccaggatttgagcc

SEQ ID NO: 86080 - DNA, 15 bp, Homo sapiens
agccaggatttgagc

SEQ ID NO: 86081 - DNA, 15 bp, Homo sapiens
gagccaggatttgag

SEQ ID NO: 86082 - DNA, 15 bp, Homo sapiens
ggagccaggatttga

SEQ ID NO: 86083 - DNA, 15 bp, Homo sapiens
aggagccaggatttg

SEQ ID NO: 86084 - DNA, 15 bp, Homo sapiens
gaggagccaggattt

SEQ ID NO: 86085 - DNA, 15 bp, Homo sapiens
ggaggagccaggatt

SEQ ID NO: 86086 - DNA, 15 bp, Homo sapiens
tggaggagccaggat

SEQ ID NO: 86087 - DNA, 15 bp, Homo sapiens
atggaggagccagga

SEQ ID NO: 86088 - DNA, 15 bp, Homo sapiens
aatggaggagccagg

SEQ ID NO: 86089 - DNA, 15 bp, Homo sapiens
aaatggaggagccag

SEQ ID NO: 86090 - DNA, 15 bp, Homo sapiens
caaatggaggagcca

SEQ ID NO: 86091 - DNA, 15 bp, Homo sapiens
gcaaatggaggagcc

SEQ ID NO: 86092 - DNA, 15 bp, Homo sapiens
agcaaatggaggagc

SEQ ID NO: 86093 - DNA, 15 bp, Homo sapiens
cagcaaatggaggag

SEQ ID NO: 86094 - DNA, 15 bp, Homo sapiens
ccagcaaatggagga

SEQ ID NO: 86095 - DNA, 15 bp, Homo sapiens
gccagcaaatggagg

SEQ ID NO: 86096 - DNA, 15 bp, Homo sapiens
agccagcaaatggag

SEQ ID NO: 86097 - DNA, 15 bp, Homo sapiens
aagccagcaaatgga

SEQ ID NO: 86098 - DNA, 15 bp, Homo sapiens
caagccagcaaatgg

SEQ ID NO: 86099 - DNA, 15 bp, Homo sapiens
tcaagccagcaaatg

SEQ ID NO: 86100 - DNA, 15 bp, Homo sapiens
ctcaagccagcaaat

SEQ ID NO: 86101 - DNA, 15 bp, Homo sapiens
cctcaagccagcaaa

SEQ ID NO: 86102 - DNA, 15 bp, Homo sapiens
ccctcaagccagcaa

SEQ ID NO: 86103 - DNA, 15 bp, Homo sapiens
accctcaagccagca

SEQ ID NO: 86104 - DNA, 15 bp, Homo sapiens
taccctcaagccagc

SEQ ID NO: 86105 - DNA, 15 bp, Homo sapiens
ctaccctcaagccag

SEQ ID NO: 86106 - DNA, 15 bp, Homo sapiens
cctaccctcaagcca

SEQ ID NO: 86107 - DNA, 15 bp, Homo sapiens
acctaccctcaagcc

SEQ ID NO: 86108 - DNA, 15 bp, Homo sapiens
cacctaccctcaagc

SEQ ID NO: 86109 - DNA, 15 bp, Homo sapiens
gcacctaccctcaag

SEQ ID NO: 86110 - DNA, 15 bp, Homo sapiens
agcacctaccctcaa

SEQ ID NO: 86111 - DNA, 15 bp, Homo sapiens
cagcacctaccctca

SEQ ID NO: 86112 - DNA, 15 bp, Homo sapiens
acagcacctaccctc

SEQ ID NO: 86113 - DNA, 15 bp, Homo sapiens
aacagcacctaccct

SEQ ID NO: 86114 - DNA, 15 bp, Homo sapiens
caacagcacctaccc

SEQ ID NO: 86115 - DNA, 15 bp, Homo sapiens
acaacagcacctacc

SEQ ID NO: 86116 - DNA, 15 bp, Homo sapiens
aacaacagcacctac

SEQ ID NO: 86117 - DNA, 15 bp, Homo sapiens
taacaacagcaccta

SEQ ID NO: 86118 - DNA, 15 bp, Homo sapiens
ttaacaacagcacct

SEQ ID NO: 86119 - DNA, 15 bp, Homo sapiens
cttaacaacagcacc

SEQ ID NO: 86120 - DNA, 15 bp, Homo sapiens
tcttaacaacagcac

SEQ ID NO: 86121 - DNA, 15 bp, Homo sapiens
ctcttaacaacagca

SEQ ID NO: 86122 - DNA, 15 bp, Homo sapiens
actcttaacaacagc

SEQ ID NO: 86123 - DNA, 15 bp, Homo sapiens
gactcttaacaacag

SEQ ID NO: 86124 - DNA, 15 bp, Homo sapiens
tgactcttaacaaca

SEQ ID NO: 86125 - DNA, 15 bp, Homo sapiens
atgactcttaacaac

SEQ ID NO: 86126 - DNA, 15 bp, Homo sapiens
catgactcttaacaa

SEQ ID NO: 86127 - DNA, 15 bp, Homo sapiens
tcatgactcttaaca

SEQ ID NO: 86128 - DNA, 15 bp, Homo sapiens
ctcatgactcttaac

SEQ ID NO: 86129 - DNA, 15 bp, Homo sapiens
actcatgactcttaa

SEQ ID NO: 86130 - DNA, 15 bp, Homo sapiens
cactcatgactctta

SEQ ID NO: 86131 - DNA, 15 bp, Homo sapiens
gcactcatgactctt

SEQ ID NO: 86132 - DNA, 15 bp, Homo sapiens
cgcactcatgactct

SEQ ID NO: 86133 - DNA, 15 bp, Homo sapiens
gcgcactcatgactc

SEQ ID NO: 86134 - DNA, 15 bp, Homo sapiens
ggcgcactcatgact

SEQ ID NO: 86135 - DNA, 15 bp, Homo sapiens
aggcgcactcatgac

SEQ ID NO: 86136 - DNA, 15 bp, Homo sapiens
gaggcgcactcatga

SEQ ID NO: 86137 - DNA, 15 bp, Homo sapiens
agaggcgcactcatg

SEQ ID NO: 86138 - DNA, 15 bp, Homo sapiens
aagaggcgcactcat

SEQ ID NO: 86139 - DNA, 15 bp, Homo sapiens
caagaggcgcactca

SEQ ID NO: 86140 - DNA, 15 bp, Homo sapiens
acaagaggcgcactc

SEQ ID NO: 86141 - DNA, 15 bp, Homo sapiens
gacaagaggcgcact

SEQ ID NO: 86142 - DNA, 15 bp, Homo sapiens
ggacaagaggcgcac

SEQ ID NO: 86143 - DNA, 15 bp, Homo sapiens
tggacaagaggcgca

SEQ ID NO: 86144 - DNA, 15 bp, Homo sapiens
gtggacaagaggcgc

SEQ ID NO: 86145 - DNA, 15 bp, Homo sapiens
ggtggacaagaggcg

SEQ ID NO: 86146 - DNA, 15 bp, Homo sapiens
gggtggacaagaggc

SEQ ID NO: 86147 - DNA, 15 bp, Homo sapiens
cgggtggacaagagg

SEQ ID NO: 86148 - DNA, 15 bp, Homo sapiens
tcgggtggacaagag

SEQ ID NO: 86149 - DNA, 15 bp, Homo sapiens
ctcgggtggacaaga

SEQ ID NO: 86150 - DNA, 15 bp, Homo sapiens
cctcgggtggacaag

SEQ ID NO: 86151 - DNA, 15 bp, Homo sapiens
gcctcgggtggacaa

SEQ ID NO: 86152 - DNA, 15 bp, Homo sapiens
agcctcgggtggaca

SEQ ID NO: 86153 - DNA, 15 bp, Homo sapiens
cagcctcgggtggac

SEQ ID NO: 86154 - DNA, 15 bp, Homo sapiens
acagcctcgggtgga

SEQ ID NO: 86155 - DNA, 15 bp, Homo sapiens
cacagcctcgggtgg

SEQ ID NO: 86156 - DNA, 15 bp, Homo sapiens
ccacagcctcgggtg

SEQ ID NO: 86157 - DNA, 15 bp, Homo sapiens
gccacagcctcgggt

SEQ ID NO: 86158 - DNA, 15 bp, Homo sapiens
ggccacagcctcggg

SEQ ID NO: 86159 - DNA, 15 bp, Homo sapiens
tggccacagcctcgg

SEQ ID NO: 86160 - DNA, 15 bp, Homo sapiens
ctggccacagcctcg

SEQ ID NO: 86161 - DNA, 15 bp, Homo sapiens
tctggccacagcctc

SEQ ID NO: 86162 - DNA, 15 bp, Homo sapiens
ctctggccacagcct

SEQ ID NO: 86163 - DNA, 15 bp, Homo sapiens
gctctggccacagcc

SEQ ID NO: 86164 - DNA, 15 bp, Homo sapiens
tgctctggccacagc

SEQ ID NO: 86165 - DNA, 15 bp, Homo sapiens
atgctctggccacag

SEQ ID NO: 86166 - DNA, 15 bp, Homo sapiens
gatgctctggccaca

SEQ ID NO: 86167 - DNA, 15 bp, Homo sapiens
agatgctctggccac

SEQ ID NO: 86168 - DNA, 15 bp, Homo sapiens
cagatgctctggcca

SEQ ID NO: 86169 - DNA, 15 bp, Homo sapiens
tcagatgctctggcc

SEQ ID NO: 86170 - DNA, 15 bp, Homo sapiens
gtcagatgctctggc

SEQ ID NO: 86171 - DNA, 15 bp, Homo sapiens
agtcagatgctctgg

SEQ ID NO: 86172 - DNA, 15 bp, Homo sapiens
aagtcagatgctctg

SEQ ID NO: 86173 - DNA, 15 bp, Homo sapiens
aaagtcagatgctct

SEQ ID NO: 86174 - DNA, 15 bp, Homo sapiens
caaagtcagatgctc

SEQ ID NO: 86175 - DNA, 15 bp, Homo sapiens
ccaaagtcagatgct

SEQ ID NO: 86176 - DNA, 15 bp, Homo sapiens
gccaaagtcagatgc

SEQ ID NO: 86177 - DNA, 15 bp, Homo sapiens
agccaaagtcagatg

SEQ ID NO: 86178 - DNA, 15 bp, Homo sapiens
tagccaaagtcagat

SEQ ID NO: 86179 - DNA, 15 bp, Homo sapiens
ttagccaaagtcaga

SEQ ID NO: 86180 - DNA, 15 bp, Homo sapiens
gttagccaaagtcag

SEQ ID NO: 86181 - DNA, 15 bp, Homo sapiens
tgttagccaaagtca

SEQ ID NO: 86182 - DNA, 15 bp, Homo sapiens
gtgttagccaaagtc

SEQ ID NO: 86183 - DNA, 15 bp, Homo sapiens
ggtgttagccaaagt

SEQ ID NO: 86184 - DNA, 15 bp, Homo sapiens
aggtgttagccaaag

SEQ ID NO: 86185 - DNA, 15 bp, Homo sapiens
caggtgttagccaaa

SEQ ID NO: 86186 - DNA, 15 bp, Homo sapiens
ccaggtgttagccaa

SEQ ID NO: 86187 - DNA, 15 bp, Homo sapiens
tccaggtgttagcca

SEQ ID NO: 86188 - DNA, 15 bp, Homo sapiens
gtccaggtgttagcc

SEQ ID NO: 86189 - DNA, 15 bp, Homo sapiens
cgtccaggtgttagc

SEQ ID NO: 86190 - DNA, 15 bp, Homo sapiens
ccgtccaggtgttag

SEQ ID NO: 86191 - DNA, 15 bp, Homo sapiens
tccgtccaggtgtta

SEQ ID NO: 86192 - DNA, 15 bp, Homo sapiens
ctccgtccaggtgtt

SEQ ID NO: 86193 - DNA, 15 bp, Homo sapiens
tctccgtccaggtgt

SEQ ID NO: 86194 - DNA, 15 bp, Homo sapiens
ctctccgtccaggtg

SEQ ID NO: 86195 - DNA, 15 bp, Homo sapiens
tctctccgtccaggt

SEQ ID NO: 86196 - DNA, 15 bp, Homo sapiens
atctctccgtccagg

SEQ ID NO: 86197 - DNA, 15 bp, Homo sapiens
gatctctccgtccag

SEQ ID NO: 86198 - DNA, 15 bp, Homo sapiens
tgatctctccgtcca

SEQ ID NO: 86199 - DNA, 15 bp, Homo sapiens
ctgatctctccgtcc

SEQ ID NO: 86200 - DNA, 15 bp, Homo sapiens
gctgatctctccgtc

SEQ ID NO: 86201 - DNA, 15 bp, Homo sapiens
tgctgatctctccgt

SEQ ID NO: 86202 - DNA, 15 bp, Homo sapiens
ttgctgatctctccg

SEQ ID NO: 86203 - DNA, 15 bp, Homo sapiens
tttgctgatctctcc

SEQ ID NO: 86204 - DNA, 15 bp, Homo sapiens
gtttgctgatctctc

SEQ ID NO: 86205 - DNA, 15 bp, Homo sapiens
tgtttgctgatctct

SEQ ID NO: 86206 - DNA, 15 bp, Homo sapiens
ctgtttgctgatctc

SEQ ID NO: 86207 - DNA, 15 bp, Homo sapiens
gctgtttgctgatct

SEQ ID NO: 86208 - DNA, 15 bp, Homo sapiens
agctgtttgctgatc

SEQ ID NO: 86209 - DNA, 15 bp, Homo sapiens
gagctgtttgctgat

SEQ ID NO: 86210 - DNA, 15 bp, Homo sapiens
ggagctgtttgctga

SEQ ID NO: 86211 - DNA, 15 bp, Homo sapiens
tggagctgtttgctg

SEQ ID NO: 86212 - DNA, 15 bp, Homo sapiens
ctggagctgtttgct

SEQ ID NO: 86213 - DNA, 15 bp, Homo sapiens
gctggagctgtttgc

SEQ ID NO: 86214 - DNA, 15 bp, Homo sapiens
tgctggagctgtttg

SEQ ID NO: 86215 - DNA, 15 bp, Homo sapiens
atgctggagctgttt

SEQ ID NO: 86216 - DNA, 15 bp, Homo sapiens
catgctggagctgtt

SEQ ID NO: 86217 - DNA, 15 bp, Homo sapiens
acatgctggagctgt

SEQ ID NO: 86218 - DNA, 15 bp, Homo sapiens
tacatgctggagctg

SEQ ID NO: 86219 - DNA, 15 bp, Homo sapiens
ttacatgctggagct

SEQ ID NO: 86220 - DNA, 15 bp, Homo sapiens
attacatgctggagc

SEQ ID NO: 86221 - DNA, 15 bp, Homo sapiens
cattacatgctggag

SEQ ID NO: 86222 - DNA, 15 bp, Homo sapiens
acattacatgctgga

SEQ ID NO: 86223 - DNA, 15 bp, Homo sapiens
aacattacatgctgg

SEQ ID NO: 86224 - DNA, 15 bp, Homo sapiens
gaacattacatgctg

SEQ ID NO: 86225 - DNA, 15 bp, Homo sapiens
agaacattacatgct

SEQ ID NO: 86226 - DNA, 15 bp, Homo sapiens
aagaacattacatgc

SEQ ID NO: 86227 - DNA, 15 bp, Homo sapiens
aaagaacattacatg

SEQ ID NO: 86228 - DNA, 15 bp, Homo sapiens
aaaagaacattacat

SEQ ID NO: 86229 - DNA, 15 bp, Homo sapiens
gaaaagaacattaca

SEQ ID NO: 86230 - DNA, 15 bp, Homo sapiens
tgaaaagaacattac

SEQ ID NO: 86231 - DNA, 15 bp, Homo sapiens
ctgaaaagaacatta

SEQ ID NO: 86232 - DNA, 15 bp, Homo sapiens
tctgaaaagaacatt

SEQ ID NO: 86233 - DNA, 15 bp, Homo sapiens
gtctgaaaagaacat

SEQ ID NO: 86234 - DNA, 15 bp, Homo sapiens
agtctgaaaagaaca

SEQ ID NO: 86235 - DNA, 15 bp, Homo sapiens
gagtctgaaaagaac

SEQ ID NO: 86236 - DNA, 15 bp, Homo sapiens
ggagtctgaaaagaa

SEQ ID NO: 86237 - DNA, 15 bp, Homo sapiens
aggagtctgaaaaga

SEQ ID NO: 86238 - DNA, 15 bp, Homo sapiens
gaggagtctgaaaag

SEQ ID NO: 86239 - DNA, 15 bp, Homo sapiens
ggaggagtctgaaaa

SEQ ID NO: 86240 - DNA, 15 bp, Homo sapiens
tggaggagtctgaaa

SEQ ID NO: 86241 - DNA, 15 bp, Homo sapiens
ctggaggagtctgaa

SEQ ID NO: 86242 - DNA, 15 bp, Homo sapiens
gctggaggagtctga

SEQ ID NO: 86243 - DNA, 15 bp, Homo sapiens
ggctggaggagtctg

SEQ ID NO: 86244 - DNA, 15 bp, Homo sapiens
tggctggaggagtct

SEQ ID NO: 86245 - DNA, 15 bp, Homo sapiens
atggctggaggagtc

SEQ ID NO: 86246 - DNA, 15 bp, Homo sapiens
catggctggaggagt

SEQ ID NO: 86247 - DNA, 15 bp, Homo sapiens
tcatggctggaggag

SEQ ID NO: 86248 - DNA, 15 bp, Homo sapiens
ctcatggctggagga

SEQ ID NO: 86249 - DNA, 15 bp, Homo sapiens
cctcatggctggagg

SEQ ID NO: 86250 - DNA, 15 bp, Homo sapiens
ccctcatggctggag

SEQ ID NO: 86251 - DNA, 15 bp, Homo sapiens
cccctcatggctgga

SEQ ID NO: 86252 - DNA, 15 bp, Homo sapiens
gcccctcatggctgg

SEQ ID NO: 86253 - DNA, 15 bp, Homo sapiens
tgcccctcatggctg

SEQ ID NO: 86254 - DNA, 15 bp, Homo sapiens
atgcccctcatggct

SEQ ID NO: 86255 - DNA, 15 bp, Homo sapiens
aatgcccctcatggc

SEQ ID NO: 86256 - DNA, 15 bp, Homo sapiens
caatgcccctcatgg

SEQ ID NO: 86257 - DNA, 15 bp, Homo sapiens
ccaatgcccctcatg

SEQ ID NO: 86258 - DNA, 15 bp, Homo sapiens
accaatgcccctcat

SEQ ID NO: 86259 - DNA, 15 bp, Homo sapiens
aaccaatgcccctca

SEQ ID NO: 86260 - DNA, 15 bp, Homo sapiens
gaaccaatgcccctc

SEQ ID NO: 86261 - DNA, 15 bp, Homo sapiens
tgaaccaatgcccct

SEQ ID NO: 86262 - DNA, 15 bp, Homo sapiens
ctgaaccaatgcccc

SEQ ID NO: 86263 - DNA, 15 bp, Homo sapiens
cctgaaccaatgccc

SEQ ID NO: 86264 - DNA, 15 bp, Homo sapiens
acctgaaccaatgcc

SEQ ID NO: 86265 - DNA, 15 bp, Homo sapiens
aacctgaaccaatgc

SEQ ID NO: 86266 - DNA, 15 bp, Homo sapiens
caacctgaaccaatg

SEQ ID NO: 86267 - DNA, 15 bp, Homo sapiens
acaacctgaaccaat

SEQ ID NO: 86268 - DNA, 15 bp, Homo sapiens
aacaacctgaaccaa

SEQ ID NO: 86269 - DNA, 15 bp, Homo sapiens
gaacaacctgaacca

SEQ ID NO: 86270 - DNA, 15 bp, Homo sapiens
ggaacaacctgaacc

SEQ ID NO: 86271 - DNA, 15 bp, Homo sapiens
aggaacaacctgaac

SEQ ID NO: 86272 - DNA, 15 bp, Homo sapiens
gaggaacaacctgaa

SEQ ID NO: 86273 - DNA, 15 bp, Homo sapiens
ggaggaacaacctga

SEQ ID NO: 86274 - DNA, 15 bp, Homo sapiens
tggaggaacaacctg

SEQ ID NO: 86275 - DNA, 15 bp, Homo sapiens
gtggaggaacaacct

SEQ ID NO: 86276 - DNA, 15 bp, Homo sapiens
tgtggaggaacaacc

SEQ ID NO: 86277 - DNA, 15 bp, Homo sapiens
ttgtggaggaacaac

SEQ ID NO: 86278 - DNA, 15 bp, Homo sapiens
attgtggaggaacaa

SEQ ID NO: 86279 - DNA, 15 bp, Homo sapiens
gattgtggaggaaca

SEQ ID NO: 86280 - DNA, 15 bp, Homo sapiens
tgattgtggaggaac

SEQ ID NO: 86281 - DNA, 15 bp, Homo sapiens
gtgattgtggaggaa

SEQ ID NO: 86282 - DNA, 15 bp, Homo sapiens
tgtgattgtggagga

SEQ ID NO: 86283 - DNA, 15 bp, Homo sapiens
atgtgattgtggagg

SEQ ID NO: 86284 - DNA, 15 bp, Homo sapiens
aatgtgattgtggag

SEQ ID NO: 86285 - DNA, 15 bp, Homo sapiens
gaatgtgattgtgga

SEQ ID NO: 86286 - DNA, 15 bp, Homo sapiens
agaatgtgattgtgg

SEQ ID NO: 86287 - DNA, 15 bp, Homo sapiens
cagaatgtgattgtg

SEQ ID NO: 86288 - DNA, 15 bp, Homo sapiens
tcagaatgtgattgt

SEQ ID NO: 86289 - DNA, 15 bp, Homo sapiens
atcagaatgtgattg

SEQ ID NO: 86290 - DNA, 15 bp, Homo sapiens
aatcagaatgtgatt

SEQ ID NO: 86291 - DNA, 15 bp, Homo sapiens
taatcagaatgtgat

SEQ ID NO: 86292 - DNA, 15 bp, Homo sapiens
ataatcagaatgtga

SEQ ID NO: 86293 - DNA, 15 bp, Homo sapiens
cataatcagaatgtg

SEQ ID NO: 86294 - DNA, 15 bp, Homo sapiens
ccataatcagaatgt

SEQ ID NO: 86295 - DNA, 15 bp, Homo sapiens
gccataatcagaatg

SEQ ID NO: 86296 - DNA, 15 bp, Homo sapiens
ggccataatcagaat

SEQ ID NO: 86297 - DNA, 15 bp, Homo sapiens
tggccataatcagaa

SEQ ID NO: 86298 - DNA, 15 bp, Homo sapiens
ctggccataatcaga

SEQ ID NO: 86299 - DNA, 15 bp, Homo sapiens
tctggccataatcag

SEQ ID NO: 86300 - DNA, 15 bp, Homo sapiens
gtctggccataatca

SEQ ID NO: 86301 - DNA, 15 bp, Homo sapiens
tgtctggccataatc

SEQ ID NO: 86302 - DNA, 15 bp, Homo sapiens
ctgtctggccataat

SEQ ID NO: 86303 - DNA, 15 bp, Homo sapiens
gctgtctggccataa

SEQ ID NO: 86304 - DNA, 15 bp, Homo sapiens
ggctgtctggccata

SEQ ID NO: 86305 - DNA, 15 bp, Homo sapiens
gggctgtctggccat

SEQ ID NO: 86306 - DNA, 15 bp, Homo sapiens
ggggctgtctggcca

SEQ ID NO: 86307 - DNA, 15 bp, Homo sapiens
aggggctgtctggcc

SEQ ID NO: 86308 - DNA, 15 bp, Homo sapiens
caggggctgtctggc

SEQ ID NO: 86309 - DNA, 15 bp, Homo sapiens
gcaggggctgtctgg

SEQ ID NO: 86310 - DNA, 15 bp, Homo sapiens
ggcaggggctgtctg

SEQ ID NO: 86311 - DNA, 15 bp, Homo sapiens
tggcaggggctgtct

SEQ ID NO: 86312 - DNA, 15 bp, Homo sapiens
gtggcaggggctgtc

SEQ ID NO: 86313 - DNA, 15 bp, Homo sapiens
tgtggcaggggctgt

SEQ ID NO: 86314 - DNA, 15 bp, Homo sapiens
gtgtggcaggggctg

SEQ ID NO: 86315 - DNA, 15 bp, Homo sapiens
agtgtggcaggggct

SEQ ID NO: 86316 - DNA, 15 bp, Homo sapiens
gagtgtggcaggggc

SEQ ID NO: 86317 - DNA, 15 bp, Homo sapiens
agagtgtggcagggg

SEQ ID NO: 86318 - DNA, 15 bp, Homo sapiens
gagagtgtggcaggg

SEQ ID NO: 86319 - DNA, 15 bp, Homo sapiens
tgagagtgtggcagg

SEQ ID NO: 86320 - DNA, 15 bp, Homo sapiens
gtgagagtgtggcag

SEQ ID NO: 86321 - DNA, 15 bp, Homo sapiens
ggtgagagtgtggca

SEQ ID NO: 86322 - DNA, 15 bp, Homo sapiens
aggtgagagtgtggc

SEQ ID NO: 86323 - DNA, 15 bp, Homo sapiens
gaggtgagagtgtgg

SEQ ID NO: 86324 - DNA, 15 bp, Homo sapiens
agaggtgagagtgtg

SEQ ID NO: 86325 - DNA, 15 bp, Homo sapiens
gagaggtgagagtgt

SEQ ID NO: 86326 - DNA, 15 bp, Homo sapiens
tgagaggtgagagtg

SEQ ID NO: 86327 - DNA, 15 bp, Homo sapiens
ctgagaggtgagagt

SEQ ID NO: 86328 - DNA, 15 bp, Homo sapiens
tctgagaggtgagag

SEQ ID NO: 86329 - DNA, 15 bp, Homo sapiens
gtctgagaggtgaga

SEQ ID NO: 86330 - DNA, 15 bp, Homo sapiens
tgtctgagaggtgag

SEQ ID NO: 86331 - DNA, 15 bp, Homo sapiens
ctgtctgagaggtga

SEQ ID NO: 86332 - DNA, 15 bp, Homo sapiens
gctgtctgagaggtg

SEQ ID NO: 86333 - DNA, 15 bp, Homo sapiens
ggctgtctgagaggt

SEQ ID NO: 86334 - DNA, 15 bp, Homo sapiens
aggctgtctgagagg

SEQ ID NO: 86335 - DNA, 15 bp, Homo sapiens
gaggctgtctgagag

SEQ ID NO: 86336 - DNA, 15 bp, Homo sapiens
agaggctgtctgaga

SEQ ID NO: 86337 - DNA, 15 bp, Homo sapiens
gagaggctgtctgag

SEQ ID NO: 86338 - DNA, 15 bp, Homo sapiens
ggagaggctgtctga

SEQ ID NO: 86339 - DNA, 15 bp, Homo sapiens
tggagaggctgtctg

SEQ ID NO: 86340 - DNA, 15 bp, Homo sapiens
ctggagaggctgtct

SEQ ID NO: 86341 - DNA, 15 bp, Homo sapiens
actggagaggctgtc

SEQ ID NO: 86342 - DNA, 15 bp, Homo sapiens
cactggagaggctgt

SEQ ID NO: 86343 - DNA, 15 bp, Homo sapiens
acactggagaggctg

SEQ ID NO: 86344 - DNA, 15 bp, Homo sapiens
gacactggagaggct

SEQ ID NO: 86345 - DNA, 15 bp, Homo sapiens
agacactggagaggc

SEQ ID NO: 86346 - DNA, 15 bp, Homo sapiens
aagacactggagagg

SEQ ID NO: 86347 - DNA, 15 bp, Homo sapiens
taagacactggagag

SEQ ID NO: 86348 - DNA, 15 bp, Homo sapiens
gtaagacactggaga

SEQ ID NO: 86349 - DNA, 15 bp, Homo sapiens
agtaagacactggag

SEQ ID NO: 86350 - DNA, 15 bp, Homo sapiens
aagtaagacactgga

SEQ ID NO: 86351 - DNA, 15 bp, Homo sapiens
taagtaagacactgg

SEQ ID NO: 86352 - DNA, 15 bp, Homo sapiens
ctaagtaagacactg

SEQ ID NO: 86353 - DNA, 15 bp, Homo sapiens
gctaagtaagacact

SEQ ID NO: 86354 - DNA, 15 bp, Homo sapiens
tgctaagtaagacac

SEQ ID NO: 86355 - DNA, 15 bp, Homo sapiens
gtgctaagtaagaca

SEQ ID NO: 86356 - DNA, 15 bp, Homo sapiens
tgtgctaagtaagac

SEQ ID NO: 86357 - DNA, 15 bp, Homo sapiens
ttgtgctaagtaaga

SEQ ID NO: 86358 - DNA, 15 bp, Homo sapiens
gttgtgctaagtaag

SEQ ID NO: 86359 - DNA, 15 bp, Homo sapiens
agttgtgctaagtaa

SEQ ID NO: 86360 - DNA, 15 bp, Homo sapiens
aagttgtgctaagta

SEQ ID NO: 86361 - DNA, 15 bp, Homo sapiens
aaagttgtgctaagt

SEQ ID NO: 86362 - DNA, 15 bp, Homo sapiens
gaaagttgtgctaag

SEQ ID NO: 86363 - DNA, 15 bp, Homo sapiens
tgaaagttgtgctaa

SEQ ID NO: 86364 - DNA, 15 bp, Homo sapiens
gtgaaagttgtgcta

SEQ ID NO: 86365 - DNA, 15 bp, Homo sapiens
agtgaaagttgtgct

SEQ ID NO: 86366 - DNA, 15 bp, Homo sapiens
gagtgaaagttgtgc

SEQ ID NO: 86367 - DNA, 15 bp, Homo sapiens
tgagtgaaagttgtg

SEQ ID NO: 86368 - DNA, 15 bp, Homo sapiens
atgagtgaaagttgt

SEQ ID NO: 86369 - DNA, 15 bp, Homo sapiens
gatgagtgaaagttg

SEQ ID NO: 86370 - DNA, 15 bp, Homo sapiens
agatgagtgaaagtt

SEQ ID NO: 86371 - DNA, 15 bp, Homo sapiens
cagatgagtgaaagt

SEQ ID NO: 86372 - DNA, 15 bp, Homo sapiens
gcagatgagtgaaag

SEQ ID NO: 86373 - DNA, 15 bp, Homo sapiens
tgcagatgagtgaaa

SEQ ID NO: 86374 - DNA, 15 bp, Homo sapiens
ttgcagatgagtgaa

SEQ ID NO: 86375 - DNA, 15 bp, Homo sapiens
tttgcagatgagtga

SEQ ID NO: 86376 - DNA, 15 bp, Homo sapiens
ctttgcagatgagtg

SEQ ID NO: 86377 - DNA, 15 bp, Homo sapiens
tctttgcagatgagt

SEQ ID NO: 86378 - DNA, 15 bp, Homo sapiens
ctctttgcagatgag

SEQ ID NO: 86379 - DNA, 15 bp, Homo sapiens
gctctttgcagatga

SEQ ID NO: 86380 - DNA, 15 bp, Homo sapiens
ggctctttgcagatg

SEQ ID NO: 86381 - DNA, 15 bp, Homo sapiens
tggctctttgcagat

SEQ ID NO: 86382 - DNA, 15 bp, Homo sapiens
ctggctctttgcaga

SEQ ID NO: 86383 - DNA, 15 bp, Homo sapiens
cctggctctttgcag

SEQ ID NO: 86384 - DNA, 15 bp, Homo sapiens
acctggctctttgca

SEQ ID NO: 86385 - DNA, 15 bp, Homo sapiens
aacctggctctttgc

SEQ ID NO: 86386 - DNA, 15 bp, Homo sapiens
gaacctggctctttg

SEQ ID NO: 86387 - DNA, 15 bp, Homo sapiens
agaacctggctcttt

SEQ ID NO: 86388 - DNA, 15 bp, Homo sapiens
aagaacctggctctt

SEQ ID NO: 86389 - DNA, 15 bp, Homo sapiens
caagaacctggctct

SEQ ID NO: 86390 - DNA, 15 bp, Homo sapiens
ccaagaacctggctc

SEQ ID NO: 86391 - DNA, 15 bp, Homo sapiens
tccaagaacctggct

SEQ ID NO: 86392 - DNA, 15 bp, Homo sapiens
ctccaagaacctggc

SEQ ID NO: 86393 - DNA, 15 bp, Homo sapiens
actccaagaacctgg

SEQ ID NO: 86394 - DNA, 15 bp, Homo sapiens
cactccaagaacctg

SEQ ID NO: 86395 - DNA, 15 bp, Homo sapiens
gcactccaagaacct

SEQ ID NO: 86396 - DNA, 15 bp, Homo sapiens
ggcactccaagaacc

SEQ ID NO: 86397 - DNA, 15 bp, Homo sapiens
aggcactccaagaac

SEQ ID NO: 86398 - DNA, 15 bp, Homo sapiens
gaggcactccaagaa

SEQ ID NO: 86399 - DNA, 15 bp, Homo sapiens
tgaggcactccaaga

SEQ ID NO: 86400 - DNA, 15 bp, Homo sapiens
ttgaggcactccaag

SEQ ID NO: 86401 - DNA, 15 bp, Homo sapiens
tttgaggcactccaa

SEQ ID NO: 86402 - DNA, 15 bp, Homo sapiens
atttgaggcactcca

SEQ ID NO: 86403 - DNA, 15 bp, Homo sapiens
aatttgaggcactcc

SEQ ID NO: 86404 - DNA, 15 bp, Homo sapiens
caatttgaggcactc

SEQ ID NO: 86405 - DNA, 15 bp, Homo sapiens
acaatttgaggcact

SEQ ID NO: 86406 - DNA, 15 bp, Homo sapiens
gacaatttgaggcac

SEQ ID NO: 86407 - DNA, 15 bp, Homo sapiens
tgacaatttgaggca

SEQ ID NO: 86408 - DNA, 15 bp, Homo sapiens
atgacaatttgaggc

SEQ ID NO: 86409 - DNA, 15 bp, Homo sapiens
aatgacaatttgagg

SEQ ID NO: 86410 - DNA, 15 bp, Homo sapiens
aaatgacaatttgag

SEQ ID NO: 86411 - DNA, 15 bp, Homo sapiens
gaaatgacaatttga

SEQ ID NO: 86412 - DNA, 15 bp, Homo sapiens
ggaaatgacaatttg

SEQ ID NO: 86413 - DNA, 15 bp, Homo sapiens
tggaaatgacaattt

SEQ ID NO: 86414 - DNA, 15 bp, Homo sapiens
atggaaatgacaatt

SEQ ID NO: 86415 - DNA, 15 bp, Homo sapiens
catggaaatgacaat

SEQ ID NO: 86416 - DNA, 15 bp, Homo sapiens
ccatggaaatgacaa

SEQ ID NO: 86417 - DNA, 15 bp, Homo sapiens
gccatggaaatgaca

SEQ ID NO: 86418 - DNA, 15 bp, Homo sapiens
ggccatggaaatgac

SEQ ID NO: 86419 - DNA, 15 bp, Homo sapiens
tggccatggaaatga

SEQ ID NO: 86420 - DNA, 15 bp, Homo sapiens
ttggccatggaaatg

SEQ ID NO: 86421 - DNA, 15 bp, Homo sapiens
tttggccatggaaat

SEQ ID NO: 86422 - DNA, 15 bp, Homo sapiens
atttggccatggaaa

SEQ ID NO: 86423 - DNA, 15 bp, Homo sapiens
aatttggccatggaa

SEQ ID NO: 86424 - DNA, 15 bp, Homo sapiens
aaatttggccatgga

SEQ ID NO: 86425 - DNA, 15 bp, Homo sapiens
taaatttggccatgg

SEQ ID NO: 86426 - DNA, 15 bp, Homo sapiens
ttaaatttggccatg

SEQ ID NO: 86427 - DNA, 15 bp, Homo sapiens
tttaaatttggccat

SEQ ID NO: 86428 - DNA, 15 bp, Homo sapiens
ttttaaatttggcca

SEQ ID NO: 86429 - DNA, 15 bp, Homo sapiens
attttaaatttggcc

SEQ ID NO: 86430 - DNA, 15 bp, Homo sapiens
cattttaaatttggc

SEQ ID NO: 86431 - DNA, 15 bp, Homo sapiens
tcattttaaatttgg

SEQ ID NO: 86432 - DNA, 15 bp, Homo sapiens
ctcattttaaatttg

SEQ ID NO: 86433 - DNA, 15 bp, Homo sapiens
tctcattttaaattt

SEQ ID NO: 86434 - DNA, 15 bp, Homo sapiens
ctctcattttaaatt

SEQ ID NO: 86435 - DNA, 15 bp, Homo sapiens
tctctcattttaaat

SEQ ID NO: 86436 - DNA, 15 bp, Homo sapiens
ttctctcattttaaa

SEQ ID NO: 86437 - DNA, 15 bp, Homo sapiens
attctctcattttaa

SEQ ID NO: 86438 - DNA, 15 bp, Homo sapiens
cattctctcatttta

SEQ ID NO: 86439 - DNA, 15 bp, Homo sapiens
acattctctcatttt

SEQ ID NO: 86440 - DNA, 15 bp, Homo sapiens
gacattctctcattt

SEQ ID NO: 86441 - DNA, 15 bp, Homo sapiens
agacattctctcatt

SEQ ID NO: 86442 - DNA, 15 bp, Homo sapiens
cagacattctctcat

SEQ ID NO: 86443 - DNA, 15 bp, Homo sapiens
tcagacattctctca

SEQ ID NO: 86444 - DNA, 15 bp, Homo sapiens
ctcagacattctctc

SEQ ID NO: 86445 - DNA, 15 bp, Homo sapiens
gctcagacattctct

SEQ ID NO: 86446 - DNA, 15 bp, Homo sapiens
agctcagacattctc

SEQ ID NO: 86447 - DNA, 15 bp, Homo sapiens
cagctcagacattct

SEQ ID NO: 86448 - DNA, 15 bp, Homo sapiens
tcagctcagacattc

SEQ ID NO: 86449 - DNA, 15 bp, Homo sapiens
ttcagctcagacatt

SEQ ID NO: 86450 - DNA, 15 bp, Homo sapiens
tttcagctcagacat

SEQ ID NO: 86451 - DNA, 15 bp, Homo sapiens
ctttcagctcagaca

SEQ ID NO: 86452 - DNA, 15 bp, Homo sapiens
cctttcagctcagac

SEQ ID NO: 86453 - DNA, 15 bp, Homo sapiens
ccctttcagctcaga

SEQ ID NO: 86454 - DNA, 15 bp, Homo sapiens
cccctttcagctcag

SEQ ID NO: 86455 - DNA, 15 bp, Homo sapiens
ccccctttcagctca

SEQ ID NO: 86456 - DNA, 15 bp, Homo sapiens
gccccctttcagctc

SEQ ID NO: 86457 - DNA, 15 bp, Homo sapiens
agccccctttcagct

SEQ ID NO: 86458 - DNA, 15 bp, Homo sapiens
aagccccctttcagc

SEQ ID NO: 86459 - DNA, 15 bp, Homo sapiens
caagccccctttcag

SEQ ID NO: 86460 - DNA, 15 bp, Homo sapiens
ccaagccccctttca

SEQ ID NO: 86461 - DNA, 15 bp, Homo sapiens
cccaagccccctttc

SEQ ID NO: 86462 - DNA, 15 bp, Homo sapiens
ccccaagcccccttt

SEQ ID NO: 86463 - DNA, 15 bp, Homo sapiens
tccccaagccccctt

SEQ ID NO: 86464 - DNA, 15 bp, Homo sapiens
ttccccaagccccct

SEQ ID NO: 86465 - DNA, 15 bp, Homo sapiens
gttccccaagccccc

SEQ ID NO: 86466 - DNA, 15 bp, Homo sapiens
tgttccccaagcccc

SEQ ID NO: 86467 - DNA, 15 bp, Homo sapiens
ctgttccccaagccc

SEQ ID NO: 86468 - DNA, 15 bp, Homo sapiens
tctgttccccaagcc

SEQ ID NO: 86469 - DNA, 15 bp, Homo sapiens
ctctgttccccaagc

SEQ ID NO: 86470 - DNA, 15 bp, Homo sapiens
cctctgttccccaag

SEQ ID NO: 86471 - DNA, 15 bp, Homo sapiens
acctctgttccccaa

SEQ ID NO: 86472 - DNA, 15 bp, Homo sapiens
gacctctgttcccca

SEQ ID NO: 86473 - DNA, 15 bp, Homo sapiens
tgacctctgttcccc

SEQ ID NO: 86474 - DNA, 15 bp, Homo sapiens
atgacctctgttccc

SEQ ID NO: 86475 - DNA, 15 bp, Homo sapiens
aatgacctctgttcc

SEQ ID NO: 86476 - DNA, 15 bp, Homo sapiens
gaatgacctctgttc

SEQ ID NO: 86477 - DNA, 15 bp, Homo sapiens
agaatgacctctgtt

SEQ ID NO: 86478 - DNA, 15 bp, Homo sapiens
gagaatgacctctgt

SEQ ID NO: 86479 - DNA, 15 bp, Homo sapiens
tgagaatgacctctg

SEQ ID NO: 86480 - DNA, 15 bp, Homo sapiens
atgagaatgacctct

SEQ ID NO: 86481 - DNA, 15 bp, Homo sapiens
gatgagaatgacctc

SEQ ID NO: 86482 - DNA, 15 bp, Homo sapiens
tgatgagaatgacct

SEQ ID NO: 86483 - DNA, 15 bp, Homo sapiens
atgatgagaatgacc

SEQ ID NO: 86484 - DNA, 15 bp, Homo sapiens
catgatgagaatgac

SEQ ID NO: 86485 - DNA, 15 bp, Homo sapiens
acatgatgagaatga

SEQ ID NO: 86486 - DNA, 15 bp, Homo sapiens
aacatgatgagaatg

SEQ ID NO: 86487 - DNA, 15 bp, Homo sapiens
gaacatgatgagaat

SEQ ID NO: 86488 - DNA, 15 bp, Homo sapiens
ggaacatgatgagaa

SEQ ID NO: 86489 - DNA, 15 bp, Homo sapiens
tggaacatgatgaga

SEQ ID NO: 86490 - DNA, 15 bp, Homo sapiens
gtggaacatgatgag

SEQ ID NO: 86491 - DNA, 15 bp, Homo sapiens
ggtggaacatgatga

SEQ ID NO: 86492 - DNA, 15 bp, Homo sapiens
aggtggaacatgatg

SEQ ID NO: 86493 - DNA, 15 bp, Homo sapiens
aaggtggaacatgat

SEQ ID NO: 86494 - DNA, 15 bp, Homo sapiens
aaaggtggaacatga

SEQ ID NO: 86495 - DNA, 15 bp, Homo sapiens
gaaaggtggaacatg

SEQ ID NO: 86496 - DNA, 15 bp, Homo sapiens
agaaaggtggaacat

SEQ ID NO: 86497 - DNA, 15 bp, Homo sapiens
aagaaaggtggaaca

SEQ ID NO: 86498 - DNA, 15 bp, Homo sapiens
aaagaaaggtggaac

SEQ ID NO: 86499 - DNA, 15 bp, Homo sapiens
gaaagaaaggtggaa

SEQ ID NO: 86500 - DNA, 15 bp, Homo sapiens
agaaagaaaggtgga

SEQ ID NO: 86501 - DNA, 15 bp, Homo sapiens
gagaaagaaaggtgg

SEQ ID NO: 86502 - DNA, 15 bp, Homo sapiens
ggagaaagaaaggtg

SEQ ID NO: 86503 - DNA, 15 bp, Homo sapiens
gggagaaagaaaggt

SEQ ID NO: 86504 - DNA, 15 bp, Homo sapiens
agggagaaagaaagg

SEQ ID NO: 86505 - DNA, 15 bp, Homo sapiens
tagggagaaagaaag

SEQ ID NO: 86506 - DNA, 15 bp, Homo sapiens
gtagggagaaagaaa

SEQ ID NO: 86507 - DNA, 15 bp, Homo sapiens
ggtagggagaaagaa

SEQ ID NO: 86508 - DNA, 15 bp, Homo sapiens
tggtagggagaaaga

SEQ ID NO: 86509 - DNA, 15 bp, Homo sapiens
ctggtagggagaaag

SEQ ID NO: 86510 - DNA, 15 bp, Homo sapiens
actggtagggagaaa

SEQ ID NO: 86511 - DNA, 15 bp, Homo sapiens
aactggtagggagaa

SEQ ID NO: 86512 - DNA, 15 bp, Homo sapiens
aaactggtagggaga

SEQ ID NO: 86513 - DNA, 15 bp, Homo sapiens
caaactggtagggag

SEQ ID NO: 86514 - DNA, 15 bp, Homo sapiens
ccaaactggtaggga

SEQ ID NO: 86515 - DNA, 15 bp, Homo sapiens
tccaaactggtaggg

SEQ ID NO: 86516 - DNA, 15 bp, Homo sapiens
ttccaaactggtagg

SEQ ID NO: 86517 - DNA, 15 bp, Homo sapiens
cttccaaactggtag

SEQ ID NO: 86518 - DNA, 15 bp, Homo sapiens
gcttccaaactggta

SEQ ID NO: 86519 - DNA, 15 bp, Homo sapiens
tgcttccaaactggt

SEQ ID NO: 86520 - DNA, 15 bp, Homo sapiens
atgcttccaaactgg

SEQ ID NO: 86521 - DNA, 15 bp, Homo sapiens
aatgcttccaaactg

SEQ ID NO: 86522 - DNA, 15 bp, Homo sapiens
aaatgcttccaaact

SEQ ID NO: 86523 - DNA, 15 bp, Homo sapiens
aaaatgcttccaaac

SEQ ID NO: 86524 - DNA, 15 bp, Homo sapiens
gaaaatgcttccaaa

SEQ ID NO: 86525 - DNA, 15 bp, Homo sapiens
tgaaaatgcttccaa

SEQ ID NO: 86526 - DNA, 15 bp, Homo sapiens
ctgaaaatgcttcca

SEQ ID NO: 86527 - DNA, 15 bp, Homo sapiens
tctgaaaatgcttcc

SEQ ID NO: 86528 - DNA, 15 bp, Homo sapiens
ctctgaaaatgcttc

SEQ ID NO: 86529 - DNA, 15 bp, Homo sapiens
cctctgaaaatgctt

SEQ ID NO: 86530 - DNA, 15 bp, Homo sapiens
tcctctgaaaatgct

SEQ ID NO: 86531 - DNA, 15 bp, Homo sapiens
ttcctctgaaaatgc

SEQ ID NO: 86532 - DNA, 15 bp, Homo sapiens
cttcctctgaaaatg

SEQ ID NO: 86533 - DNA, 15 bp, Homo sapiens
ccttcctctgaaaat

SEQ ID NO: 86534 - DNA, 15 bp, Homo sapiens
accttcctctgaaaa

SEQ ID NO: 86535 - DNA, 15 bp, Homo sapiens
caccttcctctgaaa

SEQ ID NO: 86536 - DNA, 15 bp, Homo sapiens
acaccttcctctgaa

SEQ ID NO: 86537 - DNA, 15 bp, Homo sapiens
aacaccttcctctga

SEQ ID NO: 86538 - DNA, 15 bp, Homo sapiens
gaacaccttcctctg

SEQ ID NO: 86539 - DNA, 15 bp, Homo sapiens
tgaacaccttcctct

SEQ ID NO: 86540 - DNA, 15 bp, Homo sapiens
ttgaacaccttcctc

SEQ ID NO: 86541 - DNA, 15 bp, Homo sapiens
tttgaacaccttcct

SEQ ID NO: 86542 - DNA, 15 bp, Homo sapiens
gtttgaacaccttcc

SEQ ID NO: 86543 - DNA, 15 bp, Homo sapiens
agtttgaacaccttc

SEQ ID NO: 86544 - DNA, 15 bp, Homo sapiens
gagtttgaacacctt

SEQ ID NO: 86545 - DNA, 15 bp, Homo sapiens
ggagtttgaacacct

SEQ ID NO: 86546 - DNA, 15 bp, Homo sapiens
gggagtttgaacacc

SEQ ID NO: 86547 - DNA, 15 bp, Homo sapiens
agggagtttgaacac

SEQ ID NO: 86548 - DNA, 15 bp, Homo sapiens
tagggagtttgaaca

SEQ ID NO: 86549 - DNA, 15 bp, Homo sapiens
gtagggagtttgaac

SEQ ID NO: 86550 - DNA, 15 bp, Homo sapiens
agtagggagtttgaa

SEQ ID NO: 86551 - DNA, 15 bp, Homo sapiens
gagtagggagtttga

SEQ ID NO: 86552 - DNA, 15 bp, Homo sapiens
ggagtagggagtttg

SEQ ID NO: 86553 - DNA, 15 bp, Homo sapiens
aggagtagggagttt

SEQ ID NO: 86554 - DNA, 15 bp, Homo sapiens
gaggagtagggagtt

SEQ ID NO: 86555 - DNA, 15 bp, Homo sapiens
tgaggagtagggagt

SEQ ID NO: 86556 - DNA, 15 bp, Homo sapiens
ctgaggagtagggag

SEQ ID NO: 86557 - DNA, 15 bp, Homo sapiens
actgaggagtaggga

SEQ ID NO: 86558 - DNA, 15 bp, Homo sapiens
cactgaggagtaggg

SEQ ID NO: 86559 - DNA, 15 bp, Homo sapiens
acactgaggagtagg

SEQ ID NO: 86560 - DNA, 15 bp, Homo sapiens
cacactgaggagtag

SEQ ID NO: 86561 - DNA, 15 bp, Homo sapiens
acacactgaggagta

SEQ ID NO: 86562 - DNA, 15 bp, Homo sapiens
gacacactgaggagt

SEQ ID NO: 86563 - DNA, 15 bp, Homo sapiens
agacacactgaggag

SEQ ID NO: 86564 - DNA, 15 bp, Homo sapiens
tagacacactgagga

SEQ ID NO: 86565 - DNA, 15 bp, Homo sapiens
ctagacacactgagg

SEQ ID NO: 86566 - DNA, 15 bp, Homo sapiens
tctagacacactgag

SEQ ID NO: 86567 - DNA, 15 bp, Homo sapiens
ctctagacacactga

SEQ ID NO: 86568 - DNA, 15 bp, Homo sapiens
actctagacacactg

SEQ ID NO: 86569 - DNA, 15 bp, Homo sapiens
tactctagacacact

SEQ ID NO: 86570 - DNA, 15 bp, Homo sapiens
atactctagacacac

SEQ ID NO: 86571 - DNA, 15 bp, Homo sapiens
gatactctagacaca

SEQ ID NO: 86572 - DNA, 15 bp, Homo sapiens
ggatactctagacac

SEQ ID NO: 86573 - DNA, 15 bp, Homo sapiens
aggatactctagaca

SEQ ID NO: 86574 - DNA, 15 bp, Homo sapiens
gaggatactctagac

SEQ ID NO: 86575 - DNA, 15 bp, Homo sapiens
ggaggatactctaga

SEQ ID NO: 86576 - DNA, 15 bp, Homo sapiens
aggaggatactctag

SEQ ID NO: 86577 - DNA, 15 bp, Homo sapiens
caggaggatactcta

SEQ ID NO: 86578 - DNA, 15 bp, Homo sapiens
gcaggaggatactct

SEQ ID NO: 86579 - DNA, 15 bp, Homo sapiens
tgcaggaggatactc

SEQ ID NO: 86580 - DNA, 15 bp, Homo sapiens
gtgcaggaggatact

SEQ ID NO: 86581 - DNA, 15 bp, Homo sapiens
cgtgcaggaggatac

SEQ ID NO: 86582 - DNA, 15 bp, Homo sapiens
gcgtgcaggaggata

SEQ ID NO: 86583 - DNA, 15 bp, Homo sapiens
cgcgtgcaggaggat

SEQ ID NO: 86584 - DNA, 15 bp, Homo sapiens
gcgcgtgcaggagga

SEQ ID NO: 86585 - DNA, 15 bp, Homo sapiens
cgcgcgtgcaggagg

SEQ ID NO: 86586 - DNA, 15 bp, Homo sapiens
gcgcgcgtgcaggag

SEQ ID NO: 86587 - DNA, 15 bp, Homo sapiens
cgcgcgcgtgcagga

SEQ ID NO: 86588 - DNA, 15 bp, Homo sapiens
acgcgcgcgtgcagg

SEQ ID NO: 86589 - DNA, 15 bp, Homo sapiens
cacgcgcgcgtgcag

SEQ ID NO: 86590 - DNA, 15 bp, Homo sapiens
gcacgcgcgcgtgca

SEQ ID NO: 86591 - DNA, 15 bp, Homo sapiens
tgcacgcgcgcgtgc

SEQ ID NO: 86592 - DNA, 15 bp, Homo sapiens
gtgcacgcgcgcgtg

SEQ ID NO: 86593 - DNA, 15 bp, Homo sapiens
tgtgcacgcgcgcgt

SEQ ID NO: 86594 - DNA, 15 bp, Homo sapiens
gtgtgcacgcgcgcg

SEQ ID NO: 86595 - DNA, 15 bp, Homo sapiens
tgtgtgcacgcgcgc

SEQ ID NO: 86596 - DNA, 15 bp, Homo sapiens
gtgtgtgcacgcgcg

SEQ ID NO: 86597 - DNA, 15 bp, Homo sapiens
tgtgtgtgcacgcgc

SEQ ID NO: 86598 - DNA, 15 bp, Homo sapiens
gtgtgtgtgcacgcg

SEQ ID NO: 86599 - DNA, 15 bp, Homo sapiens
tgtgtgtgtgcacgc

SEQ ID NO: 86600 - DNA, 15 bp, Homo sapiens
gtgtgtgtgtgcacg

SEQ ID NO: 86601 - DNA, 15 bp, Homo sapiens
tgtgtgtgtgtgcac

SEQ ID NO: 86602 - DNA, 15 bp, Homo sapiens
gtgtgtgtgtgtgca

SEQ ID NO: 86603 - DNA, 15 bp, Homo sapiens
tgtgtgtgtgtgtgc

SEQ ID NO: 86604 - DNA, 15 bp, Homo sapiens
gtgtgtgtgtgtgtg

SEQ ID NO: 86605 - DNA, 15 bp, Homo sapiens
tgtgtgtgtgtgtgt

SEQ ID NO: 86606 - DNA, 15 bp, Homo sapiens
agtgtgtgtgtgtgt

SEQ ID NO: 86607 - DNA, 15 bp, Homo sapiens
gagtgtgtgtgtgtg

SEQ ID NO: 86608 - DNA, 15 bp, Homo sapiens
ggagtgtgtgtgtgt

SEQ ID NO: 86609 - DNA, 15 bp, Homo sapiens
gggagtgtgtgtgtg

SEQ ID NO: 86610 - DNA, 15 bp, Homo sapiens
ggggagtgtgtgtgt

SEQ ID NO: 86611 - DNA, 15 bp, Homo sapiens
aggggagtgtgtgtg

SEQ ID NO: 86612 - DNA, 15 bp, Homo sapiens
gaggggagtgtgtgt

SEQ ID NO: 86613 - DNA, 15 bp, Homo sapiens
ggaggggagtgtgtg

SEQ ID NO: 86614 - DNA, 15 bp, Homo sapiens
tggaggggagtgtgt

SEQ ID NO: 86615 - DNA, 15 bp, Homo sapiens
atggaggggagtgtg

SEQ ID NO: 86616 - DNA, 15 bp, Homo sapiens
aatggaggggagtgt

SEQ ID NO: 86617 - DNA, 15 bp, Homo sapiens
aaatggaggggagtg

SEQ ID NO: 86618 - DNA, 15 bp, Homo sapiens
caaatggaggggagt

SEQ ID NO: 86619 - DNA, 15 bp, Homo sapiens
tcaaatggaggggag

SEQ ID NO: 86620 - DNA, 15 bp, Homo sapiens
gtcaaatggagggga

SEQ ID NO: 86621 - DNA, 15 bp, Homo sapiens
tgtcaaatggagggg

SEQ ID NO: 86622 - DNA, 15 bp, Homo sapiens
ctgtcaaatggaggg

SEQ ID NO: 86623 - DNA, 15 bp, Homo sapiens
tctgtcaaatggagg

SEQ ID NO: 86624 - DNA, 15 bp, Homo sapiens
atctgtcaaatggag

SEQ ID NO: 86625 - DNA, 15 bp, Homo sapiens
catctgtcaaatgga

SEQ ID NO: 86626 - DNA, 15 bp, Homo sapiens
tcatctgtcaaatgg

SEQ ID NO: 86627 - DNA, 15 bp, Homo sapiens
ctcatctgtcaaatg

SEQ ID NO: 86628 - DNA, 15 bp, Homo sapiens
cctcatctgtcaaat

SEQ ID NO: 86629 - DNA, 15 bp, Homo sapiens
tcctcatctgtcaaa

SEQ ID NO: 86630 - DNA, 15 bp, Homo sapiens
ctcctcatctgtcaa

SEQ ID NO: 86631 - DNA, 15 bp, Homo sapiens
tctcctcatctgtca

SEQ ID NO: 86632 - DNA, 15 bp, Homo sapiens
gtctcctcatctgtc

SEQ ID NO: 86633 - DNA, 15 bp, Homo sapiens
agtctcctcatctgt

SEQ ID NO: 86634 - DNA, 15 bp, Homo sapiens
gagtctcctcatctg

SEQ ID NO: 86635 - DNA, 15 bp, Homo sapiens
tgagtctcctcatct

SEQ ID NO: 86636 - DNA, 15 bp, Homo sapiens
ttgagtctcctcatc

SEQ ID NO: 86637 - DNA, 15 bp, Homo sapiens
tttgagtctcctcat

SEQ ID NO: 86638 - DNA, 15 bp, Homo sapiens
atttgagtctcctca

SEQ ID NO: 86639 - DNA, 15 bp, Homo sapiens
gatttgagtctcctc

SEQ ID NO: 86640 - DNA, 15 bp, Homo sapiens
ggatttgagtctcct

SEQ ID NO: 86641 - DNA, 15 bp, Homo sapiens
tggatttgagtctcc

SEQ ID NO: 86642 - DNA, 15 bp, Homo sapiens
ttggatttgagtctc

SEQ ID NO: 86643 - DNA, 15 bp, Homo sapiens
tttggatttgagtct

SEQ ID NO: 86644 - DNA, 15 bp, Homo sapiens
ctttggatttgagtc

SEQ ID NO: 86645 - DNA, 15 bp, Homo sapiens
tctttggatttgagt

SEQ ID NO: 86646 - DNA, 15 bp, Homo sapiens
ttctttggatttgag

SEQ ID NO: 86647 - DNA, 15 bp, Homo sapiens
tttctttggatttga

SEQ ID NO: 86648 - DNA, 15 bp, Homo sapiens
atttctttggatttg

SEQ ID NO: 86649 - DNA, 15 bp, Homo sapiens
aatttctttggattt

SEQ ID NO: 86650 - DNA, 15 bp, Homo sapiens
caatttctttggatt

SEQ ID NO: 86651 - DNA, 15 bp, Homo sapiens
tcaatttctttggat

SEQ ID NO: 86652 - DNA, 15 bp, Homo sapiens
ctcaatttctttgga

SEQ ID NO: 86653 - DNA, 15 bp, Homo sapiens
cctcaatttctttgg

SEQ ID NO: 86654 - DNA, 15 bp, Homo sapiens
ccctcaatttctttg

SEQ ID NO: 86655 - DNA, 15 bp, Homo sapiens
tccctcaatttcttt

SEQ ID NO: 86656 - DNA, 15 bp, Homo sapiens
atccctcaatttctt

SEQ ID NO: 86657 - DNA, 15 bp, Homo sapiens
aatccctcaatttct

SEQ ID NO: 86658 - DNA, 15 bp, Homo sapiens
gaatccctcaatttc

SEQ ID NO: 86659 - DNA, 15 bp, Homo sapiens
agaatccctcaattt

SEQ ID NO: 86660 - DNA, 15 bp, Homo sapiens
gagaatccctcaatt

SEQ ID NO: 86661 - DNA, 15 bp, Homo sapiens
cgagaatccctcaat

SEQ ID NO: 86662 - DNA, 15 bp, Homo sapiens
acgagaatccctcaa

SEQ ID NO: 86663 - DNA, 15 bp, Homo sapiens
tacgagaatccctca

SEQ ID NO: 86664 - DNA, 15 bp, Homo sapiens
ttacgagaatccctc

SEQ ID NO: 86665 - DNA, 15 bp, Homo sapiens
cttacgagaatccct

SEQ ID NO: 86666 - DNA, 15 bp, Homo sapiens
ccttacgagaatccc

SEQ ID NO: 86667 - DNA, 15 bp, Homo sapiens
tccttacgagaatcc

SEQ ID NO: 86668 - DNA, 15 bp, Homo sapiens
gtccttacgagaatc

SEQ ID NO: 86669 - DNA, 15 bp, Homo sapiens
tgtccttacgagaat

SEQ ID NO: 86670 - DNA, 15 bp, Homo sapiens
gtgtccttacgagaa

SEQ ID NO: 86671 - DNA, 15 bp, Homo sapiens
tgtgtccttacgaga

SEQ ID NO: 86672 - DNA, 15 bp, Homo sapiens
atgtgtccttacgag

SEQ ID NO: 86673 - DNA, 15 bp, Homo sapiens
tatgtgtccttacga

SEQ ID NO: 86674 - DNA, 15 bp, Homo sapiens
atatgtgtccttacg

SEQ ID NO: 86675 - DNA, 15 bp, Homo sapiens
aatatgtgtccttac

SEQ ID NO: 86676 - DNA, 15 bp, Homo sapiens
aaatatgtgtcctta

SEQ ID NO: 86677 - DNA, 15 bp, Homo sapiens
taaatatgtgtcctt

SEQ ID NO: 86678 - DNA, 15 bp, Homo sapiens
ttaaatatgtgtcct

SEQ ID NO: 86679 - DNA, 15 bp, Homo sapiens
attaaatatgtgtcc

SEQ ID NO: 86680 - DNA, 15 bp, Homo sapiens
cattaaatatgtgtc

SEQ ID NO: 86681 - DNA, 15 bp, Homo sapiens
gcattaaatatgtgt

SEQ ID NO: 86682 - DNA, 15 bp, Homo sapiens
tgcattaaatatgtg

SEQ ID NO: 86683 - DNA, 15 bp, Homo sapiens
ctgcattaaatatgt

SEQ ID NO: 86684 - DNA, 15 bp, Homo sapiens
tctgcattaaatatg

SEQ ID NO: 86685 - DNA, 15 bp, Homo sapiens
ctctgcattaaatat

SEQ ID NO: 86686 - DNA, 15 bp, Homo sapiens
gctctgcattaaata

SEQ ID NO: 86687 - DNA, 15 bp, Homo sapiens
agctctgcattaaat

SEQ ID NO: 86688 - DNA, 15 bp, Homo sapiens
tagctctgcattaaa

SEQ ID NO: 86689 - DNA, 15 bp, Homo sapiens
ctagctctgcattaa

SEQ ID NO: 86690 - DNA, 15 bp, Homo sapiens
tctagctctgcatta

SEQ ID NO: 86691 - DNA, 15 bp, Homo sapiens
ttctagctctgcatt

SEQ ID NO: 86692 - DNA, 15 bp, Homo sapiens
gttctagctctgcat

SEQ ID NO: 86693 - DNA, 15 bp, Homo sapiens
agttctagctctgca

SEQ ID NO: 86694 - DNA, 15 bp, Homo sapiens
tagttctagctctgc

SEQ ID NO: 86695 - DNA, 15 bp, Homo sapiens
ctagttctagctctg

SEQ ID NO: 86696 - DNA, 15 bp, Homo sapiens
tctagttctagctct

SEQ ID NO: 86697 - DNA, 15 bp, Homo sapiens
ttctagttctagctc

SEQ ID NO: 86698 - DNA, 15 bp, Homo sapiens
gttctagttctagct

SEQ ID NO: 86699 - DNA, 15 bp, Homo sapiens
agttctagttctagc

SEQ ID NO: 86700 - DNA, 15 bp, Homo sapiens
aagttctagttctag

SEQ ID NO: 86701 - DNA, 15 bp, Homo sapiens
aaagttctagttcta

SEQ ID NO: 86702 - DNA, 15 bp, Homo sapiens
caaagttctagttct

SEQ ID NO: 86703 - DNA, 15 bp, Homo sapiens
ccaaagttctagttc

SEQ ID NO: 86704 - DNA, 15 bp, Homo sapiens
accaaagttctagtt

SEQ ID NO: 86705 - DNA, 15 bp, Homo sapiens
aaccaaagttctagt

SEQ ID NO: 86706 - DNA, 15 bp, Homo sapiens
aaaccaaagttctag

SEQ ID NO: 86707 - DNA, 15 bp, Homo sapiens
gaaaccaaagttcta

SEQ ID NO: 86708 - DNA, 15 bp, Homo sapiens
tgaaaccaaagttct

SEQ ID NO: 86709 - DNA, 15 bp, Homo sapiens
atgaaaccaaagttc

SEQ ID NO: 86710 - DNA, 15 bp, Homo sapiens
gatgaaaccaaagtt

SEQ ID NO: 86711 - DNA, 15 bp, Homo sapiens
tgatgaaaccaaagt

SEQ ID NO: 86712 - DNA, 15 bp, Homo sapiens
atgatgaaaccaaag

SEQ ID NO: 86713 - DNA, 15 bp, Homo sapiens
aatgatgaaaccaaa

SEQ ID NO: 86714 - DNA, 15 bp, Homo sapiens
gaatgatgaaaccaa

SEQ ID NO: 86715 - DNA, 15 bp, Homo sapiens
agaatgatgaaacca

SEQ ID NO: 86716 - DNA, 15 bp, Homo sapiens
gagaatgatgaaacc

SEQ ID NO: 86717 - DNA, 15 bp, Homo sapiens
cgagaatgatgaaac

SEQ ID NO: 86718 - DNA, 15 bp, Homo sapiens
ccgagaatgatgaaa

SEQ ID NO: 86719 - DNA, 15 bp, Homo sapiens
tccgagaatgatgaa

SEQ ID NO: 86720 - DNA, 15 bp, Homo sapiens
atccgagaatgatga

SEQ ID NO: 86721 - DNA, 15 bp, Homo sapiens
gatccgagaatgatg

SEQ ID NO: 86722 - DNA, 15 bp, Homo sapiens
tgatccgagaatgat

SEQ ID NO: 86723 - DNA, 15 bp, Homo sapiens
ttgatccgagaatga

SEQ ID NO: 86724 - DNA, 15 bp, Homo sapiens
cttgatccgagaatg

SEQ ID NO: 86725 - DNA, 15 bp, Homo sapiens
tcttgatccgagaat

SEQ ID NO: 86726 - DNA, 15 bp, Homo sapiens
gtcttgatccgagaa

SEQ ID NO: 86727 - DNA, 15 bp, Homo sapiens
tgtcttgatccgaga

SEQ ID NO: 86728 - DNA, 15 bp, Homo sapiens
atgtcttgatccgag

SEQ ID NO: 86729 - DNA, 15 bp, Homo sapiens
aatgtcttgatccga

SEQ ID NO: 86730 - DNA, 15 bp, Homo sapiens
aaatgtcttgatccg

SEQ ID NO: 86731 - DNA, 15 bp, Homo sapiens
gaaatgtcttgatcc

SEQ ID NO: 86732 - DNA, 15 bp, Homo sapiens
agaaatgtcttgatc

SEQ ID NO: 86733 - DNA, 15 bp, Homo sapiens
gagaaatgtcttgat

SEQ ID NO: 86734 - DNA, 15 bp, Homo sapiens
ggagaaatgtcttga

SEQ ID NO: 86735 - DNA, 15 bp, Homo sapiens
gggagaaatgtcttg

SEQ ID NO: 86736 - DNA, 15 bp, Homo sapiens
agggagaaatgtctt

SEQ ID NO: 86737 - DNA, 15 bp, Homo sapiens
cagggagaaatgtct

SEQ ID NO: 86738 - DNA, 15 bp, Homo sapiens
ccagggagaaatgtc

SEQ ID NO: 86739 - DNA, 15 bp, Homo sapiens
cccagggagaaatgt

SEQ ID NO: 86740 - DNA, 15 bp, Homo sapiens
tcccagggagaaatg

SEQ ID NO: 86741 - DNA, 15 bp, Homo sapiens
gtcccagggagaaat

SEQ ID NO: 86742 - DNA, 15 bp, Homo sapiens
tgtcccagggagaaa

SEQ ID NO: 86743 - DNA, 15 bp, Homo sapiens
gtgtcccagggagaa

SEQ ID NO: 86744 - DNA, 15 bp, Homo sapiens
ggtgtcccagggaga

SEQ ID NO: 86745 - DNA, 15 bp, Homo sapiens
gggtgtcccagggag

SEQ ID NO: 86746 - DNA, 15 bp, Homo sapiens
agggtgtcccaggga

SEQ ID NO: 86747 - DNA, 15 bp, Homo sapiens
aagggtgtcccaggg

SEQ ID NO: 86748 - DNA, 15 bp, Homo sapiens
taagggtgtcccagg

SEQ ID NO: 86749 - DNA, 15 bp, Homo sapiens
gtaagggtgtcccag

SEQ ID NO: 86750 - DNA, 15 bp, Homo sapiens
tgtaagggtgtccca

SEQ ID NO: 86751 - DNA, 15 bp, Homo sapiens
atgtaagggtgtccc

SEQ ID NO: 86752 - DNA, 15 bp, Homo sapiens
tatgtaagggtgtcc

SEQ ID NO: 86753 - DNA, 15 bp, Homo sapiens
ctatgtaagggtgtc

SEQ ID NO: 86754 - DNA, 15 bp, Homo sapiens
actatgtaagggtgt

SEQ ID NO: 86755 - DNA, 15 bp, Homo sapiens
cactatgtaagggtg

SEQ ID NO: 86756 - DNA, 15 bp, Homo sapiens
gcactatgtaagggt

SEQ ID NO: 86757 - DNA, 15 bp, Homo sapiens
agcactatgtaaggg

SEQ ID NO: 86758 - DNA, 15 bp, Homo sapiens
cagcactatgtaagg

SEQ ID NO: 86759 - DNA, 15 bp, Homo sapiens
ccagcactatgtaag

SEQ ID NO: 86760 - DNA, 15 bp, Homo sapiens
tccagcactatgtaa

SEQ ID NO: 86761 - DNA, 15 bp, Homo sapiens
ctccagcactatgta

SEQ ID NO: 86762 - DNA, 15 bp, Homo sapiens
tctccagcactatgt

SEQ ID NO: 86763 - DNA, 15 bp, Homo sapiens
ctctccagcactatg

SEQ ID NO: 86764 - DNA, 15 bp, Homo sapiens
tctctccagcactat

SEQ ID NO: 86765 - DNA, 15 bp, Homo sapiens
ctctctccagcacta

SEQ ID NO: 86766 - DNA, 15 bp, Homo sapiens
gctctctccagcact

SEQ ID NO: 86767 - DNA, 15 bp, Homo sapiens
tgctctctccagcac

SEQ ID NO: 86768 - DNA, 15 bp, Homo sapiens
atgctctctccagca

SEQ ID NO: 86769 - DNA, 15 bp, Homo sapiens
aatgctctctccagc

SEQ ID NO: 86770 - DNA, 15 bp, Homo sapiens
aaatgctctctccag

SEQ ID NO: 86771 - DNA, 15 bp, Homo sapiens
aaaatgctctctcca

SEQ ID NO: 86772 - DNA, 15 bp, Homo sapiens
taaaatgctctctcc

SEQ ID NO: 86773 - DNA, 15 bp, Homo sapiens
ataaaatgctctctc

SEQ ID NO: 86774 - DNA, 15 bp, Homo sapiens
tataaaatgctctct

SEQ ID NO: 86775 - DNA, 15 bp, Homo sapiens
atataaaatgctctc

SEQ ID NO: 86776 - DNA, 15 bp, Homo sapiens
gatataaaatgctct

SEQ ID NO: 86777 - DNA, 15 bp, Homo sapiens
agatataaaatgctc

SEQ ID NO: 86778 - DNA, 15 bp, Homo sapiens
aagatataaaatgct

SEQ ID NO: 86779 - DNA, 15 bp, Homo sapiens
aaagatataaaatgc

SEQ ID NO: 86780 - DNA, 15 bp, Homo sapiens
aaaagatataaaatg

SEQ ID NO: 86781 - DNA, 15 bp, Homo sapiens
taaaagatataaaat

SEQ ID NO: 86782 - DNA, 15 bp, Homo sapiens
ttaaaagatataaaa

SEQ ID NO: 86783 - DNA, 15 bp, Homo sapiens
attaaaagatataaa

SEQ ID NO: 86784 - DNA, 15 bp, Homo sapiens
aattaaaagatataa

SEQ ID NO: 86785 - DNA, 15 bp, Homo sapiens
taattaaaagatata

SEQ ID NO: 86786 - DNA, 15 bp, Homo sapiens
ttaattaaaagatat

SEQ ID NO: 86787 - DNA, 15 bp, Homo sapiens
attaattaaaagata

SEQ ID NO: 86788 - DNA, 15 bp, Homo sapiens
gattaattaaaagat

SEQ ID NO: 86789 - DNA, 15 bp, Homo sapiens
tgattaattaaaaga

SEQ ID NO: 86790 - DNA, 15 bp, Homo sapiens
atgattaattaaaag

SEQ ID NO: 86791 - DNA, 15 bp, Homo sapiens
aatgattaattaaaa

SEQ ID NO: 86792 - DNA, 15 bp, Homo sapiens
aaatgattaattaaa

SEQ ID NO: 86793 - DNA, 15 bp, Homo sapiens
gaaatgattaattaa

SEQ ID NO: 86794 - DNA, 15 bp, Homo sapiens
ggaaatgattaatta

SEQ ID NO: 86795 - DNA, 15 bp, Homo sapiens
tggaaatgattaatt

SEQ ID NO: 86796 - DNA, 15 bp, Homo sapiens
ctggaaatgattaat

SEQ ID NO: 86797 - DNA, 15 bp, Homo sapiens
tctggaaatgattaa

SEQ ID NO: 86798 - DNA, 15 bp, Homo sapiens
ctctggaaatgatta

SEQ ID NO: 86799 - DNA, 15 bp, Homo sapiens
cctctggaaatgatt

SEQ ID NO: 86800 - DNA, 15 bp, Homo sapiens
acctctggaaatgat

SEQ ID NO: 86801 - DNA, 15 bp, Homo sapiens
tacctctggaaatga

SEQ ID NO: 86802 - DNA, 15 bp, Homo sapiens
ctacctctggaaatg

SEQ ID NO: 86803 - DNA, 15 bp, Homo sapiens
tctacctctggaaat

SEQ ID NO: 86804 - DNA, 15 bp, Homo sapiens
ctctacctctggaaa

SEQ ID NO: 86805 - DNA, 15 bp, Homo sapiens
tctctacctctggaa

SEQ ID NO: 86806 - DNA, 15 bp, Homo sapiens
atctctacctctgga

SEQ ID NO: 86807 - DNA, 15 bp, Homo sapiens
aatctctacctctgg

SEQ ID NO: 86808 - DNA, 15 bp, Homo sapiens
taatctctacctctg

SEQ ID NO: 86809 - DNA, 15 bp, Homo sapiens
gtaatctctacctct

SEQ ID NO: 86810 - DNA, 15 bp, Homo sapiens
agtaatctctacctc

SEQ ID NO: 86811 - DNA, 15 bp, Homo sapiens
gagtaatctctacct

SEQ ID NO: 86812 - DNA, 15 bp, Homo sapiens
tgagtaatctctacc

SEQ ID NO: 86813 - DNA, 15 bp, Homo sapiens
ttgagtaatctctac

SEQ ID NO: 86814 - DNA, 15 bp, Homo sapiens
attgagtaatctcta

SEQ ID NO: 86815 - DNA, 15 bp, Homo sapiens
aattgagtaatctct

SEQ ID NO: 86816 - DNA, 15 bp, Homo sapiens
aaattgagtaatctc

SEQ ID NO: 86817 - DNA, 15 bp, Homo sapiens
aaaattgagtaatct

SEQ ID NO: 86818 - DNA, 15 bp, Homo sapiens
aaaaattgagtaatc

SEQ ID NO: 86819 - DNA, 15 bp, Homo sapiens
aaaaaattgagtaat

SEQ ID NO: 86820 - DNA, 15 bp, Homo sapiens
taaaaaattgagtaa

SEQ ID NO: 86821 - DNA, 15 bp, Homo sapiens
ttaaaaaattgagta

SEQ ID NO: 86822 - DNA, 15 bp, Homo sapiens
tttaaaaaattgagt

SEQ ID NO: 86823 - DNA, 15 bp, Homo sapiens
gtttaaaaaattgag

SEQ ID NO: 86824 - DNA, 15 bp, Homo sapiens
tgtttaaaaaattga

SEQ ID NO: 86825 - DNA, 15 bp, Homo sapiens
atgtttaaaaaattg

SEQ ID NO: 86826 - DNA, 15 bp, Homo sapiens
aatgtttaaaaaatt

SEQ ID NO: 86827 - DNA, 15 bp, Homo sapiens
gaatgtttaaaaaat

SEQ ID NO: 86828 - DNA, 15 bp, Homo sapiens
agaatgtttaaaaaa

SEQ ID NO: 86829 - DNA, 15 bp, Homo sapiens
cagaatgtttaaaaa

SEQ ID NO: 86830 - DNA, 15 bp, Homo sapiens
gcagaatgtttaaaa

SEQ ID NO: 86831 - DNA, 15 bp, Homo sapiens
agcagaatgtttaaa

SEQ ID NO: 86832 - DNA, 15 bp, Homo sapiens
gagcagaatgtttaa

SEQ ID NO: 86833 - DNA, 15 bp, Homo sapiens
ggagcagaatgttta

SEQ ID NO: 86834 - DNA, 15 bp, Homo sapiens
tggagcagaatgttt

SEQ ID NO: 86835 - DNA, 15 bp, Homo sapiens
ttggagcagaatgtt

SEQ ID NO: 86836 - DNA, 15 bp, Homo sapiens
tttggagcagaatgt

SEQ ID NO: 86837 - DNA, 15 bp, Homo sapiens
gtttggagcagaatg

SEQ ID NO: 86838 - DNA, 15 bp, Homo sapiens
agtttggagcagaat

SEQ ID NO: 86839 - DNA, 15 bp, Homo sapiens
aagtttggagcagaa

SEQ ID NO: 86840 - DNA, 15 bp, Homo sapiens
aaagtttggagcaga

SEQ ID NO: 86841 - DNA, 15 bp, Homo sapiens
aaaagtttggagcag

SEQ ID NO: 86842 - DNA, 15 bp, Homo sapiens
taaaagtttggagca

SEQ ID NO: 86843 - DNA, 15 bp, Homo sapiens
gtaaaagtttggagc

SEQ ID NO: 86844 - DNA, 15 bp, Homo sapiens
tgtaaaagtttggag

SEQ ID NO: 86845 - DNA, 15 bp, Homo sapiens
gtgtaaaagtttgga

SEQ ID NO: 86846 - DNA, 15 bp, Homo sapiens
ggtgtaaaagtttgg

SEQ ID NO: 86847 - DNA, 15 bp, Homo sapiens
gggtgtaaaagtttg

SEQ ID NO: 86848 - DNA, 15 bp, Homo sapiens
cgggtgtaaaagttt

SEQ ID NO: 86849 - DNA, 15 bp, Homo sapiens
acgggtgtaaaagtt

SEQ ID NO: 86850 - DNA, 15 bp, Homo sapiens
gacgggtgtaaaagt

SEQ ID NO: 86851 - DNA, 15 bp, Homo sapiens
agacgggtgtaaaag

SEQ ID NO: 86852 - DNA, 15 bp, Homo sapiens
cagacgggtgtaaaa

SEQ ID NO: 86853 - DNA, 15 bp, Homo sapiens
ccagacgggtgtaaa

SEQ ID NO: 86854 - DNA, 15 bp, Homo sapiens
accagacgggtgtaa

SEQ ID NO: 86855 - DNA, 15 bp, Homo sapiens
taccagacgggtgta

SEQ ID NO: 86856 - DNA, 15 bp, Homo sapiens
ctaccagacgggtgt

SEQ ID NO: 86857 - DNA, 15 bp, Homo sapiens
tctaccagacgggtg

SEQ ID NO: 86858 - DNA, 15 bp, Homo sapiens
atctaccagacgggt

SEQ ID NO: 86859 - DNA, 15 bp, Homo sapiens
tatctaccagacggg

SEQ ID NO: 86860 - DNA, 15 bp, Homo sapiens
ttatctaccagacgg

SEQ ID NO: 86861 - DNA, 15 bp, Homo sapiens
cttatctaccagacg

SEQ ID NO: 86862 - DNA, 15 bp, Homo sapiens
acttatctaccagac

SEQ ID NO: 86863 - DNA, 15 bp, Homo sapiens
aacttatctaccaga

SEQ ID NO: 86864 - DNA, 15 bp, Homo sapiens
gaacttatctaccag

SEQ ID NO: 86865 - DNA, 15 bp, Homo sapiens
agaacttatctacca

SEQ ID NO: 86866 - DNA, 15 bp, Homo sapiens
cagaacttatctacc

SEQ ID NO: 86867 - DNA, 15 bp, Homo sapiens
acagaacttatctac

SEQ ID NO: 86868 - DNA, 15 bp, Homo sapiens
aacagaacttatcta

SEQ ID NO: 86869 - DNA, 15 bp, Homo sapiens
aaacagaacttatct

SEQ ID NO: 86870 - DNA, 15 bp, Homo sapiens
taaacagaacttatc

SEQ ID NO: 86871 - DNA, 15 bp, Homo sapiens
gtaaacagaacttat

SEQ ID NO: 86872 - DNA, 15 bp, Homo sapiens
ggtaaacagaactta

SEQ ID NO: 86873 - DNA, 15 bp, Homo sapiens
cggtaaacagaactt

SEQ ID NO: 86874 - DNA, 15 bp, Homo sapiens
acggtaaacagaact

SEQ ID NO: 86875 - DNA, 15 bp, Homo sapiens
tacggtaaacagaac

SEQ ID NO: 86876 - DNA, 15 bp, Homo sapiens
atacggtaaacagaa

SEQ ID NO: 86877 - DNA, 15 bp, Homo sapiens
tatacggtaaacaga

SEQ ID NO: 86878 - DNA, 15 bp, Homo sapiens
ttatacggtaaacag

SEQ ID NO: 86879 - DNA, 15 bp, Homo sapiens
gttatacggtaaaca

SEQ ID NO: 86880 - DNA, 15 bp, Homo sapiens
ggttatacggtaaac

SEQ ID NO: 86881 - DNA, 15 bp, Homo sapiens
tggttatacggtaaa

SEQ ID NO: 86882 - DNA, 15 bp, Homo sapiens
ttggttatacggtaa

SEQ ID NO: 86883 - DNA, 15 bp, Homo sapiens
tttggttatacggta

SEQ ID NO: 86884 - DNA, 15 bp, Homo sapiens
ctttggttatacggt

SEQ ID NO: 86885 - DNA, 15 bp, Homo sapiens
tctttggttatacgg

SEQ ID NO: 86886 - DNA, 15 bp, Homo sapiens
atctttggttatacg

SEQ ID NO: 86887 - DNA, 15 bp, Homo sapiens
gatctttggttatac

SEQ ID NO: 86888 - DNA, 15 bp, Homo sapiens
tgatctttggttata

SEQ ID NO: 86889 - DNA, 15 bp, Homo sapiens
ttgatctttggttat

SEQ ID NO: 86890 - DNA, 15 bp, Homo sapiens
tttgatctttggtta

SEQ ID NO: 86891 - DNA, 15 bp, Homo sapiens
atttgatctttggtt

SEQ ID NO: 86892 - DNA, 15 bp, Homo sapiens
catttgatctttggt

SEQ ID NO: 86893 - DNA, 15 bp, Homo sapiens
tcatttgatctttgg

SEQ ID NO: 86894 - DNA, 15 bp, Homo sapiens
ttcatttgatctttg

SEQ ID NO: 86895 - DNA, 15 bp, Homo sapiens
tttcatttgatcttt

SEQ ID NO: 86896 - DNA, 15 bp, Homo sapiens
atttcatttgatctt

SEQ ID NO: 86897 - DNA, 15 bp, Homo sapiens
gatttcatttgatct

SEQ ID NO: 86898 - DNA, 15 bp, Homo sapiens
agatttcatttgatc

SEQ ID NO: 86899 - DNA, 15 bp, Homo sapiens
aagatttcatttgat

SEQ ID NO: 86900 - DNA, 15 bp, Homo sapiens
taagatttcatttga

SEQ ID NO: 86901 - DNA, 15 bp, Homo sapiens
ataagatttcatttg

SEQ ID NO: 86902 - DNA, 15 bp, Homo sapiens
cataagatttcattt

SEQ ID NO: 86903 - DNA, 15 bp, Homo sapiens
acataagatttcatt

SEQ ID NO: 86904 - DNA, 15 bp, Homo sapiens
tacataagatttcat

SEQ ID NO: 86905 - DNA, 15 bp, Homo sapiens
atacataagatttca

SEQ ID NO: 86906 - DNA, 15 bp, Homo sapiens
tatacataagatttc

SEQ ID NO: 86907 - DNA, 15 bp, Homo sapiens
ttatacataagattt

SEQ ID NO: 86908 - DNA, 15 bp, Homo sapiens
tttatacataagatt

SEQ ID NO: 86909 - DNA, 15 bp, Homo sapiens
atttatacataagat

SEQ ID NO: 86910 - DNA, 15 bp, Homo sapiens
catttatacataaga

SEQ ID NO: 86911 - DNA, 15 bp, Homo sapiens
gcatttatacataag

SEQ ID NO: 86912 - DNA, 15 bp, Homo sapiens
tgcatttatacataa

SEQ ID NO: 86913 - DNA, 15 bp, Homo sapiens
gtgcatttatacata

SEQ ID NO: 86914 - DNA, 15 bp, Homo sapiens
agtgcatttatacat

SEQ ID NO: 86915 - DNA, 15 bp, Homo sapiens
aagtgcatttataca

SEQ ID NO: 86916 - DNA, 15 bp, Homo sapiens
aaagtgcatttatac

SEQ ID NO: 86917 - DNA, 15 bp, Homo sapiens
caaagtgcatttata

SEQ ID NO: 86918 - DNA, 15 bp, Homo sapiens
acaaagtgcatttat

SEQ ID NO: 86919 - DNA, 15 bp, Homo sapiens
tacaaagtgcattta

SEQ ID NO: 86920 - DNA, 15 bp, Homo sapiens
ttacaaagtgcattt

SEQ ID NO: 86921 - DNA, 15 bp, Homo sapiens
gttacaaagtgcatt

SEQ ID NO: 86922 - DNA, 15 bp, Homo sapiens
agttacaaagtgcat

SEQ ID NO: 86923 - DNA, 15 bp, Homo sapiens
cagttacaaagtgca

SEQ ID NO: 86924 - DNA, 15 bp, Homo sapiens
tcagttacaaagtgc

SEQ ID NO: 86925 - DNA, 15 bp, Homo sapiens
ttcagttacaaagtg

SEQ ID NO: 86926 - DNA, 15 bp, Homo sapiens
tttcagttacaaagt

SEQ ID NO: 86927 - DNA, 15 bp, Homo sapiens
gtttcagttacaaag

SEQ ID NO: 86928 - DNA, 15 bp, Homo sapiens
tgtttcagttacaaa

SEQ ID NO: 86929 - DNA, 15 bp, Homo sapiens
ctgtttcagttacaa

SEQ ID NO: 86930 - DNA, 15 bp, Homo sapiens
gctgtttcagttaca

SEQ ID NO: 86931 - DNA, 15 bp, Homo sapiens
tgctgtttcagttac

SEQ ID NO: 86932 - DNA, 15 bp, Homo sapiens
atgctgtttcagtta

SEQ ID NO: 86933 - DNA, 15 bp, Homo sapiens
gatgctgtttcagtt

SEQ ID NO: 86934 - DNA, 15 bp, Homo sapiens
tgatgctgtttcagt

SEQ ID NO: 86935 - DNA, 15 bp, Homo sapiens
gtgatgctgtttcag

SEQ ID NO: 86936 - DNA, 15 bp, Homo sapiens
tgtgatgctgtttca

SEQ ID NO: 86937 - DNA, 15 bp, Homo sapiens
ctgtgatgctgtttc

SEQ ID NO: 86938 - DNA, 15 bp, Homo sapiens
actgtgatgctgttt

SEQ ID NO: 86939 - DNA, 15 bp, Homo sapiens
gactgtgatgctgtt

SEQ ID NO: 86940 - DNA, 15 bp, Homo sapiens
tgactgtgatgctgt

SEQ ID NO: 86941 - DNA, 15 bp, Homo sapiens
atgactgtgatgctg

SEQ ID NO: 86942 - DNA, 15 bp, Homo sapiens
catgactgtgatgct

SEQ ID NO: 86943 - DNA, 15 bp, Homo sapiens
tcatgactgtgatgc

SEQ ID NO: 86944 - DNA, 15 bp, Homo sapiens
ttcatgactgtgatg

SEQ ID NO: 86945 - DNA, 15 bp, Homo sapiens
cttcatgactgtgat

SEQ ID NO: 86946 - DNA, 15 bp, Homo sapiens
acttcatgactgtga

SEQ ID NO: 86947 - DNA, 15 bp, Homo sapiens
gacttcatgactgtg

SEQ ID NO: 86948 - DNA, 15 bp, Homo sapiens
ggacttcatgactgt

SEQ ID NO: 86949 - DNA, 15 bp, Homo sapiens
gggacttcatgactg

SEQ ID NO: 86950 - DNA, 15 bp, Homo sapiens
agggacttcatgact

SEQ ID NO: 86951 - DNA, 15 bp, Homo sapiens
gagggacttcatgac

SEQ ID NO: 86952 - DNA, 15 bp, Homo sapiens
agagggacttcatga

SEQ ID NO: 86953 - DNA, 15 bp, Homo sapiens
gagagggacttcatg

SEQ ID NO: 86954 - DNA, 15 bp, Homo sapiens
tgagagggacttcat

SEQ ID NO: 86955 - DNA, 15 bp, Homo sapiens
gtgagagggacttca

SEQ ID NO: 86956 - DNA, 15 bp, Homo sapiens
agtgagagggacttc

SEQ ID NO: 86957 - DNA, 15 bp, Homo sapiens
gagtgagagggactt

SEQ ID NO: 86958 - DNA, 15 bp, Homo sapiens
agagtgagagggact

SEQ ID NO: 86959 - DNA, 15 bp, Homo sapiens
cagagtgagagggac

SEQ ID NO: 86960 - DNA, 15 bp, Homo sapiens
acagagtgagaggga

SEQ ID NO: 86961 - DNA, 15 bp, Homo sapiens
gacagagtgagaggg

SEQ ID NO: 86962 - DNA, 15 bp, Homo sapiens
ggacagagtgagagg

SEQ ID NO: 86963 - DNA, 15 bp, Homo sapiens
gggacagagtgagag

SEQ ID NO: 86964 - DNA, 15 bp, Homo sapiens
agggacagagtgaga

SEQ ID NO: 86965 - DNA, 15 bp, Homo sapiens
cagggacagagtgag

SEQ ID NO: 86966 - DNA, 15 bp, Homo sapiens
acagggacagagtga

SEQ ID NO: 86967 - DNA, 15 bp, Homo sapiens
gacagggacagagtg

SEQ ID NO: 86968 - DNA, 15 bp, Homo sapiens
ggacagggacagagt

SEQ ID NO: 86969 - DNA, 15 bp, Homo sapiens
gggacagggacagag

SEQ ID NO: 86970 - DNA, 15 bp, Homo sapiens
agggacagggacaga

SEQ ID NO: 86971 - DNA, 15 bp, Homo sapiens
cagggacagggacag

SEQ ID NO: 86972 - DNA, 15 bp, Homo sapiens
gcagggacagggaca

SEQ ID NO: 86973 - DNA, 15 bp, Homo sapiens
tgcagggacagggac

SEQ ID NO: 86974 - DNA, 15 bp, Homo sapiens
ttgcagggacaggga

SEQ ID NO: 86975 - DNA, 15 bp, Homo sapiens
attgcagggacaggg

SEQ ID NO: 86976 - DNA, 15 bp, Homo sapiens
gattgcagggacagg

SEQ ID NO: 86977 - DNA, 15 bp, Homo sapiens
ggattgcagggacag

SEQ ID NO: 86978 - DNA, 15 bp, Homo sapiens
aggattgcagggaca

SEQ ID NO: 86979 - DNA, 15 bp, Homo sapiens
caggattgcagggac

SEQ ID NO: 86980 - DNA, 15 bp, Homo sapiens
tcaggattgcaggga

SEQ ID NO: 86981 - DNA, 15 bp, Homo sapiens
gtcaggattgcaggg

SEQ ID NO: 86982 - DNA, 15 bp, Homo sapiens
ggtcaggattgcagg

SEQ ID NO: 86983 - DNA, 15 bp, Homo sapiens
aggtcaggattgcag

SEQ ID NO: 86984 - DNA, 15 bp, Homo sapiens
taggtcaggattgca

SEQ ID NO: 86985 - DNA, 15 bp, Homo sapiens
ttaggtcaggattgc

SEQ ID NO: 86986 - DNA, 15 bp, Homo sapiens
tttaggtcaggattg

SEQ ID NO: 86987 - DNA, 15 bp, Homo sapiens
atttaggtcaggatt

SEQ ID NO: 86988 - DNA, 15 bp, Homo sapiens
tatttaggtcaggat

SEQ ID NO: 86989 - DNA, 15 bp, Homo sapiens
ttatttaggtcagga

SEQ ID NO: 86990 - DNA, 15 bp, Homo sapiens
cttatttaggtcagg

SEQ ID NO: 86991 - DNA, 15 bp, Homo sapiens
tcttatttaggtcag

SEQ ID NO: 86992 - DNA, 15 bp, Homo sapiens
ttcttatttaggtca

SEQ ID NO: 86993 - DNA, 15 bp, Homo sapiens
tttcttatttaggtc

SEQ ID NO: 86994 - DNA, 15 bp, Homo sapiens
ttttcttatttaggt

SEQ ID NO: 86995 - DNA, 15 bp, Homo sapiens
tttttcttatttagg

SEQ ID NO: 86996 - DNA, 15 bp, Homo sapiens
ttttttcttatttag

SEQ ID NO: 86997 - DNA, 15 bp, Homo sapiens
cttttttcttattta

SEQ ID NO: 86998 - DNA, 15 bp, Homo sapiens
acttttttcttattt

SEQ ID NO: 86999 - DNA, 15 bp, Homo sapiens
tacttttttcttatt

SEQ ID NO: 87000 - DNA, 15 bp, Homo sapiens
ctacttttttcttat

SEQ ID NO: 87001 - DNA, 15 bp, Homo sapiens
tctacttttttctta

SEQ ID NO: 87002 - DNA, 15 bp, Homo sapiens
atctacttttttctt

SEQ ID NO: 87003 - DNA, 15 bp, Homo sapiens
gatctacttttttct

SEQ ID NO: 87004 - DNA, 15 bp, Homo sapiens
ggatctacttttttc

SEQ ID NO: 87005 - DNA, 15 bp, Homo sapiens
gggatctactttttt

SEQ ID NO: 87006 - DNA, 15 bp, Homo sapiens
cgggatctacttttt

SEQ ID NO: 87007 - DNA, 15 bp, Homo sapiens
ccgggatctactttt

SEQ ID NO: 87008 - DNA, 15 bp, Homo sapiens
gccgggatctacttt

SEQ ID NO: 87009 - DNA, 15 bp, Homo sapiens
ggccgggatctactt

SEQ ID NO: 87010 - DNA, 15 bp, Homo sapiens
tggccgggatctact

SEQ ID NO: 87011 - DNA, 15 bp, Homo sapiens
ctggccgggatctac

SEQ ID NO: 87012 - DNA, 15 bp, Homo sapiens
cctggccgggatcta

SEQ ID NO: 87013 - DNA, 15 bp, Homo sapiens
gcctggccgggatct

SEQ ID NO: 87014 - DNA, 15 bp, Homo sapiens
tgcctggccgggatc

SEQ ID NO: 87015 - DNA, 15 bp, Homo sapiens
gtgcctggccgggat

SEQ ID NO: 87016 - DNA, 15 bp, Homo sapiens
tgtgcctggccggga

SEQ ID NO: 87017 - DNA, 15 bp, Homo sapiens
ctgtgcctggccggg

SEQ ID NO: 87018 - DNA, 15 bp, Homo sapiens
actgtgcctggccgg

SEQ ID NO: 87019 - DNA, 15 bp, Homo sapiens
cactgtgcctggccg

SEQ ID NO: 87020 - DNA, 15 bp, Homo sapiens
ccactgtgcctggcc

SEQ ID NO: 87021 - DNA, 15 bp, Homo sapiens
gccactgtgcctggc

SEQ ID NO: 87022 - DNA, 15 bp, Homo sapiens
agccactgtgcctgg

SEQ ID NO: 87023 - DNA, 15 bp, Homo sapiens
gagccactgtgcctg

SEQ ID NO: 87024 - DNA, 15 bp, Homo sapiens
tgagccactgtgcct

SEQ ID NO: 87025 - DNA, 15 bp, Homo sapiens
atgagccactgtgcc

SEQ ID NO: 87026 - DNA, 15 bp, Homo sapiens
tatgagccactgtgc

SEQ ID NO: 87027 - DNA, 15 bp, Homo sapiens
gtatgagccactgtg

SEQ ID NO: 87028 - DNA, 15 bp, Homo sapiens
ggtatgagccactgt

SEQ ID NO: 87029 - DNA, 15 bp, Homo sapiens
aggtatgagccactg

SEQ ID NO: 87030 - DNA, 15 bp, Homo sapiens
caggtatgagccact

SEQ ID NO: 87031 - DNA, 15 bp, Homo sapiens
acaggtatgagccac

SEQ ID NO: 87032 - DNA, 15 bp, Homo sapiens
tacaggtatgagcca

SEQ ID NO: 87033 - DNA, 15 bp, Homo sapiens
ttacaggtatgagcc

SEQ ID NO: 87034 - DNA, 15 bp, Homo sapiens
attacaggtatgagc

SEQ ID NO: 87035 - DNA, 15 bp, Homo sapiens
gattacaggtatgag

SEQ ID NO: 87036 - DNA, 15 bp, Homo sapiens
ggattacaggtatga

SEQ ID NO: 87037 - DNA, 15 bp, Homo sapiens
aggattacaggtatg

SEQ ID NO: 87038 - DNA, 15 bp, Homo sapiens
taggattacaggtat

SEQ ID NO: 87039 - DNA, 15 bp, Homo sapiens
ctaggattacaggta

SEQ ID NO: 87040 - DNA, 15 bp, Homo sapiens
gctaggattacaggt

SEQ ID NO: 87041 - DNA, 15 bp, Homo sapiens
tgctaggattacagg

SEQ ID NO: 87042 - DNA, 15 bp, Homo sapiens
gtgctaggattacag

SEQ ID NO: 87043 - DNA, 15 bp, Homo sapiens
agtgctaggattaca

SEQ ID NO: 87044 - DNA, 15 bp, Homo sapiens
aagtgctaggattac

SEQ ID NO: 87045 - DNA, 15 bp, Homo sapiens
aaagtgctaggatta

SEQ ID NO: 87046 - DNA, 15 bp, Homo sapiens
caaagtgctaggatt

SEQ ID NO: 87047 - DNA, 15 bp, Homo sapiens
ccaaagtgctaggat

SEQ ID NO: 87048 - DNA, 15 bp, Homo sapiens
cccaaagtgctagga

SEQ ID NO: 87049 - DNA, 15 bp, Homo sapiens
tcccaaagtgctagg

SEQ ID NO: 87050 - DNA, 15 bp, Homo sapiens
ctcccaaagtgctag

SEQ ID NO: 87051 - DNA, 15 bp, Homo sapiens
cctcccaaagtgcta

SEQ ID NO: 87052 - DNA, 15 bp, Homo sapiens
cggcctcccaaagtg

SEQ ID NO: 87053 - DNA, 15 bp, Homo sapiens
tcggcctcccaaagt

SEQ ID NO: 87054 - DNA, 15 bp, Homo sapiens
ctcggcctcccaaag

SEQ ID NO: 87055 - DNA, 15 bp, Homo sapiens
cctcggcctcccaaa

SEQ ID NO: 87056 - DNA, 15 bp, Homo sapiens
gcctcggcctcccaa

SEQ ID NO: 87057 - DNA, 15 bp, Homo sapiens
cgcctcggcctccca

SEQ ID NO: 87058 - DNA, 15 bp, Homo sapiens
ccgcctcggcctccc

SEQ ID NO: 87059 - DNA, 15 bp, Homo sapiens
cccgcctcggcctcc

SEQ ID NO: 87060 - DNA, 15 bp, Homo sapiens
gcccgcctcggcctc

SEQ ID NO: 87061 - DNA, 15 bp, Homo sapiens
tgcccgcctcggcct

SEQ ID NO: 87062 - DNA, 15 bp, Homo sapiens
ctgcccgcctcggcc

SEQ ID NO: 87063 - DNA, 15 bp, Homo sapiens
tctgcccgcctcggc

SEQ ID NO: 87064 - DNA, 15 bp, Homo sapiens
atctgcccgcctcgg

SEQ ID NO: 87065 - DNA, 15 bp, Homo sapiens
gatctgcccgcctcg

SEQ ID NO: 87066 - DNA, 15 bp, Homo sapiens
tgatctgcccgcctc

SEQ ID NO: 87067 - DNA, 15 bp, Homo sapiens
gtgatctgcccgcct

SEQ ID NO: 87068 - DNA, 15 bp, Homo sapiens
cgtgatctgcccgcc

SEQ ID NO: 87069 - DNA, 15 bp, Homo sapiens
tcgtgatctgcccgc

SEQ ID NO: 87070 - DNA, 15 bp, Homo sapiens
ctcgtgatctgcccg

SEQ ID NO: 87071 - DNA, 15 bp, Homo sapiens
cctcgtgatctgccc

SEQ ID NO: 87072 - DNA, 15 bp, Homo sapiens
acctcgtgatctgcc

SEQ ID NO: 87073 - DNA, 15 bp, Homo sapiens
gacctcgtgatctgc

SEQ ID NO: 87074 - DNA, 15 bp, Homo sapiens
tgacctcgtgatctg

SEQ ID NO: 87075 - DNA, 15 bp, Homo sapiens
ctgacctcgtgatct

SEQ ID NO: 87076 - DNA, 15 bp, Homo sapiens
cctgacctcgtgatc

SEQ ID NO: 87077 - DNA, 15 bp, Homo sapiens
tcctgacctcgtgat

SEQ ID NO: 87078 - DNA, 15 bp, Homo sapiens
ctcctgacctcgtga

SEQ ID NO: 87079 - DNA, 15 bp, Homo sapiens
tctcctgacctcgtg

SEQ ID NO: 87080 - DNA, 15 bp, Homo sapiens
atctcctgacctcgt

SEQ ID NO: 87081 - DNA, 15 bp, Homo sapiens
gatctcctgacctcg

SEQ ID NO: 87082 - DNA, 15 bp, Homo sapiens
cgatctcctgacctc

SEQ ID NO: 87083 - DNA, 15 bp, Homo sapiens
tcgatctcctgacct

SEQ ID NO: 87084 - DNA, 15 bp, Homo sapiens
ctcgatctcctgacc

SEQ ID NO: 87085 - DNA, 15 bp, Homo sapiens
tctcgatctcctgac

SEQ ID NO: 87086 - DNA, 15 bp, Homo sapiens
gtctcgatctcctga

SEQ ID NO: 87087 - DNA, 15 bp, Homo sapiens
ggtctcgatctcctg

SEQ ID NO: 87088 - DNA, 15 bp, Homo sapiens
cggtctcgatctcct

SEQ ID NO: 87089 - DNA, 15 bp, Homo sapiens
acggtctcgatctcc

SEQ ID NO: 87090 - DNA, 15 bp, Homo sapiens
gacggtctcgatctc

SEQ ID NO: 87091 - DNA, 15 bp, Homo sapiens
ggacggtctcgatct

SEQ ID NO: 87092 - DNA, 15 bp, Homo sapiens
aggacggtctcgatc

SEQ ID NO: 87093 - DNA, 15 bp, Homo sapiens
caggacggtctcgat

SEQ ID NO: 87094 - DNA, 15 bp, Homo sapiens
ccaggacggtctcga

SEQ ID NO: 87095 - DNA, 15 bp, Homo sapiens
gccaggacggtctcg

SEQ ID NO: 87096 - DNA, 15 bp, Homo sapiens
agccaggacggtctc

SEQ ID NO: 87097 - DNA, 15 bp, Homo sapiens
tagccaggacggtct

SEQ ID NO: 87098 - DNA, 15 bp, Homo sapiens
atagccaggacggtc

SEQ ID NO: 87099 - DNA, 15 bp, Homo sapiens
gatagccaggacggt

SEQ ID NO: 87100 - DNA, 15 bp, Homo sapiens
tgatagccaggacgg

SEQ ID NO: 87101 - DNA, 15 bp, Homo sapiens
gtgatagccaggacg

SEQ ID NO: 87102 - DNA, 15 bp, Homo sapiens
cgtgatagccaggac

SEQ ID NO: 87103 - DNA, 15 bp, Homo sapiens
ccgtgatagccagga

SEQ ID NO: 87104 - DNA, 15 bp, Homo sapiens
accgtgatagccagg

SEQ ID NO: 87105 - DNA, 15 bp, Homo sapiens
caccgtgatagccag

SEQ ID NO: 87106 - DNA, 15 bp, Homo sapiens
tcaccgtgatagcca

SEQ ID NO: 87107 - DNA, 15 bp, Homo sapiens
ttcaccgtgatagcc

SEQ ID NO: 87108 - DNA, 15 bp, Homo sapiens
tttcaccgtgatagc

SEQ ID NO: 87109 - DNA, 15 bp, Homo sapiens
gtttcaccgtgatag

SEQ ID NO: 87110 - DNA, 15 bp, Homo sapiens
ggtttcaccgtgata

SEQ ID NO: 87111 - DNA, 15 bp, Homo sapiens
gggtttcaccgtgat

SEQ ID NO: 87112 - DNA, 15 bp, Homo sapiens
ggggtttcaccgtga

SEQ ID NO: 87113 - DNA, 15 bp, Homo sapiens
cggggtttcaccgtg

SEQ ID NO: 87114 - DNA, 15 bp, Homo sapiens
acggggtttcaccgt

SEQ ID NO: 87115 - DNA, 15 bp, Homo sapiens
gacggggtttcaccg

SEQ ID NO: 87116 - DNA, 15 bp, Homo sapiens
agacggggtttcacc

SEQ ID NO: 87117 - DNA, 15 bp, Homo sapiens
gagacggggtttcac

SEQ ID NO: 87118 - DNA, 15 bp, Homo sapiens
agagacggggtttca

SEQ ID NO: 87119 - DNA, 15 bp, Homo sapiens
tagagacggggtttc

SEQ ID NO: 87120 - DNA, 15 bp, Homo sapiens
gtagagacggggttt

SEQ ID NO: 87121 - DNA, 15 bp, Homo sapiens
agtagagacggggtt

SEQ ID NO: 87122 - DNA, 15 bp, Homo sapiens
tagtagagacggggt

SEQ ID NO: 87123 - DNA, 15 bp, Homo sapiens
ttagtagagacgggg

SEQ ID NO: 87124 - DNA, 15 bp, Homo sapiens
tttagtagagacggg

SEQ ID NO: 87125 - DNA, 15 bp, Homo sapiens
ttttagtagagacgg

SEQ ID NO: 87126 - DNA, 15 bp, Homo sapiens
tttttagtagagacg

SEQ ID NO: 87127 - DNA, 15 bp, Homo sapiens
atttttagtagagac

SEQ ID NO: 87128 - DNA, 15 bp, Homo sapiens
tatttttagtagaga

SEQ ID NO: 87129 - DNA, 15 bp, Homo sapiens
gtatttttagtagag

SEQ ID NO: 87130 - DNA, 15 bp, Homo sapiens
tgtatttttagtaga

SEQ ID NO: 87131 - DNA, 15 bp, Homo sapiens
ttgtatttttagtag

SEQ ID NO: 87132 - DNA, 15 bp, Homo sapiens
tttgtatttttagta

SEQ ID NO: 87133 - DNA, 15 bp, Homo sapiens
ttttgtatttttagt

SEQ ID NO: 87134 - DNA, 15 bp, Homo sapiens
tttttgtatttttag

SEQ ID NO: 87135 - DNA, 15 bp, Homo sapiens
ttttttgtattttta

SEQ ID NO: 87136 - DNA, 15 bp, Homo sapiens
attttttgtattttt

SEQ ID NO: 87137 - DNA, 15 bp, Homo sapiens
aattttttgtatttt

SEQ ID NO: 87138 - DNA, 15 bp, Homo sapiens
taattttttgtattt

SEQ ID NO: 87139 - DNA, 15 bp, Homo sapiens
ctaattttttgtatt

SEQ ID NO: 87140 - DNA, 15 bp, Homo sapiens
gctaattttttgtat

SEQ ID NO: 87141 - DNA, 15 bp, Homo sapiens
agctaattttttgta

SEQ ID NO: 87142 - DNA, 15 bp, Homo sapiens
cagctaattttttgt

SEQ ID NO: 87143 - DNA, 15 bp, Homo sapiens
ccagctaattttttg

SEQ ID NO: 87144 - DNA, 15 bp, Homo sapiens
cccagctaatttttt

SEQ ID NO: 87145 - DNA, 15 bp, Homo sapiens
gacacccagctaatt

SEQ ID NO: 87146 - DNA, 15 bp, Homo sapiens
cgacacccagctaat

SEQ ID NO: 87147 - DNA, 15 bp, Homo sapiens
acgacacccagctaa

SEQ ID NO: 87148 - DNA, 15 bp, Homo sapiens
cacgacacccagcta

SEQ ID NO: 87149 - DNA, 15 bp, Homo sapiens
ccacgacacccagct

SEQ ID NO: 87150 - DNA, 15 bp, Homo sapiens
accacgacacccagc

SEQ ID NO: 87151 - DNA, 15 bp, Homo sapiens
caccacgacacccag

SEQ ID NO: 87152 - DNA, 15 bp, Homo sapiens
ccaccacgacaccca

SEQ ID NO: 87153 - DNA, 15 bp, Homo sapiens
cccaccacgacaccc

SEQ ID NO: 87154 - DNA, 15 bp, Homo sapiens
acccaccacgacacc

SEQ ID NO: 87155 - DNA, 15 bp, Homo sapiens
cacccaccacgacac

SEQ ID NO: 87156 - DNA, 15 bp, Homo sapiens
gcacccaccacgaca

SEQ ID NO: 87157 - DNA, 15 bp, Homo sapiens
ggcacccaccacgac

SEQ ID NO: 87158 - DNA, 15 bp, Homo sapiens
aggcacccaccacga

SEQ ID NO: 87159 - DNA, 15 bp, Homo sapiens
caggcacccaccacg

SEQ ID NO: 87160 - DNA, 15 bp, Homo sapiens
acaggcacccaccac

SEQ ID NO: 87161 - DNA, 15 bp, Homo sapiens
tacaggcacccacca

SEQ ID NO: 87162 - DNA, 15 bp, Homo sapiens
ctacaggcacccacc

SEQ ID NO: 87163 - DNA, 15 bp, Homo sapiens
actacaggcacccac

SEQ ID NO: 87164 - DNA, 15 bp, Homo sapiens
gactacaggcaccca

SEQ ID NO: 87165 - DNA, 15 bp, Homo sapiens
ggactacaggcaccc

SEQ ID NO: 87166 - DNA, 15 bp, Homo sapiens
gggactacaggcacc

SEQ ID NO: 87167 - DNA, 15 bp, Homo sapiens
aagtagctgggacta

SEQ ID NO: 87168 - DNA, 15 bp, Homo sapiens
caagtagctgggact

SEQ ID NO: 87169 - DNA, 15 bp, Homo sapiens
ccaagtagctgggac

SEQ ID NO: 87170 - DNA, 15 bp, Homo sapiens
cccaagtagctggga

SEQ ID NO: 87171 - DNA, 15 bp, Homo sapiens
tcccaagtagctggg

SEQ ID NO: 87172 - DNA, 15 bp, Homo sapiens
ctcccaagtagctgg

SEQ ID NO: 87173 - DNA, 15 bp, Homo sapiens
cctcccaagtagctg

SEQ ID NO: 87174 - DNA, 15 bp, Homo sapiens
acctcccaagtagct

SEQ ID NO: 87175 - DNA, 15 bp, Homo sapiens
aacctcccaagtagc

SEQ ID NO: 87176 - DNA, 15 bp, Homo sapiens
caacctcccaagtag

SEQ ID NO: 87177 - DNA, 15 bp, Homo sapiens
tcaacctcccaagta

SEQ ID NO: 87178 - DNA, 15 bp, Homo sapiens
ctcaacctcccaagt

SEQ ID NO: 87179 - DNA, 15 bp, Homo sapiens
cctcaacctcccaag

SEQ ID NO: 87180 - DNA, 15 bp, Homo sapiens
gcctcaacctcccaa

SEQ ID NO: 87181 - DNA, 15 bp, Homo sapiens
tgcctcaacctccca

SEQ ID NO: 87182 - DNA, 15 bp, Homo sapiens
ctgcctcaacctccc

SEQ ID NO: 87183 - DNA, 15 bp, Homo sapiens
cctgcctcaacctcc

SEQ ID NO: 87184 - DNA, 15 bp, Homo sapiens
tcctgcctcaacctc

SEQ ID NO: 87185 - DNA, 15 bp, Homo sapiens
ctcctgcctcaacct

SEQ ID NO: 87186 - DNA, 15 bp, Homo sapiens
tctcctgcctcaacc

SEQ ID NO: 87187 - DNA, 15 bp, Homo sapiens
ttctcctgcctcaac

SEQ ID NO: 87188 - DNA, 15 bp, Homo sapiens
attctcctgcctcaa

SEQ ID NO: 87189 - DNA, 15 bp, Homo sapiens
cattctcctgcctca

SEQ ID NO: 87190 - DNA, 15 bp, Homo sapiens
ccattctcctgcctc

SEQ ID NO: 87191 - DNA, 15 bp, Homo sapiens
gccattctcctgcct

SEQ ID NO: 87192 - DNA, 15 bp, Homo sapiens
cgccattctcctgcc

SEQ ID NO: 87193 - DNA, 15 bp, Homo sapiens
acgccattctcctgc

SEQ ID NO: 87194 - DNA, 15 bp, Homo sapiens
cacgccattctcctg

SEQ ID NO: 87195 - DNA, 15 bp, Homo sapiens
tcacgccattctcct

SEQ ID NO: 87196 - DNA, 15 bp, Homo sapiens
ttcacgccattctcc

SEQ ID NO: 87197 - DNA, 15 bp, Homo sapiens
gttcacgccattctc

SEQ ID NO: 87198 - DNA, 15 bp, Homo sapiens
ggttcacgccattct

SEQ ID NO: 87199 - DNA, 15 bp, Homo sapiens
aggttcacgccattc

SEQ ID NO: 87200 - DNA, 15 bp, Homo sapiens
caggttcacgccatt

SEQ ID NO: 87201 - DNA, 15 bp, Homo sapiens
ccaggttcacgccat

SEQ ID NO: 87202 - DNA, 15 bp, Homo sapiens
cccaggttcacgcca

SEQ ID NO: 87203 - DNA, 15 bp, Homo sapiens
tcccaggttcacgcc

SEQ ID NO: 87204 - DNA, 15 bp, Homo sapiens
ctcccaggttcacgc

SEQ ID NO: 87205 - DNA, 15 bp, Homo sapiens
cctcccaggttcacg

SEQ ID NO: 87206 - DNA, 15 bp, Homo sapiens
acctcccaggttcac

SEQ ID NO: 87207 - DNA, 15 bp, Homo sapiens
cacctcccaggttca

SEQ ID NO: 87208 - DNA, 15 bp, Homo sapiens
ccacctcccaggttc

SEQ ID NO: 87209 - DNA, 15 bp, Homo sapiens
gctccacctcccagg

SEQ ID NO: 87210 - DNA, 15 bp, Homo sapiens
agctccacctcccag

SEQ ID NO: 87211 - DNA, 15 bp, Homo sapiens
aagctccacctccca

SEQ ID NO: 87212 - DNA, 15 bp, Homo sapiens
caagctccacctccc

SEQ ID NO: 87213 - DNA, 15 bp, Homo sapiens
gcaagctccacctcc

SEQ ID NO: 87214 - DNA, 15 bp, Homo sapiens
tgcaagctccacctc

SEQ ID NO: 87215 - DNA, 15 bp, Homo sapiens
ctgcaagctccacct

SEQ ID NO: 87216 - DNA, 15 bp, Homo sapiens
actgcaagctccacc

SEQ ID NO: 87217 - DNA, 15 bp, Homo sapiens
cactgcaagctccac

SEQ ID NO: 87218 - DNA, 15 bp, Homo sapiens
tcactgcaagctcca

SEQ ID NO: 87219 - DNA, 15 bp, Homo sapiens
ctcactgcaagctcc

SEQ ID NO: 87220 - DNA, 15 bp, Homo sapiens
actcactgcaagctc

SEQ ID NO: 87221 - DNA, 15 bp, Homo sapiens
gactcactgcaagct

SEQ ID NO: 87222 - DNA, 15 bp, Homo sapiens
cgactcactgcaagc

SEQ ID NO: 87223 - DNA, 15 bp, Homo sapiens
tcgactcactgcaag

SEQ ID NO: 87224 - DNA, 15 bp, Homo sapiens
ctcgactcactgcaa

SEQ ID NO: 87225 - DNA, 15 bp, Homo sapiens
tctcgactcactgca

SEQ ID NO: 87226 - DNA, 15 bp, Homo sapiens
atctcgactcactgc

SEQ ID NO: 87227 - DNA, 15 bp, Homo sapiens
gatctcgactcactg

SEQ ID NO: 87228 - DNA, 15 bp, Homo sapiens
cgatctcgactcact

SEQ ID NO: 87229 - DNA, 15 bp, Homo sapiens
gcgatctcgactcac

SEQ ID NO: 87230 - DNA, 15 bp, Homo sapiens
cgcgatctcgactca

SEQ ID NO: 87231 - DNA, 15 bp, Homo sapiens
gcgcgatctcgactc

SEQ ID NO: 87232 - DNA, 15 bp, Homo sapiens
ggcgcgatctcgact

SEQ ID NO: 87233 - DNA, 15 bp, Homo sapiens
tggcgcgatctcgac

SEQ ID NO: 87234 - DNA, 15 bp, Homo sapiens
gtggcgcgatctcga

SEQ ID NO: 87235 - DNA, 15 bp, Homo sapiens
agtggcgcgatctcg

SEQ ID NO: 87236 - DNA, 15 bp, Homo sapiens
cagtggcgcgatctc

SEQ ID NO: 87237 - DNA, 15 bp, Homo sapiens
gcagtggcgcgatct

SEQ ID NO: 87238 - DNA, 15 bp, Homo sapiens
tgcagtggcgcgatc

SEQ ID NO: 87239 - DNA, 15 bp, Homo sapiens
gtgcagtggcgcgat

SEQ ID NO: 87240 - DNA, 15 bp, Homo sapiens
agtgcagtggcgcga

SEQ ID NO: 87241 - DNA, 15 bp, Homo sapiens
gagtgcagtggcgcg

SEQ ID NO: 87242 - DNA, 15 bp, Homo sapiens
ggagtgcagtggcgc

SEQ ID NO: 87243 - DNA, 15 bp, Homo sapiens
tggagtgcagtggcg

SEQ ID NO: 87244 - DNA, 15 bp, Homo sapiens
ctggagtgcagtggc

SEQ ID NO: 87245 - DNA, 15 bp, Homo sapiens
ctgttgcccaggctg

SEQ ID NO: 87246 - DNA, 15 bp, Homo sapiens
tctgttgcccaggct

SEQ ID NO: 87247 - DNA, 15 bp, Homo sapiens
ctctgttgcccaggc

SEQ ID NO: 87248 - DNA, 15 bp, Homo sapiens
gctctgttgcccagg

SEQ ID NO: 87249 - DNA, 15 bp, Homo sapiens
tgctctgttgcccag

SEQ ID NO: 87250 - DNA, 15 bp, Homo sapiens
gtgctctgttgccca

SEQ ID NO: 87251 - DNA, 15 bp, Homo sapiens
cgtgctctgttgccc

SEQ ID NO: 87252 - DNA, 15 bp, Homo sapiens
tcgtgctctgttgcc

SEQ ID NO: 87253 - DNA, 15 bp, Homo sapiens
atcgtgctctgttgc

SEQ ID NO: 87254 - DNA, 15 bp, Homo sapiens
gatcgtgctctgttg

SEQ ID NO: 87255 - DNA, 15 bp, Homo sapiens
ggatcgtgctctgtt

SEQ ID NO: 87256 - DNA, 15 bp, Homo sapiens
gggatcgtgctctgt

SEQ ID NO: 87257 - DNA, 15 bp, Homo sapiens
cgggatcgtgctctg

SEQ ID NO: 87258 - DNA, 15 bp, Homo sapiens
acgggatcgtgctct

SEQ ID NO: 87259 - DNA, 15 bp, Homo sapiens
gacgggatcgtgctc

SEQ ID NO: 87260 - DNA, 15 bp, Homo sapiens
agacgggatcgtgct

SEQ ID NO: 87261 - DNA, 15 bp, Homo sapiens
gagacgggatcgtgc

SEQ ID NO: 87262 - DNA, 15 bp, Homo sapiens
agagacgggatcgtg

SEQ ID NO: 87263 - DNA, 15 bp, Homo sapiens
aagagacgggatcgt

SEQ ID NO: 87264 - DNA, 15 bp, Homo sapiens
taagagacgggatcg

SEQ ID NO: 87265 - DNA, 15 bp, Homo sapiens
ctaagagacgggatc

SEQ ID NO: 87266 - DNA, 15 bp, Homo sapiens
tctaagagacgggat

SEQ ID NO: 87267 - DNA, 15 bp, Homo sapiens
ttctaagagacggga

SEQ ID NO: 87268 - DNA, 15 bp, Homo sapiens
tttctaagagacggg

SEQ ID NO: 87269 - DNA, 15 bp, Homo sapiens
ctttctaagagacgg

SEQ ID NO: 87270 - DNA, 15 bp, Homo sapiens
cctttctaagagacg

SEQ ID NO: 87271 - DNA, 15 bp, Homo sapiens
tcctttctaagagac

SEQ ID NO: 87272 - DNA, 15 bp, Homo sapiens
ttcctttctaagaga

SEQ ID NO: 87273 - DNA, 15 bp, Homo sapiens
attcctttctaagag

SEQ ID NO: 87274 - DNA, 15 bp, Homo sapiens
cattcctttctaaga

SEQ ID NO: 87275 - DNA, 15 bp, Homo sapiens
tcattcctttctaag

SEQ ID NO: 87276 - DNA, 15 bp, Homo sapiens
ttcattcctttctaa

SEQ ID NO: 87277 - DNA, 15 bp, Homo sapiens
attcattcctttcta

SEQ ID NO: 87278 - DNA, 15 bp, Homo sapiens
tattcattcctttct

SEQ ID NO: 87279 - DNA, 15 bp, Homo sapiens
ttattcattcctttc

SEQ ID NO: 87280 - DNA, 15 bp, Homo sapiens
tttattcattccttt

SEQ ID NO: 87281 - DNA, 15 bp, Homo sapiens
atttattcattcctt

SEQ ID NO: 87282 - DNA, 15 bp, Homo sapiens
aatttattcattcct

SEQ ID NO: 87283 - DNA, 15 bp, Homo sapiens
taatttattcattcc

SEQ ID NO: 87284 - DNA, 15 bp, Homo sapiens
gtaatttattcattc

SEQ ID NO: 87285 - DNA, 15 bp, Homo sapiens
tgtaatttattcatt

SEQ ID NO: 87286 - DNA, 15 bp, Homo sapiens
gtgtaatttattcat

SEQ ID NO: 87287 - DNA, 15 bp, Homo sapiens
agtgtaatttattca

SEQ ID NO: 87288 - DNA, 15 bp, Homo sapiens
cagtgtaatttattc

SEQ ID NO: 87289 - DNA, 15 bp, Homo sapiens
tcagtgtaatttatt

SEQ ID NO: 87290 - DNA, 15 bp, Homo sapiens
ttcagtgtaatttat

SEQ ID NO: 87291 - DNA, 15 bp, Homo sapiens
attcagtgtaattta

SEQ ID NO: 87292 - DNA, 15 bp, Homo sapiens
tattcagtgtaattt

SEQ ID NO: 87293 - DNA, 15 bp, Homo sapiens
ctattcagtgtaatt

SEQ ID NO: 87294 - DNA, 15 bp, Homo sapiens
actattcagtgtaat

SEQ ID NO: 87295 - DNA, 15 bp, Homo sapiens
gactattcagtgtaa

SEQ ID NO: 87296 - DNA, 15 bp, Homo sapiens
agactattcagtgta

SEQ ID NO: 87297 - DNA, 15 bp, Homo sapiens
gagactattcagtgt

SEQ ID NO: 87298 - DNA, 15 bp, Homo sapiens
ggagactattcagtg

SEQ ID NO: 87299 - DNA, 15 bp, Homo sapiens
aggagactattcagt

SEQ ID NO: 87300 - DNA, 15 bp, Homo sapiens
caggagactattcag

SEQ ID NO: 87301 - DNA, 15 bp, Homo sapiens
acaggagactattca

SEQ ID NO: 87302 - DNA, 15 bp, Homo sapiens
aacaggagactattc

SEQ ID NO: 87303 - DNA, 15 bp, Homo sapiens
aaacaggagactatt

SEQ ID NO: 87304 - DNA, 15 bp, Homo sapiens
aaaacaggagactat

SEQ ID NO: 87305 - DNA, 15 bp, Homo sapiens
caaaacaggagacta

SEQ ID NO: 87306 - DNA, 15 bp, Homo sapiens
acaaaacaggagact

SEQ ID NO: 87307 - DNA, 15 bp, Homo sapiens
aacaaaacaggagac

SEQ ID NO: 87308 - DNA, 15 bp, Homo sapiens
aaacaaaacaggaga

SEQ ID NO: 87309 - DNA, 15 bp, Homo sapiens
aaaacaaaacaggag

SEQ ID NO: 87310 - DNA, 15 bp, Homo sapiens
aaaaacaaaacagga

SEQ ID NO: 87311 - DNA, 15 bp, Homo sapiens
aaaaaacaaaacagg

SEQ ID NO: 87312 - DNA, 15 bp, Homo sapiens
aaaaaaacaaaacag

SEQ ID NO: 87313 - DNA, 15 bp, Homo sapiens
aaaaaaaacaaaaca

SEQ ID NO: 87314 - DNA, 15 bp, Homo sapiens
caaaaaaaacaaaac

SEQ ID NO: 87315 - DNA, 15 bp, Homo sapiens
acaaaaaaaacaaaa

SEQ ID NO: 87316 - DNA, 15 bp, Homo sapiens
aacaaaaaaaacaaa

SEQ ID NO: 87317 - DNA, 15 bp, Homo sapiens
caacaaaaaaaacaa

SEQ ID NO: 87318 - DNA, 15 bp, Homo sapiens
acaacaaaaaaaaca

SEQ ID NO: 87319 - DNA, 15 bp, Homo sapiens
aacaacaaaaaaaac

SEQ ID NO: 87320 - DNA, 15 bp, Homo sapiens
caacaacaaaaaaaa

SEQ ID NO: 87321 - DNA, 15 bp, Homo sapiens
acaacaacaaaaaaa

SEQ ID NO: 87322 - DNA, 15 bp, Homo sapiens
aacaacaacaaaaaa

SEQ ID NO: 87323 - DNA, 15 bp, Homo sapiens
caacaacaacaaaaa

SEQ ID NO: 87324 - DNA, 15 bp, Homo sapiens
acaacaacaacaaaa

SEQ ID NO: 87325 - DNA, 15 bp, Homo sapiens
aacaacaacaacaaa

SEQ ID NO: 87326 - DNA, 15 bp, Homo sapiens
aaacaacaacaacaa

SEQ ID NO: 87327 - DNA, 15 bp, Homo sapiens
aaaacaacaacaaca

SEQ ID NO: 87328 - DNA, 15 bp, Homo sapiens
caaaacaacaacaac

SEQ ID NO: 87329 - DNA, 15 bp, Homo sapiens
acaaaacaacaacaa

SEQ ID NO: 87330 - DNA, 15 bp, Homo sapiens
aacaaaacaacaaca

SEQ ID NO: 87331 - DNA, 15 bp, Homo sapiens
aaacaaaacaacaac

SEQ ID NO: 87332 - DNA, 15 bp, Homo sapiens
aaaacaaaacaacaa

SEQ ID NO: 87333 - DNA, 15 bp, Homo sapiens
aaaaacaaaacaaca

SEQ ID NO: 87334 - DNA, 15 bp, Homo sapiens
aaaaaacaaaacaac

SEQ ID NO: 87335 - DNA, 15 bp, Homo sapiens
aaaaaaacaaaacaa

SEQ ID NO: 87336 - DNA, 15 bp, Homo sapiens
caaaaaaacaaaaca

SEQ ID NO: 87337 - DNA, 15 bp, Homo sapiens
tcaaaaaaacaaaac

SEQ ID NO: 87338 - DNA, 15 bp, Homo sapiens
ctcaaaaaaacaaaa

SEQ ID NO: 87339 - DNA, 15 bp, Homo sapiens
cctcaaaaaaacaaa

SEQ ID NO: 87340 - DNA, 15 bp, Homo sapiens
gcctcaaaaaaacaa

SEQ ID NO: 87341 - DNA, 15 bp, Homo sapiens
tgcctcaaaaaaaca

SEQ ID NO: 87342 - DNA, 15 bp, Homo sapiens
ctgcctcaaaaaaac

SEQ ID NO: 87343 - DNA, 15 bp, Homo sapiens
actgcctcaaaaaaa

SEQ ID NO: 87344 - DNA, 15 bp, Homo sapiens
gactgcctcaaaaaa

SEQ ID NO: 87345 - DNA, 15 bp, Homo sapiens
agactgcctcaaaaa

SEQ ID NO: 87346 - DNA, 15 bp, Homo sapiens
gagactgcctcaaaa

SEQ ID NO: 87347 - DNA, 15 bp, Homo sapiens
agagactgcctcaaa

SEQ ID NO: 87348 - DNA, 15 bp, Homo sapiens
gagagactgcctcaa

SEQ ID NO: 87349 - DNA, 15 bp, Homo sapiens
agagagactgcctca

SEQ ID NO: 87350 - DNA, 15 bp, Homo sapiens
gagagagactgcctc

SEQ ID NO: 87351 - DNA, 15 bp, Homo sapiens
agagagagactgcct

SEQ ID NO: 87352 - DNA, 15 bp, Homo sapiens
cagagagagactgcc

SEQ ID NO: 87353 - DNA, 15 bp, Homo sapiens
acagagagagactgc

SEQ ID NO: 87354 - DNA, 15 bp, Homo sapiens
aacagagagagactg

SEQ ID NO: 87355 - DNA, 15 bp, Homo sapiens
caacagagagagact

SEQ ID NO: 87356 - DNA, 15 bp, Homo sapiens
gcaacagagagagac

SEQ ID NO: 87357 - DNA, 15 bp, Homo sapiens
ggcaacagagagaga

SEQ ID NO: 87358 - DNA, 15 bp, Homo sapiens
aggcaacagagagag

SEQ ID NO: 87359 - DNA, 15 bp, Homo sapiens
taggcaacagagaga

SEQ ID NO: 87360 - DNA, 15 bp, Homo sapiens
ctaggcaacagagag

SEQ ID NO: 87361 - DNA, 15 bp, Homo sapiens
cctaggcaacagaga

SEQ ID NO: 87362 - DNA, 15 bp, Homo sapiens
gcctaggcaacagag

SEQ ID NO: 87363 - DNA, 15 bp, Homo sapiens
agcctaggcaacaga

SEQ ID NO: 87364 - DNA, 15 bp, Homo sapiens
cagcctaggcaacag

SEQ ID NO: 87365 - DNA, 15 bp, Homo sapiens
ccagcctaggcaaca

SEQ ID NO: 87366 - DNA, 15 bp, Homo sapiens
tccagcctaggcaac

SEQ ID NO: 87367 - DNA, 15 bp, Homo sapiens
atccagcctaggcaa

SEQ ID NO: 87368 - DNA, 15 bp, Homo sapiens
aatccagcctaggca

SEQ ID NO: 87369 - DNA, 15 bp, Homo sapiens
caatccagcctaggc

SEQ ID NO: 87370 - DNA, 15 bp, Homo sapiens
gcaatccagcctagg

SEQ ID NO: 87371 - DNA, 15 bp, Homo sapiens
tgcaatccagcctag

SEQ ID NO: 87372 - DNA, 15 bp, Homo sapiens
ctgcaatccagccta

SEQ ID NO: 87373 - DNA, 15 bp, Homo sapiens
actgcaatccagcct

SEQ ID NO: 87374 - DNA, 15 bp, Homo sapiens
cactgcaatccagcc

SEQ ID NO: 87375 - DNA, 15 bp, Homo sapiens
ccactgcaatccagc

SEQ ID NO: 87376 - DNA, 15 bp, Homo sapiens
accactgcaatccag

SEQ ID NO: 87377 - DNA, 15 bp, Homo sapiens
caccactgcaatcca

SEQ ID NO: 87378 - DNA, 15 bp, Homo sapiens
acaccactgcaatcc

SEQ ID NO: 87379 - DNA, 15 bp, Homo sapiens
cacaccactgcaatc

SEQ ID NO: 87380 - DNA, 15 bp, Homo sapiens
tcacaccactgcaat

SEQ ID NO: 87381 - DNA, 15 bp, Homo sapiens
atcacaccactgcaa

SEQ ID NO: 87382 - DNA, 15 bp, Homo sapiens
gatcacaccactgca

SEQ ID NO: 87383 - DNA, 15 bp, Homo sapiens
agatcacaccactgc

SEQ ID NO: 87384 - DNA, 15 bp, Homo sapiens
gagatcacaccactg

SEQ ID NO: 87385 - DNA, 15 bp, Homo sapiens
cgagatcacaccact

SEQ ID NO: 87386 - DNA, 15 bp, Homo sapiens
ccgagatcacaccac

SEQ ID NO: 87387 - DNA, 15 bp, Homo sapiens
gccgagatcacacca

SEQ ID NO: 87388 - DNA, 15 bp, Homo sapiens
agccgagatcacacc

SEQ ID NO: 87389 - DNA, 15 bp, Homo sapiens
gagccgagatcacac

SEQ ID NO: 87390 - DNA, 15 bp, Homo sapiens
tgagccgagatcaca

SEQ ID NO: 87391 - DNA, 15 bp, Homo sapiens
gggttgcagtgagcc

SEQ ID NO: 87392 - DNA, 15 bp, Homo sapiens
cgggttgcagtgagc

SEQ ID NO: 87393 - DNA, 15 bp, Homo sapiens
gcgggttgcagtgag

SEQ ID NO: 87394 - DNA, 15 bp, Homo sapiens
agcgggttgcagtga

SEQ ID NO: 87395 - DNA, 15 bp, Homo sapiens
gagcgggttgcagtg

SEQ ID NO: 87396 - DNA, 15 bp, Homo sapiens
ggagcgggttgcagt

SEQ ID NO: 87397 - DNA, 15 bp, Homo sapiens
aggagcgggttgcag

SEQ ID NO: 87398 - DNA, 15 bp, Homo sapiens
gaggagcgggttgca

SEQ ID NO: 87399 - DNA, 15 bp, Homo sapiens
ggaggagcgggttgc

SEQ ID NO: 87400 - DNA, 15 bp, Homo sapiens
aggaggagcgggttg

SEQ ID NO: 87401 - DNA, 15 bp, Homo sapiens
caggaggagcgggtt

SEQ ID NO: 87402 - DNA, 15 bp, Homo sapiens
ccaggaggagcgggt

SEQ ID NO: 87403 - DNA, 15 bp, Homo sapiens
cccaggaggagcggg

SEQ ID NO: 87404 - DNA, 15 bp, Homo sapiens
acccaggaggagcgg

SEQ ID NO: 87405 - DNA, 15 bp, Homo sapiens
aacccaggaggagcg

SEQ ID NO: 87406 - DNA, 15 bp, Homo sapiens
gaacccaggaggagc

SEQ ID NO: 87407 - DNA, 15 bp, Homo sapiens
tgaacccaggaggag

SEQ ID NO: 87408 - DNA, 15 bp, Homo sapiens
ttgaacccaggagga

SEQ ID NO: 87409 - DNA, 15 bp, Homo sapiens
gcttgaacccaggag

SEQ ID NO: 87410 - DNA, 15 bp, Homo sapiens
cgcttgaacccagga

SEQ ID NO: 87411 - DNA, 15 bp, Homo sapiens
tcgcttgaacccagg

SEQ ID NO: 87412 - DNA, 15 bp, Homo sapiens
ctcgcttgaacccag

SEQ ID NO: 87413 - DNA, 15 bp, Homo sapiens
actcgcttgaaccca

SEQ ID NO: 87414 - DNA, 15 bp, Homo sapiens
gactcgcttgaaccc

SEQ ID NO: 87415 - DNA, 15 bp, Homo sapiens
agactcgcttgaacc

SEQ ID NO: 87416 - DNA, 15 bp, Homo sapiens
gagactcgcttgaac

SEQ ID NO: 87417 - DNA, 15 bp, Homo sapiens
tgagactcgcttgaa

SEQ ID NO: 87418 - DNA, 15 bp, Homo sapiens
atgagactcgcttga

SEQ ID NO: 87419 - DNA, 15 bp, Homo sapiens
catgagactcgcttg

SEQ ID NO: 87420 - DNA, 15 bp, Homo sapiens
acatgagactcgctt

SEQ ID NO: 87421 - DNA, 15 bp, Homo sapiens
gacatgagactcgct

SEQ ID NO: 87422 - DNA, 15 bp, Homo sapiens
agacatgagactcgc

SEQ ID NO: 87423 - DNA, 15 bp, Homo sapiens
gagacatgagactcg

SEQ ID NO: 87424 - DNA, 15 bp, Homo sapiens
tgagacatgagactc

SEQ ID NO: 87425 - DNA, 15 bp, Homo sapiens
ctgagacatgagact

SEQ ID NO: 87426 - DNA, 15 bp, Homo sapiens
gctgagacatgagac

SEQ ID NO: 87427 - DNA, 15 bp, Homo sapiens
ggctgagacatgaga

SEQ ID NO: 87428 - DNA, 15 bp, Homo sapiens
aggctgagacatgag

SEQ ID NO: 87429 - DNA, 15 bp, Homo sapiens
gaggctgagacatga

SEQ ID NO: 87430 - DNA, 15 bp, Homo sapiens
ggaggctgagacatg

SEQ ID NO: 87431 - DNA, 15 bp, Homo sapiens
gggaggctgagacat

SEQ ID NO: 87432 - DNA, 15 bp, Homo sapiens
tgggaggctgagaca

SEQ ID NO: 87433 - DNA, 15 bp, Homo sapiens
ttgggaggctgagac

SEQ ID NO: 87434 - DNA, 15 bp, Homo sapiens
cttgggaggctgaga

SEQ ID NO: 87435 - DNA, 15 bp, Homo sapiens
ccacctgtaatccca

SEQ ID NO: 87436 - DNA, 15 bp, Homo sapiens
cccacctgtaatccc

SEQ ID NO: 87437 - DNA, 15 bp, Homo sapiens
acccacctgtaatcc

SEQ ID NO: 87438 - DNA, 15 bp, Homo sapiens
cacccacctgtaatc

SEQ ID NO: 87439 - DNA, 15 bp, Homo sapiens
gcacccacctgtaat

SEQ ID NO: 87440 - DNA, 15 bp, Homo sapiens
ggcacccacctgtaa

SEQ ID NO: 87441 - DNA, 15 bp, Homo sapiens
tggcacccacctgta

SEQ ID NO: 87442 - DNA, 15 bp, Homo sapiens
gtggcacccacctgt

SEQ ID NO: 87443 - DNA, 15 bp, Homo sapiens
agtggcacccacctg

SEQ ID NO: 87444 - DNA, 15 bp, Homo sapiens
tagtggcacccacct

SEQ ID NO: 87445 - DNA, 15 bp, Homo sapiens
atagtggcacccacc

SEQ ID NO: 87446 - DNA, 15 bp, Homo sapiens
catagtggcacccac

SEQ ID NO: 87447 - DNA, 15 bp, Homo sapiens
gcatagtggcaccca

SEQ ID NO: 87448 - DNA, 15 bp, Homo sapiens
ggcatagtggcaccc

SEQ ID NO: 87449 - DNA, 15 bp, Homo sapiens
aggcatagtggcacc

SEQ ID NO: 87450 - DNA, 15 bp, Homo sapiens
caggcatagtggcac

SEQ ID NO: 87451 - DNA, 15 bp, Homo sapiens
ccaggcatagtggca

SEQ ID NO: 87452 - DNA, 15 bp, Homo sapiens
gccaggcatagtggc

SEQ ID NO: 87453 - DNA, 15 bp, Homo sapiens
agccaggcatagtgg

SEQ ID NO: 87454 - DNA, 15 bp, Homo sapiens
gagccaggcatagtg

SEQ ID NO: 87455 - DNA, 15 bp, Homo sapiens
tgagccaggcatagt

SEQ ID NO: 87456 - DNA, 15 bp, Homo sapiens
atgagccaggcatag

SEQ ID NO: 87457 - DNA, 15 bp, Homo sapiens
aatgagccaggcata

SEQ ID NO: 87458 - DNA, 15 bp, Homo sapiens
aaatgagccaggcat

SEQ ID NO: 87459 - DNA, 15 bp, Homo sapiens
aaaatgagccaggca

SEQ ID NO: 87460 - DNA, 15 bp, Homo sapiens
aaaaatgagccaggc

SEQ ID NO: 87461 - DNA, 15 bp, Homo sapiens
aaaaaatgagccagg

SEQ ID NO: 87462 - DNA, 15 bp, Homo sapiens
aaaaaaatgagccag

SEQ ID NO: 87463 - DNA, 15 bp, Homo sapiens
aaaaaaaatgagcca

SEQ ID NO: 87464 - DNA, 15 bp, Homo sapiens
aaaaaaaaatgagcc

SEQ ID NO: 87465 - DNA, 15 bp, Homo sapiens
caaaaaaaaatgagc

SEQ ID NO: 87466 - DNA, 15 bp, Homo sapiens
acaaaaaaaaatgag

SEQ ID NO: 87467 - DNA, 15 bp, Homo sapiens
tacaaaaaaaaatga

SEQ ID NO: 87468 - DNA, 15 bp, Homo sapiens
atacaaaaaaaaatg

SEQ ID NO: 87469 - DNA, 15 bp, Homo sapiens
aaaaaatacaaaaaa

SEQ ID NO: 87470 - DNA, 15 bp, Homo sapiens
caaaaaatacaaaaa

SEQ ID NO: 87471 - DNA, 15 bp, Homo sapiens
acaaaaaatacaaaa

SEQ ID NO: 87472 - DNA, 15 bp, Homo sapiens
tacaaaaaatacaaa

SEQ ID NO: 87473 - DNA, 15 bp, Homo sapiens
ctacaaaaaatacaa

SEQ ID NO: 87474 - DNA, 15 bp, Homo sapiens
tctacaaaaaataca

SEQ ID NO: 87475 - DNA, 15 bp, Homo sapiens
ctctacaaaaaatac

SEQ ID NO: 87476 - DNA, 15 bp, Homo sapiens
tctctacaaaaaata

SEQ ID NO: 87477 - DNA, 15 bp, Homo sapiens
atctctacaaaaaat

SEQ ID NO: 87478 - DNA, 15 bp, Homo sapiens
tatctctacaaaaaa

SEQ ID NO: 87479 - DNA, 15 bp, Homo sapiens
atatctctacaaaaa

SEQ ID NO: 87480 - DNA, 15 bp, Homo sapiens
catatctctacaaaa

SEQ ID NO: 87481 - DNA, 15 bp, Homo sapiens
ccatatctctacaaa

SEQ ID NO: 87482 - DNA, 15 bp, Homo sapiens
accatatctctacaa

SEQ ID NO: 87483 - DNA, 15 bp, Homo sapiens
aaccatatctctaca

SEQ ID NO: 87484 - DNA, 15 bp, Homo sapiens
aaaccatatctctac

SEQ ID NO: 87485 - DNA, 15 bp, Homo sapiens
aaaaccatatctcta

SEQ ID NO: 87486 - DNA, 15 bp, Homo sapiens
caaaaccatatctct

SEQ ID NO: 87487 - DNA, 15 bp, Homo sapiens
gcaaaaccatatctc

SEQ ID NO: 87488 - DNA, 15 bp, Homo sapiens
ggcaaaaccatatct

SEQ ID NO: 87489 - DNA, 15 bp, Homo sapiens
tggcaaaaccatatc

SEQ ID NO: 87490 - DNA, 15 bp, Homo sapiens
atggcaaaaccatat

SEQ ID NO: 87491 - DNA, 15 bp, Homo sapiens
catggcaaaaccata

SEQ ID NO: 87492 - DNA, 15 bp, Homo sapiens
ccatggcaaaaccat

SEQ ID NO: 87493 - DNA, 15 bp, Homo sapiens
accatggcaaaacca

SEQ ID NO: 87494 - DNA, 15 bp, Homo sapiens
caccatggcaaaacc

SEQ ID NO: 87495 - DNA, 15 bp, Homo sapiens
ccaccatggcaaaac

SEQ ID NO: 87496 - DNA, 15 bp, Homo sapiens
gccaccatggcaaaa

SEQ ID NO: 87497 - DNA, 15 bp, Homo sapiens
ggccaccatggcaaa

SEQ ID NO: 87498 - DNA, 15 bp, Homo sapiens
tggccaccatggcaa

SEQ ID NO: 87499 - DNA, 15 bp, Homo sapiens
ctggccaccatggca

SEQ ID NO: 87500 - DNA, 15 bp, Homo sapiens
cctggccaccatggc

SEQ ID NO: 87501 - DNA, 15 bp, Homo sapiens
gcctggccaccatgg

SEQ ID NO: 87502 - DNA, 15 bp, Homo sapiens
agcctggccaccatg

SEQ ID NO: 87503 - DNA, 15 bp, Homo sapiens
cagcctggccaccat

SEQ ID NO: 87504 - DNA, 15 bp, Homo sapiens
tcagcctggccacca

SEQ ID NO: 87505 - DNA, 15 bp, Homo sapiens
atcagcctggccacc

SEQ ID NO: 87506 - DNA, 15 bp, Homo sapiens
gatcagcctggccac

SEQ ID NO: 87507 - DNA, 15 bp, Homo sapiens
agatcagcctggcca

SEQ ID NO: 87508 - DNA, 15 bp, Homo sapiens
gagatcagcctggcc

SEQ ID NO: 87509 - DNA, 15 bp, Homo sapiens
ggagatcagcctggc

SEQ ID NO: 87510 - DNA, 15 bp, Homo sapiens
tggagatcagcctgg

SEQ ID NO: 87511 - DNA, 15 bp, Homo sapiens
ttggagatcagcctg

SEQ ID NO: 87512 - DNA, 15 bp, Homo sapiens
gttggagatcagcct

SEQ ID NO: 87513 - DNA, 15 bp, Homo sapiens
agttggagatcagcc

SEQ ID NO: 87514 - DNA, 15 bp, Homo sapiens
gagttggagatcagc

SEQ ID NO: 87515 - DNA, 15 bp, Homo sapiens
ggagttggagatcag

SEQ ID NO: 87516 - DNA, 15 bp, Homo sapiens
aggagttggagatca

SEQ ID NO: 87517 - DNA, 15 bp, Homo sapiens
caggagttggagatc

SEQ ID NO: 87518 - DNA, 15 bp, Homo sapiens
ccaggagttggagat

SEQ ID NO: 87519 - DNA, 15 bp, Homo sapiens
gccaggagttggaga

SEQ ID NO: 87520 - DNA, 15 bp, Homo sapiens
ggccaggagttggag

SEQ ID NO: 87521 - DNA, 15 bp, Homo sapiens
aggccaggagttgga

SEQ ID NO: 87522 - DNA, 15 bp, Homo sapiens
gaggccaggagttgg

SEQ ID NO: 87523 - DNA, 15 bp, Homo sapiens
tgaggccaggagttg

SEQ ID NO: 87524 - DNA, 15 bp, Homo sapiens
agcagatcacctgag

SEQ ID NO: 87525 - DNA, 15 bp, Homo sapiens
aagcagatcacctga

SEQ ID NO: 87526 - DNA, 15 bp, Homo sapiens
caagcagatcacctg

SEQ ID NO: 87527 - DNA, 15 bp, Homo sapiens
gcaagcagatcacct

SEQ ID NO: 87528 - DNA, 15 bp, Homo sapiens
ggcaagcagatcacc

SEQ ID NO: 87529 - DNA, 15 bp, Homo sapiens
aggcaagcagatcac

SEQ ID NO: 87530 - DNA, 15 bp, Homo sapiens
aaggcaagcagatca

SEQ ID NO: 87531 - DNA, 15 bp, Homo sapiens
caaggcaagcagatc

SEQ ID NO: 87532 - DNA, 15 bp, Homo sapiens
ccaaggcaagcagat

SEQ ID NO: 87533 - DNA, 15 bp, Homo sapiens
gccaaggcaagcaga

SEQ ID NO: 87534 - DNA, 15 bp, Homo sapiens
ggccaaggcaagcag

SEQ ID NO: 87535 - DNA, 15 bp, Homo sapiens
aggccaaggcaagca

SEQ ID NO: 87536 - DNA, 15 bp, Homo sapiens
gaggccaaggcaagc

SEQ ID NO: 87537 - DNA, 15 bp, Homo sapiens
agaggccaaggcaag

SEQ ID NO: 87538 - DNA, 15 bp, Homo sapiens
gagaggccaaggcaa

SEQ ID NO: 87539 - DNA, 15 bp, Homo sapiens
tgagaggccaaggca

SEQ ID NO: 87540 - DNA, 15 bp, Homo sapiens
ttgagaggccaaggc

SEQ ID NO: 87541 - DNA, 15 bp, Homo sapiens
tttgagaggccaagg

SEQ ID NO: 87542 - DNA, 15 bp, Homo sapiens
ctttgagaggccaag

SEQ ID NO: 87543 - DNA, 15 bp, Homo sapiens
actttgagaggccaa

SEQ ID NO: 87544 - DNA, 15 bp, Homo sapiens
cactttgagaggcca

SEQ ID NO: 87545 - DNA, 15 bp, Homo sapiens
gcactttgagaggcc

SEQ ID NO: 87546 - DNA, 15 bp, Homo sapiens
agcactttgagaggc

SEQ ID NO: 87547 - DNA, 15 bp, Homo sapiens
cagcactttgagagg

SEQ ID NO: 87548 - DNA, 15 bp, Homo sapiens
ccagcactttgagag

SEQ ID NO: 87549 - DNA, 15 bp, Homo sapiens
cccagcactttgaga

SEQ ID NO: 87550 - DNA, 15 bp, Homo sapiens
tcccagcactttgag

SEQ ID NO: 87551 - DNA, 15 bp, Homo sapiens
atcccagcactttga

SEQ ID NO: 87552 - DNA, 15 bp, Homo sapiens
actcatgcctgtaat

SEQ ID NO: 87553 - DNA, 15 bp, Homo sapiens
gactcatgcctgtaa

SEQ ID NO: 87554 - DNA, 15 bp, Homo sapiens
tgactcatgcctgta

SEQ ID NO: 87555 - DNA, 15 bp, Homo sapiens
gtgactcatgcctgt

SEQ ID NO: 87556 - DNA, 15 bp, Homo sapiens
agtgactcatgcctg

SEQ ID NO: 87557 - DNA, 15 bp, Homo sapiens
cagtgactcatgcct

SEQ ID NO: 87558 - DNA, 15 bp, Homo sapiens
gcagtgactcatgcc

SEQ ID NO: 87559 - DNA, 15 bp, Homo sapiens
tgcagtgactcatgc

SEQ ID NO: 87560 - DNA, 15 bp, Homo sapiens
gtgcagtgactcatg

SEQ ID NO: 87561 - DNA, 15 bp, Homo sapiens
ggtgcagtgactcat

SEQ ID NO: 87562 - DNA, 15 bp, Homo sapiens
cggtgcagtgactca

SEQ ID NO: 87563 - DNA, 15 bp, Homo sapiens
tcggtgcagtgactc

SEQ ID NO: 87564 - DNA, 15 bp, Homo sapiens
ctcggtgcagtgact

SEQ ID NO: 87565 - DNA, 15 bp, Homo sapiens
gctcggtgcagtgac

SEQ ID NO: 87566 - DNA, 15 bp, Homo sapiens
tgctcggtgcagtga

SEQ ID NO: 87567 - DNA, 15 bp, Homo sapiens
atgctcggtgcagtg

SEQ ID NO: 87568 - DNA, 15 bp, Homo sapiens
gatgctcggtgcagt

SEQ ID NO: 87569 - DNA, 15 bp, Homo sapiens
agatgctcggtgcag

SEQ ID NO: 87570 - DNA, 15 bp, Homo sapiens
gagatgctcggtgca

SEQ ID NO: 87571 - DNA, 15 bp, Homo sapiens
ggagatgctcggtgc

SEQ ID NO: 87572 - DNA, 15 bp, Homo sapiens
aggagatgctcggtg

SEQ ID NO: 87573 - DNA, 15 bp, Homo sapiens
caggagatgctcggt

SEQ ID NO: 87574 - DNA, 15 bp, Homo sapiens
ccaggagatgctcgg

SEQ ID NO: 87575 - DNA, 15 bp, Homo sapiens
accaggagatgctcg

SEQ ID NO: 87576 - DNA, 15 bp, Homo sapiens
aaccaggagatgctc

SEQ ID NO: 87577 - DNA, 15 bp, Homo sapiens
caaccaggagatgct

SEQ ID NO: 87578 - DNA, 15 bp, Homo sapiens
acaaccaggagatgc

SEQ ID NO: 87579 - DNA, 15 bp, Homo sapiens
aacaaccaggagatg

SEQ ID NO: 87580 - DNA, 15 bp, Homo sapiens
aaacaaccaggagat

SEQ ID NO: 87581 - DNA, 15 bp, Homo sapiens
taaacaaccaggaga

SEQ ID NO: 87582 - DNA, 15 bp, Homo sapiens
ataaacaaccaggag

SEQ ID NO: 87583 - DNA, 15 bp, Homo sapiens
tataaacaaccagga

SEQ ID NO: 87584 - DNA, 15 bp, Homo sapiens
ctataaacaaccagg

SEQ ID NO: 87585 - DNA, 15 bp, Homo sapiens
tctataaacaaccag

SEQ ID NO: 87586 - DNA, 15 bp, Homo sapiens
atctataaacaacca

SEQ ID NO: 87587 - DNA, 15 bp, Homo sapiens
aatctataaacaacc

SEQ ID NO: 87588 - DNA, 15 bp, Homo sapiens
gaatctataaacaac

SEQ ID NO: 87589 - DNA, 15 bp, Homo sapiens
tgaatctataaacaa

SEQ ID NO: 87590 - DNA, 15 bp, Homo sapiens
ctgaatctataaaca

SEQ ID NO: 87591 - DNA, 15 bp, Homo sapiens
actgaatctataaac

SEQ ID NO: 87592 - DNA, 15 bp, Homo sapiens
cactgaatctataaa

SEQ ID NO: 87593 - DNA, 15 bp, Homo sapiens
acactgaatctataa

SEQ ID NO: 87594 - DNA, 15 bp, Homo sapiens
aacactgaatctata

SEQ ID NO: 87595 - DNA, 15 bp, Homo sapiens
caacactgaatctat

SEQ ID NO: 87596 - DNA, 15 bp, Homo sapiens
acaacactgaatcta

SEQ ID NO: 87597 - DNA, 15 bp, Homo sapiens
aacaacactgaatct

SEQ ID NO: 87598 - DNA, 15 bp, Homo sapiens
aaacaacactgaatc

SEQ ID NO: 87599 - DNA, 15 bp, Homo sapiens
caaacaacactgaat

SEQ ID NO: 87600 - DNA, 15 bp, Homo sapiens
ccaaacaacactgaa

SEQ ID NO: 87601 - DNA, 15 bp, Homo sapiens
gccaaacaacactga

SEQ ID NO: 87602 - DNA, 15 bp, Homo sapiens
agccaaacaacactg

SEQ ID NO: 87603 - DNA, 15 bp, Homo sapiens
aagccaaacaacact

SEQ ID NO: 87604 - DNA, 15 bp, Homo sapiens
gaagccaaacaacac

SEQ ID NO: 87605 - DNA, 15 bp, Homo sapiens
tgaagccaaacaaca

SEQ ID NO: 87606 - DNA, 15 bp, Homo sapiens
ctgaagccaaacaac

SEQ ID NO: 87607 - DNA, 15 bp, Homo sapiens
cctgaagccaaacaa

SEQ ID NO: 87608 - DNA, 15 bp, Homo sapiens
acctgaagccaaaca

SEQ ID NO: 87609 - DNA, 15 bp, Homo sapiens
aacctgaagccaaac

SEQ ID NO: 87610 - DNA, 15 bp, Homo sapiens
aaacctgaagccaaa

SEQ ID NO: 87611 - DNA, 15 bp, Homo sapiens
taaacctgaagccaa

SEQ ID NO: 87612 - DNA, 15 bp, Homo sapiens
gtaaacctgaagcca

SEQ ID NO: 87613 - DNA, 15 bp, Homo sapiens
agtaaacctgaagcc

SEQ ID NO: 87614 - DNA, 15 bp, Homo sapiens
aagtaaacctgaagc

SEQ ID NO: 87615 - DNA, 15 bp, Homo sapiens
caagtaaacctgaag

SEQ ID NO: 87616 - DNA, 15 bp, Homo sapiens
gcaagtaaacctgaa

SEQ ID NO: 87617 - DNA, 15 bp, Homo sapiens
ggcaagtaaacctga

SEQ ID NO: 87618 - DNA, 15 bp, Homo sapiens
aggcaagtaaacctg

SEQ ID NO: 87619 - DNA, 15 bp, Homo sapiens
caggcaagtaaacct

SEQ ID NO: 87620 - DNA, 15 bp, Homo sapiens
acaggcaagtaaacc

SEQ ID NO: 87621 - DNA, 15 bp, Homo sapiens
cacaggcaagtaaac

SEQ ID NO: 87622 - DNA, 15 bp, Homo sapiens
acacaggcaagtaaa

SEQ ID NO: 87623 - DNA, 15 bp, Homo sapiens
tacacaggcaagtaa

SEQ ID NO: 87624 - DNA, 15 bp, Homo sapiens
ttacacaggcaagta

SEQ ID NO: 87625 - DNA, 15 bp, Homo sapiens
tttacacaggcaagt

SEQ ID NO: 87626 - DNA, 15 bp, Homo sapiens
ttttacacaggcaag

SEQ ID NO: 87627 - DNA, 15 bp, Homo sapiens
tttttacacaggcaa

SEQ ID NO: 87628 - DNA, 15 bp, Homo sapiens
ttttttacacaggca

SEQ ID NO: 87629 - DNA, 15 bp, Homo sapiens
tttttttacacaggc

SEQ ID NO: 87630 - DNA, 15 bp, Homo sapiens
ttttttttacacagg

SEQ ID NO: 87631 - DNA, 15 bp, Homo sapiens
gttttttttacacag

SEQ ID NO: 87632 - DNA, 15 bp, Homo sapiens
tgttttttttacaca

SEQ ID NO: 87633 - DNA, 15 bp, Homo sapiens
ttgttttttttacac

SEQ ID NO: 87634 - DNA, 15 bp, Homo sapiens
tttgttttttttaca

SEQ ID NO: 87635 - DNA, 15 bp, Homo sapiens
ttttgttttttttac

SEQ ID NO: 87636 - DNA, 15 bp, Homo sapiens
tttttgtttttttta

SEQ ID NO: 87637 - DNA, 15 bp, Homo sapiens
gtttttgtttttttt

SEQ ID NO: 87638 - DNA, 15 bp, Homo sapiens
tgtttttgttttttt

SEQ ID NO: 87639 - DNA, 15 bp, Homo sapiens
ttgtttttgtttttt

SEQ ID NO: 87640 - DNA, 15 bp, Homo sapiens
tttgtttttgttttt

SEQ ID NO: 87641 - DNA, 15 bp, Homo sapiens
ttttgtttttgtttt

SEQ ID NO: 87642 - DNA, 15 bp, Homo sapiens
tttttgtttttgttt

SEQ ID NO: 87643 - DNA, 15 bp, Homo sapiens
ttttttgtttttgtt

SEQ ID NO: 87644 - DNA, 15 bp, Homo sapiens
gttttttgtttttgt

SEQ ID NO: 87645 - DNA, 15 bp, Homo sapiens
tgttttttgtttttg

SEQ ID NO: 87646 - DNA, 15 bp, Homo sapiens
ttgttttttgttttt

SEQ ID NO: 87647 - DNA, 15 bp, Homo sapiens
tttgttttttgtttt

SEQ ID NO: 87648 - DNA, 15 bp, Homo sapiens
ttttgttttttgttt

SEQ ID NO: 87649 - DNA, 15 bp, Homo sapiens
gttttgttttttgtt

SEQ ID NO: 87650 - DNA, 15 bp, Homo sapiens
tgttttgttttttgt

SEQ ID NO: 87651 - DNA, 15 bp, Homo sapiens
ttgttttgttttttg

SEQ ID NO: 87652 - DNA, 15 bp, Homo sapiens
gttgttttgtttttt

SEQ ID NO: 87653 - DNA, 15 bp, Homo sapiens
tgttgttttgttttt

SEQ ID NO: 87654 - DNA, 15 bp, Homo sapiens
ttgttgttttgtttt

SEQ ID NO: 87655 - DNA, 15 bp, Homo sapiens
gttgttgttttgttt

SEQ ID NO: 87656 - DNA, 15 bp, Homo sapiens
tgttgttgttttgtt

SEQ ID NO: 87657 - DNA, 15 bp, Homo sapiens
ttgttgttgttttgt

SEQ ID NO: 87658 - DNA, 15 bp, Homo sapiens
tttgttgttgttttg

SEQ ID NO: 87659 - DNA, 15 bp, Homo sapiens
gtttgttgttgtttt

SEQ ID NO: 87660 - DNA, 15 bp, Homo sapiens
tgtttgttgttgttt

SEQ ID NO: 87661 - DNA, 15 bp, Homo sapiens
ttgtttgttgttgtt

SEQ ID NO: 87662 - DNA, 15 bp, Homo sapiens
gttgtttgttgttgt

SEQ ID NO: 87663 - DNA, 15 bp, Homo sapiens
agttgtttgttgttg

SEQ ID NO: 87664 - DNA, 15 bp, Homo sapiens
aagttgtttgttgtt

SEQ ID NO: 87665 - DNA, 15 bp, Homo sapiens
aaagttgtttgttgt

SEQ ID NO: 87666 - DNA, 15 bp, Homo sapiens
taaagttgtttgttg

SEQ ID NO: 87667 - DNA, 15 bp, Homo sapiens
ctaaagttgtttgtt

SEQ ID NO: 87668 - DNA, 15 bp, Homo sapiens
tctaaagttgtttgt

SEQ ID NO: 87669 - DNA, 15 bp, Homo sapiens
gtctaaagttgtttg

SEQ ID NO: 87670 - DNA, 15 bp, Homo sapiens
tgtctaaagttgttt

SEQ ID NO: 87671 - DNA, 15 bp, Homo sapiens
ttgtctaaagttgtt

SEQ ID NO: 87672 - DNA, 15 bp, Homo sapiens
tttgtctaaagttgt

SEQ ID NO: 87673 - DNA, 15 bp, Homo sapiens
atttgtctaaagttg

SEQ ID NO: 87674 - DNA, 15 bp, Homo sapiens
tatttgtctaaagtt

SEQ ID NO: 87675 - DNA, 15 bp, Homo sapiens
ttatttgtctaaagt

SEQ ID NO: 87676 - DNA, 15 bp, Homo sapiens
tttatttgtctaaag

SEQ ID NO: 87677 - DNA, 15 bp, Homo sapiens
atttatttgtctaaa

SEQ ID NO: 87678 - DNA, 15 bp, Homo sapiens
tatttatttgtctaa

SEQ ID NO: 87679 - DNA, 15 bp, Homo sapiens
ctatttatttgtcta

SEQ ID NO: 87680 - DNA, 15 bp, Homo sapiens
actatttatttgtct

SEQ ID NO: 87681 - DNA, 15 bp, Homo sapiens
tactatttatttgtc

SEQ ID NO: 87682 - DNA, 15 bp, Homo sapiens
ctactatttatttgt

SEQ ID NO: 87683 - DNA, 15 bp, Homo sapiens
tctactatttatttg

SEQ ID NO: 87684 - DNA, 15 bp, Homo sapiens
ctctactatttattt

SEQ ID NO: 87685 - DNA, 15 bp, Homo sapiens
actctactatttatt

SEQ ID NO: 87686 - DNA, 15 bp, Homo sapiens
aactctactatttat

SEQ ID NO: 87687 - DNA, 15 bp, Homo sapiens
caactctactattta

SEQ ID NO: 87688 - DNA, 15 bp, Homo sapiens
acaactctactattt

SEQ ID NO: 87689 - DNA, 15 bp, Homo sapiens
gacaactctactatt

SEQ ID NO: 87690 - DNA, 15 bp, Homo sapiens
agacaactctactat

SEQ ID NO: 87691 - DNA, 15 bp, Homo sapiens
cagacaactctacta

SEQ ID NO: 87692 - DNA, 15 bp, Homo sapiens
tcagacaactctact

SEQ ID NO: 87693 - DNA, 15 bp, Homo sapiens
ctcagacaactctac

SEQ ID NO: 87694 - DNA, 15 bp, Homo sapiens
gctcagacaactcta

SEQ ID NO: 87695 - DNA, 15 bp, Homo sapiens
tgctcagacaactct

SEQ ID NO: 87696 - DNA, 15 bp, Homo sapiens
ttgctcagacaactc

SEQ ID NO: 87697 - DNA, 15 bp, Homo sapiens
tttgctcagacaact

SEQ ID NO: 87698 - DNA, 15 bp, Homo sapiens
atttgctcagacaac

SEQ ID NO: 87699 - DNA, 15 bp, Homo sapiens
tatttgctcagacaa

SEQ ID NO: 87700 - DNA, 15 bp, Homo sapiens
ctatttgctcagaca

SEQ ID NO: 87701 - DNA, 15 bp, Homo sapiens
actatttgctcagac

SEQ ID NO: 87702 - DNA, 15 bp, Homo sapiens
cactatttgctcaga

SEQ ID NO: 87703 - DNA, 15 bp, Homo sapiens
tcactatttgctcag

SEQ ID NO: 87704 - DNA, 15 bp, Homo sapiens
atcactatttgctca

SEQ ID NO: 87705 - DNA, 15 bp, Homo sapiens
aatcactatttgctc

SEQ ID NO: 87706 - DNA, 15 bp, Homo sapiens
taatcactatttgct

SEQ ID NO: 87707 - DNA, 15 bp, Homo sapiens
ttaatcactatttgc

SEQ ID NO: 87708 - DNA, 15 bp, Homo sapiens
attaatcactatttg

SEQ ID NO: 87709 - DNA, 15 bp, Homo sapiens
cattaatcactattt

SEQ ID NO: 87710 - DNA, 15 bp, Homo sapiens
tcattaatcactatt

SEQ ID NO: 87711 - DNA, 15 bp, Homo sapiens
ttcattaatcactat

SEQ ID NO: 87712 - DNA, 15 bp, Homo sapiens
attcattaatcacta

SEQ ID NO: 87713 - DNA, 15 bp, Homo sapiens
gattcattaatcact

SEQ ID NO: 87714 - DNA, 15 bp, Homo sapiens
agattcattaatcac

SEQ ID NO: 87715 - DNA, 15 bp, Homo sapiens
cagattcattaatca

SEQ ID NO: 87716 - DNA, 15 bp, Homo sapiens
ccagattcattaatc

SEQ ID NO: 87717 - DNA, 15 bp, Homo sapiens
gccagattcattaat

SEQ ID NO: 87718 - DNA, 15 bp, Homo sapiens
tgccagattcattaa

SEQ ID NO: 87719 - DNA, 15 bp, Homo sapiens
ctgccagattcatta

SEQ ID NO: 87720 - DNA, 15 bp, Homo sapiens
gctgccagattcatt

SEQ ID NO: 87721 - DNA, 15 bp, Homo sapiens
tgctgccagattcat

SEQ ID NO: 87722 - DNA, 15 bp, Homo sapiens
gtgctgccagattca

SEQ ID NO: 87723 - DNA, 15 bp, Homo sapiens
agtgctgccagattc

SEQ ID NO: 87724 - DNA, 15 bp, Homo sapiens
gagtgctgccagatt

SEQ ID NO: 87725 - DNA, 15 bp, Homo sapiens
tgagtgctgccagat

SEQ ID NO: 87726 - DNA, 15 bp, Homo sapiens
ttgagtgctgccaga

SEQ ID NO: 87727 - DNA, 15 bp, Homo sapiens
tttgagtgctgccag

SEQ ID NO: 87728 - DNA, 15 bp, Homo sapiens
ttttgagtgctgcca

SEQ ID NO: 87729 - DNA, 15 bp, Homo sapiens
tttttgagtgctgcc

SEQ ID NO: 87730 - DNA, 15 bp, Homo sapiens
gtttttgagtgctgc

SEQ ID NO: 87731 - DNA, 15 bp, Homo sapiens
tgtttttgagtgctg

SEQ ID NO: 87732 - DNA, 15 bp, Homo sapiens
ctgtttttgagtgct

SEQ ID NO: 87733 - DNA, 15 bp, Homo sapiens
cctgtttttgagtgc

SEQ ID NO: 87734 - DNA, 15 bp, Homo sapiens
tcctgtttttgagtg

SEQ ID NO: 87735 - DNA, 15 bp, Homo sapiens
gtcctgtttttgagt

SEQ ID NO: 87736 - DNA, 15 bp, Homo sapiens
ggtcctgtttttgag

SEQ ID NO: 87737 - DNA, 15 bp, Homo sapiens
tggtcctgtttttga

SEQ ID NO: 87738 - DNA, 15 bp, Homo sapiens
ctggtcctgtttttg

SEQ ID NO: 87739 - DNA, 15 bp, Homo sapiens
actggtcctgttttt

SEQ ID NO: 87740 - DNA, 15 bp, Homo sapiens
aactggtcctgtttt

SEQ ID NO: 87741 - DNA, 15 bp, Homo sapiens
gaactggtcctgttt

SEQ ID NO: 87742 - DNA, 15 bp, Homo sapiens
tgaactggtcctgtt

SEQ ID NO: 87743 - DNA, 15 bp, Homo sapiens
ctgaactggtcctgt

SEQ ID NO: 87744 - DNA, 15 bp, Homo sapiens
tctgaactggtcctg

SEQ ID NO: 87745 - DNA, 15 bp, Homo sapiens
ctctgaactggtcct

SEQ ID NO: 87746 - DNA, 15 bp, Homo sapiens
cctctgaactggtcc

SEQ ID NO: 87747 - DNA, 15 bp, Homo sapiens
gcctctgaactggtc

SEQ ID NO: 87748 - DNA, 15 bp, Homo sapiens
agcctctgaactggt

SEQ ID NO: 87749 - DNA, 15 bp, Homo sapiens
gagcctctgaactgg

SEQ ID NO: 87750 - DNA, 15 bp, Homo sapiens
ggagcctctgaactg

SEQ ID NO: 87751 - DNA, 15 bp, Homo sapiens
gggagcctctgaact

SEQ ID NO: 87752 - DNA, 15 bp, Homo sapiens
ggggagcctctgaac

SEQ ID NO: 87753 - DNA, 15 bp, Homo sapiens
gggggagcctctgaa

SEQ ID NO: 87754 - DNA, 15 bp, Homo sapiens
tgggggagcctctga

SEQ ID NO: 87755 - DNA, 15 bp, Homo sapiens
ttgggggagcctctg

SEQ ID NO: 87756 - DNA, 15 bp, Homo sapiens
cttgggggagcctct

SEQ ID NO: 87757 - DNA, 15 bp, Homo sapiens
gcttgggggagcctc

SEQ ID NO: 87758 - DNA, 15 bp, Homo sapiens
tgcttgggggagcct

SEQ ID NO: 87759 - DNA, 15 bp, Homo sapiens
ttgcttgggggagcc

SEQ ID NO: 87760 - DNA, 15 bp, Homo sapiens
attgcttgggggagc

SEQ ID NO: 87761 - DNA, 15 bp, Homo sapiens
aattgcttgggggag

SEQ ID NO: 87762 - DNA, 15 bp, Homo sapiens
aaattgcttggggga

SEQ ID NO: 87763 - DNA, 15 bp, Homo sapiens
caaattgcttggggg

SEQ ID NO: 87764 - DNA, 15 bp, Homo sapiens
ccaaattgcttgggg

SEQ ID NO: 87765 - DNA, 15 bp, Homo sapiens
accaaattgcttggg

SEQ ID NO: 87766 - DNA, 15 bp, Homo sapiens
gaccaaattgcttgg

SEQ ID NO: 87767 - DNA, 15 bp, Homo sapiens
tgaccaaattgcttg

SEQ ID NO: 87768 - DNA, 15 bp, Homo sapiens
ctgaccaaattgctt

SEQ ID NO: 87769 - DNA, 15 bp, Homo sapiens
cctgaccaaattgct

SEQ ID NO: 87770 - DNA, 15 bp, Homo sapiens
gcctgaccaaattgc

SEQ ID NO: 87771 - DNA, 15 bp, Homo sapiens
tgcctgaccaaattg

SEQ ID NO: 87772 - DNA, 15 bp, Homo sapiens
ctgcctgaccaaatt

SEQ ID NO: 87773 - DNA, 15 bp, Homo sapiens
actgcctgaccaaat

SEQ ID NO: 87774 - DNA, 15 bp, Homo sapiens
tactgcctgaccaaa

SEQ ID NO: 87775 - DNA, 15 bp, Homo sapiens
atactgcctgaccaa

SEQ ID NO: 87776 - DNA, 15 bp, Homo sapiens
aatactgcctgacca

SEQ ID NO: 87777 - DNA, 15 bp, Homo sapiens
aaatactgcctgacc

SEQ ID NO: 87778 - DNA, 15 bp, Homo sapiens
taaatactgcctgac

SEQ ID NO: 87779 - DNA, 15 bp, Homo sapiens
ataaatactgcctga

SEQ ID NO: 87780 - DNA, 15 bp, Homo sapiens
tataaatactgcctg

SEQ ID NO: 87781 - DNA, 15 bp, Homo sapiens
ctataaatactgcct

SEQ ID NO: 87782 - DNA, 15 bp, Homo sapiens
tctataaatactgcc

SEQ ID NO: 87783 - DNA, 15 bp, Homo sapiens
gtctataaatactgc

SEQ ID NO: 87784 - DNA, 15 bp, Homo sapiens
tgtctataaatactg

SEQ ID NO: 87785 - DNA, 15 bp, Homo sapiens
ctgtctataaatact

SEQ ID NO: 87786 - DNA, 15 bp, Homo sapiens
tctgtctataaatac

SEQ ID NO: 87787 - DNA, 15 bp, Homo sapiens
ttctgtctataaata

SEQ ID NO: 87788 - DNA, 15 bp, Homo sapiens
tttctgtctataaat

SEQ ID NO: 87789 - DNA, 15 bp, Homo sapiens
ttttctgtctataaa

SEQ ID NO: 87790 - DNA, 15 bp, Homo sapiens
tttttctgtctataa

SEQ ID NO: 87791 - DNA, 15 bp, Homo sapiens
ctttttctgtctata

SEQ ID NO: 87792 - DNA, 15 bp, Homo sapiens
cctttttctgtctat

SEQ ID NO: 87793 - DNA, 15 bp, Homo sapiens
tcctttttctgtcta

SEQ ID NO: 87794 - DNA, 15 bp, Homo sapiens
ttcctttttctgtct

SEQ ID NO: 87795 - DNA, 15 bp, Homo sapiens
cttcctttttctgtc

SEQ ID NO: 87796 - DNA, 15 bp, Homo sapiens
acttcctttttctgt

SEQ ID NO: 87797 - DNA, 15 bp, Homo sapiens
cacttcctttttctg

SEQ ID NO: 87798 - DNA, 15 bp, Homo sapiens
gcacttcctttttct

SEQ ID NO: 87799 - DNA, 15 bp, Homo sapiens
ggcacttcctttttc

SEQ ID NO: 87800 - DNA, 15 bp, Homo sapiens
gggcacttccttttt

SEQ ID NO: 87801 - DNA, 15 bp, Homo sapiens
agggcacttcctttt

SEQ ID NO: 87802 - DNA, 15 bp, Homo sapiens
tagggcacttccttt

SEQ ID NO: 87803 - DNA, 15 bp, Homo sapiens
gtagggcacttcctt

SEQ ID NO: 87804 - DNA, 15 bp, Homo sapiens
tgtagggcacttcct

SEQ ID NO: 87805 - DNA, 15 bp, Homo sapiens
ctgtagggcacttcc

SEQ ID NO: 87806 - DNA, 15 bp, Homo sapiens
tctgtagggcacttc

SEQ ID NO: 87807 - DNA, 15 bp, Homo sapiens
ttctgtagggcactt

SEQ ID NO: 87808 - DNA, 15 bp, Homo sapiens
tttctgtagggcact

SEQ ID NO: 87809 - DNA, 15 bp, Homo sapiens
atttctgtagggcac

SEQ ID NO: 87810 - DNA, 15 bp, Homo sapiens
tatttctgtagggca

SEQ ID NO: 87811 - DNA, 15 bp, Homo sapiens
ctatttctgtagggc

SEQ ID NO: 87812 - DNA, 15 bp, Homo sapiens
gctatttctgtaggg

SEQ ID NO: 87813 - DNA, 15 bp, Homo sapiens
agctatttctgtagg

SEQ ID NO: 87814 - DNA, 15 bp, Homo sapiens
cagctatttctgtag

SEQ ID NO: 87815 - DNA, 15 bp, Homo sapiens
tcagctatttctgta

SEQ ID NO: 87816 - DNA, 15 bp, Homo sapiens
atcagctatttctgt

SEQ ID NO: 87817 - DNA, 15 bp, Homo sapiens
aatcagctatttctg

SEQ ID NO: 87818 - DNA, 15 bp, Homo sapiens
caatcagctatttct

SEQ ID NO: 87819 - DNA, 15 bp, Homo sapiens
ccaatcagctatttc

SEQ ID NO: 87820 - DNA, 15 bp, Homo sapiens
accaatcagctattt

SEQ ID NO: 87821 - DNA, 15 bp, Homo sapiens
aaccaatcagctatt

SEQ ID NO: 87822 - DNA, 15 bp, Homo sapiens
taaccaatcagctat

SEQ ID NO: 87823 - DNA, 15 bp, Homo sapiens
gtaaccaatcagcta

SEQ ID NO: 87824 - DNA, 15 bp, Homo sapiens
tgtaaccaatcagct

SEQ ID NO: 87825 - DNA, 15 bp, Homo sapiens
ctgtaaccaatcagc

SEQ ID NO: 87826 - DNA, 15 bp, Homo sapiens
actgtaaccaatcag

SEQ ID NO: 87827 - DNA, 15 bp, Homo sapiens
aactgtaaccaatca

SEQ ID NO: 87828 - DNA, 15 bp, Homo sapiens
caactgtaaccaatc

SEQ ID NO: 87829 - DNA, 15 bp, Homo sapiens
ccaactgtaaccaat

SEQ ID NO: 87830 - DNA, 15 bp, Homo sapiens
cccaactgtaaccaa

SEQ ID NO: 87831 - DNA, 15 bp, Homo sapiens
acccaactgtaacca

SEQ ID NO: 87832 - DNA, 15 bp, Homo sapiens
cacccaactgtaacc

SEQ ID NO: 87833 - DNA, 15 bp, Homo sapiens
acacccaactgtaac

SEQ ID NO: 87834 - DNA, 15 bp, Homo sapiens
aacacccaactgtaa

SEQ ID NO: 87835 - DNA, 15 bp, Homo sapiens
gaacacccaactgta

SEQ ID NO: 87836 - DNA, 15 bp, Homo sapiens
tgaacacccaactgt

SEQ ID NO: 87837 - DNA, 15 bp, Homo sapiens
gtgaacacccaactg

SEQ ID NO: 87838 - DNA, 15 bp, Homo sapiens
ggtgaacacccaact

SEQ ID NO: 87839 - DNA, 15 bp, Homo sapiens
aggtgaacacccaac

SEQ ID NO: 87840 - DNA, 15 bp, Homo sapiens
aaggtgaacacccaa

SEQ ID NO: 87841 - DNA, 15 bp, Homo sapiens
taaggtgaacaccca

SEQ ID NO: 87842 - DNA, 15 bp, Homo sapiens
ataaggtgaacaccc

SEQ ID NO: 87843 - DNA, 15 bp, Homo sapiens
aataaggtgaacacc

SEQ ID NO: 87844 - DNA, 15 bp, Homo sapiens
aaataaggtgaacac

SEQ ID NO: 87845 - DNA, 15 bp, Homo sapiens
taaataaggtgaaca

SEQ ID NO: 87846 - DNA, 15 bp, Homo sapiens
ataaataaggtgaac

SEQ ID NO: 87847 - DNA, 15 bp, Homo sapiens
aataaataaggtgaa

SEQ ID NO: 87848 - DNA, 15 bp, Homo sapiens
aaataaataaggtga

SEQ ID NO: 87849 - DNA, 15 bp, Homo sapiens
caaataaataaggtg

SEQ ID NO: 87850 - DNA, 15 bp, Homo sapiens
tcaaataaataaggt

SEQ ID NO: 87851 - DNA, 15 bp, Homo sapiens
ctcaaataaataagg

SEQ ID NO: 87852 - DNA, 15 bp, Homo sapiens
cctcaaataaataag

SEQ ID NO: 87853 - DNA, 15 bp, Homo sapiens
ccctcaaataaataa

SEQ ID NO: 87854 - DNA, 15 bp, Homo sapiens
accctcaaataaata

SEQ ID NO: 87855 - DNA, 15 bp, Homo sapiens
caccctcaaataaat

SEQ ID NO: 87856 - DNA, 15 bp, Homo sapiens
tcaccctcaaataaa

SEQ ID NO: 87857 - DNA, 15 bp, Homo sapiens
atcaccctcaaataa

SEQ ID NO: 87858 - DNA, 15 bp, Homo sapiens
catcaccctcaaata

SEQ ID NO: 87859 - DNA, 15 bp, Homo sapiens
acatcaccctcaaat

SEQ ID NO: 87860 - DNA, 15 bp, Homo sapiens
cacatcaccctcaaa

SEQ ID NO: 87861 - DNA, 15 bp, Homo sapiens
tcacatcaccctcaa

SEQ ID NO: 87862 - DNA, 15 bp, Homo sapiens
atcacatcaccctca

SEQ ID NO: 87863 - DNA, 15 bp, Homo sapiens
gatcacatcaccctc

SEQ ID NO: 87864 - DNA, 15 bp, Homo sapiens
tgatcacatcaccct

SEQ ID NO: 87865 - DNA, 15 bp, Homo sapiens
ctgatcacatcaccc

SEQ ID NO: 87866 - DNA, 15 bp, Homo sapiens
cctgatcacatcacc

SEQ ID NO: 87867 - DNA, 15 bp, Homo sapiens
acctgatcacatcac

SEQ ID NO: 87868 - DNA, 15 bp, Homo sapiens
cacctgatcacatca

SEQ ID NO: 87869 - DNA, 15 bp, Homo sapiens
acacctgatcacatc

SEQ ID NO: 87870 - DNA, 15 bp, Homo sapiens
aacacctgatcacat

SEQ ID NO: 87871 - DNA, 15 bp, Homo sapiens
caacacctgatcaca

SEQ ID NO: 87872 - DNA, 15 bp, Homo sapiens
ccaacacctgatcac

SEQ ID NO: 87873 - DNA, 15 bp, Homo sapiens
cccaacacctgatca

SEQ ID NO: 87874 - DNA, 15 bp, Homo sapiens
acccaacacctgatc

SEQ ID NO: 87875 - DNA, 15 bp, Homo sapiens
tacccaacacctgat

SEQ ID NO: 87876 - DNA, 15 bp, Homo sapiens
atacccaacacctga

SEQ ID NO: 87877 - DNA, 15 bp, Homo sapiens
catacccaacacctg

SEQ ID NO: 87878 - DNA, 15 bp, Homo sapiens
ccatacccaacacct

SEQ ID NO: 87879 - DNA, 15 bp, Homo sapiens
tccatacccaacacc

SEQ ID NO: 87880 - DNA, 15 bp, Homo sapiens
gtccatacccaacac

SEQ ID NO: 87881 - DNA, 15 bp, Homo sapiens
tgtccatacccaaca

SEQ ID NO: 87882 - DNA, 15 bp, Homo sapiens
ctgtccatacccaac

SEQ ID NO: 87883 - DNA, 15 bp, Homo sapiens
cctgtccatacccaa

SEQ ID NO: 87884 - DNA, 15 bp, Homo sapiens
tcctgtccataccca

SEQ ID NO: 87885 - DNA, 15 bp, Homo sapiens
ctcctgtccataccc

SEQ ID NO: 87886 - DNA, 15 bp, Homo sapiens
gctcctgtccatacc

SEQ ID NO: 87887 - DNA, 15 bp, Homo sapiens
agctcctgtccatac

SEQ ID NO: 87888 - DNA, 15 bp, Homo sapiens
gagctcctgtccata

SEQ ID NO: 87889 - DNA, 15 bp, Homo sapiens
tgagctcctgtccat

SEQ ID NO: 87890 - DNA, 15 bp, Homo sapiens
atgagctcctgtcca

SEQ ID NO: 87891 - DNA, 15 bp, Homo sapiens
gatgagctcctgtcc

SEQ ID NO: 87892 - DNA, 15 bp, Homo sapiens
tgatgagctcctgtc

SEQ ID NO: 87893 - DNA, 15 bp, Homo sapiens
ctgatgagctcctgt

SEQ ID NO: 87894 - DNA, 15 bp, Homo sapiens
actgatgagctcctg

SEQ ID NO: 87895 - DNA, 15 bp, Homo sapiens
gactgatgagctcct

SEQ ID NO: 87896 - DNA, 15 bp, Homo sapiens
cgactgatgagctcc

SEQ ID NO: 87897 - DNA, 15 bp, Homo sapiens
ccgactgatgagctc

SEQ ID NO: 87898 - DNA, 15 bp, Homo sapiens
accgactgatgagct

SEQ ID NO: 87899 - DNA, 15 bp, Homo sapiens
taccgactgatgagc

SEQ ID NO: 87900 - DNA, 15 bp, Homo sapiens
ctaccgactgatgag

SEQ ID NO: 87901 - DNA, 15 bp, Homo sapiens
gctaccgactgatga

SEQ ID NO: 87902 - DNA, 15 bp, Homo sapiens
ggctaccgactgatg

SEQ ID NO: 87903 - DNA, 15 bp, Homo sapiens
aggctaccgactgat

SEQ ID NO: 87904 - DNA, 15 bp, Homo sapiens
caggctaccgactga

SEQ ID NO: 87905 - DNA, 15 bp, Homo sapiens
acaggctaccgactg

SEQ ID NO: 87906 - DNA, 15 bp, Homo sapiens
cacaggctaccgact

SEQ ID NO: 87907 - DNA, 15 bp, Homo sapiens
tcacaggctaccgac

SEQ ID NO: 87908 - DNA, 15 bp, Homo sapiens
atcacaggctaccga

SEQ ID NO: 87909 - DNA, 15 bp, Homo sapiens
aatcacaggctaccg

SEQ ID NO: 87910 - DNA, 15 bp, Homo sapiens
caatcacaggctacc

SEQ ID NO: 87911 - DNA, 15 bp, Homo sapiens
ccaatcacaggctac

SEQ ID NO: 87912 - DNA, 15 bp, Homo sapiens
gccaatcacaggcta

SEQ ID NO: 87913 - DNA, 15 bp, Homo sapiens
agccaatcacaggct

SEQ ID NO: 87914 - DNA, 15 bp, Homo sapiens
cagccaatcacaggc

SEQ ID NO: 87915 - DNA, 15 bp, Homo sapiens
tcagccaatcacagg

SEQ ID NO: 87916 - DNA, 15 bp, Homo sapiens
atcagccaatcacag

SEQ ID NO: 87917 - DNA, 15 bp, Homo sapiens
catcagccaatcaca

SEQ ID NO: 87918 - DNA, 15 bp, Homo sapiens
gcatcagccaatcac

SEQ ID NO: 87919 - DNA, 15 bp, Homo sapiens
agcatcagccaatca

SEQ ID NO: 87920 - DNA, 15 bp, Homo sapiens
aagcatcagccaatc

SEQ ID NO: 87921 - DNA, 15 bp, Homo sapiens
caagcatcagccaat

SEQ ID NO: 87922 - DNA, 15 bp, Homo sapiens
ccaagcatcagccaa

SEQ ID NO: 87923 - DNA, 15 bp, Homo sapiens
gccaagcatcagcca

SEQ ID NO: 87924 - DNA, 15 bp, Homo sapiens
agccaagcatcagcc

SEQ ID NO: 87925 - DNA, 15 bp, Homo sapiens
cagccaagcatcagc

SEQ ID NO: 87926 - DNA, 15 bp, Homo sapiens
gcagccaagcatcag

SEQ ID NO: 87927 - DNA, 15 bp, Homo sapiens
ggcagccaagcatca

SEQ ID NO: 87928 - DNA, 15 bp, Homo sapiens
tggcagccaagcatc

SEQ ID NO: 87929 - DNA, 15 bp, Homo sapiens
atggcagccaagcat

SEQ ID NO: 87930 - DNA, 15 bp, Homo sapiens
catggcagccaagca

SEQ ID NO: 87931 - DNA, 15 bp, Homo sapiens
tcatggcagccaagc

SEQ ID NO: 87932 - DNA, 15 bp, Homo sapiens
atcatggcagccaag

SEQ ID NO: 87933 - DNA, 15 bp, Homo sapiens
aatcatggcagccaa

SEQ ID NO: 87934 - DNA, 15 bp, Homo sapiens
caatcatggcagcca

SEQ ID NO: 87935 - DNA, 15 bp, Homo sapiens
ccaatcatggcagcc

SEQ ID NO: 87936 - DNA, 15 bp, Homo sapiens
gccaatcatggcagc

SEQ ID NO: 87937 - DNA, 15 bp, Homo sapiens
agccaatcatggcag

SEQ ID NO: 87938 - DNA, 15 bp, Homo sapiens
cagccaatcatggca

SEQ ID NO: 87939 - DNA, 15 bp, Homo sapiens
tcagccaatcatggc

SEQ ID NO: 87940 - DNA, 15 bp, Homo sapiens
ctcagccaatcatgg

SEQ ID NO: 87941 - DNA, 15 bp, Homo sapiens
tctcagccaatcatg

SEQ ID NO: 87942 - DNA, 15 bp, Homo sapiens
gtctcagccaatcat

SEQ ID NO: 87943 - DNA, 15 bp, Homo sapiens
agtctcagccaatca

SEQ ID NO: 87944 - DNA, 15 bp, Homo sapiens
gagtctcagccaatc

SEQ ID NO: 87945 - DNA, 15 bp, Homo sapiens
tgagtctcagccaat

SEQ ID NO: 87946 - DNA, 15 bp, Homo sapiens
ctgagtctcagccaa

SEQ ID NO: 87947 - DNA, 15 bp, Homo sapiens
gctgagtctcagcca

SEQ ID NO: 87948 - DNA, 15 bp, Homo sapiens
tgctgagtctcagcc

SEQ ID NO: 87949 - DNA, 15 bp, Homo sapiens
ttgctgagtctcagc

SEQ ID NO: 87950 - DNA, 15 bp, Homo sapiens
gttgctgagtctcag

SEQ ID NO: 87951 - DNA, 15 bp, Homo sapiens
agttgctgagtctca

SEQ ID NO: 87952 - DNA, 15 bp, Homo sapiens
aagttgctgagtctc

SEQ ID NO: 87953 - DNA, 15 bp, Homo sapiens
caagttgctgagtct

SEQ ID NO: 87954 - DNA, 15 bp, Homo sapiens
acaagttgctgagtc

SEQ ID NO: 87955 - DNA, 15 bp, Homo sapiens
gacaagttgctgagt

SEQ ID NO: 87956 - DNA, 15 bp, Homo sapiens
agacaagttgctgag

SEQ ID NO: 87957 - DNA, 15 bp, Homo sapiens
gagacaagttgctga

SEQ ID NO: 87958 - DNA, 15 bp, Homo sapiens
tgagacaagttgctg

SEQ ID NO: 87959 - DNA, 15 bp, Homo sapiens
ctgagacaagttgct

SEQ ID NO: 87960 - DNA, 15 bp, Homo sapiens
gctgagacaagttgc

SEQ ID NO: 87961 - DNA, 15 bp, Homo sapiens
ggctgagacaagttg

SEQ ID NO: 87962 - DNA, 15 bp, Homo sapiens
tggctgagacaagtt

SEQ ID NO: 87963 - DNA, 15 bp, Homo sapiens
ctggctgagacaagt

SEQ ID NO: 87964 - DNA, 15 bp, Homo sapiens
actggctgagacaag

SEQ ID NO: 87965 - DNA, 15 bp, Homo sapiens
gactggctgagacaa

SEQ ID NO: 87966 - DNA, 15 bp, Homo sapiens
agactggctgagaca

SEQ ID NO: 87967 - DNA, 15 bp, Homo sapiens
gagactggctgagac

SEQ ID NO: 87968 - DNA, 15 bp, Homo sapiens
agagactggctgaga

SEQ ID NO: 87969 - DNA, 15 bp, Homo sapiens
cagagactggctgag

SEQ ID NO: 87970 - DNA, 15 bp, Homo sapiens
acagagactggctga

SEQ ID NO: 87971 - DNA, 15 bp, Homo sapiens
gacagagactggctg

SEQ ID NO: 87972 - DNA, 15 bp, Homo sapiens
agacagagactggct

SEQ ID NO: 87973 - DNA, 15 bp, Homo sapiens
aagacagagactggc

SEQ ID NO: 87974 - DNA, 15 bp, Homo sapiens
taagacagagactgg

SEQ ID NO: 87975 - DNA, 15 bp, Homo sapiens
ttaagacagagactg

SEQ ID NO: 87976 - DNA, 15 bp, Homo sapiens
cttaagacagagact

SEQ ID NO: 87977 - DNA, 15 bp, Homo sapiens
tcttaagacagagac

SEQ ID NO: 87978 - DNA, 15 bp, Homo sapiens
ctcttaagacagaga

SEQ ID NO: 87979 - DNA, 15 bp, Homo sapiens
tctcttaagacagag

SEQ ID NO: 87980 - DNA, 15 bp, Homo sapiens
ttctcttaagacaga

SEQ ID NO: 87981 - DNA, 15 bp, Homo sapiens
attctcttaagacag

SEQ ID NO: 87982 - DNA, 15 bp, Homo sapiens
tattctcttaagaca

SEQ ID NO: 87983 - DNA, 15 bp, Homo sapiens
atattctcttaagac

SEQ ID NO: 87984 - DNA, 15 bp, Homo sapiens
tatattctcttaaga

SEQ ID NO: 87985 - DNA, 15 bp, Homo sapiens
gtatattctcttaag

SEQ ID NO: 87986 - DNA, 15 bp, Homo sapiens
agtatattctcttaa

SEQ ID NO: 87987 - DNA, 15 bp, Homo sapiens
cagtatattctctta

SEQ ID NO: 87988 - DNA, 15 bp, Homo sapiens
gcagtatattctctt

SEQ ID NO: 87989 - DNA, 15 bp, Homo sapiens
agcagtatattctct

SEQ ID NO: 87990 - DNA, 15 bp, Homo sapiens
tagcagtatattctc

SEQ ID NO: 87991 - DNA, 15 bp, Homo sapiens
ttagcagtatattct

SEQ ID NO: 87992 - DNA, 15 bp, Homo sapiens
cttagcagtatattc

SEQ ID NO: 87993 - DNA, 15 bp, Homo sapiens
tcttagcagtatatt

SEQ ID NO: 87994 - DNA, 15 bp, Homo sapiens
atcttagcagtatat

SEQ ID NO: 87995 - DNA, 15 bp, Homo sapiens
tatcttagcagtata

SEQ ID NO: 87996 - DNA, 15 bp, Homo sapiens
ttatcttagcagtat

SEQ ID NO: 87997 - DNA, 15 bp, Homo sapiens
cttatcttagcagta

SEQ ID NO: 87998 - DNA, 15 bp, Homo sapiens
acttatcttagcagt

SEQ ID NO: 87999 - DNA, 15 bp, Homo sapiens
aacttatcttagcag

SEQ ID NO: 88000 - DNA, 15 bp, Homo sapiens
caacttatcttagca

SEQ ID NO: 88001 - DNA, 15 bp, Homo sapiens
gcaacttatcttagc

SEQ ID NO: 88002 - DNA, 15 bp, Homo sapiens
tgcaacttatcttag

SEQ ID NO: 88003 - DNA, 15 bp, Homo sapiens
ctgcaacttatctta

SEQ ID NO: 88004 - DNA, 15 bp, Homo sapiens
actgcaacttatctt

SEQ ID NO: 88005 - DNA, 15 bp, Homo sapiens
aactgcaacttatct

SEQ ID NO: 88006 - DNA, 15 bp, Homo sapiens
aaactgcaacttatc

SEQ ID NO: 88007 - DNA, 15 bp, Homo sapiens
caaactgcaacttat

SEQ ID NO: 88008 - DNA, 15 bp, Homo sapiens
acaaactgcaactta

SEQ ID NO: 88009 - DNA, 15 bp, Homo sapiens
aacaaactgcaactt

SEQ ID NO: 88010 - DNA, 15 bp, Homo sapiens
aaacaaactgcaact

SEQ ID NO: 88011 - DNA, 15 bp, Homo sapiens
taaacaaactgcaac

SEQ ID NO: 88012 - DNA, 15 bp, Homo sapiens
gtaaacaaactgcaa

SEQ ID NO: 88013 - DNA, 15 bp, Homo sapiens
tgtaaacaaactgca

SEQ ID NO: 88014 - DNA, 15 bp, Homo sapiens
atgtaaacaaactgc

SEQ ID NO: 88015 - DNA, 15 bp, Homo sapiens
tatgtaaacaaactg

SEQ ID NO: 88016 - DNA, 15 bp, Homo sapiens
gtatgtaaacaaact

SEQ ID NO: 88017 - DNA, 15 bp, Homo sapiens
agtatgtaaacaaac

SEQ ID NO: 88018 - DNA, 15 bp, Homo sapiens
tagtatgtaaacaaa

SEQ ID NO: 88019 - DNA, 15 bp, Homo sapiens
ttagtatgtaaacaa

SEQ ID NO: 88020 - DNA, 15 bp, Homo sapiens
cttagtatgtaaaca

SEQ ID NO: 88021 - DNA, 15 bp, Homo sapiens
acttagtatgtaaac

SEQ ID NO: 88022 - DNA, 15 bp, Homo sapiens
aacttagtatgtaaa

SEQ ID NO: 88023 - DNA, 15 bp, Homo sapiens
aaacttagtatgtaa

SEQ ID NO: 88024 - DNA, 15 bp, Homo sapiens
caaacttagtatgta

SEQ ID NO: 88025 - DNA, 15 bp, Homo sapiens
gcaaacttagtatgt

SEQ ID NO: 88026 - DNA, 15 bp, Homo sapiens
agcaaacttagtatg

SEQ ID NO: 88027 - DNA, 15 bp, Homo sapiens
aagcaaacttagtat

SEQ ID NO: 88028 - DNA, 15 bp, Homo sapiens
caagcaaacttagta

SEQ ID NO: 88029 - DNA, 15 bp, Homo sapiens
gcaagcaaacttagt

SEQ ID NO: 88030 - DNA, 15 bp, Homo sapiens
tgcaagcaaacttag

SEQ ID NO: 88031 - DNA, 15 bp, Homo sapiens
ctgcaagcaaactta

SEQ ID NO: 88032 - DNA, 15 bp, Homo sapiens
actgcaagcaaactt

SEQ ID NO: 88033 - DNA, 15 bp, Homo sapiens
aactgcaagcaaact

SEQ ID NO: 88034 - DNA, 15 bp, Homo sapiens
aaactgcaagcaaac

SEQ ID NO: 88035 - DNA, 15 bp, Homo sapiens
caaactgcaagcaaa

SEQ ID NO: 88036 - DNA, 15 bp, Homo sapiens
gcaaactgcaagcaa

SEQ ID NO: 88037 - DNA, 15 bp, Homo sapiens
agcaaactgcaagca

SEQ ID NO: 88038 - DNA, 15 bp, Homo sapiens
gagcaaactgcaagc

SEQ ID NO: 88039 - DNA, 15 bp, Homo sapiens
agagcaaactgcaag

SEQ ID NO: 88040 - DNA, 15 bp, Homo sapiens
cagagcaaactgcaa

SEQ ID NO: 88041 - DNA, 15 bp, Homo sapiens
acagagcaaactgca

SEQ ID NO: 88042 - DNA, 15 bp, Homo sapiens
cacagagcaaactgc

SEQ ID NO: 88043 - DNA, 15 bp, Homo sapiens
ccacagagcaaactg

SEQ ID NO: 88044 - DNA, 15 bp, Homo sapiens
cccacagagcaaact

SEQ ID NO: 88045 - DNA, 15 bp, Homo sapiens
tcccacagagcaaac

SEQ ID NO: 88046 - DNA, 15 bp, Homo sapiens
ttcccacagagcaaa

SEQ ID NO: 88047 - DNA, 15 bp, Homo sapiens
gttcccacagagcaa

SEQ ID NO: 88048 - DNA, 15 bp, Homo sapiens
agttcccacagagca

SEQ ID NO: 88049 - DNA, 15 bp, Homo sapiens
gagttcccacagagc

SEQ ID NO: 88050 - DNA, 15 bp, Homo sapiens
tgagttcccacagag

SEQ ID NO: 88051 - DNA, 15 bp, Homo sapiens
ttgagttcccacaga

SEQ ID NO: 88052 - DNA, 15 bp, Homo sapiens
tttgagttcccacag

SEQ ID NO: 88053 - DNA, 15 bp, Homo sapiens
ctttgagttcccaca

SEQ ID NO: 88054 - DNA, 15 bp, Homo sapiens
actttgagttcccac

SEQ ID NO: 88055 - DNA, 15 bp, Homo sapiens
tactttgagttccca

SEQ ID NO: 88056 - DNA, 15 bp, Homo sapiens
atactttgagttccc

SEQ ID NO: 88057 - DNA, 15 bp, Homo sapiens
catactttgagttcc

SEQ ID NO: 88058 - DNA, 15 bp, Homo sapiens
gcatactttgagttc

SEQ ID NO: 88059 - DNA, 15 bp, Homo sapiens
tgcatactttgagtt

SEQ ID NO: 88060 - DNA, 15 bp, Homo sapiens
ctgcatactttgagt

SEQ ID NO: 88061 - DNA, 15 bp, Homo sapiens
cctgcatactttgag

SEQ ID NO: 88062 - DNA, 15 bp, Homo sapiens
gcctgcatactttga

SEQ ID NO: 88063 - DNA, 15 bp, Homo sapiens
tgcctgcatactttg

SEQ ID NO: 88064 - DNA, 15 bp, Homo sapiens
ctgcctgcatacttt

SEQ ID NO: 88065 - DNA, 15 bp, Homo sapiens
gctgcctgcatactt

SEQ ID NO: 88066 - DNA, 15 bp, Homo sapiens
ggctgcctgcatact

SEQ ID NO: 88067 - DNA, 15 bp, Homo sapiens
aggctgcctgcatac

SEQ ID NO: 88068 - DNA, 15 bp, Homo sapiens
gaggctgcctgcata

SEQ ID NO: 88069 - DNA, 15 bp, Homo sapiens
tgaggctgcctgcat

SEQ ID NO: 88070 - DNA, 15 bp, Homo sapiens
ctgaggctgcctgca

SEQ ID NO: 88071 - DNA, 15 bp, Homo sapiens
cctgaggctgcctgc

SEQ ID NO: 88072 - DNA, 15 bp, Homo sapiens
gcctgaggctgcctg

SEQ ID NO: 88073 - DNA, 15 bp, Homo sapiens
ggcctgaggctgcct

SEQ ID NO: 88074 - DNA, 15 bp, Homo sapiens
tggcctgaggctgcc

SEQ ID NO: 88075 - DNA, 15 bp, Homo sapiens
ttggcctgaggctgc

SEQ ID NO: 88076 - DNA, 15 bp, Homo sapiens
tttggcctgaggctg

SEQ ID NO: 88077 - DNA, 15 bp, Homo sapiens
atttggcctgaggct

SEQ ID NO: 88078 - DNA, 15 bp, Homo sapiens
aatttggcctgaggc

SEQ ID NO: 88079 - DNA, 15 bp, Homo sapiens
aaatttggcctgagg

SEQ ID NO: 88080 - DNA, 15 bp, Homo sapiens
taaatttggcctgag

SEQ ID NO: 88081 - DNA, 15 bp, Homo sapiens
ctaaatttggcctga

SEQ ID NO: 88082 - DNA, 15 bp, Homo sapiens
actaaatttggcctg

SEQ ID NO: 88083 - DNA, 15 bp, Homo sapiens
aactaaatttggcct

SEQ ID NO: 88084 - DNA, 15 bp, Homo sapiens
aaactaaatttggcc

SEQ ID NO: 88085 - DNA, 15 bp, Homo sapiens
taaactaaatttggc

SEQ ID NO: 88086 - DNA, 15 bp, Homo sapiens
ttaaactaaatttgg

SEQ ID NO: 88087 - DNA, 15 bp, Homo sapiens
gttaaactaaatttg

SEQ ID NO: 88088 - DNA, 15 bp, Homo sapiens
agttaaactaaattt

SEQ ID NO: 88089 - DNA, 15 bp, Homo sapiens
cagttaaactaaatt

SEQ ID NO: 88090 - DNA, 15 bp, Homo sapiens
tcagttaaactaaat

SEQ ID NO: 88091 - DNA, 15 bp, Homo sapiens
ctcagttaaactaaa

SEQ ID NO: 88092 - DNA, 15 bp, Homo sapiens
gctcagttaaactaa

SEQ ID NO: 88093 - DNA, 15 bp, Homo sapiens
tgctcagttaaacta

SEQ ID NO: 88094 - DNA, 15 bp, Homo sapiens
ctgctcagttaaact

SEQ ID NO: 88095 - DNA, 15 bp, Homo sapiens
gctgctcagttaaac

SEQ ID NO: 88096 - DNA, 15 bp, Homo sapiens
agctgctcagttaaa

SEQ ID NO: 88097 - DNA, 15 bp, Homo sapiens
cagctgctcagttaa

SEQ ID NO: 88098 - DNA, 15 bp, Homo sapiens
tcagctgctcagtta

SEQ ID NO: 88099 - DNA, 15 bp, Homo sapiens
ttcagctgctcagtt

SEQ ID NO: 88100 - DNA, 15 bp, Homo sapiens
tttcagctgctcagt

SEQ ID NO: 88101 - DNA, 15 bp, Homo sapiens
atttcagctgctcag

SEQ ID NO: 88102 - DNA, 15 bp, Homo sapiens
aatttcagctgctca

SEQ ID NO: 88103 - DNA, 15 bp, Homo sapiens
taatttcagctgctc

SEQ ID NO: 88104 - DNA, 15 bp, Homo sapiens
ataatttcagctgct

SEQ ID NO: 88105 - DNA, 15 bp, Homo sapiens
aataatttcagctgc

SEQ ID NO: 88106 - DNA, 15 bp, Homo sapiens
taataatttcagctg

SEQ ID NO: 88107 - DNA, 15 bp, Homo sapiens
ttaataatttcagct

SEQ ID NO: 88108 - DNA, 15 bp, Homo sapiens
tttaataatttcagc

SEQ ID NO: 88109 - DNA, 15 bp, Homo sapiens
ttttaataatttcag

SEQ ID NO: 88110 - DNA, 15 bp, Homo sapiens
attttaataatttca

SEQ ID NO: 88111 - DNA, 15 bp, Homo sapiens
cattttaataatttc

SEQ ID NO: 88112 - DNA, 15 bp, Homo sapiens
tcattttaataattt

SEQ ID NO: 88113 - DNA, 15 bp, Homo sapiens
atcattttaataatt

SEQ ID NO: 88114 - DNA, 15 bp, Homo sapiens
aatcattttaataat

SEQ ID NO: 88115 - DNA, 15 bp, Homo sapiens
aaatcattttaataa

SEQ ID NO: 88116 - DNA, 15 bp, Homo sapiens
taaatcattttaata

SEQ ID NO: 88117 - DNA, 15 bp, Homo sapiens
ataaatcattttaat

SEQ ID NO: 88118 - DNA, 15 bp, Homo sapiens
aataaatcattttaa

SEQ ID NO: 88119 - DNA, 15 bp, Homo sapiens
taataaatcatttta

SEQ ID NO: 88120 - DNA, 15 bp, Homo sapiens
ctaataaatcatttt

SEQ ID NO: 88121 - DNA, 15 bp, Homo sapiens
tctaataaatcattt

SEQ ID NO: 88122 - DNA, 15 bp, Homo sapiens
ttctaataaatcatt

SEQ ID NO: 88123 - DNA, 15 bp, Homo sapiens
tttctaataaatcat

SEQ ID NO: 88124 - DNA, 15 bp, Homo sapiens
ctttctaataaatca

SEQ ID NO: 88125 - DNA, 15 bp, Homo sapiens
cctttctaataaatc

SEQ ID NO: 88126 - DNA, 15 bp, Homo sapiens
acctttctaataaat

SEQ ID NO: 88127 - DNA, 15 bp, Homo sapiens
aacctttctaataaa

SEQ ID NO: 88128 - DNA, 15 bp, Homo sapiens
gaacctttctaataa

SEQ ID NO: 88129 - DNA, 15 bp, Homo sapiens
tgaacctttctaata

SEQ ID NO: 88130 - DNA, 15 bp, Homo sapiens
atgaacctttctaat

SEQ ID NO: 88131 - DNA, 15 bp, Homo sapiens
gatgaacctttctaa

SEQ ID NO: 88132 - DNA, 15 bp, Homo sapiens
tgatgaacctttcta

SEQ ID NO: 88133 - DNA, 15 bp, Homo sapiens
ttgatgaacctttct

SEQ ID NO: 88134 - DNA, 15 bp, Homo sapiens
gttgatgaacctttc

SEQ ID NO: 88135 - DNA, 15 bp, Homo sapiens
agttgatgaaccttt

SEQ ID NO: 88136 - DNA, 15 bp, Homo sapiens
tagttgatgaacctt

SEQ ID NO: 88137 - DNA, 15 bp, Homo sapiens
gtagttgatgaacct

SEQ ID NO: 88138 - DNA, 15 bp, Homo sapiens
tgtagttgatgaacc

SEQ ID NO: 88139 - DNA, 15 bp, Homo sapiens
gtgtagttgatgaac

SEQ ID NO: 88140 - DNA, 15 bp, Homo sapiens
agtgtagttgatgaa

SEQ ID NO: 88141 - DNA, 15 bp, Homo sapiens
aagtgtagttgatga

SEQ ID NO: 88142 - DNA, 15 bp, Homo sapiens
gaagtgtagttgatg

SEQ ID NO: 88143 - DNA, 15 bp, Homo sapiens
ggaagtgtagttgat

SEQ ID NO: 88144 - DNA, 15 bp, Homo sapiens
aggaagtgtagttga

SEQ ID NO: 88145 - DNA, 15 bp, Homo sapiens
caggaagtgtagttg

SEQ ID NO: 88146 - DNA, 15 bp, Homo sapiens
acaggaagtgtagtt

SEQ ID NO: 88147 - DNA, 15 bp, Homo sapiens
cacaggaagtgtagt

SEQ ID NO: 88148 - DNA, 15 bp, Homo sapiens
tcacaggaagtgtag

SEQ ID NO: 88149 - DNA, 15 bp, Homo sapiens
gtcacaggaagtgta

SEQ ID NO: 88150 - DNA, 15 bp, Homo sapiens
agtcacaggaagtgt

SEQ ID NO: 88151 - DNA, 15 bp, Homo sapiens
aagtcacaggaagtg

SEQ ID NO: 88152 - DNA, 15 bp, Homo sapiens
aaagtcacaggaagt

SEQ ID NO: 88153 - DNA, 15 bp, Homo sapiens
aaaagtcacaggaag

SEQ ID NO: 88154 - DNA, 15 bp, Homo sapiens
taaaagtcacaggaa

SEQ ID NO: 88155 - DNA, 15 bp, Homo sapiens
gtaaaagtcacagga

SEQ ID NO: 88156 - DNA, 15 bp, Homo sapiens
agtaaaagtcacagg

SEQ ID NO: 88157 - DNA, 15 bp, Homo sapiens
cagtaaaagtcacag

SEQ ID NO: 88158 - DNA, 15 bp, Homo sapiens
gcagtaaaagtcaca

SEQ ID NO: 88159 - DNA, 15 bp, Homo sapiens
ggcagtaaaagtcac

SEQ ID NO: 88160 - DNA, 15 bp, Homo sapiens
tggcagtaaaagtca

SEQ ID NO: 88161 - DNA, 15 bp, Homo sapiens
atggcagtaaaagtc

SEQ ID NO: 88162 - DNA, 15 bp, Homo sapiens
gatggcagtaaaagt

SEQ ID NO: 88163 - DNA, 15 bp, Homo sapiens
ggatggcagtaaaag

SEQ ID NO: 88164 - DNA, 15 bp, Homo sapiens
gggatggcagtaaaa

SEQ ID NO: 88165 - DNA, 15 bp, Homo sapiens
ggggatggcagtaaa

SEQ ID NO: 88166 - DNA, 15 bp, Homo sapiens
gggggatggcagtaa

SEQ ID NO: 88167 - DNA, 15 bp, Homo sapiens
agggggatggcagta

SEQ ID NO: 88168 - DNA, 15 bp, Homo sapiens
gagggggatggcagt

SEQ ID NO: 88169 - DNA, 15 bp, Homo sapiens
agagggggatggcag

SEQ ID NO: 88170 - DNA, 15 bp, Homo sapiens
gagagggggatggca

SEQ ID NO: 88171 - DNA, 15 bp, Homo sapiens
ggagagggggatggc

SEQ ID NO: 88172 - DNA, 15 bp, Homo sapiens
gggagagggggatgg

SEQ ID NO: 88173 - DNA, 15 bp, Homo sapiens
ggggagagggggatg

SEQ ID NO: 88174 - DNA, 15 bp, Homo sapiens
gggggagagggggat

SEQ ID NO: 88175 - DNA, 15 bp, Homo sapiens
agggggagaggggga

SEQ ID NO: 88176 - DNA, 15 bp, Homo sapiens
cagggggagaggggg

SEQ ID NO: 88177 - DNA, 15 bp, Homo sapiens
gcagggggagagggg

SEQ ID NO: 88178 - DNA, 15 bp, Homo sapiens
ggcagggggagaggg

SEQ ID NO: 88179 - DNA, 15 bp, Homo sapiens
gggcagggggagagg

SEQ ID NO: 88180 - DNA, 15 bp, Homo sapiens
tgggcagggggagag

SEQ ID NO: 88181 - DNA, 15 bp, Homo sapiens
ttgggcagggggaga

SEQ ID NO: 88182 - DNA, 15 bp, Homo sapiens
gttgggcagggggag

SEQ ID NO: 88183 - DNA, 15 bp, Homo sapiens
tgttgggcaggggga

SEQ ID NO: 88184 - DNA, 15 bp, Homo sapiens
atgttgggcaggggg

SEQ ID NO: 88185 - DNA, 15 bp, Homo sapiens
tatgttgggcagggg

SEQ ID NO: 88186 - DNA, 15 bp, Homo sapiens
gtatgttgggcaggg

SEQ ID NO: 88187 - DNA, 15 bp, Homo sapiens
tgtatgttgggcagg

SEQ ID NO: 88188 - DNA, 15 bp, Homo sapiens
gtgtatgttgggcag

SEQ ID NO: 88189 - DNA, 15 bp, Homo sapiens
tgtgtatgttgggca

SEQ ID NO: 88190 - DNA, 15 bp, Homo sapiens
gtgtgtatgttgggc

SEQ ID NO: 88191 - DNA, 15 bp, Homo sapiens
tgtgtgtatgttggg

SEQ ID NO: 88192 - DNA, 15 bp, Homo sapiens
ttgtgtgtatgttgg

SEQ ID NO: 88193 - DNA, 15 bp, Homo sapiens
tttgtgtgtatgttg

SEQ ID NO: 88194 - DNA, 15 bp, Homo sapiens
ttttgtgtgtatgtt

SEQ ID NO: 88195 - DNA, 15 bp, Homo sapiens
cttttgtgtgtatgt

SEQ ID NO: 88196 - DNA, 15 bp, Homo sapiens
tcttttgtgtgtatg

SEQ ID NO: 88197 - DNA, 15 bp, Homo sapiens
ttcttttgtgtgtat

SEQ ID NO: 88198 - DNA, 15 bp, Homo sapiens
gttcttttgtgtgta

SEQ ID NO: 88199 - DNA, 15 bp, Homo sapiens
cgttcttttgtgtgt

SEQ ID NO: 88200 - DNA, 15 bp, Homo sapiens
gcgttcttttgtgtg

SEQ ID NO: 88201 - DNA, 15 bp, Homo sapiens
agcgttcttttgtgt

SEQ ID NO: 88202 - DNA, 15 bp, Homo sapiens
cagcgttcttttgtg

SEQ ID NO: 88203 - DNA, 15 bp, Homo sapiens
ccagcgttcttttgt

SEQ ID NO: 88204 - DNA, 15 bp, Homo sapiens
gccagcgttcttttg

SEQ ID NO: 88205 - DNA, 15 bp, Homo sapiens
ggccagcgttctttt

SEQ ID NO: 88206 - DNA, 15 bp, Homo sapiens
tggccagcgttcttt

SEQ ID NO: 88207 - DNA, 15 bp, Homo sapiens
atggccagcgttctt

SEQ ID NO: 88208 - DNA, 15 bp, Homo sapiens
tatggccagcgttct

SEQ ID NO: 88209 - DNA, 15 bp, Homo sapiens
ttatggccagcgttc

SEQ ID NO: 88210 - DNA, 15 bp, Homo sapiens
attatggccagcgtt

SEQ ID NO: 88211 - DNA, 15 bp, Homo sapiens
aattatggccagcgt

SEQ ID NO: 88212 - DNA, 15 bp, Homo sapiens
aaattatggccagcg

SEQ ID NO: 88213 - DNA, 15 bp, Homo sapiens
aaaattatggccagc

SEQ ID NO: 88214 - DNA, 15 bp, Homo sapiens
aaaaattatggccag

SEQ ID NO: 88215 - DNA, 15 bp, Homo sapiens
taaaaattatggcca

SEQ ID NO: 88216 - DNA, 15 bp, Homo sapiens
ttaaaaattatggcc

SEQ ID NO: 88217 - DNA, 15 bp, Homo sapiens
tttaaaaattatggc

SEQ ID NO: 88218 - DNA, 15 bp, Homo sapiens
ttttaaaaattatgg

SEQ ID NO: 88219 - DNA, 15 bp, Homo sapiens
attttaaaaattatg

SEQ ID NO: 88220 - DNA, 15 bp, Homo sapiens
tattttaaaaattat

SEQ ID NO: 88221 - DNA, 15 bp, Homo sapiens
gtattttaaaaatta

SEQ ID NO: 88222 - DNA, 15 bp, Homo sapiens
tgtattttaaaaatt

SEQ ID NO: 88223 - DNA, 15 bp, Homo sapiens
ttgtattttaaaaat

SEQ ID NO: 88224 - DNA, 15 bp, Homo sapiens
tttgtattttaaaaa

SEQ ID NO: 88225 - DNA, 15 bp, Homo sapiens
ctttgtattttaaaa

SEQ ID NO: 88226 - DNA, 15 bp, Homo sapiens
tctttgtattttaaa

SEQ ID NO: 88227 - DNA, 15 bp, Homo sapiens
ttctttgtattttaa

SEQ ID NO: 88228 - DNA, 15 bp, Homo sapiens
tttctttgtatttta

SEQ ID NO: 88229 - DNA, 15 bp, Homo sapiens
ttttctttgtatttt

SEQ ID NO: 88230 - DNA, 15 bp, Homo sapiens
gttttctttgtattt

SEQ ID NO: 88231 - DNA, 15 bp, Homo sapiens
tgttttctttgtatt

SEQ ID NO: 88232 - DNA, 15 bp, Homo sapiens
ctgttttctttgtat

SEQ ID NO: 88233 - DNA, 15 bp, Homo sapiens
gctgttttctttgta

SEQ ID NO: 88234 - DNA, 15 bp, Homo sapiens
ggctgttttctttgt

SEQ ID NO: 88235 - DNA, 15 bp, Homo sapiens
tggctgttttctttg

SEQ ID NO: 88236 - DNA, 15 bp, Homo sapiens
ctggctgttttcttt

SEQ ID NO: 88237 - DNA, 15 bp, Homo sapiens
cctggctgttttctt

SEQ ID NO: 88238 - DNA, 15 bp, Homo sapiens
gcctggctgttttct

SEQ ID NO: 88239 - DNA, 15 bp, Homo sapiens
agcctggctgttttc

SEQ ID NO: 88240 - DNA, 15 bp, Homo sapiens
cagcctggctgtttt

SEQ ID NO: 88241 - DNA, 15 bp, Homo sapiens
ccagcctggctgttt

SEQ ID NO: 88242 - DNA, 15 bp, Homo sapiens
cccagcctggctgtt

SEQ ID NO: 88243 - DNA, 15 bp, Homo sapiens
gcccagcctggctgt

SEQ ID NO: 88244 - DNA, 15 bp, Homo sapiens
tgcccagcctggctg

SEQ ID NO: 88245 - DNA, 15 bp, Homo sapiens
gtgcccagcctggct

SEQ ID NO: 88246 - DNA, 15 bp, Homo sapiens
cgtgcccagcctggc

SEQ ID NO: 88247 - DNA, 15 bp, Homo sapiens
ccgtgcccagcctgg

SEQ ID NO: 88248 - DNA, 15 bp, Homo sapiens
accgtgcccagcctg

SEQ ID NO: 88249 - DNA, 15 bp, Homo sapiens
caccgtgcccagcct

SEQ ID NO: 88250 - DNA, 15 bp, Homo sapiens
ccaccgtgcccagcc

SEQ ID NO: 88251 - DNA, 15 bp, Homo sapiens
gccaccgtgcccagc

SEQ ID NO: 88252 - DNA, 15 bp, Homo sapiens
agccaccgtgcccag

SEQ ID NO: 88253 - DNA, 15 bp, Homo sapiens
gagccaccgtgccca

SEQ ID NO: 88254 - DNA, 15 bp, Homo sapiens
tgagccaccgtgccc

SEQ ID NO: 88255 - DNA, 15 bp, Homo sapiens
atgagccaccgtgcc

SEQ ID NO: 88256 - DNA, 15 bp, Homo sapiens
catgagccaccgtgc

SEQ ID NO: 88257 - DNA, 15 bp, Homo sapiens
gcatgagccaccgtg

SEQ ID NO: 88258 - DNA, 15 bp, Homo sapiens
ggcatgagccaccgt

SEQ ID NO: 88259 - DNA, 15 bp, Homo sapiens
aggcatgagccaccg

SEQ ID NO: 88260 - DNA, 15 bp, Homo sapiens
agcctcccaaagtgc

SEQ ID NO: 88261 - DNA, 15 bp, Homo sapiens
cagcctcccaaagtg

SEQ ID NO: 88262 - DNA, 15 bp, Homo sapiens
tcagcctcccaaagt

SEQ ID NO: 88263 - DNA, 15 bp, Homo sapiens
ctcagcctcccaaag

SEQ ID NO: 88264 - DNA, 15 bp, Homo sapiens
cctcagcctcccaaa

SEQ ID NO: 88265 - DNA, 15 bp, Homo sapiens
gcctcagcctcccaa

SEQ ID NO: 88266 - DNA, 15 bp, Homo sapiens
tgcctcagcctccca

SEQ ID NO: 88267 - DNA, 15 bp, Homo sapiens
ttgcctcagcctccc

SEQ ID NO: 88268 - DNA, 15 bp, Homo sapiens
cttgcctcagcctcc

SEQ ID NO: 88269 - DNA, 15 bp, Homo sapiens
acttgcctcagcctc

SEQ ID NO: 88270 - DNA, 15 bp, Homo sapiens
cacttgcctcagcct

SEQ ID NO: 88271 - DNA, 15 bp, Homo sapiens
ccacttgcctcagcc

SEQ ID NO: 88272 - DNA, 15 bp, Homo sapiens
tccacttgcctcagc

SEQ ID NO: 88273 - DNA, 15 bp, Homo sapiens
atccacttgcctcag

SEQ ID NO: 88274 - DNA, 15 bp, Homo sapiens
gatccacttgcctca

SEQ ID NO: 88275 - DNA, 15 bp, Homo sapiens
tgatccacttgcctc

SEQ ID NO: 88276 - DNA, 15 bp, Homo sapiens
gtgatccacttgcct

SEQ ID NO: 88277 - DNA, 15 bp, Homo sapiens
ggtgatccacttgcc

SEQ ID NO: 88278 - DNA, 15 bp, Homo sapiens
aggtgatccacttgc

SEQ ID NO: 88279 - DNA, 15 bp, Homo sapiens
caggtgatccacttg

SEQ ID NO: 88280 - DNA, 15 bp, Homo sapiens
tcaggtgatccactt

SEQ ID NO: 88281 - DNA, 15 bp, Homo sapiens
ctcaggtgatccact

SEQ ID NO: 88282 - DNA, 15 bp, Homo sapiens
cctcaggtgatccac

SEQ ID NO: 88283 - DNA, 15 bp, Homo sapiens
acctcaggtgatcca

SEQ ID NO: 88284 - DNA, 15 bp, Homo sapiens
gacctcaggtgatcc

SEQ ID NO: 88285 - DNA, 15 bp, Homo sapiens
ctggtctcgaactcc

SEQ ID NO: 88286 - DNA, 15 bp, Homo sapiens
gctggtctcgaactc

SEQ ID NO: 88287 - DNA, 15 bp, Homo sapiens
ggctggtctcgaact

SEQ ID NO: 88288 - DNA, 15 bp, Homo sapiens
aggctggtctcgaac

SEQ ID NO: 88289 - DNA, 15 bp, Homo sapiens
caggctggtctcgaa

SEQ ID NO: 88290 - DNA, 15 bp, Homo sapiens
ccaggctggtctcga

SEQ ID NO: 88291 - DNA, 15 bp, Homo sapiens
gccaggctggtctcg

SEQ ID NO: 88292 - DNA, 15 bp, Homo sapiens
ggccaggctggtctc

SEQ ID NO: 88293 - DNA, 15 bp, Homo sapiens
tggccaggctggtct

SEQ ID NO: 88294 - DNA, 15 bp, Homo sapiens
ttggccaggctggtc

SEQ ID NO: 88295 - DNA, 15 bp, Homo sapiens
gttggccaggctggt

SEQ ID NO: 88296 - DNA, 15 bp, Homo sapiens
tgttggccaggctgg

SEQ ID NO: 88297 - DNA, 15 bp, Homo sapiens
atgttggccaggctg

SEQ ID NO: 88298 - DNA, 15 bp, Homo sapiens
catgttggccaggct

SEQ ID NO: 88299 - DNA, 15 bp, Homo sapiens
ccatgttggccaggc

SEQ ID NO: 88300 - DNA, 15 bp, Homo sapiens
tttttagtagagaca

SEQ ID NO: 88301 - DNA, 15 bp, Homo sapiens
ttttttagtagagac

SEQ ID NO: 88302 - DNA, 15 bp, Homo sapiens
tttttttagtagaga

SEQ ID NO: 88303 - DNA, 15 bp, Homo sapiens
ttttttttagtagag

SEQ ID NO: 88304 - DNA, 15 bp, Homo sapiens
tttttttttagtaga

SEQ ID NO: 88305 - DNA, 15 bp, Homo sapiens
ttttttttttagtag

SEQ ID NO: 88306 - DNA, 15 bp, Homo sapiens
attttttttttagta

SEQ ID NO: 88307 - DNA, 15 bp, Homo sapiens
tattttttttttagt

SEQ ID NO: 88308 - DNA, 15 bp, Homo sapiens
gtattttttttttag

SEQ ID NO: 88309 - DNA, 15 bp, Homo sapiens
tgtatttttttttta

SEQ ID NO: 88310 - DNA, 15 bp, Homo sapiens
ttgtatttttttttt

SEQ ID NO: 88311 - DNA, 15 bp, Homo sapiens
tttgtattttttttt

SEQ ID NO: 88312 - DNA, 15 bp, Homo sapiens
ttttgtatttttttt

SEQ ID NO: 88313 - DNA, 15 bp, Homo sapiens
aaaccagtagtcaaa

SEQ ID NO: 88314 - DNA, 15 bp, Homo sapiens
aaaaccagtagtcaa

SEQ ID NO: 88315 - DNA, 15 bp, Homo sapiens
caaaaccagtagtca

SEQ ID NO: 88316 - DNA, 15 bp, Homo sapiens
tcaaaaccagtagtc

SEQ ID NO: 88317 - DNA, 15 bp, Homo sapiens
gtcaaaaccagtagt

SEQ ID NO: 88318 - DNA, 15 bp, Homo sapiens
agtcaaaaccagtag

SEQ ID NO: 88319 - DNA, 15 bp, Homo sapiens
cagtcaaaaccagta

SEQ ID NO: 88320 - DNA, 15 bp, Homo sapiens
tcagtcaaaaccagt

SEQ ID NO: 88321 - DNA, 15 bp, Homo sapiens
gtcagtcaaaaccag

SEQ ID NO: 88322 - DNA, 15 bp, Homo sapiens
agtcagtcaaaacca

SEQ ID NO: 88323 - DNA, 15 bp, Homo sapiens
cagtcagtcaaaacc

SEQ ID NO: 88324 - DNA, 15 bp, Homo sapiens
tcagtcagtcaaaac

SEQ ID NO: 88325 - DNA, 15 bp, Homo sapiens
ctcagtcagtcaaaa

SEQ ID NO: 88326 - DNA, 15 bp, Homo sapiens
actcagtcagtcaaa

SEQ ID NO: 88327 - DNA, 15 bp, Homo sapiens
aactcagtcagtcaa

SEQ ID NO: 88328 - DNA, 15 bp, Homo sapiens
taactcagtcagtca

SEQ ID NO: 88329 - DNA, 15 bp, Homo sapiens
ataactcagtcagtc

SEQ ID NO: 88330 - DNA, 15 bp, Homo sapiens
aataactcagtcagt

SEQ ID NO: 88331 - DNA, 15 bp, Homo sapiens
aaataactcagtcag

SEQ ID NO: 88332 - DNA, 15 bp, Homo sapiens
taaataactcagtca

SEQ ID NO: 88333 - DNA, 15 bp, Homo sapiens
ttaaataactcagtc

SEQ ID NO: 88334 - DNA, 15 bp, Homo sapiens
attaaataactcagt

SEQ ID NO: 88335 - DNA, 15 bp, Homo sapiens
aattaaataactcag

SEQ ID NO: 88336 - DNA, 15 bp, Homo sapiens
taattaaataactca

SEQ ID NO: 88337 - DNA, 15 bp, Homo sapiens
ttaattaaataactc

SEQ ID NO: 88338 - DNA, 15 bp, Homo sapiens
cttaattaaataact

SEQ ID NO: 88339 - DNA, 15 bp, Homo sapiens
acttaattaaataac

SEQ ID NO: 88340 - DNA, 15 bp, Homo sapiens
tacttaattaaataa

SEQ ID NO: 88341 - DNA, 15 bp, Homo sapiens
ttacttaattaaata

SEQ ID NO: 88342 - DNA, 15 bp, Homo sapiens
tttacttaattaaat

SEQ ID NO: 88343 - DNA, 15 bp, Homo sapiens
ttttacttaattaaa

SEQ ID NO: 88344 - DNA, 15 bp, Homo sapiens
attttacttaattaa

SEQ ID NO: 88345 - DNA, 15 bp, Homo sapiens
tattttacttaatta

SEQ ID NO: 88346 - DNA, 15 bp, Homo sapiens
ttattttacttaatt

SEQ ID NO: 88347 - DNA, 15 bp, Homo sapiens
gttattttacttaat

SEQ ID NO: 88348 - DNA, 15 bp, Homo sapiens
agttattttacttaa

SEQ ID NO: 88349 - DNA, 15 bp, Homo sapiens
cagttattttactta

SEQ ID NO: 88350 - DNA, 15 bp, Homo sapiens
ccagttattttactt

SEQ ID NO: 88351 - DNA, 15 bp, Homo sapiens
gccagttattttact

SEQ ID NO: 88352 - DNA, 15 bp, Homo sapiens
agccagttattttac

SEQ ID NO: 88353 - DNA, 15 bp, Homo sapiens
aagccagttatttta

SEQ ID NO: 88354 - DNA, 15 bp, Homo sapiens
taagccagttatttt

SEQ ID NO: 88355 - DNA, 15 bp, Homo sapiens
ctaagccagttattt

SEQ ID NO: 88356 - DNA, 15 bp, Homo sapiens
actaagccagttatt

SEQ ID NO: 88357 - DNA, 15 bp, Homo sapiens
tactaagccagttat

SEQ ID NO: 88358 - DNA, 15 bp, Homo sapiens
gtactaagccagtta

SEQ ID NO: 88359 - DNA, 15 bp, Homo sapiens
agtactaagccagtt

SEQ ID NO: 88360 - DNA, 15 bp, Homo sapiens
tagtactaagccagt

SEQ ID NO: 88361 - DNA, 15 bp, Homo sapiens
ttagtactaagccag

SEQ ID NO: 88362 - DNA, 15 bp, Homo sapiens
attagtactaagcca

SEQ ID NO: 88363 - DNA, 15 bp, Homo sapiens
aattagtactaagcc

SEQ ID NO: 88364 - DNA, 15 bp, Homo sapiens
taattagtactaagc

SEQ ID NO: 88365 - DNA, 15 bp, Homo sapiens
ataattagtactaag

SEQ ID NO: 88366 - DNA, 15 bp, Homo sapiens
aataattagtactaa

SEQ ID NO: 88367 - DNA, 15 bp, Homo sapiens
caataattagtacta

SEQ ID NO: 88368 - DNA, 15 bp, Homo sapiens
acaataattagtact

SEQ ID NO: 88369 - DNA, 15 bp, Homo sapiens
aacaataattagtac

SEQ ID NO: 88370 - DNA, 15 bp, Homo sapiens
gaacaataattagta

SEQ ID NO: 88371 - DNA, 15 bp, Homo sapiens
agaacaataattagt

SEQ ID NO: 88372 - DNA, 15 bp, Homo sapiens
cagaacaataattag

SEQ ID NO: 88373 - DNA, 15 bp, Homo sapiens
acagaacaataatta

SEQ ID NO: 88374 - DNA, 15 bp, Homo sapiens
tacagaacaataatt

SEQ ID NO: 88375 - DNA, 15 bp, Homo sapiens
ctacagaacaataat

SEQ ID NO: 88376 - DNA, 15 bp, Homo sapiens
actacagaacaataa

SEQ ID NO: 88377 - DNA, 15 bp, Homo sapiens
tactacagaacaata

SEQ ID NO: 88378 - DNA, 15 bp, Homo sapiens
atactacagaacaat

SEQ ID NO: 88379 - DNA, 15 bp, Homo sapiens
gatactacagaacaa

SEQ ID NO: 88380 - DNA, 15 bp, Homo sapiens
tgatactacagaaca

SEQ ID NO: 88381 - DNA, 15 bp, Homo sapiens
ctgatactacagaac

SEQ ID NO: 88382 - DNA, 15 bp, Homo sapiens
tctgatactacagaa

SEQ ID NO: 88383 - DNA, 15 bp, Homo sapiens
ctctgatactacaga

SEQ ID NO: 88384 - DNA, 15 bp, Homo sapiens
tctctgatactacag

SEQ ID NO: 88385 - DNA, 15 bp, Homo sapiens
ttctctgatactaca

SEQ ID NO: 88386 - DNA, 15 bp, Homo sapiens
tttctctgatactac

SEQ ID NO: 88387 - DNA, 15 bp, Homo sapiens
ctttctctgatacta

SEQ ID NO: 88388 - DNA, 15 bp, Homo sapiens
actttctctgatact

SEQ ID NO: 88389 - DNA, 15 bp, Homo sapiens
aactttctctgatac

SEQ ID NO: 88390 - DNA, 15 bp, Homo sapiens
caactttctctgata

SEQ ID NO: 88391 - DNA, 15 bp, Homo sapiens
acaactttctctgat

SEQ ID NO: 88392 - DNA, 15 bp, Homo sapiens
aacaactttctctga

SEQ ID NO: 88393 - DNA, 15 bp, Homo sapiens
gaacaactttctctg

SEQ ID NO: 88394 - DNA, 15 bp, Homo sapiens
agaacaactttctct

SEQ ID NO: 88395 - DNA, 15 bp, Homo sapiens
aagaacaactttctc

SEQ ID NO: 88396 - DNA, 15 bp, Homo sapiens
gaagaacaactttct

SEQ ID NO: 88397 - DNA, 15 bp, Homo sapiens
ggaagaacaactttc

SEQ ID NO: 88398 - DNA, 15 bp, Homo sapiens
aggaagaacaacttt

SEQ ID NO: 88399 - DNA, 15 bp, Homo sapiens
taggaagaacaactt

SEQ ID NO: 88400 - DNA, 15 bp, Homo sapiens
gtaggaagaacaact

SEQ ID NO: 88401 - DNA, 15 bp, Homo sapiens
agtaggaagaacaac

SEQ ID NO: 88402 - DNA, 15 bp, Homo sapiens
cagtaggaagaacaa

SEQ ID NO: 88403 - DNA, 15 bp, Homo sapiens
ccagtaggaagaaca

SEQ ID NO: 88404 - DNA, 15 bp, Homo sapiens
accagtaggaagaac

SEQ ID NO: 88405 - DNA, 15 bp, Homo sapiens
aaccagtaggaagaa

SEQ ID NO: 88406 - DNA, 15 bp, Homo sapiens
caaccagtaggaaga

SEQ ID NO: 88407 - DNA, 15 bp, Homo sapiens
tcaaccagtaggaag

SEQ ID NO: 88408 - DNA, 15 bp, Homo sapiens
ctcaaccagtaggaa

SEQ ID NO: 88409 - DNA, 15 bp, Homo sapiens
gctcaaccagtagga

SEQ ID NO: 88410 - DNA, 15 bp, Homo sapiens
agctcaaccagtagg

SEQ ID NO: 88411 - DNA, 15 bp, Homo sapiens
gagctcaaccagtag

SEQ ID NO: 88412 - DNA, 15 bp, Homo sapiens
tgagctcaaccagta

SEQ ID NO: 88413 - DNA, 15 bp, Homo sapiens
ctgagctcaaccagt

SEQ ID NO: 88414 - DNA, 15 bp, Homo sapiens
actgagctcaaccag

SEQ ID NO: 88415 - DNA, 15 bp, Homo sapiens
tactgagctcaacca

SEQ ID NO: 88416 - DNA, 15 bp, Homo sapiens
ctactgagctcaacc

SEQ ID NO: 88417 - DNA, 15 bp, Homo sapiens
actactgagctcaac

SEQ ID NO: 88418 - DNA, 15 bp, Homo sapiens
aactactgagctcaa

SEQ ID NO: 88419 - DNA, 15 bp, Homo sapiens
gaactactgagctca

SEQ ID NO: 88420 - DNA, 15 bp, Homo sapiens
agaactactgagctc

SEQ ID NO: 88421 - DNA, 15 bp, Homo sapiens
aagaactactgagct

SEQ ID NO: 88422 - DNA, 15 bp, Homo sapiens
gaagaactactgagc

SEQ ID NO: 88423 - DNA, 15 bp, Homo sapiens
tgaagaactactgag

SEQ ID NO: 88424 - DNA, 15 bp, Homo sapiens
atgaagaactactga

SEQ ID NO: 88425 - DNA, 15 bp, Homo sapiens
tatgaagaactactg

SEQ ID NO: 88426 - DNA, 15 bp, Homo sapiens
atatgaagaactact

SEQ ID NO: 88427 - DNA, 15 bp, Homo sapiens
aatatgaagaactac

SEQ ID NO: 88428 - DNA, 15 bp, Homo sapiens
gaatatgaagaacta

SEQ ID NO: 88429 - DNA, 15 bp, Homo sapiens
agaatatgaagaact

SEQ ID NO: 88430 - DNA, 15 bp, Homo sapiens
cagaatatgaagaac

SEQ ID NO: 88431 - DNA, 15 bp, Homo sapiens
tcagaatatgaagaa

SEQ ID NO: 88432 - DNA, 15 bp, Homo sapiens
ctcagaatatgaaga

SEQ ID NO: 88433 - DNA, 15 bp, Homo sapiens
gctcagaatatgaag

SEQ ID NO: 88434 - DNA, 15 bp, Homo sapiens
tgctcagaatatgaa

SEQ ID NO: 88435 - DNA, 15 bp, Homo sapiens
ttgctcagaatatga

SEQ ID NO: 88436 - DNA, 15 bp, Homo sapiens
tttgctcagaatatg

SEQ ID NO: 88437 - DNA, 15 bp, Homo sapiens
ttttgctcagaatat

SEQ ID NO: 88438 - DNA, 15 bp, Homo sapiens
cttttgctcagaata

SEQ ID NO: 88439 - DNA, 15 bp, Homo sapiens
ccttttgctcagaat

SEQ ID NO: 88440 - DNA, 15 bp, Homo sapiens
cccttttgctcagaa

SEQ ID NO: 88441 - DNA, 15 bp, Homo sapiens
gcccttttgctcaga

SEQ ID NO: 88442 - DNA, 15 bp, Homo sapiens
tgcccttttgctcag

SEQ ID NO: 88443 - DNA, 15 bp, Homo sapiens
ctgcccttttgctca

SEQ ID NO: 88444 - DNA, 15 bp, Homo sapiens
tctgcccttttgctc

SEQ ID NO: 88445 - DNA, 15 bp, Homo sapiens
ctctgcccttttgct

SEQ ID NO: 88446 - DNA, 15 bp, Homo sapiens
cctctgcccttttgc

SEQ ID NO: 88447 - DNA, 15 bp, Homo sapiens
acctctgcccttttg

SEQ ID NO: 88448 - DNA, 15 bp, Homo sapiens
tacctctgccctttt

SEQ ID NO: 88449 - DNA, 15 bp, Homo sapiens
ctacctctgcccttt

SEQ ID NO: 88450 - DNA, 15 bp, Homo sapiens
cctacctctgccctt

SEQ ID NO: 88451 - DNA, 15 bp, Homo sapiens
tcctacctctgccct

SEQ ID NO: 88452 - DNA, 15 bp, Homo sapiens
atcctacctctgccc

SEQ ID NO: 88453 - DNA, 15 bp, Homo sapiens
tatcctacctctgcc

SEQ ID NO: 88454 - DNA, 15 bp, Homo sapiens
ctatcctacctctgc

SEQ ID NO: 88455 - DNA, 15 bp, Homo sapiens
gctatcctacctctg

SEQ ID NO: 88456 - DNA, 15 bp, Homo sapiens
agctatcctacctct

SEQ ID NO: 88457 - DNA, 15 bp, Homo sapiens
aagctatcctacctc

SEQ ID NO: 88458 - DNA, 15 bp, Homo sapiens
aaagctatcctacct

SEQ ID NO: 88459 - DNA, 15 bp, Homo sapiens
aaaagctatcctacc

SEQ ID NO: 88460 - DNA, 15 bp, Homo sapiens
gaaaagctatcctac

SEQ ID NO: 88461 - DNA, 15 bp, Homo sapiens
agaaaagctatccta

SEQ ID NO: 88462 - DNA, 15 bp, Homo sapiens
cagaaaagctatcct

SEQ ID NO: 88463 - DNA, 15 bp, Homo sapiens
tcagaaaagctatcc

SEQ ID NO: 88464 - DNA, 15 bp, Homo sapiens
ctcagaaaagctatc

SEQ ID NO: 88465 - DNA, 15 bp, Homo sapiens
cctcagaaaagctat

SEQ ID NO: 88466 - DNA, 15 bp, Homo sapiens
acctcagaaaagcta

SEQ ID NO: 88467 - DNA, 15 bp, Homo sapiens
tacctcagaaaagct

SEQ ID NO: 88468 - DNA, 15 bp, Homo sapiens
ctacctcagaaaagc

SEQ ID NO: 88469 - DNA, 15 bp, Homo sapiens
tctacctcagaaaag

SEQ ID NO: 88470 - DNA, 15 bp, Homo sapiens
ctctacctcagaaaa

SEQ ID NO: 88471 - DNA, 15 bp, Homo sapiens
tctctacctcagaaa

SEQ ID NO: 88472 - DNA, 15 bp, Homo sapiens
atctctacctcagaa

SEQ ID NO: 88473 - DNA, 15 bp, Homo sapiens
tatctctacctcaga

SEQ ID NO: 88474 - DNA, 15 bp, Homo sapiens
ttatctctacctcag

SEQ ID NO: 88475 - DNA, 15 bp, Homo sapiens
cttatctctacctca

SEQ ID NO: 88476 - DNA, 15 bp, Homo sapiens
tcttatctctacctc

SEQ ID NO: 88477 - DNA, 15 bp, Homo sapiens
ttcttatctctacct

SEQ ID NO: 88478 - DNA, 15 bp, Homo sapiens
gttcttatctctacc

SEQ ID NO: 88479 - DNA, 15 bp, Homo sapiens
ggttcttatctctac

SEQ ID NO: 88480 - DNA, 15 bp, Homo sapiens
aggttcttatctcta

SEQ ID NO: 88481 - DNA, 15 bp, Homo sapiens
aaggttcttatctct

SEQ ID NO: 88482 - DNA, 15 bp, Homo sapiens
caaggttcttatctc

SEQ ID NO: 88483 - DNA, 15 bp, Homo sapiens
ccaaggttcttatct

SEQ ID NO: 88484 - DNA, 15 bp, Homo sapiens
cccaaggttcttatc

SEQ ID NO: 88485 - DNA, 15 bp, Homo sapiens
acccaaggttcttat

SEQ ID NO: 88486 - DNA, 15 bp, Homo sapiens
tacccaaggttctta

SEQ ID NO: 88487 - DNA, 15 bp, Homo sapiens
ctacccaaggttctt

SEQ ID NO: 88488 - DNA, 15 bp, Homo sapiens
cctacccaaggttct

SEQ ID NO: 88489 - DNA, 15 bp, Homo sapiens
ccctacccaaggttc

SEQ ID NO: 88490 - DNA, 15 bp, Homo sapiens
tccctacccaaggtt

SEQ ID NO: 88491 - DNA, 15 bp, Homo sapiens
ttccctacccaaggt

SEQ ID NO: 88492 - DNA, 15 bp, Homo sapiens
cttccctacccaagg

SEQ ID NO: 88493 - DNA, 15 bp, Homo sapiens
ccttccctacccaag

SEQ ID NO: 88494 - DNA, 15 bp, Homo sapiens
tccttccctacccaa

SEQ ID NO: 88495 - DNA, 15 bp, Homo sapiens
ttccttccctaccca

SEQ ID NO: 88496 - DNA, 15 bp, Homo sapiens
cttccttccctaccc

SEQ ID NO: 88497 - DNA, 15 bp, Homo sapiens
tcttccttccctacc

SEQ ID NO: 88498 - DNA, 15 bp, Homo sapiens
atcttccttccctac

SEQ ID NO: 88499 - DNA, 15 bp, Homo sapiens
aatcttccttcccta

SEQ ID NO: 88500 - DNA, 15 bp, Homo sapiens
aaatcttccttccct

SEQ ID NO: 88501 - DNA, 15 bp, Homo sapiens
taaatcttccttccc

SEQ ID NO: 88502 - DNA, 15 bp, Homo sapiens
ataaatcttccttcc

SEQ ID NO: 88503 - DNA, 15 bp, Homo sapiens
cataaatcttccttc

SEQ ID NO: 88504 - DNA, 15 bp, Homo sapiens
tcataaatcttcctt

SEQ ID NO: 88505 - DNA, 15 bp, Homo sapiens
ttcataaatcttcct

SEQ ID NO: 88506 - DNA, 15 bp, Homo sapiens
tttcataaatcttcc

SEQ ID NO: 88507 - DNA, 15 bp, Homo sapiens
atttcataaatcttc

SEQ ID NO: 88508 - DNA, 15 bp, Homo sapiens
tatttcataaatctt

SEQ ID NO: 88509 - DNA, 15 bp, Homo sapiens
atatttcataaatct

SEQ ID NO: 88510 - DNA, 15 bp, Homo sapiens
aatatttcataaatc

SEQ ID NO: 88511 - DNA, 15 bp, Homo sapiens
aaatatttcataaat

SEQ ID NO: 88512 - DNA, 15 bp, Homo sapiens
taaatatttcataaa

SEQ ID NO: 88513 - DNA, 15 bp, Homo sapiens
ttaaatatttcataa

SEQ ID NO: 88514 - DNA, 15 bp, Homo sapiens
tttaaatatttcata

SEQ ID NO: 88515 - DNA, 15 bp, Homo sapiens
ttttaaatatttcat

SEQ ID NO: 88516 - DNA, 15 bp, Homo sapiens
tttttaaatatttca

SEQ ID NO: 88517 - DNA, 15 bp, Homo sapiens
ttttttaaatatttc

SEQ ID NO: 88518 - DNA, 15 bp, Homo sapiens
attttttaaatattt

SEQ ID NO: 88519 - DNA, 15 bp, Homo sapiens
aattttttaaatatt

SEQ ID NO: 88520 - DNA, 15 bp, Homo sapiens
taattttttaaatat

SEQ ID NO: 88521 - DNA, 15 bp, Homo sapiens
ataattttttaaata

SEQ ID NO: 88522 - DNA, 15 bp, Homo sapiens
aataattttttaaat

SEQ ID NO: 88523 - DNA, 15 bp, Homo sapiens
gaataattttttaaa

SEQ ID NO: 88524 - DNA, 15 bp, Homo sapiens
agaataattttttaa

SEQ ID NO: 88525 - DNA, 15 bp, Homo sapiens
aagaataatttttta

SEQ ID NO: 88526 - DNA, 15 bp, Homo sapiens
gaagaataatttttt

SEQ ID NO: 88527 - DNA, 15 bp, Homo sapiens
ggaagaataattttt

SEQ ID NO: 88528 - DNA, 15 bp, Homo sapiens
aggaagaataatttt

SEQ ID NO: 88529 - DNA, 15 bp, Homo sapiens
aaggaagaataattt

SEQ ID NO: 88530 - DNA, 15 bp, Homo sapiens
gaaggaagaataatt

SEQ ID NO: 88531 - DNA, 15 bp, Homo sapiens
cgaaggaagaataat

SEQ ID NO: 88532 - DNA, 15 bp, Homo sapiens
gcgaaggaagaataa

SEQ ID NO: 88533 - DNA, 15 bp, Homo sapiens
agcgaaggaagaata

SEQ ID NO: 88534 - DNA, 15 bp, Homo sapiens
aagcgaaggaagaat

SEQ ID NO: 88535 - DNA, 15 bp, Homo sapiens
aaagcgaaggaagaa

SEQ ID NO: 88536 - DNA, 15 bp, Homo sapiens
caaagcgaaggaaga

SEQ ID NO: 88537 - DNA, 15 bp, Homo sapiens
acaaagcgaaggaag

SEQ ID NO: 88538 - DNA, 15 bp, Homo sapiens
aacaaagcgaaggaa

SEQ ID NO: 88539 - DNA, 15 bp, Homo sapiens
aaacaaagcgaagga

SEQ ID NO: 88540 - DNA, 15 bp, Homo sapiens
aaaacaaagcgaagg

SEQ ID NO: 88541 - DNA, 15 bp, Homo sapiens
aaaaacaaagcgaag

SEQ ID NO: 88542 - DNA, 15 bp, Homo sapiens
taaaaacaaagcgaa

SEQ ID NO: 88543 - DNA, 15 bp, Homo sapiens
ctaaaaacaaagcga

SEQ ID NO: 88544 - DNA, 15 bp, Homo sapiens
tctaaaaacaaagcg

SEQ ID NO: 88545 - DNA, 15 bp, Homo sapiens
gtctaaaaacaaagc

SEQ ID NO: 88546 - DNA, 15 bp, Homo sapiens
tgtctaaaaacaaag

SEQ ID NO: 88547 - DNA, 15 bp, Homo sapiens
atgtctaaaaacaaa

SEQ ID NO: 88548 - DNA, 15 bp, Homo sapiens
tatgtctaaaaacaa

SEQ ID NO: 88549 - DNA, 15 bp, Homo sapiens
ttatgtctaaaaaca

SEQ ID NO: 88550 - DNA, 15 bp, Homo sapiens
attatgtctaaaaac

SEQ ID NO: 88551 - DNA, 15 bp, Homo sapiens
cattatgtctaaaaa

SEQ ID NO: 88552 - DNA, 15 bp, Homo sapiens
acattatgtctaaaa

SEQ ID NO: 88553 - DNA, 15 bp, Homo sapiens
aacattatgtctaaa

SEQ ID NO: 88554 - DNA, 15 bp, Homo sapiens
taacattatgtctaa

SEQ ID NO: 88555 - DNA, 15 bp, Homo sapiens
ttaacattatgtcta

SEQ ID NO: 88556 - DNA, 15 bp, Homo sapiens
tttaacattatgtct

SEQ ID NO: 88557 - DNA, 15 bp, Homo sapiens
atttaacattatgtc

SEQ ID NO: 88558 - DNA, 15 bp, Homo sapiens
aatttaacattatgt

SEQ ID NO: 88559 - DNA, 15 bp, Homo sapiens
aaatttaacattatg

SEQ ID NO: 88560 - DNA, 15 bp, Homo sapiens
taaatttaacattat

SEQ ID NO: 88561 - DNA, 15 bp, Homo sapiens
ataaatttaacatta

SEQ ID NO: 88562 - DNA, 15 bp, Homo sapiens
aataaatttaacatt

SEQ ID NO: 88563 - DNA, 15 bp, Homo sapiens
aaataaatttaacat

SEQ ID NO: 88564 - DNA, 15 bp, Homo sapiens
aaaataaatttaaca

SEQ ID NO: 88565 - DNA, 15 bp, Homo sapiens
caaaataaatttaac

SEQ ID NO: 88566 - DNA, 15 bp, Homo sapiens
tcaaaataaatttaa

SEQ ID NO: 88567 - DNA, 15 bp, Homo sapiens
ttcaaaataaattta

SEQ ID NO: 88568 - DNA, 15 bp, Homo sapiens
tttcaaaataaattt

SEQ ID NO: 88569 - DNA, 15 bp, Homo sapiens
atttcaaaataaatt

SEQ ID NO: 88570 - DNA, 15 bp, Homo sapiens
aatttcaaaataaat

SEQ ID NO: 88571 - DNA, 15 bp, Homo sapiens
aaatttcaaaataaa

SEQ ID NO: 88572 - DNA, 15 bp, Homo sapiens
taaatttcaaaataa

SEQ ID NO: 88573 - DNA, 15 bp, Homo sapiens
ttaaatttcaaaata

SEQ ID NO: 88574 - DNA, 15 bp, Homo sapiens
tttaaatttcaaaat

SEQ ID NO: 88575 - DNA, 15 bp, Homo sapiens
ctttaaatttcaaaa

SEQ ID NO: 88576 - DNA, 15 bp, Homo sapiens
gctttaaatttcaaa

SEQ ID NO: 88577 - DNA, 15 bp, Homo sapiens
tgctttaaatttcaa

SEQ ID NO: 88578 - DNA, 15 bp, Homo sapiens
ttgctttaaatttca

SEQ ID NO: 88579 - DNA, 15 bp, Homo sapiens
gttgctttaaatttc

SEQ ID NO: 88580 - DNA, 15 bp, Homo sapiens
tgttgctttaaattt

SEQ ID NO: 88581 - DNA, 15 bp, Homo sapiens
atgttgctttaaatt

SEQ ID NO: 88582 - DNA, 15 bp, Homo sapiens
tatgttgctttaaat

SEQ ID NO: 88583 - DNA, 15 bp, Homo sapiens
ttatgttgctttaaa

SEQ ID NO: 88584 - DNA, 15 bp, Homo sapiens
tttatgttgctttaa

SEQ ID NO: 88585 - DNA, 15 bp, Homo sapiens
ttttatgttgcttta

SEQ ID NO: 88586 - DNA, 15 bp, Homo sapiens
cttttatgttgcttt

SEQ ID NO: 88587 - DNA, 15 bp, Homo sapiens
tcttttatgttgctt

SEQ ID NO: 88588 - DNA, 15 bp, Homo sapiens
ttcttttatgttgct

SEQ ID NO: 88589 - DNA, 15 bp, Homo sapiens
gttcttttatgttgc

SEQ ID NO: 88590 - DNA, 15 bp, Homo sapiens
tgttcttttatgttg

SEQ ID NO: 88591 - DNA, 15 bp, Homo sapiens
atgttcttttatgtt

SEQ ID NO: 88592 - DNA, 15 bp, Homo sapiens
catgttcttttatgt

SEQ ID NO: 88593 - DNA, 15 bp, Homo sapiens
acatgttcttttatg

SEQ ID NO: 88594 - DNA, 15 bp, Homo sapiens
cacatgttcttttat

SEQ ID NO: 88595 - DNA, 15 bp, Homo sapiens
tcacatgttctttta

SEQ ID NO: 88596 - DNA, 15 bp, Homo sapiens
atcacatgttctttt

SEQ ID NO: 88597 - DNA, 15 bp, Homo sapiens
aatcacatgttcttt

SEQ ID NO: 88598 - DNA, 15 bp, Homo sapiens
aaatcacatgttctt

SEQ ID NO: 88599 - DNA, 15 bp, Homo sapiens
aaaatcacatgttct

SEQ ID NO: 88600 - DNA, 15 bp, Homo sapiens
aaaaatcacatgttc

SEQ ID NO: 88601 - DNA, 15 bp, Homo sapiens
gaaaaatcacatgtt

SEQ ID NO: 88602 - DNA, 15 bp, Homo sapiens
agaaaaatcacatgt

SEQ ID NO: 88603 - DNA, 15 bp, Homo sapiens
tagaaaaatcacatg

SEQ ID NO: 88604 - DNA, 15 bp, Homo sapiens
gtagaaaaatcacat

SEQ ID NO: 88605 - DNA, 15 bp, Homo sapiens
agtagaaaaatcaca

SEQ ID NO: 88606 - DNA, 15 bp, Homo sapiens
aagtagaaaaatcac

SEQ ID NO: 88607 - DNA, 15 bp, Homo sapiens
taagtagaaaaatca

SEQ ID NO: 88608 - DNA, 15 bp, Homo sapiens
ataagtagaaaaatc

SEQ ID NO: 88609 - DNA, 15 bp, Homo sapiens
aataagtagaaaaat

SEQ ID NO: 88610 - DNA, 15 bp, Homo sapiens
caataagtagaaaaa

SEQ ID NO: 88611 - DNA, 15 bp, Homo sapiens
tcaataagtagaaaa

SEQ ID NO: 88612 - DNA, 15 bp, Homo sapiens
ttcaataagtagaaa

SEQ ID NO: 88613 - DNA, 15 bp, Homo sapiens
tttcaataagtagaa

SEQ ID NO: 88614 - DNA, 15 bp, Homo sapiens
ctttcaataagtaga

SEQ ID NO: 88615 - DNA, 15 bp, Homo sapiens
tctttcaataagtag

SEQ ID NO: 88616 - DNA, 15 bp, Homo sapiens
ctctttcaataagta

SEQ ID NO: 88617 - DNA, 15 bp, Homo sapiens
tctctttcaataagt

SEQ ID NO: 88618 - DNA, 15 bp, Homo sapiens
ctctctttcaataag

SEQ ID NO: 88619 - DNA, 15 bp, Homo sapiens
tctctctttcaataa

SEQ ID NO: 88620 - DNA, 15 bp, Homo sapiens
ttctctctttcaata

SEQ ID NO: 88621 - DNA, 15 bp, Homo sapiens
tttctctctttcaat

SEQ ID NO: 88622 - DNA, 15 bp, Homo sapiens
ctttctctctttcaa

SEQ ID NO: 88623 - DNA, 15 bp, Homo sapiens
cctttctctctttca

SEQ ID NO: 88624 - DNA, 15 bp, Homo sapiens
tcctttctctctttc

SEQ ID NO: 88625 - DNA, 15 bp, Homo sapiens
ttcctttctctcttt

SEQ ID NO: 88626 - DNA, 15 bp, Homo sapiens
tttcctttctctctt

SEQ ID NO: 88627 - DNA, 15 bp, Homo sapiens
ttttcctttctctct

SEQ ID NO: 88628 - DNA, 15 bp, Homo sapiens
tttttcctttctctc

SEQ ID NO: 88629 - DNA, 15 bp, Homo sapiens
ttttttcctttctct

SEQ ID NO: 88630 - DNA, 15 bp, Homo sapiens
tttttttcctttctc

SEQ ID NO: 88631 - DNA, 15 bp, Homo sapiens
atttttttcctttct

SEQ ID NO: 88632 - DNA, 15 bp, Homo sapiens
tatttttttcctttc

SEQ ID NO: 88633 - DNA, 15 bp, Homo sapiens
atatttttttccttt

SEQ ID NO: 88634 - DNA, 15 bp, Homo sapiens
catatttttttcctt

SEQ ID NO: 88635 - DNA, 15 bp, Homo sapiens
tcatatttttttcct

SEQ ID NO: 88636 - DNA, 15 bp, Homo sapiens
ttcatatttttttcc

SEQ ID NO: 88637 - DNA, 15 bp, Homo sapiens
tttcatatttttttc

SEQ ID NO: 88638 - DNA, 15 bp, Homo sapiens
gtttcatattttttt

SEQ ID NO: 88639 - DNA, 15 bp, Homo sapiens
tgtttcatatttttt

SEQ ID NO: 88640 - DNA, 15 bp, Homo sapiens
ctgtttcatattttt

SEQ ID NO: 88641 - DNA, 15 bp, Homo sapiens
cctgtttcatatttt

SEQ ID NO: 88642 - DNA, 15 bp, Homo sapiens
ccctgtttcatattt

SEQ ID NO: 88643 - DNA, 15 bp, Homo sapiens
tccctgtttcatatt

SEQ ID NO: 88644 - DNA, 15 bp, Homo sapiens
atccctgtttcatat

SEQ ID NO: 88645 - DNA, 15 bp, Homo sapiens
catccctgtttcata

SEQ ID NO: 88646 - DNA, 15 bp, Homo sapiens
ccatccctgtttcat

SEQ ID NO: 88647 - DNA, 15 bp, Homo sapiens
tccatccctgtttca

SEQ ID NO: 88648 - DNA, 15 bp, Homo sapiens
ttccatccctgtttc

SEQ ID NO: 88649 - DNA, 15 bp, Homo sapiens
tttccatccctgttt

SEQ ID NO: 88650 - DNA, 15 bp, Homo sapiens
ctttccatccctgtt

SEQ ID NO: 88651 - DNA, 15 bp, Homo sapiens
tctttccatccctgt

SEQ ID NO: 88652 - DNA, 15 bp, Homo sapiens
ttctttccatccctg

SEQ ID NO: 88653 - DNA, 15 bp, Homo sapiens
attctttccatccct

SEQ ID NO: 88654 - DNA, 15 bp, Homo sapiens
gattctttccatccc

SEQ ID NO: 88655 - DNA, 15 bp, Homo sapiens
ggattctttccatcc

SEQ ID NO: 88656 - DNA, 15 bp, Homo sapiens
aggattctttccatc

SEQ ID NO: 88657 - DNA, 15 bp, Homo sapiens
taggattctttccat

SEQ ID NO: 88658 - DNA, 15 bp, Homo sapiens
ataggattctttcca

SEQ ID NO: 88659 - DNA, 15 bp, Homo sapiens
cataggattctttcc

SEQ ID NO: 88660 - DNA, 15 bp, Homo sapiens
gcataggattctttc

SEQ ID NO: 88661 - DNA, 15 bp, Homo sapiens
ggcataggattcttt

SEQ ID NO: 88662 - DNA, 15 bp, Homo sapiens
aggcataggattctt

SEQ ID NO: 88663 - DNA, 15 bp, Homo sapiens
caggcataggattct

SEQ ID NO: 88664 - DNA, 15 bp, Homo sapiens
ccaggcataggattc

SEQ ID NO: 88665 - DNA, 15 bp, Homo sapiens
accaggcataggatt

SEQ ID NO: 88666 - DNA, 15 bp, Homo sapiens
caccaggcataggat

SEQ ID NO: 88667 - DNA, 15 bp, Homo sapiens
tcaccaggcatagga

SEQ ID NO: 88668 - DNA, 15 bp, Homo sapiens
ttcaccaggcatagg

SEQ ID NO: 88669 - DNA, 15 bp, Homo sapiens
cttcaccaggcatag

SEQ ID NO: 88670 - DNA, 15 bp, Homo sapiens
ccttcaccaggcata

SEQ ID NO: 88671 - DNA, 15 bp, Homo sapiens
accttcaccaggcat

SEQ ID NO: 88672 - DNA, 15 bp, Homo sapiens
gaccttcaccaggca

SEQ ID NO: 88673 - DNA, 15 bp, Homo sapiens
tgaccttcaccaggc

SEQ ID NO: 88674 - DNA, 15 bp, Homo sapiens
ttgaccttcaccagg

SEQ ID NO: 88675 - DNA, 15 bp, Homo sapiens
cttgaccttcaccag

SEQ ID NO: 88676 - DNA, 15 bp, Homo sapiens
ccttgaccttcacca

SEQ ID NO: 88677 - DNA, 15 bp, Homo sapiens
cccttgaccttcacc

SEQ ID NO: 88678 - DNA, 15 bp, Homo sapiens
acccttgaccttcac

SEQ ID NO: 88679 - DNA, 15 bp, Homo sapiens
aacccttgaccttca

SEQ ID NO: 88680 - DNA, 15 bp, Homo sapiens
gaacccttgaccttc

SEQ ID NO: 88681 - DNA, 15 bp, Homo sapiens
agaacccttgacctt

SEQ ID NO: 88682 - DNA, 15 bp, Homo sapiens
gagaacccttgacct

SEQ ID NO: 88683 - DNA, 15 bp, Homo sapiens
tgagaacccttgacc

SEQ ID NO: 88684 - DNA, 15 bp, Homo sapiens
atgagaacccttgac

SEQ ID NO: 88685 - DNA, 15 bp, Homo sapiens
tatgagaacccttga

SEQ ID NO: 88686 - DNA, 15 bp, Homo sapiens
ttatgagaacccttg

SEQ ID NO: 88687 - DNA, 15 bp, Homo sapiens
gttatgagaaccctt

SEQ ID NO: 88688 - DNA, 15 bp, Homo sapiens
ggttatgagaaccct

SEQ ID NO: 88689 - DNA, 15 bp, Homo sapiens
aggttatgagaaccc

SEQ ID NO: 88690 - DNA, 15 bp, Homo sapiens
taggttatgagaacc

SEQ ID NO: 88691 - DNA, 15 bp, Homo sapiens
gtaggttatgagaac

SEQ ID NO: 88692 - DNA, 15 bp, Homo sapiens
tgtaggttatgagaa

SEQ ID NO: 88693 - DNA, 15 bp, Homo sapiens
ctgtaggttatgaga

SEQ ID NO: 88694 - DNA, 15 bp, Homo sapiens
tctgtaggttatgag

SEQ ID NO: 88695 - DNA, 15 bp, Homo sapiens
ctctgtaggttatga

SEQ ID NO: 88696 - DNA, 15 bp, Homo sapiens
tctctgtaggttatg

SEQ ID NO: 88697 - DNA, 15 bp, Homo sapiens
ttctctgtaggttat

SEQ ID NO: 88698 - DNA, 15 bp, Homo sapiens
attctctgtaggtta

SEQ ID NO: 88699 - DNA, 15 bp, Homo sapiens
aattctctgtaggtt

SEQ ID NO: 88700 - DNA, 15 bp, Homo sapiens
aaattctctgtaggt

SEQ ID NO: 88701 - DNA, 15 bp, Homo sapiens
caaattctctgtagg

SEQ ID NO: 88702 - DNA, 15 bp, Homo sapiens
ccaaattctctgtag

SEQ ID NO: 88703 - DNA, 15 bp, Homo sapiens
cccaaattctctgta

SEQ ID NO: 88704 - DNA, 15 bp, Homo sapiens
ccccaaattctctgt

SEQ ID NO: 88705 - DNA, 15 bp, Homo sapiens
accccaaattctctg

SEQ ID NO: 88706 - DNA, 15 bp, Homo sapiens
gaccccaaattctct

SEQ ID NO: 88707 - DNA, 15 bp, Homo sapiens
tgaccccaaattctc

SEQ ID NO: 88708 - DNA, 15 bp, Homo sapiens
ctgaccccaaattct

SEQ ID NO: 88709 - DNA, 15 bp, Homo sapiens
gctgaccccaaattc

SEQ ID NO: 88710 - DNA, 15 bp, Homo sapiens
ggctgaccccaaatt

SEQ ID NO: 88711 - DNA, 15 bp, Homo sapiens
aggctgaccccaaat

SEQ ID NO: 88712 - DNA, 15 bp, Homo sapiens
caggctgaccccaaa

SEQ ID NO: 88713 - DNA, 15 bp, Homo sapiens
acaggctgaccccaa

SEQ ID NO: 88714 - DNA, 15 bp, Homo sapiens
gacaggctgacccca

SEQ ID NO: 88715 - DNA, 15 bp, Homo sapiens
ggacaggctgacccc

SEQ ID NO: 88716 - DNA, 15 bp, Homo sapiens
aggacaggctgaccc

SEQ ID NO: 88717 - DNA, 15 bp, Homo sapiens
taggacaggctgacc

SEQ ID NO: 88718 - DNA, 15 bp, Homo sapiens
ataggacaggctgac

SEQ ID NO: 88719 - DNA, 15 bp, Homo sapiens
aataggacaggctga

SEQ ID NO: 88720 - DNA, 15 bp, Homo sapiens
caataggacaggctg

SEQ ID NO: 88721 - DNA, 15 bp, Homo sapiens
acaataggacaggct

SEQ ID NO: 88722 - DNA, 15 bp, Homo sapiens
tacaataggacaggc

SEQ ID NO: 88723 - DNA, 15 bp, Homo sapiens
atacaataggacagg

SEQ ID NO: 88724 - DNA, 15 bp, Homo sapiens
tatacaataggacag

SEQ ID NO: 88725 - DNA, 15 bp, Homo sapiens
atatacaataggaca

SEQ ID NO: 88726 - DNA, 15 bp, Homo sapiens
aatatacaataggac

SEQ ID NO: 88727 - DNA, 15 bp, Homo sapiens
taatatacaatagga

SEQ ID NO: 88728 - DNA, 15 bp, Homo sapiens
ataatatacaatagg

SEQ ID NO: 88729 - DNA, 15 bp, Homo sapiens
cataatatacaatag

SEQ ID NO: 88730 - DNA, 15 bp, Homo sapiens
ccataatatacaata

SEQ ID NO: 88731 - DNA, 15 bp, Homo sapiens
gccataatatacaat

SEQ ID NO: 88732 - DNA, 15 bp, Homo sapiens
tgccataatatacaa

SEQ ID NO: 88733 - DNA, 15 bp, Homo sapiens
ttgccataatataca

SEQ ID NO: 88734 - DNA, 15 bp, Homo sapiens
tttgccataatatac

SEQ ID NO: 88735 - DNA, 15 bp, Homo sapiens
ctttgccataatata

SEQ ID NO: 88736 - DNA, 15 bp, Homo sapiens
tctttgccataatat

SEQ ID NO: 88737 - DNA, 15 bp, Homo sapiens
atctttgccataata

SEQ ID NO: 88738 - DNA, 15 bp, Homo sapiens
tatctttgccataat

SEQ ID NO: 88739 - DNA, 15 bp, Homo sapiens
ttatctttgccataa

SEQ ID NO: 88740 - DNA, 15 bp, Homo sapiens
attatctttgccata

SEQ ID NO: 88741 - DNA, 15 bp, Homo sapiens
gattatctttgccat

SEQ ID NO: 88742 - DNA, 15 bp, Homo sapiens
tgattatctttgcca

SEQ ID NO: 88743 - DNA, 15 bp, Homo sapiens
atgattatctttgcc

SEQ ID NO: 88744 - DNA, 15 bp, Homo sapiens
gatgattatctttgc

SEQ ID NO: 88745 - DNA, 15 bp, Homo sapiens
tgatgattatctttg

SEQ ID NO: 88746 - DNA, 15 bp, Homo sapiens
atgatgattatcttt

SEQ ID NO: 88747 - DNA, 15 bp, Homo sapiens
gatgatgattatctt

SEQ ID NO: 88748 - DNA, 15 bp, Homo sapiens
agatgatgattatct

SEQ ID NO: 88749 - DNA, 15 bp, Homo sapiens
gagatgatgattatc

SEQ ID NO: 88750 - DNA, 15 bp, Homo sapiens
tgagatgatgattat

SEQ ID NO: 88751 - DNA, 15 bp, Homo sapiens
atgagatgatgatta

SEQ ID NO: 88752 - DNA, 15 bp, Homo sapiens
aatgagatgatgatt

SEQ ID NO: 88753 - DNA, 15 bp, Homo sapiens
aaatgagatgatgat

SEQ ID NO: 88754 - DNA, 15 bp, Homo sapiens
caaatgagatgatga

SEQ ID NO: 88755 - DNA, 15 bp, Homo sapiens
ccaaatgagatgatg

SEQ ID NO: 88756 - DNA, 15 bp, Homo sapiens
cccaaatgagatgat

SEQ ID NO: 88757 - DNA, 15 bp, Homo sapiens
acccaaatgagatga

SEQ ID NO: 88758 - DNA, 15 bp, Homo sapiens
gacccaaatgagatg

SEQ ID NO: 88759 - DNA, 15 bp, Homo sapiens
ggacccaaatgagat

SEQ ID NO: 88760 - DNA, 15 bp, Homo sapiens
tggacccaaatgaga

SEQ ID NO: 88761 - DNA, 15 bp, Homo sapiens
atggacccaaatgag

SEQ ID NO: 88762 - DNA, 15 bp, Homo sapiens
aatggacccaaatga

SEQ ID NO: 88763 - DNA, 15 bp, Homo sapiens
aaatggacccaaatg

SEQ ID NO: 88764 - DNA, 15 bp, Homo sapiens
aaaatggacccaaat

SEQ ID NO: 88765 - DNA, 15 bp, Homo sapiens
gaaaatggacccaaa

SEQ ID NO: 88766 - DNA, 15 bp, Homo sapiens
ggaaaatggacccaa

SEQ ID NO: 88767 - DNA, 15 bp, Homo sapiens
aggaaaatggaccca

SEQ ID NO: 88768 - DNA, 15 bp, Homo sapiens
gaggaaaatggaccc

SEQ ID NO: 88769 - DNA, 15 bp, Homo sapiens
agaggaaaatggacc

SEQ ID NO: 88770 - DNA, 15 bp, Homo sapiens
gagaggaaaatggac

SEQ ID NO: 88771 - DNA, 15 bp, Homo sapiens
ggagaggaaaatgga

SEQ ID NO: 88772 - DNA, 15 bp, Homo sapiens
tggagaggaaaatgg

SEQ ID NO: 88773 - DNA, 15 bp, Homo sapiens
atggagaggaaaatg

SEQ ID NO: 88774 - DNA, 15 bp, Homo sapiens
gatggagaggaaaat

SEQ ID NO: 88775 - DNA, 15 bp, Homo sapiens
agatggagaggaaaa

SEQ ID NO: 88776 - DNA, 15 bp, Homo sapiens
gagatggagaggaaa

SEQ ID NO: 88777 - DNA, 15 bp, Homo sapiens
agagatggagaggaa

SEQ ID NO: 88778 - DNA, 15 bp, Homo sapiens
cagagatggagagga

SEQ ID NO: 88779 - DNA, 15 bp, Homo sapiens
gcagagatggagagg

SEQ ID NO: 88780 - DNA, 15 bp, Homo sapiens
agcagagatggagag

SEQ ID NO: 88781 - DNA, 15 bp, Homo sapiens
aagcagagatggaga

SEQ ID NO: 88782 - DNA, 15 bp, Homo sapiens
taagcagagatggag

SEQ ID NO: 88783 - DNA, 15 bp, Homo sapiens
ttaagcagagatgga

SEQ ID NO: 88784 - DNA, 15 bp, Homo sapiens
gttaagcagagatgg

SEQ ID NO: 88785 - DNA, 15 bp, Homo sapiens
agttaagcagagatg

SEQ ID NO: 88786 - DNA, 15 bp, Homo sapiens
cagttaagcagagat

SEQ ID NO: 88787 - DNA, 15 bp, Homo sapiens
tcagttaagcagaga

SEQ ID NO: 88788 - DNA, 15 bp, Homo sapiens
ttcagttaagcagag

SEQ ID NO: 88789 - DNA, 15 bp, Homo sapiens
cttcagttaagcaga

SEQ ID NO: 88790 - DNA, 15 bp, Homo sapiens
tcttcagttaagcag

SEQ ID NO: 88791 - DNA, 15 bp, Homo sapiens
atcttcagttaagca

SEQ ID NO: 88792 - DNA, 15 bp, Homo sapiens
gatcttcagttaagc

SEQ ID NO: 88793 - DNA, 15 bp, Homo sapiens
ggatcttcagttaag

SEQ ID NO: 88794 - DNA, 15 bp, Homo sapiens
gggatcttcagttaa

SEQ ID NO: 88795 - DNA, 15 bp, Homo sapiens
tgggatcttcagtta

SEQ ID NO: 88796 - DNA, 15 bp, Homo sapiens
atgggatcttcagtt

SEQ ID NO: 88797 - DNA, 15 bp, Homo sapiens
catgggatcttcagt

SEQ ID NO: 88798 - DNA, 15 bp, Homo sapiens
tcatgggatcttcag

SEQ ID NO: 88799 - DNA, 15 bp, Homo sapiens
ctcatgggatcttca

SEQ ID NO: 88800 - DNA, 15 bp, Homo sapiens
tctcatgggatcttc

SEQ ID NO: 88801 - DNA, 15 bp, Homo sapiens
atctcatgggatctt

SEQ ID NO: 88802 - DNA, 15 bp, Homo sapiens
tatctcatgggatct

SEQ ID NO: 88803 - DNA, 15 bp, Homo sapiens
atatctcatgggatc

SEQ ID NO: 88804 - DNA, 15 bp, Homo sapiens
tatatctcatgggat

SEQ ID NO: 88805 - DNA, 15 bp, Homo sapiens
gtatatctcatggga

SEQ ID NO: 88806 - DNA, 15 bp, Homo sapiens
agtatatctcatggg

SEQ ID NO: 88807 - DNA, 15 bp, Homo sapiens
gagtatatctcatgg

SEQ ID NO: 88808 - DNA, 15 bp, Homo sapiens
tgagtatatctcatg

SEQ ID NO: 88809 - DNA, 15 bp, Homo sapiens
gtgagtatatctcat

SEQ ID NO: 88810 - DNA, 15 bp, Homo sapiens
tgtgagtatatctca

SEQ ID NO: 88811 - DNA, 15 bp, Homo sapiens
gtgtgagtatatctc

SEQ ID NO: 88812 - DNA, 15 bp, Homo sapiens
agtgtgagtatatct

SEQ ID NO: 88813 - DNA, 15 bp, Homo sapiens
cagtgtgagtatatc

SEQ ID NO: 88814 - DNA, 15 bp, Homo sapiens
tcagtgtgagtatat

SEQ ID NO: 88815 - DNA, 15 bp, Homo sapiens
ttcagtgtgagtata

SEQ ID NO: 88816 - DNA, 15 bp, Homo sapiens
attcagtgtgagtat

SEQ ID NO: 88817 - DNA, 15 bp, Homo sapiens
gattcagtgtgagta

SEQ ID NO: 88818 - DNA, 15 bp, Homo sapiens
agattcagtgtgagt

SEQ ID NO: 88819 - DNA, 15 bp, Homo sapiens
tagattcagtgtgag

SEQ ID NO: 88820 - DNA, 15 bp, Homo sapiens
ttagattcagtgtga

SEQ ID NO: 88821 - DNA, 15 bp, Homo sapiens
tttagattcagtgtg

SEQ ID NO: 88822 - DNA, 15 bp, Homo sapiens
atttagattcagtgt

SEQ ID NO: 88823 - DNA, 15 bp, Homo sapiens
tatttagattcagtg

SEQ ID NO: 88824 - DNA, 15 bp, Homo sapiens
ctatttagattcagt

SEQ ID NO: 88825 - DNA, 15 bp, Homo sapiens
gctatttagattcag

SEQ ID NO: 88826 - DNA, 15 bp, Homo sapiens
ggctatttagattca

SEQ ID NO: 88827 - DNA, 15 bp, Homo sapiens
aggctatttagattc

SEQ ID NO: 88828 - DNA, 15 bp, Homo sapiens
taggctatttagatt

SEQ ID NO: 88829 - DNA, 15 bp, Homo sapiens
ataggctatttagat

SEQ ID NO: 88830 - DNA, 15 bp, Homo sapiens
gataggctatttaga

SEQ ID NO: 88831 - DNA, 15 bp, Homo sapiens
agataggctatttag

SEQ ID NO: 88832 - DNA, 15 bp, Homo sapiens
gagataggctattta

SEQ ID NO: 88833 - DNA, 15 bp, Homo sapiens
tgagataggctattt

SEQ ID NO: 88834 - DNA, 15 bp, Homo sapiens
ctgagataggctatt

SEQ ID NO: 88835 - DNA, 15 bp, Homo sapiens
cctgagataggctat

SEQ ID NO: 88836 - DNA, 15 bp, Homo sapiens
ccctgagataggcta

SEQ ID NO: 88837 - DNA, 15 bp, Homo sapiens
gccctgagataggct

SEQ ID NO: 88838 - DNA, 15 bp, Homo sapiens
agccctgagataggc

SEQ ID NO: 88839 - DNA, 15 bp, Homo sapiens
aagccctgagatagg

SEQ ID NO: 88840 - DNA, 15 bp, Homo sapiens
caagccctgagatag

SEQ ID NO: 88841 - DNA, 15 bp, Homo sapiens
tcaagccctgagata

SEQ ID NO: 88842 - DNA, 15 bp, Homo sapiens
ttcaagccctgagat

SEQ ID NO: 88843 - DNA, 15 bp, Homo sapiens
attcaagccctgaga

SEQ ID NO: 88844 - DNA, 15 bp, Homo sapiens
gattcaagccctgag

SEQ ID NO: 88845 - DNA, 15 bp, Homo sapiens
tgattcaagccctga

SEQ ID NO: 88846 - DNA, 15 bp, Homo sapiens
gtgattcaagccctg

SEQ ID NO: 88847 - DNA, 15 bp, Homo sapiens
tgtgattcaagccct

SEQ ID NO: 88848 - DNA, 15 bp, Homo sapiens
atgtgattcaagccc

SEQ ID NO: 88849 - DNA, 15 bp, Homo sapiens
catgtgattcaagcc

SEQ ID NO: 88850 - DNA, 15 bp, Homo sapiens
acatgtgattcaagc

SEQ ID NO: 88851 - DNA, 15 bp, Homo sapiens
cacatgtgattcaag

SEQ ID NO: 88852 - DNA, 15 bp, Homo sapiens
ccacatgtgattcaa

SEQ ID NO: 88853 - DNA, 15 bp, Homo sapiens
cccacatgtgattca

SEQ ID NO: 88854 - DNA, 15 bp, Homo sapiens
gcccacatgtgattc

SEQ ID NO: 88855 - DNA, 15 bp, Homo sapiens
ggcccacatgtgatt

SEQ ID NO: 88856 - DNA, 15 bp, Homo sapiens
tggcccacatgtgat

SEQ ID NO: 88857 - DNA, 15 bp, Homo sapiens
gtggcccacatgtga

SEQ ID NO: 88858 - DNA, 15 bp, Homo sapiens
tgtggcccacatgtg

SEQ ID NO: 88859 - DNA, 15 bp, Homo sapiens
ctgtggcccacatgt

SEQ ID NO: 88860 - DNA, 15 bp, Homo sapiens
gctgtggcccacatg

SEQ ID NO: 88861 - DNA, 15 bp, Homo sapiens
tgctgtggcccacat

SEQ ID NO: 88862 - DNA, 15 bp, Homo sapiens
ctgctgtggcccaca

SEQ ID NO: 88863 - DNA, 15 bp, Homo sapiens
cctgctgtggcccac

SEQ ID NO: 88864 - DNA, 15 bp, Homo sapiens
tcctgctgtggccca

SEQ ID NO: 88865 - DNA, 15 bp, Homo sapiens
ttcctgctgtggccc

SEQ ID NO: 88866 - DNA, 15 bp, Homo sapiens
attcctgctgtggcc

SEQ ID NO: 88867 - DNA, 15 bp, Homo sapiens
cattcctgctgtggc

SEQ ID NO: 88868 - DNA, 15 bp, Homo sapiens
ccattcctgctgtgg

SEQ ID NO: 88869 - DNA, 15 bp, Homo sapiens
cccattcctgctgtg

SEQ ID NO: 88870 - DNA, 15 bp, Homo sapiens
tcccattcctgctgt

SEQ ID NO: 88871 - DNA, 15 bp, Homo sapiens
ttcccattcctgctg

SEQ ID NO: 88872 - DNA, 15 bp, Homo sapiens
gttcccattcctgct

SEQ ID NO: 88873 - DNA, 15 bp, Homo sapiens
tgttcccattcctgc

SEQ ID NO: 88874 - DNA, 15 bp, Homo sapiens
atgttcccattcctg

SEQ ID NO: 88875 - DNA, 15 bp, Homo sapiens
catgttcccattcct

SEQ ID NO: 88876 - DNA, 15 bp, Homo sapiens
ccatgttcccattcc

SEQ ID NO: 88877 - DNA, 15 bp, Homo sapiens
tccatgttcccattc

SEQ ID NO: 88878 - DNA, 15 bp, Homo sapiens
ttccatgttcccatt

SEQ ID NO: 88879 - DNA, 15 bp, Homo sapiens
attccatgttcccat

SEQ ID NO: 88880 - DNA, 15 bp, Homo sapiens
aattccatgttccca

SEQ ID NO: 88881 - DNA, 15 bp, Homo sapiens
aaattccatgttccc

SEQ ID NO: 88882 - DNA, 15 bp, Homo sapiens
gaaattccatgttcc

SEQ ID NO: 88883 - DNA, 15 bp, Homo sapiens
agaaattccatgttc

SEQ ID NO: 88884 - DNA, 15 bp, Homo sapiens
tagaaattccatgtt

SEQ ID NO: 88885 - DNA, 15 bp, Homo sapiens
ttagaaattccatgt

SEQ ID NO: 88886 - DNA, 15 bp, Homo sapiens
cttagaaattccatg

SEQ ID NO: 88887 - DNA, 15 bp, Homo sapiens
acttagaaattccat

SEQ ID NO: 88888 - DNA, 15 bp, Homo sapiens
gacttagaaattcca

SEQ ID NO: 88889 - DNA, 15 bp, Homo sapiens
ggacttagaaattcc

SEQ ID NO: 88890 - DNA, 15 bp, Homo sapiens
aggacttagaaattc

SEQ ID NO: 88891 - DNA, 15 bp, Homo sapiens
taggacttagaaatt

SEQ ID NO: 88892 - DNA, 15 bp, Homo sapiens
ataggacttagaaat

SEQ ID NO: 88893 - DNA, 15 bp, Homo sapiens
gataggacttagaaa

SEQ ID NO: 88894 - DNA, 15 bp, Homo sapiens
agataggacttagaa

SEQ ID NO: 88895 - DNA, 15 bp, Homo sapiens
aagataggacttaga

SEQ ID NO: 88896 - DNA, 15 bp, Homo sapiens
taagataggacttag

SEQ ID NO: 88897 - DNA, 15 bp, Homo sapiens
gtaagataggactta

SEQ ID NO: 88898 - DNA, 15 bp, Homo sapiens
agtaagataggactt

SEQ ID NO: 88899 - DNA, 15 bp, Homo sapiens
aagtaagataggact

SEQ ID NO: 88900 - DNA, 15 bp, Homo sapiens
caagtaagataggac

SEQ ID NO: 88901 - DNA, 15 bp, Homo sapiens
acaagtaagatagga

SEQ ID NO: 88902 - DNA, 15 bp, Homo sapiens
aacaagtaagatagg

SEQ ID NO: 88903 - DNA, 15 bp, Homo sapiens
taacaagtaagatag

SEQ ID NO: 88904 - DNA, 15 bp, Homo sapiens
ataacaagtaagata

SEQ ID NO: 88905 - DNA, 15 bp, Homo sapiens
aataacaagtaagat

SEQ ID NO: 88906 - DNA, 15 bp, Homo sapiens
caataacaagtaaga

SEQ ID NO: 88907 - DNA, 15 bp, Homo sapiens
acaataacaagtaag

SEQ ID NO: 88908 - DNA, 15 bp, Homo sapiens
aacaataacaagtaa

SEQ ID NO: 88909 - DNA, 15 bp, Homo sapiens
caacaataacaagta

SEQ ID NO: 88910 - DNA, 15 bp, Homo sapiens
gcaacaataacaagt

SEQ ID NO: 88911 - DNA, 15 bp, Homo sapiens
agcaacaataacaag

SEQ ID NO: 88912 - DNA, 15 bp, Homo sapiens
tagcaacaataacaa

SEQ ID NO: 88913 - DNA, 15 bp, Homo sapiens
atagcaacaataaca

SEQ ID NO: 88914 - DNA, 15 bp, Homo sapiens
catagcaacaataac

SEQ ID NO: 88915 - DNA, 15 bp, Homo sapiens
acatagcaacaataa

SEQ ID NO: 88916 - DNA, 15 bp, Homo sapiens
gacatagcaacaata

SEQ ID NO: 88917 - DNA, 15 bp, Homo sapiens
agacatagcaacaat

SEQ ID NO: 88918 - DNA, 15 bp, Homo sapiens
aagacatagcaacaa

SEQ ID NO: 88919 - DNA, 15 bp, Homo sapiens
aaagacatagcaaca

SEQ ID NO: 88920 - DNA, 15 bp, Homo sapiens
aaaagacatagcaac

SEQ ID NO: 88921 - DNA, 15 bp, Homo sapiens
aaaaagacatagcaa

SEQ ID NO: 88922 - DNA, 15 bp, Homo sapiens
gaaaaagacatagca

SEQ ID NO: 88923 - DNA, 15 bp, Homo sapiens
agaaaaagacatagc

SEQ ID NO: 88924 - DNA, 15 bp, Homo sapiens
aagaaaaagacatag

SEQ ID NO: 88925 - DNA, 15 bp, Homo sapiens
taagaaaaagacata

SEQ ID NO: 88926 - DNA, 15 bp, Homo sapiens
ctaagaaaaagacat

SEQ ID NO: 88927 - DNA, 15 bp, Homo sapiens
actaagaaaaagaca

SEQ ID NO: 88928 - DNA, 15 bp, Homo sapiens
aactaagaaaaagac

SEQ ID NO: 88929 - DNA, 15 bp, Homo sapiens
aaactaagaaaaaga

SEQ ID NO: 88930 - DNA, 15 bp, Homo sapiens
caaactaagaaaaag

SEQ ID NO: 88931 - DNA, 15 bp, Homo sapiens
gcaaactaagaaaaa

SEQ ID NO: 88932 - DNA, 15 bp, Homo sapiens
tgcaaactaagaaaa

SEQ ID NO: 88933 - DNA, 15 bp, Homo sapiens
atgcaaactaagaaa

SEQ ID NO: 88934 - DNA, 15 bp, Homo sapiens
gatgcaaactaagaa

SEQ ID NO: 88935 - DNA, 15 bp, Homo sapiens
agatgcaaactaaga

SEQ ID NO: 88936 - DNA, 15 bp, Homo sapiens
cagatgcaaactaag

SEQ ID NO: 88937 - DNA, 15 bp, Homo sapiens
tcagatgcaaactaa

SEQ ID NO: 88938 - DNA, 15 bp, Homo sapiens
ctcagatgcaaacta

SEQ ID NO: 88939 - DNA, 15 bp, Homo sapiens
cctcagatgcaaact

SEQ ID NO: 88940 - DNA, 15 bp, Homo sapiens
gcctcagatgcaaac

SEQ ID NO: 88941 - DNA, 15 bp, Homo sapiens
tgcctcagatgcaaa

SEQ ID NO: 88942 - DNA, 15 bp, Homo sapiens
ttgcctcagatgcaa

SEQ ID NO: 88943 - DNA, 15 bp, Homo sapiens
gttgcctcagatgca

SEQ ID NO: 88944 - DNA, 15 bp, Homo sapiens
tgttgcctcagatgc

SEQ ID NO: 88945 - DNA, 15 bp, Homo sapiens
atgttgcctcagatg

SEQ ID NO: 88946 - DNA, 15 bp, Homo sapiens
gatgttgcctcagat

SEQ ID NO: 88947 - DNA, 15 bp, Homo sapiens
tgatgttgcctcaga

SEQ ID NO: 88948 - DNA, 15 bp, Homo sapiens
ctgatgttgcctcag

SEQ ID NO: 88949 - DNA, 15 bp, Homo sapiens
gctgatgttgcctca

SEQ ID NO: 88950 - DNA, 15 bp, Homo sapiens
agctgatgttgcctc

SEQ ID NO: 88951 - DNA, 15 bp, Homo sapiens
aagctgatgttgcct

SEQ ID NO: 88952 - DNA, 15 bp, Homo sapiens
aaagctgatgttgcc

SEQ ID NO: 88953 - DNA, 15 bp, Homo sapiens
aaaagctgatgttgc

SEQ ID NO: 88954 - DNA, 15 bp, Homo sapiens
aaaaagctgatgttg

SEQ ID NO: 88955 - DNA, 15 bp, Homo sapiens
gaaaaagctgatgtt

SEQ ID NO: 88956 - DNA, 15 bp, Homo sapiens
tgaaaaagctgatgt

SEQ ID NO: 88957 - DNA, 15 bp, Homo sapiens
ctgaaaaagctgatg

SEQ ID NO: 88958 - DNA, 15 bp, Homo sapiens
tctgaaaaagctgat

SEQ ID NO: 88959 - DNA, 15 bp, Homo sapiens
gtctgaaaaagctga

SEQ ID NO: 88960 - DNA, 15 bp, Homo sapiens
tgtctgaaaaagctg

SEQ ID NO: 88961 - DNA, 15 bp, Homo sapiens
ctgtctgaaaaagct

SEQ ID NO: 88962 - DNA, 15 bp, Homo sapiens
tctgtctgaaaaagc

SEQ ID NO: 88963 - DNA, 15 bp, Homo sapiens
ttctgtctgaaaaag

SEQ ID NO: 88964 - DNA, 15 bp, Homo sapiens
attctgtctgaaaaa

SEQ ID NO: 88965 - DNA, 15 bp, Homo sapiens
cattctgtctgaaaa

SEQ ID NO: 88966 - DNA, 15 bp, Homo sapiens
ccattctgtctgaaa

SEQ ID NO: 88967 - DNA, 15 bp, Homo sapiens
gccattctgtctgaa

SEQ ID NO: 88968 - DNA, 15 bp, Homo sapiens
agccattctgtctga

SEQ ID NO: 88969 - DNA, 15 bp, Homo sapiens
aagccattctgtctg

SEQ ID NO: 88970 - DNA, 15 bp, Homo sapiens
aaagccattctgtct

SEQ ID NO: 88971 - DNA, 15 bp, Homo sapiens
caaagccattctgtc

SEQ ID NO: 88972 - DNA, 15 bp, Homo sapiens
ccaaagccattctgt

SEQ ID NO: 88973 - DNA, 15 bp, Homo sapiens
tccaaagccattctg

SEQ ID NO: 88974 - DNA, 15 bp, Homo sapiens
ttccaaagccattct

SEQ ID NO: 88975 - DNA, 15 bp, Homo sapiens
attccaaagccattc

SEQ ID NO: 88976 - DNA, 15 bp, Homo sapiens
tattccaaagccatt

SEQ ID NO: 88977 - DNA, 15 bp, Homo sapiens
ctattccaaagccat

SEQ ID NO: 88978 - DNA, 15 bp, Homo sapiens
actattccaaagcca

SEQ ID NO: 88979 - DNA, 15 bp, Homo sapiens
tactattccaaagcc

SEQ ID NO: 88980 - DNA, 15 bp, Homo sapiens
ttactattccaaagc

SEQ ID NO: 88981 - DNA, 15 bp, Homo sapiens
tttactattccaaag

SEQ ID NO: 88982 - DNA, 15 bp, Homo sapiens
ttttactattccaaa

SEQ ID NO: 88983 - DNA, 15 bp, Homo sapiens
tttttactattccaa

SEQ ID NO: 88984 - DNA, 15 bp, Homo sapiens
ttttttactattcca

SEQ ID NO: 88985 - DNA, 15 bp, Homo sapiens
cttttttactattcc

SEQ ID NO: 88986 - DNA, 15 bp, Homo sapiens
tcttttttactattc

SEQ ID NO: 88987 - DNA, 15 bp, Homo sapiens
gtcttttttactatt

SEQ ID NO: 88988 - DNA, 15 bp, Homo sapiens
tgtcttttttactat

SEQ ID NO: 88989 - DNA, 15 bp, Homo sapiens
gtgtcttttttacta

SEQ ID NO: 88990 - DNA, 15 bp, Homo sapiens
tgtgtcttttttact

SEQ ID NO: 88991 - DNA, 15 bp, Homo sapiens
ctgtgtcttttttac

SEQ ID NO: 88992 - DNA, 15 bp, Homo sapiens
tctgtgtctttttta

SEQ ID NO: 88993 - DNA, 15 bp, Homo sapiens
ttctgtgtctttttt

SEQ ID NO: 88994 - DNA, 15 bp, Homo sapiens
cttctgtgtcttttt

SEQ ID NO: 88995 - DNA, 15 bp, Homo sapiens
gcttctgtgtctttt

SEQ ID NO: 88996 - DNA, 15 bp, Homo sapiens
ggcttctgtgtcttt

SEQ ID NO: 88997 - DNA, 15 bp, Homo sapiens
gggcttctgtgtctt

SEQ ID NO: 88998 - DNA, 15 bp, Homo sapiens
agggcttctgtgtct

SEQ ID NO: 88999 - DNA, 15 bp, Homo sapiens
tagggcttctgtgtc

SEQ ID NO: 89000 - DNA, 15 bp, Homo sapiens
ttagggcttctgtgt

SEQ ID NO: 89001 - DNA, 15 bp, Homo sapiens
tttagggcttctgtg

SEQ ID NO: 89002 - DNA, 15 bp, Homo sapiens
ttttagggcttctgt

SEQ ID NO: 89003 - DNA, 15 bp, Homo sapiens
attttagggcttctg

SEQ ID NO: 89004 - DNA, 15 bp, Homo sapiens
tattttagggcttct

SEQ ID NO: 89005 - DNA, 15 bp, Homo sapiens
atattttagggcttc

SEQ ID NO: 89006 - DNA, 15 bp, Homo sapiens
catattttagggctt

SEQ ID NO: 89007 - DNA, 15 bp, Homo sapiens
acatattttagggct

SEQ ID NO: 89008 - DNA, 15 bp, Homo sapiens
tacatattttagggc

SEQ ID NO: 89009 - DNA, 15 bp, Homo sapiens
atacatattttaggg

SEQ ID NO: 89010 - DNA, 15 bp, Homo sapiens
catacatattttagg

SEQ ID NO: 89011 - DNA, 15 bp, Homo sapiens
acatacatattttag

SEQ ID NO: 89012 - DNA, 15 bp, Homo sapiens
tacatacatatttta

SEQ ID NO: 89013 - DNA, 15 bp, Homo sapiens
atacatacatatttt

SEQ ID NO: 89014 - DNA, 15 bp, Homo sapiens
catacatacatattt

SEQ ID NO: 89015 - DNA, 15 bp, Homo sapiens
acatacatacatatt

SEQ ID NO: 89016 - DNA, 15 bp, Homo sapiens
tacatacatacatat

SEQ ID NO: 89017 - DNA, 15 bp, Homo sapiens
atacatacatacata

SEQ ID NO: 89018 - DNA, 15 bp, Homo sapiens
tatacatacatacat

SEQ ID NO: 89019 - DNA, 15 bp, Homo sapiens
atatacatacataca

SEQ ID NO: 89020 - DNA, 15 bp, Homo sapiens
catatacatacatac

SEQ ID NO: 89021 - DNA, 15 bp, Homo sapiens
acatatacatacata

SEQ ID NO: 89022 - DNA, 15 bp, Homo sapiens
cacatatacatacat

SEQ ID NO: 89023 - DNA, 15 bp, Homo sapiens
acacatatacataca

SEQ ID NO: 89024 - DNA, 15 bp, Homo sapiens
cacacatatacatac

SEQ ID NO: 89025 - DNA, 15 bp, Homo sapiens
acacacatatacata

SEQ ID NO: 89026 - DNA, 15 bp, Homo sapiens
cacacacatatacat

SEQ ID NO: 89027 - DNA, 15 bp, Homo sapiens
acacacacatataca

SEQ ID NO: 89028 - DNA, 15 bp, Homo sapiens
cacacacacatatac

SEQ ID NO: 89029 - DNA, 15 bp, Homo sapiens
gcacacacacatata

SEQ ID NO: 89030 - DNA, 15 bp, Homo sapiens
tgcacacacacatat

SEQ ID NO: 89031 - DNA, 15 bp, Homo sapiens
atgcacacacacata

SEQ ID NO: 89032 - DNA, 15 bp, Homo sapiens
catgcacacacacat

SEQ ID NO: 89033 - DNA, 15 bp, Homo sapiens
gcatgcacacacaca

SEQ ID NO: 89034 - DNA, 15 bp, Homo sapiens
cgcatgcacacacac

SEQ ID NO: 89035 - DNA, 15 bp, Homo sapiens
acgcatgcacacaca

SEQ ID NO: 89036 - DNA, 15 bp, Homo sapiens
cacgcatgcacacac

SEQ ID NO: 89037 - DNA, 15 bp, Homo sapiens
tcacgcatgcacaca

SEQ ID NO: 89038 - DNA, 15 bp, Homo sapiens
ctcacgcatgcacac

SEQ ID NO: 89039 - DNA, 15 bp, Homo sapiens
actcacgcatgcaca

SEQ ID NO: 89040 - DNA, 15 bp, Homo sapiens
tactcacgcatgcac

SEQ ID NO: 89041 - DNA, 15 bp, Homo sapiens
gtactcacgcatgca

SEQ ID NO: 89042 - DNA, 15 bp, Homo sapiens
agtactcacgcatgc

SEQ ID NO: 89043 - DNA, 15 bp, Homo sapiens
aagtactcacgcatg

SEQ ID NO: 89044 - DNA, 15 bp, Homo sapiens
caagtactcacgcat

SEQ ID NO: 89045 - DNA, 15 bp, Homo sapiens
acaagtactcacgca

SEQ ID NO: 89046 - DNA, 15 bp, Homo sapiens
cacaagtactcacgc

SEQ ID NO: 89047 - DNA, 15 bp, Homo sapiens
acacaagtactcacg

SEQ ID NO: 89048 - DNA, 15 bp, Homo sapiens
cacacaagtactcac

SEQ ID NO: 89049 - DNA, 15 bp, Homo sapiens
acacacaagtactca

SEQ ID NO: 89050 - DNA, 15 bp, Homo sapiens
tacacacaagtactc

SEQ ID NO: 89051 - DNA, 15 bp, Homo sapiens
ttacacacaagtact

SEQ ID NO: 89052 - DNA, 15 bp, Homo sapiens
tttacacacaagtac

SEQ ID NO: 89053 - DNA, 15 bp, Homo sapiens
atttacacacaagta

SEQ ID NO: 89054 - DNA, 15 bp, Homo sapiens
aatttacacacaagt

SEQ ID NO: 89055 - DNA, 15 bp, Homo sapiens
aaatttacacacaag

SEQ ID NO: 89056 - DNA, 15 bp, Homo sapiens
aaaatttacacacaa

SEQ ID NO: 89057 - DNA, 15 bp, Homo sapiens
aaaaatttacacaca

SEQ ID NO: 89058 - DNA, 15 bp, Homo sapiens
gaaaaatttacacac

SEQ ID NO: 89059 - DNA, 15 bp, Homo sapiens
tgaaaaatttacaca

SEQ ID NO: 89060 - DNA, 15 bp, Homo sapiens
atgaaaaatttacac

SEQ ID NO: 89061 - DNA, 15 bp, Homo sapiens
aatgaaaaatttaca

SEQ ID NO: 89062 - DNA, 15 bp, Homo sapiens
taatgaaaaatttac

SEQ ID NO: 89063 - DNA, 15 bp, Homo sapiens
ataatgaaaaattta

SEQ ID NO: 89064 - DNA, 15 bp, Homo sapiens
gataatgaaaaattt

SEQ ID NO: 89065 - DNA, 15 bp, Homo sapiens
agataatgaaaaatt

SEQ ID NO: 89066 - DNA, 15 bp, Homo sapiens
tagataatgaaaaat

SEQ ID NO: 89067 - DNA, 15 bp, Homo sapiens
atagataatgaaaaa

SEQ ID NO: 89068 - DNA, 15 bp, Homo sapiens
tatagataatgaaaa

SEQ ID NO: 89069 - DNA, 15 bp, Homo sapiens
ctatagataatgaaa

SEQ ID NO: 89070 - DNA, 15 bp, Homo sapiens
cctatagataatgaa

SEQ ID NO: 89071 - DNA, 15 bp, Homo sapiens
acctatagataatga

SEQ ID NO: 89072 - DNA, 15 bp, Homo sapiens
tacctatagataatg

SEQ ID NO: 89073 - DNA, 15 bp, Homo sapiens
ttacctatagataat

SEQ ID NO: 89074 - DNA, 15 bp, Homo sapiens
tttacctatagataa

SEQ ID NO: 89075 - DNA, 15 bp, Homo sapiens
ttttacctatagata

SEQ ID NO: 89076 - DNA, 15 bp, Homo sapiens
cttttacctatagat

SEQ ID NO: 89077 - DNA, 15 bp, Homo sapiens
gcttttacctataga

SEQ ID NO: 89078 - DNA, 15 bp, Homo sapiens
tgcttttacctatag

SEQ ID NO: 89079 - DNA, 15 bp, Homo sapiens
gtgcttttacctata

SEQ ID NO: 89080 - DNA, 15 bp, Homo sapiens
tgtgcttttacctat

SEQ ID NO: 89081 - DNA, 15 bp, Homo sapiens
gtgtgcttttaccta

SEQ ID NO: 89082 - DNA, 15 bp, Homo sapiens
agtgtgcttttacct

SEQ ID NO: 89083 - DNA, 15 bp, Homo sapiens
aagtgtgcttttacc

SEQ ID NO: 89084 - DNA, 15 bp, Homo sapiens
caagtgtgcttttac

SEQ ID NO: 89085 - DNA, 15 bp, Homo sapiens
ccaagtgtgctttta

SEQ ID NO: 89086 - DNA, 15 bp, Homo sapiens
tccaagtgtgctttt

SEQ ID NO: 89087 - DNA, 15 bp, Homo sapiens
ttccaagtgtgcttt

SEQ ID NO: 89088 - DNA, 15 bp, Homo sapiens
attccaagtgtgctt

SEQ ID NO: 89089 - DNA, 15 bp, Homo sapiens
aattccaagtgtgct

SEQ ID NO: 89090 - DNA, 15 bp, Homo sapiens
taattccaagtgtgc

SEQ ID NO: 89091 - DNA, 15 bp, Homo sapiens
ctaattccaagtgtg

SEQ ID NO: 89092 - DNA, 15 bp, Homo sapiens
gctaattccaagtgt

SEQ ID NO: 89093 - DNA, 15 bp, Homo sapiens
tgctaattccaagtg

SEQ ID NO: 89094 - DNA, 15 bp, Homo sapiens
ttgctaattccaagt

SEQ ID NO: 89095 - DNA, 15 bp, Homo sapiens
attgctaattccaag

SEQ ID NO: 89096 - DNA, 15 bp, Homo sapiens
tattgctaattccaa

SEQ ID NO: 89097 - DNA, 15 bp, Homo sapiens
ctattgctaattcca

SEQ ID NO: 89098 - DNA, 15 bp, Homo sapiens
tctattgctaattcc

SEQ ID NO: 89099 - DNA, 15 bp, Homo sapiens
atctattgctaattc

SEQ ID NO: 89100 - DNA, 15 bp, Homo sapiens
catctattgctaatt

SEQ ID NO: 89101 - DNA, 15 bp, Homo sapiens
gcatctattgctaat

SEQ ID NO: 89102 - DNA, 15 bp, Homo sapiens
tgcatctattgctaa

SEQ ID NO: 89103 - DNA, 15 bp, Homo sapiens
ttgcatctattgcta

SEQ ID NO: 89104 - DNA, 15 bp, Homo sapiens
attgcatctattgct

SEQ ID NO: 89105 - DNA, 15 bp, Homo sapiens
aattgcatctattgc

SEQ ID NO: 89106 - DNA, 15 bp, Homo sapiens
aaattgcatctattg

SEQ ID NO: 89107 - DNA, 15 bp, Homo sapiens
caaattgcatctatt

SEQ ID NO: 89108 - DNA, 15 bp, Homo sapiens
ccaaattgcatctat

SEQ ID NO: 89109 - DNA, 15 bp, Homo sapiens
cccaaattgcatcta

SEQ ID NO: 89110 - DNA, 15 bp, Homo sapiens
tcccaaattgcatct

SEQ ID NO: 89111 - DNA, 15 bp, Homo sapiens
gtcccaaattgcatc

SEQ ID NO: 89112 - DNA, 15 bp, Homo sapiens
agtcccaaattgcat

SEQ ID NO: 89113 - DNA, 15 bp, Homo sapiens
aagtcccaaattgca

SEQ ID NO: 89114 - DNA, 15 bp, Homo sapiens
taagtcccaaattgc

SEQ ID NO: 89115 - DNA, 15 bp, Homo sapiens
ttaagtcccaaattg

SEQ ID NO: 89116 - DNA, 15 bp, Homo sapiens
gttaagtcccaaatt

SEQ ID NO: 89117 - DNA, 15 bp, Homo sapiens
agttaagtcccaaat

SEQ ID NO: 89118 - DNA, 15 bp, Homo sapiens
gagttaagtcccaaa

SEQ ID NO: 89119 - DNA, 15 bp, Homo sapiens
agagttaagtcccaa

SEQ ID NO: 89120 - DNA, 15 bp, Homo sapiens
aagagttaagtccca

SEQ ID NO: 89121 - DNA, 15 bp, Homo sapiens
aaagagttaagtccc

SEQ ID NO: 89122 - DNA, 15 bp, Homo sapiens
gaaagagttaagtcc

SEQ ID NO: 89123 - DNA, 15 bp, Homo sapiens
tgaaagagttaagtc

SEQ ID NO: 89124 - DNA, 15 bp, Homo sapiens
ctgaaagagttaagt

SEQ ID NO: 89125 - DNA, 15 bp, Homo sapiens
actgaaagagttaag

SEQ ID NO: 89126 - DNA, 15 bp, Homo sapiens
tactgaaagagttaa

SEQ ID NO: 89127 - DNA, 15 bp, Homo sapiens
atactgaaagagtta

SEQ ID NO: 89128 - DNA, 15 bp, Homo sapiens
catactgaaagagtt

SEQ ID NO: 89129 - DNA, 15 bp, Homo sapiens
acatactgaaagagt

SEQ ID NO: 89130 - DNA, 15 bp, Homo sapiens
gacatactgaaagag

SEQ ID NO: 89131 - DNA, 15 bp, Homo sapiens
agacatactgaaaga

SEQ ID NO: 89132 - DNA, 15 bp, Homo sapiens
aagacatactgaaag

SEQ ID NO: 89133 - DNA, 15 bp, Homo sapiens
taagacatactgaaa

SEQ ID NO: 89134 - DNA, 15 bp, Homo sapiens
ataagacatactgaa

SEQ ID NO: 89135 - DNA, 15 bp, Homo sapiens
aataagacatactga

SEQ ID NO: 89136 - DNA, 15 bp, Homo sapiens
aaataagacatactg

SEQ ID NO: 89137 - DNA, 15 bp, Homo sapiens
gaaataagacatact

SEQ ID NO: 89138 - DNA, 15 bp, Homo sapiens
agaaataagacatac

SEQ ID NO: 89139 - DNA, 15 bp, Homo sapiens
tagaaataagacata

SEQ ID NO: 89140 - DNA, 15 bp, Homo sapiens
ttagaaataagacat

SEQ ID NO: 89141 - DNA, 15 bp, Homo sapiens
cttagaaataagaca

SEQ ID NO: 89142 - DNA, 15 bp, Homo sapiens
gcttagaaataagac

SEQ ID NO: 89143 - DNA, 15 bp, Homo sapiens
tgcttagaaataaga

SEQ ID NO: 89144 - DNA, 15 bp, Homo sapiens
ttgcttagaaataag

SEQ ID NO: 89145 - DNA, 15 bp, Homo sapiens
tttgcttagaaataa

SEQ ID NO: 89146 - DNA, 15 bp, Homo sapiens
ctttgcttagaaata

SEQ ID NO: 89147 - DNA, 15 bp, Homo sapiens
actttgcttagaaat

SEQ ID NO: 89148 - DNA, 15 bp, Homo sapiens
tactttgcttagaaa

SEQ ID NO: 89149 - DNA, 15 bp, Homo sapiens
atactttgcttagaa

SEQ ID NO: 89150 - DNA, 15 bp, Homo sapiens
aatactttgcttaga

SEQ ID NO: 89151 - DNA, 15 bp, Homo sapiens
aaatactttgcttag

SEQ ID NO: 89152 - DNA, 15 bp, Homo sapiens
taaatactttgctta

SEQ ID NO: 89153 - DNA, 15 bp, Homo sapiens
ctaaatactttgctt

SEQ ID NO: 89154 - DNA, 15 bp, Homo sapiens
actaaatactttgct

SEQ ID NO: 89155 - DNA, 15 bp, Homo sapiens
aactaaatactttgc

SEQ ID NO: 89156 - DNA, 15 bp, Homo sapiens
aaactaaatactttg

SEQ ID NO: 89157 - DNA, 15 bp, Homo sapiens
caaactaaatacttt

SEQ ID NO: 89158 - DNA, 15 bp, Homo sapiens
ccaaactaaatactt

SEQ ID NO: 89159 - DNA, 15 bp, Homo sapiens
accaaactaaatact

SEQ ID NO: 89160 - DNA, 15 bp, Homo sapiens
aaccaaactaaatac

SEQ ID NO: 89161 - DNA, 15 bp, Homo sapiens
taaccaaactaaata

SEQ ID NO: 89162 - DNA, 15 bp, Homo sapiens
ctaaccaaactaaat

SEQ ID NO: 89163 - DNA, 15 bp, Homo sapiens
actaaccaaactaaa

SEQ ID NO: 89164 - DNA, 15 bp, Homo sapiens
tactaaccaaactaa

SEQ ID NO: 89165 - DNA, 15 bp, Homo sapiens
ttactaaccaaacta

SEQ ID NO: 89166 - DNA, 15 bp, Homo sapiens
attactaaccaaact

SEQ ID NO: 89167 - DNA, 15 bp, Homo sapiens
aattactaaccaaac

SEQ ID NO: 89168 - DNA, 15 bp, Homo sapiens
taattactaaccaaa

SEQ ID NO: 89169 - DNA, 15 bp, Homo sapiens
gtaattactaaccaa

SEQ ID NO: 89170 - DNA, 15 bp, Homo sapiens
agtaattactaacca

SEQ ID NO: 89171 - DNA, 15 bp, Homo sapiens
tagtaattactaacc

SEQ ID NO: 89172 - DNA, 15 bp, Homo sapiens
ttagtaattactaac

SEQ ID NO: 89173 - DNA, 15 bp, Homo sapiens
tttagtaattactaa

SEQ ID NO: 89174 - DNA, 15 bp, Homo sapiens
gtttagtaattacta

SEQ ID NO: 89175 - DNA, 15 bp, Homo sapiens
tgtttagtaattact

SEQ ID NO: 89176 - DNA, 15 bp, Homo sapiens
gtgtttagtaattac

SEQ ID NO: 89177 - DNA, 15 bp, Homo sapiens
agtgtttagtaatta

SEQ ID NO: 89178 - DNA, 15 bp, Homo sapiens
cagtgtttagtaatt

SEQ ID NO: 89179 - DNA, 15 bp, Homo sapiens
tcagtgtttagtaat

SEQ ID NO: 89180 - DNA, 15 bp, Homo sapiens
ctcagtgtttagtaa

SEQ ID NO: 89181 - DNA, 15 bp, Homo sapiens
tctcagtgtttagta

SEQ ID NO: 89182 - DNA, 15 bp, Homo sapiens
ttctcagtgtttagt

SEQ ID NO: 89183 - DNA, 15 bp, Homo sapiens
gttctcagtgtttag

SEQ ID NO: 89184 - DNA, 15 bp, Homo sapiens
agttctcagtgttta

SEQ ID NO: 89185 - DNA, 15 bp, Homo sapiens
tagttctcagtgttt

SEQ ID NO: 89186 - DNA, 15 bp, Homo sapiens
ttagttctcagtgtt

SEQ ID NO: 89187 - DNA, 15 bp, Homo sapiens
tttagttctcagtgt

SEQ ID NO: 89188 - DNA, 15 bp, Homo sapiens
atttagttctcagtg

SEQ ID NO: 89189 - DNA, 15 bp, Homo sapiens
aatttagttctcagt

SEQ ID NO: 89190 - DNA, 15 bp, Homo sapiens
caatttagttctcag

SEQ ID NO: 89191 - DNA, 15 bp, Homo sapiens
gcaatttagttctca

SEQ ID NO: 89192 - DNA, 15 bp, Homo sapiens
tgcaatttagttctc

SEQ ID NO: 89193 - DNA, 15 bp, Homo sapiens
ttgcaatttagttct

SEQ ID NO: 89194 - DNA, 15 bp, Homo sapiens
tttgcaatttagttc

SEQ ID NO: 89195 - DNA, 15 bp, Homo sapiens
gtttgcaatttagtt

SEQ ID NO: 89196 - DNA, 15 bp, Homo sapiens
tgtttgcaatttagt

SEQ ID NO: 89197 - DNA, 15 bp, Homo sapiens
gtgtttgcaatttag

SEQ ID NO: 89198 - DNA, 15 bp, Homo sapiens
ggtgtttgcaattta

SEQ ID NO: 89199 - DNA, 15 bp, Homo sapiens
tggtgtttgcaattt

SEQ ID NO: 89200 - DNA, 15 bp, Homo sapiens
ttggtgtttgcaatt

SEQ ID NO: 89201 - DNA, 15 bp, Homo sapiens
cttggtgtttgcaat

SEQ ID NO: 89202 - DNA, 15 bp, Homo sapiens
tcttggtgtttgcaa

SEQ ID NO: 89203 - DNA, 15 bp, Homo sapiens
ttcttggtgtttgca

SEQ ID NO: 89204 - DNA, 15 bp, Homo sapiens
gttcttggtgtttgc

SEQ ID NO: 89205 - DNA, 15 bp, Homo sapiens
agttcttggtgtttg

SEQ ID NO: 89206 - DNA, 15 bp, Homo sapiens
tagttcttggtgttt

SEQ ID NO: 89207 - DNA, 15 bp, Homo sapiens
ttagttcttggtgtt

SEQ ID NO: 89208 - DNA, 15 bp, Homo sapiens
tttagttcttggtgt

SEQ ID NO: 89209 - DNA, 15 bp, Homo sapiens
ttttagttcttggtg

SEQ ID NO: 89210 - DNA, 15 bp, Homo sapiens
attttagttcttggt

SEQ ID NO: 89211 - DNA, 15 bp, Homo sapiens
cattttagttcttgg

SEQ ID NO: 89212 - DNA, 15 bp, Homo sapiens
acattttagttcttg

SEQ ID NO: 89213 - DNA, 15 bp, Homo sapiens
aacattttagttctt

SEQ ID NO: 89214 - DNA, 15 bp, Homo sapiens
gaacattttagttct

SEQ ID NO: 89215 - DNA, 15 bp, Homo sapiens
tgaacattttagttc

SEQ ID NO: 89216 - DNA, 15 bp, Homo sapiens
ttgaacattttagtt

SEQ ID NO: 89217 - DNA, 15 bp, Homo sapiens
cttgaacattttagt

SEQ ID NO: 89218 - DNA, 15 bp, Homo sapiens
acttgaacattttag

SEQ ID NO: 89219 - DNA, 15 bp, Homo sapiens
cacttgaacatttta

SEQ ID NO: 89220 - DNA, 15 bp, Homo sapiens
ccacttgaacatttt

SEQ ID NO: 89221 - DNA, 15 bp, Homo sapiens
cccacttgaacattt

SEQ ID NO: 89222 - DNA, 15 bp, Homo sapiens
tcccacttgaacatt

SEQ ID NO: 89223 - DNA, 15 bp, Homo sapiens
ttcccacttgaacat

SEQ ID NO: 89224 - DNA, 15 bp, Homo sapiens
tttcccacttgaaca

SEQ ID NO: 89225 - DNA, 15 bp, Homo sapiens
atttcccacttgaac

SEQ ID NO: 89226 - DNA, 15 bp, Homo sapiens
aatttcccacttgaa

SEQ ID NO: 89227 - DNA, 15 bp, Homo sapiens
taatttcccacttga

SEQ ID NO: 89228 - DNA, 15 bp, Homo sapiens
gtaatttcccacttg

SEQ ID NO: 89229 - DNA, 15 bp, Homo sapiens
tgtaatttcccactt

SEQ ID NO: 89230 - DNA, 15 bp, Homo sapiens
ctgtaatttcccact

SEQ ID NO: 89231 - DNA, 15 bp, Homo sapiens
actgtaatttcccac

SEQ ID NO: 89232 - DNA, 15 bp, Homo sapiens
aactgtaatttccca

SEQ ID NO: 89233 - DNA, 15 bp, Homo sapiens
taactgtaatttccc

SEQ ID NO: 89234 - DNA, 15 bp, Homo sapiens
ttaactgtaatttcc

SEQ ID NO: 89235 - DNA, 15 bp, Homo sapiens
tttaactgtaatttc

SEQ ID NO: 89236 - DNA, 15 bp, Homo sapiens
atttaactgtaattt

SEQ ID NO: 89237 - DNA, 15 bp, Homo sapiens
tatttaactgtaatt

SEQ ID NO: 89238 - DNA, 15 bp, Homo sapiens
gtatttaactgtaat

SEQ ID NO: 89239 - DNA, 15 bp, Homo sapiens
ggtatttaactgtaa

SEQ ID NO: 89240 - DNA, 15 bp, Homo sapiens
tggtatttaactgta

SEQ ID NO: 89241 - DNA, 15 bp, Homo sapiens
atggtatttaactgt

SEQ ID NO: 89242 - DNA, 15 bp, Homo sapiens
catggtatttaactg

SEQ ID NO: 89243 - DNA, 15 bp, Homo sapiens
ccatggtatttaact

SEQ ID NO: 89244 - DNA, 15 bp, Homo sapiens
accatggtatttaac

SEQ ID NO: 89245 - DNA, 15 bp, Homo sapiens
taccatggtatttaa

SEQ ID NO: 89246 - DNA, 15 bp, Homo sapiens
ttaccatggtattta

SEQ ID NO: 89247 - DNA, 15 bp, Homo sapiens
attaccatggtattt

SEQ ID NO: 89248 - DNA, 15 bp, Homo sapiens
cattaccatggtatt

SEQ ID NO: 89249 - DNA, 15 bp, Homo sapiens
tcattaccatggtat

SEQ ID NO: 89250 - DNA, 15 bp, Homo sapiens
ttcattaccatggta

SEQ ID NO: 89251 - DNA, 15 bp, Homo sapiens
attcattaccatggt

SEQ ID NO: 89252 - DNA, 15 bp, Homo sapiens
tattcattaccatgg

SEQ ID NO: 89253 - DNA, 15 bp, Homo sapiens
ttattcattaccatg

SEQ ID NO: 89254 - DNA, 15 bp, Homo sapiens
tttattcattaccat

SEQ ID NO: 89255 - DNA, 15 bp, Homo sapiens
ttttattcattacca

SEQ ID NO: 89256 - DNA, 15 bp, Homo sapiens
cttttattcattacc

SEQ ID NO: 89257 - DNA, 15 bp, Homo sapiens
ccttttattcattac

SEQ ID NO: 89258 - DNA, 15 bp, Homo sapiens
accttttattcatta

SEQ ID NO: 89259 - DNA, 15 bp, Homo sapiens
taccttttattcatt

SEQ ID NO: 89260 - DNA, 15 bp, Homo sapiens
gtaccttttattcat

SEQ ID NO: 89261 - DNA, 15 bp, Homo sapiens
tgtaccttttattca

SEQ ID NO: 89262 - DNA, 15 bp, Homo sapiens
ttgtaccttttattc

SEQ ID NO: 89263 - DNA, 15 bp, Homo sapiens
tttgtaccttttatt

SEQ ID NO: 89264 - DNA, 15 bp, Homo sapiens
atttgtaccttttat

SEQ ID NO: 89265 - DNA, 15 bp, Homo sapiens
gatttgtacctttta

SEQ ID NO: 89266 - DNA, 15 bp, Homo sapiens
cgatttgtacctttt

SEQ ID NO: 89267 - DNA, 15 bp, Homo sapiens
acgatttgtaccttt

SEQ ID NO: 89268 - DNA, 15 bp, Homo sapiens
aacgatttgtacctt

SEQ ID NO: 89269 - DNA, 15 bp, Homo sapiens
aaacgatttgtacct

SEQ ID NO: 89270 - DNA, 15 bp, Homo sapiens
taaacgatttgtacc

SEQ ID NO: 89271 - DNA, 15 bp, Homo sapiens
ttaaacgatttgtac

SEQ ID NO: 89272 - DNA, 15 bp, Homo sapiens
tttaaacgatttgta

SEQ ID NO: 89273 - DNA, 15 bp, Homo sapiens
gtttaaacgatttgt

SEQ ID NO: 89274 - DNA, 15 bp, Homo sapiens
agtttaaacgatttg

SEQ ID NO: 89275 - DNA, 15 bp, Homo sapiens
gagtttaaacgattt

SEQ ID NO: 89276 - DNA, 15 bp, Homo sapiens
agagtttaaacgatt

SEQ ID NO: 89277 - DNA, 15 bp, Homo sapiens
aagagtttaaacgat

SEQ ID NO: 89278 - DNA, 15 bp, Homo sapiens
taagagtttaaacga

SEQ ID NO: 89279 - DNA, 15 bp, Homo sapiens
ataagagtttaaacg

SEQ ID NO: 89280 - DNA, 15 bp, Homo sapiens
cataagagtttaaac

SEQ ID NO: 89281 - DNA, 15 bp, Homo sapiens
acataagagtttaaa

SEQ ID NO: 89282 - DNA, 15 bp, Homo sapiens
tacataagagtttaa

SEQ ID NO: 89283 - DNA, 15 bp, Homo sapiens
ttacataagagttta

SEQ ID NO: 89284 - DNA, 15 bp, Homo sapiens
tttacataagagttt

SEQ ID NO: 89285 - DNA, 15 bp, Homo sapiens
ttttacataagagtt

SEQ ID NO: 89286 - DNA, 15 bp, Homo sapiens
attttacataagagt

SEQ ID NO: 89287 - DNA, 15 bp, Homo sapiens
aattttacataagag

SEQ ID NO: 89288 - DNA, 15 bp, Homo sapiens
aaattttacataaga

SEQ ID NO: 89289 - DNA, 15 bp, Homo sapiens
caaattttacataag

SEQ ID NO: 89290 - DNA, 15 bp, Homo sapiens
tcaaattttacataa

SEQ ID NO: 89291 - DNA, 15 bp, Homo sapiens
atcaaattttacata

SEQ ID NO: 89292 - DNA, 15 bp, Homo sapiens
tatcaaattttacat

SEQ ID NO: 89293 - DNA, 15 bp, Homo sapiens
ttatcaaattttaca

SEQ ID NO: 89294 - DNA, 15 bp, Homo sapiens
cttatcaaattttac

SEQ ID NO: 89295 - DNA, 15 bp, Homo sapiens
tcttatcaaatttta

SEQ ID NO: 89296 - DNA, 15 bp, Homo sapiens
atcttatcaaatttt

SEQ ID NO: 89297 - DNA, 15 bp, Homo sapiens
catcttatcaaattt

SEQ ID NO: 89298 - DNA, 15 bp, Homo sapiens
acatcttatcaaatt

SEQ ID NO: 89299 - DNA, 15 bp, Homo sapiens
aacatcttatcaaat

SEQ ID NO: 89300 - DNA, 15 bp, Homo sapiens
aaacatcttatcaaa

SEQ ID NO: 89301 - DNA, 15 bp, Homo sapiens
aaaacatcttatcaa

SEQ ID NO: 89302 - DNA, 15 bp, Homo sapiens
taaaacatcttatca

SEQ ID NO: 89303 - DNA, 15 bp, Homo sapiens
gtaaaacatcttatc

SEQ ID NO: 89304 - DNA, 15 bp, Homo sapiens
tgtaaaacatcttat

SEQ ID NO: 89305 - DNA, 15 bp, Homo sapiens
gtgtaaaacatctta

SEQ ID NO: 89306 - DNA, 15 bp, Homo sapiens
tgtgtaaaacatctt

SEQ ID NO: 89307 - DNA, 15 bp, Homo sapiens
ttgtgtaaaacatct

SEQ ID NO: 89308 - DNA, 15 bp, Homo sapiens
gttgtgtaaaacatc

SEQ ID NO: 89309 - DNA, 15 bp, Homo sapiens
agttgtgtaaaacat

SEQ ID NO: 89310 - DNA, 15 bp, Homo sapiens
aagttgtgtaaaaca

SEQ ID NO: 89311 - DNA, 15 bp, Homo sapiens
aaagttgtgtaaaac

SEQ ID NO: 89312 - DNA, 15 bp, Homo sapiens
taaagttgtgtaaaa

SEQ ID NO: 89313 - DNA, 15 bp, Homo sapiens
ttaaagttgtgtaaa

SEQ ID NO: 89314 - DNA, 15 bp, Homo sapiens
attaaagttgtgtaa

SEQ ID NO: 89315 - DNA, 15 bp, Homo sapiens
tattaaagttgtgta

SEQ ID NO: 89316 - DNA, 15 bp, Homo sapiens
gtattaaagttgtgt

SEQ ID NO: 89317 - DNA, 15 bp, Homo sapiens
tgtattaaagttgtg

SEQ ID NO: 89318 - DNA, 15 bp, Homo sapiens
atgtattaaagttgt

SEQ ID NO: 89319 - DNA, 15 bp, Homo sapiens
aatgtattaaagttg

SEQ ID NO: 89320 - DNA, 15 bp, Homo sapiens
caatgtattaaagtt

SEQ ID NO: 89321 - DNA, 15 bp, Homo sapiens
tcaatgtattaaagt

SEQ ID NO: 89322 - DNA, 15 bp, Homo sapiens
gtcaatgtattaaag

SEQ ID NO: 89323 - DNA, 15 bp, Homo sapiens
tgtcaatgtattaaa

SEQ ID NO: 89324 - DNA, 15 bp, Homo sapiens
ttgtcaatgtattaa

SEQ ID NO: 89325 - DNA, 15 bp, Homo sapiens
cttgtcaatgtatta

SEQ ID NO: 89326 - DNA, 15 bp, Homo sapiens
ccttgtcaatgtatt

SEQ ID NO: 89327 - DNA, 15 bp, Homo sapiens
accttgtcaatgtat

SEQ ID NO: 89328 - DNA, 15 bp, Homo sapiens
gaccttgtcaatgta

SEQ ID NO: 89329 - DNA, 15 bp, Homo sapiens
agaccttgtcaatgt

SEQ ID NO: 89330 - DNA, 15 bp, Homo sapiens
aagaccttgtcaatg

SEQ ID NO: 89331 - DNA, 15 bp, Homo sapiens
caagaccttgtcaat

SEQ ID NO: 89332 - DNA, 15 bp, Homo sapiens
acaagaccttgtcaa

SEQ ID NO: 89333 - DNA, 15 bp, Homo sapiens
cacaagaccttgtca

SEQ ID NO: 89334 - DNA, 15 bp, Homo sapiens
ccacaagaccttgtc

SEQ ID NO: 89335 - DNA, 15 bp, Homo sapiens
tccacaagaccttgt

SEQ ID NO: 89336 - DNA, 15 bp, Homo sapiens
ctccacaagaccttg

SEQ ID NO: 89337 - DNA, 15 bp, Homo sapiens
tctccacaagacctt

SEQ ID NO: 89338 - DNA, 15 bp, Homo sapiens
ttctccacaagacct

SEQ ID NO: 89339 - DNA, 15 bp, Homo sapiens
tttctccacaagacc

SEQ ID NO: 89340 - DNA, 15 bp, Homo sapiens
ttttctccacaagac

SEQ ID NO: 89341 - DNA, 15 bp, Homo sapiens
gttttctccacaaga

SEQ ID NO: 89342 - DNA, 15 bp, Homo sapiens
tgttttctccacaag

SEQ ID NO: 89343 - DNA, 15 bp, Homo sapiens
ctgttttctccacaa

SEQ ID NO: 89344 - DNA, 15 bp, Homo sapiens
actgttttctccaca

SEQ ID NO: 89345 - DNA, 15 bp, Homo sapiens
aactgttttctccac

SEQ ID NO: 89346 - DNA, 15 bp, Homo sapiens
gaactgttttctcca

SEQ ID NO: 89347 - DNA, 15 bp, Homo sapiens
ggaactgttttctcc

SEQ ID NO: 89348 - DNA, 15 bp, Homo sapiens
tggaactgttttctc

SEQ ID NO: 89349 - DNA, 15 bp, Homo sapiens
ctggaactgttttct

SEQ ID NO: 89350 - DNA, 15 bp, Homo sapiens
tctggaactgttttc

SEQ ID NO: 89351 - DNA, 15 bp, Homo sapiens
atctggaactgtttt

SEQ ID NO: 89352 - DNA, 15 bp, Homo sapiens
catctggaactgttt

SEQ ID NO: 89353 - DNA, 15 bp, Homo sapiens
ccatctggaactgtt

SEQ ID NO: 89354 - DNA, 15 bp, Homo sapiens
accatctggaactgt

SEQ ID NO: 89355 - DNA, 15 bp, Homo sapiens
taccatctggaactg

SEQ ID NO: 89356 - DNA, 15 bp, Homo sapiens
ttaccatctggaact

SEQ ID NO: 89357 - DNA, 15 bp, Homo sapiens
tttaccatctggaac

SEQ ID NO: 89358 - DNA, 15 bp, Homo sapiens
atttaccatctggaa

SEQ ID NO: 89359 - DNA, 15 bp, Homo sapiens
tatttaccatctgga

SEQ ID NO: 89360 - DNA, 15 bp, Homo sapiens
atatttaccatctgg

SEQ ID NO: 89361 - DNA, 15 bp, Homo sapiens
tatatttaccatctg

SEQ ID NO: 89362 - DNA, 15 bp, Homo sapiens
gtatatttaccatct

SEQ ID NO: 89363 - DNA, 15 bp, Homo sapiens
tgtatatttaccatc

SEQ ID NO: 89364 - DNA, 15 bp, Homo sapiens
gtgtatatttaccat

SEQ ID NO: 89365 - DNA, 15 bp, Homo sapiens
tgtgtatatttacca

SEQ ID NO: 89366 - DNA, 15 bp, Homo sapiens
ttgtgtatatttacc

SEQ ID NO: 89367 - DNA, 15 bp, Homo sapiens
cttgtgtatatttac

SEQ ID NO: 89368 - DNA, 15 bp, Homo sapiens
ccttgtgtatattta

SEQ ID NO: 89369 - DNA, 15 bp, Homo sapiens
cccttgtgtatattt

SEQ ID NO: 89370 - DNA, 15 bp, Homo sapiens
tcccttgtgtatatt

SEQ ID NO: 89371 - DNA, 15 bp, Homo sapiens
atcccttgtgtatat

SEQ ID NO: 89372 - DNA, 15 bp, Homo sapiens
aatcccttgtgtata

SEQ ID NO: 89373 - DNA, 15 bp, Homo sapiens
aaatcccttgtgtat

SEQ ID NO: 89374 - DNA, 15 bp, Homo sapiens
taaatcccttgtgta

SEQ ID NO: 89375 - DNA, 15 bp, Homo sapiens
ctaaatcccttgtgt

SEQ ID NO: 89376 - DNA, 15 bp, Homo sapiens
actaaatcccttgtg

SEQ ID NO: 89377 - DNA, 15 bp, Homo sapiens
gactaaatcccttgt

SEQ ID NO: 89378 - DNA, 15 bp, Homo sapiens
tgactaaatcccttg

SEQ ID NO: 89379 - DNA, 15 bp, Homo sapiens
ttgactaaatccctt

SEQ ID NO: 89380 - DNA, 15 bp, Homo sapiens
tttgactaaatccct

SEQ ID NO: 89381 - DNA, 15 bp, Homo sapiens
gtttgactaaatccc

SEQ ID NO: 89382 - DNA, 15 bp, Homo sapiens
tgtttgactaaatcc

SEQ ID NO: 89383 - DNA, 15 bp, Homo sapiens
ttgtttgactaaatc

SEQ ID NO: 89384 - DNA, 15 bp, Homo sapiens
attgtttgactaaat

SEQ ID NO: 89385 - DNA, 15 bp, Homo sapiens
aattgtttgactaaa

SEQ ID NO: 89386 - DNA, 15 bp, Homo sapiens
aaattgtttgactaa

SEQ ID NO: 89387 - DNA, 15 bp, Homo sapiens
aaaattgtttgacta

SEQ ID NO: 89388 - DNA, 15 bp, Homo sapiens
aaaaattgtttgact

SEQ ID NO: 89389 - DNA, 15 bp, Homo sapiens
aaaaaattgtttgac

SEQ ID NO: 89390 - DNA, 15 bp, Homo sapiens
caaaaaattgtttga

SEQ ID NO: 89391 - DNA, 15 bp, Homo sapiens
ccaaaaaattgtttg

SEQ ID NO: 89392 - DNA, 15 bp, Homo sapiens
gccaaaaaattgttt

SEQ ID NO: 89393 - DNA, 15 bp, Homo sapiens
tgccaaaaaattgtt

SEQ ID NO: 89394 - DNA, 15 bp, Homo sapiens
ttgccaaaaaattgt

SEQ ID NO: 89395 - DNA, 15 bp, Homo sapiens
cttgccaaaaaattg

SEQ ID NO: 89396 - DNA, 15 bp, Homo sapiens
tcttgccaaaaaatt

SEQ ID NO: 89397 - DNA, 15 bp, Homo sapiens
ttcttgccaaaaaat

SEQ ID NO: 89398 - DNA, 15 bp, Homo sapiens
attcttgccaaaaaa

SEQ ID NO: 89399 - DNA, 15 bp, Homo sapiens
tattcttgccaaaaa

SEQ ID NO: 89400 - DNA, 15 bp, Homo sapiens
atattcttgccaaaa

SEQ ID NO: 89401 - DNA, 15 bp, Homo sapiens
aatattcttgccaaa

SEQ ID NO: 89402 - DNA, 15 bp, Homo sapiens
taatattcttgccaa

SEQ ID NO: 89403 - DNA, 15 bp, Homo sapiens
ataatattcttgcca

SEQ ID NO: 89404 - DNA, 15 bp, Homo sapiens
cataatattcttgcc

SEQ ID NO: 89405 - DNA, 15 bp, Homo sapiens
tcataatattcttgc

SEQ ID NO: 89406 - DNA, 15 bp, Homo sapiens
ttcataatattcttg

SEQ ID NO: 89407 - DNA, 15 bp, Homo sapiens
attcataatattctt

SEQ ID NO: 89408 - DNA, 15 bp, Homo sapiens
aattcataatattct

SEQ ID NO: 89409 - DNA, 15 bp, Homo sapiens
aaattcataatattc

SEQ ID NO: 89410 - DNA, 15 bp, Homo sapiens
aaaattcataatatt

SEQ ID NO: 89411 - DNA, 15 bp, Homo sapiens
caaaattcataatat

SEQ ID NO: 89412 - DNA, 15 bp, Homo sapiens
acaaaattcataata

SEQ ID NO: 89413 - DNA, 15 bp, Homo sapiens
tacaaaattcataat

SEQ ID NO: 89414 - DNA, 15 bp, Homo sapiens
ttacaaaattcataa

SEQ ID NO: 89415 - DNA, 15 bp, Homo sapiens
attacaaaattcata

SEQ ID NO: 89416 - DNA, 15 bp, Homo sapiens
gattacaaaattcat

SEQ ID NO: 89417 - DNA, 15 bp, Homo sapiens
cgattacaaaattca

SEQ ID NO: 89418 - DNA, 15 bp, Homo sapiens
ccgattacaaaattc

SEQ ID NO: 89419 - DNA, 15 bp, Homo sapiens
accgattacaaaatt

SEQ ID NO: 89420 - DNA, 15 bp, Homo sapiens
aaccgattacaaaat

SEQ ID NO: 89421 - DNA, 15 bp, Homo sapiens
caaccgattacaaaa

SEQ ID NO: 89422 - DNA, 15 bp, Homo sapiens
ccaaccgattacaaa

SEQ ID NO: 89423 - DNA, 15 bp, Homo sapiens
gccaaccgattacaa

SEQ ID NO: 89424 - DNA, 15 bp, Homo sapiens
tgccaaccgattaca

SEQ ID NO: 89425 - DNA, 15 bp, Homo sapiens
ctgccaaccgattac

SEQ ID NO: 89426 - DNA, 15 bp, Homo sapiens
gctgccaaccgatta

SEQ ID NO: 89427 - DNA, 15 bp, Homo sapiens
ggctgccaaccgatt

SEQ ID NO: 89428 - DNA, 15 bp, Homo sapiens
tggctgccaaccgat

SEQ ID NO: 89429 - DNA, 15 bp, Homo sapiens
ttggctgccaaccga

SEQ ID NO: 89430 - DNA, 15 bp, Homo sapiens
attggctgccaaccg

SEQ ID NO: 89431 - DNA, 15 bp, Homo sapiens
cattggctgccaacc

SEQ ID NO: 89432 - DNA, 15 bp, Homo sapiens
tcattggctgccaac

SEQ ID NO: 89433 - DNA, 15 bp, Homo sapiens
ttcattggctgccaa

SEQ ID NO: 89434 - DNA, 15 bp, Homo sapiens
tttcattggctgcca

SEQ ID NO: 89435 - DNA, 15 bp, Homo sapiens
atttcattggctgcc

SEQ ID NO: 89436 - DNA, 15 bp, Homo sapiens
tatttcattggctgc

SEQ ID NO: 89437 - DNA, 15 bp, Homo sapiens
gtatttcattggctg

SEQ ID NO: 89438 - DNA, 15 bp, Homo sapiens
tgtatttcattggct

SEQ ID NO: 89439 - DNA, 15 bp, Homo sapiens
ttgtatttcattggc

SEQ ID NO: 89440 - DNA, 15 bp, Homo sapiens
tttgtatttcattgg

SEQ ID NO: 89441 - DNA, 15 bp, Homo sapiens
ctttgtatttcattg

SEQ ID NO: 89442 - DNA, 15 bp, Homo sapiens
tctttgtatttcatt

SEQ ID NO: 89443 - DNA, 15 bp, Homo sapiens
atctttgtatttcat

SEQ ID NO: 89444 - DNA, 15 bp, Homo sapiens
catctttgtatttca

SEQ ID NO: 89445 - DNA, 15 bp, Homo sapiens
tcatctttgtatttc

SEQ ID NO: 89446 - DNA, 15 bp, Homo sapiens
ctcatctttgtattt

SEQ ID NO: 89447 - DNA, 15 bp, Homo sapiens
actcatctttgtatt

SEQ ID NO: 89448 - DNA, 15 bp, Homo sapiens
gactcatctttgtat

SEQ ID NO: 89449 - DNA, 15 bp, Homo sapiens
agactcatctttgta

SEQ ID NO: 89450 - DNA, 15 bp, Homo sapiens
tagactcatctttgt

SEQ ID NO: 89451 - DNA, 15 bp, Homo sapiens
ctagactcatctttg

SEQ ID NO: 89452 - DNA, 15 bp, Homo sapiens
actagactcatcttt

SEQ ID NO: 89453 - DNA, 15 bp, Homo sapiens
aactagactcatctt

SEQ ID NO: 89454 - DNA, 15 bp, Homo sapiens
taactagactcatct

SEQ ID NO: 89455 - DNA, 15 bp, Homo sapiens
ttaactagactcatc

SEQ ID NO: 89456 - DNA, 15 bp, Homo sapiens
attaactagactcat

SEQ ID NO: 89457 - DNA, 15 bp, Homo sapiens
tattaactagactca

SEQ ID NO: 89458 - DNA, 15 bp, Homo sapiens
ttattaactagactc

SEQ ID NO: 89459 - DNA, 15 bp, Homo sapiens
attattaactagact

SEQ ID NO: 89460 - DNA, 15 bp, Homo sapiens
gattattaactagac

SEQ ID NO: 89461 - DNA, 15 bp, Homo sapiens
agattattaactaga

SEQ ID NO: 89462 - DNA, 15 bp, Homo sapiens
tagattattaactag

SEQ ID NO: 89463 - DNA, 15 bp, Homo sapiens
gtagattattaacta

SEQ ID NO: 89464 - DNA, 15 bp, Homo sapiens
tgtagattattaact

SEQ ID NO: 89465 - DNA, 15 bp, Homo sapiens
ttgtagattattaac

SEQ ID NO: 89466 - DNA, 15 bp, Homo sapiens
attgtagattattaa

SEQ ID NO: 89467 - DNA, 15 bp, Homo sapiens
aattgtagattatta

SEQ ID NO: 89468 - DNA, 15 bp, Homo sapiens
taattgtagattatt

SEQ ID NO: 89469 - DNA, 15 bp, Homo sapiens
ataattgtagattat

SEQ ID NO: 89470 - DNA, 15 bp, Homo sapiens
aataattgtagatta

SEQ ID NO: 89471 - DNA, 15 bp, Homo sapiens
caataattgtagatt

SEQ ID NO: 89472 - DNA, 15 bp, Homo sapiens
ccaataattgtagat

SEQ ID NO: 89473 - DNA, 15 bp, Homo sapiens
accaataattgtaga

SEQ ID NO: 89474 - DNA, 15 bp, Homo sapiens
aaccaataattgtag

SEQ ID NO: 89475 - DNA, 15 bp, Homo sapiens
taaccaataattgta

SEQ ID NO: 89476 - DNA, 15 bp, Homo sapiens
ttaaccaataattgt

SEQ ID NO: 89477 - DNA, 15 bp, Homo sapiens
tttaaccaataattg

SEQ ID NO: 89478 - DNA, 15 bp, Homo sapiens
ctttaaccaataatt

SEQ ID NO: 89479 - DNA, 15 bp, Homo sapiens
tctttaaccaataat

SEQ ID NO: 89480 - DNA, 15 bp, Homo sapiens
ttctttaaccaataa

SEQ ID NO: 89481 - DNA, 15 bp, Homo sapiens
cttctttaaccaata

SEQ ID NO: 89482 - DNA, 15 bp, Homo sapiens
acttctttaaccaat

SEQ ID NO: 89483 - DNA, 15 bp, Homo sapiens
tacttctttaaccaa

SEQ ID NO: 89484 - DNA, 15 bp, Homo sapiens
atacttctttaacca

SEQ ID NO: 89485 - DNA, 15 bp, Homo sapiens
tatacttctttaacc

SEQ ID NO: 89486 - DNA, 15 bp, Homo sapiens
atatacttctttaac

SEQ ID NO: 89487 - DNA, 15 bp, Homo sapiens
aatatacttctttaa

SEQ ID NO: 89488 - DNA, 15 bp, Homo sapiens
taatatacttcttta

SEQ ID NO: 89489 - DNA, 15 bp, Homo sapiens
ctaatatacttcttt

SEQ ID NO: 89490 - DNA, 15 bp, Homo sapiens
actaatatacttctt

SEQ ID NO: 89491 - DNA, 15 bp, Homo sapiens
cactaatatacttct

SEQ ID NO: 89492 - DNA, 15 bp, Homo sapiens
gcactaatatacttc

SEQ ID NO: 89493 - DNA, 15 bp, Homo sapiens
agcactaatatactt

SEQ ID NO: 89494 - DNA, 15 bp, Homo sapiens
tagcactaatatact

SEQ ID NO: 89495 - DNA, 15 bp, Homo sapiens
ttagcactaatatac

SEQ ID NO: 89496 - DNA, 15 bp, Homo sapiens
attagcactaatata

SEQ ID NO: 89497 - DNA, 15 bp, Homo sapiens
aattagcactaatat

SEQ ID NO: 89498 - DNA, 15 bp, Homo sapiens
aaattagcactaata

SEQ ID NO: 89499 - DNA, 15 bp, Homo sapiens
gaaattagcactaat

SEQ ID NO: 89500 - DNA, 15 bp, Homo sapiens
ggaaattagcactaa

SEQ ID NO: 89501 - DNA, 15 bp, Homo sapiens
gggaaattagcacta

SEQ ID NO: 89502 - DNA, 15 bp, Homo sapiens
agggaaattagcact

SEQ ID NO: 89503 - DNA, 15 bp, Homo sapiens
gagggaaattagcac

SEQ ID NO: 89504 - DNA, 15 bp, Homo sapiens
ggagggaaattagca

SEQ ID NO: 89505 - DNA, 15 bp, Homo sapiens
cggagggaaattagc

SEQ ID NO: 89506 - DNA, 15 bp, Homo sapiens
acggagggaaattag

SEQ ID NO: 89507 - DNA, 15 bp, Homo sapiens
aacggagggaaatta

SEQ ID NO: 89508 - DNA, 15 bp, Homo sapiens
aaacggagggaaatt

SEQ ID NO: 89509 - DNA, 15 bp, Homo sapiens
caaacggagggaaat

SEQ ID NO: 89510 - DNA, 15 bp, Homo sapiens
acaaacggagggaaa

SEQ ID NO: 89511 - DNA, 15 bp, Homo sapiens
gacaaacggagggaa

SEQ ID NO: 89512 - DNA, 15 bp, Homo sapiens
ggacaaacggaggga

SEQ ID NO: 89513 - DNA, 15 bp, Homo sapiens
aggacaaacggaggg

SEQ ID NO: 89514 - DNA, 15 bp, Homo sapiens
taggacaaacggagg

SEQ ID NO: 89515 - DNA, 15 bp, Homo sapiens
ctaggacaaacggag

SEQ ID NO: 89516 - DNA, 15 bp, Homo sapiens
gctaggacaaacgga

SEQ ID NO: 89517 - DNA, 15 bp, Homo sapiens
agctaggacaaacgg

SEQ ID NO: 89518 - DNA, 15 bp, Homo sapiens
aagctaggacaaacg

SEQ ID NO: 89519 - DNA, 15 bp, Homo sapiens
aaagctaggacaaac

SEQ ID NO: 89520 - DNA, 15 bp, Homo sapiens
aaaagctaggacaaa

SEQ ID NO: 89521 - DNA, 15 bp, Homo sapiens
gaaaagctaggacaa

SEQ ID NO: 89522 - DNA, 15 bp, Homo sapiens
agaaaagctaggaca

SEQ ID NO: 89523 - DNA, 15 bp, Homo sapiens
gagaaaagctaggac

SEQ ID NO: 89524 - DNA, 15 bp, Homo sapiens
agagaaaagctagga

SEQ ID NO: 89525 - DNA, 15 bp, Homo sapiens
aagagaaaagctagg

SEQ ID NO: 89526 - DNA, 15 bp, Homo sapiens
gaagagaaaagctag

SEQ ID NO: 89527 - DNA, 15 bp, Homo sapiens
agaagagaaaagcta

SEQ ID NO: 89528 - DNA, 15 bp, Homo sapiens
cagaagagaaaagct

SEQ ID NO: 89529 - DNA, 15 bp, Homo sapiens
acagaagagaaaagc

SEQ ID NO: 89530 - DNA, 15 bp, Homo sapiens
gacagaagagaaaag

SEQ ID NO: 89531 - DNA, 15 bp, Homo sapiens
tgacagaagagaaaa

SEQ ID NO: 89532 - DNA, 15 bp, Homo sapiens
ttgacagaagagaaa

SEQ ID NO: 89533 - DNA, 15 bp, Homo sapiens
gttgacagaagagaa

SEQ ID NO: 89534 - DNA, 15 bp, Homo sapiens
ggttgacagaagaga

SEQ ID NO: 89535 - DNA, 15 bp, Homo sapiens
gggttgacagaagag

SEQ ID NO: 89536 - DNA, 15 bp, Homo sapiens
ggggttgacagaaga

SEQ ID NO: 89537 - DNA, 15 bp, Homo sapiens
tggggttgacagaag

SEQ ID NO: 89538 - DNA, 15 bp, Homo sapiens
gtggggttgacagaa

SEQ ID NO: 89539 - DNA, 15 bp, Homo sapiens
tgtggggttgacaga

SEQ ID NO: 89540 - DNA, 15 bp, Homo sapiens
gtgtggggttgacag

SEQ ID NO: 89541 - DNA, 15 bp, Homo sapiens
cgtgtggggttgaca

SEQ ID NO: 89542 - DNA, 15 bp, Homo sapiens
gcgtgtggggttgac

SEQ ID NO: 89543 - DNA, 15 bp, Homo sapiens
ggcgtgtggggttga

SEQ ID NO: 89544 - DNA, 15 bp, Homo sapiens
aggcgtgtggggttg

SEQ ID NO: 89545 - DNA, 15 bp, Homo sapiens
aaggcgtgtggggtt

SEQ ID NO: 89546 - DNA, 15 bp, Homo sapiens
aaaggcgtgtggggt

SEQ ID NO: 89547 - DNA, 15 bp, Homo sapiens
caaaggcgtgtgggg

SEQ ID NO: 89548 - DNA, 15 bp, Homo sapiens
ccaaaggcgtgtggg

SEQ ID NO: 89549 - DNA, 15 bp, Homo sapiens
gccaaaggcgtgtgg

SEQ ID NO: 89550 - DNA, 15 bp, Homo sapiens
tgccaaaggcgtgtg

SEQ ID NO: 89551 - DNA, 15 bp, Homo sapiens
gtgccaaaggcgtgt

SEQ ID NO: 89552 - DNA, 15 bp, Homo sapiens
tgtgccaaaggcgtg

SEQ ID NO: 89553 - DNA, 15 bp, Homo sapiens
ttgtgccaaaggcgt

SEQ ID NO: 89554 - DNA, 15 bp, Homo sapiens
attgtgccaaaggcg

SEQ ID NO: 89555 - DNA, 15 bp, Homo sapiens
cattgtgccaaaggc

SEQ ID NO: 89556 - DNA, 15 bp, Homo sapiens
tcattgtgccaaagg

SEQ ID NO: 89557 - DNA, 15 bp, Homo sapiens
ttcattgtgccaaag

SEQ ID NO: 89558 - DNA, 15 bp, Homo sapiens
cttcattgtgccaaa

SEQ ID NO: 89559 - DNA, 15 bp, Homo sapiens
acttcattgtgccaa

SEQ ID NO: 89560 - DNA, 15 bp, Homo sapiens
cacttcattgtgcca

SEQ ID NO: 89561 - DNA, 15 bp, Homo sapiens
ccacttcattgtgcc

SEQ ID NO: 89562 - DNA, 15 bp, Homo sapiens
cccacttcattgtgc

SEQ ID NO: 89563 - DNA, 15 bp, Homo sapiens
acccacttcattgtg

SEQ ID NO: 89564 - DNA, 15 bp, Homo sapiens
tacccacttcattgt

SEQ ID NO: 89565 - DNA, 15 bp, Homo sapiens
ttacccacttcattg

SEQ ID NO: 89566 - DNA, 15 bp, Homo sapiens
gttacccacttcatt

SEQ ID NO: 89567 - DNA, 15 bp, Homo sapiens
ggttacccacttcat

SEQ ID NO: 89568 - DNA, 15 bp, Homo sapiens
aggttacccacttca

SEQ ID NO: 89569 - DNA, 15 bp, Homo sapiens
aaggttacccacttc

SEQ ID NO: 89570 - DNA, 15 bp, Homo sapiens
aaaggttacccactt

SEQ ID NO: 89571 - DNA, 15 bp, Homo sapiens
taaaggttacccact

SEQ ID NO: 89572 - DNA, 15 bp, Homo sapiens
ataaaggttacccac

SEQ ID NO: 89573 - DNA, 15 bp, Homo sapiens
aataaaggttaccca

SEQ ID NO: 89574 - DNA, 15 bp, Homo sapiens
aaataaaggttaccc

SEQ ID NO: 89575 - DNA, 15 bp, Homo sapiens
gaaataaaggttacc

SEQ ID NO: 89576 - DNA, 15 bp, Homo sapiens
ggaaataaaggttac

SEQ ID NO: 89577 - DNA, 15 bp, Homo sapiens
gggaaataaaggtta

SEQ ID NO: 89578 - DNA, 15 bp, Homo sapiens
agggaaataaaggtt

SEQ ID NO: 89579 - DNA, 15 bp, Homo sapiens
aagggaaataaaggt

SEQ ID NO: 89580 - DNA, 15 bp, Homo sapiens
gaagggaaataaagg

SEQ ID NO: 89581 - DNA, 15 bp, Homo sapiens
agaagggaaataaag

SEQ ID NO: 89582 - DNA, 15 bp, Homo sapiens
aagaagggaaataaa

SEQ ID NO: 89583 - DNA, 15 bp, Homo sapiens
aaagaagggaaataa

SEQ ID NO: 89584 - DNA, 15 bp, Homo sapiens
aaaagaagggaaata

SEQ ID NO: 89585 - DNA, 15 bp, Homo sapiens
aaaaagaagggaaat

SEQ ID NO: 89586 - DNA, 15 bp, Homo sapiens
gaaaaagaagggaaa

SEQ ID NO: 89587 - DNA, 15 bp, Homo sapiens
agaaaaagaagggaa

SEQ ID NO: 89588 - DNA, 15 bp, Homo sapiens
gagaaaaagaaggga

SEQ ID NO: 89589 - DNA, 15 bp, Homo sapiens
agagaaaaagaaggg

SEQ ID NO: 89590 - DNA, 15 bp, Homo sapiens
aagagaaaaagaagg

SEQ ID NO: 89591 - DNA, 15 bp, Homo sapiens
aaagagaaaaagaag

SEQ ID NO: 89592 - DNA, 15 bp, Homo sapiens
taaagagaaaaagaa

SEQ ID NO: 89593 - DNA, 15 bp, Homo sapiens
ctaaagagaaaaaga

SEQ ID NO: 89594 - DNA, 15 bp, Homo sapiens
gctaaagagaaaaag

SEQ ID NO: 89595 - DNA, 15 bp, Homo sapiens
agctaaagagaaaaa

SEQ ID NO: 89596 - DNA, 15 bp, Homo sapiens
gagctaaagagaaaa

SEQ ID NO: 89597 - DNA, 15 bp, Homo sapiens
cgagctaaagagaaa

SEQ ID NO: 89598 - DNA, 15 bp, Homo sapiens
ccgagctaaagagaa

SEQ ID NO: 89599 - DNA, 15 bp, Homo sapiens
gccgagctaaagaga

SEQ ID NO: 89600 - DNA, 15 bp, Homo sapiens
agccgagctaaagag

SEQ ID NO: 89601 - DNA, 15 bp, Homo sapiens
aagccgagctaaaga

SEQ ID NO: 89602 - DNA, 15 bp, Homo sapiens
taagccgagctaaag

SEQ ID NO: 89603 - DNA, 15 bp, Homo sapiens
ataagccgagctaaa

SEQ ID NO: 89604 - DNA, 15 bp, Homo sapiens
aataagccgagctaa

SEQ ID NO: 89605 - DNA, 15 bp, Homo sapiens
gaataagccgagcta

SEQ ID NO: 89606 - DNA, 15 bp, Homo sapiens
ggaataagccgagct

SEQ ID NO: 89607 - DNA, 15 bp, Homo sapiens
tggaataagccgagc

SEQ ID NO: 89608 - DNA, 15 bp, Homo sapiens
ctggaataagccgag

SEQ ID NO: 89609 - DNA, 15 bp, Homo sapiens
cctggaataagccga

SEQ ID NO: 89610 - DNA, 15 bp, Homo sapiens
ccctggaataagccg

SEQ ID NO: 89611 - DNA, 15 bp, Homo sapiens
cccctggaataagcc

SEQ ID NO: 89612 - DNA, 15 bp, Homo sapiens
acccctggaataagc

SEQ ID NO: 89613 - DNA, 15 bp, Homo sapiens
cacccctggaataag

SEQ ID NO: 89614 - DNA, 15 bp, Homo sapiens
acacccctggaataa

SEQ ID NO: 89615 - DNA, 15 bp, Homo sapiens
cacacccctggaata

SEQ ID NO: 89616 - DNA, 15 bp, Homo sapiens
acacacccctggaat

SEQ ID NO: 89617 - DNA, 15 bp, Homo sapiens
aacacacccctggaa

SEQ ID NO: 89618 - DNA, 15 bp, Homo sapiens
aaacacacccctgga

SEQ ID NO: 89619 - DNA, 15 bp, Homo sapiens
gaaacacacccctgg

SEQ ID NO: 89620 - DNA, 15 bp, Homo sapiens
cgaaacacacccctg

SEQ ID NO: 89621 - DNA, 15 bp, Homo sapiens
acgaaacacacccct

SEQ ID NO: 89622 - DNA, 15 bp, Homo sapiens
gacgaaacacacccc

SEQ ID NO: 89623 - DNA, 15 bp, Homo sapiens
cgacgaaacacaccc

SEQ ID NO: 89624 - DNA, 15 bp, Homo sapiens
tcgacgaaacacacc

SEQ ID NO: 89625 - DNA, 15 bp, Homo sapiens
ctcgacgaaacacac

SEQ ID NO: 89626 - DNA, 15 bp, Homo sapiens
tctcgacgaaacaca

SEQ ID NO: 89627 - DNA, 15 bp, Homo sapiens
atctcgacgaaacac

SEQ ID NO: 89628 - DNA, 15 bp, Homo sapiens
catctcgacgaaaca

SEQ ID NO: 89629 - DNA, 15 bp, Homo sapiens
gcatctcgacgaaac

SEQ ID NO: 89630 - DNA, 15 bp, Homo sapiens
tgcatctcgacgaaa

SEQ ID NO: 89631 - DNA, 15 bp, Homo sapiens
gtgcatctcgacgaa

SEQ ID NO: 89632 - DNA, 15 bp, Homo sapiens
cgtgcatctcgacga

SEQ ID NO: 89633 - DNA, 15 bp, Homo sapiens
acgtgcatctcgacg

SEQ ID NO: 89634 - DNA, 15 bp, Homo sapiens
tacgtgcatctcgac

SEQ ID NO: 89635 - DNA, 15 bp, Homo sapiens
ttacgtgcatctcga

SEQ ID NO: 89636 - DNA, 15 bp, Homo sapiens
cttacgtgcatctcg

SEQ ID NO: 89637 - DNA, 15 bp, Homo sapiens
tcttacgtgcatctc

SEQ ID NO: 89638 - DNA, 15 bp, Homo sapiens
ttcttacgtgcatct

SEQ ID NO: 89639 - DNA, 15 bp, Homo sapiens
tttcttacgtgcatc

SEQ ID NO: 89640 - DNA, 15 bp, Homo sapiens
atttcttacgtgcat

SEQ ID NO: 89641 - DNA, 15 bp, Homo sapiens
gatttcttacgtgca

SEQ ID NO: 89642 - DNA, 15 bp, Homo sapiens
ggatttcttacgtgc

SEQ ID NO: 89643 - DNA, 15 bp, Homo sapiens
tggatttcttacgtg

SEQ ID NO: 89644 - DNA, 15 bp, Homo sapiens
atggatttcttacgt

SEQ ID NO: 89645 - DNA, 15 bp, Homo sapiens
aatggatttcttacg

SEQ ID NO: 89646 - DNA, 15 bp, Homo sapiens
aaatggatttcttac

SEQ ID NO: 89647 - DNA, 15 bp, Homo sapiens
aaaatggatttctta

SEQ ID NO: 89648 - DNA, 15 bp, Homo sapiens
aaaaatggatttctt

SEQ ID NO: 89649 - DNA, 15 bp, Homo sapiens
gaaaaatggatttct

SEQ ID NO: 89650 - DNA, 15 bp, Homo sapiens
agaaaaatggatttc

SEQ ID NO: 89651 - DNA, 15 bp, Homo sapiens
tagaaaaatggattt

SEQ ID NO: 89652 - DNA, 15 bp, Homo sapiens
atagaaaaatggatt

SEQ ID NO: 89653 - DNA, 15 bp, Homo sapiens
aatagaaaaatggat

SEQ ID NO: 89654 - DNA, 15 bp, Homo sapiens
caatagaaaaatgga

SEQ ID NO: 89655 - DNA, 15 bp, Homo sapiens
acaatagaaaaatgg

SEQ ID NO: 89656 - DNA, 15 bp, Homo sapiens
aacaatagaaaaatg

SEQ ID NO: 89657 - DNA, 15 bp, Homo sapiens
gaacaatagaaaaat

SEQ ID NO: 89658 - DNA, 15 bp, Homo sapiens
tgaacaatagaaaaa

SEQ ID NO: 89659 - DNA, 15 bp, Homo sapiens
ttgaacaatagaaaa

SEQ ID NO: 89660 - DNA, 15 bp, Homo sapiens
gttgaacaatagaaa

SEQ ID NO: 89661 - DNA, 15 bp, Homo sapiens
agttgaacaatagaa

SEQ ID NO: 89662 - DNA, 15 bp, Homo sapiens
aagttgaacaataga

SEQ ID NO: 89663 - DNA, 15 bp, Homo sapiens
aaagttgaacaatag

SEQ ID NO: 89664 - DNA, 15 bp, Homo sapiens
aaaagttgaacaata

SEQ ID NO: 89665 - DNA, 15 bp, Homo sapiens
taaaagttgaacaat

SEQ ID NO: 89666 - DNA, 15 bp, Homo sapiens
ataaaagttgaacaa

SEQ ID NO: 89667 - DNA, 15 bp, Homo sapiens
aataaaagttgaaca

SEQ ID NO: 89668 - DNA, 15 bp, Homo sapiens
gaataaaagttgaac

SEQ ID NO: 89669 - DNA, 15 bp, Homo sapiens
agaataaaagttgaa

SEQ ID NO: 89670 - DNA, 15 bp, Homo sapiens
tagaataaaagttga

SEQ ID NO: 89671 - DNA, 15 bp, Homo sapiens
atagaataaaagttg

SEQ ID NO: 89672 - DNA, 15 bp, Homo sapiens
aatagaataaaagtt

SEQ ID NO: 89673 - DNA, 15 bp, Homo sapiens
aaatagaataaaagt

SEQ ID NO: 89674 - DNA, 15 bp, Homo sapiens
aaaatagaataaaag

SEQ ID NO: 89675 - DNA, 15 bp, Homo sapiens
gaaaatagaataaaa

SEQ ID NO: 89676 - DNA, 15 bp, Homo sapiens
ggaaaatagaataaa

SEQ ID NO: 89677 - DNA, 15 bp, Homo sapiens
gggaaaatagaataa

SEQ ID NO: 89678 - DNA, 15 bp, Homo sapiens
tgggaaaatagaata

SEQ ID NO: 89679 - DNA, 15 bp, Homo sapiens
ctgggaaaatagaat

SEQ ID NO: 89680 - DNA, 15 bp, Homo sapiens
actgggaaaatagaa

SEQ ID NO: 89681 - DNA, 15 bp, Homo sapiens
tactgggaaaataga

SEQ ID NO: 89682 - DNA, 15 bp, Homo sapiens
ttactgggaaaatag

SEQ ID NO: 89683 - DNA, 15 bp, Homo sapiens
tttactgggaaaata

SEQ ID NO: 89684 - DNA, 15 bp, Homo sapiens
ttttactgggaaaat

SEQ ID NO: 89685 - DNA, 15 bp, Homo sapiens
attttactgggaaaa

SEQ ID NO: 89686 - DNA, 15 bp, Homo sapiens
tattttactgggaaa

SEQ ID NO: 89687 - DNA, 15 bp, Homo sapiens
ttattttactgggaa

SEQ ID NO: 89688 - DNA, 15 bp, Homo sapiens
tttattttactggga

SEQ ID NO: 89689 - DNA, 15 bp, Homo sapiens
ctttattttactggg

SEQ ID NO: 89690 - DNA, 15 bp, Homo sapiens
actttattttactgg

SEQ ID NO: 89691 - DNA, 15 bp, Homo sapiens
aactttattttactg

SEQ ID NO: 89692 - DNA, 15 bp, Homo sapiens
aaactttattttact

SEQ ID NO: 89693 - DNA, 15 bp, Homo sapiens
aaaactttattttac

SEQ ID NO: 89694 - DNA, 15 bp, Homo sapiens
taaaactttatttta

SEQ ID NO: 89695 - DNA, 15 bp, Homo sapiens
ctaaaactttatttt

SEQ ID NO: 89696 - DNA, 15 bp, Homo sapiens
actaaaactttattt

SEQ ID NO: 89697 - DNA, 15 bp, Homo sapiens
tactaaaactttatt

SEQ ID NO: 89698 - DNA, 15 bp, Homo sapiens
ttactaaaactttat

SEQ ID NO: 89699 - DNA, 15 bp, Homo sapiens
tttactaaaacttta

SEQ ID NO: 89700 - DNA, 15 bp, Homo sapiens
gtttactaaaacttt

SEQ ID NO: 89701 - DNA, 15 bp, Homo sapiens
agtttactaaaactt

SEQ ID NO: 89702 - DNA, 15 bp, Homo sapiens
gagtttactaaaact

SEQ ID NO: 89703 - DNA, 15 bp, Homo sapiens
agagtttactaaaac

SEQ ID NO: 89704 - DNA, 15 bp, Homo sapiens
cagagtttactaaaa

SEQ ID NO: 89705 - DNA, 15 bp, Homo sapiens
gcagagtttactaaa

SEQ ID NO: 89706 - DNA, 15 bp, Homo sapiens
tgcagagtttactaa

SEQ ID NO: 89707 - DNA, 15 bp, Homo sapiens
atgcagagtttacta

SEQ ID NO: 89708 - DNA, 15 bp, Homo sapiens
gatgcagagtttact

SEQ ID NO: 89709 - DNA, 15 bp, Homo sapiens
agatgcagagtttac

SEQ ID NO: 89710 - DNA, 15 bp, Homo sapiens
aagatgcagagttta

SEQ ID NO: 89711 - DNA, 15 bp, Homo sapiens
aaagatgcagagttt

SEQ ID NO: 89712 - DNA, 15 bp, Homo sapiens
taaagatgcagagtt

SEQ ID NO: 89713 - DNA, 15 bp, Homo sapiens
ttaaagatgcagagt

SEQ ID NO: 89714 - DNA, 15 bp, Homo sapiens
tttaaagatgcagag

SEQ ID NO: 89715 - DNA, 15 bp, Homo sapiens
ctttaaagatgcaga

SEQ ID NO: 89716 - DNA, 15 bp, Homo sapiens
tctttaaagatgcag

SEQ ID NO: 89717 - DNA, 15 bp, Homo sapiens
ttctttaaagatgca

SEQ ID NO: 89718 - DNA, 15 bp, Homo sapiens
attctttaaagatgc

SEQ ID NO: 89719 - DNA, 15 bp, Homo sapiens
aattctttaaagatg

SEQ ID NO: 89720 - DNA, 15 bp, Homo sapiens
taattctttaaagat

SEQ ID NO: 89721 - DNA, 15 bp, Homo sapiens
ataattctttaaaga

SEQ ID NO: 89722 - DNA, 15 bp, Homo sapiens
aataattctttaaag

SEQ ID NO: 89723 - DNA, 15 bp, Homo sapiens
aaataattctttaaa

SEQ ID NO: 89724 - DNA, 15 bp, Homo sapiens
aaaataattctttaa

SEQ ID NO: 89725 - DNA, 15 bp, Homo sapiens
caaaataattcttta

SEQ ID NO: 89726 - DNA, 15 bp, Homo sapiens
ccaaaataattcttt

SEQ ID NO: 89727 - DNA, 15 bp, Homo sapiens
gccaaaataattctt

SEQ ID NO: 89728 - DNA, 15 bp, Homo sapiens
tgccaaaataattct

SEQ ID NO: 89729 - DNA, 15 bp, Homo sapiens
atgccaaaataattc

SEQ ID NO: 89730 - DNA, 15 bp, Homo sapiens
aatgccaaaataatt

SEQ ID NO: 89731 - DNA, 15 bp, Homo sapiens
aaatgccaaaataat

SEQ ID NO: 89732 - DNA, 15 bp, Homo sapiens
taaatgccaaaataa

SEQ ID NO: 89733 - DNA, 15 bp, Homo sapiens
ataaatgccaaaata

SEQ ID NO: 89734 - DNA, 15 bp, Homo sapiens
aataaatgccaaaat

SEQ ID NO: 89735 - DNA, 15 bp, Homo sapiens
aaataaatgccaaaa

SEQ ID NO: 89736 - DNA, 15 bp, Homo sapiens
gaaataaatgccaaa

SEQ ID NO: 89737 - DNA, 15 bp, Homo sapiens
agaaataaatgccaa

SEQ ID NO: 89738 - DNA, 15 bp, Homo sapiens
tagaaataaatgcca

SEQ ID NO: 89739 - DNA, 15 bp, Homo sapiens
ttagaaataaatgcc

SEQ ID NO: 89740 - DNA, 15 bp, Homo sapiens
tttagaaataaatgc

SEQ ID NO: 89741 - DNA, 15 bp, Homo sapiens
ttttagaaataaatg

SEQ ID NO: 89742 - DNA, 15 bp, Homo sapiens
attttagaaataaat

SEQ ID NO: 89743 - DNA, 15 bp, Homo sapiens
cattttagaaataaa

SEQ ID NO: 89744 - DNA, 15 bp, Homo sapiens
ccattttagaaataa

SEQ ID NO: 89745 - DNA, 15 bp, Homo sapiens
gccattttagaaata

SEQ ID NO: 89746 - DNA, 15 bp, Homo sapiens
tgccattttagaaat

SEQ ID NO: 89747 - DNA, 15 bp, Homo sapiens
atgccattttagaaa

SEQ ID NO: 89748 - DNA, 15 bp, Homo sapiens
tatgccattttagaa

SEQ ID NO: 89749 - DNA, 15 bp, Homo sapiens
ctatgccattttaga

SEQ ID NO: 89750 - DNA, 15 bp, Homo sapiens
actatgccattttag

SEQ ID NO: 89751 - DNA, 15 bp, Homo sapiens
tactatgccatttta

SEQ ID NO: 89752 - DNA, 15 bp, Homo sapiens
atactatgccatttt

SEQ ID NO: 89753 - DNA, 15 bp, Homo sapiens
aatactatgccattt

SEQ ID NO: 89754 - DNA, 15 bp, Homo sapiens
aaatactatgccatt

SEQ ID NO: 89755 - DNA, 15 bp, Homo sapiens
aaaatactatgccat

SEQ ID NO: 89756 - DNA, 15 bp, Homo sapiens
caaaatactatgcca

SEQ ID NO: 89757 - DNA, 15 bp, Homo sapiens
acaaaatactatgcc

SEQ ID NO: 89758 - DNA, 15 bp, Homo sapiens
tacaaaatactatgc

SEQ ID NO: 89759 - DNA, 15 bp, Homo sapiens
atacaaaatactatg

SEQ ID NO: 89760 - DNA, 15 bp, Homo sapiens
aatacaaaatactat

SEQ ID NO: 89761 - DNA, 15 bp, Homo sapiens
aaatacaaaatacta

SEQ ID NO: 89762 - DNA, 15 bp, Homo sapiens
caaatacaaaatact

SEQ ID NO: 89763 - DNA, 15 bp, Homo sapiens
acaaatacaaaatac

SEQ ID NO: 89764 - DNA, 15 bp, Homo sapiens
cacaaatacaaaata

SEQ ID NO: 89765 - DNA, 15 bp, Homo sapiens
tcacaaatacaaaat

SEQ ID NO: 89766 - DNA, 15 bp, Homo sapiens
ttcacaaatacaaaa

SEQ ID NO: 89767 - DNA, 15 bp, Homo sapiens
cttcacaaatacaaa

SEQ ID NO: 89768 - DNA, 15 bp, Homo sapiens
acttcacaaatacaa

SEQ ID NO: 89769 - DNA, 15 bp, Homo sapiens
gacttcacaaataca

SEQ ID NO: 89770 - DNA, 15 bp, Homo sapiens
agacttcacaaatac

SEQ ID NO: 89771 - DNA, 15 bp, Homo sapiens
aagacttcacaaata

SEQ ID NO: 89772 - DNA, 15 bp, Homo sapiens
taagacttcacaaat

SEQ ID NO: 89773 - DNA, 15 bp, Homo sapiens
gtaagacttcacaaa

SEQ ID NO: 89774 - DNA, 15 bp, Homo sapiens
tgtaagacttcacaa

SEQ ID NO: 89775 - DNA, 15 bp, Homo sapiens
ttgtaagacttcaca

SEQ ID NO: 89776 - DNA, 15 bp, Homo sapiens
cttgtaagacttcac

SEQ ID NO: 89777 - DNA, 15 bp, Homo sapiens
ccttgtaagacttca

SEQ ID NO: 89778 - DNA, 15 bp, Homo sapiens
accttgtaagacttc

SEQ ID NO: 89779 - DNA, 15 bp, Homo sapiens
aaccttgtaagactt

SEQ ID NO: 89780 - DNA, 15 bp, Homo sapiens
taaccttgtaagact

SEQ ID NO: 89781 - DNA, 15 bp, Homo sapiens
ataaccttgtaagac

SEQ ID NO: 89782 - DNA, 15 bp, Homo sapiens
gataaccttgtaaga

SEQ ID NO: 89783 - DNA, 15 bp, Homo sapiens
agataaccttgtaag

SEQ ID NO: 89784 - DNA, 15 bp, Homo sapiens
aagataaccttgtaa

SEQ ID NO: 89785 - DNA, 15 bp, Homo sapiens
taagataaccttgta

SEQ ID NO: 89786 - DNA, 15 bp, Homo sapiens
ataagataaccttgt

SEQ ID NO: 89787 - DNA, 15 bp, Homo sapiens
aataagataaccttg

SEQ ID NO: 89788 - DNA, 15 bp, Homo sapiens
taataagataacctt

SEQ ID NO: 89789 - DNA, 15 bp, Homo sapiens
ttaataagataacct

SEQ ID NO: 89790 - DNA, 15 bp, Homo sapiens
attaataagataacc

SEQ ID NO: 89791 - DNA, 15 bp, Homo sapiens
tattaataagataac

SEQ ID NO: 89792 - DNA, 15 bp, Homo sapiens
ttattaataagataa

SEQ ID NO: 89793 - DNA, 15 bp, Homo sapiens
tttattaataagata

SEQ ID NO: 89794 - DNA, 15 bp, Homo sapiens
ttttattaataagat

SEQ ID NO: 89795 - DNA, 15 bp, Homo sapiens
attttattaataaga

SEQ ID NO: 89796 - DNA, 15 bp, Homo sapiens
aattttattaataag

SEQ ID NO: 89797 - DNA, 15 bp, Homo sapiens
gaattttattaataa

SEQ ID NO: 89798 - DNA, 15 bp, Homo sapiens
tgaattttattaata

SEQ ID NO: 89799 - DNA, 15 bp, Homo sapiens
ttgaattttattaat

SEQ ID NO: 89800 - DNA, 15 bp, Homo sapiens
tttgaattttattaa

SEQ ID NO: 89801 - DNA, 15 bp, Homo sapiens
gtttgaattttatta

SEQ ID NO: 89802 - DNA, 15 bp, Homo sapiens
tgtttgaattttatt

SEQ ID NO: 89803 - DNA, 15 bp, Homo sapiens
atgtttgaattttat

SEQ ID NO: 89804 - DNA, 15 bp, Homo sapiens
gatgtttgaatttta

SEQ ID NO: 89805 - DNA, 15 bp, Homo sapiens
ggatgtttgaatttt

SEQ ID NO: 89806 - DNA, 15 bp, Homo sapiens
aggatgtttgaattt

SEQ ID NO: 89807 - DNA, 15 bp, Homo sapiens
taggatgtttgaatt

SEQ ID NO: 89808 - DNA, 15 bp, Homo sapiens
ctaggatgtttgaat

SEQ ID NO: 89809 - DNA, 15 bp, Homo sapiens
cctaggatgtttgaa

SEQ ID NO: 89810 - DNA, 15 bp, Homo sapiens
acctaggatgtttga

SEQ ID NO: 89811 - DNA, 15 bp, Homo sapiens
tacctaggatgtttg

SEQ ID NO: 89812 - DNA, 15 bp, Homo sapiens
ttacctaggatgttt

SEQ ID NO: 89813 - DNA, 15 bp, Homo sapiens
tttacctaggatgtt

SEQ ID NO: 89814 - DNA, 15 bp, Homo sapiens
ttttacctaggatgt

SEQ ID NO: 89815 - DNA, 15 bp, Homo sapiens
tttttacctaggatg

SEQ ID NO: 89816 - DNA, 15 bp, Homo sapiens
ttttttacctaggat

SEQ ID NO: 89817 - DNA, 15 bp, Homo sapiens
tttttttacctagga

SEQ ID NO: 89818 - DNA, 15 bp, Homo sapiens
ttttttttacctagg

SEQ ID NO: 89819 - DNA, 15 bp, Homo sapiens
tttttttttacctag

SEQ ID NO: 89820 - DNA, 15 bp, Homo sapiens
ttttttttttaccta

SEQ ID NO: 89821 - DNA, 15 bp, Homo sapiens
tttttttttttacct

SEQ ID NO: 89822 - DNA, 15 bp, Homo sapiens
ttttttttttttacc

SEQ ID NO: 89823 - DNA, 15 bp, Homo sapiens
tttttttttttttac

SEQ ID NO: 89824 - DNA, 15 bp, Homo sapiens
cttttttttttttta

SEQ ID NO: 89825 - DNA, 15 bp, Homo sapiens
ccttttttttttttt

SEQ ID NO: 89826 - DNA, 15 bp, Homo sapiens
acctttttttttttt

SEQ ID NO: 89827 - DNA, 15 bp, Homo sapiens
gaccttttttttttt

SEQ ID NO: 89828 - DNA, 15 bp, Homo sapiens
tgacctttttttttt

SEQ ID NO: 89829 - DNA, 15 bp, Homo sapiens
ctgaccttttttttt

SEQ ID NO: 89830 - DNA, 15 bp, Homo sapiens
tctgacctttttttt

SEQ ID NO: 89831 - DNA, 15 bp, Homo sapiens
ttctgaccttttttt

SEQ ID NO: 89832 - DNA, 15 bp, Homo sapiens
attctgacctttttt

SEQ ID NO: 89833 - DNA, 15 bp, Homo sapiens
aattctgaccttttt

SEQ ID NO: 89834 - DNA, 15 bp, Homo sapiens
caattctgacctttt

SEQ ID NO: 89835 - DNA, 15 bp, Homo sapiens
acaattctgaccttt

SEQ ID NO: 89836 - DNA, 15 bp, Homo sapiens
aacaattctgacctt

SEQ ID NO: 89837 - DNA, 15 bp, Homo sapiens
aaacaattctgacct

SEQ ID NO: 89838 - DNA, 15 bp, Homo sapiens
taaacaattctgacc

SEQ ID NO: 89839 - DNA, 15 bp, Homo sapiens
ctaaacaattctgac

SEQ ID NO: 89840 - DNA, 15 bp, Homo sapiens
actaaacaattctga

SEQ ID NO: 89841 - DNA, 15 bp, Homo sapiens
cactaaacaattctg

SEQ ID NO: 89842 - DNA, 15 bp, Homo sapiens
tcactaaacaattct

SEQ ID NO: 89843 - DNA, 15 bp, Homo sapiens
gtcactaaacaattc

SEQ ID NO: 89844 - DNA, 15 bp, Homo sapiens
agtcactaaacaatt

SEQ ID NO: 89845 - DNA, 15 bp, Homo sapiens
cagtcactaaacaat

SEQ ID NO: 89846 - DNA, 15 bp, Homo sapiens
acagtcactaaacaa

SEQ ID NO: 89847 - DNA, 15 bp, Homo sapiens
tacagtcactaaaca

SEQ ID NO: 89848 - DNA, 15 bp, Homo sapiens
ttacagtcactaaac

SEQ ID NO: 89849 - DNA, 15 bp, Homo sapiens
attacagtcactaaa

SEQ ID NO: 89850 - DNA, 15 bp, Homo sapiens
aattacagtcactaa

SEQ ID NO: 89851 - DNA, 15 bp, Homo sapiens
aaattacagtcacta

SEQ ID NO: 89852 - DNA, 15 bp, Homo sapiens
aaaattacagtcact

SEQ ID NO: 89853 - DNA, 15 bp, Homo sapiens
gaaaattacagtcac

SEQ ID NO: 89854 - DNA, 15 bp, Homo sapiens
agaaaattacagtca

SEQ ID NO: 89855 - DNA, 15 bp, Homo sapiens
aagaaaattacagtc

SEQ ID NO: 89856 - DNA, 15 bp, Homo sapiens
aaagaaaattacagt

SEQ ID NO: 89857 - DNA, 15 bp, Homo sapiens
aaaagaaaattacag

SEQ ID NO: 89858 - DNA, 15 bp, Homo sapiens
caaaagaaaattaca

SEQ ID NO: 89859 - DNA, 15 bp, Homo sapiens
gcaaaagaaaattac

SEQ ID NO: 89860 - DNA, 15 bp, Homo sapiens
cgcaaaagaaaatta

SEQ ID NO: 89861 - DNA, 15 bp, Homo sapiens
gcgcaaaagaaaatt

SEQ ID NO: 89862 - DNA, 15 bp, Homo sapiens
tgcgcaaaagaaaat

SEQ ID NO: 89863 - DNA, 15 bp, Homo sapiens
gtgcgcaaaagaaaa

SEQ ID NO: 89864 - DNA, 15 bp, Homo sapiens
agtgcgcaaaagaaa

SEQ ID NO: 89865 - DNA, 15 bp, Homo sapiens
tagtgcgcaaaagaa

SEQ ID NO: 89866 - DNA, 15 bp, Homo sapiens
ttagtgcgcaaaaga

SEQ ID NO: 89867 - DNA, 15 bp, Homo sapiens
cttagtgcgcaaaag

SEQ ID NO: 89868 - DNA, 15 bp, Homo sapiens
ccttagtgcgcaaaa

SEQ ID NO: 89869 - DNA, 15 bp, Homo sapiens
tccttagtgcgcaaa

SEQ ID NO: 89870 - DNA, 15 bp, Homo sapiens
ttccttagtgcgcaa

SEQ ID NO: 89871 - DNA, 15 bp, Homo sapiens
tttccttagtgcgca

SEQ ID NO: 89872 - DNA, 15 bp, Homo sapiens
ctttccttagtgcgc

SEQ ID NO: 89873 - DNA, 15 bp, Homo sapiens
actttccttagtgcg

SEQ ID NO: 89874 - DNA, 15 bp, Homo sapiens
cactttccttagtgc

SEQ ID NO: 89875 - DNA, 15 bp, Homo sapiens
gcactttccttagtg

SEQ ID NO: 89876 - DNA, 15 bp, Homo sapiens
tgcactttccttagt

SEQ ID NO: 89877 - DNA, 15 bp, Homo sapiens
ttgcactttccttag

SEQ ID NO: 89878 - DNA, 15 bp, Homo sapiens
tttgcactttcctta

SEQ ID NO: 89879 - DNA, 15 bp, Homo sapiens
ctttgcactttcctt

SEQ ID NO: 89880 - DNA, 15 bp, Homo sapiens
actttgcactttcct

SEQ ID NO: 89881 - DNA, 15 bp, Homo sapiens
tactttgcactttcc

SEQ ID NO: 89882 - DNA, 15 bp, Homo sapiens
ttactttgcactttc

SEQ ID NO: 89883 - DNA, 15 bp, Homo sapiens
gttactttgcacttt

SEQ ID NO: 89884 - DNA, 15 bp, Homo sapiens
agttactttgcactt

SEQ ID NO: 89885 - DNA, 15 bp, Homo sapiens
aagttactttgcact

SEQ ID NO: 89886 - DNA, 15 bp, Homo sapiens
taagttactttgcac

SEQ ID NO: 89887 - DNA, 15 bp, Homo sapiens
ctaagttactttgca

SEQ ID NO: 89888 - DNA, 15 bp, Homo sapiens
tctaagttactttgc

SEQ ID NO: 89889 - DNA, 15 bp, Homo sapiens
ctctaagttactttg

SEQ ID NO: 89890 - DNA, 15 bp, Homo sapiens
actctaagttacttt

SEQ ID NO: 89891 - DNA, 15 bp, Homo sapiens
cactctaagttactt

SEQ ID NO: 89892 - DNA, 15 bp, Homo sapiens
tcactctaagttact

SEQ ID NO: 89893 - DNA, 15 bp, Homo sapiens
gtcactctaagttac

SEQ ID NO: 89894 - DNA, 15 bp, Homo sapiens
agtcactctaagtta

SEQ ID NO: 89895 - DNA, 15 bp, Homo sapiens
cagtcactctaagtt

SEQ ID NO: 89896 - DNA, 15 bp, Homo sapiens
tcagtcactctaagt

SEQ ID NO: 89897 - DNA, 15 bp, Homo sapiens
ttcagtcactctaag

SEQ ID NO: 89898 - DNA, 15 bp, Homo sapiens
tttcagtcactctaa

SEQ ID NO: 89899 - DNA, 15 bp, Homo sapiens
gtttcagtcactcta

SEQ ID NO: 89900 - DNA, 15 bp, Homo sapiens
agtttcagtcactct

SEQ ID NO: 89901 - DNA, 15 bp, Homo sapiens
aagtttcagtcactc

SEQ ID NO: 89902 - DNA, 15 bp, Homo sapiens
gaagtttcagtcact

SEQ ID NO: 89903 - DNA, 15 bp, Homo sapiens
tgaagtttcagtcac

SEQ ID NO: 89904 - DNA, 15 bp, Homo sapiens
gtgaagtttcagtca

SEQ ID NO: 89905 - DNA, 15 bp, Homo sapiens
tgtgaagtttcagtc

SEQ ID NO: 89906 - DNA, 15 bp, Homo sapiens
ctgtgaagtttcagt

SEQ ID NO: 89907 - DNA, 15 bp, Homo sapiens
tctgtgaagtttcag

SEQ ID NO: 89908 - DNA, 15 bp, Homo sapiens
ttctgtgaagtttca

SEQ ID NO: 89909 - DNA, 15 bp, Homo sapiens
attctgtgaagtttc

SEQ ID NO: 89910 - DNA, 15 bp, Homo sapiens
tattctgtgaagttt

SEQ ID NO: 89911 - DNA, 15 bp, Homo sapiens
ctattctgtgaagtt

SEQ ID NO: 89912 - DNA, 15 bp, Homo sapiens
cctattctgtgaagt

SEQ ID NO: 89913 - DNA, 15 bp, Homo sapiens
ccctattctgtgaag

SEQ ID NO: 89914 - DNA, 15 bp, Homo sapiens
accctattctgtgaa

SEQ ID NO: 89915 - DNA, 15 bp, Homo sapiens
aaccctattctgtga

SEQ ID NO: 89916 - DNA, 15 bp, Homo sapiens
caaccctattctgtg

SEQ ID NO: 89917 - DNA, 15 bp, Homo sapiens
tcaaccctattctgt

SEQ ID NO: 89918 - DNA, 15 bp, Homo sapiens
ttcaaccctattctg

SEQ ID NO: 89919 - DNA, 15 bp, Homo sapiens
cttcaaccctattct

SEQ ID NO: 89920 - DNA, 15 bp, Homo sapiens
tcttcaaccctattc

SEQ ID NO: 89921 - DNA, 15 bp, Homo sapiens
atcttcaaccctatt

SEQ ID NO: 89922 - DNA, 15 bp, Homo sapiens
aatcttcaaccctat

SEQ ID NO: 89923 - DNA, 15 bp, Homo sapiens
caatcttcaacccta

SEQ ID NO: 89924 - DNA, 15 bp, Homo sapiens
tcaatcttcaaccct

SEQ ID NO: 89925 - DNA, 15 bp, Homo sapiens
ttcaatcttcaaccc

SEQ ID NO: 89926 - DNA, 15 bp, Homo sapiens
attcaatcttcaacc

SEQ ID NO: 89927 - DNA, 15 bp, Homo sapiens
aattcaatcttcaac

SEQ ID NO: 89928 - DNA, 15 bp, Homo sapiens
gaattcaatcttcaa

SEQ ID NO: 89929 - DNA, 15 bp, Homo sapiens
tgaattcaatcttca

SEQ ID NO: 89930 - DNA, 15 bp, Homo sapiens
atgaattcaatcttc

SEQ ID NO: 89931 - DNA, 15 bp, Homo sapiens
tatgaattcaatctt

SEQ ID NO: 89932 - DNA, 15 bp, Homo sapiens
ttatgaattcaatct

SEQ ID NO: 89933 - DNA, 15 bp, Homo sapiens
gttatgaattcaatc

SEQ ID NO: 89934 - DNA, 15 bp, Homo sapiens
agttatgaattcaat

SEQ ID NO: 89935 - DNA, 15 bp, Homo sapiens
tagttatgaattcaa

SEQ ID NO: 89936 - DNA, 15 bp, Homo sapiens
atagttatgaattca

SEQ ID NO: 89937 - DNA, 15 bp, Homo sapiens
gatagttatgaattc

SEQ ID NO: 89938 - DNA, 15 bp, Homo sapiens
ggatagttatgaatt

SEQ ID NO: 89939 - DNA, 15 bp, Homo sapiens
gggatagttatgaat

SEQ ID NO: 89940 - DNA, 15 bp, Homo sapiens
tgggatagttatgaa

SEQ ID NO: 89941 - DNA, 15 bp, Homo sapiens
ttgggatagttatga

SEQ ID NO: 89942 - DNA, 15 bp, Homo sapiens
tttgggatagttatg

SEQ ID NO: 89943 - DNA, 15 bp, Homo sapiens
ctttgggatagttat

SEQ ID NO: 89944 - DNA, 15 bp, Homo sapiens
tctttgggatagtta

SEQ ID NO: 89945 - DNA, 15 bp, Homo sapiens
gtctttgggatagtt

SEQ ID NO: 89946 - DNA, 15 bp, Homo sapiens
ggtctttgggatagt

SEQ ID NO: 89947 - DNA, 15 bp, Homo sapiens
aggtctttgggatag

SEQ ID NO: 89948 - DNA, 15 bp, Homo sapiens
taggtctttgggata

SEQ ID NO: 89949 - DNA, 15 bp, Homo sapiens
ataggtctttgggat

SEQ ID NO: 89950 - DNA, 15 bp, Homo sapiens
gataggtctttggga

SEQ ID NO: 89951 - DNA, 15 bp, Homo sapiens
ggataggtctttggg

SEQ ID NO: 89952 - DNA, 15 bp, Homo sapiens
tggataggtctttgg

SEQ ID NO: 89953 - DNA, 15 bp, Homo sapiens
atggataggtctttg

SEQ ID NO: 89954 - DNA, 15 bp, Homo sapiens
aatggataggtcttt

SEQ ID NO: 89955 - DNA, 15 bp, Homo sapiens
caatggataggtctt

SEQ ID NO: 89956 - DNA, 15 bp, Homo sapiens
gcaatggataggtct

SEQ ID NO: 89957 - DNA, 15 bp, Homo sapiens
tgcaatggataggtc

SEQ ID NO: 89958 - DNA, 15 bp, Homo sapiens
gtgcaatggataggt

SEQ ID NO: 89959 - DNA, 15 bp, Homo sapiens
agtgcaatggatagg

SEQ ID NO: 89960 - DNA, 15 bp, Homo sapiens
tagtgcaatggatag

SEQ ID NO: 89961 - DNA, 15 bp, Homo sapiens
atagtgcaatggata

SEQ ID NO: 89962 - DNA, 15 bp, Homo sapiens
catagtgcaatggat

SEQ ID NO: 89963 - DNA, 15 bp, Homo sapiens
gcatagtgcaatgga

SEQ ID NO: 89964 - DNA, 15 bp, Homo sapiens
agcatagtgcaatgg

SEQ ID NO: 89965 - DNA, 15 bp, Homo sapiens
aagcatagtgcaatg

SEQ ID NO: 89966 - DNA, 15 bp, Homo sapiens
aaagcatagtgcaat

SEQ ID NO: 89967 - DNA, 15 bp, Homo sapiens
taaagcatagtgcaa

SEQ ID NO: 89968 - DNA, 15 bp, Homo sapiens
ataaagcatagtgca

SEQ ID NO: 89969 - DNA, 15 bp, Homo sapiens
aataaagcatagtgc

SEQ ID NO: 89970 - DNA, 15 bp, Homo sapiens
aaataaagcatagtg

SEQ ID NO: 89971 - DNA, 15 bp, Homo sapiens
taaataaagcatagt

SEQ ID NO: 89972 - DNA, 15 bp, Homo sapiens
ttaaataaagcatag

SEQ ID NO: 89973 - DNA, 15 bp, Homo sapiens
tttaaataaagcata

SEQ ID NO: 89974 - DNA, 15 bp, Homo sapiens
ttttaaataaagcat

SEQ ID NO: 89975 - DNA, 15 bp, Homo sapiens
tttttaaataaagca

SEQ ID NO: 89976 - DNA, 15 bp, Homo sapiens
gtttttaaataaagc

SEQ ID NO: 89977 - DNA, 15 bp, Homo sapiens
ggtttttaaataaag

SEQ ID NO: 89978 - DNA, 15 bp, Homo sapiens
tggtttttaaataaa

SEQ ID NO: 89979 - DNA, 15 bp, Homo sapiens
gtggtttttaaataa

SEQ ID NO: 89980 - DNA, 15 bp, Homo sapiens
tgtggtttttaaata

SEQ ID NO: 89981 - DNA, 15 bp, Homo sapiens
ttgtggtttttaaat

SEQ ID NO: 89982 - DNA, 15 bp, Homo sapiens
tttgtggtttttaaa

SEQ ID NO: 89983 - DNA, 15 bp, Homo sapiens
ttttgtggtttttaa

SEQ ID NO: 89984 - DNA, 15 bp, Homo sapiens
gttttgtggttttta

SEQ ID NO: 89985 - DNA, 15 bp, Homo sapiens
ggttttgtggttttt

SEQ ID NO: 89986 - DNA, 15 bp, Homo sapiens
aggttttgtggtttt

SEQ ID NO: 89987 - DNA, 15 bp, Homo sapiens
caggttttgtggttt

SEQ ID NO: 89988 - DNA, 15 bp, Homo sapiens
acaggttttgtggtt

SEQ ID NO: 89989 - DNA, 15 bp, Homo sapiens
cacaggttttgtggt

SEQ ID NO: 89990 - DNA, 15 bp, Homo sapiens
gcacaggttttgtgg

SEQ ID NO: 89991 - DNA, 15 bp, Homo sapiens
agcacaggttttgtg

SEQ ID NO: 89992 - DNA, 15 bp, Homo sapiens
cagcacaggttttgt

SEQ ID NO: 89993 - DNA, 15 bp, Homo sapiens
acagcacaggttttg

SEQ ID NO: 89994 - DNA, 15 bp, Homo sapiens
aacagcacaggtttt

SEQ ID NO: 89995 - DNA, 15 bp, Homo sapiens
caacagcacaggttt

SEQ ID NO: 89996 - DNA, 15 bp, Homo sapiens
tcaacagcacaggtt

SEQ ID NO: 89997 - DNA, 15 bp, Homo sapiens
atcaacagcacaggt

SEQ ID NO: 89998 - DNA, 15 bp, Homo sapiens
gatcaacagcacagg

SEQ ID NO: 89999 - DNA, 15 bp, Homo sapiens
agatcaacagcacag

SEQ ID NO: 90000 - DNA, 15 bp, Homo sapiens
gagatcaacagcaca

SEQ ID NO: 90001 - DNA, 15 bp, Homo sapiens
tgagatcaacagcac

SEQ ID NO: 90002 - DNA, 15 bp, Homo sapiens
atgagatcaacagca

SEQ ID NO: 90003 - DNA, 15 bp, Homo sapiens
tatgagatcaacagc

SEQ ID NO: 90004 - DNA, 15 bp, Homo sapiens
ttatgagatcaacag

SEQ ID NO: 90005 - DNA, 15 bp, Homo sapiens
tttatgagatcaaca

SEQ ID NO: 90006 - DNA, 15 bp, Homo sapiens
atttatgagatcaac

SEQ ID NO: 90007 - DNA, 15 bp, Homo sapiens
tatttatgagatcaa

SEQ ID NO: 90008 - DNA, 15 bp, Homo sapiens
ctatttatgagatca

SEQ ID NO: 90009 - DNA, 15 bp, Homo sapiens
tctatttatgagatc

SEQ ID NO: 90010 - DNA, 15 bp, Homo sapiens
ttctatttatgagat

SEQ ID NO: 90011 - DNA, 15 bp, Homo sapiens
gttctatttatgaga

SEQ ID NO: 90012 - DNA, 15 bp, Homo sapiens
agttctatttatgag

SEQ ID NO: 90013 - DNA, 15 bp, Homo sapiens
aagttctatttatga

SEQ ID NO: 90014 - DNA, 15 bp, Homo sapiens
caagttctatttatg

SEQ ID NO: 90015 - DNA, 15 bp, Homo sapiens
acaagttctatttat

SEQ ID NO: 90016 - DNA, 15 bp, Homo sapiens
tacaagttctattta

SEQ ID NO: 90017 - DNA, 15 bp, Homo sapiens
atacaagttctattt

SEQ ID NO: 90018 - DNA, 15 bp, Homo sapiens
aatacaagttctatt

SEQ ID NO: 90019 - DNA, 15 bp, Homo sapiens
aaatacaagttctat

SEQ ID NO: 90020 - DNA, 15 bp, Homo sapiens
taaatacaagttcta

SEQ ID NO: 90021 - DNA, 15 bp, Homo sapiens
ataaatacaagttct

SEQ ID NO: 90022 - DNA, 15 bp, Homo sapiens
tataaatacaagttc

SEQ ID NO: 90023 - DNA, 15 bp, Homo sapiens
atataaatacaagtt

SEQ ID NO: 90024 - DNA, 15 bp, Homo sapiens
aatataaatacaagt

SEQ ID NO: 90025 - DNA, 15 bp, Homo sapiens
aaatataaatacaag

SEQ ID NO: 90026 - DNA, 15 bp, Homo sapiens
taaatataaatacaa

SEQ ID NO: 90027 - DNA, 15 bp, Homo sapiens
ataaatataaataca

SEQ ID NO: 90028 - DNA, 15 bp, Homo sapiens
aataaatataaatac

SEQ ID NO: 90029 - DNA, 15 bp, Homo sapiens
aaataaatataaata

SEQ ID NO: 90030 - DNA, 15 bp, Homo sapiens
aaaataaatataaat

SEQ ID NO: 90031 - DNA, 15 bp, Homo sapiens
gaaaataaatataaa

SEQ ID NO: 90032 - DNA, 15 bp, Homo sapiens
tgaaaataaatataa

SEQ ID NO: 90033 - DNA, 15 bp, Homo sapiens
atgaaaataaatata

SEQ ID NO: 90034 - DNA, 15 bp, Homo sapiens
aatgaaaataaatat

SEQ ID NO: 90035 - DNA, 15 bp, Homo sapiens
aaatgaaaataaata

SEQ ID NO: 90036 - DNA, 15 bp, Homo sapiens
aaaatgaaaataaat

SEQ ID NO: 90037 - DNA, 15 bp, Homo sapiens
taaaatgaaaataaa

SEQ ID NO: 90038 - DNA, 15 bp, Homo sapiens
ctaaaatgaaaataa

SEQ ID NO: 90039 - DNA, 15 bp, Homo sapiens
actaaaatgaaaata

SEQ ID NO: 90040 - DNA, 15 bp, Homo sapiens
gactaaaatgaaaat

SEQ ID NO: 90041 - DNA, 15 bp, Homo sapiens
agactaaaatgaaaa

SEQ ID NO: 90042 - DNA, 15 bp, Homo sapiens
cagactaaaatgaaa

SEQ ID NO: 90043 - DNA, 15 bp, Homo sapiens
acagactaaaatgaa

SEQ ID NO: 90044 - DNA, 15 bp, Homo sapiens
gacagactaaaatga

SEQ ID NO: 90045 - DNA, 15 bp, Homo sapiens
agacagactaaaatg

SEQ ID NO: 90046 - DNA, 15 bp, Homo sapiens
aagacagactaaaat

SEQ ID NO: 90047 - DNA, 15 bp, Homo sapiens
gaagacagactaaaa

SEQ ID NO: 90048 - DNA, 15 bp, Homo sapiens
agaagacagactaaa

SEQ ID NO: 90049 - DNA, 15 bp, Homo sapiens
aagaagacagactaa

SEQ ID NO: 90050 - DNA, 15 bp, Homo sapiens
caagaagacagacta

SEQ ID NO: 90051 - DNA, 15 bp, Homo sapiens
ccaagaagacagact

SEQ ID NO: 90052 - DNA, 15 bp, Homo sapiens
accaagaagacagac

SEQ ID NO: 90053 - DNA, 15 bp, Homo sapiens
aaccaagaagacaga

SEQ ID NO: 90054 - DNA, 15 bp, Homo sapiens
caaccaagaagacag

SEQ ID NO: 90055 - DNA, 15 bp, Homo sapiens
gcaaccaagaagaca

SEQ ID NO: 90056 - DNA, 15 bp, Homo sapiens
agcaaccaagaagac

SEQ ID NO: 90057 - DNA, 15 bp, Homo sapiens
cagcaaccaagaaga

SEQ ID NO: 90058 - DNA, 15 bp, Homo sapiens
acagcaaccaagaag

SEQ ID NO: 90059 - DNA, 15 bp, Homo sapiens
aacagcaaccaagaa

SEQ ID NO: 90060 - DNA, 15 bp, Homo sapiens
caacagcaaccaaga

SEQ ID NO: 90061 - DNA, 15 bp, Homo sapiens
tcaacagcaaccaag

SEQ ID NO: 90062 - DNA, 15 bp, Homo sapiens
atcaacagcaaccaa

SEQ ID NO: 90063 - DNA, 15 bp, Homo sapiens
tatcaacagcaacca

SEQ ID NO: 90064 - DNA, 15 bp, Homo sapiens
ctatcaacagcaacc

SEQ ID NO: 90065 - DNA, 15 bp, Homo sapiens
tctatcaacagcaac

SEQ ID NO: 90066 - DNA, 15 bp, Homo sapiens
gtctatcaacagcaa

SEQ ID NO: 90067 - DNA, 15 bp, Homo sapiens
tgtctatcaacagca

SEQ ID NO: 90068 - DNA, 15 bp, Homo sapiens
gtgtctatcaacagc

SEQ ID NO: 90069 - DNA, 15 bp, Homo sapiens
agtgtctatcaacag

SEQ ID NO: 90070 - DNA, 15 bp, Homo sapiens
tagtgtctatcaaca

SEQ ID NO: 90071 - DNA, 15 bp, Homo sapiens
ttagtgtctatcaac

SEQ ID NO: 90072 - DNA, 15 bp, Homo sapiens
tttagtgtctatcaa

SEQ ID NO: 90073 - DNA, 15 bp, Homo sapiens
ttttagtgtctatca

SEQ ID NO: 90074 - DNA, 15 bp, Homo sapiens
cttttagtgtctatc

SEQ ID NO: 90075 - DNA, 15 bp, Homo sapiens
tcttttagtgtctat

SEQ ID NO: 90076 - DNA, 15 bp, Homo sapiens
ctcttttagtgtcta

SEQ ID NO: 90077 - DNA, 15 bp, Homo sapiens
actcttttagtgtct

SEQ ID NO: 90078 - DNA, 15 bp, Homo sapiens
tactcttttagtgtc

SEQ ID NO: 90079 - DNA, 15 bp, Homo sapiens
atactcttttagtgt

SEQ ID NO: 90080 - DNA, 15 bp, Homo sapiens
aatactcttttagtg

SEQ ID NO: 90081 - DNA, 15 bp, Homo sapiens
taatactcttttagt

SEQ ID NO: 90082 - DNA, 15 bp, Homo sapiens
ctaatactcttttag

SEQ ID NO: 90083 - DNA, 15 bp, Homo sapiens
tctaatactctttta

SEQ ID NO: 90084 - DNA, 15 bp, Homo sapiens
atctaatactctttt

SEQ ID NO: 90085 - DNA, 15 bp, Homo sapiens
tatctaatactcttt

SEQ ID NO: 90086 - DNA, 15 bp, Homo sapiens
atatctaatactctt

SEQ ID NO: 90087 - DNA, 15 bp, Homo sapiens
aatatctaatactct

SEQ ID NO: 90088 - DNA, 15 bp, Homo sapiens
taatatctaatactc

SEQ ID NO: 90089 - DNA, 15 bp, Homo sapiens
ataatatctaatact

SEQ ID NO: 90090 - DNA, 15 bp, Homo sapiens
gataatatctaatac

SEQ ID NO: 90091 - DNA, 15 bp, Homo sapiens
agataatatctaata

SEQ ID NO: 90092 - DNA, 15 bp, Homo sapiens
tagataatatctaat

SEQ ID NO: 90093 - DNA, 15 bp, Homo sapiens
ttagataatatctaa

SEQ ID NO: 90094 - DNA, 15 bp, Homo sapiens
cttagataatatcta

SEQ ID NO: 90095 - DNA, 15 bp, Homo sapiens
acttagataatatct

SEQ ID NO: 90096 - DNA, 15 bp, Homo sapiens
aacttagataatatc

SEQ ID NO: 90097 - DNA, 15 bp, Homo sapiens
aaacttagataatat

SEQ ID NO: 90098 - DNA, 15 bp, Homo sapiens
caaacttagataata

SEQ ID NO: 90099 - DNA, 15 bp, Homo sapiens
tcaaacttagataat

SEQ ID NO: 90100 - DNA, 15 bp, Homo sapiens
ttcaaacttagataa

SEQ ID NO: 90101 - DNA, 15 bp, Homo sapiens
attcaaacttagata

SEQ ID NO: 90102 - DNA, 15 bp, Homo sapiens
tattcaaacttagat

SEQ ID NO: 90103 - DNA, 15 bp, Homo sapiens
atattcaaacttaga

SEQ ID NO: 90104 - DNA, 15 bp, Homo sapiens
tatattcaaacttag

SEQ ID NO: 90105 - DNA, 15 bp, Homo sapiens
ttatattcaaactta

SEQ ID NO: 90106 - DNA, 15 bp, Homo sapiens
cttatattcaaactt

SEQ ID NO: 90107 - DNA, 15 bp, Homo sapiens
ccttatattcaaact

SEQ ID NO: 90108 - DNA, 15 bp, Homo sapiens
gccttatattcaaac

SEQ ID NO: 90109 - DNA, 15 bp, Homo sapiens
agccttatattcaaa

SEQ ID NO: 90110 - DNA, 15 bp, Homo sapiens
tagccttatattcaa

SEQ ID NO: 90111 - DNA, 15 bp, Homo sapiens
atagccttatattca

SEQ ID NO: 90112 - DNA, 15 bp, Homo sapiens
tatagccttatattc

SEQ ID NO: 90113 - DNA, 15 bp, Homo sapiens
ttatagccttatatt

SEQ ID NO: 90114 - DNA, 15 bp, Homo sapiens
tttatagccttatat

SEQ ID NO: 90115 - DNA, 15 bp, Homo sapiens
atttatagccttata

SEQ ID NO: 90116 - DNA, 15 bp, Homo sapiens
tatttatagccttat

SEQ ID NO: 90117 - DNA, 15 bp, Homo sapiens
atatttatagcctta

SEQ ID NO: 90118 - DNA, 15 bp, Homo sapiens
aatatttatagcctt

SEQ ID NO: 90119 - DNA, 15 bp, Homo sapiens
aaatatttatagcct

SEQ ID NO: 90120 - DNA, 15 bp, Homo sapiens
taaatatttatagcc

SEQ ID NO: 90121 - DNA, 15 bp, Homo sapiens
ttaaatatttatagc

SEQ ID NO: 90122 - DNA, 15 bp, Homo sapiens
attaaatatttatag

SEQ ID NO: 90123 - DNA, 15 bp, Homo sapiens
tattaaatatttata

SEQ ID NO: 90124 - DNA, 15 bp, Homo sapiens
ttattaaatatttat

SEQ ID NO: 90125 - DNA, 15 bp, Homo sapiens
attattaaatattta

SEQ ID NO: 90126 - DNA, 15 bp, Homo sapiens
aattattaaatattt

SEQ ID NO: 90127 - DNA, 15 bp, Homo sapiens
aaattattaaatatt

SEQ ID NO: 90128 - DNA, 15 bp, Homo sapiens
aaaattattaaatat

SEQ ID NO: 90129 - DNA, 15 bp, Homo sapiens
aaaaattattaaata

SEQ ID NO: 90130 - DNA, 15 bp, Homo sapiens
taaaaattattaaat

SEQ ID NO: 90131 - DNA, 15 bp, Homo sapiens
ttaaaaattattaaa

SEQ ID NO: 90132 - DNA, 15 bp, Homo sapiens
tttaaaaattattaa

SEQ ID NO: 90133 - DNA, 15 bp, Homo sapiens
ttttaaaaattatta

SEQ ID NO: 90134 - DNA, 15 bp, Homo sapiens
attttaaaaattatt

SEQ ID NO: 90135 - DNA, 15 bp, Homo sapiens
tattttaaaaattat

SEQ ID NO: 90136 - DNA, 15 bp, Homo sapiens
ctattttaaaaatta

SEQ ID NO: 90137 - DNA, 15 bp, Homo sapiens
actattttaaaaatt

SEQ ID NO: 90138 - DNA, 15 bp, Homo sapiens
tactattttaaaaat

SEQ ID NO: 90139 - DNA, 15 bp, Homo sapiens
atactattttaaaaa

SEQ ID NO: 90140 - DNA, 15 bp, Homo sapiens
aatactattttaaaa

SEQ ID NO: 90141 - DNA, 15 bp, Homo sapiens
gaatactattttaaa

SEQ ID NO: 90142 - DNA, 15 bp, Homo sapiens
agaatactattttaa

SEQ ID NO: 90143 - DNA, 15 bp, Homo sapiens
aagaatactatttta

SEQ ID NO: 90144 - DNA, 15 bp, Homo sapiens
caagaatactatttt

SEQ ID NO: 90145 - DNA, 15 bp, Homo sapiens
ccaagaatactattt

SEQ ID NO: 90146 - DNA, 15 bp, Homo sapiens
accaagaatactatt

SEQ ID NO: 90147 - DNA, 15 bp, Homo sapiens
taccaagaatactat

SEQ ID NO: 90148 - DNA, 15 bp, Homo sapiens
ttaccaagaatacta

SEQ ID NO: 90149 - DNA, 15 bp, Homo sapiens
attaccaagaatact

SEQ ID NO: 90150 - DNA, 15 bp, Homo sapiens
aattaccaagaatac

SEQ ID NO: 90151 - DNA, 15 bp, Homo sapiens
caattaccaagaata

SEQ ID NO: 90152 - DNA, 15 bp, Homo sapiens
tcaattaccaagaat

SEQ ID NO: 90153 - DNA, 15 bp, Homo sapiens
ttcaattaccaagaa

SEQ ID NO: 90154 - DNA, 15 bp, Homo sapiens
attcaattaccaaga

SEQ ID NO: 90155 - DNA, 15 bp, Homo sapiens
aattcaattaccaag

SEQ ID NO: 90156 - DNA, 15 bp, Homo sapiens
taattcaattaccaa

SEQ ID NO: 90157 - DNA, 15 bp, Homo sapiens
ataattcaattacca

SEQ ID NO: 90158 - DNA, 15 bp, Homo sapiens
aataattcaattacc

SEQ ID NO: 90159 - DNA, 15 bp, Homo sapiens
gaataattcaattac

SEQ ID NO: 90160 - DNA, 15 bp, Homo sapiens
agaataattcaatta

SEQ ID NO: 90161 - DNA, 15 bp, Homo sapiens
aagaataattcaatt

SEQ ID NO: 90162 - DNA, 15 bp, Homo sapiens
gaagaataattcaat

SEQ ID NO: 90163 - DNA, 15 bp, Homo sapiens
agaagaataattcaa

SEQ ID NO: 90164 - DNA, 15 bp, Homo sapiens
cagaagaataattca

SEQ ID NO: 90165 - DNA, 15 bp, Homo sapiens
acagaagaataattc

SEQ ID NO: 90166 - DNA, 15 bp, Homo sapiens
aacagaagaataatt

SEQ ID NO: 90167 - DNA, 15 bp, Homo sapiens
aaacagaagaataat

SEQ ID NO: 90168 - DNA, 15 bp, Homo sapiens
taaacagaagaataa

SEQ ID NO: 90169 - DNA, 15 bp, Homo sapiens
ttaaacagaagaata

SEQ ID NO: 90170 - DNA, 15 bp, Homo sapiens
tttaaacagaagaat

SEQ ID NO: 90171 - DNA, 15 bp, Homo sapiens
ctttaaacagaagaa

SEQ ID NO: 90172 - DNA, 15 bp, Homo sapiens
cctttaaacagaaga

SEQ ID NO: 90173 - DNA, 15 bp, Homo sapiens
gcctttaaacagaag

SEQ ID NO: 90174 - DNA, 15 bp, Homo sapiens
tgcctttaaacagaa

SEQ ID NO: 90175 - DNA, 15 bp, Homo sapiens
ctgcctttaaacaga

SEQ ID NO: 90176 - DNA, 15 bp, Homo sapiens
tctgcctttaaacag

SEQ ID NO: 90177 - DNA, 15 bp, Homo sapiens
ttctgcctttaaaca

SEQ ID NO: 90178 - DNA, 15 bp, Homo sapiens
cttctgcctttaaac

SEQ ID NO: 90179 - DNA, 15 bp, Homo sapiens
tcttctgcctttaaa

SEQ ID NO: 90180 - DNA, 15 bp, Homo sapiens
ttcttctgcctttaa

SEQ ID NO: 90181 - DNA, 15 bp, Homo sapiens
tttcttctgccttta

SEQ ID NO: 90182 - DNA, 15 bp, Homo sapiens
atttcttctgccttt

SEQ ID NO: 90183 - DNA, 15 bp, Homo sapiens
tatttcttctgcctt

SEQ ID NO: 90184 - DNA, 15 bp, Homo sapiens
ttatttcttctgcct

SEQ ID NO: 90185 - DNA, 15 bp, Homo sapiens
attatttcttctgcc

SEQ ID NO: 90186 - DNA, 15 bp, Homo sapiens
aattatttcttctgc

SEQ ID NO: 90187 - DNA, 15 bp, Homo sapiens
caattatttcttctg

SEQ ID NO: 90188 - DNA, 15 bp, Homo sapiens
tcaattatttcttct

SEQ ID NO: 90189 - DNA, 15 bp, Homo sapiens
ttcaattatttcttc

SEQ ID NO: 90190 - DNA, 15 bp, Homo sapiens
gttcaattatttctt

SEQ ID NO: 90191 - DNA, 15 bp, Homo sapiens
tgttcaattatttct

SEQ ID NO: 90192 - DNA, 15 bp, Homo sapiens
atgttcaattatttc

SEQ ID NO: 90193 - DNA, 15 bp, Homo sapiens
gatgttcaattattt

SEQ ID NO: 90194 - DNA, 15 bp, Homo sapiens
tgatgttcaattatt

SEQ ID NO: 90195 - DNA, 15 bp, Homo sapiens
atgatgttcaattat

SEQ ID NO: 90196 - DNA, 15 bp, Homo sapiens
gatgatgttcaatta

SEQ ID NO: 90197 - DNA, 15 bp, Homo sapiens
ggatgatgttcaatt

SEQ ID NO: 90198 - DNA, 15 bp, Homo sapiens
aggatgatgttcaat

SEQ ID NO: 90199 - DNA, 15 bp, Homo sapiens
caggatgatgttcaa

SEQ ID NO: 90200 - DNA, 15 bp, Homo sapiens
tcaggatgatgttca

SEQ ID NO: 90201 - DNA, 15 bp, Homo sapiens
ctcaggatgatgttc

SEQ ID NO: 90202 - DNA, 15 bp, Homo sapiens
actcaggatgatgtt

SEQ ID NO: 90203 - DNA, 15 bp, Homo sapiens
aactcaggatgatgt

SEQ ID NO: 90204 - DNA, 15 bp, Homo sapiens
aaactcaggatgatg

SEQ ID NO: 90205 - DNA, 15 bp, Homo sapiens
aaaactcaggatgat

SEQ ID NO: 90206 - DNA, 15 bp, Homo sapiens
aaaaactcaggatga

SEQ ID NO: 90207 - DNA, 15 bp, Homo sapiens
gaaaaactcaggatg

SEQ ID NO: 90208 - DNA, 15 bp, Homo sapiens
agaaaaactcaggat

SEQ ID NO: 90209 - DNA, 15 bp, Homo sapiens
cagaaaaactcagga

SEQ ID NO: 90210 - DNA, 15 bp, Homo sapiens
acagaaaaactcagg

SEQ ID NO: 90211 - DNA, 15 bp, Homo sapiens
tacagaaaaactcag

SEQ ID NO: 90212 - DNA, 15 bp, Homo sapiens
ctacagaaaaactca

SEQ ID NO: 90213 - DNA, 15 bp, Homo sapiens
cctacagaaaaactc

SEQ ID NO: 90214 - DNA, 15 bp, Homo sapiens
tcctacagaaaaact

SEQ ID NO: 90215 - DNA, 15 bp, Homo sapiens
ttcctacagaaaaac

SEQ ID NO: 90216 - DNA, 15 bp, Homo sapiens
attcctacagaaaaa

SEQ ID NO: 90217 - DNA, 15 bp, Homo sapiens
gattcctacagaaaa

SEQ ID NO: 90218 - DNA, 15 bp, Homo sapiens
tgattcctacagaaa

SEQ ID NO: 90219 - DNA, 15 bp, Homo sapiens
ctgattcctacagaa

SEQ ID NO: 90220 - DNA, 15 bp, Homo sapiens
tctgattcctacaga

SEQ ID NO: 90221 - DNA, 15 bp, Homo sapiens
ctctgattcctacag

SEQ ID NO: 90222 - DNA, 15 bp, Homo sapiens
gctctgattcctaca

SEQ ID NO: 90223 - DNA, 15 bp, Homo sapiens
ggctctgattcctac

SEQ ID NO: 90224 - DNA, 15 bp, Homo sapiens
gggctctgattccta

SEQ ID NO: 90225 - DNA, 15 bp, Homo sapiens
tgggctctgattcct

SEQ ID NO: 90226 - DNA, 15 bp, Homo sapiens
ttgggctctgattcc

SEQ ID NO: 90227 - DNA, 15 bp, Homo sapiens
attgggctctgattc

SEQ ID NO: 90228 - DNA, 15 bp, Homo sapiens
tattgggctctgatt

SEQ ID NO: 90229 - DNA, 15 bp, Homo sapiens
atattgggctctgat

SEQ ID NO: 90230 - DNA, 15 bp, Homo sapiens
aatattgggctctga

SEQ ID NO: 90231 - DNA, 15 bp, Homo sapiens
aaatattgggctctg

SEQ ID NO: 90232 - DNA, 15 bp, Homo sapiens
aaaatattgggctct

SEQ ID NO: 90233 - DNA, 15 bp, Homo sapiens
caaaatattgggctc

SEQ ID NO: 90234 - DNA, 15 bp, Homo sapiens
tcaaaatattgggct

SEQ ID NO: 90235 - DNA, 15 bp, Homo sapiens
ttcaaaatattgggc

SEQ ID NO: 90236 - DNA, 15 bp, Homo sapiens
tttcaaaatattggg

SEQ ID NO: 90237 - DNA, 15 bp, Homo sapiens
gtttcaaaatattgg

SEQ ID NO: 90238 - DNA, 15 bp, Homo sapiens
tgtttcaaaatattg

SEQ ID NO: 90239 - DNA, 15 bp, Homo sapiens
ttgtttcaaaatatt

SEQ ID NO: 90240 - DNA, 15 bp, Homo sapiens
tttgtttcaaaatat

SEQ ID NO: 90241 - DNA, 15 bp, Homo sapiens
atttgtttcaaaata

SEQ ID NO: 90242 - DNA, 15 bp, Homo sapiens
catttgtttcaaaat

SEQ ID NO: 90243 - DNA, 15 bp, Homo sapiens
gcatttgtttcaaaa

SEQ ID NO: 90244 - DNA, 15 bp, Homo sapiens
tgcatttgtttcaaa

SEQ ID NO: 90245 - DNA, 15 bp, Homo sapiens
atgcatttgtttcaa

SEQ ID NO: 90246 - DNA, 15 bp, Homo sapiens
tatgcatttgtttca

SEQ ID NO: 90247 - DNA, 15 bp, Homo sapiens
ttatgcatttgtttc

SEQ ID NO: 90248 - DNA, 15 bp, Homo sapiens
attatgcatttgttt

SEQ ID NO: 90249 - DNA, 15 bp, Homo sapiens
gattatgcatttgtt

SEQ ID NO: 90250 - DNA, 15 bp, Homo sapiens
agattatgcatttgt

SEQ ID NO: 90251 - DNA, 15 bp, Homo sapiens
tagattatgcatttg

SEQ ID NO: 90252 - DNA, 15 bp, Homo sapiens
ttagattatgcattt

SEQ ID NO: 90253 - DNA, 15 bp, Homo sapiens
cttagattatgcatt

SEQ ID NO: 90254 - DNA, 15 bp, Homo sapiens
acttagattatgcat

SEQ ID NO: 90255 - DNA, 15 bp, Homo sapiens
gacttagattatgca

SEQ ID NO: 90256 - DNA, 15 bp, Homo sapiens
tgacttagattatgc

SEQ ID NO: 90257 - DNA, 15 bp, Homo sapiens
ttgacttagattatg

SEQ ID NO: 90258 - DNA, 15 bp, Homo sapiens
tttgacttagattat

SEQ ID NO: 90259 - DNA, 15 bp, Homo sapiens
atttgacttagatta

SEQ ID NO: 90260 - DNA, 15 bp, Homo sapiens
catttgacttagatt

SEQ ID NO: 90261 - DNA, 15 bp, Homo sapiens
ccatttgacttagat

SEQ ID NO: 90262 - DNA, 15 bp, Homo sapiens
tccatttgacttaga

SEQ ID NO: 90263 - DNA, 15 bp, Homo sapiens
ttccatttgacttag

SEQ ID NO: 90264 - DNA, 15 bp, Homo sapiens
tttccatttgactta

SEQ ID NO: 90265 - DNA, 15 bp, Homo sapiens
ctttccatttgactt

SEQ ID NO: 90266 - DNA, 15 bp, Homo sapiens
tctttccatttgact

SEQ ID NO: 90267 - DNA, 15 bp, Homo sapiens
ttctttccatttgac

SEQ ID NO: 90268 - DNA, 15 bp, Homo sapiens
tttctttccatttga

SEQ ID NO: 90269 - DNA, 15 bp, Homo sapiens
atttctttccatttg

SEQ ID NO: 90270 - DNA, 15 bp, Homo sapiens
tatttctttccattt

SEQ ID NO: 90271 - DNA, 15 bp, Homo sapiens
atatttctttccatt

SEQ ID NO: 90272 - DNA, 15 bp, Homo sapiens
tatatttctttccat

SEQ ID NO: 90273 - DNA, 15 bp, Homo sapiens
ttatatttctttcca

SEQ ID NO: 90274 - DNA, 15 bp, Homo sapiens
tttatatttctttcc

SEQ ID NO: 90275 - DNA, 15 bp, Homo sapiens
ttttatatttctttc

SEQ ID NO: 90276 - DNA, 15 bp, Homo sapiens
tttttatatttcttt

SEQ ID NO: 90277 - DNA, 15 bp, Homo sapiens
ctttttatatttctt

SEQ ID NO: 90278 - DNA, 15 bp, Homo sapiens
actttttatatttct

SEQ ID NO: 90279 - DNA, 15 bp, Homo sapiens
tactttttatatttc

SEQ ID NO: 90280 - DNA, 15 bp, Homo sapiens
ttactttttatattt

SEQ ID NO: 90281 - DNA, 15 bp, Homo sapiens
gttactttttatatt

SEQ ID NO: 90282 - DNA, 15 bp, Homo sapiens
tgttactttttatat

SEQ ID NO: 90283 - DNA, 15 bp, Homo sapiens
atgttactttttata

SEQ ID NO: 90284 - DNA, 15 bp, Homo sapiens
aatgttactttttat

SEQ ID NO: 90285 - DNA, 15 bp, Homo sapiens
taatgttacttttta

SEQ ID NO: 90286 - DNA, 15 bp, Homo sapiens
ataatgttacttttt

SEQ ID NO: 90287 - DNA, 15 bp, Homo sapiens
aataatgttactttt

SEQ ID NO: 90288 - DNA, 15 bp, Homo sapiens
taataatgttacttt

SEQ ID NO: 90289 - DNA, 15 bp, Homo sapiens
gtaataatgttactt

SEQ ID NO: 90290 - DNA, 15 bp, Homo sapiens
agtaataatgttact

SEQ ID NO: 90291 - DNA, 15 bp, Homo sapiens
aagtaataatgttac

SEQ ID NO: 90292 - DNA, 15 bp, Homo sapiens
gaagtaataatgtta

SEQ ID NO: 90293 - DNA, 15 bp, Homo sapiens
agaagtaataatgtt

SEQ ID NO: 90294 - DNA, 15 bp, Homo sapiens
aagaagtaataatgt

SEQ ID NO: 90295 - DNA, 15 bp, Homo sapiens
caagaagtaataatg

SEQ ID NO: 90296 - DNA, 15 bp, Homo sapiens
acaagaagtaataat

SEQ ID NO: 90297 - DNA, 15 bp, Homo sapiens
aacaagaagtaataa

SEQ ID NO: 90298 - DNA, 15 bp, Homo sapiens
aaacaagaagtaata

SEQ ID NO: 90299 - DNA, 15 bp, Homo sapiens
aaaacaagaagtaat

SEQ ID NO: 90300 - DNA, 15 bp, Homo sapiens
gaaaacaagaagtaa

SEQ ID NO: 90301 - DNA, 15 bp, Homo sapiens
agaaaacaagaagta

SEQ ID NO: 90302 - DNA, 15 bp, Homo sapiens
aagaaaacaagaagt

SEQ ID NO: 90303 - DNA, 15 bp, Homo sapiens
gaagaaaacaagaag

SEQ ID NO: 90304 - DNA, 15 bp, Homo sapiens
tgaagaaaacaagaa

SEQ ID NO: 90305 - DNA, 15 bp, Homo sapiens
ctgaagaaaacaaga

SEQ ID NO: 90306 - DNA, 15 bp, Homo sapiens
actgaagaaaacaag

SEQ ID NO: 90307 - DNA, 15 bp, Homo sapiens
tactgaagaaaacaa

SEQ ID NO: 90308 - DNA, 15 bp, Homo sapiens
atactgaagaaaaca

SEQ ID NO: 90309 - DNA, 15 bp, Homo sapiens
aatactgaagaaaac

SEQ ID NO: 90310 - DNA, 15 bp, Homo sapiens
aaatactgaagaaaa

SEQ ID NO: 90311 - DNA, 15 bp, Homo sapiens
taaatactgaagaaa

SEQ ID NO: 90312 - DNA, 15 bp, Homo sapiens
ttaaatactgaagaa

SEQ ID NO: 90313 - DNA, 15 bp, Homo sapiens
gttaaatactgaaga

SEQ ID NO: 90314 - DNA, 15 bp, Homo sapiens
tgttaaatactgaag

SEQ ID NO: 90315 - DNA, 15 bp, Homo sapiens
ttgttaaatactgaa

SEQ ID NO: 90316 - DNA, 15 bp, Homo sapiens
attgttaaatactga

SEQ ID NO: 90317 - DNA, 15 bp, Homo sapiens
gattgttaaatactg

SEQ ID NO: 90318 - DNA, 15 bp, Homo sapiens
ggattgttaaatact

SEQ ID NO: 90319 - DNA, 15 bp, Homo sapiens
aggattgttaaatac

SEQ ID NO: 90320 - DNA, 15 bp, Homo sapiens
aaggattgttaaata

SEQ ID NO: 90321 - DNA, 15 bp, Homo sapiens
aaaggattgttaaat

SEQ ID NO: 90322 - DNA, 15 bp, Homo sapiens
aaaaggattgttaaa

SEQ ID NO: 90323 - DNA, 15 bp, Homo sapiens
aaaaaggattgttaa

SEQ ID NO: 90324 - DNA, 15 bp, Homo sapiens
aaaaaaggattgtta

SEQ ID NO: 90325 - DNA, 15 bp, Homo sapiens
aaaaaaaggattgtt

SEQ ID NO: 90326 - DNA, 15 bp, Homo sapiens
aaaaaaaaggattgt

SEQ ID NO: 90327 - DNA, 15 bp, Homo sapiens
gaaaaaaaaggattg

SEQ ID NO: 90328 - DNA, 15 bp, Homo sapiens
agaaaaaaaaggatt

SEQ ID NO: 90329 - DNA, 15 bp, Homo sapiens
aagaaaaaaaaggat

SEQ ID NO: 90330 - DNA, 15 bp, Homo sapiens
gaagaaaaaaaagga

SEQ ID NO: 90331 - DNA, 15 bp, Homo sapiens
ggaagaaaaaaaagg

SEQ ID NO: 90332 - DNA, 15 bp, Homo sapiens
gggaagaaaaaaaag

SEQ ID NO: 90333 - DNA, 15 bp, Homo sapiens
agggaagaaaaaaaa

SEQ ID NO: 90334 - DNA, 15 bp, Homo sapiens
aagggaagaaaaaaa

SEQ ID NO: 90335 - DNA, 15 bp, Homo sapiens
caagggaagaaaaaa

SEQ ID NO: 90336 - DNA, 15 bp, Homo sapiens
gcaagggaagaaaaa

SEQ ID NO: 90337 - DNA, 15 bp, Homo sapiens
ggcaagggaagaaaa

SEQ ID NO: 90338 - DNA, 15 bp, Homo sapiens
gggcaagggaagaaa

SEQ ID NO: 90339 - DNA, 15 bp, Homo sapiens
tgggcaagggaagaa

SEQ ID NO: 90340 - DNA, 15 bp, Homo sapiens
ctgggcaagggaaga

SEQ ID NO: 90341 - DNA, 15 bp, Homo sapiens
tctgggcaagggaag

SEQ ID NO: 90342 - DNA, 15 bp, Homo sapiens
gtctgggcaagggaa

SEQ ID NO: 90343 - DNA, 15 bp, Homo sapiens
tgtctgggcaaggga

SEQ ID NO: 90344 - DNA, 15 bp, Homo sapiens
ttgtctgggcaaggg

SEQ ID NO: 90345 - DNA, 15 bp, Homo sapiens
cttgtctgggcaagg

SEQ ID NO: 90346 - DNA, 15 bp, Homo sapiens
tcttgtctgggcaag

SEQ ID NO: 90347 - DNA, 15 bp, Homo sapiens
ctcttgtctgggcaa

SEQ ID NO: 90348 - DNA, 15 bp, Homo sapiens
actcttgtctgggca

SEQ ID NO: 90349 - DNA, 15 bp, Homo sapiens
cactcttgtctgggc

SEQ ID NO: 90350 - DNA, 15 bp, Homo sapiens
tcactcttgtctggg

SEQ ID NO: 90351 - DNA, 15 bp, Homo sapiens
ctcactcttgtctgg

SEQ ID NO: 90352 - DNA, 15 bp, Homo sapiens
cctcactcttgtctg

SEQ ID NO: 90353 - DNA, 15 bp, Homo sapiens
acctcactcttgtct

SEQ ID NO: 90354 - DNA, 15 bp, Homo sapiens
aacctcactcttgtc

SEQ ID NO: 90355 - DNA, 15 bp, Homo sapiens
caacctcactcttgt

SEQ ID NO: 90356 - DNA, 15 bp, Homo sapiens
gcaacctcactcttg

SEQ ID NO: 90357 - DNA, 15 bp, Homo sapiens
agcaacctcactctt

SEQ ID NO: 90358 - DNA, 15 bp, Homo sapiens
gagcaacctcactct

SEQ ID NO: 90359 - DNA, 15 bp, Homo sapiens
tgagcaacctcactc

SEQ ID NO: 90360 - DNA, 15 bp, Homo sapiens
atgagcaacctcact

SEQ ID NO: 90361 - DNA, 15 bp, Homo sapiens
gatgagcaacctcac

SEQ ID NO: 90362 - DNA, 15 bp, Homo sapiens
cgatgagcaacctca

SEQ ID NO: 90363 - DNA, 15 bp, Homo sapiens
ccgatgagcaacctc

SEQ ID NO: 90364 - DNA, 15 bp, Homo sapiens
accgatgagcaacct

SEQ ID NO: 90365 - DNA, 15 bp, Homo sapiens
aaccgatgagcaacc

SEQ ID NO: 90366 - DNA, 15 bp, Homo sapiens
aaaccgatgagcaac

SEQ ID NO: 90367 - DNA, 15 bp, Homo sapiens
taaaccgatgagcaa

SEQ ID NO: 90368 - DNA, 15 bp, Homo sapiens
ttaaaccgatgagca

SEQ ID NO: 90369 - DNA, 15 bp, Homo sapiens
tttaaaccgatgagc

SEQ ID NO: 90370 - DNA, 15 bp, Homo sapiens
ctttaaaccgatgag

SEQ ID NO: 90371 - DNA, 15 bp, Homo sapiens
tctttaaaccgatga

SEQ ID NO: 90372 - DNA, 15 bp, Homo sapiens
atctttaaaccgatg

SEQ ID NO: 90373 - DNA, 15 bp, Homo sapiens
aatctttaaaccgat

SEQ ID NO: 90374 - DNA, 15 bp, Homo sapiens
aaatctttaaaccga

SEQ ID NO: 90375 - DNA, 15 bp, Homo sapiens
caaatctttaaaccg

SEQ ID NO: 90376 - DNA, 15 bp, Homo sapiens
ccaaatctttaaacc

SEQ ID NO: 90377 - DNA, 15 bp, Homo sapiens
cccaaatctttaaac

SEQ ID NO: 90378 - DNA, 15 bp, Homo sapiens
tcccaaatctttaaa

SEQ ID NO: 90379 - DNA, 15 bp, Homo sapiens
ctcccaaatctttaa

SEQ ID NO: 90380 - DNA, 15 bp, Homo sapiens
tctcccaaatcttta

SEQ ID NO: 90381 - DNA, 15 bp, Homo sapiens
ttctcccaaatcttt

SEQ ID NO: 90382 - DNA, 15 bp, Homo sapiens
cttctcccaaatctt

SEQ ID NO: 90383 - DNA, 15 bp, Homo sapiens
tcttctcccaaatct

SEQ ID NO: 90384 - DNA, 15 bp, Homo sapiens
ttcttctcccaaatc

SEQ ID NO: 90385 - DNA, 15 bp, Homo sapiens
tttcttctcccaaat

SEQ ID NO: 90386 - DNA, 15 bp, Homo sapiens
ttttcttctcccaaa

SEQ ID NO: 90387 - DNA, 15 bp, Homo sapiens
attttcttctcccaa

SEQ ID NO: 90388 - DNA, 15 bp, Homo sapiens
aattttcttctccca

SEQ ID NO: 90389 - DNA, 15 bp, Homo sapiens
aaattttcttctccc

SEQ ID NO: 90390 - DNA, 15 bp, Homo sapiens
gaaattttcttctcc

SEQ ID NO: 90391 - DNA, 15 bp, Homo sapiens
tgaaattttcttctc

SEQ ID NO: 90392 - DNA, 15 bp, Homo sapiens
ttgaaattttcttct

SEQ ID NO: 90393 - DNA, 15 bp, Homo sapiens
tttgaaattttcttc

SEQ ID NO: 90394 - DNA, 15 bp, Homo sapiens
ctttgaaattttctt

SEQ ID NO: 90395 - DNA, 15 bp, Homo sapiens
gctttgaaattttct

SEQ ID NO: 90396 - DNA, 15 bp, Homo sapiens
ggctttgaaattttc

SEQ ID NO: 90397 - DNA, 15 bp, Homo sapiens
aggctttgaaatttt

SEQ ID NO: 90398 - DNA, 15 bp, Homo sapiens
aaggctttgaaattt

SEQ ID NO: 90399 - DNA, 15 bp, Homo sapiens
caaggctttgaaatt

SEQ ID NO: 90400 - DNA, 15 bp, Homo sapiens
acaaggctttgaaat

SEQ ID NO: 90401 - DNA, 15 bp, Homo sapiens
tacaaggctttgaaa

SEQ ID NO: 90402 - DNA, 15 bp, Homo sapiens
ttacaaggctttgaa

SEQ ID NO: 90403 - DNA, 15 bp, Homo sapiens
cttacaaggctttga

SEQ ID NO: 90404 - DNA, 15 bp, Homo sapiens
acttacaaggctttg

SEQ ID NO: 90405 - DNA, 15 bp, Homo sapiens
aacttacaaggcttt

SEQ ID NO: 90406 - DNA, 15 bp, Homo sapiens
taacttacaaggctt

SEQ ID NO: 90407 - DNA, 15 bp, Homo sapiens
ttaacttacaaggct

SEQ ID NO: 90408 - DNA, 15 bp, Homo sapiens
tttaacttacaaggc

SEQ ID NO: 90409 - DNA, 15 bp, Homo sapiens
ttttaacttacaagg

SEQ ID NO: 90410 - DNA, 15 bp, Homo sapiens
attttaacttacaag

SEQ ID NO: 90411 - DNA, 15 bp, Homo sapiens
tattttaacttacaa

SEQ ID NO: 90412 - DNA, 15 bp, Homo sapiens
atattttaacttaca

SEQ ID NO: 90413 - DNA, 15 bp, Homo sapiens
aatattttaacttac

SEQ ID NO: 90414 - DNA, 15 bp, Homo sapiens
caatattttaactta

SEQ ID NO: 90415 - DNA, 15 bp, Homo sapiens
tcaatattttaactt

SEQ ID NO: 90416 - DNA, 15 bp, Homo sapiens
atcaatattttaact

SEQ ID NO: 90417 - DNA, 15 bp, Homo sapiens
catcaatattttaac

SEQ ID NO: 90418 - DNA, 15 bp, Homo sapiens
tcatcaatattttaa

SEQ ID NO: 90419 - DNA, 15 bp, Homo sapiens
ttcatcaatatttta

SEQ ID NO: 90420 - DNA, 15 bp, Homo sapiens
attcatcaatatttt

SEQ ID NO: 90421 - DNA, 15 bp, Homo sapiens
gattcatcaatattt

SEQ ID NO: 90422 - DNA, 15 bp, Homo sapiens
tgattcatcaatatt

SEQ ID NO: 90423 - DNA, 15 bp, Homo sapiens
ttgattcatcaatat

SEQ ID NO: 90424 - DNA, 15 bp, Homo sapiens
tttgattcatcaata

SEQ ID NO: 90425 - DNA, 15 bp, Homo sapiens
atttgattcatcaat

SEQ ID NO: 90426 - DNA, 15 bp, Homo sapiens
aatttgattcatcaa

SEQ ID NO: 90427 - DNA, 15 bp, Homo sapiens
aaatttgattcatca

SEQ ID NO: 90428 - DNA, 15 bp, Homo sapiens
taaatttgattcatc

SEQ ID NO: 90429 - DNA, 15 bp, Homo sapiens
ttaaatttgattcat

SEQ ID NO: 90430 - DNA, 15 bp, Homo sapiens
attaaatttgattca

SEQ ID NO: 90431 - DNA, 15 bp, Homo sapiens
cattaaatttgattc

SEQ ID NO: 90432 - DNA, 15 bp, Homo sapiens
acattaaatttgatt

SEQ ID NO: 90433 - DNA, 15 bp, Homo sapiens
aacattaaatttgat

SEQ ID NO: 90434 - DNA, 15 bp, Homo sapiens
aaacattaaatttga

SEQ ID NO: 90435 - DNA, 15 bp, Homo sapiens
gaaacattaaatttg

SEQ ID NO: 90436 - DNA, 15 bp, Homo sapiens
agaaacattaaattt

SEQ ID NO: 90437 - DNA, 15 bp, Homo sapiens
tagaaacattaaatt

SEQ ID NO: 90438 - DNA, 15 bp, Homo sapiens
ttagaaacattaaat

SEQ ID NO: 90439 - DNA, 15 bp, Homo sapiens
attagaaacattaaa

SEQ ID NO: 90440 - DNA, 15 bp, Homo sapiens
tattagaaacattaa

SEQ ID NO: 90441 - DNA, 15 bp, Homo sapiens
ctattagaaacatta

SEQ ID NO: 90442 - DNA, 15 bp, Homo sapiens
actattagaaacatt

SEQ ID NO: 90443 - DNA, 15 bp, Homo sapiens
cactattagaaacat

SEQ ID NO: 90444 - DNA, 15 bp, Homo sapiens
acactattagaaaca

SEQ ID NO: 90445 - DNA, 15 bp, Homo sapiens
aacactattagaaac

SEQ ID NO: 90446 - DNA, 15 bp, Homo sapiens
caacactattagaaa

SEQ ID NO: 90447 - DNA, 15 bp, Homo sapiens
acaacactattagaa

SEQ ID NO: 90448 - DNA, 15 bp, Homo sapiens
aacaacactattaga

SEQ ID NO: 90449 - DNA, 15 bp, Homo sapiens
aaacaacactattag

SEQ ID NO: 90450 - DNA, 15 bp, Homo sapiens
taaacaacactatta

SEQ ID NO: 90451 - DNA, 15 bp, Homo sapiens
ataaacaacactatt

SEQ ID NO: 90452 - DNA, 15 bp, Homo sapiens
aataaacaacactat

SEQ ID NO: 90453 - DNA, 15 bp, Homo sapiens
taataaacaacacta

SEQ ID NO: 90454 - DNA, 15 bp, Homo sapiens
ataataaacaacact

SEQ ID NO: 90455 - DNA, 15 bp, Homo sapiens
aataataaacaacac

SEQ ID NO: 90456 - DNA, 15 bp, Homo sapiens
gaataataaacaaca

SEQ ID NO: 90457 - DNA, 15 bp, Homo sapiens
agaataataaacaac

SEQ ID NO: 90458 - DNA, 15 bp, Homo sapiens
tagaataataaacaa

SEQ ID NO: 90459 - DNA, 15 bp, Homo sapiens
ttagaataataaaca

SEQ ID NO: 90460 - DNA, 15 bp, Homo sapiens
tttagaataataaac

SEQ ID NO: 90461 - DNA, 15 bp, Homo sapiens
ctttagaataataaa

SEQ ID NO: 90462 - DNA, 15 bp, Homo sapiens
actttagaataataa

SEQ ID NO: 90463 - DNA, 15 bp, Homo sapiens
cactttagaataata

SEQ ID NO: 90464 - DNA, 15 bp, Homo sapiens
gcactttagaataat

SEQ ID NO: 90465 - DNA, 15 bp, Homo sapiens
agcactttagaataa

SEQ ID NO: 90466 - DNA, 15 bp, Homo sapiens
aagcactttagaata

SEQ ID NO: 90467 - DNA, 15 bp, Homo sapiens
taagcactttagaat

SEQ ID NO: 90468 - DNA, 15 bp, Homo sapiens
ataagcactttagaa

SEQ ID NO: 90469 - DNA, 15 bp, Homo sapiens
tataagcactttaga

SEQ ID NO: 90470 - DNA, 15 bp, Homo sapiens
atataagcactttag

SEQ ID NO: 90471 - DNA, 15 bp, Homo sapiens
aatataagcacttta

SEQ ID NO: 90472 - DNA, 15 bp, Homo sapiens
aaatataagcacttt

SEQ ID NO: 90473 - DNA, 15 bp, Homo sapiens
gaaatataagcactt

SEQ ID NO: 90474 - DNA, 15 bp, Homo sapiens
ggaaatataagcact

SEQ ID NO: 90475 - DNA, 15 bp, Homo sapiens
aggaaatataagcac

SEQ ID NO: 90476 - DNA, 15 bp, Homo sapiens
aaggaaatataagca

SEQ ID NO: 90477 - DNA, 15 bp, Homo sapiens
caaggaaatataagc

SEQ ID NO: 90478 - DNA, 15 bp, Homo sapiens
acaaggaaatataag

SEQ ID NO: 90479 - DNA, 15 bp, Homo sapiens
gacaaggaaatataa

SEQ ID NO: 90480 - DNA, 15 bp, Homo sapiens
tgacaaggaaatata

SEQ ID NO: 90481 - DNA, 15 bp, Homo sapiens
atgacaaggaaatat

SEQ ID NO: 90482 - DNA, 15 bp, Homo sapiens
gatgacaaggaaata

SEQ ID NO: 90483 - DNA, 15 bp, Homo sapiens
tgatgacaaggaaat

SEQ ID NO: 90484 - DNA, 15 bp, Homo sapiens
ctgatgacaaggaaa

SEQ ID NO: 90485 - DNA, 15 bp, Homo sapiens
cctgatgacaaggaa

SEQ ID NO: 90486 - DNA, 15 bp, Homo sapiens
ccctgatgacaagga

SEQ ID NO: 90487 - DNA, 15 bp, Homo sapiens
accctgatgacaagg

SEQ ID NO: 90488 - DNA, 15 bp, Homo sapiens
aaccctgatgacaag

SEQ ID NO: 90489 - DNA, 15 bp, Homo sapiens
gaaccctgatgacaa

SEQ ID NO: 90490 - DNA, 15 bp, Homo sapiens
tgaaccctgatgaca

SEQ ID NO: 90491 - DNA, 15 bp, Homo sapiens
ctgaaccctgatgac

SEQ ID NO: 90492 - DNA, 15 bp, Homo sapiens
tctgaaccctgatga

SEQ ID NO: 90493 - DNA, 15 bp, Homo sapiens
atctgaaccctgatg

SEQ ID NO: 90494 - DNA, 15 bp, Homo sapiens
aatctgaaccctgat

SEQ ID NO: 90495 - DNA, 15 bp, Homo sapiens
gaatctgaaccctga

SEQ ID NO: 90496 - DNA, 15 bp, Homo sapiens
agaatctgaaccctg

SEQ ID NO: 90497 - DNA, 15 bp, Homo sapiens
tagaatctgaaccct

SEQ ID NO: 90498 - DNA, 15 bp, Homo sapiens
ttagaatctgaaccc

SEQ ID NO: 90499 - DNA, 15 bp, Homo sapiens
tttagaatctgaacc

SEQ ID NO: 90500 - DNA, 15 bp, Homo sapiens
ttttagaatctgaac

SEQ ID NO: 90501 - DNA, 15 bp, Homo sapiens
gttttagaatctgaa

SEQ ID NO: 90502 - DNA, 15 bp, Homo sapiens
tgttttagaatctga

SEQ ID NO: 90503 - DNA, 15 bp, Homo sapiens
ctgttttagaatctg

SEQ ID NO: 90504 - DNA, 15 bp, Homo sapiens
actgttttagaatct

SEQ ID NO: 90505 - DNA, 15 bp, Homo sapiens
cactgttttagaatc

SEQ ID NO: 90506 - DNA, 15 bp, Homo sapiens
gcactgttttagaat

SEQ ID NO: 90507 - DNA, 15 bp, Homo sapiens
agcactgttttagaa

SEQ ID NO: 90508 - DNA, 15 bp, Homo sapiens
cagcactgttttaga

SEQ ID NO: 90509 - DNA, 15 bp, Homo sapiens
gcagcactgttttag

SEQ ID NO: 90510 - DNA, 15 bp, Homo sapiens
ggcagcactgtttta

SEQ ID NO: 90511 - DNA, 15 bp, Homo sapiens
aggcagcactgtttt

SEQ ID NO: 90512 - DNA, 15 bp, Homo sapiens
gaggcagcactgttt

SEQ ID NO: 90513 - DNA, 15 bp, Homo sapiens
cgaggcagcactgtt

SEQ ID NO: 90514 - DNA, 15 bp, Homo sapiens
acgaggcagcactgt

SEQ ID NO: 90515 - DNA, 15 bp, Homo sapiens
tacgaggcagcactg

SEQ ID NO: 90516 - DNA, 15 bp, Homo sapiens
ctacgaggcagcact

SEQ ID NO: 90517 - DNA, 15 bp, Homo sapiens
tctacgaggcagcac

SEQ ID NO: 90518 - DNA, 15 bp, Homo sapiens
ctctacgaggcagca

SEQ ID NO: 90519 - DNA, 15 bp, Homo sapiens
actctacgaggcagc

SEQ ID NO: 90520 - DNA, 15 bp, Homo sapiens
aactctacgaggcag

SEQ ID NO: 90521 - DNA, 15 bp, Homo sapiens
aaactctacgaggca

SEQ ID NO: 90522 - DNA, 15 bp, Homo sapiens
aaaactctacgaggc

SEQ ID NO: 90523 - DNA, 15 bp, Homo sapiens
gaaaactctacgagg

SEQ ID NO: 90524 - DNA, 15 bp, Homo sapiens
agaaaactctacgag

SEQ ID NO: 90525 - DNA, 15 bp, Homo sapiens
cagaaaactctacga

SEQ ID NO: 90526 - DNA, 15 bp, Homo sapiens
gcagaaaactctacg

SEQ ID NO: 90527 - DNA, 15 bp, Homo sapiens
cgcagaaaactctac

SEQ ID NO: 90528 - DNA, 15 bp, Homo sapiens
acgcagaaaactcta

SEQ ID NO: 90529 - DNA, 15 bp, Homo sapiens
aacgcagaaaactct

SEQ ID NO: 90530 - DNA, 15 bp, Homo sapiens
caacgcagaaaactc

SEQ ID NO: 90531 - DNA, 15 bp, Homo sapiens
tcaacgcagaaaact

SEQ ID NO: 90532 - DNA, 15 bp, Homo sapiens
ctcaacgcagaaaac

SEQ ID NO: 90533 - DNA, 15 bp, Homo sapiens
cctcaacgcagaaaa

SEQ ID NO: 90534 - DNA, 15 bp, Homo sapiens
tcctcaacgcagaaa

SEQ ID NO: 90535 - DNA, 15 bp, Homo sapiens
ttcctcaacgcagaa

SEQ ID NO: 90536 - DNA, 15 bp, Homo sapiens
cttcctcaacgcaga

SEQ ID NO: 90537 - DNA, 15 bp, Homo sapiens
tcttcctcaacgcag

SEQ ID NO: 90538 - DNA, 15 bp, Homo sapiens
atcttcctcaacgca

SEQ ID NO: 90539 - DNA, 15 bp, Homo sapiens
tatcttcctcaacgc

SEQ ID NO: 90540 - DNA, 15 bp, Homo sapiens
atatcttcctcaacg

SEQ ID NO: 90541 - DNA, 15 bp, Homo sapiens
aatatcttcctcaac

SEQ ID NO: 90542 - DNA, 15 bp, Homo sapiens
gaatatcttcctcaa

SEQ ID NO: 90543 - DNA, 15 bp, Homo sapiens
agaatatcttcctca

SEQ ID NO: 90544 - DNA, 15 bp, Homo sapiens
cagaatatcttcctc

SEQ ID NO: 90545 - DNA, 15 bp, Homo sapiens
acagaatatcttcct

SEQ ID NO: 90546 - DNA, 15 bp, Homo sapiens
tacagaatatcttcc

SEQ ID NO: 90547 - DNA, 15 bp, Homo sapiens
atacagaatatcttc

SEQ ID NO: 90548 - DNA, 15 bp, Homo sapiens
gatacagaatatctt

SEQ ID NO: 90549 - DNA, 15 bp, Homo sapiens
agatacagaatatct

SEQ ID NO: 90550 - DNA, 15 bp, Homo sapiens
cagatacagaatatc

SEQ ID NO: 90551 - DNA, 15 bp, Homo sapiens
ccagatacagaatat

SEQ ID NO: 90552 - DNA, 15 bp, Homo sapiens
cccagatacagaata

SEQ ID NO: 90553 - DNA, 15 bp, Homo sapiens
gcccagatacagaat

SEQ ID NO: 90554 - DNA, 15 bp, Homo sapiens
agcccagatacagaa

SEQ ID NO: 90555 - DNA, 15 bp, Homo sapiens
tagcccagatacaga

SEQ ID NO: 90556 - DNA, 15 bp, Homo sapiens
atagcccagatacag

SEQ ID NO: 90557 - DNA, 15 bp, Homo sapiens
gatagcccagataca

SEQ ID NO: 90558 - DNA, 15 bp, Homo sapiens
ggatagcccagatac

SEQ ID NO: 90559 - DNA, 15 bp, Homo sapiens
tggatagcccagata

SEQ ID NO: 90560 - DNA, 15 bp, Homo sapiens
ttggatagcccagat

SEQ ID NO: 90561 - DNA, 15 bp, Homo sapiens
attggatagcccaga

SEQ ID NO: 90562 - DNA, 15 bp, Homo sapiens
tattggatagcccag

SEQ ID NO: 90563 - DNA, 15 bp, Homo sapiens
ttattggatagccca

SEQ ID NO: 90564 - DNA, 15 bp, Homo sapiens
cttattggatagccc

SEQ ID NO: 90565 - DNA, 15 bp, Homo sapiens
ccttattggatagcc

SEQ ID NO: 90566 - DNA, 15 bp, Homo sapiens
accttattggatagc

SEQ ID NO: 90567 - DNA, 15 bp, Homo sapiens
taccttattggatag

SEQ ID NO: 90568 - DNA, 15 bp, Homo sapiens
ctaccttattggata

SEQ ID NO: 90569 - DNA, 15 bp, Homo sapiens
actaccttattggat

SEQ ID NO: 90570 - DNA, 15 bp, Homo sapiens
gactaccttattgga

SEQ ID NO: 90571 - DNA, 15 bp, Homo sapiens
tgactaccttattgg

SEQ ID NO: 90572 - DNA, 15 bp, Homo sapiens
gtgactaccttattg

SEQ ID NO: 90573 - DNA, 15 bp, Homo sapiens
agtgactaccttatt

SEQ ID NO: 90574 - DNA, 15 bp, Homo sapiens
cagtgactaccttat

SEQ ID NO: 90575 - DNA, 15 bp, Homo sapiens
ccagtgactacctta

SEQ ID NO: 90576 - DNA, 15 bp, Homo sapiens
accagtgactacctt

SEQ ID NO: 90577 - DNA, 15 bp, Homo sapiens
gaccagtgactacct

SEQ ID NO: 90578 - DNA, 15 bp, Homo sapiens
tgaccagtgactacc

SEQ ID NO: 90579 - DNA, 15 bp, Homo sapiens
gtgaccagtgactac

SEQ ID NO: 90580 - DNA, 15 bp, Homo sapiens
tgtgaccagtgacta

SEQ ID NO: 90581 - DNA, 15 bp, Homo sapiens
atgtgaccagtgact

SEQ ID NO: 90582 - DNA, 15 bp, Homo sapiens
catgtgaccagtgac

SEQ ID NO: 90583 - DNA, 15 bp, Homo sapiens
ccatgtgaccagtga

SEQ ID NO: 90584 - DNA, 15 bp, Homo sapiens
gccatgtgaccagtg

SEQ ID NO: 90585 - DNA, 15 bp, Homo sapiens
agccatgtgaccagt

SEQ ID NO: 90586 - DNA, 15 bp, Homo sapiens
tagccatgtgaccag

SEQ ID NO: 90587 - DNA, 15 bp, Homo sapiens
atagccatgtgacca

SEQ ID NO: 90588 - DNA, 15 bp, Homo sapiens
aatagccatgtgacc

SEQ ID NO: 90589 - DNA, 15 bp, Homo sapiens
caatagccatgtgac

SEQ ID NO: 90590 - DNA, 15 bp, Homo sapiens
tcaatagccatgtga

SEQ ID NO: 90591 - DNA, 15 bp, Homo sapiens
ctcaatagccatgtg

SEQ ID NO: 90592 - DNA, 15 bp, Homo sapiens
actcaatagccatgt

SEQ ID NO: 90593 - DNA, 15 bp, Homo sapiens
tactcaatagccatg

SEQ ID NO: 90594 - DNA, 15 bp, Homo sapiens
gtactcaatagccat

SEQ ID NO: 90595 - DNA, 15 bp, Homo sapiens
agtactcaatagcca

SEQ ID NO: 90596 - DNA, 15 bp, Homo sapiens
aagtactcaatagcc

SEQ ID NO: 90597 - DNA, 15 bp, Homo sapiens
gaagtactcaatagc

SEQ ID NO: 90598 - DNA, 15 bp, Homo sapiens
tgaagtactcaatag

SEQ ID NO: 90599 - DNA, 15 bp, Homo sapiens
ttgaagtactcaata

SEQ ID NO: 90600 - DNA, 15 bp, Homo sapiens
tttgaagtactcaat

SEQ ID NO: 90601 - DNA, 15 bp, Homo sapiens
atttgaagtactcaa

SEQ ID NO: 90602 - DNA, 15 bp, Homo sapiens
tatttgaagtactca

SEQ ID NO: 90603 - DNA, 15 bp, Homo sapiens
atatttgaagtactc

SEQ ID NO: 90604 - DNA, 15 bp, Homo sapiens
catatttgaagtact

SEQ ID NO: 90605 - DNA, 15 bp, Homo sapiens
tcatatttgaagtac

SEQ ID NO: 90606 - DNA, 15 bp, Homo sapiens
gtcatatttgaagta

SEQ ID NO: 90607 - DNA, 15 bp, Homo sapiens
tgtcatatttgaagt

SEQ ID NO: 90608 - DNA, 15 bp, Homo sapiens
ttgtcatatttgaag

SEQ ID NO: 90609 - DNA, 15 bp, Homo sapiens
cttgtcatatttgaa

SEQ ID NO: 90610 - DNA, 15 bp, Homo sapiens
acttgtcatatttga

SEQ ID NO: 90611 - DNA, 15 bp, Homo sapiens
cacttgtcatatttg

SEQ ID NO: 90612 - DNA, 15 bp, Homo sapiens
gcacttgtcatattt

SEQ ID NO: 90613 - DNA, 15 bp, Homo sapiens
tgcacttgtcatatt

SEQ ID NO: 90614 - DNA, 15 bp, Homo sapiens
ttgcacttgtcatat

SEQ ID NO: 90615 - DNA, 15 bp, Homo sapiens
gttgcacttgtcata

SEQ ID NO: 90616 - DNA, 15 bp, Homo sapiens
agttgcacttgtcat

SEQ ID NO: 90617 - DNA, 15 bp, Homo sapiens
cagttgcacttgtca

SEQ ID NO: 90618 - DNA, 15 bp, Homo sapiens
tcagttgcacttgtc

SEQ ID NO: 90619 - DNA, 15 bp, Homo sapiens
ctcagttgcacttgt

SEQ ID NO: 90620 - DNA, 15 bp, Homo sapiens
tctcagttgcacttg

SEQ ID NO: 90621 - DNA, 15 bp, Homo sapiens
ttctcagttgcactt

SEQ ID NO: 90622 - DNA, 15 bp, Homo sapiens
tttctcagttgcact

SEQ ID NO: 90623 - DNA, 15 bp, Homo sapiens
gtttctcagttgcac

SEQ ID NO: 90624 - DNA, 15 bp, Homo sapiens
tgtttctcagttgca

SEQ ID NO: 90625 - DNA, 15 bp, Homo sapiens
ttgtttctcagttgc

SEQ ID NO: 90626 - DNA, 15 bp, Homo sapiens
tttgtttctcagttg

SEQ ID NO: 90627 - DNA, 15 bp, Homo sapiens
ttttgtttctcagtt

SEQ ID NO: 90628 - DNA, 15 bp, Homo sapiens
tttttgtttctcagt

SEQ ID NO: 90629 - DNA, 15 bp, Homo sapiens
gtttttgtttctcag

SEQ ID NO: 90630 - DNA, 15 bp, Homo sapiens
agtttttgtttctca

SEQ ID NO: 90631 - DNA, 15 bp, Homo sapiens
aagtttttgtttctc

SEQ ID NO: 90632 - DNA, 15 bp, Homo sapiens
taagtttttgtttct

SEQ ID NO: 90633 - DNA, 15 bp, Homo sapiens
ttaagtttttgtttc

SEQ ID NO: 90634 - DNA, 15 bp, Homo sapiens
tttaagtttttgttt

SEQ ID NO: 90635 - DNA, 15 bp, Homo sapiens
atttaagtttttgtt

SEQ ID NO: 90636 - DNA, 15 bp, Homo sapiens
aatttaagtttttgt

SEQ ID NO: 90637 - DNA, 15 bp, Homo sapiens
caatttaagtttttg

SEQ ID NO: 90638 - DNA, 15 bp, Homo sapiens
acaatttaagttttt

SEQ ID NO: 90639 - DNA, 15 bp, Homo sapiens
tacaatttaagtttt

SEQ ID NO: 90640 - DNA, 15 bp, Homo sapiens
atacaatttaagttt

SEQ ID NO: 90641 - DNA, 15 bp, Homo sapiens
aatacaatttaagtt

SEQ ID NO: 90642 - DNA, 15 bp, Homo sapiens
aaatacaatttaagt

SEQ ID NO: 90643 - DNA, 15 bp, Homo sapiens
taaatacaatttaag

SEQ ID NO: 90644 - DNA, 15 bp, Homo sapiens
ttaaatacaatttaa

SEQ ID NO: 90645 - DNA, 15 bp, Homo sapiens
attaaatacaattta

SEQ ID NO: 90646 - DNA, 15 bp, Homo sapiens
aattaaatacaattt

SEQ ID NO: 90647 - DNA, 15 bp, Homo sapiens
caattaaatacaatt

SEQ ID NO: 90648 - DNA, 15 bp, Homo sapiens
acaattaaatacaat

SEQ ID NO: 90649 - DNA, 15 bp, Homo sapiens
tacaattaaatacaa

SEQ ID NO: 90650 - DNA, 15 bp, Homo sapiens
ctacaattaaataca

SEQ ID NO: 90651 - DNA, 15 bp, Homo sapiens
actacaattaaatac

SEQ ID NO: 90652 - DNA, 15 bp, Homo sapiens
aactacaattaaata

SEQ ID NO: 90653 - DNA, 15 bp, Homo sapiens
taactacaattaaat

SEQ ID NO: 90654 - DNA, 15 bp, Homo sapiens
ttaactacaattaaa

SEQ ID NO: 90655 - DNA, 15 bp, Homo sapiens
attaactacaattaa

SEQ ID NO: 90656 - DNA, 15 bp, Homo sapiens
aattaactacaatta

SEQ ID NO: 90657 - DNA, 15 bp, Homo sapiens
aaattaactacaatt

SEQ ID NO: 90658 - DNA, 15 bp, Homo sapiens
caaattaactacaat

SEQ ID NO: 90659 - DNA, 15 bp, Homo sapiens
tcaaattaactacaa

SEQ ID NO: 90660 - DNA, 15 bp, Homo sapiens
ttcaaattaactaca

SEQ ID NO: 90661 - DNA, 15 bp, Homo sapiens
attcaaattaactac

SEQ ID NO: 90662 - DNA, 15 bp, Homo sapiens
cattcaaattaacta

SEQ ID NO: 90663 - DNA, 15 bp, Homo sapiens
acattcaaattaact

SEQ ID NO: 90664 - DNA, 15 bp, Homo sapiens
tacattcaaattaac

SEQ ID NO: 90665 - DNA, 15 bp, Homo sapiens
atacattcaaattaa

SEQ ID NO: 90666 - DNA, 15 bp, Homo sapiens
tatacattcaaatta

SEQ ID NO: 90667 - DNA, 15 bp, Homo sapiens
atatacattcaaatt

SEQ ID NO: 90668 - DNA, 15 bp, Homo sapiens
tatatacattcaaat

SEQ ID NO: 90669 - DNA, 15 bp, Homo sapiens
ctatatacattcaaa

SEQ ID NO: 90670 - DNA, 15 bp, Homo sapiens
actatatacattcaa

SEQ ID NO: 90671 - DNA, 15 bp, Homo sapiens
gactatatacattca

SEQ ID NO: 90672 - DNA, 15 bp, Homo sapiens
tgactatatacattc

SEQ ID NO: 90673 - DNA, 15 bp, Homo sapiens
gtgactatatacatt

SEQ ID NO: 90674 - DNA, 15 bp, Homo sapiens
tgtgactatatacat

SEQ ID NO: 90675 - DNA, 15 bp, Homo sapiens
atgtgactatataca

SEQ ID NO: 90676 - DNA, 15 bp, Homo sapiens
catgtgactatatac

SEQ ID NO: 90677 - DNA, 15 bp, Homo sapiens
acatgtgactatata

SEQ ID NO: 90678 - DNA, 15 bp, Homo sapiens
cacatgtgactatat

SEQ ID NO: 90679 - DNA, 15 bp, Homo sapiens
ccacatgtgactata

SEQ ID NO: 90680 - DNA, 15 bp, Homo sapiens
gccacatgtgactat

SEQ ID NO: 90681 - DNA, 15 bp, Homo sapiens
agccacatgtgacta

SEQ ID NO: 90682 - DNA, 15 bp, Homo sapiens
tagccacatgtgact

SEQ ID NO: 90683 - DNA, 15 bp, Homo sapiens
ttagccacatgtgac

SEQ ID NO: 90684 - DNA, 15 bp, Homo sapiens
attagccacatgtga

SEQ ID NO: 90685 - DNA, 15 bp, Homo sapiens
cattagccacatgtg

SEQ ID NO: 90686 - DNA, 15 bp, Homo sapiens
ccattagccacatgt

SEQ ID NO: 90687 - DNA, 15 bp, Homo sapiens
gccattagccacatg

SEQ ID NO: 90688 - DNA, 15 bp, Homo sapiens
agccattagccacat

SEQ ID NO: 90689 - DNA, 15 bp, Homo sapiens
tagccattagccaca

SEQ ID NO: 90690 - DNA, 15 bp, Homo sapiens
gtagccattagccac

SEQ ID NO: 90691 - DNA, 15 bp, Homo sapiens
agtagccattagcca

SEQ ID NO: 90692 - DNA, 15 bp, Homo sapiens
cagtagccattagcc

SEQ ID NO: 90693 - DNA, 15 bp, Homo sapiens
acagtagccattagc

SEQ ID NO: 90694 - DNA, 15 bp, Homo sapiens
tacagtagccattag

SEQ ID NO: 90695 - DNA, 15 bp, Homo sapiens
atacagtagccatta

SEQ ID NO: 90696 - DNA, 15 bp, Homo sapiens
aatacagtagccatt

SEQ ID NO: 90697 - DNA, 15 bp, Homo sapiens
caatacagtagccat

SEQ ID NO: 90698 - DNA, 15 bp, Homo sapiens
ccaatacagtagcca

SEQ ID NO: 90699 - DNA, 15 bp, Homo sapiens
tccaatacagtagcc

SEQ ID NO: 90700 - DNA, 15 bp, Homo sapiens
gtccaatacagtagc

SEQ ID NO: 90701 - DNA, 15 bp, Homo sapiens
tgtccaatacagtag

SEQ ID NO: 90702 - DNA, 15 bp, Homo sapiens
ctgtccaatacagta

SEQ ID NO: 90703 - DNA, 15 bp, Homo sapiens
actgtccaatacagt

SEQ ID NO: 90704 - DNA, 15 bp, Homo sapiens
tactgtccaatacag

SEQ ID NO: 90705 - DNA, 15 bp, Homo sapiens
gtactgtccaataca

SEQ ID NO: 90706 - DNA, 15 bp, Homo sapiens
tgtactgtccaatac

SEQ ID NO: 90707 - DNA, 15 bp, Homo sapiens
ctgtactgtccaata

SEQ ID NO: 90708 - DNA, 15 bp, Homo sapiens
gctgtactgtccaat

SEQ ID NO: 90709 - DNA, 15 bp, Homo sapiens
agctgtactgtccaa

SEQ ID NO: 90710 - DNA, 15 bp, Homo sapiens
gagctgtactgtcca

SEQ ID NO: 90711 - DNA, 15 bp, Homo sapiens
agagctgtactgtcc

SEQ ID NO: 90712 - DNA, 15 bp, Homo sapiens
cagagctgtactgtc

SEQ ID NO: 90713 - DNA, 15 bp, Homo sapiens
ccagagctgtactgt

SEQ ID NO: 90714 - DNA, 15 bp, Homo sapiens
tccagagctgtactg

SEQ ID NO: 90715 - DNA, 15 bp, Homo sapiens
ttccagagctgtact

SEQ ID NO: 90716 - DNA, 15 bp, Homo sapiens
gttccagagctgtac

SEQ ID NO: 90717 - DNA, 15 bp, Homo sapiens
agttccagagctgta

SEQ ID NO: 90718 - DNA, 15 bp, Homo sapiens
aagttccagagctgt

SEQ ID NO: 90719 - DNA, 15 bp, Homo sapiens
caagttccagagctg

SEQ ID NO: 90720 - DNA, 15 bp, Homo sapiens
gcaagttccagagct

SEQ ID NO: 90721 - DNA, 15 bp, Homo sapiens
agcaagttccagagc

SEQ ID NO: 90722 - DNA, 15 bp, Homo sapiens
aagcaagttccagag

SEQ ID NO: 90723 - DNA, 15 bp, Homo sapiens
caagcaagttccaga

SEQ ID NO: 90724 - DNA, 15 bp, Homo sapiens
ccaagcaagttccag

SEQ ID NO: 90725 - DNA, 15 bp, Homo sapiens
accaagcaagttcca

SEQ ID NO: 90726 - DNA, 15 bp, Homo sapiens
caccaagcaagttcc

SEQ ID NO: 90727 - DNA, 15 bp, Homo sapiens
ccaccaagcaagttc

SEQ ID NO: 90728 - DNA, 15 bp, Homo sapiens
tccaccaagcaagtt

SEQ ID NO: 90729 - DNA, 15 bp, Homo sapiens
ttccaccaagcaagt

SEQ ID NO: 90730 - DNA, 15 bp, Homo sapiens
tttccaccaagcaag

SEQ ID NO: 90731 - DNA, 15 bp, Homo sapiens
ctttccaccaagcaa

SEQ ID NO: 90732 - DNA, 15 bp, Homo sapiens
cctttccaccaagca

SEQ ID NO: 90733 - DNA, 15 bp, Homo sapiens
tcctttccaccaagc

SEQ ID NO: 90734 - DNA, 15 bp, Homo sapiens
gtcctttccaccaag

SEQ ID NO: 90735 - DNA, 15 bp, Homo sapiens
agtcctttccaccaa

SEQ ID NO: 90736 - DNA, 15 bp, Homo sapiens
aagtcctttccacca

SEQ ID NO: 90737 - DNA, 15 bp, Homo sapiens
aaagtcctttccacc

SEQ ID NO: 90738 - DNA, 15 bp, Homo sapiens
taaagtcctttccac

SEQ ID NO: 90739 - DNA, 15 bp, Homo sapiens
ttaaagtcctttcca

SEQ ID NO: 90740 - DNA, 15 bp, Homo sapiens
attaaagtcctttcc

SEQ ID NO: 90741 - DNA, 15 bp, Homo sapiens
tattaaagtcctttc

SEQ ID NO: 90742 - DNA, 15 bp, Homo sapiens
atattaaagtccttt

SEQ ID NO: 90743 - DNA, 15 bp, Homo sapiens
tatattaaagtcctt

SEQ ID NO: 90744 - DNA, 15 bp, Homo sapiens
ctatattaaagtcct

SEQ ID NO: 90745 - DNA, 15 bp, Homo sapiens
cctatattaaagtcc

SEQ ID NO: 90746 - DNA, 15 bp, Homo sapiens
acctatattaaagtc

SEQ ID NO: 90747 - DNA, 15 bp, Homo sapiens
aacctatattaaagt

SEQ ID NO: 90748 - DNA, 15 bp, Homo sapiens
aaacctatattaaag

SEQ ID NO: 90749 - DNA, 15 bp, Homo sapiens
gaaacctatattaaa

SEQ ID NO: 90750 - DNA, 15 bp, Homo sapiens
ggaaacctatattaa

SEQ ID NO: 90751 - DNA, 15 bp, Homo sapiens
aggaaacctatatta

SEQ ID NO: 90752 - DNA, 15 bp, Homo sapiens
aaggaaacctatatt

SEQ ID NO: 90753 - DNA, 15 bp, Homo sapiens
aaaggaaacctatat

SEQ ID NO: 90754 - DNA, 15 bp, Homo sapiens
caaaggaaacctata

SEQ ID NO: 90755 - DNA, 15 bp, Homo sapiens
ccaaaggaaacctat

SEQ ID NO: 90756 - DNA, 15 bp, Homo sapiens
accaaaggaaaccta

SEQ ID NO: 90757 - DNA, 15 bp, Homo sapiens
caccaaaggaaacct

SEQ ID NO: 90758 - DNA, 15 bp, Homo sapiens
ccaccaaaggaaacc

SEQ ID NO: 90759 - DNA, 15 bp, Homo sapiens
gccaccaaaggaaac

SEQ ID NO: 90760 - DNA, 15 bp, Homo sapiens
agccaccaaaggaaa

SEQ ID NO: 90761 - DNA, 15 bp, Homo sapiens
aagccaccaaaggaa

SEQ ID NO: 90762 - DNA, 15 bp, Homo sapiens
taagccaccaaagga

SEQ ID NO: 90763 - DNA, 15 bp, Homo sapiens
gtaagccaccaaagg

SEQ ID NO: 90764 - DNA, 15 bp, Homo sapiens
ggtaagccaccaaag

SEQ ID NO: 90765 - DNA, 15 bp, Homo sapiens
gggtaagccaccaaa

SEQ ID NO: 90766 - DNA, 15 bp, Homo sapiens
tgggtaagccaccaa

SEQ ID NO: 90767 - DNA, 15 bp, Homo sapiens
gtgggtaagccacca

SEQ ID NO: 90768 - DNA, 15 bp, Homo sapiens
agtgggtaagccacc

SEQ ID NO: 90769 - DNA, 15 bp, Homo sapiens
tagtgggtaagccac

SEQ ID NO: 90770 - DNA, 15 bp, Homo sapiens
ttagtgggtaagcca

SEQ ID NO: 90771 - DNA, 15 bp, Homo sapiens
tttagtgggtaagcc

SEQ ID NO: 90772 - DNA, 15 bp, Homo sapiens
atttagtgggtaagc

SEQ ID NO: 90773 - DNA, 15 bp, Homo sapiens
gatttagtgggtaag

SEQ ID NO: 90774 - DNA, 15 bp, Homo sapiens
agatttagtgggtaa

SEQ ID NO: 90775 - DNA, 15 bp, Homo sapiens
aagatttagtgggta

SEQ ID NO: 90776 - DNA, 15 bp, Homo sapiens
gaagatttagtgggt

SEQ ID NO: 90777 - DNA, 15 bp, Homo sapiens
agaagatttagtggg

SEQ ID NO: 90778 - DNA, 15 bp, Homo sapiens
aagaagatttagtgg

SEQ ID NO: 90779 - DNA, 15 bp, Homo sapiens
aaagaagatttagtg

SEQ ID NO: 90780 - DNA, 15 bp, Homo sapiens
taaagaagatttagt

SEQ ID NO: 90781 - DNA, 15 bp, Homo sapiens
gtaaagaagatttag

SEQ ID NO: 90782 - DNA, 15 bp, Homo sapiens
tgtaaagaagattta

SEQ ID NO: 90783 - DNA, 15 bp, Homo sapiens
atgtaaagaagattt

SEQ ID NO: 90784 - DNA, 15 bp, Homo sapiens
tatgtaaagaagatt

SEQ ID NO: 90785 - DNA, 15 bp, Homo sapiens
ctatgtaaagaagat

SEQ ID NO: 90786 - DNA, 15 bp, Homo sapiens
gctatgtaaagaaga

SEQ ID NO: 90787 - DNA, 15 bp, Homo sapiens
tgctatgtaaagaag

SEQ ID NO: 90788 - DNA, 15 bp, Homo sapiens
ttgctatgtaaagaa

SEQ ID NO: 90789 - DNA, 15 bp, Homo sapiens
cttgctatgtaaaga

SEQ ID NO: 90790 - DNA, 15 bp, Homo sapiens
gcttgctatgtaaag

SEQ ID NO: 90791 - DNA, 15 bp, Homo sapiens
tgcttgctatgtaaa

SEQ ID NO: 90792 - DNA, 15 bp, Homo sapiens
atgcttgctatgtaa

SEQ ID NO: 90793 - DNA, 15 bp, Homo sapiens
aatgcttgctatgta

SEQ ID NO: 90794 - DNA, 15 bp, Homo sapiens
gaatgcttgctatgt

SEQ ID NO: 90795 - DNA, 15 bp, Homo sapiens
ggaatgcttgctatg

SEQ ID NO: 90796 - DNA, 15 bp, Homo sapiens
aggaatgcttgctat

SEQ ID NO: 90797 - DNA, 15 bp, Homo sapiens
caggaatgcttgcta

SEQ ID NO: 90798 - DNA, 15 bp, Homo sapiens
acaggaatgcttgct

SEQ ID NO: 90799 - DNA, 15 bp, Homo sapiens
cacaggaatgcttgc

SEQ ID NO: 90800 - DNA, 15 bp, Homo sapiens
gcacaggaatgcttg

SEQ ID NO: 90801 - DNA, 15 bp, Homo sapiens
agcacaggaatgctt

SEQ ID NO: 90802 - DNA, 15 bp, Homo sapiens
aagcacaggaatgct

SEQ ID NO: 90803 - DNA, 15 bp, Homo sapiens
taagcacaggaatgc

SEQ ID NO: 90804 - DNA, 15 bp, Homo sapiens
ctaagcacaggaatg

SEQ ID NO: 90805 - DNA, 15 bp, Homo sapiens
actaagcacaggaat

SEQ ID NO: 90806 - DNA, 15 bp, Homo sapiens
aactaagcacaggaa

SEQ ID NO: 90807 - DNA, 15 bp, Homo sapiens
caactaagcacagga

SEQ ID NO: 90808 - DNA, 15 bp, Homo sapiens
ccaactaagcacagg

SEQ ID NO: 90809 - DNA, 15 bp, Homo sapiens
cccaactaagcacag

SEQ ID NO: 90810 - DNA, 15 bp, Homo sapiens
tcccaactaagcaca

SEQ ID NO: 90811 - DNA, 15 bp, Homo sapiens
ttcccaactaagcac

SEQ ID NO: 90812 - DNA, 15 bp, Homo sapiens
attcccaactaagca

SEQ ID NO: 90813 - DNA, 15 bp, Homo sapiens
tattcccaactaagc

SEQ ID NO: 90814 - DNA, 15 bp, Homo sapiens
atattcccaactaag

SEQ ID NO: 90815 - DNA, 15 bp, Homo sapiens
aatattcccaactaa

SEQ ID NO: 90816 - DNA, 15 bp, Homo sapiens
aaatattcccaacta

SEQ ID NO: 90817 - DNA, 15 bp, Homo sapiens
taaatattcccaact

SEQ ID NO: 90818 - DNA, 15 bp, Homo sapiens
ttaaatattcccaac

SEQ ID NO: 90819 - DNA, 15 bp, Homo sapiens
attaaatattcccaa

SEQ ID NO: 90820 - DNA, 15 bp, Homo sapiens
aattaaatattccca

SEQ ID NO: 90821 - DNA, 15 bp, Homo sapiens
aaattaaatattccc

SEQ ID NO: 90822 - DNA, 15 bp, Homo sapiens
aaaattaaatattcc

SEQ ID NO: 90823 - DNA, 15 bp, Homo sapiens
aaaaattaaatattc

SEQ ID NO: 90824 - DNA, 15 bp, Homo sapiens
aaaaaattaaatatt

SEQ ID NO: 90825 - DNA, 15 bp, Homo sapiens
aaaaaaattaaatat

SEQ ID NO: 90826 - DNA, 15 bp, Homo sapiens
aaaaaaaattaaata

SEQ ID NO: 90827 - DNA, 15 bp, Homo sapiens
aaaaaaaaattaaat

SEQ ID NO: 90828 - DNA, 15 bp, Homo sapiens
aaaaaaaaaattaaa

SEQ ID NO: 90829 - DNA, 15 bp, Homo sapiens
aaaaaaaaaaattaa

SEQ ID NO: 90830 - DNA, 15 bp, Homo sapiens
aaaaaaaaaaaatta

SEQ ID NO: 90831 - DNA, 15 bp, Homo sapiens
aaaaaaaaaaaaatt

SEQ ID NO: 90832 - DNA, 15 bp, Homo sapiens
aaaaaaaaaaaaaat

SEQ ID NO: 90833 - DNA, 15 bp, Homo sapiens
cttaaaaaaaaaaaa

SEQ ID NO: 90834 - DNA, 15 bp, Homo sapiens
tcttaaaaaaaaaaa

SEQ ID NO: 90835 - DNA, 15 bp, Homo sapiens
gtcttaaaaaaaaaa

SEQ ID NO: 90836 - DNA, 15 bp, Homo sapiens
tgtcttaaaaaaaaa

SEQ ID NO: 90837 - DNA, 15 bp, Homo sapiens
ctgtcttaaaaaaaa

SEQ ID NO: 90838 - DNA, 15 bp, Homo sapiens
cctgtcttaaaaaaa

SEQ ID NO: 90839 - DNA, 15 bp, Homo sapiens
ccctgtcttaaaaaa

SEQ ID NO: 90840 - DNA, 15 bp, Homo sapiens
accctgtcttaaaaa

SEQ ID NO: 90841 - DNA, 15 bp, Homo sapiens
gaccctgtcttaaaa

SEQ ID NO: 90842 - DNA, 15 bp, Homo sapiens
agaccctgtcttaaa

SEQ ID NO: 90843 - DNA, 15 bp, Homo sapiens
gagaccctgtcttaa

SEQ ID NO: 90844 - DNA, 15 bp, Homo sapiens
cgagaccctgtctta

SEQ ID NO: 90845 - DNA, 15 bp, Homo sapiens
gcgagaccctgtctt

SEQ ID NO: 90846 - DNA, 15 bp, Homo sapiens
agcgagaccctgtct

SEQ ID NO: 90847 - DNA, 15 bp, Homo sapiens
gagcgagaccctgtc

SEQ ID NO: 90848 - DNA, 15 bp, Homo sapiens
agagcgagaccctgt

SEQ ID NO: 90849 - DNA, 15 bp, Homo sapiens
cagagcgagaccctg

SEQ ID NO: 90850 - DNA, 15 bp, Homo sapiens
acagagcgagaccct

SEQ ID NO: 90851 - DNA, 15 bp, Homo sapiens
gacagagcgagaccc

SEQ ID NO: 90852 - DNA, 15 bp, Homo sapiens
cgacagagcgagacc

SEQ ID NO: 90853 - DNA, 15 bp, Homo sapiens
gcgacagagcgagac

SEQ ID NO: 90854 - DNA, 15 bp, Homo sapiens
ggcgacagagcgaga

SEQ ID NO: 90855 - DNA, 15 bp, Homo sapiens
gggcgacagagcgag

SEQ ID NO: 90856 - DNA, 15 bp, Homo sapiens
tgggcgacagagcga

SEQ ID NO: 90857 - DNA, 15 bp, Homo sapiens
ctgggcgacagagcg

SEQ ID NO: 90858 - DNA, 15 bp, Homo sapiens
cctgggcgacagagc

SEQ ID NO: 90859 - DNA, 15 bp, Homo sapiens
gcctgggcgacagag

SEQ ID NO: 90860 - DNA, 15 bp, Homo sapiens
agcctgggcgacaga

SEQ ID NO: 90861 - DNA, 15 bp, Homo sapiens
cagcctgggcgacag

SEQ ID NO: 90862 - DNA, 15 bp, Homo sapiens
ccagcctgggcgaca

SEQ ID NO: 90863 - DNA, 15 bp, Homo sapiens
tccagcctgggcgac

SEQ ID NO: 90864 - DNA, 15 bp, Homo sapiens
ctccagcctgggcga

SEQ ID NO: 90865 - DNA, 15 bp, Homo sapiens
actccagcctgggcg

SEQ ID NO: 90866 - DNA, 15 bp, Homo sapiens
cactccagcctgggc

SEQ ID NO: 90867 - DNA, 15 bp, Homo sapiens
gcactccagcctggg

SEQ ID NO: 90868 - DNA, 15 bp, Homo sapiens
cgccactgcactcca

SEQ ID NO: 90869 - DNA, 15 bp, Homo sapiens
gcgccactgcactcc

SEQ ID NO: 90870 - DNA, 15 bp, Homo sapiens
tgcgccactgcactc

SEQ ID NO: 90871 - DNA, 15 bp, Homo sapiens
ttgcgccactgcact

SEQ ID NO: 90872 - DNA, 15 bp, Homo sapiens
attgcgccactgcac

SEQ ID NO: 90873 - DNA, 15 bp, Homo sapiens
gattgcgccactgca

SEQ ID NO: 90874 - DNA, 15 bp, Homo sapiens
agattgcgccactgc

SEQ ID NO: 90875 - DNA, 15 bp, Homo sapiens
gagattgcgccactg

SEQ ID NO: 90876 - DNA, 15 bp, Homo sapiens
cgagattgcgccact

SEQ ID NO: 90877 - DNA, 15 bp, Homo sapiens
ccgagattgcgccac

SEQ ID NO: 90878 - DNA, 15 bp, Homo sapiens
gccgagattgcgcca

SEQ ID NO: 90879 - DNA, 15 bp, Homo sapiens
agccgagattgcgcc

SEQ ID NO: 90880 - DNA, 15 bp, Homo sapiens
gagccgagattgcgc

SEQ ID NO: 90881 - DNA, 15 bp, Homo sapiens
tgagccgagattgcg

SEQ ID NO: 90882 - DNA, 15 bp, Homo sapiens
gtgagccgagattgc

SEQ ID NO: 90883 - DNA, 15 bp, Homo sapiens
agtgagccgagattg

SEQ ID NO: 90884 - DNA, 15 bp, Homo sapiens
cagtgagccgagatt

SEQ ID NO: 90885 - DNA, 15 bp, Homo sapiens
gcagtgagccgagat

SEQ ID NO: 90886 - DNA, 15 bp, Homo sapiens
tgcagtgagccgaga

SEQ ID NO: 90887 - DNA, 15 bp, Homo sapiens
ttgcagtgagccgag

SEQ ID NO: 90888 - DNA, 15 bp, Homo sapiens
tttgcagtgagccga

SEQ ID NO: 90889 - DNA, 15 bp, Homo sapiens
gtttgcagtgagccg

SEQ ID NO: 90890 - DNA, 15 bp, Homo sapiens
agtttgcagtgagcc

SEQ ID NO: 90891 - DNA, 15 bp, Homo sapiens
gagtttgcagtgagc

SEQ ID NO: 90892 - DNA, 15 bp, Homo sapiens
ggagtttgcagtgag

SEQ ID NO: 90893 - DNA, 15 bp, Homo sapiens
cggagtttgcagtga

SEQ ID NO: 90894 - DNA, 15 bp, Homo sapiens
gcggagtttgcagtg

SEQ ID NO: 90895 - DNA, 15 bp, Homo sapiens
ggcggagtttgcagt

SEQ ID NO: 90896 - DNA, 15 bp, Homo sapiens
aggcggagtttgcag

SEQ ID NO: 90897 - DNA, 15 bp, Homo sapiens
gaggcggagtttgca

SEQ ID NO: 90898 - DNA, 15 bp, Homo sapiens
ggaggcggagtttgc

SEQ ID NO: 90899 - DNA, 15 bp, Homo sapiens
gggaggcggagtttg

SEQ ID NO: 90900 - DNA, 15 bp, Homo sapiens
cgggaggcggagttt

SEQ ID NO: 90901 - DNA, 15 bp, Homo sapiens
ccgggaggcggagtt

SEQ ID NO: 90902 - DNA, 15 bp, Homo sapiens
cccgggaggcggagt

SEQ ID NO: 90903 - DNA, 15 bp, Homo sapiens
acccgggaggcggag

SEQ ID NO: 90904 - DNA, 15 bp, Homo sapiens
aacccgggaggcgga

SEQ ID NO: 90905 - DNA, 15 bp, Homo sapiens
gaacccgggaggcgg

SEQ ID NO: 90906 - DNA, 15 bp, Homo sapiens
tgaacccgggaggcg

SEQ ID NO: 90907 - DNA, 15 bp, Homo sapiens
gtgaacccgggaggc

SEQ ID NO: 90908 - DNA, 15 bp, Homo sapiens
cgtgaacccgggagg

SEQ ID NO: 90909 - DNA, 15 bp, Homo sapiens
gcgtgaacccgggag

SEQ ID NO: 90910 - DNA, 15 bp, Homo sapiens
ggcgtgaacccggga

SEQ ID NO: 90911 - DNA, 15 bp, Homo sapiens
tggcgtgaacccggg

SEQ ID NO: 90912 - DNA, 15 bp, Homo sapiens
atggcgtgaacccgg

SEQ ID NO: 90913 - DNA, 15 bp, Homo sapiens
aatggcgtgaacccg

SEQ ID NO: 90914 - DNA, 15 bp, Homo sapiens
gaatggcgtgaaccc

SEQ ID NO: 90915 - DNA, 15 bp, Homo sapiens
agaatggcgtgaacc

SEQ ID NO: 90916 - DNA, 15 bp, Homo sapiens
gagaatggcgtgaac

SEQ ID NO: 90917 - DNA, 15 bp, Homo sapiens
ggagaatggcgtgaa

SEQ ID NO: 90918 - DNA, 15 bp, Homo sapiens
aggagaatggcgtga

SEQ ID NO: 90919 - DNA, 15 bp, Homo sapiens
caggagaatggcgtg

SEQ ID NO: 90920 - DNA, 15 bp, Homo sapiens
gcaggagaatggcgt

SEQ ID NO: 90921 - DNA, 15 bp, Homo sapiens
ggcaggagaatggcg

SEQ ID NO: 90922 - DNA, 15 bp, Homo sapiens
aggcaggagaatggc

SEQ ID NO: 90923 - DNA, 15 bp, Homo sapiens
gaggcaggagaatgg

SEQ ID NO: 90924 - DNA, 15 bp, Homo sapiens
tgaggcaggagaatg

SEQ ID NO: 90925 - DNA, 15 bp, Homo sapiens
ctgaggcaggagaat

SEQ ID NO: 90926 - DNA, 15 bp, Homo sapiens
gctgaggcaggagaa

SEQ ID NO: 90927 - DNA, 15 bp, Homo sapiens
ggctgaggcaggaga

SEQ ID NO: 90928 - DNA, 15 bp, Homo sapiens
aggctgaggcaggag

SEQ ID NO: 90929 - DNA, 15 bp, Homo sapiens
gaggctgaggcagga

SEQ ID NO: 90930 - DNA, 15 bp, Homo sapiens
ggaggctgaggcagg

SEQ ID NO: 90931 - DNA, 15 bp, Homo sapiens
gggaggctgaggcag

SEQ ID NO: 90932 - DNA, 15 bp, Homo sapiens
cgggaggctgaggca

SEQ ID NO: 90933 - DNA, 15 bp, Homo sapiens
tcgggaggctgaggc

SEQ ID NO: 90934 - DNA, 15 bp, Homo sapiens
ctcgggaggctgagg

SEQ ID NO: 90935 - DNA, 15 bp, Homo sapiens
actcgggaggctgag

SEQ ID NO: 90936 - DNA, 15 bp, Homo sapiens
tactcgggaggctga

SEQ ID NO: 90937 - DNA, 15 bp, Homo sapiens
ctactcgggaggctg

SEQ ID NO: 90938 - DNA, 15 bp, Homo sapiens
gctactcgggaggct

SEQ ID NO: 90939 - DNA, 15 bp, Homo sapiens
agctactcgggaggc

SEQ ID NO: 90940 - DNA, 15 bp, Homo sapiens
cagctactcgggagg

SEQ ID NO: 90941 - DNA, 15 bp, Homo sapiens
ccagctactcgggag

SEQ ID NO: 90942 - DNA, 15 bp, Homo sapiens
cccagctactcggga

SEQ ID NO: 90943 - DNA, 15 bp, Homo sapiens
tcccagctactcggg

SEQ ID NO: 90944 - DNA, 15 bp, Homo sapiens
gtcccagctactcgg

SEQ ID NO: 90945 - DNA, 15 bp, Homo sapiens
agtcccagctactcg

SEQ ID NO: 90946 - DNA, 15 bp, Homo sapiens
tagtcccagctactc

SEQ ID NO: 90947 - DNA, 15 bp, Homo sapiens
gtagtcccagctact

SEQ ID NO: 90948 - DNA, 15 bp, Homo sapiens
tgtagtcccagctac

SEQ ID NO: 90949 - DNA, 15 bp, Homo sapiens
ctgtagtcccagcta

SEQ ID NO: 90950 - DNA, 15 bp, Homo sapiens
cctgtagtcccagct

SEQ ID NO: 90951 - DNA, 15 bp, Homo sapiens
gcctgtagtcccagc

SEQ ID NO: 90952 - DNA, 15 bp, Homo sapiens
cgcctgtagtcccag

SEQ ID NO: 90953 - DNA, 15 bp, Homo sapiens
gcgcctgtagtccca

SEQ ID NO: 90954 - DNA, 15 bp, Homo sapiens
ggcgcctgtagtccc

SEQ ID NO: 90955 - DNA, 15 bp, Homo sapiens
gggcgcctgtagtcc

SEQ ID NO: 90956 - DNA, 15 bp, Homo sapiens
cgggcgcctgtagtc

SEQ ID NO: 90957 - DNA, 15 bp, Homo sapiens
gcgggcgcctgtagt

SEQ ID NO: 90958 - DNA, 15 bp, Homo sapiens
ggcgggcgcctgtag

SEQ ID NO: 90959 - DNA, 15 bp, Homo sapiens
tggcgggcgcctgta

SEQ ID NO: 90960 - DNA, 15 bp, Homo sapiens
atggcgggcgcctgt

SEQ ID NO: 90961 - DNA, 15 bp, Homo sapiens
gatggcgggcgcctg

SEQ ID NO: 90962 - DNA, 15 bp, Homo sapiens
tgatggcgggcgcct

SEQ ID NO: 90963 - DNA, 15 bp, Homo sapiens
gtgatggcgggcgcc

SEQ ID NO: 90964 - DNA, 15 bp, Homo sapiens
cgtgatggcgggcgc

SEQ ID NO: 90965 - DNA, 15 bp, Homo sapiens
gcgtgatggcgggcg

SEQ ID NO: 90966 - DNA, 15 bp, Homo sapiens
ggcgtgatggcgggc

SEQ ID NO: 90967 - DNA, 15 bp, Homo sapiens
gggcgtgatggcggg

SEQ ID NO: 90968 - DNA, 15 bp, Homo sapiens
cgggcgtgatggcgg

SEQ ID NO: 90969 - DNA, 15 bp, Homo sapiens
ccgggcgtgatggcg

SEQ ID NO: 90970 - DNA, 15 bp, Homo sapiens
gccgggcgtgatggc

SEQ ID NO: 90971 - DNA, 15 bp, Homo sapiens
agccgggcgtgatgg

SEQ ID NO: 90972 - DNA, 15 bp, Homo sapiens
tagccgggcgtgatg

SEQ ID NO: 90973 - DNA, 15 bp, Homo sapiens
ttagccgggcgtgat

SEQ ID NO: 90974 - DNA, 15 bp, Homo sapiens
attagccgggcgtga

SEQ ID NO: 90975 - DNA, 15 bp, Homo sapiens
gattagccgggcgtg

SEQ ID NO: 90976 - DNA, 15 bp, Homo sapiens
agattagccgggcgt

SEQ ID NO: 90977 - DNA, 15 bp, Homo sapiens
aagattagccgggcg

SEQ ID NO: 90978 - DNA, 15 bp, Homo sapiens
aaagattagccgggc

SEQ ID NO: 90979 - DNA, 15 bp, Homo sapiens
aaaagattagccggg

SEQ ID NO: 90980 - DNA, 15 bp, Homo sapiens
caaaagattagccgg

SEQ ID NO: 90981 - DNA, 15 bp, Homo sapiens
acaaaagattagccg

SEQ ID NO: 90982 - DNA, 15 bp, Homo sapiens
tacaaaagattagcc

SEQ ID NO: 90983 - DNA, 15 bp, Homo sapiens
atacaaaagattagc

SEQ ID NO: 90984 - DNA, 15 bp, Homo sapiens
aatacaaaagattag

SEQ ID NO: 90985 - DNA, 15 bp, Homo sapiens
aaatacaaaagatta

SEQ ID NO: 90986 - DNA, 15 bp, Homo sapiens
aaaatacaaaagatt

SEQ ID NO: 90987 - DNA, 15 bp, Homo sapiens
aaaaatacaaaagat

SEQ ID NO: 90988 - DNA, 15 bp, Homo sapiens
taaaaatacaaaaga

SEQ ID NO: 90989 - DNA, 15 bp, Homo sapiens
ctaaaaatacaaaag

SEQ ID NO: 90990 - DNA, 15 bp, Homo sapiens
actaaaaatacaaaa

SEQ ID NO: 90991 - DNA, 15 bp, Homo sapiens
tactaaaaatacaaa

SEQ ID NO: 90992 - DNA, 15 bp, Homo sapiens
ctactaaaaatacaa

SEQ ID NO: 90993 - DNA, 15 bp, Homo sapiens
tctactaaaaataca

SEQ ID NO: 90994 - DNA, 15 bp, Homo sapiens
ctctactaaaaatac

SEQ ID NO: 90995 - DNA, 15 bp, Homo sapiens
tctctactaaaaata

SEQ ID NO: 90996 - DNA, 15 bp, Homo sapiens
atctctactaaaaat

SEQ ID NO: 90997 - DNA, 15 bp, Homo sapiens
catctctactaaaaa

SEQ ID NO: 90998 - DNA, 15 bp, Homo sapiens
ccatctctactaaaa

SEQ ID NO: 90999 - DNA, 15 bp, Homo sapiens
cccatctctactaaa

SEQ ID NO: 91000 - DNA, 15 bp, Homo sapiens
ccccatctctactaa

SEQ ID NO: 91001 - DNA, 15 bp, Homo sapiens
accccatctctacta

SEQ ID NO: 91002 - DNA, 15 bp, Homo sapiens
aaccccatctctact

SEQ ID NO: 91003 - DNA, 15 bp, Homo sapiens
aaaccccatctctac

SEQ ID NO: 91004 - DNA, 15 bp, Homo sapiens
gaaaccccatctcta

SEQ ID NO: 91005 - DNA, 15 bp, Homo sapiens
tgaaaccccatctct

SEQ ID NO: 91006 - DNA, 15 bp, Homo sapiens
gtgaaaccccatctc

SEQ ID NO: 91007 - DNA, 15 bp, Homo sapiens
ggtgaaaccccatct

SEQ ID NO: 91008 - DNA, 15 bp, Homo sapiens
cggtgaaaccccatc

SEQ ID NO: 91009 - DNA, 15 bp, Homo sapiens
acggtgaaaccccat

SEQ ID NO: 91010 - DNA, 15 bp, Homo sapiens
cacggtgaaacccca

SEQ ID NO: 91011 - DNA, 15 bp, Homo sapiens
acacggtgaaacccc

SEQ ID NO: 91012 - DNA, 15 bp, Homo sapiens
cacacggtgaaaccc

SEQ ID NO: 91013 - DNA, 15 bp, Homo sapiens
gcacacggtgaaacc

SEQ ID NO: 91014 - DNA, 15 bp, Homo sapiens
ggcacacggtgaaac

SEQ ID NO: 91015 - DNA, 15 bp, Homo sapiens
tggcacacggtgaaa

SEQ ID NO: 91016 - DNA, 15 bp, Homo sapiens
ctggcacacggtgaa

SEQ ID NO: 91017 - DNA, 15 bp, Homo sapiens
cctggcacacggtga

SEQ ID NO: 91018 - DNA, 15 bp, Homo sapiens
tcctggcacacggtg

SEQ ID NO: 91019 - DNA, 15 bp, Homo sapiens
atcctggcacacggt

SEQ ID NO: 91020 - DNA, 15 bp, Homo sapiens
catcctggcacacgg

SEQ ID NO: 91021 - DNA, 15 bp, Homo sapiens
ccatcctggcacacg

SEQ ID NO: 91022 - DNA, 15 bp, Homo sapiens
accatcctggcacac

SEQ ID NO: 91023 - DNA, 15 bp, Homo sapiens
gaccatcctggcaca

SEQ ID NO: 91024 - DNA, 15 bp, Homo sapiens
agaccatcctggcac

SEQ ID NO: 91025 - DNA, 15 bp, Homo sapiens
gagaccatcctggca

SEQ ID NO: 91026 - DNA, 15 bp, Homo sapiens
tgagaccatcctggc

SEQ ID NO: 91027 - DNA, 15 bp, Homo sapiens
ttgagaccatcctgg

SEQ ID NO: 91028 - DNA, 15 bp, Homo sapiens
attgagaccatcctg

SEQ ID NO: 91029 - DNA, 15 bp, Homo sapiens
gattgagaccatcct

SEQ ID NO: 91030 - DNA, 15 bp, Homo sapiens
agattgagaccatcc

SEQ ID NO: 91031 - DNA, 15 bp, Homo sapiens
gagattgagaccatc

SEQ ID NO: 91032 - DNA, 15 bp, Homo sapiens
ggagattgagaccat

SEQ ID NO: 91033 - DNA, 15 bp, Homo sapiens
aggagattgagacca

SEQ ID NO: 91034 - DNA, 15 bp, Homo sapiens
caggagattgagacc

SEQ ID NO: 91035 - DNA, 15 bp, Homo sapiens
tcaggagattgagac

SEQ ID NO: 91036 - DNA, 15 bp, Homo sapiens
gtcaggagattgaga

SEQ ID NO: 91037 - DNA, 15 bp, Homo sapiens
tgtcaggagattgag

SEQ ID NO: 91038 - DNA, 15 bp, Homo sapiens
atgtcaggagattga

SEQ ID NO: 91039 - DNA, 15 bp, Homo sapiens
gatgtcaggagattg

SEQ ID NO: 91040 - DNA, 15 bp, Homo sapiens
cgatgtcaggagatt

SEQ ID NO: 91041 - DNA, 15 bp, Homo sapiens
acgatgtcaggagat

SEQ ID NO: 91042 - DNA, 15 bp, Homo sapiens
cacgatgtcaggaga

SEQ ID NO: 91043 - DNA, 15 bp, Homo sapiens
tcacgatgtcaggag

SEQ ID NO: 91044 - DNA, 15 bp, Homo sapiens
atcacgatgtcagga

SEQ ID NO: 91045 - DNA, 15 bp, Homo sapiens
gatcacgatgtcagg

SEQ ID NO: 91046 - DNA, 15 bp, Homo sapiens
agatcacgatgtcag

SEQ ID NO: 91047 - DNA, 15 bp, Homo sapiens
cagatcacgatgtca

SEQ ID NO: 91048 - DNA, 15 bp, Homo sapiens
gcagatcacgatgtc

SEQ ID NO: 91049 - DNA, 15 bp, Homo sapiens
ggcagatcacgatgt

SEQ ID NO: 91050 - DNA, 15 bp, Homo sapiens
gggcagatcacgatg

SEQ ID NO: 91051 - DNA, 15 bp, Homo sapiens
tgggcagatcacgat

SEQ ID NO: 91052 - DNA, 15 bp, Homo sapiens
gtgggcagatcacga

SEQ ID NO: 91053 - DNA, 15 bp, Homo sapiens
ggtgggcagatcacg

SEQ ID NO: 91054 - DNA, 15 bp, Homo sapiens
aggtgggcagatcac

SEQ ID NO: 91055 - DNA, 15 bp, Homo sapiens
gaggtgggcagatca

SEQ ID NO: 91056 - DNA, 15 bp, Homo sapiens
cgaggtgggcagatc

SEQ ID NO: 91057 - DNA, 15 bp, Homo sapiens
ccgaggtgggcagat

SEQ ID NO: 91058 - DNA, 15 bp, Homo sapiens
gccgaggtgggcaga

SEQ ID NO: 91059 - DNA, 15 bp, Homo sapiens
ggccgaggtgggcag

SEQ ID NO: 91060 - DNA, 15 bp, Homo sapiens
aggccgaggtgggca

SEQ ID NO: 91061 - DNA, 15 bp, Homo sapiens
gaggccgaggtgggc

SEQ ID NO: 91062 - DNA, 15 bp, Homo sapiens
ggaggccgaggtggg

SEQ ID NO: 91063 - DNA, 15 bp, Homo sapiens
gggaggccgaggtgg

SEQ ID NO: 91064 - DNA, 15 bp, Homo sapiens
tgggaggccgaggtg

SEQ ID NO: 91065 - DNA, 15 bp, Homo sapiens
ttgggaggccgaggt

SEQ ID NO: 91066 - DNA, 15 bp, Homo sapiens
tttgggaggccgagg

SEQ ID NO: 91067 - DNA, 15 bp, Homo sapiens
ctttgggaggccgag

SEQ ID NO: 91068 - DNA, 15 bp, Homo sapiens
actttgggaggccga

SEQ ID NO: 91069 - DNA, 15 bp, Homo sapiens
cactttgggaggccg

SEQ ID NO: 91070 - DNA, 15 bp, Homo sapiens
gcactttgggaggcc

SEQ ID NO: 91071 - DNA, 15 bp, Homo sapiens
agcactttgggaggc

SEQ ID NO: 91072 - DNA, 15 bp, Homo sapiens
cagcactttgggagg

SEQ ID NO: 91073 - DNA, 15 bp, Homo sapiens
ccagcactttgggag

SEQ ID NO: 91074 - DNA, 15 bp, Homo sapiens
cccagcactttggga

SEQ ID NO: 91075 - DNA, 15 bp, Homo sapiens
tcccagcactttggg

SEQ ID NO: 91076 - DNA, 15 bp, Homo sapiens
atcccagcactttgg

SEQ ID NO: 91077 - DNA, 15 bp, Homo sapiens
aatcccagcactttg

SEQ ID NO: 91078 - DNA, 15 bp, Homo sapiens
taatcccagcacttt

SEQ ID NO: 91079 - DNA, 15 bp, Homo sapiens
gtaatcccagcactt

SEQ ID NO: 91080 - DNA, 15 bp, Homo sapiens
tgtaatcccagcact

SEQ ID NO: 91081 - DNA, 15 bp, Homo sapiens
ctgtaatcccagcac

SEQ ID NO: 91082 - DNA, 15 bp, Homo sapiens
cctgtaatcccagca

SEQ ID NO: 91083 - DNA, 15 bp, Homo sapiens
tcctgtaatcccagc

SEQ ID NO: 91084 - DNA, 15 bp, Homo sapiens
ctcctgtaatcccag

SEQ ID NO: 91085 - DNA, 15 bp, Homo sapiens
actcctgtaatccca

SEQ ID NO: 91086 - DNA, 15 bp, Homo sapiens
cactcctgtaatccc

SEQ ID NO: 91087 - DNA, 15 bp, Homo sapiens
tcactcctgtaatcc

SEQ ID NO: 91088 - DNA, 15 bp, Homo sapiens
ctcactcctgtaatc

SEQ ID NO: 91089 - DNA, 15 bp, Homo sapiens
gctcactcctgtaat

SEQ ID NO: 91090 - DNA, 15 bp, Homo sapiens
ggctcactcctgtaa

SEQ ID NO: 91091 - DNA, 15 bp, Homo sapiens
tggctcactcctgta

SEQ ID NO: 91092 - DNA, 15 bp, Homo sapiens
gtggctcactcctgt

SEQ ID NO: 91093 - DNA, 15 bp, Homo sapiens
ggtggctcactcctg

SEQ ID NO: 91094 - DNA, 15 bp, Homo sapiens
cggtggctcactcct

SEQ ID NO: 91095 - DNA, 15 bp, Homo sapiens
gcggtggctcactcc

SEQ ID NO: 91096 - DNA, 15 bp, Homo sapiens
cgcggtggctcactc

SEQ ID NO: 91097 - DNA, 15 bp, Homo sapiens
gcgcggtggctcact

SEQ ID NO: 91098 - DNA, 15 bp, Homo sapiens
ggcgcggtggctcac

SEQ ID NO: 91099 - DNA, 15 bp, Homo sapiens
gggcgcggtggctca

SEQ ID NO: 91100 - DNA, 15 bp, Homo sapiens
cgggcgcggtggctc

SEQ ID NO: 91101 - DNA, 15 bp, Homo sapiens
ccgggcgcggtggct

SEQ ID NO: 91102 - DNA, 15 bp, Homo sapiens
gccgggcgcggtggc

SEQ ID NO: 91103 - DNA, 15 bp, Homo sapiens
ggccgggcgcggtgg

SEQ ID NO: 91104 - DNA, 15 bp, Homo sapiens
aggccgggcgcggtg

SEQ ID NO: 91105 - DNA, 15 bp, Homo sapiens
taggccgggcgcggt

SEQ ID NO: 91106 - DNA, 15 bp, Homo sapiens
ataggccgggcgcgg

SEQ ID NO: 91107 - DNA, 15 bp, Homo sapiens
aataggccgggcgcg

SEQ ID NO: 91108 - DNA, 15 bp, Homo sapiens
aaataggccgggcgc

SEQ ID NO: 91109 - DNA, 15 bp, Homo sapiens
taaataggccgggcg

SEQ ID NO: 91110 - DNA, 15 bp, Homo sapiens
ttaaataggccgggc

SEQ ID NO: 91111 - DNA, 15 bp, Homo sapiens
tttaaataggccggg

SEQ ID NO: 91112 - DNA, 15 bp, Homo sapiens
atttaaataggccgg

SEQ ID NO: 91113 - DNA, 15 bp, Homo sapiens
catttaaataggccg

SEQ ID NO: 91114 - DNA, 15 bp, Homo sapiens
acatttaaataggcc

SEQ ID NO: 91115 - DNA, 15 bp, Homo sapiens
aacatttaaataggc

SEQ ID NO: 91116 - DNA, 15 bp, Homo sapiens
aaacatttaaatagg

SEQ ID NO: 91117 - DNA, 15 bp, Homo sapiens
aaaacatttaaatag

SEQ ID NO: 91118 - DNA, 15 bp, Homo sapiens
aaaaacatttaaata

SEQ ID NO: 91119 - DNA, 15 bp, Homo sapiens
aaaaaacatttaaat

SEQ ID NO: 91120 - DNA, 15 bp, Homo sapiens
taaaaaacatttaaa

SEQ ID NO: 91121 - DNA, 15 bp, Homo sapiens
ttaaaaaacatttaa

SEQ ID NO: 91122 - DNA, 15 bp, Homo sapiens
attaaaaaacattta

SEQ ID NO: 91123 - DNA, 15 bp, Homo sapiens
gattaaaaaacattt

SEQ ID NO: 91124 - DNA, 15 bp, Homo sapiens
agattaaaaaacatt

SEQ ID NO: 91125 - DNA, 15 bp, Homo sapiens
tagattaaaaaacat

SEQ ID NO: 91126 - DNA, 15 bp, Homo sapiens
ctagattaaaaaaca

SEQ ID NO: 91127 - DNA, 15 bp, Homo sapiens
actagattaaaaaac

SEQ ID NO: 91128 - DNA, 15 bp, Homo sapiens
tactagattaaaaaa

SEQ ID NO: 91129 - DNA, 15 bp, Homo sapiens
ttactagattaaaaa

SEQ ID NO: 91130 - DNA, 15 bp, Homo sapiens
tttactagattaaaa

SEQ ID NO: 91131 - DNA, 15 bp, Homo sapiens
ttttactagattaaa

SEQ ID NO: 91132 - DNA, 15 bp, Homo sapiens
tttttactagattaa

SEQ ID NO: 91133 - DNA, 15 bp, Homo sapiens
ttttttactagatta

SEQ ID NO: 91134 - DNA, 15 bp, Homo sapiens
attttttactagatt

SEQ ID NO: 91135 - DNA, 15 bp, Homo sapiens
cattttttactagat

SEQ ID NO: 91136 - DNA, 15 bp, Homo sapiens
tcattttttactaga

SEQ ID NO: 91137 - DNA, 15 bp, Homo sapiens
ctcattttttactag

SEQ ID NO: 91138 - DNA, 15 bp, Homo sapiens
tctcattttttacta

SEQ ID NO: 91139 - DNA, 15 bp, Homo sapiens
ttctcattttttact

SEQ ID NO: 91140 - DNA, 15 bp, Homo sapiens
tttctcattttttac

SEQ ID NO: 91141 - DNA, 15 bp, Homo sapiens
ttttctcatttttta

SEQ ID NO: 91142 - DNA, 15 bp, Homo sapiens
attttctcatttttt

SEQ ID NO: 91143 - DNA, 15 bp, Homo sapiens
aattttctcattttt

SEQ ID NO: 91144 - DNA, 15 bp, Homo sapiens
caattttctcatttt

SEQ ID NO: 91145 - DNA, 15 bp, Homo sapiens
acaattttctcattt

SEQ ID NO: 91146 - DNA, 15 bp, Homo sapiens
aacaattttctcatt

SEQ ID NO: 91147 - DNA, 15 bp, Homo sapiens
aaacaattttctcat

SEQ ID NO: 91148 - DNA, 15 bp, Homo sapiens
aaaacaattttctca

SEQ ID NO: 91149 - DNA, 15 bp, Homo sapiens
aaaaacaattttctc

SEQ ID NO: 91150 - DNA, 15 bp, Homo sapiens
aaaaaacaattttct

SEQ ID NO: 91151 - DNA, 15 bp, Homo sapiens
aaaaaaacaattttc

SEQ ID NO: 91152 - DNA, 15 bp, Homo sapiens
taaaaaaacaatttt

SEQ ID NO: 91153 - DNA, 15 bp, Homo sapiens
ttaaaaaaacaattt

SEQ ID NO: 91154 - DNA, 15 bp, Homo sapiens
tttaaaaaaacaatt

SEQ ID NO: 91155 - DNA, 15 bp, Homo sapiens
ttttaaaaaaacaat

SEQ ID NO: 91156 - DNA, 15 bp, Homo sapiens
cttttaaaaaaacaa

SEQ ID NO: 91157 - DNA, 15 bp, Homo sapiens
acttttaaaaaaaca

SEQ ID NO: 91158 - DNA, 15 bp, Homo sapiens
gacttttaaaaaaac

SEQ ID NO: 91159 - DNA, 15 bp, Homo sapiens
agacttttaaaaaaa

SEQ ID NO: 91160 - DNA, 15 bp, Homo sapiens
tagacttttaaaaaa

SEQ ID NO: 91161 - DNA, 15 bp, Homo sapiens
gtagacttttaaaaa

SEQ ID NO: 91162 - DNA, 15 bp, Homo sapiens
ggtagacttttaaaa

SEQ ID NO: 91163 - DNA, 15 bp, Homo sapiens
aggtagacttttaaa

SEQ ID NO: 91164 - DNA, 15 bp, Homo sapiens
taggtagacttttaa

SEQ ID NO: 91165 - DNA, 15 bp, Homo sapiens
ttaggtagactttta

SEQ ID NO: 91166 - DNA, 15 bp, Homo sapiens
attaggtagactttt

SEQ ID NO: 91167 - DNA, 15 bp, Homo sapiens
gattaggtagacttt

SEQ ID NO: 91168 - DNA, 15 bp, Homo sapiens
ggattaggtagactt

SEQ ID NO: 91169 - DNA, 15 bp, Homo sapiens
aggattaggtagact

SEQ ID NO: 91170 - DNA, 15 bp, Homo sapiens
taggattaggtagac

SEQ ID NO: 91171 - DNA, 15 bp, Homo sapiens
gtaggattaggtaga

SEQ ID NO: 91172 - DNA, 15 bp, Homo sapiens
tgtaggattaggtag

SEQ ID NO: 91173 - DNA, 15 bp, Homo sapiens
ctgtaggattaggta

SEQ ID NO: 91174 - DNA, 15 bp, Homo sapiens
cctgtaggattaggt

SEQ ID NO: 91175 - DNA, 15 bp, Homo sapiens
gcctgtaggattagg

SEQ ID NO: 91176 - DNA, 15 bp, Homo sapiens
agcctgtaggattag

SEQ ID NO: 91177 - DNA, 15 bp, Homo sapiens
tagcctgtaggatta

SEQ ID NO: 91178 - DNA, 15 bp, Homo sapiens
ttagcctgtaggatt

SEQ ID NO: 91179 - DNA, 15 bp, Homo sapiens
attagcctgtaggat

SEQ ID NO: 91180 - DNA, 15 bp, Homo sapiens
aattagcctgtagga

SEQ ID NO: 91181 - DNA, 15 bp, Homo sapiens
taattagcctgtagg

SEQ ID NO: 91182 - DNA, 15 bp, Homo sapiens
ttaattagcctgtag

SEQ ID NO: 91183 - DNA, 15 bp, Homo sapiens
tttaattagcctgta

SEQ ID NO: 91184 - DNA, 15 bp, Homo sapiens
ctttaattagcctgt

SEQ ID NO: 91185 - DNA, 15 bp, Homo sapiens
tctttaattagcctg

SEQ ID NO: 91186 - DNA, 15 bp, Homo sapiens
gtctttaattagcct

SEQ ID NO: 91187 - DNA, 15 bp, Homo sapiens
cgtctttaattagcc

SEQ ID NO: 91188 - DNA, 15 bp, Homo sapiens
acgtctttaattagc

SEQ ID NO: 91189 - DNA, 15 bp, Homo sapiens
cacgtctttaattag

SEQ ID NO: 91190 - DNA, 15 bp, Homo sapiens
acacgtctttaatta

SEQ ID NO: 91191 - DNA, 15 bp, Homo sapiens
cacacgtctttaatt

SEQ ID NO: 91192 - DNA, 15 bp, Homo sapiens
acacacgtctttaat

SEQ ID NO: 91193 - DNA, 15 bp, Homo sapiens
cacacacgtctttaa

SEQ ID NO: 91194 - DNA, 15 bp, Homo sapiens
ccacacacgtcttta

SEQ ID NO: 91195 - DNA, 15 bp, Homo sapiens
cccacacacgtcttt

SEQ ID NO: 91196 - DNA, 15 bp, Homo sapiens
ccccacacacgtctt

SEQ ID NO: 91197 - DNA, 15 bp, Homo sapiens
tccccacacacgtct

SEQ ID NO: 91198 - DNA, 15 bp, Homo sapiens
atccccacacacgtc

SEQ ID NO: 91199 - DNA, 15 bp, Homo sapiens
gatccccacacacgt

SEQ ID NO: 91200 - DNA, 15 bp, Homo sapiens
tgatccccacacacg

SEQ ID NO: 91201 - DNA, 15 bp, Homo sapiens
ctgatccccacacac

SEQ ID NO: 91202 - DNA, 15 bp, Homo sapiens
cctgatccccacaca

SEQ ID NO: 91203 - DNA, 15 bp, Homo sapiens
acctgatccccacac

SEQ ID NO: 91204 - DNA, 15 bp, Homo sapiens
cacctgatccccaca

SEQ ID NO: 91205 - DNA, 15 bp, Homo sapiens
gcacctgatccccac

SEQ ID NO: 91206 - DNA, 15 bp, Homo sapiens
cgcacctgatcccca

SEQ ID NO: 91207 - DNA, 15 bp, Homo sapiens
ccgcacctgatcccc

SEQ ID NO: 91208 - DNA, 15 bp, Homo sapiens
accgcacctgatccc

SEQ ID NO: 91209 - DNA, 15 bp, Homo sapiens
caccgcacctgatcc

SEQ ID NO: 91210 - DNA, 15 bp, Homo sapiens
ccaccgcacctgatc

SEQ ID NO: 91211 - DNA, 15 bp, Homo sapiens
accaccgcacctgat

SEQ ID NO: 91212 - DNA, 15 bp, Homo sapiens
aaccaccgcacctga

SEQ ID NO: 91213 - DNA, 15 bp, Homo sapiens
gaaccaccgcacctg

SEQ ID NO: 91214 - DNA, 15 bp, Homo sapiens
tgaaccaccgcacct

SEQ ID NO: 91215 - DNA, 15 bp, Homo sapiens
gtgaaccaccgcacc

SEQ ID NO: 91216 - DNA, 15 bp, Homo sapiens
tgtgaaccaccgcac

SEQ ID NO: 91217 - DNA, 15 bp, Homo sapiens
gtgtgaaccaccgca

SEQ ID NO: 91218 - DNA, 15 bp, Homo sapiens
ggtgtgaaccaccgc

SEQ ID NO: 91219 - DNA, 15 bp, Homo sapiens
aggtgtgaaccaccg

SEQ ID NO: 91220 - DNA, 15 bp, Homo sapiens
caggtgtgaaccacc

SEQ ID NO: 91221 - DNA, 15 bp, Homo sapiens
acaggtgtgaaccac

SEQ ID NO: 91222 - DNA, 15 bp, Homo sapiens
tacaggtgtgaacca

SEQ ID NO: 91223 - DNA, 15 bp, Homo sapiens
ttacaggtgtgaacc

SEQ ID NO: 91224 - DNA, 15 bp, Homo sapiens
attacaggtgtgaac

SEQ ID NO: 91225 - DNA, 15 bp, Homo sapiens
gattacaggtgtgaa

SEQ ID NO: 91226 - DNA, 15 bp, Homo sapiens
ggattacaggtgtga

SEQ ID NO: 91227 - DNA, 15 bp, Homo sapiens
gggattacaggtgtg

SEQ ID NO: 91228 - DNA, 15 bp, Homo sapiens
tgggattacaggtgt

SEQ ID NO: 91229 - DNA, 15 bp, Homo sapiens
ctgggattacaggtg

SEQ ID NO: 91230 - DNA, 15 bp, Homo sapiens
gctgggattacaggt

SEQ ID NO: 91231 - DNA, 15 bp, Homo sapiens
cagccttccaaagtg

SEQ ID NO: 91232 - DNA, 15 bp, Homo sapiens
tcagccttccaaagt

SEQ ID NO: 91233 - DNA, 15 bp, Homo sapiens
atcagccttccaaag

SEQ ID NO: 91234 - DNA, 15 bp, Homo sapiens
catcagccttccaaa

SEQ ID NO: 91235 - DNA, 15 bp, Homo sapiens
gcatcagccttccaa

SEQ ID NO: 91236 - DNA, 15 bp, Homo sapiens
tgcatcagccttcca

SEQ ID NO: 91237 - DNA, 15 bp, Homo sapiens
ctgcatcagccttcc

SEQ ID NO: 91238 - DNA, 15 bp, Homo sapiens
cctgcatcagccttc

SEQ ID NO: 91239 - DNA, 15 bp, Homo sapiens
tcctgcatcagcctt

SEQ ID NO: 91240 - DNA, 15 bp, Homo sapiens
ctcctgcatcagcct

SEQ ID NO: 91241 - DNA, 15 bp, Homo sapiens
cctcctgcatcagcc

SEQ ID NO: 91242 - DNA, 15 bp, Homo sapiens
tcctcctgcatcagc

SEQ ID NO: 91243 - DNA, 15 bp, Homo sapiens
atcctcctgcatcag

SEQ ID NO: 91244 - DNA, 15 bp, Homo sapiens
aatcctcctgcatca

SEQ ID NO: 91245 - DNA, 15 bp, Homo sapiens
caatcctcctgcatc

SEQ ID NO: 91246 - DNA, 15 bp, Homo sapiens
gcaatcctcctgcat

SEQ ID NO: 91247 - DNA, 15 bp, Homo sapiens
agcaatcctcctgca

SEQ ID NO: 91248 - DNA, 15 bp, Homo sapiens
aagcaatcctcctgc

SEQ ID NO: 91249 - DNA, 15 bp, Homo sapiens
caagcaatcctcctg

SEQ ID NO: 91250 - DNA, 15 bp, Homo sapiens
tcaagcaatcctcct

SEQ ID NO: 91251 - DNA, 15 bp, Homo sapiens
ctcaagcaatcctcc

SEQ ID NO: 91252 - DNA, 15 bp, Homo sapiens
gctcaagcaatcctc

SEQ ID NO: 91253 - DNA, 15 bp, Homo sapiens
ggctcaagcaatcct

SEQ ID NO: 91254 - DNA, 15 bp, Homo sapiens
gggctcaagcaatcc

SEQ ID NO: 91255 - DNA, 15 bp, Homo sapiens
tgggctcaagcaatc

SEQ ID NO: 91256 - DNA, 15 bp, Homo sapiens
ctgggctcaagcaat

SEQ ID NO: 91257 - DNA, 15 bp, Homo sapiens
cctgggctcaagcaa

SEQ ID NO: 91258 - DNA, 15 bp, Homo sapiens
tcctgggctcaagca

SEQ ID NO: 91259 - DNA, 15 bp, Homo sapiens
ctcctgggctcaagc

SEQ ID NO: 91260 - DNA, 15 bp, Homo sapiens
actcctgggctcaag

SEQ ID NO: 91261 - DNA, 15 bp, Homo sapiens
aactcctgggctcaa

SEQ ID NO: 91262 - DNA, 15 bp, Homo sapiens
gaactcctgggctca

SEQ ID NO: 91263 - DNA, 15 bp, Homo sapiens
tgaactcctgggctc

SEQ ID NO: 91264 - DNA, 15 bp, Homo sapiens
ttgaactcctgggct

SEQ ID NO: 91265 - DNA, 15 bp, Homo sapiens
cttgaactcctgggc

SEQ ID NO: 91266 - DNA, 15 bp, Homo sapiens
tcttgaactcctggg

SEQ ID NO: 91267 - DNA, 15 bp, Homo sapiens
gtcttgaactcctgg

SEQ ID NO: 91268 - DNA, 15 bp, Homo sapiens
ggtcttgaactcctg

SEQ ID NO: 91269 - DNA, 15 bp, Homo sapiens
tggtcttgaactcct

SEQ ID NO: 91270 - DNA, 15 bp, Homo sapiens
ctggtcttgaactcc

SEQ ID NO: 91271 - DNA, 15 bp, Homo sapiens
gctggtcttgaactc

SEQ ID NO: 91272 - DNA, 15 bp, Homo sapiens
ggctggtcttgaact

SEQ ID NO: 91273 - DNA, 15 bp, Homo sapiens
aggctggtcttgaac

SEQ ID NO: 91274 - DNA, 15 bp, Homo sapiens
caggctggtcttgaa

SEQ ID NO: 91275 - DNA, 15 bp, Homo sapiens
ccaggctggtcttga

SEQ ID NO: 91276 - DNA, 15 bp, Homo sapiens
cccaggctggtcttg

SEQ ID NO: 91277 - DNA, 15 bp, Homo sapiens
gcccaggctggtctt

SEQ ID NO: 91278 - DNA, 15 bp, Homo sapiens
tgcccaggctggtct

SEQ ID NO: 91279 - DNA, 15 bp, Homo sapiens
ttgcccaggctggtc

SEQ ID NO: 91280 - DNA, 15 bp, Homo sapiens
cttgcccaggctggt

SEQ ID NO: 91281 - DNA, 15 bp, Homo sapiens
acttgcccaggctgg

SEQ ID NO: 91282 - DNA, 15 bp, Homo sapiens
gacttgcccaggctg

SEQ ID NO: 91283 - DNA, 15 bp, Homo sapiens
agacttgcccaggct

SEQ ID NO: 91284 - DNA, 15 bp, Homo sapiens
gagacttgcccaggc

SEQ ID NO: 91285 - DNA, 15 bp, Homo sapiens
agagacttgcccagg

SEQ ID NO: 91286 - DNA, 15 bp, Homo sapiens
aagagacttgcccag

SEQ ID NO: 91287 - DNA, 15 bp, Homo sapiens
aaagagacttgccca

SEQ ID NO: 91288 - DNA, 15 bp, Homo sapiens
taaagagacttgccc

SEQ ID NO: 91289 - DNA, 15 bp, Homo sapiens
ttaaagagacttgcc

SEQ ID NO: 91290 - DNA, 15 bp, Homo sapiens
tttaaagagacttgc

SEQ ID NO: 91291 - DNA, 15 bp, Homo sapiens
ttttaaagagacttg

SEQ ID NO: 91292 - DNA, 15 bp, Homo sapiens
tttttaaagagactt

SEQ ID NO: 91293 - DNA, 15 bp, Homo sapiens
ttttttaaagagact

SEQ ID NO: 91294 - DNA, 15 bp, Homo sapiens
tttttttaaagagac

SEQ ID NO: 91295 - DNA, 15 bp, Homo sapiens
ttttttttaaagaga

SEQ ID NO: 91296 - DNA, 15 bp, Homo sapiens
gttttttttaaagag

SEQ ID NO: 91297 - DNA, 15 bp, Homo sapiens
tgttttttttaaaga

SEQ ID NO: 91298 - DNA, 15 bp, Homo sapiens
ttgttttttttaaag

SEQ ID NO: 91299 - DNA, 15 bp, Homo sapiens
tttgttttttttaaa

SEQ ID NO: 91300 - DNA, 15 bp, Homo sapiens
ttttgttttttttaa

SEQ ID NO: 91301 - DNA, 15 bp, Homo sapiens
gttttgtttttttta

SEQ ID NO: 91302 - DNA, 15 bp, Homo sapiens
tgttttgtttttttt

SEQ ID NO: 91303 - DNA, 15 bp, Homo sapiens
ttgttttgttttttt

SEQ ID NO: 91304 - DNA, 15 bp, Homo sapiens
tttgttttgtttttt

SEQ ID NO: 91305 - DNA, 15 bp, Homo sapiens
gtttgttttgttttt

SEQ ID NO: 91306 - DNA, 15 bp, Homo sapiens
tgtttgttttgtttt

SEQ ID NO: 91307 - DNA, 15 bp, Homo sapiens
ttgtttgttttgttt

SEQ ID NO: 91308 - DNA, 15 bp, Homo sapiens
tttgtttgttttgtt

SEQ ID NO: 91309 - DNA, 15 bp, Homo sapiens
gtttgtttgttttgt

SEQ ID NO: 91310 - DNA, 15 bp, Homo sapiens
tgtttgtttgttttg

SEQ ID NO: 91311 - DNA, 15 bp, Homo sapiens
ttgtttgtttgtttt

SEQ ID NO: 91312 - DNA, 15 bp, Homo sapiens
tttgtttgtttgttt

SEQ ID NO: 91313 - DNA, 15 bp, Homo sapiens
ttttgtttgtttgtt

SEQ ID NO: 91314 - DNA, 15 bp, Homo sapiens
tttttgtttgtttgt

SEQ ID NO: 91315 - DNA, 15 bp, Homo sapiens
ttttttgtttgtttg

SEQ ID NO: 91316 - DNA, 15 bp, Homo sapiens
tttttttgtttgttt

SEQ ID NO: 91317 - DNA, 15 bp, Homo sapiens
atttttttgtttgtt

SEQ ID NO: 91318 - DNA, 15 bp, Homo sapiens
aatttttttgtttgt

SEQ ID NO: 91319 - DNA, 15 bp, Homo sapiens
taatttttttgtttg

SEQ ID NO: 91320 - DNA, 15 bp, Homo sapiens
ctaatttttttgttt

SEQ ID NO: 91321 - DNA, 15 bp, Homo sapiens
cctaatttttttgtt

SEQ ID NO: 91322 - DNA, 15 bp, Homo sapiens
gcctaatttttttgt

SEQ ID NO: 91323 - DNA, 15 bp, Homo sapiens
tgcctaatttttttg

SEQ ID NO: 91324 - DNA, 15 bp, Homo sapiens
atgcctaattttttt

SEQ ID NO: 91325 - DNA, 15 bp, Homo sapiens
catgcctaatttttt

SEQ ID NO: 91326 - DNA, 15 bp, Homo sapiens
ccatgcctaattttt

SEQ ID NO: 91327 - DNA, 15 bp, Homo sapiens
accatgcctaatttt

SEQ ID NO: 91328 - DNA, 15 bp, Homo sapiens
caccatgcctaattt

SEQ ID NO: 91329 - DNA, 15 bp, Homo sapiens
ccaccatgcctaatt

SEQ ID NO: 91330 - DNA, 15 bp, Homo sapiens
gccaccatgcctaat

SEQ ID NO: 91331 - DNA, 15 bp, Homo sapiens
tgccaccatgcctaa

SEQ ID NO: 91332 - DNA, 15 bp, Homo sapiens
gtgccaccatgccta

SEQ ID NO: 91333 - DNA, 15 bp, Homo sapiens
tgtgccaccatgcct

SEQ ID NO: 91334 - DNA, 15 bp, Homo sapiens
atgtgccaccatgcc

SEQ ID NO: 91335 - DNA, 15 bp, Homo sapiens
catgtgccaccatgc

SEQ ID NO: 91336 - DNA, 15 bp, Homo sapiens
gcatgtgccaccatg

SEQ ID NO: 91337 - DNA, 15 bp, Homo sapiens
ggcatgtgccaccat

SEQ ID NO: 91338 - DNA, 15 bp, Homo sapiens
aggcatgtgccacca

SEQ ID NO: 91339 - DNA, 15 bp, Homo sapiens
caggcatgtgccacc

SEQ ID NO: 91340 - DNA, 15 bp, Homo sapiens
acaggcatgtgccac

SEQ ID NO: 91341 - DNA, 15 bp, Homo sapiens
tacaggcatgtgcca

SEQ ID NO: 91342 - DNA, 15 bp, Homo sapiens
ctacaggcatgtgcc

SEQ ID NO: 91343 - DNA, 15 bp, Homo sapiens
actacaggcatgtgc

SEQ ID NO: 91344 - DNA, 15 bp, Homo sapiens
gactacaggcatgtg

SEQ ID NO: 91345 - DNA, 15 bp, Homo sapiens
ggactacaggcatgt

SEQ ID NO: 91346 - DNA, 15 bp, Homo sapiens
aggactacaggcatg

SEQ ID NO: 91347 - DNA, 15 bp, Homo sapiens
taggactacaggcat

SEQ ID NO: 91348 - DNA, 15 bp, Homo sapiens
ctaggactacaggca

SEQ ID NO: 91349 - DNA, 15 bp, Homo sapiens
gctaggactacaggc

SEQ ID NO: 91350 - DNA, 15 bp, Homo sapiens
agctaggactacagg

SEQ ID NO: 91351 - DNA, 15 bp, Homo sapiens
tagctaggactacag

SEQ ID NO: 91352 - DNA, 15 bp, Homo sapiens
gtagctaggactaca

SEQ ID NO: 91353 - DNA, 15 bp, Homo sapiens
agtagctaggactac

SEQ ID NO: 91354 - DNA, 15 bp, Homo sapiens
aagtagctaggacta

SEQ ID NO: 91355 - DNA, 15 bp, Homo sapiens
taagtagctaggact

SEQ ID NO: 91356 - DNA, 15 bp, Homo sapiens
ctaagtagctaggac

SEQ ID NO: 91357 - DNA, 15 bp, Homo sapiens
cctaagtagctagga

SEQ ID NO: 91358 - DNA, 15 bp, Homo sapiens
tcctaagtagctagg

SEQ ID NO: 91359 - DNA, 15 bp, Homo sapiens
ctcctaagtagctag

SEQ ID NO: 91360 - DNA, 15 bp, Homo sapiens
cctcctaagtagcta

SEQ ID NO: 91361 - DNA, 15 bp, Homo sapiens
gcctcctaagtagct

SEQ ID NO: 91362 - DNA, 15 bp, Homo sapiens
agcctcctaagtagc

SEQ ID NO: 91363 - DNA, 15 bp, Homo sapiens
cagcctcctaagtag

SEQ ID NO: 91364 - DNA, 15 bp, Homo sapiens
tcagcctcctaagta

SEQ ID NO: 91365 - DNA, 15 bp, Homo sapiens
gtcagcctcctaagt

SEQ ID NO: 91366 - DNA, 15 bp, Homo sapiens
cgtcagcctcctaag

SEQ ID NO: 91367 - DNA, 15 bp, Homo sapiens
acgtcagcctcctaa

SEQ ID NO: 91368 - DNA, 15 bp, Homo sapiens
tacgtcagcctccta

SEQ ID NO: 91369 - DNA, 15 bp, Homo sapiens
ctacgtcagcctcct

SEQ ID NO: 91370 - DNA, 15 bp, Homo sapiens
cctacgtcagcctcc

SEQ ID NO: 91371 - DNA, 15 bp, Homo sapiens
tcctacgtcagcctc

SEQ ID NO: 91372 - DNA, 15 bp, Homo sapiens
ctcctacgtcagcct

SEQ ID NO: 91373 - DNA, 15 bp, Homo sapiens
cctcctacgtcagcc

SEQ ID NO: 91374 - DNA, 15 bp, Homo sapiens
tcctcctacgtcagc

SEQ ID NO: 91375 - DNA, 15 bp, Homo sapiens
atcctcctacgtcag

SEQ ID NO: 91376 - DNA, 15 bp, Homo sapiens
gatcctcctacgtca

SEQ ID NO: 91377 - DNA, 15 bp, Homo sapiens
cgatcctcctacgtc

SEQ ID NO: 91378 - DNA, 15 bp, Homo sapiens
acgatcctcctacgt

SEQ ID NO: 91379 - DNA, 15 bp, Homo sapiens
aacgatcctcctacg

SEQ ID NO: 91380 - DNA, 15 bp, Homo sapiens
aaacgatcctcctac

SEQ ID NO: 91381 - DNA, 15 bp, Homo sapiens
caaacgatcctccta

SEQ ID NO: 91382 - DNA, 15 bp, Homo sapiens
ccaaacgatcctcct

SEQ ID NO: 91383 - DNA, 15 bp, Homo sapiens
tccaaacgatcctcc

SEQ ID NO: 91384 - DNA, 15 bp, Homo sapiens
gtccaaacgatcctc

SEQ ID NO: 91385 - DNA, 15 bp, Homo sapiens
ggtccaaacgatcct

SEQ ID NO: 91386 - DNA, 15 bp, Homo sapiens
aggtccaaacgatcc

SEQ ID NO: 91387 - DNA, 15 bp, Homo sapiens
caggtccaaacgatc

SEQ ID NO: 91388 - DNA, 15 bp, Homo sapiens
tcaggtccaaacgat

SEQ ID NO: 91389 - DNA, 15 bp, Homo sapiens
ctcaggtccaaacga

SEQ ID NO: 91390 - DNA, 15 bp, Homo sapiens
tctcaggtccaaacg

SEQ ID NO: 91391 - DNA, 15 bp, Homo sapiens
ctctcaggtccaaac

SEQ ID NO: 91392 - DNA, 15 bp, Homo sapiens
cctctcaggtccaaa

SEQ ID NO: 91393 - DNA, 15 bp, Homo sapiens
acctctcaggtccaa

SEQ ID NO: 91394 - DNA, 15 bp, Homo sapiens
gacctctcaggtcca

SEQ ID NO: 91395 - DNA, 15 bp, Homo sapiens
tgacctctcaggtcc

SEQ ID NO: 91396 - DNA, 15 bp, Homo sapiens
ttgacctctcaggtc

SEQ ID NO: 91397 - DNA, 15 bp, Homo sapiens
cttgacctctcaggt

SEQ ID NO: 91398 - DNA, 15 bp, Homo sapiens
ccttgacctctcagg

SEQ ID NO: 91399 - DNA, 15 bp, Homo sapiens
gccttgacctctcag

SEQ ID NO: 91400 - DNA, 15 bp, Homo sapiens
agccttgacctctca

SEQ ID NO: 91401 - DNA, 15 bp, Homo sapiens
tagccttgacctctc

SEQ ID NO: 91402 - DNA, 15 bp, Homo sapiens
gtagccttgacctct

SEQ ID NO: 91403 - DNA, 15 bp, Homo sapiens
tgtagccttgacctc

SEQ ID NO: 91404 - DNA, 15 bp, Homo sapiens
ctgtagccttgacct

SEQ ID NO: 91405 - DNA, 15 bp, Homo sapiens
actgtagccttgacc

SEQ ID NO: 91406 - DNA, 15 bp, Homo sapiens
cactgtagccttgac

SEQ ID NO: 91407 - DNA, 15 bp, Homo sapiens
tcactgtagccttga

SEQ ID NO: 91408 - DNA, 15 bp, Homo sapiens
ctcactgtagccttg

SEQ ID NO: 91409 - DNA, 15 bp, Homo sapiens
gctcactgtagcctt

SEQ ID NO: 91410 - DNA, 15 bp, Homo sapiens
ggctcactgtagcct

SEQ ID NO: 91411 - DNA, 15 bp, Homo sapiens
tggctcactgtagcc

SEQ ID NO: 91412 - DNA, 15 bp, Homo sapiens
atggctcactgtagc

SEQ ID NO: 91413 - DNA, 15 bp, Homo sapiens
catggctcactgtag

SEQ ID NO: 91414 - DNA, 15 bp, Homo sapiens
tcatggctcactgta

SEQ ID NO: 91415 - DNA, 15 bp, Homo sapiens
atcatggctcactgt

SEQ ID NO: 91416 - DNA, 15 bp, Homo sapiens
aatcatggctcactg

SEQ ID NO: 91417 - DNA, 15 bp, Homo sapiens
caatcatggctcact

SEQ ID NO: 91418 - DNA, 15 bp, Homo sapiens
acaatcatggctcac

SEQ ID NO: 91419 - DNA, 15 bp, Homo sapiens
cacaatcatggctca

SEQ ID NO: 91420 - DNA, 15 bp, Homo sapiens
gcacaatcatggctc

SEQ ID NO: 91421 - DNA, 15 bp, Homo sapiens
ggcacaatcatggct

SEQ ID NO: 91422 - DNA, 15 bp, Homo sapiens
tggcacaatcatggc

SEQ ID NO: 91423 - DNA, 15 bp, Homo sapiens
gtggcacaatcatgg

SEQ ID NO: 91424 - DNA, 15 bp, Homo sapiens
agtggcacaatcatg

SEQ ID NO: 91425 - DNA, 15 bp, Homo sapiens
cagtggcacaatcat

SEQ ID NO: 91426 - DNA, 15 bp, Homo sapiens
gcagtggcacaatca

SEQ ID NO: 91427 - DNA, 15 bp, Homo sapiens
tgcagtggcacaatc

SEQ ID NO: 91428 - DNA, 15 bp, Homo sapiens
gtgcagtggcacaat

SEQ ID NO: 91429 - DNA, 15 bp, Homo sapiens
agtgcagtggcacaa

SEQ ID NO: 91430 - DNA, 15 bp, Homo sapiens
gagtgcagtggcaca

SEQ ID NO: 91431 - DNA, 15 bp, Homo sapiens
gctggagtgcagtgg

SEQ ID NO: 91432 - DNA, 15 bp, Homo sapiens
ggctggagtgcagtg

SEQ ID NO: 91433 - DNA, 15 bp, Homo sapiens
aggctggagtgcagt

SEQ ID NO: 91434 - DNA, 15 bp, Homo sapiens
caggctggagtgcag

SEQ ID NO: 91435 - DNA, 15 bp, Homo sapiens
ctgtcacccaggctg

SEQ ID NO: 91436 - DNA, 15 bp, Homo sapiens
tctgtcacccaggct

SEQ ID NO: 91437 - DNA, 15 bp, Homo sapiens
ctctgtcacccaggc

SEQ ID NO: 91438 - DNA, 15 bp, Homo sapiens
actctgtcacccagg

SEQ ID NO: 91439 - DNA, 15 bp, Homo sapiens
cactctgtcacccag

SEQ ID NO: 91440 - DNA, 15 bp, Homo sapiens
tcactctgtcaccca

SEQ ID NO: 91441 - DNA, 15 bp, Homo sapiens
ctcactctgtcaccc

SEQ ID NO: 91442 - DNA, 15 bp, Homo sapiens
tctcactctgtcacc

SEQ ID NO: 91443 - DNA, 15 bp, Homo sapiens
gtctcactctgtcac

SEQ ID NO: 91444 - DNA, 15 bp, Homo sapiens
agtctcactctgtca

SEQ ID NO: 91445 - DNA, 15 bp, Homo sapiens
gagtctcactctgtc

SEQ ID NO: 91446 - DNA, 15 bp, Homo sapiens
agagtctcactctgt

SEQ ID NO: 91447 - DNA, 15 bp, Homo sapiens
cagagtctcactctg

SEQ ID NO: 91448 - DNA, 15 bp, Homo sapiens
acagagtctcactct

SEQ ID NO: 91449 - DNA, 15 bp, Homo sapiens
gacagagtctcactc

SEQ ID NO: 91450 - DNA, 15 bp, Homo sapiens
agacagagtctcact

SEQ ID NO: 91451 - DNA, 15 bp, Homo sapiens
gagacagagtctcac

SEQ ID NO: 91452 - DNA, 15 bp, Homo sapiens
tgagacagagtctca

SEQ ID NO: 91453 - DNA, 15 bp, Homo sapiens
ttgagacagagtctc

SEQ ID NO: 91454 - DNA, 15 bp, Homo sapiens
tttgagacagagtct

SEQ ID NO: 91455 - DNA, 15 bp, Homo sapiens
ttttgagacagagtc

SEQ ID NO: 91456 - DNA, 15 bp, Homo sapiens
tttttgagacagagt

SEQ ID NO: 91457 - DNA, 15 bp, Homo sapiens
ttttttgagacagag

SEQ ID NO: 91458 - DNA, 15 bp, Homo sapiens
cttttttgagacaga

SEQ ID NO: 91459 - DNA, 15 bp, Homo sapiens
tcttttttgagacag

SEQ ID NO: 91460 - DNA, 15 bp, Homo sapiens
ttcttttttgagaca

SEQ ID NO: 91461 - DNA, 15 bp, Homo sapiens
tttcttttttgagac

SEQ ID NO: 91462 - DNA, 15 bp, Homo sapiens
ttttcttttttgaga

SEQ ID NO: 91463 - DNA, 15 bp, Homo sapiens
tttttcttttttgag

SEQ ID NO: 91464 - DNA, 15 bp, Homo sapiens
ctttttcttttttga

SEQ ID NO: 91465 - DNA, 15 bp, Homo sapiens
cctttttcttttttg

SEQ ID NO: 91466 - DNA, 15 bp, Homo sapiens
tcctttttctttttt

SEQ ID NO: 91467 - DNA, 15 bp, Homo sapiens
ttcctttttcttttt

SEQ ID NO: 91468 - DNA, 15 bp, Homo sapiens
tttcctttttctttt

SEQ ID NO: 91469 - DNA, 15 bp, Homo sapiens
atttcctttttcttt

SEQ ID NO: 91470 - DNA, 15 bp, Homo sapiens
gatttcctttttctt

SEQ ID NO: 91471 - DNA, 15 bp, Homo sapiens
agatttcctttttct

SEQ ID NO: 91472 - DNA, 15 bp, Homo sapiens
cagatttcctttttc

SEQ ID NO: 91473 - DNA, 15 bp, Homo sapiens
acagatttccttttt

SEQ ID NO: 91474 - DNA, 15 bp, Homo sapiens
cacagatttcctttt

SEQ ID NO: 91475 - DNA, 15 bp, Homo sapiens
ccacagatttccttt

SEQ ID NO: 91476 - DNA, 15 bp, Homo sapiens
cccacagatttcctt

SEQ ID NO: 91477 - DNA, 15 bp, Homo sapiens
ccccacagatttcct

SEQ ID NO: 91478 - DNA, 15 bp, Homo sapiens
accccacagatttcc

SEQ ID NO: 91479 - DNA, 15 bp, Homo sapiens
aaccccacagatttc

SEQ ID NO: 91480 - DNA, 15 bp, Homo sapiens
aaaccccacagattt

SEQ ID NO: 91481 - DNA, 15 bp, Homo sapiens
caaaccccacagatt

SEQ ID NO: 91482 - DNA, 15 bp, Homo sapiens
acaaaccccacagat

SEQ ID NO: 91483 - DNA, 15 bp, Homo sapiens
aacaaaccccacaga

SEQ ID NO: 91484 - DNA, 15 bp, Homo sapiens
aaacaaaccccacag

SEQ ID NO: 91485 - DNA, 15 bp, Homo sapiens
aaaacaaaccccaca

SEQ ID NO: 91486 - DNA, 15 bp, Homo sapiens
taaaacaaaccccac

SEQ ID NO: 91487 - DNA, 15 bp, Homo sapiens
ctaaaacaaacccca

SEQ ID NO: 91488 - DNA, 15 bp, Homo sapiens
actaaaacaaacccc

SEQ ID NO: 91489 - DNA, 15 bp, Homo sapiens
aactaaaacaaaccc

SEQ ID NO: 91490 - DNA, 15 bp, Homo sapiens
aaactaaaacaaacc

SEQ ID NO: 91491 - DNA, 15 bp, Homo sapiens
aaaactaaaacaaac

SEQ ID NO: 91492 - DNA, 15 bp, Homo sapiens
taaaactaaaacaaa

SEQ ID NO: 91493 - DNA, 15 bp, Homo sapiens
ttaaaactaaaacaa

SEQ ID NO: 91494 - DNA, 15 bp, Homo sapiens
cttaaaactaaaaca

SEQ ID NO: 91495 - DNA, 15 bp, Homo sapiens
acttaaaactaaaac

SEQ ID NO: 91496 - DNA, 15 bp, Homo sapiens
tacttaaaactaaaa

SEQ ID NO: 91497 - DNA, 15 bp, Homo sapiens
ttacttaaaactaaa

SEQ ID NO: 91498 - DNA, 15 bp, Homo sapiens
attacttaaaactaa

SEQ ID NO: 91499 - DNA, 15 bp, Homo sapiens
aattacttaaaacta

SEQ ID NO: 91500 - DNA, 15 bp, Homo sapiens
gaattacttaaaact

SEQ ID NO: 91501 - DNA, 15 bp, Homo sapiens
agaattacttaaaac

SEQ ID NO: 91502 - DNA, 15 bp, Homo sapiens
tagaattacttaaaa

SEQ ID NO: 91503 - DNA, 15 bp, Homo sapiens
ttagaattacttaaa

SEQ ID NO: 91504 - DNA, 15 bp, Homo sapiens
cttagaattacttaa

SEQ ID NO: 91505 - DNA, 15 bp, Homo sapiens
ccttagaattactta

SEQ ID NO: 91506 - DNA, 15 bp, Homo sapiens
tccttagaattactt

SEQ ID NO: 91507 - DNA, 15 bp, Homo sapiens
gtccttagaattact

SEQ ID NO: 91508 - DNA, 15 bp, Homo sapiens
agtccttagaattac

SEQ ID NO: 91509 - DNA, 15 bp, Homo sapiens
aagtccttagaatta

SEQ ID NO: 91510 - DNA, 15 bp, Homo sapiens
aaagtccttagaatt

SEQ ID NO: 91511 - DNA, 15 bp, Homo sapiens
taaagtccttagaat

SEQ ID NO: 91512 - DNA, 15 bp, Homo sapiens
ttaaagtccttagaa

SEQ ID NO: 91513 - DNA, 15 bp, Homo sapiens
tttaaagtccttaga

SEQ ID NO: 91514 - DNA, 15 bp, Homo sapiens
ttttaaagtccttag

SEQ ID NO: 91515 - DNA, 15 bp, Homo sapiens
tttttaaagtcctta

SEQ ID NO: 91516 - DNA, 15 bp, Homo sapiens
atttttaaagtcctt

SEQ ID NO: 91517 - DNA, 15 bp, Homo sapiens
catttttaaagtcct

SEQ ID NO: 91518 - DNA, 15 bp, Homo sapiens
gcatttttaaagtcc

SEQ ID NO: 91519 - DNA, 15 bp, Homo sapiens
ggcatttttaaagtc

SEQ ID NO: 91520 - DNA, 15 bp, Homo sapiens
aggcatttttaaagt

SEQ ID NO: 91521 - DNA, 15 bp, Homo sapiens
taggcatttttaaag

SEQ ID NO: 91522 - DNA, 15 bp, Homo sapiens
ctaggcatttttaaa

SEQ ID NO: 91523 - DNA, 15 bp, Homo sapiens
actaggcatttttaa

SEQ ID NO: 91524 - DNA, 15 bp, Homo sapiens
gactaggcattttta

SEQ ID NO: 91525 - DNA, 15 bp, Homo sapiens
agactaggcattttt

SEQ ID NO: 91526 - DNA, 15 bp, Homo sapiens
aagactaggcatttt

SEQ ID NO: 91527 - DNA, 15 bp, Homo sapiens
caagactaggcattt

SEQ ID NO: 91528 - DNA, 15 bp, Homo sapiens
tcaagactaggcatt

SEQ ID NO: 91529 - DNA, 15 bp, Homo sapiens
gtcaagactaggcat

SEQ ID NO: 91530 - DNA, 15 bp, Homo sapiens
tgtcaagactaggca

SEQ ID NO: 91531 - DNA, 15 bp, Homo sapiens
ttgtcaagactaggc

SEQ ID NO: 91532 - DNA, 15 bp, Homo sapiens
attgtcaagactagg

SEQ ID NO: 91533 - DNA, 15 bp, Homo sapiens
aattgtcaagactag

SEQ ID NO: 91534 - DNA, 15 bp, Homo sapiens
taattgtcaagacta

SEQ ID NO: 91535 - DNA, 15 bp, Homo sapiens
ctaattgtcaagact

SEQ ID NO: 91536 - DNA, 15 bp, Homo sapiens
tctaattgtcaagac

SEQ ID NO: 91537 - DNA, 15 bp, Homo sapiens
atctaattgtcaaga

SEQ ID NO: 91538 - DNA, 15 bp, Homo sapiens
gatctaattgtcaag

SEQ ID NO: 91539 - DNA, 15 bp, Homo sapiens
agatctaattgtcaa

SEQ ID NO: 91540 - DNA, 15 bp, Homo sapiens
tagatctaattgtca

SEQ ID NO: 91541 - DNA, 15 bp, Homo sapiens
atagatctaattgtc

SEQ ID NO: 91542 - DNA, 15 bp, Homo sapiens
aatagatctaattgt

SEQ ID NO: 91543 - DNA, 15 bp, Homo sapiens
aaatagatctaattg

SEQ ID NO: 91544 - DNA, 15 bp, Homo sapiens
caaatagatctaatt

SEQ ID NO: 91545 - DNA, 15 bp, Homo sapiens
ccaaatagatctaat

SEQ ID NO: 91546 - DNA, 15 bp, Homo sapiens
gccaaatagatctaa

SEQ ID NO: 91547 - DNA, 15 bp, Homo sapiens
tgccaaatagatcta

SEQ ID NO: 91548 - DNA, 15 bp, Homo sapiens
atgccaaatagatct

SEQ ID NO: 91549 - DNA, 15 bp, Homo sapiens
tatgccaaatagatc

SEQ ID NO: 91550 - DNA, 15 bp, Homo sapiens
gtatgccaaatagat

SEQ ID NO: 91551 - DNA, 15 bp, Homo sapiens
tgtatgccaaataga

SEQ ID NO: 91552 - DNA, 15 bp, Homo sapiens
ttgtatgccaaatag

SEQ ID NO: 91553 - DNA, 15 bp, Homo sapiens
attgtatgccaaata

SEQ ID NO: 91554 - DNA, 15 bp, Homo sapiens
aattgtatgccaaat

SEQ ID NO: 91555 - DNA, 15 bp, Homo sapiens
aaattgtatgccaaa

SEQ ID NO: 91556 - DNA, 15 bp, Homo sapiens
caaattgtatgccaa

SEQ ID NO: 91557 - DNA, 15 bp, Homo sapiens
gcaaattgtatgcca

SEQ ID NO: 91558 - DNA, 15 bp, Homo sapiens
agcaaattgtatgcc

SEQ ID NO: 91559 - DNA, 15 bp, Homo sapiens
aagcaaattgtatgc

SEQ ID NO: 91560 - DNA, 15 bp, Homo sapiens
caagcaaattgtatg

SEQ ID NO: 91561 - DNA, 15 bp, Homo sapiens
gcaagcaaattgtat

SEQ ID NO: 91562 - DNA, 15 bp, Homo sapiens
agcaagcaaattgta

SEQ ID NO: 91563 - DNA, 15 bp, Homo sapiens
aagcaagcaaattgt

SEQ ID NO: 91564 - DNA, 15 bp, Homo sapiens
taagcaagcaaattg

SEQ ID NO: 91565 - DNA, 15 bp, Homo sapiens
ttaagcaagcaaatt

SEQ ID NO: 91566 - DNA, 15 bp, Homo sapiens
attaagcaagcaaat

SEQ ID NO: 91567 - DNA, 15 bp, Homo sapiens
gattaagcaagcaaa

SEQ ID NO: 91568 - DNA, 15 bp, Homo sapiens
agattaagcaagcaa

SEQ ID NO: 91569 - DNA, 15 bp, Homo sapiens
tagattaagcaagca

SEQ ID NO: 91570 - DNA, 15 bp, Homo sapiens
atagattaagcaagc

SEQ ID NO: 91571 - DNA, 15 bp, Homo sapiens
catagattaagcaag

SEQ ID NO: 91572 - DNA, 15 bp, Homo sapiens
acatagattaagcaa

SEQ ID NO: 91573 - DNA, 15 bp, Homo sapiens
cacatagattaagca

SEQ ID NO: 91574 - DNA, 15 bp, Homo sapiens
acacatagattaagc

SEQ ID NO: 91575 - DNA, 15 bp, Homo sapiens
cacacatagattaag

SEQ ID NO: 91576 - DNA, 15 bp, Homo sapiens
acacacatagattaa

SEQ ID NO: 91577 - DNA, 15 bp, Homo sapiens
cacacacatagatta

SEQ ID NO: 91578 - DNA, 15 bp, Homo sapiens
gcacacacatagatt

SEQ ID NO: 91579 - DNA, 15 bp, Homo sapiens
tgcacacacatagat

SEQ ID NO: 91580 - DNA, 15 bp, Homo sapiens
atgcacacacataga

SEQ ID NO: 91581 - DNA, 15 bp, Homo sapiens
tatgcacacacatag

SEQ ID NO: 91582 - DNA, 15 bp, Homo sapiens
ctatgcacacacata

SEQ ID NO: 91583 - DNA, 15 bp, Homo sapiens
tctatgcacacacat

SEQ ID NO: 91584 - DNA, 15 bp, Homo sapiens
atctatgcacacaca

SEQ ID NO: 91585 - DNA, 15 bp, Homo sapiens
gatctatgcacacac

SEQ ID NO: 91586 - DNA, 15 bp, Homo sapiens
agatctatgcacaca

SEQ ID NO: 91587 - DNA, 15 bp, Homo sapiens
tagatctatgcacac

SEQ ID NO: 91588 - DNA, 15 bp, Homo sapiens
gtagatctatgcaca

SEQ ID NO: 91589 - DNA, 15 bp, Homo sapiens
agtagatctatgcac

SEQ ID NO: 91590 - DNA, 15 bp, Homo sapiens
cagtagatctatgca

SEQ ID NO: 91591 - DNA, 15 bp, Homo sapiens
tcagtagatctatgc

SEQ ID NO: 91592 - DNA, 15 bp, Homo sapiens
gtcagtagatctatg

SEQ ID NO: 91593 - DNA, 15 bp, Homo sapiens
tgtcagtagatctat

SEQ ID NO: 91594 - DNA, 15 bp, Homo sapiens
gtgtcagtagatcta

SEQ ID NO: 91595 - DNA, 15 bp, Homo sapiens
tgtgtcagtagatct

SEQ ID NO: 91596 - DNA, 15 bp, Homo sapiens
gtgtgtcagtagatc

SEQ ID NO: 91597 - DNA, 15 bp, Homo sapiens
cgtgtgtcagtagat

SEQ ID NO: 91598 - DNA, 15 bp, Homo sapiens
gcgtgtgtcagtaga

SEQ ID NO: 91599 - DNA, 15 bp, Homo sapiens
tgcgtgtgtcagtag

SEQ ID NO: 91600 - DNA, 15 bp, Homo sapiens
atgcgtgtgtcagta

SEQ ID NO: 91601 - DNA, 15 bp, Homo sapiens
tatgcgtgtgtcagt

SEQ ID NO: 91602 - DNA, 15 bp, Homo sapiens
gtatgcgtgtgtcag

SEQ ID NO: 91603 - DNA, 15 bp, Homo sapiens
tgtatgcgtgtgtca

SEQ ID NO: 91604 - DNA, 15 bp, Homo sapiens
atgtatgcgtgtgtc

SEQ ID NO: 91605 - DNA, 15 bp, Homo sapiens
tatgtatgcgtgtgt

SEQ ID NO: 91606 - DNA, 15 bp, Homo sapiens
atatgtatgcgtgtg

SEQ ID NO: 91607 - DNA, 15 bp, Homo sapiens
tatatgtatgcgtgt

SEQ ID NO: 91608 - DNA, 15 bp, Homo sapiens
ttatatgtatgcgtg

SEQ ID NO: 91609 - DNA, 15 bp, Homo sapiens
tttatatgtatgcgt

SEQ ID NO: 91610 - DNA, 15 bp, Homo sapiens
gtttatatgtatgcg

SEQ ID NO: 91611 - DNA, 15 bp, Homo sapiens
tgtttatatgtatgc

SEQ ID NO: 91612 - DNA, 15 bp, Homo sapiens
atgtttatatgtatg

SEQ ID NO: 91613 - DNA, 15 bp, Homo sapiens
aatgtttatatgtat

SEQ ID NO: 91614 - DNA, 15 bp, Homo sapiens
taatgtttatatgta

SEQ ID NO: 91615 - DNA, 15 bp, Homo sapiens
ctaatgtttatatgt

SEQ ID NO: 91616 - DNA, 15 bp, Homo sapiens
cctaatgtttatatg

SEQ ID NO: 91617 - DNA, 15 bp, Homo sapiens
ccctaatgtttatat

SEQ ID NO: 91618 - DNA, 15 bp, Homo sapiens
tccctaatgtttata

SEQ ID NO: 91619 - DNA, 15 bp, Homo sapiens
ttccctaatgtttat

SEQ ID NO: 91620 - DNA, 15 bp, Homo sapiens
gttccctaatgttta

SEQ ID NO: 91621 - DNA, 15 bp, Homo sapiens
agttccctaatgttt

SEQ ID NO: 91622 - DNA, 15 bp, Homo sapiens
tagttccctaatgtt

SEQ ID NO: 91623 - DNA, 15 bp, Homo sapiens
gtagttccctaatgt

SEQ ID NO: 91624 - DNA, 15 bp, Homo sapiens
ggtagttccctaatg

SEQ ID NO: 91625 - DNA, 15 bp, Homo sapiens
tggtagttccctaat

SEQ ID NO: 91626 - DNA, 15 bp, Homo sapiens
atggtagttccctaa

SEQ ID NO: 91627 - DNA, 15 bp, Homo sapiens
aatggtagttcccta

SEQ ID NO: 91628 - DNA, 15 bp, Homo sapiens
gaatggtagttccct

SEQ ID NO: 91629 - DNA, 15 bp, Homo sapiens
agaatggtagttccc

SEQ ID NO: 91630 - DNA, 15 bp, Homo sapiens
gagaatggtagttcc

SEQ ID NO: 91631 - DNA, 15 bp, Homo sapiens
agagaatggtagttc

SEQ ID NO: 91632 - DNA, 15 bp, Homo sapiens
aagagaatggtagtt

SEQ ID NO: 91633 - DNA, 15 bp, Homo sapiens
aaagagaatggtagt

SEQ ID NO: 91634 - DNA, 15 bp, Homo sapiens
caaagagaatggtag

SEQ ID NO: 91635 - DNA, 15 bp, Homo sapiens
gcaaagagaatggta

SEQ ID NO: 91636 - DNA, 15 bp, Homo sapiens
cgcaaagagaatggt

SEQ ID NO: 91637 - DNA, 15 bp, Homo sapiens
acgcaaagagaatgg

SEQ ID NO: 91638 - DNA, 15 bp, Homo sapiens
tacgcaaagagaatg

SEQ ID NO: 91639 - DNA, 15 bp, Homo sapiens
ctacgcaaagagaat

SEQ ID NO: 91640 - DNA, 15 bp, Homo sapiens
cctacgcaaagagaa

SEQ ID NO: 91641 - DNA, 15 bp, Homo sapiens
tcctacgcaaagaga

SEQ ID NO: 91642 - DNA, 15 bp, Homo sapiens
ttcctacgcaaagag

SEQ ID NO: 91643 - DNA, 15 bp, Homo sapiens
cttcctacgcaaaga

SEQ ID NO: 91644 - DNA, 15 bp, Homo sapiens
gcttcctacgcaaag

SEQ ID NO: 91645 - DNA, 15 bp, Homo sapiens
ggcttcctacgcaaa

SEQ ID NO: 91646 - DNA, 15 bp, Homo sapiens
tggcttcctacgcaa

SEQ ID NO: 91647 - DNA, 15 bp, Homo sapiens
gtggcttcctacgca

SEQ ID NO: 91648 - DNA, 15 bp, Homo sapiens
tgtggcttcctacgc

SEQ ID NO: 91649 - DNA, 15 bp, Homo sapiens
atgtggcttcctacg

SEQ ID NO: 91650 - DNA, 15 bp, Homo sapiens
tatgtggcttcctac

SEQ ID NO: 91651 - DNA, 15 bp, Homo sapiens
atatgtggcttccta

SEQ ID NO: 91652 - DNA, 15 bp, Homo sapiens
catatgtggcttcct

SEQ ID NO: 91653 - DNA, 15 bp, Homo sapiens
gcatatgtggcttcc

SEQ ID NO: 91654 - DNA, 15 bp, Homo sapiens
ggcatatgtggcttc

SEQ ID NO: 91655 - DNA, 15 bp, Homo sapiens
aggcatatgtggctt

SEQ ID NO: 91656 - DNA, 15 bp, Homo sapiens
taggcatatgtggct

SEQ ID NO: 91657 - DNA, 15 bp, Homo sapiens
ataggcatatgtggc

SEQ ID NO: 91658 - DNA, 15 bp, Homo sapiens
gataggcatatgtgg

SEQ ID NO: 91659 - DNA, 15 bp, Homo sapiens
agataggcatatgtg

SEQ ID NO: 91660 - DNA, 15 bp, Homo sapiens
tagataggcatatgt

SEQ ID NO: 91661 - DNA, 15 bp, Homo sapiens
ctagataggcatatg

SEQ ID NO: 91662 - DNA, 15 bp, Homo sapiens
cctagataggcatat

SEQ ID NO: 91663 - DNA, 15 bp, Homo sapiens
gcctagataggcata

SEQ ID NO: 91664 - DNA, 15 bp, Homo sapiens
ggcctagataggcat

SEQ ID NO: 91665 - DNA, 15 bp, Homo sapiens
aggcctagataggca

SEQ ID NO: 91666 - DNA, 15 bp, Homo sapiens
gaggcctagataggc

SEQ ID NO: 91667 - DNA, 15 bp, Homo sapiens
tgaggcctagatagg

SEQ ID NO: 91668 - DNA, 15 bp, Homo sapiens
ctgaggcctagatag

SEQ ID NO: 91669 - DNA, 15 bp, Homo sapiens
tctgaggcctagata

SEQ ID NO: 91670 - DNA, 15 bp, Homo sapiens
atctgaggcctagat

SEQ ID NO: 91671 - DNA, 15 bp, Homo sapiens
gatctgaggcctaga

SEQ ID NO: 91672 - DNA, 15 bp, Homo sapiens
tgatctgaggcctag

SEQ ID NO: 91673 - DNA, 15 bp, Homo sapiens
atgatctgaggccta

SEQ ID NO: 91674 - DNA, 15 bp, Homo sapiens
tatgatctgaggcct

SEQ ID NO: 91675 - DNA, 15 bp, Homo sapiens
gtatgatctgaggcc

SEQ ID NO: 91676 - DNA, 15 bp, Homo sapiens
ggtatgatctgaggc

SEQ ID NO: 91677 - DNA, 15 bp, Homo sapiens
aggtatgatctgagg

SEQ ID NO: 91678 - DNA, 15 bp, Homo sapiens
caggtatgatctgag

SEQ ID NO: 91679 - DNA, 15 bp, Homo sapiens
tcaggtatgatctga

SEQ ID NO: 91680 - DNA, 15 bp, Homo sapiens
atcaggtatgatctg

SEQ ID NO: 91681 - DNA, 15 bp, Homo sapiens
tatcaggtatgatct

SEQ ID NO: 91682 - DNA, 15 bp, Homo sapiens
atatcaggtatgatc

SEQ ID NO: 91683 - DNA, 15 bp, Homo sapiens
catatcaggtatgat

SEQ ID NO: 91684 - DNA, 15 bp, Homo sapiens
tcatatcaggtatga

SEQ ID NO: 91685 - DNA, 15 bp, Homo sapiens
ttcatatcaggtatg

SEQ ID NO: 91686 - DNA, 15 bp, Homo sapiens
attcatatcaggtat

SEQ ID NO: 91687 - DNA, 15 bp, Homo sapiens
tattcatatcaggta

SEQ ID NO: 91688 - DNA, 15 bp, Homo sapiens
ctattcatatcaggt

SEQ ID NO: 91689 - DNA, 15 bp, Homo sapiens
cctattcatatcagg

SEQ ID NO: 91690 - DNA, 15 bp, Homo sapiens
gcctattcatatcag

SEQ ID NO: 91691 - DNA, 15 bp, Homo sapiens
agcctattcatatca

SEQ ID NO: 91692 - DNA, 15 bp, Homo sapiens
aagcctattcatatc

SEQ ID NO: 91693 - DNA, 15 bp, Homo sapiens
aaagcctattcatat

SEQ ID NO: 91694 - DNA, 15 bp, Homo sapiens
gaaagcctattcata

SEQ ID NO: 91695 - DNA, 15 bp, Homo sapiens
agaaagcctattcat

SEQ ID NO: 91696 - DNA, 15 bp, Homo sapiens
cagaaagcctattca

SEQ ID NO: 91697 - DNA, 15 bp, Homo sapiens
ccagaaagcctattc

SEQ ID NO: 91698 - DNA, 15 bp, Homo sapiens
tccagaaagcctatt

SEQ ID NO: 91699 - DNA, 15 bp, Homo sapiens
atccagaaagcctat

SEQ ID NO: 91700 - DNA, 15 bp, Homo sapiens
tatccagaaagccta

SEQ ID NO: 91701 - DNA, 15 bp, Homo sapiens
ttatccagaaagcct

SEQ ID NO: 91702 - DNA, 15 bp, Homo sapiens
attatccagaaagcc

SEQ ID NO: 91703 - DNA, 15 bp, Homo sapiens
cattatccagaaagc

SEQ ID NO: 91704 - DNA, 15 bp, Homo sapiens
ccattatccagaaag

SEQ ID NO: 91705 - DNA, 15 bp, Homo sapiens
accattatccagaaa

SEQ ID NO: 91706 - DNA, 15 bp, Homo sapiens
caccattatccagaa

SEQ ID NO: 91707 - DNA, 15 bp, Homo sapiens
tcaccattatccaga

SEQ ID NO: 91708 - DNA, 15 bp, Homo sapiens
ttcaccattatccag

SEQ ID NO: 91709 - DNA, 15 bp, Homo sapiens
cttcaccattatcca

SEQ ID NO: 91710 - DNA, 15 bp, Homo sapiens
tcttcaccattatcc

SEQ ID NO: 91711 - DNA, 15 bp, Homo sapiens
ttcttcaccattatc

SEQ ID NO: 91712 - DNA, 15 bp, Homo sapiens
cttcttcaccattat

SEQ ID NO: 91713 - DNA, 15 bp, Homo sapiens
tcttcttcaccatta

SEQ ID NO: 91714 - DNA, 15 bp, Homo sapiens
atcttcttcaccatt

SEQ ID NO: 91715 - DNA, 15 bp, Homo sapiens
catcttcttcaccat

SEQ ID NO: 91716 - DNA, 15 bp, Homo sapiens
acatcttcttcacca

SEQ ID NO: 91717 - DNA, 15 bp, Homo sapiens
tacatcttcttcacc

SEQ ID NO: 91718 - DNA, 15 bp, Homo sapiens
atacatcttcttcac

SEQ ID NO: 91719 - DNA, 15 bp, Homo sapiens
tatacatcttcttca

SEQ ID NO: 91720 - DNA, 15 bp, Homo sapiens
ttatacatcttcttc

SEQ ID NO: 91721 - DNA, 15 bp, Homo sapiens
tttatacatcttctt

SEQ ID NO: 91722 - DNA, 15 bp, Homo sapiens
ttttatacatcttct

SEQ ID NO: 91723 - DNA, 15 bp, Homo sapiens
cttttatacatcttc

SEQ ID NO: 91724 - DNA, 15 bp, Homo sapiens
tcttttatacatctt

SEQ ID NO: 91725 - DNA, 15 bp, Homo sapiens
atcttttatacatct

SEQ ID NO: 91726 - DNA, 15 bp, Homo sapiens
tatcttttatacatc

SEQ ID NO: 91727 - DNA, 15 bp, Homo sapiens
ctatcttttatacat

SEQ ID NO: 91728 - DNA, 15 bp, Homo sapiens
tctatcttttataca

SEQ ID NO: 91729 - DNA, 15 bp, Homo sapiens
ttctatcttttatac

SEQ ID NO: 91730 - DNA, 15 bp, Homo sapiens
gttctatcttttata

SEQ ID NO: 91731 - DNA, 15 bp, Homo sapiens
ggttctatcttttat

SEQ ID NO: 91732 - DNA, 15 bp, Homo sapiens
aggttctatctttta

SEQ ID NO: 91733 - DNA, 15 bp, Homo sapiens
taggttctatctttt

SEQ ID NO: 91734 - DNA, 15 bp, Homo sapiens
ataggttctatcttt

SEQ ID NO: 91735 - DNA, 15 bp, Homo sapiens
tataggttctatctt

SEQ ID NO: 91736 - DNA, 15 bp, Homo sapiens
gtataggttctatct

SEQ ID NO: 91737 - DNA, 15 bp, Homo sapiens
ggtataggttctatc

SEQ ID NO: 91738 - DNA, 15 bp, Homo sapiens
gggtataggttctat

SEQ ID NO: 91739 - DNA, 15 bp, Homo sapiens
tgggtataggttcta

SEQ ID NO: 91740 - DNA, 15 bp, Homo sapiens
atgggtataggttct

SEQ ID NO: 91741 - DNA, 15 bp, Homo sapiens
tatgggtataggttc

SEQ ID NO: 91742 - DNA, 15 bp, Homo sapiens
gtatgggtataggtt

SEQ ID NO: 91743 - DNA, 15 bp, Homo sapiens
tgtatgggtataggt

SEQ ID NO: 91744 - DNA, 15 bp, Homo sapiens
atgtatgggtatagg

SEQ ID NO: 91745 - DNA, 15 bp, Homo sapiens
catgtatgggtatag

SEQ ID NO: 91746 - DNA, 15 bp, Homo sapiens
tcatgtatgggtata

SEQ ID NO: 91747 - DNA, 15 bp, Homo sapiens
atcatgtatgggtat

SEQ ID NO: 91748 - DNA, 15 bp, Homo sapiens
aatcatgtatgggta

SEQ ID NO: 91749 - DNA, 15 bp, Homo sapiens
aaatcatgtatgggt

SEQ ID NO: 91750 - DNA, 15 bp, Homo sapiens
caaatcatgtatggg

SEQ ID NO: 91751 - DNA, 15 bp, Homo sapiens
acaaatcatgtatgg

SEQ ID NO: 91752 - DNA, 15 bp, Homo sapiens
aacaaatcatgtatg

SEQ ID NO: 91753 - DNA, 15 bp, Homo sapiens
gaacaaatcatgtat

SEQ ID NO: 91754 - DNA, 15 bp, Homo sapiens
agaacaaatcatgta

SEQ ID NO: 91755 - DNA, 15 bp, Homo sapiens
gagaacaaatcatgt

SEQ ID NO: 91756 - DNA, 15 bp, Homo sapiens
agagaacaaatcatg

SEQ ID NO: 91757 - DNA, 15 bp, Homo sapiens
tagagaacaaatcat

SEQ ID NO: 91758 - DNA, 15 bp, Homo sapiens
ctagagaacaaatca

SEQ ID NO: 91759 - DNA, 15 bp, Homo sapiens
gctagagaacaaatc

SEQ ID NO: 91760 - DNA, 15 bp, Homo sapiens
cgctagagaacaaat

SEQ ID NO: 91761 - DNA, 15 bp, Homo sapiens
acgctagagaacaaa

SEQ ID NO: 91762 - DNA, 15 bp, Homo sapiens
tacgctagagaacaa

SEQ ID NO: 91763 - DNA, 15 bp, Homo sapiens
ctacgctagagaaca

SEQ ID NO: 91764 - DNA, 15 bp, Homo sapiens
gctacgctagagaac

SEQ ID NO: 91765 - DNA, 15 bp, Homo sapiens
tgctacgctagagaa

SEQ ID NO: 91766 - DNA, 15 bp, Homo sapiens
ttgctacgctagaga

SEQ ID NO: 91767 - DNA, 15 bp, Homo sapiens
gttgctacgctagag

SEQ ID NO: 91768 - DNA, 15 bp, Homo sapiens
ggttgctacgctaga

SEQ ID NO: 91769 - DNA, 15 bp, Homo sapiens
aggttgctacgctag

SEQ ID NO: 91770 - DNA, 15 bp, Homo sapiens
caggttgctacgcta

SEQ ID NO: 91771 - DNA, 15 bp, Homo sapiens
acaggttgctacgct

SEQ ID NO: 91772 - DNA, 15 bp, Homo sapiens
aacaggttgctacgc

SEQ ID NO: 91773 - DNA, 15 bp, Homo sapiens
taacaggttgctacg

SEQ ID NO: 91774 - DNA, 15 bp, Homo sapiens
gtaacaggttgctac

SEQ ID NO: 91775 - DNA, 15 bp, Homo sapiens
tgtaacaggttgcta

SEQ ID NO: 91776 - DNA, 15 bp, Homo sapiens
atgtaacaggttgct

SEQ ID NO: 91777 - DNA, 15 bp, Homo sapiens
tatgtaacaggttgc

SEQ ID NO: 91778 - DNA, 15 bp, Homo sapiens
atatgtaacaggttg

SEQ ID NO: 91779 - DNA, 15 bp, Homo sapiens
aatatgtaacaggtt

SEQ ID NO: 91780 - DNA, 15 bp, Homo sapiens
taatatgtaacaggt

SEQ ID NO: 91781 - DNA, 15 bp, Homo sapiens
ttaatatgtaacagg

SEQ ID NO: 91782 - DNA, 15 bp, Homo sapiens
tttaatatgtaacag

SEQ ID NO: 91783 - DNA, 15 bp, Homo sapiens
ctttaatatgtaaca

SEQ ID NO: 91784 - DNA, 15 bp, Homo sapiens
actttaatatgtaac

SEQ ID NO: 91785 - DNA, 15 bp, Homo sapiens
aactttaatatgtaa

SEQ ID NO: 91786 - DNA, 15 bp, Homo sapiens
aaactttaatatgta

SEQ ID NO: 91787 - DNA, 15 bp, Homo sapiens
aaaactttaatatgt

SEQ ID NO: 91788 - DNA, 15 bp, Homo sapiens
taaaactttaatatg

SEQ ID NO: 91789 - DNA, 15 bp, Homo sapiens
ataaaactttaatat

SEQ ID NO: 91790 - DNA, 15 bp, Homo sapiens
aataaaactttaata

SEQ ID NO: 91791 - DNA, 15 bp, Homo sapiens
taataaaactttaat

SEQ ID NO: 91792 - DNA, 15 bp, Homo sapiens
ataataaaactttaa

SEQ ID NO: 91793 - DNA, 15 bp, Homo sapiens
tataataaaacttta

SEQ ID NO: 91794 - DNA, 15 bp, Homo sapiens
gtataataaaacttt

SEQ ID NO: 91795 - DNA, 15 bp, Homo sapiens
agtataataaaactt

SEQ ID NO: 91796 - DNA, 15 bp, Homo sapiens
tagtataataaaact

SEQ ID NO: 91797 - DNA, 15 bp, Homo sapiens
gtagtataataaaac

SEQ ID NO: 91798 - DNA, 15 bp, Homo sapiens
tgtagtataataaaa

SEQ ID NO: 91799 - DNA, 15 bp, Homo sapiens
atgtagtataataaa

SEQ ID NO: 91800 - DNA, 15 bp, Homo sapiens
aatgtagtataataa

SEQ ID NO: 91801 - DNA, 15 bp, Homo sapiens
aaatgtagtataata

SEQ ID NO: 91802 - DNA, 15 bp, Homo sapiens
aaaatgtagtataat

SEQ ID NO: 91803 - DNA, 15 bp, Homo sapiens
aaaaatgtagtataa

SEQ ID NO: 91804 - DNA, 15 bp, Homo sapiens
gaaaaatgtagtata

SEQ ID NO: 91805 - DNA, 15 bp, Homo sapiens
agaaaaatgtagtat

SEQ ID NO: 91806 - DNA, 15 bp, Homo sapiens
tagaaaaatgtagta

SEQ ID NO: 91807 - DNA, 15 bp, Homo sapiens
gtagaaaaatgtagt

SEQ ID NO: 91808 - DNA, 15 bp, Homo sapiens
tgtagaaaaatgtag

SEQ ID NO: 91809 - DNA, 15 bp, Homo sapiens
atgtagaaaaatgta

SEQ ID NO: 91810 - DNA, 15 bp, Homo sapiens
gatgtagaaaaatgt

SEQ ID NO: 91811 - DNA, 15 bp, Homo sapiens
ggatgtagaaaaatg

SEQ ID NO: 91812 - DNA, 15 bp, Homo sapiens
aggatgtagaaaaat

SEQ ID NO: 91813 - DNA, 15 bp, Homo sapiens
aaggatgtagaaaaa

SEQ ID NO: 91814 - DNA, 15 bp, Homo sapiens
aaaggatgtagaaaa

SEQ ID NO: 91815 - DNA, 15 bp, Homo sapiens
caaaggatgtagaaa

SEQ ID NO: 91816 - DNA, 15 bp, Homo sapiens
acaaaggatgtagaa

SEQ ID NO: 91817 - DNA, 15 bp, Homo sapiens
aacaaaggatgtaga

SEQ ID NO: 91818 - DNA, 15 bp, Homo sapiens
aaacaaaggatgtag

SEQ ID NO: 91819 - DNA, 15 bp, Homo sapiens
gaaacaaaggatgta

SEQ ID NO: 91820 - DNA, 15 bp, Homo sapiens
tgaaacaaaggatgt

SEQ ID NO: 91821 - DNA, 15 bp, Homo sapiens
ctgaaacaaaggatg

SEQ ID NO: 91822 - DNA, 15 bp, Homo sapiens
cctgaaacaaaggat

SEQ ID NO: 91823 - DNA, 15 bp, Homo sapiens
ccctgaaacaaagga

SEQ ID NO: 91824 - DNA, 15 bp, Homo sapiens
accctgaaacaaagg

SEQ ID NO: 91825 - DNA, 15 bp, Homo sapiens
caccctgaaacaaag

SEQ ID NO: 91826 - DNA, 15 bp, Homo sapiens
acaccctgaaacaaa

SEQ ID NO: 91827 - DNA, 15 bp, Homo sapiens
aacaccctgaaacaa

SEQ ID NO: 91828 - DNA, 15 bp, Homo sapiens
caacaccctgaaaca

SEQ ID NO: 91829 - DNA, 15 bp, Homo sapiens
tcaacaccctgaaac

SEQ ID NO: 91830 - DNA, 15 bp, Homo sapiens
atcaacaccctgaaa

SEQ ID NO: 91831 - DNA, 15 bp, Homo sapiens
aatcaacaccctgaa

SEQ ID NO: 91832 - DNA, 15 bp, Homo sapiens
caatcaacaccctga

SEQ ID NO: 91833 - DNA, 15 bp, Homo sapiens
gcaatcaacaccctg

SEQ ID NO: 91834 - DNA, 15 bp, Homo sapiens
ggcaatcaacaccct

SEQ ID NO: 91835 - DNA, 15 bp, Homo sapiens
aggcaatcaacaccc

SEQ ID NO: 91836 - DNA, 15 bp, Homo sapiens
aaggcaatcaacacc

SEQ ID NO: 91837 - DNA, 15 bp, Homo sapiens
aaaggcaatcaacac

SEQ ID NO: 91838 - DNA, 15 bp, Homo sapiens
caaaggcaatcaaca

SEQ ID NO: 91839 - DNA, 15 bp, Homo sapiens
gcaaaggcaatcaac

SEQ ID NO: 91840 - DNA, 15 bp, Homo sapiens
agcaaaggcaatcaa

SEQ ID NO: 91841 - DNA, 15 bp, Homo sapiens
gagcaaaggcaatca

SEQ ID NO: 91842 - DNA, 15 bp, Homo sapiens
tgagcaaaggcaatc

SEQ ID NO: 91843 - DNA, 15 bp, Homo sapiens
ctgagcaaaggcaat

SEQ ID NO: 91844 - DNA, 15 bp, Homo sapiens
actgagcaaaggcaa

SEQ ID NO: 91845 - DNA, 15 bp, Homo sapiens
tactgagcaaaggca

SEQ ID NO: 91846 - DNA, 15 bp, Homo sapiens
atactgagcaaaggc

SEQ ID NO: 91847 - DNA, 15 bp, Homo sapiens
gatactgagcaaagg

SEQ ID NO: 91848 - DNA, 15 bp, Homo sapiens
agatactgagcaaag

SEQ ID NO: 91849 - DNA, 15 bp, Homo sapiens
aagatactgagcaaa

SEQ ID NO: 91850 - DNA, 15 bp, Homo sapiens
gaagatactgagcaa

SEQ ID NO: 91851 - DNA, 15 bp, Homo sapiens
tgaagatactgagca

SEQ ID NO: 91852 - DNA, 15 bp, Homo sapiens
ctgaagatactgagc

SEQ ID NO: 91853 - DNA, 15 bp, Homo sapiens
gctgaagatactgag

SEQ ID NO: 91854 - DNA, 15 bp, Homo sapiens
tgctgaagatactga

SEQ ID NO: 91855 - DNA, 15 bp, Homo sapiens
ctgctgaagatactg

SEQ ID NO: 91856 - DNA, 15 bp, Homo sapiens
actgctgaagatact

SEQ ID NO: 91857 - DNA, 15 bp, Homo sapiens
cactgctgaagatac

SEQ ID NO: 91858 - DNA, 15 bp, Homo sapiens
acactgctgaagata

SEQ ID NO: 91859 - DNA, 15 bp, Homo sapiens
gacactgctgaagat

SEQ ID NO: 91860 - DNA, 15 bp, Homo sapiens
ggacactgctgaaga

SEQ ID NO: 91861 - DNA, 15 bp, Homo sapiens
tggacactgctgaag

SEQ ID NO: 91862 - DNA, 15 bp, Homo sapiens
atggacactgctgaa

SEQ ID NO: 91863 - DNA, 15 bp, Homo sapiens
aatggacactgctga

SEQ ID NO: 91864 - DNA, 15 bp, Homo sapiens
aaatggacactgctg

SEQ ID NO: 91865 - DNA, 15 bp, Homo sapiens
caaatggacactgct

SEQ ID NO: 91866 - DNA, 15 bp, Homo sapiens
tcaaatggacactgc

SEQ ID NO: 91867 - DNA, 15 bp, Homo sapiens
ttcaaatggacactg

SEQ ID NO: 91868 - DNA, 15 bp, Homo sapiens
cttcaaatggacact

SEQ ID NO: 91869 - DNA, 15 bp, Homo sapiens
tcttcaaatggacac

SEQ ID NO: 91870 - DNA, 15 bp, Homo sapiens
atcttcaaatggaca

SEQ ID NO: 91871 - DNA, 15 bp, Homo sapiens
gatcttcaaatggac

SEQ ID NO: 91872 - DNA, 15 bp, Homo sapiens
tgatcttcaaatgga

SEQ ID NO: 91873 - DNA, 15 bp, Homo sapiens
atgatcttcaaatgg

SEQ ID NO: 91874 - DNA, 15 bp, Homo sapiens
catgatcttcaaatg

SEQ ID NO: 91875 - DNA, 15 bp, Homo sapiens
acatgatcttcaaat

SEQ ID NO: 91876 - DNA, 15 bp, Homo sapiens
tacatgatcttcaaa

SEQ ID NO: 91877 - DNA, 15 bp, Homo sapiens
ttacatgatcttcaa

SEQ ID NO: 91878 - DNA, 15 bp, Homo sapiens
tttacatgatcttca

SEQ ID NO: 91879 - DNA, 15 bp, Homo sapiens
ttttacatgatcttc

SEQ ID NO: 91880 - DNA, 15 bp, Homo sapiens
attttacatgatctt

SEQ ID NO: 91881 - DNA, 15 bp, Homo sapiens
aattttacatgatct

SEQ ID NO: 91882 - DNA, 15 bp, Homo sapiens
taattttacatgatc

SEQ ID NO: 91883 - DNA, 15 bp, Homo sapiens
ctaattttacatgat

SEQ ID NO: 91884 - DNA, 15 bp, Homo sapiens
actaattttacatga

SEQ ID NO: 91885 - DNA, 15 bp, Homo sapiens
cactaattttacatg

SEQ ID NO: 91886 - DNA, 15 bp, Homo sapiens
tcactaattttacat

SEQ ID NO: 91887 - DNA, 15 bp, Homo sapiens
ttcactaattttaca

SEQ ID NO: 91888 - DNA, 15 bp, Homo sapiens
attcactaattttac

SEQ ID NO: 91889 - DNA, 15 bp, Homo sapiens
cattcactaatttta

SEQ ID NO: 91890 - DNA, 15 bp, Homo sapiens
tcattcactaatttt

SEQ ID NO: 91891 - DNA, 15 bp, Homo sapiens
ttcattcactaattt

SEQ ID NO: 91892 - DNA, 15 bp, Homo sapiens
cttcattcactaatt

SEQ ID NO: 91893 - DNA, 15 bp, Homo sapiens
acttcattcactaat

SEQ ID NO: 91894 - DNA, 15 bp, Homo sapiens
tacttcattcactaa

SEQ ID NO: 91895 - DNA, 15 bp, Homo sapiens
ttacttcattcacta

SEQ ID NO: 91896 - DNA, 15 bp, Homo sapiens
gttacttcattcact

SEQ ID NO: 91897 - DNA, 15 bp, Homo sapiens
agttacttcattcac

SEQ ID NO: 91898 - DNA, 15 bp, Homo sapiens
cagttacttcattca

SEQ ID NO: 91899 - DNA, 15 bp, Homo sapiens
tcagttacttcattc

SEQ ID NO: 91900 - DNA, 15 bp, Homo sapiens
ttcagttacttcatt

SEQ ID NO: 91901 - DNA, 15 bp, Homo sapiens
attcagttacttcat

SEQ ID NO: 91902 - DNA, 15 bp, Homo sapiens
aattcagttacttca

SEQ ID NO: 91903 - DNA, 15 bp, Homo sapiens
aaattcagttacttc

SEQ ID NO: 91904 - DNA, 15 bp, Homo sapiens
caaattcagttactt

SEQ ID NO: 91905 - DNA, 15 bp, Homo sapiens
gcaaattcagttact

SEQ ID NO: 91906 - DNA, 15 bp, Homo sapiens
tgcaaattcagttac

SEQ ID NO: 91907 - DNA, 15 bp, Homo sapiens
ttgcaaattcagtta

SEQ ID NO: 91908 - DNA, 15 bp, Homo sapiens
tttgcaaattcagtt

SEQ ID NO: 91909 - DNA, 15 bp, Homo sapiens
ttttgcaaattcagt

SEQ ID NO: 91910 - DNA, 15 bp, Homo sapiens
tttttgcaaattcag

SEQ ID NO: 91911 - DNA, 15 bp, Homo sapiens
gtttttgcaaattca

SEQ ID NO: 91912 - DNA, 15 bp, Homo sapiens
tgtttttgcaaattc

SEQ ID NO: 91913 - DNA, 15 bp, Homo sapiens
atgtttttgcaaatt

SEQ ID NO: 91914 - DNA, 15 bp, Homo sapiens
catgtttttgcaaat

SEQ ID NO: 91915 - DNA, 15 bp, Homo sapiens
acatgtttttgcaaa

SEQ ID NO: 91916 - DNA, 15 bp, Homo sapiens
cacatgtttttgcaa

SEQ ID NO: 91917 - DNA, 15 bp, Homo sapiens
acacatgtttttgca

SEQ ID NO: 91918 - DNA, 15 bp, Homo sapiens
aacacatgtttttgc

SEQ ID NO: 91919 - DNA, 15 bp, Homo sapiens
caacacatgtttttg

SEQ ID NO: 91920 - DNA, 15 bp, Homo sapiens
gcaacacatgttttt

SEQ ID NO: 91921 - DNA, 15 bp, Homo sapiens
agcaacacatgtttt

SEQ ID NO: 91922 - DNA, 15 bp, Homo sapiens
cagcaacacatgttt

SEQ ID NO: 91923 - DNA, 15 bp, Homo sapiens
tcagcaacacatgtt

SEQ ID NO: 91924 - DNA, 15 bp, Homo sapiens
atcagcaacacatgt

SEQ ID NO: 91925 - DNA, 15 bp, Homo sapiens
catcagcaacacatg

SEQ ID NO: 91926 - DNA, 15 bp, Homo sapiens
tcatcagcaacacat

SEQ ID NO: 91927 - DNA, 15 bp, Homo sapiens
ctcatcagcaacaca

SEQ ID NO: 91928 - DNA, 15 bp, Homo sapiens
actcatcagcaacac

SEQ ID NO: 91929 - DNA, 15 bp, Homo sapiens
gactcatcagcaaca

SEQ ID NO: 91930 - DNA, 15 bp, Homo sapiens
tgactcatcagcaac

SEQ ID NO: 91931 - DNA, 15 bp, Homo sapiens
ctgactcatcagcaa

SEQ ID NO: 91932 - DNA, 15 bp, Homo sapiens
gctgactcatcagca

SEQ ID NO: 91933 - DNA, 15 bp, Homo sapiens
agctgactcatcagc

SEQ ID NO: 91934 - DNA, 15 bp, Homo sapiens
cagctgactcatcag

SEQ ID NO: 91935 - DNA, 15 bp, Homo sapiens
tcagctgactcatca

SEQ ID NO: 91936 - DNA, 15 bp, Homo sapiens
ttcagctgactcatc

SEQ ID NO: 91937 - DNA, 15 bp, Homo sapiens
tttcagctgactcat

SEQ ID NO: 91938 - DNA, 15 bp, Homo sapiens
ttttcagctgactca

SEQ ID NO: 91939 - DNA, 15 bp, Homo sapiens
attttcagctgactc

SEQ ID NO: 91940 - DNA, 15 bp, Homo sapiens
aattttcagctgact

SEQ ID NO: 91941 - DNA, 15 bp, Homo sapiens
caattttcagctgac

SEQ ID NO: 91942 - DNA, 15 bp, Homo sapiens
acaattttcagctga

SEQ ID NO: 91943 - DNA, 15 bp, Homo sapiens
cacaattttcagctg

SEQ ID NO: 91944 - DNA, 15 bp, Homo sapiens
tcacaattttcagct

SEQ ID NO: 91945 - DNA, 15 bp, Homo sapiens
gtcacaattttcagc

SEQ ID NO: 91946 - DNA, 15 bp, Homo sapiens
tgtcacaattttcag

SEQ ID NO: 91947 - DNA, 15 bp, Homo sapiens
ttgtcacaattttca

SEQ ID NO: 91948 - DNA, 15 bp, Homo sapiens
tttgtcacaattttc

SEQ ID NO: 91949 - DNA, 15 bp, Homo sapiens
atttgtcacaatttt

SEQ ID NO: 91950 - DNA, 15 bp, Homo sapiens
gatttgtcacaattt

SEQ ID NO: 91951 - DNA, 15 bp, Homo sapiens
tgatttgtcacaatt

SEQ ID NO: 91952 - DNA, 15 bp, Homo sapiens
gtgatttgtcacaat

SEQ ID NO: 91953 - DNA, 15 bp, Homo sapiens
agtgatttgtcacaa

SEQ ID NO: 91954 - DNA, 15 bp, Homo sapiens
aagtgatttgtcaca

SEQ ID NO: 91955 - DNA, 15 bp, Homo sapiens
caagtgatttgtcac

SEQ ID NO: 91956 - DNA, 15 bp, Homo sapiens
acaagtgatttgtca

SEQ ID NO: 91957 - DNA, 15 bp, Homo sapiens
tacaagtgatttgtc

SEQ ID NO: 91958 - DNA, 15 bp, Homo sapiens
ttacaagtgatttgt

SEQ ID NO: 91959 - DNA, 15 bp, Homo sapiens
cttacaagtgatttg

SEQ ID NO: 91960 - DNA, 15 bp, Homo sapiens
acttacaagtgattt

SEQ ID NO: 91961 - DNA, 15 bp, Homo sapiens
tacttacaagtgatt

SEQ ID NO: 91962 - DNA, 15 bp, Homo sapiens
gtacttacaagtgat

SEQ ID NO: 91963 - DNA, 15 bp, Homo sapiens
tgtacttacaagtga

SEQ ID NO: 91964 - DNA, 15 bp, Homo sapiens
atgtacttacaagtg

SEQ ID NO: 91965 - DNA, 15 bp, Homo sapiens
aatgtacttacaagt

SEQ ID NO: 91966 - DNA, 15 bp, Homo sapiens
gaatgtacttacaag

SEQ ID NO: 91967 - DNA, 15 bp, Homo sapiens
agaatgtacttacaa

SEQ ID NO: 91968 - DNA, 15 bp, Homo sapiens
tagaatgtacttaca

SEQ ID NO: 91969 - DNA, 15 bp, Homo sapiens
ttagaatgtacttac

SEQ ID NO: 91970 - DNA, 15 bp, Homo sapiens
attagaatgtactta

SEQ ID NO: 91971 - DNA, 15 bp, Homo sapiens
aattagaatgtactt

SEQ ID NO: 91972 - DNA, 15 bp, Homo sapiens
caattagaatgtact

SEQ ID NO: 91973 - DNA, 15 bp, Homo sapiens
acaattagaatgtac

SEQ ID NO: 91974 - DNA, 15 bp, Homo sapiens
cacaattagaatgta

SEQ ID NO: 91975 - DNA, 15 bp, Homo sapiens
ccacaattagaatgt

SEQ ID NO: 91976 - DNA, 15 bp, Homo sapiens
tccacaattagaatg

SEQ ID NO: 91977 - DNA, 15 bp, Homo sapiens
ctccacaattagaat

SEQ ID NO: 91978 - DNA, 15 bp, Homo sapiens
tctccacaattagaa

SEQ ID NO: 91979 - DNA, 15 bp, Homo sapiens
atctccacaattaga

SEQ ID NO: 91980 - DNA, 15 bp, Homo sapiens
aatctccacaattag

SEQ ID NO: 91981 - DNA, 15 bp, Homo sapiens
gaatctccacaatta

SEQ ID NO: 91982 - DNA, 15 bp, Homo sapiens
agaatctccacaatt

SEQ ID NO: 91983 - DNA, 15 bp, Homo sapiens
aagaatctccacaat

SEQ ID NO: 91984 - DNA, 15 bp, Homo sapiens
aaagaatctccacaa

SEQ ID NO: 91985 - DNA, 15 bp, Homo sapiens
gaaagaatctccaca

SEQ ID NO: 91986 - DNA, 15 bp, Homo sapiens
agaaagaatctccac

SEQ ID NO: 91987 - DNA, 15 bp, Homo sapiens
aagaaagaatctcca

SEQ ID NO: 91988 - DNA, 15 bp, Homo sapiens
gaagaaagaatctcc

SEQ ID NO: 91989 - DNA, 15 bp, Homo sapiens
agaagaaagaatctc

SEQ ID NO: 91990 - DNA, 15 bp, Homo sapiens
cagaagaaagaatct

SEQ ID NO: 91991 - DNA, 15 bp, Homo sapiens
acagaagaaagaatc

SEQ ID NO: 91992 - DNA, 15 bp, Homo sapiens
aacagaagaaagaat

SEQ ID NO: 91993 - DNA, 15 bp, Homo sapiens
aaacagaagaaagaa

SEQ ID NO: 91994 - DNA, 15 bp, Homo sapiens
caaacagaagaaaga

SEQ ID NO: 91995 - DNA, 15 bp, Homo sapiens
tcaaacagaagaaag

SEQ ID NO: 91996 - DNA, 15 bp, Homo sapiens
ttcaaacagaagaaa

SEQ ID NO: 91997 - DNA, 15 bp, Homo sapiens
cttcaaacagaagaa

SEQ ID NO: 91998 - DNA, 15 bp, Homo sapiens
acttcaaacagaaga

SEQ ID NO: 91999 - DNA, 15 bp, Homo sapiens
tacttcaaacagaag

SEQ ID NO: 92000 - DNA, 15 bp, Homo sapiens
ttacttcaaacagaa

SEQ ID NO: 92001 - DNA, 15 bp, Homo sapiens
attacttcaaacaga

SEQ ID NO: 92002 - DNA, 15 bp, Homo sapiens
gattacttcaaacag

SEQ ID NO: 92003 - DNA, 15 bp, Homo sapiens
ggattacttcaaaca

SEQ ID NO: 92004 - DNA, 15 bp, Homo sapiens
gggattacttcaaac

SEQ ID NO: 92005 - DNA, 15 bp, Homo sapiens
tgggattacttcaaa

SEQ ID NO: 92006 - DNA, 15 bp, Homo sapiens
ttgggattacttcaa

SEQ ID NO: 92007 - DNA, 15 bp, Homo sapiens
cttgggattacttca

SEQ ID NO: 92008 - DNA, 15 bp, Homo sapiens
gcttgggattacttc

SEQ ID NO: 92009 - DNA, 15 bp, Homo sapiens
tgcttgggattactt

SEQ ID NO: 92010 - DNA, 15 bp, Homo sapiens
atgcttgggattact

SEQ ID NO: 92011 - DNA, 15 bp, Homo sapiens
aatgcttgggattac

SEQ ID NO: 92012 - DNA, 15 bp, Homo sapiens
aaatgcttgggatta

SEQ ID NO: 92013 - DNA, 15 bp, Homo sapiens
gaaatgcttgggatt

SEQ ID NO: 92014 - DNA, 15 bp, Homo sapiens
tgaaatgcttgggat

SEQ ID NO: 92015 - DNA, 15 bp, Homo sapiens
ttgaaatgcttggga

SEQ ID NO: 92016 - DNA, 15 bp, Homo sapiens
tttgaaatgcttggg

SEQ ID NO: 92017 - DNA, 15 bp, Homo sapiens
ctttgaaatgcttgg

SEQ ID NO: 92018 - DNA, 15 bp, Homo sapiens
cctttgaaatgcttg

SEQ ID NO: 92019 - DNA, 15 bp, Homo sapiens
tcctttgaaatgctt

SEQ ID NO: 92020 - DNA, 15 bp, Homo sapiens
ttcctttgaaatgct

SEQ ID NO: 92021 - DNA, 15 bp, Homo sapiens
attcctttgaaatgc

SEQ ID NO: 92022 - DNA, 15 bp, Homo sapiens
aattcctttgaaatg

SEQ ID NO: 92023 - DNA, 15 bp, Homo sapiens
aaattcctttgaaat

SEQ ID NO: 92024 - DNA, 15 bp, Homo sapiens
aaaattcctttgaaa

SEQ ID NO: 92025 - DNA, 15 bp, Homo sapiens
aaaaattcctttgaa

SEQ ID NO: 92026 - DNA, 15 bp, Homo sapiens
aaaaaattcctttga

SEQ ID NO: 92027 - DNA, 15 bp, Homo sapiens
aaaaaaattcctttg

SEQ ID NO: 92028 - DNA, 15 bp, Homo sapiens
aaaaaaaattccttt

SEQ ID NO: 92029 - DNA, 15 bp, Homo sapiens
taaaaaaaattcctt

SEQ ID NO: 92030 - DNA, 15 bp, Homo sapiens
ttaaaaaaaattcct

SEQ ID NO: 92031 - DNA, 15 bp, Homo sapiens
cttaaaaaaaattcc

SEQ ID NO: 92032 - DNA, 15 bp, Homo sapiens
acttaaaaaaaattc

SEQ ID NO: 92033 - DNA, 15 bp, Homo sapiens
aacttaaaaaaaatt

SEQ ID NO: 92034 - DNA, 15 bp, Homo sapiens
aaacttaaaaaaaat

SEQ ID NO: 92035 - DNA, 15 bp, Homo sapiens
aaaacttaaaaaaaa

SEQ ID NO: 92036 - DNA, 15 bp, Homo sapiens
gaaaacttaaaaaaa

SEQ ID NO: 92037 - DNA, 15 bp, Homo sapiens
agaaaacttaaaaaa

SEQ ID NO: 92038 - DNA, 15 bp, Homo sapiens
gagaaaacttaaaaa

SEQ ID NO: 92039 - DNA, 15 bp, Homo sapiens
tgagaaaacttaaaa

SEQ ID NO: 92040 - DNA, 15 bp, Homo sapiens
ttgagaaaacttaaa

SEQ ID NO: 92041 - DNA, 15 bp, Homo sapiens
attgagaaaacttaa

SEQ ID NO: 92042 - DNA, 15 bp, Homo sapiens
aattgagaaaactta

SEQ ID NO: 92043 - DNA, 15 bp, Homo sapiens
taattgagaaaactt

SEQ ID NO: 92044 - DNA, 15 bp, Homo sapiens
ataattgagaaaact

SEQ ID NO: 92045 - DNA, 15 bp, Homo sapiens
aataattgagaaaac

SEQ ID NO: 92046 - DNA, 15 bp, Homo sapiens
taataattgagaaaa

SEQ ID NO: 92047 - DNA, 15 bp, Homo sapiens
ataataattgagaaa

SEQ ID NO: 92048 - DNA, 15 bp, Homo sapiens
aataataattgagaa

SEQ ID NO: 92049 - DNA, 15 bp, Homo sapiens
taataataattgaga

SEQ ID NO: 92050 - DNA, 15 bp, Homo sapiens
ttaataataattgag

SEQ ID NO: 92051 - DNA, 15 bp, Homo sapiens
cttaataataattga

SEQ ID NO: 92052 - DNA, 15 bp, Homo sapiens
acttaataataattg

SEQ ID NO: 92053 - DNA, 15 bp, Homo sapiens
cacttaataataatt

SEQ ID NO: 92054 - DNA, 15 bp, Homo sapiens
acacttaataataat

SEQ ID NO: 92055 - DNA, 15 bp, Homo sapiens
gacacttaataataa

SEQ ID NO: 92056 - DNA, 15 bp, Homo sapiens
ggacacttaataata

SEQ ID NO: 92057 - DNA, 15 bp, Homo sapiens
aggacacttaataat

SEQ ID NO: 92058 - DNA, 15 bp, Homo sapiens
caggacacttaataa

SEQ ID NO: 92059 - DNA, 15 bp, Homo sapiens
tcaggacacttaata

SEQ ID NO: 92060 - DNA, 15 bp, Homo sapiens
atcaggacacttaat

SEQ ID NO: 92061 - DNA, 15 bp, Homo sapiens
aatcaggacacttaa

SEQ ID NO: 92062 - DNA, 15 bp, Homo sapiens
aaatcaggacactta

SEQ ID NO: 92063 - DNA, 15 bp, Homo sapiens
caaatcaggacactt

SEQ ID NO: 92064 - DNA, 15 bp, Homo sapiens
acaaatcaggacact

SEQ ID NO: 92065 - DNA, 15 bp, Homo sapiens
tacaaatcaggacac

SEQ ID NO: 92066 - DNA, 15 bp, Homo sapiens
ttacaaatcaggaca

SEQ ID NO: 92067 - DNA, 15 bp, Homo sapiens
cttacaaatcaggac

SEQ ID NO: 92068 - DNA, 15 bp, Homo sapiens
tcttacaaatcagga

SEQ ID NO: 92069 - DNA, 15 bp, Homo sapiens
ttcttacaaatcagg

SEQ ID NO: 92070 - DNA, 15 bp, Homo sapiens
tttcttacaaatcag

SEQ ID NO: 92071 - DNA, 15 bp, Homo sapiens
gtttcttacaaatca

SEQ ID NO: 92072 - DNA, 15 bp, Homo sapiens
tgtttcttacaaatc

SEQ ID NO: 92073 - DNA, 15 bp, Homo sapiens
gtgtttcttacaaat

SEQ ID NO: 92074 - DNA, 15 bp, Homo sapiens
agtgtttcttacaaa

SEQ ID NO: 92075 - DNA, 15 bp, Homo sapiens
tagtgtttcttacaa

SEQ ID NO: 92076 - DNA, 15 bp, Homo sapiens
ttagtgtttcttaca

SEQ ID NO: 92077 - DNA, 15 bp, Homo sapiens
tttagtgtttcttac

SEQ ID NO: 92078 - DNA, 15 bp, Homo sapiens
ttttagtgtttctta

SEQ ID NO: 92079 - DNA, 15 bp, Homo sapiens
tttttagtgtttctt

SEQ ID NO: 92080 - DNA, 15 bp, Homo sapiens
ctttttagtgtttct

SEQ ID NO: 92081 - DNA, 15 bp, Homo sapiens
actttttagtgtttc

SEQ ID NO: 92082 - DNA, 15 bp, Homo sapiens
aactttttagtgttt

SEQ ID NO: 92083 - DNA, 15 bp, Homo sapiens
caactttttagtgtt

SEQ ID NO: 92084 - DNA, 15 bp, Homo sapiens
gcaactttttagtgt

SEQ ID NO: 92085 - DNA, 15 bp, Homo sapiens
agcaactttttagtg

SEQ ID NO: 92086 - DNA, 15 bp, Homo sapiens
gagcaactttttagt

SEQ ID NO: 92087 - DNA, 15 bp, Homo sapiens
tgagcaactttttag

SEQ ID NO: 92088 - DNA, 15 bp, Homo sapiens
atgagcaacttttta

SEQ ID NO: 92089 - DNA, 15 bp, Homo sapiens
tatgagcaacttttt

SEQ ID NO: 92090 - DNA, 15 bp, Homo sapiens
ctatgagcaactttt

SEQ ID NO: 92091 - DNA, 15 bp, Homo sapiens
tctatgagcaacttt

SEQ ID NO: 92092 - DNA, 15 bp, Homo sapiens
gtctatgagcaactt

SEQ ID NO: 92093 - DNA, 15 bp, Homo sapiens
agtctatgagcaact

SEQ ID NO: 92094 - DNA, 15 bp, Homo sapiens
cagtctatgagcaac

SEQ ID NO: 92095 - DNA, 15 bp, Homo sapiens
tcagtctatgagcaa

SEQ ID NO: 92096 - DNA, 15 bp, Homo sapiens
atcagtctatgagca

SEQ ID NO: 92097 - DNA, 15 bp, Homo sapiens
tatcagtctatgagc

SEQ ID NO: 92098 - DNA, 15 bp, Homo sapiens
ttatcagtctatgag

SEQ ID NO: 92099 - DNA, 15 bp, Homo sapiens
cttatcagtctatga

SEQ ID NO: 92100 - DNA, 15 bp, Homo sapiens
gcttatcagtctatg

SEQ ID NO: 92101 - DNA, 15 bp, Homo sapiens
ggcttatcagtctat

SEQ ID NO: 92102 - DNA, 15 bp, Homo sapiens
tggcttatcagtcta

SEQ ID NO: 92103 - DNA, 15 bp, Homo sapiens
atggcttatcagtct

SEQ ID NO: 92104 - DNA, 15 bp, Homo sapiens
aatggcttatcagtc

SEQ ID NO: 92105 - DNA, 15 bp, Homo sapiens
caatggcttatcagt

SEQ ID NO: 92106 - DNA, 15 bp, Homo sapiens
acaatggcttatcag

SEQ ID NO: 92107 - DNA, 15 bp, Homo sapiens
aacaatggcttatca

SEQ ID NO: 92108 - DNA, 15 bp, Homo sapiens
aaacaatggcttatc

SEQ ID NO: 92109 - DNA, 15 bp, Homo sapiens
gaaacaatggcttat

SEQ ID NO: 92110 - DNA, 15 bp, Homo sapiens
agaaacaatggctta

SEQ ID NO: 92111 - DNA, 15 bp, Homo sapiens
aagaaacaatggctt

SEQ ID NO: 92112 - DNA, 15 bp, Homo sapiens
aaagaaacaatggct

SEQ ID NO: 92113 - DNA, 15 bp, Homo sapiens
aaaagaaacaatggc

SEQ ID NO: 92114 - DNA, 15 bp, Homo sapiens
caaaagaaacaatgg

SEQ ID NO: 92115 - DNA, 15 bp, Homo sapiens
acaaaagaaacaatg

SEQ ID NO: 92116 - DNA, 15 bp, Homo sapiens
cacaaaagaaacaat

SEQ ID NO: 92117 - DNA, 15 bp, Homo sapiens
tcacaaaagaaacaa

SEQ ID NO: 92118 - DNA, 15 bp, Homo sapiens
atcacaaaagaaaca

SEQ ID NO: 92119 - DNA, 15 bp, Homo sapiens
tatcacaaaagaaac

SEQ ID NO: 92120 - DNA, 15 bp, Homo sapiens
ctatcacaaaagaaa

SEQ ID NO: 92121 - DNA, 15 bp, Homo sapiens
tctatcacaaaagaa

SEQ ID NO: 92122 - DNA, 15 bp, Homo sapiens
ctctatcacaaaaga

SEQ ID NO: 92123 - DNA, 15 bp, Homo sapiens
tctctatcacaaaag

SEQ ID NO: 92124 - DNA, 15 bp, Homo sapiens
atctctatcacaaaa

SEQ ID NO: 92125 - DNA, 15 bp, Homo sapiens
catctctatcacaaa

SEQ ID NO: 92126 - DNA, 15 bp, Homo sapiens
gcatctctatcacaa

SEQ ID NO: 92127 - DNA, 15 bp, Homo sapiens
agcatctctatcaca

SEQ ID NO: 92128 - DNA, 15 bp, Homo sapiens
aagcatctctatcac

SEQ ID NO: 92129 - DNA, 15 bp, Homo sapiens
aaagcatctctatca

SEQ ID NO: 92130 - DNA, 15 bp, Homo sapiens
taaagcatctctatc

SEQ ID NO: 92131 - DNA, 15 bp, Homo sapiens
ctaaagcatctctat

SEQ ID NO: 92132 - DNA, 15 bp, Homo sapiens
gctaaagcatctcta

SEQ ID NO: 92133 - DNA, 15 bp, Homo sapiens
agctaaagcatctct

SEQ ID NO: 92134 - DNA, 15 bp, Homo sapiens
tagctaaagcatctc

SEQ ID NO: 92135 - DNA, 15 bp, Homo sapiens
atagctaaagcatct

SEQ ID NO: 92136 - DNA, 15 bp, Homo sapiens
catagctaaagcatc

SEQ ID NO: 92137 - DNA, 15 bp, Homo sapiens
acatagctaaagcat

SEQ ID NO: 92138 - DNA, 15 bp, Homo sapiens
gacatagctaaagca

SEQ ID NO: 92139 - DNA, 15 bp, Homo sapiens
ggacatagctaaagc

SEQ ID NO: 92140 - DNA, 15 bp, Homo sapiens
tggacatagctaaag

SEQ ID NO: 92141 - DNA, 15 bp, Homo sapiens
gtggacatagctaaa

SEQ ID NO: 92142 - DNA, 15 bp, Homo sapiens
tgtggacatagctaa

SEQ ID NO: 92143 - DNA, 15 bp, Homo sapiens
ctgtggacatagcta

SEQ ID NO: 92144 - DNA, 15 bp, Homo sapiens
actgtggacatagct

SEQ ID NO: 92145 - DNA, 15 bp, Homo sapiens
aactgtggacatagc

SEQ ID NO: 92146 - DNA, 15 bp, Homo sapiens
aaactgtggacatag

SEQ ID NO: 92147 - DNA, 15 bp, Homo sapiens
aaaactgtggacata

SEQ ID NO: 92148 - DNA, 15 bp, Homo sapiens
taaaactgtggacat

SEQ ID NO: 92149 - DNA, 15 bp, Homo sapiens
ttaaaactgtggaca

SEQ ID NO: 92150 - DNA, 15 bp, Homo sapiens
tttaaaactgtggac

SEQ ID NO: 92151 - DNA, 15 bp, Homo sapiens
ttttaaaactgtgga

SEQ ID NO: 92152 - DNA, 15 bp, Homo sapiens
attttaaaactgtgg

SEQ ID NO: 92153 - DNA, 15 bp, Homo sapiens
gattttaaaactgtg

SEQ ID NO: 92154 - DNA, 15 bp, Homo sapiens
tgattttaaaactgt

SEQ ID NO: 92155 - DNA, 15 bp, Homo sapiens
atgattttaaaactg

SEQ ID NO: 92156 - DNA, 15 bp, Homo sapiens
aatgattttaaaact

SEQ ID NO: 92157 - DNA, 15 bp, Homo sapiens
aaatgattttaaaac

SEQ ID NO: 92158 - DNA, 15 bp, Homo sapiens
gaaatgattttaaaa

SEQ ID NO: 92159 - DNA, 15 bp, Homo sapiens
agaaatgattttaaa

SEQ ID NO: 92160 - DNA, 15 bp, Homo sapiens
aagaaatgattttaa

SEQ ID NO: 92161 - DNA, 15 bp, Homo sapiens
aaagaaatgatttta

SEQ ID NO: 92162 - DNA, 15 bp, Homo sapiens
taaagaaatgatttt

SEQ ID NO: 92163 - DNA, 15 bp, Homo sapiens
ataaagaaatgattt

SEQ ID NO: 92164 - DNA, 15 bp, Homo sapiens
aataaagaaatgatt

SEQ ID NO: 92165 - DNA, 15 bp, Homo sapiens
caataaagaaatgat

SEQ ID NO: 92166 - DNA, 15 bp, Homo sapiens
tcaataaagaaatga

SEQ ID NO: 92167 - DNA, 15 bp, Homo sapiens
ctcaataaagaaatg

SEQ ID NO: 92168 - DNA, 15 bp, Homo sapiens
tctcaataaagaaat

SEQ ID NO: 92169 - DNA, 15 bp, Homo sapiens
gtctcaataaagaaa

SEQ ID NO: 92170 - DNA, 15 bp, Homo sapiens
ggtctcaataaagaa

SEQ ID NO: 92171 - DNA, 15 bp, Homo sapiens
tggtctcaataaaga

SEQ ID NO: 92172 - DNA, 15 bp, Homo sapiens
ttggtctcaataaag

SEQ ID NO: 92173 - DNA, 15 bp, Homo sapiens
tttggtctcaataaa

SEQ ID NO: 92174 - DNA, 15 bp, Homo sapiens
gtttggtctcaataa

SEQ ID NO: 92175 - DNA, 15 bp, Homo sapiens
tgtttggtctcaata

SEQ ID NO: 92176 - DNA, 15 bp, Homo sapiens
gtgtttggtctcaat

SEQ ID NO: 92177 - DNA, 15 bp, Homo sapiens
tgtgtttggtctcaa

SEQ ID NO: 92178 - DNA, 15 bp, Homo sapiens
ttgtgtttggtctca

SEQ ID NO: 92179 - DNA, 15 bp, Homo sapiens
gttgtgtttggtctc

SEQ ID NO: 92180 - DNA, 15 bp, Homo sapiens
tgttgtgtttggtct

SEQ ID NO: 92181 - DNA, 15 bp, Homo sapiens
ctgttgtgtttggtc

SEQ ID NO: 92182 - DNA, 15 bp, Homo sapiens
actgttgtgtttggt

SEQ ID NO: 92183 - DNA, 15 bp, Homo sapiens
gactgttgtgtttgg

SEQ ID NO: 92184 - DNA, 15 bp, Homo sapiens
tgactgttgtgtttg

SEQ ID NO: 92185 - DNA, 15 bp, Homo sapiens
atgactgttgtgttt

SEQ ID NO: 92186 - DNA, 15 bp, Homo sapiens
catgactgttgtgtt

SEQ ID NO: 92187 - DNA, 15 bp, Homo sapiens
ccatgactgttgtgt

SEQ ID NO: 92188 - DNA, 15 bp, Homo sapiens
accatgactgttgtg

SEQ ID NO: 92189 - DNA, 15 bp, Homo sapiens
caccatgactgttgt

SEQ ID NO: 92190 - DNA, 15 bp, Homo sapiens
acaccatgactgttg

SEQ ID NO: 92191 - DNA, 15 bp, Homo sapiens
tacaccatgactgtt

SEQ ID NO: 92192 - DNA, 15 bp, Homo sapiens
atacaccatgactgt

SEQ ID NO: 92193 - DNA, 15 bp, Homo sapiens
aatacaccatgactg

SEQ ID NO: 92194 - DNA, 15 bp, Homo sapiens
aaatacaccatgact

SEQ ID NO: 92195 - DNA, 15 bp, Homo sapiens
taaatacaccatgac

SEQ ID NO: 92196 - DNA, 15 bp, Homo sapiens
ttaaatacaccatga

SEQ ID NO: 92197 - DNA, 15 bp, Homo sapiens
tttaaatacaccatg

SEQ ID NO: 92198 - DNA, 15 bp, Homo sapiens
atttaaatacaccat

SEQ ID NO: 92199 - DNA, 15 bp, Homo sapiens
catttaaatacacca

SEQ ID NO: 92200 - DNA, 15 bp, Homo sapiens
ccatttaaatacacc

SEQ ID NO: 92201 - DNA, 15 bp, Homo sapiens
gccatttaaatacac

SEQ ID NO: 92202 - DNA, 15 bp, Homo sapiens
tgccatttaaataca

SEQ ID NO: 92203 - DNA, 15 bp, Homo sapiens
ttgccatttaaatac

SEQ ID NO: 92204 - DNA, 15 bp, Homo sapiens
attgccatttaaata

SEQ ID NO: 92205 - DNA, 15 bp, Homo sapiens
aattgccatttaaat

SEQ ID NO: 92206 - DNA, 15 bp, Homo sapiens
aaattgccatttaaa

SEQ ID NO: 92207 - DNA, 15 bp, Homo sapiens
caaattgccatttaa

SEQ ID NO: 92208 - DNA, 15 bp, Homo sapiens
acaaattgccattta

SEQ ID NO: 92209 - DNA, 15 bp, Homo sapiens
gacaaattgccattt

SEQ ID NO: 92210 - DNA, 15 bp, Homo sapiens
tgacaaattgccatt

SEQ ID NO: 92211 - DNA, 15 bp, Homo sapiens
atgacaaattgccat

SEQ ID NO: 92212 - DNA, 15 bp, Homo sapiens
aatgacaaattgcca

SEQ ID NO: 92213 - DNA, 15 bp, Homo sapiens
aaatgacaaattgcc

SEQ ID NO: 92214 - DNA, 15 bp, Homo sapiens
taaatgacaaattgc

SEQ ID NO: 92215 - DNA, 15 bp, Homo sapiens
ataaatgacaaattg

SEQ ID NO: 92216 - DNA, 15 bp, Homo sapiens
tataaatgacaaatt

SEQ ID NO: 92217 - DNA, 15 bp, Homo sapiens
ttataaatgacaaat

SEQ ID NO: 92218 - DNA, 15 bp, Homo sapiens
tttataaatgacaaa

SEQ ID NO: 92219 - DNA, 15 bp, Homo sapiens
gtttataaatgacaa

SEQ ID NO: 92220 - DNA, 15 bp, Homo sapiens
tgtttataaatgaca

SEQ ID NO: 92221 - DNA, 15 bp, Homo sapiens
gtgtttataaatgac

SEQ ID NO: 92222 - DNA, 15 bp, Homo sapiens
ggtgtttataaatga

SEQ ID NO: 92223 - DNA, 15 bp, Homo sapiens
aggtgtttataaatg

SEQ ID NO: 92224 - DNA, 15 bp, Homo sapiens
gaggtgtttataaat

SEQ ID NO: 92225 - DNA, 15 bp, Homo sapiens
agaggtgtttataaa

SEQ ID NO: 92226 - DNA, 15 bp, Homo sapiens
aagaggtgtttataa

SEQ ID NO: 92227 - DNA, 15 bp, Homo sapiens
aaagaggtgtttata

SEQ ID NO: 92228 - DNA, 15 bp, Homo sapiens
aaaagaggtgtttat

SEQ ID NO: 92229 - DNA, 15 bp, Homo sapiens
aaaaagaggtgttta

SEQ ID NO: 92230 - DNA, 15 bp, Homo sapiens
taaaaagaggtgttt

SEQ ID NO: 92231 - DNA, 15 bp, Homo sapiens
ttaaaaagaggtgtt

SEQ ID NO: 92232 - DNA, 15 bp, Homo sapiens
tttaaaaagaggtgt

SEQ ID NO: 92233 - DNA, 15 bp, Homo sapiens
ttttaaaaagaggtg

SEQ ID NO: 92234 - DNA, 15 bp, Homo sapiens
attttaaaaagaggt

SEQ ID NO: 92235 - DNA, 15 bp, Homo sapiens
aattttaaaaagagg

SEQ ID NO: 92236 - DNA, 15 bp, Homo sapiens
aaattttaaaaagag

SEQ ID NO: 92237 - DNA, 15 bp, Homo sapiens
caaattttaaaaaga

SEQ ID NO: 92238 - DNA, 15 bp, Homo sapiens
tcaaattttaaaaag

SEQ ID NO: 92239 - DNA, 15 bp, Homo sapiens
ctcaaattttaaaaa

SEQ ID NO: 92240 - DNA, 15 bp, Homo sapiens
cctcaaattttaaaa

SEQ ID NO: 92241 - DNA, 15 bp, Homo sapiens
acctcaaattttaaa

SEQ ID NO: 92242 - DNA, 15 bp, Homo sapiens
aacctcaaattttaa

SEQ ID NO: 92243 - DNA, 15 bp, Homo sapiens
aaacctcaaatttta

SEQ ID NO: 92244 - DNA, 15 bp, Homo sapiens
caaacctcaaatttt

SEQ ID NO: 92245 - DNA, 15 bp, Homo sapiens
ccaaacctcaaattt

SEQ ID NO: 92246 - DNA, 15 bp, Homo sapiens
accaaacctcaaatt

SEQ ID NO: 92247 - DNA, 15 bp, Homo sapiens
aaccaaacctcaaat

SEQ ID NO: 92248 - DNA, 15 bp, Homo sapiens
aaaccaaacctcaaa

SEQ ID NO: 92249 - DNA, 15 bp, Homo sapiens
gaaaccaaacctcaa

SEQ ID NO: 92250 - DNA, 15 bp, Homo sapiens
agaaaccaaacctca

SEQ ID NO: 92251 - DNA, 15 bp, Homo sapiens
aagaaaccaaacctc

SEQ ID NO: 92252 - DNA, 15 bp, Homo sapiens
aaagaaaccaaacct

SEQ ID NO: 92253 - DNA, 15 bp, Homo sapiens
aaaagaaaccaaacc

SEQ ID NO: 92254 - DNA, 15 bp, Homo sapiens
aaaaagaaaccaaac

SEQ ID NO: 92255 - DNA, 15 bp, Homo sapiens
caaaaagaaaccaaa

SEQ ID NO: 92256 - DNA, 15 bp, Homo sapiens
acaaaaagaaaccaa

SEQ ID NO: 92257 - DNA, 15 bp, Homo sapiens
tacaaaaagaaacca

SEQ ID NO: 92258 - DNA, 15 bp, Homo sapiens
ctacaaaaagaaacc

SEQ ID NO: 92259 - DNA, 15 bp, Homo sapiens
tctacaaaaagaaac

SEQ ID NO: 92260 - DNA, 15 bp, Homo sapiens
ctctacaaaaagaaa

SEQ ID NO: 92261 - DNA, 15 bp, Homo sapiens
cctctacaaaaagaa

SEQ ID NO: 92262 - DNA, 15 bp, Homo sapiens
gcctctacaaaaaga

SEQ ID NO: 92263 - DNA, 15 bp, Homo sapiens
agcctctacaaaaag

SEQ ID NO: 92264 - DNA, 15 bp, Homo sapiens
tagcctctacaaaaa

SEQ ID NO: 92265 - DNA, 15 bp, Homo sapiens
ttagcctctacaaaa

SEQ ID NO: 92266 - DNA, 15 bp, Homo sapiens
attagcctctacaaa

SEQ ID NO: 92267 - DNA, 15 bp, Homo sapiens
tattagcctctacaa

SEQ ID NO: 92268 - DNA, 15 bp, Homo sapiens
ctattagcctctaca

SEQ ID NO: 92269 - DNA, 15 bp, Homo sapiens
cctattagcctctac

SEQ ID NO: 92270 - DNA, 15 bp, Homo sapiens
ccctattagcctcta

SEQ ID NO: 92271 - DNA, 15 bp, Homo sapiens
tccctattagcctct

SEQ ID NO: 92272 - DNA, 15 bp, Homo sapiens
atccctattagcctc

SEQ ID NO: 92273 - DNA, 15 bp, Homo sapiens
tatccctattagcct

SEQ ID NO: 92274 - DNA, 15 bp, Homo sapiens
atatccctattagcc

SEQ ID NO: 92275 - DNA, 15 bp, Homo sapiens
catatccctattagc

SEQ ID NO: 92276 - DNA, 15 bp, Homo sapiens
tcatatccctattag

SEQ ID NO: 92277 - DNA, 15 bp, Homo sapiens
atcatatccctatta

SEQ ID NO: 92278 - DNA, 15 bp, Homo sapiens
tatcatatccctatt

SEQ ID NO: 92279 - DNA, 15 bp, Homo sapiens
ctatcatatccctat

SEQ ID NO: 92280 - DNA, 15 bp, Homo sapiens
gctatcatatcccta

SEQ ID NO: 92281 - DNA, 15 bp, Homo sapiens
tgctatcatatccct

SEQ ID NO: 92282 - DNA, 15 bp, Homo sapiens
atgctatcatatccc

SEQ ID NO: 92283 - DNA, 15 bp, Homo sapiens
catgctatcatatcc

SEQ ID NO: 92284 - DNA, 15 bp, Homo sapiens
acatgctatcatatc

SEQ ID NO: 92285 - DNA, 15 bp, Homo sapiens
tacatgctatcatat

SEQ ID NO: 92286 - DNA, 15 bp, Homo sapiens
atacatgctatcata

SEQ ID NO: 92287 - DNA, 15 bp, Homo sapiens
aatacatgctatcat

SEQ ID NO: 92288 - DNA, 15 bp, Homo sapiens
aaatacatgctatca

SEQ ID NO: 92289 - DNA, 15 bp, Homo sapiens
taaatacatgctatc

SEQ ID NO: 92290 - DNA, 15 bp, Homo sapiens
ataaatacatgctat

SEQ ID NO: 92291 - DNA, 15 bp, Homo sapiens
aataaatacatgcta

SEQ ID NO: 92292 - DNA, 15 bp, Homo sapiens
aaataaatacatgct

SEQ ID NO: 92293 - DNA, 15 bp, Homo sapiens
taaataaatacatgc

SEQ ID NO: 92294 - DNA, 15 bp, Homo sapiens
ataaataaatacatg

SEQ ID NO: 92295 - DNA, 15 bp, Homo sapiens
aataaataaatacat

SEQ ID NO: 92296 - DNA, 15 bp, Homo sapiens
aaataaataaataca

SEQ ID NO: 92297 - DNA, 15 bp, Homo sapiens
taaataaataaatac

SEQ ID NO: 92298 - DNA, 15 bp, Homo sapiens
gataaataaataaat

SEQ ID NO: 92299 - DNA, 15 bp, Homo sapiens
agataaataaataaa

SEQ ID NO: 92300 - DNA, 15 bp, Homo sapiens
aagataaataaataa

SEQ ID NO: 92301 - DNA, 15 bp, Homo sapiens
taagataaataaata

SEQ ID NO: 92302 - DNA, 15 bp, Homo sapiens
ataagataaataaat

SEQ ID NO: 92303 - DNA, 15 bp, Homo sapiens
aataagataaataaa

SEQ ID NO: 92304 - DNA, 15 bp, Homo sapiens
aaataagataaataa

SEQ ID NO: 92305 - DNA, 15 bp, Homo sapiens
aaaataagataaata

SEQ ID NO: 92306 - DNA, 15 bp, Homo sapiens
taaaataagataaat

SEQ ID NO: 92307 - DNA, 15 bp, Homo sapiens
ataaaataagataaa

SEQ ID NO: 92308 - DNA, 15 bp, Homo sapiens
aataaaataagataa

SEQ ID NO: 92309 - DNA, 15 bp, Homo sapiens
taataaaataagata

SEQ ID NO: 92310 - DNA, 15 bp, Homo sapiens
ataataaaataagat

SEQ ID NO: 92311 - DNA, 15 bp, Homo sapiens
tataataaaataaga

SEQ ID NO: 92312 - DNA, 15 bp, Homo sapiens
ctataataaaataag

SEQ ID NO: 92313 - DNA, 15 bp, Homo sapiens
actataataaaataa

SEQ ID NO: 92314 - DNA, 15 bp, Homo sapiens
tactataataaaata

SEQ ID NO: 92315 - DNA, 15 bp, Homo sapiens
ttactataataaaat

SEQ ID NO: 92316 - DNA, 15 bp, Homo sapiens
cttactataataaaa

SEQ ID NO: 92317 - DNA, 15 bp, Homo sapiens
tcttactataataaa

SEQ ID NO: 92318 - DNA, 15 bp, Homo sapiens
ttcttactataataa

SEQ ID NO: 92319 - DNA, 15 bp, Homo sapiens
gttcttactataata

SEQ ID NO: 92320 - DNA, 15 bp, Homo sapiens
ggttcttactataat

SEQ ID NO: 92321 - DNA, 15 bp, Homo sapiens
gggttcttactataa

SEQ ID NO: 92322 - DNA, 15 bp, Homo sapiens
agggttcttactata

SEQ ID NO: 92323 - DNA, 15 bp, Homo sapiens
aagggttcttactat

SEQ ID NO: 92324 - DNA, 15 bp, Homo sapiens
taagggttcttacta

SEQ ID NO: 92325 - DNA, 15 bp, Homo sapiens
ttaagggttcttact

SEQ ID NO: 92326 - DNA, 15 bp, Homo sapiens
gttaagggttcttac

SEQ ID NO: 92327 - DNA, 15 bp, Homo sapiens
tgttaagggttctta

SEQ ID NO: 92328 - DNA, 15 bp, Homo sapiens
gcggtgattcaggaa

SEQ ID NO: 92329 - DNA, 15 bp, Homo sapiens
tgcggtgattcagga

SEQ ID NO: 92330 - DNA, 15 bp, Homo sapiens
ttgcggtgattcagg

SEQ ID NO: 92331 - DNA, 15 bp, Homo sapiens
cttgcggtgattcag

SEQ ID NO: 92332 - DNA, 15 bp, Homo sapiens
tcttgcggtgattca

SEQ ID NO: 92333 - DNA, 15 bp, Homo sapiens
ttcttgcggtgattc

SEQ ID NO: 92334 - DNA, 15 bp, Homo sapiens
gttcttgcggtgatt

SEQ ID NO: 92335 - DNA, 15 bp, Homo sapiens
tgttcttgcggtgat

SEQ ID NO: 92336 - DNA, 15 bp, Homo sapiens
ttgttcttgcggtga

SEQ ID NO: 92337 - DNA, 15 bp, Homo sapiens
cttgttcttgcggtg

SEQ ID NO: 92338 - DNA, 15 bp, Homo sapiens
acttgttcttgcggt

SEQ ID NO: 92339 - DNA, 15 bp, Homo sapiens
aacttgttcttgcgg

SEQ ID NO: 92340 - DNA, 15 bp, Homo sapiens
aaacttgttcttgcg

SEQ ID NO: 92341 - DNA, 15 bp, Homo sapiens
gaaacttgttcttgc

SEQ ID NO: 92342 - DNA, 15 bp, Homo sapiens
tgaaacttgttcttg

SEQ ID NO: 92343 - DNA, 15 bp, Homo sapiens
ctgaaacttgttctt

SEQ ID NO: 92344 - DNA, 15 bp, Homo sapiens
actgaaacttgttct

SEQ ID NO: 92345 - DNA, 15 bp, Homo sapiens
cactgaaacttgttc

SEQ ID NO: 92346 - DNA, 15 bp, Homo sapiens
acactgaaacttgtt

SEQ ID NO: 92347 - DNA, 15 bp, Homo sapiens
cacactgaaacttgt

SEQ ID NO: 92348 - DNA, 15 bp, Homo sapiens
ccacactgaaacttg

SEQ ID NO: 92349 - DNA, 15 bp, Homo sapiens
gccacactgaaactt

SEQ ID NO: 92350 - DNA, 15 bp, Homo sapiens
agccacactgaaact

SEQ ID NO: 92351 - DNA, 15 bp, Homo sapiens
aagccacactgaaac

SEQ ID NO: 92352 - DNA, 15 bp, Homo sapiens
aaagccacactgaaa

SEQ ID NO: 92353 - DNA, 15 bp, Homo sapiens
caaagccacactgaa

SEQ ID NO: 92354 - DNA, 15 bp, Homo sapiens
ccaaagccacactga

SEQ ID NO: 92355 - DNA, 15 bp, Homo sapiens
gccaaagccacactg

SEQ ID NO: 92356 - DNA, 15 bp, Homo sapiens
ggccaaagccacact

SEQ ID NO: 92357 - DNA, 15 bp, Homo sapiens
aggccaaagccacac

SEQ ID NO: 92358 - DNA, 15 bp, Homo sapiens
gaggccaaagccaca

SEQ ID NO: 92359 - DNA, 15 bp, Homo sapiens
tgaggccaaagccac

SEQ ID NO: 92360 - DNA, 15 bp, Homo sapiens
gtgaggccaaagcca

SEQ ID NO: 92361 - DNA, 15 bp, Homo sapiens
ggtgaggccaaagcc

SEQ ID NO: 92362 - DNA, 15 bp, Homo sapiens
tggtgaggccaaagc

SEQ ID NO: 92363 - DNA, 15 bp, Homo sapiens
atggtgaggccaaag

SEQ ID NO: 92364 - DNA, 15 bp, Homo sapiens
gatggtgaggccaaa

SEQ ID NO: 92365 - DNA, 15 bp, Homo sapiens
cgatggtgaggccaa

SEQ ID NO: 92366 - DNA, 15 bp, Homo sapiens
ccgatggtgaggcca

SEQ ID NO: 92367 - DNA, 15 bp, Homo sapiens
gccgatggtgaggcc

SEQ ID NO: 92368 - DNA, 15 bp, Homo sapiens
agccgatggtgaggc

SEQ ID NO: 92369 - DNA, 15 bp, Homo sapiens
cagccgatggtgagg

SEQ ID NO: 92370 - DNA, 15 bp, Homo sapiens
tcagccgatggtgag

SEQ ID NO: 92371 - DNA, 15 bp, Homo sapiens
ctcagccgatggtga

SEQ ID NO: 92372 - DNA, 15 bp, Homo sapiens
gctcagccgatggtg

SEQ ID NO: 92373 - DNA, 15 bp, Homo sapiens
ggctcagccgatggt

SEQ ID NO: 92374 - DNA, 15 bp, Homo sapiens
gggctcagccgatgg

SEQ ID NO: 92375 - DNA, 15 bp, Homo sapiens
agggctcagccgatg

SEQ ID NO: 92376 - DNA, 15 bp, Homo sapiens
gagggctcagccgat

SEQ ID NO: 92377 - DNA, 15 bp, Homo sapiens
ggagggctcagccga

SEQ ID NO: 92378 - DNA, 15 bp, Homo sapiens
aggagggctcagccg

SEQ ID NO: 92379 - DNA, 15 bp, Homo sapiens
caggagggctcagcc

SEQ ID NO: 92380 - DNA, 15 bp, Homo sapiens
ccaggagggctcagc

SEQ ID NO: 92381 - DNA, 15 bp, Homo sapiens
gccaggagggctcag

SEQ ID NO: 92382 - DNA, 15 bp, Homo sapiens
ggccaggagggctca

SEQ ID NO: 92383 - DNA, 15 bp, Homo sapiens
gggccaggagggctc

SEQ ID NO: 92384 - DNA, 15 bp, Homo sapiens
ggggccaggagggct

SEQ ID NO: 92385 - DNA, 15 bp, Homo sapiens
gggggccaggagggc

SEQ ID NO: 92386 - DNA, 15 bp, Homo sapiens
cgggggccaggaggg

SEQ ID NO: 92387 - DNA, 15 bp, Homo sapiens
gcgggggccaggagg

SEQ ID NO: 92388 - DNA, 15 bp, Homo sapiens
ggcgggggccaggag

SEQ ID NO: 92389 - DNA, 15 bp, Homo sapiens
aggcgggggccagga

SEQ ID NO: 92390 - DNA, 15 bp, Homo sapiens
aaggcgggggccagg

SEQ ID NO: 92391 - DNA, 15 bp, Homo sapiens
gaaggcgggggccag

SEQ ID NO: 92392 - DNA, 15 bp, Homo sapiens
ggaaggcgggggcca

SEQ ID NO: 92393 - DNA, 15 bp, Homo sapiens
tggaaggcgggggcc

SEQ ID NO: 92394 - DNA, 15 bp, Homo sapiens
gtggaaggcgggggc

SEQ ID NO: 92395 - DNA, 15 bp, Homo sapiens
cgtggaaggcggggg

SEQ ID NO: 92396 - DNA, 15 bp, Homo sapiens
gcgtggaaggcgggg

SEQ ID NO: 92397 - DNA, 15 bp, Homo sapiens
ggcgtggaaggcggg

SEQ ID NO: 92398 - DNA, 15 bp, Homo sapiens
gggcgtggaaggcgg

SEQ ID NO: 92399 - DNA, 15 bp, Homo sapiens
agggcgtggaaggcg

SEQ ID NO: 92400 - DNA, 15 bp, Homo sapiens
aagggcgtggaaggc

SEQ ID NO: 92401 - DNA, 15 bp, Homo sapiens
gaagggcgtggaagg

SEQ ID NO: 92402 - DNA, 15 bp, Homo sapiens
ggaagggcgtggaag

SEQ ID NO: 92403 - DNA, 15 bp, Homo sapiens
cggaagggcgtggaa

SEQ ID NO: 92404 - DNA, 15 bp, Homo sapiens
tcggaagggcgtgga

SEQ ID NO: 92405 - DNA, 15 bp, Homo sapiens
atcggaagggcgtgg

SEQ ID NO: 92406 - DNA, 15 bp, Homo sapiens
aatcggaagggcgtg

SEQ ID NO: 92407 - DNA, 15 bp, Homo sapiens
gaatcggaagggcgt

SEQ ID NO: 92408 - DNA, 15 bp, Homo sapiens
ggaatcggaagggcg

SEQ ID NO: 92409 - DNA, 15 bp, Homo sapiens
tggaatcggaagggc

SEQ ID NO: 92410 - DNA, 15 bp, Homo sapiens
gtggaatcggaaggg

SEQ ID NO: 92411 - DNA, 15 bp, Homo sapiens
ggtggaatcggaagg

SEQ ID NO: 92412 - DNA, 15 bp, Homo sapiens
aggtggaatcggaag

SEQ ID NO: 92413 - DNA, 15 bp, Homo sapiens
gaggtggaatcggaa

SEQ ID NO: 92414 - DNA, 15 bp, Homo sapiens
ggaggtggaatcgga

SEQ ID NO: 92415 - DNA, 15 bp, Homo sapiens
tggaggtggaatcgg

SEQ ID NO: 92416 - DNA, 15 bp, Homo sapiens
gtggaggtggaatcg

SEQ ID NO: 92417 - DNA, 15 bp, Homo sapiens
ggtggaggtggaatc

SEQ ID NO: 92418 - DNA, 15 bp, Homo sapiens
aggtggaggtggaat

SEQ ID NO: 92419 - DNA, 15 bp, Homo sapiens
gaggtggaggtggaa

SEQ ID NO: 92420 - DNA, 15 bp, Homo sapiens
ggaggtggaggtgga

SEQ ID NO: 92421 - DNA, 15 bp, Homo sapiens
tggaggtggaggtgg

SEQ ID NO: 92422 - DNA, 15 bp, Homo sapiens
gtggaggtggaggtg

SEQ ID NO: 92423 - DNA, 15 bp, Homo sapiens
ggtggaggtggaggt

SEQ ID NO: 92424 - DNA, 15 bp, Homo sapiens
aggtggaggtggagg

SEQ ID NO: 92425 - DNA, 15 bp, Homo sapiens
gaggtggaggtggag

SEQ ID NO: 92426 - DNA, 15 bp, Homo sapiens
gggaggtggaggtgg

SEQ ID NO: 92427 - DNA, 15 bp, Homo sapiens
ggggaggtggaggtg

SEQ ID NO: 92428 - DNA, 15 bp, Homo sapiens
gggggaggtggaggt

SEQ ID NO: 92429 - DNA, 15 bp, Homo sapiens
agggggaggtggagg

SEQ ID NO: 92430 - DNA, 15 bp, Homo sapiens
cagggggaggtggag

SEQ ID NO: 92431 - DNA, 15 bp, Homo sapiens
gcagggggaggtgga

SEQ ID NO: 92432 - DNA, 15 bp, Homo sapiens
ggcagggggaggtgg

SEQ ID NO: 92433 - DNA, 15 bp, Homo sapiens
tggcagggggaggtg

SEQ ID NO: 92434 - DNA, 15 bp, Homo sapiens
gtggcagggggaggt

SEQ ID NO: 92435 - DNA, 15 bp, Homo sapiens
tgtggcagggggagg

SEQ ID NO: 92436 - DNA, 15 bp, Homo sapiens
ctgtggcagggggag

SEQ ID NO: 92437 - DNA, 15 bp, Homo sapiens
tctgtggcaggggga

SEQ ID NO: 92438 - DNA, 15 bp, Homo sapiens
ctctgtggcaggggg

SEQ ID NO: 92439 - DNA, 15 bp, Homo sapiens
cctctgtggcagggg

SEQ ID NO: 92440 - DNA, 15 bp, Homo sapiens
ccctctgtggcaggg

SEQ ID NO: 92441 - DNA, 15 bp, Homo sapiens
cccctctgtggcagg

SEQ ID NO: 92442 - DNA, 15 bp, Homo sapiens
tcccctctgtggcag

SEQ ID NO: 92443 - DNA, 15 bp, Homo sapiens
ctcccctctgtggca

SEQ ID NO: 92444 - DNA, 15 bp, Homo sapiens
tctcccctctgtggc

SEQ ID NO: 92445 - DNA, 15 bp, Homo sapiens
gtctcccctctgtgg

SEQ ID NO: 92446 - DNA, 15 bp, Homo sapiens
ggtctcccctctgtg

SEQ ID NO: 92447 - DNA, 15 bp, Homo sapiens
aggtctcccctctgt

SEQ ID NO: 92448 - DNA, 15 bp, Homo sapiens
caggtctcccctctg

SEQ ID NO: 92449 - DNA, 15 bp, Homo sapiens
tcaggtctcccctct

SEQ ID NO: 92450 - DNA, 15 bp, Homo sapiens
ctcaggtctcccctc

SEQ ID NO: 92451 - DNA, 15 bp, Homo sapiens
gctcaggtctcccct

SEQ ID NO: 92452 - DNA, 15 bp, Homo sapiens
ggctcaggtctcccc

SEQ ID NO: 92453 - DNA, 15 bp, Homo sapiens
gggctcaggtctccc

SEQ ID NO: 92454 - DNA, 15 bp, Homo sapiens
ggggctcaggtctcc

SEQ ID NO: 92455 - DNA, 15 bp, Homo sapiens
gggggctcaggtctc

SEQ ID NO: 92456 - DNA, 15 bp, Homo sapiens
ggggggctcaggtct

SEQ ID NO: 92457 - DNA, 15 bp, Homo sapiens
aggggggctcaggtc

SEQ ID NO: 92458 - DNA, 15 bp, Homo sapiens
gaggggggctcaggt

SEQ ID NO: 92459 - DNA, 15 bp, Homo sapiens
ggaggggggctcagg

SEQ ID NO: 92460 - DNA, 15 bp, Homo sapiens
gggaggggggctcag

SEQ ID NO: 92461 - DNA, 15 bp, Homo sapiens
agggaggggggctca

SEQ ID NO: 92462 - DNA, 15 bp, Homo sapiens
aagggaggggggctc

SEQ ID NO: 92463 - DNA, 15 bp, Homo sapiens
gaagggaggggggct

SEQ ID NO: 92464 - DNA, 15 bp, Homo sapiens
ggaagggaggggggc

SEQ ID NO: 92465 - DNA, 15 bp, Homo sapiens
gggaagggagggggg

SEQ ID NO: 92466 - DNA, 15 bp, Homo sapiens
agggaagggaggggg

SEQ ID NO: 92467 - DNA, 15 bp, Homo sapiens
gagggaagggagggg

SEQ ID NO: 92468 - DNA, 15 bp, Homo sapiens
ggagggaagggaggg

SEQ ID NO: 92469 - DNA, 15 bp, Homo sapiens
gggagggaagggagg

SEQ ID NO: 92470 - DNA, 15 bp, Homo sapiens
ggggagggaagggag

SEQ ID NO: 92471 - DNA, 15 bp, Homo sapiens
gggggagggaaggga

SEQ ID NO: 92472 - DNA, 15 bp, Homo sapiens
ggggggagggaaggg

SEQ ID NO: 92473 - DNA, 15 bp, Homo sapiens
aggggggagggaagg

SEQ ID NO: 92474 - DNA, 15 bp, Homo sapiens
aaggggggagggaag

SEQ ID NO: 92475 - DNA, 15 bp, Homo sapiens
caaggggggagggaa

SEQ ID NO: 92476 - DNA, 15 bp, Homo sapiens
ccaaggggggaggga

SEQ ID NO: 92477 - DNA, 15 bp, Homo sapiens
cccaaggggggaggg

SEQ ID NO: 92478 - DNA, 15 bp, Homo sapiens
ccccaaggggggagg

SEQ ID NO: 92479 - DNA, 15 bp, Homo sapiens
cccccaaggggggag

SEQ ID NO: 92480 - DNA, 15 bp, Homo sapiens
acccccaagggggga

SEQ ID NO: 92481 - DNA, 15 bp, Homo sapiens
gacccccaagggggg

SEQ ID NO: 92482 - DNA, 15 bp, Homo sapiens
cgacccccaaggggg

SEQ ID NO: 92483 - DNA, 15 bp, Homo sapiens
ccgacccccaagggg

SEQ ID NO: 92484 - DNA, 15 bp, Homo sapiens
cccgacccccaaggg

SEQ ID NO: 92485 - DNA, 15 bp, Homo sapiens
ccccgacccccaagg

SEQ ID NO: 92486 - DNA, 15 bp, Homo sapiens
cccccgacccccaag

SEQ ID NO: 92487 - DNA, 15 bp, Homo sapiens
ccccccgacccccaa

SEQ ID NO: 92488 - DNA, 15 bp, Homo sapiens
cccccccgaccccca

SEQ ID NO: 92489 - DNA, 15 bp, Homo sapiens
tcccccccgaccccc

SEQ ID NO: 92490 - DNA, 15 bp, Homo sapiens
gtcccccccgacccc

SEQ ID NO: 92491 - DNA, 15 bp, Homo sapiens
tgtcccccccgaccc

SEQ ID NO: 92492 - DNA, 15 bp, Homo sapiens
atgtcccccccgacc

SEQ ID NO: 92493 - DNA, 15 bp, Homo sapiens
aatgtcccccccgac

SEQ ID NO: 92494 - DNA, 15 bp, Homo sapiens
caatgtcccccccga

SEQ ID NO: 92495 - DNA, 15 bp, Homo sapiens
ccaatgtcccccccg

SEQ ID NO: 92496 - DNA, 15 bp, Homo sapiens
tccaatgtccccccc

SEQ ID NO: 92497 - DNA, 15 bp, Homo sapiens
ttccaatgtcccccc

SEQ ID NO: 92498 - DNA, 15 bp, Homo sapiens
tttccaatgtccccc

SEQ ID NO: 92499 - DNA, 15 bp, Homo sapiens
ctttccaatgtcccc

SEQ ID NO: 92500 - DNA, 15 bp, Homo sapiens
cctttccaatgtccc

SEQ ID NO: 92501 - DNA, 15 bp, Homo sapiens
tcctttccaatgtcc

SEQ ID NO: 92502 - DNA, 15 bp, Homo sapiens
ctcctttccaatgtc

SEQ ID NO: 92503 - DNA, 15 bp, Homo sapiens
cctcctttccaatgt

SEQ ID NO: 92504 - DNA, 15 bp, Homo sapiens
ccctcctttccaatg

SEQ ID NO: 92505 - DNA, 15 bp, Homo sapiens
tccctcctttccaat

SEQ ID NO: 92506 - DNA, 15 bp, Homo sapiens
gtccctcctttccaa

SEQ ID NO: 92507 - DNA, 15 bp, Homo sapiens
ggtccctcctttcca

SEQ ID NO: 92508 - DNA, 15 bp, Homo sapiens
gggtccctcctttcc

SEQ ID NO: 92509 - DNA, 15 bp, Homo sapiens
ggggtccctcctttc

SEQ ID NO: 92510 - DNA, 15 bp, Homo sapiens
cggggtccctccttt

SEQ ID NO: 92511 - DNA, 15 bp, Homo sapiens
gcggggtccctcctt

SEQ ID NO: 92512 - DNA, 15 bp, Homo sapiens
ggcggggtccctcct

SEQ ID NO: 92513 - DNA, 15 bp, Homo sapiens
tggcggggtccctcc

SEQ ID NO: 92514 - DNA, 15 bp, Homo sapiens
gtggcggggtccctc

SEQ ID NO: 92515 - DNA, 15 bp, Homo sapiens
ggtggcggggtccct

SEQ ID NO: 92516 - DNA, 15 bp, Homo sapiens
gggtggcggggtccc

SEQ ID NO: 92517 - DNA, 15 bp, Homo sapiens
ggggtggcggggtcc

SEQ ID NO: 92518 - DNA, 15 bp, Homo sapiens
tggggtggcggggtc

SEQ ID NO: 92519 - DNA, 15 bp, Homo sapiens
ctggggtggcggggt

SEQ ID NO: 92520 - DNA, 15 bp, Homo sapiens
gctggggtggcgggg

SEQ ID NO: 92521 - DNA, 15 bp, Homo sapiens
tgctggggtggcggg

SEQ ID NO: 92522 - DNA, 15 bp, Homo sapiens
ctgctggggtggcgg

SEQ ID NO: 92523 - DNA, 15 bp, Homo sapiens
gctgctggggtggcg

SEQ ID NO: 92524 - DNA, 15 bp, Homo sapiens
agctgctggggtggc

SEQ ID NO: 92525 - DNA, 15 bp, Homo sapiens
cagctgctggggtgg

SEQ ID NO: 92526 - DNA, 15 bp, Homo sapiens
tcagctgctggggtg

SEQ ID NO: 92527 - DNA, 15 bp, Homo sapiens
ctcagctgctggggt

SEQ ID NO: 92528 - DNA, 15 bp, Homo sapiens
cctcagctgctgggg

SEQ ID NO: 92529 - DNA, 15 bp, Homo sapiens
tcctcagctgctggg

SEQ ID NO: 92530 - DNA, 15 bp, Homo sapiens
ctcctcagctgctgg

SEQ ID NO: 92531 - DNA, 15 bp, Homo sapiens
cctcctcagctgctg

SEQ ID NO: 92532 - DNA, 15 bp, Homo sapiens
ccctcctcagctgct

SEQ ID NO: 92533 - DNA, 15 bp, Homo sapiens
cccctcctcagctgc

SEQ ID NO: 92534 - DNA, 15 bp, Homo sapiens
tcccctcctcagctg

SEQ ID NO: 92535 - DNA, 15 bp, Homo sapiens
atcccctcctcagct

SEQ ID NO: 92536 - DNA, 15 bp, Homo sapiens
aatcccctcctcagc

SEQ ID NO: 92537 - DNA, 15 bp, Homo sapiens
gaatcccctcctcag

SEQ ID NO: 92538 - DNA, 15 bp, Homo sapiens
agaatcccctcctca

SEQ ID NO: 92539 - DNA, 15 bp, Homo sapiens
cagaatcccctcctc

SEQ ID NO: 92540 - DNA, 15 bp, Homo sapiens
ccagaatcccctcct

SEQ ID NO: 92541 - DNA, 15 bp, Homo sapiens
tccagaatcccctcc

SEQ ID NO: 92542 - DNA, 15 bp, Homo sapiens
ttccagaatcccctc

SEQ ID NO: 92543 - DNA, 15 bp, Homo sapiens
gttccagaatcccct

SEQ ID NO: 92544 - DNA, 15 bp, Homo sapiens
agttccagaatcccc

SEQ ID NO: 92545 - DNA, 15 bp, Homo sapiens
cagttccagaatccc

SEQ ID NO: 92546 - DNA, 15 bp, Homo sapiens
tcagttccagaatcc

SEQ ID NO: 92547 - DNA, 15 bp, Homo sapiens
ttcagttccagaatc

SEQ ID NO: 92548 - DNA, 15 bp, Homo sapiens
attcagttccagaat

SEQ ID NO: 92549 - DNA, 15 bp, Homo sapiens
cattcagttccagaa

SEQ ID NO: 92550 - DNA, 15 bp, Homo sapiens
ccattcagttccaga

SEQ ID NO: 92551 - DNA, 15 bp, Homo sapiens
gccattcagttccag

SEQ ID NO: 92552 - DNA, 15 bp, Homo sapiens
cgccattcagttcca

SEQ ID NO: 92553 - DNA, 15 bp, Homo sapiens
gcgccattcagttcc

SEQ ID NO: 92554 - DNA, 15 bp, Homo sapiens
agcgccattcagttc

SEQ ID NO: 92555 - DNA, 15 bp, Homo sapiens
aagcgccattcagtt

SEQ ID NO: 92556 - DNA, 15 bp, Homo sapiens
gaagcgccattcagt

SEQ ID NO: 92557 - DNA, 15 bp, Homo sapiens
cgaagcgccattcag

SEQ ID NO: 92558 - DNA, 15 bp, Homo sapiens
ccgaagcgccattca

SEQ ID NO: 92559 - DNA, 15 bp, Homo sapiens
cccgaagcgccattc

SEQ ID NO: 92560 - DNA, 15 bp, Homo sapiens
tcccgaagcgccatt

SEQ ID NO: 92561 - DNA, 15 bp, Homo sapiens
atcccgaagcgccat

SEQ ID NO: 92562 - DNA, 15 bp, Homo sapiens
aatcccgaagcgcca

SEQ ID NO: 92563 - DNA, 15 bp, Homo sapiens
gaatcccgaagcgcc

SEQ ID NO: 92564 - DNA, 15 bp, Homo sapiens
agaatcccgaagcgc

SEQ ID NO: 92565 - DNA, 15 bp, Homo sapiens
cagaatcccgaagcg

SEQ ID NO: 92566 - DNA, 15 bp, Homo sapiens
tcagaatcccgaagc

SEQ ID NO: 92567 - DNA, 15 bp, Homo sapiens
ctcagaatcccgaag

SEQ ID NO: 92568 - DNA, 15 bp, Homo sapiens
actcagaatcccgaa

SEQ ID NO: 92569 - DNA, 15 bp, Homo sapiens
tactcagaatcccga

SEQ ID NO: 92570 - DNA, 15 bp, Homo sapiens
ctactcagaatcccg

SEQ ID NO: 92571 - DNA, 15 bp, Homo sapiens
gctactcagaatccc

SEQ ID NO: 92572 - DNA, 15 bp, Homo sapiens
tgctactcagaatcc

SEQ ID NO: 92573 - DNA, 15 bp, Homo sapiens
ctgctactcagaatc

SEQ ID NO: 92574 - DNA, 15 bp, Homo sapiens
cctgctactcagaat

SEQ ID NO: 92575 - DNA, 15 bp, Homo sapiens
ccctgctactcagaa

SEQ ID NO: 92576 - DNA, 15 bp, Homo sapiens
cccctgctactcaga

SEQ ID NO: 92577 - DNA, 15 bp, Homo sapiens
gcccctgctactcag

SEQ ID NO: 92578 - DNA, 15 bp, Homo sapiens
tgcccctgctactca

SEQ ID NO: 92579 - DNA, 15 bp, Homo sapiens
ctgcccctgctactc

SEQ ID NO: 92580 - DNA, 15 bp, Homo sapiens
gctgcccctgctact

SEQ ID NO: 92581 - DNA, 15 bp, Homo sapiens
tgctgcccctgctac

SEQ ID NO: 92582 - DNA, 15 bp, Homo sapiens
atgctgcccctgcta

SEQ ID NO: 92583 - DNA, 15 bp, Homo sapiens
catgctgcccctgct

SEQ ID NO: 92584 - DNA, 15 bp, Homo sapiens
gcatgctgcccctgc

SEQ ID NO: 92585 - DNA, 15 bp, Homo sapiens
ggcatgctgcccctg

SEQ ID NO: 92586 - DNA, 15 bp, Homo sapiens
gggcatgctgcccct

SEQ ID NO: 92587 - DNA, 15 bp, Homo sapiens
tgggcatgctgcccc

SEQ ID NO: 92588 - DNA, 15 bp, Homo sapiens
ctgggcatgctgccc

SEQ ID NO: 92589 - DNA, 15 bp, Homo sapiens
actgggcatgctgcc

SEQ ID NO: 92590 - DNA, 15 bp, Homo sapiens
cactgggcatgctgc

SEQ ID NO: 92591 - DNA, 15 bp, Homo sapiens
ccactgggcatgctg

SEQ ID NO: 92592 - DNA, 15 bp, Homo sapiens
cccactgggcatgct

SEQ ID NO: 92593 - DNA, 15 bp, Homo sapiens
gcccactgggcatgc

SEQ ID NO: 92594 - DNA, 15 bp, Homo sapiens
ggcccactgggcatg

SEQ ID NO: 92595 - DNA, 15 bp, Homo sapiens
aggcccactgggcat

SEQ ID NO: 92596 - DNA, 15 bp, Homo sapiens
caggcccactgggca

SEQ ID NO: 92597 - DNA, 15 bp, Homo sapiens
ccaggcccactgggc

SEQ ID NO: 92598 - DNA, 15 bp, Homo sapiens
cccaggcccactggg

SEQ ID NO: 92599 - DNA, 15 bp, Homo sapiens
ccccaggcccactgg

SEQ ID NO: 92600 - DNA, 15 bp, Homo sapiens
accccaggcccactg

SEQ ID NO: 92601 - DNA, 15 bp, Homo sapiens
gaccccaggcccact

SEQ ID NO: 92602 - DNA, 15 bp, Homo sapiens
ggaccccaggcccac

SEQ ID NO: 92603 - DNA, 15 bp, Homo sapiens
gggaccccaggccca

SEQ ID NO: 92604 - DNA, 15 bp, Homo sapiens
cgggaccccaggccc

SEQ ID NO: 92605 - DNA, 15 bp, Homo sapiens
ccgggaccccaggcc

SEQ ID NO: 92606 - DNA, 15 bp, Homo sapiens
cccgggaccccaggc

SEQ ID NO: 92607 - DNA, 15 bp, Homo sapiens
tcccgggaccccagg

SEQ ID NO: 92608 - DNA, 15 bp, Homo sapiens
ctcccgggaccccag

SEQ ID NO: 92609 - DNA, 15 bp, Homo sapiens
cctcccgggacccca

SEQ ID NO: 92610 - DNA, 15 bp, Homo sapiens
ccctcccgggacccc

SEQ ID NO: 92611 - DNA, 15 bp, Homo sapiens
tccctcccgggaccc

SEQ ID NO: 92612 - DNA, 15 bp, Homo sapiens
atccctcccgggacc

SEQ ID NO: 92613 - DNA, 15 bp, Homo sapiens
aatccctcccgggac

SEQ ID NO: 92614 - DNA, 15 bp, Homo sapiens
gaatccctcccggga

SEQ ID NO: 92615 - DNA, 15 bp, Homo sapiens
ggaatccctcccggg

SEQ ID NO: 92616 - DNA, 15 bp, Homo sapiens
cggaatccctcccgg

SEQ ID NO: 92617 - DNA, 15 bp, Homo sapiens
ccggaatccctcccg

SEQ ID NO: 92618 - DNA, 15 bp, Homo sapiens
tccggaatccctccc

SEQ ID NO: 92619 - DNA, 15 bp, Homo sapiens
ttccggaatccctcc

SEQ ID NO: 92620 - DNA, 15 bp, Homo sapiens
attccggaatccctc

SEQ ID NO: 92621 - DNA, 15 bp, Homo sapiens
aattccggaatccct

SEQ ID NO: 92622 - DNA, 15 bp, Homo sapiens
caattccggaatccc

SEQ ID NO: 92623 - DNA, 15 bp, Homo sapiens
tcaattccggaatcc

SEQ ID NO: 92624 - DNA, 15 bp, Homo sapiens
ctcaattccggaatc

SEQ ID NO: 92625 - DNA, 15 bp, Homo sapiens
cctcaattccggaat

SEQ ID NO: 92626 - DNA, 15 bp, Homo sapiens
ccctcaattccggaa

SEQ ID NO: 92627 - DNA, 15 bp, Homo sapiens
cccctcaattccgga

SEQ ID NO: 92628 - DNA, 15 bp, Homo sapiens
gcccctcaattccgg

SEQ ID NO: 92629 - DNA, 15 bp, Homo sapiens
tgcccctcaattccg

SEQ ID NO: 92630 - DNA, 15 bp, Homo sapiens
gtgcccctcaattcc

SEQ ID NO: 92631 - DNA, 15 bp, Homo sapiens
cgtgcccctcaattc

SEQ ID NO: 92632 - DNA, 15 bp, Homo sapiens
gcgtgcccctcaatt

SEQ ID NO: 92633 - DNA, 15 bp, Homo sapiens
tgcgtgcccctcaat

SEQ ID NO: 92634 - DNA, 15 bp, Homo sapiens
ctgcgtgcccctcaa

SEQ ID NO: 92635 - DNA, 15 bp, Homo sapiens
cctgcgtgcccctca

SEQ ID NO: 92636 - DNA, 15 bp, Homo sapiens
tcctgcgtgcccctc

SEQ ID NO: 92637 - DNA, 15 bp, Homo sapiens
atcctgcgtgcccct

SEQ ID NO: 92638 - DNA, 15 bp, Homo sapiens
aatcctgcgtgcccc

SEQ ID NO: 92639 - DNA, 15 bp, Homo sapiens
gaatcctgcgtgccc

SEQ ID NO: 92640 - DNA, 15 bp, Homo sapiens
agaatcctgcgtgcc

SEQ ID NO: 92641 - DNA, 15 bp, Homo sapiens
cagaatcctgcgtgc

SEQ ID NO: 92642 - DNA, 15 bp, Homo sapiens
tcagaatcctgcgtg

SEQ ID NO: 92643 - DNA, 15 bp, Homo sapiens
ctcagaatcctgcgt

SEQ ID NO: 92644 - DNA, 15 bp, Homo sapiens
gctcagaatcctgcg

SEQ ID NO: 92645 - DNA, 15 bp, Homo sapiens
tgctcagaatcctgc

SEQ ID NO: 92646 - DNA, 15 bp, Homo sapiens
gtgctcagaatcctg

SEQ ID NO: 92647 - DNA, 15 bp, Homo sapiens
ggtgctcagaatcct

SEQ ID NO: 92648 - DNA, 15 bp, Homo sapiens
tggtgctcagaatcc

SEQ ID NO: 92649 - DNA, 15 bp, Homo sapiens
ctggtgctcagaatc

SEQ ID NO: 92650 - DNA, 15 bp, Homo sapiens
cctggtgctcagaat

SEQ ID NO: 92651 - DNA, 15 bp, Homo sapiens
ccctggtgctcagaa

SEQ ID NO: 92652 - DNA, 15 bp, Homo sapiens
cccctggtgctcaga

SEQ ID NO: 92653 - DNA, 15 bp, Homo sapiens
gcccctggtgctcag

SEQ ID NO: 92654 - DNA, 15 bp, Homo sapiens
tgcccctggtgctca

SEQ ID NO: 92655 - DNA, 15 bp, Homo sapiens
ctgcccctggtgctc

SEQ ID NO: 92656 - DNA, 15 bp, Homo sapiens
tctgcccctggtgct

SEQ ID NO: 92657 - DNA, 15 bp, Homo sapiens
ctctgcccctggtgc

SEQ ID NO: 92658 - DNA, 15 bp, Homo sapiens
cctctgcccctggtg

SEQ ID NO: 92659 - DNA, 15 bp, Homo sapiens
gcctctgcccctggt

SEQ ID NO: 92660 - DNA, 15 bp, Homo sapiens
cgcctctgcccctgg

SEQ ID NO: 92661 - DNA, 15 bp, Homo sapiens
ccgcctctgcccctg

SEQ ID NO: 92662 - DNA, 15 bp, Homo sapiens
gccgcctctgcccct

SEQ ID NO: 92663 - DNA, 15 bp, Homo sapiens
ggccgcctctgcccc

SEQ ID NO: 92664 - DNA, 15 bp, Homo sapiens
tggccgcctctgccc

SEQ ID NO: 92665 - DNA, 15 bp, Homo sapiens
ctggccgcctctgcc

SEQ ID NO: 92666 - DNA, 15 bp, Homo sapiens
tctggccgcctctgc

SEQ ID NO: 92667 - DNA, 15 bp, Homo sapiens
gtctggccgcctctg

SEQ ID NO: 92668 - DNA, 15 bp, Homo sapiens
tgtctggccgcctct

SEQ ID NO: 92669 - DNA, 15 bp, Homo sapiens
ttgtctggccgcctc

SEQ ID NO: 92670 - DNA, 15 bp, Homo sapiens
gttgtctggccgcct

SEQ ID NO: 92671 - DNA, 15 bp, Homo sapiens
ggttgtctggccgcc

SEQ ID NO: 92672 - DNA, 15 bp, Homo sapiens
aggttgtctggccgc

SEQ ID NO: 92673 - DNA, 15 bp, Homo sapiens
gaggttgtctggccg

SEQ ID NO: 92674 - DNA, 15 bp, Homo sapiens
tgaggttgtctggcc

SEQ ID NO: 92675 - DNA, 15 bp, Homo sapiens
ctgaggttgtctggc

SEQ ID NO: 92676 - DNA, 15 bp, Homo sapiens
cctgaggttgtctgg

SEQ ID NO: 92677 - DNA, 15 bp, Homo sapiens
ccctgaggttgtctg

SEQ ID NO: 92678 - DNA, 15 bp, Homo sapiens
tccctgaggttgtct

SEQ ID NO: 92679 - DNA, 15 bp, Homo sapiens
ctccctgaggttgtc

SEQ ID NO: 92680 - DNA, 15 bp, Homo sapiens
cctccctgaggttgt

SEQ ID NO: 92681 - DNA, 15 bp, Homo sapiens
tcctccctgaggttg

SEQ ID NO: 92682 - DNA, 15 bp, Homo sapiens
ctcctccctgaggtt

SEQ ID NO: 92683 - DNA, 15 bp, Homo sapiens
actcctccctgaggt

SEQ ID NO: 92684 - DNA, 15 bp, Homo sapiens
cactcctccctgagg

SEQ ID NO: 92685 - DNA, 15 bp, Homo sapiens
acactcctccctgag

SEQ ID NO: 92686 - DNA, 15 bp, Homo sapiens
gacactcctccctga

SEQ ID NO: 92687 - DNA, 15 bp, Homo sapiens
ggacactcctccctg

SEQ ID NO: 92688 - DNA, 15 bp, Homo sapiens
aggacactcctccct

SEQ ID NO: 92689 - DNA, 15 bp, Homo sapiens
caggacactcctccc

SEQ ID NO: 92690 - DNA, 15 bp, Homo sapiens
ccaggacactcctcc

SEQ ID NO: 92691 - DNA, 15 bp, Homo sapiens
gccaggacactcctc

SEQ ID NO: 92692 - DNA, 15 bp, Homo sapiens
cgccaggacactcct

SEQ ID NO: 92693 - DNA, 15 bp, Homo sapiens
acgccaggacactcc

SEQ ID NO: 92694 - DNA, 15 bp, Homo sapiens
gacgccaggacactc

SEQ ID NO: 92695 - DNA, 15 bp, Homo sapiens
ggacgccaggacact

SEQ ID NO: 92696 - DNA, 15 bp, Homo sapiens
gggacgccaggacac

SEQ ID NO: 92697 - DNA, 15 bp, Homo sapiens
ggggacgccaggaca

SEQ ID NO: 92698 - DNA, 15 bp, Homo sapiens
tggggacgccaggac

SEQ ID NO: 92699 - DNA, 15 bp, Homo sapiens
atggggacgccagga

SEQ ID NO: 92700 - DNA, 15 bp, Homo sapiens
gatggggacgccagg

SEQ ID NO: 92701 - DNA, 15 bp, Homo sapiens
ggatggggacgccag

SEQ ID NO: 92702 - DNA, 15 bp, Homo sapiens
aggatggggacgcca

SEQ ID NO: 92703 - DNA, 15 bp, Homo sapiens
gaggatggggacgcc

SEQ ID NO: 92704 - DNA, 15 bp, Homo sapiens
ggaggatggggacgc

SEQ ID NO: 92705 - DNA, 15 bp, Homo sapiens
tggaggatggggacg

SEQ ID NO: 92706 - DNA, 15 bp, Homo sapiens
ttggaggatggggac

SEQ ID NO: 92707 - DNA, 15 bp, Homo sapiens
tttggaggatgggga

SEQ ID NO: 92708 - DNA, 15 bp, Homo sapiens
ctttggaggatgggg

SEQ ID NO: 92709 - DNA, 15 bp, Homo sapiens
cctttggaggatggg

SEQ ID NO: 92710 - DNA, 15 bp, Homo sapiens
ccctttggaggatgg

SEQ ID NO: 92711 - DNA, 15 bp, Homo sapiens
gccctttggaggatg

SEQ ID NO: 92712 - DNA, 15 bp, Homo sapiens
ggccctttggaggat

SEQ ID NO: 92713 - DNA, 15 bp, Homo sapiens
aggccctttggagga

SEQ ID NO: 92714 - DNA, 15 bp, Homo sapiens
caggccctttggagg

SEQ ID NO: 92715 - DNA, 15 bp, Homo sapiens
ccaggccctttggag

SEQ ID NO: 92716 - DNA, 15 bp, Homo sapiens
cccaggccctttgga

SEQ ID NO: 92717 - DNA, 15 bp, Homo sapiens
gcccaggccctttgg

SEQ ID NO: 92718 - DNA, 15 bp, Homo sapiens
ggcccaggccctttg

SEQ ID NO: 92719 - DNA, 15 bp, Homo sapiens
gggcccaggcccttt

SEQ ID NO: 92720 - DNA, 15 bp, Homo sapiens
cgggcccaggccctt

SEQ ID NO: 92721 - DNA, 15 bp, Homo sapiens
gcgggcccaggccct

SEQ ID NO: 92722 - DNA, 15 bp, Homo sapiens
ggcgggcccaggccc

SEQ ID NO: 92723 - DNA, 15 bp, Homo sapiens
gggcgggcccaggcc

SEQ ID NO: 92724 - DNA, 15 bp, Homo sapiens
ggggcgggcccaggc

SEQ ID NO: 92725 - DNA, 15 bp, Homo sapiens
cggggcgggcccagg

SEQ ID NO: 92726 - DNA, 15 bp, Homo sapiens
tcggggcgggcccag

SEQ ID NO: 92727 - DNA, 15 bp, Homo sapiens
ctcggggcgggccca

SEQ ID NO: 92728 - DNA, 15 bp, Homo sapiens
cctcggggcgggccc

SEQ ID NO: 92729 - DNA, 15 bp, Homo sapiens
ccctcggggcgggcc

SEQ ID NO: 92730 - DNA, 15 bp, Homo sapiens
cccctcggggcgggc

SEQ ID NO: 92731 - DNA, 15 bp, Homo sapiens
ccccctcggggcggg

SEQ ID NO: 92732 - DNA, 15 bp, Homo sapiens
gccccctcggggcgg

SEQ ID NO: 92733 - DNA, 15 bp, Homo sapiens
tgccccctcggggcg

SEQ ID NO: 92734 - DNA, 15 bp, Homo sapiens
ctgccccctcggggc

SEQ ID NO: 92735 - DNA, 15 bp, Homo sapiens
gctgccccctcgggg

SEQ ID NO: 92736 - DNA, 15 bp, Homo sapiens
cgctgccccctcggg

SEQ ID NO: 92737 - DNA, 15 bp, Homo sapiens
tcgctgccccctcgg

SEQ ID NO: 92738 - DNA, 15 bp, Homo sapiens
ctcgctgccccctcg

SEQ ID NO: 92739 - DNA, 15 bp, Homo sapiens
tctcgctgccccctc

SEQ ID NO: 92740 - DNA, 15 bp, Homo sapiens
ctctcgctgccccct

SEQ ID NO: 92741 - DNA, 15 bp, Homo sapiens
cctctcgctgccccc

SEQ ID NO: 92742 - DNA, 15 bp, Homo sapiens
tcctctcgctgcccc

SEQ ID NO: 92743 - DNA, 15 bp, Homo sapiens
ctcctctcgctgccc

SEQ ID NO: 92744 - DNA, 15 bp, Homo sapiens
gctcctctcgctgcc

SEQ ID NO: 92745 - DNA, 15 bp, Homo sapiens
agctcctctcgctgc

SEQ ID NO: 92746 - DNA, 15 bp, Homo sapiens
aagctcctctcgctg

SEQ ID NO: 92747 - DNA, 15 bp, Homo sapiens
gaagctcctctcgct

SEQ ID NO: 92748 - DNA, 15 bp, Homo sapiens
ggaagctcctctcgc

SEQ ID NO: 92749 - DNA, 15 bp, Homo sapiens
gggaagctcctctcg

SEQ ID NO: 92750 - DNA, 15 bp, Homo sapiens
ggggaagctcctctc

SEQ ID NO: 92751 - DNA, 15 bp, Homo sapiens
tggggaagctcctct

SEQ ID NO: 92752 - DNA, 15 bp, Homo sapiens
atggggaagctcctc

SEQ ID NO: 92753 - DNA, 15 bp, Homo sapiens
gatggggaagctcct

SEQ ID NO: 92754 - DNA, 15 bp, Homo sapiens
ggatggggaagctcc

SEQ ID NO: 92755 - DNA, 15 bp, Homo sapiens
gggatggggaagctc

SEQ ID NO: 92756 - DNA, 15 bp, Homo sapiens
ggggatggggaagct

SEQ ID NO: 92757 - DNA, 15 bp, Homo sapiens
cggggatggggaagc

SEQ ID NO: 92758 - DNA, 15 bp, Homo sapiens
ccggggatggggaag

SEQ ID NO: 92759 - DNA, 15 bp, Homo sapiens
accggggatggggaa

SEQ ID NO: 92760 - DNA, 15 bp, Homo sapiens
gaccggggatgggga

SEQ ID NO: 92761 - DNA, 15 bp, Homo sapiens
tgaccggggatgggg

SEQ ID NO: 92762 - DNA, 15 bp, Homo sapiens
ctgaccggggatggg

SEQ ID NO: 92763 - DNA, 15 bp, Homo sapiens
actgaccggggatgg

SEQ ID NO: 92764 - DNA, 15 bp, Homo sapiens
gactgaccggggatg

SEQ ID NO: 92765 - DNA, 15 bp, Homo sapiens
ggactgaccggggat

SEQ ID NO: 92766 - DNA, 15 bp, Homo sapiens
tggactgaccgggga

SEQ ID NO: 92767 - DNA, 15 bp, Homo sapiens
gtggactgaccgggg

SEQ ID NO: 92768 - DNA, 15 bp, Homo sapiens
ggtggactgaccggg

SEQ ID NO: 92769 - DNA, 15 bp, Homo sapiens
gggtggactgaccgg

SEQ ID NO: 92770 - DNA, 15 bp, Homo sapiens
agggtggactgaccg

SEQ ID NO: 92771 - DNA, 15 bp, Homo sapiens
cagggtggactgacc

SEQ ID NO: 92772 - DNA, 15 bp, Homo sapiens
gcagggtggactgac

SEQ ID NO: 92773 - DNA, 15 bp, Homo sapiens
ggcagggtggactga

SEQ ID NO: 92774 - DNA, 15 bp, Homo sapiens
gggcagggtggactg

SEQ ID NO: 92775 - DNA, 15 bp, Homo sapiens
ggggcagggtggact

SEQ ID NO: 92776 - DNA, 15 bp, Homo sapiens
cggggcagggtggac

SEQ ID NO: 92777 - DNA, 15 bp, Homo sapiens
acggggcagggtgga

SEQ ID NO: 92778 - DNA, 15 bp, Homo sapiens
gacggggcagggtgg

SEQ ID NO: 92779 - DNA, 15 bp, Homo sapiens
ggacggggcagggtg

SEQ ID NO: 92780 - DNA, 15 bp, Homo sapiens
tggacggggcagggt

SEQ ID NO: 92781 - DNA, 15 bp, Homo sapiens
gtggacggggcaggg

SEQ ID NO: 92782 - DNA, 15 bp, Homo sapiens
agtggacggggcagg

SEQ ID NO: 92783 - DNA, 15 bp, Homo sapiens
aagtggacggggcag

SEQ ID NO: 92784 - DNA, 15 bp, Homo sapiens
aaagtggacggggca

SEQ ID NO: 92785 - DNA, 15 bp, Homo sapiens
gaaagtggacggggc

SEQ ID NO: 92786 - DNA, 15 bp, Homo sapiens
ggaaagtggacgggg

SEQ ID NO: 92787 - DNA, 15 bp, Homo sapiens
gggaaagtggacggg

SEQ ID NO: 92788 - DNA, 15 bp, Homo sapiens
tgggaaagtggacgg

SEQ ID NO: 92789 - DNA, 15 bp, Homo sapiens
atgggaaagtggacg

SEQ ID NO: 92790 - DNA, 15 bp, Homo sapiens
gatgggaaagtggac

SEQ ID NO: 92791 - DNA, 15 bp, Homo sapiens
agatgggaaagtgga

SEQ ID NO: 92792 - DNA, 15 bp, Homo sapiens
gagatgggaaagtgg

SEQ ID NO: 92793 - DNA, 15 bp, Homo sapiens
ggagatgggaaagtg

SEQ ID NO: 92794 - DNA, 15 bp, Homo sapiens
aggagatgggaaagt

SEQ ID NO: 92795 - DNA, 15 bp, Homo sapiens
gaggagatgggaaag

SEQ ID NO: 92796 - DNA, 15 bp, Homo sapiens
cgaggagatgggaaa

SEQ ID NO: 92797 - DNA, 15 bp, Homo sapiens
ccgaggagatgggaa

SEQ ID NO: 92798 - DNA, 15 bp, Homo sapiens
accgaggagatggga

SEQ ID NO: 92799 - DNA, 15 bp, Homo sapiens
taccgaggagatggg

SEQ ID NO: 92800 - DNA, 15 bp, Homo sapiens
ataccgaggagatgg

SEQ ID NO: 92801 - DNA, 15 bp, Homo sapiens
tataccgaggagatg

SEQ ID NO: 92802 - DNA, 15 bp, Homo sapiens
ttataccgaggagat

SEQ ID NO: 92803 - DNA, 15 bp, Homo sapiens
tttataccgaggaga

SEQ ID NO: 92804 - DNA, 15 bp, Homo sapiens
atttataccgaggag

SEQ ID NO: 92805 - DNA, 15 bp, Homo sapiens
gatttataccgagga

SEQ ID NO: 92806 - DNA, 15 bp, Homo sapiens
tgatttataccgagg

SEQ ID NO: 92807 - DNA, 15 bp, Homo sapiens
atgatttataccgag

SEQ ID NO: 92808 - DNA, 15 bp, Homo sapiens
catgatttataccga

SEQ ID NO: 92809 - DNA, 15 bp, Homo sapiens
acatgatttataccg

SEQ ID NO: 92810 - DNA, 15 bp, Homo sapiens
aacatgatttatacc

SEQ ID NO: 92811 - DNA, 15 bp, Homo sapiens
aaacatgatttatac

SEQ ID NO: 92812 - DNA, 15 bp, Homo sapiens
taaacatgatttata

SEQ ID NO: 92813 - DNA, 15 bp, Homo sapiens
ataaacatgatttat

SEQ ID NO: 92814 - DNA, 15 bp, Homo sapiens
tataaacatgattta

SEQ ID NO: 92815 - DNA, 15 bp, Homo sapiens
ttataaacatgattt

SEQ ID NO: 92816 - DNA, 15 bp, Homo sapiens
cttataaacatgatt

SEQ ID NO: 92817 - DNA, 15 bp, Homo sapiens
acttataaacatgat

SEQ ID NO: 92818 - DNA, 15 bp, Homo sapiens
aacttataaacatga

SEQ ID NO: 92819 - DNA, 15 bp, Homo sapiens
taacttataaacatg

SEQ ID NO: 92820 - DNA, 15 bp, Homo sapiens
ataacttataaacat

SEQ ID NO: 92821 - DNA, 15 bp, Homo sapiens
cataacttataaaca

SEQ ID NO: 92822 - DNA, 15 bp, Homo sapiens
ccataacttataaac

SEQ ID NO: 92823 - DNA, 15 bp, Homo sapiens
tccataacttataaa

SEQ ID NO: 92824 - DNA, 15 bp, Homo sapiens
ttccataacttataa

SEQ ID NO: 92825 - DNA, 15 bp, Homo sapiens
cttccataacttata

SEQ ID NO: 92826 - DNA, 15 bp, Homo sapiens
tcttccataacttat

SEQ ID NO: 92827 - DNA, 15 bp, Homo sapiens
ttcttccataactta

SEQ ID NO: 92828 - DNA, 15 bp, Homo sapiens
gttcttccataactt

SEQ ID NO: 92829 - DNA, 15 bp, Homo sapiens
ggttcttccataact

SEQ ID NO: 92830 - DNA, 15 bp, Homo sapiens
cggttcttccataac

SEQ ID NO: 92831 - DNA, 15 bp, Homo sapiens
ccggttcttccataa

SEQ ID NO: 92832 - DNA, 15 bp, Homo sapiens
cccggttcttccata

SEQ ID NO: 92833 - DNA, 15 bp, Homo sapiens
tcccggttcttccat

SEQ ID NO: 92834 - DNA, 15 bp, Homo sapiens
gtcccggttcttcca

SEQ ID NO: 92835 - DNA, 15 bp, Homo sapiens
tgtcccggttcttcc

SEQ ID NO: 92836 - DNA, 15 bp, Homo sapiens
atgtcccggttcttc

SEQ ID NO: 92837 - DNA, 15 bp, Homo sapiens
aatgtcccggttctt

SEQ ID NO: 92838 - DNA, 15 bp, Homo sapiens
aaatgtcccggttct

SEQ ID NO: 92839 - DNA, 15 bp, Homo sapiens
aaaatgtcccggttc

SEQ ID NO: 92840 - DNA, 15 bp, Homo sapiens
taaaatgtcccggtt

SEQ ID NO: 92841 - DNA, 15 bp, Homo sapiens
gtaaaatgtcccggt

SEQ ID NO: 92842 - DNA, 15 bp, Homo sapiens
tgtaaaatgtcccgg

SEQ ID NO: 92843 - DNA, 15 bp, Homo sapiens
ctgtaaaatgtcccg

SEQ ID NO: 92844 - DNA, 15 bp, Homo sapiens
tctgtaaaatgtccc

SEQ ID NO: 92845 - DNA, 15 bp, Homo sapiens
ttctgtaaaatgtcc

SEQ ID NO: 92846 - DNA, 15 bp, Homo sapiens
tttctgtaaaatgtc

SEQ ID NO: 92847 - DNA, 15 bp, Homo sapiens
ttttctgtaaaatgt

SEQ ID NO: 92848 - DNA, 15 bp, Homo sapiens
tttttctgtaaaatg

SEQ ID NO: 92849 - DNA, 15 bp, Homo sapiens
ttttttctgtaaaat

SEQ ID NO: 92850 - DNA, 15 bp, Homo sapiens
tttttttctgtaaaa

SEQ ID NO: 92851 - DNA, 15 bp, Homo sapiens
ttttttttctgtaaa

SEQ ID NO: 92852 - DNA, 15 bp, Homo sapiens
gttttttttctgtaa

SEQ ID NO: 92853 - DNA, 15 bp, Homo sapiens
tgttttttttctgta

SEQ ID NO: 92854 - DNA, 15 bp, Homo sapiens
ttgttttttttctgt

SEQ ID NO: 92855 - DNA, 15 bp, Homo sapiens
tttgttttttttctg

SEQ ID NO: 92856 - DNA, 15 bp, Homo sapiens
ttttgttttttttct

SEQ ID NO: 92857 - DNA, 15 bp, Homo sapiens
tttttgttttttttc

SEQ ID NO: 92858 - DNA, 15 bp, Homo sapiens
ttttttgtttttttt

SEQ ID NO: 92859 - DNA, 15 bp, Homo sapiens
gttttttgttttttt

SEQ ID NO: 92860 - DNA, 15 bp, Homo sapiens
tgttttttgtttttt

SEQ ID NO: 92861 - DNA, 15 bp, Homo sapiens
ttgttttttgttttt

SEQ ID NO: 92862 - DNA, 15 bp, Homo sapiens
gttgttttttgtttt

SEQ ID NO: 92863 - DNA, 15 bp, Homo sapiens
tgttgttttttgttt

SEQ ID NO: 92864 - DNA, 15 bp, Homo sapiens
ttgttgttttttgtt

SEQ ID NO: 92865 - DNA, 15 bp, Homo sapiens
tttgttgttttttgt

SEQ ID NO: 92866 - DNA, 15 bp, Homo sapiens
ttttgttgttttttg

SEQ ID NO: 92867 - DNA, 15 bp, Homo sapiens
tttttgttgtttttt

SEQ ID NO: 92868 - DNA, 15 bp, Homo sapiens
ttttttgttgttttt

SEQ ID NO: 92869 - DNA, 15 bp, Homo sapiens
attttttgttgtttt

SEQ ID NO: 92870 - DNA, 15 bp, Homo sapiens
tattttttgttgttt

SEQ ID NO: 92871 - DNA, 15 bp, Homo sapiens
atattttttgttgtt

SEQ ID NO: 92872 - DNA, 15 bp, Homo sapiens
tatattttttgttgt

SEQ ID NO: 92873 - DNA, 15 bp, Homo sapiens
gtatattttttgttg

SEQ ID NO: 92874 - DNA, 15 bp, Homo sapiens
cgtatattttttgtt

SEQ ID NO: 92875 - DNA, 15 bp, Homo sapiens
acgtatattttttgt

SEQ ID NO: 92876 - DNA, 15 bp, Homo sapiens
cacgtatattttttg

SEQ ID NO: 92877 - DNA, 15 bp, Homo sapiens
ccacgtatatttttt

SEQ ID NO: 92878 - DNA, 15 bp, Homo sapiens
cccacgtatattttt

SEQ ID NO: 92879 - DNA, 15 bp, Homo sapiens
tcccacgtatatttt

SEQ ID NO: 92880 - DNA, 15 bp, Homo sapiens
ttcccacgtatattt

SEQ ID NO: 92881 - DNA, 15 bp, Homo sapiens
tttcccacgtatatt

SEQ ID NO: 92882 - DNA, 15 bp, Homo sapiens
ttttcccacgtatat

SEQ ID NO: 92883 - DNA, 15 bp, Homo sapiens
tttttcccacgtata

SEQ ID NO: 92884 - DNA, 15 bp, Homo sapiens
ttttttcccacgtat

SEQ ID NO: 92885 - DNA, 15 bp, Homo sapiens
tttttttcccacgta

SEQ ID NO: 92886 - DNA, 15 bp, Homo sapiens
ttttttttcccacgt

SEQ ID NO: 92887 - DNA, 15 bp, Homo sapiens
gttttttttcccacg

SEQ ID NO: 92888 - DNA, 15 bp, Homo sapiens
cgttttttttcccac

SEQ ID NO: 92889 - DNA, 15 bp, Homo sapiens
tcgttttttttccca

SEQ ID NO: 92890 - DNA, 15 bp, Homo sapiens
atcgttttttttccc

SEQ ID NO: 92891 - DNA, 15 bp, Homo sapiens
catcgttttttttcc

SEQ ID NO: 92892 - DNA, 15 bp, Homo sapiens
ccatcgttttttttc

SEQ ID NO: 92893 - DNA, 15 bp, Homo sapiens
cccatcgtttttttt

SEQ ID NO: 92894 - DNA, 15 bp, Homo sapiens
tcccatcgttttttt

SEQ ID NO: 92895 - DNA, 15 bp, Homo sapiens
ctcccatcgtttttt

SEQ ID NO: 92896 - DNA, 15 bp, Homo sapiens
cctcccatcgttttt

SEQ ID NO: 92897 - DNA, 15 bp, Homo sapiens
gcctcccatcgtttt

SEQ ID NO: 92898 - DNA, 15 bp, Homo sapiens
ggcctcccatcgttt

SEQ ID NO: 92899 - DNA, 15 bp, Homo sapiens
aggcctcccatcgtt

SEQ ID NO: 92900 - DNA, 15 bp, Homo sapiens
gaggcctcccatcgt

SEQ ID NO: 92901 - DNA, 15 bp, Homo sapiens
ggaggcctcccatcg

SEQ ID NO: 92902 - DNA, 15 bp, Homo sapiens
cggaggcctcccatc

SEQ ID NO: 92903 - DNA, 15 bp, Homo sapiens
acggaggcctcccat

SEQ ID NO: 92904 - DNA, 15 bp, Homo sapiens
aacggaggcctccca

SEQ ID NO: 92905 - DNA, 15 bp, Homo sapiens
aaacggaggcctccc

SEQ ID NO: 92906 - DNA, 15 bp, Homo sapiens
aaaacggaggcctcc

SEQ ID NO: 92907 - DNA, 15 bp, Homo sapiens
gaaaacggaggcctc

SEQ ID NO: 92908 - DNA, 15 bp, Homo sapiens
agaaaacggaggcct

SEQ ID NO: 92909 - DNA, 15 bp, Homo sapiens
gagaaaacggaggcc

SEQ ID NO: 92910 - DNA, 15 bp, Homo sapiens
tgagaaaacggaggc

SEQ ID NO: 92911 - DNA, 15 bp, Homo sapiens
ttgagaaaacggagg

SEQ ID NO: 92912 - DNA, 15 bp, Homo sapiens
cttgagaaaacggag

SEQ ID NO: 92913 - DNA, 15 bp, Homo sapiens
acttgagaaaacgga

SEQ ID NO: 92914 - DNA, 15 bp, Homo sapiens
cacttgagaaaacgg

SEQ ID NO: 92915 - DNA, 15 bp, Homo sapiens
acacttgagaaaacg

SEQ ID NO: 92916 - DNA, 15 bp, Homo sapiens
cacacttgagaaaac

SEQ ID NO: 92917 - DNA, 15 bp, Homo sapiens
acacacttgagaaaa

SEQ ID NO: 92918 - DNA, 15 bp, Homo sapiens
gacacacttgagaaa

SEQ ID NO: 92919 - DNA, 15 bp, Homo sapiens
agacacacttgagaa

SEQ ID NO: 92920 - DNA, 15 bp, Homo sapiens
cagacacacttgaga

SEQ ID NO: 92921 - DNA, 15 bp, Homo sapiens
ccagacacacttgag

SEQ ID NO: 92922 - DNA, 15 bp, Homo sapiens
gccagacacacttga

SEQ ID NO: 92923 - DNA, 15 bp, Homo sapiens
ggccagacacacttg

SEQ ID NO: 92924 - DNA, 15 bp, Homo sapiens
aggccagacacactt

SEQ ID NO: 92925 - DNA, 15 bp, Homo sapiens
caggccagacacact

SEQ ID NO: 92926 - DNA, 15 bp, Homo sapiens
acaggccagacacac

SEQ ID NO: 92927 - DNA, 15 bp, Homo sapiens
aacaggccagacaca

SEQ ID NO: 92928 - DNA, 15 bp, Homo sapiens
aaacaggccagacac

SEQ ID NO: 92929 - DNA, 15 bp, Homo sapiens
aaaacaggccagaca

SEQ ID NO: 92930 - DNA, 15 bp, Homo sapiens
caaaacaggccagac

SEQ ID NO: 92931 - DNA, 15 bp, Homo sapiens
tcaaaacaggccaga

SEQ ID NO: 92932 - DNA, 15 bp, Homo sapiens
ctcaaaacaggccag

SEQ ID NO: 92933 - DNA, 15 bp, Homo sapiens
gctcaaaacaggcca

SEQ ID NO: 92934 - DNA, 15 bp, Homo sapiens
tgctcaaaacaggcc

SEQ ID NO: 92935 - DNA, 15 bp, Homo sapiens
atgctcaaaacaggc

SEQ ID NO: 92936 - DNA, 15 bp, Homo sapiens
aatgctcaaaacagg

SEQ ID NO: 92937 - DNA, 15 bp, Homo sapiens
aaatgctcaaaacag

SEQ ID NO: 92938 - DNA, 15 bp, Homo sapiens
gaaatgctcaaaaca

SEQ ID NO: 92939 - DNA, 15 bp, Homo sapiens
tgaaatgctcaaaac

SEQ ID NO: 92940 - DNA, 15 bp, Homo sapiens
atgaaatgctcaaaa

SEQ ID NO: 92941 - DNA, 15 bp, Homo sapiens
gatgaaatgctcaaa

SEQ ID NO: 92942 - DNA, 15 bp, Homo sapiens
ggatgaaatgctcaa

SEQ ID NO: 92943 - DNA, 15 bp, Homo sapiens
cggatgaaatgctca

SEQ ID NO: 92944 - DNA, 15 bp, Homo sapiens
ccggatgaaatgctc

SEQ ID NO: 92945 - DNA, 15 bp, Homo sapiens
tccggatgaaatgct

SEQ ID NO: 92946 - DNA, 15 bp, Homo sapiens
ctccggatgaaatgc

SEQ ID NO: 92947 - DNA, 15 bp, Homo sapiens
actccggatgaaatg

SEQ ID NO: 92948 - DNA, 15 bp, Homo sapiens
gactccggatgaaat

SEQ ID NO: 92949 - DNA, 15 bp, Homo sapiens
agactccggatgaaa

SEQ ID NO: 92950 - DNA, 15 bp, Homo sapiens
cagactccggatgaa

SEQ ID NO: 92951 - DNA, 15 bp, Homo sapiens
ccagactccggatga

SEQ ID NO: 92952 - DNA, 15 bp, Homo sapiens
gccagactccggatg

SEQ ID NO: 92953 - DNA, 15 bp, Homo sapiens
ggccagactccggat

SEQ ID NO: 92954 - DNA, 15 bp, Homo sapiens
cggccagactccgga

SEQ ID NO: 92955 - DNA, 15 bp, Homo sapiens
gcggccagactccgg

SEQ ID NO: 92956 - DNA, 15 bp, Homo sapiens
ggcggccagactccg

SEQ ID NO: 92957 - DNA, 15 bp, Homo sapiens
gggcggccagactcc

SEQ ID NO: 92958 - DNA, 15 bp, Homo sapiens
agggcggccagactc

SEQ ID NO: 92959 - DNA, 15 bp, Homo sapiens
cagggcggccagact

SEQ ID NO: 92960 - DNA, 15 bp, Homo sapiens
tcagggcggccagac

SEQ ID NO: 92961 - DNA, 15 bp, Homo sapiens
gtcagggcggccaga

SEQ ID NO: 92962 - DNA, 15 bp, Homo sapiens
ggtcagggcggccag

SEQ ID NO: 92963 - DNA, 15 bp, Homo sapiens
aggtcagggcggcca

SEQ ID NO: 92964 - DNA, 15 bp, Homo sapiens
aaggtcagggcggcc

SEQ ID NO: 92965 - DNA, 15 bp, Homo sapiens
gaaggtcagggcggc

SEQ ID NO: 92966 - DNA, 15 bp, Homo sapiens
ggaaggtcagggcgg

SEQ ID NO: 92967 - DNA, 15 bp, Homo sapiens
gggaaggtcagggcg

SEQ ID NO: 92968 - DNA, 15 bp, Homo sapiens
ggggaaggtcagggc

SEQ ID NO: 92969 - DNA, 15 bp, Homo sapiens
gggggaaggtcaggg

SEQ ID NO: 92970 - DNA, 15 bp, Homo sapiens
tgggggaaggtcagg

SEQ ID NO: 92971 - DNA, 15 bp, Homo sapiens
ctgggggaaggtcag

SEQ ID NO: 92972 - DNA, 15 bp, Homo sapiens
gctgggggaaggtca

SEQ ID NO: 92973 - DNA, 15 bp, Homo sapiens
ggctgggggaaggtc

SEQ ID NO: 92974 - DNA, 15 bp, Homo sapiens
cggctgggggaaggt

SEQ ID NO: 92975 - DNA, 15 bp, Homo sapiens
gcggctgggggaagg

SEQ ID NO: 92976 - DNA, 15 bp, Homo sapiens
ggcggctgggggaag

SEQ ID NO: 92977 - DNA, 15 bp, Homo sapiens
aggcggctgggggaa

SEQ ID NO: 92978 - DNA, 15 bp, Homo sapiens
caggcggctggggga

SEQ ID NO: 92979 - DNA, 15 bp, Homo sapiens
gcaggcggctggggg

SEQ ID NO: 92980 - DNA, 15 bp, Homo sapiens
tgcaggcggctgggg

SEQ ID NO: 92981 - DNA, 15 bp, Homo sapiens
ctgcaggcggctggg

SEQ ID NO: 92982 - DNA, 15 bp, Homo sapiens
cctgcaggcggctgg

SEQ ID NO: 92983 - DNA, 15 bp, Homo sapiens
ccctgcaggcggctg

SEQ ID NO: 92984 - DNA, 15 bp, Homo sapiens
cccctgcaggcggct

SEQ ID NO: 92985 - DNA, 15 bp, Homo sapiens
ccccctgcaggcggc

SEQ ID NO: 92986 - DNA, 15 bp, Homo sapiens
gccccctgcaggcgg

SEQ ID NO: 92987 - DNA, 15 bp, Homo sapiens
cgccccctgcaggcg

SEQ ID NO: 92988 - DNA, 15 bp, Homo sapiens
gcgccccctgcaggc

SEQ ID NO: 92989 - DNA, 15 bp, Homo sapiens
ggcgccccctgcagg

SEQ ID NO: 92990 - DNA, 15 bp, Homo sapiens
tggcgccccctgcag

SEQ ID NO: 92991 - DNA, 15 bp, Homo sapiens
ctggcgccccctgca

SEQ ID NO: 92992 - DNA, 15 bp, Homo sapiens
tctggcgccccctgc

SEQ ID NO: 92993 - DNA, 15 bp, Homo sapiens
ctctggcgccccctg

SEQ ID NO: 92994 - DNA, 15 bp, Homo sapiens
cctctggcgccccct

SEQ ID NO: 92995 - DNA, 15 bp, Homo sapiens
ccctctggcgccccc

SEQ ID NO: 92996 - DNA, 15 bp, Homo sapiens
gccctctggcgcccc

SEQ ID NO: 92997 - DNA, 15 bp, Homo sapiens
ggccctctggcgccc

SEQ ID NO: 92998 - DNA, 15 bp, Homo sapiens
cggccctctggcgcc

SEQ ID NO: 92999 - DNA, 15 bp, Homo sapiens
ccggccctctggcgc

SEQ ID NO: 93000 - DNA, 15 bp, Homo sapiens
tccggccctctggcg

SEQ ID NO: 93001 - DNA, 15 bp, Homo sapiens
ctccggccctctggc

SEQ ID NO: 93002 - DNA, 15 bp, Homo sapiens
gctccggccctctgg

SEQ ID NO: 93003 - DNA, 15 bp, Homo sapiens
tgctccggccctctg

SEQ ID NO: 93004 - DNA, 15 bp, Homo sapiens
gtgctccggccctct

SEQ ID NO: 93005 - DNA, 15 bp, Homo sapiens
cgtgctccggccctc

SEQ ID NO: 93006 - DNA, 15 bp, Homo sapiens
ccgtgctccggccct

SEQ ID NO: 93007 - DNA, 15 bp, Homo sapiens
tccgtgctccggccc

SEQ ID NO: 93008 - DNA, 15 bp, Homo sapiens
ttccgtgctccggcc

SEQ ID NO: 93009 - DNA, 15 bp, Homo sapiens
tttccgtgctccggc

SEQ ID NO: 93010 - DNA, 15 bp, Homo sapiens
ctttccgtgctccgg

SEQ ID NO: 93011 - DNA, 15 bp, Homo sapiens
gctttccgtgctccg

SEQ ID NO: 93012 - DNA, 15 bp, Homo sapiens
tgctttccgtgctcc

SEQ ID NO: 93013 - DNA, 15 bp, Homo sapiens
ctgctttccgtgctc

SEQ ID NO: 93014 - DNA, 15 bp, Homo sapiens
gctgctttccgtgct

SEQ ID NO: 93015 - DNA, 15 bp, Homo sapiens
cgctgctttccgtgc

SEQ ID NO: 93016 - DNA, 15 bp, Homo sapiens
ccgctgctttccgtg

SEQ ID NO: 93017 - DNA, 15 bp, Homo sapiens
tccgctgctttccgt

SEQ ID NO: 93018 - DNA, 15 bp, Homo sapiens
atccgctgctttccg

SEQ ID NO: 93019 - DNA, 15 bp, Homo sapiens
gatccgctgctttcc

SEQ ID NO: 93020 - DNA, 15 bp, Homo sapiens
ggatccgctgctttc

SEQ ID NO: 93021 - DNA, 15 bp, Homo sapiens
aggatccgctgcttt

SEQ ID NO: 93022 - DNA, 15 bp, Homo sapiens
aaggatccgctgctt

SEQ ID NO: 93023 - DNA, 15 bp, Homo sapiens
caaggatccgctgct

SEQ ID NO: 93024 - DNA, 15 bp, Homo sapiens
tcaaggatccgctgc

SEQ ID NO: 93025 - DNA, 15 bp, Homo sapiens
atcaaggatccgctg

SEQ ID NO: 93026 - DNA, 15 bp, Homo sapiens
catcaaggatccgct

SEQ ID NO: 93027 - DNA, 15 bp, Homo sapiens
gcatcaaggatccgc

SEQ ID NO: 93028 - DNA, 15 bp, Homo sapiens
agcatcaaggatccg

SEQ ID NO: 93029 - DNA, 15 bp, Homo sapiens
cagcatcaaggatcc

SEQ ID NO: 93030 - DNA, 15 bp, Homo sapiens
gcagcatcaaggatc

SEQ ID NO: 93031 - DNA, 15 bp, Homo sapiens
ggcagcatcaaggat

SEQ ID NO: 93032 - DNA, 15 bp, Homo sapiens
aggcagcatcaagga

SEQ ID NO: 93033 - DNA, 15 bp, Homo sapiens
aaggcagcatcaagg

SEQ ID NO: 93034 - DNA, 15 bp, Homo sapiens
taaggcagcatcaag

SEQ ID NO: 93035 - DNA, 15 bp, Homo sapiens
ttaaggcagcatcaa

SEQ ID NO: 93036 - DNA, 15 bp, Homo sapiens
cttaaggcagcatca

SEQ ID NO: 93037 - DNA, 15 bp, Homo sapiens
acttaaggcagcatc

SEQ ID NO: 93038 - DNA, 15 bp, Homo sapiens
gacttaaggcagcat

SEQ ID NO: 93039 - DNA, 15 bp, Homo sapiens
ggacttaaggcagca

SEQ ID NO: 93040 - DNA, 15 bp, Homo sapiens
cggacttaaggcagc

SEQ ID NO: 93041 - DNA, 15 bp, Homo sapiens
ccggacttaaggcag

SEQ ID NO: 93042 - DNA, 15 bp, Homo sapiens
gccggacttaaggca

SEQ ID NO: 93043 - DNA, 15 bp, Homo sapiens
agccggacttaaggc

SEQ ID NO: 93044 - DNA, 15 bp, Homo sapiens
gagccggacttaagg

SEQ ID NO: 93045 - DNA, 15 bp, Homo sapiens
tgagccggacttaag

SEQ ID NO: 93046 - DNA, 15 bp, Homo sapiens
ctgagccggacttaa

SEQ ID NO: 93047 - DNA, 15 bp, Homo sapiens
tctgagccggactta

SEQ ID NO: 93048 - DNA, 15 bp, Homo sapiens
ctctgagccggactt

SEQ ID NO: 93049 - DNA, 15 bp, Homo sapiens
cctctgagccggact

SEQ ID NO: 93050 - DNA, 15 bp, Homo sapiens
ccctctgagccggac

SEQ ID NO: 93051 - DNA, 15 bp, Homo sapiens
cccctctgagccgga

SEQ ID NO: 93052 - DNA, 15 bp, Homo sapiens
gcccctctgagccgg

SEQ ID NO: 93053 - DNA, 15 bp, Homo sapiens
cgcccctctgagccg

SEQ ID NO: 93054 - DNA, 15 bp, Homo sapiens
gcgcccctctgagcc

SEQ ID NO: 93055 - DNA, 15 bp, Homo sapiens
tgcgcccctctgagc

SEQ ID NO: 93056 - DNA, 15 bp, Homo sapiens
ctgcgcccctctgag

SEQ ID NO: 93057 - DNA, 15 bp, Homo sapiens
gctgcgcccctctga

SEQ ID NO: 93058 - DNA, 15 bp, Homo sapiens
cgctgcgcccctctg

SEQ ID NO: 93059 - DNA, 15 bp, Homo sapiens
acgctgcgcccctct

SEQ ID NO: 93060 - DNA, 15 bp, Homo sapiens
cacgctgcgcccctc

SEQ ID NO: 93061 - DNA, 15 bp, Homo sapiens
ccacgctgcgcccct

SEQ ID NO: 93062 - DNA, 15 bp, Homo sapiens
gccacgctgcgcccc

SEQ ID NO: 93063 - DNA, 15 bp, Homo sapiens
ggccacgctgcgccc

SEQ ID NO: 93064 - DNA, 15 bp, Homo sapiens
aggccacgctgcgcc

SEQ ID NO: 93065 - DNA, 15 bp, Homo sapiens
caggccacgctgcgc

SEQ ID NO: 93066 - DNA, 15 bp, Homo sapiens
ccaggccacgctgcg

SEQ ID NO: 93067 - DNA, 15 bp, Homo sapiens
cccaggccacgctgc

SEQ ID NO: 93068 - DNA, 15 bp, Homo sapiens
ccccaggccacgctg

SEQ ID NO: 93069 - DNA, 15 bp, Homo sapiens
accccaggccacgct

SEQ ID NO: 93070 - DNA, 15 bp, Homo sapiens
gaccccaggccacgc

SEQ ID NO: 93071 - DNA, 15 bp, Homo sapiens
cgaccccaggccacg

SEQ ID NO: 93072 - DNA, 15 bp, Homo sapiens
gcgaccccaggccac

SEQ ID NO: 93073 - DNA, 15 bp, Homo sapiens
agcgaccccaggcca

SEQ ID NO: 93074 - DNA, 15 bp, Homo sapiens
tagcgaccccaggcc

SEQ ID NO: 93075 - DNA, 15 bp, Homo sapiens
atagcgaccccaggc

SEQ ID NO: 93076 - DNA, 15 bp, Homo sapiens
gatagcgaccccagg

SEQ ID NO: 93077 - DNA, 15 bp, Homo sapiens
agatagcgaccccag

SEQ ID NO: 93078 - DNA, 15 bp, Homo sapiens
aagatagcgacccca

SEQ ID NO: 93079 - DNA, 15 bp, Homo sapiens
gaagatagcgacccc

SEQ ID NO: 93080 - DNA, 15 bp, Homo sapiens
ggaagatagcgaccc

SEQ ID NO: 93081 - DNA, 15 bp, Homo sapiens
gggaagatagcgacc

SEQ ID NO: 93082 - DNA, 15 bp, Homo sapiens
tgggaagatagcgac

SEQ ID NO: 93083 - DNA, 15 bp, Homo sapiens
atgggaagatagcga

SEQ ID NO: 93084 - DNA, 15 bp, Homo sapiens
gatgggaagatagcg

SEQ ID NO: 93085 - DNA, 15 bp, Homo sapiens
ggatgggaagatagc

SEQ ID NO: 93086 - DNA, 15 bp, Homo sapiens
cggatgggaagatag

SEQ ID NO: 93087 - DNA, 15 bp, Homo sapiens
ccggatgggaagata

SEQ ID NO: 93088 - DNA, 15 bp, Homo sapiens
tccggatgggaagat

SEQ ID NO: 93089 - DNA, 15 bp, Homo sapiens
ttccggatgggaaga

SEQ ID NO: 93090 - DNA, 15 bp, Homo sapiens
gttccggatgggaag

SEQ ID NO: 93091 - DNA, 15 bp, Homo sapiens
tgttccggatgggaa

SEQ ID NO: 93092 - DNA, 15 bp, Homo sapiens
atgttccggatggga

SEQ ID NO: 93093 - DNA, 15 bp, Homo sapiens
gatgttccggatggg

SEQ ID NO: 93094 - DNA, 15 bp, Homo sapiens
agatgttccggatgg

SEQ ID NO: 93095 - DNA, 15 bp, Homo sapiens
cagatgttccggatg

SEQ ID NO: 93096 - DNA, 15 bp, Homo sapiens
gcagatgttccggat

SEQ ID NO: 93097 - DNA, 15 bp, Homo sapiens
ggcagatgttccgga

SEQ ID NO: 93098 - DNA, 15 bp, Homo sapiens
gggcagatgttccgg

SEQ ID NO: 93099 - DNA, 15 bp, Homo sapiens
agggcagatgttccg

SEQ ID NO: 93100 - DNA, 15 bp, Homo sapiens
cagggcagatgttcc

SEQ ID NO: 93101 - DNA, 15 bp, Homo sapiens
gcagggcagatgttc

SEQ ID NO: 93102 - DNA, 15 bp, Homo sapiens
agcagggcagatgtt

SEQ ID NO: 93103 - DNA, 15 bp, Homo sapiens
cagcagggcagatgt

SEQ ID NO: 93104 - DNA, 15 bp, Homo sapiens
ccagcagggcagatg

SEQ ID NO: 93105 - DNA, 15 bp, Homo sapiens
cccagcagggcagat

SEQ ID NO: 93106 - DNA, 15 bp, Homo sapiens
ccccagcagggcaga

SEQ ID NO: 93107 - DNA, 15 bp, Homo sapiens
cccccagcagggcag

SEQ ID NO: 93108 - DNA, 15 bp, Homo sapiens
tcccccagcagggca

SEQ ID NO: 93109 - DNA, 15 bp, Homo sapiens
gtcccccagcagggc

SEQ ID NO: 93110 - DNA, 15 bp, Homo sapiens
tgtcccccagcaggg

SEQ ID NO: 93111 - DNA, 15 bp, Homo sapiens
gtgtcccccagcagg

SEQ ID NO: 93112 - DNA, 15 bp, Homo sapiens
agtgtcccccagcag

SEQ ID NO: 93113 - DNA, 15 bp, Homo sapiens
tagtgtcccccagca

SEQ ID NO: 93114 - DNA, 15 bp, Homo sapiens
gtagtgtcccccagc

SEQ ID NO: 93115 - DNA, 15 bp, Homo sapiens
cgtagtgtcccccag

SEQ ID NO: 93116 - DNA, 15 bp, Homo sapiens
ccgtagtgtccccca

SEQ ID NO: 93117 - DNA, 15 bp, Homo sapiens
cccgtagtgtccccc

SEQ ID NO: 93118 - DNA, 15 bp, Homo sapiens
gcccgtagtgtcccc

SEQ ID NO: 93119 - DNA, 15 bp, Homo sapiens
ggcccgtagtgtccc

SEQ ID NO: 93120 - DNA, 15 bp, Homo sapiens
aggcccgtagtgtcc

SEQ ID NO: 93121 - DNA, 15 bp, Homo sapiens
aaggcccgtagtgtc

SEQ ID NO: 93122 - DNA, 15 bp, Homo sapiens
gaaggcccgtagtgt

SEQ ID NO: 93123 - DNA, 15 bp, Homo sapiens
ggaaggcccgtagtg

SEQ ID NO: 93124 - DNA, 15 bp, Homo sapiens
gggaaggcccgtagt

SEQ ID NO: 93125 - DNA, 15 bp, Homo sapiens
agggaaggcccgtag

SEQ ID NO: 93126 - DNA, 15 bp, Homo sapiens
aagggaaggcccgta

SEQ ID NO: 93127 - DNA, 15 bp, Homo sapiens
caagggaaggcccgt

SEQ ID NO: 93128 - DNA, 15 bp, Homo sapiens
gcaagggaaggcccg

SEQ ID NO: 93129 - DNA, 15 bp, Homo sapiens
ggcaagggaaggccc

SEQ ID NO: 93130 - DNA, 15 bp, Homo sapiens
aggcaagggaaggcc

SEQ ID NO: 93131 - DNA, 15 bp, Homo sapiens
caggcaagggaaggc

SEQ ID NO: 93132 - DNA, 15 bp, Homo sapiens
tcaggcaagggaagg

SEQ ID NO: 93133 - DNA, 15 bp, Homo sapiens
ctcaggcaagggaag

SEQ ID NO: 93134 - DNA, 15 bp, Homo sapiens
cctcaggcaagggaa

SEQ ID NO: 93135 - DNA, 15 bp, Homo sapiens
ccctcaggcaaggga

SEQ ID NO: 93136 - DNA, 15 bp, Homo sapiens
accctcaggcaaggg

SEQ ID NO: 93137 - DNA, 15 bp, Homo sapiens
taccctcaggcaagg

SEQ ID NO: 93138 - DNA, 15 bp, Homo sapiens
ctaccctcaggcaag

SEQ ID NO: 93139 - DNA, 15 bp, Homo sapiens
cctaccctcaggcaa

SEQ ID NO: 93140 - DNA, 15 bp, Homo sapiens
ccctaccctcaggca

SEQ ID NO: 93141 - DNA, 15 bp, Homo sapiens
accctaccctcaggc

SEQ ID NO: 93142 - DNA, 15 bp, Homo sapiens
gaccctaccctcagg

SEQ ID NO: 93143 - DNA, 15 bp, Homo sapiens
agaccctaccctcag

SEQ ID NO: 93144 - DNA, 15 bp, Homo sapiens
gagaccctaccctca

SEQ ID NO: 93145 - DNA, 15 bp, Homo sapiens
tgagaccctaccctc

SEQ ID NO: 93146 - DNA, 15 bp, Homo sapiens
ttgagaccctaccct

SEQ ID NO: 93147 - DNA, 15 bp, Homo sapiens
cttgagaccctaccc

SEQ ID NO: 93148 - DNA, 15 bp, Homo sapiens
ccttgagaccctacc

SEQ ID NO: 93149 - DNA, 15 bp, Homo sapiens
accttgagaccctac

SEQ ID NO: 93150 - DNA, 15 bp, Homo sapiens
gaccttgagacccta

SEQ ID NO: 93151 - DNA, 15 bp, Homo sapiens
tgaccttgagaccct

SEQ ID NO: 93152 - DNA, 15 bp, Homo sapiens
gtgaccttgagaccc

SEQ ID NO: 93153 - DNA, 15 bp, Homo sapiens
agtgaccttgagacc

SEQ ID NO: 93154 - DNA, 15 bp, Homo sapiens
aagtgaccttgagac

SEQ ID NO: 93155 - DNA, 15 bp, Homo sapiens
caagtgaccttgaga

SEQ ID NO: 93156 - DNA, 15 bp, Homo sapiens
gcaagtgaccttgag

SEQ ID NO: 93157 - DNA, 15 bp, Homo sapiens
ggcaagtgaccttga

SEQ ID NO: 93158 - DNA, 15 bp, Homo sapiens
gggcaagtgaccttg

SEQ ID NO: 93159 - DNA, 15 bp, Homo sapiens
ggggcaagtgacctt

SEQ ID NO: 93160 - DNA, 15 bp, Homo sapiens
gggggcaagtgacct

SEQ ID NO: 93161 - DNA, 15 bp, Homo sapiens
tgggggcaagtgacc

SEQ ID NO: 93162 - DNA, 15 bp, Homo sapiens
ctgggggcaagtgac

SEQ ID NO: 93163 - DNA, 15 bp, Homo sapiens
gctgggggcaagtga

SEQ ID NO: 93164 - DNA, 15 bp, Homo sapiens
agctgggggcaagtg

SEQ ID NO: 93165 - DNA, 15 bp, Homo sapiens
aagctgggggcaagt

SEQ ID NO: 93166 - DNA, 15 bp, Homo sapiens
caagctgggggcaag

SEQ ID NO: 93167 - DNA, 15 bp, Homo sapiens
tcaagctgggggcaa

SEQ ID NO: 93168 - DNA, 15 bp, Homo sapiens
gtcaagctgggggca

SEQ ID NO: 93169 - DNA, 15 bp, Homo sapiens
ggtcaagctgggggc

SEQ ID NO: 93170 - DNA, 15 bp, Homo sapiens
aggtcaagctggggg

SEQ ID NO: 93171 - DNA, 15 bp, Homo sapiens
caggtcaagctgggg

SEQ ID NO: 93172 - DNA, 15 bp, Homo sapiens
ccaggtcaagctggg

SEQ ID NO: 93173 - DNA, 15 bp, Homo sapiens
gccaggtcaagctgg

SEQ ID NO: 93174 - DNA, 15 bp, Homo sapiens
ggccaggtcaagctg

SEQ ID NO: 93175 - DNA, 15 bp, Homo sapiens
cggccaggtcaagct

SEQ ID NO: 93176 - DNA, 15 bp, Homo sapiens
ccggccaggtcaagc

SEQ ID NO: 93177 - DNA, 15 bp, Homo sapiens
tccggccaggtcaag

SEQ ID NO: 93178 - DNA, 15 bp, Homo sapiens
ctccggccaggtcaa

SEQ ID NO: 93179 - DNA, 15 bp, Homo sapiens
actccggccaggtca

SEQ ID NO: 93180 - DNA, 15 bp, Homo sapiens
cactccggccaggtc

SEQ ID NO: 93181 - DNA, 15 bp, Homo sapiens
ccactccggccaggt

SEQ ID NO: 93182 - DNA, 15 bp, Homo sapiens
gccactccggccagg

SEQ ID NO: 93183 - DNA, 15 bp, Homo sapiens
agccactccggccag

SEQ ID NO: 93184 - DNA, 15 bp, Homo sapiens
tagccactccggcca

SEQ ID NO: 93185 - DNA, 15 bp, Homo sapiens
atagccactccggcc

SEQ ID NO: 93186 - DNA, 15 bp, Homo sapiens
tatagccactccggc

SEQ ID NO: 93187 - DNA, 15 bp, Homo sapiens
ctatagccactccgg

SEQ ID NO: 93188 - DNA, 15 bp, Homo sapiens
tctatagccactccg

SEQ ID NO: 93189 - DNA, 15 bp, Homo sapiens
ctctatagccactcc

SEQ ID NO: 93190 - DNA, 15 bp, Homo sapiens
cctctatagccactc

SEQ ID NO: 93191 - DNA, 15 bp, Homo sapiens
tcctctatagccact

SEQ ID NO: 93192 - DNA, 15 bp, Homo sapiens
gtcctctatagccac

SEQ ID NO: 93193 - DNA, 15 bp, Homo sapiens
agtcctctatagcca

SEQ ID NO: 93194 - DNA, 15 bp, Homo sapiens
aagtcctctatagcc

SEQ ID NO: 93195 - DNA, 15 bp, Homo sapiens
aaagtcctctatagc

SEQ ID NO: 93196 - DNA, 15 bp, Homo sapiens
caaagtcctctatag

SEQ ID NO: 93197 - DNA, 15 bp, Homo sapiens
acaaagtcctctata

SEQ ID NO: 93198 - DNA, 15 bp, Homo sapiens
gacaaagtcctctat

SEQ ID NO: 93199 - DNA, 15 bp, Homo sapiens
ggacaaagtcctcta

SEQ ID NO: 93200 - DNA, 15 bp, Homo sapiens
gggacaaagtcctct

SEQ ID NO: 93201 - DNA, 15 bp, Homo sapiens
agggacaaagtcctc

SEQ ID NO: 93202 - DNA, 15 bp, Homo sapiens
cagggacaaagtcct

SEQ ID NO: 93203 - DNA, 15 bp, Homo sapiens
gcagggacaaagtcc

SEQ ID NO: 93204 - DNA, 15 bp, Homo sapiens
tgcagggacaaagtc

SEQ ID NO: 93205 - DNA, 15 bp, Homo sapiens
ctgcagggacaaagt

SEQ ID NO: 93206 - DNA, 15 bp, Homo sapiens
tctgcagggacaaag

SEQ ID NO: 93207 - DNA, 15 bp, Homo sapiens
gtctgcagggacaaa

SEQ ID NO: 93208 - DNA, 15 bp, Homo sapiens
agtctgcagggacaa

SEQ ID NO: 93209 - DNA, 15 bp, Homo sapiens
cagtctgcagggaca

SEQ ID NO: 93210 - DNA, 15 bp, Homo sapiens
gcagtctgcagggac

SEQ ID NO: 93211 - DNA, 15 bp, Homo sapiens
tgcagtctgcaggga

SEQ ID NO: 93212 - DNA, 15 bp, Homo sapiens
ctgcagtctgcaggg

SEQ ID NO: 93213 - DNA, 15 bp, Homo sapiens
gctgcagtctgcagg

SEQ ID NO: 93214 - DNA, 15 bp, Homo sapiens
tgctgcagtctgcag

SEQ ID NO: 93215 - DNA, 15 bp, Homo sapiens
ctgctgcagtctgca

SEQ ID NO: 93216 - DNA, 15 bp, Homo sapiens
gctgctgcagtctgc

SEQ ID NO: 93217 - DNA, 15 bp, Homo sapiens
tgctgctgcagtctg

SEQ ID NO: 93218 - DNA, 15 bp, Homo sapiens
ctgctgctgcagtct

SEQ ID NO: 93219 - DNA, 15 bp, Homo sapiens
tctgctgctgcagtc

SEQ ID NO: 93220 - DNA, 15 bp, Homo sapiens
ctctgctgctgcagt

SEQ ID NO: 93221 - DNA, 15 bp, Homo sapiens
tctctgctgctgcag

SEQ ID NO: 93222 - DNA, 15 bp, Homo sapiens
atctctgctgctgca

SEQ ID NO: 93223 - DNA, 15 bp, Homo sapiens
catctctgctgctgc

SEQ ID NO: 93224 - DNA, 15 bp, Homo sapiens
tcatctctgctgctg

SEQ ID NO: 93225 - DNA, 15 bp, Homo sapiens
gtcatctctgctgct

SEQ ID NO: 93226 - DNA, 15 bp, Homo sapiens
tgtcatctctgctgc

SEQ ID NO: 93227 - DNA, 15 bp, Homo sapiens
gtgtcatctctgctg

SEQ ID NO: 93228 - DNA, 15 bp, Homo sapiens
agtgtcatctctgct

SEQ ID NO: 93229 - DNA, 15 bp, Homo sapiens
cagtgtcatctctgc

SEQ ID NO: 93230 - DNA, 15 bp, Homo sapiens
acagtgtcatctctg

SEQ ID NO: 93231 - DNA, 15 bp, Homo sapiens
gacagtgtcatctct

SEQ ID NO: 93232 - DNA, 15 bp, Homo sapiens
agacagtgtcatctc

SEQ ID NO: 93233 - DNA, 15 bp, Homo sapiens
gagacagtgtcatct

SEQ ID NO: 93234 - DNA, 15 bp, Homo sapiens
agagacagtgtcatc

SEQ ID NO: 93235 - DNA, 15 bp, Homo sapiens
cagagacagtgtcat

SEQ ID NO: 93236 - DNA, 15 bp, Homo sapiens
tcagagacagtgtca

SEQ ID NO: 93237 - DNA, 15 bp, Homo sapiens
ctcagagacagtgtc

SEQ ID NO: 93238 - DNA, 15 bp, Homo sapiens
actcagagacagtgt

SEQ ID NO: 93239 - DNA, 15 bp, Homo sapiens
cactcagagacagtg

SEQ ID NO: 93240 - DNA, 15 bp, Homo sapiens
gcactcagagacagt

SEQ ID NO: 93241 - DNA, 15 bp, Homo sapiens
tgcactcagagacag

SEQ ID NO: 93242 - DNA, 15 bp, Homo sapiens
ctgcactcagagaca

SEQ ID NO: 93243 - DNA, 15 bp, Homo sapiens
tctgcactcagagac

SEQ ID NO: 93244 - DNA, 15 bp, Homo sapiens
ctctgcactcagaga

SEQ ID NO: 93245 - DNA, 15 bp, Homo sapiens
tctctgcactcagag

SEQ ID NO: 93246 - DNA, 15 bp, Homo sapiens
atctctgcactcaga

SEQ ID NO: 93247 - DNA, 15 bp, Homo sapiens
catctctgcactcag

SEQ ID NO: 93248 - DNA, 15 bp, Homo sapiens
ccatctctgcactca

SEQ ID NO: 93249 - DNA, 15 bp, Homo sapiens
cccatctctgcactc

SEQ ID NO: 93250 - DNA, 15 bp, Homo sapiens
ccccatctctgcact

SEQ ID NO: 93251 - DNA, 15 bp, Homo sapiens
cccccatctctgcac

SEQ ID NO: 93252 - DNA, 15 bp, Homo sapiens
gcccccatctctgca

SEQ ID NO: 93253 - DNA, 15 bp, Homo sapiens
tgcccccatctctgc

SEQ ID NO: 93254 - DNA, 15 bp, Homo sapiens
ctgcccccatctctg

SEQ ID NO: 93255 - DNA, 15 bp, Homo sapiens
cctgcccccatctct

SEQ ID NO: 93256 - DNA, 15 bp, Homo sapiens
ccctgcccccatctc

SEQ ID NO: 93257 - DNA, 15 bp, Homo sapiens
tccctgcccccatct

SEQ ID NO: 93258 - DNA, 15 bp, Homo sapiens
ctccctgcccccatc

SEQ ID NO: 93259 - DNA, 15 bp, Homo sapiens
gctccctgcccccat

SEQ ID NO: 93260 - DNA, 15 bp, Homo sapiens
agctccctgccccca

SEQ ID NO: 93261 - DNA, 15 bp, Homo sapiens
cagctccctgccccc

SEQ ID NO: 93262 - DNA, 15 bp, Homo sapiens
ccagctccctgcccc

SEQ ID NO: 93263 - DNA, 15 bp, Homo sapiens
cccagctccctgccc

SEQ ID NO: 93264 - DNA, 15 bp, Homo sapiens
tcccagctccctgcc

SEQ ID NO: 93265 - DNA, 15 bp, Homo sapiens
ctcccagctccctgc

SEQ ID NO: 93266 - DNA, 15 bp, Homo sapiens
tctcccagctccctg

SEQ ID NO: 93267 - DNA, 15 bp, Homo sapiens
ctctcccagctccct

SEQ ID NO: 93268 - DNA, 15 bp, Homo sapiens
cctctcccagctccc

SEQ ID NO: 93269 - DNA, 15 bp, Homo sapiens
ccctctcccagctcc

SEQ ID NO: 93270 - DNA, 15 bp, Homo sapiens
accctctcccagctc

SEQ ID NO: 93271 - DNA, 15 bp, Homo sapiens
aaccctctcccagct

SEQ ID NO: 93272 - DNA, 15 bp, Homo sapiens
gaaccctctcccagc

SEQ ID NO: 93273 - DNA, 15 bp, Homo sapiens
tgaaccctctcccag

SEQ ID NO: 93274 - DNA, 15 bp, Homo sapiens
ttgaaccctctccca

SEQ ID NO: 93275 - DNA, 15 bp, Homo sapiens
cttgaaccctctccc

SEQ ID NO: 93276 - DNA, 15 bp, Homo sapiens
gcttgaaccctctcc

SEQ ID NO: 93277 - DNA, 15 bp, Homo sapiens
agcttgaaccctctc

SEQ ID NO: 93278 - DNA, 15 bp, Homo sapiens
tagcttgaaccctct

SEQ ID NO: 93279 - DNA, 15 bp, Homo sapiens
gtagcttgaaccctc

SEQ ID NO: 93280 - DNA, 15 bp, Homo sapiens
agtagcttgaaccct

SEQ ID NO: 93281 - DNA, 15 bp, Homo sapiens
cagtagcttgaaccc

SEQ ID NO: 93282 - DNA, 15 bp, Homo sapiens
ccagtagcttgaacc

SEQ ID NO: 93283 - DNA, 15 bp, Homo sapiens
tccagtagcttgaac

SEQ ID NO: 93284 - DNA, 15 bp, Homo sapiens
ttccagtagcttgaa

SEQ ID NO: 93285 - DNA, 15 bp, Homo sapiens
gttccagtagcttga

SEQ ID NO: 93286 - DNA, 15 bp, Homo sapiens
tgttccagtagcttg

SEQ ID NO: 93287 - DNA, 15 bp, Homo sapiens
ctgttccagtagctt

SEQ ID NO: 93288 - DNA, 15 bp, Homo sapiens
gctgttccagtagct

SEQ ID NO: 93289 - DNA, 15 bp, Homo sapiens
agctgttccagtagc

SEQ ID NO: 93290 - DNA, 15 bp, Homo sapiens
aagctgttccagtag

SEQ ID NO: 93291 - DNA, 15 bp, Homo sapiens
gaagctgttccagta

SEQ ID NO: 93292 - DNA, 15 bp, Homo sapiens
tgaagctgttccagt

SEQ ID NO: 93293 - DNA, 15 bp, Homo sapiens
ctgaagctgttccag

SEQ ID NO: 93294 - DNA, 15 bp, Homo sapiens
tctgaagctgttcca

SEQ ID NO: 93295 - DNA, 15 bp, Homo sapiens
ttctgaagctgttcc

SEQ ID NO: 93296 - DNA, 15 bp, Homo sapiens
gttctgaagctgttc

SEQ ID NO: 93297 - DNA, 15 bp, Homo sapiens
tgttctgaagctgtt

SEQ ID NO: 93298 - DNA, 15 bp, Homo sapiens
ttgttctgaagctgt

SEQ ID NO: 93299 - DNA, 15 bp, Homo sapiens
gttgttctgaagctg

SEQ ID NO: 93300 - DNA, 15 bp, Homo sapiens
agttgttctgaagct

SEQ ID NO: 93301 - DNA, 15 bp, Homo sapiens
tagttgttctgaagc

SEQ ID NO: 93302 - DNA, 15 bp, Homo sapiens
ctagttgttctgaag

SEQ ID NO: 93303 - DNA, 15 bp, Homo sapiens
cctagttgttctgaa

SEQ ID NO: 93304 - DNA, 15 bp, Homo sapiens
ccctagttgttctga

SEQ ID NO: 93305 - DNA, 15 bp, Homo sapiens
accctagttgttctg

SEQ ID NO: 93306 - DNA, 15 bp, Homo sapiens
taccctagttgttct

SEQ ID NO: 93307 - DNA, 15 bp, Homo sapiens
gtaccctagttgttc

SEQ ID NO: 93308 - DNA, 15 bp, Homo sapiens
agtaccctagttgtt

SEQ ID NO: 93309 - DNA, 15 bp, Homo sapiens
tagtaccctagttgt

SEQ ID NO: 93310 - DNA, 15 bp, Homo sapiens
ctagtaccctagttg

SEQ ID NO: 93311 - DNA, 15 bp, Homo sapiens
cctagtaccctagtt

SEQ ID NO: 93312 - DNA, 15 bp, Homo sapiens
tcctagtaccctagt

SEQ ID NO: 93313 - DNA, 15 bp, Homo sapiens
ttcctagtaccctag

SEQ ID NO: 93314 - DNA, 15 bp, Homo sapiens
gttcctagtacccta

SEQ ID NO: 93315 - DNA, 15 bp, Homo sapiens
agttcctagtaccct

SEQ ID NO: 93316 - DNA, 15 bp, Homo sapiens
cagttcctagtaccc

SEQ ID NO: 93317 - DNA, 15 bp, Homo sapiens
gcagttcctagtacc

SEQ ID NO: 93318 - DNA, 15 bp, Homo sapiens
agcagttcctagtac

SEQ ID NO: 93319 - DNA, 15 bp, Homo sapiens
cagcagttcctagta

SEQ ID NO: 93320 - DNA, 15 bp, Homo sapiens
acagcagttcctagt

SEQ ID NO: 93321 - DNA, 15 bp, Homo sapiens
cacagcagttcctag

SEQ ID NO: 93322 - DNA, 15 bp, Homo sapiens
acacagcagttccta

SEQ ID NO: 93323 - DNA, 15 bp, Homo sapiens
gacacagcagttcct

SEQ ID NO: 93324 - DNA, 15 bp, Homo sapiens
tgacacagcagttcc

SEQ ID NO: 93325 - DNA, 15 bp, Homo sapiens
ctgacacagcagttc

SEQ ID NO: 93326 - DNA, 15 bp, Homo sapiens
cctgacacagcagtt

SEQ ID NO: 93327 - DNA, 15 bp, Homo sapiens
ccctgacacagcagt

SEQ ID NO: 93328 - DNA, 15 bp, Homo sapiens
tccctgacacagcag

SEQ ID NO: 93329 - DNA, 15 bp, Homo sapiens
ctccctgacacagca

SEQ ID NO: 93330 - DNA, 15 bp, Homo sapiens
tctccctgacacagc

SEQ ID NO: 93331 - DNA, 15 bp, Homo sapiens
ttctccctgacacag

SEQ ID NO: 93332 - DNA, 15 bp, Homo sapiens
cttctccctgacaca

SEQ ID NO: 93333 - DNA, 15 bp, Homo sapiens
ccttctccctgacac

SEQ ID NO: 93334 - DNA, 15 bp, Homo sapiens
cccttctccctgaca

SEQ ID NO: 93335 - DNA, 15 bp, Homo sapiens
ccccttctccctgac

SEQ ID NO: 93336 - DNA, 15 bp, Homo sapiens
gccccttctccctga

SEQ ID NO: 93337 - DNA, 15 bp, Homo sapiens
agccccttctccctg

SEQ ID NO: 93338 - DNA, 15 bp, Homo sapiens
gagccccttctccct

SEQ ID NO: 93339 - DNA, 15 bp, Homo sapiens
tgagccccttctccc

SEQ ID NO: 93340 - DNA, 15 bp, Homo sapiens
ttgagccccttctcc

SEQ ID NO: 93341 - DNA, 15 bp, Homo sapiens
cttgagccccttctc

SEQ ID NO: 93342 - DNA, 15 bp, Homo sapiens
ccttgagccccttct

SEQ ID NO: 93343 - DNA, 15 bp, Homo sapiens
tccttgagccccttc

SEQ ID NO: 93344 - DNA, 15 bp, Homo sapiens
gtccttgagcccctt

SEQ ID NO: 93345 - DNA, 15 bp, Homo sapiens
agtccttgagcccct

SEQ ID NO: 93346 - DNA, 15 bp, Homo sapiens
gagtccttgagcccc

SEQ ID NO: 93347 - DNA, 15 bp, Homo sapiens
cgagtccttgagccc

SEQ ID NO: 93348 - DNA, 15 bp, Homo sapiens
gcgagtccttgagcc

SEQ ID NO: 93349 - DNA, 15 bp, Homo sapiens
tgcgagtccttgagc

SEQ ID NO: 93350 - DNA, 15 bp, Homo sapiens
ctgcgagtccttgag

SEQ ID NO: 93351 - DNA, 15 bp, Homo sapiens
cctgcgagtccttga

SEQ ID NO: 93352 - DNA, 15 bp, Homo sapiens
gcctgcgagtccttg

SEQ ID NO: 93353 - DNA, 15 bp, Homo sapiens
ggcctgcgagtcctt

SEQ ID NO: 93354 - DNA, 15 bp, Homo sapiens
aggcctgcgagtcct

SEQ ID NO: 93355 - DNA, 15 bp, Homo sapiens
caggcctgcgagtcc

SEQ ID NO: 93356 - DNA, 15 bp, Homo sapiens
ccaggcctgcgagtc

SEQ ID NO: 93357 - DNA, 15 bp, Homo sapiens
cccaggcctgcgagt

SEQ ID NO: 93358 - DNA, 15 bp, Homo sapiens
tcccaggcctgcgag

SEQ ID NO: 93359 - DNA, 15 bp, Homo sapiens
ctcccaggcctgcga

SEQ ID NO: 93360 - DNA, 15 bp, Homo sapiens
cctcccaggcctgcg

SEQ ID NO: 93361 - DNA, 15 bp, Homo sapiens
tcctcccaggcctgc

SEQ ID NO: 93362 - DNA, 15 bp, Homo sapiens
ctcctcccaggcctg

SEQ ID NO: 93363 - DNA, 15 bp, Homo sapiens
cctcctcccaggcct

SEQ ID NO: 93364 - DNA, 15 bp, Homo sapiens
ccctcctcccaggcc

SEQ ID NO: 93365 - DNA, 15 bp, Homo sapiens
cccctcctcccaggc

SEQ ID NO: 93366 - DNA, 15 bp, Homo sapiens
gcccctcctcccagg

SEQ ID NO: 93367 - DNA, 15 bp, Homo sapiens
ggcccctcctcccag

SEQ ID NO: 93368 - DNA, 15 bp, Homo sapiens
aggcccctcctccca

SEQ ID NO: 93369 - DNA, 15 bp, Homo sapiens
taggcccctcctccc

SEQ ID NO: 93370 - DNA, 15 bp, Homo sapiens
ctaggcccctcctcc

SEQ ID NO: 93371 - DNA, 15 bp, Homo sapiens
cctaggcccctcctc

SEQ ID NO: 93372 - DNA, 15 bp, Homo sapiens
gcctaggcccctcct

SEQ ID NO: 93373 - DNA, 15 bp, Homo sapiens
ggcctaggcccctcc

SEQ ID NO: 93374 - DNA, 15 bp, Homo sapiens
tggcctaggcccctc

SEQ ID NO: 93375 - DNA, 15 bp, Homo sapiens
ctggcctaggcccct

SEQ ID NO: 93376 - DNA, 15 bp, Homo sapiens
gctggcctaggcccc

SEQ ID NO: 93377 - DNA, 15 bp, Homo sapiens
ggctggcctaggccc

SEQ ID NO: 93378 - DNA, 15 bp, Homo sapiens
tggctggcctaggcc

SEQ ID NO: 93379 - DNA, 15 bp, Homo sapiens
atggctggcctaggc

SEQ ID NO: 93380 - DNA, 15 bp, Homo sapiens
catggctggcctagg

SEQ ID NO: 93381 - DNA, 15 bp, Homo sapiens
ccatggctggcctag

SEQ ID NO: 93382 - DNA, 15 bp, Homo sapiens
cccatggctggccta

SEQ ID NO: 93383 - DNA, 15 bp, Homo sapiens
tcccatggctggcct

SEQ ID NO: 93384 - DNA, 15 bp, Homo sapiens
ctcccatggctggcc

SEQ ID NO: 93385 - DNA, 15 bp, Homo sapiens
actcccatggctggc

SEQ ID NO: 93386 - DNA, 15 bp, Homo sapiens
aactcccatggctgg

SEQ ID NO: 93387 - DNA, 15 bp, Homo sapiens
caactcccatggctg

SEQ ID NO: 93388 - DNA, 15 bp, Homo sapiens
ccaactcccatggct

SEQ ID NO: 93389 - DNA, 15 bp, Homo sapiens
cccaactcccatggc

SEQ ID NO: 93390 - DNA, 15 bp, Homo sapiens
acccaactcccatgg

SEQ ID NO: 93391 - DNA, 15 bp, Homo sapiens
gacccaactcccatg

SEQ ID NO: 93392 - DNA, 15 bp, Homo sapiens
tgacccaactcccat

SEQ ID NO: 93393 - DNA, 15 bp, Homo sapiens
gtgacccaactccca

SEQ ID NO: 93394 - DNA, 15 bp, Homo sapiens
ggtgacccaactccc

SEQ ID NO: 93395 - DNA, 15 bp, Homo sapiens
aggtgacccaactcc

SEQ ID NO: 93396 - DNA, 15 bp, Homo sapiens
caggtgacccaactc

SEQ ID NO: 93397 - DNA, 15 bp, Homo sapiens
acaggtgacccaact

SEQ ID NO: 93398 - DNA, 15 bp, Homo sapiens
cacaggtgacccaac

SEQ ID NO: 93399 - DNA, 15 bp, Homo sapiens
acacaggtgacccaa

SEQ ID NO: 93400 - DNA, 15 bp, Homo sapiens
gacacaggtgaccca

SEQ ID NO: 93401 - DNA, 15 bp, Homo sapiens
agacacaggtgaccc

SEQ ID NO: 93402 - DNA, 15 bp, Homo sapiens
cagacacaggtgacc

SEQ ID NO: 93403 - DNA, 15 bp, Homo sapiens
tcagacacaggtgac

SEQ ID NO: 93404 - DNA, 15 bp, Homo sapiens
ctcagacacaggtga

SEQ ID NO: 93405 - DNA, 15 bp, Homo sapiens
cctcagacacaggtg

SEQ ID NO: 93406 - DNA, 15 bp, Homo sapiens
tcctcagacacaggt

SEQ ID NO: 93407 - DNA, 15 bp, Homo sapiens
gtcctcagacacagg

SEQ ID NO: 93408 - DNA, 15 bp, Homo sapiens
agtcctcagacacag

SEQ ID NO: 93409 - DNA, 15 bp, Homo sapiens
aagtcctcagacaca

SEQ ID NO: 93410 - DNA, 15 bp, Homo sapiens
caagtcctcagacac

SEQ ID NO: 93411 - DNA, 15 bp, Homo sapiens
ccaagtcctcagaca

SEQ ID NO: 93412 - DNA, 15 bp, Homo sapiens
accaagtcctcagac

SEQ ID NO: 93413 - DNA, 15 bp, Homo sapiens
caccaagtcctcaga

SEQ ID NO: 93414 - DNA, 15 bp, Homo sapiens
gcaccaagtcctcag

SEQ ID NO: 93415 - DNA, 15 bp, Homo sapiens
agcaccaagtcctca

SEQ ID NO: 93416 - DNA, 15 bp, Homo sapiens
cagcaccaagtcctc

SEQ ID NO: 93417 - DNA, 15 bp, Homo sapiens
acagcaccaagtcct

SEQ ID NO: 93418 - DNA, 15 bp, Homo sapiens
gacagcaccaagtcc

SEQ ID NO: 93419 - DNA, 15 bp, Homo sapiens
agacagcaccaagtc

SEQ ID NO: 93420 - DNA, 15 bp, Homo sapiens
cagacagcaccaagt

SEQ ID NO: 93421 - DNA, 15 bp, Homo sapiens
ccagacagcaccaag

SEQ ID NO: 93422 - DNA, 15 bp, Homo sapiens
tccagacagcaccaa

SEQ ID NO: 93423 - DNA, 15 bp, Homo sapiens
atccagacagcacca

SEQ ID NO: 93424 - DNA, 15 bp, Homo sapiens
aatccagacagcacc

SEQ ID NO: 93425 - DNA, 15 bp, Homo sapiens
aaatccagacagcac

SEQ ID NO: 93426 - DNA, 15 bp, Homo sapiens
aaaatccagacagca

SEQ ID NO: 93427 - DNA, 15 bp, Homo sapiens
caaaatccagacagc

SEQ ID NO: 93428 - DNA, 15 bp, Homo sapiens
gcaaaatccagacag

SEQ ID NO: 93429 - DNA, 15 bp, Homo sapiens
ggcaaaatccagaca

SEQ ID NO: 93430 - DNA, 15 bp, Homo sapiens
tggcaaaatccagac

SEQ ID NO: 93431 - DNA, 15 bp, Homo sapiens
ttggcaaaatccaga

SEQ ID NO: 93432 - DNA, 15 bp, Homo sapiens
gttggcaaaatccag

SEQ ID NO: 93433 - DNA, 15 bp, Homo sapiens
ggttggcaaaatcca

SEQ ID NO: 93434 - DNA, 15 bp, Homo sapiens
aggttggcaaaatcc

SEQ ID NO: 93435 - DNA, 15 bp, Homo sapiens
taggttggcaaaatc

SEQ ID NO: 93436 - DNA, 15 bp, Homo sapiens
ctaggttggcaaaat

SEQ ID NO: 93437 - DNA, 15 bp, Homo sapiens
cctaggttggcaaaa

SEQ ID NO: 93438 - DNA, 15 bp, Homo sapiens
ccctaggttggcaaa

SEQ ID NO: 93439 - DNA, 15 bp, Homo sapiens
gccctaggttggcaa

SEQ ID NO: 93440 - DNA, 15 bp, Homo sapiens
agccctaggttggca

SEQ ID NO: 93441 - DNA, 15 bp, Homo sapiens
cagccctaggttggc

SEQ ID NO: 93442 - DNA, 15 bp, Homo sapiens
ccagccctaggttgg

SEQ ID NO: 93443 - DNA, 15 bp, Homo sapiens
cccagccctaggttg

SEQ ID NO: 93444 - DNA, 15 bp, Homo sapiens
ccccagccctaggtt

SEQ ID NO: 93445 - DNA, 15 bp, Homo sapiens
accccagccctaggt

SEQ ID NO: 93446 - DNA, 15 bp, Homo sapiens
gaccccagccctagg

SEQ ID NO: 93447 - DNA, 15 bp, Homo sapiens
tgaccccagccctag

SEQ ID NO: 93448 - DNA, 15 bp, Homo sapiens
ctgaccccagcccta

SEQ ID NO: 93449 - DNA, 15 bp, Homo sapiens
gctgaccccagccct

SEQ ID NO: 93450 - DNA, 15 bp, Homo sapiens
agctgaccccagccc

SEQ ID NO: 93451 - DNA, 15 bp, Homo sapiens
cagctgaccccagcc

SEQ ID NO: 93452 - DNA, 15 bp, Homo sapiens
tcagctgaccccagc

SEQ ID NO: 93453 - DNA, 15 bp, Homo sapiens
atcagctgaccccag

SEQ ID NO: 93454 - DNA, 15 bp, Homo sapiens
catcagctgacccca

SEQ ID NO: 93455 - DNA, 15 bp, Homo sapiens
gcatcagctgacccc

SEQ ID NO: 93456 - DNA, 15 bp, Homo sapiens
ggcatcagctgaccc

SEQ ID NO: 93457 - DNA, 15 bp, Homo sapiens
gggcatcagctgacc

SEQ ID NO: 93458 - DNA, 15 bp, Homo sapiens
tgggcatcagctgac

SEQ ID NO: 93459 - DNA, 15 bp, Homo sapiens
gtgggcatcagctga

SEQ ID NO: 93460 - DNA, 15 bp, Homo sapiens
ggtgggcatcagctg

SEQ ID NO: 93461 - DNA, 15 bp, Homo sapiens
tggtgggcatcagct

SEQ ID NO: 93462 - DNA, 15 bp, Homo sapiens
gtggtgggcatcagc

SEQ ID NO: 93463 - DNA, 15 bp, Homo sapiens
cgtggtgggcatcag

SEQ ID NO: 93464 - DNA, 15 bp, Homo sapiens
tcgtggtgggcatca

SEQ ID NO: 93465 - DNA, 15 bp, Homo sapiens
gtcgtggtgggcatc

SEQ ID NO: 93466 - DNA, 15 bp, Homo sapiens
agtcgtggtgggcat

SEQ ID NO: 93467 - DNA, 15 bp, Homo sapiens
gagtcgtggtgggca

SEQ ID NO: 93468 - DNA, 15 bp, Homo sapiens
ggagtcgtggtgggc

SEQ ID NO: 93469 - DNA, 15 bp, Homo sapiens
gggagtcgtggtggg

SEQ ID NO: 93470 - DNA, 15 bp, Homo sapiens
cgggagtcgtggtgg

SEQ ID NO: 93471 - DNA, 15 bp, Homo sapiens
tcgggagtcgtggtg

SEQ ID NO: 93472 - DNA, 15 bp, Homo sapiens
ctcgggagtcgtggt

SEQ ID NO: 93473 - DNA, 15 bp, Homo sapiens
gctcgggagtcgtgg

SEQ ID NO: 93474 - DNA, 15 bp, Homo sapiens
ggctcgggagtcgtg

SEQ ID NO: 93475 - DNA, 15 bp, Homo sapiens
aggctcgggagtcgt

SEQ ID NO: 93476 - DNA, 15 bp, Homo sapiens
gaggctcgggagtcg

SEQ ID NO: 93477 - DNA, 15 bp, Homo sapiens
ggaggctcgggagtc

SEQ ID NO: 93478 - DNA, 15 bp, Homo sapiens
tggaggctcgggagt

SEQ ID NO: 93479 - DNA, 15 bp, Homo sapiens
ctggaggctcgggag

SEQ ID NO: 93480 - DNA, 15 bp, Homo sapiens
cctggaggctcggga

SEQ ID NO: 93481 - DNA, 15 bp, Homo sapiens
tcctggaggctcggg

SEQ ID NO: 93482 - DNA, 15 bp, Homo sapiens
ttcctggaggctcgg

SEQ ID NO: 93483 - DNA, 15 bp, Homo sapiens
gttcctggaggctcg

SEQ ID NO: 93484 - DNA, 15 bp, Homo sapiens
agttcctggaggctc

SEQ ID NO: 93485 - DNA, 15 bp, Homo sapiens
cagttcctggaggct

SEQ ID NO: 93486 - DNA, 15 bp, Homo sapiens
tcagttcctggaggc

SEQ ID NO: 93487 - DNA, 15 bp, Homo sapiens
ttcagttcctggagg

SEQ ID NO: 93488 - DNA, 15 bp, Homo sapiens
tttcagttcctggag

SEQ ID NO: 93489 - DNA, 15 bp, Homo sapiens
gtttcagttcctgga

SEQ ID NO: 93490 - DNA, 15 bp, Homo sapiens
ggtttcagttcctgg

SEQ ID NO: 93491 - DNA, 15 bp, Homo sapiens
gggtttcagttcctg

SEQ ID NO: 93492 - DNA, 15 bp, Homo sapiens
agggtttcagttcct

SEQ ID NO: 93493 - DNA, 15 bp, Homo sapiens
cagggtttcagttcc

SEQ ID NO: 93494 - DNA, 15 bp, Homo sapiens
acagggtttcagttc

SEQ ID NO: 93495 - DNA, 15 bp, Homo sapiens
gacagggtttcagtt

SEQ ID NO: 93496 - DNA, 15 bp, Homo sapiens
agacagggtttcagt

SEQ ID NO: 93497 - DNA, 15 bp, Homo sapiens
cagacagggtttcag

SEQ ID NO: 93498 - DNA, 15 bp, Homo sapiens
gcagacagggtttca

SEQ ID NO: 93499 - DNA, 15 bp, Homo sapiens
ggcagacagggtttc

SEQ ID NO: 93500 - DNA, 15 bp, Homo sapiens
gggcagacagggttt

SEQ ID NO: 93501 - DNA, 15 bp, Homo sapiens
ggggcagacagggtt

SEQ ID NO: 93502 - DNA, 15 bp, Homo sapiens
gggggcagacagggt

SEQ ID NO: 93503 - DNA, 15 bp, Homo sapiens
tgggggcagacaggg

SEQ ID NO: 93504 - DNA, 15 bp, Homo sapiens
ctgggggcagacagg

SEQ ID NO: 93505 - DNA, 15 bp, Homo sapiens
cctgggggcagacag

SEQ ID NO: 93506 - DNA, 15 bp, Homo sapiens
ccctgggggcagaca

SEQ ID NO: 93507 - DNA, 15 bp, Homo sapiens
accctgggggcagac

SEQ ID NO: 93508 - DNA, 15 bp, Homo sapiens
gaccctgggggcaga

SEQ ID NO: 93509 - DNA, 15 bp, Homo sapiens
agaccctgggggcag

SEQ ID NO: 93510 - DNA, 15 bp, Homo sapiens
cagaccctgggggca

SEQ ID NO: 93511 - DNA, 15 bp, Homo sapiens
ccagaccctgggggc

SEQ ID NO: 93512 - DNA, 15 bp, Homo sapiens
cccagaccctggggg

SEQ ID NO: 93513 - DNA, 15 bp, Homo sapiens
ccccagaccctgggg

SEQ ID NO: 93514 - DNA, 15 bp, Homo sapiens
tccccagaccctggg

SEQ ID NO: 93515 - DNA, 15 bp, Homo sapiens
ttccccagaccctgg

SEQ ID NO: 93516 - DNA, 15 bp, Homo sapiens
cttccccagaccctg

SEQ ID NO: 93517 - DNA, 15 bp, Homo sapiens
ccttccccagaccct

SEQ ID NO: 93518 - DNA, 15 bp, Homo sapiens
tccttccccagaccc

SEQ ID NO: 93519 - DNA, 15 bp, Homo sapiens
ctccttccccagacc

SEQ ID NO: 93520 - DNA, 15 bp, Homo sapiens
cctccttccccagac

SEQ ID NO: 93521 - DNA, 15 bp, Homo sapiens
gcctccttccccaga

SEQ ID NO: 93522 - DNA, 15 bp, Homo sapiens
agcctccttccccag

SEQ ID NO: 93523 - DNA, 15 bp, Homo sapiens
cagcctccttcccca

SEQ ID NO: 93524 - DNA, 15 bp, Homo sapiens
gcagcctccttcccc

SEQ ID NO: 93525 - DNA, 15 bp, Homo sapiens
agcagcctccttccc

SEQ ID NO: 93526 - DNA, 15 bp, Homo sapiens
cagcagcctccttcc

SEQ ID NO: 93527 - DNA, 15 bp, Homo sapiens
tcagcagcctccttc

SEQ ID NO: 93528 - DNA, 15 bp, Homo sapiens
ctcagcagcctcctt

SEQ ID NO: 93529 - DNA, 15 bp, Homo sapiens
actcagcagcctcct

SEQ ID NO: 93530 - DNA, 15 bp, Homo sapiens
tactcagcagcctcc

SEQ ID NO: 93531 - DNA, 15 bp, Homo sapiens
ctactcagcagcctc

SEQ ID NO: 93532 - DNA, 15 bp, Homo sapiens
tctactcagcagcct

SEQ ID NO: 93533 - DNA, 15 bp, Homo sapiens
ttctactcagcagcc

SEQ ID NO: 93534 - DNA, 15 bp, Homo sapiens
gttctactcagcagc

SEQ ID NO: 93535 - DNA, 15 bp, Homo sapiens
ggttctactcagcag

SEQ ID NO: 93536 - DNA, 15 bp, Homo sapiens
tggttctactcagca

SEQ ID NO: 93537 - DNA, 15 bp, Homo sapiens
ttggttctactcagc

SEQ ID NO: 93538 - DNA, 15 bp, Homo sapiens
gttggttctactcag

SEQ ID NO: 93539 - DNA, 15 bp, Homo sapiens
ggttggttctactca

SEQ ID NO: 93540 - DNA, 15 bp, Homo sapiens
gggttggttctactc

SEQ ID NO: 93541 - DNA, 15 bp, Homo sapiens
ggggttggttctact

SEQ ID NO: 93542 - DNA, 15 bp, Homo sapiens
tggggttggttctac

SEQ ID NO: 93543 - DNA, 15 bp, Homo sapiens
ctggggttggttcta

SEQ ID NO: 93544 - DNA, 15 bp, Homo sapiens
cctggggttggttct

SEQ ID NO: 93545 - DNA, 15 bp, Homo sapiens
acctggggttggttc

SEQ ID NO: 93546 - DNA, 15 bp, Homo sapiens
aacctggggttggtt

SEQ ID NO: 93547 - DNA, 15 bp, Homo sapiens
taacctggggttggt

SEQ ID NO: 93548 - DNA, 15 bp, Homo sapiens
gtaacctggggttgg

SEQ ID NO: 93549 - DNA, 15 bp, Homo sapiens
ggtaacctggggttg

SEQ ID NO: 93550 - DNA, 15 bp, Homo sapiens
tggtaacctggggtt

SEQ ID NO: 93551 - DNA, 15 bp, Homo sapiens
ttggtaacctggggt

SEQ ID NO: 93552 - DNA, 15 bp, Homo sapiens
gttggtaacctgggg

SEQ ID NO: 93553 - DNA, 15 bp, Homo sapiens
ggttggtaacctggg

SEQ ID NO: 93554 - DNA, 15 bp, Homo sapiens
gggttggtaacctgg

SEQ ID NO: 93555 - DNA, 15 bp, Homo sapiens
ggggttggtaacctg

SEQ ID NO: 93556 - DNA, 15 bp, Homo sapiens
tggggttggtaacct

SEQ ID NO: 93557 - DNA, 15 bp, Homo sapiens
gtggggttggtaacc

SEQ ID NO: 93558 - DNA, 15 bp, Homo sapiens
ggtggggttggtaac

SEQ ID NO: 93559 - DNA, 15 bp, Homo sapiens
aggtggggttggtaa

SEQ ID NO: 93560 - DNA, 15 bp, Homo sapiens
gaggtggggttggta

SEQ ID NO: 93561 - DNA, 15 bp, Homo sapiens
tgaggtggggttggt

SEQ ID NO: 93562 - DNA, 15 bp, Homo sapiens
ctgaggtggggttgg

SEQ ID NO: 93563 - DNA, 15 bp, Homo sapiens
gctgaggtggggttg

SEQ ID NO: 93564 - DNA, 15 bp, Homo sapiens
ggctgaggtggggtt

SEQ ID NO: 93565 - DNA, 15 bp, Homo sapiens
tggctgaggtggggt

SEQ ID NO: 93566 - DNA, 15 bp, Homo sapiens
gtggctgaggtgggg

SEQ ID NO: 93567 - DNA, 15 bp, Homo sapiens
ggtggctgaggtggg

SEQ ID NO: 93568 - DNA, 15 bp, Homo sapiens
gggtggctgaggtgg

SEQ ID NO: 93569 - DNA, 15 bp, Homo sapiens
ggggtggctgaggtg

SEQ ID NO: 93570 - DNA, 15 bp, Homo sapiens
aggggtggctgaggt

SEQ ID NO: 93571 - DNA, 15 bp, Homo sapiens
aaggggtggctgagg

SEQ ID NO: 93572 - DNA, 15 bp, Homo sapiens
caaggggtggctgag

SEQ ID NO: 93573 - DNA, 15 bp, Homo sapiens
gcaaggggtggctga

SEQ ID NO: 93574 - DNA, 15 bp, Homo sapiens
ggcaaggggtggctg

SEQ ID NO: 93575 - DNA, 15 bp, Homo sapiens
tggcaaggggtggct

SEQ ID NO: 93576 - DNA, 15 bp, Homo sapiens
ctggcaaggggtggc

SEQ ID NO: 93577 - DNA, 15 bp, Homo sapiens
gctggcaaggggtgg

SEQ ID NO: 93578 - DNA, 15 bp, Homo sapiens
ggctggcaaggggtg

SEQ ID NO: 93579 - DNA, 15 bp, Homo sapiens
tggctggcaaggggt

SEQ ID NO: 93580 - DNA, 15 bp, Homo sapiens
ttggctggcaagggg

SEQ ID NO: 93581 - DNA, 15 bp, Homo sapiens
tttggctggcaaggg

SEQ ID NO: 93582 - DNA, 15 bp, Homo sapiens
ctttggctggcaagg

SEQ ID NO: 93583 - DNA, 15 bp, Homo sapiens
gctttggctggcaag

SEQ ID NO: 93584 - DNA, 15 bp, Homo sapiens
tgctttggctggcaa

SEQ ID NO: 93585 - DNA, 15 bp, Homo sapiens
ttgctttggctggca

SEQ ID NO: 93586 - DNA, 15 bp, Homo sapiens
tttgctttggctggc

SEQ ID NO: 93587 - DNA, 15 bp, Homo sapiens
gtttgctttggctgg

SEQ ID NO: 93588 - DNA, 15 bp, Homo sapiens
tgtttgctttggctg

SEQ ID NO: 93589 - DNA, 15 bp, Homo sapiens
ctgtttgctttggct

SEQ ID NO: 93590 - DNA, 15 bp, Homo sapiens
cctgtttgctttggc

SEQ ID NO: 93591 - DNA, 15 bp, Homo sapiens
gcctgtttgctttgg

SEQ ID NO: 93592 - DNA, 15 bp, Homo sapiens
ggcctgtttgctttg

SEQ ID NO: 93593 - DNA, 15 bp, Homo sapiens
gggcctgtttgcttt

SEQ ID NO: 93594 - DNA, 15 bp, Homo sapiens
cgggcctgtttgctt

SEQ ID NO: 93595 - DNA, 15 bp, Homo sapiens
ccgggcctgtttgct

SEQ ID NO: 93596 - DNA, 15 bp, Homo sapiens
gccgggcctgtttgc

SEQ ID NO: 93597 - DNA, 15 bp, Homo sapiens
ggccgggcctgtttg

SEQ ID NO: 93598 - DNA, 15 bp, Homo sapiens
gggccgggcctgttt

SEQ ID NO: 93599 - DNA, 15 bp, Homo sapiens
cgggccgggcctgtt

SEQ ID NO: 93600 - DNA, 15 bp, Homo sapiens
ccgggccgggcctgt

SEQ ID NO: 93601 - DNA, 15 bp, Homo sapiens
gccgggccgggcctg

SEQ ID NO: 93602 - DNA, 15 bp, Homo sapiens
tgccgggccgggcct

SEQ ID NO: 93603 - DNA, 15 bp, Homo sapiens
gtgccgggccgggcc

SEQ ID NO: 93604 - DNA, 15 bp, Homo sapiens
agtgccgggccgggc

SEQ ID NO: 93605 - DNA, 15 bp, Homo sapiens
cagtgccgggccggg

SEQ ID NO: 93606 - DNA, 15 bp, Homo sapiens
ccagtgccgggccgg

SEQ ID NO: 93607 - DNA, 15 bp, Homo sapiens
cccagtgccgggccg

SEQ ID NO: 93608 - DNA, 15 bp, Homo sapiens
ccccagtgccgggcc

SEQ ID NO: 93609 - DNA, 15 bp, Homo sapiens
cccccagtgccgggc

SEQ ID NO: 93610 - DNA, 15 bp, Homo sapiens
acccccagtgccggg

SEQ ID NO: 93611 - DNA, 15 bp, Homo sapiens
aacccccagtgccgg

SEQ ID NO: 93612 - DNA, 15 bp, Homo sapiens
gaacccccagtgccg

SEQ ID NO: 93613 - DNA, 15 bp, Homo sapiens
ggaacccccagtgcc

SEQ ID NO: 93614 - DNA, 15 bp, Homo sapiens
aggaacccccagtgc

SEQ ID NO: 93615 - DNA, 15 bp, Homo sapiens
aaggaacccccagtg

SEQ ID NO: 93616 - DNA, 15 bp, Homo sapiens
gaaggaacccccagt

SEQ ID NO: 93617 - DNA, 15 bp, Homo sapiens
agaaggaacccccag

SEQ ID NO: 93618 - DNA, 15 bp, Homo sapiens
gagaaggaaccccca

SEQ ID NO: 93619 - DNA, 15 bp, Homo sapiens
cgagaaggaaccccc

SEQ ID NO: 93620 - DNA, 15 bp, Homo sapiens
tcgagaaggaacccc

SEQ ID NO: 93621 - DNA, 15 bp, Homo sapiens
ttcgagaaggaaccc

SEQ ID NO: 93622 - DNA, 15 bp, Homo sapiens
gttcgagaaggaacc

SEQ ID NO: 93623 - DNA, 15 bp, Homo sapiens
ggttcgagaaggaac

SEQ ID NO: 93624 - DNA, 15 bp, Homo sapiens
tggttcgagaaggaa

SEQ ID NO: 93625 - DNA, 15 bp, Homo sapiens
ctggttcgagaagga

SEQ ID NO: 93626 - DNA, 15 bp, Homo sapiens
cctggttcgagaagg

SEQ ID NO: 93627 - DNA, 15 bp, Homo sapiens
tcctggttcgagaag

SEQ ID NO: 93628 - DNA, 15 bp, Homo sapiens
ctcctggttcgagaa

SEQ ID NO: 93629 - DNA, 15 bp, Homo sapiens
actcctggttcgaga

SEQ ID NO: 93630 - DNA, 15 bp, Homo sapiens
aactcctggttcgag

SEQ ID NO: 93631 - DNA, 15 bp, Homo sapiens
gaactcctggttcga

SEQ ID NO: 93632 - DNA, 15 bp, Homo sapiens
tgaactcctggttcg

SEQ ID NO: 93633 - DNA, 15 bp, Homo sapiens
ctgaactcctggttc

SEQ ID NO: 93634 - DNA, 15 bp, Homo sapiens
gctgaactcctggtt

SEQ ID NO: 93635 - DNA, 15 bp, Homo sapiens
ggctgaactcctggt

SEQ ID NO: 93636 - DNA, 15 bp, Homo sapiens
aggctgaactcctgg

SEQ ID NO: 93637 - DNA, 15 bp, Homo sapiens
gaggctgaactcctg

SEQ ID NO: 93638 - DNA, 15 bp, Homo sapiens
ggaggctgaactcct

SEQ ID NO: 93639 - DNA, 15 bp, Homo sapiens
gggaggctgaactcc

SEQ ID NO: 93640 - DNA, 15 bp, Homo sapiens
ggggaggctgaactc

SEQ ID NO: 93641 - DNA, 15 bp, Homo sapiens
aggggaggctgaact

SEQ ID NO: 93642 - DNA, 15 bp, Homo sapiens
caggggaggctgaac

SEQ ID NO: 93643 - DNA, 15 bp, Homo sapiens
tcaggggaggctgaa

SEQ ID NO: 93644 - DNA, 15 bp, Homo sapiens
gtcaggggaggctga

SEQ ID NO: 93645 - DNA, 15 bp, Homo sapiens
ggtcaggggaggctg

SEQ ID NO: 93646 - DNA, 15 bp, Homo sapiens
gggtcaggggaggct

SEQ ID NO: 93647 - DNA, 15 bp, Homo sapiens
cgggtcaggggaggc

SEQ ID NO: 93648 - DNA, 15 bp, Homo sapiens
gcgggtcaggggagg

SEQ ID NO: 93649 - DNA, 15 bp, Homo sapiens
tgcgggtcaggggag

SEQ ID NO: 93650 - DNA, 15 bp, Homo sapiens
ctgcgggtcagggga

SEQ ID NO: 93651 - DNA, 15 bp, Homo sapiens
tctgcgggtcagggg

SEQ ID NO: 93652 - DNA, 15 bp, Homo sapiens
ttctgcgggtcaggg

SEQ ID NO: 93653 - DNA, 15 bp, Homo sapiens
attctgcgggtcagg

SEQ ID NO: 93654 - DNA, 15 bp, Homo sapiens
gattctgcgggtcag

SEQ ID NO: 93655 - DNA, 15 bp, Homo sapiens
agattctgcgggtca

SEQ ID NO: 93656 - DNA, 15 bp, Homo sapiens
aagattctgcgggtc

SEQ ID NO: 93657 - DNA, 15 bp, Homo sapiens
gaagattctgcgggt

SEQ ID NO: 93658 - DNA, 15 bp, Homo sapiens
agaagattctgcggg

SEQ ID NO: 93659 - DNA, 15 bp, Homo sapiens
cagaagattctgcgg

SEQ ID NO: 93660 - DNA, 15 bp, Homo sapiens
tcagaagattctgcg

SEQ ID NO: 93661 - DNA, 15 bp, Homo sapiens
atcagaagattctgc

SEQ ID NO: 93662 - DNA, 15 bp, Homo sapiens
gatcagaagattctg

SEQ ID NO: 93663 - DNA, 15 bp, Homo sapiens
ggatcagaagattct

SEQ ID NO: 93664 - DNA, 15 bp, Homo sapiens
gggatcagaagattc

SEQ ID NO: 93665 - DNA, 15 bp, Homo sapiens
tgggatcagaagatt

SEQ ID NO: 93666 - DNA, 15 bp, Homo sapiens
gtgggatcagaagat

SEQ ID NO: 93667 - DNA, 15 bp, Homo sapiens
ggtgggatcagaaga

SEQ ID NO: 93668 - DNA, 15 bp, Homo sapiens
gggtgggatcagaag

SEQ ID NO: 93669 - DNA, 15 bp, Homo sapiens
cgggtgggatcagaa

SEQ ID NO: 93670 - DNA, 15 bp, Homo sapiens
gcgggtgggatcaga

SEQ ID NO: 93671 - DNA, 15 bp, Homo sapiens
agcgggtgggatcag

SEQ ID NO: 93672 - DNA, 15 bp, Homo sapiens
gagcgggtgggatca

SEQ ID NO: 93673 - DNA, 15 bp, Homo sapiens
ggagcgggtgggatc

SEQ ID NO: 93674 - DNA, 15 bp, Homo sapiens
tggagcgggtgggat

SEQ ID NO: 93675 - DNA, 15 bp, Homo sapiens
ctggagcgggtggga

SEQ ID NO: 93676 - DNA, 15 bp, Homo sapiens
cctggagcgggtggg

SEQ ID NO: 93677 - DNA, 15 bp, Homo sapiens
tcctggagcgggtgg

SEQ ID NO: 93678 - DNA, 15 bp, Homo sapiens
ctcctggagcgggtg

SEQ ID NO: 93679 - DNA, 15 bp, Homo sapiens
gctcctggagcgggt

SEQ ID NO: 93680 - DNA, 15 bp, Homo sapiens
ggctcctggagcggg

SEQ ID NO: 93681 - DNA, 15 bp, Homo sapiens
tggctcctggagcgg

SEQ ID NO: 93682 - DNA, 15 bp, Homo sapiens
ctggctcctggagcg

SEQ ID NO: 93683 - DNA, 15 bp, Homo sapiens
cctggctcctggagc

SEQ ID NO: 93684 - DNA, 15 bp, Homo sapiens
tcctggctcctggag

SEQ ID NO: 93685 - DNA, 15 bp, Homo sapiens
ttcctggctcctgga

SEQ ID NO: 93686 - DNA, 15 bp, Homo sapiens
attcctggctcctgg

SEQ ID NO: 93687 - DNA, 15 bp, Homo sapiens
cattcctggctcctg

SEQ ID NO: 93688 - DNA, 15 bp, Homo sapiens
tcattcctggctcct

SEQ ID NO: 93689 - DNA, 15 bp, Homo sapiens
ctcattcctggctcc

SEQ ID NO: 93690 - DNA, 15 bp, Homo sapiens
actcattcctggctc

SEQ ID NO: 93691 - DNA, 15 bp, Homo sapiens
gactcattcctggct

SEQ ID NO: 93692 - DNA, 15 bp, Homo sapiens
ggactcattcctggc

SEQ ID NO: 93693 - DNA, 15 bp, Homo sapiens
gggactcattcctgg

SEQ ID NO: 93694 - DNA, 15 bp, Homo sapiens
tgggactcattcctg

SEQ ID NO: 93695 - DNA, 15 bp, Homo sapiens
ctgggactcattcct

SEQ ID NO: 93696 - DNA, 15 bp, Homo sapiens
actgggactcattcc

SEQ ID NO: 93697 - DNA, 15 bp, Homo sapiens
gactgggactcattc

SEQ ID NO: 93698 - DNA, 15 bp, Homo sapiens
agactgggactcatt

SEQ ID NO: 93699 - DNA, 15 bp, Homo sapiens
gagactgggactcat

SEQ ID NO: 93700 - DNA, 15 bp, Homo sapiens
agagactgggactca

SEQ ID NO: 93701 - DNA, 15 bp, Homo sapiens
gagagactgggactc

SEQ ID NO: 93702 - DNA, 15 bp, Homo sapiens
ggagagactgggact

SEQ ID NO: 93703 - DNA, 15 bp, Homo sapiens
gggagagactgggac

SEQ ID NO: 93704 - DNA, 15 bp, Homo sapiens
tgggagagactggga

SEQ ID NO: 93705 - DNA, 15 bp, Homo sapiens
ctgggagagactggg

SEQ ID NO: 93706 - DNA, 15 bp, Homo sapiens
actgggagagactgg

SEQ ID NO: 93707 - DNA, 15 bp, Homo sapiens
aactgggagagactg

SEQ ID NO: 93708 - DNA, 15 bp, Homo sapiens
gaactgggagagact

SEQ ID NO: 93709 - DNA, 15 bp, Homo sapiens
agaactgggagagac

SEQ ID NO: 93710 - DNA, 15 bp, Homo sapiens
gagaactgggagaga

SEQ ID NO: 93711 - DNA, 15 bp, Homo sapiens
tgagaactgggagag

SEQ ID NO: 93712 - DNA, 15 bp, Homo sapiens
gtgagaactgggaga

SEQ ID NO: 93713 - DNA, 15 bp, Homo sapiens
agtgagaactgggag

SEQ ID NO: 93714 - DNA, 15 bp, Homo sapiens
cagtgagaactggga

SEQ ID NO: 93715 - DNA, 15 bp, Homo sapiens
acagtgagaactggg

SEQ ID NO: 93716 - DNA, 15 bp, Homo sapiens
cacagtgagaactgg

SEQ ID NO: 93717 - DNA, 15 bp, Homo sapiens
acacagtgagaactg

SEQ ID NO: 93718 - DNA, 15 bp, Homo sapiens
cacacagtgagaact

SEQ ID NO: 93719 - DNA, 15 bp, Homo sapiens
ccacacagtgagaac

SEQ ID NO: 93720 - DNA, 15 bp, Homo sapiens
accacacagtgagaa

SEQ ID NO: 93721 - DNA, 15 bp, Homo sapiens
aaccacacagtgaga

SEQ ID NO: 93722 - DNA, 15 bp, Homo sapiens
aaaccacacagtgag

SEQ ID NO: 93723 - DNA, 15 bp, Homo sapiens
aaaaccacacagtga

SEQ ID NO: 93724 - DNA, 15 bp, Homo sapiens
caaaaccacacagtg

SEQ ID NO: 93725 - DNA, 15 bp, Homo sapiens
gcaaaaccacacagt

SEQ ID NO: 93726 - DNA, 15 bp, Homo sapiens
ggcaaaaccacacag

SEQ ID NO: 93727 - DNA, 15 bp, Homo sapiens
tggcaaaaccacaca

SEQ ID NO: 93728 - DNA, 15 bp, Homo sapiens
atggcaaaaccacac

SEQ ID NO: 93729 - DNA, 15 bp, Homo sapiens
aatggcaaaaccaca

SEQ ID NO: 93730 - DNA, 15 bp, Homo sapiens
gaatggcaaaaccac

SEQ ID NO: 93731 - DNA, 15 bp, Homo sapiens
cgaatggcaaaacca

SEQ ID NO: 93732 - DNA, 15 bp, Homo sapiens
acgaatggcaaaacc

SEQ ID NO: 93733 - DNA, 15 bp, Homo sapiens
gacgaatggcaaaac

SEQ ID NO: 93734 - DNA, 15 bp, Homo sapiens
agacgaatggcaaaa

SEQ ID NO: 93735 - DNA, 15 bp, Homo sapiens
aagacgaatggcaaa

SEQ ID NO: 93736 - DNA, 15 bp, Homo sapiens
caagacgaatggcaa

SEQ ID NO: 93737 - DNA, 15 bp, Homo sapiens
gcaagacgaatggca

SEQ ID NO: 93738 - DNA, 15 bp, Homo sapiens
agcaagacgaatggc

SEQ ID NO: 93739 - DNA, 15 bp, Homo sapiens
cagcaagacgaatgg

SEQ ID NO: 93740 - DNA, 15 bp, Homo sapiens
gcagcaagacgaatg

SEQ ID NO: 93741 - DNA, 15 bp, Homo sapiens
agcagcaagacgaat

SEQ ID NO: 93742 - DNA, 15 bp, Homo sapiens
cagcagcaagacgaa

SEQ ID NO: 93743 - DNA, 15 bp, Homo sapiens
tcagcagcaagacga

SEQ ID NO: 93744 - DNA, 15 bp, Homo sapiens
ttcagcagcaagacg

SEQ ID NO: 93745 - DNA, 15 bp, Homo sapiens
gttcagcagcaagac

SEQ ID NO: 93746 - DNA, 15 bp, Homo sapiens
ggttcagcagcaaga

SEQ ID NO: 93747 - DNA, 15 bp, Homo sapiens
tggttcagcagcaag

SEQ ID NO: 93748 - DNA, 15 bp, Homo sapiens
gtggttcagcagcaa

SEQ ID NO: 93749 - DNA, 15 bp, Homo sapiens
cgtggttcagcagca

SEQ ID NO: 93750 - DNA, 15 bp, Homo sapiens
ccgtggttcagcagc

SEQ ID NO: 93751 - DNA, 15 bp, Homo sapiens
cccgtggttcagcag

SEQ ID NO: 93752 - DNA, 15 bp, Homo sapiens
acccgtggttcagca

SEQ ID NO: 93753 - DNA, 15 bp, Homo sapiens
aacccgtggttcagc

SEQ ID NO: 93754 - DNA, 15 bp, Homo sapiens
aaacccgtggttcag

SEQ ID NO: 93755 - DNA, 15 bp, Homo sapiens
gaaacccgtggttca

SEQ ID NO: 93756 - DNA, 15 bp, Homo sapiens
agaaacccgtggttc

SEQ ID NO: 93757 - DNA, 15 bp, Homo sapiens
gagaaacccgtggtt

SEQ ID NO: 93758 - DNA, 15 bp, Homo sapiens
ggagaaacccgtggt

SEQ ID NO: 93759 - DNA, 15 bp, Homo sapiens
aggagaaacccgtgg

SEQ ID NO: 93760 - DNA, 15 bp, Homo sapiens
gaggagaaacccgtg

SEQ ID NO: 93761 - DNA, 15 bp, Homo sapiens
agaggagaaacccgt

SEQ ID NO: 93762 - DNA, 15 bp, Homo sapiens
cagaggagaaacccg

SEQ ID NO: 93763 - DNA, 15 bp, Homo sapiens
tcagaggagaaaccc

SEQ ID NO: 93764 - DNA, 15 bp, Homo sapiens
ttcagaggagaaacc

SEQ ID NO: 93765 - DNA, 15 bp, Homo sapiens
tttcagaggagaaac

SEQ ID NO: 93766 - DNA, 15 bp, Homo sapiens
gtttcagaggagaaa

SEQ ID NO: 93767 - DNA, 15 bp, Homo sapiens
tgtttcagaggagaa

SEQ ID NO: 93768 - DNA, 15 bp, Homo sapiens
atgtttcagaggaga

SEQ ID NO: 93769 - DNA, 15 bp, Homo sapiens
gatgtttcagaggag

SEQ ID NO: 93770 - DNA, 15 bp, Homo sapiens
agatgtttcagagga

SEQ ID NO: 93771 - DNA, 15 bp, Homo sapiens
cagatgtttcagagg

SEQ ID NO: 93772 - DNA, 15 bp, Homo sapiens
ccagatgtttcagag

SEQ ID NO: 93773 - DNA, 15 bp, Homo sapiens
cccagatgtttcaga

SEQ ID NO: 93774 - DNA, 15 bp, Homo sapiens
tcccagatgtttcag

SEQ ID NO: 93775 - DNA, 15 bp, Homo sapiens
atcccagatgtttca

SEQ ID NO: 93776 - DNA, 15 bp, Homo sapiens
aatcccagatgtttc

SEQ ID NO: 93777 - DNA, 15 bp, Homo sapiens
aaatcccagatgttt

SEQ ID NO: 93778 - DNA, 15 bp, Homo sapiens
taaatcccagatgtt

SEQ ID NO: 93779 - DNA, 15 bp, Homo sapiens
ataaatcccagatgt

SEQ ID NO: 93780 - DNA, 15 bp, Homo sapiens
tataaatcccagatg

SEQ ID NO: 93781 - DNA, 15 bp, Homo sapiens
ttataaatcccagat

SEQ ID NO: 93782 - DNA, 15 bp, Homo sapiens
gttataaatcccaga

SEQ ID NO: 93783 - DNA, 15 bp, Homo sapiens
tgttataaatcccag

SEQ ID NO: 93784 - DNA, 15 bp, Homo sapiens
ctgttataaatccca

SEQ ID NO: 93785 - DNA, 15 bp, Homo sapiens
cctgttataaatccc

SEQ ID NO: 93786 - DNA, 15 bp, Homo sapiens
ccctgttataaatcc

SEQ ID NO: 93787 - DNA, 15 bp, Homo sapiens
gccctgttataaatc

SEQ ID NO: 93788 - DNA, 15 bp, Homo sapiens
agccctgttataaat

SEQ ID NO: 93789 - DNA, 15 bp, Homo sapiens
aagccctgttataaa

SEQ ID NO: 93790 - DNA, 15 bp, Homo sapiens
taagccctgttataa

SEQ ID NO: 93791 - DNA, 15 bp, Homo sapiens
ctaagccctgttata

SEQ ID NO: 93792 - DNA, 15 bp, Homo sapiens
cctaagccctgttat

SEQ ID NO: 93793 - DNA, 15 bp, Homo sapiens
tcctaagccctgtta

SEQ ID NO: 93794 - DNA, 15 bp, Homo sapiens
ttcctaagccctgtt

SEQ ID NO: 93795 - DNA, 15 bp, Homo sapiens
tttcctaagccctgt

SEQ ID NO: 93796 - DNA, 15 bp, Homo sapiens
ctttcctaagccctg

SEQ ID NO: 93797 - DNA, 15 bp, Homo sapiens
actttcctaagccct

SEQ ID NO: 93798 - DNA, 15 bp, Homo sapiens
cactttcctaagccc

SEQ ID NO: 93799 - DNA, 15 bp, Homo sapiens
tcactttcctaagcc

SEQ ID NO: 93800 - DNA, 15 bp, Homo sapiens
gtcactttcctaagc

SEQ ID NO: 93801 - DNA, 15 bp, Homo sapiens
tgtcactttcctaag

SEQ ID NO: 93802 - DNA, 15 bp, Homo sapiens
ctgtcactttcctaa

SEQ ID NO: 93803 - DNA, 15 bp, Homo sapiens
gctgtcactttccta

SEQ ID NO: 93804 - DNA, 15 bp, Homo sapiens
cgctgtcactttcct

SEQ ID NO: 93805 - DNA, 15 bp, Homo sapiens
acgctgtcactttcc

SEQ ID NO: 93806 - DNA, 15 bp, Homo sapiens
gacgctgtcactttc

SEQ ID NO: 93807 - DNA, 15 bp, Homo sapiens
agacgctgtcacttt

SEQ ID NO: 93808 - DNA, 15 bp, Homo sapiens
cagacgctgtcactt

SEQ ID NO: 93809 - DNA, 15 bp, Homo sapiens
tcagacgctgtcact

SEQ ID NO: 93810 - DNA, 15 bp, Homo sapiens
ctcagacgctgtcac

SEQ ID NO: 93811 - DNA, 15 bp, Homo sapiens
gctcagacgctgtca

SEQ ID NO: 93812 - DNA, 15 bp, Homo sapiens
cgctcagacgctgtc

SEQ ID NO: 93813 - DNA, 15 bp, Homo sapiens
acgctcagacgctgt

SEQ ID NO: 93814 - DNA, 15 bp, Homo sapiens
aacgctcagacgctg

SEQ ID NO: 93815 - DNA, 15 bp, Homo sapiens
gaacgctcagacgct

SEQ ID NO: 93816 - DNA, 15 bp, Homo sapiens
tgaacgctcagacgc

SEQ ID NO: 93817 - DNA, 15 bp, Homo sapiens
gtgaacgctcagacg

SEQ ID NO: 93818 - DNA, 15 bp, Homo sapiens
agtgaacgctcagac

SEQ ID NO: 93819 - DNA, 15 bp, Homo sapiens
cagtgaacgctcaga

SEQ ID NO: 93820 - DNA, 15 bp, Homo sapiens
acagtgaacgctcag

SEQ ID NO: 93821 - DNA, 15 bp, Homo sapiens
cacagtgaacgctca

SEQ ID NO: 93822 - DNA, 15 bp, Homo sapiens
ccacagtgaacgctc

SEQ ID NO: 93823 - DNA, 15 bp, Homo sapiens
gccacagtgaacgct

SEQ ID NO: 93824 - DNA, 15 bp, Homo sapiens
ggccacagtgaacgc

SEQ ID NO: 93825 - DNA, 15 bp, Homo sapiens
aggccacagtgaacg

SEQ ID NO: 93826 - DNA, 15 bp, Homo sapiens
caggccacagtgaac

SEQ ID NO: 93827 - DNA, 15 bp, Homo sapiens
acaggccacagtgaa

SEQ ID NO: 93828 - DNA, 15 bp, Homo sapiens
gacaggccacagtga

SEQ ID NO: 93829 - DNA, 15 bp, Homo sapiens
ggacaggccacagtg

SEQ ID NO: 93830 - DNA, 15 bp, Homo sapiens
tggacaggccacagt

SEQ ID NO: 93831 - DNA, 15 bp, Homo sapiens
atggacaggccacag

SEQ ID NO: 93832 - DNA, 15 bp, Homo sapiens
aatggacaggccaca

SEQ ID NO: 93833 - DNA, 15 bp, Homo sapiens
caatggacaggccac

SEQ ID NO: 93834 - DNA, 15 bp, Homo sapiens
cccgactgcgcttct

SEQ ID NO: 93835 - DNA, 15 bp, Homo sapiens
ccccgactgcgcttc

SEQ ID NO: 93836 - DNA, 15 bp, Homo sapiens
cccccgactgcgctt

SEQ ID NO: 93837 - DNA, 15 bp, Homo sapiens
gcccccgactgcgct

SEQ ID NO: 93838 - DNA, 15 bp, Homo sapiens
tgcccccgactgcgc

SEQ ID NO: 93839 - DNA, 15 bp, Homo sapiens
gtgcccccgactgcg

SEQ ID NO: 93840 - DNA, 15 bp, Homo sapiens
cgtgcccccgactgc

SEQ ID NO: 93841 - DNA, 15 bp, Homo sapiens
ccgtgcccccgactg

SEQ ID NO: 93842 - DNA, 15 bp, Homo sapiens
cccgtgcccccgact

SEQ ID NO: 93843 - DNA, 15 bp, Homo sapiens
ccccgtgcccccgac

SEQ ID NO: 93844 - DNA, 15 bp, Homo sapiens
tccccgtgcccccga

SEQ ID NO: 93845 - DNA, 15 bp, Homo sapiens
atccccgtgcccccg

SEQ ID NO: 93846 - DNA, 15 bp, Homo sapiens
catccccgtgccccc

SEQ ID NO: 93847 - DNA, 15 bp, Homo sapiens
tcatccccgtgcccc

SEQ ID NO: 93848 - DNA, 15 bp, Homo sapiens
ctcatccccgtgccc

SEQ ID NO: 93849 - DNA, 15 bp, Homo sapiens
gctcatccccgtgcc

SEQ ID NO: 93850 - DNA, 15 bp, Homo sapiens
agctcatccccgtgc

SEQ ID NO: 93851 - DNA, 15 bp, Homo sapiens
gagctcatccccgtg

SEQ ID NO: 93852 - DNA, 15 bp, Homo sapiens
tgagctcatccccgt

SEQ ID NO: 93853 - DNA, 15 bp, Homo sapiens
ctgagctcatccccg

SEQ ID NO: 93854 - DNA, 15 bp, Homo sapiens
cctgagctcatcccc

SEQ ID NO: 93855 - DNA, 15 bp, Homo sapiens
ccctgagctcatccc

SEQ ID NO: 93856 - DNA, 15 bp, Homo sapiens
cccctgagctcatcc

SEQ ID NO: 93857 - DNA, 15 bp, Homo sapiens
gcccctgagctcatc

SEQ ID NO: 93858 - DNA, 15 bp, Homo sapiens
ggcccctgagctcat

SEQ ID NO: 93859 - DNA, 15 bp, Homo sapiens
aggcccctgagctca

SEQ ID NO: 93860 - DNA, 15 bp, Homo sapiens
gaggcccctgagctc

SEQ ID NO: 93861 - DNA, 15 bp, Homo sapiens
agaggcccctgagct

SEQ ID NO: 93862 - DNA, 15 bp, Homo sapiens
tagaggcccctgagc

SEQ ID NO: 93863 - DNA, 15 bp, Homo sapiens
ctagaggcccctgag

SEQ ID NO: 93864 - DNA, 15 bp, Homo sapiens
tctagaggcccctga

SEQ ID NO: 93865 - DNA, 15 bp, Homo sapiens
ttctagaggcccctg

SEQ ID NO: 93866 - DNA, 15 bp, Homo sapiens
tttctagaggcccct

SEQ ID NO: 93867 - DNA, 15 bp, Homo sapiens
ctttctagaggcccc

SEQ ID NO: 93868 - DNA, 15 bp, Homo sapiens
tctttctagaggccc

SEQ ID NO: 93869 - DNA, 15 bp, Homo sapiens
ctctttctagaggcc

SEQ ID NO: 93870 - DNA, 15 bp, Homo sapiens
gctctttctagaggc

SEQ ID NO: 93871 - DNA, 15 bp, Homo sapiens
agctctttctagagg

SEQ ID NO: 93872 - DNA, 15 bp, Homo sapiens
cagctctttctagag

SEQ ID NO: 93873 - DNA, 15 bp, Homo sapiens
ccagctctttctaga

SEQ ID NO: 93874 - DNA, 15 bp, Homo sapiens
cccagctctttctag

SEQ ID NO: 93875 - DNA, 15 bp, Homo sapiens
tcccagctctttcta

SEQ ID NO: 93876 - DNA, 15 bp, Homo sapiens
gtcccagctctttct

SEQ ID NO: 93877 - DNA, 15 bp, Homo sapiens
ggtcccagctctttc

SEQ ID NO: 93878 - DNA, 15 bp, Homo sapiens
gggtcccagctcttt

SEQ ID NO: 93879 - DNA, 15 bp, Homo sapiens
agggtcccagctctt

SEQ ID NO: 93880 - DNA, 15 bp, Homo sapiens
cagggtcccagctct

SEQ ID NO: 93881 - DNA, 15 bp, Homo sapiens
ccagggtcccagctc

SEQ ID NO: 93882 - DNA, 15 bp, Homo sapiens
cccagggtcccagct

SEQ ID NO: 93883 - DNA, 15 bp, Homo sapiens
tcccagggtcccagc

SEQ ID NO: 93884 - DNA, 15 bp, Homo sapiens
ttcccagggtcccag

SEQ ID NO: 93885 - DNA, 15 bp, Homo sapiens
gttcccagggtccca

SEQ ID NO: 93886 - DNA, 15 bp, Homo sapiens
ggttcccagggtccc

SEQ ID NO: 93887 - DNA, 15 bp, Homo sapiens
gggttcccagggtcc

SEQ ID NO: 93888 - DNA, 15 bp, Homo sapiens
ggggttcccagggtc

SEQ ID NO: 93889 - DNA, 15 bp, Homo sapiens
aggggttcccagggt

SEQ ID NO: 93890 - DNA, 15 bp, Homo sapiens
caggggttcccaggg

SEQ ID NO: 93891 - DNA, 15 bp, Homo sapiens
ccaggggttcccagg

SEQ ID NO: 93892 - DNA, 15 bp, Homo sapiens
gccaggggttcccag

SEQ ID NO: 93893 - DNA, 15 bp, Homo sapiens
ggccaggggttccca

SEQ ID NO: 93894 - DNA, 15 bp, Homo sapiens
aggccaggggttccc

SEQ ID NO: 93895 - DNA, 15 bp, Homo sapiens
gaggccaggggttcc

SEQ ID NO: 93896 - DNA, 15 bp, Homo sapiens
ggaggccaggggttc

SEQ ID NO: 93897 - DNA, 15 bp, Homo sapiens
tggaggccaggggtt

SEQ ID NO: 93898 - DNA, 15 bp, Homo sapiens
ctggaggccaggggt

SEQ ID NO: 93899 - DNA, 15 bp, Homo sapiens
cctggaggccagggg

SEQ ID NO: 93900 - DNA, 15 bp, Homo sapiens
acctggaggccaggg

SEQ ID NO: 93901 - DNA, 15 bp, Homo sapiens
tacctggaggccagg

SEQ ID NO: 93902 - DNA, 15 bp, Homo sapiens
ctacctggaggccag

SEQ ID NO: 93903 - DNA, 15 bp, Homo sapiens
actacctggaggcca

SEQ ID NO: 93904 - DNA, 15 bp, Homo sapiens
gactacctggaggcc

SEQ ID NO: 93905 - DNA, 15 bp, Homo sapiens
agactacctggaggc

SEQ ID NO: 93906 - DNA, 15 bp, Homo sapiens
gagactacctggagg

SEQ ID NO: 93907 - DNA, 15 bp, Homo sapiens
tgagactacctggag

SEQ ID NO: 93908 - DNA, 15 bp, Homo sapiens
ctgagactacctgga

SEQ ID NO: 93909 - DNA, 15 bp, Homo sapiens
cctgagactacctgg

SEQ ID NO: 93910 - DNA, 15 bp, Homo sapiens
tcctgagactacctg

SEQ ID NO: 93911 - DNA, 15 bp, Homo sapiens
ctcctgagactacct

SEQ ID NO: 93912 - DNA, 15 bp, Homo sapiens
tctcctgagactacc

SEQ ID NO: 93913 - DNA, 15 bp, Homo sapiens
ctctcctgagactac

SEQ ID NO: 93914 - DNA, 15 bp, Homo sapiens
gctctcctgagacta

SEQ ID NO: 93915 - DNA, 15 bp, Homo sapiens
agctctcctgagact

SEQ ID NO: 93916 - DNA, 15 bp, Homo sapiens
tagctctcctgagac

SEQ ID NO: 93917 - DNA, 15 bp, Homo sapiens
gtagctctcctgaga

SEQ ID NO: 93918 - DNA, 15 bp, Homo sapiens
agtagctctcctgag

SEQ ID NO: 93919 - DNA, 15 bp, Homo sapiens
gagtagctctcctga

SEQ ID NO: 93920 - DNA, 15 bp, Homo sapiens
cgagtagctctcctg

SEQ ID NO: 93921 - DNA, 15 bp, Homo sapiens
ccgagtagctctcct

SEQ ID NO: 93922 - DNA, 15 bp, Homo sapiens
cccgagtagctctcc

SEQ ID NO: 93923 - DNA, 15 bp, Homo sapiens
ccccgagtagctctc

SEQ ID NO: 93924 - DNA, 15 bp, Homo sapiens
accccgagtagctct

SEQ ID NO: 93925 - DNA, 15 bp, Homo sapiens
gaccccgagtagctc

SEQ ID NO: 93926 - DNA, 15 bp, Homo sapiens
cgaccccgagtagct

SEQ ID NO: 93927 - DNA, 15 bp, Homo sapiens
ccgaccccgagtagc

SEQ ID NO: 93928 - DNA, 15 bp, Homo sapiens
cccgaccccgagtag

SEQ ID NO: 93929 - DNA, 15 bp, Homo sapiens
gcccgaccccgagta

SEQ ID NO: 93930 - DNA, 15 bp, Homo sapiens
agcccgaccccgagt

SEQ ID NO: 93931 - DNA, 15 bp, Homo sapiens
aagcccgaccccgag

SEQ ID NO: 93932 - DNA, 15 bp, Homo sapiens
caagcccgaccccga

SEQ ID NO: 93933 - DNA, 15 bp, Homo sapiens
ccaagcccgaccccg

SEQ ID NO: 93934 - DNA, 15 bp, Homo sapiens
cccaagcccgacccc

SEQ ID NO: 93935 - DNA, 15 bp, Homo sapiens
ccccaagcccgaccc

SEQ ID NO: 93936 - DNA, 15 bp, Homo sapiens
tccccaagcccgacc

SEQ ID NO: 93937 - DNA, 15 bp, Homo sapiens
ctccccaagcccgac

SEQ ID NO: 93938 - DNA, 15 bp, Homo sapiens
tctccccaagcccga

SEQ ID NO: 93939 - DNA, 15 bp, Homo sapiens
ctctccccaagcccg

SEQ ID NO: 93940 - DNA, 15 bp, Homo sapiens
cctctccccaagccc

SEQ ID NO: 93941 - DNA, 15 bp, Homo sapiens
tcctctccccaagcc

SEQ ID NO: 93942 - DNA, 15 bp, Homo sapiens
ctcctctccccaagc

SEQ ID NO: 93943 - DNA, 15 bp, Homo sapiens
cctcctctccccaag

SEQ ID NO: 93944 - DNA, 15 bp, Homo sapiens
tcctcctctccccaa

SEQ ID NO: 93945 - DNA, 15 bp, Homo sapiens
ctcctcctctcccca

SEQ ID NO: 93946 - DNA, 15 bp, Homo sapiens
gctcctcctctcccc

SEQ ID NO: 93947 - DNA, 15 bp, Homo sapiens
cgctcctcctctccc

SEQ ID NO: 93948 - DNA, 15 bp, Homo sapiens
ccgctcctcctctcc

SEQ ID NO: 93949 - DNA, 15 bp, Homo sapiens
cccgctcctcctctc

SEQ ID NO: 93950 - DNA, 15 bp, Homo sapiens
ccccgctcctcctct

SEQ ID NO: 93951 - DNA, 15 bp, Homo sapiens
cccccgctcctcctc

SEQ ID NO: 93952 - DNA, 15 bp, Homo sapiens
acccccgctcctcct

SEQ ID NO: 93953 - DNA, 15 bp, Homo sapiens
cacccccgctcctcc

SEQ ID NO: 93954 - DNA, 15 bp, Homo sapiens
tcacccccgctcctc

SEQ ID NO: 93955 - DNA, 15 bp, Homo sapiens
ctcacccccgctcct

SEQ ID NO: 93956 - DNA, 15 bp, Homo sapiens
cctcacccccgctcc

SEQ ID NO: 93957 - DNA, 15 bp, Homo sapiens
gcctcacccccgctc

SEQ ID NO: 93958 - DNA, 15 bp, Homo sapiens
tgcctcacccccgct

SEQ ID NO: 93959 - DNA, 15 bp, Homo sapiens
ttgcctcacccccgc

SEQ ID NO: 93960 - DNA, 15 bp, Homo sapiens
cttgcctcacccccg

SEQ ID NO: 93961 - DNA, 15 bp, Homo sapiens
gcttgcctcaccccc

SEQ ID NO: 93962 - DNA, 15 bp, Homo sapiens
tgcttgcctcacccc

SEQ ID NO: 93963 - DNA, 15 bp, Homo sapiens
ctgcttgcctcaccc

SEQ ID NO: 93964 - DNA, 15 bp, Homo sapiens
gctgcttgcctcacc

SEQ ID NO: 93965 - DNA, 15 bp, Homo sapiens
tgctgcttgcctcac

SEQ ID NO: 93966 - DNA, 15 bp, Homo sapiens
ctgctgcttgcctca

SEQ ID NO: 93967 - DNA, 15 bp, Homo sapiens
cctgctgcttgcctc

SEQ ID NO: 93968 - DNA, 15 bp, Homo sapiens
ccctgctgcttgcct

SEQ ID NO: 93969 - DNA, 15 bp, Homo sapiens
cccctgctgcttgcc

SEQ ID NO: 93970 - DNA, 15 bp, Homo sapiens
tcccctgctgcttgc

SEQ ID NO: 93971 - DNA, 15 bp, Homo sapiens
gtcccctgctgcttg

SEQ ID NO: 93972 - DNA, 15 bp, Homo sapiens
agtcccctgctgctt

SEQ ID NO: 93973 - DNA, 15 bp, Homo sapiens
cagtcccctgctgct

SEQ ID NO: 93974 - DNA, 15 bp, Homo sapiens
ccagtcccctgctgc

SEQ ID NO: 93975 - DNA, 15 bp, Homo sapiens
tccagtcccctgctg

SEQ ID NO: 93976 - DNA, 15 bp, Homo sapiens
gtccagtcccctgct

SEQ ID NO: 93977 - DNA, 15 bp, Homo sapiens
ggtccagtcccctgc

SEQ ID NO: 93978 - DNA, 15 bp, Homo sapiens
aggtccagtcccctg

SEQ ID NO: 93979 - DNA, 15 bp, Homo sapiens
caggtccagtcccct

SEQ ID NO: 93980 - DNA, 15 bp, Homo sapiens
ccaggtccagtcccc

SEQ ID NO: 93981 - DNA, 15 bp, Homo sapiens
cccaggtccagtccc

SEQ ID NO: 93982 - DNA, 15 bp, Homo sapiens
tcccaggtccagtcc

SEQ ID NO: 93983 - DNA, 15 bp, Homo sapiens
ttcccaggtccagtc

SEQ ID NO: 93984 - DNA, 15 bp, Homo sapiens
cttcccaggtccagt

SEQ ID NO: 93985 - DNA, 15 bp, Homo sapiens
ccttcccaggtccag

SEQ ID NO: 93986 - DNA, 15 bp, Homo sapiens
cccttcccaggtcca

SEQ ID NO: 93987 - DNA, 15 bp, Homo sapiens
gcccttcccaggtcc

SEQ ID NO: 93988 - DNA, 15 bp, Homo sapiens
agcccttcccaggtc

SEQ ID NO: 93989 - DNA, 15 bp, Homo sapiens
cagcccttcccaggt

SEQ ID NO: 93990 - DNA, 15 bp, Homo sapiens
ccagcccttcccagg

SEQ ID NO: 93991 - DNA, 15 bp, Homo sapiens
cccagcccttcccag

SEQ ID NO: 93992 - DNA, 15 bp, Homo sapiens
gcccagcccttccca

SEQ ID NO: 93993 - DNA, 15 bp, Homo sapiens
tgcccagcccttccc

SEQ ID NO: 93994 - DNA, 15 bp, Homo sapiens
ctgcccagcccttcc

SEQ ID NO: 93995 - DNA, 15 bp, Homo sapiens
gctgcccagcccttc

SEQ ID NO: 93996 - DNA, 15 bp, Homo sapiens
tgctgcccagccctt

SEQ ID NO: 93997 - DNA, 15 bp, Homo sapiens
ctgctgcccagccct

SEQ ID NO: 93998 - DNA, 15 bp, Homo sapiens
tctgctgcccagccc

SEQ ID NO: 93999 - DNA, 15 bp, Homo sapiens
ctctgctgcccagcc

SEQ ID NO: 94000 - DNA, 15 bp, Homo sapiens
tctctgctgcccagc

SEQ ID NO: 94001 - DNA, 15 bp, Homo sapiens
gtctctgctgcccag

SEQ ID NO: 94002 - DNA, 15 bp, Homo sapiens
cgtctctgctgccca

SEQ ID NO: 94003 - DNA, 15 bp, Homo sapiens
tcgtctctgctgccc

SEQ ID NO: 94004 - DNA, 15 bp, Homo sapiens
gtcgtctctgctgcc

SEQ ID NO: 94005 - DNA, 15 bp, Homo sapiens
ggtcgtctctgctgc

SEQ ID NO: 94006 - DNA, 15 bp, Homo sapiens
gggtcgtctctgctg

SEQ ID NO: 94007 - DNA, 15 bp, Homo sapiens
cgggtcgtctctgct

SEQ ID NO: 94008 - DNA, 15 bp, Homo sapiens
tcgggtcgtctctgc

SEQ ID NO: 94009 - DNA, 15 bp, Homo sapiens
gtcgggtcgtctctg

SEQ ID NO: 94010 - DNA, 15 bp, Homo sapiens
ggtcgggtcgtctct

SEQ ID NO: 94011 - DNA, 15 bp, Homo sapiens
gggtcgggtcgtctc

SEQ ID NO: 94012 - DNA, 15 bp, Homo sapiens
cgggtcgggtcgtct

SEQ ID NO: 94013 - DNA, 15 bp, Homo sapiens
gcgggtcgggtcgtc

SEQ ID NO: 94014 - DNA, 15 bp, Homo sapiens
agcgggtcgggtcgt

SEQ ID NO: 94015 - DNA, 15 bp, Homo sapiens
tagcgggtcgggtcg

SEQ ID NO: 94016 - DNA, 15 bp, Homo sapiens
ctagcgggtcgggtc

SEQ ID NO: 94017 - DNA, 15 bp, Homo sapiens
tctagcgggtcgggt

SEQ ID NO: 94018 - DNA, 15 bp, Homo sapiens
ttctagcgggtcggg

SEQ ID NO: 94019 - DNA, 15 bp, Homo sapiens
cttctagcgggtcgg

SEQ ID NO: 94020 - DNA, 15 bp, Homo sapiens
ccttctagcgggtcg

SEQ ID NO: 94021 - DNA, 15 bp, Homo sapiens
accttctagcgggtc

SEQ ID NO: 94022 - DNA, 15 bp, Homo sapiens
caccttctagcgggt

SEQ ID NO: 94023 - DNA, 15 bp, Homo sapiens
ccaccttctagcggg

SEQ ID NO: 94024 - DNA, 15 bp, Homo sapiens
cccaccttctagcgg

SEQ ID NO: 94025 - DNA, 15 bp, Homo sapiens
ccccaccttctagcg

SEQ ID NO: 94026 - DNA, 15 bp, Homo sapiens
accccaccttctagc

SEQ ID NO: 94027 - DNA, 15 bp, Homo sapiens
caccccaccttctag

SEQ ID NO: 94028 - DNA, 15 bp, Homo sapiens
ccaccccaccttcta

SEQ ID NO: 94029 - DNA, 15 bp, Homo sapiens
cccaccccaccttct

SEQ ID NO: 94030 - DNA, 15 bp, Homo sapiens
ccccaccccaccttc

SEQ ID NO: 94031 - DNA, 15 bp, Homo sapiens
tccccaccccacctt

SEQ ID NO: 94032 - DNA, 15 bp, Homo sapiens
ctccccaccccacct

SEQ ID NO: 94033 - DNA, 15 bp, Homo sapiens
tctccccaccccacc

SEQ ID NO: 94034 - DNA, 15 bp, Homo sapiens
ctctccccaccccac

SEQ ID NO: 94035 - DNA, 15 bp, Homo sapiens
gctctccccacccca

SEQ ID NO: 94036 - DNA, 15 bp, Homo sapiens
tgctctccccacccc

SEQ ID NO: 94037 - DNA, 15 bp, Homo sapiens
ctgctctccccaccc

SEQ ID NO: 94038 - DNA, 15 bp, Homo sapiens
gctgctctccccacc

SEQ ID NO: 94039 - DNA, 15 bp, Homo sapiens
agctgctctccccac

SEQ ID NO: 94040 - DNA, 15 bp, Homo sapiens
cagctgctctcccca

SEQ ID NO: 94041 - DNA, 15 bp, Homo sapiens
ccagctgctctcccc

SEQ ID NO: 94042 - DNA, 15 bp, Homo sapiens
tccagctgctctccc

SEQ ID NO: 94043 - DNA, 15 bp, Homo sapiens
gtccagctgctctcc

SEQ ID NO: 94044 - DNA, 15 bp, Homo sapiens
agtccagctgctctc

SEQ ID NO: 94045 - DNA, 15 bp, Homo sapiens
cagtccagctgctct

SEQ ID NO: 94046 - DNA, 15 bp, Homo sapiens
ccagtccagctgctc

SEQ ID NO: 94047 - DNA, 15 bp, Homo sapiens
cccagtccagctgct

SEQ ID NO: 94048 - DNA, 15 bp, Homo sapiens
tcccagtccagctgc

SEQ ID NO: 94049 - DNA, 15 bp, Homo sapiens
atcccagtccagctg

SEQ ID NO: 94050 - DNA, 15 bp, Homo sapiens
catcccagtccagct

SEQ ID NO: 94051 - DNA, 15 bp, Homo sapiens
acatcccagtccagc

SEQ ID NO: 94052 - DNA, 15 bp, Homo sapiens
tacatcccagtccag

SEQ ID NO: 94053 - DNA, 15 bp, Homo sapiens
ttacatcccagtcca

SEQ ID NO: 94054 - DNA, 15 bp, Homo sapiens
cttacatcccagtcc

SEQ ID NO: 94055 - DNA, 15 bp, Homo sapiens
gcttacatcccagtc

SEQ ID NO: 94056 - DNA, 15 bp, Homo sapiens
ggcttacatcccagt

SEQ ID NO: 94057 - DNA, 15 bp, Homo sapiens
tggcttacatcccag

SEQ ID NO: 94058 - DNA, 15 bp, Homo sapiens
atggcttacatccca

SEQ ID NO: 94059 - DNA, 15 bp, Homo sapiens
tatggcttacatccc

SEQ ID NO: 94060 - DNA, 15 bp, Homo sapiens
ctatggcttacatcc

SEQ ID NO: 94061 - DNA, 15 bp, Homo sapiens
gctatggcttacatc

SEQ ID NO: 94062 - DNA, 15 bp, Homo sapiens
tgctatggcttacat

SEQ ID NO: 94063 - DNA, 15 bp, Homo sapiens
ctgctatggcttaca

SEQ ID NO: 94064 - DNA, 15 bp, Homo sapiens
cctgctatggcttac

SEQ ID NO: 94065 - DNA, 15 bp, Homo sapiens
tcctgctatggctta

SEQ ID NO: 94066 - DNA, 15 bp, Homo sapiens
gtcctgctatggctt

SEQ ID NO: 94067 - DNA, 15 bp, Homo sapiens
agtcctgctatggct

SEQ ID NO: 94068 - DNA, 15 bp, Homo sapiens
gagtcctgctatggc

SEQ ID NO: 94069 - DNA, 15 bp, Homo sapiens
ggagtcctgctatgg

SEQ ID NO: 94070 - DNA, 15 bp, Homo sapiens
tggagtcctgctatg

SEQ ID NO: 94071 - DNA, 15 bp, Homo sapiens
gtggagtcctgctat

SEQ ID NO: 94072 - DNA, 15 bp, Homo sapiens
cgtggagtcctgcta

SEQ ID NO: 94073 - DNA, 15 bp, Homo sapiens
tcgtggagtcctgct

SEQ ID NO: 94074 - DNA, 15 bp, Homo sapiens
ctcgtggagtcctgc

SEQ ID NO: 94075 - DNA, 15 bp, Homo sapiens
actcgtggagtcctg

SEQ ID NO: 94076 - DNA, 15 bp, Homo sapiens
aactcgtggagtcct

SEQ ID NO: 94077 - DNA, 15 bp, Homo sapiens
caactcgtggagtcc

SEQ ID NO: 94078 - DNA, 15 bp, Homo sapiens
acaactcgtggagtc

SEQ ID NO: 94079 - DNA, 15 bp, Homo sapiens
gacaactcgtggagt

SEQ ID NO: 94080 - DNA, 15 bp, Homo sapiens
tgacaactcgtggag

SEQ ID NO: 94081 - DNA, 15 bp, Homo sapiens
gtgacaactcgtgga

SEQ ID NO: 94082 - DNA, 15 bp, Homo sapiens
agtgacaactcgtgg

SEQ ID NO: 94083 - DNA, 15 bp, Homo sapiens
tagtgacaactcgtg

SEQ ID NO: 94084 - DNA, 15 bp, Homo sapiens
atagtgacaactcgt

SEQ ID NO: 94085 - DNA, 15 bp, Homo sapiens
gatagtgacaactcg

SEQ ID NO: 94086 - DNA, 15 bp, Homo sapiens
tgatagtgacaactc

SEQ ID NO: 94087 - DNA, 15 bp, Homo sapiens
atgatagtgacaact

SEQ ID NO: 94088 - DNA, 15 bp, Homo sapiens
aatgatagtgacaac

SEQ ID NO: 94089 - DNA, 15 bp, Homo sapiens
aaatgatagtgacaa

SEQ ID NO: 94090 - DNA, 15 bp, Homo sapiens
taaatgatagtgaca

SEQ ID NO: 94091 - DNA, 15 bp, Homo sapiens
ataaatgatagtgac

SEQ ID NO: 94092 - DNA, 15 bp, Homo sapiens
gataaatgatagtga

SEQ ID NO: 94093 - DNA, 15 bp, Homo sapiens
cgataaatgatagtg

SEQ ID NO: 94094 - DNA, 15 bp, Homo sapiens
tcgataaatgatagt

SEQ ID NO: 94095 - DNA, 15 bp, Homo sapiens
ctcgataaatgatag

SEQ ID NO: 94096 - DNA, 15 bp, Homo sapiens
gctcgataaatgata

SEQ ID NO: 94097 - DNA, 15 bp, Homo sapiens
tgctcgataaatgat

SEQ ID NO: 94098 - DNA, 15 bp, Homo sapiens
gtgctcgataaatga

SEQ ID NO: 94099 - DNA, 15 bp, Homo sapiens
ggtgctcgataaatg

SEQ ID NO: 94100 - DNA, 15 bp, Homo sapiens
aggtgctcgataaat

SEQ ID NO: 94101 - DNA, 15 bp, Homo sapiens
taggtgctcgataaa

SEQ ID NO: 94102 - DNA, 15 bp, Homo sapiens
gtaggtgctcgataa

SEQ ID NO: 94103 - DNA, 15 bp, Homo sapiens
agtaggtgctcgata

SEQ ID NO: 94104 - DNA, 15 bp, Homo sapiens
cagtaggtgctcgat

SEQ ID NO: 94105 - DNA, 15 bp, Homo sapiens
ccagtaggtgctcga

SEQ ID NO: 94106 - DNA, 15 bp, Homo sapiens
cccagtaggtgctcg

SEQ ID NO: 94107 - DNA, 15 bp, Homo sapiens
acccagtaggtgctc

SEQ ID NO: 94108 - DNA, 15 bp, Homo sapiens
cacccagtaggtgct

SEQ ID NO: 94109 - DNA, 15 bp, Homo sapiens
acacccagtaggtgc

SEQ ID NO: 94110 - DNA, 15 bp, Homo sapiens
gacacccagtaggtg

SEQ ID NO: 94111 - DNA, 15 bp, Homo sapiens
ggacacccagtaggt

SEQ ID NO: 94112 - DNA, 15 bp, Homo sapiens
gggacacccagtagg

SEQ ID NO: 94113 - DNA, 15 bp, Homo sapiens
ggggacacccagtag

SEQ ID NO: 94114 - DNA, 15 bp, Homo sapiens
tggggacacccagta

SEQ ID NO: 94115 - DNA, 15 bp, Homo sapiens
ctggggacacccagt

SEQ ID NO: 94116 - DNA, 15 bp, Homo sapiens
actggggacacccag

SEQ ID NO: 94117 - DNA, 15 bp, Homo sapiens
cactggggacaccca

SEQ ID NO: 94118 - DNA, 15 bp, Homo sapiens
acactggggacaccc

SEQ ID NO: 94119 - DNA, 15 bp, Homo sapiens
gacactggggacacc

SEQ ID NO: 94120 - DNA, 15 bp, Homo sapiens
ggacactggggacac

SEQ ID NO: 94121 - DNA, 15 bp, Homo sapiens
aggacactggggaca

SEQ ID NO: 94122 - DNA, 15 bp, Homo sapiens
gaggacactggggac

SEQ ID NO: 94123 - DNA, 15 bp, Homo sapiens
tgaggacactgggga

SEQ ID NO: 94124 - DNA, 15 bp, Homo sapiens
ctgaggacactgggg

SEQ ID NO: 94125 - DNA, 15 bp, Homo sapiens
tctgaggacactggg

SEQ ID NO: 94126 - DNA, 15 bp, Homo sapiens
atctgaggacactgg

SEQ ID NO: 94127 - DNA, 15 bp, Homo sapiens
gatctgaggacactg

SEQ ID NO: 94128 - DNA, 15 bp, Homo sapiens
agatctgaggacact

SEQ ID NO: 94129 - DNA, 15 bp, Homo sapiens
gagatctgaggacac

SEQ ID NO: 94130 - DNA, 15 bp, Homo sapiens
ggagatctgaggaca

SEQ ID NO: 94131 - DNA, 15 bp, Homo sapiens
tggagatctgaggac

SEQ ID NO: 94132 - DNA, 15 bp, Homo sapiens
atggagatctgagga

SEQ ID NO: 94133 - DNA, 15 bp, Homo sapiens
tatggagatctgagg

SEQ ID NO: 94134 - DNA, 15 bp, Homo sapiens
ttatggagatctgag

SEQ ID NO: 94135 - DNA, 15 bp, Homo sapiens
gttatggagatctga

SEQ ID NO: 94136 - DNA, 15 bp, Homo sapiens
agttatggagatctg

SEQ ID NO: 94137 - DNA, 15 bp, Homo sapiens
cagttatggagatct

SEQ ID NO: 94138 - DNA, 15 bp, Homo sapiens
ccagttatggagatc

SEQ ID NO: 94139 - DNA, 15 bp, Homo sapiens
cccagttatggagat

SEQ ID NO: 94140 - DNA, 15 bp, Homo sapiens
ccccagttatggaga

SEQ ID NO: 94141 - DNA, 15 bp, Homo sapiens
tccccagttatggag

SEQ ID NO: 94142 - DNA, 15 bp, Homo sapiens
ctccccagttatgga

SEQ ID NO: 94143 - DNA, 15 bp, Homo sapiens
gctccccagttatgg

SEQ ID NO: 94144 - DNA, 15 bp, Homo sapiens
ggctccccagttatg

SEQ ID NO: 94145 - DNA, 15 bp, Homo sapiens
tggctccccagttat

SEQ ID NO: 94146 - DNA, 15 bp, Homo sapiens
ctggctccccagtta

SEQ ID NO: 94147 - DNA, 15 bp, Homo sapiens
cctggctccccagtt

SEQ ID NO: 94148 - DNA, 15 bp, Homo sapiens
ccctggctccccagt

SEQ ID NO: 94149 - DNA, 15 bp, Homo sapiens
cccctggctccccag

SEQ ID NO: 94150 - DNA, 15 bp, Homo sapiens
gcccctggctcccca

SEQ ID NO: 94151 - DNA, 15 bp, Homo sapiens
tgcccctggctcccc

SEQ ID NO: 94152 - DNA, 15 bp, Homo sapiens
ctgcccctggctccc

SEQ ID NO: 94153 - DNA, 15 bp, Homo sapiens
gctgcccctggctcc

SEQ ID NO: 94154 - DNA, 15 bp, Homo sapiens
cgctgcccctggctc

SEQ ID NO: 94155 - DNA, 15 bp, Homo sapiens
tcgctgcccctggct

SEQ ID NO: 94156 - DNA, 15 bp, Homo sapiens
gtcgctgcccctggc

SEQ ID NO: 94157 - DNA, 15 bp, Homo sapiens
tgtcgctgcccctgg

SEQ ID NO: 94158 - DNA, 15 bp, Homo sapiens
gtgtcgctgcccctg

SEQ ID NO: 94159 - DNA, 15 bp, Homo sapiens
cgtgtcgctgcccct

SEQ ID NO: 94160 - DNA, 15 bp, Homo sapiens
ccgtgtcgctgcccc

SEQ ID NO: 94161 - DNA, 15 bp, Homo sapiens
accgtgtcgctgccc

SEQ ID NO: 94162 - DNA, 15 bp, Homo sapiens
taccgtgtcgctgcc

SEQ ID NO: 94163 - DNA, 15 bp, Homo sapiens
ctaccgtgtcgctgc

SEQ ID NO: 94164 - DNA, 15 bp, Homo sapiens
gctaccgtgtcgctg

SEQ ID NO: 94165 - DNA, 15 bp, Homo sapiens
agctaccgtgtcgct

SEQ ID NO: 94166 - DNA, 15 bp, Homo sapiens
tagctaccgtgtcgc

SEQ ID NO: 94167 - DNA, 15 bp, Homo sapiens
ctagctaccgtgtcg

SEQ ID NO: 94168 - DNA, 15 bp, Homo sapiens
gctagctaccgtgtc

SEQ ID NO: 94169 - DNA, 15 bp, Homo sapiens
ggctagctaccgtgt

SEQ ID NO: 94170 - DNA, 15 bp, Homo sapiens
cggctagctaccgtg

SEQ ID NO: 94171 - DNA, 15 bp, Homo sapiens
acggctagctaccgt

SEQ ID NO: 94172 - DNA, 15 bp, Homo sapiens
gacggctagctaccg

SEQ ID NO: 94173 - DNA, 15 bp, Homo sapiens
cgacggctagctacc

SEQ ID NO: 94174 - DNA, 15 bp, Homo sapiens
tcgacggctagctac

SEQ ID NO: 94175 - DNA, 15 bp, Homo sapiens
atcgacggctagcta

SEQ ID NO: 94176 - DNA, 15 bp, Homo sapiens
aatcgacggctagct

SEQ ID NO: 94177 - DNA, 15 bp, Homo sapiens
caatcgacggctagc

SEQ ID NO: 94178 - DNA, 15 bp, Homo sapiens
ccaatcgacggctag

SEQ ID NO: 94179 - DNA, 15 bp, Homo sapiens
tccaatcgacggcta

SEQ ID NO: 94180 - DNA, 15 bp, Homo sapiens
ctccaatcgacggct

SEQ ID NO: 94181 - DNA, 15 bp, Homo sapiens
tctccaatcgacggc

SEQ ID NO: 94182 - DNA, 15 bp, Homo sapiens
ttctccaatcgacgg

SEQ ID NO: 94183 - DNA, 15 bp, Homo sapiens
gttctccaatcgacg

SEQ ID NO: 94184 - DNA, 15 bp, Homo sapiens
agttctccaatcgac

SEQ ID NO: 94185 - DNA, 15 bp, Homo sapiens
aagttctccaatcga

SEQ ID NO: 94186 - DNA, 15 bp, Homo sapiens
aaagttctccaatcg

SEQ ID NO: 94187 - DNA, 15 bp, Homo sapiens
taaagttctccaatc

SEQ ID NO: 94188 - DNA, 15 bp, Homo sapiens
ttaaagttctccaat

SEQ ID NO: 94189 - DNA, 15 bp, Homo sapiens
tttaaagttctccaa

SEQ ID NO: 94190 - DNA, 15 bp, Homo sapiens
ttttaaagttctcca

SEQ ID NO: 94191 - DNA, 15 bp, Homo sapiens
attttaaagttctcc

SEQ ID NO: 94192 - DNA, 15 bp, Homo sapiens
cattttaaagttctc

SEQ ID NO: 94193 - DNA, 15 bp, Homo sapiens
tcattttaaagttct

SEQ ID NO: 94194 - DNA, 15 bp, Homo sapiens
ctcattttaaagttc

SEQ ID NO: 94195 - DNA, 15 bp, Homo sapiens
cctcattttaaagtt

SEQ ID NO: 94196 - DNA, 15 bp, Homo sapiens
tcctcattttaaagt

SEQ ID NO: 94197 - DNA, 15 bp, Homo sapiens
gtcctcattttaaag

SEQ ID NO: 94198 - DNA, 15 bp, Homo sapiens
agtcctcattttaaa

SEQ ID NO: 94199 - DNA, 15 bp, Homo sapiens
cagtcctcattttaa

SEQ ID NO: 94200 - DNA, 15 bp, Homo sapiens
tcagtcctcatttta

SEQ ID NO: 94201 - DNA, 15 bp, Homo sapiens
ttcagtcctcatttt

SEQ ID NO: 94202 - DNA, 15 bp, Homo sapiens
attcagtcctcattt

SEQ ID NO: 94203 - DNA, 15 bp, Homo sapiens
aattcagtcctcatt

SEQ ID NO: 94204 - DNA, 15 bp, Homo sapiens
taattcagtcctcat

SEQ ID NO: 94205 - DNA, 15 bp, Homo sapiens
ctaattcagtcctca

SEQ ID NO: 94206 - DNA, 15 bp, Homo sapiens
gctaattcagtcctc

SEQ ID NO: 94207 - DNA, 15 bp, Homo sapiens
agctaattcagtcct

SEQ ID NO: 94208 - DNA, 15 bp, Homo sapiens
gagctaattcagtcc

SEQ ID NO: 94209 - DNA, 15 bp, Homo sapiens
tgagctaattcagtc

SEQ ID NO: 94210 - DNA, 15 bp, Homo sapiens
atgagctaattcagt

SEQ ID NO: 94211 - DNA, 15 bp, Homo sapiens
tatgagctaattcag

SEQ ID NO: 94212 - DNA, 15 bp, Homo sapiens
ttatgagctaattca

SEQ ID NO: 94213 - DNA, 15 bp, Homo sapiens
tttatgagctaattc

SEQ ID NO: 94214 - DNA, 15 bp, Homo sapiens
atttatgagctaatt

SEQ ID NO: 94215 - DNA, 15 bp, Homo sapiens
catttatgagctaat

SEQ ID NO: 94216 - DNA, 15 bp, Homo sapiens
ccatttatgagctaa

SEQ ID NO: 94217 - DNA, 15 bp, Homo sapiens
tccatttatgagcta

SEQ ID NO: 94218 - DNA, 15 bp, Homo sapiens
ttccatttatgagct

SEQ ID NO: 94219 - DNA, 15 bp, Homo sapiens
gttccatttatgagc

SEQ ID NO: 94220 - DNA, 15 bp, Homo sapiens
tgttccatttatgag

SEQ ID NO: 94221 - DNA, 15 bp, Homo sapiens
gtgttccatttatga

SEQ ID NO: 94222 - DNA, 15 bp, Homo sapiens
cgtgttccatttatg

SEQ ID NO: 94223 - DNA, 15 bp, Homo sapiens
ccgtgttccatttat

SEQ ID NO: 94224 - DNA, 15 bp, Homo sapiens
gccgtgttccattta

SEQ ID NO: 94225 - DNA, 15 bp, Homo sapiens
cgccgtgttccattt

SEQ ID NO: 94226 - DNA, 15 bp, Homo sapiens
gcgccgtgttccatt

SEQ ID NO: 94227 - DNA, 15 bp, Homo sapiens
agcgccgtgttccat

SEQ ID NO: 94228 - DNA, 15 bp, Homo sapiens
aagcgccgtgttcca

SEQ ID NO: 94229 - DNA, 15 bp, Homo sapiens
taagcgccgtgttcc

SEQ ID NO: 94230 - DNA, 15 bp, Homo sapiens
ttaagcgccgtgttc

SEQ ID NO: 94231 - DNA, 15 bp, Homo sapiens
gttaagcgccgtgtt

SEQ ID NO: 94232 - DNA, 15 bp, Homo sapiens
agttaagcgccgtgt

SEQ ID NO: 94233 - DNA, 15 bp, Homo sapiens
cagttaagcgccgtg

SEQ ID NO: 94234 - DNA, 15 bp, Homo sapiens
acagttaagcgccgt

SEQ ID NO: 94235 - DNA, 15 bp, Homo sapiens
cacagttaagcgccg

SEQ ID NO: 94236 - DNA, 15 bp, Homo sapiens
tcacagttaagcgcc

SEQ ID NO: 94237 - DNA, 15 bp, Homo sapiens
ctcacagttaagcgc

SEQ ID NO: 94238 - DNA, 15 bp, Homo sapiens
cctcacagttaagcg

SEQ ID NO: 94239 - DNA, 15 bp, Homo sapiens
acctcacagttaagc

SEQ ID NO: 94240 - DNA, 15 bp, Homo sapiens
aacctcacagttaag

SEQ ID NO: 94241 - DNA, 15 bp, Homo sapiens
caacctcacagttaa

SEQ ID NO: 94242 - DNA, 15 bp, Homo sapiens
ccaacctcacagtta

SEQ ID NO: 94243 - DNA, 15 bp, Homo sapiens
tccaacctcacagtt

SEQ ID NO: 94244 - DNA, 15 bp, Homo sapiens
ctccaacctcacagt

SEQ ID NO: 94245 - DNA, 15 bp, Homo sapiens
gctccaacctcacag

SEQ ID NO: 94246 - DNA, 15 bp, Homo sapiens
agctccaacctcaca

SEQ ID NO: 94247 - DNA, 15 bp, Homo sapiens
aagctccaacctcac

SEQ ID NO: 94248 - DNA, 15 bp, Homo sapiens
taagctccaacctca

SEQ ID NO: 94249 - DNA, 15 bp, Homo sapiens
ctaagctccaacctc

SEQ ID NO: 94250 - DNA, 15 bp, Homo sapiens
tctaagctccaacct

SEQ ID NO: 94251 - DNA, 15 bp, Homo sapiens
ttctaagctccaacc

SEQ ID NO: 94252 - DNA, 15 bp, Homo sapiens
attctaagctccaac

SEQ ID NO: 94253 - DNA, 15 bp, Homo sapiens
cattctaagctccaa

SEQ ID NO: 94254 - DNA, 15 bp, Homo sapiens
acattctaagctcca

SEQ ID NO: 94255 - DNA, 15 bp, Homo sapiens
cacattctaagctcc

SEQ ID NO: 94256 - DNA, 15 bp, Homo sapiens
tcacattctaagctc

SEQ ID NO: 94257 - DNA, 15 bp, Homo sapiens
ttcacattctaagct

SEQ ID NO: 94258 - DNA, 15 bp, Homo sapiens
cttcacattctaagc

SEQ ID NO: 94259 - DNA, 15 bp, Homo sapiens
ccttcacattctaag

SEQ ID NO: 94260 - DNA, 15 bp, Homo sapiens
cccttcacattctaa

SEQ ID NO: 94261 - DNA, 15 bp, Homo sapiens
tcccttcacattcta

SEQ ID NO: 94262 - DNA, 15 bp, Homo sapiens
ctcccttcacattct

SEQ ID NO: 94263 - DNA, 15 bp, Homo sapiens
tctcccttcacattc

SEQ ID NO: 94264 - DNA, 15 bp, Homo sapiens
ttctcccttcacatt

SEQ ID NO: 94265 - DNA, 15 bp, Homo sapiens
attctcccttcacat

SEQ ID NO: 94266 - DNA, 15 bp, Homo sapiens
cattctcccttcaca

SEQ ID NO: 94267 - DNA, 15 bp, Homo sapiens
tcattctcccttcac

SEQ ID NO: 94268 - DNA, 15 bp, Homo sapiens
ctcattctcccttca

SEQ ID NO: 94269 - DNA, 15 bp, Homo sapiens
cctcattctcccttc

SEQ ID NO: 94270 - DNA, 15 bp, Homo sapiens
tcctcattctccctt

SEQ ID NO: 94271 - DNA, 15 bp, Homo sapiens
ttcctcattctccct

SEQ ID NO: 94272 - DNA, 15 bp, Homo sapiens
attcctcattctccc

SEQ ID NO: 94273 - DNA, 15 bp, Homo sapiens
cattcctcattctcc

SEQ ID NO: 94274 - DNA, 15 bp, Homo sapiens
gcattcctcattctc

SEQ ID NO: 94275 - DNA, 15 bp, Homo sapiens
cgcattcctcattct

SEQ ID NO: 94276 - DNA, 15 bp, Homo sapiens
tcgcattcctcattc

SEQ ID NO: 94277 - DNA, 15 bp, Homo sapiens
ctcgcattcctcatt

SEQ ID NO: 94278 - DNA, 15 bp, Homo sapiens
tctcgcattcctcat

SEQ ID NO: 94279 - DNA, 15 bp, Homo sapiens
gtctcgcattcctca

SEQ ID NO: 94280 - DNA, 15 bp, Homo sapiens
agtctcgcattcctc

SEQ ID NO: 94281 - DNA, 15 bp, Homo sapiens
cagtctcgcattcct

SEQ ID NO: 94282 - DNA, 15 bp, Homo sapiens
ccagtctcgcattcc

SEQ ID NO: 94283 - DNA, 15 bp, Homo sapiens
cccagtctcgcattc

SEQ ID NO: 94284 - DNA, 15 bp, Homo sapiens
tcccagtctcgcatt

SEQ ID NO: 94285 - DNA, 15 bp, Homo sapiens
gtcccagtctcgcat

SEQ ID NO: 94286 - DNA, 15 bp, Homo sapiens
agtcccagtctcgca

SEQ ID NO: 94287 - DNA, 15 bp, Homo sapiens
cagtcccagtctcgc

SEQ ID NO: 94288 - DNA, 15 bp, Homo sapiens
tcagtcccagtctcg

SEQ ID NO: 94289 - DNA, 15 bp, Homo sapiens
ctcagtcccagtctc

SEQ ID NO: 94290 - DNA, 15 bp, Homo sapiens
tctcagtcccagtct

SEQ ID NO: 94291 - DNA, 15 bp, Homo sapiens
atctcagtcccagtc

SEQ ID NO: 94292 - DNA, 15 bp, Homo sapiens
catctcagtcccagt

SEQ ID NO: 94293 - DNA, 15 bp, Homo sapiens
ccatctcagtcccag

SEQ ID NO: 94294 - DNA, 15 bp, Homo sapiens
tccatctcagtccca

SEQ ID NO: 94295 - DNA, 15 bp, Homo sapiens
ttccatctcagtccc

SEQ ID NO: 94296 - DNA, 15 bp, Homo sapiens
gttccatctcagtcc

SEQ ID NO: 94297 - DNA, 15 bp, Homo sapiens
ggttccatctcagtc

SEQ ID NO: 94298 - DNA, 15 bp, Homo sapiens
cggttccatctcagt

SEQ ID NO: 94299 - DNA, 15 bp, Homo sapiens
ccggttccatctcag

SEQ ID NO: 94300 - DNA, 15 bp, Homo sapiens
gccggttccatctca

SEQ ID NO: 94301 - DNA, 15 bp, Homo sapiens
cgccggttccatctc

SEQ ID NO: 94302 - DNA, 15 bp, Homo sapiens
ccgccggttccatct

SEQ ID NO: 94303 - DNA, 15 bp, Homo sapiens
accgccggttccatc

SEQ ID NO: 94304 - DNA, 15 bp, Homo sapiens
caccgccggttccat

SEQ ID NO: 94305 - DNA, 15 bp, Homo sapiens
ccaccgccggttcca

SEQ ID NO: 94306 - DNA, 15 bp, Homo sapiens
cccaccgccggttcc

SEQ ID NO: 94307 - DNA, 15 bp, Homo sapiens
ccccaccgccggttc

SEQ ID NO: 94308 - DNA, 15 bp, Homo sapiens
tccccaccgccggtt

SEQ ID NO: 94309 - DNA, 15 bp, Homo sapiens
ctccccaccgccggt

SEQ ID NO: 94310 - DNA, 15 bp, Homo sapiens
cctccccaccgccgg

SEQ ID NO: 94311 - DNA, 15 bp, Homo sapiens
ccctccccaccgccg

SEQ ID NO: 94312 - DNA, 15 bp, Homo sapiens
cccctccccaccgcc

SEQ ID NO: 94313 - DNA, 15 bp, Homo sapiens
ccccctccccaccgc

SEQ ID NO: 94314 - DNA, 15 bp, Homo sapiens
accccctccccaccg

SEQ ID NO: 94315 - DNA, 15 bp, Homo sapiens
caccccctccccacc

SEQ ID NO: 94316 - DNA, 15 bp, Homo sapiens
ccaccccctccccac

SEQ ID NO: 94317 - DNA, 15 bp, Homo sapiens
cccaccccctcccca

SEQ ID NO: 94318 - DNA, 15 bp, Homo sapiens
ccccaccccctcccc

SEQ ID NO: 94319 - DNA, 15 bp, Homo sapiens
cccccaccccctccc

SEQ ID NO: 94320 - DNA, 15 bp, Homo sapiens
ccccccaccccctcc

SEQ ID NO: 94321 - DNA, 15 bp, Homo sapiens
tccccccaccccctc

SEQ ID NO: 94322 - DNA, 15 bp, Homo sapiens
atccccccaccccct

SEQ ID NO: 94323 - DNA, 15 bp, Homo sapiens
catccccccaccccc

SEQ ID NO: 94324 - DNA, 15 bp, Homo sapiens
ccatccccccacccc

SEQ ID NO: 94325 - DNA, 15 bp, Homo sapiens
tccatccccccaccc

SEQ ID NO: 94326 - DNA, 15 bp, Homo sapiens
ttccatccccccacc

SEQ ID NO: 94327 - DNA, 15 bp, Homo sapiens
attccatccccccac

SEQ ID NO: 94328 - DNA, 15 bp, Homo sapiens
aattccatcccccca

SEQ ID NO: 94329 - DNA, 15 bp, Homo sapiens
aaattccatcccccc

SEQ ID NO: 94330 - DNA, 15 bp, Homo sapiens
caaattccatccccc

SEQ ID NO: 94331 - DNA, 15 bp, Homo sapiens
tcaaattccatcccc

SEQ ID NO: 94332 - DNA, 15 bp, Homo sapiens
ttcaaattccatccc

SEQ ID NO: 94333 - DNA, 15 bp, Homo sapiens
gttcaaattccatcc

SEQ ID NO: 94334 - DNA, 15 bp, Homo sapiens
ggttcaaattccatc

SEQ ID NO: 94335 - DNA, 15 bp, Homo sapiens
gggttcaaattccat

SEQ ID NO: 94336 - DNA, 15 bp, Homo sapiens
ggggttcaaattcca

SEQ ID NO: 94337 - DNA, 15 bp, Homo sapiens
cggggttcaaattcc

SEQ ID NO: 94338 - DNA, 15 bp, Homo sapiens
ccggggttcaaattc

SEQ ID NO: 94339 - DNA, 15 bp, Homo sapiens
cccggggttcaaatt

SEQ ID NO: 94340 - DNA, 15 bp, Homo sapiens
tcccggggttcaaat

SEQ ID NO: 94341 - DNA, 15 bp, Homo sapiens
ctcccggggttcaaa

SEQ ID NO: 94342 - DNA, 15 bp, Homo sapiens
tctcccggggttcaa

SEQ ID NO: 94343 - DNA, 15 bp, Homo sapiens
ctctcccggggttca

SEQ ID NO: 94344 - DNA, 15 bp, Homo sapiens
cctctcccggggttc

SEQ ID NO: 94345 - DNA, 15 bp, Homo sapiens
tcctctcccggggtt

SEQ ID NO: 94346 - DNA, 15 bp, Homo sapiens
ttcctctcccggggt

SEQ ID NO: 94347 - DNA, 15 bp, Homo sapiens
cttcctctcccgggg

SEQ ID NO: 94348 - DNA, 15 bp, Homo sapiens
tcttcctctcccggg

SEQ ID NO: 94349 - DNA, 15 bp, Homo sapiens
atcttcctctcccgg

SEQ ID NO: 94350 - DNA, 15 bp, Homo sapiens
catcttcctctcccg

SEQ ID NO: 94351 - DNA, 15 bp, Homo sapiens
ccatcttcctctccc

SEQ ID NO: 94352 - DNA, 15 bp, Homo sapiens
tccatcttcctctcc

SEQ ID NO: 94353 - DNA, 15 bp, Homo sapiens
ttccatcttcctctc

SEQ ID NO: 94354 - DNA, 15 bp, Homo sapiens
attccatcttcctct

SEQ ID NO: 94355 - DNA, 15 bp, Homo sapiens
aattccatcttcctc

SEQ ID NO: 94356 - DNA, 15 bp, Homo sapiens
aaattccatcttcct

SEQ ID NO: 94357 - DNA, 15 bp, Homo sapiens
aaaattccatcttcc

SEQ ID NO: 94358 - DNA, 15 bp, Homo sapiens
gaaaattccatcttc

SEQ ID NO: 94359 - DNA, 15 bp, Homo sapiens
agaaaattccatctt

SEQ ID NO: 94360 - DNA, 15 bp, Homo sapiens
tagaaaattccatct

SEQ ID NO: 94361 - DNA, 15 bp, Homo sapiens
atagaaaattccatc

SEQ ID NO: 94362 - DNA, 15 bp, Homo sapiens
catagaaaattccat

SEQ ID NO: 94363 - DNA, 15 bp, Homo sapiens
ccatagaaaattcca

SEQ ID NO: 94364 - DNA, 15 bp, Homo sapiens
tccatagaaaattcc

SEQ ID NO: 94365 - DNA, 15 bp, Homo sapiens
ctccatagaaaattc

SEQ ID NO: 94366 - DNA, 15 bp, Homo sapiens
cctccatagaaaatt

SEQ ID NO: 94367 - DNA, 15 bp, Homo sapiens
gcctccatagaaaat

SEQ ID NO: 94368 - DNA, 15 bp, Homo sapiens
ggcctccatagaaaa

SEQ ID NO: 94369 - DNA, 15 bp, Homo sapiens
cggcctccatagaaa

SEQ ID NO: 94370 - DNA, 15 bp, Homo sapiens
tcggcctccatagaa

SEQ ID NO: 94371 - DNA, 15 bp, Homo sapiens
gtcggcctccataga

SEQ ID NO: 94372 - DNA, 15 bp, Homo sapiens
ggtcggcctccatag

SEQ ID NO: 94373 - DNA, 15 bp, Homo sapiens
aggtcggcctccata

SEQ ID NO: 94374 - DNA, 15 bp, Homo sapiens
caggtcggcctccat

SEQ ID NO: 94375 - DNA, 15 bp, Homo sapiens
ccaggtcggcctcca

SEQ ID NO: 94376 - DNA, 15 bp, Homo sapiens
cccaggtcggcctcc

SEQ ID NO: 94377 - DNA, 15 bp, Homo sapiens
ccccaggtcggcctc

SEQ ID NO: 94378 - DNA, 15 bp, Homo sapiens
tccccaggtcggcct

SEQ ID NO: 94379 - DNA, 15 bp, Homo sapiens
atccccaggtcggcc

SEQ ID NO: 94380 - DNA, 15 bp, Homo sapiens
catccccaggtcggc

SEQ ID NO: 94381 - DNA, 15 bp, Homo sapiens
ccatccccaggtcgg

SEQ ID NO: 94382 - DNA, 15 bp, Homo sapiens
cccatccccaggtcg

SEQ ID NO: 94383 - DNA, 15 bp, Homo sapiens
ccccatccccaggtc

SEQ ID NO: 94384 - DNA, 15 bp, Homo sapiens
tccccatccccaggt

SEQ ID NO: 94385 - DNA, 15 bp, Homo sapiens
ctccccatccccagg

SEQ ID NO: 94386 - DNA, 15 bp, Homo sapiens
tctccccatccccag

SEQ ID NO: 94387 - DNA, 15 bp, Homo sapiens
atctccccatcccca

SEQ ID NO: 94388 - DNA, 15 bp, Homo sapiens
tatctccccatcccc

SEQ ID NO: 94389 - DNA, 15 bp, Homo sapiens
ttatctccccatccc

SEQ ID NO: 94390 - DNA, 15 bp, Homo sapiens
cttatctccccatcc

SEQ ID NO: 94391 - DNA, 15 bp, Homo sapiens
tcttatctccccatc

SEQ ID NO: 94392 - DNA, 15 bp, Homo sapiens
ctcttatctccccat

SEQ ID NO: 94393 - DNA, 15 bp, Homo sapiens
tctcttatctcccca

SEQ ID NO: 94394 - DNA, 15 bp, Homo sapiens
ttctcttatctcccc

SEQ ID NO: 94395 - DNA, 15 bp, Homo sapiens
cttctcttatctccc

SEQ ID NO: 94396 - DNA, 15 bp, Homo sapiens
tcttctcttatctcc

SEQ ID NO: 94397 - DNA, 15 bp, Homo sapiens
gtcttctcttatctc

SEQ ID NO: 94398 - DNA, 15 bp, Homo sapiens
ggtcttctcttatct

SEQ ID NO: 94399 - DNA, 15 bp, Homo sapiens
tggtcttctcttatc

SEQ ID NO: 94400 - DNA, 15 bp, Homo sapiens
ctggtcttctcttat

SEQ ID NO: 94401 - DNA, 15 bp, Homo sapiens
cctggtcttctctta

SEQ ID NO: 94402 - DNA, 15 bp, Homo sapiens
tcctggtcttctctt

SEQ ID NO: 94403 - DNA, 15 bp, Homo sapiens
ctcctggtcttctct

SEQ ID NO: 94404 - DNA, 15 bp, Homo sapiens
cctcctggtcttctc

SEQ ID NO: 94405 - DNA, 15 bp, Homo sapiens
ccctcctggtcttct

SEQ ID NO: 94406 - DNA, 15 bp, Homo sapiens
tccctcctggtcttc

SEQ ID NO: 94407 - DNA, 15 bp, Homo sapiens
ctccctcctggtctt

SEQ ID NO: 94408 - DNA, 15 bp, Homo sapiens
actccctcctggtct

SEQ ID NO: 94409 - DNA, 15 bp, Homo sapiens
aactccctcctggtc

SEQ ID NO: 94410 - DNA, 15 bp, Homo sapiens
taactccctcctggt

SEQ ID NO: 94411 - DNA, 15 bp, Homo sapiens
ttaactccctcctgg

SEQ ID NO: 94412 - DNA, 15 bp, Homo sapiens
tttaactccctcctg

SEQ ID NO: 94413 - DNA, 15 bp, Homo sapiens
atttaactccctcct

SEQ ID NO: 94414 - DNA, 15 bp, Homo sapiens
tatttaactccctcc

SEQ ID NO: 94415 - DNA, 15 bp, Homo sapiens
ctatttaactccctc

SEQ ID NO: 94416 - DNA, 15 bp, Homo sapiens
cctatttaactccct

SEQ ID NO: 94417 - DNA, 15 bp, Homo sapiens
ccctatttaactccc

SEQ ID NO: 94418 - DNA, 15 bp, Homo sapiens
tccctatttaactcc

SEQ ID NO: 94419 - DNA, 15 bp, Homo sapiens
ttccctatttaactc

SEQ ID NO: 94420 - DNA, 15 bp, Homo sapiens
attccctatttaact

SEQ ID NO: 94421 - DNA, 15 bp, Homo sapiens
cattccctatttaac

SEQ ID NO: 94422 - DNA, 15 bp, Homo sapiens
ccattccctatttaa

SEQ ID NO: 94423 - DNA, 15 bp, Homo sapiens
cccattccctattta

SEQ ID NO: 94424 - DNA, 15 bp, Homo sapiens
acccattccctattt

SEQ ID NO: 94425 - DNA, 15 bp, Homo sapiens
aacccattccctatt

SEQ ID NO: 94426 - DNA, 15 bp, Homo sapiens
caacccattccctat

SEQ ID NO: 94427 - DNA, 15 bp, Homo sapiens
ccaacccattcccta

SEQ ID NO: 94428 - DNA, 15 bp, Homo sapiens
cccaacccattccct

SEQ ID NO: 94429 - DNA, 15 bp, Homo sapiens
ccccaacccattccc

SEQ ID NO: 94430 - DNA, 15 bp, Homo sapiens
cccccaacccattcc

SEQ ID NO: 94431 - DNA, 15 bp, Homo sapiens
gcccccaacccattc

SEQ ID NO: 94432 - DNA, 15 bp, Homo sapiens
cgcccccaacccatt

SEQ ID NO: 94433 - DNA, 15 bp, Homo sapiens
ccgcccccaacccat

SEQ ID NO: 94434 - DNA, 15 bp, Homo sapiens
gccgcccccaaccca

SEQ ID NO: 94435 - DNA, 15 bp, Homo sapiens
agccgcccccaaccc

SEQ ID NO: 94436 - DNA, 15 bp, Homo sapiens
aagccgcccccaacc

SEQ ID NO: 94437 - DNA, 15 bp, Homo sapiens
caagccgcccccaac

SEQ ID NO: 94438 - DNA, 15 bp, Homo sapiens
ccaagccgcccccaa

SEQ ID NO: 94439 - DNA, 15 bp, Homo sapiens
accaagccgccccca

SEQ ID NO: 94440 - DNA, 15 bp, Homo sapiens
taccaagccgccccc

SEQ ID NO: 94441 - DNA, 15 bp, Homo sapiens
ttaccaagccgcccc

SEQ ID NO: 94442 - DNA, 15 bp, Homo sapiens
tttaccaagccgccc

SEQ ID NO: 94443 - DNA, 15 bp, Homo sapiens
atttaccaagccgcc

SEQ ID NO: 94444 - DNA, 15 bp, Homo sapiens
catttaccaagccgc

SEQ ID NO: 94445 - DNA, 15 bp, Homo sapiens
acatttaccaagccg

SEQ ID NO: 94446 - DNA, 15 bp, Homo sapiens
cacatttaccaagcc

SEQ ID NO: 94447 - DNA, 15 bp, Homo sapiens
gcacatttaccaagc

SEQ ID NO: 94448 - DNA, 15 bp, Homo sapiens
agcacatttaccaag

SEQ ID NO: 94449 - DNA, 15 bp, Homo sapiens
cagcacatttaccaa

SEQ ID NO: 94450 - DNA, 15 bp, Homo sapiens
ccagcacatttacca

SEQ ID NO: 94451 - DNA, 15 bp, Homo sapiens
cccagcacatttacc

SEQ ID NO: 94452 - DNA, 15 bp, Homo sapiens
tcccagcacatttac

SEQ ID NO: 94453 - DNA, 15 bp, Homo sapiens
atcccagcacattta

SEQ ID NO: 94454 - DNA, 15 bp, Homo sapiens
aatcccagcacattt

SEQ ID NO: 94455 - DNA, 15 bp, Homo sapiens
taatcccagcacatt

SEQ ID NO: 94456 - DNA, 15 bp, Homo sapiens
ctaatcccagcacat

SEQ ID NO: 94457 - DNA, 15 bp, Homo sapiens
cctaatcccagcaca

SEQ ID NO: 94458 - DNA, 15 bp, Homo sapiens
gcctaatcccagcac

SEQ ID NO: 94459 - DNA, 15 bp, Homo sapiens
agcctaatcccagca

SEQ ID NO: 94460 - DNA, 15 bp, Homo sapiens
cagcctaatcccagc

SEQ ID NO: 94461 - DNA, 15 bp, Homo sapiens
acagcctaatcccag

SEQ ID NO: 94462 - DNA, 15 bp, Homo sapiens
aacagcctaatccca

SEQ ID NO: 94463 - DNA, 15 bp, Homo sapiens
caacagcctaatccc

SEQ ID NO: 94464 - DNA, 15 bp, Homo sapiens
gcaacagcctaatcc

SEQ ID NO: 94465 - DNA, 15 bp, Homo sapiens
tgcaacagcctaatc

SEQ ID NO: 94466 - DNA, 15 bp, Homo sapiens
ctgcaacagcctaat

SEQ ID NO: 94467 - DNA, 15 bp, Homo sapiens
tctgcaacagcctaa

SEQ ID NO: 94468 - DNA, 15 bp, Homo sapiens
atctgcaacagccta

SEQ ID NO: 94469 - DNA, 15 bp, Homo sapiens
tatctgcaacagcct

SEQ ID NO: 94470 - DNA, 15 bp, Homo sapiens
ttatctgcaacagcc

SEQ ID NO: 94471 - DNA, 15 bp, Homo sapiens
attatctgcaacagc

SEQ ID NO: 94472 - DNA, 15 bp, Homo sapiens
cattatctgcaacag

SEQ ID NO: 94473 - DNA, 15 bp, Homo sapiens
gcattatctgcaaca

SEQ ID NO: 94474 - DNA, 15 bp, Homo sapiens
tgcattatctgcaac

SEQ ID NO: 94475 - DNA, 15 bp, Homo sapiens
ttgcattatctgcaa

SEQ ID NO: 94476 - DNA, 15 bp, Homo sapiens
gttgcattatctgca

SEQ ID NO: 94477 - DNA, 15 bp, Homo sapiens
tgttgcattatctgc

SEQ ID NO: 94478 - DNA, 15 bp, Homo sapiens
ttgttgcattatctg

SEQ ID NO: 94479 - DNA, 15 bp, Homo sapiens
cttgttgcattatct

SEQ ID NO: 94480 - DNA, 15 bp, Homo sapiens
ccttgttgcattatc

SEQ ID NO: 94481 - DNA, 15 bp, Homo sapiens
gccttgttgcattat

SEQ ID NO: 94482 - DNA, 15 bp, Homo sapiens
agccttgttgcatta

SEQ ID NO: 94483 - DNA, 15 bp, Homo sapiens
aagccttgttgcatt

SEQ ID NO: 94484 - DNA, 15 bp, Homo sapiens
caagccttgttgcat

SEQ ID NO: 94485 - DNA, 15 bp, Homo sapiens
ccaagccttgttgca

SEQ ID NO: 94486 - DNA, 15 bp, Homo sapiens
tccaagccttgttgc

SEQ ID NO: 94487 - DNA, 15 bp, Homo sapiens
ttccaagccttgttg

SEQ ID NO: 94488 - DNA, 15 bp, Homo sapiens
cttccaagccttgtt

SEQ ID NO: 94489 - DNA, 15 bp, Homo sapiens
ccttccaagccttgt

SEQ ID NO: 94490 - DNA, 15 bp, Homo sapiens
gccttccaagccttg

SEQ ID NO: 94491 - DNA, 15 bp, Homo sapiens
agccttccaagcctt

SEQ ID NO: 94492 - DNA, 15 bp, Homo sapiens
tagccttccaagcct

SEQ ID NO: 94493 - DNA, 15 bp, Homo sapiens
ttagccttccaagcc

SEQ ID NO: 94494 - DNA, 15 bp, Homo sapiens
gttagccttccaagc

SEQ ID NO: 94495 - DNA, 15 bp, Homo sapiens
ggttagccttccaag

SEQ ID NO: 94496 - DNA, 15 bp, Homo sapiens
aggttagccttccaa

SEQ ID NO: 94497 - DNA, 15 bp, Homo sapiens
caggttagccttcca

SEQ ID NO: 94498 - DNA, 15 bp, Homo sapiens
ccaggttagccttcc

SEQ ID NO: 94499 - DNA, 15 bp, Homo sapiens
cccaggttagccttc

SEQ ID NO: 94500 - DNA, 15 bp, Homo sapiens
ccccaggttagcctt

SEQ ID NO: 94501 - DNA, 15 bp, Homo sapiens
accccaggttagcct

SEQ ID NO: 94502 - DNA, 15 bp, Homo sapiens
caccccaggttagcc

SEQ ID NO: 94503 - DNA, 15 bp, Homo sapiens
tcaccccaggttagc

SEQ ID NO: 94504 - DNA, 15 bp, Homo sapiens
ctcaccccaggttag

SEQ ID NO: 94505 - DNA, 15 bp, Homo sapiens
cctcaccccaggtta

SEQ ID NO: 94506 - DNA, 15 bp, Homo sapiens
gcctcaccccaggtt

SEQ ID NO: 94507 - DNA, 15 bp, Homo sapiens
ggcctcaccccaggt

SEQ ID NO: 94508 - DNA, 15 bp, Homo sapiens
cggcctcaccccagg

SEQ ID NO: 94509 - DNA, 15 bp, Homo sapiens
ccggcctcaccccag

SEQ ID NO: 94510 - DNA, 15 bp, Homo sapiens
cccggcctcacccca

SEQ ID NO: 94511 - DNA, 15 bp, Homo sapiens
acccggcctcacccc

SEQ ID NO: 94512 - DNA, 15 bp, Homo sapiens
aacccggcctcaccc

SEQ ID NO: 94513 - DNA, 15 bp, Homo sapiens
caacccggcctcacc

SEQ ID NO: 94514 - DNA, 15 bp, Homo sapiens
ccaacccggcctcac

SEQ ID NO: 94515 - DNA, 15 bp, Homo sapiens
cccaacccggcctca

SEQ ID NO: 94516 - DNA, 15 bp, Homo sapiens
ccccaacccggcctc

SEQ ID NO: 94517 - DNA, 15 bp, Homo sapiens
gccccaacccggcct

SEQ ID NO: 94518 - DNA, 15 bp, Homo sapiens
ggccccaacccggcc

SEQ ID NO: 94519 - DNA, 15 bp, Homo sapiens
cggccccaacccggc

SEQ ID NO: 94520 - DNA, 15 bp, Homo sapiens
ccggccccaacccgg

SEQ ID NO: 94521 - DNA, 15 bp, Homo sapiens
cccggccccaacccg

SEQ ID NO: 94522 - DNA, 15 bp, Homo sapiens
gcccggccccaaccc

SEQ ID NO: 94523 - DNA, 15 bp, Homo sapiens
agcccggccccaacc

SEQ ID NO: 94524 - DNA, 15 bp, Homo sapiens
cagcccggccccaac

SEQ ID NO: 94525 - DNA, 15 bp, Homo sapiens
ccagcccggccccaa

SEQ ID NO: 94526 - DNA, 15 bp, Homo sapiens
cccagcccggcccca

SEQ ID NO: 94527 - DNA, 15 bp, Homo sapiens
ccccagcccggcccc

SEQ ID NO: 94528 - DNA, 15 bp, Homo sapiens
cccccagcccggccc

SEQ ID NO: 94529 - DNA, 15 bp, Homo sapiens
acccccagcccggcc

SEQ ID NO: 94530 - DNA, 15 bp, Homo sapiens
cacccccagcccggc

SEQ ID NO: 94531 - DNA, 15 bp, Homo sapiens
ccacccccagcccgg

SEQ ID NO: 94532 - DNA, 15 bp, Homo sapiens
cccacccccagcccg

SEQ ID NO: 94533 - DNA, 15 bp, Homo sapiens
tcccacccccagccc

SEQ ID NO: 94534 - DNA, 15 bp, Homo sapiens
ctcccacccccagcc

SEQ ID NO: 94535 - DNA, 15 bp, Homo sapiens
cctcccacccccagc

SEQ ID NO: 94536 - DNA, 15 bp, Homo sapiens
tcctcccacccccag

SEQ ID NO: 94537 - DNA, 15 bp, Homo sapiens
ctcctcccaccccca

SEQ ID NO: 94538 - DNA, 15 bp, Homo sapiens
actcctcccaccccc

SEQ ID NO: 94539 - DNA, 15 bp, Homo sapiens
gactcctcccacccc

SEQ ID NO: 94540 - DNA, 15 bp, Homo sapiens
ggactcctcccaccc

SEQ ID NO: 94541 - DNA, 15 bp, Homo sapiens
aggactcctcccacc

SEQ ID NO: 94542 - DNA, 15 bp, Homo sapiens
gaggactcctcccac

SEQ ID NO: 94543 - DNA, 15 bp, Homo sapiens
tgaggactcctccca

SEQ ID NO: 94544 - DNA, 15 bp, Homo sapiens
gtgaggactcctccc

SEQ ID NO: 94545 - DNA, 15 bp, Homo sapiens
agtgaggactcctcc

SEQ ID NO: 94546 - DNA, 15 bp, Homo sapiens
cagtgaggactcctc

SEQ ID NO: 94547 - DNA, 15 bp, Homo sapiens
ccagtgaggactcct

SEQ ID NO: 94548 - DNA, 15 bp, Homo sapiens
gccagtgaggactcc

SEQ ID NO: 94549 - DNA, 15 bp, Homo sapiens
cgccagtgaggactc

SEQ ID NO: 94550 - DNA, 15 bp, Homo sapiens
ccgccagtgaggact

SEQ ID NO: 94551 - DNA, 15 bp, Homo sapiens
accgccagtgaggac

SEQ ID NO: 94552 - DNA, 15 bp, Homo sapiens
aaccgccagtgagga

SEQ ID NO: 94553 - DNA, 15 bp, Homo sapiens
caaccgccagtgagg

SEQ ID NO: 94554 - DNA, 15 bp, Homo sapiens
tcaaccgccagtgag

SEQ ID NO: 94555 - DNA, 15 bp, Homo sapiens
atcaaccgccagtga

SEQ ID NO: 94556 - DNA, 15 bp, Homo sapiens
aatcaaccgccagtg

SEQ ID NO: 94557 - DNA, 15 bp, Homo sapiens
caatcaaccgccagt

SEQ ID NO: 94558 - DNA, 15 bp, Homo sapiens
tcaatcaaccgccag

SEQ ID NO: 94559 - DNA, 15 bp, Homo sapiens
gtcaatcaaccgcca

SEQ ID NO: 94560 - DNA, 15 bp, Homo sapiens
tgtcaatcaaccgcc

SEQ ID NO: 94561 - DNA, 15 bp, Homo sapiens
ctgtcaatcaaccgc

SEQ ID NO: 94562 - DNA, 15 bp, Homo sapiens
actgtcaatcaaccg

SEQ ID NO: 94563 - DNA, 15 bp, Homo sapiens
aactgtcaatcaacc

SEQ ID NO: 94564 - DNA, 15 bp, Homo sapiens
aaactgtcaatcaac

SEQ ID NO: 94565 - DNA, 15 bp, Homo sapiens
gaaactgtcaatcaa

SEQ ID NO: 94566 - DNA, 15 bp, Homo sapiens
agaaactgtcaatca

SEQ ID NO: 94567 - DNA, 15 bp, Homo sapiens
gagaaactgtcaatc

SEQ ID NO: 94568 - DNA, 15 bp, Homo sapiens
ggagaaactgtcaat

SEQ ID NO: 94569 - DNA, 15 bp, Homo sapiens
aggagaaactgtcaa

SEQ ID NO: 94570 - DNA, 15 bp, Homo sapiens
aaggagaaactgtca

SEQ ID NO: 94571 - DNA, 15 bp, Homo sapiens
gaaggagaaactgtc

SEQ ID NO: 94572 - DNA, 15 bp, Homo sapiens
ggaaggagaaactgt

SEQ ID NO: 94573 - DNA, 15 bp, Homo sapiens
gggaaggagaaactg

SEQ ID NO: 94574 - DNA, 15 bp, Homo sapiens
ggggaaggagaaact

SEQ ID NO: 94575 - DNA, 15 bp, Homo sapiens
tggggaaggagaaac

SEQ ID NO: 94576 - DNA, 15 bp, Homo sapiens
ctggggaaggagaaa

SEQ ID NO: 94577 - DNA, 15 bp, Homo sapiens
tctggggaaggagaa

SEQ ID NO: 94578 - DNA, 15 bp, Homo sapiens
gtctggggaaggaga

SEQ ID NO: 94579 - DNA, 15 bp, Homo sapiens
agtctggggaaggag

SEQ ID NO: 94580 - DNA, 15 bp, Homo sapiens
cagtctggggaagga

SEQ ID NO: 94581 - DNA, 15 bp, Homo sapiens
ccagtctggggaagg

SEQ ID NO: 94582 - DNA, 15 bp, Homo sapiens
gccagtctggggaag

SEQ ID NO: 94583 - DNA, 15 bp, Homo sapiens
ggccagtctggggaa

SEQ ID NO: 94584 - DNA, 15 bp, Homo sapiens
tggccagtctgggga

SEQ ID NO: 94585 - DNA, 15 bp, Homo sapiens
ttggccagtctgggg

SEQ ID NO: 94586 - DNA, 15 bp, Homo sapiens
attggccagtctggg

SEQ ID NO: 94587 - DNA, 15 bp, Homo sapiens
gattggccagtctgg

SEQ ID NO: 94588 - DNA, 15 bp, Homo sapiens
tgattggccagtctg

SEQ ID NO: 94589 - DNA, 15 bp, Homo sapiens
gtgattggccagtct

SEQ ID NO: 94590 - DNA, 15 bp, Homo sapiens
tgtgattggccagtc

SEQ ID NO: 94591 - DNA, 15 bp, Homo sapiens
ctgtgattggccagt

SEQ ID NO: 94592 - DNA, 15 bp, Homo sapiens
cctgtgattggccag

SEQ ID NO: 94593 - DNA, 15 bp, Homo sapiens
gcctgtgattggcca

SEQ ID NO: 94594 - DNA, 15 bp, Homo sapiens
tgcctgtgattggcc

SEQ ID NO: 94595 - DNA, 15 bp, Homo sapiens
ctgcctgtgattggc

SEQ ID NO: 94596 - DNA, 15 bp, Homo sapiens
cctgcctgtgattgg

SEQ ID NO: 94597 - DNA, 15 bp, Homo sapiens
tcctgcctgtgattg

SEQ ID NO: 94598 - DNA, 15 bp, Homo sapiens
ttcctgcctgtgatt

SEQ ID NO: 94599 - DNA, 15 bp, Homo sapiens
cttcctgcctgtgat

SEQ ID NO: 94600 - DNA, 15 bp, Homo sapiens
tcttcctgcctgtga

SEQ ID NO: 94601 - DNA, 15 bp, Homo sapiens
atcttcctgcctgtg

SEQ ID NO: 94602 - DNA, 15 bp, Homo sapiens
catcttcctgcctgt

SEQ ID NO: 94603 - DNA, 15 bp, Homo sapiens
tcatcttcctgcctg

SEQ ID NO: 94604 - DNA, 15 bp, Homo sapiens
ttcatcttcctgcct

SEQ ID NO: 94605 - DNA, 15 bp, Homo sapiens
cttcatcttcctgcc

SEQ ID NO: 94606 - DNA, 15 bp, Homo sapiens
ccttcatcttcctgc

SEQ ID NO: 94607 - DNA, 15 bp, Homo sapiens
accttcatcttcctg

SEQ ID NO: 94608 - DNA, 15 bp, Homo sapiens
aaccttcatcttcct

SEQ ID NO: 94609 - DNA, 15 bp, Homo sapiens
gaaccttcatcttcc

SEQ ID NO: 94610 - DNA, 15 bp, Homo sapiens
agaaccttcatcttc

SEQ ID NO: 94611 - DNA, 15 bp, Homo sapiens
cagaaccttcatctt

SEQ ID NO: 94612 - DNA, 15 bp, Homo sapiens
acagaaccttcatct

SEQ ID NO: 94613 - DNA, 15 bp, Homo sapiens
cacagaaccttcatc

SEQ ID NO: 94614 - DNA, 15 bp, Homo sapiens
ccacagaaccttcat

SEQ ID NO: 94615 - DNA, 15 bp, Homo sapiens
cccacagaaccttca

SEQ ID NO: 94616 - DNA, 15 bp, Homo sapiens
gcccacagaaccttc

SEQ ID NO: 94617 - DNA, 15 bp, Homo sapiens
agcccacagaacctt

SEQ ID NO: 94618 - DNA, 15 bp, Homo sapiens
cagcccacagaacct

SEQ ID NO: 94619 - DNA, 15 bp, Homo sapiens
gcagcccacagaacc

SEQ ID NO: 94620 - DNA, 15 bp, Homo sapiens
cgcagcccacagaac

SEQ ID NO: 94621 - DNA, 15 bp, Homo sapiens
acgcagcccacagaa

SEQ ID NO: 94622 - DNA, 15 bp, Homo sapiens
aacgcagcccacaga

SEQ ID NO: 94623 - DNA, 15 bp, Homo sapiens
caacgcagcccacag

SEQ ID NO: 94624 - DNA, 15 bp, Homo sapiens
gcaacgcagcccaca

SEQ ID NO: 94625 - DNA, 15 bp, Homo sapiens
agcaacgcagcccac

SEQ ID NO: 94626 - DNA, 15 bp, Homo sapiens
cagcaacgcagccca

SEQ ID NO: 94627 - DNA, 15 bp, Homo sapiens
ccagcaacgcagccc

SEQ ID NO: 94628 - DNA, 15 bp, Homo sapiens
accagcaacgcagcc

SEQ ID NO: 94629 - DNA, 15 bp, Homo sapiens
gaccagcaacgcagc

SEQ ID NO: 94630 - DNA, 15 bp, Homo sapiens
tgaccagcaacgcag

SEQ ID NO: 94631 - DNA, 15 bp, Homo sapiens
gtgaccagcaacgca

SEQ ID NO: 94632 - DNA, 15 bp, Homo sapiens
tgtgaccagcaacgc

SEQ ID NO: 94633 - DNA, 15 bp, Homo sapiens
atgtgaccagcaacg

SEQ ID NO: 94634 - DNA, 15 bp, Homo sapiens
aatgtgaccagcaac

SEQ ID NO: 94635 - DNA, 15 bp, Homo sapiens
gaatgtgaccagcaa

SEQ ID NO: 94636 - DNA, 15 bp, Homo sapiens
ggaatgtgaccagca

SEQ ID NO: 94637 - DNA, 15 bp, Homo sapiens
aggaatgtgaccagc

SEQ ID NO: 94638 - DNA, 15 bp, Homo sapiens
caggaatgtgaccag

SEQ ID NO: 94639 - DNA, 15 bp, Homo sapiens
ccaggaatgtgacca

SEQ ID NO: 94640 - DNA, 15 bp, Homo sapiens
gccaggaatgtgacc

SEQ ID NO: 94641 - DNA, 15 bp, Homo sapiens
tgccaggaatgtgac

SEQ ID NO: 94642 - DNA, 15 bp, Homo sapiens
ctgccaggaatgtga

SEQ ID NO: 94643 - DNA, 15 bp, Homo sapiens
cctgccaggaatgtg

SEQ ID NO: 94644 - DNA, 15 bp, Homo sapiens
acctgccaggaatgt

SEQ ID NO: 94645 - DNA, 15 bp, Homo sapiens
tacctgccaggaatg

SEQ ID NO: 94646 - DNA, 15 bp, Homo sapiens
atacctgccaggaat

SEQ ID NO: 94647 - DNA, 15 bp, Homo sapiens
catacctgccaggaa

SEQ ID NO: 94648 - DNA, 15 bp, Homo sapiens
ccatacctgccagga

SEQ ID NO: 94649 - DNA, 15 bp, Homo sapiens
cccatacctgccagg

SEQ ID NO: 94650 - DNA, 15 bp, Homo sapiens
ccccatacctgccag

SEQ ID NO: 94651 - DNA, 15 bp, Homo sapiens
cccccatacctgcca

SEQ ID NO: 94652 - DNA, 15 bp, Homo sapiens
gcccccatacctgcc

SEQ ID NO: 94653 - DNA, 15 bp, Homo sapiens
cgcccccatacctgc

SEQ ID NO: 94654 - DNA, 15 bp, Homo sapiens
ccgcccccatacctg

SEQ ID NO: 94655 - DNA, 15 bp, Homo sapiens
cccgcccccatacct

SEQ ID NO: 94656 - DNA, 15 bp, Homo sapiens
ccccgcccccatacc

SEQ ID NO: 94657 - DNA, 15 bp, Homo sapiens
gccccgcccccatac

SEQ ID NO: 94658 - DNA, 15 bp, Homo sapiens
agccccgcccccata

SEQ ID NO: 94659 - DNA, 15 bp, Homo sapiens
aagccccgcccccat

SEQ ID NO: 94660 - DNA, 15 bp, Homo sapiens
caagccccgccccca

SEQ ID NO: 94661 - DNA, 15 bp, Homo sapiens
gcaagccccgccccc

SEQ ID NO: 94662 - DNA, 15 bp, Homo sapiens
agcaagccccgcccc

SEQ ID NO: 94663 - DNA, 15 bp, Homo sapiens
gagcaagccccgccc

SEQ ID NO: 94664 - DNA, 15 bp, Homo sapiens
cgagcaagccccgcc

SEQ ID NO: 94665 - DNA, 15 bp, Homo sapiens
ccgagcaagccccgc

SEQ ID NO: 94666 - DNA, 15 bp, Homo sapiens
accgagcaagccccg

SEQ ID NO: 94667 - DNA, 15 bp, Homo sapiens
aaccgagcaagcccc

SEQ ID NO: 94668 - DNA, 15 bp, Homo sapiens
gaaccgagcaagccc

SEQ ID NO: 94669 - DNA, 15 bp, Homo sapiens
ggaaccgagcaagcc

SEQ ID NO: 94670 - DNA, 15 bp, Homo sapiens
gggaaccgagcaagc

SEQ ID NO: 94671 - DNA, 15 bp, Homo sapiens
ggggaaccgagcaag

SEQ ID NO: 94672 - DNA, 15 bp, Homo sapiens
gggggaaccgagcaa

SEQ ID NO: 94673 - DNA, 15 bp, Homo sapiens
ggggggaaccgagca

SEQ ID NO: 94674 - DNA, 15 bp, Homo sapiens
cggggggaaccgagc

SEQ ID NO: 94675 - DNA, 15 bp, Homo sapiens
gcggggggaaccgag

SEQ ID NO: 94676 - DNA, 15 bp, Homo sapiens
agcggggggaaccga

SEQ ID NO: 94677 - DNA, 15 bp, Homo sapiens
gagcggggggaaccg

SEQ ID NO: 94678 - DNA, 15 bp, Homo sapiens
ggagcggggggaacc

SEQ ID NO: 94679 - DNA, 15 bp, Homo sapiens
aggagcggggggaac

SEQ ID NO: 94680 - DNA, 15 bp, Homo sapiens
gaggagcggggggaa

SEQ ID NO: 94681 - DNA, 15 bp, Homo sapiens
ggaggagcgggggga

SEQ ID NO: 94682 - DNA, 15 bp, Homo sapiens
gggaggagcgggggg

SEQ ID NO: 94683 - DNA, 15 bp, Homo sapiens
ggggaggagcggggg

SEQ ID NO: 94684 - DNA, 15 bp, Homo sapiens
gggggaggagcgggg

SEQ ID NO: 94685 - DNA, 15 bp, Homo sapiens
agggggaggagcggg

SEQ ID NO: 94686 - DNA, 15 bp, Homo sapiens
gagggggaggagcgg

SEQ ID NO: 94687 - DNA, 15 bp, Homo sapiens
agagggggaggagcg

SEQ ID NO: 94688 - DNA, 15 bp, Homo sapiens
gagagggggaggagc

SEQ ID NO: 94689 - DNA, 15 bp, Homo sapiens
tgagagggggaggag

SEQ ID NO: 94690 - DNA, 15 bp, Homo sapiens
atgagagggggagga

SEQ ID NO: 94691 - DNA, 15 bp, Homo sapiens
gatgagagggggagg

SEQ ID NO: 94692 - DNA, 15 bp, Homo sapiens
ggatgagagggggag

SEQ ID NO: 94693 - DNA, 15 bp, Homo sapiens
aggatgagaggggga

SEQ ID NO: 94694 - DNA, 15 bp, Homo sapiens
gaggatgagaggggg

SEQ ID NO: 94695 - DNA, 15 bp, Homo sapiens
tgaggatgagagggg

SEQ ID NO: 94696 - DNA, 15 bp, Homo sapiens
gtgaggatgagaggg

SEQ ID NO: 94697 - DNA, 15 bp, Homo sapiens
ggtgaggatgagagg

SEQ ID NO: 94698 - DNA, 15 bp, Homo sapiens
aggtgaggatgagag

SEQ ID NO: 94699 - DNA, 15 bp, Homo sapiens
gaggtgaggatgaga

SEQ ID NO: 94700 - DNA, 15 bp, Homo sapiens
tgaggtgaggatgag

SEQ ID NO: 94701 - DNA, 15 bp, Homo sapiens
ttgaggtgaggatga

SEQ ID NO: 94702 - DNA, 15 bp, Homo sapiens
gttgaggtgaggatg

SEQ ID NO: 94703 - DNA, 15 bp, Homo sapiens
ggttgaggtgaggat

SEQ ID NO: 94704 - DNA, 15 bp, Homo sapiens
aggttgaggtgagga

SEQ ID NO: 94705 - DNA, 15 bp, Homo sapiens
gaggttgaggtgagg

SEQ ID NO: 94706 - DNA, 15 bp, Homo sapiens
aggaggttgaggtga

SEQ ID NO: 94707 - DNA, 15 bp, Homo sapiens
caggaggttgaggtg

SEQ ID NO: 94708 - DNA, 15 bp, Homo sapiens
ccaggaggttgaggt

SEQ ID NO: 94709 - DNA, 15 bp, Homo sapiens
gccaggaggttgagg

SEQ ID NO: 94710 - DNA, 15 bp, Homo sapiens
ggccaggaggttgag

SEQ ID NO: 94711 - DNA, 15 bp, Homo sapiens
gggccaggaggttga

SEQ ID NO: 94712 - DNA, 15 bp, Homo sapiens
ggggccaggaggttg

SEQ ID NO: 94713 - DNA, 15 bp, Homo sapiens
tggggccaggaggtt

SEQ ID NO: 94714 - DNA, 15 bp, Homo sapiens
atggggccaggaggt

SEQ ID NO: 94715 - DNA, 15 bp, Homo sapiens
aatggggccaggagg

SEQ ID NO: 94716 - DNA, 15 bp, Homo sapiens
gaatggggccaggag

SEQ ID NO: 94717 - DNA, 15 bp, Homo sapiens
tgaatggggccagga

SEQ ID NO: 94718 - DNA, 15 bp, Homo sapiens
ctgaatggggccagg

SEQ ID NO: 94719 - DNA, 15 bp, Homo sapiens
cctgaatggggccag

SEQ ID NO: 94720 - DNA, 15 bp, Homo sapiens
gcctgaatggggcca

SEQ ID NO: 94721 - DNA, 15 bp, Homo sapiens
tgcctgaatggggcc

SEQ ID NO: 94722 - DNA, 15 bp, Homo sapiens
ctgcctgaatggggc

SEQ ID NO: 94723 - DNA, 15 bp, Homo sapiens
tctgcctgaatgggg

SEQ ID NO: 94724 - DNA, 15 bp, Homo sapiens
gtctgcctgaatggg

SEQ ID NO: 94725 - DNA, 15 bp, Homo sapiens
ggtctgcctgaatgg

SEQ ID NO: 94726 - DNA, 15 bp, Homo sapiens
gggtctgcctgaatg

SEQ ID NO: 94727 - DNA, 15 bp, Homo sapiens
agggtctgcctgaat

SEQ ID NO: 94728 - DNA, 15 bp, Homo sapiens
cagggtctgcctgaa

SEQ ID NO: 94729 - DNA, 15 bp, Homo sapiens
ccagggtctgcctga

SEQ ID NO: 94730 - DNA, 15 bp, Homo sapiens
cccagggtctgcctg

SEQ ID NO: 94731 - DNA, 15 bp, Homo sapiens
gcccagggtctgcct

SEQ ID NO: 94732 - DNA, 15 bp, Homo sapiens
ggcccagggtctgcc

SEQ ID NO: 94733 - DNA, 15 bp, Homo sapiens
gggcccagggtctgc

SEQ ID NO: 94734 - DNA, 15 bp, Homo sapiens
ggggcccagggtctg

SEQ ID NO: 94735 - DNA, 15 bp, Homo sapiens
gggggcccagggtct

SEQ ID NO: 94736 - DNA, 15 bp, Homo sapiens
agggggcccagggtc

SEQ ID NO: 94737 - DNA, 15 bp, Homo sapiens
gagggggcccagggt

SEQ ID NO: 94738 - DNA, 15 bp, Homo sapiens
agagggggcccaggg

SEQ ID NO: 94739 - DNA, 15 bp, Homo sapiens
aagagggggcccagg

SEQ ID NO: 94740 - DNA, 15 bp, Homo sapiens
gaagagggggcccag

SEQ ID NO: 94741 - DNA, 15 bp, Homo sapiens
agaagagggggccca

SEQ ID NO: 94742 - DNA, 15 bp, Homo sapiens
cagaagagggggccc

SEQ ID NO: 94743 - DNA, 15 bp, Homo sapiens
tcagaagagggggcc

SEQ ID NO: 94744 - DNA, 15 bp, Homo sapiens
ctcagaagagggggc

SEQ ID NO: 94745 - DNA, 15 bp, Homo sapiens
cctcagaagaggggg

SEQ ID NO: 94746 - DNA, 15 bp, Homo sapiens
gcctcagaagagggg

SEQ ID NO: 94747 - DNA, 15 bp, Homo sapiens
agcctcagaagaggg

SEQ ID NO: 94748 - DNA, 15 bp, Homo sapiens
aagcctcagaagagg

SEQ ID NO: 94749 - DNA, 15 bp, Homo sapiens
gaagcctcagaagag

SEQ ID NO: 94750 - DNA, 15 bp, Homo sapiens
agaagcctcagaaga

SEQ ID NO: 94751 - DNA, 15 bp, Homo sapiens
cagaagcctcagaag

SEQ ID NO: 94752 - DNA, 15 bp, Homo sapiens
acagaagcctcagaa

SEQ ID NO: 94753 - DNA, 15 bp, Homo sapiens
cacagaagcctcaga

SEQ ID NO: 94754 - DNA, 15 bp, Homo sapiens
gcacagaagcctcag

SEQ ID NO: 94755 - DNA, 15 bp, Homo sapiens
agcacagaagcctca

SEQ ID NO: 94756 - DNA, 15 bp, Homo sapiens
cagcacagaagcctc

SEQ ID NO: 94757 - DNA, 15 bp, Homo sapiens
gcagcacagaagcct

SEQ ID NO: 94758 - DNA, 15 bp, Homo sapiens
agcagcacagaagcc

SEQ ID NO: 94759 - DNA, 15 bp, Homo sapiens
aagcagcacagaagc

SEQ ID NO: 94760 - DNA, 15 bp, Homo sapiens
gaagcagcacagaag

SEQ ID NO: 94761 - DNA, 15 bp, Homo sapiens
ggaagcagcacagaa

SEQ ID NO: 94762 - DNA, 15 bp, Homo sapiens
aggaagcagcacaga

SEQ ID NO: 94763 - DNA, 15 bp, Homo sapiens
caggaagcagcacag

SEQ ID NO: 94764 - DNA, 15 bp, Homo sapiens
ccaggaagcagcaca

SEQ ID NO: 94765 - DNA, 15 bp, Homo sapiens
gccaggaagcagcac

SEQ ID NO: 94766 - DNA, 15 bp, Homo sapiens
agccaggaagcagca

SEQ ID NO: 94767 - DNA, 15 bp, Homo sapiens
gagccaggaagcagc

SEQ ID NO: 94768 - DNA, 15 bp, Homo sapiens
agagccaggaagcag

SEQ ID NO: 94769 - DNA, 15 bp, Homo sapiens
cagagccaggaagca

SEQ ID NO: 94770 - DNA, 15 bp, Homo sapiens
tcagagccaggaagc

SEQ ID NO: 94771 - DNA, 15 bp, Homo sapiens
ttcagagccaggaag

SEQ ID NO: 94772 - DNA, 15 bp, Homo sapiens
gttcagagccaggaa

SEQ ID NO: 94773 - DNA, 15 bp, Homo sapiens
tgttcagagccagga

SEQ ID NO: 94774 - DNA, 15 bp, Homo sapiens
ctgttcagagccagg

SEQ ID NO: 94775 - DNA, 15 bp, Homo sapiens
gctgttcagagccag

SEQ ID NO: 94776 - DNA, 15 bp, Homo sapiens
cgctgttcagagcca

SEQ ID NO: 94777 - DNA, 15 bp, Homo sapiens
tcgctgttcagagcc

SEQ ID NO: 94778 - DNA, 15 bp, Homo sapiens
atcgctgttcagagc

SEQ ID NO: 94779 - DNA, 15 bp, Homo sapiens
aatcgctgttcagag

SEQ ID NO: 94780 - DNA, 15 bp, Homo sapiens
aaatcgctgttcaga

SEQ ID NO: 94781 - DNA, 15 bp, Homo sapiens
caaatcgctgttcag

SEQ ID NO: 94782 - DNA, 15 bp, Homo sapiens
tcaaatcgctgttca

SEQ ID NO: 94783 - DNA, 15 bp, Homo sapiens
gtcaaatcgctgttc

SEQ ID NO: 94784 - DNA, 15 bp, Homo sapiens
cgtcaaatcgctgtt

SEQ ID NO: 94785 - DNA, 15 bp, Homo sapiens
gcgtcaaatcgctgt

SEQ ID NO: 94786 - DNA, 15 bp, Homo sapiens
agcgtcaaatcgctg

SEQ ID NO: 94787 - DNA, 15 bp, Homo sapiens
gagcgtcaaatcgct

SEQ ID NO: 94788 - DNA, 15 bp, Homo sapiens
agagcgtcaaatcgc

SEQ ID NO: 94789 - DNA, 15 bp, Homo sapiens
gagagcgtcaaatcg

SEQ ID NO: 94790 - DNA, 15 bp, Homo sapiens
agagagcgtcaaatc

SEQ ID NO: 94791 - DNA, 15 bp, Homo sapiens
cagagagcgtcaaat

SEQ ID NO: 94792 - DNA, 15 bp, Homo sapiens
ccagagagcgtcaaa

SEQ ID NO: 94793 - DNA, 15 bp, Homo sapiens
cccagagagcgtcaa

SEQ ID NO: 94794 - DNA, 15 bp, Homo sapiens
gcccagagagcgtca

SEQ ID NO: 94795 - DNA, 15 bp, Homo sapiens
ggcccagagagcgtc

SEQ ID NO: 94796 - DNA, 15 bp, Homo sapiens
aggcccagagagcgt

SEQ ID NO: 94797 - DNA, 15 bp, Homo sapiens
gaggcccagagagcg

SEQ ID NO: 94798 - DNA, 15 bp, Homo sapiens
cgaggcccagagagc

SEQ ID NO: 94799 - DNA, 15 bp, Homo sapiens
ccgaggcccagagag

SEQ ID NO: 94800 - DNA, 15 bp, Homo sapiens
accgaggcccagaga

SEQ ID NO: 94801 - DNA, 15 bp, Homo sapiens
aaccgaggcccagag

SEQ ID NO: 94802 - DNA, 15 bp, Homo sapiens
aaaccgaggcccaga

SEQ ID NO: 94803 - DNA, 15 bp, Homo sapiens
gaaaccgaggcccag

SEQ ID NO: 94804 - DNA, 15 bp, Homo sapiens
ggaaaccgaggccca

SEQ ID NO: 94805 - DNA, 15 bp, Homo sapiens
gggaaaccgaggccc

SEQ ID NO: 94806 - DNA, 15 bp, Homo sapiens
ggggaaaccgaggcc

SEQ ID NO: 94807 - DNA, 15 bp, Homo sapiens
gggggaaaccgaggc

SEQ ID NO: 94808 - DNA, 15 bp, Homo sapiens
tgggggaaaccgagg

SEQ ID NO: 94809 - DNA, 15 bp, Homo sapiens
atgggggaaaccgag

SEQ ID NO: 94810 - DNA, 15 bp, Homo sapiens
gatgggggaaaccga

SEQ ID NO: 94811 - DNA, 15 bp, Homo sapiens
ggatgggggaaaccg

SEQ ID NO: 94812 - DNA, 15 bp, Homo sapiens
aggatgggggaaacc

SEQ ID NO: 94813 - DNA, 15 bp, Homo sapiens
aaggatgggggaaac

SEQ ID NO: 94814 - DNA, 15 bp, Homo sapiens
caaggatgggggaaa

SEQ ID NO: 94815 - DNA, 15 bp, Homo sapiens
tcaaggatgggggaa

SEQ ID NO: 94816 - DNA, 15 bp, Homo sapiens
ctcaaggatggggga

SEQ ID NO: 94817 - DNA, 15 bp, Homo sapiens
tctcaaggatggggg

SEQ ID NO: 94818 - DNA, 15 bp, Homo sapiens
atctcaaggatgggg

SEQ ID NO: 94819 - DNA, 15 bp, Homo sapiens
tatctcaaggatggg

SEQ ID NO: 94820 - DNA, 15 bp, Homo sapiens
ctatctcaaggatgg

SEQ ID NO: 94821 - DNA, 15 bp, Homo sapiens
cctatctcaaggatg

SEQ ID NO: 94822 - DNA, 15 bp, Homo sapiens
tcctatctcaaggat

SEQ ID NO: 94823 - DNA, 15 bp, Homo sapiens
ctcctatctcaagga

SEQ ID NO: 94824 - DNA, 15 bp, Homo sapiens
actcctatctcaagg

SEQ ID NO: 94825 - DNA, 15 bp, Homo sapiens
aactcctatctcaag

SEQ ID NO: 94826 - DNA, 15 bp, Homo sapiens
taactcctatctcaa

SEQ ID NO: 94827 - DNA, 15 bp, Homo sapiens
ctaactcctatctca

SEQ ID NO: 94828 - DNA, 15 bp, Homo sapiens
tctaactcctatctc

SEQ ID NO: 94829 - DNA, 15 bp, Homo sapiens
ttctaactcctatct

SEQ ID NO: 94830 - DNA, 15 bp, Homo sapiens
cttctaactcctatc

SEQ ID NO: 94831 - DNA, 15 bp, Homo sapiens
acttctaactcctat

SEQ ID NO: 94832 - DNA, 15 bp, Homo sapiens
aacttctaactccta

SEQ ID NO: 94833 - DNA, 15 bp, Homo sapiens
caacttctaactcct

SEQ ID NO: 94834 - DNA, 15 bp, Homo sapiens
acaacttctaactcc

SEQ ID NO: 94835 - DNA, 15 bp, Homo sapiens
aacaacttctaactc

SEQ ID NO: 94836 - DNA, 15 bp, Homo sapiens
aaacaacttctaact

SEQ ID NO: 94837 - DNA, 15 bp, Homo sapiens
aaaacaacttctaac

SEQ ID NO: 94838 - DNA, 15 bp, Homo sapiens
caaaacaacttctaa

SEQ ID NO: 94839 - DNA, 15 bp, Homo sapiens
acaaaacaacttcta

SEQ ID NO: 94840 - DNA, 15 bp, Homo sapiens
aacaaaacaacttct

SEQ ID NO: 94841 - DNA, 15 bp, Homo sapiens
caacaaaacaacttc

SEQ ID NO: 94842 - DNA, 15 bp, Homo sapiens
acaacaaaacaactt

SEQ ID NO: 94843 - DNA, 15 bp, Homo sapiens
aacaacaaaacaact

SEQ ID NO: 94844 - DNA, 15 bp, Homo sapiens
caacaacaaaacaac

SEQ ID NO: 94845 - DNA, 15 bp, Homo sapiens
acaacaacaaaacaa

SEQ ID NO: 94846 - DNA, 15 bp, Homo sapiens
aacaacaacaaaaca

SEQ ID NO: 94847 - DNA, 15 bp, Homo sapiens
caacaacaacaaaac

SEQ ID NO: 94848 - DNA, 15 bp, Homo sapiens
acaacaacaacaaaa

SEQ ID NO: 94849 - DNA, 15 bp, Homo sapiens
aacaacaacaacaaa

SEQ ID NO: 94850 - DNA, 15 bp, Homo sapiens
aaacaacaacaacaa

SEQ ID NO: 94851 - DNA, 15 bp, Homo sapiens
caaacaacaacaaca

SEQ ID NO: 94852 - DNA, 15 bp, Homo sapiens
acaaacaacaacaac

SEQ ID NO: 94853 - DNA, 15 bp, Homo sapiens
aacaaacaacaacaa

SEQ ID NO: 94854 - DNA, 15 bp, Homo sapiens
caacaaacaacaaca

SEQ ID NO: 94855 - DNA, 15 bp, Homo sapiens
acaacaaacaacaac

SEQ ID NO: 94856 - DNA, 15 bp, Homo sapiens
aacaacaaacaacaa

SEQ ID NO: 94857 - DNA, 15 bp, Homo sapiens
caacaacaaacaaca

SEQ ID NO: 94858 - DNA, 15 bp, Homo sapiens
acaacaacaaacaac

SEQ ID NO: 94859 - DNA, 15 bp, Homo sapiens
aacaacaacaaacaa

SEQ ID NO: 94860 - DNA, 15 bp, Homo sapiens
caacaacaacaaaca

SEQ ID NO: 94861 - DNA, 15 bp, Homo sapiens
acaacaacaacaaac

SEQ ID NO: 94862 - DNA, 15 bp, Homo sapiens
aaaacaacaacaaca

SEQ ID NO: 94863 - DNA, 15 bp, Homo sapiens
caaaacaacaacaac

SEQ ID NO: 94864 - DNA, 15 bp, Homo sapiens
acaaaacaacaacaa

SEQ ID NO: 94865 - DNA, 15 bp, Homo sapiens
aacaaaacaacaaca

SEQ ID NO: 94866 - DNA, 15 bp, Homo sapiens
aaacaaaacaacaac

SEQ ID NO: 94867 - DNA, 15 bp, Homo sapiens
aaaacaaaacaacaa

SEQ ID NO: 94868 - DNA, 15 bp, Homo sapiens
aaaaacaaaacaaca

SEQ ID NO: 94869 - DNA, 15 bp, Homo sapiens
aaaaaacaaaacaac

SEQ ID NO: 94870 - DNA, 15 bp, Homo sapiens
aaaaaaacaaaacaa

SEQ ID NO: 94871 - DNA, 15 bp, Homo sapiens
caaaaaaacaaaaca

SEQ ID NO: 94872 - DNA, 15 bp, Homo sapiens
tcaaaaaaacaaaac

SEQ ID NO: 94873 - DNA, 15 bp, Homo sapiens
ctcaaaaaaacaaaa

SEQ ID NO: 94874 - DNA, 15 bp, Homo sapiens
tctcaaaaaaacaaa

SEQ ID NO: 94875 - DNA, 15 bp, Homo sapiens
atctcaaaaaaacaa

SEQ ID NO: 94876 - DNA, 15 bp, Homo sapiens
catctcaaaaaaaca

SEQ ID NO: 94877 - DNA, 15 bp, Homo sapiens
tcatctcaaaaaaac

SEQ ID NO: 94878 - DNA, 15 bp, Homo sapiens
ttcatctcaaaaaaa

SEQ ID NO: 94879 - DNA, 15 bp, Homo sapiens
cttcatctcaaaaaa

SEQ ID NO: 94880 - DNA, 15 bp, Homo sapiens
gagacttcatctcaa

SEQ ID NO: 94881 - DNA, 15 bp, Homo sapiens
cgagacttcatctca

SEQ ID NO: 94882 - DNA, 15 bp, Homo sapiens
gcgagacttcatctc

SEQ ID NO: 94883 - DNA, 15 bp, Homo sapiens
agcgagacttcatct

SEQ ID NO: 94884 - DNA, 15 bp, Homo sapiens
gagcgagacttcatc

SEQ ID NO: 94885 - DNA, 15 bp, Homo sapiens
agagcgagacttcat

SEQ ID NO: 94886 - DNA, 15 bp, Homo sapiens
cagagcgagacttca

SEQ ID NO: 94887 - DNA, 15 bp, Homo sapiens
acagagcgagacttc

SEQ ID NO: 94888 - DNA, 15 bp, Homo sapiens
gacagagcgagactt

SEQ ID NO: 94889 - DNA, 15 bp, Homo sapiens
cgacagagcgagact

SEQ ID NO: 94890 - DNA, 15 bp, Homo sapiens
gcgacagagcgagac

SEQ ID NO: 94891 - DNA, 15 bp, Homo sapiens
ggcgacagagcgaga

SEQ ID NO: 94892 - DNA, 15 bp, Homo sapiens
gggcgacagagcgag

SEQ ID NO: 94893 - DNA, 15 bp, Homo sapiens
tgggcgacagagcga

SEQ ID NO: 94894 - DNA, 15 bp, Homo sapiens
ctgggcgacagagcg

SEQ ID NO: 94895 - DNA, 15 bp, Homo sapiens
cctgggcgacagagc

SEQ ID NO: 94896 - DNA, 15 bp, Homo sapiens
cagcctgggcgacag

SEQ ID NO: 94897 - DNA, 15 bp, Homo sapiens
ccagcctgggcgaca

SEQ ID NO: 94898 - DNA, 15 bp, Homo sapiens
tccagcctgggcgac

SEQ ID NO: 94899 - DNA, 15 bp, Homo sapiens
ctccagcctgggcga

SEQ ID NO: 94900 - DNA, 15 bp, Homo sapiens
actccagcctgggcg

SEQ ID NO: 94901 - DNA, 15 bp, Homo sapiens
ccgccactgcactcc

SEQ ID NO: 94902 - DNA, 15 bp, Homo sapiens
cccgccactgcactc

SEQ ID NO: 94903 - DNA, 15 bp, Homo sapiens
tcccgccactgcact

SEQ ID NO: 94904 - DNA, 15 bp, Homo sapiens
atcccgccactgcac

SEQ ID NO: 94905 - DNA, 15 bp, Homo sapiens
gatcccgccactgca

SEQ ID NO: 94906 - DNA, 15 bp, Homo sapiens
agatcccgccactgc

SEQ ID NO: 94907 - DNA, 15 bp, Homo sapiens
gagatcccgccactg

SEQ ID NO: 94908 - DNA, 15 bp, Homo sapiens
cgagatcccgccact

SEQ ID NO: 94909 - DNA, 15 bp, Homo sapiens
ccgagatcccgccac

SEQ ID NO: 94910 - DNA, 15 bp, Homo sapiens
gccgagatcccgcca

SEQ ID NO: 94911 - DNA, 15 bp, Homo sapiens
agccgagatcccgcc

SEQ ID NO: 94912 - DNA, 15 bp, Homo sapiens
gagccgagatcccgc

SEQ ID NO: 94913 - DNA, 15 bp, Homo sapiens
tgagccgagatcccg

SEQ ID NO: 94914 - DNA, 15 bp, Homo sapiens
gtgagccgagatccc

SEQ ID NO: 94915 - DNA, 15 bp, Homo sapiens
agtgagccgagatcc

SEQ ID NO: 94916 - DNA, 15 bp, Homo sapiens
cttgcagtgagccga

SEQ ID NO: 94917 - DNA, 15 bp, Homo sapiens
gcttgcagtgagccg

SEQ ID NO: 94918 - DNA, 15 bp, Homo sapiens
agcttgcagtgagcc

SEQ ID NO: 94919 - DNA, 15 bp, Homo sapiens
gagcttgcagtgagc

SEQ ID NO: 94920 - DNA, 15 bp, Homo sapiens
ggagcttgcagtgag

SEQ ID NO: 94921 - DNA, 15 bp, Homo sapiens
cggagcttgcagtga

SEQ ID NO: 94922 - DNA, 15 bp, Homo sapiens
gcggagcttgcagtg

SEQ ID NO: 94923 - DNA, 15 bp, Homo sapiens
ggcggagcttgcagt

SEQ ID NO: 94924 - DNA, 15 bp, Homo sapiens
aggcggagcttgcag

SEQ ID NO: 94925 - DNA, 15 bp, Homo sapiens
gaggcggagcttgca

SEQ ID NO: 94926 - DNA, 15 bp, Homo sapiens
ggaggcggagcttgc

SEQ ID NO: 94927 - DNA, 15 bp, Homo sapiens
gggaggcggagcttg

SEQ ID NO: 94928 - DNA, 15 bp, Homo sapiens
tgggaggcggagctt

SEQ ID NO: 94929 - DNA, 15 bp, Homo sapiens
ctgggaggcggagct

SEQ ID NO: 94930 - DNA, 15 bp, Homo sapiens
cctgggaggcggagc

SEQ ID NO: 94931 - DNA, 15 bp, Homo sapiens
acctgggaggcggag

SEQ ID NO: 94932 - DNA, 15 bp, Homo sapiens
gacctgggaggcgga

SEQ ID NO: 94933 - DNA, 15 bp, Homo sapiens
ggacctgggaggcgg

SEQ ID NO: 94934 - DNA, 15 bp, Homo sapiens
tggacctgggaggcg

SEQ ID NO: 94935 - DNA, 15 bp, Homo sapiens
gtggacctgggaggc

SEQ ID NO: 94936 - DNA, 15 bp, Homo sapiens
cgtggacctgggagg

SEQ ID NO: 94937 - DNA, 15 bp, Homo sapiens
gcgtggacctgggag

SEQ ID NO: 94938 - DNA, 15 bp, Homo sapiens
ggcgtggacctggga

SEQ ID NO: 94939 - DNA, 15 bp, Homo sapiens
tggcgtggacctggg

SEQ ID NO: 94940 - DNA, 15 bp, Homo sapiens
atggcgtggacctgg

SEQ ID NO: 94941 - DNA, 15 bp, Homo sapiens
aatggcgtggacctg

SEQ ID NO: 94942 - DNA, 15 bp, Homo sapiens
gaatggcgtggacct

SEQ ID NO: 94943 - DNA, 15 bp, Homo sapiens
agaatggcgtggacc

SEQ ID NO: 94944 - DNA, 15 bp, Homo sapiens
gagaatggcgtggac

SEQ ID NO: 94945 - DNA, 15 bp, Homo sapiens
ggagaatggcgtgga

SEQ ID NO: 94946 - DNA, 15 bp, Homo sapiens
aggagaatggcgtgg

SEQ ID NO: 94947 - DNA, 15 bp, Homo sapiens
caggagaatggcgtg

SEQ ID NO: 94948 - DNA, 15 bp, Homo sapiens
gcaggagaatggcgt

SEQ ID NO: 94949 - DNA, 15 bp, Homo sapiens
ggcaggagaatggcg

SEQ ID NO: 94950 - DNA, 15 bp, Homo sapiens
aggcaggagaatggc

SEQ ID NO: 94951 - DNA, 15 bp, Homo sapiens
gaggcaggagaatgg

SEQ ID NO: 94952 - DNA, 15 bp, Homo sapiens
tgaggcaggagaatg

SEQ ID NO: 94953 - DNA, 15 bp, Homo sapiens
tgcctgtagtcccag

SEQ ID NO: 94954 - DNA, 15 bp, Homo sapiens
gtgcctgtagtccca

SEQ ID NO: 94955 - DNA, 15 bp, Homo sapiens
tgtgcctgtagtccc

SEQ ID NO: 94956 - DNA, 15 bp, Homo sapiens
atgtgcctgtagtcc

SEQ ID NO: 94957 - DNA, 15 bp, Homo sapiens
catgtgcctgtagtc

SEQ ID NO: 94958 - DNA, 15 bp, Homo sapiens
gcatgtgcctgtagt

SEQ ID NO: 94959 - DNA, 15 bp, Homo sapiens
ggcatgtgcctgtag

SEQ ID NO: 94960 - DNA, 15 bp, Homo sapiens
tggcatgtgcctgta

SEQ ID NO: 94961 - DNA, 15 bp, Homo sapiens
gtggcatgtgcctgt

SEQ ID NO: 94962 - DNA, 15 bp, Homo sapiens
ggtggcatgtgcctg

SEQ ID NO: 94963 - DNA, 15 bp, Homo sapiens
tggtggcatgtgcct

SEQ ID NO: 94964 - DNA, 15 bp, Homo sapiens
gtggtggcatgtgcc

SEQ ID NO: 94965 - DNA, 15 bp, Homo sapiens
tgtggtggcatgtgc

SEQ ID NO: 94966 - DNA, 15 bp, Homo sapiens
gtgtggtggcatgtg

SEQ ID NO: 94967 - DNA, 15 bp, Homo sapiens
ggtgtggtggcatgt

SEQ ID NO: 94968 - DNA, 15 bp, Homo sapiens
gggtgtggtggcatg

SEQ ID NO: 94969 - DNA, 15 bp, Homo sapiens
cgggtgtggtggcat

SEQ ID NO: 94970 - DNA, 15 bp, Homo sapiens
tcgggtgtggtggca

SEQ ID NO: 94971 - DNA, 15 bp, Homo sapiens
gtcgggtgtggtggc

SEQ ID NO: 94972 - DNA, 15 bp, Homo sapiens
agtcgggtgtggtgg

SEQ ID NO: 94973 - DNA, 15 bp, Homo sapiens
tagtcgggtgtggtg

SEQ ID NO: 94974 - DNA, 15 bp, Homo sapiens
ttagtcgggtgtggt

SEQ ID NO: 94975 - DNA, 15 bp, Homo sapiens
gttagtcgggtgtgg

SEQ ID NO: 94976 - DNA, 15 bp, Homo sapiens
agttagtcgggtgtg

SEQ ID NO: 94977 - DNA, 15 bp, Homo sapiens
aagttagtcgggtgt

SEQ ID NO: 94978 - DNA, 15 bp, Homo sapiens
aaagttagtcgggtg

SEQ ID NO: 94979 - DNA, 15 bp, Homo sapiens
aaaagttagtcgggt

SEQ ID NO: 94980 - DNA, 15 bp, Homo sapiens
aaaaagttagtcggg

SEQ ID NO: 94981 - DNA, 15 bp, Homo sapiens
aaaaaagttagtcgg

SEQ ID NO: 94982 - DNA, 15 bp, Homo sapiens
caaaaaagttagtcg

SEQ ID NO: 94983 - DNA, 15 bp, Homo sapiens
acaaaaaagttagtc

SEQ ID NO: 94984 - DNA, 15 bp, Homo sapiens
tacaaaaaagttagt

SEQ ID NO: 94985 - DNA, 15 bp, Homo sapiens
atacaaaaaagttag

SEQ ID NO: 94986 - DNA, 15 bp, Homo sapiens
aatacaaaaaagtta

SEQ ID NO: 94987 - DNA, 15 bp, Homo sapiens
aaatacaaaaaagtt

SEQ ID NO: 94988 - DNA, 15 bp, Homo sapiens
aaaatacaaaaaagt

SEQ ID NO: 94989 - DNA, 15 bp, Homo sapiens
gaaaatacaaaaaag

SEQ ID NO: 94990 - DNA, 15 bp, Homo sapiens
tgaaaatacaaaaaa

SEQ ID NO: 94991 - DNA, 15 bp, Homo sapiens
ctgaaaatacaaaaa

SEQ ID NO: 94992 - DNA, 15 bp, Homo sapiens
actgaaaatacaaaa

SEQ ID NO: 94993 - DNA, 15 bp, Homo sapiens
tactgaaaatacaaa

SEQ ID NO: 94994 - DNA, 15 bp, Homo sapiens
ctactgaaaatacaa

SEQ ID NO: 94995 - DNA, 15 bp, Homo sapiens
tctactgaaaataca

SEQ ID NO: 94996 - DNA, 15 bp, Homo sapiens
ctctactgaaaatac

SEQ ID NO: 94997 - DNA, 15 bp, Homo sapiens
tctctactgaaaata

SEQ ID NO: 94998 - DNA, 15 bp, Homo sapiens
gtctctactgaaaat

SEQ ID NO: 94999 - DNA, 15 bp, Homo sapiens
cgtctctactgaaaa

SEQ ID NO: 95000 - DNA, 15 bp, Homo sapiens
ccgtctctactgaaa

SEQ ID NO: 95001 - DNA, 15 bp, Homo sapiens
cccgtctctactgaa

SEQ ID NO: 95002 - DNA, 15 bp, Homo sapiens
ccccgtctctactga

SEQ ID NO: 95003 - DNA, 15 bp, Homo sapiens
accccgtctctactg

SEQ ID NO: 95004 - DNA, 15 bp, Homo sapiens
aaccccgtctctact

SEQ ID NO: 95005 - DNA, 15 bp, Homo sapiens
aaaccccgtctctac

SEQ ID NO: 95006 - DNA, 15 bp, Homo sapiens
gaaaccccgtctcta

SEQ ID NO: 95007 - DNA, 15 bp, Homo sapiens
tgaaaccccgtctct

SEQ ID NO: 95008 - DNA, 15 bp, Homo sapiens
gtgaaaccccgtctc

SEQ ID NO: 95009 - DNA, 15 bp, Homo sapiens
ggtgaaaccccgtct

SEQ ID NO: 95010 - DNA, 15 bp, Homo sapiens
tggtgaaaccccgtc

SEQ ID NO: 95011 - DNA, 15 bp, Homo sapiens
atggtgaaaccccgt

SEQ ID NO: 95012 - DNA, 15 bp, Homo sapiens
catggtgaaaccccg

SEQ ID NO: 95013 - DNA, 15 bp, Homo sapiens
cagaccagcctggcc

SEQ ID NO: 95014 - DNA, 15 bp, Homo sapiens
ccagaccagcctggc

SEQ ID NO: 95015 - DNA, 15 bp, Homo sapiens
tccagaccagcctgg

SEQ ID NO: 95016 - DNA, 15 bp, Homo sapiens
ttccagaccagcctg

SEQ ID NO: 95017 - DNA, 15 bp, Homo sapiens
gttccagaccagcct

SEQ ID NO: 95018 - DNA, 15 bp, Homo sapiens
agttccagaccagcc

SEQ ID NO: 95019 - DNA, 15 bp, Homo sapiens
gagttccagaccagc

SEQ ID NO: 95020 - DNA, 15 bp, Homo sapiens
ggagttccagaccag

SEQ ID NO: 95021 - DNA, 15 bp, Homo sapiens
aggagttccagacca

SEQ ID NO: 95022 - DNA, 15 bp, Homo sapiens
caggagttccagacc

SEQ ID NO: 95023 - DNA, 15 bp, Homo sapiens
tcaggagttccagac

SEQ ID NO: 95024 - DNA, 15 bp, Homo sapiens
gtcaggagttccaga

SEQ ID NO: 95025 - DNA, 15 bp, Homo sapiens
ggtcaggagttccag

SEQ ID NO: 95026 - DNA, 15 bp, Homo sapiens
aggtcaggagttcca

SEQ ID NO: 95027 - DNA, 15 bp, Homo sapiens
gaggtcaggagttcc

SEQ ID NO: 95028 - DNA, 15 bp, Homo sapiens
ctgaggtcaggagtt

SEQ ID NO: 95029 - DNA, 15 bp, Homo sapiens
cctgaggtcaggagt

SEQ ID NO: 95030 - DNA, 15 bp, Homo sapiens
acctgaggtcaggag

SEQ ID NO: 95031 - DNA, 15 bp, Homo sapiens
cacctgaggtcagga

SEQ ID NO: 95032 - DNA, 15 bp, Homo sapiens
tcacctgaggtcagg

SEQ ID NO: 95033 - DNA, 15 bp, Homo sapiens
atcacctgaggtcag

SEQ ID NO: 95034 - DNA, 15 bp, Homo sapiens
gatcacctgaggtca

SEQ ID NO: 95035 - DNA, 15 bp, Homo sapiens
agatcacctgaggtc

SEQ ID NO: 95036 - DNA, 15 bp, Homo sapiens
cagatcacctgaggt

SEQ ID NO: 95037 - DNA, 15 bp, Homo sapiens
gcagatcacctgagg

SEQ ID NO: 95038 - DNA, 15 bp, Homo sapiens
ggcagatcacctgag

SEQ ID NO: 95039 - DNA, 15 bp, Homo sapiens
gggcagatcacctga

SEQ ID NO: 95040 - DNA, 15 bp, Homo sapiens
cgggcagatcacctg

SEQ ID NO: 95041 - DNA, 15 bp, Homo sapiens
acgggcagatcacct

SEQ ID NO: 95042 - DNA, 15 bp, Homo sapiens
aacgggcagatcacc

SEQ ID NO: 95043 - DNA, 15 bp, Homo sapiens
aaacgggcagatcac

SEQ ID NO: 95044 - DNA, 15 bp, Homo sapiens
gaaacgggcagatca

SEQ ID NO: 95045 - DNA, 15 bp, Homo sapiens
cgaaacgggcagatc

SEQ ID NO: 95046 - DNA, 15 bp, Homo sapiens
tcgaaacgggcagat

SEQ ID NO: 95047 - DNA, 15 bp, Homo sapiens
atcgaaacgggcaga

SEQ ID NO: 95048 - DNA, 15 bp, Homo sapiens
gatcgaaacgggcag

SEQ ID NO: 95049 - DNA, 15 bp, Homo sapiens
agatcgaaacgggca

SEQ ID NO: 95050 - DNA, 15 bp, Homo sapiens
gagatcgaaacgggc

SEQ ID NO: 95051 - DNA, 15 bp, Homo sapiens
ggagatcgaaacggg

SEQ ID NO: 95052 - DNA, 15 bp, Homo sapiens
gggagatcgaaacgg

SEQ ID NO: 95053 - DNA, 15 bp, Homo sapiens
tgggagatcgaaacg

SEQ ID NO: 95054 - DNA, 15 bp, Homo sapiens
ttgggagatcgaaac

SEQ ID NO: 95055 - DNA, 15 bp, Homo sapiens
tttgggagatcgaaa

SEQ ID NO: 95056 - DNA, 15 bp, Homo sapiens
ctttgggagatcgaa

SEQ ID NO: 95057 - DNA, 15 bp, Homo sapiens
actttgggagatcga

SEQ ID NO: 95058 - DNA, 15 bp, Homo sapiens
cactttgggagatcg

SEQ ID NO: 95059 - DNA, 15 bp, Homo sapiens
gcactttgggagatc

SEQ ID NO: 95060 - DNA, 15 bp, Homo sapiens
agcactttgggagat

SEQ ID NO: 95061 - DNA, 15 bp, Homo sapiens
cagcactttgggaga

SEQ ID NO: 95062 - DNA, 15 bp, Homo sapiens
ggctcacgcctgtaa

SEQ ID NO: 95063 - DNA, 15 bp, Homo sapiens
tggctcacgcctgta

SEQ ID NO: 95064 - DNA, 15 bp, Homo sapiens
cggtggctcacgcct

SEQ ID NO: 95065 - DNA, 15 bp, Homo sapiens
gcggtggctcacgcc

SEQ ID NO: 95066 - DNA, 15 bp, Homo sapiens
tgcggtggctcacgc

SEQ ID NO: 95067 - DNA, 15 bp, Homo sapiens
gtgcggtggctcacg

SEQ ID NO: 95068 - DNA, 15 bp, Homo sapiens
ggtgcggtggctcac

SEQ ID NO: 95069 - DNA, 15 bp, Homo sapiens
aggtgcggtggctca

SEQ ID NO: 95070 - DNA, 15 bp, Homo sapiens
caggtgcggtggctc

SEQ ID NO: 95071 - DNA, 15 bp, Homo sapiens
ccaggtgcggtggct

SEQ ID NO: 95072 - DNA, 15 bp, Homo sapiens
gccaggtgcggtggc

SEQ ID NO: 95073 - DNA, 15 bp, Homo sapiens
agccaggtgcggtgg

SEQ ID NO: 95074 - DNA, 15 bp, Homo sapiens
cagccaggtgcggtg

SEQ ID NO: 95075 - DNA, 15 bp, Homo sapiens
ccagccaggtgcggt

SEQ ID NO: 95076 - DNA, 15 bp, Homo sapiens
cccagccaggtgcgg

SEQ ID NO: 95077 - DNA, 15 bp, Homo sapiens
tcccagccaggtgcg

SEQ ID NO: 95078 - DNA, 15 bp, Homo sapiens
ctcccagccaggtgc

SEQ ID NO: 95079 - DNA, 15 bp, Homo sapiens
actcccagccaggtg

SEQ ID NO: 95080 - DNA, 15 bp, Homo sapiens
aactcccagccaggt

SEQ ID NO: 95081 - DNA, 15 bp, Homo sapiens
taactcccagccagg

SEQ ID NO: 95082 - DNA, 15 bp, Homo sapiens
ctaactcccagccag

SEQ ID NO: 95083 - DNA, 15 bp, Homo sapiens
tctaactcccagcca

SEQ ID NO: 95084 - DNA, 15 bp, Homo sapiens
ctctaactcccagcc

SEQ ID NO: 95085 - DNA, 15 bp, Homo sapiens
cctctaactcccagc

SEQ ID NO: 95086 - DNA, 15 bp, Homo sapiens
acctctaactcccag

SEQ ID NO: 95087 - DNA, 15 bp, Homo sapiens
aacctctaactccca

SEQ ID NO: 95088 - DNA, 15 bp, Homo sapiens
aaacctctaactccc

SEQ ID NO: 95089 - DNA, 15 bp, Homo sapiens
gaaacctctaactcc

SEQ ID NO: 95090 - DNA, 15 bp, Homo sapiens
agaaacctctaactc

SEQ ID NO: 95091 - DNA, 15 bp, Homo sapiens
tagaaacctctaact

SEQ ID NO: 95092 - DNA, 15 bp, Homo sapiens
ttagaaacctctaac

SEQ ID NO: 95093 - DNA, 15 bp, Homo sapiens
attagaaacctctaa

SEQ ID NO: 95094 - DNA, 15 bp, Homo sapiens
cattagaaacctcta

SEQ ID NO: 95095 - DNA, 15 bp, Homo sapiens
gcattagaaacctct

SEQ ID NO: 95096 - DNA, 15 bp, Homo sapiens
tgcattagaaacctc

SEQ ID NO: 95097 - DNA, 15 bp, Homo sapiens
atgcattagaaacct

SEQ ID NO: 95098 - DNA, 15 bp, Homo sapiens
aatgcattagaaacc

SEQ ID NO: 95099 - DNA, 15 bp, Homo sapiens
caatgcattagaaac

SEQ ID NO: 95100 - DNA, 15 bp, Homo sapiens
gcaatgcattagaaa

SEQ ID NO: 95101 - DNA, 15 bp, Homo sapiens
tgcaatgcattagaa

SEQ ID NO: 95102 - DNA, 15 bp, Homo sapiens
ctgcaatgcattaga

SEQ ID NO: 95103 - DNA, 15 bp, Homo sapiens
cctgcaatgcattag

SEQ ID NO: 95104 - DNA, 15 bp, Homo sapiens
gcctgcaatgcatta

SEQ ID NO: 95105 - DNA, 15 bp, Homo sapiens
tgcctgcaatgcatt

SEQ ID NO: 95106 - DNA, 15 bp, Homo sapiens
ctgcctgcaatgcat

SEQ ID NO: 95107 - DNA, 15 bp, Homo sapiens
tctgcctgcaatgca

SEQ ID NO: 95108 - DNA, 15 bp, Homo sapiens
atctgcctgcaatgc

SEQ ID NO: 95109 - DNA, 15 bp, Homo sapiens
tatctgcctgcaatg

SEQ ID NO: 95110 - DNA, 15 bp, Homo sapiens
ctatctgcctgcaat

SEQ ID NO: 95111 - DNA, 15 bp, Homo sapiens
actatctgcctgcaa

SEQ ID NO: 95112 - DNA, 15 bp, Homo sapiens
cactatctgcctgca

SEQ ID NO: 95113 - DNA, 15 bp, Homo sapiens
tcactatctgcctgc

SEQ ID NO: 95114 - DNA, 15 bp, Homo sapiens
ttcactatctgcctg

SEQ ID NO: 95115 - DNA, 15 bp, Homo sapiens
attcactatctgcct

SEQ ID NO: 95116 - DNA, 15 bp, Homo sapiens
tattcactatctgcc

SEQ ID NO: 95117 - DNA, 15 bp, Homo sapiens
gtattcactatctgc

SEQ ID NO: 95118 - DNA, 15 bp, Homo sapiens
ggtattcactatctg

SEQ ID NO: 95119 - DNA, 15 bp, Homo sapiens
tggtattcactatct

SEQ ID NO: 95120 - DNA, 15 bp, Homo sapiens
ctggtattcactatc

SEQ ID NO: 95121 - DNA, 15 bp, Homo sapiens
tctggtattcactat

SEQ ID NO: 95122 - DNA, 15 bp, Homo sapiens
gtctggtattcacta

SEQ ID NO: 95123 - DNA, 15 bp, Homo sapiens
tgtctggtattcact

SEQ ID NO: 95124 - DNA, 15 bp, Homo sapiens
gtgtctggtattcac

SEQ ID NO: 95125 - DNA, 15 bp, Homo sapiens
cgtgtctggtattca

SEQ ID NO: 95126 - DNA, 15 bp, Homo sapiens
ccgtgtctggtattc

SEQ ID NO: 95127 - DNA, 15 bp, Homo sapiens
cccgtgtctggtatt

SEQ ID NO: 95128 - DNA, 15 bp, Homo sapiens
ccccgtgtctggtat

SEQ ID NO: 95129 - DNA, 15 bp, Homo sapiens
gccccgtgtctggta

SEQ ID NO: 95130 - DNA, 15 bp, Homo sapiens
tgccccgtgtctggt

SEQ ID NO: 95131 - DNA, 15 bp, Homo sapiens
ctgccccgtgtctgg

SEQ ID NO: 95132 - DNA, 15 bp, Homo sapiens
gctgccccgtgtctg

SEQ ID NO: 95133 - DNA, 15 bp, Homo sapiens
agctgccccgtgtct

SEQ ID NO: 95134 - DNA, 15 bp, Homo sapiens
cagctgccccgtgtc

SEQ ID NO: 95135 - DNA, 15 bp, Homo sapiens
acagctgccccgtgt

SEQ ID NO: 95136 - DNA, 15 bp, Homo sapiens
cacagctgccccgtg

SEQ ID NO: 95137 - DNA, 15 bp, Homo sapiens
tcacagctgccccgt

SEQ ID NO: 95138 - DNA, 15 bp, Homo sapiens
atcacagctgccccg

SEQ ID NO: 95139 - DNA, 15 bp, Homo sapiens
gatcacagctgcccc

SEQ ID NO: 95140 - DNA, 15 bp, Homo sapiens
agatcacagctgccc

SEQ ID NO: 95141 - DNA, 15 bp, Homo sapiens
aagatcacagctgcc

SEQ ID NO: 95142 - DNA, 15 bp, Homo sapiens
aaagatcacagctgc

SEQ ID NO: 95143 - DNA, 15 bp, Homo sapiens
taaagatcacagctg

SEQ ID NO: 95144 - DNA, 15 bp, Homo sapiens
ataaagatcacagct

SEQ ID NO: 95145 - DNA, 15 bp, Homo sapiens
aataaagatcacagc

SEQ ID NO: 95146 - DNA, 15 bp, Homo sapiens
gaataaagatcacag

SEQ ID NO: 95147 - DNA, 15 bp, Homo sapiens
agaataaagatcaca

SEQ ID NO: 95148 - DNA, 15 bp, Homo sapiens
gagaataaagatcac

SEQ ID NO: 95149 - DNA, 15 bp, Homo sapiens
ggagaataaagatca

SEQ ID NO: 95150 - DNA, 15 bp, Homo sapiens
tggagaataaagatc

SEQ ID NO: 95151 - DNA, 15 bp, Homo sapiens
atggagaataaagat

SEQ ID NO: 95152 - DNA, 15 bp, Homo sapiens
gatggagaataaaga

SEQ ID NO: 95153 - DNA, 15 bp, Homo sapiens
tgatggagaataaag

SEQ ID NO: 95154 - DNA, 15 bp, Homo sapiens
gtgatggagaataaa

SEQ ID NO: 95155 - DNA, 15 bp, Homo sapiens
ggtgatggagaataa

SEQ ID NO: 95156 - DNA, 15 bp, Homo sapiens
gggtgatggagaata

SEQ ID NO: 95157 - DNA, 15 bp, Homo sapiens
ggggtgatggagaat

SEQ ID NO: 95158 - DNA, 15 bp, Homo sapiens
gggggtgatggagaa

SEQ ID NO: 95159 - DNA, 15 bp, Homo sapiens
tgggggtgatggaga

SEQ ID NO: 95160 - DNA, 15 bp, Homo sapiens
gtgggggtgatggag

SEQ ID NO: 95161 - DNA, 15 bp, Homo sapiens
tgtgggggtgatgga

SEQ ID NO: 95162 - DNA, 15 bp, Homo sapiens
gtgtgggggtgatgg

SEQ ID NO: 95163 - DNA, 15 bp, Homo sapiens
tgtgtgggggtgatg

SEQ ID NO: 95164 - DNA, 15 bp, Homo sapiens
ctgtgtgggggtgat

SEQ ID NO: 95165 - DNA, 15 bp, Homo sapiens
gctgtgtgggggtga

SEQ ID NO: 95166 - DNA, 15 bp, Homo sapiens
ggctgtgtgggggtg

SEQ ID NO: 95167 - DNA, 15 bp, Homo sapiens
gggctgtgtgggggt

SEQ ID NO: 95168 - DNA, 15 bp, Homo sapiens
agggctgtgtggggg

SEQ ID NO: 95169 - DNA, 15 bp, Homo sapiens
cagggctgtgtgggg

SEQ ID NO: 95170 - DNA, 15 bp, Homo sapiens
gcagggctgtgtggg

SEQ ID NO: 95171 - DNA, 15 bp, Homo sapiens
ggcagggctgtgtgg

SEQ ID NO: 95172 - DNA, 15 bp, Homo sapiens
aggcagggctgtgtg

SEQ ID NO: 95173 - DNA, 15 bp, Homo sapiens
caggcagggctgtgt

SEQ ID NO: 95174 - DNA, 15 bp, Homo sapiens
ccaggcagggctgtg

SEQ ID NO: 95175 - DNA, 15 bp, Homo sapiens
cccaggcagggctgt

SEQ ID NO: 95176 - DNA, 15 bp, Homo sapiens
ccccaggcagggctg

SEQ ID NO: 95177 - DNA, 15 bp, Homo sapiens
gccccaggcagggct

SEQ ID NO: 95178 - DNA, 15 bp, Homo sapiens
tgccccaggcagggc

SEQ ID NO: 95179 - DNA, 15 bp, Homo sapiens
gtgccccaggcaggg

SEQ ID NO: 95180 - DNA, 15 bp, Homo sapiens
tgtgccccaggcagg

SEQ ID NO: 95181 - DNA, 15 bp, Homo sapiens
gtgtgccccaggcag

SEQ ID NO: 95182 - DNA, 15 bp, Homo sapiens
tgtgtgccccaggca

SEQ ID NO: 95183 - DNA, 15 bp, Homo sapiens
ttgtgtgccccaggc

SEQ ID NO: 95184 - DNA, 15 bp, Homo sapiens
cttgtgtgccccagg

SEQ ID NO: 95185 - DNA, 15 bp, Homo sapiens
ccttgtgtgccccag

SEQ ID NO: 95186 - DNA, 15 bp, Homo sapiens
tccttgtgtgcccca

SEQ ID NO: 95187 - DNA, 15 bp, Homo sapiens
gtccttgtgtgcccc

SEQ ID NO: 95188 - DNA, 15 bp, Homo sapiens
tgtccttgtgtgccc

SEQ ID NO: 95189 - DNA, 15 bp, Homo sapiens
gtgtccttgtgtgcc

SEQ ID NO: 95190 - DNA, 15 bp, Homo sapiens
agtgtccttgtgtgc

SEQ ID NO: 95191 - DNA, 15 bp, Homo sapiens
gagtgtccttgtgtg

SEQ ID NO: 95192 - DNA, 15 bp, Homo sapiens
tgagtgtccttgtgt

SEQ ID NO: 95193 - DNA, 15 bp, Homo sapiens
ttgagtgtccttgtg

SEQ ID NO: 95194 - DNA, 15 bp, Homo sapiens
attgagtgtccttgt

SEQ ID NO: 95195 - DNA, 15 bp, Homo sapiens
tattgagtgtccttg

SEQ ID NO: 95196 - DNA, 15 bp, Homo sapiens
gtattgagtgtcctt

SEQ ID NO: 95197 - DNA, 15 bp, Homo sapiens
tgtattgagtgtcct

SEQ ID NO: 95198 - DNA, 15 bp, Homo sapiens
atgtattgagtgtcc

SEQ ID NO: 95199 - DNA, 15 bp, Homo sapiens
catgtattgagtgtc

SEQ ID NO: 95200 - DNA, 15 bp, Homo sapiens
gcatgtattgagtgt

SEQ ID NO: 95201 - DNA, 15 bp, Homo sapiens
agcatgtattgagtg

SEQ ID NO: 95202 - DNA, 15 bp, Homo sapiens
aagcatgtattgagt

SEQ ID NO: 95203 - DNA, 15 bp, Homo sapiens
aaagcatgtattgag

SEQ ID NO: 95204 - DNA, 15 bp, Homo sapiens
aaaagcatgtattga

SEQ ID NO: 95205 - DNA, 15 bp, Homo sapiens
gaaaagcatgtattg

SEQ ID NO: 95206 - DNA, 15 bp, Homo sapiens
ggaaaagcatgtatt

SEQ ID NO: 95207 - DNA, 15 bp, Homo sapiens
cggaaaagcatgtat

SEQ ID NO: 95208 - DNA, 15 bp, Homo sapiens
gcggaaaagcatgta

SEQ ID NO: 95209 - DNA, 15 bp, Homo sapiens
agcggaaaagcatgt

SEQ ID NO: 95210 - DNA, 15 bp, Homo sapiens
cagcggaaaagcatg

SEQ ID NO: 95211 - DNA, 15 bp, Homo sapiens
ccagcggaaaagcat

SEQ ID NO: 95212 - DNA, 15 bp, Homo sapiens
cccagcggaaaagca

SEQ ID NO: 95213 - DNA, 15 bp, Homo sapiens
gcccagcggaaaagc

SEQ ID NO: 95214 - DNA, 15 bp, Homo sapiens
cgcccagcggaaaag

SEQ ID NO: 95215 - DNA, 15 bp, Homo sapiens
gcgcccagcggaaaa

SEQ ID NO: 95216 - DNA, 15 bp, Homo sapiens
cgcgcccagcggaaa

SEQ ID NO: 95217 - DNA, 15 bp, Homo sapiens
ccgcgcccagcggaa

SEQ ID NO: 95218 - DNA, 15 bp, Homo sapiens
accgcgcccagcgga

SEQ ID NO: 95219 - DNA, 15 bp, Homo sapiens
caccgcgcccagcgg

SEQ ID NO: 95220 - DNA, 15 bp, Homo sapiens
ccaccgcgcccagcg

SEQ ID NO: 95221 - DNA, 15 bp, Homo sapiens
gccaccgcgcccagc

SEQ ID NO: 95222 - DNA, 15 bp, Homo sapiens
agccaccgcgcccag

SEQ ID NO: 95223 - DNA, 15 bp, Homo sapiens
gagccaccgcgccca

SEQ ID NO: 95224 - DNA, 15 bp, Homo sapiens
gtgagccaccgcgcc

SEQ ID NO: 95225 - DNA, 15 bp, Homo sapiens
ggtgagccaccgcgc

SEQ ID NO: 95226 - DNA, 15 bp, Homo sapiens
gggtgagccaccgcg

SEQ ID NO: 95227 - DNA, 15 bp, Homo sapiens
ggggtgagccaccgc

SEQ ID NO: 95228 - DNA, 15 bp, Homo sapiens
aggggtgagccaccg

SEQ ID NO: 95229 - DNA, 15 bp, Homo sapiens
caggggtgagccacc

SEQ ID NO: 95230 - DNA, 15 bp, Homo sapiens
acaggggtgagccac

SEQ ID NO: 95231 - DNA, 15 bp, Homo sapiens
tacaggggtgagcca

SEQ ID NO: 95232 - DNA, 15 bp, Homo sapiens
ttacaggggtgagcc

SEQ ID NO: 95233 - DNA, 15 bp, Homo sapiens
attacaggggtgagc

SEQ ID NO: 95234 - DNA, 15 bp, Homo sapiens
gattacaggggtgag

SEQ ID NO: 95235 - DNA, 15 bp, Homo sapiens
ggattacaggggtga

SEQ ID NO: 95236 - DNA, 15 bp, Homo sapiens
gggattacaggggtg

SEQ ID NO: 95237 - DNA, 15 bp, Homo sapiens
tgggattacaggggt

SEQ ID NO: 95238 - DNA, 15 bp, Homo sapiens
ctgggattacagggg

SEQ ID NO: 95239 - DNA, 15 bp, Homo sapiens
gctgggattacaggg

SEQ ID NO: 95240 - DNA, 15 bp, Homo sapiens
accttggcctcccaa

SEQ ID NO: 95241 - DNA, 15 bp, Homo sapiens
caccttggcctccca

SEQ ID NO: 95242 - DNA, 15 bp, Homo sapiens
ccaccttggcctccc

SEQ ID NO: 95243 - DNA, 15 bp, Homo sapiens
cccaccttggcctcc

SEQ ID NO: 95244 - DNA, 15 bp, Homo sapiens
tcccaccttggcctc

SEQ ID NO: 95245 - DNA, 15 bp, Homo sapiens
ctcccaccttggcct

SEQ ID NO: 95246 - DNA, 15 bp, Homo sapiens
cctcccaccttggcc

SEQ ID NO: 95247 - DNA, 15 bp, Homo sapiens
tcctcccaccttggc

SEQ ID NO: 95248 - DNA, 15 bp, Homo sapiens
atcctcccaccttgg

SEQ ID NO: 95249 - DNA, 15 bp, Homo sapiens
gatcctcccaccttg

SEQ ID NO: 95250 - DNA, 15 bp, Homo sapiens
tgatcctcccacctt

SEQ ID NO: 95251 - DNA, 15 bp, Homo sapiens
gtgatcctcccacct

SEQ ID NO: 95252 - DNA, 15 bp, Homo sapiens
agtgatcctcccacc

SEQ ID NO: 95253 - DNA, 15 bp, Homo sapiens
aagtgatcctcccac

SEQ ID NO: 95254 - DNA, 15 bp, Homo sapiens
caagtgatcctccca

SEQ ID NO: 95255 - DNA, 15 bp, Homo sapiens
tcaagtgatcctccc

SEQ ID NO: 95256 - DNA, 15 bp, Homo sapiens
ctcaagtgatcctcc

SEQ ID NO: 95257 - DNA, 15 bp, Homo sapiens
gctcaagtgatcctc

SEQ ID NO: 95258 - DNA, 15 bp, Homo sapiens
ggctcaagtgatcct

SEQ ID NO: 95259 - DNA, 15 bp, Homo sapiens
gggctcaagtgatcc

SEQ ID NO: 95260 - DNA, 15 bp, Homo sapiens
tgggctcaagtgatc

SEQ ID NO: 95261 - DNA, 15 bp, Homo sapiens
ctgggctcaagtgat

SEQ ID NO: 95262 - DNA, 15 bp, Homo sapiens
cctgggctcaagtga

SEQ ID NO: 95263 - DNA, 15 bp, Homo sapiens
tcctgggctcaagtg

SEQ ID NO: 95264 - DNA, 15 bp, Homo sapiens
ctcctgggctcaagt

SEQ ID NO: 95265 - DNA, 15 bp, Homo sapiens
actcctgggctcaag

SEQ ID NO: 95266 - DNA, 15 bp, Homo sapiens
aactcctgggctcaa

SEQ ID NO: 95267 - DNA, 15 bp, Homo sapiens
gaactcctgggctca

SEQ ID NO: 95268 - DNA, 15 bp, Homo sapiens
tgaactcctgggctc

SEQ ID NO: 95269 - DNA, 15 bp, Homo sapiens
ttgaactcctgggct

SEQ ID NO: 95270 - DNA, 15 bp, Homo sapiens
gttgaactcctgggc

SEQ ID NO: 95271 - DNA, 15 bp, Homo sapiens
tgttgaactcctggg

SEQ ID NO: 95272 - DNA, 15 bp, Homo sapiens
gtgttgaactcctgg

SEQ ID NO: 95273 - DNA, 15 bp, Homo sapiens
ggtgttgaactcctg

SEQ ID NO: 95274 - DNA, 15 bp, Homo sapiens
tggtgttgaactcct

SEQ ID NO: 95275 - DNA, 15 bp, Homo sapiens
ctggtgttgaactcc

SEQ ID NO: 95276 - DNA, 15 bp, Homo sapiens
gctggtgttgaactc

SEQ ID NO: 95277 - DNA, 15 bp, Homo sapiens
ggctggtgttgaact

SEQ ID NO: 95278 - DNA, 15 bp, Homo sapiens
aggctggtgttgaac

SEQ ID NO: 95279 - DNA, 15 bp, Homo sapiens
caggctggtgttgaa

SEQ ID NO: 95280 - DNA, 15 bp, Homo sapiens
ccaggctggtgttga

SEQ ID NO: 95281 - DNA, 15 bp, Homo sapiens
cccaggctggtgttg

SEQ ID NO: 95282 - DNA, 15 bp, Homo sapiens
gcccaggctggtgtt

SEQ ID NO: 95283 - DNA, 15 bp, Homo sapiens
tgcccaggctggtgt

SEQ ID NO: 95284 - DNA, 15 bp, Homo sapiens
ttgcccaggctggtg

SEQ ID NO: 95285 - DNA, 15 bp, Homo sapiens
gttgcccaggctggt

SEQ ID NO: 95286 - DNA, 15 bp, Homo sapiens
actatgttgcccagg

SEQ ID NO: 95287 - DNA, 15 bp, Homo sapiens
cactatgttgcccag

SEQ ID NO: 95288 - DNA, 15 bp, Homo sapiens
tcactatgttgccca

SEQ ID NO: 95289 - DNA, 15 bp, Homo sapiens
ctcactatgttgccc

SEQ ID NO: 95290 - DNA, 15 bp, Homo sapiens
tctcactatgttgcc

SEQ ID NO: 95291 - DNA, 15 bp, Homo sapiens
gtctcactatgttgc

SEQ ID NO: 95292 - DNA, 15 bp, Homo sapiens
ggtctcactatgttg

SEQ ID NO: 95293 - DNA, 15 bp, Homo sapiens
gggtctcactatgtt

SEQ ID NO: 95294 - DNA, 15 bp, Homo sapiens
agggtctcactatgt

SEQ ID NO: 95295 - DNA, 15 bp, Homo sapiens
cagggtctcactatg

SEQ ID NO: 95296 - DNA, 15 bp, Homo sapiens
acagggtctcactat

SEQ ID NO: 95297 - DNA, 15 bp, Homo sapiens
gacagggtctcacta

SEQ ID NO: 95298 - DNA, 15 bp, Homo sapiens
agacagggtctcact

SEQ ID NO: 95299 - DNA, 15 bp, Homo sapiens
gagacagggtctcac

SEQ ID NO: 95300 - DNA, 15 bp, Homo sapiens
agagacagggtctca

SEQ ID NO: 95301 - DNA, 15 bp, Homo sapiens
tagagacagggtctc

SEQ ID NO: 95302 - DNA, 15 bp, Homo sapiens
gtagagacagggtct

SEQ ID NO: 95303 - DNA, 15 bp, Homo sapiens
agtagagacagggtc

SEQ ID NO: 95304 - DNA, 15 bp, Homo sapiens
tagtagagacagggt

SEQ ID NO: 95305 - DNA, 15 bp, Homo sapiens
ttagtagagacaggg

SEQ ID NO: 95306 - DNA, 15 bp, Homo sapiens
tttagtagagacagg

SEQ ID NO: 95307 - DNA, 15 bp, Homo sapiens
ttttagtagagacag

SEQ ID NO: 95308 - DNA, 15 bp, Homo sapiens
tttttagtagagaca

SEQ ID NO: 95309 - DNA, 15 bp, Homo sapiens
atttttgtattttta

SEQ ID NO: 95310 - DNA, 15 bp, Homo sapiens
aatttttgtattttt

SEQ ID NO: 95311 - DNA, 15 bp, Homo sapiens
taatttttgtatttt

SEQ ID NO: 95312 - DNA, 15 bp, Homo sapiens
ctaatttttgtattt

SEQ ID NO: 95313 - DNA, 15 bp, Homo sapiens
gctaatttttgtatt

SEQ ID NO: 95314 - DNA, 15 bp, Homo sapiens
ggctaatttttgtat

SEQ ID NO: 95315 - DNA, 15 bp, Homo sapiens
gcaccatgcctggct

SEQ ID NO: 95316 - DNA, 15 bp, Homo sapiens
ggcaccatgcctggc

SEQ ID NO: 95317 - DNA, 15 bp, Homo sapiens
tggcaccatgcctgg

SEQ ID NO: 95318 - DNA, 15 bp, Homo sapiens
gtggcaccatgcctg

SEQ ID NO: 95319 - DNA, 15 bp, Homo sapiens
tgtggcaccatgcct

SEQ ID NO: 95320 - DNA, 15 bp, Homo sapiens
gtgtggcaccatgcc

SEQ ID NO: 95321 - DNA, 15 bp, Homo sapiens
tgtgtggcaccatgc

SEQ ID NO: 95322 - DNA, 15 bp, Homo sapiens
gtgtgtggcaccatg

SEQ ID NO: 95323 - DNA, 15 bp, Homo sapiens
ggtgtgtggcaccat

SEQ ID NO: 95324 - DNA, 15 bp, Homo sapiens
aggtgtgtggcacca

SEQ ID NO: 95325 - DNA, 15 bp, Homo sapiens
caggtgtgtggcacc

SEQ ID NO: 95326 - DNA, 15 bp, Homo sapiens
acaggtgtgtggcac

SEQ ID NO: 95327 - DNA, 15 bp, Homo sapiens
cacaggtgtgtggca

SEQ ID NO: 95328 - DNA, 15 bp, Homo sapiens
gcacaggtgtgtggc

SEQ ID NO: 95329 - DNA, 15 bp, Homo sapiens
agcacaggtgtgtgg

SEQ ID NO: 95330 - DNA, 15 bp, Homo sapiens
gagcacaggtgtgtg

SEQ ID NO: 95331 - DNA, 15 bp, Homo sapiens
agagcacaggtgtgt

SEQ ID NO: 95332 - DNA, 15 bp, Homo sapiens
gagagcacaggtgtg

SEQ ID NO: 95333 - DNA, 15 bp, Homo sapiens
tgagagcacaggtgt

SEQ ID NO: 95334 - DNA, 15 bp, Homo sapiens
ctgagagcacaggtg

SEQ ID NO: 95335 - DNA, 15 bp, Homo sapiens
gctgagagcacaggt

SEQ ID NO: 95336 - DNA, 15 bp, Homo sapiens
agctgagagcacagg

SEQ ID NO: 95337 - DNA, 15 bp, Homo sapiens
tagctgagagcacag

SEQ ID NO: 95338 - DNA, 15 bp, Homo sapiens
gtagctgagagcaca

SEQ ID NO: 95339 - DNA, 15 bp, Homo sapiens
agtagctgagagcac

SEQ ID NO: 95340 - DNA, 15 bp, Homo sapiens
gagtagctgagagca

SEQ ID NO: 95341 - DNA, 15 bp, Homo sapiens
tgagtagctgagagc

SEQ ID NO: 95342 - DNA, 15 bp, Homo sapiens
ctgagtagctgagag

SEQ ID NO: 95343 - DNA, 15 bp, Homo sapiens
cctgagtagctgaga

SEQ ID NO: 95344 - DNA, 15 bp, Homo sapiens
tcctgagtagctgag

SEQ ID NO: 95345 - DNA, 15 bp, Homo sapiens
ctcctgagtagctga

SEQ ID NO: 95346 - DNA, 15 bp, Homo sapiens
cctcctgagtagctg

SEQ ID NO: 95347 - DNA, 15 bp, Homo sapiens
gcctcctgagtagct

SEQ ID NO: 95348 - DNA, 15 bp, Homo sapiens
agcctcctgagtagc

SEQ ID NO: 95349 - DNA, 15 bp, Homo sapiens
cagcctcctgagtag

SEQ ID NO: 95350 - DNA, 15 bp, Homo sapiens
tcagcctcctgagta

SEQ ID NO: 95351 - DNA, 15 bp, Homo sapiens
ctcagcctcctgagt

SEQ ID NO: 95352 - DNA, 15 bp, Homo sapiens
cctcagcctcctgag

SEQ ID NO: 95353 - DNA, 15 bp, Homo sapiens
gcctcagcctcctga

SEQ ID NO: 95354 - DNA, 15 bp, Homo sapiens
tgcctcagcctcctg

SEQ ID NO: 95355 - DNA, 15 bp, Homo sapiens
ctgcctcagcctcct

SEQ ID NO: 95356 - DNA, 15 bp, Homo sapiens
cctcctgcctcagcc

SEQ ID NO: 95357 - DNA, 15 bp, Homo sapiens
tcctcctgcctcagc

SEQ ID NO: 95358 - DNA, 15 bp, Homo sapiens
atcctcctgcctcag

SEQ ID NO: 95359 - DNA, 15 bp, Homo sapiens
gatcctcctgcctca

SEQ ID NO: 95360 - DNA, 15 bp, Homo sapiens
cgatcctcctgcctc

SEQ ID NO: 95361 - DNA, 15 bp, Homo sapiens
gcgatcctcctgcct

SEQ ID NO: 95362 - DNA, 15 bp, Homo sapiens
agcgatcctcctgcc

SEQ ID NO: 95363 - DNA, 15 bp, Homo sapiens
aagcgatcctcctgc

SEQ ID NO: 95364 - DNA, 15 bp, Homo sapiens
caagcgatcctcctg

SEQ ID NO: 95365 - DNA, 15 bp, Homo sapiens
tcaagcgatcctcct

SEQ ID NO: 95366 - DNA, 15 bp, Homo sapiens
ctcaagcgatcctcc

SEQ ID NO: 95367 - DNA, 15 bp, Homo sapiens
gctcaagcgatcctc

SEQ ID NO: 95368 - DNA, 15 bp, Homo sapiens
ggctcaagcgatcct

SEQ ID NO: 95369 - DNA, 15 bp, Homo sapiens
gggctcaagcgatcc

SEQ ID NO: 95370 - DNA, 15 bp, Homo sapiens
tgggctcaagcgatc

SEQ ID NO: 95371 - DNA, 15 bp, Homo sapiens
ctgggctcaagcgat

SEQ ID NO: 95372 - DNA, 15 bp, Homo sapiens
tctgggctcaagcga

SEQ ID NO: 95373 - DNA, 15 bp, Homo sapiens
ttctgggctcaagcg

SEQ ID NO: 95374 - DNA, 15 bp, Homo sapiens
cttctgggctcaagc

SEQ ID NO: 95375 - DNA, 15 bp, Homo sapiens
ccttctgggctcaag

SEQ ID NO: 95376 - DNA, 15 bp, Homo sapiens
accttctgggctcaa

SEQ ID NO: 95377 - DNA, 15 bp, Homo sapiens
gaccttctgggctca

SEQ ID NO: 95378 - DNA, 15 bp, Homo sapiens
tgaccttctgggctc

SEQ ID NO: 95379 - DNA, 15 bp, Homo sapiens
ttgaccttctgggct

SEQ ID NO: 95380 - DNA, 15 bp, Homo sapiens
cttgaccttctgggc

SEQ ID NO: 95381 - DNA, 15 bp, Homo sapiens
ccttgaccttctggg

SEQ ID NO: 95382 - DNA, 15 bp, Homo sapiens
accttgaccttctgg

SEQ ID NO: 95383 - DNA, 15 bp, Homo sapiens
aaccttgaccttctg

SEQ ID NO: 95384 - DNA, 15 bp, Homo sapiens
caaccttgaccttct

SEQ ID NO: 95385 - DNA, 15 bp, Homo sapiens
gcaaccttgaccttc

SEQ ID NO: 95386 - DNA, 15 bp, Homo sapiens
tgcaaccttgacctt

SEQ ID NO: 95387 - DNA, 15 bp, Homo sapiens
ctgcaaccttgacct

SEQ ID NO: 95388 - DNA, 15 bp, Homo sapiens
actgcaaccttgacc

SEQ ID NO: 95389 - DNA, 15 bp, Homo sapiens
cactgcaaccttgac

SEQ ID NO: 95390 - DNA, 15 bp, Homo sapiens
tcactgcaaccttga

SEQ ID NO: 95391 - DNA, 15 bp, Homo sapiens
ttcactgcaaccttg

SEQ ID NO: 95392 - DNA, 15 bp, Homo sapiens
gttcactgcaacctt

SEQ ID NO: 95393 - DNA, 15 bp, Homo sapiens
ggttcactgcaacct

SEQ ID NO: 95394 - DNA, 15 bp, Homo sapiens
tggttcactgcaacc

SEQ ID NO: 95395 - DNA, 15 bp, Homo sapiens
atggttcactgcaac

SEQ ID NO: 95396 - DNA, 15 bp, Homo sapiens
catggttcactgcaa

SEQ ID NO: 95397 - DNA, 15 bp, Homo sapiens
acatggttcactgca

SEQ ID NO: 95398 - DNA, 15 bp, Homo sapiens
aacatggttcactgc

SEQ ID NO: 95399 - DNA, 15 bp, Homo sapiens
gaacatggttcactg

SEQ ID NO: 95400 - DNA, 15 bp, Homo sapiens
tgaacatggttcact

SEQ ID NO: 95401 - DNA, 15 bp, Homo sapiens
ctgaacatggttcac

SEQ ID NO: 95402 - DNA, 15 bp, Homo sapiens
cctgaacatggttca

SEQ ID NO: 95403 - DNA, 15 bp, Homo sapiens
gcctgaacatggttc

SEQ ID NO: 95404 - DNA, 15 bp, Homo sapiens
ggcctgaacatggtt

SEQ ID NO: 95405 - DNA, 15 bp, Homo sapiens
cggcctgaacatggt

SEQ ID NO: 95406 - DNA, 15 bp, Homo sapiens
gcggcctgaacatgg

SEQ ID NO: 95407 - DNA, 15 bp, Homo sapiens
agcggcctgaacatg

SEQ ID NO: 95408 - DNA, 15 bp, Homo sapiens
cagcggcctgaacat

SEQ ID NO: 95409 - DNA, 15 bp, Homo sapiens
gcagcggcctgaaca

SEQ ID NO: 95410 - DNA, 15 bp, Homo sapiens
tgcagcggcctgaac

SEQ ID NO: 95411 - DNA, 15 bp, Homo sapiens
gtgcagcggcctgaa

SEQ ID NO: 95412 - DNA, 15 bp, Homo sapiens
agtgcagcggcctga

SEQ ID NO: 95413 - DNA, 15 bp, Homo sapiens
gagtgcagcggcctg

SEQ ID NO: 95414 - DNA, 15 bp, Homo sapiens
ggagtgcagcggcct

SEQ ID NO: 95415 - DNA, 15 bp, Homo sapiens
tggagtgcagcggcc

SEQ ID NO: 95416 - DNA, 15 bp, Homo sapiens
ctggagtgcagcggc

SEQ ID NO: 95417 - DNA, 15 bp, Homo sapiens
gctggagtgcagcgg

SEQ ID NO: 95418 - DNA, 15 bp, Homo sapiens
ggctggagtgcagcg

SEQ ID NO: 95419 - DNA, 15 bp, Homo sapiens
aggctggagtgcagc

SEQ ID NO: 95420 - DNA, 15 bp, Homo sapiens
ggtcttgctctgtca

SEQ ID NO: 95421 - DNA, 15 bp, Homo sapiens
gggtcttgctctgtc

SEQ ID NO: 95422 - DNA, 15 bp, Homo sapiens
agggtcttgctctgt

SEQ ID NO: 95423 - DNA, 15 bp, Homo sapiens
cagggtcttgctctg

SEQ ID NO: 95424 - DNA, 15 bp, Homo sapiens
acagggtcttgctct

SEQ ID NO: 95425 - DNA, 15 bp, Homo sapiens
aacagggtcttgctc

SEQ ID NO: 95426 - DNA, 15 bp, Homo sapiens
aaacagggtcttgct

SEQ ID NO: 95427 - DNA, 15 bp, Homo sapiens
taaacagggtcttgc

SEQ ID NO: 95428 - DNA, 15 bp, Homo sapiens
ataaacagggtcttg

SEQ ID NO: 95429 - DNA, 15 bp, Homo sapiens
tataaacagggtctt

SEQ ID NO: 95430 - DNA, 15 bp, Homo sapiens
ttataaacagggtct

SEQ ID NO: 95431 - DNA, 15 bp, Homo sapiens
tttataaacagggtc

SEQ ID NO: 95432 - DNA, 15 bp, Homo sapiens
atttataaacagggt

SEQ ID NO: 95433 - DNA, 15 bp, Homo sapiens
tatttataaacaggg

SEQ ID NO: 95434 - DNA, 15 bp, Homo sapiens
gtatttataaacagg

SEQ ID NO: 95435 - DNA, 15 bp, Homo sapiens
tgtatttataaacag

SEQ ID NO: 95436 - DNA, 15 bp, Homo sapiens
atgtatttataaaca

SEQ ID NO: 95437 - DNA, 15 bp, Homo sapiens
tatgtatttataaac

SEQ ID NO: 95438 - DNA, 15 bp, Homo sapiens
ttatgtatttataaa

SEQ ID NO: 95439 - DNA, 15 bp, Homo sapiens
attatgtatttataa

SEQ ID NO: 95440 - DNA, 15 bp, Homo sapiens
cattatgtatttata

SEQ ID NO: 95441 - DNA, 15 bp, Homo sapiens
gcattatgtatttat

SEQ ID NO: 95442 - DNA, 15 bp, Homo sapiens
agcattatgtattta

SEQ ID NO: 95443 - DNA, 15 bp, Homo sapiens
aagcattatgtattt

SEQ ID NO: 95444 - DNA, 15 bp, Homo sapiens
aaagcattatgtatt

SEQ ID NO: 95445 - DNA, 15 bp, Homo sapiens
gaaagcattatgtat

SEQ ID NO: 95446 - DNA, 15 bp, Homo sapiens
ggaaagcattatgta

SEQ ID NO: 95447 - DNA, 15 bp, Homo sapiens
tggaaagcattatgt

SEQ ID NO: 95448 - DNA, 15 bp, Homo sapiens
ttggaaagcattatg

SEQ ID NO: 95449 - DNA, 15 bp, Homo sapiens
cttggaaagcattat

SEQ ID NO: 95450 - DNA, 15 bp, Homo sapiens
acttggaaagcatta

SEQ ID NO: 95451 - DNA, 15 bp, Homo sapiens
cacttggaaagcatt

SEQ ID NO: 95452 - DNA, 15 bp, Homo sapiens
tcacttggaaagcat

SEQ ID NO: 95453 - DNA, 15 bp, Homo sapiens
atcacttggaaagca

SEQ ID NO: 95454 - DNA, 15 bp, Homo sapiens
aatcacttggaaagc

SEQ ID NO: 95455 - DNA, 15 bp, Homo sapiens
taatcacttggaaag

SEQ ID NO: 95456 - DNA, 15 bp, Homo sapiens
ttaatcacttggaaa

SEQ ID NO: 95457 - DNA, 15 bp, Homo sapiens
tttaatcacttggaa

SEQ ID NO: 95458 - DNA, 15 bp, Homo sapiens
gtttaatcacttgga

SEQ ID NO: 95459 - DNA, 15 bp, Homo sapiens
ggtttaatcacttgg

SEQ ID NO: 95460 - DNA, 15 bp, Homo sapiens
cggtttaatcacttg

SEQ ID NO: 95461 - DNA, 15 bp, Homo sapiens
tcggtttaatcactt

SEQ ID NO: 95462 - DNA, 15 bp, Homo sapiens
gtcggtttaatcact

SEQ ID NO: 95463 - DNA, 15 bp, Homo sapiens
agtcggtttaatcac

SEQ ID NO: 95464 - DNA, 15 bp, Homo sapiens
gagtcggtttaatca

SEQ ID NO: 95465 - DNA, 15 bp, Homo sapiens
ggagtcggtttaatc

SEQ ID NO: 95466 - DNA, 15 bp, Homo sapiens
gggagtcggtttaat

SEQ ID NO: 95467 - DNA, 15 bp, Homo sapiens
ggggagtcggtttaa

SEQ ID NO: 95468 - DNA, 15 bp, Homo sapiens
gggggagtcggttta

SEQ ID NO: 95469 - DNA, 15 bp, Homo sapiens
ggggggagtcggttt

SEQ ID NO: 95470 - DNA, 15 bp, Homo sapiens
aggggggagtcggtt

SEQ ID NO: 95471 - DNA, 15 bp, Homo sapiens
gaggggggagtcggt

SEQ ID NO: 95472 - DNA, 15 bp, Homo sapiens
tgaggggggagtcgg

SEQ ID NO: 95473 - DNA, 15 bp, Homo sapiens
gtgaggggggagtcg

SEQ ID NO: 95474 - DNA, 15 bp, Homo sapiens
ggtgaggggggagtc

SEQ ID NO: 95475 - DNA, 15 bp, Homo sapiens
gggtgaggggggagt

SEQ ID NO: 95476 - DNA, 15 bp, Homo sapiens
agggtgaggggggag

SEQ ID NO: 95477 - DNA, 15 bp, Homo sapiens
cagggtgagggggga

SEQ ID NO: 95478 - DNA, 15 bp, Homo sapiens
gcagggtgagggggg

SEQ ID NO: 95479 - DNA, 15 bp, Homo sapiens
ggcagggtgaggggg

SEQ ID NO: 95480 - DNA, 15 bp, Homo sapiens
gggcagggtgagggg

SEQ ID NO: 95481 - DNA, 15 bp, Homo sapiens
tgggcagggtgaggg

SEQ ID NO: 95482 - DNA, 15 bp, Homo sapiens
gtgggcagggtgagg

SEQ ID NO: 95483 - DNA, 15 bp, Homo sapiens
ggtgggcagggtgag

SEQ ID NO: 95484 - DNA, 15 bp, Homo sapiens
tggtgggcagggtga

SEQ ID NO: 95485 - DNA, 15 bp, Homo sapiens
atggtgggcagggtg

SEQ ID NO: 95486 - DNA, 15 bp, Homo sapiens
catggtgggcagggt

SEQ ID NO: 95487 - DNA, 15 bp, Homo sapiens
ccatggtgggcaggg

SEQ ID NO: 95488 - DNA, 15 bp, Homo sapiens
gccatggtgggcagg

SEQ ID NO: 95489 - DNA, 15 bp, Homo sapiens
agccatggtgggcag

SEQ ID NO: 95490 - DNA, 15 bp, Homo sapiens
gagccatggtgggca

SEQ ID NO: 95491 - DNA, 15 bp, Homo sapiens
ggagccatggtgggc

SEQ ID NO: 95492 - DNA, 15 bp, Homo sapiens
tggagccatggtggg

SEQ ID NO: 95493 - DNA, 15 bp, Homo sapiens
ttggagccatggtgg

SEQ ID NO: 95494 - DNA, 15 bp, Homo sapiens
tttggagccatggtg

SEQ ID NO: 95495 - DNA, 15 bp, Homo sapiens
ctttggagccatggt

SEQ ID NO: 95496 - DNA, 15 bp, Homo sapiens
tctttggagccatgg

SEQ ID NO: 95497 - DNA, 15 bp, Homo sapiens
ttctttggagccatg

SEQ ID NO: 95498 - DNA, 15 bp, Homo sapiens
cttctttggagccat

SEQ ID NO: 95499 - DNA, 15 bp, Homo sapiens
gcttctttggagcca

SEQ ID NO: 95500 - DNA, 15 bp, Homo sapiens
tgcttctttggagcc

SEQ ID NO: 95501 - DNA, 15 bp, Homo sapiens
atgcttctttggagc

SEQ ID NO: 95502 - DNA, 15 bp, Homo sapiens
aatgcttctttggag

SEQ ID NO: 95503 - DNA, 15 bp, Homo sapiens
aaatgcttctttgga

SEQ ID NO: 95504 - DNA, 15 bp, Homo sapiens
caaatgcttctttgg

SEQ ID NO: 95505 - DNA, 15 bp, Homo sapiens
acaaatgcttctttg

SEQ ID NO: 95506 - DNA, 15 bp, Homo sapiens
cacaaatgcttcttt

SEQ ID NO: 95507 - DNA, 15 bp, Homo sapiens
ccacaaatgcttctt

SEQ ID NO: 95508 - DNA, 15 bp, Homo sapiens
tccacaaatgcttct

SEQ ID NO: 95509 - DNA, 15 bp, Homo sapiens
ctccacaaatgcttc

SEQ ID NO: 95510 - DNA, 15 bp, Homo sapiens
gctccacaaatgctt

SEQ ID NO: 95511 - DNA, 15 bp, Homo sapiens
tgctccacaaatgct

SEQ ID NO: 95512 - DNA, 15 bp, Homo sapiens
gtgctccacaaatgc

SEQ ID NO: 95513 - DNA, 15 bp, Homo sapiens
ggtgctccacaaatg

SEQ ID NO: 95514 - DNA, 15 bp, Homo sapiens
aggtgctccacaaat

SEQ ID NO: 95515 - DNA, 15 bp, Homo sapiens
aaggtgctccacaaa

SEQ ID NO: 95516 - DNA, 15 bp, Homo sapiens
gaaggtgctccacaa

SEQ ID NO: 95517 - DNA, 15 bp, Homo sapiens
agaaggtgctccaca

SEQ ID NO: 95518 - DNA, 15 bp, Homo sapiens
cagaaggtgctccac

SEQ ID NO: 95519 - DNA, 15 bp, Homo sapiens
acagaaggtgctcca

SEQ ID NO: 95520 - DNA, 15 bp, Homo sapiens
cacagaaggtgctcc

SEQ ID NO: 95521 - DNA, 15 bp, Homo sapiens
acacagaaggtgctc

SEQ ID NO: 95522 - DNA, 15 bp, Homo sapiens
cacacagaaggtgct

SEQ ID NO: 95523 - DNA, 15 bp, Homo sapiens
gcacacagaaggtgc

SEQ ID NO: 95524 - DNA, 15 bp, Homo sapiens
ggcacacagaaggtg

SEQ ID NO: 95525 - DNA, 15 bp, Homo sapiens
gggcacacagaaggt

SEQ ID NO: 95526 - DNA, 15 bp, Homo sapiens
ggggcacacagaagg

SEQ ID NO: 95527 - DNA, 15 bp, Homo sapiens
aggggcacacagaag

SEQ ID NO: 95528 - DNA, 15 bp, Homo sapiens
taggggcacacagaa

SEQ ID NO: 95529 - DNA, 15 bp, Homo sapiens
ctaggggcacacaga

SEQ ID NO: 95530 - DNA, 15 bp, Homo sapiens
cctaggggcacacag

SEQ ID NO: 95531 - DNA, 15 bp, Homo sapiens
acctaggggcacaca

SEQ ID NO: 95532 - DNA, 15 bp, Homo sapiens
tacctaggggcacac

SEQ ID NO: 95533 - DNA, 15 bp, Homo sapiens
gtacctaggggcaca

SEQ ID NO: 95534 - DNA, 15 bp, Homo sapiens
agtacctaggggcac

SEQ ID NO: 95535 - DNA, 15 bp, Homo sapiens
tagtacctaggggca

SEQ ID NO: 95536 - DNA, 15 bp, Homo sapiens
ctagtacctaggggc

SEQ ID NO: 95537 - DNA, 15 bp, Homo sapiens
tctagtacctagggg

SEQ ID NO: 95538 - DNA, 15 bp, Homo sapiens
atctagtacctaggg

SEQ ID NO: 95539 - DNA, 15 bp, Homo sapiens
catctagtacctagg

SEQ ID NO: 95540 - DNA, 15 bp, Homo sapiens
gcatctagtacctag

SEQ ID NO: 95541 - DNA, 15 bp, Homo sapiens
ggcatctagtaccta

SEQ ID NO: 95542 - DNA, 15 bp, Homo sapiens
aggcatctagtacct

SEQ ID NO: 95543 - DNA, 15 bp, Homo sapiens
caggcatctagtacc

SEQ ID NO: 95544 - DNA, 15 bp, Homo sapiens
ccaggcatctagtac

SEQ ID NO: 95545 - DNA, 15 bp, Homo sapiens
tccaggcatctagta

SEQ ID NO: 95546 - DNA, 15 bp, Homo sapiens
gtccaggcatctagt

SEQ ID NO: 95547 - DNA, 15 bp, Homo sapiens
cgtccaggcatctag

SEQ ID NO: 95548 - DNA, 15 bp, Homo sapiens
ccgtccaggcatcta

SEQ ID NO: 95549 - DNA, 15 bp, Homo sapiens
cccgtccaggcatct

SEQ ID NO: 95550 - DNA, 15 bp, Homo sapiens
ccccgtccaggcatc

SEQ ID NO: 95551 - DNA, 15 bp, Homo sapiens
accccgtccaggcat

SEQ ID NO: 95552 - DNA, 15 bp, Homo sapiens
gaccccgtccaggca

SEQ ID NO: 95553 - DNA, 15 bp, Homo sapiens
tgaccccgtccaggc

SEQ ID NO: 95554 - DNA, 15 bp, Homo sapiens
ctgaccccgtccagg

SEQ ID NO: 95555 - DNA, 15 bp, Homo sapiens
tctgaccccgtccag

SEQ ID NO: 95556 - DNA, 15 bp, Homo sapiens
ttctgaccccgtcca

SEQ ID NO: 95557 - DNA, 15 bp, Homo sapiens
cttctgaccccgtcc

SEQ ID NO: 95558 - DNA, 15 bp, Homo sapiens
ccttctgaccccgtc

SEQ ID NO: 95559 - DNA, 15 bp, Homo sapiens
tccttctgaccccgt

SEQ ID NO: 95560 - DNA, 15 bp, Homo sapiens
gtccttctgaccccg

SEQ ID NO: 95561 - DNA, 15 bp, Homo sapiens
ggtccttctgacccc

SEQ ID NO: 95562 - DNA, 15 bp, Homo sapiens
gggtccttctgaccc

SEQ ID NO: 95563 - DNA, 15 bp, Homo sapiens
agggtccttctgacc

SEQ ID NO: 95564 - DNA, 15 bp, Homo sapiens
cagggtccttctgac

SEQ ID NO: 95565 - DNA, 15 bp, Homo sapiens
tcagggtccttctga

SEQ ID NO: 95566 - DNA, 15 bp, Homo sapiens
gtcagggtccttctg

SEQ ID NO: 95567 - DNA, 15 bp, Homo sapiens
ggtcagggtccttct

SEQ ID NO: 95568 - DNA, 15 bp, Homo sapiens
gggtcagggtccttc

SEQ ID NO: 95569 - DNA, 15 bp, Homo sapiens
tgggtcagggtcctt

SEQ ID NO: 95570 - DNA, 15 bp, Homo sapiens
gtgggtcagggtcct

SEQ ID NO: 95571 - DNA, 15 bp, Homo sapiens
ggtgggtcagggtcc

SEQ ID NO: 95572 - DNA, 15 bp, Homo sapiens
aggtgggtcagggtc

SEQ ID NO: 95573 - DNA, 15 bp, Homo sapiens
aaggtgggtcagggt

SEQ ID NO: 95574 - DNA, 15 bp, Homo sapiens
caaggtgggtcaggg

SEQ ID NO: 95575 - DNA, 15 bp, Homo sapiens
tcaaggtgggtcagg

SEQ ID NO: 95576 - DNA, 15 bp, Homo sapiens
ttcaaggtgggtcag

SEQ ID NO: 95577 - DNA, 15 bp, Homo sapiens
gttcaaggtgggtca

SEQ ID NO: 95578 - DNA, 15 bp, Homo sapiens
agttcaaggtgggtc

SEQ ID NO: 95579 - DNA, 15 bp, Homo sapiens
aagttcaaggtgggt

SEQ ID NO: 95580 - DNA, 15 bp, Homo sapiens
caagttcaaggtggg

SEQ ID NO: 95581 - DNA, 15 bp, Homo sapiens
acaagttcaaggtgg

SEQ ID NO: 95582 - DNA, 15 bp, Homo sapiens
aacaagttcaaggtg

SEQ ID NO: 95583 - DNA, 15 bp, Homo sapiens
gaacaagttcaaggt

SEQ ID NO: 95584 - DNA, 15 bp, Homo sapiens
ggaacaagttcaagg

SEQ ID NO: 95585 - DNA, 15 bp, Homo sapiens
tggaacaagttcaag

SEQ ID NO: 95586 - DNA, 15 bp, Homo sapiens
gtggaacaagttcaa

SEQ ID NO: 95587 - DNA, 15 bp, Homo sapiens
tgtggaacaagttca

SEQ ID NO: 95588 - DNA, 15 bp, Homo sapiens
gtgtggaacaagttc

SEQ ID NO: 95589 - DNA, 15 bp, Homo sapiens
tgtgtggaacaagtt

SEQ ID NO: 95590 - DNA, 15 bp, Homo sapiens
ctgtgtggaacaagt

SEQ ID NO: 95591 - DNA, 15 bp, Homo sapiens
cctgtgtggaacaag

SEQ ID NO: 95592 - DNA, 15 bp, Homo sapiens
tcctgtgtggaacaa

SEQ ID NO: 95593 - DNA, 15 bp, Homo sapiens
atcctgtgtggaaca

SEQ ID NO: 95594 - DNA, 15 bp, Homo sapiens
catcctgtgtggaac

SEQ ID NO: 95595 - DNA, 15 bp, Homo sapiens
gcatcctgtgtggaa

SEQ ID NO: 95596 - DNA, 15 bp, Homo sapiens
ggcatcctgtgtgga

SEQ ID NO: 95597 - DNA, 15 bp, Homo sapiens
tggcatcctgtgtgg

SEQ ID NO: 95598 - DNA, 15 bp, Homo sapiens
ctggcatcctgtgtg

SEQ ID NO: 95599 - DNA, 15 bp, Homo sapiens
cctggcatcctgtgt

SEQ ID NO: 95600 - DNA, 15 bp, Homo sapiens
gcctggcatcctgtg

SEQ ID NO: 95601 - DNA, 15 bp, Homo sapiens
ggcctggcatcctgt

SEQ ID NO: 95602 - DNA, 15 bp, Homo sapiens
tggcctggcatcctg

SEQ ID NO: 95603 - DNA, 15 bp, Homo sapiens
ttggcctggcatcct

SEQ ID NO: 95604 - DNA, 15 bp, Homo sapiens
cttggcctggcatcc

SEQ ID NO: 95605 - DNA, 15 bp, Homo sapiens
ccttggcctggcatc

SEQ ID NO: 95606 - DNA, 15 bp, Homo sapiens
accttggcctggcat

SEQ ID NO: 95607 - DNA, 15 bp, Homo sapiens
caccttggcctggca

SEQ ID NO: 95608 - DNA, 15 bp, Homo sapiens
gctagggaaggacag

SEQ ID NO: 95609 - DNA, 15 bp, Homo sapiens
agctagggaaggaca

SEQ ID NO: 95610 - DNA, 15 bp, Homo sapiens
gagctagggaaggac

SEQ ID NO: 95611 - DNA, 15 bp, Homo sapiens
agagctagggaagga

SEQ ID NO: 95612 - DNA, 15 bp, Homo sapiens
aagagctagggaagg

SEQ ID NO: 95613 - DNA, 15 bp, Homo sapiens
aaagagctagggaag

SEQ ID NO: 95614 - DNA, 15 bp, Homo sapiens
aaaagagctagggaa

SEQ ID NO: 95615 - DNA, 15 bp, Homo sapiens
taaaagagctaggga

SEQ ID NO: 95616 - DNA, 15 bp, Homo sapiens
ataaaagagctaggg

SEQ ID NO: 95617 - DNA, 15 bp, Homo sapiens
tataaaagagctagg

SEQ ID NO: 95618 - DNA, 15 bp, Homo sapiens
atataaaagagctag

SEQ ID NO: 95619 - DNA, 15 bp, Homo sapiens
tatataaaagagcta

SEQ ID NO: 95620 - DNA, 15 bp, Homo sapiens
ctatataaaagagct

SEQ ID NO: 95621 - DNA, 15 bp, Homo sapiens
tctatataaaagagc

SEQ ID NO: 95622 - DNA, 15 bp, Homo sapiens
ctctatataaaagag

SEQ ID NO: 95623 - DNA, 15 bp, Homo sapiens
tctctatataaaaga

SEQ ID NO: 95624 - DNA, 15 bp, Homo sapiens
gtctctatataaaag

SEQ ID NO: 95625 - DNA, 15 bp, Homo sapiens
tgtctctatataaaa

SEQ ID NO: 95626 - DNA, 15 bp, Homo sapiens
ctgtctctatataaa

SEQ ID NO: 95627 - DNA, 15 bp, Homo sapiens
tctgtctctatataa

SEQ ID NO: 95628 - DNA, 15 bp, Homo sapiens
ctctgtctctatata

SEQ ID NO: 95629 - DNA, 15 bp, Homo sapiens
tctctgtctctatat

SEQ ID NO: 95630 - DNA, 15 bp, Homo sapiens
ctctctgtctctata

SEQ ID NO: 95631 - DNA, 15 bp, Homo sapiens
tctctctgtctctat

SEQ ID NO: 95632 - DNA, 15 bp, Homo sapiens
atctctctgtctcta

SEQ ID NO: 95633 - DNA, 15 bp, Homo sapiens
catctctctgtctct

SEQ ID NO: 95634 - DNA, 15 bp, Homo sapiens
ccatctctctgtctc

SEQ ID NO: 95635 - DNA, 15 bp, Homo sapiens
cccatctctctgtct

SEQ ID NO: 95636 - DNA, 15 bp, Homo sapiens
ccccatctctctgtc

SEQ ID NO: 95637 - DNA, 15 bp, Homo sapiens
accccatctctctgt

SEQ ID NO: 95638 - DNA, 15 bp, Homo sapiens
gaccccatctctctg

SEQ ID NO: 95639 - DNA, 15 bp, Homo sapiens
agaccccatctctct

SEQ ID NO: 95640 - DNA, 15 bp, Homo sapiens
gagaccccatctctc

SEQ ID NO: 95641 - DNA, 15 bp, Homo sapiens
cagtgagaccccatc

SEQ ID NO: 95642 - DNA, 15 bp, Homo sapiens
acagtgagaccccat

SEQ ID NO: 95643 - DNA, 15 bp, Homo sapiens
cacagtgagacccca

SEQ ID NO: 95644 - DNA, 15 bp, Homo sapiens
acacagtgagacccc

SEQ ID NO: 95645 - DNA, 15 bp, Homo sapiens
aacacagtgagaccc

SEQ ID NO: 95646 - DNA, 15 bp, Homo sapiens
caacacagtgagacc

SEQ ID NO: 95647 - DNA, 15 bp, Homo sapiens
gcaacacagtgagac

SEQ ID NO: 95648 - DNA, 15 bp, Homo sapiens
ggcaacacagtgaga

SEQ ID NO: 95649 - DNA, 15 bp, Homo sapiens
gggcaacacagtgag

SEQ ID NO: 95650 - DNA, 15 bp, Homo sapiens
tgggcaacacagtga

SEQ ID NO: 95651 - DNA, 15 bp, Homo sapiens
ctgggcaacacagtg

SEQ ID NO: 95652 - DNA, 15 bp, Homo sapiens
cctgggcaacacagt

SEQ ID NO: 95653 - DNA, 15 bp, Homo sapiens
gcctgggcaacacag

SEQ ID NO: 95654 - DNA, 15 bp, Homo sapiens
agcctgggcaacaca

SEQ ID NO: 95655 - DNA, 15 bp, Homo sapiens
cagcctgggcaacac

SEQ ID NO: 95656 - DNA, 15 bp, Homo sapiens
aagaccagcctgggc

SEQ ID NO: 95657 - DNA, 15 bp, Homo sapiens
caagaccagcctggg

SEQ ID NO: 95658 - DNA, 15 bp, Homo sapiens
tcaagaccagcctgg

SEQ ID NO: 95659 - DNA, 15 bp, Homo sapiens
aagttcaagaccagc

SEQ ID NO: 95660 - DNA, 15 bp, Homo sapiens
gaagttcaagaccag

SEQ ID NO: 95661 - DNA, 15 bp, Homo sapiens
agaagttcaagacca

SEQ ID NO: 95662 - DNA, 15 bp, Homo sapiens
cagaagttcaagacc

SEQ ID NO: 95663 - DNA, 15 bp, Homo sapiens
ccagaagttcaagac

SEQ ID NO: 95664 - DNA, 15 bp, Homo sapiens
cccagaagttcaaga

SEQ ID NO: 95665 - DNA, 15 bp, Homo sapiens
gcccagaagttcaag

SEQ ID NO: 95666 - DNA, 15 bp, Homo sapiens
agcccagaagttcaa

SEQ ID NO: 95667 - DNA, 15 bp, Homo sapiens
gagcccagaagttca

SEQ ID NO: 95668 - DNA, 15 bp, Homo sapiens
tgagcccagaagttc

SEQ ID NO: 95669 - DNA, 15 bp, Homo sapiens
ttgagcccagaagtt

SEQ ID NO: 95670 - DNA, 15 bp, Homo sapiens
cttgagcccagaagt

SEQ ID NO: 95671 - DNA, 15 bp, Homo sapiens
gcttgagcccagaag

SEQ ID NO: 95672 - DNA, 15 bp, Homo sapiens
cgcttgagcccagaa

SEQ ID NO: 95673 - DNA, 15 bp, Homo sapiens
tcgcttgagcccaga

SEQ ID NO: 95674 - DNA, 15 bp, Homo sapiens
atcgcttgagcccag

SEQ ID NO: 95675 - DNA, 15 bp, Homo sapiens
gatcgcttgagccca

SEQ ID NO: 95676 - DNA, 15 bp, Homo sapiens
ggatcgcttgagccc

SEQ ID NO: 95677 - DNA, 15 bp, Homo sapiens
aggatcgcttgagcc

SEQ ID NO: 95678 - DNA, 15 bp, Homo sapiens
gaggatcgcttgagc

SEQ ID NO: 95679 - DNA, 15 bp, Homo sapiens
ggaggatcgcttgag

SEQ ID NO: 95680 - DNA, 15 bp, Homo sapiens
gggaggatcgcttga

SEQ ID NO: 95681 - DNA, 15 bp, Homo sapiens
cgggaggatcgcttg

SEQ ID NO: 95682 - DNA, 15 bp, Homo sapiens
gcgggaggatcgctt

SEQ ID NO: 95683 - DNA, 15 bp, Homo sapiens
ggcgggaggatcgct

SEQ ID NO: 95684 - DNA, 15 bp, Homo sapiens
aggcgggaggatcgc

SEQ ID NO: 95685 - DNA, 15 bp, Homo sapiens
gaggcgggaggatcg

SEQ ID NO: 95686 - DNA, 15 bp, Homo sapiens
cgaggcgggaggatc

SEQ ID NO: 95687 - DNA, 15 bp, Homo sapiens
ccgaggcgggaggat

SEQ ID NO: 95688 - DNA, 15 bp, Homo sapiens
gccgaggcgggagga

SEQ ID NO: 95689 - DNA, 15 bp, Homo sapiens
ggccgaggcgggagg

SEQ ID NO: 95690 - DNA, 15 bp, Homo sapiens
aggccgaggcgggag

SEQ ID NO: 95691 - DNA, 15 bp, Homo sapiens
gaggccgaggcggga

SEQ ID NO: 95692 - DNA, 15 bp, Homo sapiens
ggaggccgaggcggg

SEQ ID NO: 95693 - DNA, 15 bp, Homo sapiens
gggaggccgaggcgg

SEQ ID NO: 95694 - DNA, 15 bp, Homo sapiens
tgggaggccgaggcg

SEQ ID NO: 95695 - DNA, 15 bp, Homo sapiens
ttgggaggccgaggc

SEQ ID NO: 95696 - DNA, 15 bp, Homo sapiens
tttgggaggccgagg

SEQ ID NO: 95697 - DNA, 15 bp, Homo sapiens
ctttgggaggccgag

SEQ ID NO: 95698 - DNA, 15 bp, Homo sapiens
actttgggaggccga

SEQ ID NO: 95699 - DNA, 15 bp, Homo sapiens
ctaatcccagcactt

SEQ ID NO: 95700 - DNA, 15 bp, Homo sapiens
tctaatcccagcact

SEQ ID NO: 95701 - DNA, 15 bp, Homo sapiens
ctctaatcccagcac

SEQ ID NO: 95702 - DNA, 15 bp, Homo sapiens
cctctaatcccagca

SEQ ID NO: 95703 - DNA, 15 bp, Homo sapiens
gcctctaatcccagc

SEQ ID NO: 95704 - DNA, 15 bp, Homo sapiens
tgcctctaatcccag

SEQ ID NO: 95705 - DNA, 15 bp, Homo sapiens
atgcctctaatccca

SEQ ID NO: 95706 - DNA, 15 bp, Homo sapiens
catgcctctaatccc

SEQ ID NO: 95707 - DNA, 15 bp, Homo sapiens
tcatgcctctaatcc

SEQ ID NO: 95708 - DNA, 15 bp, Homo sapiens
ctcatgcctctaatc

SEQ ID NO: 95709 - DNA, 15 bp, Homo sapiens
gctcatgcctctaat

SEQ ID NO: 95710 - DNA, 15 bp, Homo sapiens
ggctcatgcctctaa

SEQ ID NO: 95711 - DNA, 15 bp, Homo sapiens
tggctcatgcctcta

SEQ ID NO: 95712 - DNA, 15 bp, Homo sapiens
gtggctcatgcctct

SEQ ID NO: 95713 - DNA, 15 bp, Homo sapiens
ggtggctcatgcctc

SEQ ID NO: 95714 - DNA, 15 bp, Homo sapiens
aggtggctcatgcct

SEQ ID NO: 95715 - DNA, 15 bp, Homo sapiens
aaggtggctcatgcc

SEQ ID NO: 95716 - DNA, 15 bp, Homo sapiens
caaggtggctcatgc

SEQ ID NO: 95717 - DNA, 15 bp, Homo sapiens
gcaaggtggctcatg

SEQ ID NO: 95718 - DNA, 15 bp, Homo sapiens
ggcaaggtggctcat

SEQ ID NO: 95719 - DNA, 15 bp, Homo sapiens
gggcaaggtggctca

SEQ ID NO: 95720 - DNA, 15 bp, Homo sapiens
cgggcaaggtggctc

SEQ ID NO: 95721 - DNA, 15 bp, Homo sapiens
ccgggcaaggtggct

SEQ ID NO: 95722 - DNA, 15 bp, Homo sapiens
gccgggcaaggtggc

SEQ ID NO: 95723 - DNA, 15 bp, Homo sapiens
ggccgggcaaggtgg

SEQ ID NO: 95724 - DNA, 15 bp, Homo sapiens
aggccgggcaaggtg

SEQ ID NO: 95725 - DNA, 15 bp, Homo sapiens
gaggccgggcaaggt

SEQ ID NO: 95726 - DNA, 15 bp, Homo sapiens
ggaggccgggcaagg

SEQ ID NO: 95727 - DNA, 15 bp, Homo sapiens
aggaggccgggcaag

SEQ ID NO: 95728 - DNA, 15 bp, Homo sapiens
taggaggccgggcaa

SEQ ID NO: 95729 - DNA, 15 bp, Homo sapiens
ctaggaggccgggca

SEQ ID NO: 95730 - DNA, 15 bp, Homo sapiens
gctaggaggccgggc

SEQ ID NO: 95731 - DNA, 15 bp, Homo sapiens
agctaggaggccggg

SEQ ID NO: 95732 - DNA, 15 bp, Homo sapiens
gagctaggaggccgg

SEQ ID NO: 95733 - DNA, 15 bp, Homo sapiens
ggagctaggaggccg

SEQ ID NO: 95734 - DNA, 15 bp, Homo sapiens
aggagctaggaggcc

SEQ ID NO: 95735 - DNA, 15 bp, Homo sapiens
aaggagctaggaggc

SEQ ID NO: 95736 - DNA, 15 bp, Homo sapiens
gaaggagctaggagg

SEQ ID NO: 95737 - DNA, 15 bp, Homo sapiens
agaaggagctaggag

SEQ ID NO: 95738 - DNA, 15 bp, Homo sapiens
aagaaggagctagga

SEQ ID NO: 95739 - DNA, 15 bp, Homo sapiens
gaagaaggagctagg

SEQ ID NO: 95740 - DNA, 15 bp, Homo sapiens
cgaagaaggagctag

SEQ ID NO: 95741 - DNA, 15 bp, Homo sapiens
acgaagaaggagcta

SEQ ID NO: 95742 - DNA, 15 bp, Homo sapiens
gacgaagaaggagct

SEQ ID NO: 95743 - DNA, 15 bp, Homo sapiens
agacgaagaaggagc

SEQ ID NO: 95744 - DNA, 15 bp, Homo sapiens
gagacgaagaaggag

SEQ ID NO: 95745 - DNA, 15 bp, Homo sapiens
agagacgaagaagga

SEQ ID NO: 95746 - DNA, 15 bp, Homo sapiens
cagagacgaagaagg

SEQ ID NO: 95747 - DNA, 15 bp, Homo sapiens
gcagagacgaagaag

SEQ ID NO: 95748 - DNA, 15 bp, Homo sapiens
ggcagagacgaagaa

SEQ ID NO: 95749 - DNA, 15 bp, Homo sapiens
aggcagagacgaaga

SEQ ID NO: 95750 - DNA, 15 bp, Homo sapiens
gaggcagagacgaag

SEQ ID NO: 95751 - DNA, 15 bp, Homo sapiens
agaggcagagacgaa

SEQ ID NO: 95752 - DNA, 15 bp, Homo sapiens
cagaggcagagacga

SEQ ID NO: 95753 - DNA, 15 bp, Homo sapiens
gcagaggcagagacg

SEQ ID NO: 95754 - DNA, 15 bp, Homo sapiens
ggcagaggcagagac

SEQ ID NO: 95755 - DNA, 15 bp, Homo sapiens
gggcagaggcagaga

SEQ ID NO: 95756 - DNA, 15 bp, Homo sapiens
agggcagaggcagag

SEQ ID NO: 95757 - DNA, 15 bp, Homo sapiens
gagggcagaggcaga

SEQ ID NO: 95758 - DNA, 15 bp, Homo sapiens
agagggcagaggcag

SEQ ID NO: 95759 - DNA, 15 bp, Homo sapiens
cagagggcagaggca

SEQ ID NO: 95760 - DNA, 15 bp, Homo sapiens
gcagagggcagaggc

SEQ ID NO: 95761 - DNA, 15 bp, Homo sapiens
tgcagagggcagagg

SEQ ID NO: 95762 - DNA, 15 bp, Homo sapiens
atgcagagggcagag

SEQ ID NO: 95763 - DNA, 15 bp, Homo sapiens
gatgcagagggcaga

SEQ ID NO: 95764 - DNA, 15 bp, Homo sapiens
agatgcagagggcag

SEQ ID NO: 95765 - DNA, 15 bp, Homo sapiens
cagatgcagagggca

SEQ ID NO: 95766 - DNA, 15 bp, Homo sapiens
gcagatgcagagggc

SEQ ID NO: 95767 - DNA, 15 bp, Homo sapiens
agcagatgcagaggg

SEQ ID NO: 95768 - DNA, 15 bp, Homo sapiens
gagcagatgcagagg

SEQ ID NO: 95769 - DNA, 15 bp, Homo sapiens
agagcagatgcagag

SEQ ID NO: 95770 - DNA, 15 bp, Homo sapiens
gagagcagatgcaga

SEQ ID NO: 95771 - DNA, 15 bp, Homo sapiens
agagagcagatgcag

SEQ ID NO: 95772 - DNA, 15 bp, Homo sapiens
cagagagcagatgca

SEQ ID NO: 95773 - DNA, 15 bp, Homo sapiens
gcagagagcagatgc

SEQ ID NO: 95774 - DNA, 15 bp, Homo sapiens
tgcagagagcagatg

SEQ ID NO: 95775 - DNA, 15 bp, Homo sapiens
atgcagagagcagat

SEQ ID NO: 95776 - DNA, 15 bp, Homo sapiens
gatgcagagagcaga

SEQ ID NO: 95777 - DNA, 15 bp, Homo sapiens
agatgcagagagcag

SEQ ID NO: 95778 - DNA, 15 bp, Homo sapiens
cagatgcagagagca

SEQ ID NO: 95779 - DNA, 15 bp, Homo sapiens
acagatgcagagagc

SEQ ID NO: 95780 - DNA, 15 bp, Homo sapiens
gacagatgcagagag

SEQ ID NO: 95781 - DNA, 15 bp, Homo sapiens
agacagatgcagaga

SEQ ID NO: 95782 - DNA, 15 bp, Homo sapiens
gagacagatgcagag

SEQ ID NO: 95783 - DNA, 15 bp, Homo sapiens
agagacagatgcaga

SEQ ID NO: 95784 - DNA, 15 bp, Homo sapiens
cagagacagatgcag

SEQ ID NO: 95785 - DNA, 15 bp, Homo sapiens
acagagacagatgca

SEQ ID NO: 95786 - DNA, 15 bp, Homo sapiens
gacagagacagatgc

SEQ ID NO: 95787 - DNA, 15 bp, Homo sapiens
agacagagacagatg

SEQ ID NO: 95788 - DNA, 15 bp, Homo sapiens
gagacagagacagat

SEQ ID NO: 95789 - DNA, 15 bp, Homo sapiens
ggagacagagacaga

SEQ ID NO: 95790 - DNA, 15 bp, Homo sapiens
aggagacagagacag

SEQ ID NO: 95791 - DNA, 15 bp, Homo sapiens
aaggagacagagaca

SEQ ID NO: 95792 - DNA, 15 bp, Homo sapiens
gaaggagacagagac

SEQ ID NO: 95793 - DNA, 15 bp, Homo sapiens
agaaggagacagaga

SEQ ID NO: 95794 - DNA, 15 bp, Homo sapiens
gagaaggagacagag

SEQ ID NO: 95795 - DNA, 15 bp, Homo sapiens
agagaaggagacaga

SEQ ID NO: 95796 - DNA, 15 bp, Homo sapiens
gagagaaggagacag

SEQ ID NO: 95797 - DNA, 15 bp, Homo sapiens
cgagagaaggagaca

SEQ ID NO: 95798 - DNA, 15 bp, Homo sapiens
ccgagagaaggagac

SEQ ID NO: 95799 - DNA, 15 bp, Homo sapiens
gccgagagaaggaga

SEQ ID NO: 95800 - DNA, 15 bp, Homo sapiens
ggccgagagaaggag

SEQ ID NO: 95801 - DNA, 15 bp, Homo sapiens
aggccgagagaagga

SEQ ID NO: 95802 - DNA, 15 bp, Homo sapiens
gaggccgagagaagg

SEQ ID NO: 95803 - DNA, 15 bp, Homo sapiens
agaggccgagagaag

SEQ ID NO: 95804 - DNA, 15 bp, Homo sapiens
cagaggccgagagaa

SEQ ID NO: 95805 - DNA, 15 bp, Homo sapiens
gcagaggccgagaga

SEQ ID NO: 95806 - DNA, 15 bp, Homo sapiens
ggcagaggccgagag

SEQ ID NO: 95807 - DNA, 15 bp, Homo sapiens
gggcagaggccgaga

SEQ ID NO: 95808 - DNA, 15 bp, Homo sapiens
ggggcagaggccgag

SEQ ID NO: 95809 - DNA, 15 bp, Homo sapiens
cggggcagaggccga

SEQ ID NO: 95810 - DNA, 15 bp, Homo sapiens
acggggcagaggccg

SEQ ID NO: 95811 - DNA, 15 bp, Homo sapiens
aacggggcagaggcc

SEQ ID NO: 95812 - DNA, 15 bp, Homo sapiens
gaacggggcagaggc

SEQ ID NO: 95813 - DNA, 15 bp, Homo sapiens
ggaacggggcagagg

SEQ ID NO: 95814 - DNA, 15 bp, Homo sapiens
aggaacggggcagag

SEQ ID NO: 95815 - DNA, 15 bp, Homo sapiens
aaggaacggggcaga

SEQ ID NO: 95816 - DNA, 15 bp, Homo sapiens
gaaggaacggggcag

SEQ ID NO: 95817 - DNA, 15 bp, Homo sapiens
agaaggaacggggca

SEQ ID NO: 95818 - DNA, 15 bp, Homo sapiens
gagaaggaacggggc

SEQ ID NO: 95819 - DNA, 15 bp, Homo sapiens
agagaaggaacgggg

SEQ ID NO: 95820 - DNA, 15 bp, Homo sapiens
gagagaaggaacggg

SEQ ID NO: 95821 - DNA, 15 bp, Homo sapiens
ggagagaaggaacgg

SEQ ID NO: 95822 - DNA, 15 bp, Homo sapiens
gggagagaaggaacg

SEQ ID NO: 95823 - DNA, 15 bp, Homo sapiens
agggagagaaggaac

SEQ ID NO: 95824 - DNA, 15 bp, Homo sapiens
gagggagagaaggaa

SEQ ID NO: 95825 - DNA, 15 bp, Homo sapiens
agagggagagaagga

SEQ ID NO: 95826 - DNA, 15 bp, Homo sapiens
aagagggagagaagg

SEQ ID NO: 95827 - DNA, 15 bp, Homo sapiens
caagagggagagaag

SEQ ID NO: 95828 - DNA, 15 bp, Homo sapiens
ccaagagggagagaa

SEQ ID NO: 95829 - DNA, 15 bp, Homo sapiens
cccaagagggagaga

SEQ ID NO: 95830 - DNA, 15 bp, Homo sapiens
acccaagagggagag

SEQ ID NO: 95831 - DNA, 15 bp, Homo sapiens
gacccaagagggaga

SEQ ID NO: 95832 - DNA, 15 bp, Homo sapiens
agacccaagagggag

SEQ ID NO: 95833 - DNA, 15 bp, Homo sapiens
gagacccaagaggga

SEQ ID NO: 95834 - DNA, 15 bp, Homo sapiens
agagacccaagaggg

SEQ ID NO: 95835 - DNA, 15 bp, Homo sapiens
gagagacccaagagg

SEQ ID NO: 95836 - DNA, 15 bp, Homo sapiens
agagagacccaagag

SEQ ID NO: 95837 - DNA, 15 bp, Homo sapiens
cagagagacccaaga

SEQ ID NO: 95838 - DNA, 15 bp, Homo sapiens
ccagagagacccaag

SEQ ID NO: 95839 - DNA, 15 bp, Homo sapiens
gccagagagacccaa

SEQ ID NO: 95840 - DNA, 15 bp, Homo sapiens
agccagagagaccca

SEQ ID NO: 95841 - DNA, 15 bp, Homo sapiens
gagccagagagaccc

SEQ ID NO: 95842 - DNA, 15 bp, Homo sapiens
tgagccagagagacc

SEQ ID NO: 95843 - DNA, 15 bp, Homo sapiens
atgagccagagagac

SEQ ID NO: 95844 - DNA, 15 bp, Homo sapiens
gatgagccagagaga

SEQ ID NO: 95845 - DNA, 15 bp, Homo sapiens
ggatgagccagagag

SEQ ID NO: 95846 - DNA, 15 bp, Homo sapiens
gggatgagccagaga

SEQ ID NO: 95847 - DNA, 15 bp, Homo sapiens
ggggatgagccagag

SEQ ID NO: 95848 - DNA, 15 bp, Homo sapiens
tggggatgagccaga

SEQ ID NO: 95849 - DNA, 15 bp, Homo sapiens
atggggatgagccag

SEQ ID NO: 95850 - DNA, 15 bp, Homo sapiens
gatggggatgagcca

SEQ ID NO: 95851 - DNA, 15 bp, Homo sapiens
agatggggatgagcc

SEQ ID NO: 95852 - DNA, 15 bp, Homo sapiens
gagatggggatgagc

SEQ ID NO: 95853 - DNA, 15 bp, Homo sapiens
cgagatggggatgag

SEQ ID NO: 95854 - DNA, 15 bp, Homo sapiens
gcgagatggggatga

SEQ ID NO: 95855 - DNA, 15 bp, Homo sapiens
ggcgagatggggatg

SEQ ID NO: 95856 - DNA, 15 bp, Homo sapiens
gggcgagatggggat

SEQ ID NO: 95857 - DNA, 15 bp, Homo sapiens
cgggcgagatgggga

SEQ ID NO: 95858 - DNA, 15 bp, Homo sapiens
gcgggcgagatgggg

SEQ ID NO: 95859 - DNA, 15 bp, Homo sapiens
ggcgggcgagatggg

SEQ ID NO: 95860 - DNA, 15 bp, Homo sapiens
gggcgggcgagatgg

SEQ ID NO: 95861 - DNA, 15 bp, Homo sapiens
ggggcgggcgagatg

SEQ ID NO: 95862 - DNA, 15 bp, Homo sapiens
tggggcgggcgagat

SEQ ID NO: 95863 - DNA, 15 bp, Homo sapiens
atggggcgggcgaga

SEQ ID NO: 95864 - DNA, 15 bp, Homo sapiens
gatggggcgggcgag

SEQ ID NO: 95865 - DNA, 15 bp, Homo sapiens
ggatggggcgggcga

SEQ ID NO: 95866 - DNA, 15 bp, Homo sapiens
gggatggggcgggcg

SEQ ID NO: 95867 - DNA, 15 bp, Homo sapiens
tgggatggggcgggc

SEQ ID NO: 95868 - DNA, 15 bp, Homo sapiens
ctgggatggggcggg

SEQ ID NO: 95869 - DNA, 15 bp, Homo sapiens
gctgggatggggcgg

SEQ ID NO: 95870 - DNA, 15 bp, Homo sapiens
ggctgggatggggcg

SEQ ID NO: 95871 - DNA, 15 bp, Homo sapiens
gggctgggatggggc

SEQ ID NO: 95872 - DNA, 15 bp, Homo sapiens
agggctgggatgggg

SEQ ID NO: 95873 - DNA, 15 bp, Homo sapiens
aagggctgggatggg

SEQ ID NO: 95874 - DNA, 15 bp, Homo sapiens
gaagggctgggatgg

SEQ ID NO: 95875 - DNA, 15 bp, Homo sapiens
agaagggctgggatg

SEQ ID NO: 95876 - DNA, 15 bp, Homo sapiens
gagaagggctgggat

SEQ ID NO: 95877 - DNA, 15 bp, Homo sapiens
ggagaagggctggga

SEQ ID NO: 95878 - DNA, 15 bp, Homo sapiens
gggagaagggctggg

SEQ ID NO: 95879 - DNA, 15 bp, Homo sapiens
ggggagaagggctgg

SEQ ID NO: 95880 - DNA, 15 bp, Homo sapiens
cggggagaagggctg

SEQ ID NO: 95881 - DNA, 15 bp, Homo sapiens
gcggggagaagggct

SEQ ID NO: 95882 - DNA, 15 bp, Homo sapiens
ggcggggagaagggc

SEQ ID NO: 95883 - DNA, 15 bp, Homo sapiens
aggcggggagaaggg

SEQ ID NO: 95884 - DNA, 15 bp, Homo sapiens
gaggcggggagaagg

SEQ ID NO: 95885 - DNA, 15 bp, Homo sapiens
ggaggcggggagaag

SEQ ID NO: 95886 - DNA, 15 bp, Homo sapiens
gggaggcggggagaa

SEQ ID NO: 95887 - DNA, 15 bp, Homo sapiens
tgggaggcggggaga

SEQ ID NO: 95888 - DNA, 15 bp, Homo sapiens
gtgggaggcggggag

SEQ ID NO: 95889 - DNA, 15 bp, Homo sapiens
agtgggaggcgggga

SEQ ID NO: 95890 - DNA, 15 bp, Homo sapiens
cagtgggaggcgggg

SEQ ID NO: 95891 - DNA, 15 bp, Homo sapiens
acagtgggaggcggg

SEQ ID NO: 95892 - DNA, 15 bp, Homo sapiens
cacagtgggaggcgg

SEQ ID NO: 95893 - DNA, 15 bp, Homo sapiens
gcacagtgggaggcg

SEQ ID NO: 95894 - DNA, 15 bp, Homo sapiens
cgcacagtgggaggc

SEQ ID NO: 95895 - DNA, 15 bp, Homo sapiens
tcgcacagtgggagg

SEQ ID NO: 95896 - DNA, 15 bp, Homo sapiens
gtcgcacagtgggag

SEQ ID NO: 95897 - DNA, 15 bp, Homo sapiens
tgtcgcacagtggga

SEQ ID NO: 95898 - DNA, 15 bp, Homo sapiens
gtgtcgcacagtggg

SEQ ID NO: 95899 - DNA, 15 bp, Homo sapiens
ggtgtcgcacagtgg

SEQ ID NO: 95900 - DNA, 15 bp, Homo sapiens
gggtgtcgcacagtg

SEQ ID NO: 95901 - DNA, 15 bp, Homo sapiens
agggtgtcgcacagt

SEQ ID NO: 95902 - DNA, 15 bp, Homo sapiens
gagggtgtcgcacag

SEQ ID NO: 95903 - DNA, 15 bp, Homo sapiens
ggagggtgtcgcaca

SEQ ID NO: 95904 - DNA, 15 bp, Homo sapiens
gggagggtgtcgcac

SEQ ID NO: 95905 - DNA, 15 bp, Homo sapiens
cgggagggtgtcgca

SEQ ID NO: 95906 - DNA, 15 bp, Homo sapiens
gcgggagggtgtcgc

SEQ ID NO: 95907 - DNA, 15 bp, Homo sapiens
ggcgggagggtgtcg

SEQ ID NO: 95908 - DNA, 15 bp, Homo sapiens
gggcgggagggtgtc

SEQ ID NO: 95909 - DNA, 15 bp, Homo sapiens
agggcgggagggtgt

SEQ ID NO: 95910 - DNA, 15 bp, Homo sapiens
gagggcgggagggtg

SEQ ID NO: 95911 - DNA, 15 bp, Homo sapiens
agagggcgggagggt

SEQ ID NO: 95912 - DNA, 15 bp, Homo sapiens
gagagggcgggaggg

SEQ ID NO: 95913 - DNA, 15 bp, Homo sapiens
cgagagggcgggagg

SEQ ID NO: 95914 - DNA, 15 bp, Homo sapiens
ccgagagggcgggag

SEQ ID NO: 95915 - DNA, 15 bp, Homo sapiens
gccgagagggcggga

SEQ ID NO: 95916 - DNA, 15 bp, Homo sapiens
ggccgagagggcggg

SEQ ID NO: 95917 - DNA, 15 bp, Homo sapiens
cggccgagagggcgg

SEQ ID NO: 95918 - DNA, 15 bp, Homo sapiens
gcggccgagagggcg

SEQ ID NO: 95919 - DNA, 15 bp, Homo sapiens
tgcggccgagagggc

SEQ ID NO: 95920 - DNA, 15 bp, Homo sapiens
ctgcggccgagaggg

SEQ ID NO: 95921 - DNA, 15 bp, Homo sapiens
cctgcggccgagagg

SEQ ID NO: 95922 - DNA, 15 bp, Homo sapiens
ccctgcggccgagag

SEQ ID NO: 95923 - DNA, 15 bp, Homo sapiens
gccctgcggccgaga

SEQ ID NO: 95924 - DNA, 15 bp, Homo sapiens
cgccctgcggccgag

SEQ ID NO: 95925 - DNA, 15 bp, Homo sapiens
gcgccctgcggccga

SEQ ID NO: 95926 - DNA, 15 bp, Homo sapiens
agcgccctgcggccg

SEQ ID NO: 95927 - DNA, 15 bp, Homo sapiens
cagcgccctgcggcc

SEQ ID NO: 95928 - DNA, 15 bp, Homo sapiens
tcagcgccctgcggc

SEQ ID NO: 95929 - DNA, 15 bp, Homo sapiens
atcagcgccctgcgg

SEQ ID NO: 95930 - DNA, 15 bp, Homo sapiens
catcagcgccctgcg

SEQ ID NO: 95931 - DNA, 15 bp, Homo sapiens
ccatcagcgccctgc

SEQ ID NO: 95932 - DNA, 15 bp, Homo sapiens
tccatcagcgccctg

SEQ ID NO: 95933 - DNA, 15 bp, Homo sapiens
gtccatcagcgccct

SEQ ID NO: 95934 - DNA, 15 bp, Homo sapiens
cgtccatcagcgccc

SEQ ID NO: 95935 - DNA, 15 bp, Homo sapiens
tcgtccatcagcgcc

SEQ ID NO: 95936 - DNA, 15 bp, Homo sapiens
ctcgtccatcagcgc

SEQ ID NO: 95937 - DNA, 15 bp, Homo sapiens
tctcgtccatcagcg

SEQ ID NO: 95938 - DNA, 15 bp, Homo sapiens
gtctcgtccatcagc

SEQ ID NO: 95939 - DNA, 15 bp, Homo sapiens
ggtctcgtccatcag

SEQ ID NO: 95940 - DNA, 15 bp, Homo sapiens
tggtctcgtccatca

SEQ ID NO: 95941 - DNA, 15 bp, Homo sapiens
atggtctcgtccatc

SEQ ID NO: 95942 - DNA, 15 bp, Homo sapiens
catggtctcgtccat

SEQ ID NO: 95943 - DNA, 15 bp, Homo sapiens
tcatggtctcgtcca

SEQ ID NO: 95944 - DNA, 15 bp, Homo sapiens
ttcatggtctcgtcc

SEQ ID NO: 95945 - DNA, 15 bp, Homo sapiens
cttcatggtctcgtc

SEQ ID NO: 95946 - DNA, 15 bp, Homo sapiens
ccttcatggtctcgt

SEQ ID NO: 95947 - DNA, 15 bp, Homo sapiens
tccttcatggtctcg

SEQ ID NO: 95948 - DNA, 15 bp, Homo sapiens
ctccttcatggtctc

SEQ ID NO: 95949 - DNA, 15 bp, Homo sapiens
actccttcatggtct

SEQ ID NO: 95950 - DNA, 15 bp, Homo sapiens
aactccttcatggtc

SEQ ID NO: 95951 - DNA, 15 bp, Homo sapiens
caactccttcatggt

SEQ ID NO: 95952 - DNA, 15 bp, Homo sapiens
tcaactccttcatgg

SEQ ID NO: 95953 - DNA, 15 bp, Homo sapiens
ttcaactccttcatg

SEQ ID NO: 95954 - DNA, 15 bp, Homo sapiens
cttcaactccttcat

SEQ ID NO: 95955 - DNA, 15 bp, Homo sapiens
ccttcaactccttca

SEQ ID NO: 95956 - DNA, 15 bp, Homo sapiens
gccttcaactccttc

SEQ ID NO: 95957 - DNA, 15 bp, Homo sapiens
ggccttcaactcctt

SEQ ID NO: 95958 - DNA, 15 bp, Homo sapiens
aggccttcaactcct

SEQ ID NO: 95959 - DNA, 15 bp, Homo sapiens
taggccttcaactcc

SEQ ID NO: 95960 - DNA, 15 bp, Homo sapiens
gtaggccttcaactc

SEQ ID NO: 95961 - DNA, 15 bp, Homo sapiens
tgtaggccttcaact

SEQ ID NO: 95962 - DNA, 15 bp, Homo sapiens
ttgtaggccttcaac

SEQ ID NO: 95963 - DNA, 15 bp, Homo sapiens
tttgtaggccttcaa

SEQ ID NO: 95964 - DNA, 15 bp, Homo sapiens
atttgtaggccttca

SEQ ID NO: 95965 - DNA, 15 bp, Homo sapiens
gatttgtaggccttc

SEQ ID NO: 95966 - DNA, 15 bp, Homo sapiens
cgatttgtaggcctt

SEQ ID NO: 95967 - DNA, 15 bp, Homo sapiens
ccgatttgtaggcct

SEQ ID NO: 95968 - DNA, 15 bp, Homo sapiens
tccgatttgtaggcc

SEQ ID NO: 95969 - DNA, 15 bp, Homo sapiens
ttccgatttgtaggc

SEQ ID NO: 95970 - DNA, 15 bp, Homo sapiens
gttccgatttgtagg

SEQ ID NO: 95971 - DNA, 15 bp, Homo sapiens
agttccgatttgtag

SEQ ID NO: 95972 - DNA, 15 bp, Homo sapiens
cagttccgatttgta

SEQ ID NO: 95973 - DNA, 15 bp, Homo sapiens
ccagttccgatttgt

SEQ ID NO: 95974 - DNA, 15 bp, Homo sapiens
tccagttccgatttg

SEQ ID NO: 95975 - DNA, 15 bp, Homo sapiens
ctccagttccgattt

SEQ ID NO: 95976 - DNA, 15 bp, Homo sapiens
cctccagttccgatt

SEQ ID NO: 95977 - DNA, 15 bp, Homo sapiens
tcctccagttccgat

SEQ ID NO: 95978 - DNA, 15 bp, Homo sapiens
ttcctccagttccga

SEQ ID NO: 95979 - DNA, 15 bp, Homo sapiens
gttcctccagttccg

SEQ ID NO: 95980 - DNA, 15 bp, Homo sapiens
tgttcctccagttcc

SEQ ID NO: 95981 - DNA, 15 bp, Homo sapiens
ttgttcctccagttc

SEQ ID NO: 95982 - DNA, 15 bp, Homo sapiens
gttgttcctccagtt

SEQ ID NO: 95983 - DNA, 15 bp, Homo sapiens
agttgttcctccagt

SEQ ID NO: 95984 - DNA, 15 bp, Homo sapiens
cagttgttcctccag

SEQ ID NO: 95985 - DNA, 15 bp, Homo sapiens
tcagttgttcctcca

SEQ ID NO: 95986 - DNA, 15 bp, Homo sapiens
gtcagttgttcctcc

SEQ ID NO: 95987 - DNA, 15 bp, Homo sapiens
ggtcagttgttcctc

SEQ ID NO: 95988 - DNA, 15 bp, Homo sapiens
gggtcagttgttcct

SEQ ID NO: 95989 - DNA, 15 bp, Homo sapiens
ggggtcagttgttcc

SEQ ID NO: 95990 - DNA, 15 bp, Homo sapiens
cggggtcagttgttc

SEQ ID NO: 95991 - DNA, 15 bp, Homo sapiens
ccggggtcagttgtt

SEQ ID NO: 95992 - DNA, 15 bp, Homo sapiens
accggggtcagttgt

SEQ ID NO: 95993 - DNA, 15 bp, Homo sapiens
caccggggtcagttg

SEQ ID NO: 95994 - DNA, 15 bp, Homo sapiens
ccaccggggtcagtt

SEQ ID NO: 95995 - DNA, 15 bp, Homo sapiens
gccaccggggtcagt

SEQ ID NO: 95996 - DNA, 15 bp, Homo sapiens
cgccaccggggtcag

SEQ ID NO: 95997 - DNA, 15 bp, Homo sapiens
ccgccaccggggtca

SEQ ID NO: 95998 - DNA, 15 bp, Homo sapiens
tccgccaccggggtc

SEQ ID NO: 95999 - DNA, 15 bp, Homo sapiens
ctccgccaccggggt

SEQ ID NO: 96000 - DNA, 15 bp, Homo sapiens
cctccgccaccgggg

SEQ ID NO: 96001 - DNA, 15 bp, Homo sapiens
tcctccgccaccggg

SEQ ID NO: 96002 - DNA, 15 bp, Homo sapiens
ctcctccgccaccgg

SEQ ID NO: 96003 - DNA, 15 bp, Homo sapiens
tctcctccgccaccg

SEQ ID NO: 96004 - DNA, 15 bp, Homo sapiens
gtctcctccgccacc

SEQ ID NO: 96005 - DNA, 15 bp, Homo sapiens
cgtctcctccgccac

SEQ ID NO: 96006 - DNA, 15 bp, Homo sapiens
gcgtctcctccgcca

SEQ ID NO: 96007 - DNA, 15 bp, Homo sapiens
cgcgtctcctccgcc

SEQ ID NO: 96008 - DNA, 15 bp, Homo sapiens
ccgcgtctcctccgc

SEQ ID NO: 96009 - DNA, 15 bp, Homo sapiens
cccgcgtctcctccg

SEQ ID NO: 96010 - DNA, 15 bp, Homo sapiens
gcccgcgtctcctcc

SEQ ID NO: 96011 - DNA, 15 bp, Homo sapiens
tgcccgcgtctcctc

SEQ ID NO: 96012 - DNA, 15 bp, Homo sapiens
gtgcccgcgtctcct

SEQ ID NO: 96013 - DNA, 15 bp, Homo sapiens
cgtgcccgcgtctcc

SEQ ID NO: 96014 - DNA, 15 bp, Homo sapiens
ccgtgcccgcgtctc

SEQ ID NO: 96015 - DNA, 15 bp, Homo sapiens
gccgtgcccgcgtct

SEQ ID NO: 96016 - DNA, 15 bp, Homo sapiens
agccgtgcccgcgtc

SEQ ID NO: 96017 - DNA, 15 bp, Homo sapiens
cagccgtgcccgcgt

SEQ ID NO: 96018 - DNA, 15 bp, Homo sapiens
acagccgtgcccgcg

SEQ ID NO: 96019 - DNA, 15 bp, Homo sapiens
gacagccgtgcccgc

SEQ ID NO: 96020 - DNA, 15 bp, Homo sapiens
ggacagccgtgcccg

SEQ ID NO: 96021 - DNA, 15 bp, Homo sapiens
tggacagccgtgccc

SEQ ID NO: 96022 - DNA, 15 bp, Homo sapiens
ttggacagccgtgcc

SEQ ID NO: 96023 - DNA, 15 bp, Homo sapiens
cttggacagccgtgc

SEQ ID NO: 96024 - DNA, 15 bp, Homo sapiens
ccttggacagccgtg

SEQ ID NO: 96025 - DNA, 15 bp, Homo sapiens
tccttggacagccgt

SEQ ID NO: 96026 - DNA, 15 bp, Homo sapiens
ctccttggacagccg

SEQ ID NO: 96027 - DNA, 15 bp, Homo sapiens
gctccttggacagcc

SEQ ID NO: 96028 - DNA, 15 bp, Homo sapiens
agctccttggacagc

SEQ ID NO: 96029 - DNA, 15 bp, Homo sapiens
cagctccttggacag

SEQ ID NO: 96030 - DNA, 15 bp, Homo sapiens
gcagctccttggaca

SEQ ID NO: 96031 - DNA, 15 bp, Homo sapiens
tgcagctccttggac

SEQ ID NO: 96032 - DNA, 15 bp, Homo sapiens
ctgcagctccttgga

SEQ ID NO: 96033 - DNA, 15 bp, Homo sapiens
cctgcagctccttgg

SEQ ID NO: 96034 - DNA, 15 bp, Homo sapiens
gcctgcagctccttg

SEQ ID NO: 96035 - DNA, 15 bp, Homo sapiens
cgcctgcagctcctt

SEQ ID NO: 96036 - DNA, 15 bp, Homo sapiens
ccgcctgcagctcct

SEQ ID NO: 96037 - DNA, 15 bp, Homo sapiens
gccgcctgcagctcc

SEQ ID NO: 96038 - DNA, 15 bp, Homo sapiens
cgccgcctgcagctc

SEQ ID NO: 96039 - DNA, 15 bp, Homo sapiens
gcgccgcctgcagct

SEQ ID NO: 96040 - DNA, 15 bp, Homo sapiens
tgcgccgcctgcagc

SEQ ID NO: 96041 - DNA, 15 bp, Homo sapiens
ctgcgccgcctgcag

SEQ ID NO: 96042 - DNA, 15 bp, Homo sapiens
cctgcgccgcctgca

SEQ ID NO: 96043 - DNA, 15 bp, Homo sapiens
gcctgcgccgcctgc

SEQ ID NO: 96044 - DNA, 15 bp, Homo sapiens
ggcctgcgccgcctg

SEQ ID NO: 96045 - DNA, 15 bp, Homo sapiens
gggcctgcgccgcct

SEQ ID NO: 96046 - DNA, 15 bp, Homo sapiens
cgggcctgcgccgcc

SEQ ID NO: 96047 - DNA, 15 bp, Homo sapiens
ccgggcctgcgccgc

SEQ ID NO: 96048 - DNA, 15 bp, Homo sapiens
gccgggcctgcgccg

SEQ ID NO: 96049 - DNA, 15 bp, Homo sapiens
agccgggcctgcgcc

SEQ ID NO: 96050 - DNA, 15 bp, Homo sapiens
cagccgggcctgcgc

SEQ ID NO: 96051 - DNA, 15 bp, Homo sapiens
ccagccgggcctgcg

SEQ ID NO: 96052 - DNA, 15 bp, Homo sapiens
cccagccgggcctgc

SEQ ID NO: 96053 - DNA, 15 bp, Homo sapiens
gcccagccgggcctg

SEQ ID NO: 96054 - DNA, 15 bp, Homo sapiens
cgcccagccgggcct

SEQ ID NO: 96055 - DNA, 15 bp, Homo sapiens
gcgcccagccgggcc

SEQ ID NO: 96056 - DNA, 15 bp, Homo sapiens
cgcgcccagccgggc

SEQ ID NO: 96057 - DNA, 15 bp, Homo sapiens
ccgcgcccagccggg

SEQ ID NO: 96058 - DNA, 15 bp, Homo sapiens
tccgcgcccagccgg

SEQ ID NO: 96059 - DNA, 15 bp, Homo sapiens
gtccgcgcccagccg

SEQ ID NO: 96060 - DNA, 15 bp, Homo sapiens
tgtccgcgcccagcc

SEQ ID NO: 96061 - DNA, 15 bp, Homo sapiens
atgtccgcgcccagc

SEQ ID NO: 96062 - DNA, 15 bp, Homo sapiens
catgtccgcgcccag

SEQ ID NO: 96063 - DNA, 15 bp, Homo sapiens
ccatgtccgcgccca

SEQ ID NO: 96064 - DNA, 15 bp, Homo sapiens
tccatgtccgcgccc

SEQ ID NO: 96065 - DNA, 15 bp, Homo sapiens
ctccatgtccgcgcc

SEQ ID NO: 96066 - DNA, 15 bp, Homo sapiens
cctccatgtccgcgc

SEQ ID NO: 96067 - DNA, 15 bp, Homo sapiens
tcctccatgtccgcg

SEQ ID NO: 96068 - DNA, 15 bp, Homo sapiens
gtcctccatgtccgc

SEQ ID NO: 96069 - DNA, 15 bp, Homo sapiens
cgtcctccatgtccg

SEQ ID NO: 96070 - DNA, 15 bp, Homo sapiens
acgtcctccatgtcc

SEQ ID NO: 96071 - DNA, 15 bp, Homo sapiens
cacgtcctccatgtc

SEQ ID NO: 96072 - DNA, 15 bp, Homo sapiens
acacgtcctccatgt

SEQ ID NO: 96073 - DNA, 15 bp, Homo sapiens
cacacgtcctccatg

SEQ ID NO: 96074 - DNA, 15 bp, Homo sapiens
gcacacgtcctccat

SEQ ID NO: 96075 - DNA, 15 bp, Homo sapiens
cgcacacgtcctcca

SEQ ID NO: 96076 - DNA, 15 bp, Homo sapiens
ccgcacacgtcctcc

SEQ ID NO: 96077 - DNA, 15 bp, Homo sapiens
gccgcacacgtcctc

SEQ ID NO: 96078 - DNA, 15 bp, Homo sapiens
ggccgcacacgtcct

SEQ ID NO: 96079 - DNA, 15 bp, Homo sapiens
cggccgcacacgtcc

SEQ ID NO: 96080 - DNA, 15 bp, Homo sapiens
gcggccgcacacgtc

SEQ ID NO: 96081 - DNA, 15 bp, Homo sapiens
ggcggccgcacacgt

SEQ ID NO: 96082 - DNA, 15 bp, Homo sapiens
aggcggccgcacacg

SEQ ID NO: 96083 - DNA, 15 bp, Homo sapiens
caggcggccgcacac

SEQ ID NO: 96084 - DNA, 15 bp, Homo sapiens
ccaggcggccgcaca

SEQ ID NO: 96085 - DNA, 15 bp, Homo sapiens
accaggcggccgcac

SEQ ID NO: 96086 - DNA, 15 bp, Homo sapiens
caccaggcggccgca

SEQ ID NO: 96087 - DNA, 15 bp, Homo sapiens
gcaccaggcggccgc

SEQ ID NO: 96088 - DNA, 15 bp, Homo sapiens
tgcaccaggcggccg

SEQ ID NO: 96089 - DNA, 15 bp, Homo sapiens
ctgcaccaggcggcc

SEQ ID NO: 96090 - DNA, 15 bp, Homo sapiens
actgcaccaggcggc

SEQ ID NO: 96091 - DNA, 15 bp, Homo sapiens
tactgcaccaggcgg

SEQ ID NO: 96092 - DNA, 15 bp, Homo sapiens
gtactgcaccaggcg

SEQ ID NO: 96093 - DNA, 15 bp, Homo sapiens
ggtactgcaccaggc

SEQ ID NO: 96094 - DNA, 15 bp, Homo sapiens
cggtactgcaccagg

SEQ ID NO: 96095 - DNA, 15 bp, Homo sapiens
gcggtactgcaccag

SEQ ID NO: 96096 - DNA, 15 bp, Homo sapiens
cgcggtactgcacca

SEQ ID NO: 96097 - DNA, 15 bp, Homo sapiens
ccgcggtactgcacc

SEQ ID NO: 96098 - DNA, 15 bp, Homo sapiens
gccgcggtactgcac

SEQ ID NO: 96099 - DNA, 15 bp, Homo sapiens
cgccgcggtactgca

SEQ ID NO: 96100 - DNA, 15 bp, Homo sapiens
tcgccgcggtactgc

SEQ ID NO: 96101 - DNA, 15 bp, Homo sapiens
ctcgccgcggtactg

SEQ ID NO: 96102 - DNA, 15 bp, Homo sapiens
cctcgccgcggtact

SEQ ID NO: 96103 - DNA, 15 bp, Homo sapiens
acctcgccgcggtac

SEQ ID NO: 96104 - DNA, 15 bp, Homo sapiens
cacctcgccgcggta

SEQ ID NO: 96105 - DNA, 15 bp, Homo sapiens
gcacctcgccgcggt

SEQ ID NO: 96106 - DNA, 15 bp, Homo sapiens
tgcacctcgccgcgg

SEQ ID NO: 96107 - DNA, 15 bp, Homo sapiens
ctgcacctcgccgcg

SEQ ID NO: 96108 - DNA, 15 bp, Homo sapiens
cctgcacctcgccgc

SEQ ID NO: 96109 - DNA, 15 bp, Homo sapiens
gcctgcacctcgccg

SEQ ID NO: 96110 - DNA, 15 bp, Homo sapiens
ggcctgcacctcgcc

SEQ ID NO: 96111 - DNA, 15 bp, Homo sapiens
tggcctgcacctcgc

SEQ ID NO: 96112 - DNA, 15 bp, Homo sapiens
atggcctgcacctcg

SEQ ID NO: 96113 - DNA, 15 bp, Homo sapiens
catggcctgcacctc

SEQ ID NO: 96114 - DNA, 15 bp, Homo sapiens
gcatggcctgcacct

SEQ ID NO: 96115 - DNA, 15 bp, Homo sapiens
agcatggcctgcacc

SEQ ID NO: 96116 - DNA, 15 bp, Homo sapiens
gagcatggcctgcac

SEQ ID NO: 96117 - DNA, 15 bp, Homo sapiens
cgagcatggcctgca

SEQ ID NO: 96118 - DNA, 15 bp, Homo sapiens
ccgagcatggcctgc

SEQ ID NO: 96119 - DNA, 15 bp, Homo sapiens
gccgagcatggcctg

SEQ ID NO: 96120 - DNA, 15 bp, Homo sapiens
ggccgagcatggcct

SEQ ID NO: 96121 - DNA, 15 bp, Homo sapiens
tggccgagcatggcc

SEQ ID NO: 96122 - DNA, 15 bp, Homo sapiens
ctggccgagcatggc

SEQ ID NO: 96123 - DNA, 15 bp, Homo sapiens
tctggccgagcatgg

SEQ ID NO: 96124 - DNA, 15 bp, Homo sapiens
ctctggccgagcatg

SEQ ID NO: 96125 - DNA, 15 bp, Homo sapiens
gctctggccgagcat

SEQ ID NO: 96126 - DNA, 15 bp, Homo sapiens
tgctctggccgagca

SEQ ID NO: 96127 - DNA, 15 bp, Homo sapiens
gtgctctggccgagc

SEQ ID NO: 96128 - DNA, 15 bp, Homo sapiens
ggtgctctggccgag

SEQ ID NO: 96129 - DNA, 15 bp, Homo sapiens
cggtgctctggccga

SEQ ID NO: 96130 - DNA, 15 bp, Homo sapiens
tcggtgctctggccg

SEQ ID NO: 96131 - DNA, 15 bp, Homo sapiens
ctcggtgctctggcc

SEQ ID NO: 96132 - DNA, 15 bp, Homo sapiens
cctcggtgctctggc

SEQ ID NO: 96133 - DNA, 15 bp, Homo sapiens
tcctcggtgctctgg

SEQ ID NO: 96134 - DNA, 15 bp, Homo sapiens
ctcctcggtgctctg

SEQ ID NO: 96135 - DNA, 15 bp, Homo sapiens
gctcctcggtgctct

SEQ ID NO: 96136 - DNA, 15 bp, Homo sapiens
agctcctcggtgctc

SEQ ID NO: 96137 - DNA, 15 bp, Homo sapiens
cagctcctcggtgct

SEQ ID NO: 96138 - DNA, 15 bp, Homo sapiens
gcagctcctcggtgc

SEQ ID NO: 96139 - DNA, 15 bp, Homo sapiens
cgcagctcctcggtg

SEQ ID NO: 96140 - DNA, 15 bp, Homo sapiens
ccgcagctcctcggt

SEQ ID NO: 96141 - DNA, 15 bp, Homo sapiens
cccgcagctcctcgg

SEQ ID NO: 96142 - DNA, 15 bp, Homo sapiens
acccgcagctcctcg

SEQ ID NO: 96143 - DNA, 15 bp, Homo sapiens
cacccgcagctcctc

SEQ ID NO: 96144 - DNA, 15 bp, Homo sapiens
gcacccgcagctcct

SEQ ID NO: 96145 - DNA, 15 bp, Homo sapiens
cgcacccgcagctcc

SEQ ID NO: 96146 - DNA, 15 bp, Homo sapiens
gcgcacccgcagctc

SEQ ID NO: 96147 - DNA, 15 bp, Homo sapiens
ggcgcacccgcagct

SEQ ID NO: 96148 - DNA, 15 bp, Homo sapiens
aggcgcacccgcagc

SEQ ID NO: 96149 - DNA, 15 bp, Homo sapiens
gaggcgcacccgcag

SEQ ID NO: 96150 - DNA, 15 bp, Homo sapiens
cgaggcgcacccgca

SEQ ID NO: 96151 - DNA, 15 bp, Homo sapiens
gcgaggcgcacccgc

SEQ ID NO: 96152 - DNA, 15 bp, Homo sapiens
ggcgaggcgcacccg

SEQ ID NO: 96153 - DNA, 15 bp, Homo sapiens
aggcgaggcgcaccc

SEQ ID NO: 96154 - DNA, 15 bp, Homo sapiens
gaggcgaggcgcacc

SEQ ID NO: 96155 - DNA, 15 bp, Homo sapiens
ggaggcgaggcgcac

SEQ ID NO: 96156 - DNA, 15 bp, Homo sapiens
gggaggcgaggcgca

SEQ ID NO: 96157 - DNA, 15 bp, Homo sapiens
tgggaggcgaggcgc

SEQ ID NO: 96158 - DNA, 15 bp, Homo sapiens
gtgggaggcgaggcg

SEQ ID NO: 96159 - DNA, 15 bp, Homo sapiens
ggtgggaggcgaggc

SEQ ID NO: 96160 - DNA, 15 bp, Homo sapiens
aggtgggaggcgagg

SEQ ID NO: 96161 - DNA, 15 bp, Homo sapiens
caggtgggaggcgag

SEQ ID NO: 96162 - DNA, 15 bp, Homo sapiens
gcaggtgggaggcga

SEQ ID NO: 96163 - DNA, 15 bp, Homo sapiens
cgcaggtgggaggcg

SEQ ID NO: 96164 - DNA, 15 bp, Homo sapiens
gcgcaggtgggaggc

SEQ ID NO: 96165 - DNA, 15 bp, Homo sapiens
tgcgcaggtgggagg

SEQ ID NO: 96166 - DNA, 15 bp, Homo sapiens
ttgcgcaggtgggag

SEQ ID NO: 96167 - DNA, 15 bp, Homo sapiens
cttgcgcaggtggga

SEQ ID NO: 96168 - DNA, 15 bp, Homo sapiens
gcttgcgcaggtggg

SEQ ID NO: 96169 - DNA, 15 bp, Homo sapiens
agcttgcgcaggtgg

SEQ ID NO: 96170 - DNA, 15 bp, Homo sapiens
cagcttgcgcaggtg

SEQ ID NO: 96171 - DNA, 15 bp, Homo sapiens
gcagcttgcgcaggt

SEQ ID NO: 96172 - DNA, 15 bp, Homo sapiens
cgcagcttgcgcagg

SEQ ID NO: 96173 - DNA, 15 bp, Homo sapiens
acgcagcttgcgcag

SEQ ID NO: 96174 - DNA, 15 bp, Homo sapiens
tacgcagcttgcgca

SEQ ID NO: 96175 - DNA, 15 bp, Homo sapiens
ttacgcagcttgcgc

SEQ ID NO: 96176 - DNA, 15 bp, Homo sapiens
cttacgcagcttgcg

SEQ ID NO: 96177 - DNA, 15 bp, Homo sapiens
gcttacgcagcttgc

SEQ ID NO: 96178 - DNA, 15 bp, Homo sapiens
cgcttacgcagcttg

SEQ ID NO: 96179 - DNA, 15 bp, Homo sapiens
ccgcttacgcagctt

SEQ ID NO: 96180 - DNA, 15 bp, Homo sapiens
gccgcttacgcagct

SEQ ID NO: 96181 - DNA, 15 bp, Homo sapiens
agccgcttacgcagc

SEQ ID NO: 96182 - DNA, 15 bp, Homo sapiens
gagccgcttacgcag

SEQ ID NO: 96183 - DNA, 15 bp, Homo sapiens
ggagccgcttacgca

SEQ ID NO: 96184 - DNA, 15 bp, Homo sapiens
aggagccgcttacgc

SEQ ID NO: 96185 - DNA, 15 bp, Homo sapiens
gaggagccgcttacg

SEQ ID NO: 96186 - DNA, 15 bp, Homo sapiens
ggaggagccgcttac

SEQ ID NO: 96187 - DNA, 15 bp, Homo sapiens
cggaggagccgctta

SEQ ID NO: 96188 - DNA, 15 bp, Homo sapiens
gcggaggagccgctt

SEQ ID NO: 96189 - DNA, 15 bp, Homo sapiens
cgcggaggagccgct

SEQ ID NO: 96190 - DNA, 15 bp, Homo sapiens
tcgcggaggagccgc

SEQ ID NO: 96191 - DNA, 15 bp, Homo sapiens
atcgcggaggagccg

SEQ ID NO: 96192 - DNA, 15 bp, Homo sapiens
catcgcggaggagcc

SEQ ID NO: 96193 - DNA, 15 bp, Homo sapiens
gcatcgcggaggagc

SEQ ID NO: 96194 - DNA, 15 bp, Homo sapiens
ggcatcgcggaggag

SEQ ID NO: 96195 - DNA, 15 bp, Homo sapiens
cggcatcgcggagga

SEQ ID NO: 96196 - DNA, 15 bp, Homo sapiens
tcggcatcgcggagg

SEQ ID NO: 96197 - DNA, 15 bp, Homo sapiens
atcggcatcgcggag

SEQ ID NO: 96198 - DNA, 15 bp, Homo sapiens
catcggcatcgcgga

SEQ ID NO: 96199 - DNA, 15 bp, Homo sapiens
tcatcggcatcgcgg

SEQ ID NO: 96200 - DNA, 15 bp, Homo sapiens
gtcatcggcatcgcg

SEQ ID NO: 96201 - DNA, 15 bp, Homo sapiens
ggtcatcggcatcgc

SEQ ID NO: 96202 - DNA, 15 bp, Homo sapiens
aggtcatcggcatcg

SEQ ID NO: 96203 - DNA, 15 bp, Homo sapiens
caggtcatcggcatc

SEQ ID NO: 96204 - DNA, 15 bp, Homo sapiens
gcaggtcatcggcat

SEQ ID NO: 96205 - DNA, 15 bp, Homo sapiens
tgcaggtcatcggca

SEQ ID NO: 96206 - DNA, 15 bp, Homo sapiens
ctgcaggtcatcggc

SEQ ID NO: 96207 - DNA, 15 bp, Homo sapiens
tctgcaggtcatcgg

SEQ ID NO: 96208 - DNA, 15 bp, Homo sapiens
ttctgcaggtcatcg

SEQ ID NO: 96209 - DNA, 15 bp, Homo sapiens
cttctgcaggtcatc

SEQ ID NO: 96210 - DNA, 15 bp, Homo sapiens
gcttctgcaggtcat

SEQ ID NO: 96211 - DNA, 15 bp, Homo sapiens
cgcttctgcaggtca

SEQ ID NO: 96212 - DNA, 15 bp, Homo sapiens
gcgcttctgcaggtc

SEQ ID NO: 96213 - DNA, 15 bp, Homo sapiens
ggcgcttctgcaggt

SEQ ID NO: 96214 - DNA, 15 bp, Homo sapiens
aggcgcttctgcagg

SEQ ID NO: 96215 - DNA, 15 bp, Homo sapiens
caggcgcttctgcag

SEQ ID NO: 96216 - DNA, 15 bp, Homo sapiens
ccaggcgcttctgca

SEQ ID NO: 96217 - DNA, 15 bp, Homo sapiens
gccaggcgcttctgc

SEQ ID NO: 96218 - DNA, 15 bp, Homo sapiens
tgccaggcgcttctg

SEQ ID NO: 96219 - DNA, 15 bp, Homo sapiens
ctgccaggcgcttct

SEQ ID NO: 96220 - DNA, 15 bp, Homo sapiens
actgccaggcgcttc

SEQ ID NO: 96221 - DNA, 15 bp, Homo sapiens
cactgccaggcgctt

SEQ ID NO: 96222 - DNA, 15 bp, Homo sapiens
acactgccaggcgct

SEQ ID NO: 96223 - DNA, 15 bp, Homo sapiens
tacactgccaggcgc

SEQ ID NO: 96224 - DNA, 15 bp, Homo sapiens
gtacactgccaggcg

SEQ ID NO: 96225 - DNA, 15 bp, Homo sapiens
ggtacactgccaggc

SEQ ID NO: 96226 - DNA, 15 bp, Homo sapiens
tggtacactgccagg

SEQ ID NO: 96227 - DNA, 15 bp, Homo sapiens
ctggtacactgccag

SEQ ID NO: 96228 - DNA, 15 bp, Homo sapiens
cctggtacactgcca

SEQ ID NO: 96229 - DNA, 15 bp, Homo sapiens
gcctggtacactgcc

SEQ ID NO: 96230 - DNA, 15 bp, Homo sapiens
ggcctggtacactgc

SEQ ID NO: 96231 - DNA, 15 bp, Homo sapiens
cggcctggtacactg

SEQ ID NO: 96232 - DNA, 15 bp, Homo sapiens
ccggcctggtacact

SEQ ID NO: 96233 - DNA, 15 bp, Homo sapiens
cccggcctggtacac

SEQ ID NO: 96234 - DNA, 15 bp, Homo sapiens
ccccggcctggtaca

SEQ ID NO: 96235 - DNA, 15 bp, Homo sapiens
gccccggcctggtac

SEQ ID NO: 96236 - DNA, 15 bp, Homo sapiens
ggccccggcctggta

SEQ ID NO: 96237 - DNA, 15 bp, Homo sapiens
gggccccggcctggt

SEQ ID NO: 96238 - DNA, 15 bp, Homo sapiens
cgggccccggcctgg

SEQ ID NO: 96239 - DNA, 15 bp, Homo sapiens
gcgggccccggcctg

SEQ ID NO: 96240 - DNA, 15 bp, Homo sapiens
cgcgggccccggcct

SEQ ID NO: 96241 - DNA, 15 bp, Homo sapiens
tcgcgggccccggcc

SEQ ID NO: 96242 - DNA, 15 bp, Homo sapiens
ctcgcgggccccggc

SEQ ID NO: 96243 - DNA, 15 bp, Homo sapiens
cctcgcgggccccgg

SEQ ID NO: 96244 - DNA, 15 bp, Homo sapiens
ccctcgcgggccccg

SEQ ID NO: 96245 - DNA, 15 bp, Homo sapiens
gccctcgcgggcccc

SEQ ID NO: 96246 - DNA, 15 bp, Homo sapiens
cgccctcgcgggccc

SEQ ID NO: 96247 - DNA, 15 bp, Homo sapiens
gcgccctcgcgggcc

SEQ ID NO: 96248 - DNA, 15 bp, Homo sapiens
ggcgccctcgcgggc

SEQ ID NO: 96249 - DNA, 15 bp, Homo sapiens
cggcgccctcgcggg

SEQ ID NO: 96250 - DNA, 15 bp, Homo sapiens
tcggcgccctcgcgg

SEQ ID NO: 96251 - DNA, 15 bp, Homo sapiens
ctcggcgccctcgcg

SEQ ID NO: 96252 - DNA, 15 bp, Homo sapiens
gctcggcgccctcgc

SEQ ID NO: 96253 - DNA, 15 bp, Homo sapiens
cgctcggcgccctcg

SEQ ID NO: 96254 - DNA, 15 bp, Homo sapiens
gcgctcggcgccctc

SEQ ID NO: 96255 - DNA, 15 bp, Homo sapiens
cgcgctcggcgccct

SEQ ID NO: 96256 - DNA, 15 bp, Homo sapiens
ccgcgctcggcgccc

SEQ ID NO: 96257 - DNA, 15 bp, Homo sapiens
gccgcgctcggcgcc

SEQ ID NO: 96258 - DNA, 15 bp, Homo sapiens
ggccgcgctcggcgc

SEQ ID NO: 96259 - DNA, 15 bp, Homo sapiens
aggccgcgctcggcg

SEQ ID NO: 96260 - DNA, 15 bp, Homo sapiens
gaggccgcgctcggc

SEQ ID NO: 96261 - DNA, 15 bp, Homo sapiens
tgaggccgcgctcgg

SEQ ID NO: 96262 - DNA, 15 bp, Homo sapiens
ctgaggccgcgctcg

SEQ ID NO: 96263 - DNA, 15 bp, Homo sapiens
gctgaggccgcgctc

SEQ ID NO: 96264 - DNA, 15 bp, Homo sapiens
cgctgaggccgcgct

SEQ ID NO: 96265 - DNA, 15 bp, Homo sapiens
gcgctgaggccgcgc

SEQ ID NO: 96266 - DNA, 15 bp, Homo sapiens
ggcgctgaggccgcg

SEQ ID NO: 96267 - DNA, 15 bp, Homo sapiens
tggcgctgaggccgc

SEQ ID NO: 96268 - DNA, 15 bp, Homo sapiens
atggcgctgaggccg

SEQ ID NO: 96269 - DNA, 15 bp, Homo sapiens
gatggcgctgaggcc

SEQ ID NO: 96270 - DNA, 15 bp, Homo sapiens
ggatggcgctgaggc

SEQ ID NO: 96271 - DNA, 15 bp, Homo sapiens
cggatggcgctgagg

SEQ ID NO: 96272 - DNA, 15 bp, Homo sapiens
gcggatggcgctgag

SEQ ID NO: 96273 - DNA, 15 bp, Homo sapiens
cgcggatggcgctga

SEQ ID NO: 96274 - DNA, 15 bp, Homo sapiens
tcgcggatggcgctg

SEQ ID NO: 96275 - DNA, 15 bp, Homo sapiens
ctcgcggatggcgct

SEQ ID NO: 96276 - DNA, 15 bp, Homo sapiens
gctcgcggatggcgc

SEQ ID NO: 96277 - DNA, 15 bp, Homo sapiens
cgctcgcggatggcg

SEQ ID NO: 96278 - DNA, 15 bp, Homo sapiens
gcgctcgcggatggc

SEQ ID NO: 96279 - DNA, 15 bp, Homo sapiens
ggcgctcgcggatgg

SEQ ID NO: 96280 - DNA, 15 bp, Homo sapiens
aggcgctcgcggatg

SEQ ID NO: 96281 - DNA, 15 bp, Homo sapiens
caggcgctcgcggat

SEQ ID NO: 96282 - DNA, 15 bp, Homo sapiens
ccaggcgctcgcgga

SEQ ID NO: 96283 - DNA, 15 bp, Homo sapiens
cccaggcgctcgcgg

SEQ ID NO: 96284 - DNA, 15 bp, Homo sapiens
ccccaggcgctcgcg

SEQ ID NO: 96285 - DNA, 15 bp, Homo sapiens
gccccaggcgctcgc

SEQ ID NO: 96286 - DNA, 15 bp, Homo sapiens
ggccccaggcgctcg

SEQ ID NO: 96287 - DNA, 15 bp, Homo sapiens
gggccccaggcgctc

SEQ ID NO: 96288 - DNA, 15 bp, Homo sapiens
ggggccccaggcgct

SEQ ID NO: 96289 - DNA, 15 bp, Homo sapiens
aggggccccaggcgc

SEQ ID NO: 96290 - DNA, 15 bp, Homo sapiens
caggggccccaggcg

SEQ ID NO: 96291 - DNA, 15 bp, Homo sapiens
ccaggggccccaggc

SEQ ID NO: 96292 - DNA, 15 bp, Homo sapiens
accaggggccccagg

SEQ ID NO: 96293 - DNA, 15 bp, Homo sapiens
caccaggggccccag

SEQ ID NO: 96294 - DNA, 15 bp, Homo sapiens
ccaccaggggcccca

SEQ ID NO: 96295 - DNA, 15 bp, Homo sapiens
tccaccaggggcccc

SEQ ID NO: 96296 - DNA, 15 bp, Homo sapiens
ttccaccaggggccc

SEQ ID NO: 96297 - DNA, 15 bp, Homo sapiens
gttccaccaggggcc

SEQ ID NO: 96298 - DNA, 15 bp, Homo sapiens
tgttccaccaggggc

SEQ ID NO: 96299 - DNA, 15 bp, Homo sapiens
ctgttccaccagggg

SEQ ID NO: 96300 - DNA, 15 bp, Homo sapiens
cctgttccaccaggg

SEQ ID NO: 96301 - DNA, 15 bp, Homo sapiens
ccctgttccaccagg

SEQ ID NO: 96302 - DNA, 15 bp, Homo sapiens
gccctgttccaccag

SEQ ID NO: 96303 - DNA, 15 bp, Homo sapiens
ggccctgttccacca

SEQ ID NO: 96304 - DNA, 15 bp, Homo sapiens
cggccctgttccacc

SEQ ID NO: 96305 - DNA, 15 bp, Homo sapiens
gcggccctgttccac

SEQ ID NO: 96306 - DNA, 15 bp, Homo sapiens
cgcggccctgttcca

SEQ ID NO: 96307 - DNA, 15 bp, Homo sapiens
acgcggccctgttcc

SEQ ID NO: 96308 - DNA, 15 bp, Homo sapiens
cacgcggccctgttc

SEQ ID NO: 96309 - DNA, 15 bp, Homo sapiens
gcacgcggccctgtt

SEQ ID NO: 96310 - DNA, 15 bp, Homo sapiens
cgcacgcggccctgt

SEQ ID NO: 96311 - DNA, 15 bp, Homo sapiens
ccgcacgcggccctg

SEQ ID NO: 96312 - DNA, 15 bp, Homo sapiens
cccgcacgcggccct

SEQ ID NO: 96313 - DNA, 15 bp, Homo sapiens
gcccgcacgcggccc

SEQ ID NO: 96314 - DNA, 15 bp, Homo sapiens
ggcccgcacgcggcc

SEQ ID NO: 96315 - DNA, 15 bp, Homo sapiens
cggcccgcacgcggc

SEQ ID NO: 96316 - DNA, 15 bp, Homo sapiens
gcggcccgcacgcgg

SEQ ID NO: 96317 - DNA, 15 bp, Homo sapiens
ggcggcccgcacgcg

SEQ ID NO: 96318 - DNA, 15 bp, Homo sapiens
tggcggcccgcacgc

SEQ ID NO: 96319 - DNA, 15 bp, Homo sapiens
gtggcggcccgcacg

SEQ ID NO: 96320 - DNA, 15 bp, Homo sapiens
agtggcggcccgcac

SEQ ID NO: 96321 - DNA, 15 bp, Homo sapiens
cagtggcggcccgca

SEQ ID NO: 96322 - DNA, 15 bp, Homo sapiens
acagtggcggcccgc

SEQ ID NO: 96323 - DNA, 15 bp, Homo sapiens
cacagtggcggcccg

SEQ ID NO: 96324 - DNA, 15 bp, Homo sapiens
ccacagtggcggccc

SEQ ID NO: 96325 - DNA, 15 bp, Homo sapiens
cccacagtggcggcc

SEQ ID NO: 96326 - DNA, 15 bp, Homo sapiens
gcccacagtggcggc

SEQ ID NO: 96327 - DNA, 15 bp, Homo sapiens
agcccacagtggcgg

SEQ ID NO: 96328 - DNA, 15 bp, Homo sapiens
gagcccacagtggcg

SEQ ID NO: 96329 - DNA, 15 bp, Homo sapiens
ggagcccacagtggc

SEQ ID NO: 96330 - DNA, 15 bp, Homo sapiens
gggagcccacagtgg

SEQ ID NO: 96331 - DNA, 15 bp, Homo sapiens
agggagcccacagtg

SEQ ID NO: 96332 - DNA, 15 bp, Homo sapiens
cagggagcccacagt

SEQ ID NO: 96333 - DNA, 15 bp, Homo sapiens
ccagggagcccacag

SEQ ID NO: 96334 - DNA, 15 bp, Homo sapiens
gccagggagcccaca

SEQ ID NO: 96335 - DNA, 15 bp, Homo sapiens
ggccagggagcccac

SEQ ID NO: 96336 - DNA, 15 bp, Homo sapiens
cggccagggagccca

SEQ ID NO: 96337 - DNA, 15 bp, Homo sapiens
ccggccagggagccc

SEQ ID NO: 96338 - DNA, 15 bp, Homo sapiens
gccggccagggagcc

SEQ ID NO: 96339 - DNA, 15 bp, Homo sapiens
ggccggccagggagc

SEQ ID NO: 96340 - DNA, 15 bp, Homo sapiens
tggccggccagggag

SEQ ID NO: 96341 - DNA, 15 bp, Homo sapiens
ctggccggccaggga

SEQ ID NO: 96342 - DNA, 15 bp, Homo sapiens
gctggccggccaggg

SEQ ID NO: 96343 - DNA, 15 bp, Homo sapiens
ggctggccggccagg

SEQ ID NO: 96344 - DNA, 15 bp, Homo sapiens
cggctggccggccag

SEQ ID NO: 96345 - DNA, 15 bp, Homo sapiens
gcggctggccggcca

SEQ ID NO: 96346 - DNA, 15 bp, Homo sapiens
agcggctggccggcc

SEQ ID NO: 96347 - DNA, 15 bp, Homo sapiens
tagcggctggccggc

SEQ ID NO: 96348 - DNA, 15 bp, Homo sapiens
gtagcggctggccgg

SEQ ID NO: 96349 - DNA, 15 bp, Homo sapiens
tgtagcggctggccg

SEQ ID NO: 96350 - DNA, 15 bp, Homo sapiens
ctgtagcggctggcc

SEQ ID NO: 96351 - DNA, 15 bp, Homo sapiens
cctgtagcggctggc

SEQ ID NO: 96352 - DNA, 15 bp, Homo sapiens
tcctgtagcggctgg

SEQ ID NO: 96353 - DNA, 15 bp, Homo sapiens
ctcctgtagcggctg

SEQ ID NO: 96354 - DNA, 15 bp, Homo sapiens
gctcctgtagcggct

SEQ ID NO: 96355 - DNA, 15 bp, Homo sapiens
cgctcctgtagcggc

SEQ ID NO: 96356 - DNA, 15 bp, Homo sapiens
ccgctcctgtagcgg

SEQ ID NO: 96357 - DNA, 15 bp, Homo sapiens
cccgctcctgtagcg

SEQ ID NO: 96358 - DNA, 15 bp, Homo sapiens
gcccgctcctgtagc

SEQ ID NO: 96359 - DNA, 15 bp, Homo sapiens
ggcccgctcctgtag

SEQ ID NO: 96360 - DNA, 15 bp, Homo sapiens
gggcccgctcctgta

SEQ ID NO: 96361 - DNA, 15 bp, Homo sapiens
tgggcccgctcctgt

SEQ ID NO: 96362 - DNA, 15 bp, Homo sapiens
ctgggcccgctcctg

SEQ ID NO: 96363 - DNA, 15 bp, Homo sapiens
cctgggcccgctcct

SEQ ID NO: 96364 - DNA, 15 bp, Homo sapiens
gcctgggcccgctcc

SEQ ID NO: 96365 - DNA, 15 bp, Homo sapiens
ggcctgggcccgctc

SEQ ID NO: 96366 - DNA, 15 bp, Homo sapiens
aggcctgggcccgct

SEQ ID NO: 96367 - DNA, 15 bp, Homo sapiens
caggcctgggcccgc

SEQ ID NO: 96368 - DNA, 15 bp, Homo sapiens
ccaggcctgggcccg

SEQ ID NO: 96369 - DNA, 15 bp, Homo sapiens
cccaggcctgggccc

SEQ ID NO: 96370 - DNA, 15 bp, Homo sapiens
ccccaggcctgggcc

SEQ ID NO: 96371 - DNA, 15 bp, Homo sapiens
gccccaggcctgggc

SEQ ID NO: 96372 - DNA, 15 bp, Homo sapiens
cgccccaggcctggg

SEQ ID NO: 96373 - DNA, 15 bp, Homo sapiens
tcgccccaggcctgg

SEQ ID NO: 96374 - DNA, 15 bp, Homo sapiens
ctcgccccaggcctg

SEQ ID NO: 96375 - DNA, 15 bp, Homo sapiens
gctcgccccaggcct

SEQ ID NO: 96376 - DNA, 15 bp, Homo sapiens
cgctcgccccaggcc

SEQ ID NO: 96377 - DNA, 15 bp, Homo sapiens
ccgctcgccccaggc

SEQ ID NO: 96378 - DNA, 15 bp, Homo sapiens
gccgctcgccccagg

SEQ ID NO: 96379 - DNA, 15 bp, Homo sapiens
agccgctcgccccag

SEQ ID NO: 96380 - DNA, 15 bp, Homo sapiens
cagccgctcgcccca

SEQ ID NO: 96381 - DNA, 15 bp, Homo sapiens
gcagccgctcgcccc

SEQ ID NO: 96382 - DNA, 15 bp, Homo sapiens
cgcagccgctcgccc

SEQ ID NO: 96383 - DNA, 15 bp, Homo sapiens
gcgcagccgctcgcc

SEQ ID NO: 96384 - DNA, 15 bp, Homo sapiens
cgcgcagccgctcgc

SEQ ID NO: 96385 - DNA, 15 bp, Homo sapiens
gcgcgcagccgctcg

SEQ ID NO: 96386 - DNA, 15 bp, Homo sapiens
cgcgcgcagccgctc

SEQ ID NO: 96387 - DNA, 15 bp, Homo sapiens
gcgcgcgcagccgct

SEQ ID NO: 96388 - DNA, 15 bp, Homo sapiens
cgcgcgcgcagccgc

SEQ ID NO: 96389 - DNA, 15 bp, Homo sapiens
ccgcgcgcgcagccg

SEQ ID NO: 96390 - DNA, 15 bp, Homo sapiens
tccgcgcgcgcagcc

SEQ ID NO: 96391 - DNA, 15 bp, Homo sapiens
atccgcgcgcgcagc

SEQ ID NO: 96392 - DNA, 15 bp, Homo sapiens
catccgcgcgcgcag

SEQ ID NO: 96393 - DNA, 15 bp, Homo sapiens
ccatccgcgcgcgca

SEQ ID NO: 96394 - DNA, 15 bp, Homo sapiens
tccatccgcgcgcgc

SEQ ID NO: 96395 - DNA, 15 bp, Homo sapiens
ctccatccgcgcgcg

SEQ ID NO: 96396 - DNA, 15 bp, Homo sapiens
cctccatccgcgcgc

SEQ ID NO: 96397 - DNA, 15 bp, Homo sapiens
tcctccatccgcgcg

SEQ ID NO: 96398 - DNA, 15 bp, Homo sapiens
ctcctccatccgcgc

SEQ ID NO: 96399 - DNA, 15 bp, Homo sapiens
tctcctccatccgcg

SEQ ID NO: 96400 - DNA, 15 bp, Homo sapiens
atctcctccatccgc

SEQ ID NO: 96401 - DNA, 15 bp, Homo sapiens
catctcctccatccg

SEQ ID NO: 96402 - DNA, 15 bp, Homo sapiens
ccatctcctccatcc

SEQ ID NO: 96403 - DNA, 15 bp, Homo sapiens
cccatctcctccatc

SEQ ID NO: 96404 - DNA, 15 bp, Homo sapiens
gcccatctcctccat

SEQ ID NO: 96405 - DNA, 15 bp, Homo sapiens
tgcccatctcctcca

SEQ ID NO: 96406 - DNA, 15 bp, Homo sapiens
ctgcccatctcctcc

SEQ ID NO: 96407 - DNA, 15 bp, Homo sapiens
gctgcccatctcctc

SEQ ID NO: 96408 - DNA, 15 bp, Homo sapiens
ggctgcccatctcct

SEQ ID NO: 96409 - DNA, 15 bp, Homo sapiens
cggctgcccatctcc

SEQ ID NO: 96410 - DNA, 15 bp, Homo sapiens
ccggctgcccatctc

SEQ ID NO: 96411 - DNA, 15 bp, Homo sapiens
tccggctgcccatct

SEQ ID NO: 96412 - DNA, 15 bp, Homo sapiens
gtccggctgcccatc

SEQ ID NO: 96413 - DNA, 15 bp, Homo sapiens
ggtccggctgcccat

SEQ ID NO: 96414 - DNA, 15 bp, Homo sapiens
gggtccggctgccca

SEQ ID NO: 96415 - DNA, 15 bp, Homo sapiens
cgggtccggctgccc

SEQ ID NO: 96416 - DNA, 15 bp, Homo sapiens
gcgggtccggctgcc

SEQ ID NO: 96417 - DNA, 15 bp, Homo sapiens
cgcgggtccggctgc

SEQ ID NO: 96418 - DNA, 15 bp, Homo sapiens
tcgcgggtccggctg

SEQ ID NO: 96419 - DNA, 15 bp, Homo sapiens
gtcgcgggtccggct

SEQ ID NO: 96420 - DNA, 15 bp, Homo sapiens
ggtcgcgggtccggc

SEQ ID NO: 96421 - DNA, 15 bp, Homo sapiens
cggtcgcgggtccgg

SEQ ID NO: 96422 - DNA, 15 bp, Homo sapiens
gcggtcgcgggtccg

SEQ ID NO: 96423 - DNA, 15 bp, Homo sapiens
ggcggtcgcgggtcc

SEQ ID NO: 96424 - DNA, 15 bp, Homo sapiens
aggcggtcgcgggtc

SEQ ID NO: 96425 - DNA, 15 bp, Homo sapiens
caggcggtcgcgggt

SEQ ID NO: 96426 - DNA, 15 bp, Homo sapiens
ccaggcggtcgcggg

SEQ ID NO: 96427 - DNA, 15 bp, Homo sapiens
tccaggcggtcgcgg

SEQ ID NO: 96428 - DNA, 15 bp, Homo sapiens
gtccaggcggtcgcg

SEQ ID NO: 96429 - DNA, 15 bp, Homo sapiens
cgtccaggcggtcgc

SEQ ID NO: 96430 - DNA, 15 bp, Homo sapiens
tcgtccaggcggtcg

SEQ ID NO: 96431 - DNA, 15 bp, Homo sapiens
ctcgtccaggcggtc

SEQ ID NO: 96432 - DNA, 15 bp, Homo sapiens
cctcgtccaggcggt

SEQ ID NO: 96433 - DNA, 15 bp, Homo sapiens
acctcgtccaggcgg

SEQ ID NO: 96434 - DNA, 15 bp, Homo sapiens
cacctcgtccaggcg

SEQ ID NO: 96435 - DNA, 15 bp, Homo sapiens
tcacctcgtccaggc

SEQ ID NO: 96436 - DNA, 15 bp, Homo sapiens
ttcacctcgtccagg

SEQ ID NO: 96437 - DNA, 15 bp, Homo sapiens
cttcacctcgtccag

SEQ ID NO: 96438 - DNA, 15 bp, Homo sapiens
ccttcacctcgtcca

SEQ ID NO: 96439 - DNA, 15 bp, Homo sapiens
tccttcacctcgtcc

SEQ ID NO: 96440 - DNA, 15 bp, Homo sapiens
ctccttcacctcgtc

SEQ ID NO: 96441 - DNA, 15 bp, Homo sapiens
gctccttcacctcgt

SEQ ID NO: 96442 - DNA, 15 bp, Homo sapiens
tgctccttcacctcg

SEQ ID NO: 96443 - DNA, 15 bp, Homo sapiens
ctgctccttcacctc

SEQ ID NO: 96444 - DNA, 15 bp, Homo sapiens
cctgctccttcacct

SEQ ID NO: 96445 - DNA, 15 bp, Homo sapiens
acctgctccttcacc

SEQ ID NO: 96446 - DNA, 15 bp, Homo sapiens
cacctgctccttcac

SEQ ID NO: 96447 - DNA, 15 bp, Homo sapiens
ccacctgctccttca

SEQ ID NO: 96448 - DNA, 15 bp, Homo sapiens
gccacctgctccttc

SEQ ID NO: 96449 - DNA, 15 bp, Homo sapiens
cgccacctgctcctt

SEQ ID NO: 96450 - DNA, 15 bp, Homo sapiens
ccgccacctgctcct

SEQ ID NO: 96451 - DNA, 15 bp, Homo sapiens
tccgccacctgctcc

SEQ ID NO: 96452 - DNA, 15 bp, Homo sapiens
ctccgccacctgctc

SEQ ID NO: 96453 - DNA, 15 bp, Homo sapiens
cctccgccacctgct

SEQ ID NO: 96454 - DNA, 15 bp, Homo sapiens
acctccgccacctgc

SEQ ID NO: 96455 - DNA, 15 bp, Homo sapiens
cacctccgccacctg

SEQ ID NO: 96456 - DNA, 15 bp, Homo sapiens
gcacctccgccacct

SEQ ID NO: 96457 - DNA, 15 bp, Homo sapiens
cgcacctccgccacc

SEQ ID NO: 96458 - DNA, 15 bp, Homo sapiens
gcgcacctccgccac

SEQ ID NO: 96459 - DNA, 15 bp, Homo sapiens
cgcgcacctccgcca

SEQ ID NO: 96460 - DNA, 15 bp, Homo sapiens
gcgcgcacctccgcc

SEQ ID NO: 96461 - DNA, 15 bp, Homo sapiens
ggcgcgcacctccgc

SEQ ID NO: 96462 - DNA, 15 bp, Homo sapiens
tggcgcgcacctccg

SEQ ID NO: 96463 - DNA, 15 bp, Homo sapiens
ttggcgcgcacctcc

SEQ ID NO: 96464 - DNA, 15 bp, Homo sapiens
cttggcgcgcacctc

SEQ ID NO: 96465 - DNA, 15 bp, Homo sapiens
gcttggcgcgcacct

SEQ ID NO: 96466 - DNA, 15 bp, Homo sapiens
agcttggcgcgcacc

SEQ ID NO: 96467 - DNA, 15 bp, Homo sapiens
cagcttggcgcgcac

SEQ ID NO: 96468 - DNA, 15 bp, Homo sapiens
ccagcttggcgcgca

SEQ ID NO: 96469 - DNA, 15 bp, Homo sapiens
tccagcttggcgcgc

SEQ ID NO: 96470 - DNA, 15 bp, Homo sapiens
ctccagcttggcgcg

SEQ ID NO: 96471 - DNA, 15 bp, Homo sapiens
cctccagcttggcgc

SEQ ID NO: 96472 - DNA, 15 bp, Homo sapiens
tcctccagcttggcg

SEQ ID NO: 96473 - DNA, 15 bp, Homo sapiens
ctcctccagcttggc

SEQ ID NO: 96474 - DNA, 15 bp, Homo sapiens
gctcctccagcttgg

SEQ ID NO: 96475 - DNA, 15 bp, Homo sapiens
tgctcctccagcttg

SEQ ID NO: 96476 - DNA, 15 bp, Homo sapiens
ctgctcctccagctt

SEQ ID NO: 96477 - DNA, 15 bp, Homo sapiens
cctgctcctccagct

SEQ ID NO: 96478 - DNA, 15 bp, Homo sapiens
gcctgctcctccagc

SEQ ID NO: 96479 - DNA, 15 bp, Homo sapiens
ggcctgctcctccag

SEQ ID NO: 96480 - DNA, 15 bp, Homo sapiens
gggcctgctcctcca

SEQ ID NO: 96481 - DNA, 15 bp, Homo sapiens
tgggcctgctcctcc

SEQ ID NO: 96482 - DNA, 15 bp, Homo sapiens
ctgggcctgctcctc

SEQ ID NO: 96483 - DNA, 15 bp, Homo sapiens
gctgggcctgctcct

SEQ ID NO: 96484 - DNA, 15 bp, Homo sapiens
tgctgggcctgctcc

SEQ ID NO: 96485 - DNA, 15 bp, Homo sapiens
ctgctgggcctgctc

SEQ ID NO: 96486 - DNA, 15 bp, Homo sapiens
tctgctgggcctgct

SEQ ID NO: 96487 - DNA, 15 bp, Homo sapiens
atctgctgggcctgc

SEQ ID NO: 96488 - DNA, 15 bp, Homo sapiens
tatctgctgggcctg

SEQ ID NO: 96489 - DNA, 15 bp, Homo sapiens
gtatctgctgggcct

SEQ ID NO: 96490 - DNA, 15 bp, Homo sapiens
cgtatctgctgggcc

SEQ ID NO: 96491 - DNA, 15 bp, Homo sapiens
gcgtatctgctgggc

SEQ ID NO: 96492 - DNA, 15 bp, Homo sapiens
ggcgtatctgctggg

SEQ ID NO: 96493 - DNA, 15 bp, Homo sapiens
aggcgtatctgctgg

SEQ ID NO: 96494 - DNA, 15 bp, Homo sapiens
caggcgtatctgctg

SEQ ID NO: 96495 - DNA, 15 bp, Homo sapiens
gcaggcgtatctgct

SEQ ID NO: 96496 - DNA, 15 bp, Homo sapiens
tgcaggcgtatctgc

SEQ ID NO: 96497 - DNA, 15 bp, Homo sapiens
ctgcaggcgtatctg

SEQ ID NO: 96498 - DNA, 15 bp, Homo sapiens
cctgcaggcgtatct

SEQ ID NO: 96499 - DNA, 15 bp, Homo sapiens
gcctgcaggcgtatc

SEQ ID NO: 96500 - DNA, 15 bp, Homo sapiens
ggcctgcaggcgtat

SEQ ID NO: 96501 - DNA, 15 bp, Homo sapiens
cggcctgcaggcgta

SEQ ID NO: 96502 - DNA, 15 bp, Homo sapiens
tcggcctgcaggcgt

SEQ ID NO: 96503 - DNA, 15 bp, Homo sapiens
ctcggcctgcaggcg

SEQ ID NO: 96504 - DNA, 15 bp, Homo sapiens
cctcggcctgcaggc

SEQ ID NO: 96505 - DNA, 15 bp, Homo sapiens
gcctcggcctgcagg

SEQ ID NO: 96506 - DNA, 15 bp, Homo sapiens
ggcctcggcctgcag

SEQ ID NO: 96507 - DNA, 15 bp, Homo sapiens
aggcctcggcctgca

SEQ ID NO: 96508 - DNA, 15 bp, Homo sapiens
aaggcctcggcctgc

SEQ ID NO: 96509 - DNA, 15 bp, Homo sapiens
gaaggcctcggcctg

SEQ ID NO: 96510 - DNA, 15 bp, Homo sapiens
ggaaggcctcggcct

SEQ ID NO: 96511 - DNA, 15 bp, Homo sapiens
tggaaggcctcggcc

SEQ ID NO: 96512 - DNA, 15 bp, Homo sapiens
ctggaaggcctcggc

SEQ ID NO: 96513 - DNA, 15 bp, Homo sapiens
cctggaaggcctcgg

SEQ ID NO: 96514 - DNA, 15 bp, Homo sapiens
gcctggaaggcctcg

SEQ ID NO: 96515 - DNA, 15 bp, Homo sapiens
ggcctggaaggcctc

SEQ ID NO: 96516 - DNA, 15 bp, Homo sapiens
gggcctggaaggcct

SEQ ID NO: 96517 - DNA, 15 bp, Homo sapiens
cgggcctggaaggcc

SEQ ID NO: 96518 - DNA, 15 bp, Homo sapiens
gcgggcctggaaggc

SEQ ID NO: 96519 - DNA, 15 bp, Homo sapiens
ggcgggcctggaagg

SEQ ID NO: 96520 - DNA, 15 bp, Homo sapiens
aggcgggcctggaag

SEQ ID NO: 96521 - DNA, 15 bp, Homo sapiens
gaggcgggcctggaa

SEQ ID NO: 96522 - DNA, 15 bp, Homo sapiens
tgaggcgggcctgga

SEQ ID NO: 96523 - DNA, 15 bp, Homo sapiens
ttgaggcgggcctgg

SEQ ID NO: 96524 - DNA, 15 bp, Homo sapiens
cttgaggcgggcctg

SEQ ID NO: 96525 - DNA, 15 bp, Homo sapiens
tcttgaggcgggcct

SEQ ID NO: 96526 - DNA, 15 bp, Homo sapiens
ctcttgaggcgggcc

SEQ ID NO: 96527 - DNA, 15 bp, Homo sapiens
gctcttgaggcgggc

SEQ ID NO: 96528 - DNA, 15 bp, Homo sapiens
agctcttgaggcggg

SEQ ID NO: 96529 - DNA, 15 bp, Homo sapiens
cagctcttgaggcgg

SEQ ID NO: 96530 - DNA, 15 bp, Homo sapiens
ccagctcttgaggcg

SEQ ID NO: 96531 - DNA, 15 bp, Homo sapiens
accagctcttgaggc

SEQ ID NO: 96532 - DNA, 15 bp, Homo sapiens
aaccagctcttgagg

SEQ ID NO: 96533 - DNA, 15 bp, Homo sapiens
gaaccagctcttgag

SEQ ID NO: 96534 - DNA, 15 bp, Homo sapiens
cgaaccagctcttga

SEQ ID NO: 96535 - DNA, 15 bp, Homo sapiens
tcgaaccagctcttg

SEQ ID NO: 96536 - DNA, 15 bp, Homo sapiens
ctcgaaccagctctt

SEQ ID NO: 96537 - DNA, 15 bp, Homo sapiens
gctcgaaccagctct

SEQ ID NO: 96538 - DNA, 15 bp, Homo sapiens
ggctcgaaccagctc

SEQ ID NO: 96539 - DNA, 15 bp, Homo sapiens
gggctcgaaccagct

SEQ ID NO: 96540 - DNA, 15 bp, Homo sapiens
ggggctcgaaccagc

SEQ ID NO: 96541 - DNA, 15 bp, Homo sapiens
aggggctcgaaccag

SEQ ID NO: 96542 - DNA, 15 bp, Homo sapiens
caggggctcgaacca

SEQ ID NO: 96543 - DNA, 15 bp, Homo sapiens
ccaggggctcgaacc

SEQ ID NO: 96544 - DNA, 15 bp, Homo sapiens
accaggggctcgaac

SEQ ID NO: 96545 - DNA, 15 bp, Homo sapiens
caccaggggctcgaa

SEQ ID NO: 96546 - DNA, 15 bp, Homo sapiens
ccaccaggggctcga

SEQ ID NO: 96547 - DNA, 15 bp, Homo sapiens
tccaccaggggctcg

SEQ ID NO: 96548 - DNA, 15 bp, Homo sapiens
ttccaccaggggctc

SEQ ID NO: 96549 - DNA, 15 bp, Homo sapiens
cttccaccaggggct

SEQ ID NO: 96550 - DNA, 15 bp, Homo sapiens
tcttccaccaggggc

SEQ ID NO: 96551 - DNA, 15 bp, Homo sapiens
gtcttccaccagggg

SEQ ID NO: 96552 - DNA, 15 bp, Homo sapiens
tgtcttccaccaggg

SEQ ID NO: 96553 - DNA, 15 bp, Homo sapiens
atgtcttccaccagg

SEQ ID NO: 96554 - DNA, 15 bp, Homo sapiens
catgtcttccaccag

SEQ ID NO: 96555 - DNA, 15 bp, Homo sapiens
gcatgtcttccacca

SEQ ID NO: 96556 - DNA, 15 bp, Homo sapiens
tgcatgtcttccacc

SEQ ID NO: 96557 - DNA, 15 bp, Homo sapiens
ctgcatgtcttccac

SEQ ID NO: 96558 - DNA, 15 bp, Homo sapiens
gctgcatgtcttcca

SEQ ID NO: 96559 - DNA, 15 bp, Homo sapiens
cgctgcatgtcttcc

SEQ ID NO: 96560 - DNA, 15 bp, Homo sapiens
gcgctgcatgtcttc

SEQ ID NO: 96561 - DNA, 15 bp, Homo sapiens
ggcgctgcatgtctt

SEQ ID NO: 96562 - DNA, 15 bp, Homo sapiens
tggcgctgcatgtct

SEQ ID NO: 96563 - DNA, 15 bp, Homo sapiens
ctggcgctgcatgtc

SEQ ID NO: 96564 - DNA, 15 bp, Homo sapiens
actggcgctgcatgt

SEQ ID NO: 96565 - DNA, 15 bp, Homo sapiens
cactggcgctgcatg

SEQ ID NO: 96566 - DNA, 15 bp, Homo sapiens
ccactggcgctgcat

SEQ ID NO: 96567 - DNA, 15 bp, Homo sapiens
cccactggcgctgca

SEQ ID NO: 96568 - DNA, 15 bp, Homo sapiens
gcccactggcgctgc

SEQ ID NO: 96569 - DNA, 15 bp, Homo sapiens
ggcccactggcgctg

SEQ ID NO: 96570 - DNA, 15 bp, Homo sapiens
cggcccactggcgct

SEQ ID NO: 96571 - DNA, 15 bp, Homo sapiens
ccggcccactggcgc

SEQ ID NO: 96572 - DNA, 15 bp, Homo sapiens
cccggcccactggcg

SEQ ID NO: 96573 - DNA, 15 bp, Homo sapiens
gcccggcccactggc

SEQ ID NO: 96574 - DNA, 15 bp, Homo sapiens
agcccggcccactgg

SEQ ID NO: 96575 - DNA, 15 bp, Homo sapiens
cagcccggcccactg

SEQ ID NO: 96576 - DNA, 15 bp, Homo sapiens
ccagcccggcccact

SEQ ID NO: 96577 - DNA, 15 bp, Homo sapiens
accagcccggcccac

SEQ ID NO: 96578 - DNA, 15 bp, Homo sapiens
caccagcccggccca

SEQ ID NO: 96579 - DNA, 15 bp, Homo sapiens
ccaccagcccggccc

SEQ ID NO: 96580 - DNA, 15 bp, Homo sapiens
tccaccagcccggcc

SEQ ID NO: 96581 - DNA, 15 bp, Homo sapiens
ctccaccagcccggc

SEQ ID NO: 96582 - DNA, 15 bp, Homo sapiens
tctccaccagcccgg

SEQ ID NO: 96583 - DNA, 15 bp, Homo sapiens
ttctccaccagcccg

SEQ ID NO: 96584 - DNA, 15 bp, Homo sapiens
cttctccaccagccc

SEQ ID NO: 96585 - DNA, 15 bp, Homo sapiens
ccttctccaccagcc

SEQ ID NO: 96586 - DNA, 15 bp, Homo sapiens
accttctccaccagc

SEQ ID NO: 96587 - DNA, 15 bp, Homo sapiens
caccttctccaccag

SEQ ID NO: 96588 - DNA, 15 bp, Homo sapiens
gcaccttctccacca

SEQ ID NO: 96589 - DNA, 15 bp, Homo sapiens
tgcaccttctccacc

SEQ ID NO: 96590 - DNA, 15 bp, Homo sapiens
ctgcaccttctccac

SEQ ID NO: 96591 - DNA, 15 bp, Homo sapiens
cctgcaccttctcca

SEQ ID NO: 96592 - DNA, 15 bp, Homo sapiens
gcctgcaccttctcc

SEQ ID NO: 96593 - DNA, 15 bp, Homo sapiens
agcctgcaccttctc

SEQ ID NO: 96594 - DNA, 15 bp, Homo sapiens
cagcctgcaccttct

SEQ ID NO: 96595 - DNA, 15 bp, Homo sapiens
gcagcctgcaccttc

SEQ ID NO: 96596 - DNA, 15 bp, Homo sapiens
ggcagcctgcacctt

SEQ ID NO: 96597 - DNA, 15 bp, Homo sapiens
cggcagcctgcacct

SEQ ID NO: 96598 - DNA, 15 bp, Homo sapiens
acggcagcctgcacc

SEQ ID NO: 96599 - DNA, 15 bp, Homo sapiens
cacggcagcctgcac

SEQ ID NO: 96600 - DNA, 15 bp, Homo sapiens
ccacggcagcctgca

SEQ ID NO: 96601 - DNA, 15 bp, Homo sapiens
cccacggcagcctgc

SEQ ID NO: 96602 - DNA, 15 bp, Homo sapiens
gcccacggcagcctg

SEQ ID NO: 96603 - DNA, 15 bp, Homo sapiens
tgcccacggcagcct

SEQ ID NO: 96604 - DNA, 15 bp, Homo sapiens
gtgcccacggcagcc

SEQ ID NO: 96605 - DNA, 15 bp, Homo sapiens
ggtgcccacggcagc

SEQ ID NO: 96606 - DNA, 15 bp, Homo sapiens
tggtgcccacggcag

SEQ ID NO: 96607 - DNA, 15 bp, Homo sapiens
ctggtgcccacggca

SEQ ID NO: 96608 - DNA, 15 bp, Homo sapiens
gctggtgcccacggc

SEQ ID NO: 96609 - DNA, 15 bp, Homo sapiens
cgctggtgcccacgg

SEQ ID NO: 96610 - DNA, 15 bp, Homo sapiens
gcgctggtgcccacg

SEQ ID NO: 96611 - DNA, 15 bp, Homo sapiens
ggcgctggtgcccac

SEQ ID NO: 96612 - DNA, 15 bp, Homo sapiens
cggcgctggtgccca

SEQ ID NO: 96613 - DNA, 15 bp, Homo sapiens
gcggcgctggtgccc

SEQ ID NO: 96614 - DNA, 15 bp, Homo sapiens
ggcggcgctggtgcc

SEQ ID NO: 96615 - DNA, 15 bp, Homo sapiens
gggcggcgctggtgc

SEQ ID NO: 96616 - DNA, 15 bp, Homo sapiens
ggggcggcgctggtg

SEQ ID NO: 96617 - DNA, 15 bp, Homo sapiens
aggggcggcgctggt

SEQ ID NO: 96618 - DNA, 15 bp, Homo sapiens
caggggcggcgctgg

SEQ ID NO: 96619 - DNA, 15 bp, Homo sapiens
acaggggcggcgctg

SEQ ID NO: 96620 - DNA, 15 bp, Homo sapiens
cacaggggcggcgct

SEQ ID NO: 96621 - DNA, 15 bp, Homo sapiens
gcacaggggcggcgc

SEQ ID NO: 96622 - DNA, 15 bp, Homo sapiens
ggcacaggggcggcg

SEQ ID NO: 96623 - DNA, 15 bp, Homo sapiens
gggcacaggggcggc

SEQ ID NO: 96624 - DNA, 15 bp, Homo sapiens
tgggcacaggggcgg

SEQ ID NO: 96625 - DNA, 15 bp, Homo sapiens
ctgggcacaggggcg

SEQ ID NO: 96626 - DNA, 15 bp, Homo sapiens
gctgggcacaggggc

SEQ ID NO: 96627 - DNA, 15 bp, Homo sapiens
cgctgggcacagggg

SEQ ID NO: 96628 - DNA, 15 bp, Homo sapiens
tcgctgggcacaggg

SEQ ID NO: 96629 - DNA, 15 bp, Homo sapiens
gtcgctgggcacagg

SEQ ID NO: 96630 - DNA, 15 bp, Homo sapiens
tgtcgctgggcacag

SEQ ID NO: 96631 - DNA, 15 bp, Homo sapiens
ttgtcgctgggcaca

SEQ ID NO: 96632 - DNA, 15 bp, Homo sapiens
attgtcgctgggcac

SEQ ID NO: 96633 - DNA, 15 bp, Homo sapiens
gattgtcgctgggca

SEQ ID NO: 96634 - DNA, 15 bp, Homo sapiens
tgattgtcgctgggc

SEQ ID NO: 96635 - DNA, 15 bp, Homo sapiens
gtgattgtcgctggg

SEQ ID NO: 96636 - DNA, 15 bp, Homo sapiens
agtgattgtcgctgg

SEQ ID NO: 96637 - DNA, 15 bp, Homo sapiens
cagtgattgtcgctg

SEQ ID NO: 96638 - DNA, 15 bp, Homo sapiens
tcagtgattgtcgct

SEQ ID NO: 96639 - DNA, 15 bp, Homo sapiens
ttcagtgattgtcgc

SEQ ID NO: 96640 - DNA, 15 bp, Homo sapiens
gttcagtgattgtcg

SEQ ID NO: 96641 - DNA, 15 bp, Homo sapiens
cgttcagtgattgtc

SEQ ID NO: 96642 - DNA, 15 bp, Homo sapiens
gcgttcagtgattgt

SEQ ID NO: 96643 - DNA, 15 bp, Homo sapiens
ggcgttcagtgattg

SEQ ID NO: 96644 - DNA, 15 bp, Homo sapiens
cggcgttcagtgatt

SEQ ID NO: 96645 - DNA, 15 bp, Homo sapiens
tcggcgttcagtgat

SEQ ID NO: 96646 - DNA, 15 bp, Homo sapiens
ttcggcgttcagtga

SEQ ID NO: 96647 - DNA, 15 bp, Homo sapiens
cttcggcgttcagtg

SEQ ID NO: 96648 - DNA, 15 bp, Homo sapiens
gcttcggcgttcagt

SEQ ID NO: 96649 - DNA, 15 bp, Homo sapiens
ggcttcggcgttcag

SEQ ID NO: 96650 - DNA, 15 bp, Homo sapiens
aggcttcggcgttca

SEQ ID NO: 96651 - DNA, 15 bp, Homo sapiens
caggcttcggcgttc

SEQ ID NO: 96652 - DNA, 15 bp, Homo sapiens
gcaggcttcggcgtt

SEQ ID NO: 96653 - DNA, 15 bp, Homo sapiens
tgcaggcttcggcgt

SEQ ID NO: 96654 - DNA, 15 bp, Homo sapiens
ctgcaggcttcggcg

SEQ ID NO: 96655 - DNA, 15 bp, Homo sapiens
gctgcaggcttcggc

SEQ ID NO: 96656 - DNA, 15 bp, Homo sapiens
ggctgcaggcttcgg

SEQ ID NO: 96657 - DNA, 15 bp, Homo sapiens
tggctgcaggcttcg

SEQ ID NO: 96658 - DNA, 15 bp, Homo sapiens
atggctgcaggcttc

SEQ ID NO: 96659 - DNA, 15 bp, Homo sapiens
catggctgcaggctt

SEQ ID NO: 96660 - DNA, 15 bp, Homo sapiens
gcatggctgcaggct

SEQ ID NO: 96661 - DNA, 15 bp, Homo sapiens
cgcatggctgcaggc

SEQ ID NO: 96662 - DNA, 15 bp, Homo sapiens
tcgcatggctgcagg

SEQ ID NO: 96663 - DNA, 15 bp, Homo sapiens
gtcgcatggctgcag

SEQ ID NO: 96664 - DNA, 15 bp, Homo sapiens
ggtcgcatggctgca

SEQ ID NO: 96665 - DNA, 15 bp, Homo sapiens
gggtcgcatggctgc

SEQ ID NO: 96666 - DNA, 15 bp, Homo sapiens
ggggtcgcatggctg

SEQ ID NO: 96667 - DNA, 15 bp, Homo sapiens
tggggtcgcatggct

SEQ ID NO: 96668 - DNA, 15 bp, Homo sapiens
gtggggtcgcatggc

SEQ ID NO: 96669 - DNA, 15 bp, Homo sapiens
cgtggggtcgcatgg

SEQ ID NO: 96670 - DNA, 15 bp, Homo sapiens
gcgtggggtcgcatg

SEQ ID NO: 96671 - DNA, 15 bp, Homo sapiens
ggcgtggggtcgcat

SEQ ID NO: 96672 - DNA, 15 bp, Homo sapiens
tggcgtggggtcgca

SEQ ID NO: 96673 - DNA, 15 bp, Homo sapiens
gtggcgtggggtcgc

SEQ ID NO: 96674 - DNA, 15 bp, Homo sapiens
ggtggcgtggggtcg

SEQ ID NO: 96675 - DNA, 15 bp, Homo sapiens
gggtggcgtggggtc

SEQ ID NO: 96676 - DNA, 15 bp, Homo sapiens
ggggtggcgtggggt

SEQ ID NO: 96677 - DNA, 15 bp, Homo sapiens
cggggtggcgtgggg

SEQ ID NO: 96678 - DNA, 15 bp, Homo sapiens
acggggtggcgtggg

SEQ ID NO: 96679 - DNA, 15 bp, Homo sapiens
cacggggtggcgtgg

SEQ ID NO: 96680 - DNA, 15 bp, Homo sapiens
gcacggggtggcgtg

SEQ ID NO: 96681 - DNA, 15 bp, Homo sapiens
ggcacggggtggcgt

SEQ ID NO: 96682 - DNA, 15 bp, Homo sapiens
aggcacggggtggcg

SEQ ID NO: 96683 - DNA, 15 bp, Homo sapiens
gaggcacggggtggc

SEQ ID NO: 96684 - DNA, 15 bp, Homo sapiens
ggaggcacggggtgg

SEQ ID NO: 96685 - DNA, 15 bp, Homo sapiens
aggaggcacggggtg

SEQ ID NO: 96686 - DNA, 15 bp, Homo sapiens
caggaggcacggggt

SEQ ID NO: 96687 - DNA, 15 bp, Homo sapiens
gcaggaggcacgggg

SEQ ID NO: 96688 - DNA, 15 bp, Homo sapiens
ggcaggaggcacggg

SEQ ID NO: 96689 - DNA, 15 bp, Homo sapiens
aggcaggaggcacgg

SEQ ID NO: 96690 - DNA, 15 bp, Homo sapiens
gaggcaggaggcacg

SEQ ID NO: 96691 - DNA, 15 bp, Homo sapiens
ggaggcaggaggcac

SEQ ID NO: 96692 - DNA, 15 bp, Homo sapiens
cggaggcaggaggca

SEQ ID NO: 96693 - DNA, 15 bp, Homo sapiens
gcggaggcaggaggc

SEQ ID NO: 96694 - DNA, 15 bp, Homo sapiens
cgcggaggcaggagg

SEQ ID NO: 96695 - DNA, 15 bp, Homo sapiens
gcgcggaggcaggag

SEQ ID NO: 96696 - DNA, 15 bp, Homo sapiens
tgcgcggaggcagga

SEQ ID NO: 96697 - DNA, 15 bp, Homo sapiens
ctgcgcggaggcagg

SEQ ID NO: 96698 - DNA, 15 bp, Homo sapiens
gctgcgcggaggcag

SEQ ID NO: 96699 - DNA, 15 bp, Homo sapiens
ggctgcgcggaggca

SEQ ID NO: 96700 - DNA, 15 bp, Homo sapiens
aggctgcgcggaggc

SEQ ID NO: 96701 - DNA, 15 bp, Homo sapiens
caggctgcgcggagg

SEQ ID NO: 96702 - DNA, 15 bp, Homo sapiens
gcaggctgcgcggag

SEQ ID NO: 96703 - DNA, 15 bp, Homo sapiens
tgcaggctgcgcgga

SEQ ID NO: 96704 - DNA, 15 bp, Homo sapiens
ctgcaggctgcgcgg

SEQ ID NO: 96705 - DNA, 15 bp, Homo sapiens
gctgcaggctgcgcg

SEQ ID NO: 96706 - DNA, 15 bp, Homo sapiens
cgctgcaggctgcgc

SEQ ID NO: 96707 - DNA, 15 bp, Homo sapiens
ccgctgcaggctgcg

SEQ ID NO: 96708 - DNA, 15 bp, Homo sapiens
cccgctgcaggctgc

SEQ ID NO: 96709 - DNA, 15 bp, Homo sapiens
tcccgctgcaggctg

SEQ ID NO: 96710 - DNA, 15 bp, Homo sapiens
ctcccgctgcaggct

SEQ ID NO: 96711 - DNA, 15 bp, Homo sapiens
tctcccgctgcaggc

SEQ ID NO: 96712 - DNA, 15 bp, Homo sapiens
gtctcccgctgcagg

SEQ ID NO: 96713 - DNA, 15 bp, Homo sapiens
ggtctcccgctgcag

SEQ ID NO: 96714 - DNA, 15 bp, Homo sapiens
gggtctcccgctgca

SEQ ID NO: 96715 - DNA, 15 bp, Homo sapiens
agggtctcccgctgc

SEQ ID NO: 96716 - DNA, 15 bp, Homo sapiens
cagggtctcccgctg

SEQ ID NO: 96717 - DNA, 15 bp, Homo sapiens
acagggtctcccgct

SEQ ID NO: 96718 - DNA, 15 bp, Homo sapiens
gacagggtctcccgc

SEQ ID NO: 96719 - DNA, 15 bp, Homo sapiens
ggacagggtctcccg

SEQ ID NO: 96720 - DNA, 15 bp, Homo sapiens
gggacagggtctccc

SEQ ID NO: 96721 - DNA, 15 bp, Homo sapiens
ggggacagggtctcc

SEQ ID NO: 96722 - DNA, 15 bp, Homo sapiens
cggggacagggtctc

SEQ ID NO: 96723 - DNA, 15 bp, Homo sapiens
gcggggacagggtct

SEQ ID NO: 96724 - DNA, 15 bp, Homo sapiens
ggcggggacagggtc

SEQ ID NO: 96725 - DNA, 15 bp, Homo sapiens
gggcggggacagggt

SEQ ID NO: 96726 - DNA, 15 bp, Homo sapiens
ggggcggggacaggg

SEQ ID NO: 96727 - DNA, 15 bp, Homo sapiens
tggggcggggacagg

SEQ ID NO: 96728 - DNA, 15 bp, Homo sapiens
ctggggcggggacag

SEQ ID NO: 96729 - DNA, 15 bp, Homo sapiens
gctggggcggggaca

SEQ ID NO: 96730 - DNA, 15 bp, Homo sapiens
ggctggggcggggac

SEQ ID NO: 96731 - DNA, 15 bp, Homo sapiens
cggctggggcgggga

SEQ ID NO: 96732 - DNA, 15 bp, Homo sapiens
acggctggggcgggg

SEQ ID NO: 96733 - DNA, 15 bp, Homo sapiens
gacggctggggcggg

SEQ ID NO: 96734 - DNA, 15 bp, Homo sapiens
ggacggctggggcgg

SEQ ID NO: 96735 - DNA, 15 bp, Homo sapiens
aggacggctggggcg

SEQ ID NO: 96736 - DNA, 15 bp, Homo sapiens
gaggacggctggggc

SEQ ID NO: 96737 - DNA, 15 bp, Homo sapiens
ggaggacggctgggg

SEQ ID NO: 96738 - DNA, 15 bp, Homo sapiens
aggaggacggctggg

SEQ ID NO: 96739 - DNA, 15 bp, Homo sapiens
caggaggacggctgg

SEQ ID NO: 96740 - DNA, 15 bp, Homo sapiens
ccaggaggacggctg

SEQ ID NO: 96741 - DNA, 15 bp, Homo sapiens
cccaggaggacggct

SEQ ID NO: 96742 - DNA, 15 bp, Homo sapiens
ccccaggaggacggc

SEQ ID NO: 96743 - DNA, 15 bp, Homo sapiens
accccaggaggacgg

SEQ ID NO: 96744 - DNA, 15 bp, Homo sapiens
caccccaggaggacg

SEQ ID NO: 96745 - DNA, 15 bp, Homo sapiens
ccaccccaggaggac

SEQ ID NO: 96746 - DNA, 15 bp, Homo sapiens
tccaccccaggagga

SEQ ID NO: 96747 - DNA, 15 bp, Homo sapiens
gtccaccccaggagg

SEQ ID NO: 96748 - DNA, 15 bp, Homo sapiens
ggtccaccccaggag

SEQ ID NO: 96749 - DNA, 15 bp, Homo sapiens
gggtccaccccagga

SEQ ID NO: 96750 - DNA, 15 bp, Homo sapiens
agggtccaccccagg

SEQ ID NO: 96751 - DNA, 15 bp, Homo sapiens
tagggtccaccccag

SEQ ID NO: 96752 - DNA, 15 bp, Homo sapiens
ctagggtccacccca

SEQ ID NO: 96753 - DNA, 15 bp, Homo sapiens
actagggtccacccc

SEQ ID NO: 96754 - DNA, 15 bp, Homo sapiens
aactagggtccaccc

SEQ ID NO: 96755 - DNA, 15 bp, Homo sapiens
aaactagggtccacc

SEQ ID NO: 96756 - DNA, 15 bp, Homo sapiens
taaactagggtccac

SEQ ID NO: 96757 - DNA, 15 bp, Homo sapiens
ttaaactagggtcca

SEQ ID NO: 96758 - DNA, 15 bp, Homo sapiens
attaaactagggtcc

SEQ ID NO: 96759 - DNA, 15 bp, Homo sapiens
tattaaactagggtc

SEQ ID NO: 96760 - DNA, 15 bp, Homo sapiens
ttattaaactagggt

SEQ ID NO: 96761 - DNA, 15 bp, Homo sapiens
tttattaaactaggg

SEQ ID NO: 96762 - DNA, 15 bp, Homo sapiens
ctttattaaactagg

SEQ ID NO: 96763 - DNA, 15 bp, Homo sapiens
tctttattaaactag

SEQ ID NO: 96764 - DNA, 15 bp, Homo sapiens
atctttattaaacta

SEQ ID NO: 96765 - DNA, 15 bp, Homo sapiens
aatctttattaaact

SEQ ID NO: 96766 - DNA, 15 bp, Homo sapiens
gaatctttattaaac

SEQ ID NO: 96767 - DNA, 15 bp, Homo sapiens
tgaatctttattaaa

SEQ ID NO: 96768 - DNA, 15 bp, Homo sapiens
gtgaatctttattaa

SEQ ID NO: 96769 - DNA, 15 bp, Homo sapiens
ggtgaatctttatta

SEQ ID NO: 96770 - DNA, 15 bp, Homo sapiens
tggtgaatctttatt

SEQ ID NO: 96771 - DNA, 15 bp, Homo sapiens
ttggtgaatctttat

SEQ ID NO: 96772 - DNA, 15 bp, Homo sapiens
cttggtgaatcttta

SEQ ID NO: 96773 - DNA, 15 bp, Homo sapiens
acttggtgaatcttt

SEQ ID NO: 96774 - DNA, 15 bp, Homo sapiens
aacttggtgaatctt

SEQ ID NO: 96775 - DNA, 15 bp, Homo sapiens
aaacttggtgaatct

SEQ ID NO: 96776 - DNA, 15 bp, Homo sapiens
gaaacttggtgaatc

SEQ ID NO: 96777 - DNA, 15 bp, Homo sapiens
tgaaacttggtgaat

SEQ ID NO: 96778 - DNA, 15 bp, Homo sapiens
gtgaaacttggtgaa

SEQ ID NO: 96779 - DNA, 15 bp, Homo sapiens
cgtgaaacttggtga

SEQ ID NO: 96780 - DNA, 15 bp, Homo sapiens
gcgtgaaacttggtg

SEQ ID NO: 96781 - DNA, 15 bp, Homo sapiens
tgcgtgaaacttggt

SEQ ID NO: 96782 - DNA, 15 bp, Homo sapiens
atgcgtgaaacttgg

SEQ ID NO: 96783 - DNA, 15 bp, Homo sapiens
gatgcgtgaaacttg

SEQ ID NO: 96784 - DNA, 15 bp, Homo sapiens
agatgcgtgaaactt

SEQ ID NO: 96785 - DNA, 15 bp, Homo sapiens
cagatgcgtgaaact

SEQ ID NO: 96786 - DNA, 15 bp, Homo sapiens
gcagatgcgtgaaac

SEQ ID NO: 96787 - DNA, 15 bp, Homo sapiens
agcagatgcgtgaaa

SEQ ID NO: 96788 - DNA, 15 bp, Homo sapiens
cagcagatgcgtgaa

SEQ ID NO: 96789 - DNA, 15 bp, Homo sapiens
ccagcagatgcgtga

SEQ ID NO: 96790 - DNA, 15 bp, Homo sapiens
gccagcagatgcgtg

SEQ ID NO: 96791 - DNA, 15 bp, Homo sapiens
ggccagcagatgcgt

SEQ ID NO: 96792 - DNA, 15 bp, Homo sapiens
aggccagcagatgcg

SEQ ID NO: 96793 - DNA, 15 bp, Homo sapiens
gaggccagcagatgc

SEQ ID NO: 96794 - DNA, 15 bp, Homo sapiens
ggaggccagcagatg

SEQ ID NO: 96795 - DNA, 15 bp, Homo sapiens
gggaggccagcagat

SEQ ID NO: 96796 - DNA, 15 bp, Homo sapiens
ggggaggccagcaga

SEQ ID NO: 96797 - DNA, 15 bp, Homo sapiens
gggggaggccagcag

SEQ ID NO: 96798 - DNA, 15 bp, Homo sapiens
agggggaggccagca

SEQ ID NO: 96799 - DNA, 15 bp, Homo sapiens
cagggggaggccagc

SEQ ID NO: 96800 - DNA, 15 bp, Homo sapiens
acagggggaggccag

SEQ ID NO: 96801 - DNA, 15 bp, Homo sapiens
cacagggggaggcca

SEQ ID NO: 96802 - DNA, 15 bp, Homo sapiens
tcacagggggaggcc

SEQ ID NO: 96803 - DNA, 15 bp, Homo sapiens
atcacagggggaggc

SEQ ID NO: 96804 - DNA, 15 bp, Homo sapiens
aatcacagggggagg

SEQ ID NO: 96805 - DNA, 15 bp, Homo sapiens
aaatcacagggggag

SEQ ID NO: 96806 - DNA, 15 bp, Homo sapiens
gaaatcacaggggga

SEQ ID NO: 96807 - DNA, 15 bp, Homo sapiens
ggaaatcacaggggg

SEQ ID NO: 96808 - DNA, 15 bp, Homo sapiens
aggaaatcacagggg

SEQ ID NO: 96809 - DNA, 15 bp, Homo sapiens
gaggaaatcacaggg

SEQ ID NO: 96810 - DNA, 15 bp, Homo sapiens
agaggaaatcacagg

SEQ ID NO: 96811 - DNA, 15 bp, Homo sapiens
tagaggaaatcacag

SEQ ID NO: 96812 - DNA, 15 bp, Homo sapiens
ttagaggaaatcaca

SEQ ID NO: 96813 - DNA, 15 bp, Homo sapiens
cttagaggaaatcac

SEQ ID NO: 96814 - DNA, 15 bp, Homo sapiens
gcttagaggaaatca

SEQ ID NO: 96815 - DNA, 15 bp, Homo sapiens
ggcttagaggaaatc

SEQ ID NO: 96816 - DNA, 15 bp, Homo sapiens
gggcttagaggaaat

SEQ ID NO: 96817 - DNA, 15 bp, Homo sapiens
ggggcttagaggaaa

SEQ ID NO: 96818 - DNA, 15 bp, Homo sapiens
tggggcttagaggaa

SEQ ID NO: 96819 - DNA, 15 bp, Homo sapiens
ctggggcttagagga

SEQ ID NO: 96820 - DNA, 15 bp, Homo sapiens
gctggggcttagagg

SEQ ID NO: 96821 - DNA, 15 bp, Homo sapiens
ggctggggcttagag

SEQ ID NO: 96822 - DNA, 15 bp, Homo sapiens
aggctggggcttaga

SEQ ID NO: 96823 - DNA, 15 bp, Homo sapiens
gaggctggggcttag

SEQ ID NO: 96824 - DNA, 15 bp, Homo sapiens
tgaggctggggctta

SEQ ID NO: 96825 - DNA, 15 bp, Homo sapiens
ctgaggctggggctt

SEQ ID NO: 96826 - DNA, 15 bp, Homo sapiens
actgaggctggggct

SEQ ID NO: 96827 - DNA, 15 bp, Homo sapiens
aactgaggctggggc

SEQ ID NO: 96828 - DNA, 15 bp, Homo sapiens
aaactgaggctgggg

SEQ ID NO: 96829 - DNA, 15 bp, Homo sapiens
gaaactgaggctggg

SEQ ID NO: 96830 - DNA, 15 bp, Homo sapiens
agaaactgaggctgg

SEQ ID NO: 96831 - DNA, 15 bp, Homo sapiens
gagaaactgaggctg

SEQ ID NO: 96832 - DNA, 15 bp, Homo sapiens
agagaaactgaggct

SEQ ID NO: 96833 - DNA, 15 bp, Homo sapiens
aagagaaactgaggc

SEQ ID NO: 96834 - DNA, 15 bp, Homo sapiens
aaagagaaactgagg

SEQ ID NO: 96835 - DNA, 15 bp, Homo sapiens
gaaagagaaactgag

SEQ ID NO: 96836 - DNA, 15 bp, Homo sapiens
agaaagagaaactga

SEQ ID NO: 96837 - DNA, 15 bp, Homo sapiens
cagaaagagaaactg

SEQ ID NO: 96838 - DNA, 15 bp, Homo sapiens
gcagaaagagaaact

SEQ ID NO: 96839 - DNA, 15 bp, Homo sapiens
ggcagaaagagaaac

SEQ ID NO: 96840 - DNA, 15 bp, Homo sapiens
gggcagaaagagaaa

SEQ ID NO: 96841 - DNA, 15 bp, Homo sapiens
tgggcagaaagagaa

SEQ ID NO: 96842 - DNA, 15 bp, Homo sapiens
gtgggcagaaagaga

SEQ ID NO: 96843 - DNA, 15 bp, Homo sapiens
tgtgggcagaaagag

SEQ ID NO: 96844 - DNA, 15 bp, Homo sapiens
atgtgggcagaaaga

SEQ ID NO: 96845 - DNA, 15 bp, Homo sapiens
tatgtgggcagaaag

SEQ ID NO: 96846 - DNA, 15 bp, Homo sapiens
gtatgtgggcagaaa

SEQ ID NO: 96847 - DNA, 15 bp, Homo sapiens
agtatgtgggcagaa

SEQ ID NO: 96848 - DNA, 15 bp, Homo sapiens
cagtatgtgggcaga

SEQ ID NO: 96849 - DNA, 15 bp, Homo sapiens
ccagtatgtgggcag

SEQ ID NO: 96850 - DNA, 15 bp, Homo sapiens
gccagtatgtgggca

SEQ ID NO: 96851 - DNA, 15 bp, Homo sapiens
ggccagtatgtgggc

SEQ ID NO: 96852 - DNA, 15 bp, Homo sapiens
tggccagtatgtggg

SEQ ID NO: 96853 - DNA, 15 bp, Homo sapiens
gtggccagtatgtgg

SEQ ID NO: 96854 - DNA, 15 bp, Homo sapiens
tgtggccagtatgtg

SEQ ID NO: 96855 - DNA, 15 bp, Homo sapiens
gtgtggccagtatgt

SEQ ID NO: 96856 - DNA, 15 bp, Homo sapiens
tgtgtggccagtatg

SEQ ID NO: 96857 - DNA, 15 bp, Homo sapiens
ttgtgtggccagtat

SEQ ID NO: 96858 - DNA, 15 bp, Homo sapiens
attgtgtggccagta

SEQ ID NO: 96859 - DNA, 15 bp, Homo sapiens
aattgtgtggccagt

SEQ ID NO: 96860 - DNA, 15 bp, Homo sapiens
gaattgtgtggccag

SEQ ID NO: 96861 - DNA, 15 bp, Homo sapiens
agaattgtgtggcca

SEQ ID NO: 96862 - DNA, 15 bp, Homo sapiens
gagaattgtgtggcc

SEQ ID NO: 96863 - DNA, 15 bp, Homo sapiens
tgagaattgtgtggc

SEQ ID NO: 96864 - DNA, 15 bp, Homo sapiens
ctgagaattgtgtgg

SEQ ID NO: 96865 - DNA, 15 bp, Homo sapiens
gctgagaattgtgtg

SEQ ID NO: 96866 - DNA, 15 bp, Homo sapiens
ggctgagaattgtgt

SEQ ID NO: 96867 - DNA, 15 bp, Homo sapiens
gggctgagaattgtg

SEQ ID NO: 96868 - DNA, 15 bp, Homo sapiens
ggggctgagaattgt

SEQ ID NO: 96869 - DNA, 15 bp, Homo sapiens
gggggctgagaattg

SEQ ID NO: 96870 - DNA, 15 bp, Homo sapiens
agggggctgagaatt

SEQ ID NO: 96871 - DNA, 15 bp, Homo sapiens
gagggggctgagaat

SEQ ID NO: 96872 - DNA, 15 bp, Homo sapiens
ggagggggctgagaa

SEQ ID NO: 96873 - DNA, 15 bp, Homo sapiens
aggagggggctgaga

SEQ ID NO: 96874 - DNA, 15 bp, Homo sapiens
gaggagggggctgag

SEQ ID NO: 96875 - DNA, 15 bp, Homo sapiens
agaggagggggctga

SEQ ID NO: 96876 - DNA, 15 bp, Homo sapiens
gagaggagggggctg

SEQ ID NO: 96877 - DNA, 15 bp, Homo sapiens
ggagaggagggggct

SEQ ID NO: 96878 - DNA, 15 bp, Homo sapiens
tggagaggagggggc

SEQ ID NO: 96879 - DNA, 15 bp, Homo sapiens
atggagaggaggggg

SEQ ID NO: 96880 - DNA, 15 bp, Homo sapiens
gatggagaggagggg

SEQ ID NO: 96881 - DNA, 15 bp, Homo sapiens
agatggagaggaggg

SEQ ID NO: 96882 - DNA, 15 bp, Homo sapiens
cagatggagaggagg

SEQ ID NO: 96883 - DNA, 15 bp, Homo sapiens
acagatggagaggag

SEQ ID NO: 96884 - DNA, 15 bp, Homo sapiens
cacagatggagagga

SEQ ID NO: 96885 - DNA, 15 bp, Homo sapiens
acacagatggagagg

SEQ ID NO: 96886 - DNA, 15 bp, Homo sapiens
gacacagatggagag

SEQ ID NO: 96887 - DNA, 15 bp, Homo sapiens
agacacagatggaga

SEQ ID NO: 96888 - DNA, 15 bp, Homo sapiens
cagacacagatggag

SEQ ID NO: 96889 - DNA, 15 bp, Homo sapiens
acagacacagatgga

SEQ ID NO: 96890 - DNA, 15 bp, Homo sapiens
cacagacacagatgg

SEQ ID NO: 96891 - DNA, 15 bp, Homo sapiens
acacagacacagatg

SEQ ID NO: 96892 - DNA, 15 bp, Homo sapiens
cacacagacacagat

SEQ ID NO: 96893 - DNA, 15 bp, Homo sapiens
acacacagacacaga

SEQ ID NO: 96894 - DNA, 15 bp, Homo sapiens
tacacacagacacag

SEQ ID NO: 96895 - DNA, 15 bp, Homo sapiens
atacacacagacaca

SEQ ID NO: 96896 - DNA, 15 bp, Homo sapiens
gatacacacagacac

SEQ ID NO: 96897 - DNA, 15 bp, Homo sapiens
agatacacacagaca

SEQ ID NO: 96898 - DNA, 15 bp, Homo sapiens
aagatacacacagac

SEQ ID NO: 96899 - DNA, 15 bp, Homo sapiens
aaagatacacacaga

SEQ ID NO: 96900 - DNA, 15 bp, Homo sapiens
gaaagatacacacag

SEQ ID NO: 96901 - DNA, 15 bp, Homo sapiens
agaaagatacacaca

SEQ ID NO: 96902 - DNA, 15 bp, Homo sapiens
gagaaagatacacac

SEQ ID NO: 96903 - DNA, 15 bp, Homo sapiens
agagaaagatacaca

SEQ ID NO: 96904 - DNA, 15 bp, Homo sapiens
gagagaaagatacac

SEQ ID NO: 96905 - DNA, 15 bp, Homo sapiens
agagagaaagataca

SEQ ID NO: 96906 - DNA, 15 bp, Homo sapiens
cagagagaaagatac

SEQ ID NO: 96907 - DNA, 15 bp, Homo sapiens
gcagagagaaagata

SEQ ID NO: 96908 - DNA, 15 bp, Homo sapiens
ggcagagagaaagat

SEQ ID NO: 96909 - DNA, 15 bp, Homo sapiens
gggcagagagaaaga

SEQ ID NO: 96910 - DNA, 15 bp, Homo sapiens
agggcagagagaaag

SEQ ID NO: 96911 - DNA, 15 bp, Homo sapiens
aagggcagagagaaa

SEQ ID NO: 96912 - DNA, 15 bp, Homo sapiens
aaagggcagagagaa

SEQ ID NO: 96913 - DNA, 15 bp, Homo sapiens
aaaagggcagagaga

SEQ ID NO: 96914 - DNA, 15 bp, Homo sapiens
aaaaagggcagagag

SEQ ID NO: 96915 - DNA, 15 bp, Homo sapiens
aaaaaagggcagaga

SEQ ID NO: 96916 - DNA, 15 bp, Homo sapiens
aaaaaaagggcagag

SEQ ID NO: 96917 - DNA, 15 bp, Homo sapiens
aaaaaaaagggcaga

SEQ ID NO: 96918 - DNA, 15 bp, Homo sapiens
aaaaaaaaagggcag

SEQ ID NO: 96919 - DNA, 15 bp, Homo sapiens
aaaaaaaaaagggca

SEQ ID NO: 96920 - DNA, 15 bp, Homo sapiens
aaaaaaaaaaagggc

SEQ ID NO: 96921 - DNA, 15 bp, Homo sapiens
aaaaaaaaaaaaggg

SEQ ID NO: 96922 - DNA, 15 bp, Homo sapiens
aaaaaaaaaaaaagg

SEQ ID NO: 96923 - DNA, 15 bp, Homo sapiens
ctaaaaaaaaaaaaa

SEQ ID NO: 96924 - DNA, 15 bp, Homo sapiens
tctaaaaaaaaaaaa

SEQ ID NO: 96925 - DNA, 15 bp, Homo sapiens
gtctaaaaaaaaaaa

SEQ ID NO: 96926 - DNA, 15 bp, Homo sapiens
cgtctaaaaaaaaaa

SEQ ID NO: 96927 - DNA, 15 bp, Homo sapiens
ccgtctaaaaaaaaa

SEQ ID NO: 96928 - DNA, 15 bp, Homo sapiens
tccgtctaaaaaaaa

SEQ ID NO: 96929 - DNA, 15 bp, Homo sapiens
ctccgtctaaaaaaa

SEQ ID NO: 96930 - DNA, 15 bp, Homo sapiens
actccgtctaaaaaa

SEQ ID NO: 96931 - DNA, 15 bp, Homo sapiens
gactccgtctaaaaa

SEQ ID NO: 96932 - DNA, 15 bp, Homo sapiens
agactccgtctaaaa

SEQ ID NO: 96933 - DNA, 15 bp, Homo sapiens
cagactccgtctaaa

SEQ ID NO: 96934 - DNA, 15 bp, Homo sapiens
ccagactccgtctaa

SEQ ID NO: 96935 - DNA, 15 bp, Homo sapiens
gccagactccgtcta

SEQ ID NO: 96936 - DNA, 15 bp, Homo sapiens
agccagactccgtct

SEQ ID NO: 96937 - DNA, 15 bp, Homo sapiens
gagccagactccgtc

SEQ ID NO: 96938 - DNA, 15 bp, Homo sapiens
agagccagactccgt

SEQ ID NO: 96939 - DNA, 15 bp, Homo sapiens
cagagccagactccg

SEQ ID NO: 96940 - DNA, 15 bp, Homo sapiens
acagagccagactcc

SEQ ID NO: 96941 - DNA, 15 bp, Homo sapiens
gacagagccagactc

SEQ ID NO: 96942 - DNA, 15 bp, Homo sapiens
tgacagagccagact

SEQ ID NO: 96943 - DNA, 15 bp, Homo sapiens
gtgacagagccagac

SEQ ID NO: 96944 - DNA, 15 bp, Homo sapiens
ggtgacagagccaga

SEQ ID NO: 96945 - DNA, 15 bp, Homo sapiens
gggtgacagagccag

SEQ ID NO: 96946 - DNA, 15 bp, Homo sapiens
tgggtgacagagcca

SEQ ID NO: 96947 - DNA, 15 bp, Homo sapiens
ctgggtgacagagcc

SEQ ID NO: 96948 - DNA, 15 bp, Homo sapiens
cctgggtgacagagc

SEQ ID NO: 96949 - DNA, 15 bp, Homo sapiens
gcctgggtgacagag

SEQ ID NO: 96950 - DNA, 15 bp, Homo sapiens
agcctgggtgacaga

SEQ ID NO: 96951 - DNA, 15 bp, Homo sapiens
tagcctgggtgacag

SEQ ID NO: 96952 - DNA, 15 bp, Homo sapiens
ctagcctgggtgaca

SEQ ID NO: 96953 - DNA, 15 bp, Homo sapiens
tctagcctgggtgac

SEQ ID NO: 96954 - DNA, 15 bp, Homo sapiens
ctctagcctgggtga

SEQ ID NO: 96955 - DNA, 15 bp, Homo sapiens
actctagcctgggtg

SEQ ID NO: 96956 - DNA, 15 bp, Homo sapiens
cactctagcctgggt

SEQ ID NO: 96957 - DNA, 15 bp, Homo sapiens
actgcactctagcct

SEQ ID NO: 96958 - DNA, 15 bp, Homo sapiens
cactgcactctagcc

SEQ ID NO: 96959 - DNA, 15 bp, Homo sapiens
ccactgcactctagc

SEQ ID NO: 96960 - DNA, 15 bp, Homo sapiens
gccactgcactctag

SEQ ID NO: 96961 - DNA, 15 bp, Homo sapiens
tgccactgcactcta

SEQ ID NO: 96962 - DNA, 15 bp, Homo sapiens
cgtgccactgcactc

SEQ ID NO: 96963 - DNA, 15 bp, Homo sapiens
tcgtgccactgcact

SEQ ID NO: 96964 - DNA, 15 bp, Homo sapiens
atcgtgccactgcac

SEQ ID NO: 96965 - DNA, 15 bp, Homo sapiens
gatcgtgccactgca

SEQ ID NO: 96966 - DNA, 15 bp, Homo sapiens
agatcgtgccactgc

SEQ ID NO: 96967 - DNA, 15 bp, Homo sapiens
aagatcgtgccactg

SEQ ID NO: 96968 - DNA, 15 bp, Homo sapiens
caagatcgtgccact

SEQ ID NO: 96969 - DNA, 15 bp, Homo sapiens
agaggcagaggttgc

SEQ ID NO: 96970 - DNA, 15 bp, Homo sapiens
aagaggcagaggttg

SEQ ID NO: 96971 - DNA, 15 bp, Homo sapiens
caagaggcagaggtt

SEQ ID NO: 96972 - DNA, 15 bp, Homo sapiens
ccaagaggcagaggt

SEQ ID NO: 96973 - DNA, 15 bp, Homo sapiens
cccaagaggcagagg

SEQ ID NO: 96974 - DNA, 15 bp, Homo sapiens
acccaagaggcagag

SEQ ID NO: 96975 - DNA, 15 bp, Homo sapiens
aacccaagaggcaga

SEQ ID NO: 96976 - DNA, 15 bp, Homo sapiens
gaacccaagaggcag

SEQ ID NO: 96977 - DNA, 15 bp, Homo sapiens
tgaacccaagaggca

SEQ ID NO: 96978 - DNA, 15 bp, Homo sapiens
ttgaacccaagaggc

SEQ ID NO: 96979 - DNA, 15 bp, Homo sapiens
cttgaacccaagagg

SEQ ID NO: 96980 - DNA, 15 bp, Homo sapiens
gcttgaacccaagag

SEQ ID NO: 96981 - DNA, 15 bp, Homo sapiens
cgcttgaacccaaga

SEQ ID NO: 96982 - DNA, 15 bp, Homo sapiens
tcgcttgaacccaag

SEQ ID NO: 96983 - DNA, 15 bp, Homo sapiens
atcgcttgaacccaa

SEQ ID NO: 96984 - DNA, 15 bp, Homo sapiens
aatcgcttgaaccca

SEQ ID NO: 96985 - DNA, 15 bp, Homo sapiens
cagaatcgcttgaac

SEQ ID NO: 96986 - DNA, 15 bp, Homo sapiens
gcagaatcgcttgaa

SEQ ID NO: 96987 - DNA, 15 bp, Homo sapiens
agcagaatcgcttga

SEQ ID NO: 96988 - DNA, 15 bp, Homo sapiens
cagcagaatcgcttg

SEQ ID NO: 96989 - DNA, 15 bp, Homo sapiens
gcagcagaatcgctt

SEQ ID NO: 96990 - DNA, 15 bp, Homo sapiens
ggcagcagaatcgct

SEQ ID NO: 96991 - DNA, 15 bp, Homo sapiens
aggcagcagaatcgc

SEQ ID NO: 96992 - DNA, 15 bp, Homo sapiens
gaggcagcagaatcg

SEQ ID NO: 96993 - DNA, 15 bp, Homo sapiens
tgaggcagcagaatc

SEQ ID NO: 96994 - DNA, 15 bp, Homo sapiens
ctgaggcagcagaat

SEQ ID NO: 96995 - DNA, 15 bp, Homo sapiens
actgaggcagcagaa

SEQ ID NO: 96996 - DNA, 15 bp, Homo sapiens
tactgaggcagcaga

SEQ ID NO: 96997 - DNA, 15 bp, Homo sapiens
ctactgaggcagcag

SEQ ID NO: 96998 - DNA, 15 bp, Homo sapiens
gctactgaggcagca

SEQ ID NO: 96999 - DNA, 15 bp, Homo sapiens
agctactgaggcagc

SEQ ID NO: 97000 - DNA, 15 bp, Homo sapiens
cagctactgaggcag

SEQ ID NO: 97001 - DNA, 15 bp, Homo sapiens
ccagctactgaggca

SEQ ID NO: 97002 - DNA, 15 bp, Homo sapiens
cccagctactgaggc

SEQ ID NO: 97003 - DNA, 15 bp, Homo sapiens
tcccagctactgagg

SEQ ID NO: 97004 - DNA, 15 bp, Homo sapiens
atcccagctactgag

SEQ ID NO: 97005 - DNA, 15 bp, Homo sapiens
aatcccagctactga

SEQ ID NO: 97006 - DNA, 15 bp, Homo sapiens
taatcccagctactg

SEQ ID NO: 97007 - DNA, 15 bp, Homo sapiens
agcctgtaatcccag

SEQ ID NO: 97008 - DNA, 15 bp, Homo sapiens
gagcctgtaatccca

SEQ ID NO: 97009 - DNA, 15 bp, Homo sapiens
tgagcctgtaatccc

SEQ ID NO: 97010 - DNA, 15 bp, Homo sapiens
gtgagcctgtaatcc

SEQ ID NO: 97011 - DNA, 15 bp, Homo sapiens
tgtgagcctgtaatc

SEQ ID NO: 97012 - DNA, 15 bp, Homo sapiens
gtgtgagcctgtaat

SEQ ID NO: 97013 - DNA, 15 bp, Homo sapiens
ggtgtgagcctgtaa

SEQ ID NO: 97014 - DNA, 15 bp, Homo sapiens
tggtgtgagcctgta

SEQ ID NO: 97015 - DNA, 15 bp, Homo sapiens
gtggtgtgagcctgt

SEQ ID NO: 97016 - DNA, 15 bp, Homo sapiens
ggtggtgtgagcctg

SEQ ID NO: 97017 - DNA, 15 bp, Homo sapiens
tggtggtgtgagcct

SEQ ID NO: 97018 - DNA, 15 bp, Homo sapiens
gtggtggtgtgagcc

SEQ ID NO: 97019 - DNA, 15 bp, Homo sapiens
tgtggtggtgtgagc

SEQ ID NO: 97020 - DNA, 15 bp, Homo sapiens
gtgtggtggtgtgag

SEQ ID NO: 97021 - DNA, 15 bp, Homo sapiens
ggtgtggtggtgtga

SEQ ID NO: 97022 - DNA, 15 bp, Homo sapiens
gggtgtggtggtgtg

SEQ ID NO: 97023 - DNA, 15 bp, Homo sapiens
cgggtgtggtggtgt

SEQ ID NO: 97024 - DNA, 15 bp, Homo sapiens
ccgggtgtggtggtg

SEQ ID NO: 97025 - DNA, 15 bp, Homo sapiens
gccgggtgtggtggt

SEQ ID NO: 97026 - DNA, 15 bp, Homo sapiens
agccgggtgtggtgg

SEQ ID NO: 97027 - DNA, 15 bp, Homo sapiens
tagccgggtgtggtg

SEQ ID NO: 97028 - DNA, 15 bp, Homo sapiens
ttagccgggtgtggt

SEQ ID NO: 97029 - DNA, 15 bp, Homo sapiens
cgtctctactaaaaa

SEQ ID NO: 97030 - DNA, 15 bp, Homo sapiens
tcgtctctactaaaa

SEQ ID NO: 97031 - DNA, 15 bp, Homo sapiens
ctcgtctctactaaa

SEQ ID NO: 97032 - DNA, 15 bp, Homo sapiens
gctcgtctctactaa

SEQ ID NO: 97033 - DNA, 15 bp, Homo sapiens
agctcgtctctacta

SEQ ID NO: 97034 - DNA, 15 bp, Homo sapiens
aagctcgtctctact

SEQ ID NO: 97035 - DNA, 15 bp, Homo sapiens
aaagctcgtctctac

SEQ ID NO: 97036 - DNA, 15 bp, Homo sapiens
gaaagctcgtctcta

SEQ ID NO: 97037 - DNA, 15 bp, Homo sapiens
tgaaagctcgtctct

SEQ ID NO: 97038 - DNA, 15 bp, Homo sapiens
gtgaaagctcgtctc

SEQ ID NO: 97039 - DNA, 15 bp, Homo sapiens
ggtgaaagctcgtct

SEQ ID NO: 97040 - DNA, 15 bp, Homo sapiens
tggtgaaagctcgtc

SEQ ID NO: 97041 - DNA, 15 bp, Homo sapiens
atggtgaaagctcgt

SEQ ID NO: 97042 - DNA, 15 bp, Homo sapiens
catggtgaaagctcg

SEQ ID NO: 97043 - DNA, 15 bp, Homo sapiens
acatggtgaaagctc

SEQ ID NO: 97044 - DNA, 15 bp, Homo sapiens
aacatggtgaaagct

SEQ ID NO: 97045 - DNA, 15 bp, Homo sapiens
caacatggtgaaagc

SEQ ID NO: 97046 - DNA, 15 bp, Homo sapiens
ccaacatggtgaaag

SEQ ID NO: 97047 - DNA, 15 bp, Homo sapiens
tgcctggccaacatg

SEQ ID NO: 97048 - DNA, 15 bp, Homo sapiens
ctgcctggccaacat

SEQ ID NO: 97049 - DNA, 15 bp, Homo sapiens
cctgcctggccaaca

SEQ ID NO: 97050 - DNA, 15 bp, Homo sapiens
acctgcctggccaac

SEQ ID NO: 97051 - DNA, 15 bp, Homo sapiens
gacctgcctggccaa

SEQ ID NO: 97052 - DNA, 15 bp, Homo sapiens
agacctgcctggcca

SEQ ID NO: 97053 - DNA, 15 bp, Homo sapiens
gagacctgcctggcc

SEQ ID NO: 97054 - DNA, 15 bp, Homo sapiens
tgagacctgcctggc

SEQ ID NO: 97055 - DNA, 15 bp, Homo sapiens
ttgagacctgcctgg

SEQ ID NO: 97056 - DNA, 15 bp, Homo sapiens
tttgagacctgcctg

SEQ ID NO: 97057 - DNA, 15 bp, Homo sapiens
gtttgagacctgcct

SEQ ID NO: 97058 - DNA, 15 bp, Homo sapiens
agtttgagacctgcc

SEQ ID NO: 97059 - DNA, 15 bp, Homo sapiens
gagtttgagacctgc

SEQ ID NO: 97060 - DNA, 15 bp, Homo sapiens
ggagtttgagacctg

SEQ ID NO: 97061 - DNA, 15 bp, Homo sapiens
aggagtttgagacct

SEQ ID NO: 97062 - DNA, 15 bp, Homo sapiens
tggtcaggagtttga

SEQ ID NO: 97063 - DNA, 15 bp, Homo sapiens
ttggtcaggagtttg

SEQ ID NO: 97064 - DNA, 15 bp, Homo sapiens
cttggtcaggagttt

SEQ ID NO: 97065 - DNA, 15 bp, Homo sapiens
acttggtcaggagtt

SEQ ID NO: 97066 - DNA, 15 bp, Homo sapiens
cacttggtcaggagt

SEQ ID NO: 97067 - DNA, 15 bp, Homo sapiens
tcacttggtcaggag

SEQ ID NO: 97068 - DNA, 15 bp, Homo sapiens
atcacttggtcagga

SEQ ID NO: 97069 - DNA, 15 bp, Homo sapiens
gatcacttggtcagg

SEQ ID NO: 97070 - DNA, 15 bp, Homo sapiens
ggatcacttggtcag

SEQ ID NO: 97071 - DNA, 15 bp, Homo sapiens
tggatcacttggtca

SEQ ID NO: 97072 - DNA, 15 bp, Homo sapiens
gtggatcacttggtc

SEQ ID NO: 97073 - DNA, 15 bp, Homo sapiens
ggtggatcacttggt

SEQ ID NO: 97074 - DNA, 15 bp, Homo sapiens
gggtggatcacttgg

SEQ ID NO: 97075 - DNA, 15 bp, Homo sapiens
cggcgggtggatcac

SEQ ID NO: 97076 - DNA, 15 bp, Homo sapiens
ccggcgggtggatca

SEQ ID NO: 97077 - DNA, 15 bp, Homo sapiens
gccggcgggtggatc

SEQ ID NO: 97078 - DNA, 15 bp, Homo sapiens
ggccggcgggtggat

SEQ ID NO: 97079 - DNA, 15 bp, Homo sapiens
aggccggcgggtgga

SEQ ID NO: 97080 - DNA, 15 bp, Homo sapiens
gaggccggcgggtgg

SEQ ID NO: 97081 - DNA, 15 bp, Homo sapiens
ggaggccggcgggtg

SEQ ID NO: 97082 - DNA, 15 bp, Homo sapiens
gggaggccggcgggt

SEQ ID NO: 97083 - DNA, 15 bp, Homo sapiens
tgggaggccggcggg

SEQ ID NO: 97084 - DNA, 15 bp, Homo sapiens
ttgggaggccggcgg

SEQ ID NO: 97085 - DNA, 15 bp, Homo sapiens
tttgggaggccggcg

SEQ ID NO: 97086 - DNA, 15 bp, Homo sapiens
ctttgggaggccggc

SEQ ID NO: 97087 - DNA, 15 bp, Homo sapiens
tcagcactttgggag

SEQ ID NO: 97088 - DNA, 15 bp, Homo sapiens
ctcagcactttggga

SEQ ID NO: 97089 - DNA, 15 bp, Homo sapiens
tctcagcactttggg

SEQ ID NO: 97090 - DNA, 15 bp, Homo sapiens
atctcagcactttgg

SEQ ID NO: 97091 - DNA, 15 bp, Homo sapiens
aatctcagcactttg

SEQ ID NO: 97092 - DNA, 15 bp, Homo sapiens
taatctcagcacttt

SEQ ID NO: 97093 - DNA, 15 bp, Homo sapiens
gtaatctcagcactt

SEQ ID NO: 97094 - DNA, 15 bp, Homo sapiens
tgtaatctcagcact

SEQ ID NO: 97095 - DNA, 15 bp, Homo sapiens
ctgtaatctcagcac

SEQ ID NO: 97096 - DNA, 15 bp, Homo sapiens
cctgtaatctcagca

SEQ ID NO: 97097 - DNA, 15 bp, Homo sapiens
gcctgtaatctcagc

SEQ ID NO: 97098 - DNA, 15 bp, Homo sapiens
ggcctgtaatctcag

SEQ ID NO: 97099 - DNA, 15 bp, Homo sapiens
aggcctgtaatctca

SEQ ID NO: 97100 - DNA, 15 bp, Homo sapiens
caggcctgtaatctc

SEQ ID NO: 97101 - DNA, 15 bp, Homo sapiens
tcaggcctgtaatct

SEQ ID NO: 97102 - DNA, 15 bp, Homo sapiens
ctcaggcctgtaatc

SEQ ID NO: 97103 - DNA, 15 bp, Homo sapiens
gctcaggcctgtaat

SEQ ID NO: 97104 - DNA, 15 bp, Homo sapiens
ggctcaggcctgtaa

SEQ ID NO: 97105 - DNA, 15 bp, Homo sapiens
tggctcaggcctgta

SEQ ID NO: 97106 - DNA, 15 bp, Homo sapiens
gtggctcaggcctgt

SEQ ID NO: 97107 - DNA, 15 bp, Homo sapiens
ggtggctcaggcctg

SEQ ID NO: 97108 - DNA, 15 bp, Homo sapiens
tggtggctcaggcct

SEQ ID NO: 97109 - DNA, 15 bp, Homo sapiens
atggtggctcaggcc

SEQ ID NO: 97110 - DNA, 15 bp, Homo sapiens
catggtggctcaggc

SEQ ID NO: 97111 - DNA, 15 bp, Homo sapiens
gcatggtggctcagg

SEQ ID NO: 97112 - DNA, 15 bp, Homo sapiens
ggcatggtggctcag

SEQ ID NO: 97113 - DNA, 15 bp, Homo sapiens
gggcatggtggctca

SEQ ID NO: 97114 - DNA, 15 bp, Homo sapiens
cgggcatggtggctc

SEQ ID NO: 97115 - DNA, 15 bp, Homo sapiens
ccgggcatggtggct

SEQ ID NO: 97116 - DNA, 15 bp, Homo sapiens
gccgggcatggtggc

SEQ ID NO: 97117 - DNA, 15 bp, Homo sapiens
ggccgggcatggtgg

SEQ ID NO: 97118 - DNA, 15 bp, Homo sapiens
aggccgggcatggtg

SEQ ID NO: 97119 - DNA, 15 bp, Homo sapiens
gaggccgggcatggt

SEQ ID NO: 97120 - DNA, 15 bp, Homo sapiens
agaggccgggcatgg

SEQ ID NO: 97121 - DNA, 15 bp, Homo sapiens
cagaggccgggcatg

SEQ ID NO: 97122 - DNA, 15 bp, Homo sapiens
gcagaggccgggcat

SEQ ID NO: 97123 - DNA, 15 bp, Homo sapiens
ggcagaggccgggca

SEQ ID NO: 97124 - DNA, 15 bp, Homo sapiens
gggcagaggccgggc

SEQ ID NO: 97125 - DNA, 15 bp, Homo sapiens
ggggcagaggccggg

SEQ ID NO: 97126 - DNA, 15 bp, Homo sapiens
aggggcagaggccgg

SEQ ID NO: 97127 - DNA, 15 bp, Homo sapiens
gaggggcagaggccg

SEQ ID NO: 97128 - DNA, 15 bp, Homo sapiens
agaggggcagaggcc

SEQ ID NO: 97129 - DNA, 15 bp, Homo sapiens
aagaggggcagaggc

SEQ ID NO: 97130 - DNA, 15 bp, Homo sapiens
aaagaggggcagagg

SEQ ID NO: 97131 - DNA, 15 bp, Homo sapiens
gaaagaggggcagag

SEQ ID NO: 97132 - DNA, 15 bp, Homo sapiens
agaaagaggggcaga

SEQ ID NO: 97133 - DNA, 15 bp, Homo sapiens
aagaaagaggggcag

SEQ ID NO: 97134 - DNA, 15 bp, Homo sapiens
aaagaaagaggggca

SEQ ID NO: 97135 - DNA, 15 bp, Homo sapiens
aaaagaaagaggggc

SEQ ID NO: 97136 - DNA, 15 bp, Homo sapiens
aaaaagaaagagggg

SEQ ID NO: 97137 - DNA, 15 bp, Homo sapiens
aaaaaagaaagaggg

SEQ ID NO: 97138 - DNA, 15 bp, Homo sapiens
taaaaaagaaagagg

SEQ ID NO: 97139 - DNA, 15 bp, Homo sapiens
ctaaaaaagaaagag

SEQ ID NO: 97140 - DNA, 15 bp, Homo sapiens
cctaaaaaagaaaga

SEQ ID NO: 97141 - DNA, 15 bp, Homo sapiens
ccctaaaaaagaaag

SEQ ID NO: 97142 - DNA, 15 bp, Homo sapiens
cccctaaaaaagaaa

SEQ ID NO: 97143 - DNA, 15 bp, Homo sapiens
ccccctaaaaaagaa

SEQ ID NO: 97144 - DNA, 15 bp, Homo sapiens
gccccctaaaaaaga

SEQ ID NO: 97145 - DNA, 15 bp, Homo sapiens
tgccccctaaaaaag

SEQ ID NO: 97146 - DNA, 15 bp, Homo sapiens
ctgccccctaaaaaa

SEQ ID NO: 97147 - DNA, 15 bp, Homo sapiens
cctgccccctaaaaa

SEQ ID NO: 97148 - DNA, 15 bp, Homo sapiens
ccctgccccctaaaa

SEQ ID NO: 97149 - DNA, 15 bp, Homo sapiens
tccctgccccctaaa

SEQ ID NO: 97150 - DNA, 15 bp, Homo sapiens
ttccctgccccctaa

SEQ ID NO: 97151 - DNA, 15 bp, Homo sapiens
tttccctgcccccta

SEQ ID NO: 97152 - DNA, 15 bp, Homo sapiens
ctttccctgccccct

SEQ ID NO: 97153 - DNA, 15 bp, Homo sapiens
cctttccctgccccc

SEQ ID NO: 97154 - DNA, 15 bp, Homo sapiens
acctttccctgcccc

SEQ ID NO: 97155 - DNA, 15 bp, Homo sapiens
gacctttccctgccc

SEQ ID NO: 97156 - DNA, 15 bp, Homo sapiens
agacctttccctgcc

SEQ ID NO: 97157 - DNA, 15 bp, Homo sapiens
gagacctttccctgc

SEQ ID NO: 97158 - DNA, 15 bp, Homo sapiens
tgagacctttccctg

SEQ ID NO: 97159 - DNA, 15 bp, Homo sapiens
gtgagacctttccct

SEQ ID NO: 97160 - DNA, 15 bp, Homo sapiens
ggtgagacctttccc

SEQ ID NO: 97161 - DNA, 15 bp, Homo sapiens
gggtgagacctttcc

SEQ ID NO: 97162 - DNA, 15 bp, Homo sapiens
agggtgagacctttc

SEQ ID NO: 97163 - DNA, 15 bp, Homo sapiens
cagggtgagaccttt

SEQ ID NO: 97164 - DNA, 15 bp, Homo sapiens
acagggtgagacctt

SEQ ID NO: 97165 - DNA, 15 bp, Homo sapiens
gacagggtgagacct

SEQ ID NO: 97166 - DNA, 15 bp, Homo sapiens
tgacagggtgagacc

SEQ ID NO: 97167 - DNA, 15 bp, Homo sapiens
gtgacagggtgagac

SEQ ID NO: 97168 - DNA, 15 bp, Homo sapiens
ggtgacagggtgaga

SEQ ID NO: 97169 - DNA, 15 bp, Homo sapiens
gggtgacagggtgag

SEQ ID NO: 97170 - DNA, 15 bp, Homo sapiens
cgggtgacagggtga

SEQ ID NO: 97171 - DNA, 15 bp, Homo sapiens
gcgggtgacagggtg

SEQ ID NO: 97172 - DNA, 15 bp, Homo sapiens
ggcgggtgacagggt

SEQ ID NO: 97173 - DNA, 15 bp, Homo sapiens
tggcgggtgacaggg

SEQ ID NO: 97174 - DNA, 15 bp, Homo sapiens
atggcgggtgacagg

SEQ ID NO: 97175 - DNA, 15 bp, Homo sapiens
gatggcgggtgacag

SEQ ID NO: 97176 - DNA, 15 bp, Homo sapiens
tgatggcgggtgaca

SEQ ID NO: 97177 - DNA, 15 bp, Homo sapiens
gtgatggcgggtgac

SEQ ID NO: 97178 - DNA, 15 bp, Homo sapiens
tgtgatggcgggtga

SEQ ID NO: 97179 - DNA, 15 bp, Homo sapiens
ctgtgatggcgggtg

SEQ ID NO: 97180 - DNA, 15 bp, Homo sapiens
gctgtgatggcgggt

SEQ ID NO: 97181 - DNA, 15 bp, Homo sapiens
agctgtgatggcggg

SEQ ID NO: 97182 - DNA, 15 bp, Homo sapiens
gagctgtgatggcgg

SEQ ID NO: 97183 - DNA, 15 bp, Homo sapiens
tgagctgtgatggcg

SEQ ID NO: 97184 - DNA, 15 bp, Homo sapiens
gtgagctgtgatggc

SEQ ID NO: 97185 - DNA, 15 bp, Homo sapiens
agtgagctgtgatgg

SEQ ID NO: 97186 - DNA, 15 bp, Homo sapiens
cagtgagctgtgatg

SEQ ID NO: 97187 - DNA, 15 bp, Homo sapiens
gcagtgagctgtgat

SEQ ID NO: 97188 - DNA, 15 bp, Homo sapiens
tgcagtgagctgtga

SEQ ID NO: 97189 - DNA, 15 bp, Homo sapiens
ctgcagtgagctgtg

SEQ ID NO: 97190 - DNA, 15 bp, Homo sapiens
gctgcagtgagctgt

SEQ ID NO: 97191 - DNA, 15 bp, Homo sapiens
ggctgcagtgagctg

SEQ ID NO: 97192 - DNA, 15 bp, Homo sapiens
aggctgcagtgagct

SEQ ID NO: 97193 - DNA, 15 bp, Homo sapiens
tccaggaggtggagg

SEQ ID NO: 97194 - DNA, 15 bp, Homo sapiens
gtccaggaggtggag

SEQ ID NO: 97195 - DNA, 15 bp, Homo sapiens
agtccaggaggtgga

SEQ ID NO: 97196 - DNA, 15 bp, Homo sapiens
gagtccaggaggtgg

SEQ ID NO: 97197 - DNA, 15 bp, Homo sapiens
tgagtccaggaggtg

SEQ ID NO: 97198 - DNA, 15 bp, Homo sapiens
ttgagtccaggaggt

SEQ ID NO: 97199 - DNA, 15 bp, Homo sapiens
cttgagtccaggagg

SEQ ID NO: 97200 - DNA, 15 bp, Homo sapiens
acttgagtccaggag

SEQ ID NO: 97201 - DNA, 15 bp, Homo sapiens
cacttgagtccagga

SEQ ID NO: 97202 - DNA, 15 bp, Homo sapiens
tcacttgagtccagg

SEQ ID NO: 97203 - DNA, 15 bp, Homo sapiens
atcacttgagtccag

SEQ ID NO: 97204 - DNA, 15 bp, Homo sapiens
tatcacttgagtcca

SEQ ID NO: 97205 - DNA, 15 bp, Homo sapiens
ttatcacttgagtcc

SEQ ID NO: 97206 - DNA, 15 bp, Homo sapiens
cttatcacttgagtc

SEQ ID NO: 97207 - DNA, 15 bp, Homo sapiens
acttatcacttgagt

SEQ ID NO: 97208 - DNA, 15 bp, Homo sapiens
cacttatcacttgag

SEQ ID NO: 97209 - DNA, 15 bp, Homo sapiens
tcacttatcacttga

SEQ ID NO: 97210 - DNA, 15 bp, Homo sapiens
atcacttatcacttg

SEQ ID NO: 97211 - DNA, 15 bp, Homo sapiens
gatcacttatcactt

SEQ ID NO: 97212 - DNA, 15 bp, Homo sapiens
ggatcacttatcact

SEQ ID NO: 97213 - DNA, 15 bp, Homo sapiens
aggatcacttatcac

SEQ ID NO: 97214 - DNA, 15 bp, Homo sapiens
gaggatcacttatca

SEQ ID NO: 97215 - DNA, 15 bp, Homo sapiens
ggaggatcacttatc

SEQ ID NO: 97216 - DNA, 15 bp, Homo sapiens
gggaggatcacttat

SEQ ID NO: 97217 - DNA, 15 bp, Homo sapiens
cgggaggatcactta

SEQ ID NO: 97218 - DNA, 15 bp, Homo sapiens
gcgggaggatcactt

SEQ ID NO: 97219 - DNA, 15 bp, Homo sapiens
ggcgggaggatcact

SEQ ID NO: 97220 - DNA, 15 bp, Homo sapiens
aggcgggaggatcac

SEQ ID NO: 97221 - DNA, 15 bp, Homo sapiens
gaggcgggaggatca

SEQ ID NO: 97222 - DNA, 15 bp, Homo sapiens
tgaggcgggaggatc

SEQ ID NO: 97223 - DNA, 15 bp, Homo sapiens
ctgaggcgggaggat

SEQ ID NO: 97224 - DNA, 15 bp, Homo sapiens
gctgaggcgggagga

SEQ ID NO: 97225 - DNA, 15 bp, Homo sapiens
ggctgaggcgggagg

SEQ ID NO: 97226 - DNA, 15 bp, Homo sapiens
aggctgaggcgggag

SEQ ID NO: 97227 - DNA, 15 bp, Homo sapiens
aaggctgaggcggga

SEQ ID NO: 97228 - DNA, 15 bp, Homo sapiens
aaaggctgaggcggg

SEQ ID NO: 97229 - DNA, 15 bp, Homo sapiens
gaaaggctgaggcgg

SEQ ID NO: 97230 - DNA, 15 bp, Homo sapiens
ggaaaggctgaggcg

SEQ ID NO: 97231 - DNA, 15 bp, Homo sapiens
tggaaaggctgaggc

SEQ ID NO: 97232 - DNA, 15 bp, Homo sapiens
ctggaaaggctgagg

SEQ ID NO: 97233 - DNA, 15 bp, Homo sapiens
actggaaaggctgag

SEQ ID NO: 97234 - DNA, 15 bp, Homo sapiens
tactggaaaggctga

SEQ ID NO: 97235 - DNA, 15 bp, Homo sapiens
ctactggaaaggctg

SEQ ID NO: 97236 - DNA, 15 bp, Homo sapiens
gctactggaaaggct

SEQ ID NO: 97237 - DNA, 15 bp, Homo sapiens
agctactggaaaggc

SEQ ID NO: 97238 - DNA, 15 bp, Homo sapiens
cagctactggaaagg

SEQ ID NO: 97239 - DNA, 15 bp, Homo sapiens
tcagctactggaaag

SEQ ID NO: 97240 - DNA, 15 bp, Homo sapiens
ctcagctactggaaa

SEQ ID NO: 97241 - DNA, 15 bp, Homo sapiens
tctcagctactggaa

SEQ ID NO: 97242 - DNA, 15 bp, Homo sapiens
gtctcagctactgga

SEQ ID NO: 97243 - DNA, 15 bp, Homo sapiens
agtctcagctactgg

SEQ ID NO: 97244 - DNA, 15 bp, Homo sapiens
tagtctcagctactg

SEQ ID NO: 97245 - DNA, 15 bp, Homo sapiens
gtagtctcagctact

SEQ ID NO: 97246 - DNA, 15 bp, Homo sapiens
tgtagtctcagctac

SEQ ID NO: 97247 - DNA, 15 bp, Homo sapiens
ctgtagtctcagcta

SEQ ID NO: 97248 - DNA, 15 bp, Homo sapiens
cctgtagtctcagct

SEQ ID NO: 97249 - DNA, 15 bp, Homo sapiens
gcctgtagtctcagc

SEQ ID NO: 97250 - DNA, 15 bp, Homo sapiens
cgcctgtagtctcag

SEQ ID NO: 97251 - DNA, 15 bp, Homo sapiens
gcgcctgtagtctca

SEQ ID NO: 97252 - DNA, 15 bp, Homo sapiens
tgcgcctgtagtctc

SEQ ID NO: 97253 - DNA, 15 bp, Homo sapiens
atgcgcctgtagtct

SEQ ID NO: 97254 - DNA, 15 bp, Homo sapiens
tatgcgcctgtagtc

SEQ ID NO: 97255 - DNA, 15 bp, Homo sapiens
gtatgcgcctgtagt

SEQ ID NO: 97256 - DNA, 15 bp, Homo sapiens
ggtatgcgcctgtag

SEQ ID NO: 97257 - DNA, 15 bp, Homo sapiens
tggtatgcgcctgta

SEQ ID NO: 97258 - DNA, 15 bp, Homo sapiens
gtggtatgcgcctgt

SEQ ID NO: 97259 - DNA, 15 bp, Homo sapiens
agtggtatgcgcctg

SEQ ID NO: 97260 - DNA, 15 bp, Homo sapiens
tagtggtatgcgcct

SEQ ID NO: 97261 - DNA, 15 bp, Homo sapiens
ctagtggtatgcgcc

SEQ ID NO: 97262 - DNA, 15 bp, Homo sapiens
cctagtggtatgcgc

SEQ ID NO: 97263 - DNA, 15 bp, Homo sapiens
tcctagtggtatgcg

SEQ ID NO: 97264 - DNA, 15 bp, Homo sapiens
atcctagtggtatgc

SEQ ID NO: 97265 - DNA, 15 bp, Homo sapiens
aatcctagtggtatg

SEQ ID NO: 97266 - DNA, 15 bp, Homo sapiens
taatcctagtggtat

SEQ ID NO: 97267 - DNA, 15 bp, Homo sapiens
ttaatcctagtggta

SEQ ID NO: 97268 - DNA, 15 bp, Homo sapiens
attaatcctagtggt

SEQ ID NO: 97269 - DNA, 15 bp, Homo sapiens
aattaatcctagtgg

SEQ ID NO: 97270 - DNA, 15 bp, Homo sapiens
aaattaatcctagtg

SEQ ID NO: 97271 - DNA, 15 bp, Homo sapiens
caaattaatcctagt

SEQ ID NO: 97272 - DNA, 15 bp, Homo sapiens
ccaaattaatcctag

SEQ ID NO: 97273 - DNA, 15 bp, Homo sapiens
cccaaattaatccta

SEQ ID NO: 97274 - DNA, 15 bp, Homo sapiens
ccccaaattaatcct

SEQ ID NO: 97275 - DNA, 15 bp, Homo sapiens
cccccaaattaatcc

SEQ ID NO: 97276 - DNA, 15 bp, Homo sapiens
ccccccaaattaatc

SEQ ID NO: 97277 - DNA, 15 bp, Homo sapiens
cccccccaaattaat

SEQ ID NO: 97278 - DNA, 15 bp, Homo sapiens
ccccccccaaattaa

SEQ ID NO: 97279 - DNA, 15 bp, Homo sapiens
cccccccccaaatta

SEQ ID NO: 97280 - DNA, 15 bp, Homo sapiens
ccccccccccaaatt

SEQ ID NO: 97281 - DNA, 15 bp, Homo sapiens
cccccccccccaaat

SEQ ID NO: 97282 - DNA, 15 bp, Homo sapiens
acccccccccccaaa

SEQ ID NO: 97283 - DNA, 15 bp, Homo sapiens
cacccccccccccaa

SEQ ID NO: 97284 - DNA, 15 bp, Homo sapiens
ccaccccccccccca

SEQ ID NO: 97285 - DNA, 15 bp, Homo sapiens
accaccccccccccc

SEQ ID NO: 97286 - DNA, 15 bp, Homo sapiens
caccacccccccccc

SEQ ID NO: 97287 - DNA, 15 bp, Homo sapiens
acaccaccccccccc

SEQ ID NO: 97288 - DNA, 15 bp, Homo sapiens
cacaccacccccccc

SEQ ID NO: 97289 - DNA, 15 bp, Homo sapiens
acacaccaccccccc

SEQ ID NO: 97290 - DNA, 15 bp, Homo sapiens
cacacaccacccccc

SEQ ID NO: 97291 - DNA, 15 bp, Homo sapiens
acacacaccaccccc

SEQ ID NO: 97292 - DNA, 15 bp, Homo sapiens
cacacacaccacccc

SEQ ID NO: 97293 - DNA, 15 bp, Homo sapiens
ccacacacaccaccc

SEQ ID NO: 97294 - DNA, 15 bp, Homo sapiens
tccacacacaccacc

SEQ ID NO: 97295 - DNA, 15 bp, Homo sapiens
ctccacacacaccac

SEQ ID NO: 97296 - DNA, 15 bp, Homo sapiens
tctccacacacacca

SEQ ID NO: 97297 - DNA, 15 bp, Homo sapiens
atctccacacacacc

SEQ ID NO: 97298 - DNA, 15 bp, Homo sapiens
catctccacacacac

SEQ ID NO: 97299 - DNA, 15 bp, Homo sapiens
ccatctccacacaca

SEQ ID NO: 97300 - DNA, 15 bp, Homo sapiens
cccatctccacacac

SEQ ID NO: 97301 - DNA, 15 bp, Homo sapiens
ccccatctccacaca

SEQ ID NO: 97302 - DNA, 15 bp, Homo sapiens
accccatctccacac

SEQ ID NO: 97303 - DNA, 15 bp, Homo sapiens
gaccccatctccaca

SEQ ID NO: 97304 - DNA, 15 bp, Homo sapiens
agaccccatctccac

SEQ ID NO: 97305 - DNA, 15 bp, Homo sapiens
cagaccccatctcca

SEQ ID NO: 97306 - DNA, 15 bp, Homo sapiens
ccagaccccatctcc

SEQ ID NO: 97307 - DNA, 15 bp, Homo sapiens
gccagaccccatctc

SEQ ID NO: 97308 - DNA, 15 bp, Homo sapiens
agccagaccccatct

SEQ ID NO: 97309 - DNA, 15 bp, Homo sapiens
aagccagaccccatc

SEQ ID NO: 97310 - DNA, 15 bp, Homo sapiens
aaagccagaccccat

SEQ ID NO: 97311 - DNA, 15 bp, Homo sapiens
caaagccagacccca

SEQ ID NO: 97312 - DNA, 15 bp, Homo sapiens
acaaagccagacccc

SEQ ID NO: 97313 - DNA, 15 bp, Homo sapiens
aacaaagccagaccc

SEQ ID NO: 97314 - DNA, 15 bp, Homo sapiens
caacaaagccagacc

SEQ ID NO: 97315 - DNA, 15 bp, Homo sapiens
ccaacaaagccagac

SEQ ID NO: 97316 - DNA, 15 bp, Homo sapiens
gccaacaaagccaga

SEQ ID NO: 97317 - DNA, 15 bp, Homo sapiens
ggccaacaaagccag

SEQ ID NO: 97318 - DNA, 15 bp, Homo sapiens
tggccaacaaagcca

SEQ ID NO: 97319 - DNA, 15 bp, Homo sapiens
ctggccaacaaagcc

SEQ ID NO: 97320 - DNA, 15 bp, Homo sapiens
cctggccaacaaagc

SEQ ID NO: 97321 - DNA, 15 bp, Homo sapiens
gcctggccaacaaag

SEQ ID NO: 97322 - DNA, 15 bp, Homo sapiens
agcctggccaacaaa

SEQ ID NO: 97323 - DNA, 15 bp, Homo sapiens
cagcctggccaacaa

SEQ ID NO: 97324 - DNA, 15 bp, Homo sapiens
tcagcctggccaaca

SEQ ID NO: 97325 - DNA, 15 bp, Homo sapiens
atcagcctggccaac

SEQ ID NO: 97326 - DNA, 15 bp, Homo sapiens
catcagcctggccaa

SEQ ID NO: 97327 - DNA, 15 bp, Homo sapiens
acatcagcctggcca

SEQ ID NO: 97328 - DNA, 15 bp, Homo sapiens
cacatcagcctggcc

SEQ ID NO: 97329 - DNA, 15 bp, Homo sapiens
ccacatcagcctggc

SEQ ID NO: 97330 - DNA, 15 bp, Homo sapiens
tccacatcagcctgg

SEQ ID NO: 97331 - DNA, 15 bp, Homo sapiens
ttccacatcagcctg

SEQ ID NO: 97332 - DNA, 15 bp, Homo sapiens
attccacatcagcct

SEQ ID NO: 97333 - DNA, 15 bp, Homo sapiens
aattccacatcagcc

SEQ ID NO: 97334 - DNA, 15 bp, Homo sapiens
gaattccacatcagc

SEQ ID NO: 97335 - DNA, 15 bp, Homo sapiens
ggaattccacatcag

SEQ ID NO: 97336 - DNA, 15 bp, Homo sapiens
aggaattccacatca

SEQ ID NO: 97337 - DNA, 15 bp, Homo sapiens
caggaattccacatc

SEQ ID NO: 97338 - DNA, 15 bp, Homo sapiens
ccaggaattccacat

SEQ ID NO: 97339 - DNA, 15 bp, Homo sapiens
cccaggaattccaca

SEQ ID NO: 97340 - DNA, 15 bp, Homo sapiens
gcccaggaattccac

SEQ ID NO: 97341 - DNA, 15 bp, Homo sapiens
agcccaggaattcca

SEQ ID NO: 97342 - DNA, 15 bp, Homo sapiens
gagcccaggaattcc

SEQ ID NO: 97343 - DNA, 15 bp, Homo sapiens
cttgagcccaggaat

SEQ ID NO: 97344 - DNA, 15 bp, Homo sapiens
gcttgagcccaggaa

SEQ ID NO: 97345 - DNA, 15 bp, Homo sapiens
cgcttgagcccagga

SEQ ID NO: 97346 - DNA, 15 bp, Homo sapiens
tcgcttgagcccagg

SEQ ID NO: 97347 - DNA, 15 bp, Homo sapiens
tatcgcttgagccca

SEQ ID NO: 97348 - DNA, 15 bp, Homo sapiens
gtatcgcttgagccc

SEQ ID NO: 97349 - DNA, 15 bp, Homo sapiens
agtatcgcttgagcc

SEQ ID NO: 97350 - DNA, 15 bp, Homo sapiens
gagtatcgcttgagc

SEQ ID NO: 97351 - DNA, 15 bp, Homo sapiens
ggagtatcgcttgag

SEQ ID NO: 97352 - DNA, 15 bp, Homo sapiens
gggagtatcgcttga

SEQ ID NO: 97353 - DNA, 15 bp, Homo sapiens
tgggagtatcgcttg

SEQ ID NO: 97354 - DNA, 15 bp, Homo sapiens
gtgggagtatcgctt

SEQ ID NO: 97355 - DNA, 15 bp, Homo sapiens
ggtgggagtatcgct

SEQ ID NO: 97356 - DNA, 15 bp, Homo sapiens
aggtgggagtatcgc

SEQ ID NO: 97357 - DNA, 15 bp, Homo sapiens
aaggtgggagtatcg

SEQ ID NO: 97358 - DNA, 15 bp, Homo sapiens
caaggtgggagtatc

SEQ ID NO: 97359 - DNA, 15 bp, Homo sapiens
ccaaggtgggagtat

SEQ ID NO: 97360 - DNA, 15 bp, Homo sapiens
gccaaggtgggagta

SEQ ID NO: 97361 - DNA, 15 bp, Homo sapiens
ggccaaggtgggagt

SEQ ID NO: 97362 - DNA, 15 bp, Homo sapiens
aggccaaggtgggag

SEQ ID NO: 97363 - DNA, 15 bp, Homo sapiens
gaggccaaggtggga

SEQ ID NO: 97364 - DNA, 15 bp, Homo sapiens
ggaggccaaggtggg

SEQ ID NO: 97365 - DNA, 15 bp, Homo sapiens
aggaggccaaggtgg

SEQ ID NO: 97366 - DNA, 15 bp, Homo sapiens
caggaggccaaggtg

SEQ ID NO: 97367 - DNA, 15 bp, Homo sapiens
tcaggaggccaaggt

SEQ ID NO: 97368 - DNA, 15 bp, Homo sapiens
ctcaggaggccaagg

SEQ ID NO: 97369 - DNA, 15 bp, Homo sapiens
actcaggaggccaag

SEQ ID NO: 97370 - DNA, 15 bp, Homo sapiens
tactcaggaggccaa

SEQ ID NO: 97371 - DNA, 15 bp, Homo sapiens
ctactcaggaggcca

SEQ ID NO: 97372 - DNA, 15 bp, Homo sapiens
gctactcaggaggcc

SEQ ID NO: 97373 - DNA, 15 bp, Homo sapiens
tcagctactcaggag

SEQ ID NO: 97374 - DNA, 15 bp, Homo sapiens
ctcagctactcagga

SEQ ID NO: 97375 - DNA, 15 bp, Homo sapiens
tctcagctactcagg

SEQ ID NO: 97376 - DNA, 15 bp, Homo sapiens
gtctcagctactcag

SEQ ID NO: 97377 - DNA, 15 bp, Homo sapiens
agtctcagctactca

SEQ ID NO: 97378 - DNA, 15 bp, Homo sapiens
tagtctcagctactc

SEQ ID NO: 97379 - DNA, 15 bp, Homo sapiens
agtagtctcagctac

SEQ ID NO: 97380 - DNA, 15 bp, Homo sapiens
cagtagtctcagcta

SEQ ID NO: 97381 - DNA, 15 bp, Homo sapiens
ccagtagtctcagct

SEQ ID NO: 97382 - DNA, 15 bp, Homo sapiens
gccagtagtctcagc

SEQ ID NO: 97383 - DNA, 15 bp, Homo sapiens
agccagtagtctcag

SEQ ID NO: 97384 - DNA, 15 bp, Homo sapiens
tagccagtagtctca

SEQ ID NO: 97385 - DNA, 15 bp, Homo sapiens
ctagccagtagtctc

SEQ ID NO: 97386 - DNA, 15 bp, Homo sapiens
gctagccagtagtct

SEQ ID NO: 97387 - DNA, 15 bp, Homo sapiens
tgctagccagtagtc

SEQ ID NO: 97388 - DNA, 15 bp, Homo sapiens
gtgctagccagtagt

SEQ ID NO: 97389 - DNA, 15 bp, Homo sapiens
ggtgctagccagtag

SEQ ID NO: 97390 - DNA, 15 bp, Homo sapiens
tggtgctagccagta

SEQ ID NO: 97391 - DNA, 15 bp, Homo sapiens
gtggtgctagccagt

SEQ ID NO: 97392 - DNA, 15 bp, Homo sapiens
ggtggtgctagccag

SEQ ID NO: 97393 - DNA, 15 bp, Homo sapiens
tggtggtgctagcca

SEQ ID NO: 97394 - DNA, 15 bp, Homo sapiens
gtggtggtgctagcc

SEQ ID NO: 97395 - DNA, 15 bp, Homo sapiens
tgtggtggtgctagc

SEQ ID NO: 97396 - DNA, 15 bp, Homo sapiens
gtgtggtggtgctag

SEQ ID NO: 97397 - DNA, 15 bp, Homo sapiens
ggtgtggtggtgcta

SEQ ID NO: 97398 - DNA, 15 bp, Homo sapiens
gggtgtggtggtgct

SEQ ID NO: 97399 - DNA, 15 bp, Homo sapiens
tgggtgtggtggtgc

SEQ ID NO: 97400 - DNA, 15 bp, Homo sapiens
ctgggtgtggtggtg

SEQ ID NO: 97401 - DNA, 15 bp, Homo sapiens
gctgggtgtggtggt

SEQ ID NO: 97402 - DNA, 15 bp, Homo sapiens
agctgggtgtggtgg

SEQ ID NO: 97403 - DNA, 15 bp, Homo sapiens
aagctgggtgtggtg

SEQ ID NO: 97404 - DNA, 15 bp, Homo sapiens
aaagctgggtgtggt

SEQ ID NO: 97405 - DNA, 15 bp, Homo sapiens
aaaagctgggtgtgg

SEQ ID NO: 97406 - DNA, 15 bp, Homo sapiens
aaaaagctgggtgtg

SEQ ID NO: 97407 - DNA, 15 bp, Homo sapiens
taaaaagctgggtgt

SEQ ID NO: 97408 - DNA, 15 bp, Homo sapiens
ataaaaagctgggtg

SEQ ID NO: 97409 - DNA, 15 bp, Homo sapiens
aataaaaagctgggt

SEQ ID NO: 97410 - DNA, 15 bp, Homo sapiens
taataaaaagctggg

SEQ ID NO: 97411 - DNA, 15 bp, Homo sapiens
ataataaaaagctgg

SEQ ID NO: 97412 - DNA, 15 bp, Homo sapiens
aataataaaaagctg

SEQ ID NO: 97413 - DNA, 15 bp, Homo sapiens
taataataaaaagct

SEQ ID NO: 97414 - DNA, 15 bp, Homo sapiens
ataataataaaaagc

SEQ ID NO: 97415 - DNA, 15 bp, Homo sapiens
aataataataaaaag

SEQ ID NO: 97416 - DNA, 15 bp, Homo sapiens
aaataataataaaaa

SEQ ID NO: 97417 - DNA, 15 bp, Homo sapiens
caaataataataaaa

SEQ ID NO: 97418 - DNA, 15 bp, Homo sapiens
acaaataataataaa

SEQ ID NO: 97419 - DNA, 15 bp, Homo sapiens
tacaaataataataa

SEQ ID NO: 97420 - DNA, 15 bp, Homo sapiens
ctacaaataataata

SEQ ID NO: 97421 - DNA, 15 bp, Homo sapiens
tctacaaataataat

SEQ ID NO: 97422 - DNA, 15 bp, Homo sapiens
ctctacaaataataa

SEQ ID NO: 97423 - DNA, 15 bp, Homo sapiens
tctctacaaataata

SEQ ID NO: 97424 - DNA, 15 bp, Homo sapiens
gtctctacaaataat

SEQ ID NO: 97425 - DNA, 15 bp, Homo sapiens
tgtctctacaaataa

SEQ ID NO: 97426 - DNA, 15 bp, Homo sapiens
ttgtctctacaaata

SEQ ID NO: 97427 - DNA, 15 bp, Homo sapiens
cttgtctctacaaat

SEQ ID NO: 97428 - DNA, 15 bp, Homo sapiens
ccttgtctctacaaa

SEQ ID NO: 97429 - DNA, 15 bp, Homo sapiens
accttgtctctacaa

SEQ ID NO: 97430 - DNA, 15 bp, Homo sapiens
gaccttgtctctaca

SEQ ID NO: 97431 - DNA, 15 bp, Homo sapiens
agaccttgtctctac

SEQ ID NO: 97432 - DNA, 15 bp, Homo sapiens
gagaccttgtctcta

SEQ ID NO: 97433 - DNA, 15 bp, Homo sapiens
tgagaccttgtctct

SEQ ID NO: 97434 - DNA, 15 bp, Homo sapiens
ttgagaccttgtctc

SEQ ID NO: 97435 - DNA, 15 bp, Homo sapiens
attgagaccttgtct

SEQ ID NO: 97436 - DNA, 15 bp, Homo sapiens
tattgagaccttgtc

SEQ ID NO: 97437 - DNA, 15 bp, Homo sapiens
atattgagaccttgt

SEQ ID NO: 97438 - DNA, 15 bp, Homo sapiens
catattgagaccttg

SEQ ID NO: 97439 - DNA, 15 bp, Homo sapiens
acatattgagacctt

SEQ ID NO: 97440 - DNA, 15 bp, Homo sapiens
aacatattgagacct

SEQ ID NO: 97441 - DNA, 15 bp, Homo sapiens
caacatattgagacc

SEQ ID NO: 97442 - DNA, 15 bp, Homo sapiens
gcaacatattgagac

SEQ ID NO: 97443 - DNA, 15 bp, Homo sapiens
ggcaacatattgaga

SEQ ID NO: 97444 - DNA, 15 bp, Homo sapiens
gggcaacatattgag

SEQ ID NO: 97445 - DNA, 15 bp, Homo sapiens
tgggcaacatattga

SEQ ID NO: 97446 - DNA, 15 bp, Homo sapiens
ctgggcaacatattg

SEQ ID NO: 97447 - DNA, 15 bp, Homo sapiens
cctgggcaacatatt

SEQ ID NO: 97448 - DNA, 15 bp, Homo sapiens
gcctgggcaacatat

SEQ ID NO: 97449 - DNA, 15 bp, Homo sapiens
agcctgggcaacata

SEQ ID NO: 97450 - DNA, 15 bp, Homo sapiens
tagcctgggcaacat

SEQ ID NO: 97451 - DNA, 15 bp, Homo sapiens
ctagcctgggcaaca

SEQ ID NO: 97452 - DNA, 15 bp, Homo sapiens
actagcctgggcaac

SEQ ID NO: 97453 - DNA, 15 bp, Homo sapiens
gactagcctgggcaa

SEQ ID NO: 97454 - DNA, 15 bp, Homo sapiens
agactagcctgggca

SEQ ID NO: 97455 - DNA, 15 bp, Homo sapiens
gagactagcctgggc

SEQ ID NO: 97456 - DNA, 15 bp, Homo sapiens
tgagactagcctggg

SEQ ID NO: 97457 - DNA, 15 bp, Homo sapiens
ttgagactagcctgg

SEQ ID NO: 97458 - DNA, 15 bp, Homo sapiens
tttgagactagcctg

SEQ ID NO: 97459 - DNA, 15 bp, Homo sapiens
gtttgagactagcct

SEQ ID NO: 97460 - DNA, 15 bp, Homo sapiens
ggtttgagactagcc

SEQ ID NO: 97461 - DNA, 15 bp, Homo sapiens
gggtttgagactagc

SEQ ID NO: 97462 - DNA, 15 bp, Homo sapiens
ggggtttgagactag

SEQ ID NO: 97463 - DNA, 15 bp, Homo sapiens
aggggtttgagacta

SEQ ID NO: 97464 - DNA, 15 bp, Homo sapiens
caggggtttgagact

SEQ ID NO: 97465 - DNA, 15 bp, Homo sapiens
ccaggggtttgagac

SEQ ID NO: 97466 - DNA, 15 bp, Homo sapiens
cccaggggtttgaga

SEQ ID NO: 97467 - DNA, 15 bp, Homo sapiens
gcccaggggtttgag

SEQ ID NO: 97468 - DNA, 15 bp, Homo sapiens
agcccaggggtttga

SEQ ID NO: 97469 - DNA, 15 bp, Homo sapiens
gagcccaggggtttg

SEQ ID NO: 97470 - DNA, 15 bp, Homo sapiens
tgagcccaggggttt

SEQ ID NO: 97471 - DNA, 15 bp, Homo sapiens
ttgagcccaggggtt

SEQ ID NO: 97472 - DNA, 15 bp, Homo sapiens
cttgagcccaggggt

SEQ ID NO: 97473 - DNA, 15 bp, Homo sapiens
tcttgagcccagggg

SEQ ID NO: 97474 - DNA, 15 bp, Homo sapiens
ctcttgagcccaggg

SEQ ID NO: 97475 - DNA, 15 bp, Homo sapiens
tctcttgagcccagg

SEQ ID NO: 97476 - DNA, 15 bp, Homo sapiens
atctcttgagcccag

SEQ ID NO: 97477 - DNA, 15 bp, Homo sapiens
gatctcttgagccca

SEQ ID NO: 97478 - DNA, 15 bp, Homo sapiens
ggatctcttgagccc

SEQ ID NO: 97479 - DNA, 15 bp, Homo sapiens
aggatctcttgagcc

SEQ ID NO: 97480 - DNA, 15 bp, Homo sapiens
gaggatctcttgagc

SEQ ID NO: 97481 - DNA, 15 bp, Homo sapiens
ggaggatctcttgag

SEQ ID NO: 97482 - DNA, 15 bp, Homo sapiens
cggaggatctcttga

SEQ ID NO: 97483 - DNA, 15 bp, Homo sapiens
gcggaggatctcttg

SEQ ID NO: 97484 - DNA, 15 bp, Homo sapiens
ggcggaggatctctt

SEQ ID NO: 97485 - DNA, 15 bp, Homo sapiens
tggcggaggatctct

SEQ ID NO: 97486 - DNA, 15 bp, Homo sapiens
atggcggaggatctc

SEQ ID NO: 97487 - DNA, 15 bp, Homo sapiens
gatggcggaggatct

SEQ ID NO: 97488 - DNA, 15 bp, Homo sapiens
cgatggcggaggatc

SEQ ID NO: 97489 - DNA, 15 bp, Homo sapiens
ccgatggcggaggat

SEQ ID NO: 97490 - DNA, 15 bp, Homo sapiens
gccgatggcggagga

SEQ ID NO: 97491 - DNA, 15 bp, Homo sapiens
ggccgatggcggagg

SEQ ID NO: 97492 - DNA, 15 bp, Homo sapiens
aggccgatggcggag

SEQ ID NO: 97493 - DNA, 15 bp, Homo sapiens
gaggccgatggcgga

SEQ ID NO: 97494 - DNA, 15 bp, Homo sapiens
ggaggccgatggcgg

SEQ ID NO: 97495 - DNA, 15 bp, Homo sapiens
gggaggccgatggcg

SEQ ID NO: 97496 - DNA, 15 bp, Homo sapiens
tgggaggccgatggc

SEQ ID NO: 97497 - DNA, 15 bp, Homo sapiens
ttgggaggccgatgg

SEQ ID NO: 97498 - DNA, 15 bp, Homo sapiens
tttgggaggccgatg

SEQ ID NO: 97499 - DNA, 15 bp, Homo sapiens
ctttgggaggccgat

SEQ ID NO: 97500 - DNA, 15 bp, Homo sapiens
gaatcccagcacttt

SEQ ID NO: 97501 - DNA, 15 bp, Homo sapiens
ggaatcccagcactt

SEQ ID NO: 97502 - DNA, 15 bp, Homo sapiens
tggaatcccagcact

SEQ ID NO: 97503 - DNA, 15 bp, Homo sapiens
ctggaatcccagcac

SEQ ID NO: 97504 - DNA, 15 bp, Homo sapiens
cctggaatcccagca

SEQ ID NO: 97505 - DNA, 15 bp, Homo sapiens
gcctggaatcccagc

SEQ ID NO: 97506 - DNA, 15 bp, Homo sapiens
tgcctggaatcccag

SEQ ID NO: 97507 - DNA, 15 bp, Homo sapiens
atgcctggaatccca

SEQ ID NO: 97508 - DNA, 15 bp, Homo sapiens
catgcctggaatccc

SEQ ID NO: 97509 - DNA, 15 bp, Homo sapiens
ccatgcctggaatcc

SEQ ID NO: 97510 - DNA, 15 bp, Homo sapiens
cccatgcctggaatc

SEQ ID NO: 97511 - DNA, 15 bp, Homo sapiens
ccccatgcctggaat

SEQ ID NO: 97512 - DNA, 15 bp, Homo sapiens
gccccatgcctggaa

SEQ ID NO: 97513 - DNA, 15 bp, Homo sapiens
agccccatgcctgga

SEQ ID NO: 97514 - DNA, 15 bp, Homo sapiens
gagccccatgcctgg

SEQ ID NO: 97515 - DNA, 15 bp, Homo sapiens
ggagccccatgcctg

SEQ ID NO: 97516 - DNA, 15 bp, Homo sapiens
cggagccccatgcct

SEQ ID NO: 97517 - DNA, 15 bp, Homo sapiens
tcggagccccatgcc

SEQ ID NO: 97518 - DNA, 15 bp, Homo sapiens
ctcggagccccatgc

SEQ ID NO: 97519 - DNA, 15 bp, Homo sapiens
gctcggagccccatg

SEQ ID NO: 97520 - DNA, 15 bp, Homo sapiens
ggctcggagccccat

SEQ ID NO: 97521 - DNA, 15 bp, Homo sapiens
gggctcggagcccca

SEQ ID NO: 97522 - DNA, 15 bp, Homo sapiens
cgggctcggagcccc

SEQ ID NO: 97523 - DNA, 15 bp, Homo sapiens
ccgggctcggagccc

SEQ ID NO: 97524 - DNA, 15 bp, Homo sapiens
gccgggctcggagcc

SEQ ID NO: 97525 - DNA, 15 bp, Homo sapiens
ggccgggctcggagc

SEQ ID NO: 97526 - DNA, 15 bp, Homo sapiens
aggccgggctcggag

SEQ ID NO: 97527 - DNA, 15 bp, Homo sapiens
caggccgggctcgga

SEQ ID NO: 97528 - DNA, 15 bp, Homo sapiens
gcaggccgggctcgg

SEQ ID NO: 97529 - DNA, 15 bp, Homo sapiens
ggcaggccgggctcg

SEQ ID NO: 97530 - DNA, 15 bp, Homo sapiens
gggcaggccgggctc

SEQ ID NO: 97531 - DNA, 15 bp, Homo sapiens
tgggcaggccgggct

SEQ ID NO: 97532 - DNA, 15 bp, Homo sapiens
ttgggcaggccgggc

SEQ ID NO: 97533 - DNA, 15 bp, Homo sapiens
gttgggcaggccggg

SEQ ID NO: 97534 - DNA, 15 bp, Homo sapiens
agttgggcaggccgg

SEQ ID NO: 97535 - DNA, 15 bp, Homo sapiens
aagttgggcaggccg

SEQ ID NO: 97536 - DNA, 15 bp, Homo sapiens
taagttgggcaggcc

SEQ ID NO: 97537 - DNA, 15 bp, Homo sapiens
ttaagttgggcaggc

SEQ ID NO: 97538 - DNA, 15 bp, Homo sapiens
attaagttgggcagg

SEQ ID NO: 97539 - DNA, 15 bp, Homo sapiens
tattaagttgggcag

SEQ ID NO: 97540 - DNA, 15 bp, Homo sapiens
ttattaagttgggca

SEQ ID NO: 97541 - DNA, 15 bp, Homo sapiens
attattaagttgggc

SEQ ID NO: 97542 - DNA, 15 bp, Homo sapiens
tattattaagttggg

SEQ ID NO: 97543 - DNA, 15 bp, Homo sapiens
gtattattaagttgg

SEQ ID NO: 97544 - DNA, 15 bp, Homo sapiens
agtattattaagttg

SEQ ID NO: 97545 - DNA, 15 bp, Homo sapiens
aagtattattaagtt

SEQ ID NO: 97546 - DNA, 15 bp, Homo sapiens
caagtattattaagt

SEQ ID NO: 97547 - DNA, 15 bp, Homo sapiens
acaagtattattaag

SEQ ID NO: 97548 - DNA, 15 bp, Homo sapiens
aacaagtattattaa

SEQ ID NO: 97549 - DNA, 15 bp, Homo sapiens
gaacaagtattatta

SEQ ID NO: 97550 - DNA, 15 bp, Homo sapiens
ggaacaagtattatt

SEQ ID NO: 97551 - DNA, 15 bp, Homo sapiens
aggaacaagtattat

SEQ ID NO: 97552 - DNA, 15 bp, Homo sapiens
gaggaacaagtatta

SEQ ID NO: 97553 - DNA, 15 bp, Homo sapiens
tgaggaacaagtatt

SEQ ID NO: 97554 - DNA, 15 bp, Homo sapiens
ctgaggaacaagtat

SEQ ID NO: 97555 - DNA, 15 bp, Homo sapiens
tctgaggaacaagta

SEQ ID NO: 97556 - DNA, 15 bp, Homo sapiens
ctctgaggaacaagt

SEQ ID NO: 97557 - DNA, 15 bp, Homo sapiens
actctgaggaacaag

SEQ ID NO: 97558 - DNA, 15 bp, Homo sapiens
aactctgaggaacaa

SEQ ID NO: 97559 - DNA, 15 bp, Homo sapiens
caactctgaggaaca

SEQ ID NO: 97560 - DNA, 15 bp, Homo sapiens
gcaactctgaggaac

SEQ ID NO: 97561 - DNA, 15 bp, Homo sapiens
tgcaactctgaggaa

SEQ ID NO: 97562 - DNA, 15 bp, Homo sapiens
ttgcaactctgagga

SEQ ID NO: 97563 - DNA, 15 bp, Homo sapiens
gttgcaactctgagg

SEQ ID NO: 97564 - DNA, 15 bp, Homo sapiens
agttgcaactctgag

SEQ ID NO: 97565 - DNA, 15 bp, Homo sapiens
gagttgcaactctga

SEQ ID NO: 97566 - DNA, 15 bp, Homo sapiens
ggagttgcaactctg

SEQ ID NO: 97567 - DNA, 15 bp, Homo sapiens
tggagttgcaactct

SEQ ID NO: 97568 - DNA, 15 bp, Homo sapiens
ttggagttgcaactc

SEQ ID NO: 97569 - DNA, 15 bp, Homo sapiens
tttggagttgcaact

SEQ ID NO: 97570 - DNA, 15 bp, Homo sapiens
atttggagttgcaac

SEQ ID NO: 97571 - DNA, 15 bp, Homo sapiens
catttggagttgcaa

SEQ ID NO: 97572 - DNA, 15 bp, Homo sapiens
tcatttggagttgca

SEQ ID NO: 97573 - DNA, 15 bp, Homo sapiens
gtcatttggagttgc

SEQ ID NO: 97574 - DNA, 15 bp, Homo sapiens
ggtcatttggagttg

SEQ ID NO: 97575 - DNA, 15 bp, Homo sapiens
aggtcatttggagtt

SEQ ID NO: 97576 - DNA, 15 bp, Homo sapiens
caggtcatttggagt

SEQ ID NO: 97577 - DNA, 15 bp, Homo sapiens
tcaggtcatttggag

SEQ ID NO: 97578 - DNA, 15 bp, Homo sapiens
ctcaggtcatttgga

SEQ ID NO: 97579 - DNA, 15 bp, Homo sapiens
tctcaggtcatttgg

SEQ ID NO: 97580 - DNA, 15 bp, Homo sapiens
atctcaggtcatttg

SEQ ID NO: 97581 - DNA, 15 bp, Homo sapiens
aatctcaggtcattt

SEQ ID NO: 97582 - DNA, 15 bp, Homo sapiens
caatctcaggtcatt

SEQ ID NO: 97583 - DNA, 15 bp, Homo sapiens
ccaatctcaggtcat

SEQ ID NO: 97584 - DNA, 15 bp, Homo sapiens
accaatctcaggtca

SEQ ID NO: 97585 - DNA, 15 bp, Homo sapiens
caccaatctcaggtc

SEQ ID NO: 97586 - DNA, 15 bp, Homo sapiens
gcaccaatctcaggt

SEQ ID NO: 97587 - DNA, 15 bp, Homo sapiens
ggcaccaatctcagg

SEQ ID NO: 97588 - DNA, 15 bp, Homo sapiens
aggcaccaatctcag

SEQ ID NO: 97589 - DNA, 15 bp, Homo sapiens
aaggcaccaatctca

SEQ ID NO: 97590 - DNA, 15 bp, Homo sapiens
aaaggcaccaatctc

SEQ ID NO: 97591 - DNA, 15 bp, Homo sapiens
taaaggcaccaatct

SEQ ID NO: 97592 - DNA, 15 bp, Homo sapiens
ataaaggcaccaatc

SEQ ID NO: 97593 - DNA, 15 bp, Homo sapiens
aataaaggcaccaat

SEQ ID NO: 97594 - DNA, 15 bp, Homo sapiens
gaataaaggcaccaa

SEQ ID NO: 97595 - DNA, 15 bp, Homo sapiens
agaataaaggcacca

SEQ ID NO: 97596 - DNA, 15 bp, Homo sapiens
tagaataaaggcacc

SEQ ID NO: 97597 - DNA, 15 bp, Homo sapiens
ttagaataaaggcac

SEQ ID NO: 97598 - DNA, 15 bp, Homo sapiens
cttagaataaaggca

SEQ ID NO: 97599 - DNA, 15 bp, Homo sapiens
gcttagaataaaggc

SEQ ID NO: 97600 - DNA, 15 bp, Homo sapiens
agcttagaataaagg

SEQ ID NO: 97601 - DNA, 15 bp, Homo sapiens
tagcttagaataaag

SEQ ID NO: 97602 - DNA, 15 bp, Homo sapiens
atagcttagaataaa

SEQ ID NO: 97603 - DNA, 15 bp, Homo sapiens
aatagcttagaataa

SEQ ID NO: 97604 - DNA, 15 bp, Homo sapiens
aaatagcttagaata

SEQ ID NO: 97605 - DNA, 15 bp, Homo sapiens
aaaatagcttagaat

SEQ ID NO: 97606 - DNA, 15 bp, Homo sapiens
gaaaatagcttagaa

SEQ ID NO: 97607 - DNA, 15 bp, Homo sapiens
tgaaaatagcttaga

SEQ ID NO: 97608 - DNA, 15 bp, Homo sapiens
atgaaaatagcttag

SEQ ID NO: 97609 - DNA, 15 bp, Homo sapiens
aatgaaaatagctta

SEQ ID NO: 97610 - DNA, 15 bp, Homo sapiens
aaatgaaaatagctt

SEQ ID NO: 97611 - DNA, 15 bp, Homo sapiens
aaaatgaaaatagct

SEQ ID NO: 97612 - DNA, 15 bp, Homo sapiens
aaaaatgaaaatagc

SEQ ID NO: 97613 - DNA, 15 bp, Homo sapiens
aaaaaatgaaaatag

SEQ ID NO: 97614 - DNA, 15 bp, Homo sapiens
aaaaaaatgaaaata

SEQ ID NO: 97615 - DNA, 15 bp, Homo sapiens
aaaaaaaatgaaaat

SEQ ID NO: 97616 - DNA, 15 bp, Homo sapiens
gaaaaaaaatgaaaa

SEQ ID NO: 97617 - DNA, 15 bp, Homo sapiens
agaaaaaaaatgaaa

SEQ ID NO: 97618 - DNA, 15 bp, Homo sapiens
cagaaaaaaaatgaa

SEQ ID NO: 97619 - DNA, 15 bp, Homo sapiens
gcagaaaaaaaatga

SEQ ID NO: 97620 - DNA, 15 bp, Homo sapiens
agcagaaaaaaaatg

SEQ ID NO: 97621 - DNA, 15 bp, Homo sapiens
cagcagaaaaaaaat

SEQ ID NO: 97622 - DNA, 15 bp, Homo sapiens
acagcagaaaaaaaa

SEQ ID NO: 97623 - DNA, 15 bp, Homo sapiens
gacagcagaaaaaaa

SEQ ID NO: 97624 - DNA, 15 bp, Homo sapiens
tgacagcagaaaaaa

SEQ ID NO: 97625 - DNA, 15 bp, Homo sapiens
atgacagcagaaaaa

SEQ ID NO: 97626 - DNA, 15 bp, Homo sapiens
aatgacagcagaaaa

SEQ ID NO: 97627 - DNA, 15 bp, Homo sapiens
taatgacagcagaaa

SEQ ID NO: 97628 - DNA, 15 bp, Homo sapiens
ataatgacagcagaa

SEQ ID NO: 97629 - DNA, 15 bp, Homo sapiens
aataatgacagcaga

SEQ ID NO: 97630 - DNA, 15 bp, Homo sapiens
gaataatgacagcag

SEQ ID NO: 97631 - DNA, 15 bp, Homo sapiens
agaataatgacagca

SEQ ID NO: 97632 - DNA, 15 bp, Homo sapiens
gagaataatgacagc

SEQ ID NO: 97633 - DNA, 15 bp, Homo sapiens
ggagaataatgacag

SEQ ID NO: 97634 - DNA, 15 bp, Homo sapiens
gggagaataatgaca

SEQ ID NO: 97635 - DNA, 15 bp, Homo sapiens
ggggagaataatgac

SEQ ID NO: 97636 - DNA, 15 bp, Homo sapiens
gggggagaataatga

SEQ ID NO: 97637 - DNA, 15 bp, Homo sapiens
agggggagaataatg

SEQ ID NO: 97638 - DNA, 15 bp, Homo sapiens
aagggggagaataat

SEQ ID NO: 97639 - DNA, 15 bp, Homo sapiens
gaagggggagaataa

SEQ ID NO: 97640 - DNA, 15 bp, Homo sapiens
agaagggggagaata

SEQ ID NO: 97641 - DNA, 15 bp, Homo sapiens
gagaagggggagaat

SEQ ID NO: 97642 - DNA, 15 bp, Homo sapiens
agagaagggggagaa

SEQ ID NO: 97643 - DNA, 15 bp, Homo sapiens
gagagaagggggaga

SEQ ID NO: 97644 - DNA, 15 bp, Homo sapiens
ggagagaagggggag

SEQ ID NO: 97645 - DNA, 15 bp, Homo sapiens
aggagagaaggggga

SEQ ID NO: 97646 - DNA, 15 bp, Homo sapiens
gaggagagaaggggg

SEQ ID NO: 97647 - DNA, 15 bp, Homo sapiens
ggaggagagaagggg

SEQ ID NO: 97648 - DNA, 15 bp, Homo sapiens
tggaggagagaaggg

SEQ ID NO: 97649 - DNA, 15 bp, Homo sapiens
ctggaggagagaagg

SEQ ID NO: 97650 - DNA, 15 bp, Homo sapiens
actggaggagagaag

SEQ ID NO: 97651 - DNA, 15 bp, Homo sapiens
gactggaggagagaa

SEQ ID NO: 97652 - DNA, 15 bp, Homo sapiens
agactggaggagaga

SEQ ID NO: 97653 - DNA, 15 bp, Homo sapiens
aagactggaggagag

SEQ ID NO: 97654 - DNA, 15 bp, Homo sapiens
taagactggaggaga

SEQ ID NO: 97655 - DNA, 15 bp, Homo sapiens
ataagactggaggag

SEQ ID NO: 97656 - DNA, 15 bp, Homo sapiens
gataagactggagga

SEQ ID NO: 97657 - DNA, 15 bp, Homo sapiens
agataagactggagg

SEQ ID NO: 97658 - DNA, 15 bp, Homo sapiens
cagataagactggag

SEQ ID NO: 97659 - DNA, 15 bp, Homo sapiens
tcagataagactgga

SEQ ID NO: 97660 - DNA, 15 bp, Homo sapiens
atcagataagactgg

SEQ ID NO: 97661 - DNA, 15 bp, Homo sapiens
tatcagataagactg

SEQ ID NO: 97662 - DNA, 15 bp, Homo sapiens
atatcagataagact

SEQ ID NO: 97663 - DNA, 15 bp, Homo sapiens
gatatcagataagac

SEQ ID NO: 97664 - DNA, 15 bp, Homo sapiens
agatatcagataaga

SEQ ID NO: 97665 - DNA, 15 bp, Homo sapiens
cagatatcagataag

SEQ ID NO: 97666 - DNA, 15 bp, Homo sapiens
gcagatatcagataa

SEQ ID NO: 97667 - DNA, 15 bp, Homo sapiens
ggcagatatcagata

SEQ ID NO: 97668 - DNA, 15 bp, Homo sapiens
aggcagatatcagat

SEQ ID NO: 97669 - DNA, 15 bp, Homo sapiens
gaggcagatatcaga

SEQ ID NO: 97670 - DNA, 15 bp, Homo sapiens
ggaggcagatatcag

SEQ ID NO: 97671 - DNA, 15 bp, Homo sapiens
aggaggcagatatca

SEQ ID NO: 97672 - DNA, 15 bp, Homo sapiens
aaggaggcagatatc

SEQ ID NO: 97673 - DNA, 15 bp, Homo sapiens
gaaggaggcagatat

SEQ ID NO: 97674 - DNA, 15 bp, Homo sapiens
ggaaggaggcagata

SEQ ID NO: 97675 - DNA, 15 bp, Homo sapiens
gggaaggaggcagat

SEQ ID NO: 97676 - DNA, 15 bp, Homo sapiens
tgggaaggaggcaga

SEQ ID NO: 97677 - DNA, 15 bp, Homo sapiens
gtgggaaggaggcag

SEQ ID NO: 97678 - DNA, 15 bp, Homo sapiens
ggtgggaaggaggca

SEQ ID NO: 97679 - DNA, 15 bp, Homo sapiens
gggtgggaaggaggc

SEQ ID NO: 97680 - DNA, 15 bp, Homo sapiens
tgggtgggaaggagg

SEQ ID NO: 97681 - DNA, 15 bp, Homo sapiens
gtgggtgggaaggag

SEQ ID NO: 97682 - DNA, 15 bp, Homo sapiens
ggtgggtgggaagga

SEQ ID NO: 97683 - DNA, 15 bp, Homo sapiens
gggtgggtgggaagg

SEQ ID NO: 97684 - DNA, 15 bp, Homo sapiens
agggtgggtgggaag

SEQ ID NO: 97685 - DNA, 15 bp, Homo sapiens
cagggtgggtgggaa

SEQ ID NO: 97686 - DNA, 15 bp, Homo sapiens
gcagggtgggtggga

SEQ ID NO: 97687 - DNA, 15 bp, Homo sapiens
tgcagggtgggtggg

SEQ ID NO: 97688 - DNA, 15 bp, Homo sapiens
gtgcagggtgggtgg

SEQ ID NO: 97689 - DNA, 15 bp, Homo sapiens
ggtgcagggtgggtg

SEQ ID NO: 97690 - DNA, 15 bp, Homo sapiens
gggtgcagggtgggt

SEQ ID NO: 97691 - DNA, 15 bp, Homo sapiens
ggggtgcagggtggg

SEQ ID NO: 97692 - DNA, 15 bp, Homo sapiens
tggggtgcagggtgg

SEQ ID NO: 97693 - DNA, 15 bp, Homo sapiens
atggggtgcagggtg

SEQ ID NO: 97694 - DNA, 15 bp, Homo sapiens
gatggggtgcagggt

SEQ ID NO: 97695 - DNA, 15 bp, Homo sapiens
ggatggggtgcaggg

SEQ ID NO: 97696 - DNA, 15 bp, Homo sapiens
gggatggggtgcagg

SEQ ID NO: 97697 - DNA, 15 bp, Homo sapiens
tgggatggggtgcag

SEQ ID NO: 97698 - DNA, 15 bp, Homo sapiens
gtgggatggggtgca

SEQ ID NO: 97699 - DNA, 15 bp, Homo sapiens
ggtgggatggggtgc

SEQ ID NO: 97700 - DNA, 15 bp, Homo sapiens
gggtgggatggggtg

SEQ ID NO: 97701 - DNA, 15 bp, Homo sapiens
ggggtgggatggggt

SEQ ID NO: 97702 - DNA, 15 bp, Homo sapiens
aggggtgggatgggg

SEQ ID NO: 97703 - DNA, 15 bp, Homo sapiens
gaggggtgggatggg

SEQ ID NO: 97704 - DNA, 15 bp, Homo sapiens
agaggggtgggatgg

SEQ ID NO: 97705 - DNA, 15 bp, Homo sapiens
cagaggggtgggatg

SEQ ID NO: 97706 - DNA, 15 bp, Homo sapiens
acagaggggtgggat

SEQ ID NO: 97707 - DNA, 15 bp, Homo sapiens
gacagaggggtggga

SEQ ID NO: 97708 - DNA, 15 bp, Homo sapiens
agacagaggggtggg

SEQ ID NO: 97709 - DNA, 15 bp, Homo sapiens
gagacagaggggtgg

SEQ ID NO: 97710 - DNA, 15 bp, Homo sapiens
agagacagaggggtg

SEQ ID NO: 97711 - DNA, 15 bp, Homo sapiens
gagagacagaggggt

SEQ ID NO: 97712 - DNA, 15 bp, Homo sapiens
ggagagacagagggg

SEQ ID NO: 97713 - DNA, 15 bp, Homo sapiens
gggagagacagaggg

SEQ ID NO: 97714 - DNA, 15 bp, Homo sapiens
agggagagacagagg

SEQ ID NO: 97715 - DNA, 15 bp, Homo sapiens
cagggagagacagag

SEQ ID NO: 97716 - DNA, 15 bp, Homo sapiens
acagggagagacaga

SEQ ID NO: 97717 - DNA, 15 bp, Homo sapiens
aacagggagagacag

SEQ ID NO: 97718 - DNA, 15 bp, Homo sapiens
gaacagggagagaca

SEQ ID NO: 97719 - DNA, 15 bp, Homo sapiens
agaacagggagagac

SEQ ID NO: 97720 - DNA, 15 bp, Homo sapiens
gagaacagggagaga

SEQ ID NO: 97721 - DNA, 15 bp, Homo sapiens
ggagaacagggagag

SEQ ID NO: 97722 - DNA, 15 bp, Homo sapiens
aggagaacagggaga

SEQ ID NO: 97723 - DNA, 15 bp, Homo sapiens
gaggagaacagggag

SEQ ID NO: 97724 - DNA, 15 bp, Homo sapiens
tgaggagaacaggga

SEQ ID NO: 97725 - DNA, 15 bp, Homo sapiens
ctgaggagaacaggg

SEQ ID NO: 97726 - DNA, 15 bp, Homo sapiens
cctgaggagaacagg

SEQ ID NO: 97727 - DNA, 15 bp, Homo sapiens
tcctgaggagaacag

SEQ ID NO: 97728 - DNA, 15 bp, Homo sapiens
ctcctgaggagaaca

SEQ ID NO: 97729 - DNA, 15 bp, Homo sapiens
tctcctgaggagaac

SEQ ID NO: 97730 - DNA, 15 bp, Homo sapiens
gtctcctgaggagaa

SEQ ID NO: 97731 - DNA, 15 bp, Homo sapiens
agtctcctgaggaga

SEQ ID NO: 97732 - DNA, 15 bp, Homo sapiens
gagtctcctgaggag

SEQ ID NO: 97733 - DNA, 15 bp, Homo sapiens
agagtctcctgagga

SEQ ID NO: 97734 - DNA, 15 bp, Homo sapiens
cagagtctcctgagg

SEQ ID NO: 97735 - DNA, 15 bp, Homo sapiens
ccagagtctcctgag

SEQ ID NO: 97736 - DNA, 15 bp, Homo sapiens
gccagagtctcctga

SEQ ID NO: 97737 - DNA, 15 bp, Homo sapiens
agccagagtctcctg

SEQ ID NO: 97738 - DNA, 15 bp, Homo sapiens
aagccagagtctcct

SEQ ID NO: 97739 - DNA, 15 bp, Homo sapiens
gaagccagagtctcc

SEQ ID NO: 97740 - DNA, 15 bp, Homo sapiens
ggaagccagagtctc

SEQ ID NO: 97741 - DNA, 15 bp, Homo sapiens
aggaagccagagtct

SEQ ID NO: 97742 - DNA, 15 bp, Homo sapiens
caggaagccagagtc

SEQ ID NO: 97743 - DNA, 15 bp, Homo sapiens
acaggaagccagagt

SEQ ID NO: 97744 - DNA, 15 bp, Homo sapiens
aacaggaagccagag

SEQ ID NO: 97745 - DNA, 15 bp, Homo sapiens
aaacaggaagccaga

SEQ ID NO: 97746 - DNA, 15 bp, Homo sapiens
aaaacaggaagccag

SEQ ID NO: 97747 - DNA, 15 bp, Homo sapiens
gaaaacaggaagcca

SEQ ID NO: 97748 - DNA, 15 bp, Homo sapiens
ggaaaacaggaagcc

SEQ ID NO: 97749 - DNA, 15 bp, Homo sapiens
aggaaaacaggaagc

SEQ ID NO: 97750 - DNA, 15 bp, Homo sapiens
gaggaaaacaggaag

SEQ ID NO: 97751 - DNA, 15 bp, Homo sapiens
ggaggaaaacaggaa

SEQ ID NO: 97752 - DNA, 15 bp, Homo sapiens
tggaggaaaacagga

SEQ ID NO: 97753 - DNA, 15 bp, Homo sapiens
gtggaggaaaacagg

SEQ ID NO: 97754 - DNA, 15 bp, Homo sapiens
agtggaggaaaacag

SEQ ID NO: 97755 - DNA, 15 bp, Homo sapiens
aagtggaggaaaaca

SEQ ID NO: 97756 - DNA, 15 bp, Homo sapiens
gaagtggaggaaaac

SEQ ID NO: 97757 - DNA, 15 bp, Homo sapiens
agaagtggaggaaaa

SEQ ID NO: 97758 - DNA, 15 bp, Homo sapiens
tagaagtggaggaaa

SEQ ID NO: 97759 - DNA, 15 bp, Homo sapiens
atagaagtggaggaa

SEQ ID NO: 97760 - DNA, 15 bp, Homo sapiens
gatagaagtggagga

SEQ ID NO: 97761 - DNA, 15 bp, Homo sapiens
agatagaagtggagg

SEQ ID NO: 97762 - DNA, 15 bp, Homo sapiens
aagatagaagtggag

SEQ ID NO: 97763 - DNA, 15 bp, Homo sapiens
aaagatagaagtgga

SEQ ID NO: 97764 - DNA, 15 bp, Homo sapiens
aaaagatagaagtgg

SEQ ID NO: 97765 - DNA, 15 bp, Homo sapiens
taaaagatagaagtg

SEQ ID NO: 97766 - DNA, 15 bp, Homo sapiens
ataaaagatagaagt

SEQ ID NO: 97767 - DNA, 15 bp, Homo sapiens
gataaaagatagaag

SEQ ID NO: 97768 - DNA, 15 bp, Homo sapiens
agataaaagatagaa

SEQ ID NO: 97769 - DNA, 15 bp, Homo sapiens
gagataaaagataga

SEQ ID NO: 97770 - DNA, 15 bp, Homo sapiens
agagataaaagatag

SEQ ID NO: 97771 - DNA, 15 bp, Homo sapiens
gagagataaaagata

SEQ ID NO: 97772 - DNA, 15 bp, Homo sapiens
ggagagataaaagat

SEQ ID NO: 97773 - DNA, 15 bp, Homo sapiens
gggagagataaaaga

SEQ ID NO: 97774 - DNA, 15 bp, Homo sapiens
agggagagataaaag

SEQ ID NO: 97775 - DNA, 15 bp, Homo sapiens
gagggagagataaaa

SEQ ID NO: 97776 - DNA, 15 bp, Homo sapiens
ggagggagagataaa

SEQ ID NO: 97777 - DNA, 15 bp, Homo sapiens
aggagggagagataa

SEQ ID NO: 97778 - DNA, 15 bp, Homo sapiens
taggagggagagata

SEQ ID NO: 97779 - DNA, 15 bp, Homo sapiens
gtaggagggagagat

SEQ ID NO: 97780 - DNA, 15 bp, Homo sapiens
cgtaggagggagaga

SEQ ID NO: 97781 - DNA, 15 bp, Homo sapiens
ccgtaggagggagag

SEQ ID NO: 97782 - DNA, 15 bp, Homo sapiens
accgtaggagggaga

SEQ ID NO: 97783 - DNA, 15 bp, Homo sapiens
aaccgtaggagggag

SEQ ID NO: 97784 - DNA, 15 bp, Homo sapiens
aaaccgtaggaggga

SEQ ID NO: 97785 - DNA, 15 bp, Homo sapiens
gaaaccgtaggaggg

SEQ ID NO: 97786 - DNA, 15 bp, Homo sapiens
agaaaccgtaggagg

SEQ ID NO: 97787 - DNA, 15 bp, Homo sapiens
aagaaaccgtaggag

SEQ ID NO: 97788 - DNA, 15 bp, Homo sapiens
aaagaaaccgtagga

SEQ ID NO: 97789 - DNA, 15 bp, Homo sapiens
aaaagaaaccgtagg

SEQ ID NO: 97790 - DNA, 15 bp, Homo sapiens
gaaaagaaaccgtag

SEQ ID NO: 97791 - DNA, 15 bp, Homo sapiens
agaaaagaaaccgta

SEQ ID NO: 97792 - DNA, 15 bp, Homo sapiens
aagaaaagaaaccgt

SEQ ID NO: 97793 - DNA, 15 bp, Homo sapiens
aaagaaaagaaaccg

SEQ ID NO: 97794 - DNA, 15 bp, Homo sapiens
gaaagaaaagaaacc

SEQ ID NO: 97795 - DNA, 15 bp, Homo sapiens
agaaagaaaagaaac

SEQ ID NO: 97796 - DNA, 15 bp, Homo sapiens
gagaaagaaaagaaa

SEQ ID NO: 97797 - DNA, 15 bp, Homo sapiens
ggagaaagaaaagaa

SEQ ID NO: 97798 - DNA, 15 bp, Homo sapiens
gggagaaagaaaaga

SEQ ID NO: 97799 - DNA, 15 bp, Homo sapiens
ggggagaaagaaaag

SEQ ID NO: 97800 - DNA, 15 bp, Homo sapiens
cggggagaaagaaaa

SEQ ID NO: 97801 - DNA, 15 bp, Homo sapiens
ccggggagaaagaaa

SEQ ID NO: 97802 - DNA, 15 bp, Homo sapiens
gccggggagaaagaa

SEQ ID NO: 97803 - DNA, 15 bp, Homo sapiens
ggccggggagaaaga

SEQ ID NO: 97804 - DNA, 15 bp, Homo sapiens
aggccggggagaaag

SEQ ID NO: 97805 - DNA, 15 bp, Homo sapiens
caggccggggagaaa

SEQ ID NO: 97806 - DNA, 15 bp, Homo sapiens
gcaggccggggagaa

SEQ ID NO: 97807 - DNA, 15 bp, Homo sapiens
agcaggccggggaga

SEQ ID NO: 97808 - DNA, 15 bp, Homo sapiens
aagcaggccggggag

SEQ ID NO: 97809 - DNA, 15 bp, Homo sapiens
caagcaggccgggga

SEQ ID NO: 97810 - DNA, 15 bp, Homo sapiens
acaagcaggccgggg

SEQ ID NO: 97811 - DNA, 15 bp, Homo sapiens
aacaagcaggccggg

SEQ ID NO: 97812 - DNA, 15 bp, Homo sapiens
aaacaagcaggccgg

SEQ ID NO: 97813 - DNA, 15 bp, Homo sapiens
gaaacaagcaggccg

SEQ ID NO: 97814 - DNA, 15 bp, Homo sapiens
agaaacaagcaggcc

SEQ ID NO: 97815 - DNA, 15 bp, Homo sapiens
gagaaacaagcaggc

SEQ ID NO: 97816 - DNA, 15 bp, Homo sapiens
ggagaaacaagcagg

SEQ ID NO: 97817 - DNA, 15 bp, Homo sapiens
gggagaaacaagcag

SEQ ID NO: 97818 - DNA, 15 bp, Homo sapiens
ggggagaaacaagca

SEQ ID NO: 97819 - DNA, 15 bp, Homo sapiens
gggggagaaacaagc

SEQ ID NO: 97820 - DNA, 15 bp, Homo sapiens
tgggggagaaacaag

SEQ ID NO: 97821 - DNA, 15 bp, Homo sapiens
ttgggggagaaacaa

SEQ ID NO: 97822 - DNA, 15 bp, Homo sapiens
gttgggggagaaaca

SEQ ID NO: 97823 - DNA, 15 bp, Homo sapiens
ggttgggggagaaac

SEQ ID NO: 97824 - DNA, 15 bp, Homo sapiens
gggttgggggagaaa

SEQ ID NO: 97825 - DNA, 15 bp, Homo sapiens
ggggttgggggagaa

SEQ ID NO: 97826 - DNA, 15 bp, Homo sapiens
gggggttgggggaga

SEQ ID NO: 97827 - DNA, 15 bp, Homo sapiens
agggggttgggggag

SEQ ID NO: 97828 - DNA, 15 bp, Homo sapiens
aagggggttggggga

SEQ ID NO: 97829 - DNA, 15 bp, Homo sapiens
gaagggggttggggg

SEQ ID NO: 97830 - DNA, 15 bp, Homo sapiens
tgaagggggttgggg

SEQ ID NO: 97831 - DNA, 15 bp, Homo sapiens
atgaagggggttggg

SEQ ID NO: 97832 - DNA, 15 bp, Homo sapiens
gatgaagggggttgg

SEQ ID NO: 97833 - DNA, 15 bp, Homo sapiens
agatgaagggggttg

SEQ ID NO: 97834 - DNA, 15 bp, Homo sapiens
cagatgaagggggtt

SEQ ID NO: 97835 - DNA, 15 bp, Homo sapiens
ccagatgaagggggt

SEQ ID NO: 97836 - DNA, 15 bp, Homo sapiens
tccagatgaaggggg

SEQ ID NO: 97837 - DNA, 15 bp, Homo sapiens
atccagatgaagggg

SEQ ID NO: 97838 - DNA, 15 bp, Homo sapiens
aatccagatgaaggg

SEQ ID NO: 97839 - DNA, 15 bp, Homo sapiens
aaatccagatgaagg

SEQ ID NO: 97840 - DNA, 15 bp, Homo sapiens
gaaatccagatgaag

SEQ ID NO: 97841 - DNA, 15 bp, Homo sapiens
agaaatccagatgaa

SEQ ID NO: 97842 - DNA, 15 bp, Homo sapiens
aagaaatccagatga

SEQ ID NO: 97843 - DNA, 15 bp, Homo sapiens
gaagaaatccagatg

SEQ ID NO: 97844 - DNA, 15 bp, Homo sapiens
agaagaaatccagat

SEQ ID NO: 97845 - DNA, 15 bp, Homo sapiens
aagaagaaatccaga

SEQ ID NO: 97846 - DNA, 15 bp, Homo sapiens
gaagaagaaatccag

SEQ ID NO: 97847 - DNA, 15 bp, Homo sapiens
agaagaagaaatcca

SEQ ID NO: 97848 - DNA, 15 bp, Homo sapiens
cagaagaagaaatcc

SEQ ID NO: 97849 - DNA, 15 bp, Homo sapiens
gcagaagaagaaatc

SEQ ID NO: 97850 - DNA, 15 bp, Homo sapiens
ggcagaagaagaaat

SEQ ID NO: 97851 - DNA, 15 bp, Homo sapiens
tggcagaagaagaaa

SEQ ID NO: 97852 - DNA, 15 bp, Homo sapiens
atggcagaagaagaa

SEQ ID NO: 97853 - DNA, 15 bp, Homo sapiens
aatggcagaagaaga

SEQ ID NO: 97854 - DNA, 15 bp, Homo sapiens
gaatggcagaagaag

SEQ ID NO: 97855 - DNA, 15 bp, Homo sapiens
tgaatggcagaagaa

SEQ ID NO: 97856 - DNA, 15 bp, Homo sapiens
ctgaatggcagaaga

SEQ ID NO: 97857 - DNA, 15 bp, Homo sapiens
actgaatggcagaag

SEQ ID NO: 97858 - DNA, 15 bp, Homo sapiens
aactgaatggcagaa

SEQ ID NO: 97859 - DNA, 15 bp, Homo sapiens
aaactgaatggcaga

SEQ ID NO: 97860 - DNA, 15 bp, Homo sapiens
caaactgaatggcag

SEQ ID NO: 97861 - DNA, 15 bp, Homo sapiens
ccaaactgaatggca

SEQ ID NO: 97862 - DNA, 15 bp, Homo sapiens
accaaactgaatggc

SEQ ID NO: 97863 - DNA, 15 bp, Homo sapiens
aaccaaactgaatgg

SEQ ID NO: 97864 - DNA, 15 bp, Homo sapiens
aaaccaaactgaatg

SEQ ID NO: 97865 - DNA, 15 bp, Homo sapiens
caaaccaaactgaat

SEQ ID NO: 97866 - DNA, 15 bp, Homo sapiens
tcaaaccaaactgaa

SEQ ID NO: 97867 - DNA, 15 bp, Homo sapiens
ctcaaaccaaactga

SEQ ID NO: 97868 - DNA, 15 bp, Homo sapiens
gctcaaaccaaactg

SEQ ID NO: 97869 - DNA, 15 bp, Homo sapiens
agctcaaaccaaact

SEQ ID NO: 97870 - DNA, 15 bp, Homo sapiens
gagctcaaaccaaac

SEQ ID NO: 97871 - DNA, 15 bp, Homo sapiens
agagctcaaaccaaa

SEQ ID NO: 97872 - DNA, 15 bp, Homo sapiens
gagagctcaaaccaa

SEQ ID NO: 97873 - DNA, 15 bp, Homo sapiens
agagagctcaaacca

SEQ ID NO: 97874 - DNA, 15 bp, Homo sapiens
cagagagctcaaacc

SEQ ID NO: 97875 - DNA, 15 bp, Homo sapiens
gcagagagctcaaac

SEQ ID NO: 97876 - DNA, 15 bp, Homo sapiens
agcagagagctcaaa

SEQ ID NO: 97877 - DNA, 15 bp, Homo sapiens
aagcagagagctcaa

SEQ ID NO: 97878 - DNA, 15 bp, Homo sapiens
gaagcagagagctca

SEQ ID NO: 97879 - DNA, 15 bp, Homo sapiens
agaagcagagagctc

SEQ ID NO: 97880 - DNA, 15 bp, Homo sapiens
gagaagcagagagct

SEQ ID NO: 97881 - DNA, 15 bp, Homo sapiens
ggagaagcagagagc

SEQ ID NO: 97882 - DNA, 15 bp, Homo sapiens
cggagaagcagagag

SEQ ID NO: 97883 - DNA, 15 bp, Homo sapiens
ccggagaagcagaga

SEQ ID NO: 97884 - DNA, 15 bp, Homo sapiens
accggagaagcagag

SEQ ID NO: 97885 - DNA, 15 bp, Homo sapiens
aaccggagaagcaga

SEQ ID NO: 97886 - DNA, 15 bp, Homo sapiens
gaaccggagaagcag

SEQ ID NO: 97887 - DNA, 15 bp, Homo sapiens
ggaaccggagaagca

SEQ ID NO: 97888 - DNA, 15 bp, Homo sapiens
gggaaccggagaagc

SEQ ID NO: 97889 - DNA, 15 bp, Homo sapiens
agggaaccggagaag

SEQ ID NO: 97890 - DNA, 15 bp, Homo sapiens
gagggaaccggagaa

SEQ ID NO: 97891 - DNA, 15 bp, Homo sapiens
agagggaaccggaga

SEQ ID NO: 97892 - DNA, 15 bp, Homo sapiens
cagagggaaccggag

SEQ ID NO: 97893 - DNA, 15 bp, Homo sapiens
tcagagggaaccgga

SEQ ID NO: 97894 - DNA, 15 bp, Homo sapiens
ctcagagggaaccgg

SEQ ID NO: 97895 - DNA, 15 bp, Homo sapiens
gctcagagggaaccg

SEQ ID NO: 97896 - DNA, 15 bp, Homo sapiens
agctcagagggaacc

SEQ ID NO: 97897 - DNA, 15 bp, Homo sapiens
tagctcagagggaac

SEQ ID NO: 97898 - DNA, 15 bp, Homo sapiens
ctagctcagagggaa

SEQ ID NO: 97899 - DNA, 15 bp, Homo sapiens
gctagctcagaggga

SEQ ID NO: 97900 - DNA, 15 bp, Homo sapiens
agctagctcagaggg

SEQ ID NO: 97901 - DNA, 15 bp, Homo sapiens
cagctagctcagagg

SEQ ID NO: 97902 - DNA, 15 bp, Homo sapiens
acagctagctcagag

SEQ ID NO: 97903 - DNA, 15 bp, Homo sapiens
gacagctagctcaga

SEQ ID NO: 97904 - DNA, 15 bp, Homo sapiens
ggacagctagctcag

SEQ ID NO: 97905 - DNA, 15 bp, Homo sapiens
gggacagctagctca

SEQ ID NO: 97906 - DNA, 15 bp, Homo sapiens
agggacagctagctc

SEQ ID NO: 97907 - DNA, 15 bp, Homo sapiens
aagggacagctagct

SEQ ID NO: 97908 - DNA, 15 bp, Homo sapiens
gaagggacagctagc

SEQ ID NO: 97909 - DNA, 15 bp, Homo sapiens
tgaagggacagctag

SEQ ID NO: 97910 - DNA, 15 bp, Homo sapiens
gtgaagggacagcta

SEQ ID NO: 97911 - DNA, 15 bp, Homo sapiens
ggtgaagggacagct

SEQ ID NO: 97912 - DNA, 15 bp, Homo sapiens
gggtgaagggacagc

SEQ ID NO: 97913 - DNA, 15 bp, Homo sapiens
tgggtgaagggacag

SEQ ID NO: 97914 - DNA, 15 bp, Homo sapiens
gtgggtgaagggaca

SEQ ID NO: 97915 - DNA, 15 bp, Homo sapiens
agtgggtgaagggac

SEQ ID NO: 97916 - DNA, 15 bp, Homo sapiens
cagtgggtgaaggga

SEQ ID NO: 97917 - DNA, 15 bp, Homo sapiens
acagtgggtgaaggg

SEQ ID NO: 97918 - DNA, 15 bp, Homo sapiens
cacagtgggtgaagg

SEQ ID NO: 97919 - DNA, 15 bp, Homo sapiens
tcacagtgggtgaag

SEQ ID NO: 97920 - DNA, 15 bp, Homo sapiens
ttcacagtgggtgaa

SEQ ID NO: 97921 - DNA, 15 bp, Homo sapiens
gttcacagtgggtga

SEQ ID NO: 97922 - DNA, 15 bp, Homo sapiens
agttcacagtgggtg

SEQ ID NO: 97923 - DNA, 15 bp, Homo sapiens
cagttcacagtgggt

SEQ ID NO: 97924 - DNA, 15 bp, Homo sapiens
ccagttcacagtggg

SEQ ID NO: 97925 - DNA, 15 bp, Homo sapiens
cccagttcacagtgg

SEQ ID NO: 97926 - DNA, 15 bp, Homo sapiens
acccagttcacagtg

SEQ ID NO: 97927 - DNA, 15 bp, Homo sapiens
aacccagttcacagt

SEQ ID NO: 97928 - DNA, 15 bp, Homo sapiens
aaacccagttcacag

SEQ ID NO: 97929 - DNA, 15 bp, Homo sapiens
gaaacccagttcaca

SEQ ID NO: 97930 - DNA, 15 bp, Homo sapiens
ggaaacccagttcac

SEQ ID NO: 97931 - DNA, 15 bp, Homo sapiens
gggaaacccagttca

SEQ ID NO: 97932 - DNA, 15 bp, Homo sapiens
agggaaacccagttc

SEQ ID NO: 97933 - DNA, 15 bp, Homo sapiens
cagggaaacccagtt

SEQ ID NO: 97934 - DNA, 15 bp, Homo sapiens
gcagggaaacccagt

SEQ ID NO: 97935 - DNA, 15 bp, Homo sapiens
ggcagggaaacccag

SEQ ID NO: 97936 - DNA, 15 bp, Homo sapiens
gggcagggaaaccca

SEQ ID NO: 97937 - DNA, 15 bp, Homo sapiens
tgggcagggaaaccc

SEQ ID NO: 97938 - DNA, 15 bp, Homo sapiens
ttgggcagggaaacc

SEQ ID NO: 97939 - DNA, 15 bp, Homo sapiens
gttgggcagggaaac

SEQ ID NO: 97940 - DNA, 15 bp, Homo sapiens
ggttgggcagggaaa

SEQ ID NO: 97941 - DNA, 15 bp, Homo sapiens
gggttgggcagggaa

SEQ ID NO: 97942 - DNA, 15 bp, Homo sapiens
agggttgggcaggga

SEQ ID NO: 97943 - DNA, 15 bp, Homo sapiens
gagggttgggcaggg

SEQ ID NO: 97944 - DNA, 15 bp, Homo sapiens
tgagggttgggcagg

SEQ ID NO: 97945 - DNA, 15 bp, Homo sapiens
atgagggttgggcag

SEQ ID NO: 97946 - DNA, 15 bp, Homo sapiens
aatgagggttgggca

SEQ ID NO: 97947 - DNA, 15 bp, Homo sapiens
gaatgagggttgggc

SEQ ID NO: 97948 - DNA, 15 bp, Homo sapiens
agaatgagggttggg

SEQ ID NO: 97949 - DNA, 15 bp, Homo sapiens
gagaatgagggttgg

SEQ ID NO: 97950 - DNA, 15 bp, Homo sapiens
agagaatgagggttg

SEQ ID NO: 97951 - DNA, 15 bp, Homo sapiens
aagagaatgagggtt

SEQ ID NO: 97952 - DNA, 15 bp, Homo sapiens
aaagagaatgagggt

SEQ ID NO: 97953 - DNA, 15 bp, Homo sapiens
gaaagagaatgaggg

SEQ ID NO: 97954 - DNA, 15 bp, Homo sapiens
agaaagagaatgagg

SEQ ID NO: 97955 - DNA, 15 bp, Homo sapiens
aagaaagagaatgag

SEQ ID NO: 97956 - DNA, 15 bp, Homo sapiens
aaagaaagagaatga

SEQ ID NO: 97957 - DNA, 15 bp, Homo sapiens
gaaagaaagagaatg

SEQ ID NO: 97958 - DNA, 15 bp, Homo sapiens
agaaagaaagagaat

SEQ ID NO: 97959 - DNA, 15 bp, Homo sapiens
aagaaagaaagagaa

SEQ ID NO: 97960 - DNA, 15 bp, Homo sapiens
aaagaaagaaagaga

SEQ ID NO: 97961 - DNA, 15 bp, Homo sapiens
gaaagaaagaaagag

SEQ ID NO: 97962 - DNA, 15 bp, Homo sapiens
agaaagaaagaaaga

SEQ ID NO: 97963 - DNA, 15 bp, Homo sapiens
aagaaagaaagaaag

SEQ ID NO: 97964 - DNA, 15 bp, Homo sapiens
aaagaaagaaagaaa

SEQ ID NO: 97965 - DNA, 15 bp, Homo sapiens
aaaagaaagaaagaa

SEQ ID NO: 97966 - DNA, 15 bp, Homo sapiens
aaaaagaaagaaaga

SEQ ID NO: 97967 - DNA, 15 bp, Homo sapiens
aaaaaagaaagaaag

SEQ ID NO: 97968 - DNA, 15 bp, Homo sapiens
aaaaaaagaaagaaa

SEQ ID NO: 97969 - DNA, 15 bp, Homo sapiens
aaaaaaaagaaagaa

SEQ ID NO: 97970 - DNA, 15 bp, Homo sapiens
aaaaaaaaagaaaga

SEQ ID NO: 97971 - DNA, 15 bp, Homo sapiens
aaaaaaaaaagaaag

SEQ ID NO: 97972 - DNA, 15 bp, Homo sapiens
gtctcaaaaaaaaaa

SEQ ID NO: 97973 - DNA, 15 bp, Homo sapiens
tgtctcaaaaaaaaa

SEQ ID NO: 97974 - DNA, 15 bp, Homo sapiens
ctgtctcaaaaaaaa

SEQ ID NO: 97975 - DNA, 15 bp, Homo sapiens
tctgtctcaaaaaaa

SEQ ID NO: 97976 - DNA, 15 bp, Homo sapiens
ctctgtctcaaaaaa

SEQ ID NO: 97977 - DNA, 15 bp, Homo sapiens
actctgtctcaaaaa

SEQ ID NO: 97978 - DNA, 15 bp, Homo sapiens
gactctgtctcaaaa

SEQ ID NO: 97979 - DNA, 15 bp, Homo sapiens
agactctgtctcaaa

SEQ ID NO: 97980 - DNA, 15 bp, Homo sapiens
aagactctgtctcaa

SEQ ID NO: 97981 - DNA, 15 bp, Homo sapiens
caagactctgtctca

SEQ ID NO: 97982 - DNA, 15 bp, Homo sapiens
gcaagactctgtctc

SEQ ID NO: 97983 - DNA, 15 bp, Homo sapiens
agcaagactctgtct

SEQ ID NO: 97984 - DNA, 15 bp, Homo sapiens
gagcaagactctgtc

SEQ ID NO: 97985 - DNA, 15 bp, Homo sapiens
agagcaagactctgt

SEQ ID NO: 97986 - DNA, 15 bp, Homo sapiens
cagagcaagactctg

SEQ ID NO: 97987 - DNA, 15 bp, Homo sapiens
acagagcaagactct

SEQ ID NO: 97988 - DNA, 15 bp, Homo sapiens
gctgggcaacagagc

SEQ ID NO: 97989 - DNA, 15 bp, Homo sapiens
ggctgggcaacagag

SEQ ID NO: 97990 - DNA, 15 bp, Homo sapiens
aggctgggcaacaga

SEQ ID NO: 97991 - DNA, 15 bp, Homo sapiens
caggctgggcaacag

SEQ ID NO: 97992 - DNA, 15 bp, Homo sapiens
ccaggctgggcaaca

SEQ ID NO: 97993 - DNA, 15 bp, Homo sapiens
tccaggctgggcaac

SEQ ID NO: 97994 - DNA, 15 bp, Homo sapiens
ctccaggctgggcaa

SEQ ID NO: 97995 - DNA, 15 bp, Homo sapiens
actccaggctgggca

SEQ ID NO: 97996 - DNA, 15 bp, Homo sapiens
cactccaggctgggc

SEQ ID NO: 97997 - DNA, 15 bp, Homo sapiens
gcactccaggctggg

SEQ ID NO: 97998 - DNA, 15 bp, Homo sapiens
tgcactccaggctgg

SEQ ID NO: 97999 - DNA, 15 bp, Homo sapiens
ctgcactccaggctg

SEQ ID NO: 98000 - DNA, 15 bp, Homo sapiens
actgcactccaggct

SEQ ID NO: 98001 - DNA, 15 bp, Homo sapiens
cactgcactccaggc

SEQ ID NO: 98002 - DNA, 15 bp, Homo sapiens
ccactgcactccagg

SEQ ID NO: 98003 - DNA, 15 bp, Homo sapiens
accactgcactccag

SEQ ID NO: 98004 - DNA, 15 bp, Homo sapiens
caccactgcactcca

SEQ ID NO: 98005 - DNA, 15 bp, Homo sapiens
gcaccactgcactcc

SEQ ID NO: 98006 - DNA, 15 bp, Homo sapiens
tgcaccactgcactc

SEQ ID NO: 98007 - DNA, 15 bp, Homo sapiens
ttgcaccactgcact

SEQ ID NO: 98008 - DNA, 15 bp, Homo sapiens
attgcaccactgcac

SEQ ID NO: 98009 - DNA, 15 bp, Homo sapiens
gattgcaccactgca

SEQ ID NO: 98010 - DNA, 15 bp, Homo sapiens
agattgcaccactgc

SEQ ID NO: 98011 - DNA, 15 bp, Homo sapiens
aagattgcaccactg

SEQ ID NO: 98012 - DNA, 15 bp, Homo sapiens
caagattgcaccact

SEQ ID NO: 98013 - DNA, 15 bp, Homo sapiens
ccaagattgcaccac

SEQ ID NO: 98014 - DNA, 15 bp, Homo sapiens
accaagattgcacca

SEQ ID NO: 98015 - DNA, 15 bp, Homo sapiens
aaccaagattgcacc

SEQ ID NO: 98016 - DNA, 15 bp, Homo sapiens
gaaccaagattgcac

SEQ ID NO: 98017 - DNA, 15 bp, Homo sapiens
tgaaccaagattgca

SEQ ID NO: 98018 - DNA, 15 bp, Homo sapiens
gtgaaccaagattgc

SEQ ID NO: 98019 - DNA, 15 bp, Homo sapiens
agtgaaccaagattg

SEQ ID NO: 98020 - DNA, 15 bp, Homo sapiens
cagtgaaccaagatt

SEQ ID NO: 98021 - DNA, 15 bp, Homo sapiens
gcagtgaaccaagat

SEQ ID NO: 98022 - DNA, 15 bp, Homo sapiens
tgcagtgaaccaaga

SEQ ID NO: 98023 - DNA, 15 bp, Homo sapiens
ttgcagtgaaccaag

SEQ ID NO: 98024 - DNA, 15 bp, Homo sapiens
gttgcagtgaaccaa

SEQ ID NO: 98025 - DNA, 15 bp, Homo sapiens
ggttgcagtgaacca

SEQ ID NO: 98026 - DNA, 15 bp, Homo sapiens
aggttgcagtgaacc

SEQ ID NO: 98027 - DNA, 15 bp, Homo sapiens
gaggttgcagtgaac

SEQ ID NO: 98028 - DNA, 15 bp, Homo sapiens
ggaggttgcagtgaa

SEQ ID NO: 98029 - DNA, 15 bp, Homo sapiens
gtggaggttgcagtg

SEQ ID NO: 98030 - DNA, 15 bp, Homo sapiens
agtggaggttgcagt

SEQ ID NO: 98031 - DNA, 15 bp, Homo sapiens
aagtggaggttgcag

SEQ ID NO: 98032 - DNA, 15 bp, Homo sapiens
gaagtggaggttgca

SEQ ID NO: 98033 - DNA, 15 bp, Homo sapiens
ggaagtggaggttgc

SEQ ID NO: 98034 - DNA, 15 bp, Homo sapiens
gggaagtggaggttg

SEQ ID NO: 98035 - DNA, 15 bp, Homo sapiens
tgggaagtggaggtt

SEQ ID NO: 98036 - DNA, 15 bp, Homo sapiens
ctgggaagtggaggt

SEQ ID NO: 98037 - DNA, 15 bp, Homo sapiens
tctgggaagtggagg

SEQ ID NO: 98038 - DNA, 15 bp, Homo sapiens
atctgggaagtggag

SEQ ID NO: 98039 - DNA, 15 bp, Homo sapiens
aatctgggaagtgga

SEQ ID NO: 98040 - DNA, 15 bp, Homo sapiens
gaatctgggaagtgg

SEQ ID NO: 98041 - DNA, 15 bp, Homo sapiens
tgaatctgggaagtg

SEQ ID NO: 98042 - DNA, 15 bp, Homo sapiens
ttgaatctgggaagt

SEQ ID NO: 98043 - DNA, 15 bp, Homo sapiens
cttgaatctgggaag

SEQ ID NO: 98044 - DNA, 15 bp, Homo sapiens
gcttgaatctgggaa

SEQ ID NO: 98045 - DNA, 15 bp, Homo sapiens
tgcttgaatctggga

SEQ ID NO: 98046 - DNA, 15 bp, Homo sapiens
ttgcttgaatctggg

SEQ ID NO: 98047 - DNA, 15 bp, Homo sapiens
attgcttgaatctgg

SEQ ID NO: 98048 - DNA, 15 bp, Homo sapiens
aattgcttgaatctg

SEQ ID NO: 98049 - DNA, 15 bp, Homo sapiens
gaattgcttgaatct

SEQ ID NO: 98050 - DNA, 15 bp, Homo sapiens
agaattgcttgaatc

SEQ ID NO: 98051 - DNA, 15 bp, Homo sapiens
gagaattgcttgaat

SEQ ID NO: 98052 - DNA, 15 bp, Homo sapiens
ggagaattgcttgaa

SEQ ID NO: 98053 - DNA, 15 bp, Homo sapiens
aggagaattgcttga

SEQ ID NO: 98054 - DNA, 15 bp, Homo sapiens
caggagaattgcttg

SEQ ID NO: 98055 - DNA, 15 bp, Homo sapiens
gcaggagaattgctt

SEQ ID NO: 98056 - DNA, 15 bp, Homo sapiens
ggcaggagaattgct

SEQ ID NO: 98057 - DNA, 15 bp, Homo sapiens
tggaggctgaggcag

SEQ ID NO: 98058 - DNA, 15 bp, Homo sapiens
ctggaggctgaggca

SEQ ID NO: 98059 - DNA, 15 bp, Homo sapiens
tctggaggctgaggc

SEQ ID NO: 98060 - DNA, 15 bp, Homo sapiens
ctctggaggctgagg

SEQ ID NO: 98061 - DNA, 15 bp, Homo sapiens
actctggaggctgag

SEQ ID NO: 98062 - DNA, 15 bp, Homo sapiens
tactctggaggctga

SEQ ID NO: 98063 - DNA, 15 bp, Homo sapiens
ctactctggaggctg

SEQ ID NO: 98064 - DNA, 15 bp, Homo sapiens
gctactctggaggct

SEQ ID NO: 98065 - DNA, 15 bp, Homo sapiens
agctactctggaggc

SEQ ID NO: 98066 - DNA, 15 bp, Homo sapiens
cagctactctggagg

SEQ ID NO: 98067 - DNA, 15 bp, Homo sapiens
ccagctactctggag

SEQ ID NO: 98068 - DNA, 15 bp, Homo sapiens
cccagctactctgga

SEQ ID NO: 98069 - DNA, 15 bp, Homo sapiens
tcccagctactctgg

SEQ ID NO: 98070 - DNA, 15 bp, Homo sapiens
atcccagctactctg

SEQ ID NO: 98071 - DNA, 15 bp, Homo sapiens
aatcccagctactct

SEQ ID NO: 98072 - DNA, 15 bp, Homo sapiens
acacgcctgtaatcc

SEQ ID NO: 98073 - DNA, 15 bp, Homo sapiens
gacacgcctgtaatc

SEQ ID NO: 98074 - DNA, 15 bp, Homo sapiens
ggacacgcctgtaat

SEQ ID NO: 98075 - DNA, 15 bp, Homo sapiens
gggacacgcctgtaa

SEQ ID NO: 98076 - DNA, 15 bp, Homo sapiens
tgggacacgcctgta

SEQ ID NO: 98077 - DNA, 15 bp, Homo sapiens
gtgggacacgcctgt

SEQ ID NO: 98078 - DNA, 15 bp, Homo sapiens
ggtgggacacgcctg

SEQ ID NO: 98079 - DNA, 15 bp, Homo sapiens
tggtgggacacgcct

SEQ ID NO: 98080 - DNA, 15 bp, Homo sapiens
gtggtgggacacgcc

SEQ ID NO: 98081 - DNA, 15 bp, Homo sapiens
tgtggtgggacacgc

SEQ ID NO: 98082 - DNA, 15 bp, Homo sapiens
gtgtggtgggacacg

SEQ ID NO: 98083 - DNA, 15 bp, Homo sapiens
ggtgtggtgggacac

SEQ ID NO: 98084 - DNA, 15 bp, Homo sapiens
gggtgtggtgggaca

SEQ ID NO: 98085 - DNA, 15 bp, Homo sapiens
cgggtgtggtgggac

SEQ ID NO: 98086 - DNA, 15 bp, Homo sapiens
tcgggtgtggtggga

SEQ ID NO: 98087 - DNA, 15 bp, Homo sapiens
gtcgggtgtggtggg

SEQ ID NO: 98088 - DNA, 15 bp, Homo sapiens
attagtcgggtgtgg

SEQ ID NO: 98089 - DNA, 15 bp, Homo sapiens
aattagtcgggtgtg

SEQ ID NO: 98090 - DNA, 15 bp, Homo sapiens
aaattagtcgggtgt

SEQ ID NO: 98091 - DNA, 15 bp, Homo sapiens
aaaattagtcgggtg

SEQ ID NO: 98092 - DNA, 15 bp, Homo sapiens
aaaaattagtcgggt

SEQ ID NO: 98093 - DNA, 15 bp, Homo sapiens
caaaaattagtcggg

SEQ ID NO: 98094 - DNA, 15 bp, Homo sapiens
acaaaaattagtcgg

SEQ ID NO: 98095 - DNA, 15 bp, Homo sapiens
tacaaaaattagtcg

SEQ ID NO: 98096 - DNA, 15 bp, Homo sapiens
atacaaaaattagtc

SEQ ID NO: 98097 - DNA, 15 bp, Homo sapiens
ccaaaaatacaaaaa

SEQ ID NO: 98098 - DNA, 15 bp, Homo sapiens
accaaaaatacaaaa

SEQ ID NO: 98099 - DNA, 15 bp, Homo sapiens
taccaaaaatacaaa

SEQ ID NO: 98100 - DNA, 15 bp, Homo sapiens
ctaccaaaaatacaa

SEQ ID NO: 98101 - DNA, 15 bp, Homo sapiens
tctaccaaaaataca

SEQ ID NO: 98102 - DNA, 15 bp, Homo sapiens
ctctaccaaaaatac

SEQ ID NO: 98103 - DNA, 15 bp, Homo sapiens
tctctaccaaaaata

SEQ ID NO: 98104 - DNA, 15 bp, Homo sapiens
gtctctaccaaaaat

SEQ ID NO: 98105 - DNA, 15 bp, Homo sapiens
tgtctctaccaaaaa

SEQ ID NO: 98106 - DNA, 15 bp, Homo sapiens
ttgtctctaccaaaa

SEQ ID NO: 98107 - DNA, 15 bp, Homo sapiens
cttgtctctaccaaa

SEQ ID NO: 98108 - DNA, 15 bp, Homo sapiens
ccttgtctctaccaa

SEQ ID NO: 98109 - DNA, 15 bp, Homo sapiens
gccttgtctctacca

SEQ ID NO: 98110 - DNA, 15 bp, Homo sapiens
agccttgtctctacc

SEQ ID NO: 98111 - DNA, 15 bp, Homo sapiens
aagccttgtctctac

SEQ ID NO: 98112 - DNA, 15 bp, Homo sapiens
gaagccttgtctcta

SEQ ID NO: 98113 - DNA, 15 bp, Homo sapiens
cgaagccttgtctct

SEQ ID NO: 98114 - DNA, 15 bp, Homo sapiens
ccgaagccttgtctc

SEQ ID NO: 98115 - DNA, 15 bp, Homo sapiens
gccgaagccttgtct

SEQ ID NO: 98116 - DNA, 15 bp, Homo sapiens
tgccgaagccttgtc

SEQ ID NO: 98117 - DNA, 15 bp, Homo sapiens
atgccgaagccttgt

SEQ ID NO: 98118 - DNA, 15 bp, Homo sapiens
aatgccgaagccttg

SEQ ID NO: 98119 - DNA, 15 bp, Homo sapiens
caatgccgaagcctt

SEQ ID NO: 98120 - DNA, 15 bp, Homo sapiens
acaatgccgaagcct

SEQ ID NO: 98121 - DNA, 15 bp, Homo sapiens
aacaatgccgaagcc

SEQ ID NO: 98122 - DNA, 15 bp, Homo sapiens
caacaatgccgaagc

SEQ ID NO: 98123 - DNA, 15 bp, Homo sapiens
ccaacaatgccgaag

SEQ ID NO: 98124 - DNA, 15 bp, Homo sapiens
gccaacaatgccgaa

SEQ ID NO: 98125 - DNA, 15 bp, Homo sapiens
ggccaacaatgccga

SEQ ID NO: 98126 - DNA, 15 bp, Homo sapiens
tggccaacaatgccg

SEQ ID NO: 98127 - DNA, 15 bp, Homo sapiens
ctggccaacaatgcc

SEQ ID NO: 98128 - DNA, 15 bp, Homo sapiens
cctggccaacaatgc

SEQ ID NO: 98129 - DNA, 15 bp, Homo sapiens
gcctggccaacaatg

SEQ ID NO: 98130 - DNA, 15 bp, Homo sapiens
tgcctggccaacaat

SEQ ID NO: 98131 - DNA, 15 bp, Homo sapiens
ctgcctggccaacaa

SEQ ID NO: 98132 - DNA, 15 bp, Homo sapiens
cgagacctgcctggc

SEQ ID NO: 98133 - DNA, 15 bp, Homo sapiens
tcgagacctgcctgg

SEQ ID NO: 98134 - DNA, 15 bp, Homo sapiens
ttcgagacctgcctg

SEQ ID NO: 98135 - DNA, 15 bp, Homo sapiens
gttcgagacctgcct

SEQ ID NO: 98136 - DNA, 15 bp, Homo sapiens
agttcgagacctgcc

SEQ ID NO: 98137 - DNA, 15 bp, Homo sapiens
gagttcgagacctgc

SEQ ID NO: 98138 - DNA, 15 bp, Homo sapiens
ggagttcgagacctg

SEQ ID NO: 98139 - DNA, 15 bp, Homo sapiens
aggagttcgagacct

SEQ ID NO: 98140 - DNA, 15 bp, Homo sapiens
tcaggagttcgagac

SEQ ID NO: 98141 - DNA, 15 bp, Homo sapiens
gtcaggagttcgaga

SEQ ID NO: 98142 - DNA, 15 bp, Homo sapiens
ggtcaggagttcgag

SEQ ID NO: 98143 - DNA, 15 bp, Homo sapiens
aggtcaggagttcga

SEQ ID NO: 98144 - DNA, 15 bp, Homo sapiens
gaggtcaggagttcg

SEQ ID NO: 98145 - DNA, 15 bp, Homo sapiens
acttgaggtcaggag

SEQ ID NO: 98146 - DNA, 15 bp, Homo sapiens
tacttgaggtcagga

SEQ ID NO: 98147 - DNA, 15 bp, Homo sapiens
ttacttgaggtcagg

SEQ ID NO: 98148 - DNA, 15 bp, Homo sapiens
attacttgaggtcag

SEQ ID NO: 98149 - DNA, 15 bp, Homo sapiens
gattacttgaggtca

SEQ ID NO: 98150 - DNA, 15 bp, Homo sapiens
agattacttgaggtc

SEQ ID NO: 98151 - DNA, 15 bp, Homo sapiens
cagattacttgaggt

SEQ ID NO: 98152 - DNA, 15 bp, Homo sapiens
gcagattacttgagg

SEQ ID NO: 98153 - DNA, 15 bp, Homo sapiens
ggcagattacttgag

SEQ ID NO: 98154 - DNA, 15 bp, Homo sapiens
aggcagattacttga

SEQ ID NO: 98155 - DNA, 15 bp, Homo sapiens
caggcagattacttg

SEQ ID NO: 98156 - DNA, 15 bp, Homo sapiens
gcaggcagattactt

SEQ ID NO: 98157 - DNA, 15 bp, Homo sapiens
ggcaggcagattact

SEQ ID NO: 98158 - DNA, 15 bp, Homo sapiens
aggcaggcagattac

SEQ ID NO: 98159 - DNA, 15 bp, Homo sapiens
gaggcaggcagatta

SEQ ID NO: 98160 - DNA, 15 bp, Homo sapiens
tgaggcaggcagatt

SEQ ID NO: 98161 - DNA, 15 bp, Homo sapiens
gtgaggcaggcagat

SEQ ID NO: 98162 - DNA, 15 bp, Homo sapiens
ggtgaggcaggcaga

SEQ ID NO: 98163 - DNA, 15 bp, Homo sapiens
gggtgaggcaggcag

SEQ ID NO: 98164 - DNA, 15 bp, Homo sapiens
agggtgaggcaggca

SEQ ID NO: 98165 - DNA, 15 bp, Homo sapiens
gagggtgaggcaggc

SEQ ID NO: 98166 - DNA, 15 bp, Homo sapiens
ggagggtgaggcagg

SEQ ID NO: 98167 - DNA, 15 bp, Homo sapiens
gggagggtgaggcag

SEQ ID NO: 98168 - DNA, 15 bp, Homo sapiens
tgggagggtgaggca

SEQ ID NO: 98169 - DNA, 15 bp, Homo sapiens
ttgggagggtgaggc

SEQ ID NO: 98170 - DNA, 15 bp, Homo sapiens
tttgggagggtgagg

SEQ ID NO: 98171 - DNA, 15 bp, Homo sapiens
ctttgggagggtgag

SEQ ID NO: 98172 - DNA, 15 bp, Homo sapiens
actttgggagggtga

SEQ ID NO: 98173 - DNA, 15 bp, Homo sapiens
cactttgggagggtg

SEQ ID NO: 98174 - DNA, 15 bp, Homo sapiens
gcactttgggagggt

SEQ ID NO: 98175 - DNA, 15 bp, Homo sapiens
agcactttgggaggg

SEQ ID NO: 98176 - DNA, 15 bp, Homo sapiens
tcatgcctgtaatcc

SEQ ID NO: 98177 - DNA, 15 bp, Homo sapiens
ctcatgcctgtaatc

SEQ ID NO: 98178 - DNA, 15 bp, Homo sapiens
gctcatgcctgtaat

SEQ ID NO: 98179 - DNA, 15 bp, Homo sapiens
ggctcatgcctgtaa

SEQ ID NO: 98180 - DNA, 15 bp, Homo sapiens
tggctcatgcctgta

SEQ ID NO: 98181 - DNA, 15 bp, Homo sapiens
gtggctcatgcctgt

SEQ ID NO: 98182 - DNA, 15 bp, Homo sapiens
ggtggctcatgcctg

SEQ ID NO: 98183 - DNA, 15 bp, Homo sapiens
gaggtggctcatgcc

SEQ ID NO: 98184 - DNA, 15 bp, Homo sapiens
tgaggtggctcatgc

SEQ ID NO: 98185 - DNA, 15 bp, Homo sapiens
gtgaggtggctcatg

SEQ ID NO: 98186 - DNA, 15 bp, Homo sapiens
ggtgaggtggctcat

SEQ ID NO: 98187 - DNA, 15 bp, Homo sapiens
gggtgaggtggctca

SEQ ID NO: 98188 - DNA, 15 bp, Homo sapiens
cgggtgaggtggctc

SEQ ID NO: 98189 - DNA, 15 bp, Homo sapiens
ccgggtgaggtggct

SEQ ID NO: 98190 - DNA, 15 bp, Homo sapiens
tccgggtgaggtggc

SEQ ID NO: 98191 - DNA, 15 bp, Homo sapiens
gtccgggtgaggtgg

SEQ ID NO: 98192 - DNA, 15 bp, Homo sapiens
ggtccgggtgaggtg

SEQ ID NO: 98193 - DNA, 15 bp, Homo sapiens
tggtccgggtgaggt

SEQ ID NO: 98194 - DNA, 15 bp, Homo sapiens
atggtccgggtgagg

SEQ ID NO: 98195 - DNA, 15 bp, Homo sapiens
gatggtccgggtgag

SEQ ID NO: 98196 - DNA, 15 bp, Homo sapiens
ggatggtccgggtga

SEQ ID NO: 98197 - DNA, 15 bp, Homo sapiens
gggatggtccgggtg

SEQ ID NO: 98198 - DNA, 15 bp, Homo sapiens
agggatggtccgggt

SEQ ID NO: 98199 - DNA, 15 bp, Homo sapiens
gagggatggtccggg

SEQ ID NO: 98200 - DNA, 15 bp, Homo sapiens
tgagggatggtccgg

SEQ ID NO: 98201 - DNA, 15 bp, Homo sapiens
atgagggatggtccg

SEQ ID NO: 98202 - DNA, 15 bp, Homo sapiens
aatgagggatggtcc

SEQ ID NO: 98203 - DNA, 15 bp, Homo sapiens
gaatgagggatggtc

SEQ ID NO: 98204 - DNA, 15 bp, Homo sapiens
agaatgagggatggt

SEQ ID NO: 98205 - DNA, 15 bp, Homo sapiens
gagaatgagggatgg

SEQ ID NO: 98206 - DNA, 15 bp, Homo sapiens
ggagaatgagggatg

SEQ ID NO: 98207 - DNA, 15 bp, Homo sapiens
tggagaatgagggat

SEQ ID NO: 98208 - DNA, 15 bp, Homo sapiens
atggagaatgaggga

SEQ ID NO: 98209 - DNA, 15 bp, Homo sapiens
gatggagaatgaggg

SEQ ID NO: 98210 - DNA, 15 bp, Homo sapiens
ggatggagaatgagg

SEQ ID NO: 98211 - DNA, 15 bp, Homo sapiens
aggatggagaatgag

SEQ ID NO: 98212 - DNA, 15 bp, Homo sapiens
aaggatggagaatga

SEQ ID NO: 98213 - DNA, 15 bp, Homo sapiens
aaaggatggagaatg

SEQ ID NO: 98214 - DNA, 15 bp, Homo sapiens
gaaaggatggagaat

SEQ ID NO: 98215 - DNA, 15 bp, Homo sapiens
ggaaaggatggagaa

SEQ ID NO: 98216 - DNA, 15 bp, Homo sapiens
aggaaaggatggaga

SEQ ID NO: 98217 - DNA, 15 bp, Homo sapiens
gaggaaaggatggag

SEQ ID NO: 98218 - DNA, 15 bp, Homo sapiens
ggaggaaaggatgga

SEQ ID NO: 98219 - DNA, 15 bp, Homo sapiens
tggaggaaaggatgg

SEQ ID NO: 98220 - DNA, 15 bp, Homo sapiens
ctggaggaaaggatg

SEQ ID NO: 98221 - DNA, 15 bp, Homo sapiens
actggaggaaaggat

SEQ ID NO: 98222 - DNA, 15 bp, Homo sapiens
aactggaggaaagga

SEQ ID NO: 98223 - DNA, 15 bp, Homo sapiens
caactggaggaaagg

SEQ ID NO: 98224 - DNA, 15 bp, Homo sapiens
acaactggaggaaag

SEQ ID NO: 98225 - DNA, 15 bp, Homo sapiens
cacaactggaggaaa

SEQ ID NO: 98226 - DNA, 15 bp, Homo sapiens
tcacaactggaggaa

SEQ ID NO: 98227 - DNA, 15 bp, Homo sapiens
atcacaactggagga

SEQ ID NO: 98228 - DNA, 15 bp, Homo sapiens
catcacaactggagg

SEQ ID NO: 98229 - DNA, 15 bp, Homo sapiens
acatcacaactggag

SEQ ID NO: 98230 - DNA, 15 bp, Homo sapiens
gacatcacaactgga

SEQ ID NO: 98231 - DNA, 15 bp, Homo sapiens
agacatcacaactgg

SEQ ID NO: 98232 - DNA, 15 bp, Homo sapiens
tagacatcacaactg

SEQ ID NO: 98233 - DNA, 15 bp, Homo sapiens
gtagacatcacaact

SEQ ID NO: 98234 - DNA, 15 bp, Homo sapiens
ggtagacatcacaac

SEQ ID NO: 98235 - DNA, 15 bp, Homo sapiens
gggtagacatcacaa

SEQ ID NO: 98236 - DNA, 15 bp, Homo sapiens
ggggtagacatcaca

SEQ ID NO: 98237 - DNA, 15 bp, Homo sapiens
aggggtagacatcac

SEQ ID NO: 98238 - DNA, 15 bp, Homo sapiens
gaggggtagacatca

SEQ ID NO: 98239 - DNA, 15 bp, Homo sapiens
tgaggggtagacatc

SEQ ID NO: 98240 - DNA, 15 bp, Homo sapiens
atgaggggtagacat

SEQ ID NO: 98241 - DNA, 15 bp, Homo sapiens
catgaggggtagaca

SEQ ID NO: 98242 - DNA, 15 bp, Homo sapiens
acatgaggggtagac

SEQ ID NO: 98243 - DNA, 15 bp, Homo sapiens
aacatgaggggtaga

SEQ ID NO: 98244 - DNA, 15 bp, Homo sapiens
aaacatgaggggtag

SEQ ID NO: 98245 - DNA, 15 bp, Homo sapiens
gaaacatgaggggta

SEQ ID NO: 98246 - DNA, 15 bp, Homo sapiens
ggaaacatgaggggt

SEQ ID NO: 98247 - DNA, 15 bp, Homo sapiens
gggaaacatgagggg

SEQ ID NO: 98248 - DNA, 15 bp, Homo sapiens
tgggaaacatgaggg

SEQ ID NO: 98249 - DNA, 15 bp, Homo sapiens
ttgggaaacatgagg

SEQ ID NO: 98250 - DNA, 15 bp, Homo sapiens
gttgggaaacatgag

SEQ ID NO: 98251 - DNA, 15 bp, Homo sapiens
tgttgggaaacatga

SEQ ID NO: 98252 - DNA, 15 bp, Homo sapiens
ttgttgggaaacatg

SEQ ID NO: 98253 - DNA, 15 bp, Homo sapiens
cttgttgggaaacat

SEQ ID NO: 98254 - DNA, 15 bp, Homo sapiens
gcttgttgggaaaca

SEQ ID NO: 98255 - DNA, 15 bp, Homo sapiens
ggcttgttgggaaac

SEQ ID NO: 98256 - DNA, 15 bp, Homo sapiens
aggcttgttgggaaa

SEQ ID NO: 98257 - DNA, 15 bp, Homo sapiens
taggcttgttgggaa

SEQ ID NO: 98258 - DNA, 15 bp, Homo sapiens
gtaggcttgttggga

SEQ ID NO: 98259 - DNA, 15 bp, Homo sapiens
agtaggcttgttggg

SEQ ID NO: 98260 - DNA, 15 bp, Homo sapiens
cagtaggcttgttgg

SEQ ID NO: 98261 - DNA, 15 bp, Homo sapiens
ccagtaggcttgttg

SEQ ID NO: 98262 - DNA, 15 bp, Homo sapiens
cccagtaggcttgtt

SEQ ID NO: 98263 - DNA, 15 bp, Homo sapiens
acccagtaggcttgt

SEQ ID NO: 98264 - DNA, 15 bp, Homo sapiens
cacccagtaggcttg

SEQ ID NO: 98265 - DNA, 15 bp, Homo sapiens
gcacccagtaggctt

SEQ ID NO: 98266 - DNA, 15 bp, Homo sapiens
agcacccagtaggct

SEQ ID NO: 98267 - DNA, 15 bp, Homo sapiens
cagcacccagtaggc

SEQ ID NO: 98268 - DNA, 15 bp, Homo sapiens
tcagcacccagtagg

SEQ ID NO: 98269 - DNA, 15 bp, Homo sapiens
ttcagcacccagtag

SEQ ID NO: 98270 - DNA, 15 bp, Homo sapiens
attcagcacccagta

SEQ ID NO: 98271 - DNA, 15 bp, Homo sapiens
gattcagcacccagt

SEQ ID NO: 98272 - DNA, 15 bp, Homo sapiens
ggattcagcacccag

SEQ ID NO: 98273 - DNA, 15 bp, Homo sapiens
tggattcagcaccca

SEQ ID NO: 98274 - DNA, 15 bp, Homo sapiens
ctggattcagcaccc

SEQ ID NO: 98275 - DNA, 15 bp, Homo sapiens
cctggattcagcacc

SEQ ID NO: 98276 - DNA, 15 bp, Homo sapiens
gcctggattcagcac

SEQ ID NO: 98277 - DNA, 15 bp, Homo sapiens
agcctggattcagca

SEQ ID NO: 98278 - DNA, 15 bp, Homo sapiens
cagcctggattcagc

SEQ ID NO: 98279 - DNA, 15 bp, Homo sapiens
ccagcctggattcag

SEQ ID NO: 98280 - DNA, 15 bp, Homo sapiens
cccagcctggattca

SEQ ID NO: 98281 - DNA, 15 bp, Homo sapiens
tcccagcctggattc

SEQ ID NO: 98282 - DNA, 15 bp, Homo sapiens
ttcccagcctggatt

SEQ ID NO: 98283 - DNA, 15 bp, Homo sapiens
cttcccagcctggat

SEQ ID NO: 98284 - DNA, 15 bp, Homo sapiens
tcttcccagcctgga

SEQ ID NO: 98285 - DNA, 15 bp, Homo sapiens
ctcttcccagcctgg

SEQ ID NO: 98286 - DNA, 15 bp, Homo sapiens
tctcttcccagcctg

SEQ ID NO: 98287 - DNA, 15 bp, Homo sapiens
ttctcttcccagcct

SEQ ID NO: 98288 - DNA, 15 bp, Homo sapiens
cttctcttcccagcc

SEQ ID NO: 98289 - DNA, 15 bp, Homo sapiens
ccttctcttcccagc

SEQ ID NO: 98290 - DNA, 15 bp, Homo sapiens
cccttctcttcccag

SEQ ID NO: 98291 - DNA, 15 bp, Homo sapiens
tcccttctcttccca

SEQ ID NO: 98292 - DNA, 15 bp, Homo sapiens
ctcccttctcttccc

SEQ ID NO: 98293 - DNA, 15 bp, Homo sapiens
gctcccttctcttcc

SEQ ID NO: 98294 - DNA, 15 bp, Homo sapiens
cgctcccttctcttc

SEQ ID NO: 98295 - DNA, 15 bp, Homo sapiens
ccgctcccttctctt

SEQ ID NO: 98296 - DNA, 15 bp, Homo sapiens
gccgctcccttctct

SEQ ID NO: 98297 - DNA, 15 bp, Homo sapiens
agccgctcccttctc

SEQ ID NO: 98298 - DNA, 15 bp, Homo sapiens
gagccgctcccttct

SEQ ID NO: 98299 - DNA, 15 bp, Homo sapiens
agagccgctcccttc

SEQ ID NO: 98300 - DNA, 15 bp, Homo sapiens
aagagccgctccctt

SEQ ID NO: 98301 - DNA, 15 bp, Homo sapiens
gaagagccgctccct

SEQ ID NO: 98302 - DNA, 15 bp, Homo sapiens
agaagagccgctccc

SEQ ID NO: 98303 - DNA, 15 bp, Homo sapiens
cagaagagccgctcc

SEQ ID NO: 98304 - DNA, 15 bp, Homo sapiens
acagaagagccgctc

SEQ ID NO: 98305 - DNA, 15 bp, Homo sapiens
gacagaagagccgct

SEQ ID NO: 98306 - DNA, 15 bp, Homo sapiens
cgacagaagagccgc

SEQ ID NO: 98307 - DNA, 15 bp, Homo sapiens
ccgacagaagagccg

SEQ ID NO: 98308 - DNA, 15 bp, Homo sapiens
tccgacagaagagcc

SEQ ID NO: 98309 - DNA, 15 bp, Homo sapiens
ctccgacagaagagc

SEQ ID NO: 98310 - DNA, 15 bp, Homo sapiens
actccgacagaagag

SEQ ID NO: 98311 - DNA, 15 bp, Homo sapiens
gactccgacagaaga

SEQ ID NO: 98312 - DNA, 15 bp, Homo sapiens
agactccgacagaag

SEQ ID NO: 98313 - DNA, 15 bp, Homo sapiens
cagactccgacagaa

SEQ ID NO: 98314 - DNA, 15 bp, Homo sapiens
gcagactccgacaga

SEQ ID NO: 98315 - DNA, 15 bp, Homo sapiens
tgcagactccgacag

SEQ ID NO: 98316 - DNA, 15 bp, Homo sapiens
gtgcagactccgaca

SEQ ID NO: 98317 - DNA, 15 bp, Homo sapiens
ggtgcagactccgac

SEQ ID NO: 98318 - DNA, 15 bp, Homo sapiens
tggtgcagactccga

SEQ ID NO: 98319 - DNA, 15 bp, Homo sapiens
ctggtgcagactccg

SEQ ID NO: 98320 - DNA, 15 bp, Homo sapiens
cctggtgcagactcc

SEQ ID NO: 98321 - DNA, 15 bp, Homo sapiens
gcctggtgcagactc

SEQ ID NO: 98322 - DNA, 15 bp, Homo sapiens
ggcctggtgcagact

SEQ ID NO: 98323 - DNA, 15 bp, Homo sapiens
gggcctggtgcagac

SEQ ID NO: 98324 - DNA, 15 bp, Homo sapiens
tgggcctggtgcaga

SEQ ID NO: 98325 - DNA, 15 bp, Homo sapiens
atgggcctggtgcag

SEQ ID NO: 98326 - DNA, 15 bp, Homo sapiens
catgggcctggtgca

SEQ ID NO: 98327 - DNA, 15 bp, Homo sapiens
gcatgggcctggtgc

SEQ ID NO: 98328 - DNA, 15 bp, Homo sapiens
agcatgggcctggtg

SEQ ID NO: 98329 - DNA, 15 bp, Homo sapiens
cagcatgggcctggt

SEQ ID NO: 98330 - DNA, 15 bp, Homo sapiens
tcagcatgggcctgg

SEQ ID NO: 98331 - DNA, 15 bp, Homo sapiens
ctcagcatgggcctg

SEQ ID NO: 98332 - DNA, 15 bp, Homo sapiens
tctcagcatgggcct

SEQ ID NO: 98333 - DNA, 15 bp, Homo sapiens
gtctcagcatgggcc

SEQ ID NO: 98334 - DNA, 15 bp, Homo sapiens
cgtctcagcatgggc

SEQ ID NO: 98335 - DNA, 15 bp, Homo sapiens
tcgtctcagcatggg

SEQ ID NO: 98336 - DNA, 15 bp, Homo sapiens
ctcgtctcagcatgg

SEQ ID NO: 98337 - DNA, 15 bp, Homo sapiens
tctcgtctcagcatg

SEQ ID NO: 98338 - DNA, 15 bp, Homo sapiens
ctctcgtctcagcat

SEQ ID NO: 98339 - DNA, 15 bp, Homo sapiens
gctctcgtctcagca

SEQ ID NO: 98340 - DNA, 15 bp, Homo sapiens
agctctcgtctcagc

SEQ ID NO: 98341 - DNA, 15 bp, Homo sapiens
cagctctcgtctcag

SEQ ID NO: 98342 - DNA, 15 bp, Homo sapiens
ccagctctcgtctca

SEQ ID NO: 98343 - DNA, 15 bp, Homo sapiens
gccagctctcgtctc

SEQ ID NO: 98344 - DNA, 15 bp, Homo sapiens
cgccagctctcgtct

SEQ ID NO: 98345 - DNA, 15 bp, Homo sapiens
gcgccagctctcgtc

SEQ ID NO: 98346 - DNA, 15 bp, Homo sapiens
agcgccagctctcgt

SEQ ID NO: 98347 - DNA, 15 bp, Homo sapiens
gagcgccagctctcg

SEQ ID NO: 98348 - DNA, 15 bp, Homo sapiens
tgagcgccagctctc

SEQ ID NO: 98349 - DNA, 15 bp, Homo sapiens
ctgagcgccagctct

SEQ ID NO: 98350 - DNA, 15 bp, Homo sapiens
tctgagcgccagctc

SEQ ID NO: 98351 - DNA, 15 bp, Homo sapiens
ctctgagcgccagct

SEQ ID NO: 98352 - DNA, 15 bp, Homo sapiens
tctctgagcgccagc

SEQ ID NO: 98353 - DNA, 15 bp, Homo sapiens
ctctctgagcgccag

SEQ ID NO: 98354 - DNA, 15 bp, Homo sapiens
cctctctgagcgcca

SEQ ID NO: 98355 - DNA, 15 bp, Homo sapiens
ccctctctgagcgcc

SEQ ID NO: 98356 - DNA, 15 bp, Homo sapiens
cccctctctgagcgc

SEQ ID NO: 98357 - DNA, 15 bp, Homo sapiens
tcccctctctgagcg

SEQ ID NO: 98358 - DNA, 15 bp, Homo sapiens
ttcccctctctgagc

SEQ ID NO: 98359 - DNA, 15 bp, Homo sapiens
cttcccctctctgag

SEQ ID NO: 98360 - DNA, 15 bp, Homo sapiens
gcttcccctctctga

SEQ ID NO: 98361 - DNA, 15 bp, Homo sapiens
agcttcccctctctg

SEQ ID NO: 98362 - DNA, 15 bp, Homo sapiens
aagcttcccctctct

SEQ ID NO: 98363 - DNA, 15 bp, Homo sapiens
caagcttcccctctc

SEQ ID NO: 98364 - DNA, 15 bp, Homo sapiens
ccaagcttcccctct

SEQ ID NO: 98365 - DNA, 15 bp, Homo sapiens
tccaagcttcccctc

SEQ ID NO: 98366 - DNA, 15 bp, Homo sapiens
atccaagcttcccct

SEQ ID NO: 98367 - DNA, 15 bp, Homo sapiens
catccaagcttcccc

SEQ ID NO: 98368 - DNA, 15 bp, Homo sapiens
ccatccaagcttccc

SEQ ID NO: 98369 - DNA, 15 bp, Homo sapiens
tccatccaagcttcc

SEQ ID NO: 98370 - DNA, 15 bp, Homo sapiens
ttccatccaagcttc

SEQ ID NO: 98371 - DNA, 15 bp, Homo sapiens
cttccatccaagctt

SEQ ID NO: 98372 - DNA, 15 bp, Homo sapiens
gcttccatccaagct

SEQ ID NO: 98373 - DNA, 15 bp, Homo sapiens
ggcttccatccaagc

SEQ ID NO: 98374 - DNA, 15 bp, Homo sapiens
gggcttccatccaag

SEQ ID NO: 98375 - DNA, 15 bp, Homo sapiens
tgggcttccatccaa

SEQ ID NO: 98376 - DNA, 15 bp, Homo sapiens
ctgggcttccatcca

SEQ ID NO: 98377 - DNA, 15 bp, Homo sapiens
cctgggcttccatcc

SEQ ID NO: 98378 - DNA, 15 bp, Homo sapiens
tcctgggcttccatc

SEQ ID NO: 98379 - DNA, 15 bp, Homo sapiens
ctcctgggcttccat

SEQ ID NO: 98380 - DNA, 15 bp, Homo sapiens
gctcctgggcttcca

SEQ ID NO: 98381 - DNA, 15 bp, Homo sapiens
ggctcctgggcttcc

SEQ ID NO: 98382 - DNA, 15 bp, Homo sapiens
cggctcctgggcttc

SEQ ID NO: 98383 - DNA, 15 bp, Homo sapiens
gcggctcctgggctt

SEQ ID NO: 98384 - DNA, 15 bp, Homo sapiens
ggcggctcctgggct

SEQ ID NO: 98385 - DNA, 15 bp, Homo sapiens
cggcggctcctgggc

SEQ ID NO: 98386 - DNA, 15 bp, Homo sapiens
ccggcggctcctggg

SEQ ID NO: 98387 - DNA, 15 bp, Homo sapiens
gccggcggctcctgg

SEQ ID NO: 98388 - DNA, 15 bp, Homo sapiens
tgccggcggctcctg

SEQ ID NO: 98389 - DNA, 15 bp, Homo sapiens
gtgccggcggctcct

SEQ ID NO: 98390 - DNA, 15 bp, Homo sapiens
agtgccggcggctcc

SEQ ID NO: 98391 - DNA, 15 bp, Homo sapiens
gagtgccggcggctc

SEQ ID NO: 98392 - DNA, 15 bp, Homo sapiens
agagtgccggcggct

SEQ ID NO: 98393 - DNA, 15 bp, Homo sapiens
gagagtgccggcggc

SEQ ID NO: 98394 - DNA, 15 bp, Homo sapiens
agagagtgccggcgg

SEQ ID NO: 98395 - DNA, 15 bp, Homo sapiens
aagagagtgccggcg

SEQ ID NO: 98396 - DNA, 15 bp, Homo sapiens
gaagagagtgccggc

SEQ ID NO: 98397 - DNA, 15 bp, Homo sapiens
agaagagagtgccgg

SEQ ID NO: 98398 - DNA, 15 bp, Homo sapiens
gagaagagagtgccg

SEQ ID NO: 98399 - DNA, 15 bp, Homo sapiens
ggagaagagagtgcc

SEQ ID NO: 98400 - DNA, 15 bp, Homo sapiens
aggagaagagagtgc

SEQ ID NO: 98401 - DNA, 15 bp, Homo sapiens
gaggagaagagagtg

SEQ ID NO: 98402 - DNA, 15 bp, Homo sapiens
ggaggagaagagagt

SEQ ID NO: 98403 - DNA, 15 bp, Homo sapiens
gggaggagaagagag

SEQ ID NO: 98404 - DNA, 15 bp, Homo sapiens
tgggaggagaagaga

SEQ ID NO: 98405 - DNA, 15 bp, Homo sapiens
gtgggaggagaagag

SEQ ID NO: 98406 - DNA, 15 bp, Homo sapiens
ggtgggaggagaaga

SEQ ID NO: 98407 - DNA, 15 bp, Homo sapiens
gggtgggaggagaag

SEQ ID NO: 98408 - DNA, 15 bp, Homo sapiens
ggggtgggaggagaa

SEQ ID NO: 98409 - DNA, 15 bp, Homo sapiens
gggggtgggaggaga

SEQ ID NO: 98410 - DNA, 15 bp, Homo sapiens
agggggtgggaggag

SEQ ID NO: 98411 - DNA, 15 bp, Homo sapiens
gagggggtgggagga

SEQ ID NO: 98412 - DNA, 15 bp, Homo sapiens
tgagggggtgggagg

SEQ ID NO: 98413 - DNA, 15 bp, Homo sapiens
ctgagggggtgggag

SEQ ID NO: 98414 - DNA, 15 bp, Homo sapiens
actgagggggtggga

SEQ ID NO: 98415 - DNA, 15 bp, Homo sapiens
aactgagggggtggg

SEQ ID NO: 98416 - DNA, 15 bp, Homo sapiens
gaactgagggggtgg

SEQ ID NO: 98417 - DNA, 15 bp, Homo sapiens
agaactgagggggtg

SEQ ID NO: 98418 - DNA, 15 bp, Homo sapiens
gagaactgagggggt

SEQ ID NO: 98419 - DNA, 15 bp, Homo sapiens
tgagaactgaggggg

SEQ ID NO: 98420 - DNA, 15 bp, Homo sapiens
ctgagaactgagggg

SEQ ID NO: 98421 - DNA, 15 bp, Homo sapiens
tctgagaactgaggg

SEQ ID NO: 98422 - DNA, 15 bp, Homo sapiens
ctctgagaactgagg

SEQ ID NO: 98423 - DNA, 15 bp, Homo sapiens
tctctgagaactgag

SEQ ID NO: 98424 - DNA, 15 bp, Homo sapiens
gtctctgagaactga

SEQ ID NO: 98425 - DNA, 15 bp, Homo sapiens
cgtctctgagaactg

SEQ ID NO: 98426 - DNA, 15 bp, Homo sapiens
ccgtctctgagaact

SEQ ID NO: 98427 - DNA, 15 bp, Homo sapiens
cccgtctctgagaac

SEQ ID NO: 98428 - DNA, 15 bp, Homo sapiens
ccccgtctctgagaa

SEQ ID NO: 98429 - DNA, 15 bp, Homo sapiens
tccccgtctctgaga

SEQ ID NO: 98430 - DNA, 15 bp, Homo sapiens
ctccccgtctctgag

SEQ ID NO: 98431 - DNA, 15 bp, Homo sapiens
cctccccgtctctga

SEQ ID NO: 98432 - DNA, 15 bp, Homo sapiens
tcctccccgtctctg

SEQ ID NO: 98433 - DNA, 15 bp, Homo sapiens
ctcctccccgtctct

SEQ ID NO: 98434 - DNA, 15 bp, Homo sapiens
cctcctccccgtctc

SEQ ID NO: 98435 - DNA, 15 bp, Homo sapiens
ccctcctccccgtct

SEQ ID NO: 98436 - DNA, 15 bp, Homo sapiens
accctcctccccgtc

SEQ ID NO: 98437 - DNA, 15 bp, Homo sapiens
aaccctcctccccgt

SEQ ID NO: 98438 - DNA, 15 bp, Homo sapiens
gaaccctcctccccg

SEQ ID NO: 98439 - DNA, 15 bp, Homo sapiens
ggaaccctcctcccc

SEQ ID NO: 98440 - DNA, 15 bp, Homo sapiens
gggaaccctcctccc

SEQ ID NO: 98441 - DNA, 15 bp, Homo sapiens
tgggaaccctcctcc

SEQ ID NO: 98442 - DNA, 15 bp, Homo sapiens
gtgggaaccctcctc

SEQ ID NO: 98443 - DNA, 15 bp, Homo sapiens
ggtgggaaccctcct

SEQ ID NO: 98444 - DNA, 15 bp, Homo sapiens
tggtgggaaccctcc

SEQ ID NO: 98445 - DNA, 15 bp, Homo sapiens
ttggtgggaaccctc

SEQ ID NO: 98446 - DNA, 15 bp, Homo sapiens
gttggtgggaaccct

SEQ ID NO: 98447 - DNA, 15 bp, Homo sapiens
cgttggtgggaaccc

SEQ ID NO: 98448 - DNA, 15 bp, Homo sapiens
ccgttggtgggaacc

SEQ ID NO: 98449 - DNA, 15 bp, Homo sapiens
cccgttggtgggaac

SEQ ID NO: 98450 - DNA, 15 bp, Homo sapiens
tgggggctactggct

SEQ ID NO: 98451 - DNA, 15 bp, Homo sapiens
atgggggctactggc

SEQ ID NO: 98452 - DNA, 15 bp, Homo sapiens
gatgggggctactgg

SEQ ID NO: 98453 - DNA, 15 bp, Homo sapiens
agatgggggctactg

SEQ ID NO: 98454 - DNA, 15 bp, Homo sapiens
aagatgggggctact

SEQ ID NO: 98455 - DNA, 15 bp, Homo sapiens
aaagatgggggctac

SEQ ID NO: 98456 - DNA, 15 bp, Homo sapiens
caaagatgggggcta

SEQ ID NO: 98457 - DNA, 15 bp, Homo sapiens
gcaaagatgggggct

SEQ ID NO: 98458 - DNA, 15 bp, Homo sapiens
ggcaaagatgggggc

SEQ ID NO: 98459 - DNA, 15 bp, Homo sapiens
gggcaaagatggggg

SEQ ID NO: 98460 - DNA, 15 bp, Homo sapiens
ggggcaaagatgggg

SEQ ID NO: 98461 - DNA, 15 bp, Homo sapiens
aggggcaaagatggg

SEQ ID NO: 98462 - DNA, 15 bp, Homo sapiens
gaggggcaaagatgg

SEQ ID NO: 98463 - DNA, 15 bp, Homo sapiens
cgaggggcaaagatg

SEQ ID NO: 98464 - DNA, 15 bp, Homo sapiens
gcgaggggcaaagat

SEQ ID NO: 98465 - DNA, 15 bp, Homo sapiens
agcgaggggcaaaga

SEQ ID NO: 98466 - DNA, 15 bp, Homo sapiens
cagcgaggggcaaag

SEQ ID NO: 98467 - DNA, 15 bp, Homo sapiens
tcagcgaggggcaaa

SEQ ID NO: 98468 - DNA, 15 bp, Homo sapiens
ctcagcgaggggcaa

SEQ ID NO: 98469 - DNA, 15 bp, Homo sapiens
gctcagcgaggggca

SEQ ID NO: 98470 - DNA, 15 bp, Homo sapiens
ggctcagcgaggggc

SEQ ID NO: 98471 - DNA, 15 bp, Homo sapiens
gggctcagcgagggg

SEQ ID NO: 98472 - DNA, 15 bp, Homo sapiens
agggctcagcgaggg

SEQ ID NO: 98473 - DNA, 15 bp, Homo sapiens
tagggctcagcgagg

SEQ ID NO: 98474 - DNA, 15 bp, Homo sapiens
gtagggctcagcgag

SEQ ID NO: 98475 - DNA, 15 bp, Homo sapiens
agtagggctcagcga

SEQ ID NO: 98476 - DNA, 15 bp, Homo sapiens
cagtagggctcagcg

SEQ ID NO: 98477 - DNA, 15 bp, Homo sapiens
ccagtagggctcagc

SEQ ID NO: 98478 - DNA, 15 bp, Homo sapiens
tccagtagggctcag

SEQ ID NO: 98479 - DNA, 15 bp, Homo sapiens
atccagtagggctca

SEQ ID NO: 98480 - DNA, 15 bp, Homo sapiens
catccagtagggctc

SEQ ID NO: 98481 - DNA, 15 bp, Homo sapiens
acatccagtagggct

SEQ ID NO: 98482 - DNA, 15 bp, Homo sapiens
aacatccagtagggc

SEQ ID NO: 98483 - DNA, 15 bp, Homo sapiens
gaacatccagtaggg

SEQ ID NO: 98484 - DNA, 15 bp, Homo sapiens
agaacatccagtagg

SEQ ID NO: 98485 - DNA, 15 bp, Homo sapiens
aagaacatccagtag

SEQ ID NO: 98486 - DNA, 15 bp, Homo sapiens
caagaacatccagta

SEQ ID NO: 98487 - DNA, 15 bp, Homo sapiens
ccaagaacatccagt

SEQ ID NO: 98488 - DNA, 15 bp, Homo sapiens
accaagaacatccag

SEQ ID NO: 98489 - DNA, 15 bp, Homo sapiens
aaccaagaacatcca

SEQ ID NO: 98490 - DNA, 15 bp, Homo sapiens
taaccaagaacatcc

SEQ ID NO: 98491 - DNA, 15 bp, Homo sapiens
ataaccaagaacatc

SEQ ID NO: 98492 - DNA, 15 bp, Homo sapiens
cataaccaagaacat

SEQ ID NO: 98493 - DNA, 15 bp, Homo sapiens
gcataaccaagaaca

SEQ ID NO: 98494 - DNA, 15 bp, Homo sapiens
cgcataaccaagaac

SEQ ID NO: 98495 - DNA, 15 bp, Homo sapiens
tcgcataaccaagaa

SEQ ID NO: 98496 - DNA, 15 bp, Homo sapiens
gtcgcataaccaaga

SEQ ID NO: 98497 - DNA, 15 bp, Homo sapiens
tgtcgcataaccaag

SEQ ID NO: 98498 - DNA, 15 bp, Homo sapiens
ctgtcgcataaccaa

SEQ ID NO: 98499 - DNA, 15 bp, Homo sapiens
actgtcgcataacca

SEQ ID NO: 98500 - DNA, 15 bp, Homo sapiens
aactgtcgcataacc

SEQ ID NO: 98501 - DNA, 15 bp, Homo sapiens
aaactgtcgcataac

SEQ ID NO: 98502 - DNA, 15 bp, Homo sapiens
gaaactgtcgcataa

SEQ ID NO: 98503 - DNA, 15 bp, Homo sapiens
ggaaactgtcgcata

SEQ ID NO: 98504 - DNA, 15 bp, Homo sapiens
gggaaactgtcgcat

SEQ ID NO: 98505 - DNA, 15 bp, Homo sapiens
ggggaaactgtcgca

SEQ ID NO: 98506 - DNA, 15 bp, Homo sapiens
tggggaaactgtcgc

SEQ ID NO: 98507 - DNA, 15 bp, Homo sapiens
atggggaaactgtcg

SEQ ID NO: 98508 - DNA, 15 bp, Homo sapiens
gatggggaaactgtc

SEQ ID NO: 98509 - DNA, 15 bp, Homo sapiens
agatggggaaactgt

SEQ ID NO: 98510 - DNA, 15 bp, Homo sapiens
tagatggggaaactg

SEQ ID NO: 98511 - DNA, 15 bp, Homo sapiens
atagatggggaaact

SEQ ID NO: 98512 - DNA, 15 bp, Homo sapiens
aatagatggggaaac

SEQ ID NO: 98513 - DNA, 15 bp, Homo sapiens
taatagatggggaaa

SEQ ID NO: 98514 - DNA, 15 bp, Homo sapiens
ttaatagatggggaa

SEQ ID NO: 98515 - DNA, 15 bp, Homo sapiens
tttaatagatgggga

SEQ ID NO: 98516 - DNA, 15 bp, Homo sapiens
ctttaatagatgggg

SEQ ID NO: 98517 - DNA, 15 bp, Homo sapiens
tctttaatagatggg

SEQ ID NO: 98518 - DNA, 15 bp, Homo sapiens
ctctttaatagatgg

SEQ ID NO: 98519 - DNA, 15 bp, Homo sapiens
tctctttaatagatg

SEQ ID NO: 98520 - DNA, 15 bp, Homo sapiens
ttctctttaatagat

SEQ ID NO: 98521 - DNA, 15 bp, Homo sapiens
tttctctttaataga

SEQ ID NO: 98522 - DNA, 15 bp, Homo sapiens
gtttctctttaatag

SEQ ID NO: 98523 - DNA, 15 bp, Homo sapiens
ggtttctctttaata

SEQ ID NO: 98524 - DNA, 15 bp, Homo sapiens
gggtttctctttaat

SEQ ID NO: 98525 - DNA, 15 bp, Homo sapiens
ggggtttctctttaa

SEQ ID NO: 98526 - DNA, 15 bp, Homo sapiens
aggggtttctcttta

SEQ ID NO: 98527 - DNA, 15 bp, Homo sapiens
taggggtttctcttt

SEQ ID NO: 98528 - DNA, 15 bp, Homo sapiens
ataggggtttctctt

SEQ ID NO: 98529 - DNA, 15 bp, Homo sapiens
tataggggtttctct

SEQ ID NO: 98530 - DNA, 15 bp, Homo sapiens
ctataggggtttctc

SEQ ID NO: 98531 - DNA, 15 bp, Homo sapiens
gctataggggtttct

SEQ ID NO: 98532 - DNA, 15 bp, Homo sapiens
tgctataggggtttc

SEQ ID NO: 98533 - DNA, 15 bp, Homo sapiens
ctgctataggggttt

SEQ ID NO: 98534 - DNA, 15 bp, Homo sapiens
tctgctataggggtt

SEQ ID NO: 98535 - DNA, 15 bp, Homo sapiens
ctctgctataggggt

SEQ ID NO: 98536 - DNA, 15 bp, Homo sapiens
cctctgctatagggg

SEQ ID NO: 98537 - DNA, 15 bp, Homo sapiens
ccctctgctataggg

SEQ ID NO: 98538 - DNA, 15 bp, Homo sapiens
cccctctgctatagg

SEQ ID NO: 98539 - DNA, 15 bp, Homo sapiens
tcccctctgctatag

SEQ ID NO: 98540 - DNA, 15 bp, Homo sapiens
ctcccctctgctata

SEQ ID NO: 98541 - DNA, 15 bp, Homo sapiens
cctcccctctgctat

SEQ ID NO: 98542 - DNA, 15 bp, Homo sapiens
tcctcccctctgcta

SEQ ID NO: 98543 - DNA, 15 bp, Homo sapiens
atcctcccctctgct

SEQ ID NO: 98544 - DNA, 15 bp, Homo sapiens
catcctcccctctgc

SEQ ID NO: 98545 - DNA, 15 bp, Homo sapiens
tcatcctcccctctg

SEQ ID NO: 98546 - DNA, 15 bp, Homo sapiens
ctcatcctcccctct

SEQ ID NO: 98547 - DNA, 15 bp, Homo sapiens
cctcatcctcccctc

SEQ ID NO: 98548 - DNA, 15 bp, Homo sapiens
acctcatcctcccct

SEQ ID NO: 98549 - DNA, 15 bp, Homo sapiens
aacctcatcctcccc

SEQ ID NO: 98550 - DNA, 15 bp, Homo sapiens
caacctcatcctccc

SEQ ID NO: 98551 - DNA, 15 bp, Homo sapiens
ccaacctcatcctcc

SEQ ID NO: 98552 - DNA, 15 bp, Homo sapiens
tccaacctcatcctc

SEQ ID NO: 98553 - DNA, 15 bp, Homo sapiens
ttccaacctcatcct

SEQ ID NO: 98554 - DNA, 15 bp, Homo sapiens
tttccaacctcatcc

SEQ ID NO: 98555 - DNA, 15 bp, Homo sapiens
ttttccaacctcatc

SEQ ID NO: 98556 - DNA, 15 bp, Homo sapiens
cttttccaacctcat

SEQ ID NO: 98557 - DNA, 15 bp, Homo sapiens
gcttttccaacctca

SEQ ID NO: 98558 - DNA, 15 bp, Homo sapiens
tgcttttccaacctc

SEQ ID NO: 98559 - DNA, 15 bp, Homo sapiens
ctgcttttccaacct

SEQ ID NO: 98560 - DNA, 15 bp, Homo sapiens
cctgcttttccaacc

SEQ ID NO: 98561 - DNA, 15 bp, Homo sapiens
tcctgcttttccaac

SEQ ID NO: 98562 - DNA, 15 bp, Homo sapiens
ctcctgcttttccaa

SEQ ID NO: 98563 - DNA, 15 bp, Homo sapiens
gctcctgcttttcca

SEQ ID NO: 98564 - DNA, 15 bp, Homo sapiens
tgctcctgcttttcc

SEQ ID NO: 98565 - DNA, 15 bp, Homo sapiens
atgctcctgcttttc

SEQ ID NO: 98566 - DNA, 15 bp, Homo sapiens
aatgctcctgctttt

SEQ ID NO: 98567 - DNA, 15 bp, Homo sapiens
caatgctcctgcttt

SEQ ID NO: 98568 - DNA, 15 bp, Homo sapiens
acaatgctcctgctt

SEQ ID NO: 98569 - DNA, 15 bp, Homo sapiens
aacaatgctcctgct

SEQ ID NO: 98570 - DNA, 15 bp, Homo sapiens
taacaatgctcctgc

SEQ ID NO: 98571 - DNA, 15 bp, Homo sapiens
ataacaatgctcctg

SEQ ID NO: 98572 - DNA, 15 bp, Homo sapiens
cataacaatgctcct

SEQ ID NO: 98573 - DNA, 15 bp, Homo sapiens
gcataacaatgctcc

SEQ ID NO: 98574 - DNA, 15 bp, Homo sapiens
agcataacaatgctc

SEQ ID NO: 98575 - DNA, 15 bp, Homo sapiens
tagcataacaatgct

SEQ ID NO: 98576 - DNA, 15 bp, Homo sapiens
atagcataacaatgc

SEQ ID NO: 98577 - DNA, 15 bp, Homo sapiens
aatagcataacaatg

SEQ ID NO: 98578 - DNA, 15 bp, Homo sapiens
gaatagcataacaat

SEQ ID NO: 98579 - DNA, 15 bp, Homo sapiens
agaatagcataacaa

SEQ ID NO: 98580 - DNA, 15 bp, Homo sapiens
aagaatagcataaca

SEQ ID NO: 98581 - DNA, 15 bp, Homo sapiens
caagaatagcataac

SEQ ID NO: 98582 - DNA, 15 bp, Homo sapiens
acaagaatagcataa

SEQ ID NO: 98583 - DNA, 15 bp, Homo sapiens
cacaagaatagcata

SEQ ID NO: 98584 - DNA, 15 bp, Homo sapiens
ccacaagaatagcat

SEQ ID NO: 98585 - DNA, 15 bp, Homo sapiens
cccacaagaatagca

SEQ ID NO: 98586 - DNA, 15 bp, Homo sapiens
ccccacaagaatagc

SEQ ID NO: 98587 - DNA, 15 bp, Homo sapiens
accccacaagaatag

SEQ ID NO: 98588 - DNA, 15 bp, Homo sapiens
gaccccacaagaata

SEQ ID NO: 98589 - DNA, 15 bp, Homo sapiens
agaccccacaagaat

SEQ ID NO: 98590 - DNA, 15 bp, Homo sapiens
cagaccccacaagaa

SEQ ID NO: 98591 - DNA, 15 bp, Homo sapiens
ccagaccccacaaga

SEQ ID NO: 98592 - DNA, 15 bp, Homo sapiens
cccagaccccacaag

SEQ ID NO: 98593 - DNA, 15 bp, Homo sapiens
tcccagaccccacaa

SEQ ID NO: 98594 - DNA, 15 bp, Homo sapiens
ttcccagaccccaca

SEQ ID NO: 98595 - DNA, 15 bp, Homo sapiens
cttcccagaccccac

SEQ ID NO: 98596 - DNA, 15 bp, Homo sapiens
gcttcccagacccca

SEQ ID NO: 98597 - DNA, 15 bp, Homo sapiens
tgcttcccagacccc

SEQ ID NO: 98598 - DNA, 15 bp, Homo sapiens
ctgcttcccagaccc

SEQ ID NO: 98599 - DNA, 15 bp, Homo sapiens
tctgcttcccagacc

SEQ ID NO: 98600 - DNA, 15 bp, Homo sapiens
gtctgcttcccagac

SEQ ID NO: 98601 - DNA, 15 bp, Homo sapiens
tgtctgcttcccaga

SEQ ID NO: 98602 - DNA, 15 bp, Homo sapiens
atgtctgcttcccag

SEQ ID NO: 98603 - DNA, 15 bp, Homo sapiens
gatgtctgcttccca

SEQ ID NO: 98604 - DNA, 15 bp, Homo sapiens
agatgtctgcttccc

SEQ ID NO: 98605 - DNA, 15 bp, Homo sapiens
cagatgtctgcttcc

SEQ ID NO: 98606 - DNA, 15 bp, Homo sapiens
ccagatgtctgcttc

SEQ ID NO: 98607 - DNA, 15 bp, Homo sapiens
cccagatgtctgctt

SEQ ID NO: 98608 - DNA, 15 bp, Homo sapiens
acccagatgtctgct

SEQ ID NO: 98609 - DNA, 15 bp, Homo sapiens
cacccagatgtctgc

SEQ ID NO: 98610 - DNA, 15 bp, Homo sapiens
ccacccagatgtctg

SEQ ID NO: 98611 - DNA, 15 bp, Homo sapiens
tccacccagatgtct

SEQ ID NO: 98612 - DNA, 15 bp, Homo sapiens
atccacccagatgtc

SEQ ID NO: 98613 - DNA, 15 bp, Homo sapiens
catccacccagatgt

SEQ ID NO: 98614 - DNA, 15 bp, Homo sapiens
acatccacccagatg

SEQ ID NO: 98615 - DNA, 15 bp, Homo sapiens
aacatccacccagat

SEQ ID NO: 98616 - DNA, 15 bp, Homo sapiens
aaacatccacccaga

SEQ ID NO: 98617 - DNA, 15 bp, Homo sapiens
caaacatccacccag

SEQ ID NO: 98618 - DNA, 15 bp, Homo sapiens
ccaaacatccaccca

SEQ ID NO: 98619 - DNA, 15 bp, Homo sapiens
cccaaacatccaccc

SEQ ID NO: 98620 - DNA, 15 bp, Homo sapiens
ccccaaacatccacc

SEQ ID NO: 98621 - DNA, 15 bp, Homo sapiens
cccccaaacatccac

SEQ ID NO: 98622 - DNA, 15 bp, Homo sapiens
ccccccaaacatcca

SEQ ID NO: 98623 - DNA, 15 bp, Homo sapiens
accccccaaacatcc

SEQ ID NO: 98624 - DNA, 15 bp, Homo sapiens
caccccccaaacatc

SEQ ID NO: 98625 - DNA, 15 bp, Homo sapiens
gcaccccccaaacat

SEQ ID NO: 98626 - DNA, 15 bp, Homo sapiens
agcaccccccaaaca

SEQ ID NO: 98627 - DNA, 15 bp, Homo sapiens
cagcaccccccaaac

SEQ ID NO: 98628 - DNA, 15 bp, Homo sapiens
ccagcaccccccaaa

SEQ ID NO: 98629 - DNA, 15 bp, Homo sapiens
cccagcaccccccaa

SEQ ID NO: 98630 - DNA, 15 bp, Homo sapiens
gcccagcacccccca

SEQ ID NO: 98631 - DNA, 15 bp, Homo sapiens
agcccagcacccccc

SEQ ID NO: 98632 - DNA, 15 bp, Homo sapiens
aagcccagcaccccc

SEQ ID NO: 98633 - DNA, 15 bp, Homo sapiens
taagcccagcacccc

SEQ ID NO: 98634 - DNA, 15 bp, Homo sapiens
ctaagcccagcaccc

SEQ ID NO: 98635 - DNA, 15 bp, Homo sapiens
actaagcccagcacc

SEQ ID NO: 98636 - DNA, 15 bp, Homo sapiens
aactaagcccagcac

SEQ ID NO: 98637 - DNA, 15 bp, Homo sapiens
caactaagcccagca

SEQ ID NO: 98638 - DNA, 15 bp, Homo sapiens
ccaactaagcccagc

SEQ ID NO: 98639 - DNA, 15 bp, Homo sapiens
cccaactaagcccag

SEQ ID NO: 98640 - DNA, 15 bp, Homo sapiens
ccccaactaagccca

SEQ ID NO: 98641 - DNA, 15 bp, Homo sapiens
tccccaactaagccc

SEQ ID NO: 98642 - DNA, 15 bp, Homo sapiens
ttccccaactaagcc

SEQ ID NO: 98643 - DNA, 15 bp, Homo sapiens
cttccccaactaagc

SEQ ID NO: 98644 - DNA, 15 bp, Homo sapiens
acttccccaactaag

SEQ ID NO: 98645 - DNA, 15 bp, Homo sapiens
tacttccccaactaa

SEQ ID NO: 98646 - DNA, 15 bp, Homo sapiens
ctacttccccaacta

SEQ ID NO: 98647 - DNA, 15 bp, Homo sapiens
cctacttccccaact

SEQ ID NO: 98648 - DNA, 15 bp, Homo sapiens
ccctacttccccaac

SEQ ID NO: 98649 - DNA, 15 bp, Homo sapiens
cccctacttccccaa

SEQ ID NO: 98650 - DNA, 15 bp, Homo sapiens
ccccctacttcccca

SEQ ID NO: 98651 - DNA, 15 bp, Homo sapiens
cccccctacttcccc

SEQ ID NO: 98652 - DNA, 15 bp, Homo sapiens
gcccccctacttccc

SEQ ID NO: 98653 - DNA, 15 bp, Homo sapiens
ggcccccctacttcc

SEQ ID NO: 98654 - DNA, 15 bp, Homo sapiens
gggcccccctacttc

SEQ ID NO: 98655 - DNA, 15 bp, Homo sapiens
ggggcccccctactt

SEQ ID NO: 98656 - DNA, 15 bp, Homo sapiens
aggggcccccctact

SEQ ID NO: 98657 - DNA, 15 bp, Homo sapiens
caggggcccccctac

SEQ ID NO: 98658 - DNA, 15 bp, Homo sapiens
ccaggggccccccta

SEQ ID NO: 98659 - DNA, 15 bp, Homo sapiens
cccaggggcccccct

SEQ ID NO: 98660 - DNA, 15 bp, Homo sapiens
ccccaggggcccccc

SEQ ID NO: 98661 - DNA, 15 bp, Homo sapiens
gccccaggggccccc

SEQ ID NO: 98662 - DNA, 15 bp, Homo sapiens
agccccaggggcccc

SEQ ID NO: 98663 - DNA, 15 bp, Homo sapiens
cagccccaggggccc

SEQ ID NO: 98664 - DNA, 15 bp, Homo sapiens
tcagccccaggggcc

SEQ ID NO: 98665 - DNA, 15 bp, Homo sapiens
gtcagccccaggggc

SEQ ID NO: 98666 - DNA, 15 bp, Homo sapiens
tgtcagccccagggg

SEQ ID NO: 98667 - DNA, 15 bp, Homo sapiens
ctgtcagccccaggg

SEQ ID NO: 98668 - DNA, 15 bp, Homo sapiens
cctgtcagccccagg

SEQ ID NO: 98669 - DNA, 15 bp, Homo sapiens
ccctgtcagccccag

SEQ ID NO: 98670 - DNA, 15 bp, Homo sapiens
tccctgtcagcccca

SEQ ID NO: 98671 - DNA, 15 bp, Homo sapiens
gtccctgtcagcccc

SEQ ID NO: 98672 - DNA, 15 bp, Homo sapiens
agtccctgtcagccc

SEQ ID NO: 98673 - DNA, 15 bp, Homo sapiens
cagtccctgtcagcc

SEQ ID NO: 98674 - DNA, 15 bp, Homo sapiens
ccagtccctgtcagc

SEQ ID NO: 98675 - DNA, 15 bp, Homo sapiens
tccagtccctgtcag

SEQ ID NO: 98676 - DNA, 15 bp, Homo sapiens
ttccagtccctgtca

SEQ ID NO: 98677 - DNA, 15 bp, Homo sapiens
cttccagtccctgtc

SEQ ID NO: 98678 - DNA, 15 bp, Homo sapiens
gcttccagtccctgt

SEQ ID NO: 98679 - DNA, 15 bp, Homo sapiens
agcttccagtccctg

SEQ ID NO: 98680 - DNA, 15 bp, Homo sapiens
gagcttccagtccct

SEQ ID NO: 98681 - DNA, 15 bp, Homo sapiens
agagcttccagtccc

SEQ ID NO: 98682 - DNA, 15 bp, Homo sapiens
cagagcttccagtcc

SEQ ID NO: 98683 - DNA, 15 bp, Homo sapiens
tcagagcttccagtc

SEQ ID NO: 98684 - DNA, 15 bp, Homo sapiens
ctcagagcttccagt

SEQ ID NO: 98685 - DNA, 15 bp, Homo sapiens
gctcagagcttccag

SEQ ID NO: 98686 - DNA, 15 bp, Homo sapiens
agctcagagcttcca

SEQ ID NO: 98687 - DNA, 15 bp, Homo sapiens
cagctcagagcttcc

SEQ ID NO: 98688 - DNA, 15 bp, Homo sapiens
ccagctcagagcttc

SEQ ID NO: 98689 - DNA, 15 bp, Homo sapiens
gccagctcagagctt

SEQ ID NO: 98690 - DNA, 15 bp, Homo sapiens
ggccagctcagagct

SEQ ID NO: 98691 - DNA, 15 bp, Homo sapiens
tggccagctcagagc

SEQ ID NO: 98692 - DNA, 15 bp, Homo sapiens
ctggccagctcagag

SEQ ID NO: 98693 - DNA, 15 bp, Homo sapiens
tctggccagctcaga

SEQ ID NO: 98694 - DNA, 15 bp, Homo sapiens
ctctggccagctcag

SEQ ID NO: 98695 - DNA, 15 bp, Homo sapiens
cctctggccagctca

SEQ ID NO: 98696 - DNA, 15 bp, Homo sapiens
ccctctggccagctc

SEQ ID NO: 98697 - DNA, 15 bp, Homo sapiens
tccctctggccagct

SEQ ID NO: 98698 - DNA, 15 bp, Homo sapiens
atccctctggccagc

SEQ ID NO: 98699 - DNA, 15 bp, Homo sapiens
catccctctggccag

SEQ ID NO: 98700 - DNA, 15 bp, Homo sapiens
acatccctctggcca

SEQ ID NO: 98701 - DNA, 15 bp, Homo sapiens
aacatccctctggcc

SEQ ID NO: 98702 - DNA, 15 bp, Homo sapiens
caacatccctctggc

SEQ ID NO: 98703 - DNA, 15 bp, Homo sapiens
gcaacatccctctgg

SEQ ID NO: 98704 - DNA, 15 bp, Homo sapiens
tgcaacatccctctg

SEQ ID NO: 98705 - DNA, 15 bp, Homo sapiens
ttgcaacatccctct

SEQ ID NO: 98706 - DNA, 15 bp, Homo sapiens
attgcaacatccctc

SEQ ID NO: 98707 - DNA, 15 bp, Homo sapiens
gattgcaacatccct

SEQ ID NO: 98708 - DNA, 15 bp, Homo sapiens
ggattgcaacatccc

SEQ ID NO: 98709 - DNA, 15 bp, Homo sapiens
aggattgcaacatcc

SEQ ID NO: 98710 - DNA, 15 bp, Homo sapiens
caggattgcaacatc

SEQ ID NO: 98711 - DNA, 15 bp, Homo sapiens
gcaggattgcaacat

SEQ ID NO: 98712 - DNA, 15 bp, Homo sapiens
ggcaggattgcaaca

SEQ ID NO: 98713 - DNA, 15 bp, Homo sapiens
tggcaggattgcaac

SEQ ID NO: 98714 - DNA, 15 bp, Homo sapiens
ctggcaggattgcaa

SEQ ID NO: 98715 - DNA, 15 bp, Homo sapiens
cctggcaggattgca

SEQ ID NO: 98716 - DNA, 15 bp, Homo sapiens
ccctggcaggattgc

SEQ ID NO: 98717 - DNA, 15 bp, Homo sapiens
accctggcaggattg

SEQ ID NO: 98718 - DNA, 15 bp, Homo sapiens
gaccctggcaggatt

SEQ ID NO: 98719 - DNA, 15 bp, Homo sapiens
agaccctggcaggat

SEQ ID NO: 98720 - DNA, 15 bp, Homo sapiens
aagaccctggcagga

SEQ ID NO: 98721 - DNA, 15 bp, Homo sapiens
caagaccctggcagg

SEQ ID NO: 98722 - DNA, 15 bp, Homo sapiens
acaagaccctggcag

SEQ ID NO: 98723 - DNA, 15 bp, Homo sapiens
gacaagaccctggca

SEQ ID NO: 98724 - DNA, 15 bp, Homo sapiens
agacaagaccctggc

SEQ ID NO: 98725 - DNA, 15 bp, Homo sapiens
tagacaagaccctgg

SEQ ID NO: 98726 - DNA, 15 bp, Homo sapiens
atagacaagaccctg

SEQ ID NO: 98727 - DNA, 15 bp, Homo sapiens
catagacaagaccct

SEQ ID NO: 98728 - DNA, 15 bp, Homo sapiens
gcatagacaagaccc

SEQ ID NO: 98729 - DNA, 15 bp, Homo sapiens
agcatagacaagacc

SEQ ID NO: 98730 - DNA, 15 bp, Homo sapiens
cagcatagacaagac

SEQ ID NO: 98731 - DNA, 15 bp, Homo sapiens
acagcatagacaaga

SEQ ID NO: 98732 - DNA, 15 bp, Homo sapiens
gacagcatagacaag

SEQ ID NO: 98733 - DNA, 15 bp, Homo sapiens
ggacagcatagacaa

SEQ ID NO: 98734 - DNA, 15 bp, Homo sapiens
aggacagcatagaca

SEQ ID NO: 98735 - DNA, 15 bp, Homo sapiens
aaggacagcatagac

SEQ ID NO: 98736 - DNA, 15 bp, Homo sapiens
aaaggacagcataga

SEQ ID NO: 98737 - DNA, 15 bp, Homo sapiens
aaaaggacagcatag

SEQ ID NO: 98738 - DNA, 15 bp, Homo sapiens
gaaaaggacagcata

SEQ ID NO: 98739 - DNA, 15 bp, Homo sapiens
tgaaaaggacagcat

SEQ ID NO: 98740 - DNA, 15 bp, Homo sapiens
gtgaaaaggacagca

SEQ ID NO: 98741 - DNA, 15 bp, Homo sapiens
tgtgaaaaggacagc

SEQ ID NO: 98742 - DNA, 15 bp, Homo sapiens
ttgtgaaaaggacag

SEQ ID NO: 98743 - DNA, 15 bp, Homo sapiens
gttgtgaaaaggaca

SEQ ID NO: 98744 - DNA, 15 bp, Homo sapiens
ggttgtgaaaaggac

SEQ ID NO: 98745 - DNA, 15 bp, Homo sapiens
tggttgtgaaaagga

SEQ ID NO: 98746 - DNA, 15 bp, Homo sapiens
atggttgtgaaaagg

SEQ ID NO: 98747 - DNA, 15 bp, Homo sapiens
gatggttgtgaaaag

SEQ ID NO: 98748 - DNA, 15 bp, Homo sapiens
ggatggttgtgaaaa

SEQ ID NO: 98749 - DNA, 15 bp, Homo sapiens
gggatggttgtgaaa

SEQ ID NO: 98750 - DNA, 15 bp, Homo sapiens
ggggatggttgtgaa

SEQ ID NO: 98751 - DNA, 15 bp, Homo sapiens
gggggatggttgtga

SEQ ID NO: 98752 - DNA, 15 bp, Homo sapiens
agggggatggttgtg

SEQ ID NO: 98753 - DNA, 15 bp, Homo sapiens
tagggggatggttgt

SEQ ID NO: 98754 - DNA, 15 bp, Homo sapiens
gtagggggatggttg

SEQ ID NO: 98755 - DNA, 15 bp, Homo sapiens
agtagggggatggtt

SEQ ID NO: 98756 - DNA, 15 bp, Homo sapiens
cagtagggggatggt

SEQ ID NO: 98757 - DNA, 15 bp, Homo sapiens
gcagtagggggatgg

SEQ ID NO: 98758 - DNA, 15 bp, Homo sapiens
ggcagtagggggatg

SEQ ID NO: 98759 - DNA, 15 bp, Homo sapiens
tggcagtagggggat

SEQ ID NO: 98760 - DNA, 15 bp, Homo sapiens
ctggcagtaggggga

SEQ ID NO: 98761 - DNA, 15 bp, Homo sapiens
cctggcagtaggggg

SEQ ID NO: 98762 - DNA, 15 bp, Homo sapiens
gcctggcagtagggg

SEQ ID NO: 98763 - DNA, 15 bp, Homo sapiens
agcctggcagtaggg

SEQ ID NO: 98764 - DNA, 15 bp, Homo sapiens
cagcctggcagtagg

SEQ ID NO: 98765 - DNA, 15 bp, Homo sapiens
tcagcctggcagtag

SEQ ID NO: 98766 - DNA, 15 bp, Homo sapiens
gtcagcctggcagta

SEQ ID NO: 98767 - DNA, 15 bp, Homo sapiens
tgtcagcctggcagt

SEQ ID NO: 98768 - DNA, 15 bp, Homo sapiens
gtgtcagcctggcag

SEQ ID NO: 98769 - DNA, 15 bp, Homo sapiens
cgtgtcagcctggca

SEQ ID NO: 98770 - DNA, 15 bp, Homo sapiens
acgtgtcagcctggc

SEQ ID NO: 98771 - DNA, 15 bp, Homo sapiens
cacgtgtcagcctgg

SEQ ID NO: 98772 - DNA, 15 bp, Homo sapiens
ccacgtgtcagcctg

SEQ ID NO: 98773 - DNA, 15 bp, Homo sapiens
accacgtgtcagcct

SEQ ID NO: 98774 - DNA, 15 bp, Homo sapiens
aaccacgtgtcagcc

SEQ ID NO: 98775 - DNA, 15 bp, Homo sapiens
caaccacgtgtcagc

SEQ ID NO: 98776 - DNA, 15 bp, Homo sapiens
gcaaccacgtgtcag

SEQ ID NO: 98777 - DNA, 15 bp, Homo sapiens
cgcaaccacgtgtca

SEQ ID NO: 98778 - DNA, 15 bp, Homo sapiens
ccgcaaccacgtgtc

SEQ ID NO: 98779 - DNA, 15 bp, Homo sapiens
cccgcaaccacgtgt

SEQ ID NO: 98780 - DNA, 15 bp, Homo sapiens
ccccgcaaccacgtg

SEQ ID NO: 98781 - DNA, 15 bp, Homo sapiens
cccccgcaaccacgt

SEQ ID NO: 98782 - DNA, 15 bp, Homo sapiens
gcccccgcaaccacg

SEQ ID NO: 98783 - DNA, 15 bp, Homo sapiens
tgcccccgcaaccac

SEQ ID NO: 98784 - DNA, 15 bp, Homo sapiens
gtgcccccgcaacca

SEQ ID NO: 98785 - DNA, 15 bp, Homo sapiens
tgtgcccccgcaacc

SEQ ID NO: 98786 - DNA, 15 bp, Homo sapiens
ttgtgcccccgcaac

SEQ ID NO: 98787 - DNA, 15 bp, Homo sapiens
cttgtgcccccgcaa

SEQ ID NO: 98788 - DNA, 15 bp, Homo sapiens
ccttgtgcccccgca

SEQ ID NO: 98789 - DNA, 15 bp, Homo sapiens
gccttgtgcccccgc

SEQ ID NO: 98790 - DNA, 15 bp, Homo sapiens
ggccttgtgcccccg

SEQ ID NO: 98791 - DNA, 15 bp, Homo sapiens
tggccttgtgccccc

SEQ ID NO: 98792 - DNA, 15 bp, Homo sapiens
ctggccttgtgcccc

SEQ ID NO: 98793 - DNA, 15 bp, Homo sapiens
gctggccttgtgccc

SEQ ID NO: 98794 - DNA, 15 bp, Homo sapiens
ggctggccttgtgcc

SEQ ID NO: 98795 - DNA, 15 bp, Homo sapiens
tggctggccttgtgc

SEQ ID NO: 98796 - DNA, 15 bp, Homo sapiens
ttggctggccttgtg

SEQ ID NO: 98797 - DNA, 15 bp, Homo sapiens
gttggctggccttgt

SEQ ID NO: 98798 - DNA, 15 bp, Homo sapiens
ggttggctggccttg

SEQ ID NO: 98799 - DNA, 15 bp, Homo sapiens
aggttggctggcctt

SEQ ID NO: 98800 - DNA, 15 bp, Homo sapiens
taggttggctggcct

SEQ ID NO: 98801 - DNA, 15 bp, Homo sapiens
ctaggttggctggcc

SEQ ID NO: 98802 - DNA, 15 bp, Homo sapiens
tctaggttggctggc

SEQ ID NO: 98803 - DNA, 15 bp, Homo sapiens
ctctaggttggctgg

SEQ ID NO: 98804 - DNA, 15 bp, Homo sapiens
actctaggttggctg

SEQ ID NO: 98805 - DNA, 15 bp, Homo sapiens
gactctaggttggct

SEQ ID NO: 98806 - DNA, 15 bp, Homo sapiens
agactctaggttggc

SEQ ID NO: 98807 - DNA, 15 bp, Homo sapiens
cagactctaggttgg

SEQ ID NO: 98808 - DNA, 15 bp, Homo sapiens
tcagactctaggttg

SEQ ID NO: 98809 - DNA, 15 bp, Homo sapiens
ctcagactctaggtt

SEQ ID NO: 98810 - DNA, 15 bp, Homo sapiens
cctcagactctaggt

SEQ ID NO: 98811 - DNA, 15 bp, Homo sapiens
gcctcagactctagg

SEQ ID NO: 98812 - DNA, 15 bp, Homo sapiens
agcctcagactctag

SEQ ID NO: 98813 - DNA, 15 bp, Homo sapiens
tagcctcagactcta

SEQ ID NO: 98814 - DNA, 15 bp, Homo sapiens
ctagcctcagactct

SEQ ID NO: 98815 - DNA, 15 bp, Homo sapiens
cctagcctcagactc

SEQ ID NO: 98816 - DNA, 15 bp, Homo sapiens
gcctagcctcagact

SEQ ID NO: 98817 - DNA, 15 bp, Homo sapiens
cgcctagcctcagac

SEQ ID NO: 98818 - DNA, 15 bp, Homo sapiens
ccgcctagcctcaga

SEQ ID NO: 98819 - DNA, 15 bp, Homo sapiens
tccgcctagcctcag

SEQ ID NO: 98820 - DNA, 15 bp, Homo sapiens
ctccgcctagcctca

SEQ ID NO: 98821 - DNA, 15 bp, Homo sapiens
cctccgcctagcctc

SEQ ID NO: 98822 - DNA, 15 bp, Homo sapiens
tcctccgcctagcct

SEQ ID NO: 98823 - DNA, 15 bp, Homo sapiens
gtcctccgcctagcc

SEQ ID NO: 98824 - DNA, 15 bp, Homo sapiens
tgtcctccgcctagc

SEQ ID NO: 98825 - DNA, 15 bp, Homo sapiens
gtgtcctccgcctag

SEQ ID NO: 98826 - DNA, 15 bp, Homo sapiens
ggtgtcctccgccta

SEQ ID NO: 98827 - DNA, 15 bp, Homo sapiens
gggtgtcctccgcct

SEQ ID NO: 98828 - DNA, 15 bp, Homo sapiens
agggtgtcctccgcc

SEQ ID NO: 98829 - DNA, 15 bp, Homo sapiens
gagggtgtcctccgc

SEQ ID NO: 98830 - DNA, 15 bp, Homo sapiens
ggagggtgtcctccg

SEQ ID NO: 98831 - DNA, 15 bp, Homo sapiens
gggagggtgtcctcc

SEQ ID NO: 98832 - DNA, 15 bp, Homo sapiens
ggggagggtgtcctc

SEQ ID NO: 98833 - DNA, 15 bp, Homo sapiens
tggggagggtgtcct

SEQ ID NO: 98834 - DNA, 15 bp, Homo sapiens
gtggggagggtgtcc

SEQ ID NO: 98835 - DNA, 15 bp, Homo sapiens
ggtggggagggtgtc

SEQ ID NO: 98836 - DNA, 15 bp, Homo sapiens
tggtggggagggtgt

SEQ ID NO: 98837 - DNA, 15 bp, Homo sapiens
ctggtggggagggtg

SEQ ID NO: 98838 - DNA, 15 bp, Homo sapiens
gctggtggggagggt

SEQ ID NO: 98839 - DNA, 15 bp, Homo sapiens
agctggtggggaggg

SEQ ID NO: 98840 - DNA, 15 bp, Homo sapiens
cagctggtggggagg

SEQ ID NO: 98841 - DNA, 15 bp, Homo sapiens
gcagctggtggggag

SEQ ID NO: 98842 - DNA, 15 bp, Homo sapiens
ggcagctggtgggga

SEQ ID NO: 98843 - DNA, 15 bp, Homo sapiens
tggcagctggtgggg

SEQ ID NO: 98844 - DNA, 15 bp, Homo sapiens
ctggcagctggtggg

SEQ ID NO: 98845 - DNA, 15 bp, Homo sapiens
cctggcagctggtgg

SEQ ID NO: 98846 - DNA, 15 bp, Homo sapiens
ccctggcagctggtg

SEQ ID NO: 98847 - DNA, 15 bp, Homo sapiens
accctggcagctggt

SEQ ID NO: 98848 - DNA, 15 bp, Homo sapiens
gaccctggcagctgg

SEQ ID NO: 98849 - DNA, 15 bp, Homo sapiens
tgaccctggcagctg

SEQ ID NO: 98850 - DNA, 15 bp, Homo sapiens
gtgaccctggcagct

SEQ ID NO: 98851 - DNA, 15 bp, Homo sapiens
agtgaccctggcagc

SEQ ID NO: 98852 - DNA, 15 bp, Homo sapiens
cagtgaccctggcag

SEQ ID NO: 98853 - DNA, 15 bp, Homo sapiens
ccagtgaccctggca

SEQ ID NO: 98854 - DNA, 15 bp, Homo sapiens
gccagtgaccctggc

SEQ ID NO: 98855 - DNA, 15 bp, Homo sapiens
cgccagtgaccctgg

SEQ ID NO: 98856 - DNA, 15 bp, Homo sapiens
ccgccagtgaccctg

SEQ ID NO: 98857 - DNA, 15 bp, Homo sapiens
accgccagtgaccct

SEQ ID NO: 98858 - DNA, 15 bp, Homo sapiens
gaccgccagtgaccc

SEQ ID NO: 98859 - DNA, 15 bp, Homo sapiens
tgaccgccagtgacc

SEQ ID NO: 98860 - DNA, 15 bp, Homo sapiens
ttgaccgccagtgac

SEQ ID NO: 98861 - DNA, 15 bp, Homo sapiens
tttgaccgccagtga

SEQ ID NO: 98862 - DNA, 15 bp, Homo sapiens
ctttgaccgccagtg

SEQ ID NO: 98863 - DNA, 15 bp, Homo sapiens
cctttgaccgccagt

SEQ ID NO: 98864 - DNA, 15 bp, Homo sapiens
gcctttgaccgccag

SEQ ID NO: 98865 - DNA, 15 bp, Homo sapiens
tgcctttgaccgcca

SEQ ID NO: 98866 - DNA, 15 bp, Homo sapiens
ctgcctttgaccgcc

SEQ ID NO: 98867 - DNA, 15 bp, Homo sapiens
gctgcctttgaccgc

SEQ ID NO: 98868 - DNA, 15 bp, Homo sapiens
agctgcctttgaccg

SEQ ID NO: 98869 - DNA, 15 bp, Homo sapiens
cagctgcctttgacc

SEQ ID NO: 98870 - DNA, 15 bp, Homo sapiens
ccagctgcctttgac

SEQ ID NO: 98871 - DNA, 15 bp, Homo sapiens
accagctgcctttga

SEQ ID NO: 98872 - DNA, 15 bp, Homo sapiens
caccagctgcctttg

SEQ ID NO: 98873 - DNA, 15 bp, Homo sapiens
ccaccagctgccttt

SEQ ID NO: 98874 - DNA, 15 bp, Homo sapiens
cccaccagctgcctt

SEQ ID NO: 98875 - DNA, 15 bp, Homo sapiens
ccccaccagctgcct

SEQ ID NO: 98876 - DNA, 15 bp, Homo sapiens
tccccaccagctgcc

SEQ ID NO: 98877 - DNA, 15 bp, Homo sapiens
ttccccaccagctgc

SEQ ID NO: 98878 - DNA, 15 bp, Homo sapiens
cttccccaccagctg

SEQ ID NO: 98879 - DNA, 15 bp, Homo sapiens
ccttccccaccagct

SEQ ID NO: 98880 - DNA, 15 bp, Homo sapiens
gccttccccaccagc

SEQ ID NO: 98881 - DNA, 15 bp, Homo sapiens
tgccttccccaccag

SEQ ID NO: 98882 - DNA, 15 bp, Homo sapiens
atgccttccccacca

SEQ ID NO: 98883 - DNA, 15 bp, Homo sapiens
aatgccttccccacc

SEQ ID NO: 98884 - DNA, 15 bp, Homo sapiens
caatgccttccccac

SEQ ID NO: 98885 - DNA, 15 bp, Homo sapiens
ccaatgccttcccca

SEQ ID NO: 98886 - DNA, 15 bp, Homo sapiens
tccaatgccttcccc

SEQ ID NO: 98887 - DNA, 15 bp, Homo sapiens
gtccaatgccttccc

SEQ ID NO: 98888 - DNA, 15 bp, Homo sapiens
agtccaatgccttcc

SEQ ID NO: 98889 - DNA, 15 bp, Homo sapiens
gagtccaatgccttc

SEQ ID NO: 98890 - DNA, 15 bp, Homo sapiens
ggagtccaatgcctt

SEQ ID NO: 98891 - DNA, 15 bp, Homo sapiens
tggagtccaatgcct

SEQ ID NO: 98892 - DNA, 15 bp, Homo sapiens
ctggagtccaatgcc

SEQ ID NO: 98893 - DNA, 15 bp, Homo sapiens
gctggagtccaatgc

SEQ ID NO: 98894 - DNA, 15 bp, Homo sapiens
ggctggagtccaatg

SEQ ID NO: 98895 - DNA, 15 bp, Homo sapiens
aggctggagtccaat

SEQ ID NO: 98896 - DNA, 15 bp, Homo sapiens
aaggctggagtccaa

SEQ ID NO: 98897 - DNA, 15 bp, Homo sapiens
caaggctggagtcca

SEQ ID NO: 98898 - DNA, 15 bp, Homo sapiens
ccaaggctggagtcc

SEQ ID NO: 98899 - DNA, 15 bp, Homo sapiens
cccaaggctggagtc

SEQ ID NO: 98900 - DNA, 15 bp, Homo sapiens
ccccaaggctggagt

SEQ ID NO: 98901 - DNA, 15 bp, Homo sapiens
cccccaaggctggag

SEQ ID NO: 98902 - DNA, 15 bp, Homo sapiens
tcccccaaggctgga

SEQ ID NO: 98903 - DNA, 15 bp, Homo sapiens
gtcccccaaggctgg

SEQ ID NO: 98904 - DNA, 15 bp, Homo sapiens
cgtcccccaaggctg

SEQ ID NO: 98905 - DNA, 15 bp, Homo sapiens
ccgtcccccaaggct

SEQ ID NO: 98906 - DNA, 15 bp, Homo sapiens
tccgtcccccaaggc

SEQ ID NO: 98907 - DNA, 15 bp, Homo sapiens
atccgtcccccaagg

SEQ ID NO: 98908 - DNA, 15 bp, Homo sapiens
catccgtcccccaag

SEQ ID NO: 98909 - DNA, 15 bp, Homo sapiens
acatccgtcccccaa

SEQ ID NO: 98910 - DNA, 15 bp, Homo sapiens
tacatccgtccccca

SEQ ID NO: 98911 - DNA, 15 bp, Homo sapiens
ctacatccgtccccc

SEQ ID NO: 98912 - DNA, 15 bp, Homo sapiens
actacatccgtcccc

SEQ ID NO: 98913 - DNA, 15 bp, Homo sapiens
cactacatccgtccc

SEQ ID NO: 98914 - DNA, 15 bp, Homo sapiens
tcactacatccgtcc

SEQ ID NO: 98915 - DNA, 15 bp, Homo sapiens
atcactacatccgtc

SEQ ID NO: 98916 - DNA, 15 bp, Homo sapiens
catcactacatccgt

SEQ ID NO: 98917 - DNA, 15 bp, Homo sapiens
ccatcactacatccg

SEQ ID NO: 98918 - DNA, 15 bp, Homo sapiens
accatcactacatcc

SEQ ID NO: 98919 - DNA, 15 bp, Homo sapiens
caccatcactacatc

SEQ ID NO: 98920 - DNA, 15 bp, Homo sapiens
ccaccatcactacat

SEQ ID NO: 98921 - DNA, 15 bp, Homo sapiens
cccaccatcactaca

SEQ ID NO: 98922 - DNA, 15 bp, Homo sapiens
tcccaccatcactac

SEQ ID NO: 98923 - DNA, 15 bp, Homo sapiens
ttcccaccatcacta

SEQ ID NO: 98924 - DNA, 15 bp, Homo sapiens
cttcccaccatcact

SEQ ID NO: 98925 - DNA, 15 bp, Homo sapiens
gcttcccaccatcac

SEQ ID NO: 98926 - DNA, 15 bp, Homo sapiens
tgcttcccaccatca

SEQ ID NO: 98927 - DNA, 15 bp, Homo sapiens
ctgcttcccaccatc

SEQ ID NO: 98928 - DNA, 15 bp, Homo sapiens
cctgcttcccaccat

SEQ ID NO: 98929 - DNA, 15 bp, Homo sapiens
gcctgcttcccacca

SEQ ID NO: 98930 - DNA, 15 bp, Homo sapiens
agcctgcttcccacc

SEQ ID NO: 98931 - DNA, 15 bp, Homo sapiens
aagcctgcttcccac

SEQ ID NO: 98932 - DNA, 15 bp, Homo sapiens
caagcctgcttccca

SEQ ID NO: 98933 - DNA, 15 bp, Homo sapiens
ccaagcctgcttccc

SEQ ID NO: 98934 - DNA, 15 bp, Homo sapiens
accaagcctgcttcc

SEQ ID NO: 98935 - DNA, 15 bp, Homo sapiens
caccaagcctgcttc

SEQ ID NO: 98936 - DNA, 15 bp, Homo sapiens
gcaccaagcctgctt

SEQ ID NO: 98937 - DNA, 15 bp, Homo sapiens
ggcaccaagcctgct

SEQ ID NO: 98938 - DNA, 15 bp, Homo sapiens
tggcaccaagcctgc

SEQ ID NO: 98939 - DNA, 15 bp, Homo sapiens
ctggcaccaagcctg

SEQ ID NO: 98940 - DNA, 15 bp, Homo sapiens
cctggcaccaagcct

SEQ ID NO: 98941 - DNA, 15 bp, Homo sapiens
tcctggcaccaagcc

SEQ ID NO: 98942 - DNA, 15 bp, Homo sapiens
ctcctggcaccaagc

SEQ ID NO: 98943 - DNA, 15 bp, Homo sapiens
cctcctggcaccaag

SEQ ID NO: 98944 - DNA, 15 bp, Homo sapiens
ccctcctggcaccaa

SEQ ID NO: 98945 - DNA, 15 bp, Homo sapiens
cccctcctggcacca

SEQ ID NO: 98946 - DNA, 15 bp, Homo sapiens
gcccctcctggcacc

SEQ ID NO: 98947 - DNA, 15 bp, Homo sapiens
cgcccctcctggcac

SEQ ID NO: 98948 - DNA, 15 bp, Homo sapiens
acgcccctcctggca

SEQ ID NO: 98949 - DNA, 15 bp, Homo sapiens
gacgcccctcctggc

SEQ ID NO: 98950 - DNA, 15 bp, Homo sapiens
tgacgcccctcctgg

SEQ ID NO: 98951 - DNA, 15 bp, Homo sapiens
ctgacgcccctcctg

SEQ ID NO: 98952 - DNA, 15 bp, Homo sapiens
tctgacgcccctcct

SEQ ID NO: 98953 - DNA, 15 bp, Homo sapiens
ctctgacgcccctcc

SEQ ID NO: 98954 - DNA, 15 bp, Homo sapiens
cctctgacgcccctc

SEQ ID NO: 98955 - DNA, 15 bp, Homo sapiens
ccctctgacgcccct

SEQ ID NO: 98956 - DNA, 15 bp, Homo sapiens
accctctgacgcccc

SEQ ID NO: 98957 - DNA, 15 bp, Homo sapiens
caccctctgacgccc

SEQ ID NO: 98958 - DNA, 15 bp, Homo sapiens
tcaccctctgacgcc

SEQ ID NO: 98959 - DNA, 15 bp, Homo sapiens
ttcaccctctgacgc

SEQ ID NO: 98960 - DNA, 15 bp, Homo sapiens
attcaccctctgacg

SEQ ID NO: 98961 - DNA, 15 bp, Homo sapiens
tattcaccctctgac

SEQ ID NO: 98962 - DNA, 15 bp, Homo sapiens
ttattcaccctctga

SEQ ID NO: 98963 - DNA, 15 bp, Homo sapiens
tttattcaccctctg

SEQ ID NO: 98964 - DNA, 15 bp, Homo sapiens
ttttattcaccctct

SEQ ID NO: 98965 - DNA, 15 bp, Homo sapiens
cttttattcaccctc

SEQ ID NO: 98966 - DNA, 15 bp, Homo sapiens
gcttttattcaccct

SEQ ID NO: 98967 - DNA, 15 bp, Homo sapiens
tgcttttattcaccc

SEQ ID NO: 98968 - DNA, 15 bp, Homo sapiens
ctgcttttattcacc

SEQ ID NO: 98969 - DNA, 15 bp, Homo sapiens
tctgcttttattcac

SEQ ID NO: 98970 - DNA, 15 bp, Homo sapiens
atctgcttttattca

SEQ ID NO: 98971 - DNA, 15 bp, Homo sapiens
tatctgcttttattc

SEQ ID NO: 98972 - DNA, 15 bp, Homo sapiens
ctatctgcttttatt

SEQ ID NO: 98973 - DNA, 15 bp, Homo sapiens
tctatctgcttttat

SEQ ID NO: 98974 - DNA, 15 bp, Homo sapiens
ctctatctgctttta

SEQ ID NO: 98975 - DNA, 15 bp, Homo sapiens
actctatctgctttt

SEQ ID NO: 98976 - DNA, 15 bp, Homo sapiens
cactctatctgcttt

SEQ ID NO: 98977 - DNA, 15 bp, Homo sapiens
acactctatctgctt

SEQ ID NO: 98978 - DNA, 15 bp, Homo sapiens
aacactctatctgct

SEQ ID NO: 98979 - DNA, 15 bp, Homo sapiens
aaacactctatctgc

SEQ ID NO: 98980 - DNA, 15 bp, Homo sapiens
caaacactctatctg

SEQ ID NO: 98981 - DNA, 15 bp, Homo sapiens
ccaaacactctatct

SEQ ID NO: 98982 - DNA, 15 bp, Homo sapiens
cccaaacactctatc

SEQ ID NO: 98983 - DNA, 15 bp, Homo sapiens
ccccaaacactctat

SEQ ID NO: 98984 - DNA, 15 bp, Homo sapiens
cccccaaacactcta

SEQ ID NO: 98985 - DNA, 15 bp, Homo sapiens
tcccccaaacactct

SEQ ID NO: 98986 - DNA, 15 bp, Homo sapiens
ctcccccaaacactc

SEQ ID NO: 98987 - DNA, 15 bp, Homo sapiens
cctcccccaaacact

SEQ ID NO: 98988 - DNA, 15 bp, Homo sapiens
acctcccccaaacac

SEQ ID NO: 98989 - DNA, 15 bp, Homo sapiens
tacctcccccaaaca

SEQ ID NO: 98990 - DNA, 15 bp, Homo sapiens
ctacctcccccaaac

SEQ ID NO: 98991 - DNA, 15 bp, Homo sapiens
gctacctcccccaaa

SEQ ID NO: 98992 - DNA, 15 bp, Homo sapiens
ggctacctcccccaa

SEQ ID NO: 98993 - DNA, 15 bp, Homo sapiens
tggctacctccccca

SEQ ID NO: 98994 - DNA, 15 bp, Homo sapiens
ctggctacctccccc

SEQ ID NO: 98995 - DNA, 15 bp, Homo sapiens
gctggctacctcccc

SEQ ID NO: 98996 - DNA, 15 bp, Homo sapiens
ggctggctacctccc

SEQ ID NO: 98997 - DNA, 15 bp, Homo sapiens
tggctggctacctcc

SEQ ID NO: 98998 - DNA, 15 bp, Homo sapiens
ttggctggctacctc

SEQ ID NO: 98999 - DNA, 15 bp, Homo sapiens
tttggctggctacct

SEQ ID NO: 99000 - DNA, 15 bp, Homo sapiens
ctttggctggctacc

SEQ ID NO: 99001 - DNA, 15 bp, Homo sapiens
cctttggctggctac

SEQ ID NO: 99002 - DNA, 15 bp, Homo sapiens
ccctttggctggcta

SEQ ID NO: 99003 - DNA, 15 bp, Homo sapiens
cccctttggctggct

SEQ ID NO: 99004 - DNA, 15 bp, Homo sapiens
ccccctttggctggc

SEQ ID NO: 99005 - DNA, 15 bp, Homo sapiens
accccctttggctgg

SEQ ID NO: 99006 - DNA, 15 bp, Homo sapiens
caccccctttggctg

SEQ ID NO: 99007 - DNA, 15 bp, Homo sapiens
tcaccccctttggct

SEQ ID NO: 99008 - DNA, 15 bp, Homo sapiens
ctcaccccctttggc

SEQ ID NO: 99009 - DNA, 15 bp, Homo sapiens
cctcaccccctttgg

SEQ ID NO: 99010 - DNA, 15 bp, Homo sapiens
gcctcaccccctttg

SEQ ID NO: 99011 - DNA, 15 bp, Homo sapiens
ggcctcacccccttt

SEQ ID NO: 99012 - DNA, 15 bp, Homo sapiens
gggcctcaccccctt

SEQ ID NO: 99013 - DNA, 15 bp, Homo sapiens
cgggcctcaccccct

SEQ ID NO: 99014 - DNA, 15 bp, Homo sapiens
ccgggcctcaccccc

SEQ ID NO: 99015 - DNA, 15 bp, Homo sapiens
accgggcctcacccc

SEQ ID NO: 99016 - DNA, 15 bp, Homo sapiens
caccgggcctcaccc

SEQ ID NO: 99017 - DNA, 15 bp, Homo sapiens
ccaccgggcctcacc

SEQ ID NO: 99018 - DNA, 15 bp, Homo sapiens
tccaccgggcctcac

SEQ ID NO: 99019 - DNA, 15 bp, Homo sapiens
ttccaccgggcctca

SEQ ID NO: 99020 - DNA, 15 bp, Homo sapiens
cttccaccgggcctc

SEQ ID NO: 99021 - DNA, 15 bp, Homo sapiens
ccttccaccgggcct

SEQ ID NO: 99022 - DNA, 15 bp, Homo sapiens
cccttccaccgggcc

SEQ ID NO: 99023 - DNA, 15 bp, Homo sapiens
tcccttccaccgggc

SEQ ID NO: 99024 - DNA, 15 bp, Homo sapiens
ttcccttccaccggg

SEQ ID NO: 99025 - DNA, 15 bp, Homo sapiens
cttcccttccaccgg

SEQ ID NO: 99026 - DNA, 15 bp, Homo sapiens
tcttcccttccaccg

SEQ ID NO: 99027 - DNA, 15 bp, Homo sapiens
ttcttcccttccacc

SEQ ID NO: 99028 - DNA, 15 bp, Homo sapiens
cttcttcccttccac

SEQ ID NO: 99029 - DNA, 15 bp, Homo sapiens
ccttcttcccttcca

SEQ ID NO: 99030 - DNA, 15 bp, Homo sapiens
cccttcttcccttcc

SEQ ID NO: 99031 - DNA, 15 bp, Homo sapiens
tcccttcttcccttc

SEQ ID NO: 99032 - DNA, 15 bp, Homo sapiens
gtcccttcttccctt

SEQ ID NO: 99033 - DNA, 15 bp, Homo sapiens
tgtcccttcttccct

SEQ ID NO: 99034 - DNA, 15 bp, Homo sapiens
atgtcccttcttccc

SEQ ID NO: 99035 - DNA, 15 bp, Homo sapiens
tatgtcccttcttcc

SEQ ID NO: 99036 - DNA, 15 bp, Homo sapiens
gtatgtcccttcttc

SEQ ID NO: 99037 - DNA, 15 bp, Homo sapiens
tgtatgtcccttctt

SEQ ID NO: 99038 - DNA, 15 bp, Homo sapiens
gtgtatgtcccttct

SEQ ID NO: 99039 - DNA, 15 bp, Homo sapiens
cgtgtatgtcccttc

SEQ ID NO: 99040 - DNA, 15 bp, Homo sapiens
gcgtgtatgtccctt

SEQ ID NO: 99041 - DNA, 15 bp, Homo sapiens
tgcgtgtatgtccct

SEQ ID NO: 99042 - DNA, 15 bp, Homo sapiens
ctgcgtgtatgtccc

SEQ ID NO: 99043 - DNA, 15 bp, Homo sapiens
tctgcgtgtatgtcc

SEQ ID NO: 99044 - DNA, 15 bp, Homo sapiens
ctctgcgtgtatgtc

SEQ ID NO: 99045 - DNA, 15 bp, Homo sapiens
gctctgcgtgtatgt

SEQ ID NO: 99046 - DNA, 15 bp, Homo sapiens
agctctgcgtgtatg

SEQ ID NO: 99047 - DNA, 15 bp, Homo sapiens
aagctctgcgtgtat

SEQ ID NO: 99048 - DNA, 15 bp, Homo sapiens
aaagctctgcgtgta

SEQ ID NO: 99049 - DNA, 15 bp, Homo sapiens
caaagctctgcgtgt

SEQ ID NO: 99050 - DNA, 15 bp, Homo sapiens
gcaaagctctgcgtg

SEQ ID NO: 99051 - DNA, 15 bp, Homo sapiens
tgcaaagctctgcgt

SEQ ID NO: 99052 - DNA, 15 bp, Homo sapiens
ctgcaaagctctgcg

SEQ ID NO: 99053 - DNA, 15 bp, Homo sapiens
gctgcaaagctctgc

SEQ ID NO: 99054 - DNA, 15 bp, Homo sapiens
agctgcaaagctctg

SEQ ID NO: 99055 - DNA, 15 bp, Homo sapiens
cagctgcaaagctct

SEQ ID NO: 99056 - DNA, 15 bp, Homo sapiens
tcagctgcaaagctc

SEQ ID NO: 99057 - DNA, 15 bp, Homo sapiens
ctcagctgcaaagct

SEQ ID NO: 99058 - DNA, 15 bp, Homo sapiens
cctcagctgcaaagc

SEQ ID NO: 99059 - DNA, 15 bp, Homo sapiens
ccctcagctgcaaag

SEQ ID NO: 99060 - DNA, 15 bp, Homo sapiens
accctcagctgcaaa

SEQ ID NO: 99061 - DNA, 15 bp, Homo sapiens
aaccctcagctgcaa

SEQ ID NO: 99062 - DNA, 15 bp, Homo sapiens
aaaccctcagctgca

SEQ ID NO: 99063 - DNA, 15 bp, Homo sapiens
aaaaccctcagctgc

SEQ ID NO: 99064 - DNA, 15 bp, Homo sapiens
taaaaccctcagctg

SEQ ID NO: 99065 - DNA, 15 bp, Homo sapiens
ttaaaaccctcagct

SEQ ID NO: 99066 - DNA, 15 bp, Homo sapiens
attaaaaccctcagc

SEQ ID NO: 99067 - DNA, 15 bp, Homo sapiens
aattaaaaccctcag

SEQ ID NO: 99068 - DNA, 15 bp, Homo sapiens
aaattaaaaccctca

SEQ ID NO: 99069 - DNA, 15 bp, Homo sapiens
aaaattaaaaccctc

SEQ ID NO: 99070 - DNA, 15 bp, Homo sapiens
aaaaattaaaaccct

SEQ ID NO: 99071 - DNA, 15 bp, Homo sapiens
aaaaaattaaaaccc

SEQ ID NO: 99072 - DNA, 15 bp, Homo sapiens
caaaaaattaaaacc

SEQ ID NO: 99073 - DNA, 15 bp, Homo sapiens
tcaaaaaattaaaac

SEQ ID NO: 99074 - DNA, 15 bp, Homo sapiens
ctcaaaaaattaaaa

SEQ ID NO: 99075 - DNA, 15 bp, Homo sapiens
tctcaaaaaattaaa

SEQ ID NO: 99076 - DNA, 15 bp, Homo sapiens
atctcaaaaaattaa

SEQ ID NO: 99077 - DNA, 15 bp, Homo sapiens
catctcaaaaaatta

SEQ ID NO: 99078 - DNA, 15 bp, Homo sapiens
ccatctcaaaaaatt

SEQ ID NO: 99079 - DNA, 15 bp, Homo sapiens
cccatctcaaaaaat

SEQ ID NO: 99080 - DNA, 15 bp, Homo sapiens
agagaccccatctca

SEQ ID NO: 99081 - DNA, 15 bp, Homo sapiens
cagagaccccatctc

SEQ ID NO: 99082 - DNA, 15 bp, Homo sapiens
acagagaccccatct

SEQ ID NO: 99083 - DNA, 15 bp, Homo sapiens
gacagagaccccatc

SEQ ID NO: 99084 - DNA, 15 bp, Homo sapiens
ggacagagaccccat

SEQ ID NO: 99085 - DNA, 15 bp, Homo sapiens
gggacagagacccca

SEQ ID NO: 99086 - DNA, 15 bp, Homo sapiens
tgggacagagacccc

SEQ ID NO: 99087 - DNA, 15 bp, Homo sapiens
gtgggacagagaccc

SEQ ID NO: 99088 - DNA, 15 bp, Homo sapiens
ggtgggacagagacc

SEQ ID NO: 99089 - DNA, 15 bp, Homo sapiens
tggtgggacagagac

SEQ ID NO: 99090 - DNA, 15 bp, Homo sapiens
ctggtgggacagaga

SEQ ID NO: 99091 - DNA, 15 bp, Homo sapiens
cctggtgggacagag

SEQ ID NO: 99092 - DNA, 15 bp, Homo sapiens
gcctggtgggacaga

SEQ ID NO: 99093 - DNA, 15 bp, Homo sapiens
agcctggtgggacag

SEQ ID NO: 99094 - DNA, 15 bp, Homo sapiens
cagcctggtgggaca

SEQ ID NO: 99095 - DNA, 15 bp, Homo sapiens
ccagcctggtgggac

SEQ ID NO: 99096 - DNA, 15 bp, Homo sapiens
tccagcctggtggga

SEQ ID NO: 99097 - DNA, 15 bp, Homo sapiens
ctccagcctggtggg

SEQ ID NO: 99098 - DNA, 15 bp, Homo sapiens
actccagcctggtgg

SEQ ID NO: 99099 - DNA, 15 bp, Homo sapiens
cactccagcctggtg

SEQ ID NO: 99100 - DNA, 15 bp, Homo sapiens
gcactccagcctggt

SEQ ID NO: 99101 - DNA, 15 bp, Homo sapiens
ctgtgattgtgccac

SEQ ID NO: 99102 - DNA, 15 bp, Homo sapiens
gctgtgattgtgcca

SEQ ID NO: 99103 - DNA, 15 bp, Homo sapiens
agctgtgattgtgcc

SEQ ID NO: 99104 - DNA, 15 bp, Homo sapiens
gagctgtgattgtgc

SEQ ID NO: 99105 - DNA, 15 bp, Homo sapiens
tgagctgtgattgtg

SEQ ID NO: 99106 - DNA, 15 bp, Homo sapiens
gtgagctgtgattgt

SEQ ID NO: 99107 - DNA, 15 bp, Homo sapiens
agtgagctgtgattg

SEQ ID NO: 99108 - DNA, 15 bp, Homo sapiens
cagtgagctgtgatt

SEQ ID NO: 99109 - DNA, 15 bp, Homo sapiens
cgaggctgcagtgag

SEQ ID NO: 99110 - DNA, 15 bp, Homo sapiens
tcgaggctgcagtga

SEQ ID NO: 99111 - DNA, 15 bp, Homo sapiens
ttcgaggctgcagtg

SEQ ID NO: 99112 - DNA, 15 bp, Homo sapiens
gttcgaggctgcagt

SEQ ID NO: 99113 - DNA, 15 bp, Homo sapiens
agttcgaggctgcag

SEQ ID NO: 99114 - DNA, 15 bp, Homo sapiens
gagttcgaggctgca

SEQ ID NO: 99115 - DNA, 15 bp, Homo sapiens
ggagttcgaggctgc

SEQ ID NO: 99116 - DNA, 15 bp, Homo sapiens
aggagttcgaggctg

SEQ ID NO: 99117 - DNA, 15 bp, Homo sapiens
caggagttcgaggct

SEQ ID NO: 99118 - DNA, 15 bp, Homo sapiens
ccaggagttcgaggc

SEQ ID NO: 99119 - DNA, 15 bp, Homo sapiens
cccaggagttcgagg

SEQ ID NO: 99120 - DNA, 15 bp, Homo sapiens
gcccaggagttcgag

SEQ ID NO: 99121 - DNA, 15 bp, Homo sapiens
agcccaggagttcga

SEQ ID NO: 99122 - DNA, 15 bp, Homo sapiens
gagcccaggagttcg

SEQ ID NO: 99123 - DNA, 15 bp, Homo sapiens
tgagcccaggagttc

SEQ ID NO: 99124 - DNA, 15 bp, Homo sapiens
ttgagcccaggagtt

SEQ ID NO: 99125 - DNA, 15 bp, Homo sapiens
cttgagcccaggagt

SEQ ID NO: 99126 - DNA, 15 bp, Homo sapiens
gcttgagcccaggag

SEQ ID NO: 99127 - DNA, 15 bp, Homo sapiens
tgcttgagcccagga

SEQ ID NO: 99128 - DNA, 15 bp, Homo sapiens
ttgcttgagcccagg

SEQ ID NO: 99129 - DNA, 15 bp, Homo sapiens
attgcttgagcccag

SEQ ID NO: 99130 - DNA, 15 bp, Homo sapiens
gattgcttgagccca

SEQ ID NO: 99131 - DNA, 15 bp, Homo sapiens
agattgcttgagccc

SEQ ID NO: 99132 - DNA, 15 bp, Homo sapiens
aagattgcttgagcc

SEQ ID NO: 99133 - DNA, 15 bp, Homo sapiens
gaagattgcttgagc

SEQ ID NO: 99134 - DNA, 15 bp, Homo sapiens
ggaagattgcttgag

SEQ ID NO: 99135 - DNA, 15 bp, Homo sapiens
aggaagattgcttga

SEQ ID NO: 99136 - DNA, 15 bp, Homo sapiens
taggaagattgcttg

SEQ ID NO: 99137 - DNA, 15 bp, Homo sapiens
gtaggaagattgctt

SEQ ID NO: 99138 - DNA, 15 bp, Homo sapiens
ggtaggaagattgct

SEQ ID NO: 99139 - DNA, 15 bp, Homo sapiens
aggtaggaagattgc

SEQ ID NO: 99140 - DNA, 15 bp, Homo sapiens
gaggtaggaagattg

SEQ ID NO: 99141 - DNA, 15 bp, Homo sapiens
tgaggtaggaagatt

SEQ ID NO: 99142 - DNA, 15 bp, Homo sapiens
ctgaggtaggaagat

SEQ ID NO: 99143 - DNA, 15 bp, Homo sapiens
gctgaggtaggaaga

SEQ ID NO: 99144 - DNA, 15 bp, Homo sapiens
ggctgaggtaggaag

SEQ ID NO: 99145 - DNA, 15 bp, Homo sapiens
aggctgaggtaggaa

SEQ ID NO: 99146 - DNA, 15 bp, Homo sapiens
gaggctgaggtagga

SEQ ID NO: 99147 - DNA, 15 bp, Homo sapiens
agaggctgaggtagg

SEQ ID NO: 99148 - DNA, 15 bp, Homo sapiens
aagaggctgaggtag

SEQ ID NO: 99149 - DNA, 15 bp, Homo sapiens
caagaggctgaggta

SEQ ID NO: 99150 - DNA, 15 bp, Homo sapiens
tcaagaggctgaggt

SEQ ID NO: 99151 - DNA, 15 bp, Homo sapiens
ctcaagaggctgagg

SEQ ID NO: 99152 - DNA, 15 bp, Homo sapiens
actcaagaggctgag

SEQ ID NO: 99153 - DNA, 15 bp, Homo sapiens
tactcaagaggctga

SEQ ID NO: 99154 - DNA, 15 bp, Homo sapiens
ctactcaagaggctg

SEQ ID NO: 99155 - DNA, 15 bp, Homo sapiens
gctactcaagaggct

SEQ ID NO: 99156 - DNA, 15 bp, Homo sapiens
agctactcaagaggc

SEQ ID NO: 99157 - DNA, 15 bp, Homo sapiens
cagctactcaagagg

SEQ ID NO: 99158 - DNA, 15 bp, Homo sapiens
ccagctactcaagag

SEQ ID NO: 99159 - DNA, 15 bp, Homo sapiens
cccagctactcaaga

SEQ ID NO: 99160 - DNA, 15 bp, Homo sapiens
tcccagctactcaag

SEQ ID NO: 99161 - DNA, 15 bp, Homo sapiens
gtcccagctactcaa

SEQ ID NO: 99162 - DNA, 15 bp, Homo sapiens
atgcctgtagtccca

SEQ ID NO: 99163 - DNA, 15 bp, Homo sapiens
catgcctgtagtccc

SEQ ID NO: 99164 - DNA, 15 bp, Homo sapiens
gcatgcctgtagtcc

SEQ ID NO: 99165 - DNA, 15 bp, Homo sapiens
cgcatgcctgtagtc

SEQ ID NO: 99166 - DNA, 15 bp, Homo sapiens
gcgcatgcctgtagt

SEQ ID NO: 99167 - DNA, 15 bp, Homo sapiens
ggcgcatgcctgtag

SEQ ID NO: 99168 - DNA, 15 bp, Homo sapiens
tggcgcatgcctgta

SEQ ID NO: 99169 - DNA, 15 bp, Homo sapiens
gtggcgcatgcctgt

SEQ ID NO: 99170 - DNA, 15 bp, Homo sapiens
ggtggcgcatgcctg

SEQ ID NO: 99171 - DNA, 15 bp, Homo sapiens
tggtggcgcatgcct

SEQ ID NO: 99172 - DNA, 15 bp, Homo sapiens
gtggtggcgcatgcc

SEQ ID NO: 99173 - DNA, 15 bp, Homo sapiens
cgtggtggcgcatgc

SEQ ID NO: 99174 - DNA, 15 bp, Homo sapiens
gcgtggtggcgcatg

SEQ ID NO: 99175 - DNA, 15 bp, Homo sapiens
agcgtggtggcgcat

SEQ ID NO: 99176 - DNA, 15 bp, Homo sapiens
gagcgtggtggcgca

SEQ ID NO: 99177 - DNA, 15 bp, Homo sapiens
cgagcgtggtggcgc

SEQ ID NO: 99178 - DNA, 15 bp, Homo sapiens
ccgagcgtggtggcg

SEQ ID NO: 99179 - DNA, 15 bp, Homo sapiens
gccgagcgtggtggc

SEQ ID NO: 99180 - DNA, 15 bp, Homo sapiens
agccgagcgtggtgg

SEQ ID NO: 99181 - DNA, 15 bp, Homo sapiens
tagccgagcgtggtg

SEQ ID NO: 99182 - DNA, 15 bp, Homo sapiens
ttagccgagcgtggt

SEQ ID NO: 99183 - DNA, 15 bp, Homo sapiens
attagccgagcgtgg

SEQ ID NO: 99184 - DNA, 15 bp, Homo sapiens
aattagccgagcgtg

SEQ ID NO: 99185 - DNA, 15 bp, Homo sapiens
aaattagccgagcgt

SEQ ID NO: 99186 - DNA, 15 bp, Homo sapiens
aaaattagccgagcg

SEQ ID NO: 99187 - DNA, 15 bp, Homo sapiens
aaaaattagccgagc

SEQ ID NO: 99188 - DNA, 15 bp, Homo sapiens
caaaaattagccgag

SEQ ID NO: 99189 - DNA, 15 bp, Homo sapiens
tcaaaaattagccga

SEQ ID NO: 99190 - DNA, 15 bp, Homo sapiens
ttcaaaaattagccg

SEQ ID NO: 99191 - DNA, 15 bp, Homo sapiens
gttcaaaaattagcc

SEQ ID NO: 99192 - DNA, 15 bp, Homo sapiens
agttcaaaaattagc

SEQ ID NO: 99193 - DNA, 15 bp, Homo sapiens
aagttcaaaaattag

SEQ ID NO: 99194 - DNA, 15 bp, Homo sapiens
aaagttcaaaaatta

SEQ ID NO: 99195 - DNA, 15 bp, Homo sapiens
aaaagttcaaaaatt

SEQ ID NO: 99196 - DNA, 15 bp, Homo sapiens
aaaaagttcaaaaat

SEQ ID NO: 99197 - DNA, 15 bp, Homo sapiens
aaaaaagttcaaaaa

SEQ ID NO: 99198 - DNA, 15 bp, Homo sapiens
caaaaaagttcaaaa

SEQ ID NO: 99199 - DNA, 15 bp, Homo sapiens
acaaaaaagttcaaa

SEQ ID NO: 99200 - DNA, 15 bp, Homo sapiens
tacaaaaaagttcaa

SEQ ID NO: 99201 - DNA, 15 bp, Homo sapiens
ctacaaaaaagttca

SEQ ID NO: 99202 - DNA, 15 bp, Homo sapiens
tctacaaaaaagttc

SEQ ID NO: 99203 - DNA, 15 bp, Homo sapiens
tcatctctacaaaaa

SEQ ID NO: 99204 - DNA, 15 bp, Homo sapiens
ctcatctctacaaaa

SEQ ID NO: 99205 - DNA, 15 bp, Homo sapiens
cctcatctctacaaa

SEQ ID NO: 99206 - DNA, 15 bp, Homo sapiens
acctcatctctacaa

SEQ ID NO: 99207 - DNA, 15 bp, Homo sapiens
gacctcatctctaca

SEQ ID NO: 99208 - DNA, 15 bp, Homo sapiens
agacctcatctctac

SEQ ID NO: 99209 - DNA, 15 bp, Homo sapiens
gagacctcatctcta

SEQ ID NO: 99210 - DNA, 15 bp, Homo sapiens
ggagacctcatctct

SEQ ID NO: 99211 - DNA, 15 bp, Homo sapiens
gggagacctcatctc

SEQ ID NO: 99212 - DNA, 15 bp, Homo sapiens
agggagacctcatct

SEQ ID NO: 99213 - DNA, 15 bp, Homo sapiens
tagggagacctcatc

SEQ ID NO: 99214 - DNA, 15 bp, Homo sapiens
atagggagacctcat

SEQ ID NO: 99215 - DNA, 15 bp, Homo sapiens
tatagggagacctca

SEQ ID NO: 99216 - DNA, 15 bp, Homo sapiens
atatagggagacctc

SEQ ID NO: 99217 - DNA, 15 bp, Homo sapiens
aatatagggagacct

SEQ ID NO: 99218 - DNA, 15 bp, Homo sapiens
caatatagggagacc

SEQ ID NO: 99219 - DNA, 15 bp, Homo sapiens
gcaatatagggagac

SEQ ID NO: 99220 - DNA, 15 bp, Homo sapiens
ggcaatatagggaga

SEQ ID NO: 99221 - DNA, 15 bp, Homo sapiens
gggcaatatagggag

SEQ ID NO: 99222 - DNA, 15 bp, Homo sapiens
tgggcaatataggga

SEQ ID NO: 99223 - DNA, 15 bp, Homo sapiens
ctgggcaatataggg

SEQ ID NO: 99224 - DNA, 15 bp, Homo sapiens
cctgggcaatatagg

SEQ ID NO: 99225 - DNA, 15 bp, Homo sapiens
gcctgggcaatatag

SEQ ID NO: 99226 - DNA, 15 bp, Homo sapiens
agcctgggcaatata

SEQ ID NO: 99227 - DNA, 15 bp, Homo sapiens
cagcctgggcaatat

SEQ ID NO: 99228 - DNA, 15 bp, Homo sapiens
ccagcctgggcaata

SEQ ID NO: 99229 - DNA, 15 bp, Homo sapiens
accagcctgggcaat

SEQ ID NO: 99230 - DNA, 15 bp, Homo sapiens
gggagttcgagacca

SEQ ID NO: 99231 - DNA, 15 bp, Homo sapiens
tgggagttcgagacc

SEQ ID NO: 99232 - DNA, 15 bp, Homo sapiens
ctgggagttcgagac

SEQ ID NO: 99233 - DNA, 15 bp, Homo sapiens
cctgggagttcgaga

SEQ ID NO: 99234 - DNA, 15 bp, Homo sapiens
gcctgggagttcgag

SEQ ID NO: 99235 - DNA, 15 bp, Homo sapiens
agcctgggagttcga

SEQ ID NO: 99236 - DNA, 15 bp, Homo sapiens
gagcctgggagttcg

SEQ ID NO: 99237 - DNA, 15 bp, Homo sapiens
tgagcctgggagttc

SEQ ID NO: 99238 - DNA, 15 bp, Homo sapiens
ttgagcctgggagtt

SEQ ID NO: 99239 - DNA, 15 bp, Homo sapiens
cttgagcctgggagt

SEQ ID NO: 99240 - DNA, 15 bp, Homo sapiens
acttgagcctgggag

SEQ ID NO: 99241 - DNA, 15 bp, Homo sapiens
cacttgagcctggga

SEQ ID NO: 99242 - DNA, 15 bp, Homo sapiens
tcacttgagcctggg

SEQ ID NO: 99243 - DNA, 15 bp, Homo sapiens
atcacttgagcctgg

SEQ ID NO: 99244 - DNA, 15 bp, Homo sapiens
gatcacttgagcctg

SEQ ID NO: 99245 - DNA, 15 bp, Homo sapiens
ggatcacttgagcct

SEQ ID NO: 99246 - DNA, 15 bp, Homo sapiens
aggatcacttgagcc

SEQ ID NO: 99247 - DNA, 15 bp, Homo sapiens
gggaggatcacttga

SEQ ID NO: 99248 - DNA, 15 bp, Homo sapiens
agggaggatcacttg

SEQ ID NO: 99249 - DNA, 15 bp, Homo sapiens
gagggaggatcactt

SEQ ID NO: 99250 - DNA, 15 bp, Homo sapiens
agagggaggatcact

SEQ ID NO: 99251 - DNA, 15 bp, Homo sapiens
aagagggaggatcac

SEQ ID NO: 99252 - DNA, 15 bp, Homo sapiens
gaagagggaggatca

SEQ ID NO: 99253 - DNA, 15 bp, Homo sapiens
tgaagagggaggatc

SEQ ID NO: 99254 - DNA, 15 bp, Homo sapiens
ctgaagagggaggat

SEQ ID NO: 99255 - DNA, 15 bp, Homo sapiens
gctgaagagggagga

SEQ ID NO: 99256 - DNA, 15 bp, Homo sapiens
agctgaagagggagg

SEQ ID NO: 99257 - DNA, 15 bp, Homo sapiens
aagctgaagagggag

SEQ ID NO: 99258 - DNA, 15 bp, Homo sapiens
gaagctgaagaggga

SEQ ID NO: 99259 - DNA, 15 bp, Homo sapiens
ggaagctgaagaggg

SEQ ID NO: 99260 - DNA, 15 bp, Homo sapiens
gggaagctgaagagg

SEQ ID NO: 99261 - DNA, 15 bp, Homo sapiens
tgggaagctgaagag

SEQ ID NO: 99262 - DNA, 15 bp, Homo sapiens
ttgggaagctgaaga

SEQ ID NO: 99263 - DNA, 15 bp, Homo sapiens
tttgggaagctgaag

SEQ ID NO: 99264 - DNA, 15 bp, Homo sapiens
ctttgggaagctgaa

SEQ ID NO: 99265 - DNA, 15 bp, Homo sapiens
actttgggaagctga

SEQ ID NO: 99266 - DNA, 15 bp, Homo sapiens
cactttgggaagctg

SEQ ID NO: 99267 - DNA, 15 bp, Homo sapiens
gcactttgggaagct

SEQ ID NO: 99268 - DNA, 15 bp, Homo sapiens
agcactttgggaagc

SEQ ID NO: 99269 - DNA, 15 bp, Homo sapiens
cagcactttgggaag

SEQ ID NO: 99270 - DNA, 15 bp, Homo sapiens
ccagcactttgggaa

SEQ ID NO: 99271 - DNA, 15 bp, Homo sapiens
tggtggctcatgcct

SEQ ID NO: 99272 - DNA, 15 bp, Homo sapiens
atggtggctcatgcc

SEQ ID NO: 99273 - DNA, 15 bp, Homo sapiens
catggtggctcatgc

SEQ ID NO: 99274 - DNA, 15 bp, Homo sapiens
gcatggtggctcatg

SEQ ID NO: 99275 - DNA, 15 bp, Homo sapiens
ggcatggtggctcat

SEQ ID NO: 99276 - DNA, 15 bp, Homo sapiens
cattagccaggcatg

SEQ ID NO: 99277 - DNA, 15 bp, Homo sapiens
gcattagccaggcat

SEQ ID NO: 99278 - DNA, 15 bp, Homo sapiens
tgcattagccaggca

SEQ ID NO: 99279 - DNA, 15 bp, Homo sapiens
ctgcattagccaggc

SEQ ID NO: 99280 - DNA, 15 bp, Homo sapiens
cctgcattagccagg

SEQ ID NO: 99281 - DNA, 15 bp, Homo sapiens
acctgcattagccag

SEQ ID NO: 99282 - DNA, 15 bp, Homo sapiens
cacctgcattagcca

SEQ ID NO: 99283 - DNA, 15 bp, Homo sapiens
tcacctgcattagcc

SEQ ID NO: 99284 - DNA, 15 bp, Homo sapiens
ctcacctgcattagc

SEQ ID NO: 99285 - DNA, 15 bp, Homo sapiens
cctcacctgcattag

SEQ ID NO: 99286 - DNA, 15 bp, Homo sapiens
acctcacctgcatta

SEQ ID NO: 99287 - DNA, 15 bp, Homo sapiens
aacctcacctgcatt

SEQ ID NO: 99288 - DNA, 15 bp, Homo sapiens
aaacctcacctgcat

SEQ ID NO: 99289 - DNA, 15 bp, Homo sapiens
aaaacctcacctgca

SEQ ID NO: 99290 - DNA, 15 bp, Homo sapiens
aaaaacctcacctgc

SEQ ID NO: 99291 - DNA, 15 bp, Homo sapiens
caaaaacctcacctg

SEQ ID NO: 99292 - DNA, 15 bp, Homo sapiens
gcaaaaacctcacct

SEQ ID NO: 99293 - DNA, 15 bp, Homo sapiens
tgcaaaaacctcacc

SEQ ID NO: 99294 - DNA, 15 bp, Homo sapiens
ctgcaaaaacctcac

SEQ ID NO: 99295 - DNA, 15 bp, Homo sapiens
actgcaaaaacctca

SEQ ID NO: 99296 - DNA, 15 bp, Homo sapiens
cactgcaaaaacctc

SEQ ID NO: 99297 - DNA, 15 bp, Homo sapiens
acactgcaaaaacct

SEQ ID NO: 99298 - DNA, 15 bp, Homo sapiens
gacactgcaaaaacc

SEQ ID NO: 99299 - DNA, 15 bp, Homo sapiens
tgacactgcaaaaac

SEQ ID NO: 99300 - DNA, 15 bp, Homo sapiens
atgacactgcaaaaa

SEQ ID NO: 99301 - DNA, 15 bp, Homo sapiens
gatgacactgcaaaa

SEQ ID NO: 99302 - DNA, 15 bp, Homo sapiens
ggatgacactgcaaa

SEQ ID NO: 99303 - DNA, 15 bp, Homo sapiens
tggatgacactgcaa

SEQ ID NO: 99304 - DNA, 15 bp, Homo sapiens
ctggatgacactgca

SEQ ID NO: 99305 - DNA, 15 bp, Homo sapiens
gctggatgacactgc

SEQ ID NO: 99306 - DNA, 15 bp, Homo sapiens
agctggatgacactg

SEQ ID NO: 99307 - DNA, 15 bp, Homo sapiens
tagctggatgacact

SEQ ID NO: 99308 - DNA, 15 bp, Homo sapiens
ttagctggatgacac

SEQ ID NO: 99309 - DNA, 15 bp, Homo sapiens
cttagctggatgaca

SEQ ID NO: 99310 - DNA, 15 bp, Homo sapiens
ccttagctggatgac

SEQ ID NO: 99311 - DNA, 15 bp, Homo sapiens
gccttagctggatga

SEQ ID NO: 99312 - DNA, 15 bp, Homo sapiens
cgccttagctggatg

SEQ ID NO: 99313 - DNA, 15 bp, Homo sapiens
tcgccttagctggat

SEQ ID NO: 99314 - DNA, 15 bp, Homo sapiens
gtcgccttagctgga

SEQ ID NO: 99315 - DNA, 15 bp, Homo sapiens
ggtcgccttagctgg

SEQ ID NO: 99316 - DNA, 15 bp, Homo sapiens
gggtcgccttagctg

SEQ ID NO: 99317 - DNA, 15 bp, Homo sapiens
cgggtcgccttagct

SEQ ID NO: 99318 - DNA, 15 bp, Homo sapiens
acgggtcgccttagc

SEQ ID NO: 99319 - DNA, 15 bp, Homo sapiens
aacgggtcgccttag

SEQ ID NO: 99320 - DNA, 15 bp, Homo sapiens
gaacgggtcgcctta

SEQ ID NO: 99321 - DNA, 15 bp, Homo sapiens
ggaacgggtcgcctt

SEQ ID NO: 99322 - DNA, 15 bp, Homo sapiens
gggaacgggtcgcct

SEQ ID NO: 99323 - DNA, 15 bp, Homo sapiens
ggggaacgggtcgcc

SEQ ID NO: 99324 - DNA, 15 bp, Homo sapiens
aggggaacgggtcgc

SEQ ID NO: 99325 - DNA, 15 bp, Homo sapiens
gaggggaacgggtcg

SEQ ID NO: 99326 - DNA, 15 bp, Homo sapiens
ggaggggaacgggtc

SEQ ID NO: 99327 - DNA, 15 bp, Homo sapiens
gggaggggaacgggt

SEQ ID NO: 99328 - DNA, 15 bp, Homo sapiens
tgggaggggaacggg

SEQ ID NO: 99329 - DNA, 15 bp, Homo sapiens
ttgggaggggaacgg

SEQ ID NO: 99330 - DNA, 15 bp, Homo sapiens
tttgggaggggaacg

SEQ ID NO: 99331 - DNA, 15 bp, Homo sapiens
ttttgggaggggaac

SEQ ID NO: 99332 - DNA, 15 bp, Homo sapiens
tttttgggaggggaa

SEQ ID NO: 99333 - DNA, 15 bp, Homo sapiens
ttttttgggagggga

SEQ ID NO: 99334 - DNA, 15 bp, Homo sapiens
cttttttgggagggg

SEQ ID NO: 99335 - DNA, 15 bp, Homo sapiens
ccttttttgggaggg

SEQ ID NO: 99336 - DNA, 15 bp, Homo sapiens
cccttttttgggagg

SEQ ID NO: 99337 - DNA, 15 bp, Homo sapiens
tcccttttttgggag

SEQ ID NO: 99338 - DNA, 15 bp, Homo sapiens
ctcccttttttggga

SEQ ID NO: 99339 - DNA, 15 bp, Homo sapiens
tctcccttttttggg

SEQ ID NO: 99340 - DNA, 15 bp, Homo sapiens
gtctcccttttttgg

SEQ ID NO: 99341 - DNA, 15 bp, Homo sapiens
agtctcccttttttg

SEQ ID NO: 99342 - DNA, 15 bp, Homo sapiens
cagtctccctttttt

SEQ ID NO: 99343 - DNA, 15 bp, Homo sapiens
tcagtctcccttttt

SEQ ID NO: 99344 - DNA, 15 bp, Homo sapiens
ctcagtctccctttt

SEQ ID NO: 99345 - DNA, 15 bp, Homo sapiens
tctcagtctcccttt

SEQ ID NO: 99346 - DNA, 15 bp, Homo sapiens
ttctcagtctccctt

SEQ ID NO: 99347 - DNA, 15 bp, Homo sapiens
gttctcagtctccct

SEQ ID NO: 99348 - DNA, 15 bp, Homo sapiens
ggttctcagtctccc

SEQ ID NO: 99349 - DNA, 15 bp, Homo sapiens
tggttctcagtctcc

SEQ ID NO: 99350 - DNA, 15 bp, Homo sapiens
atggttctcagtctc

SEQ ID NO: 99351 - DNA, 15 bp, Homo sapiens
catggttctcagtct

SEQ ID NO: 99352 - DNA, 15 bp, Homo sapiens
tcatggttctcagtc

SEQ ID NO: 99353 - DNA, 15 bp, Homo sapiens
ttcatggttctcagt

SEQ ID NO: 99354 - DNA, 15 bp, Homo sapiens
cttcatggttctcag

SEQ ID NO: 99355 - DNA, 15 bp, Homo sapiens
acttcatggttctca

SEQ ID NO: 99356 - DNA, 15 bp, Homo sapiens
aacttcatggttctc

SEQ ID NO: 99357 - DNA, 15 bp, Homo sapiens
taacttcatggttct

SEQ ID NO: 99358 - DNA, 15 bp, Homo sapiens
ttaacttcatggttc

SEQ ID NO: 99359 - DNA, 15 bp, Homo sapiens
cttaacttcatggtt

SEQ ID NO: 99360 - DNA, 15 bp, Homo sapiens
tcttaacttcatggt

SEQ ID NO: 99361 - DNA, 15 bp, Homo sapiens
ctcttaacttcatgg

SEQ ID NO: 99362 - DNA, 15 bp, Homo sapiens
gctcttaacttcatg

SEQ ID NO: 99363 - DNA, 15 bp, Homo sapiens
ggctcttaacttcat

SEQ ID NO: 99364 - DNA, 15 bp, Homo sapiens
gggctcttaacttca

SEQ ID NO: 99365 - DNA, 15 bp, Homo sapiens
tgggctcttaacttc

SEQ ID NO: 99366 - DNA, 15 bp, Homo sapiens
ctgggctcttaactt

SEQ ID NO: 99367 - DNA, 15 bp, Homo sapiens
tctgggctcttaact

SEQ ID NO: 99368 - DNA, 15 bp, Homo sapiens
ctctgggctcttaac

SEQ ID NO: 99369 - DNA, 15 bp, Homo sapiens
tctctgggctcttaa

SEQ ID NO: 99370 - DNA, 15 bp, Homo sapiens
ttctctgggctctta

SEQ ID NO: 99371 - DNA, 15 bp, Homo sapiens
attctctgggctctt

SEQ ID NO: 99372 - DNA, 15 bp, Homo sapiens
tattctctgggctct

SEQ ID NO: 99373 - DNA, 15 bp, Homo sapiens
atattctctgggctc

SEQ ID NO: 99374 - DNA, 15 bp, Homo sapiens
gatattctctgggct

SEQ ID NO: 99375 - DNA, 15 bp, Homo sapiens
tgatattctctgggc

SEQ ID NO: 99376 - DNA, 15 bp, Homo sapiens
gtgatattctctggg

SEQ ID NO: 99377 - DNA, 15 bp, Homo sapiens
cgtgatattctctgg

SEQ ID NO: 99378 - DNA, 15 bp, Homo sapiens
ccgtgatattctctg

SEQ ID NO: 99379 - DNA, 15 bp, Homo sapiens
accgtgatattctct

SEQ ID NO: 99380 - DNA, 15 bp, Homo sapiens
caccgtgatattctc

SEQ ID NO: 99381 - DNA, 15 bp, Homo sapiens
ccaccgtgatattct

SEQ ID NO: 99382 - DNA, 15 bp, Homo sapiens
accaccgtgatattc

SEQ ID NO: 99383 - DNA, 15 bp, Homo sapiens
gaccaccgtgatatt

SEQ ID NO: 99384 - DNA, 15 bp, Homo sapiens
agaccaccgtgatat

SEQ ID NO: 99385 - DNA, 15 bp, Homo sapiens
cagaccaccgtgata

SEQ ID NO: 99386 - DNA, 15 bp, Homo sapiens
ccagaccaccgtgat

SEQ ID NO: 99387 - DNA, 15 bp, Homo sapiens
cccagaccaccgtga

SEQ ID NO: 99388 - DNA, 15 bp, Homo sapiens
ccccagaccaccgtg

SEQ ID NO: 99389 - DNA, 15 bp, Homo sapiens
accccagaccaccgt

SEQ ID NO: 99390 - DNA, 15 bp, Homo sapiens
caccccagaccaccg

SEQ ID NO: 99391 - DNA, 15 bp, Homo sapiens
gcaccccagaccacc

SEQ ID NO: 99392 - DNA, 15 bp, Homo sapiens
agcaccccagaccac

SEQ ID NO: 99393 - DNA, 15 bp, Homo sapiens
aagcaccccagacca

SEQ ID NO: 99394 - DNA, 15 bp, Homo sapiens
gaagcaccccagacc

SEQ ID NO: 99395 - DNA, 15 bp, Homo sapiens
tgaagcaccccagac

SEQ ID NO: 99396 - DNA, 15 bp, Homo sapiens
ttgaagcaccccaga

SEQ ID NO: 99397 - DNA, 15 bp, Homo sapiens
cttgaagcaccccag

SEQ ID NO: 99398 - DNA, 15 bp, Homo sapiens
ccttgaagcacccca

SEQ ID NO: 99399 - DNA, 15 bp, Homo sapiens
cccttgaagcacccc

SEQ ID NO: 99400 - DNA, 15 bp, Homo sapiens
gcccttgaagcaccc

SEQ ID NO: 99401 - DNA, 15 bp, Homo sapiens
agcccttgaagcacc

SEQ ID NO: 99402 - DNA, 15 bp, Homo sapiens
cagcccttgaagcac

SEQ ID NO: 99403 - DNA, 15 bp, Homo sapiens
ccagcccttgaagca

SEQ ID NO: 99404 - DNA, 15 bp, Homo sapiens
accagcccttgaagc

SEQ ID NO: 99405 - DNA, 15 bp, Homo sapiens
gaccagcccttgaag

SEQ ID NO: 99406 - DNA, 15 bp, Homo sapiens
agaccagcccttgaa

SEQ ID NO: 99407 - DNA, 15 bp, Homo sapiens
cagaccagcccttga

SEQ ID NO: 99408 - DNA, 15 bp, Homo sapiens
ccagaccagcccttg

SEQ ID NO: 99409 - DNA, 15 bp, Homo sapiens
tccagaccagccctt

SEQ ID NO: 99410 - DNA, 15 bp, Homo sapiens
ttccagaccagccct

SEQ ID NO: 99411 - DNA, 15 bp, Homo sapiens
attccagaccagccc

SEQ ID NO: 99412 - DNA, 15 bp, Homo sapiens
tattccagaccagcc

SEQ ID NO: 99413 - DNA, 15 bp, Homo sapiens
ttattccagaccagc

SEQ ID NO: 99414 - DNA, 15 bp, Homo sapiens
tttattccagaccag

SEQ ID NO: 99415 - DNA, 15 bp, Homo sapiens
atttattccagacca

SEQ ID NO: 99416 - DNA, 15 bp, Homo sapiens
aatttattccagacc

SEQ ID NO: 99417 - DNA, 15 bp, Homo sapiens
caatttattccagac

SEQ ID NO: 99418 - DNA, 15 bp, Homo sapiens
ccaatttattccaga

SEQ ID NO: 99419 - DNA, 15 bp, Homo sapiens
tccaatttattccag

SEQ ID NO: 99420 - DNA, 15 bp, Homo sapiens
ctccaatttattcca

SEQ ID NO: 99421 - DNA, 15 bp, Homo sapiens
cctccaatttattcc

SEQ ID NO: 99422 - DNA, 15 bp, Homo sapiens
acctccaatttattc

SEQ ID NO: 99423 - DNA, 15 bp, Homo sapiens
cacctccaatttatt

SEQ ID NO: 99424 - DNA, 15 bp, Homo sapiens
ccacctccaatttat

SEQ ID NO: 99425 - DNA, 15 bp, Homo sapiens
gccacctccaattta

SEQ ID NO: 99426 - DNA, 15 bp, Homo sapiens
tgccacctccaattt

SEQ ID NO: 99427 - DNA, 15 bp, Homo sapiens
gtgccacctccaatt

SEQ ID NO: 99428 - DNA, 15 bp, Homo sapiens
cgtgccacctccaat

SEQ ID NO: 99429 - DNA, 15 bp, Homo sapiens
gcgtgccacctccaa

SEQ ID NO: 99430 - DNA, 15 bp, Homo sapiens
tgcgtgccacctcca

SEQ ID NO: 99431 - DNA, 15 bp, Homo sapiens
ctgcgtgccacctcc

SEQ ID NO: 99432 - DNA, 15 bp, Homo sapiens
cctgcgtgccacctc

SEQ ID NO: 99433 - DNA, 15 bp, Homo sapiens
ccctgcgtgccacct

SEQ ID NO: 99434 - DNA, 15 bp, Homo sapiens
accctgcgtgccacc

SEQ ID NO: 99435 - DNA, 15 bp, Homo sapiens
taccctgcgtgccac

SEQ ID NO: 99436 - DNA, 15 bp, Homo sapiens
ctaccctgcgtgcca

SEQ ID NO: 99437 - DNA, 15 bp, Homo sapiens
cctaccctgcgtgcc

SEQ ID NO: 99438 - DNA, 15 bp, Homo sapiens
tcctaccctgcgtgc

SEQ ID NO: 99439 - DNA, 15 bp, Homo sapiens
ctcctaccctgcgtg

SEQ ID NO: 99440 - DNA, 15 bp, Homo sapiens
gctcctaccctgcgt

SEQ ID NO: 99441 - DNA, 15 bp, Homo sapiens
cgctcctaccctgcg

SEQ ID NO: 99442 - DNA, 15 bp, Homo sapiens
gcgctcctaccctgc

SEQ ID NO: 99443 - DNA, 15 bp, Homo sapiens
ggcgctcctaccctg

SEQ ID NO: 99444 - DNA, 15 bp, Homo sapiens
cggcgctcctaccct

SEQ ID NO: 99445 - DNA, 15 bp, Homo sapiens
ccggcgctcctaccc

SEQ ID NO: 99446 - DNA, 15 bp, Homo sapiens
cccggcgctcctacc

SEQ ID NO: 99447 - DNA, 15 bp, Homo sapiens
gcccggcgctcctac

SEQ ID NO: 99448 - DNA, 15 bp, Homo sapiens
ggcccggcgctccta

SEQ ID NO: 99449 - DNA, 15 bp, Homo sapiens
tggcccggcgctcct

SEQ ID NO: 99450 - DNA, 15 bp, Homo sapiens
ttggcccggcgctcc

SEQ ID NO: 99451 - DNA, 15 bp, Homo sapiens
gttggcccggcgctc

SEQ ID NO: 99452 - DNA, 15 bp, Homo sapiens
agttggcccggcgct

SEQ ID NO: 99453 - DNA, 15 bp, Homo sapiens
cagttggcccggcgc

SEQ ID NO: 99454 - DNA, 15 bp, Homo sapiens
ccagttggcccggcg

SEQ ID NO: 99455 - DNA, 15 bp, Homo sapiens
cccagttggcccggc

SEQ ID NO: 99456 - DNA, 15 bp, Homo sapiens
tcccagttggcccgg

SEQ ID NO: 99457 - DNA, 15 bp, Homo sapiens
ctcccagttggcccg

SEQ ID NO: 99458 - DNA, 15 bp, Homo sapiens
tctcccagttggccc

SEQ ID NO: 99459 - DNA, 15 bp, Homo sapiens
gtctcccagttggcc

SEQ ID NO: 99460 - DNA, 15 bp, Homo sapiens
ggtctcccagttggc

SEQ ID NO: 99461 - DNA, 15 bp, Homo sapiens
gggtctcccagttgg

SEQ ID NO: 99462 - DNA, 15 bp, Homo sapiens
tgggtctcccagttg

SEQ ID NO: 99463 - DNA, 15 bp, Homo sapiens
ctgggtctcccagtt

SEQ ID NO: 99464 - DNA, 15 bp, Homo sapiens
gctgggtctcccagt

SEQ ID NO: 99465 - DNA, 15 bp, Homo sapiens
tgctgggtctcccag

SEQ ID NO: 99466 - DNA, 15 bp, Homo sapiens
ttgctgggtctccca

SEQ ID NO: 99467 - DNA, 15 bp, Homo sapiens
gttgctgggtctccc

SEQ ID NO: 99468 - DNA, 15 bp, Homo sapiens
tgttgctgggtctcc

SEQ ID NO: 99469 - DNA, 15 bp, Homo sapiens
atgttgctgggtctc

SEQ ID NO: 99470 - DNA, 15 bp, Homo sapiens
tatgttgctgggtct

SEQ ID NO: 99471 - DNA, 15 bp, Homo sapiens
ttatgttgctgggtc

SEQ ID NO: 99472 - DNA, 15 bp, Homo sapiens
tttatgttgctgggt

SEQ ID NO: 99473 - DNA, 15 bp, Homo sapiens
ctttatgttgctggg

SEQ ID NO: 99474 - DNA, 15 bp, Homo sapiens
cctttatgttgctgg

SEQ ID NO: 99475 - DNA, 15 bp, Homo sapiens
tcctttatgttgctg

SEQ ID NO: 99476 - DNA, 15 bp, Homo sapiens
ttcctttatgttgct

SEQ ID NO: 99477 - DNA, 15 bp, Homo sapiens
tttcctttatgttgc

SEQ ID NO: 99478 - DNA, 15 bp, Homo sapiens
ttttcctttatgttg

SEQ ID NO: 99479 - DNA, 15 bp, Homo sapiens
cttttcctttatgtt

SEQ ID NO: 99480 - DNA, 15 bp, Homo sapiens
acttttcctttatgt

SEQ ID NO: 99481 - DNA, 15 bp, Homo sapiens
aacttttcctttatg

SEQ ID NO: 99482 - DNA, 15 bp, Homo sapiens
caacttttcctttat

SEQ ID NO: 99483 - DNA, 15 bp, Homo sapiens
acaacttttccttta

SEQ ID NO: 99484 - DNA, 15 bp, Homo sapiens
aacaacttttccttt

SEQ ID NO: 99485 - DNA, 15 bp, Homo sapiens
caacaacttttcctt

SEQ ID NO: 99486 - DNA, 15 bp, Homo sapiens
ccaacaacttttcct

SEQ ID NO: 99487 - DNA, 15 bp, Homo sapiens
cccaacaacttttcc

SEQ ID NO: 99488 - DNA, 15 bp, Homo sapiens
ccccaacaacttttc

SEQ ID NO: 99489 - DNA, 15 bp, Homo sapiens
gccccaacaactttt

SEQ ID NO: 99490 - DNA, 15 bp, Homo sapiens
agccccaacaacttt

SEQ ID NO: 99491 - DNA, 15 bp, Homo sapiens
cagccccaacaactt

SEQ ID NO: 99492 - DNA, 15 bp, Homo sapiens
tcagccccaacaact

SEQ ID NO: 99493 - DNA, 15 bp, Homo sapiens
ctcagccccaacaac

SEQ ID NO: 99494 - DNA, 15 bp, Homo sapiens
cctcagccccaacaa

SEQ ID NO: 99495 - DNA, 15 bp, Homo sapiens
tcctcagccccaaca

SEQ ID NO: 99496 - DNA, 15 bp, Homo sapiens
ctcctcagccccaac

SEQ ID NO: 99497 - DNA, 15 bp, Homo sapiens
cctcctcagccccaa

SEQ ID NO: 99498 - DNA, 15 bp, Homo sapiens
gcctcctcagcccca

SEQ ID NO: 99499 - DNA, 15 bp, Homo sapiens
agcctcctcagcccc

SEQ ID NO: 99500 - DNA, 15 bp, Homo sapiens
aagcctcctcagccc

SEQ ID NO: 99501 - DNA, 15 bp, Homo sapiens
caagcctcctcagcc

SEQ ID NO: 99502 - DNA, 15 bp, Homo sapiens
gcaagcctcctcagc

SEQ ID NO: 99503 - DNA, 15 bp, Homo sapiens
agcaagcctcctcag

SEQ ID NO: 99504 - DNA, 15 bp, Homo sapiens
cagcaagcctcctca

SEQ ID NO: 99505 - DNA, 15 bp, Homo sapiens
tcagcaagcctcctc

SEQ ID NO: 99506 - DNA, 15 bp, Homo sapiens
ctcagcaagcctcct

SEQ ID NO: 99507 - DNA, 15 bp, Homo sapiens
tctcagcaagcctcc

SEQ ID NO: 99508 - DNA, 15 bp, Homo sapiens
ctctcagcaagcctc

SEQ ID NO: 99509 - DNA, 15 bp, Homo sapiens
tctctcagcaagcct

SEQ ID NO: 99510 - DNA, 15 bp, Homo sapiens
ctctctcagcaagcc

SEQ ID NO: 99511 - DNA, 15 bp, Homo sapiens
cctctctcagcaagc

SEQ ID NO: 99512 - DNA, 15 bp, Homo sapiens
ccctctctcagcaag

SEQ ID NO: 99513 - DNA, 15 bp, Homo sapiens
cccctctctcagcaa

SEQ ID NO: 99514 - DNA, 15 bp, Homo sapiens
tcccctctctcagca

SEQ ID NO: 99515 - DNA, 15 bp, Homo sapiens
ttcccctctctcagc

SEQ ID NO: 99516 - DNA, 15 bp, Homo sapiens
cttcccctctctcag

SEQ ID NO: 99517 - DNA, 15 bp, Homo sapiens
acttcccctctctca

SEQ ID NO: 99518 - DNA, 15 bp, Homo sapiens
cacttcccctctctc

SEQ ID NO: 99519 - DNA, 15 bp, Homo sapiens
tcacttcccctctct

SEQ ID NO: 99520 - DNA, 15 bp, Homo sapiens
ctcacttcccctctc

SEQ ID NO: 99521 - DNA, 15 bp, Homo sapiens
cctcacttcccctct

SEQ ID NO: 99522 - DNA, 15 bp, Homo sapiens
ccctcacttcccctc

SEQ ID NO: 99523 - DNA, 15 bp, Homo sapiens
tccctcacttcccct

SEQ ID NO: 99524 - DNA, 15 bp, Homo sapiens
ttccctcacttcccc

SEQ ID NO: 99525 - DNA, 15 bp, Homo sapiens
tttccctcacttccc

SEQ ID NO: 99526 - DNA, 15 bp, Homo sapiens
ctttccctcacttcc

SEQ ID NO: 99527 - DNA, 15 bp, Homo sapiens
tctttccctcacttc

SEQ ID NO: 99528 - DNA, 15 bp, Homo sapiens
ctctttccctcactt

SEQ ID NO: 99529 - DNA, 15 bp, Homo sapiens
cctctttccctcact

SEQ ID NO: 99530 - DNA, 15 bp, Homo sapiens
acctctttccctcac

SEQ ID NO: 99531 - DNA, 15 bp, Homo sapiens
cacctctttccctca

SEQ ID NO: 99532 - DNA, 15 bp, Homo sapiens
tcacctctttccctc

SEQ ID NO: 99533 - DNA, 15 bp, Homo sapiens
atcacctctttccct

SEQ ID NO: 99534 - DNA, 15 bp, Homo sapiens
gatcacctctttccc

SEQ ID NO: 99535 - DNA, 15 bp, Homo sapiens
agatcacctctttcc

SEQ ID NO: 99536 - DNA, 15 bp, Homo sapiens
tagatcacctctttc

SEQ ID NO: 99537 - DNA, 15 bp, Homo sapiens
ctagatcacctcttt

SEQ ID NO: 99538 - DNA, 15 bp, Homo sapiens
cctagatcacctctt

SEQ ID NO: 99539 - DNA, 15 bp, Homo sapiens
ccctagatcacctct

SEQ ID NO: 99540 - DNA, 15 bp, Homo sapiens
tccctagatcacctc

SEQ ID NO: 99541 - DNA, 15 bp, Homo sapiens
gtccctagatcacct

SEQ ID NO: 99542 - DNA, 15 bp, Homo sapiens
tgtccctagatcacc

SEQ ID NO: 99543 - DNA, 15 bp, Homo sapiens
gtgtccctagatcac

SEQ ID NO: 99544 - DNA, 15 bp, Homo sapiens
cgtgtccctagatca

SEQ ID NO: 99545 - DNA, 15 bp, Homo sapiens
ccgtgtccctagatc

SEQ ID NO: 99546 - DNA, 15 bp, Homo sapiens
accgtgtccctagat

SEQ ID NO: 99547 - DNA, 15 bp, Homo sapiens
caccgtgtccctaga

SEQ ID NO: 99548 - DNA, 15 bp, Homo sapiens
acaccgtgtccctag

SEQ ID NO: 99549 - DNA, 15 bp, Homo sapiens
cacaccgtgtcccta

SEQ ID NO: 99550 - DNA, 15 bp, Homo sapiens
tcacaccgtgtccct

SEQ ID NO: 99551 - DNA, 15 bp, Homo sapiens
ttcacaccgtgtccc

SEQ ID NO: 99552 - DNA, 15 bp, Homo sapiens
attcacaccgtgtcc

SEQ ID NO: 99553 - DNA, 15 bp, Homo sapiens
cattcacaccgtgtc

SEQ ID NO: 99554 - DNA, 15 bp, Homo sapiens
tcattcacaccgtgt

SEQ ID NO: 99555 - DNA, 15 bp, Homo sapiens
ctcattcacaccgtg

SEQ ID NO: 99556 - DNA, 15 bp, Homo sapiens
cctcattcacaccgt

SEQ ID NO: 99557 - DNA, 15 bp, Homo sapiens
ccctcattcacaccg

SEQ ID NO: 99558 - DNA, 15 bp, Homo sapiens
cccctcattcacacc

SEQ ID NO: 99559 - DNA, 15 bp, Homo sapiens
ccccctcattcacac

SEQ ID NO: 99560 - DNA, 15 bp, Homo sapiens
cccccctcattcaca

SEQ ID NO: 99561 - DNA, 15 bp, Homo sapiens
ccccccctcattcac

SEQ ID NO: 99562 - DNA, 15 bp, Homo sapiens
tccccccctcattca

SEQ ID NO: 99563 - DNA, 15 bp, Homo sapiens
atccccccctcattc

SEQ ID NO: 99564 - DNA, 15 bp, Homo sapiens
catccccccctcatt

SEQ ID NO: 99565 - DNA, 15 bp, Homo sapiens
tcatccccccctcat

SEQ ID NO: 99566 - DNA, 15 bp, Homo sapiens
ctcatccccccctca

SEQ ID NO: 99567 - DNA, 15 bp, Homo sapiens
tctcatccccccctc

SEQ ID NO: 99568 - DNA, 15 bp, Homo sapiens
atctcatccccccct

SEQ ID NO: 99569 - DNA, 15 bp, Homo sapiens
gatctcatccccccc

SEQ ID NO: 99570 - DNA, 15 bp, Homo sapiens
tgatctcatcccccc

SEQ ID NO: 99571 - DNA, 15 bp, Homo sapiens
gtgatctcatccccc

SEQ ID NO: 99572 - DNA, 15 bp, Homo sapiens
tgtgatctcatcccc

SEQ ID NO: 99573 - DNA, 15 bp, Homo sapiens
ctgtgatctcatccc

SEQ ID NO: 99574 - DNA, 15 bp, Homo sapiens
cctgtgatctcatcc

SEQ ID NO: 99575 - DNA, 15 bp, Homo sapiens
ccctgtgatctcatc

SEQ ID NO: 99576 - DNA, 15 bp, Homo sapiens
accctgtgatctcat

SEQ ID NO: 99577 - DNA, 15 bp, Homo sapiens
aaccctgtgatctca

SEQ ID NO: 99578 - DNA, 15 bp, Homo sapiens
taaccctgtgatctc

SEQ ID NO: 99579 - DNA, 15 bp, Homo sapiens
ataaccctgtgatct

SEQ ID NO: 99580 - DNA, 15 bp, Homo sapiens
aataaccctgtgatc

SEQ ID NO: 99581 - DNA, 15 bp, Homo sapiens
taataaccctgtgat

SEQ ID NO: 99582 - DNA, 15 bp, Homo sapiens
gtaataaccctgtga

SEQ ID NO: 99583 - DNA, 15 bp, Homo sapiens
agtaataaccctgtg

SEQ ID NO: 99584 - DNA, 15 bp, Homo sapiens
cagtaataaccctgt

SEQ ID NO: 99585 - DNA, 15 bp, Homo sapiens
ccagtaataaccctg

SEQ ID NO: 99586 - DNA, 15 bp, Homo sapiens
cccagtaataaccct

SEQ ID NO: 99587 - DNA, 15 bp, Homo sapiens
tcccagtaataaccc

SEQ ID NO: 99588 - DNA, 15 bp, Homo sapiens
ctcccagtaataacc

SEQ ID NO: 99589 - DNA, 15 bp, Homo sapiens
tctcccagtaataac

SEQ ID NO: 99590 - DNA, 15 bp, Homo sapiens
gtctcccagtaataa

SEQ ID NO: 99591 - DNA, 15 bp, Homo sapiens
ggtctcccagtaata

SEQ ID NO: 99592 - DNA, 15 bp, Homo sapiens
gggtctcccagtaat

SEQ ID NO: 99593 - DNA, 15 bp, Homo sapiens
ggggtctcccagtaa

SEQ ID NO: 99594 - DNA, 15 bp, Homo sapiens
aggggtctcccagta

SEQ ID NO: 99595 - DNA, 15 bp, Homo sapiens
caggggtctcccagt

SEQ ID NO: 99596 - DNA, 15 bp, Homo sapiens
tcaggggtctcccag

SEQ ID NO: 99597 - DNA, 15 bp, Homo sapiens
ctcaggggtctccca

SEQ ID NO: 99598 - DNA, 15 bp, Homo sapiens
cctcaggggtctccc

SEQ ID NO: 99599 - DNA, 15 bp, Homo sapiens
ccctcaggggtctcc

SEQ ID NO: 99600 - DNA, 15 bp, Homo sapiens
tccctcaggggtctc

SEQ ID NO: 99601 - DNA, 15 bp, Homo sapiens
ttccctcaggggtct

SEQ ID NO: 99602 - DNA, 15 bp, Homo sapiens
cttccctcaggggtc

SEQ ID NO: 99603 - DNA, 15 bp, Homo sapiens
tcttccctcaggggt

SEQ ID NO: 99604 - DNA, 15 bp, Homo sapiens
atcttccctcagggg

SEQ ID NO: 99605 - DNA, 15 bp, Homo sapiens
catcttccctcaggg

SEQ ID NO: 99606 - DNA, 15 bp, Homo sapiens
ccatcttccctcagg

SEQ ID NO: 99607 - DNA, 15 bp, Homo sapiens
gccatcttccctcag

SEQ ID NO: 99608 - DNA, 15 bp, Homo sapiens
ggccatcttccctca

SEQ ID NO: 99609 - DNA, 15 bp, Homo sapiens
tggccatcttccctc

SEQ ID NO: 99610 - DNA, 15 bp, Homo sapiens
gtggccatcttccct

SEQ ID NO: 99611 - DNA, 15 bp, Homo sapiens
tgtggccatcttccc

SEQ ID NO: 99612 - DNA, 15 bp, Homo sapiens
ctgtggccatcttcc

SEQ ID NO: 99613 - DNA, 15 bp, Homo sapiens
cctgtggccatcttc

SEQ ID NO: 99614 - DNA, 15 bp, Homo sapiens
ccctgtggccatctt

SEQ ID NO: 99615 - DNA, 15 bp, Homo sapiens
tccctgtggccatct

SEQ ID NO: 99616 - DNA, 15 bp, Homo sapiens
gtccctgtggccatc

SEQ ID NO: 99617 - DNA, 15 bp, Homo sapiens
tgtccctgtggccat

SEQ ID NO: 99618 - DNA, 15 bp, Homo sapiens
ctgtccctgtggcca

SEQ ID NO: 99619 - DNA, 15 bp, Homo sapiens
cctgtccctgtggcc

SEQ ID NO: 99620 - DNA, 15 bp, Homo sapiens
tcctgtccctgtggc

SEQ ID NO: 99621 - DNA, 15 bp, Homo sapiens
gtcctgtccctgtgg

SEQ ID NO: 99622 - DNA, 15 bp, Homo sapiens
tgtcctgtccctgtg

SEQ ID NO: 99623 - DNA, 15 bp, Homo sapiens
ttgtcctgtccctgt

SEQ ID NO: 99624 - DNA, 15 bp, Homo sapiens
cttgtcctgtccctg

SEQ ID NO: 99625 - DNA, 15 bp, Homo sapiens
ccttgtcctgtccct

SEQ ID NO: 99626 - DNA, 15 bp, Homo sapiens
gccttgtcctgtccc

SEQ ID NO: 99627 - DNA, 15 bp, Homo sapiens
agccttgtcctgtcc

SEQ ID NO: 99628 - DNA, 15 bp, Homo sapiens
cagccttgtcctgtc

SEQ ID NO: 99629 - DNA, 15 bp, Homo sapiens
acagccttgtcctgt

SEQ ID NO: 99630 - DNA, 15 bp, Homo sapiens
gacagccttgtcctg

SEQ ID NO: 99631 - DNA, 15 bp, Homo sapiens
agacagccttgtcct

SEQ ID NO: 99632 - DNA, 15 bp, Homo sapiens
aagacagccttgtcc

SEQ ID NO: 99633 - DNA, 15 bp, Homo sapiens
gaagacagccttgtc

SEQ ID NO: 99634 - DNA, 15 bp, Homo sapiens
agaagacagccttgt

SEQ ID NO: 99635 - DNA, 15 bp, Homo sapiens
aagaagacagccttg

SEQ ID NO: 99636 - DNA, 15 bp, Homo sapiens
taagaagacagcctt

SEQ ID NO: 99637 - DNA, 15 bp, Homo sapiens
ttaagaagacagcct

SEQ ID NO: 99638 - DNA, 15 bp, Homo sapiens
cttaagaagacagcc

SEQ ID NO: 99639 - DNA, 15 bp, Homo sapiens
ccttaagaagacagc

SEQ ID NO: 99640 - DNA, 15 bp, Homo sapiens
cccttaagaagacag

SEQ ID NO: 99641 - DNA, 15 bp, Homo sapiens
tcccttaagaagaca

SEQ ID NO: 99642 - DNA, 15 bp, Homo sapiens
ctcccttaagaagac

SEQ ID NO: 99643 - DNA, 15 bp, Homo sapiens
cctcccttaagaaga

SEQ ID NO: 99644 - DNA, 15 bp, Homo sapiens
tcctcccttaagaag

SEQ ID NO: 99645 - DNA, 15 bp, Homo sapiens
ctcctcccttaagaa

SEQ ID NO: 99646 - DNA, 15 bp, Homo sapiens
tctcctcccttaaga

SEQ ID NO: 99647 - DNA, 15 bp, Homo sapiens
gtctcctcccttaag

SEQ ID NO: 99648 - DNA, 15 bp, Homo sapiens
ggtctcctcccttaa

SEQ ID NO: 99649 - DNA, 15 bp, Homo sapiens
tggtctcctccctta

SEQ ID NO: 99650 - DNA, 15 bp, Homo sapiens
gtggtctcctccctt

SEQ ID NO: 99651 - DNA, 15 bp, Homo sapiens
ggtggtctcctccct

SEQ ID NO: 99652 - DNA, 15 bp, Homo sapiens
gggtggtctcctccc

SEQ ID NO: 99653 - DNA, 15 bp, Homo sapiens
ggggtggtctcctcc

SEQ ID NO: 99654 - DNA, 15 bp, Homo sapiens
aggggtggtctcctc

SEQ ID NO: 99655 - DNA, 15 bp, Homo sapiens
gaggggtggtctcct

SEQ ID NO: 99656 - DNA, 15 bp, Homo sapiens
tgaggggtggtctcc

SEQ ID NO: 99657 - DNA, 15 bp, Homo sapiens
atgaggggtggtctc

SEQ ID NO: 99658 - DNA, 15 bp, Homo sapiens
tatgaggggtggtct

SEQ ID NO: 99659 - DNA, 15 bp, Homo sapiens
atatgaggggtggtc

SEQ ID NO: 99660 - DNA, 15 bp, Homo sapiens
aatatgaggggtggt

SEQ ID NO: 99661 - DNA, 15 bp, Homo sapiens
caatatgaggggtgg

SEQ ID NO: 99662 - DNA, 15 bp, Homo sapiens
acaatatgaggggtg

SEQ ID NO: 99663 - DNA, 15 bp, Homo sapiens
gacaatatgaggggt

SEQ ID NO: 99664 - DNA, 15 bp, Homo sapiens
agacaatatgagggg

SEQ ID NO: 99665 - DNA, 15 bp, Homo sapiens
aagacaatatgaggg

SEQ ID NO: 99666 - DNA, 15 bp, Homo sapiens
taagacaatatgagg

SEQ ID NO: 99667 - DNA, 15 bp, Homo sapiens
ataagacaatatgag

SEQ ID NO: 99668 - DNA, 15 bp, Homo sapiens
cataagacaatatga

SEQ ID NO: 99669 - DNA, 15 bp, Homo sapiens
gcataagacaatatg

SEQ ID NO: 99670 - DNA, 15 bp, Homo sapiens
ggcataagacaatat

SEQ ID NO: 99671 - DNA, 15 bp, Homo sapiens
gggcataagacaata

SEQ ID NO: 99672 - DNA, 15 bp, Homo sapiens
tgggcataagacaat

SEQ ID NO: 99673 - DNA, 15 bp, Homo sapiens
ttgggcataagacaa

SEQ ID NO: 99674 - DNA, 15 bp, Homo sapiens
attgggcataagaca

SEQ ID NO: 99675 - DNA, 15 bp, Homo sapiens
aattgggcataagac

SEQ ID NO: 99676 - DNA, 15 bp, Homo sapiens
aaattgggcataaga

SEQ ID NO: 99677 - DNA, 15 bp, Homo sapiens
gaaattgggcataag

SEQ ID NO: 99678 - DNA, 15 bp, Homo sapiens
agaaattgggcataa

SEQ ID NO: 99679 - DNA, 15 bp, Homo sapiens
cagaaattgggcata

SEQ ID NO: 99680 - DNA, 15 bp, Homo sapiens
gcagaaattgggcat

SEQ ID NO: 99681 - DNA, 15 bp, Homo sapiens
ggcagaaattgggca

SEQ ID NO: 99682 - DNA, 15 bp, Homo sapiens
aggcagaaattgggc

SEQ ID NO: 99683 - DNA, 15 bp, Homo sapiens
gaggcagaaattggg

SEQ ID NO: 99684 - DNA, 15 bp, Homo sapiens
ggaggcagaaattgg

SEQ ID NO: 99685 - DNA, 15 bp, Homo sapiens
tggaggcagaaattg

SEQ ID NO: 99686 - DNA, 15 bp, Homo sapiens
ttggaggcagaaatt

SEQ ID NO: 99687 - DNA, 15 bp, Homo sapiens
tttggaggcagaaat

SEQ ID NO: 99688 - DNA, 15 bp, Homo sapiens
ctttggaggcagaaa

SEQ ID NO: 99689 - DNA, 15 bp, Homo sapiens
tctttggaggcagaa

SEQ ID NO: 99690 - DNA, 15 bp, Homo sapiens
ttctttggaggcaga

SEQ ID NO: 99691 - DNA, 15 bp, Homo sapiens
tttctttggaggcag

SEQ ID NO: 99692 - DNA, 15 bp, Homo sapiens
ctttctttggaggca

SEQ ID NO: 99693 - DNA, 15 bp, Homo sapiens
tctttctttggaggc

SEQ ID NO: 99694 - DNA, 15 bp, Homo sapiens
ttctttctttggagg

SEQ ID NO: 99695 - DNA, 15 bp, Homo sapiens
tttctttctttggag

SEQ ID NO: 99696 - DNA, 15 bp, Homo sapiens
ttttctttctttgga

SEQ ID NO: 99697 - DNA, 15 bp, Homo sapiens
tttttctttctttgg

SEQ ID NO: 99698 - DNA, 15 bp, Homo sapiens
ctttttctttctttg

SEQ ID NO: 99699 - DNA, 15 bp, Homo sapiens
actttttctttcttt

SEQ ID NO: 99700 - DNA, 15 bp, Homo sapiens
tactttttctttctt

SEQ ID NO: 99701 - DNA, 15 bp, Homo sapiens
ttactttttctttct

SEQ ID NO: 99702 - DNA, 15 bp, Homo sapiens
tttactttttctttc

SEQ ID NO: 99703 - DNA, 15 bp, Homo sapiens
ttttactttttcttt

SEQ ID NO: 99704 - DNA, 15 bp, Homo sapiens
tttttactttttctt

SEQ ID NO: 99705 - DNA, 15 bp, Homo sapiens
gtttttactttttct

SEQ ID NO: 99706 - DNA, 15 bp, Homo sapiens
agtttttactttttc

SEQ ID NO: 99707 - DNA, 15 bp, Homo sapiens
tagtttttacttttt

SEQ ID NO: 99708 - DNA, 15 bp, Homo sapiens
ttagtttttactttt

SEQ ID NO: 99709 - DNA, 15 bp, Homo sapiens
tttagtttttacttt

SEQ ID NO: 99710 - DNA, 15 bp, Homo sapiens
ttttagtttttactt

SEQ ID NO: 99711 - DNA, 15 bp, Homo sapiens
cttttagtttttact

SEQ ID NO: 99712 - DNA, 15 bp, Homo sapiens
ccttttagtttttac

SEQ ID NO: 99713 - DNA, 15 bp, Homo sapiens
gccttttagttttta

SEQ ID NO: 99714 - DNA, 15 bp, Homo sapiens
tgccttttagttttt

SEQ ID NO: 99715 - DNA, 15 bp, Homo sapiens
ctgccttttagtttt

SEQ ID NO: 99716 - DNA, 15 bp, Homo sapiens
tctgccttttagttt

SEQ ID NO: 99717 - DNA, 15 bp, Homo sapiens
ttctgccttttagtt

SEQ ID NO: 99718 - DNA, 15 bp, Homo sapiens
tttctgccttttagt

SEQ ID NO: 99719 - DNA, 15 bp, Homo sapiens
atttctgccttttag

SEQ ID NO: 99720 - DNA, 15 bp, Homo sapiens
catttctgcctttta

SEQ ID NO: 99721 - DNA, 15 bp, Homo sapiens
tcatttctgcctttt

SEQ ID NO: 99722 - DNA, 15 bp, Homo sapiens
ttcatttctgccttt

SEQ ID NO: 99723 - DNA, 15 bp, Homo sapiens
tttcatttctgcctt

SEQ ID NO: 99724 - DNA, 15 bp, Homo sapiens
atttcatttctgcct

SEQ ID NO: 99725 - DNA, 15 bp, Homo sapiens
gatttcatttctgcc

SEQ ID NO: 99726 - DNA, 15 bp, Homo sapiens
ggatttcatttctgc

SEQ ID NO: 99727 - DNA, 15 bp, Homo sapiens
tggatttcatttctg

SEQ ID NO: 99728 - DNA, 15 bp, Homo sapiens
gtggatttcatttct

SEQ ID NO: 99729 - DNA, 15 bp, Homo sapiens
tgtggatttcatttc

SEQ ID NO: 99730 - DNA, 15 bp, Homo sapiens
ttgtggatttcattt

SEQ ID NO: 99731 - DNA, 15 bp, Homo sapiens
cttgtggatttcatt

SEQ ID NO: 99732 - DNA, 15 bp, Homo sapiens
gcttgtggatttcat

SEQ ID NO: 99733 - DNA, 15 bp, Homo sapiens
tgcttgtggatttca

SEQ ID NO: 99734 - DNA, 15 bp, Homo sapiens
ctgcttgtggatttc

SEQ ID NO: 99735 - DNA, 15 bp, Homo sapiens
tctgcttgtggattt

SEQ ID NO: 99736 - DNA, 15 bp, Homo sapiens
gtctgcttgtggatt

SEQ ID NO: 99737 - DNA, 15 bp, Homo sapiens
tgtctgcttgtggat

SEQ ID NO: 99738 - DNA, 15 bp, Homo sapiens
ctgtctgcttgtgga

SEQ ID NO: 99739 - DNA, 15 bp, Homo sapiens
gctgtctgcttgtgg

SEQ ID NO: 99740 - DNA, 15 bp, Homo sapiens
ggctgtctgcttgtg

SEQ ID NO: 99741 - DNA, 15 bp, Homo sapiens
gggctgtctgcttgt

SEQ ID NO: 99742 - DNA, 15 bp, Homo sapiens
cgggctgtctgcttg

SEQ ID NO: 99743 - DNA, 15 bp, Homo sapiens
gcgggctgtctgctt

SEQ ID NO: 99744 - DNA, 15 bp, Homo sapiens
cgcgggctgtctgct

SEQ ID NO: 99745 - DNA, 15 bp, Homo sapiens
gcgcgggctgtctgc

SEQ ID NO: 99746 - DNA, 15 bp, Homo sapiens
ggcgcgggctgtctg

SEQ ID NO: 99747 - DNA, 15 bp, Homo sapiens
tggcgcgggctgtct

SEQ ID NO: 99748 - DNA, 15 bp, Homo sapiens
gtggcgcgggctgtc

SEQ ID NO: 99749 - DNA, 15 bp, Homo sapiens
tgtggcgcgggctgt

SEQ ID NO: 99750 - DNA, 15 bp, Homo sapiens
gtgtggcgcgggctg

SEQ ID NO: 99751 - DNA, 15 bp, Homo sapiens
ggtgtggcgcgggct

SEQ ID NO: 99752 - DNA, 15 bp, Homo sapiens
gggtgtggcgcgggc

SEQ ID NO: 99753 - DNA, 15 bp, Homo sapiens
agggtgtggcgcggg

SEQ ID NO: 99754 - DNA, 15 bp, Homo sapiens
cagggtgtggcgcgg

SEQ ID NO: 99755 - DNA, 15 bp, Homo sapiens
ccagggtgtggcgcg

SEQ ID NO: 99756 - DNA, 15 bp, Homo sapiens
cccagggtgtggcgc

SEQ ID NO: 99757 - DNA, 15 bp, Homo sapiens
gcccagggtgtggcg

SEQ ID NO: 99758 - DNA, 15 bp, Homo sapiens
ggcccagggtgtggc

SEQ ID NO: 99759 - DNA, 15 bp, Homo sapiens
aggcccagggtgtgg

SEQ ID NO: 99760 - DNA, 15 bp, Homo sapiens
caggcccagggtgtg

SEQ ID NO: 99761 - DNA, 15 bp, Homo sapiens
ccaggcccagggtgt

SEQ ID NO: 99762 - DNA, 15 bp, Homo sapiens
accaggcccagggtg

SEQ ID NO: 99763 - DNA, 15 bp, Homo sapiens
caccaggcccagggt

SEQ ID NO: 99764 - DNA, 15 bp, Homo sapiens
ccaccaggcccaggg

SEQ ID NO: 99765 - DNA, 15 bp, Homo sapiens
accaccaggcccagg

SEQ ID NO: 99766 - DNA, 15 bp, Homo sapiens
aaccaccaggcccag

SEQ ID NO: 99767 - DNA, 15 bp, Homo sapiens
taaccaccaggccca

SEQ ID NO: 99768 - DNA, 15 bp, Homo sapiens
ttaaccaccaggccc

SEQ ID NO: 99769 - DNA, 15 bp, Homo sapiens
tttaaccaccaggcc

SEQ ID NO: 99770 - DNA, 15 bp, Homo sapiens
ctttaaccaccaggc

SEQ ID NO: 99771 - DNA, 15 bp, Homo sapiens
tctttaaccaccagg

SEQ ID NO: 99772 - DNA, 15 bp, Homo sapiens
atctttaaccaccag

SEQ ID NO: 99773 - DNA, 15 bp, Homo sapiens
aatctttaaccacca

SEQ ID NO: 99774 - DNA, 15 bp, Homo sapiens
caatctttaaccacc

SEQ ID NO: 99775 - DNA, 15 bp, Homo sapiens
tcaatctttaaccac

SEQ ID NO: 99776 - DNA, 15 bp, Homo sapiens
gtcaatctttaacca

SEQ ID NO: 99777 - DNA, 15 bp, Homo sapiens
ggtcaatctttaacc

SEQ ID NO: 99778 - DNA, 15 bp, Homo sapiens
gggtcaatctttaac

SEQ ID NO: 99779 - DNA, 15 bp, Homo sapiens
ggggtcaatctttaa

SEQ ID NO: 99780 - DNA, 15 bp, Homo sapiens
aggggtcaatcttta

SEQ ID NO: 99781 - DNA, 15 bp, Homo sapiens
caggggtcaatcttt

SEQ ID NO: 99782 - DNA, 15 bp, Homo sapiens
tcaggggtcaatctt

SEQ ID NO: 99783 - DNA, 15 bp, Homo sapiens
gtcaggggtcaatct

SEQ ID NO: 99784 - DNA, 15 bp, Homo sapiens
ggtcaggggtcaatc

SEQ ID NO: 99785 - DNA, 15 bp, Homo sapiens
aggtcaggggtcaat

SEQ ID NO: 99786 - DNA, 15 bp, Homo sapiens
taggtcaggggtcaa

SEQ ID NO: 99787 - DNA, 15 bp, Homo sapiens
ttaggtcaggggtca

SEQ ID NO: 99788 - DNA, 15 bp, Homo sapiens
attaggtcaggggtc

SEQ ID NO: 99789 - DNA, 15 bp, Homo sapiens
gattaggtcaggggt

SEQ ID NO: 99790 - DNA, 15 bp, Homo sapiens
ggattaggtcagggg

SEQ ID NO: 99791 - DNA, 15 bp, Homo sapiens
cggattaggtcaggg

SEQ ID NO: 99792 - DNA, 15 bp, Homo sapiens
acggattaggtcagg

SEQ ID NO: 99793 - DNA, 15 bp, Homo sapiens
aacggattaggtcag

SEQ ID NO: 99794 - DNA, 15 bp, Homo sapiens
taacggattaggtca

SEQ ID NO: 99795 - DNA, 15 bp, Homo sapiens
ctaacggattaggtc

SEQ ID NO: 99796 - DNA, 15 bp, Homo sapiens
cctaacggattaggt

SEQ ID NO: 99797 - DNA, 15 bp, Homo sapiens
acctaacggattagg

SEQ ID NO: 99798 - DNA, 15 bp, Homo sapiens
aacctaacggattag

SEQ ID NO: 99799 - DNA, 15 bp, Homo sapiens
taacctaacggatta

SEQ ID NO: 99800 - DNA, 15 bp, Homo sapiens
ataacctaacggatt

SEQ ID NO: 99801 - DNA, 15 bp, Homo sapiens
gataacctaacggat

SEQ ID NO: 99802 - DNA, 15 bp, Homo sapiens
agataacctaacgga

SEQ ID NO: 99803 - DNA, 15 bp, Homo sapiens
tagataacctaacgg

SEQ ID NO: 99804 - DNA, 15 bp, Homo sapiens
atagataacctaacg

SEQ ID NO: 99805 - DNA, 15 bp, Homo sapiens
tatagataacctaac

SEQ ID NO: 99806 - DNA, 15 bp, Homo sapiens
ctatagataacctaa

SEQ ID NO: 99807 - DNA, 15 bp, Homo sapiens
tctatagataaccta

SEQ ID NO: 99808 - DNA, 15 bp, Homo sapiens
atctatagataacct

SEQ ID NO: 99809 - DNA, 15 bp, Homo sapiens
aatctatagataacc

SEQ ID NO: 99810 - DNA, 15 bp, Homo sapiens
taatctatagataac

SEQ ID NO: 99811 - DNA, 15 bp, Homo sapiens
gtaatctatagataa

SEQ ID NO: 99812 - DNA, 15 bp, Homo sapiens
tgtaatctatagata

SEQ ID NO: 99813 - DNA, 15 bp, Homo sapiens
ctgtaatctatagat

SEQ ID NO: 99814 - DNA, 15 bp, Homo sapiens
tctgtaatctataga

SEQ ID NO: 99815 - DNA, 15 bp, Homo sapiens
gtctgtaatctatag

SEQ ID NO: 99816 - DNA, 15 bp, Homo sapiens
tgtctgtaatctata

SEQ ID NO: 99817 - DNA, 15 bp, Homo sapiens
atgtctgtaatctat

SEQ ID NO: 99818 - DNA, 15 bp, Homo sapiens
aatgtctgtaatcta

SEQ ID NO: 99819 - DNA, 15 bp, Homo sapiens
caatgtctgtaatct

SEQ ID NO: 99820 - DNA, 15 bp, Homo sapiens
acaatgtctgtaatc

SEQ ID NO: 99821 - DNA, 15 bp, Homo sapiens
tacaatgtctgtaat

SEQ ID NO: 99822 - DNA, 15 bp, Homo sapiens
atacaatgtctgtaa

SEQ ID NO: 99823 - DNA, 15 bp, Homo sapiens
tatacaatgtctgta

SEQ ID NO: 99824 - DNA, 15 bp, Homo sapiens
ctatacaatgtctgt

SEQ ID NO: 99825 - DNA, 15 bp, Homo sapiens
tctatacaatgtctg

SEQ ID NO: 99826 - DNA, 15 bp, Homo sapiens
ttctatacaatgtct

SEQ ID NO: 99827 - DNA, 15 bp, Homo sapiens
tttctatacaatgtc

SEQ ID NO: 99828 - DNA, 15 bp, Homo sapiens
ttttctatacaatgt

SEQ ID NO: 99829 - DNA, 15 bp, Homo sapiens
cttttctatacaatg

SEQ ID NO: 99830 - DNA, 15 bp, Homo sapiens
gcttttctatacaat

SEQ ID NO: 99831 - DNA, 15 bp, Homo sapiens
tgcttttctatacaa

SEQ ID NO: 99832 - DNA, 15 bp, Homo sapiens
gtgcttttctataca

SEQ ID NO: 99833 - DNA, 15 bp, Homo sapiens
agtgcttttctatac

SEQ ID NO: 99834 - DNA, 15 bp, Homo sapiens
cagtgcttttctata

SEQ ID NO: 99835 - DNA, 15 bp, Homo sapiens
acagtgcttttctat

SEQ ID NO: 99836 - DNA, 15 bp, Homo sapiens
cacagtgcttttcta

SEQ ID NO: 99837 - DNA, 15 bp, Homo sapiens
tcacagtgcttttct

SEQ ID NO: 99838 - DNA, 15 bp, Homo sapiens
ttcacagtgcttttc

SEQ ID NO: 99839 - DNA, 15 bp, Homo sapiens
tttcacagtgctttt

SEQ ID NO: 99840 - DNA, 15 bp, Homo sapiens
ttttcacagtgcttt

SEQ ID NO: 99841 - DNA, 15 bp, Homo sapiens
attttcacagtgctt

SEQ ID NO: 99842 - DNA, 15 bp, Homo sapiens
gattttcacagtgct

SEQ ID NO: 99843 - DNA, 15 bp, Homo sapiens
ggattttcacagtgc

SEQ ID NO: 99844 - DNA, 15 bp, Homo sapiens
gggattttcacagtg

SEQ ID NO: 99845 - DNA, 15 bp, Homo sapiens
agggattttcacagt

SEQ ID NO: 99846 - DNA, 15 bp, Homo sapiens
tagggattttcacag

SEQ ID NO: 99847 - DNA, 15 bp, Homo sapiens
atagggattttcaca

SEQ ID NO: 99848 - DNA, 15 bp, Homo sapiens
aatagggattttcac

SEQ ID NO: 99849 - DNA, 15 bp, Homo sapiens
gaatagggattttca

SEQ ID NO: 99850 - DNA, 15 bp, Homo sapiens
agaatagggattttc

SEQ ID NO: 99851 - DNA, 15 bp, Homo sapiens
cagaatagggatttt

SEQ ID NO: 99852 - DNA, 15 bp, Homo sapiens
acagaatagggattt

SEQ ID NO: 99853 - DNA, 15 bp, Homo sapiens
aacagaatagggatt

SEQ ID NO: 99854 - DNA, 15 bp, Homo sapiens
aaacagaatagggat

SEQ ID NO: 99855 - DNA, 15 bp, Homo sapiens
aaaacagaataggga

SEQ ID NO: 99856 - DNA, 15 bp, Homo sapiens
caaaacagaataggg

SEQ ID NO: 99857 - DNA, 15 bp, Homo sapiens
acaaaacagaatagg

SEQ ID NO: 99858 - DNA, 15 bp, Homo sapiens
aacaaaacagaatag

SEQ ID NO: 99859 - DNA, 15 bp, Homo sapiens
gaacaaaacagaata

SEQ ID NO: 99860 - DNA, 15 bp, Homo sapiens
ggaacaaaacagaat

SEQ ID NO: 99861 - DNA, 15 bp, Homo sapiens
cggaacaaaacagaa

SEQ ID NO: 99862 - DNA, 15 bp, Homo sapiens
tcggaacaaaacaga

SEQ ID NO: 99863 - DNA, 15 bp, Homo sapiens
atcggaacaaaacag

SEQ ID NO: 99864 - DNA, 15 bp, Homo sapiens
gatcggaacaaaaca

SEQ ID NO: 99865 - DNA, 15 bp, Homo sapiens
agatcggaacaaaac

SEQ ID NO: 99866 - DNA, 15 bp, Homo sapiens
tagatcggaacaaaa

SEQ ID NO: 99867 - DNA, 15 bp, Homo sapiens
ttagatcggaacaaa

SEQ ID NO: 99868 - DNA, 15 bp, Homo sapiens
attagatcggaacaa

SEQ ID NO: 99869 - DNA, 15 bp, Homo sapiens
aattagatcggaaca

SEQ ID NO: 99870 - DNA, 15 bp, Homo sapiens
taattagatcggaac

SEQ ID NO: 99871 - DNA, 15 bp, Homo sapiens
gtaattagatcggaa

SEQ ID NO: 99872 - DNA, 15 bp, Homo sapiens
ggtaattagatcgga

SEQ ID NO: 99873 - DNA, 15 bp, Homo sapiens
cggtaattagatcgg

SEQ ID NO: 99874 - DNA, 15 bp, Homo sapiens
ccggtaattagatcg

SEQ ID NO: 99875 - DNA, 15 bp, Homo sapiens
accggtaattagatc

SEQ ID NO: 99876 - DNA, 15 bp, Homo sapiens
caccggtaattagat

SEQ ID NO: 99877 - DNA, 15 bp, Homo sapiens
gcaccggtaattaga

SEQ ID NO: 99878 - DNA, 15 bp, Homo sapiens
tgcaccggtaattag

SEQ ID NO: 99879 - DNA, 15 bp, Homo sapiens
atgcaccggtaatta

SEQ ID NO: 99880 - DNA, 15 bp, Homo sapiens
catgcaccggtaatt

SEQ ID NO: 99881 - DNA, 15 bp, Homo sapiens
gcatgcaccggtaat

SEQ ID NO: 99882 - DNA, 15 bp, Homo sapiens
tgcatgcaccggtaa

SEQ ID NO: 99883 - DNA, 15 bp, Homo sapiens
ctgcatgcaccggta

SEQ ID NO: 99884 - DNA, 15 bp, Homo sapiens
gctgcatgcaccggt

SEQ ID NO: 99885 - DNA, 15 bp, Homo sapiens
ggctgcatgcaccgg

SEQ ID NO: 99886 - DNA, 15 bp, Homo sapiens
gggctgcatgcaccg

SEQ ID NO: 99887 - DNA, 15 bp, Homo sapiens
ggggctgcatgcacc

SEQ ID NO: 99888 - DNA, 15 bp, Homo sapiens
gggggctgcatgcac

SEQ ID NO: 99889 - DNA, 15 bp, Homo sapiens
tgggggctgcatgca

SEQ ID NO: 99890 - DNA, 15 bp, Homo sapiens
ctgggggctgcatgc

SEQ ID NO: 99891 - DNA, 15 bp, Homo sapiens
actgggggctgcatg

SEQ ID NO: 99892 - DNA, 15 bp, Homo sapiens
gactgggggctgcat

SEQ ID NO: 99893 - DNA, 15 bp, Homo sapiens
tgactgggggctgca

SEQ ID NO: 99894 - DNA, 15 bp, Homo sapiens
gtgactgggggctgc

SEQ ID NO: 99895 - DNA, 15 bp, Homo sapiens
cgtgactgggggctg

SEQ ID NO: 99896 - DNA, 15 bp, Homo sapiens
gcgtgactgggggct

SEQ ID NO: 99897 - DNA, 15 bp, Homo sapiens
tgcgtgactgggggc

SEQ ID NO: 99898 - DNA, 15 bp, Homo sapiens
atgcgtgactggggg

SEQ ID NO: 99899 - DNA, 15 bp, Homo sapiens
gatgcgtgactgggg

SEQ ID NO: 99900 - DNA, 15 bp, Homo sapiens
ggatgcgtgactggg

SEQ ID NO: 99901 - DNA, 15 bp, Homo sapiens
gggatgcgtgactgg

SEQ ID NO: 99902 - DNA, 15 bp, Homo sapiens
ggggatgcgtgactg

SEQ ID NO: 99903 - DNA, 15 bp, Homo sapiens
aggggatgcgtgact

SEQ ID NO: 99904 - DNA, 15 bp, Homo sapiens
caggggatgcgtgac

SEQ ID NO: 99905 - DNA, 15 bp, Homo sapiens
gcaggggatgcgtga

SEQ ID NO: 99906 - DNA, 15 bp, Homo sapiens
agcaggggatgcgtg

SEQ ID NO: 99907 - DNA, 15 bp, Homo sapiens
aagcaggggatgcgt

SEQ ID NO: 99908 - DNA, 15 bp, Homo sapiens
caagcaggggatgcg

SEQ ID NO: 99909 - DNA, 15 bp, Homo sapiens
acaagcaggggatgc

SEQ ID NO: 99910 - DNA, 15 bp, Homo sapiens
aacaagcaggggatg

SEQ ID NO: 99911 - DNA, 15 bp, Homo sapiens
gaacaagcaggggat

SEQ ID NO: 99912 - DNA, 15 bp, Homo sapiens
tgaacaagcagggga

SEQ ID NO: 99913 - DNA, 15 bp, Homo sapiens
ttgaacaagcagggg

SEQ ID NO: 99914 - DNA, 15 bp, Homo sapiens
attgaacaagcaggg

SEQ ID NO: 99915 - DNA, 15 bp, Homo sapiens
gattgaacaagcagg

SEQ ID NO: 99916 - DNA, 15 bp, Homo sapiens
cgattgaacaagcag

SEQ ID NO: 99917 - DNA, 15 bp, Homo sapiens
tcgattgaacaagca

SEQ ID NO: 99918 - DNA, 15 bp, Homo sapiens
atcgattgaacaagc

SEQ ID NO: 99919 - DNA, 15 bp, Homo sapiens
gatcgattgaacaag

SEQ ID NO: 99920 - DNA, 15 bp, Homo sapiens
tgatcgattgaacaa

SEQ ID NO: 99921 - DNA, 15 bp, Homo sapiens
gtgatcgattgaaca

SEQ ID NO: 99922 - DNA, 15 bp, Homo sapiens
cgtgatcgattgaac

SEQ ID NO: 99923 - DNA, 15 bp, Homo sapiens
tcgtgatcgattgaa

SEQ ID NO: 99924 - DNA, 15 bp, Homo sapiens
gtcgtgatcgattga

SEQ ID NO: 99925 - DNA, 15 bp, Homo sapiens
ggtcgtgatcgattg

SEQ ID NO: 99926 - DNA, 15 bp, Homo sapiens
gggtcgtgatcgatt

SEQ ID NO: 99927 - DNA, 15 bp, Homo sapiens
agggtcgtgatcgat

SEQ ID NO: 99928 - DNA, 15 bp, Homo sapiens
gagggtcgtgatcga

SEQ ID NO: 99929 - DNA, 15 bp, Homo sapiens
agagggtcgtgatcg

SEQ ID NO: 99930 - DNA, 15 bp, Homo sapiens
gagagggtcgtgatc

SEQ ID NO: 99931 - DNA, 15 bp, Homo sapiens
tgagagggtcgtgat

SEQ ID NO: 99932 - DNA, 15 bp, Homo sapiens
gtgagagggtcgtga

SEQ ID NO: 99933 - DNA, 15 bp, Homo sapiens
cgtgagagggtcgtg

SEQ ID NO: 99934 - DNA, 15 bp, Homo sapiens
acgtgagagggtcgt

SEQ ID NO: 99935 - DNA, 15 bp, Homo sapiens
cacgtgagagggtcg

SEQ ID NO: 99936 - DNA, 15 bp, Homo sapiens
gcacgtgagagggtc

SEQ ID NO: 99937 - DNA, 15 bp, Homo sapiens
tgcacgtgagagggt

SEQ ID NO: 99938 - DNA, 15 bp, Homo sapiens
gtgcacgtgagaggg

SEQ ID NO: 99939 - DNA, 15 bp, Homo sapiens
ggtgcacgtgagagg

SEQ ID NO: 99940 - DNA, 15 bp, Homo sapiens
gggtgcacgtgagag

SEQ ID NO: 99941 - DNA, 15 bp, Homo sapiens
tgggtgcacgtgaga

SEQ ID NO: 99942 - DNA, 15 bp, Homo sapiens
gtgggtgcacgtgag

SEQ ID NO: 99943 - DNA, 15 bp, Homo sapiens
agtgggtgcacgtga

SEQ ID NO: 99944 - DNA, 15 bp, Homo sapiens
aagtgggtgcacgtg

SEQ ID NO: 99945 - DNA, 15 bp, Homo sapiens
taagtgggtgcacgt

SEQ ID NO: 99946 - DNA, 15 bp, Homo sapiens
ctaagtgggtgcacg

SEQ ID NO: 99947 - DNA, 15 bp, Homo sapiens
tctaagtgggtgcac

SEQ ID NO: 99948 - DNA, 15 bp, Homo sapiens
ctctaagtgggtgca

SEQ ID NO: 99949 - DNA, 15 bp, Homo sapiens
actctaagtgggtgc

SEQ ID NO: 99950 - DNA, 15 bp, Homo sapiens
aactctaagtgggtg

SEQ ID NO: 99951 - DNA, 15 bp, Homo sapiens
caactctaagtgggt

SEQ ID NO: 99952 - DNA, 15 bp, Homo sapiens
acaactctaagtggg

SEQ ID NO: 99953 - DNA, 15 bp, Homo sapiens
cacaactctaagtgg

SEQ ID NO: 99954 - DNA, 15 bp, Homo sapiens
tcacaactctaagtg

SEQ ID NO: 99955 - DNA, 15 bp, Homo sapiens
ctcacaactctaagt

SEQ ID NO: 99956 - DNA, 15 bp, Homo sapiens
gctcacaactctaag

SEQ ID NO: 99957 - DNA, 15 bp, Homo sapiens
ggctcacaactctaa

SEQ ID NO: 99958 - DNA, 15 bp, Homo sapiens
gggctcacaactcta

SEQ ID NO: 99959 - DNA, 15 bp, Homo sapiens
agggctcacaactct

SEQ ID NO: 99960 - DNA, 15 bp, Homo sapiens
aagggctcacaactc

SEQ ID NO: 99961 - DNA, 15 bp, Homo sapiens
taagggctcacaact

SEQ ID NO: 99962 - DNA, 15 bp, Homo sapiens
ttaagggctcacaac

SEQ ID NO: 99963 - DNA, 15 bp, Homo sapiens
tttaagggctcacaa

SEQ ID NO: 99964 - DNA, 15 bp, Homo sapiens
ttttaagggctcaca

SEQ ID NO: 99965 - DNA, 15 bp, Homo sapiens
cttttaagggctcac

SEQ ID NO: 99966 - DNA, 15 bp, Homo sapiens
ccttttaagggctca

SEQ ID NO: 99967 - DNA, 15 bp, Homo sapiens
tccttttaagggctc

SEQ ID NO: 99968 - DNA, 15 bp, Homo sapiens
ttccttttaagggct

SEQ ID NO: 99969 - DNA, 15 bp, Homo sapiens
gttccttttaagggc

SEQ ID NO: 99970 - DNA, 15 bp, Homo sapiens
tgttccttttaaggg

SEQ ID NO: 99971 - DNA, 15 bp, Homo sapiens
ctgttccttttaagg

SEQ ID NO: 99972 - DNA, 15 bp, Homo sapiens
cctgttccttttaag

SEQ ID NO: 99973 - DNA, 15 bp, Homo sapiens
ccctgttccttttaa

SEQ ID NO: 99974 - DNA, 15 bp, Homo sapiens
tccctgttcctttta

SEQ ID NO: 99975 - DNA, 15 bp, Homo sapiens
atccctgttcctttt

SEQ ID NO: 99976 - DNA, 15 bp, Homo sapiens
aatccctgttccttt

SEQ ID NO: 99977 - DNA, 15 bp, Homo sapiens
caatccctgttcctt

SEQ ID NO: 99978 - DNA, 15 bp, Homo sapiens
gcaatccctgttcct

SEQ ID NO: 99979 - DNA, 15 bp, Homo sapiens
agcaatccctgttcc

SEQ ID NO: 99980 - DNA, 15 bp, Homo sapiens
gagcaatccctgttc

SEQ ID NO: 99981 - DNA, 15 bp, Homo sapiens
tgagcaatccctgtt

SEQ ID NO: 99982 - DNA, 15 bp, Homo sapiens
gtgagcaatccctgt

SEQ ID NO: 99983 - DNA, 15 bp, Homo sapiens
agtgagcaatccctg

SEQ ID NO: 99984 - DNA, 15 bp, Homo sapiens
gagtgagcaatccct

SEQ ID NO: 99985 - DNA, 15 bp, Homo sapiens
cgagtgagcaatccc

SEQ ID NO: 99986 - DNA, 15 bp, Homo sapiens
ccgagtgagcaatcc

SEQ ID NO: 99987 - DNA, 15 bp, Homo sapiens
cccgagtgagcaatc

SEQ ID NO: 99988 - DNA, 15 bp, Homo sapiens
ccccgagtgagcaat

SEQ ID NO: 99989 - DNA, 15 bp, Homo sapiens
tccccgagtgagcaa

SEQ ID NO: 99990 - DNA, 15 bp, Homo sapiens
ctccccgagtgagca

SEQ ID NO: 99991 - DNA, 15 bp, Homo sapiens
gctccccgagtgagc

SEQ ID NO: 99992 - DNA, 15 bp, Homo sapiens
agctccccgagtgag

SEQ ID NO: 99993 - DNA, 15 bp, Homo sapiens
gagctccccgagtga

SEQ ID NO: 99994 - DNA, 15 bp, Homo sapiens
cgagctccccgagtg

SEQ ID NO: 99995 - DNA, 15 bp, Homo sapiens
ccgagctccccgagt

SEQ ID NO: 99996 - DNA, 15 bp, Homo sapiens
gccgagctccccgag

SEQ ID NO: 99997 - DNA, 15 bp, Homo sapiens
agccgagctccccga

SEQ ID NO: 99998 - DNA, 15 bp, Homo sapiens
gagccgagctccccg

SEQ ID NO: 99999 - DNA, 15 bp, Homo sapiens
agagccgagctcccc

SEQ ID NO: 100000 - DNA, 15 bp, Homo sapiens
aagagccgagctccc

SEQ ID NO: 100001 - DNA, 15 bp, Homo sapiens
caagagccgagctcc

SEQ ID NO: 100002 - DNA, 15 bp, Homo sapiens
tcaagagccgagctc

SEQ ID NO: 100003 - DNA, 15 bp, Homo sapiens
ctcaagagccgagct

SEQ ID NO: 100004 - DNA, 15 bp, Homo sapiens
tctcaagagccgagc

SEQ ID NO: 100005 - DNA, 15 bp, Homo sapiens
gtctcaagagccgag

SEQ ID NO: 100006 - DNA, 15 bp, Homo sapiens
tgtctcaagagccga

SEQ ID NO: 100007 - DNA, 15 bp, Homo sapiens
ctgtctcaagagccg

SEQ ID NO: 100008 - DNA, 15 bp, Homo sapiens
cctgtctcaagagcc

SEQ ID NO: 100009 - DNA, 15 bp, Homo sapiens
tcctgtctcaagagc

SEQ ID NO: 100010 - DNA, 15 bp, Homo sapiens
ttcctgtctcaagag

SEQ ID NO: 100011 - DNA, 15 bp, Homo sapiens
attcctgtctcaaga

SEQ ID NO: 100012 - DNA, 15 bp, Homo sapiens
gattcctgtctcaag

SEQ ID NO: 100013 - DNA, 15 bp, Homo sapiens
agattcctgtctcaa

SEQ ID NO: 100014 - DNA, 15 bp, Homo sapiens
aagattcctgtctca

SEQ ID NO: 100015 - DNA, 15 bp, Homo sapiens
caagattcctgtctc

SEQ ID NO: 100016 - DNA, 15 bp, Homo sapiens
gcaagattcctgtct

SEQ ID NO: 100017 - DNA, 15 bp, Homo sapiens
ggcaagattcctgtc

SEQ ID NO: 100018 - DNA, 15 bp, Homo sapiens
gggcaagattcctgt

SEQ ID NO: 100019 - DNA, 15 bp, Homo sapiens
tgggcaagattcctg

SEQ ID NO: 100020 - DNA, 15 bp, Homo sapiens
atgggcaagattcct

SEQ ID NO: 100021 - DNA, 15 bp, Homo sapiens
aatgggcaagattcc

SEQ ID NO: 100022 - DNA, 15 bp, Homo sapiens
gaatgggcaagattc

SEQ ID NO: 100023 - DNA, 15 bp, Homo sapiens
ggaatgggcaagatt

SEQ ID NO: 100024 - DNA, 15 bp, Homo sapiens
gggaatgggcaagat

SEQ ID NO: 100025 - DNA, 15 bp, Homo sapiens
ggggaatgggcaaga

SEQ ID NO: 100026 - DNA, 15 bp, Homo sapiens
cggggaatgggcaag

SEQ ID NO: 100027 - DNA, 15 bp, Homo sapiens
tcggggaatgggcaa

SEQ ID NO: 100028 - DNA, 15 bp, Homo sapiens
ttcggggaatgggca

SEQ ID NO: 100029 - DNA, 15 bp, Homo sapiens
gttcggggaatgggc

SEQ ID NO: 100030 - DNA, 15 bp, Homo sapiens
cgttcggggaatggg

SEQ ID NO: 100031 - DNA, 15 bp, Homo sapiens
tcgttcggggaatgg

SEQ ID NO: 100032 - DNA, 15 bp, Homo sapiens
ttcgttcggggaatg

SEQ ID NO: 100033 - DNA, 15 bp, Homo sapiens
attcgttcggggaat

SEQ ID NO: 100034 - DNA, 15 bp, Homo sapiens
tattcgttcggggaa

SEQ ID NO: 100035 - DNA, 15 bp, Homo sapiens
ttattcgttcgggga

SEQ ID NO: 100036 - DNA, 15 bp, Homo sapiens
tttattcgttcgggg

SEQ ID NO: 100037 - DNA, 15 bp, Homo sapiens
gtttattcgttcggg

SEQ ID NO: 100038 - DNA, 15 bp, Homo sapiens
ggtttattcgttcgg

SEQ ID NO: 100039 - DNA, 15 bp, Homo sapiens
gggtttattcgttcg

SEQ ID NO: 100040 - DNA, 15 bp, Homo sapiens
ggggtttattcgttc

SEQ ID NO: 100041 - DNA, 15 bp, Homo sapiens
aggggtttattcgtt

SEQ ID NO: 100042 - DNA, 15 bp, Homo sapiens
aaggggtttattcgt

SEQ ID NO: 100043 - DNA, 15 bp, Homo sapiens
gaaggggtttattcg

SEQ ID NO: 100044 - DNA, 15 bp, Homo sapiens
ggaaggggtttattc

SEQ ID NO: 100045 - DNA, 15 bp, Homo sapiens
aggaaggggtttatt

SEQ ID NO: 100046 - DNA, 15 bp, Homo sapiens
aaggaaggggtttat

SEQ ID NO: 100047 - DNA, 15 bp, Homo sapiens
taaggaaggggttta

SEQ ID NO: 100048 - DNA, 15 bp, Homo sapiens
ttaaggaaggggttt

SEQ ID NO: 100049 - DNA, 15 bp, Homo sapiens
gttaaggaaggggtt

SEQ ID NO: 100050 - DNA, 15 bp, Homo sapiens
agttaaggaaggggt

SEQ ID NO: 100051 - DNA, 15 bp, Homo sapiens
gagttaaggaagggg

SEQ ID NO: 100052 - DNA, 15 bp, Homo sapiens
tgagttaaggaaggg

SEQ ID NO: 100053 - DNA, 15 bp, Homo sapiens
ctgagttaaggaagg

SEQ ID NO: 100054 - DNA, 15 bp, Homo sapiens
gctgagttaaggaag

SEQ ID NO: 100055 - DNA, 15 bp, Homo sapiens
cgctgagttaaggaa

SEQ ID NO: 100056 - DNA, 15 bp, Homo sapiens
acgctgagttaagga

SEQ ID NO: 100057 - DNA, 15 bp, Homo sapiens
gacgctgagttaagg

SEQ ID NO: 100058 - DNA, 15 bp, Homo sapiens
agacgctgagttaag

SEQ ID NO: 100059 - DNA, 15 bp, Homo sapiens
cagacgctgagttaa

SEQ ID NO: 100060 - DNA, 15 bp, Homo sapiens
tcagacgctgagtta

SEQ ID NO: 100061 - DNA, 15 bp, Homo sapiens
ctcagacgctgagtt

SEQ ID NO: 100062 - DNA, 15 bp, Homo sapiens
cctcagacgctgagt

SEQ ID NO: 100063 - DNA, 15 bp, Homo sapiens
tcctcagacgctgag

SEQ ID NO: 100064 - DNA, 15 bp, Homo sapiens
ttcctcagacgctga

SEQ ID NO: 100065 - DNA, 15 bp, Homo sapiens
attcctcagacgctg

SEQ ID NO: 100066 - DNA, 15 bp, Homo sapiens
aattcctcagacgct

SEQ ID NO: 100067 - DNA, 15 bp, Homo sapiens
aaattcctcagacgc

SEQ ID NO: 100068 - DNA, 15 bp, Homo sapiens
aaaattcctcagacg

SEQ ID NO: 100069 - DNA, 15 bp, Homo sapiens
caaaattcctcagac

SEQ ID NO: 100070 - DNA, 15 bp, Homo sapiens
acaaaattcctcaga

SEQ ID NO: 100071 - DNA, 15 bp, Homo sapiens
gacaaaattcctcag

SEQ ID NO: 100072 - DNA, 15 bp, Homo sapiens
agacaaaattcctca

SEQ ID NO: 100073 - DNA, 15 bp, Homo sapiens
cagacaaaattcctc

SEQ ID NO: 100074 - DNA, 15 bp, Homo sapiens
gcagacaaaattcct

SEQ ID NO: 100075 - DNA, 15 bp, Homo sapiens
cgcagacaaaattcc

SEQ ID NO: 100076 - DNA, 15 bp, Homo sapiens
ccgcagacaaaattc

SEQ ID NO: 100077 - DNA, 15 bp, Homo sapiens
gccgcagacaaaatt

SEQ ID NO: 100078 - DNA, 15 bp, Homo sapiens
agccgcagacaaaat

SEQ ID NO: 100079 - DNA, 15 bp, Homo sapiens
gagccgcagacaaaa

SEQ ID NO: 100080 - DNA, 15 bp, Homo sapiens
ggagccgcagacaaa

SEQ ID NO: 100081 - DNA, 15 bp, Homo sapiens
aggagccgcagacaa

SEQ ID NO: 100082 - DNA, 15 bp, Homo sapiens
gaggagccgcagaca

SEQ ID NO: 100083 - DNA, 15 bp, Homo sapiens
ggaggagccgcagac

SEQ ID NO: 100084 - DNA, 15 bp, Homo sapiens
aggaggagccgcaga

SEQ ID NO: 100085 - DNA, 15 bp, Homo sapiens
caggaggagccgcag

SEQ ID NO: 100086 - DNA, 15 bp, Homo sapiens
gcaggaggagccgca

SEQ ID NO: 100087 - DNA, 15 bp, Homo sapiens
agcaggaggagccgc

SEQ ID NO: 100088 - DNA, 15 bp, Homo sapiens
tagcaggaggagccg

SEQ ID NO: 100089 - DNA, 15 bp, Homo sapiens
gtagcaggaggagcc

SEQ ID NO: 100090 - DNA, 15 bp, Homo sapiens
tgtagcaggaggagc

SEQ ID NO: 100091 - DNA, 15 bp, Homo sapiens
atgtagcaggaggag

SEQ ID NO: 100092 - DNA, 15 bp, Homo sapiens
aatgtagcaggagga

SEQ ID NO: 100093 - DNA, 15 bp, Homo sapiens
gaatgtagcaggagg

SEQ ID NO: 100094 - DNA, 15 bp, Homo sapiens
agaatgtagcaggag

SEQ ID NO: 100095 - DNA, 15 bp, Homo sapiens
cagaatgtagcagga

SEQ ID NO: 100096 - DNA, 15 bp, Homo sapiens
tcagaatgtagcagg

SEQ ID NO: 100097 - DNA, 15 bp, Homo sapiens
ctcagaatgtagcag

SEQ ID NO: 100098 - DNA, 15 bp, Homo sapiens
actcagaatgtagca

SEQ ID NO: 100099 - DNA, 15 bp, Homo sapiens
cactcagaatgtagc

SEQ ID NO: 100100 - DNA, 15 bp, Homo sapiens
ccactcagaatgtag

SEQ ID NO: 100101 - DNA, 15 bp, Homo sapiens
cccactcagaatgta

SEQ ID NO: 100102 - DNA, 15 bp, Homo sapiens
ccccactcagaatgt

SEQ ID NO: 100103 - DNA, 15 bp, Homo sapiens
tccccactcagaatg

SEQ ID NO: 100104 - DNA, 15 bp, Homo sapiens
ttccccactcagaat

SEQ ID NO: 100105 - DNA, 15 bp, Homo sapiens
tttccccactcagaa

SEQ ID NO: 100106 - DNA, 15 bp, Homo sapiens
ctttccccactcaga

SEQ ID NO: 100107 - DNA, 15 bp, Homo sapiens
cctttccccactcag

SEQ ID NO: 100108 - DNA, 15 bp, Homo sapiens
ccctttccccactca

SEQ ID NO: 100109 - DNA, 15 bp, Homo sapiens
tccctttccccactc

SEQ ID NO: 100110 - DNA, 15 bp, Homo sapiens
gtccctttccccact

SEQ ID NO: 100111 - DNA, 15 bp, Homo sapiens
agtccctttccccac

SEQ ID NO: 100112 - DNA, 15 bp, Homo sapiens
tagtccctttcccca

SEQ ID NO: 100113 - DNA, 15 bp, Homo sapiens
ttagtccctttcccc

SEQ ID NO: 100114 - DNA, 15 bp, Homo sapiens
cttagtccctttccc

SEQ ID NO: 100115 - DNA, 15 bp, Homo sapiens
ccttagtccctttcc

SEQ ID NO: 100116 - DNA, 15 bp, Homo sapiens
accttagtccctttc

SEQ ID NO: 100117 - DNA, 15 bp, Homo sapiens
caccttagtcccttt

SEQ ID NO: 100118 - DNA, 15 bp, Homo sapiens
ccaccttagtccctt

SEQ ID NO: 100119 - DNA, 15 bp, Homo sapiens
accaccttagtccct

SEQ ID NO: 100120 - DNA, 15 bp, Homo sapiens
gaccaccttagtccc

SEQ ID NO: 100121 - DNA, 15 bp, Homo sapiens
agaccaccttagtcc

SEQ ID NO: 100122 - DNA, 15 bp, Homo sapiens
cagaccaccttagtc

SEQ ID NO: 100123 - DNA, 15 bp, Homo sapiens
tcagaccaccttagt

SEQ ID NO: 100124 - DNA, 15 bp, Homo sapiens
ctcagaccaccttag

SEQ ID NO: 100125 - DNA, 15 bp, Homo sapiens
cctcagaccacctta

SEQ ID NO: 100126 - DNA, 15 bp, Homo sapiens
tcctcagaccacctt

SEQ ID NO: 100127 - DNA, 15 bp, Homo sapiens
gtcctcagaccacct

SEQ ID NO: 100128 - DNA, 15 bp, Homo sapiens
ggtcctcagaccacc

SEQ ID NO: 100129 - DNA, 15 bp, Homo sapiens
gggtcctcagaccac

SEQ ID NO: 100130 - DNA, 15 bp, Homo sapiens
ggggtcctcagacca

SEQ ID NO: 100131 - DNA, 15 bp, Homo sapiens
tggggtcctcagacc

SEQ ID NO: 100132 - DNA, 15 bp, Homo sapiens
gtggggtcctcagac

SEQ ID NO: 100133 - DNA, 15 bp, Homo sapiens
tgtggggtcctcaga

SEQ ID NO: 100134 - DNA, 15 bp, Homo sapiens
ctgtggggtcctcag

SEQ ID NO: 100135 - DNA, 15 bp, Homo sapiens
tctgtggggtcctca

SEQ ID NO: 100136 - DNA, 15 bp, Homo sapiens
ctctgtggggtcctc

SEQ ID NO: 100137 - DNA, 15 bp, Homo sapiens
actctgtggggtcct

SEQ ID NO: 100138 - DNA, 15 bp, Homo sapiens
gactctgtggggtcc

SEQ ID NO: 100139 - DNA, 15 bp, Homo sapiens
tgactctgtggggtc

SEQ ID NO: 100140 - DNA, 15 bp, Homo sapiens
ctgactctgtggggt

SEQ ID NO: 100141 - DNA, 15 bp, Homo sapiens
cctgactctgtgggg

SEQ ID NO: 100142 - DNA, 15 bp, Homo sapiens
tcctgactctgtggg

SEQ ID NO: 100143 - DNA, 15 bp, Homo sapiens
ttcctgactctgtgg

SEQ ID NO: 100144 - DNA, 15 bp, Homo sapiens
cttcctgactctgtg

SEQ ID NO: 100145 - DNA, 15 bp, Homo sapiens
tcttcctgactctgt

SEQ ID NO: 100146 - DNA, 15 bp, Homo sapiens
atcttcctgactctg

SEQ ID NO: 100147 - DNA, 15 bp, Homo sapiens
aatcttcctgactct

SEQ ID NO: 100148 - DNA, 15 bp, Homo sapiens
caatcttcctgactc

SEQ ID NO: 100149 - DNA, 15 bp, Homo sapiens
tcaatcttcctgact

SEQ ID NO: 100150 - DNA, 15 bp, Homo sapiens
ctcaatcttcctgac

SEQ ID NO: 100151 - DNA, 15 bp, Homo sapiens
tctcaatcttcctga

SEQ ID NO: 100152 - DNA, 15 bp, Homo sapiens
ctctcaatcttcctg

SEQ ID NO: 100153 - DNA, 15 bp, Homo sapiens
cctctcaatcttcct

SEQ ID NO: 100154 - DNA, 15 bp, Homo sapiens
acctctcaatcttcc

SEQ ID NO: 100155 - DNA, 15 bp, Homo sapiens
cacctctcaatcttc

SEQ ID NO: 100156 - DNA, 15 bp, Homo sapiens
tcacctctcaatctt

SEQ ID NO: 100157 - DNA, 15 bp, Homo sapiens
ctcacctctcaatct

SEQ ID NO: 100158 - DNA, 15 bp, Homo sapiens
tctcacctctcaatc

SEQ ID NO: 100159 - DNA, 15 bp, Homo sapiens
ctctcacctctcaat

SEQ ID NO: 100160 - DNA, 15 bp, Homo sapiens
actctcacctctcaa

SEQ ID NO: 100161 - DNA, 15 bp, Homo sapiens
cactctcacctctca

SEQ ID NO: 100162 - DNA, 15 bp, Homo sapiens
gcactctcacctctc

SEQ ID NO: 100163 - DNA, 15 bp, Homo sapiens
agcactctcacctct

SEQ ID NO: 100164 - DNA, 15 bp, Homo sapiens
cagcactctcacctc

SEQ ID NO: 100165 - DNA, 15 bp, Homo sapiens
tcagcactctcacct

SEQ ID NO: 100166 - DNA, 15 bp, Homo sapiens
ttcagcactctcacc

SEQ ID NO: 100167 - DNA, 15 bp, Homo sapiens
gttcagcactctcac

SEQ ID NO: 100168 - DNA, 15 bp, Homo sapiens
cgttcagcactctca

SEQ ID NO: 100169 - DNA, 15 bp, Homo sapiens
ccgttcagcactctc

SEQ ID NO: 100170 - DNA, 15 bp, Homo sapiens
cccgttcagcactct

SEQ ID NO: 100171 - DNA, 15 bp, Homo sapiens
ccccgttcagcactc

SEQ ID NO: 100172 - DNA, 15 bp, Homo sapiens
tccccgttcagcact

SEQ ID NO: 100173 - DNA, 15 bp, Homo sapiens
ctccccgttcagcac

SEQ ID NO: 100174 - DNA, 15 bp, Homo sapiens
cctccccgttcagca

SEQ ID NO: 100175 - DNA, 15 bp, Homo sapiens
ccctccccgttcagc

SEQ ID NO: 100176 - DNA, 15 bp, Homo sapiens
cccctccccgttcag

SEQ ID NO: 100177 - DNA, 15 bp, Homo sapiens
gcccctccccgttca

SEQ ID NO: 100178 - DNA, 15 bp, Homo sapiens
agcccctccccgttc

SEQ ID NO: 100179 - DNA, 15 bp, Homo sapiens
aagcccctccccgtt

SEQ ID NO: 100180 - DNA, 15 bp, Homo sapiens
aaagcccctccccgt

SEQ ID NO: 100181 - DNA, 15 bp, Homo sapiens
caaagcccctccccg

SEQ ID NO: 100182 - DNA, 15 bp, Homo sapiens
ccaaagcccctcccc

SEQ ID NO: 100183 - DNA, 15 bp, Homo sapiens
cccaaagcccctccc

SEQ ID NO: 100184 - DNA, 15 bp, Homo sapiens
ccccaaagcccctcc

SEQ ID NO: 100185 - DNA, 15 bp, Homo sapiens
gccccaaagcccctc

SEQ ID NO: 100186 - DNA, 15 bp, Homo sapiens
agccccaaagcccct

SEQ ID NO: 100187 - DNA, 15 bp, Homo sapiens
tagccccaaagcccc

SEQ ID NO: 100188 - DNA, 15 bp, Homo sapiens
ttagccccaaagccc

SEQ ID NO: 100189 - DNA, 15 bp, Homo sapiens
cttagccccaaagcc

SEQ ID NO: 100190 - DNA, 15 bp, Homo sapiens
ccttagccccaaagc

SEQ ID NO: 100191 - DNA, 15 bp, Homo sapiens
cccttagccccaaag

SEQ ID NO: 100192 - DNA, 15 bp, Homo sapiens
tcccttagccccaaa

SEQ ID NO: 100193 - DNA, 15 bp, Homo sapiens
ttcccttagccccaa

SEQ ID NO: 100194 - DNA, 15 bp, Homo sapiens
cttcccttagcccca

SEQ ID NO: 100195 - DNA, 15 bp, Homo sapiens
acttcccttagcccc

SEQ ID NO: 100196 - DNA, 15 bp, Homo sapiens
cacttcccttagccc

SEQ ID NO: 100197 - DNA, 15 bp, Homo sapiens
gcacttcccttagcc

SEQ ID NO: 100198 - DNA, 15 bp, Homo sapiens
ggcacttcccttagc

SEQ ID NO: 100199 - DNA, 15 bp, Homo sapiens
gggcacttcccttag

SEQ ID NO: 100200 - DNA, 15 bp, Homo sapiens
cgggcacttccctta

SEQ ID NO: 100201 - DNA, 15 bp, Homo sapiens
ccgggcacttccctt

SEQ ID NO: 100202 - DNA, 15 bp, Homo sapiens
cccgggcacttccct

SEQ ID NO: 100203 - DNA, 15 bp, Homo sapiens
tcccgggcacttccc

SEQ ID NO: 100204 - DNA, 15 bp, Homo sapiens
gtcccgggcacttcc

SEQ ID NO: 100205 - DNA, 15 bp, Homo sapiens
ggtcccgggcacttc

SEQ ID NO: 100206 - DNA, 15 bp, Homo sapiens
gggtcccgggcactt

SEQ ID NO: 100207 - DNA, 15 bp, Homo sapiens
ggggtcccgggcact

SEQ ID NO: 100208 - DNA, 15 bp, Homo sapiens
tggggtcccgggcac

SEQ ID NO: 100209 - DNA, 15 bp, Homo sapiens
gtggggtcccgggca

SEQ ID NO: 100210 - DNA, 15 bp, Homo sapiens
ggtggggtcccgggc

SEQ ID NO: 100211 - DNA, 15 bp, Homo sapiens
aggtggggtcccggg

SEQ ID NO: 100212 - DNA, 15 bp, Homo sapiens
caggtggggtcccgg

SEQ ID NO: 100213 - DNA, 15 bp, Homo sapiens
tcaggtggggtcccg

SEQ ID NO: 100214 - DNA, 15 bp, Homo sapiens
gtcaggtggggtccc

SEQ ID NO: 100215 - DNA, 15 bp, Homo sapiens
ggtcaggtggggtcc

SEQ ID NO: 100216 - DNA, 15 bp, Homo sapiens
gggtcaggtggggtc

SEQ ID NO: 100217 - DNA, 15 bp, Homo sapiens
ggggtcaggtggggt

SEQ ID NO: 100218 - DNA, 15 bp, Homo sapiens
tggggtcaggtgggg

SEQ ID NO: 100219 - DNA, 15 bp, Homo sapiens
ttggggtcaggtggg

SEQ ID NO: 100220 - DNA, 15 bp, Homo sapiens
gttggggtcaggtgg

SEQ ID NO: 100221 - DNA, 15 bp, Homo sapiens
cgttggggtcaggtg

SEQ ID NO: 100222 - DNA, 15 bp, Homo sapiens
gcgttggggtcaggt

SEQ ID NO: 100223 - DNA, 15 bp, Homo sapiens
agcgttggggtcagg

SEQ ID NO: 100224 - DNA, 15 bp, Homo sapiens
gagcgttggggtcag

SEQ ID NO: 100225 - DNA, 15 bp, Homo sapiens
tgagcgttggggtca

SEQ ID NO: 100226 - DNA, 15 bp, Homo sapiens
gtgagcgttggggtc

SEQ ID NO: 100227 - DNA, 15 bp, Homo sapiens
cgtgagcgttggggt

SEQ ID NO: 100228 - DNA, 15 bp, Homo sapiens
ccgtgagcgttgggg

SEQ ID NO: 100229 - DNA, 15 bp, Homo sapiens
cccgtgagcgttggg

SEQ ID NO: 100230 - DNA, 15 bp, Homo sapiens
tcccgtgagcgttgg

SEQ ID NO: 100231 - DNA, 15 bp, Homo sapiens
gtcccgtgagcgttg

SEQ ID NO: 100232 - DNA, 15 bp, Homo sapiens
tgtcccgtgagcgtt

SEQ ID NO: 100233 - DNA, 15 bp, Homo sapiens
ctgtcccgtgagcgt

SEQ ID NO: 100234 - DNA, 15 bp, Homo sapiens
cctgtcccgtgagcg

SEQ ID NO: 100235 - DNA, 15 bp, Homo sapiens
ccctgtcccgtgagc

SEQ ID NO: 100236 - DNA, 15 bp, Homo sapiens
cccctgtcccgtgag

SEQ ID NO: 100237 - DNA, 15 bp, Homo sapiens
gcccctgtcccgtga

SEQ ID NO: 100238 - DNA, 15 bp, Homo sapiens
tgcccctgtcccgtg

SEQ ID NO: 100239 - DNA, 15 bp, Homo sapiens
ctgcccctgtcccgt

SEQ ID NO: 100240 - DNA, 15 bp, Homo sapiens
tctgcccctgtcccg

SEQ ID NO: 100241 - DNA, 15 bp, Homo sapiens
ctctgcccctgtccc

SEQ ID NO: 100242 - DNA, 15 bp, Homo sapiens
cctctgcccctgtcc

SEQ ID NO: 100243 - DNA, 15 bp, Homo sapiens
tcctctgcccctgtc

SEQ ID NO: 100244 - DNA, 15 bp, Homo sapiens
ctcctctgcccctgt

SEQ ID NO: 100245 - DNA, 15 bp, Homo sapiens
tctcctctgcccctg

SEQ ID NO: 100246 - DNA, 15 bp, Homo sapiens
ttctcctctgcccct

SEQ ID NO: 100247 - DNA, 15 bp, Homo sapiens
tttctcctctgcccc

SEQ ID NO: 100248 - DNA, 15 bp, Homo sapiens
ttttctcctctgccc

SEQ ID NO: 100249 - DNA, 15 bp, Homo sapiens
tttttctcctctgcc

SEQ ID NO: 100250 - DNA, 15 bp, Homo sapiens
gtttttctcctctgc

SEQ ID NO: 100251 - DNA, 15 bp, Homo sapiens
cgtttttctcctctg

SEQ ID NO: 100252 - DNA, 15 bp, Homo sapiens
acgtttttctcctct

SEQ ID NO: 100253 - DNA, 15 bp, Homo sapiens
cacgtttttctcctc

SEQ ID NO: 100254 - DNA, 15 bp, Homo sapiens
ccacgtttttctcct

SEQ ID NO: 100255 - DNA, 15 bp, Homo sapiens
cccacgtttttctcc

SEQ ID NO: 100256 - DNA, 15 bp, Homo sapiens
acccacgtttttctc

SEQ ID NO: 100257 - DNA, 15 bp, Homo sapiens
cacccacgtttttct

SEQ ID NO: 100258 - DNA, 15 bp, Homo sapiens
ccacccacgtttttc

SEQ ID NO: 100259 - DNA, 15 bp, Homo sapiens
tccacccacgttttt

SEQ ID NO: 100260 - DNA, 15 bp, Homo sapiens
gtccacccacgtttt

SEQ ID NO: 100261 - DNA, 15 bp, Homo sapiens
tgtccacccacgttt

SEQ ID NO: 100262 - DNA, 15 bp, Homo sapiens
ctgtccacccacgtt

SEQ ID NO: 100263 - DNA, 15 bp, Homo sapiens
tctgtccacccacgt

SEQ ID NO: 100264 - DNA, 15 bp, Homo sapiens
ctctgtccacccacg

SEQ ID NO: 100265 - DNA, 15 bp, Homo sapiens
cctctgtccacccac

SEQ ID NO: 100266 - DNA, 15 bp, Homo sapiens
ccctctgtccaccca

SEQ ID NO: 100267 - DNA, 15 bp, Homo sapiens
tccctctgtccaccc

SEQ ID NO: 100268 - DNA, 15 bp, Homo sapiens
ctccctctgtccacc

SEQ ID NO: 100269 - DNA, 15 bp, Homo sapiens
cctccctctgtccac

SEQ ID NO: 100270 - DNA, 15 bp, Homo sapiens
gcctccctctgtcca

SEQ ID NO: 100271 - DNA, 15 bp, Homo sapiens
tgcctccctctgtcc

SEQ ID NO: 100272 - DNA, 15 bp, Homo sapiens
ctgcctccctctgtc

SEQ ID NO: 100273 - DNA, 15 bp, Homo sapiens
cctgcctccctctgt

SEQ ID NO: 100274 - DNA, 15 bp, Homo sapiens
gcctgcctccctctg

SEQ ID NO: 100275 - DNA, 15 bp, Homo sapiens
cgcctgcctccctct

SEQ ID NO: 100276 - DNA, 15 bp, Homo sapiens
ccgcctgcctccctc

SEQ ID NO: 100277 - DNA, 15 bp, Homo sapiens
accgcctgcctccct

SEQ ID NO: 100278 - DNA, 15 bp, Homo sapiens
gaccgcctgcctccc

SEQ ID NO: 100279 - DNA, 15 bp, Homo sapiens
tgaccgcctgcctcc

SEQ ID NO: 100280 - DNA, 15 bp, Homo sapiens
ctgaccgcctgcctc

SEQ ID NO: 100281 - DNA, 15 bp, Homo sapiens
cctgaccgcctgcct

SEQ ID NO: 100282 - DNA, 15 bp, Homo sapiens
ccctgaccgcctgcc

SEQ ID NO: 100283 - DNA, 15 bp, Homo sapiens
cccctgaccgcctgc

SEQ ID NO: 100284 - DNA, 15 bp, Homo sapiens
tcccctgaccgcctg

SEQ ID NO: 100285 - DNA, 15 bp, Homo sapiens
ttcccctgaccgcct

SEQ ID NO: 100286 - DNA, 15 bp, Homo sapiens
cttcccctgaccgcc

SEQ ID NO: 100287 - DNA, 15 bp, Homo sapiens
ccttcccctgaccgc

SEQ ID NO: 100288 - DNA, 15 bp, Homo sapiens
gccttcccctgaccg

SEQ ID NO: 100289 - DNA, 15 bp, Homo sapiens
agccttcccctgacc

SEQ ID NO: 100290 - DNA, 15 bp, Homo sapiens
gagccttcccctgac

SEQ ID NO: 100291 - DNA, 15 bp, Homo sapiens
tgagccttcccctga

SEQ ID NO: 100292 - DNA, 15 bp, Homo sapiens
ctgagccttcccctg

SEQ ID NO: 100293 - DNA, 15 bp, Homo sapiens
cctgagccttcccct

SEQ ID NO: 100294 - DNA, 15 bp, Homo sapiens
tcctgagccttcccc

SEQ ID NO: 100295 - DNA, 15 bp, Homo sapiens
ctcctgagccttccc

SEQ ID NO: 100296 - DNA, 15 bp, Homo sapiens
cctcctgagccttcc

SEQ ID NO: 100297 - DNA, 15 bp, Homo sapiens
tcctcctgagccttc

SEQ ID NO: 100298 - DNA, 15 bp, Homo sapiens
ctcctcctgagcctt

SEQ ID NO: 100299 - DNA, 15 bp, Homo sapiens
cctcctcctgagcct

SEQ ID NO: 100300 - DNA, 15 bp, Homo sapiens
ccctcctcctgagcc

SEQ ID NO: 100301 - DNA, 15 bp, Homo sapiens
tccctcctcctgagc

SEQ ID NO: 100302 - DNA, 15 bp, Homo sapiens
ctccctcctcctgag

SEQ ID NO: 100303 - DNA, 15 bp, Homo sapiens
tctccctcctcctga

SEQ ID NO: 100304 - DNA, 15 bp, Homo sapiens
atctccctcctcctg

SEQ ID NO: 100305 - DNA, 15 bp, Homo sapiens
gatctccctcctcct

SEQ ID NO: 100306 - DNA, 15 bp, Homo sapiens
tgatctccctcctcc

SEQ ID NO: 100307 - DNA, 15 bp, Homo sapiens
ttgatctccctcctc

SEQ ID NO: 100308 - DNA, 15 bp, Homo sapiens
gttgatctccctcct

SEQ ID NO: 100309 - DNA, 15 bp, Homo sapiens
tgttgatctccctcc

SEQ ID NO: 100310 - DNA, 15 bp, Homo sapiens
atgttgatctccctc

SEQ ID NO: 100311 - DNA, 15 bp, Homo sapiens
gatgttgatctccct

SEQ ID NO: 100312 - DNA, 15 bp, Homo sapiens
tgatgttgatctccc

SEQ ID NO: 100313 - DNA, 15 bp, Homo sapiens
ttgatgttgatctcc

SEQ ID NO: 100314 - DNA, 15 bp, Homo sapiens
gttgatgttgatctc

SEQ ID NO: 100315 - DNA, 15 bp, Homo sapiens
ggttgatgttgatct

SEQ ID NO: 100316 - DNA, 15 bp, Homo sapiens
aggttgatgttgatc

SEQ ID NO: 100317 - DNA, 15 bp, Homo sapiens
caggttgatgttgat

SEQ ID NO: 100318 - DNA, 15 bp, Homo sapiens
gcaggttgatgttga

SEQ ID NO: 100319 - DNA, 15 bp, Homo sapiens
ggcaggttgatgttg

SEQ ID NO: 100320 - DNA, 15 bp, Homo sapiens
gggcaggttgatgtt

SEQ ID NO: 100321 - DNA, 15 bp, Homo sapiens
ggggcaggttgatgt

SEQ ID NO: 100322 - DNA, 15 bp, Homo sapiens
cggggcaggttgatg

SEQ ID NO: 100323 - DNA, 15 bp, Homo sapiens
gcggggcaggttgat

SEQ ID NO: 100324 - DNA, 15 bp, Homo sapiens
ggcggggcaggttga

SEQ ID NO: 100325 - DNA, 15 bp, Homo sapiens
gggcggggcaggttg

SEQ ID NO: 100326 - DNA, 15 bp, Homo sapiens
ggggcggggcaggtt

SEQ ID NO: 100327 - DNA, 15 bp, Homo sapiens
gggggcggggcaggt

SEQ ID NO: 100328 - DNA, 15 bp, Homo sapiens
agggggcggggcagg

SEQ ID NO: 100329 - DNA, 15 bp, Homo sapiens
gagggggcggggcag

SEQ ID NO: 100330 - DNA, 15 bp, Homo sapiens
ggagggggcggggca

SEQ ID NO: 100331 - DNA, 15 bp, Homo sapiens
gggagggggcggggc

SEQ ID NO: 100332 - DNA, 15 bp, Homo sapiens
ggggagggggcgggg

SEQ ID NO: 100333 - DNA, 15 bp, Homo sapiens
tggggagggggcggg

SEQ ID NO: 100334 - DNA, 15 bp, Homo sapiens
ctggggagggggcgg

SEQ ID NO: 100335 - DNA, 15 bp, Homo sapiens
gctggggagggggcg

SEQ ID NO: 100336 - DNA, 15 bp, Homo sapiens
ggctggggagggggc

SEQ ID NO: 100337 - DNA, 15 bp, Homo sapiens
aggctggggaggggg

SEQ ID NO: 100338 - DNA, 15 bp, Homo sapiens
caggctggggagggg

SEQ ID NO: 100339 - DNA, 15 bp, Homo sapiens
tcaggctggggaggg

SEQ ID NO: 100340 - DNA, 15 bp, Homo sapiens
atcaggctggggagg

SEQ ID NO: 100341 - DNA, 15 bp, Homo sapiens
tatcaggctggggag

SEQ ID NO: 100342 - DNA, 15 bp, Homo sapiens
ttatcaggctgggga

SEQ ID NO: 100343 - DNA, 15 bp, Homo sapiens
tttatcaggctgggg

SEQ ID NO: 100344 - DNA, 15 bp, Homo sapiens
ctttatcaggctggg

SEQ ID NO: 100345 - DNA, 15 bp, Homo sapiens
cctttatcaggctgg

SEQ ID NO: 100346 - DNA, 15 bp, Homo sapiens
acctttatcaggctg

SEQ ID NO: 100347 - DNA, 15 bp, Homo sapiens
gacctttatcaggct

SEQ ID NO: 100348 - DNA, 15 bp, Homo sapiens
ggacctttatcaggc

SEQ ID NO: 100349 - DNA, 15 bp, Homo sapiens
aggacctttatcagg

SEQ ID NO: 100350 - DNA, 15 bp, Homo sapiens
caggacctttatcag

SEQ ID NO: 100351 - DNA, 15 bp, Homo sapiens
gcaggacctttatca

SEQ ID NO: 100352 - DNA, 15 bp, Homo sapiens
cgcaggacctttatc

SEQ ID NO: 100353 - DNA, 15 bp, Homo sapiens
ccgcaggacctttat

SEQ ID NO: 100354 - DNA, 15 bp, Homo sapiens
cccgcaggaccttta

SEQ ID NO: 100355 - DNA, 15 bp, Homo sapiens
gcccgcaggaccttt

SEQ ID NO: 100356 - DNA, 15 bp, Homo sapiens
tgcccgcaggacctt

SEQ ID NO: 100357 - DNA, 15 bp, Homo sapiens
ctgcccgcaggacct

SEQ ID NO: 100358 - DNA, 15 bp, Homo sapiens
cctgcccgcaggacc

SEQ ID NO: 100359 - DNA, 15 bp, Homo sapiens
tcctgcccgcaggac

SEQ ID NO: 100360 - DNA, 15 bp, Homo sapiens
gtcctgcccgcagga

SEQ ID NO: 100361 - DNA, 15 bp, Homo sapiens
tgtcctgcccgcagg

SEQ ID NO: 100362 - DNA, 15 bp, Homo sapiens
ctgtcctgcccgcag

SEQ ID NO: 100363 - DNA, 15 bp, Homo sapiens
cctgtcctgcccgca

SEQ ID NO: 100364 - DNA, 15 bp, Homo sapiens
tcctgtcctgcccgc

SEQ ID NO: 100365 - DNA, 15 bp, Homo sapiens
gtcctgtcctgcccg

SEQ ID NO: 100366 - DNA, 15 bp, Homo sapiens
ggtcctgtcctgccc

SEQ ID NO: 100367 - DNA, 15 bp, Homo sapiens
aggtcctgtcctgcc

SEQ ID NO: 100368 - DNA, 15 bp, Homo sapiens
gaggtcctgtcctgc

SEQ ID NO: 100369 - DNA, 15 bp, Homo sapiens
ggaggtcctgtcctg

SEQ ID NO: 100370 - DNA, 15 bp, Homo sapiens
gggaggtcctgtcct

SEQ ID NO: 100371 - DNA, 15 bp, Homo sapiens
tgggaggtcctgtcc

SEQ ID NO: 100372 - DNA, 15 bp, Homo sapiens
ttgggaggtcctgtc

SEQ ID NO: 100373 - DNA, 15 bp, Homo sapiens
gttgggaggtcctgt

SEQ ID NO: 100374 - DNA, 15 bp, Homo sapiens
ggttgggaggtcctg

SEQ ID NO: 100375 - DNA, 15 bp, Homo sapiens
tggttgggaggtcct

SEQ ID NO: 100376 - DNA, 15 bp, Homo sapiens
ttggttgggaggtcc

SEQ ID NO: 100377 - DNA, 15 bp, Homo sapiens
cttggttgggaggtc

SEQ ID NO: 100378 - DNA, 15 bp, Homo sapiens
gcttggttgggaggt

SEQ ID NO: 100379 - DNA, 15 bp, Homo sapiens
ggcttggttgggagg

SEQ ID NO: 100380 - DNA, 15 bp, Homo sapiens
gggcttggttgggag

SEQ ID NO: 100381 - DNA, 15 bp, Homo sapiens
agggcttggttggga

SEQ ID NO: 100382 - DNA, 15 bp, Homo sapiens
gagggcttggttggg

SEQ ID NO: 100383 - DNA, 15 bp, Homo sapiens
ggagggcttggttgg

SEQ ID NO: 100384 - DNA, 15 bp, Homo sapiens
tggagggcttggttg

SEQ ID NO: 100385 - DNA, 15 bp, Homo sapiens
ctggagggcttggtt

SEQ ID NO: 100386 - DNA, 15 bp, Homo sapiens
gctggagggcttggt

SEQ ID NO: 100387 - DNA, 15 bp, Homo sapiens
tgctggagggcttgg

SEQ ID NO: 100388 - DNA, 15 bp, Homo sapiens
ttgctggagggcttg

SEQ ID NO: 100389 - DNA, 15 bp, Homo sapiens
cttgctggagggctt

SEQ ID NO: 100390 - DNA, 15 bp, Homo sapiens
ccttgctggagggct

SEQ ID NO: 100391 - DNA, 15 bp, Homo sapiens
tccttgctggagggc

SEQ ID NO: 100392 - DNA, 15 bp, Homo sapiens
atccttgctggaggg

SEQ ID NO: 100393 - DNA, 15 bp, Homo sapiens
aatccttgctggagg

SEQ ID NO: 100394 - DNA, 15 bp, Homo sapiens
gaatccttgctggag

SEQ ID NO: 100395 - DNA, 15 bp, Homo sapiens
tgaatccttgctgga

SEQ ID NO: 100396 - DNA, 15 bp, Homo sapiens
ctgaatccttgctgg

SEQ ID NO: 100397 - DNA, 15 bp, Homo sapiens
cctgaatccttgctg

SEQ ID NO: 100398 - DNA, 15 bp, Homo sapiens
acctgaatccttgct

SEQ ID NO: 100399 - DNA, 15 bp, Homo sapiens
aacctgaatccttgc

SEQ ID NO: 100400 - DNA, 15 bp, Homo sapiens
caacctgaatccttg

SEQ ID NO: 100401 - DNA, 15 bp, Homo sapiens
ccaacctgaatcctt

SEQ ID NO: 100402 - DNA, 15 bp, Homo sapiens
accaacctgaatcct

SEQ ID NO: 100403 - DNA, 15 bp, Homo sapiens
caccaacctgaatcc

SEQ ID NO: 100404 - DNA, 15 bp, Homo sapiens
ggggccttcattttc

SEQ ID NO: 100405 - DNA, 15 bp, Homo sapiens
tggggccttcatttt

SEQ ID NO: 100406 - DNA, 15 bp, Homo sapiens
ttggggccttcattt

SEQ ID NO: 100407 - DNA, 15 bp, Homo sapiens
cttggggccttcatt

SEQ ID NO: 100408 - DNA, 15 bp, Homo sapiens
gcttggggccttcat

SEQ ID NO: 100409 - DNA, 15 bp, Homo sapiens
agcttggggccttca

SEQ ID NO: 100410 - DNA, 15 bp, Homo sapiens
aagcttggggccttc

SEQ ID NO: 100411 - DNA, 15 bp, Homo sapiens
caagcttggggcctt

SEQ ID NO: 100412 - DNA, 15 bp, Homo sapiens
ccaagcttggggcct

SEQ ID NO: 100413 - DNA, 15 bp, Homo sapiens
gccaagcttggggcc

SEQ ID NO: 100414 - DNA, 15 bp, Homo sapiens
ggccaagcttggggc

SEQ ID NO: 100415 - DNA, 15 bp, Homo sapiens
tggccaagcttgggg

SEQ ID NO: 100416 - DNA, 15 bp, Homo sapiens
ctggccaagcttggg

SEQ ID NO: 100417 - DNA, 15 bp, Homo sapiens
tctggccaagcttgg

SEQ ID NO: 100418 - DNA, 15 bp, Homo sapiens
gtctggccaagcttg

SEQ ID NO: 100419 - DNA, 15 bp, Homo sapiens
ggtctggccaagctt

SEQ ID NO: 100420 - DNA, 15 bp, Homo sapiens
aggtctggccaagct

SEQ ID NO: 100421 - DNA, 15 bp, Homo sapiens
caggtctggccaagc

SEQ ID NO: 100422 - DNA, 15 bp, Homo sapiens
ccaggtctggccaag

SEQ ID NO: 100423 - DNA, 15 bp, Homo sapiens
cccaggtctggccaa

SEQ ID NO: 100424 - DNA, 15 bp, Homo sapiens
acccaggtctggcca

SEQ ID NO: 100425 - DNA, 15 bp, Homo sapiens
gacccaggtctggcc

SEQ ID NO: 100426 - DNA, 15 bp, Homo sapiens
ggacccaggtctggc

SEQ ID NO: 100427 - DNA, 15 bp, Homo sapiens
gggacccaggtctgg

SEQ ID NO: 100428 - DNA, 15 bp, Homo sapiens
ggggacccaggtctg

SEQ ID NO: 100429 - DNA, 15 bp, Homo sapiens
tggggacccaggtct

SEQ ID NO: 100430 - DNA, 15 bp, Homo sapiens
ctggggacccaggtc

SEQ ID NO: 100431 - DNA, 15 bp, Homo sapiens
cctggggacccaggt

SEQ ID NO: 100432 - DNA, 15 bp, Homo sapiens
gcctggggacccagg

SEQ ID NO: 100433 - DNA, 15 bp, Homo sapiens
agcctggggacccag

SEQ ID NO: 100434 - DNA, 15 bp, Homo sapiens
cagcctggggaccca

SEQ ID NO: 100435 - DNA, 15 bp, Homo sapiens
ccagcctggggaccc

SEQ ID NO: 100436 - DNA, 15 bp, Homo sapiens
tccagcctggggacc

SEQ ID NO: 100437 - DNA, 15 bp, Homo sapiens
ctccagcctggggac

SEQ ID NO: 100438 - DNA, 15 bp, Homo sapiens
actccagcctgggga

SEQ ID NO: 100439 - DNA, 15 bp, Homo sapiens
tactccagcctgggg

SEQ ID NO: 100440 - DNA, 15 bp, Homo sapiens
ctactccagcctggg

SEQ ID NO: 100441 - DNA, 15 bp, Homo sapiens
gctactccagcctgg

SEQ ID NO: 100442 - DNA, 15 bp, Homo sapiens
tgctactccagcctg

SEQ ID NO: 100443 - DNA, 15 bp, Homo sapiens
gtgctactccagcct

SEQ ID NO: 100444 - DNA, 15 bp, Homo sapiens
ggtgctactccagcc

SEQ ID NO: 100445 - DNA, 15 bp, Homo sapiens
gggtgctactccagc

SEQ ID NO: 100446 - DNA, 15 bp, Homo sapiens
ggggtgctactccag

SEQ ID NO: 100447 - DNA, 15 bp, Homo sapiens
aggggtgctactcca

SEQ ID NO: 100448 - DNA, 15 bp, Homo sapiens
aaggggtgctactcc

SEQ ID NO: 100449 - DNA, 15 bp, Homo sapiens
gaaggggtgctactc

SEQ ID NO: 100450 - DNA, 15 bp, Homo sapiens
ggaaggggtgctact

SEQ ID NO: 100451 - DNA, 15 bp, Homo sapiens
aggaaggggtgctac

SEQ ID NO: 100452 - DNA, 15 bp, Homo sapiens
caggaaggggtgcta

SEQ ID NO: 100453 - DNA, 15 bp, Homo sapiens
acaggaaggggtgct

SEQ ID NO: 100454 - DNA, 15 bp, Homo sapiens
cacaggaaggggtgc

SEQ ID NO: 100455 - DNA, 15 bp, Homo sapiens
acacaggaaggggtg

SEQ ID NO: 100456 - DNA, 15 bp, Homo sapiens
cacacaggaaggggt

SEQ ID NO: 100457 - DNA, 15 bp, Homo sapiens
tcacacaggaagggg

SEQ ID NO: 100458 - DNA, 15 bp, Homo sapiens
atcacacaggaaggg

SEQ ID NO: 100459 - DNA, 15 bp, Homo sapiens
gatcacacaggaagg

SEQ ID NO: 100460 - DNA, 15 bp, Homo sapiens
agatcacacaggaag

SEQ ID NO: 100461 - DNA, 15 bp, Homo sapiens
aagatcacacaggaa

SEQ ID NO: 100462 - DNA, 15 bp, Homo sapiens
caagatcacacagga

SEQ ID NO: 100463 - DNA, 15 bp, Homo sapiens
tcaagatcacacagg

SEQ ID NO: 100464 - DNA, 15 bp, Homo sapiens
gtcaagatcacacag

SEQ ID NO: 100465 - DNA, 15 bp, Homo sapiens
tgtcaagatcacaca

SEQ ID NO: 100466 - DNA, 15 bp, Homo sapiens
ctgtcaagatcacac

SEQ ID NO: 100467 - DNA, 15 bp, Homo sapiens
tctgtcaagatcaca

SEQ ID NO: 100468 - DNA, 15 bp, Homo sapiens
ctctgtcaagatcac

SEQ ID NO: 100469 - DNA, 15 bp, Homo sapiens
cctctgtcaagatca

SEQ ID NO: 100470 - DNA, 15 bp, Homo sapiens
ccctctgtcaagatc

SEQ ID NO: 100471 - DNA, 15 bp, Homo sapiens
cccctctgtcaagat

SEQ ID NO: 100472 - DNA, 15 bp, Homo sapiens
gcccctctgtcaaga

SEQ ID NO: 100473 - DNA, 15 bp, Homo sapiens
tgcccctctgtcaag

SEQ ID NO: 100474 - DNA, 15 bp, Homo sapiens
atgcccctctgtcaa

SEQ ID NO: 100475 - DNA, 15 bp, Homo sapiens
aatgcccctctgtca

SEQ ID NO: 100476 - DNA, 15 bp, Homo sapiens
taatgcccctctgtc

SEQ ID NO: 100477 - DNA, 15 bp, Homo sapiens
gtaatgcccctctgt

SEQ ID NO: 100478 - DNA, 15 bp, Homo sapiens
agtaatgcccctctg

SEQ ID NO: 100479 - DNA, 15 bp, Homo sapiens
cagtaatgcccctct

SEQ ID NO: 100480 - DNA, 15 bp, Homo sapiens
acagtaatgcccctc

SEQ ID NO: 100481 - DNA, 15 bp, Homo sapiens
cacagtaatgcccct

SEQ ID NO: 100482 - DNA, 15 bp, Homo sapiens
tcacagtaatgcccc

SEQ ID NO: 100483 - DNA, 15 bp, Homo sapiens
ctcacagtaatgccc

SEQ ID NO: 100484 - DNA, 15 bp, Homo sapiens
gctcacagtaatgcc

SEQ ID NO: 100485 - DNA, 15 bp, Homo sapiens
ggctcacagtaatgc

SEQ ID NO: 100486 - DNA, 15 bp, Homo sapiens
aggctcacagtaatg

SEQ ID NO: 100487 - DNA, 15 bp, Homo sapiens
gaggctcacagtaat

SEQ ID NO: 100488 - DNA, 15 bp, Homo sapiens
tgaggctcacagtaa

SEQ ID NO: 100489 - DNA, 15 bp, Homo sapiens
ctgaggctcacagta

SEQ ID NO: 100490 - DNA, 15 bp, Homo sapiens
actgaggctcacagt

SEQ ID NO: 100491 - DNA, 15 bp, Homo sapiens
aactgaggctcacag

SEQ ID NO: 100492 - DNA, 15 bp, Homo sapiens
aaactgaggctcaca

SEQ ID NO: 100493 - DNA, 15 bp, Homo sapiens
gaaactgaggctcac

SEQ ID NO: 100494 - DNA, 15 bp, Homo sapiens
ggaaactgaggctca

SEQ ID NO: 100495 - DNA, 15 bp, Homo sapiens
aggaaactgaggctc

SEQ ID NO: 100496 - DNA, 15 bp, Homo sapiens
gaggaaactgaggct

SEQ ID NO: 100497 - DNA, 15 bp, Homo sapiens
agaggaaactgaggc

SEQ ID NO: 100498 - DNA, 15 bp, Homo sapiens
gagaggaaactgagg

SEQ ID NO: 100499 - DNA, 15 bp, Homo sapiens
ggagaggaaactgag

SEQ ID NO: 100500 - DNA, 15 bp, Homo sapiens
aggagaggaaactga

SEQ ID NO: 100501 - DNA, 15 bp, Homo sapiens
taggagaggaaactg

SEQ ID NO: 100502 - DNA, 15 bp, Homo sapiens
ataggagaggaaact

SEQ ID NO: 100503 - DNA, 15 bp, Homo sapiens
tataggagaggaaac

SEQ ID NO: 100504 - DNA, 15 bp, Homo sapiens
ttataggagaggaaa

SEQ ID NO: 100505 - DNA, 15 bp, Homo sapiens
tttataggagaggaa

SEQ ID NO: 100506 - DNA, 15 bp, Homo sapiens
gtttataggagagga

SEQ ID NO: 100507 - DNA, 15 bp, Homo sapiens
agtttataggagagg

SEQ ID NO: 100508 - DNA, 15 bp, Homo sapiens
cagtttataggagag

SEQ ID NO: 100509 - DNA, 15 bp, Homo sapiens
ccagtttataggaga

SEQ ID NO: 100510 - DNA, 15 bp, Homo sapiens
accagtttataggag

SEQ ID NO: 100511 - DNA, 15 bp, Homo sapiens
caccagtttatagga

SEQ ID NO: 100512 - DNA, 15 bp, Homo sapiens
ccaccagtttatagg

SEQ ID NO: 100513 - DNA, 15 bp, Homo sapiens
accaccagtttatag

SEQ ID NO: 100514 - DNA, 15 bp, Homo sapiens
aaccaccagtttata

SEQ ID NO: 100515 - DNA, 15 bp, Homo sapiens
gaaccaccagtttat

SEQ ID NO: 100516 - DNA, 15 bp, Homo sapiens
agaaccaccagttta

SEQ ID NO: 100517 - DNA, 15 bp, Homo sapiens
tagaaccaccagttt

SEQ ID NO: 100518 - DNA, 15 bp, Homo sapiens
gtagaaccaccagtt

SEQ ID NO: 100519 - DNA, 15 bp, Homo sapiens
tgtagaaccaccagt

SEQ ID NO: 100520 - DNA, 15 bp, Homo sapiens
ctgtagaaccaccag

SEQ ID NO: 100521 - DNA, 15 bp, Homo sapiens
cctgtagaaccacca

SEQ ID NO: 100522 - DNA, 15 bp, Homo sapiens
ccctgtagaaccacc

SEQ ID NO: 100523 - DNA, 15 bp, Homo sapiens
tccctgtagaaccac

SEQ ID NO: 100524 - DNA, 15 bp, Homo sapiens
ttccctgtagaacca

SEQ ID NO: 100525 - DNA, 15 bp, Homo sapiens
cttccctgtagaacc

SEQ ID NO: 100526 - DNA, 15 bp, Homo sapiens
acttccctgtagaac

SEQ ID NO: 100527 - DNA, 15 bp, Homo sapiens
tacttccctgtagaa

SEQ ID NO: 100528 - DNA, 15 bp, Homo sapiens
ttacttccctgtaga

SEQ ID NO: 100529 - DNA, 15 bp, Homo sapiens
tttacttccctgtag

SEQ ID NO: 100530 - DNA, 15 bp, Homo sapiens
ctttacttccctgta

SEQ ID NO: 100531 - DNA, 15 bp, Homo sapiens
cctttacttccctgt

SEQ ID NO: 100532 - DNA, 15 bp, Homo sapiens
tcctttacttccctg

SEQ ID NO: 100533 - DNA, 15 bp, Homo sapiens
ctcctttacttccct

SEQ ID NO: 100534 - DNA, 15 bp, Homo sapiens
gctcctttacttccc

SEQ ID NO: 100535 - DNA, 15 bp, Homo sapiens
tgctcctttacttcc

SEQ ID NO: 100536 - DNA, 15 bp, Homo sapiens
ctgctcctttacttc

SEQ ID NO: 100537 - DNA, 15 bp, Homo sapiens
cctgctcctttactt

SEQ ID NO: 100538 - DNA, 15 bp, Homo sapiens
gcctgctcctttact

SEQ ID NO: 100539 - DNA, 15 bp, Homo sapiens
ggcctgctcctttac

SEQ ID NO: 100540 - DNA, 15 bp, Homo sapiens
aggcctgctccttta

SEQ ID NO: 100541 - DNA, 15 bp, Homo sapiens
taggcctgctccttt

SEQ ID NO: 100542 - DNA, 15 bp, Homo sapiens
gtaggcctgctcctt

SEQ ID NO: 100543 - DNA, 15 bp, Homo sapiens
tgtaggcctgctcct

SEQ ID NO: 100544 - DNA, 15 bp, Homo sapiens
ctgtaggcctgctcc

SEQ ID NO: 100545 - DNA, 15 bp, Homo sapiens
cctgtaggcctgctc

SEQ ID NO: 100546 - DNA, 15 bp, Homo sapiens
ccctgtaggcctgct

SEQ ID NO: 100547 - DNA, 15 bp, Homo sapiens
accctgtaggcctgc

SEQ ID NO: 100548 - DNA, 15 bp, Homo sapiens
caccctgtaggcctg

SEQ ID NO: 100549 - DNA, 15 bp, Homo sapiens
acaccctgtaggcct

SEQ ID NO: 100550 - DNA, 15 bp, Homo sapiens
gacaccctgtaggcc

SEQ ID NO: 100551 - DNA, 15 bp, Homo sapiens
agacaccctgtaggc

SEQ ID NO: 100552 - DNA, 15 bp, Homo sapiens
cagacaccctgtagg

SEQ ID NO: 100553 - DNA, 15 bp, Homo sapiens
ccagacaccctgtag

SEQ ID NO: 100554 - DNA, 15 bp, Homo sapiens
accagacaccctgta

SEQ ID NO: 100555 - DNA, 15 bp, Homo sapiens
taccagacaccctgt

SEQ ID NO: 100556 - DNA, 15 bp, Homo sapiens
gtaccagacaccctg

SEQ ID NO: 100557 - DNA, 15 bp, Homo sapiens
tgtaccagacaccct

SEQ ID NO: 100558 - DNA, 15 bp, Homo sapiens
atgtaccagacaccc

SEQ ID NO: 100559 - DNA, 15 bp, Homo sapiens
catgtaccagacacc

SEQ ID NO: 100560 - DNA, 15 bp, Homo sapiens
acatgtaccagacac

SEQ ID NO: 100561 - DNA, 15 bp, Homo sapiens
tacatgtaccagaca

SEQ ID NO: 100562 - DNA, 15 bp, Homo sapiens
ctacatgtaccagac

SEQ ID NO: 100563 - DNA, 15 bp, Homo sapiens
tctacatgtaccaga

SEQ ID NO: 100564 - DNA, 15 bp, Homo sapiens
atctacatgtaccag

SEQ ID NO: 100565 - DNA, 15 bp, Homo sapiens
catctacatgtacca

SEQ ID NO: 100566 - DNA, 15 bp, Homo sapiens
gcatctacatgtacc

SEQ ID NO: 100567 - DNA, 15 bp, Homo sapiens
agcatctacatgtac

SEQ ID NO: 100568 - DNA, 15 bp, Homo sapiens
gagcatctacatgta

SEQ ID NO: 100569 - DNA, 15 bp, Homo sapiens
tgagcatctacatgt

SEQ ID NO: 100570 - DNA, 15 bp, Homo sapiens
ctgagcatctacatg

SEQ ID NO: 100571 - DNA, 15 bp, Homo sapiens
actgagcatctacat

SEQ ID NO: 100572 - DNA, 15 bp, Homo sapiens
tactgagcatctaca

SEQ ID NO: 100573 - DNA, 15 bp, Homo sapiens
atactgagcatctac

SEQ ID NO: 100574 - DNA, 15 bp, Homo sapiens
tatactgagcatcta

SEQ ID NO: 100575 - DNA, 15 bp, Homo sapiens
atatactgagcatct

SEQ ID NO: 100576 - DNA, 15 bp, Homo sapiens
gatatactgagcatc

SEQ ID NO: 100577 - DNA, 15 bp, Homo sapiens
tgatatactgagcat

SEQ ID NO: 100578 - DNA, 15 bp, Homo sapiens
atgatatactgagca

SEQ ID NO: 100579 - DNA, 15 bp, Homo sapiens
catgatatactgagc

SEQ ID NO: 100580 - DNA, 15 bp, Homo sapiens
tcatgatatactgag

SEQ ID NO: 100581 - DNA, 15 bp, Homo sapiens
ttcatgatatactga

SEQ ID NO: 100582 - DNA, 15 bp, Homo sapiens
tttcatgatatactg

SEQ ID NO: 100583 - DNA, 15 bp, Homo sapiens
gtttcatgatatact

SEQ ID NO: 100584 - DNA, 15 bp, Homo sapiens
ggtttcatgatatac

SEQ ID NO: 100585 - DNA, 15 bp, Homo sapiens
gggtttcatgatata

SEQ ID NO: 100586 - DNA, 15 bp, Homo sapiens
tgggtttcatgatat

SEQ ID NO: 100587 - DNA, 15 bp, Homo sapiens
gtgggtttcatgata

SEQ ID NO: 100588 - DNA, 15 bp, Homo sapiens
ggtgggtttcatgat

SEQ ID NO: 100589 - DNA, 15 bp, Homo sapiens
gggtgggtttcatga

SEQ ID NO: 100590 - DNA, 15 bp, Homo sapiens
agggtgggtttcatg

SEQ ID NO: 100591 - DNA, 15 bp, Homo sapiens
aagggtgggtttcat

SEQ ID NO: 100592 - DNA, 15 bp, Homo sapiens
caagggtgggtttca

SEQ ID NO: 100593 - DNA, 15 bp, Homo sapiens
gcaagggtgggtttc

SEQ ID NO: 100594 - DNA, 15 bp, Homo sapiens
ggcaagggtgggttt

SEQ ID NO: 100595 - DNA, 15 bp, Homo sapiens
gggcaagggtgggtt

SEQ ID NO: 100596 - DNA, 15 bp, Homo sapiens
ggggcaagggtgggt

SEQ ID NO: 100597 - DNA, 15 bp, Homo sapiens
gggggcaagggtggg

SEQ ID NO: 100598 - DNA, 15 bp, Homo sapiens
agggggcaagggtgg

SEQ ID NO: 100599 - DNA, 15 bp, Homo sapiens
aagggggcaagggtg

SEQ ID NO: 100600 - DNA, 15 bp, Homo sapiens
aaagggggcaagggt

SEQ ID NO: 100601 - DNA, 15 bp, Homo sapiens
caaagggggcaaggg

SEQ ID NO: 100602 - DNA, 15 bp, Homo sapiens
ccaaagggggcaagg

SEQ ID NO: 100603 - DNA, 15 bp, Homo sapiens
gccaaagggggcaag

SEQ ID NO: 100604 - DNA, 15 bp, Homo sapiens
tgccaaagggggcaa

SEQ ID NO: 100605 - DNA, 15 bp, Homo sapiens
ttgccaaagggggca

SEQ ID NO: 100606 - DNA, 15 bp, Homo sapiens
cttgccaaagggggc

SEQ ID NO: 100607 - DNA, 15 bp, Homo sapiens
acttgccaaaggggg

SEQ ID NO: 100608 - DNA, 15 bp, Homo sapiens
aacttgccaaagggg

SEQ ID NO: 100609 - DNA, 15 bp, Homo sapiens
taacttgccaaaggg

SEQ ID NO: 100610 - DNA, 15 bp, Homo sapiens
ctaacttgccaaagg

SEQ ID NO: 100611 - DNA, 15 bp, Homo sapiens
tctaacttgccaaag

SEQ ID NO: 100612 - DNA, 15 bp, Homo sapiens
ctctaacttgccaaa

SEQ ID NO: 100613 - DNA, 15 bp, Homo sapiens
tctctaacttgccaa

SEQ ID NO: 100614 - DNA, 15 bp, Homo sapiens
ctctctaacttgcca

SEQ ID NO: 100615 - DNA, 15 bp, Homo sapiens
actctctaacttgcc

SEQ ID NO: 100616 - DNA, 15 bp, Homo sapiens
gactctctaacttgc

SEQ ID NO: 100617 - DNA, 15 bp, Homo sapiens
tgactctctaacttg

SEQ ID NO: 100618 - DNA, 15 bp, Homo sapiens
atgactctctaactt

SEQ ID NO: 100619 - DNA, 15 bp, Homo sapiens
aatgactctctaact

SEQ ID NO: 100620 - DNA, 15 bp, Homo sapiens
gaatgactctctaac

SEQ ID NO: 100621 - DNA, 15 bp, Homo sapiens
cgaatgactctctaa

SEQ ID NO: 100622 - DNA, 15 bp, Homo sapiens
acgaatgactctcta

SEQ ID NO: 100623 - DNA, 15 bp, Homo sapiens
aacgaatgactctct

SEQ ID NO: 100624 - DNA, 15 bp, Homo sapiens
gaacgaatgactctc

SEQ ID NO: 100625 - DNA, 15 bp, Homo sapiens
agaacgaatgactct

SEQ ID NO: 100626 - DNA, 15 bp, Homo sapiens
aagaacgaatgactc

SEQ ID NO: 100627 - DNA, 15 bp, Homo sapiens
aaagaacgaatgact

SEQ ID NO: 100628 - DNA, 15 bp, Homo sapiens
gaaagaacgaatgac

SEQ ID NO: 100629 - DNA, 15 bp, Homo sapiens
tgaaagaacgaatga

SEQ ID NO: 100630 - DNA, 15 bp, Homo sapiens
ttgaaagaacgaatg

SEQ ID NO: 100631 - DNA, 15 bp, Homo sapiens
tttgaaagaacgaat

SEQ ID NO: 100632 - DNA, 15 bp, Homo sapiens
ttttgaaagaacgaa

SEQ ID NO: 100633 - DNA, 15 bp, Homo sapiens
tttttgaaagaacga

SEQ ID NO: 100634 - DNA, 15 bp, Homo sapiens
atttttgaaagaacg

SEQ ID NO: 100635 - DNA, 15 bp, Homo sapiens
tatttttgaaagaac

SEQ ID NO: 100636 - DNA, 15 bp, Homo sapiens
atatttttgaaagaa

SEQ ID NO: 100637 - DNA, 15 bp, Homo sapiens
aatatttttgaaaga

SEQ ID NO: 100638 - DNA, 15 bp, Homo sapiens
aaatatttttgaaag

SEQ ID NO: 100639 - DNA, 15 bp, Homo sapiens
taaatatttttgaaa

SEQ ID NO: 100640 - DNA, 15 bp, Homo sapiens
gtaaatatttttgaa

SEQ ID NO: 100641 - DNA, 15 bp, Homo sapiens
agtaaatatttttga

SEQ ID NO: 100642 - DNA, 15 bp, Homo sapiens
cagtaaatatttttg

SEQ ID NO: 100643 - DNA, 15 bp, Homo sapiens
tcagtaaatattttt

SEQ ID NO: 100644 - DNA, 15 bp, Homo sapiens
ctcagtaaatatttt

SEQ ID NO: 100645 - DNA, 15 bp, Homo sapiens
gctcagtaaatattt

SEQ ID NO: 100646 - DNA, 15 bp, Homo sapiens
tgctcagtaaatatt

SEQ ID NO: 100647 - DNA, 15 bp, Homo sapiens
atgctcagtaaatat

SEQ ID NO: 100648 - DNA, 15 bp, Homo sapiens
gatgctcagtaaata

SEQ ID NO: 100649 - DNA, 15 bp, Homo sapiens
agatgctcagtaaat

SEQ ID NO: 100650 - DNA, 15 bp, Homo sapiens
cagatgctcagtaaa

SEQ ID NO: 100651 - DNA, 15 bp, Homo sapiens
gcagatgctcagtaa

SEQ ID NO: 100652 - DNA, 15 bp, Homo sapiens
agcagatgctcagta

SEQ ID NO: 100653 - DNA, 15 bp, Homo sapiens
tagcagatgctcagt

SEQ ID NO: 100654 - DNA, 15 bp, Homo sapiens
ttagcagatgctcag

SEQ ID NO: 100655 - DNA, 15 bp, Homo sapiens
cttagcagatgctca

SEQ ID NO: 100656 - DNA, 15 bp, Homo sapiens
acttagcagatgctc

SEQ ID NO: 100657 - DNA, 15 bp, Homo sapiens
cacttagcagatgct

SEQ ID NO: 100658 - DNA, 15 bp, Homo sapiens
gcacttagcagatgc

SEQ ID NO: 100659 - DNA, 15 bp, Homo sapiens
agcacttagcagatg

SEQ ID NO: 100660 - DNA, 15 bp, Homo sapiens
cagcacttagcagat

SEQ ID NO: 100661 - DNA, 15 bp, Homo sapiens
ccagcacttagcaga

SEQ ID NO: 100662 - DNA, 15 bp, Homo sapiens
tccagcacttagcag

SEQ ID NO: 100663 - DNA, 15 bp, Homo sapiens
ttccagcacttagca

SEQ ID NO: 100664 - DNA, 15 bp, Homo sapiens
tttccagcacttagc

SEQ ID NO: 100665 - DNA, 15 bp, Homo sapiens
gtttccagcacttag

SEQ ID NO: 100666 - DNA, 15 bp, Homo sapiens
agtttccagcactta

SEQ ID NO: 100667 - DNA, 15 bp, Homo sapiens
cagtttccagcactt

SEQ ID NO: 100668 - DNA, 15 bp, Homo sapiens
acagtttccagcact

SEQ ID NO: 100669 - DNA, 15 bp, Homo sapiens
aacagtttccagcac

SEQ ID NO: 100670 - DNA, 15 bp, Homo sapiens
aaacagtttccagca

SEQ ID NO: 100671 - DNA, 15 bp, Homo sapiens
gaaacagtttccagc

SEQ ID NO: 100672 - DNA, 15 bp, Homo sapiens
tgaaacagtttccag

SEQ ID NO: 100673 - DNA, 15 bp, Homo sapiens
ttgaaacagtttcca

SEQ ID NO: 100674 - DNA, 15 bp, Homo sapiens
attgaaacagtttcc

SEQ ID NO: 100675 - DNA, 15 bp, Homo sapiens
cattgaaacagtttc

SEQ ID NO: 100676 - DNA, 15 bp, Homo sapiens
acattgaaacagttt

SEQ ID NO: 100677 - DNA, 15 bp, Homo sapiens
cacattgaaacagtt

SEQ ID NO: 100678 - DNA, 15 bp, Homo sapiens
ccacattgaaacagt

SEQ ID NO: 100679 - DNA, 15 bp, Homo sapiens
cccacattgaaacag

SEQ ID NO: 100680 - DNA, 15 bp, Homo sapiens
ccccacattgaaaca

SEQ ID NO: 100681 - DNA, 15 bp, Homo sapiens
tccccacattgaaac

SEQ ID NO: 100682 - DNA, 15 bp, Homo sapiens
ttccccacattgaaa

SEQ ID NO: 100683 - DNA, 15 bp, Homo sapiens
attccccacattgaa

SEQ ID NO: 100684 - DNA, 15 bp, Homo sapiens
tattccccacattga

SEQ ID NO: 100685 - DNA, 15 bp, Homo sapiens
ttattccccacattg

SEQ ID NO: 100686 - DNA, 15 bp, Homo sapiens
tttattccccacatt

SEQ ID NO: 100687 - DNA, 15 bp, Homo sapiens
ttttattccccacat

SEQ ID NO: 100688 - DNA, 15 bp, Homo sapiens
gttttattccccaca

SEQ ID NO: 100689 - DNA, 15 bp, Homo sapiens
tgttttattccccac

SEQ ID NO: 100690 - DNA, 15 bp, Homo sapiens
ctgttttattcccca

SEQ ID NO: 100691 - DNA, 15 bp, Homo sapiens
actgttttattcccc

SEQ ID NO: 100692 - DNA, 15 bp, Homo sapiens
cactgttttattccc

SEQ ID NO: 100693 - DNA, 15 bp, Homo sapiens
tcactgttttattcc

SEQ ID NO: 100694 - DNA, 15 bp, Homo sapiens
ttcactgttttattc

SEQ ID NO: 100695 - DNA, 15 bp, Homo sapiens
cttcactgttttatt

SEQ ID NO: 100696 - DNA, 15 bp, Homo sapiens
tcttcactgttttat

SEQ ID NO: 100697 - DNA, 15 bp, Homo sapiens
ttcttcactgtttta

SEQ ID NO: 100698 - DNA, 15 bp, Homo sapiens
gttcttcactgtttt

SEQ ID NO: 100699 - DNA, 15 bp, Homo sapiens
cgttcttcactgttt

SEQ ID NO: 100700 - DNA, 15 bp, Homo sapiens
acgttcttcactgtt

SEQ ID NO: 100701 - DNA, 15 bp, Homo sapiens
cacgttcttcactgt

SEQ ID NO: 100702 - DNA, 15 bp, Homo sapiens
gcacgttcttcactg

SEQ ID NO: 100703 - DNA, 15 bp, Homo sapiens
ggcacgttcttcact

SEQ ID NO: 100704 - DNA, 15 bp, Homo sapiens
cggcacgttcttcac

SEQ ID NO: 100705 - DNA, 15 bp, Homo sapiens
tcggcacgttcttca

SEQ ID NO: 100706 - DNA, 15 bp, Homo sapiens
ctcggcacgttcttc

SEQ ID NO: 100707 - DNA, 15 bp, Homo sapiens
gctcggcacgttctt

SEQ ID NO: 100708 - DNA, 15 bp, Homo sapiens
tgctcggcacgttct

SEQ ID NO: 100709 - DNA, 15 bp, Homo sapiens
gtgctcggcacgttc

SEQ ID NO: 100710 - DNA, 15 bp, Homo sapiens
cgtgctcggcacgtt

SEQ ID NO: 100711 - DNA, 15 bp, Homo sapiens
ccgtgctcggcacgt

SEQ ID NO: 100712 - DNA, 15 bp, Homo sapiens
accgtgctcggcacg

SEQ ID NO: 100713 - DNA, 15 bp, Homo sapiens
caccgtgctcggcac

SEQ ID NO: 100714 - DNA, 15 bp, Homo sapiens
ccaccgtgctcggca

SEQ ID NO: 100715 - DNA, 15 bp, Homo sapiens
gccaccgtgctcggc

SEQ ID NO: 100716 - DNA, 15 bp, Homo sapiens
agccaccgtgctcgg

SEQ ID NO: 100717 - DNA, 15 bp, Homo sapiens
gagccaccgtgctcg

SEQ ID NO: 100718 - DNA, 15 bp, Homo sapiens
tgagccaccgtgctc

SEQ ID NO: 100719 - DNA, 15 bp, Homo sapiens
gtgagccaccgtgct

SEQ ID NO: 100720 - DNA, 15 bp, Homo sapiens
tgtgagccaccgtgc

SEQ ID NO: 100721 - DNA, 15 bp, Homo sapiens
gtgtgagccaccgtg

SEQ ID NO: 100722 - DNA, 15 bp, Homo sapiens
ggtgtgagccaccgt

SEQ ID NO: 100723 - DNA, 15 bp, Homo sapiens
aggtgtgagccaccg

SEQ ID NO: 100724 - DNA, 15 bp, Homo sapiens
gttacaggtgtgagc

SEQ ID NO: 100725 - DNA, 15 bp, Homo sapiens
ggttacaggtgtgag

SEQ ID NO: 100726 - DNA, 15 bp, Homo sapiens
gggttacaggtgtga

SEQ ID NO: 100727 - DNA, 15 bp, Homo sapiens
ggggttacaggtgtg

SEQ ID NO: 100728 - DNA, 15 bp, Homo sapiens
tggggttacaggtgt

SEQ ID NO: 100729 - DNA, 15 bp, Homo sapiens
gtggggttacaggtg

SEQ ID NO: 100730 - DNA, 15 bp, Homo sapiens
ggtggggttacaggt

SEQ ID NO: 100731 - DNA, 15 bp, Homo sapiens
tggtggggttacagg

SEQ ID NO: 100732 - DNA, 15 bp, Homo sapiens
gtggtggggttacag

SEQ ID NO: 100733 - DNA, 15 bp, Homo sapiens
agtggtggggttaca

SEQ ID NO: 100734 - DNA, 15 bp, Homo sapiens
aagtggtggggttac

SEQ ID NO: 100735 - DNA, 15 bp, Homo sapiens
aaagtggtggggtta

SEQ ID NO: 100736 - DNA, 15 bp, Homo sapiens
caaagtggtggggtt

SEQ ID NO: 100737 - DNA, 15 bp, Homo sapiens
ccaaagtggtggggt

SEQ ID NO: 100738 - DNA, 15 bp, Homo sapiens
tccaaagtggtgggg

SEQ ID NO: 100739 - DNA, 15 bp, Homo sapiens
ttccaaagtggtggg

SEQ ID NO: 100740 - DNA, 15 bp, Homo sapiens
cttccaaagtggtgg

SEQ ID NO: 100741 - DNA, 15 bp, Homo sapiens
ccttccaaagtggtg

SEQ ID NO: 100742 - DNA, 15 bp, Homo sapiens
gccttccaaagtggt

SEQ ID NO: 100743 - DNA, 15 bp, Homo sapiens
ggccttccaaagtgg

SEQ ID NO: 100744 - DNA, 15 bp, Homo sapiens
cggccttccaaagtg

SEQ ID NO: 100745 - DNA, 15 bp, Homo sapiens
tcggccttccaaagt

SEQ ID NO: 100746 - DNA, 15 bp, Homo sapiens
ctcggccttccaaag

SEQ ID NO: 100747 - DNA, 15 bp, Homo sapiens
cctcggccttccaaa

SEQ ID NO: 100748 - DNA, 15 bp, Homo sapiens
acctcggccttccaa

SEQ ID NO: 100749 - DNA, 15 bp, Homo sapiens
cacctcggccttcca

SEQ ID NO: 100750 - DNA, 15 bp, Homo sapiens
ccacctcggccttcc

SEQ ID NO: 100751 - DNA, 15 bp, Homo sapiens
cccacctcggccttc

SEQ ID NO: 100752 - DNA, 15 bp, Homo sapiens
acccacctcggcctt

SEQ ID NO: 100753 - DNA, 15 bp, Homo sapiens
cacccacctcggcct

SEQ ID NO: 100754 - DNA, 15 bp, Homo sapiens
ccacccacctcggcc

SEQ ID NO: 100755 - DNA, 15 bp, Homo sapiens
tccacccacctcggc

SEQ ID NO: 100756 - DNA, 15 bp, Homo sapiens
atccacccacctcgg

SEQ ID NO: 100757 - DNA, 15 bp, Homo sapiens
gatccacccacctcg

SEQ ID NO: 100758 - DNA, 15 bp, Homo sapiens
tgatccacccacctc

SEQ ID NO: 100759 - DNA, 15 bp, Homo sapiens
gtgatccacccacct

SEQ ID NO: 100760 - DNA, 15 bp, Homo sapiens
agtgatccacccacc

SEQ ID NO: 100761 - DNA, 15 bp, Homo sapiens
aagtgatccacccac

SEQ ID NO: 100762 - DNA, 15 bp, Homo sapiens
caagtgatccaccca

SEQ ID NO: 100763 - DNA, 15 bp, Homo sapiens
tcaagtgatccaccc

SEQ ID NO: 100764 - DNA, 15 bp, Homo sapiens
ctcaagtgatccacc

SEQ ID NO: 100765 - DNA, 15 bp, Homo sapiens
cctcaagtgatccac

SEQ ID NO: 100766 - DNA, 15 bp, Homo sapiens
acctcaagtgatcca

SEQ ID NO: 100767 - DNA, 15 bp, Homo sapiens
gacctcaagtgatcc

SEQ ID NO: 100768 - DNA, 15 bp, Homo sapiens
cactcctgacctcaa

SEQ ID NO: 100769 - DNA, 15 bp, Homo sapiens
gcactcctgacctca

SEQ ID NO: 100770 - DNA, 15 bp, Homo sapiens
cgcactcctgacctc

SEQ ID NO: 100771 - DNA, 15 bp, Homo sapiens
tcgcactcctgacct

SEQ ID NO: 100772 - DNA, 15 bp, Homo sapiens
ctcgcactcctgacc

SEQ ID NO: 100773 - DNA, 15 bp, Homo sapiens
tctcgcactcctgac

SEQ ID NO: 100774 - DNA, 15 bp, Homo sapiens
ttctcgcactcctga

SEQ ID NO: 100775 - DNA, 15 bp, Homo sapiens
gttctcgcactcctg

SEQ ID NO: 100776 - DNA, 15 bp, Homo sapiens
ggttctcgcactcct

SEQ ID NO: 100777 - DNA, 15 bp, Homo sapiens
gggttctcgcactcc

SEQ ID NO: 100778 - DNA, 15 bp, Homo sapiens
ggggttctcgcactc

SEQ ID NO: 100779 - DNA, 15 bp, Homo sapiens
cggggttctcgcact

SEQ ID NO: 100780 - DNA, 15 bp, Homo sapiens
acggggttctcgcac

SEQ ID NO: 100781 - DNA, 15 bp, Homo sapiens
gacggggttctcgca

SEQ ID NO: 100782 - DNA, 15 bp, Homo sapiens
ggacggggttctcgc

SEQ ID NO: 100783 - DNA, 15 bp, Homo sapiens
gggacggggttctcg

SEQ ID NO: 100784 - DNA, 15 bp, Homo sapiens
agggacggggttctc

SEQ ID NO: 100785 - DNA, 15 bp, Homo sapiens
tagggacggggttct

SEQ ID NO: 100786 - DNA, 15 bp, Homo sapiens
ttagggacggggttc

SEQ ID NO: 100787 - DNA, 15 bp, Homo sapiens
attagggacggggtt

SEQ ID NO: 100788 - DNA, 15 bp, Homo sapiens
tattagggacggggt

SEQ ID NO: 100789 - DNA, 15 bp, Homo sapiens
ctattagggacgggg

SEQ ID NO: 100790 - DNA, 15 bp, Homo sapiens
tctattagggacggg

SEQ ID NO: 100791 - DNA, 15 bp, Homo sapiens
ttctattagggacgg

SEQ ID NO: 100792 - DNA, 15 bp, Homo sapiens
tttctattagggacg

SEQ ID NO: 100793 - DNA, 15 bp, Homo sapiens
atttctattagggac

SEQ ID NO: 100794 - DNA, 15 bp, Homo sapiens
catttctattaggga

SEQ ID NO: 100795 - DNA, 15 bp, Homo sapiens
gcatttctattaggg

SEQ ID NO: 100796 - DNA, 15 bp, Homo sapiens
tgcatttctattagg

SEQ ID NO: 100797 - DNA, 15 bp, Homo sapiens
ttgcatttctattag

SEQ ID NO: 100798 - DNA, 15 bp, Homo sapiens
tttgcatttctatta

SEQ ID NO: 100799 - DNA, 15 bp, Homo sapiens
ttttgcatttctatt

SEQ ID NO: 100800 - DNA, 15 bp, Homo sapiens
tttttgcatttctat

SEQ ID NO: 100801 - DNA, 15 bp, Homo sapiens
ttttttgcatttcta

SEQ ID NO: 100802 - DNA, 15 bp, Homo sapiens
tttttttgcatttct

SEQ ID NO: 100803 - DNA, 15 bp, Homo sapiens
ttttttttgcatttc

SEQ ID NO: 100804 - DNA, 15 bp, Homo sapiens
attttttttgcattt

SEQ ID NO: 100805 - DNA, 15 bp, Homo sapiens
aattttttttgcatt

SEQ ID NO: 100806 - DNA, 15 bp, Homo sapiens
taattttttttgcat

SEQ ID NO: 100807 - DNA, 15 bp, Homo sapiens
ctaattttttttgca

SEQ ID NO: 100808 - DNA, 15 bp, Homo sapiens
gctaattttttttgc

SEQ ID NO: 100809 - DNA, 15 bp, Homo sapiens
agctaattttttttg

SEQ ID NO: 100810 - DNA, 15 bp, Homo sapiens
cagctaatttttttt

SEQ ID NO: 100811 - DNA, 15 bp, Homo sapiens
ccagctaattttttt

SEQ ID NO: 100812 - DNA, 15 bp, Homo sapiens
cccagctaatttttt

SEQ ID NO: 100813 - DNA, 15 bp, Homo sapiens
gcccagctaattttt

SEQ ID NO: 100814 - DNA, 15 bp, Homo sapiens
tgcccagctaatttt

SEQ ID NO: 100815 - DNA, 15 bp, Homo sapiens
atgcccagctaattt

SEQ ID NO: 100816 - DNA, 15 bp, Homo sapiens
catgcccagctaatt

SEQ ID NO: 100817 - DNA, 15 bp, Homo sapiens
ccatgcccagctaat

SEQ ID NO: 100818 - DNA, 15 bp, Homo sapiens
accatgcccagctaa

SEQ ID NO: 100819 - DNA, 15 bp, Homo sapiens
caccatgcccagcta

SEQ ID NO: 100820 - DNA, 15 bp, Homo sapiens
ccaccatgcccagct

SEQ ID NO: 100821 - DNA, 15 bp, Homo sapiens
gccaccatgcccagc

SEQ ID NO: 100822 - DNA, 15 bp, Homo sapiens
ggccaccatgcccag

SEQ ID NO: 100823 - DNA, 15 bp, Homo sapiens
gggccaccatgccca

SEQ ID NO: 100824 - DNA, 15 bp, Homo sapiens
tgggccaccatgccc

SEQ ID NO: 100825 - DNA, 15 bp, Homo sapiens
atgggccaccatgcc

SEQ ID NO: 100826 - DNA, 15 bp, Homo sapiens
catgggccaccatgc

SEQ ID NO: 100827 - DNA, 15 bp, Homo sapiens
gcatgggccaccatg

SEQ ID NO: 100828 - DNA, 15 bp, Homo sapiens
ggcatgggccaccat

SEQ ID NO: 100829 - DNA, 15 bp, Homo sapiens
aggcatgggccacca

SEQ ID NO: 100830 - DNA, 15 bp, Homo sapiens
caggcatgggccacc

SEQ ID NO: 100831 - DNA, 15 bp, Homo sapiens
acaggcatgggccac

SEQ ID NO: 100832 - DNA, 15 bp, Homo sapiens
tacaggcatgggcca

SEQ ID NO: 100833 - DNA, 15 bp, Homo sapiens
ctacaggcatgggcc

SEQ ID NO: 100834 - DNA, 15 bp, Homo sapiens
actacaggcatgggc

SEQ ID NO: 100835 - DNA, 15 bp, Homo sapiens
gactacaggcatggg

SEQ ID NO: 100836 - DNA, 15 bp, Homo sapiens
ggactacaggcatgg

SEQ ID NO: 100837 - DNA, 15 bp, Homo sapiens
ctgggactacaggca

SEQ ID NO: 100838 - DNA, 15 bp, Homo sapiens
gctgggactacaggc

SEQ ID NO: 100839 - DNA, 15 bp, Homo sapiens
gagctgggactacag

SEQ ID NO: 100840 - DNA, 15 bp, Homo sapiens
ggagctgggactaca

SEQ ID NO: 100841 - DNA, 15 bp, Homo sapiens
aggagctgggactac

SEQ ID NO: 100842 - DNA, 15 bp, Homo sapiens
aaggagctgggacta

SEQ ID NO: 100843 - DNA, 15 bp, Homo sapiens
caaggagctgggact

SEQ ID NO: 100844 - DNA, 15 bp, Homo sapiens
ccaaggagctgggac

SEQ ID NO: 100845 - DNA, 15 bp, Homo sapiens
cccaaggagctggga

SEQ ID NO: 100846 - DNA, 15 bp, Homo sapiens
tcccaaggagctggg

SEQ ID NO: 100847 - DNA, 15 bp, Homo sapiens
ctcccaaggagctgg

SEQ ID NO: 100848 - DNA, 15 bp, Homo sapiens
cctcccaaggagctg

SEQ ID NO: 100849 - DNA, 15 bp, Homo sapiens
gcctcccaaggagct

SEQ ID NO: 100850 - DNA, 15 bp, Homo sapiens
agcctcccaaggagc

SEQ ID NO: 100851 - DNA, 15 bp, Homo sapiens
cagcctcccaaggag

SEQ ID NO: 100852 - DNA, 15 bp, Homo sapiens
tcagcctcccaagga

SEQ ID NO: 100853 - DNA, 15 bp, Homo sapiens
ctcagcctcccaagg

SEQ ID NO: 100854 - DNA, 15 bp, Homo sapiens
cgcctcagcctccca

SEQ ID NO: 100855 - DNA, 15 bp, Homo sapiens
tcgcctcagcctccc

SEQ ID NO: 100856 - DNA, 15 bp, Homo sapiens
ctcgcctcagcctcc

SEQ ID NO: 100857 - DNA, 15 bp, Homo sapiens
tctcgcctcagcctc

SEQ ID NO: 100858 - DNA, 15 bp, Homo sapiens
ctctcgcctcagcct

SEQ ID NO: 100859 - DNA, 15 bp, Homo sapiens
cctctcgcctcagcc

SEQ ID NO: 100860 - DNA, 15 bp, Homo sapiens
tcctctcgcctcagc

SEQ ID NO: 100861 - DNA, 15 bp, Homo sapiens
atcctctcgcctcag

SEQ ID NO: 100862 - DNA, 15 bp, Homo sapiens
aatcctctcgcctca

SEQ ID NO: 100863 - DNA, 15 bp, Homo sapiens
caatcctctcgcctc

SEQ ID NO: 100864 - DNA, 15 bp, Homo sapiens
gcaatcctctcgcct

SEQ ID NO: 100865 - DNA, 15 bp, Homo sapiens
agcaatcctctcgcc

SEQ ID NO: 100866 - DNA, 15 bp, Homo sapiens
aagcaatcctctcgc

SEQ ID NO: 100867 - DNA, 15 bp, Homo sapiens
caagcaatcctctcg

SEQ ID NO: 100868 - DNA, 15 bp, Homo sapiens
tcaagcaatcctctc

SEQ ID NO: 100869 - DNA, 15 bp, Homo sapiens
ctcaagcaatcctct

SEQ ID NO: 100870 - DNA, 15 bp, Homo sapiens
tctcctgggctcaag

SEQ ID NO: 100871 - DNA, 15 bp, Homo sapiens
atctcctgggctcaa

SEQ ID NO: 100872 - DNA, 15 bp, Homo sapiens
gatctcctgggctca

SEQ ID NO: 100873 - DNA, 15 bp, Homo sapiens
agatctcctgggctc

SEQ ID NO: 100874 - DNA, 15 bp, Homo sapiens
tagatctcctgggct

SEQ ID NO: 100875 - DNA, 15 bp, Homo sapiens
ctagatctcctgggc

SEQ ID NO: 100876 - DNA, 15 bp, Homo sapiens
cctagatctcctggg

SEQ ID NO: 100877 - DNA, 15 bp, Homo sapiens
gcctagatctcctgg

SEQ ID NO: 100878 - DNA, 15 bp, Homo sapiens
agcctagatctcctg

SEQ ID NO: 100879 - DNA, 15 bp, Homo sapiens
cagcctagatctcct

SEQ ID NO: 100880 - DNA, 15 bp, Homo sapiens
gcagcctagatctcc

SEQ ID NO: 100881 - DNA, 15 bp, Homo sapiens
tgcagcctagatctc

SEQ ID NO: 100882 - DNA, 15 bp, Homo sapiens
ctgcagcctagatct

SEQ ID NO: 100883 - DNA, 15 bp, Homo sapiens
actgcagcctagatc

SEQ ID NO: 100884 - DNA, 15 bp, Homo sapiens
cactgcagcctagat

SEQ ID NO: 100885 - DNA, 15 bp, Homo sapiens
gcactgcagcctaga

SEQ ID NO: 100886 - DNA, 15 bp, Homo sapiens
cgcactgcagcctag

SEQ ID NO: 100887 - DNA, 15 bp, Homo sapiens
gcgcactgcagccta

SEQ ID NO: 100888 - DNA, 15 bp, Homo sapiens
ggcgcactgcagcct

SEQ ID NO: 100889 - DNA, 15 bp, Homo sapiens
tggcgcactgcagcc

SEQ ID NO: 100890 - DNA, 15 bp, Homo sapiens
atggcgcactgcagc

SEQ ID NO: 100891 - DNA, 15 bp, Homo sapiens
catggcgcactgcag

SEQ ID NO: 100892 - DNA, 15 bp, Homo sapiens
acatggcgcactgca

SEQ ID NO: 100893 - DNA, 15 bp, Homo sapiens
aacatggcgcactgc

SEQ ID NO: 100894 - DNA, 15 bp, Homo sapiens
aaacatggcgcactg

SEQ ID NO: 100895 - DNA, 15 bp, Homo sapiens
caaacatggcgcact

SEQ ID NO: 100896 - DNA, 15 bp, Homo sapiens
acaaacatggcgcac

SEQ ID NO: 100897 - DNA, 15 bp, Homo sapiens
cacaaacatggcgca

SEQ ID NO: 100898 - DNA, 15 bp, Homo sapiens
gcacaaacatggcgc

SEQ ID NO: 100899 - DNA, 15 bp, Homo sapiens
ggcacaaacatggcg

SEQ ID NO: 100900 - DNA, 15 bp, Homo sapiens
tggcacaaacatggc

SEQ ID NO: 100901 - DNA, 15 bp, Homo sapiens
gtggcacaaacatgg

SEQ ID NO: 100902 - DNA, 15 bp, Homo sapiens
agtggcacaaacatg

SEQ ID NO: 100903 - DNA, 15 bp, Homo sapiens
cagtggcacaaacat

SEQ ID NO: 100904 - DNA, 15 bp, Homo sapiens
gcagtggcacaaaca

SEQ ID NO: 100905 - DNA, 15 bp, Homo sapiens
tgcagtggcacaaac

SEQ ID NO: 100906 - DNA, 15 bp, Homo sapiens
atgcagtggcacaaa

SEQ ID NO: 100907 - DNA, 15 bp, Homo sapiens
aatgcagtggcacaa

SEQ ID NO: 100908 - DNA, 15 bp, Homo sapiens
gaatgcagtggcaca

SEQ ID NO: 100909 - DNA, 15 bp, Homo sapiens
ggaatgcagtggcac

SEQ ID NO: 100910 - DNA, 15 bp, Homo sapiens
tggaatgcagtggca

SEQ ID NO: 100911 - DNA, 15 bp, Homo sapiens
ctggaatgcagtggc

SEQ ID NO: 100912 - DNA, 15 bp, Homo sapiens
gctggaatgcagtgg

SEQ ID NO: 100913 - DNA, 15 bp, Homo sapiens
ggctggaatgcagtg

SEQ ID NO: 100914 - DNA, 15 bp, Homo sapiens
aggctggaatgcagt

SEQ ID NO: 100915 - DNA, 15 bp, Homo sapiens
caggctggaatgcag

SEQ ID NO: 100916 - DNA, 15 bp, Homo sapiens
ccaggctggaatgca

SEQ ID NO: 100917 - DNA, 15 bp, Homo sapiens
cccaggctggaatgc

SEQ ID NO: 100918 - DNA, 15 bp, Homo sapiens
acccaggctggaatg

SEQ ID NO: 100919 - DNA, 15 bp, Homo sapiens
tacccaggctggaat

SEQ ID NO: 100920 - DNA, 15 bp, Homo sapiens
ttacccaggctggaa

SEQ ID NO: 100921 - DNA, 15 bp, Homo sapiens
gttacccaggctgga

SEQ ID NO: 100922 - DNA, 15 bp, Homo sapiens
tgttacccaggctgg

SEQ ID NO: 100923 - DNA, 15 bp, Homo sapiens
ctgttacccaggctg

SEQ ID NO: 100924 - DNA, 15 bp, Homo sapiens
tctgttacccaggct

SEQ ID NO: 100925 - DNA, 15 bp, Homo sapiens
ttctgttacccaggc

SEQ ID NO: 100926 - DNA, 15 bp, Homo sapiens
attctgttacccagg

SEQ ID NO: 100927 - DNA, 15 bp, Homo sapiens
cattctgttacccag

SEQ ID NO: 100928 - DNA, 15 bp, Homo sapiens
tcattctgttaccca

SEQ ID NO: 100929 - DNA, 15 bp, Homo sapiens
ctcattctgttaccc

SEQ ID NO: 100930 - DNA, 15 bp, Homo sapiens
tctcattctgttacc

SEQ ID NO: 100931 - DNA, 15 bp, Homo sapiens
gtctcattctgttac

SEQ ID NO: 100932 - DNA, 15 bp, Homo sapiens
ggtctcattctgtta

SEQ ID NO: 100933 - DNA, 15 bp, Homo sapiens
gggtctcattctgtt

SEQ ID NO: 100934 - DNA, 15 bp, Homo sapiens
agggtctcattctgt

SEQ ID NO: 100935 - DNA, 15 bp, Homo sapiens
cagggtctcattctg

SEQ ID NO: 100936 - DNA, 15 bp, Homo sapiens
acagggtctcattct

SEQ ID NO: 100937 - DNA, 15 bp, Homo sapiens
gacagggtctcattc

SEQ ID NO: 100938 - DNA, 15 bp, Homo sapiens
agacagggtctcatt

SEQ ID NO: 100939 - DNA, 15 bp, Homo sapiens
gagacagggtctcat

SEQ ID NO: 100940 - DNA, 15 bp, Homo sapiens
tgagacagggtctca

SEQ ID NO: 100941 - DNA, 15 bp, Homo sapiens
ttgagacagggtctc

SEQ ID NO: 100942 - DNA, 15 bp, Homo sapiens
gttgagacagggtct

SEQ ID NO: 100943 - DNA, 15 bp, Homo sapiens
tgttgagacagggtc

SEQ ID NO: 100944 - DNA, 15 bp, Homo sapiens
ttgttgagacagggt

SEQ ID NO: 100945 - DNA, 15 bp, Homo sapiens
tttgttgagacaggg

SEQ ID NO: 100946 - DNA, 15 bp, Homo sapiens
ttttgttgagacagg

SEQ ID NO: 100947 - DNA, 15 bp, Homo sapiens
tttttgttgagacag

SEQ ID NO: 100948 - DNA, 15 bp, Homo sapiens
ttttttgttgagaca

SEQ ID NO: 100949 - DNA, 15 bp, Homo sapiens
tttttttgttgagac

SEQ ID NO: 100950 - DNA, 15 bp, Homo sapiens
ctttttttgttgaga

SEQ ID NO: 100951 - DNA, 15 bp, Homo sapiens
tctttttttgttgag

SEQ ID NO: 100952 - DNA, 15 bp, Homo sapiens
ttctttttttgttga

SEQ ID NO: 100953 - DNA, 15 bp, Homo sapiens
tttctttttttgttg

SEQ ID NO: 100954 - DNA, 15 bp, Homo sapiens
ttttctttttttgtt

SEQ ID NO: 100955 - DNA, 15 bp, Homo sapiens
cttttctttttttgt

SEQ ID NO: 100956 - DNA, 15 bp, Homo sapiens
tcttttctttttttg

SEQ ID NO: 100957 - DNA, 15 bp, Homo sapiens
ttcttttcttttttt

SEQ ID NO: 100958 - DNA, 15 bp, Homo sapiens
tttcttttctttttt

SEQ ID NO: 100959 - DNA, 15 bp, Homo sapiens
ttttcttttcttttt

SEQ ID NO: 100960 - DNA, 15 bp, Homo sapiens
cttttcttttctttt

SEQ ID NO: 100961 - DNA, 15 bp, Homo sapiens
tcttttcttttcttt

SEQ ID NO: 100962 - DNA, 15 bp, Homo sapiens
ctcttttcttttctt

SEQ ID NO: 100963 - DNA, 15 bp, Homo sapiens
tctcttttcttttct

SEQ ID NO: 100964 - DNA, 15 bp, Homo sapiens
ttctcttttcttttc

SEQ ID NO: 100965 - DNA, 15 bp, Homo sapiens
cttctcttttctttt

SEQ ID NO: 100966 - DNA, 15 bp, Homo sapiens
tcttctcttttcttt

SEQ ID NO: 100967 - DNA, 15 bp, Homo sapiens
ttcttctcttttctt

SEQ ID NO: 100968 - DNA, 15 bp, Homo sapiens
tttcttctcttttct

SEQ ID NO: 100969 - DNA, 15 bp, Homo sapiens
ttttcttctcttttc

SEQ ID NO: 100970 - DNA, 15 bp, Homo sapiens
cttttcttctctttt

SEQ ID NO: 100971 - DNA, 15 bp, Homo sapiens
tcttttcttctcttt

SEQ ID NO: 100972 - DNA, 15 bp, Homo sapiens
ctcttttcttctctt

SEQ ID NO: 100973 - DNA, 15 bp, Homo sapiens
tctcttttcttctct

SEQ ID NO: 100974 - DNA, 15 bp, Homo sapiens
ttctcttttcttctc

SEQ ID NO: 100975 - DNA, 15 bp, Homo sapiens
tttctcttttcttct

SEQ ID NO: 100976 - DNA, 15 bp, Homo sapiens
ttttctcttttcttc

SEQ ID NO: 100977 - DNA, 15 bp, Homo sapiens
cttttctcttttctt

SEQ ID NO: 100978 - DNA, 15 bp, Homo sapiens
tcttttctcttttct

SEQ ID NO: 100979 - DNA, 15 bp, Homo sapiens
ttcttttctcttttc

SEQ ID NO: 100980 - DNA, 15 bp, Homo sapiens
tttcttttctctttt

SEQ ID NO: 100981 - DNA, 15 bp, Homo sapiens
ctttcttttctcttt

SEQ ID NO: 100982 - DNA, 15 bp, Homo sapiens
tctttcttttctctt

SEQ ID NO: 100983 - DNA, 15 bp, Homo sapiens
gtctttcttttctct

SEQ ID NO: 100984 - DNA, 15 bp, Homo sapiens
tgtctttcttttctc

SEQ ID NO: 100985 - DNA, 15 bp, Homo sapiens
ctgtctttcttttct

SEQ ID NO: 100986 - DNA, 15 bp, Homo sapiens
cctgtctttcttttc

SEQ ID NO: 100987 - DNA, 15 bp, Homo sapiens
ccctgtctttctttt

SEQ ID NO: 100988 - DNA, 15 bp, Homo sapiens
tccctgtctttcttt

SEQ ID NO: 100989 - DNA, 15 bp, Homo sapiens
ctccctgtctttctt

SEQ ID NO: 100990 - DNA, 15 bp, Homo sapiens
cctccctgtctttct

SEQ ID NO: 100991 - DNA, 15 bp, Homo sapiens
ccctccctgtctttc

SEQ ID NO: 100992 - DNA, 15 bp, Homo sapiens
tccctccctgtcttt

SEQ ID NO: 100993 - DNA, 15 bp, Homo sapiens
ctccctccctgtctt

SEQ ID NO: 100994 - DNA, 15 bp, Homo sapiens
cctccctccctgtct

SEQ ID NO: 100995 - DNA, 15 bp, Homo sapiens
ccctccctccctgtc

SEQ ID NO: 100996 - DNA, 15 bp, Homo sapiens
tccctccctccctgt

SEQ ID NO: 100997 - DNA, 15 bp, Homo sapiens
ctccctccctccctg

SEQ ID NO: 100998 - DNA, 15 bp, Homo sapiens
cctccctccctccct

SEQ ID NO: 100999 - DNA, 15 bp, Homo sapiens
tcctccctccctccc

SEQ ID NO: 101000 - DNA, 15 bp, Homo sapiens
ttcctccctccctcc

SEQ ID NO: 101001 - DNA, 15 bp, Homo sapiens
cttcctccctccctc

SEQ ID NO: 101002 - DNA, 15 bp, Homo sapiens
ccttcctccctccct

SEQ ID NO: 101003 - DNA, 15 bp, Homo sapiens
tccttcctccctccc

SEQ ID NO: 101004 - DNA, 15 bp, Homo sapiens
ttccttcctccctcc

SEQ ID NO: 101005 - DNA, 15 bp, Homo sapiens
cttccttcctccctc

SEQ ID NO: 101006 - DNA, 15 bp, Homo sapiens
ccttccttcctccct

SEQ ID NO: 101007 - DNA, 15 bp, Homo sapiens
cccttccttcctccc

SEQ ID NO: 101008 - DNA, 15 bp, Homo sapiens
tcccttccttcctcc

SEQ ID NO: 101009 - DNA, 15 bp, Homo sapiens
ctcccttccttcctc

SEQ ID NO: 101010 - DNA, 15 bp, Homo sapiens
cctcccttccttcct

SEQ ID NO: 101011 - DNA, 15 bp, Homo sapiens
ccctcccttccttcc

SEQ ID NO: 101012 - DNA, 15 bp, Homo sapiens
tccctcccttccttc

SEQ ID NO: 101013 - DNA, 15 bp, Homo sapiens
ctccctcccttcctt

SEQ ID NO: 101014 - DNA, 15 bp, Homo sapiens
cctccctcccttcct

SEQ ID NO: 101015 - DNA, 15 bp, Homo sapiens
ccctccctcccttcc

SEQ ID NO: 101016 - DNA, 15 bp, Homo sapiens
tccctccctcccttc

SEQ ID NO: 101017 - DNA, 15 bp, Homo sapiens
ctccctccctccctt

SEQ ID NO: 101018 - DNA, 15 bp, Homo sapiens
ccctccctccctccc

SEQ ID NO: 101019 - DNA, 15 bp, Homo sapiens
tccctccctccctcc

SEQ ID NO: 101020 - DNA, 15 bp, Homo sapiens
ttccctccctccctc

SEQ ID NO: 101021 - DNA, 15 bp, Homo sapiens
tttccctccctccct

SEQ ID NO: 101022 - DNA, 15 bp, Homo sapiens
ttttccctccctccc

SEQ ID NO: 101023 - DNA, 15 bp, Homo sapiens
attttccctccctcc

SEQ ID NO: 101024 - DNA, 15 bp, Homo sapiens
tattttccctccctc

SEQ ID NO: 101025 - DNA, 15 bp, Homo sapiens
ctattttccctccct

SEQ ID NO: 101026 - DNA, 15 bp, Homo sapiens
tctattttccctccc

SEQ ID NO: 101027 - DNA, 15 bp, Homo sapiens
ctctattttccctcc

SEQ ID NO: 101028 - DNA, 15 bp, Homo sapiens
gctctattttccctc

SEQ ID NO: 101029 - DNA, 15 bp, Homo sapiens
ggctctattttccct

SEQ ID NO: 101030 - DNA, 15 bp, Homo sapiens
tggctctattttccc

SEQ ID NO: 101031 - DNA, 15 bp, Homo sapiens
ctggctctattttcc

SEQ ID NO: 101032 - DNA, 15 bp, Homo sapiens
cctggctctattttc

SEQ ID NO: 101033 - DNA, 15 bp, Homo sapiens
gcctggctctatttt

SEQ ID NO: 101034 - DNA, 15 bp, Homo sapiens
tgcctggctctattt

SEQ ID NO: 101035 - DNA, 15 bp, Homo sapiens
atgcctggctctatt

SEQ ID NO: 101036 - DNA, 15 bp, Homo sapiens
tatgcctggctctat

SEQ ID NO: 101037 - DNA, 15 bp, Homo sapiens
ttatgcctggctcta

SEQ ID NO: 101038 - DNA, 15 bp, Homo sapiens
tttatgcctggctct

SEQ ID NO: 101039 - DNA, 15 bp, Homo sapiens
gtttatgcctggctc

SEQ ID NO: 101040 - DNA, 15 bp, Homo sapiens
agtttatgcctggct

SEQ ID NO: 101041 - DNA, 15 bp, Homo sapiens
aagtttatgcctggc

SEQ ID NO: 101042 - DNA, 15 bp, Homo sapiens
taagtttatgcctgg

SEQ ID NO: 101043 - DNA, 15 bp, Homo sapiens
ctaagtttatgcctg

SEQ ID NO: 101044 - DNA, 15 bp, Homo sapiens
tctaagtttatgcct

SEQ ID NO: 101045 - DNA, 15 bp, Homo sapiens
ttctaagtttatgcc

SEQ ID NO: 101046 - DNA, 15 bp, Homo sapiens
tttctaagtttatgc

SEQ ID NO: 101047 - DNA, 15 bp, Homo sapiens
ctttctaagtttatg

SEQ ID NO: 101048 - DNA, 15 bp, Homo sapiens
tctttctaagtttat

SEQ ID NO: 101049 - DNA, 15 bp, Homo sapiens
atctttctaagttta

SEQ ID NO: 101050 - DNA, 15 bp, Homo sapiens
gatctttctaagttt

SEQ ID NO: 101051 - DNA, 15 bp, Homo sapiens
cgatctttctaagtt

SEQ ID NO: 101052 - DNA, 15 bp, Homo sapiens
acgatctttctaagt

SEQ ID NO: 101053 - DNA, 15 bp, Homo sapiens
aacgatctttctaag

SEQ ID NO: 101054 - DNA, 15 bp, Homo sapiens
aaacgatctttctaa

SEQ ID NO: 101055 - DNA, 15 bp, Homo sapiens
caaacgatctttcta

SEQ ID NO: 101056 - DNA, 15 bp, Homo sapiens
ccaaacgatctttct

SEQ ID NO: 101057 - DNA, 15 bp, Homo sapiens
tccaaacgatctttc

SEQ ID NO: 101058 - DNA, 15 bp, Homo sapiens
ctccaaacgatcttt

SEQ ID NO: 101059 - DNA, 15 bp, Homo sapiens
cctccaaacgatctt

SEQ ID NO: 101060 - DNA, 15 bp, Homo sapiens
gcctccaaacgatct

SEQ ID NO: 101061 - DNA, 15 bp, Homo sapiens
ggcctccaaacgatc

SEQ ID NO: 101062 - DNA, 15 bp, Homo sapiens
tggcctccaaacgat

SEQ ID NO: 101063 - DNA, 15 bp, Homo sapiens
ctggcctccaaacga

SEQ ID NO: 101064 - DNA, 15 bp, Homo sapiens
cctggcctccaaacg

SEQ ID NO: 101065 - DNA, 15 bp, Homo sapiens
gcctggcctccaaac

SEQ ID NO: 101066 - DNA, 15 bp, Homo sapiens
tgcctggcctccaaa

SEQ ID NO: 101067 - DNA, 15 bp, Homo sapiens
gtgcctggcctccaa

SEQ ID NO: 101068 - DNA, 15 bp, Homo sapiens
tgtgcctggcctcca

SEQ ID NO: 101069 - DNA, 15 bp, Homo sapiens
ttgtgcctggcctcc

SEQ ID NO: 101070 - DNA, 15 bp, Homo sapiens
attgtgcctggcctc

SEQ ID NO: 101071 - DNA, 15 bp, Homo sapiens
cattgtgcctggcct

SEQ ID NO: 101072 - DNA, 15 bp, Homo sapiens
ccattgtgcctggcc

SEQ ID NO: 101073 - DNA, 15 bp, Homo sapiens
gccattgtgcctggc

SEQ ID NO: 101074 - DNA, 15 bp, Homo sapiens
agccattgtgcctgg

SEQ ID NO: 101075 - DNA, 15 bp, Homo sapiens
gagccattgtgcctg

SEQ ID NO: 101076 - DNA, 15 bp, Homo sapiens
tgagccattgtgcct

SEQ ID NO: 101077 - DNA, 15 bp, Homo sapiens
gtgagccattgtgcc

SEQ ID NO: 101078 - DNA, 15 bp, Homo sapiens
tgtgagccattgtgc

SEQ ID NO: 101079 - DNA, 15 bp, Homo sapiens
gtgtgagccattgtg

SEQ ID NO: 101080 - DNA, 15 bp, Homo sapiens
ggtgtgagccattgt

SEQ ID NO: 101081 - DNA, 15 bp, Homo sapiens
aggtgtgagccattg

SEQ ID NO: 101082 - DNA, 15 bp, Homo sapiens
caggtgtgagccatt

SEQ ID NO: 101083 - DNA, 15 bp, Homo sapiens
acaggtgtgagccat

SEQ ID NO: 101084 - DNA, 15 bp, Homo sapiens
tgccttggcctccca

SEQ ID NO: 101085 - DNA, 15 bp, Homo sapiens
ttgccttggcctccc

SEQ ID NO: 101086 - DNA, 15 bp, Homo sapiens
cttgccttggcctcc

SEQ ID NO: 101087 - DNA, 15 bp, Homo sapiens
gcttgccttggcctc

SEQ ID NO: 101088 - DNA, 15 bp, Homo sapiens
tgcttgccttggcct

SEQ ID NO: 101089 - DNA, 15 bp, Homo sapiens
ctgcttgccttggcc

SEQ ID NO: 101090 - DNA, 15 bp, Homo sapiens
tctgcttgccttggc

SEQ ID NO: 101091 - DNA, 15 bp, Homo sapiens
atctgcttgccttgg

SEQ ID NO: 101092 - DNA, 15 bp, Homo sapiens
gatctgcttgccttg

SEQ ID NO: 101093 - DNA, 15 bp, Homo sapiens
tgatctgcttgcctt

SEQ ID NO: 101094 - DNA, 15 bp, Homo sapiens
gtgatctgcttgcct

SEQ ID NO: 101095 - DNA, 15 bp, Homo sapiens
ggtgatctgcttgcc

SEQ ID NO: 101096 - DNA, 15 bp, Homo sapiens
aggtgatctgcttgc

SEQ ID NO: 101097 - DNA, 15 bp, Homo sapiens
caggtgatctgcttg

SEQ ID NO: 101098 - DNA, 15 bp, Homo sapiens
tcaggtgatctgctt

SEQ ID NO: 101099 - DNA, 15 bp, Homo sapiens
ctcaggtgatctgct

SEQ ID NO: 101100 - DNA, 15 bp, Homo sapiens
cctcaggtgatctgc

SEQ ID NO: 101101 - DNA, 15 bp, Homo sapiens
acctcaggtgatctg

SEQ ID NO: 101102 - DNA, 15 bp, Homo sapiens
gacctcaggtgatct

SEQ ID NO: 101103 - DNA, 15 bp, Homo sapiens
tgacctcaggtgatc

SEQ ID NO: 101104 - DNA, 15 bp, Homo sapiens
ctgacctcaggtgat

SEQ ID NO: 101105 - DNA, 15 bp, Homo sapiens
cctgacctcaggtga

SEQ ID NO: 101106 - DNA, 15 bp, Homo sapiens
tcctgacctcaggtg

SEQ ID NO: 101107 - DNA, 15 bp, Homo sapiens
ctcctgacctcaggt

SEQ ID NO: 101108 - DNA, 15 bp, Homo sapiens
taggctggtctcgaa

SEQ ID NO: 101109 - DNA, 15 bp, Homo sapiens
ttaggctggtctcga

SEQ ID NO: 101110 - DNA, 15 bp, Homo sapiens
gttaggctggtctcg

SEQ ID NO: 101111 - DNA, 15 bp, Homo sapiens
tgttaggctggtctc

SEQ ID NO: 101112 - DNA, 15 bp, Homo sapiens
atgttaggctggtct

SEQ ID NO: 101113 - DNA, 15 bp, Homo sapiens
catgttaggctggtc

SEQ ID NO: 101114 - DNA, 15 bp, Homo sapiens
ccatgttaggctggt

SEQ ID NO: 101115 - DNA, 15 bp, Homo sapiens
tccatgttaggctgg

SEQ ID NO: 101116 - DNA, 15 bp, Homo sapiens
ctccatgttaggctg

SEQ ID NO: 101117 - DNA, 15 bp, Homo sapiens
tctccatgttaggct

SEQ ID NO: 101118 - DNA, 15 bp, Homo sapiens
ttctccatgttaggc

SEQ ID NO: 101119 - DNA, 15 bp, Homo sapiens
tttctccatgttagg

SEQ ID NO: 101120 - DNA, 15 bp, Homo sapiens
gtttctccatgttag

SEQ ID NO: 101121 - DNA, 15 bp, Homo sapiens
ggtttctccatgtta

SEQ ID NO: 101122 - DNA, 15 bp, Homo sapiens
gggtttctccatgtt

SEQ ID NO: 101123 - DNA, 15 bp, Homo sapiens
agggtttctccatgt

SEQ ID NO: 101124 - DNA, 15 bp, Homo sapiens
cagggtttctccatg

SEQ ID NO: 101125 - DNA, 15 bp, Homo sapiens
acagggtttctccat

SEQ ID NO: 101126 - DNA, 15 bp, Homo sapiens
gacagggtttctcca

SEQ ID NO: 101127 - DNA, 15 bp, Homo sapiens
agacagggtttctcc

SEQ ID NO: 101128 - DNA, 15 bp, Homo sapiens
gagacagggtttctc

SEQ ID NO: 101129 - DNA, 15 bp, Homo sapiens
agagacagggtttct

SEQ ID NO: 101130 - DNA, 15 bp, Homo sapiens
tagagacagggtttc

SEQ ID NO: 101131 - DNA, 15 bp, Homo sapiens
gtagagacagggttt

SEQ ID NO: 101132 - DNA, 15 bp, Homo sapiens
agtagagacagggtt

SEQ ID NO: 101133 - DNA, 15 bp, Homo sapiens
attttgtatttttag

SEQ ID NO: 101134 - DNA, 15 bp, Homo sapiens
aattttgtattttta

SEQ ID NO: 101135 - DNA, 15 bp, Homo sapiens
taattttgtattttt

SEQ ID NO: 101136 - DNA, 15 bp, Homo sapiens
ctaattttgtatttt

SEQ ID NO: 101137 - DNA, 15 bp, Homo sapiens
gctaattttgtattt

SEQ ID NO: 101138 - DNA, 15 bp, Homo sapiens
ggctaattttgtatt

SEQ ID NO: 101139 - DNA, 15 bp, Homo sapiens
cggctaattttgtat

SEQ ID NO: 101140 - DNA, 15 bp, Homo sapiens
ccggctaattttgta

SEQ ID NO: 101141 - DNA, 15 bp, Homo sapiens
gcccggctaattttg

SEQ ID NO: 101142 - DNA, 15 bp, Homo sapiens
cgcccggctaatttt

SEQ ID NO: 101143 - DNA, 15 bp, Homo sapiens
acgcccggctaattt

SEQ ID NO: 101144 - DNA, 15 bp, Homo sapiens
cacgcccggctaatt

SEQ ID NO: 101145 - DNA, 15 bp, Homo sapiens
ccacgcccggctaat

SEQ ID NO: 101146 - DNA, 15 bp, Homo sapiens
accacgcccggctaa

SEQ ID NO: 101147 - DNA, 15 bp, Homo sapiens
caccacgcccggcta

SEQ ID NO: 101148 - DNA, 15 bp, Homo sapiens
ccaccacgcccggct

SEQ ID NO: 101149 - DNA, 15 bp, Homo sapiens
accaccacgcccggc

SEQ ID NO: 101150 - DNA, 15 bp, Homo sapiens
caccaccacgcccgg

SEQ ID NO: 101151 - DNA, 15 bp, Homo sapiens
gcaccaccacgcccg

SEQ ID NO: 101152 - DNA, 15 bp, Homo sapiens
tgcaccaccacgccc

SEQ ID NO: 101153 - DNA, 15 bp, Homo sapiens
atgcaccaccacgcc

SEQ ID NO: 101154 - DNA, 15 bp, Homo sapiens
aatgcaccaccacgc

SEQ ID NO: 101155 - DNA, 15 bp, Homo sapiens
gaatgcaccaccacg

SEQ ID NO: 101156 - DNA, 15 bp, Homo sapiens
ggaatgcaccaccac

SEQ ID NO: 101157 - DNA, 15 bp, Homo sapiens
aggaatgcaccacca

SEQ ID NO: 101158 - DNA, 15 bp, Homo sapiens
caggaatgcaccacc

SEQ ID NO: 101159 - DNA, 15 bp, Homo sapiens
acaggaatgcaccac

SEQ ID NO: 101160 - DNA, 15 bp, Homo sapiens
tacaggaatgcacca

SEQ ID NO: 101161 - DNA, 15 bp, Homo sapiens
ctacaggaatgcacc

SEQ ID NO: 101162 - DNA, 15 bp, Homo sapiens
actacaggaatgcac

SEQ ID NO: 101163 - DNA, 15 bp, Homo sapiens
gactacaggaatgca

SEQ ID NO: 101164 - DNA, 15 bp, Homo sapiens
ggactacaggaatgc

SEQ ID NO: 101165 - DNA, 15 bp, Homo sapiens
aggactacaggaatg

SEQ ID NO: 101166 - DNA, 15 bp, Homo sapiens
taggactacaggaat

SEQ ID NO: 101167 - DNA, 15 bp, Homo sapiens
ctaggactacaggaa

SEQ ID NO: 101168 - DNA, 15 bp, Homo sapiens
gctaggactacagga

SEQ ID NO: 101169 - DNA, 15 bp, Homo sapiens
agctaggactacagg

SEQ ID NO: 101170 - DNA, 15 bp, Homo sapiens
tagctaggactacag

SEQ ID NO: 101171 - DNA, 15 bp, Homo sapiens
gtagctaggactaca

SEQ ID NO: 101172 - DNA, 15 bp, Homo sapiens
agtagctaggactac

SEQ ID NO: 101173 - DNA, 15 bp, Homo sapiens
gagtagctaggacta

SEQ ID NO: 101174 - DNA, 15 bp, Homo sapiens
cgagtagctaggact

SEQ ID NO: 101175 - DNA, 15 bp, Homo sapiens
ccgagtagctaggac

SEQ ID NO: 101176 - DNA, 15 bp, Homo sapiens
cccgagtagctagga

SEQ ID NO: 101177 - DNA, 15 bp, Homo sapiens
tcccgagtagctagg

SEQ ID NO: 101178 - DNA, 15 bp, Homo sapiens
ctcccgagtagctag

SEQ ID NO: 101179 - DNA, 15 bp, Homo sapiens
gctcccgagtagcta

SEQ ID NO: 101180 - DNA, 15 bp, Homo sapiens
ggctcccgagtagct

SEQ ID NO: 101181 - DNA, 15 bp, Homo sapiens
aggctcccgagtagc

SEQ ID NO: 101182 - DNA, 15 bp, Homo sapiens
caggctcccgagtag

SEQ ID NO: 101183 - DNA, 15 bp, Homo sapiens
tcaggctcccgagta

SEQ ID NO: 101184 - DNA, 15 bp, Homo sapiens
ctcaggctcccgagt

SEQ ID NO: 101185 - DNA, 15 bp, Homo sapiens
cctcaggctcccgag

SEQ ID NO: 101186 - DNA, 15 bp, Homo sapiens
gcctcaggctcccga

SEQ ID NO: 101187 - DNA, 15 bp, Homo sapiens
tgcctcaggctcccg

SEQ ID NO: 101188 - DNA, 15 bp, Homo sapiens
ctgcctcaggctccc

SEQ ID NO: 101189 - DNA, 15 bp, Homo sapiens
cctgcctcaggctcc

SEQ ID NO: 101190 - DNA, 15 bp, Homo sapiens
tcctgcctcaggctc

SEQ ID NO: 101191 - DNA, 15 bp, Homo sapiens
ctcctgcctcaggct

SEQ ID NO: 101192 - DNA, 15 bp, Homo sapiens
tctcctgcctcaggc

SEQ ID NO: 101193 - DNA, 15 bp, Homo sapiens
ttctcctgcctcagg

SEQ ID NO: 101194 - DNA, 15 bp, Homo sapiens
catgatctcggctca

SEQ ID NO: 101195 - DNA, 15 bp, Homo sapiens
gcatgatctcggctc

SEQ ID NO: 101196 - DNA, 15 bp, Homo sapiens
ggcatgatctcggct

SEQ ID NO: 101197 - DNA, 15 bp, Homo sapiens
ttgtcgcccaggctg

SEQ ID NO: 101198 - DNA, 15 bp, Homo sapiens
cttgtcgcccaggct

SEQ ID NO: 101199 - DNA, 15 bp, Homo sapiens
ccttgtcgcccaggc

SEQ ID NO: 101200 - DNA, 15 bp, Homo sapiens
gccttgtcgcccagg

SEQ ID NO: 101201 - DNA, 15 bp, Homo sapiens
cgccttgtcgcccag

SEQ ID NO: 101202 - DNA, 15 bp, Homo sapiens
tcgccttgtcgccca

SEQ ID NO: 101203 - DNA, 15 bp, Homo sapiens
ctcgccttgtcgccc

SEQ ID NO: 101204 - DNA, 15 bp, Homo sapiens
tctcgccttgtcgcc

SEQ ID NO: 101205 - DNA, 15 bp, Homo sapiens
gtctcgccttgtcgc

SEQ ID NO: 101206 - DNA, 15 bp, Homo sapiens
agtctcgccttgtcg

SEQ ID NO: 101207 - DNA, 15 bp, Homo sapiens
gagtctcgccttgtc

SEQ ID NO: 101208 - DNA, 15 bp, Homo sapiens
ggagtctcgccttgt

SEQ ID NO: 101209 - DNA, 15 bp, Homo sapiens
tggagtctcgccttg

SEQ ID NO: 101210 - DNA, 15 bp, Homo sapiens
atggagtctcgcctt

SEQ ID NO: 101211 - DNA, 15 bp, Homo sapiens
catggagtctcgcct

SEQ ID NO: 101212 - DNA, 15 bp, Homo sapiens
gcatggagtctcgcc

SEQ ID NO: 101213 - DNA, 15 bp, Homo sapiens
ggcatggagtctcgc

SEQ ID NO: 101214 - DNA, 15 bp, Homo sapiens
tggcatggagtctcg

SEQ ID NO: 101215 - DNA, 15 bp, Homo sapiens
ttggcatggagtctc

SEQ ID NO: 101216 - DNA, 15 bp, Homo sapiens
tttggcatggagtct

SEQ ID NO: 101217 - DNA, 15 bp, Homo sapiens
ttttggcatggagtc

SEQ ID NO: 101218 - DNA, 15 bp, Homo sapiens
tttttggcatggagt

SEQ ID NO: 101219 - DNA, 15 bp, Homo sapiens
ttttttggcatggag

SEQ ID NO: 101220 - DNA, 15 bp, Homo sapiens
cttttttggcatgga

SEQ ID NO: 101221 - DNA, 15 bp, Homo sapiens
tcttttttggcatgg

SEQ ID NO: 101222 - DNA, 15 bp, Homo sapiens
ttcttttttggcatg

SEQ ID NO: 101223 - DNA, 15 bp, Homo sapiens
tttcttttttggcat

SEQ ID NO: 101224 - DNA, 15 bp, Homo sapiens
ttttcttttttggca

SEQ ID NO: 101225 - DNA, 15 bp, Homo sapiens
tttttcttttttggc

SEQ ID NO: 101226 - DNA, 15 bp, Homo sapiens
ttttttcttttttgg

SEQ ID NO: 101227 - DNA, 15 bp, Homo sapiens
tttttttcttttttg

SEQ ID NO: 101228 - DNA, 15 bp, Homo sapiens
ttttttttctttttt

SEQ ID NO: 101229 - DNA, 15 bp, Homo sapiens
gttttttttcttttt

SEQ ID NO: 101230 - DNA, 15 bp, Homo sapiens
agttttttttctttt

SEQ ID NO: 101231 - DNA, 15 bp, Homo sapiens
gagttttttttcttt

SEQ ID NO: 101232 - DNA, 15 bp, Homo sapiens
ggagttttttttctt

SEQ ID NO: 101233 - DNA, 15 bp, Homo sapiens
aggagttttttttct

SEQ ID NO: 101234 - DNA, 15 bp, Homo sapiens
caggagttttttttc

SEQ ID NO: 101235 - DNA, 15 bp, Homo sapiens
ccaggagtttttttt

SEQ ID NO: 101236 - DNA, 15 bp, Homo sapiens
gccaggagttttttt

SEQ ID NO: 101237 - DNA, 15 bp, Homo sapiens
cgccaggagtttttt

SEQ ID NO: 101238 - DNA, 15 bp, Homo sapiens
gcgccaggagttttt

SEQ ID NO: 101239 - DNA, 15 bp, Homo sapiens
cgcgccaggagtttt

SEQ ID NO: 101240 - DNA, 15 bp, Homo sapiens
ccgcgccaggagttt

SEQ ID NO: 101241 - DNA, 15 bp, Homo sapiens
accgcgccaggagtt

SEQ ID NO: 101242 - DNA, 15 bp, Homo sapiens
caccgcgccaggagt

SEQ ID NO: 101243 - DNA, 15 bp, Homo sapiens
ccaccgcgccaggag

SEQ ID NO: 101244 - DNA, 15 bp, Homo sapiens
gccaccgcgccagga

SEQ ID NO: 101245 - DNA, 15 bp, Homo sapiens
agccaccgcgccagg

SEQ ID NO: 101246 - DNA, 15 bp, Homo sapiens
gagccaccgcgccag

SEQ ID NO: 101247 - DNA, 15 bp, Homo sapiens
tgagccaccgcgcca

SEQ ID NO: 101248 - DNA, 15 bp, Homo sapiens
cgtgagccaccgcgc

SEQ ID NO: 101249 - DNA, 15 bp, Homo sapiens
gcgtgagccaccgcg

SEQ ID NO: 101250 - DNA, 15 bp, Homo sapiens
tggcgtgagccaccg

SEQ ID NO: 101251 - DNA, 15 bp, Homo sapiens
ctggcgtgagccacc

SEQ ID NO: 101252 - DNA, 15 bp, Homo sapiens
actggcgtgagccac

SEQ ID NO: 101253 - DNA, 15 bp, Homo sapiens
tactggcgtgagcca

SEQ ID NO: 101254 - DNA, 15 bp, Homo sapiens
ttactggcgtgagcc

SEQ ID NO: 101255 - DNA, 15 bp, Homo sapiens
attactggcgtgagc

SEQ ID NO: 101256 - DNA, 15 bp, Homo sapiens
gattactggcgtgag

SEQ ID NO: 101257 - DNA, 15 bp, Homo sapiens
ggattactggcgtga

SEQ ID NO: 101258 - DNA, 15 bp, Homo sapiens
gggattactggcgtg

SEQ ID NO: 101259 - DNA, 15 bp, Homo sapiens
tgggattactggcgt

SEQ ID NO: 101260 - DNA, 15 bp, Homo sapiens
ctgggattactggcg

SEQ ID NO: 101261 - DNA, 15 bp, Homo sapiens
gctgggattactggc

SEQ ID NO: 101262 - DNA, 15 bp, Homo sapiens
tgctgggattactgg

SEQ ID NO: 101263 - DNA, 15 bp, Homo sapiens
gtgctgggattactg

SEQ ID NO: 101264 - DNA, 15 bp, Homo sapiens
agtgctgggattact

SEQ ID NO: 101265 - DNA, 15 bp, Homo sapiens
cagtgctgggattac

SEQ ID NO: 101266 - DNA, 15 bp, Homo sapiens
acagtgctgggatta

SEQ ID NO: 101267 - DNA, 15 bp, Homo sapiens
cacagtgctgggatt

SEQ ID NO: 101268 - DNA, 15 bp, Homo sapiens
ccacagtgctgggat

SEQ ID NO: 101269 - DNA, 15 bp, Homo sapiens
cccacagtgctggga

SEQ ID NO: 101270 - DNA, 15 bp, Homo sapiens
tcccacagtgctggg

SEQ ID NO: 101271 - DNA, 15 bp, Homo sapiens
ctcccacagtgctgg

SEQ ID NO: 101272 - DNA, 15 bp, Homo sapiens
cctcccacagtgctg

SEQ ID NO: 101273 - DNA, 15 bp, Homo sapiens
gcctcccacagtgct

SEQ ID NO: 101274 - DNA, 15 bp, Homo sapiens
agcctcccacagtgc

SEQ ID NO: 101275 - DNA, 15 bp, Homo sapiens
cagcctcccacagtg

SEQ ID NO: 101276 - DNA, 15 bp, Homo sapiens
tcagcctcccacagt

SEQ ID NO: 101277 - DNA, 15 bp, Homo sapiens
ctcagcctcccacag

SEQ ID NO: 101278 - DNA, 15 bp, Homo sapiens
gctcagcctcccaca

SEQ ID NO: 101279 - DNA, 15 bp, Homo sapiens
tgctcagcctcccac

SEQ ID NO: 101280 - DNA, 15 bp, Homo sapiens
ctgctcagcctccca

SEQ ID NO: 101281 - DNA, 15 bp, Homo sapiens
cctgctcagcctccc

SEQ ID NO: 101282 - DNA, 15 bp, Homo sapiens
gcctgctcagcctcc

SEQ ID NO: 101283 - DNA, 15 bp, Homo sapiens
cgcctgctcagcctc

SEQ ID NO: 101284 - DNA, 15 bp, Homo sapiens
ccgcctgctcagcct

SEQ ID NO: 101285 - DNA, 15 bp, Homo sapiens
tccgcctgctcagcc

SEQ ID NO: 101286 - DNA, 15 bp, Homo sapiens
atccgcctgctcagc

SEQ ID NO: 101287 - DNA, 15 bp, Homo sapiens
gatccgcctgctcag

SEQ ID NO: 101288 - DNA, 15 bp, Homo sapiens
tgatccgcctgctca

SEQ ID NO: 101289 - DNA, 15 bp, Homo sapiens
gtgatccgcctgctc

SEQ ID NO: 101290 - DNA, 15 bp, Homo sapiens
cgtgatccgcctgct

SEQ ID NO: 101291 - DNA, 15 bp, Homo sapiens
actcctgacctcgtg

SEQ ID NO: 101292 - DNA, 15 bp, Homo sapiens
aactcctgacctcgt

SEQ ID NO: 101293 - DNA, 15 bp, Homo sapiens
gaactcctgacctcg

SEQ ID NO: 101294 - DNA, 15 bp, Homo sapiens
agtctcgaactcctg

SEQ ID NO: 101295 - DNA, 15 bp, Homo sapiens
tagtctcgaactcct

SEQ ID NO: 101296 - DNA, 15 bp, Homo sapiens
ctagtctcgaactcc

SEQ ID NO: 101297 - DNA, 15 bp, Homo sapiens
gctagtctcgaactc

SEQ ID NO: 101298 - DNA, 15 bp, Homo sapiens
ggctagtctcgaact

SEQ ID NO: 101299 - DNA, 15 bp, Homo sapiens
aggctagtctcgaac

SEQ ID NO: 101300 - DNA, 15 bp, Homo sapiens
caggctagtctcgaa

SEQ ID NO: 101301 - DNA, 15 bp, Homo sapiens
gcaggctagtctcga

SEQ ID NO: 101302 - DNA, 15 bp, Homo sapiens
agcaggctagtctcg

SEQ ID NO: 101303 - DNA, 15 bp, Homo sapiens
gagcaggctagtctc

SEQ ID NO: 101304 - DNA, 15 bp, Homo sapiens
tgagcaggctagtct

SEQ ID NO: 101305 - DNA, 15 bp, Homo sapiens
ttgagcaggctagtc

SEQ ID NO: 101306 - DNA, 15 bp, Homo sapiens
gttgagcaggctagt

SEQ ID NO: 101307 - DNA, 15 bp, Homo sapiens
tgttgagcaggctag

SEQ ID NO: 101308 - DNA, 15 bp, Homo sapiens
atgttgagcaggcta

SEQ ID NO: 101309 - DNA, 15 bp, Homo sapiens
tatgttgagcaggct

SEQ ID NO: 101310 - DNA, 15 bp, Homo sapiens
ttatgttgagcaggc

SEQ ID NO: 101311 - DNA, 15 bp, Homo sapiens
attatgttgagcagg

SEQ ID NO: 101312 - DNA, 15 bp, Homo sapiens
cattatgttgagcag

SEQ ID NO: 101313 - DNA, 15 bp, Homo sapiens
tcattatgttgagca

SEQ ID NO: 101314 - DNA, 15 bp, Homo sapiens
ttcattatgttgagc

SEQ ID NO: 101315 - DNA, 15 bp, Homo sapiens
tttcattatgttgag

SEQ ID NO: 101316 - DNA, 15 bp, Homo sapiens
gtttcattatgttga

SEQ ID NO: 101317 - DNA, 15 bp, Homo sapiens
ggtttcattatgttg

SEQ ID NO: 101318 - DNA, 15 bp, Homo sapiens
gggtttcattatgtt

SEQ ID NO: 101319 - DNA, 15 bp, Homo sapiens
agggtttcattatgt

SEQ ID NO: 101320 - DNA, 15 bp, Homo sapiens
gagggtttcattatg

SEQ ID NO: 101321 - DNA, 15 bp, Homo sapiens
agagggtttcattat

SEQ ID NO: 101322 - DNA, 15 bp, Homo sapiens
gagagggtttcatta

SEQ ID NO: 101323 - DNA, 15 bp, Homo sapiens
agagagggtttcatt

SEQ ID NO: 101324 - DNA, 15 bp, Homo sapiens
cagagagggtttcat

SEQ ID NO: 101325 - DNA, 15 bp, Homo sapiens
acagagagggtttca

SEQ ID NO: 101326 - DNA, 15 bp, Homo sapiens
tacagagagggtttc

SEQ ID NO: 101327 - DNA, 15 bp, Homo sapiens
gtacagagagggttt

SEQ ID NO: 101328 - DNA, 15 bp, Homo sapiens
agtacagagagggtt

SEQ ID NO: 101329 - DNA, 15 bp, Homo sapiens
tagtacagagagggt

SEQ ID NO: 101330 - DNA, 15 bp, Homo sapiens
ttagtacagagaggg

SEQ ID NO: 101331 - DNA, 15 bp, Homo sapiens
tttagtacagagagg

SEQ ID NO: 101332 - DNA, 15 bp, Homo sapiens
ttttagtacagagag

SEQ ID NO: 101333 - DNA, 15 bp, Homo sapiens
tttttagtacagaga

SEQ ID NO: 101334 - DNA, 15 bp, Homo sapiens
atttttagtacagag

SEQ ID NO: 101335 - DNA, 15 bp, Homo sapiens
tatttttagtacaga

SEQ ID NO: 101336 - DNA, 15 bp, Homo sapiens
gtatttttagtacag

SEQ ID NO: 101337 - DNA, 15 bp, Homo sapiens
tgtatttttagtaca

SEQ ID NO: 101338 - DNA, 15 bp, Homo sapiens
ttgtatttttagtac

SEQ ID NO: 101339 - DNA, 15 bp, Homo sapiens
agctaatttttgtat

SEQ ID NO: 101340 - DNA, 15 bp, Homo sapiens
cagctaatttttgta

SEQ ID NO: 101341 - DNA, 15 bp, Homo sapiens
ccagctaatttttgt

SEQ ID NO: 101342 - DNA, 15 bp, Homo sapiens
cccagctaatttttg

SEQ ID NO: 101343 - DNA, 15 bp, Homo sapiens
acccagctaattttt

SEQ ID NO: 101344 - DNA, 15 bp, Homo sapiens
cacccagctaatttt

SEQ ID NO: 101345 - DNA, 15 bp, Homo sapiens
acacccagctaattt

SEQ ID NO: 101346 - DNA, 15 bp, Homo sapiens
cacacccagctaatt

SEQ ID NO: 101347 - DNA, 15 bp, Homo sapiens
ccacacccagctaat

SEQ ID NO: 101348 - DNA, 15 bp, Homo sapiens
accacacccagctaa

SEQ ID NO: 101349 - DNA, 15 bp, Homo sapiens
gccaccacacccagc

SEQ ID NO: 101350 - DNA, 15 bp, Homo sapiens
tgccaccacacccag

SEQ ID NO: 101351 - DNA, 15 bp, Homo sapiens
ctgccaccacaccca

SEQ ID NO: 101352 - DNA, 15 bp, Homo sapiens
cctgccaccacaccc

SEQ ID NO: 101353 - DNA, 15 bp, Homo sapiens
gcctgccaccacacc

SEQ ID NO: 101354 - DNA, 15 bp, Homo sapiens
tgcctgccaccacac

SEQ ID NO: 101355 - DNA, 15 bp, Homo sapiens
gtgcctgccaccaca

SEQ ID NO: 101356 - DNA, 15 bp, Homo sapiens
ggtgcctgccaccac

SEQ ID NO: 101357 - DNA, 15 bp, Homo sapiens
aggtgcctgccacca

SEQ ID NO: 101358 - DNA, 15 bp, Homo sapiens
caggtgcctgccacc

SEQ ID NO: 101359 - DNA, 15 bp, Homo sapiens
acaggtgcctgccac

SEQ ID NO: 101360 - DNA, 15 bp, Homo sapiens
tacaggtgcctgcca

SEQ ID NO: 101361 - DNA, 15 bp, Homo sapiens
ctacaggtgcctgcc

SEQ ID NO: 101362 - DNA, 15 bp, Homo sapiens
actacaggtgcctgc

SEQ ID NO: 101363 - DNA, 15 bp, Homo sapiens
gactacaggtgcctg

SEQ ID NO: 101364 - DNA, 15 bp, Homo sapiens
ggactacaggtgcct

SEQ ID NO: 101365 - DNA, 15 bp, Homo sapiens
gggactacaggtgcc

SEQ ID NO: 101366 - DNA, 15 bp, Homo sapiens
tgggactacaggtgc

SEQ ID NO: 101367 - DNA, 15 bp, Homo sapiens
ctgggactacaggtg

SEQ ID NO: 101368 - DNA, 15 bp, Homo sapiens
gctgggactacaggt

SEQ ID NO: 101369 - DNA, 15 bp, Homo sapiens
cccgagtagctggga

SEQ ID NO: 101370 - DNA, 15 bp, Homo sapiens
agccattctcctgcc

SEQ ID NO: 101371 - DNA, 15 bp, Homo sapiens
aagccattctcctgc

SEQ ID NO: 101372 - DNA, 15 bp, Homo sapiens
caagccattctcctg

SEQ ID NO: 101373 - DNA, 15 bp, Homo sapiens
tcaagccattctcct

SEQ ID NO: 101374 - DNA, 15 bp, Homo sapiens
ttcaagccattctcc

SEQ ID NO: 101375 - DNA, 15 bp, Homo sapiens
gttcaagccattctc

SEQ ID NO: 101376 - DNA, 15 bp, Homo sapiens
ggttcaagccattct

SEQ ID NO: 101377 - DNA, 15 bp, Homo sapiens
aggttcaagccattc

SEQ ID NO: 101378 - DNA, 15 bp, Homo sapiens
caggttcaagccatt

SEQ ID NO: 101379 - DNA, 15 bp, Homo sapiens
ccaggttcaagccat

SEQ ID NO: 101380 - DNA, 15 bp, Homo sapiens
cccaggttcaagcca

SEQ ID NO: 101381 - DNA, 15 bp, Homo sapiens
tcccaggttcaagcc

SEQ ID NO: 101382 - DNA, 15 bp, Homo sapiens
ctcccaggttcaagc

SEQ ID NO: 101383 - DNA, 15 bp, Homo sapiens
tgcctcccaggttca

SEQ ID NO: 101384 - DNA, 15 bp, Homo sapiens
ctgcctcccaggttc

SEQ ID NO: 101385 - DNA, 15 bp, Homo sapiens
tctgcctcccaggtt

SEQ ID NO: 101386 - DNA, 15 bp, Homo sapiens
ctctgcctcccaggt

SEQ ID NO: 101387 - DNA, 15 bp, Homo sapiens
cctctgcctcccagg

SEQ ID NO: 101388 - DNA, 15 bp, Homo sapiens
acctctgcctcccag

SEQ ID NO: 101389 - DNA, 15 bp, Homo sapiens
aacctctgcctccca

SEQ ID NO: 101390 - DNA, 15 bp, Homo sapiens
gtctcggctcactgc

SEQ ID NO: 101391 - DNA, 15 bp, Homo sapiens
tgtctcggctcactg

SEQ ID NO: 101392 - DNA, 15 bp, Homo sapiens
ctgtctcggctcact

SEQ ID NO: 101393 - DNA, 15 bp, Homo sapiens
actgtctcggctcac

SEQ ID NO: 101394 - DNA, 15 bp, Homo sapiens
cactgtctcggctca

SEQ ID NO: 101395 - DNA, 15 bp, Homo sapiens
gcactgtctcggctc

SEQ ID NO: 101396 - DNA, 15 bp, Homo sapiens
ggcactgtctcggct

SEQ ID NO: 101397 - DNA, 15 bp, Homo sapiens
tggcactgtctcggc

SEQ ID NO: 101398 - DNA, 15 bp, Homo sapiens
atggcactgtctcgg

SEQ ID NO: 101399 - DNA, 15 bp, Homo sapiens
aatggcactgtctcg

SEQ ID NO: 101400 - DNA, 15 bp, Homo sapiens
caatggcactgtctc

SEQ ID NO: 101401 - DNA, 15 bp, Homo sapiens
gcaatggcactgtct

SEQ ID NO: 101402 - DNA, 15 bp, Homo sapiens
tgcaatggcactgtc

SEQ ID NO: 101403 - DNA, 15 bp, Homo sapiens
gtgcaatggcactgt

SEQ ID NO: 101404 - DNA, 15 bp, Homo sapiens
agtgcaatggcactg

SEQ ID NO: 101405 - DNA, 15 bp, Homo sapiens
gagtgcaatggcact

SEQ ID NO: 101406 - DNA, 15 bp, Homo sapiens
ggagtgcaatggcac

SEQ ID NO: 101407 - DNA, 15 bp, Homo sapiens
tggagtgcaatggca

SEQ ID NO: 101408 - DNA, 15 bp, Homo sapiens
ctggagtgcaatggc

SEQ ID NO: 101409 - DNA, 15 bp, Homo sapiens
actggagtgcaatgg

SEQ ID NO: 101410 - DNA, 15 bp, Homo sapiens
gactggagtgcaatg

SEQ ID NO: 101411 - DNA, 15 bp, Homo sapiens
ggactggagtgcaat

SEQ ID NO: 101412 - DNA, 15 bp, Homo sapiens
tggactggagtgcaa

SEQ ID NO: 101413 - DNA, 15 bp, Homo sapiens
ctggactggagtgca

SEQ ID NO: 101414 - DNA, 15 bp, Homo sapiens
cctggactggagtgc

SEQ ID NO: 101415 - DNA, 15 bp, Homo sapiens
acctggactggagtg

SEQ ID NO: 101416 - DNA, 15 bp, Homo sapiens
cacctggactggagt

SEQ ID NO: 101417 - DNA, 15 bp, Homo sapiens
tcacctggactggag

SEQ ID NO: 101418 - DNA, 15 bp, Homo sapiens
gtcacctggactgga

SEQ ID NO: 101419 - DNA, 15 bp, Homo sapiens
tgtcacctggactgg

SEQ ID NO: 101420 - DNA, 15 bp, Homo sapiens
ctgtcacctggactg

SEQ ID NO: 101421 - DNA, 15 bp, Homo sapiens
tctgtcacctggact

SEQ ID NO: 101422 - DNA, 15 bp, Homo sapiens
ctctgtcacctggac

SEQ ID NO: 101423 - DNA, 15 bp, Homo sapiens
gctctgtcacctgga

SEQ ID NO: 101424 - DNA, 15 bp, Homo sapiens
cgctctgtcacctgg

SEQ ID NO: 101425 - DNA, 15 bp, Homo sapiens
tcgctctgtcacctg

SEQ ID NO: 101426 - DNA, 15 bp, Homo sapiens
ttcgctctgtcacct

SEQ ID NO: 101427 - DNA, 15 bp, Homo sapiens
tttcgctctgtcacc

SEQ ID NO: 101428 - DNA, 15 bp, Homo sapiens
gtttcgctctgtcac

SEQ ID NO: 101429 - DNA, 15 bp, Homo sapiens
agtttcgctctgtca

SEQ ID NO: 101430 - DNA, 15 bp, Homo sapiens
gagtttcgctctgtc

SEQ ID NO: 101431 - DNA, 15 bp, Homo sapiens
ggagtttcgctctgt

SEQ ID NO: 101432 - DNA, 15 bp, Homo sapiens
tggagtttcgctctg

SEQ ID NO: 101433 - DNA, 15 bp, Homo sapiens
atggagtttcgctct

SEQ ID NO: 101434 - DNA, 15 bp, Homo sapiens
gatggagtttcgctc

SEQ ID NO: 101435 - DNA, 15 bp, Homo sapiens
agatggagtttcgct

SEQ ID NO: 101436 - DNA, 15 bp, Homo sapiens
gagatggagtttcgc

SEQ ID NO: 101437 - DNA, 15 bp, Homo sapiens
tgagatggagtttcg

SEQ ID NO: 101438 - DNA, 15 bp, Homo sapiens
ttgagatggagtttc

SEQ ID NO: 101439 - DNA, 15 bp, Homo sapiens
tttgagatggagttt

SEQ ID NO: 101440 - DNA, 15 bp, Homo sapiens
ttttgagatggagtt

SEQ ID NO: 101441 - DNA, 15 bp, Homo sapiens
cttttttttttgaga

SEQ ID NO: 101442 - DNA, 15 bp, Homo sapiens
ccttttttttttgag

SEQ ID NO: 101443 - DNA, 15 bp, Homo sapiens
tccttttttttttga

SEQ ID NO: 101444 - DNA, 15 bp, Homo sapiens
ttccttttttttttg

SEQ ID NO: 101445 - DNA, 15 bp, Homo sapiens
cttcctttttttttt

SEQ ID NO: 101446 - DNA, 15 bp, Homo sapiens
ccttccttttttttt

SEQ ID NO: 101447 - DNA, 15 bp, Homo sapiens
gccttcctttttttt

SEQ ID NO: 101448 - DNA, 15 bp, Homo sapiens
tgccttccttttttt

SEQ ID NO: 101449 - DNA, 15 bp, Homo sapiens
atgccttcctttttt

SEQ ID NO: 101450 - DNA, 15 bp, Homo sapiens
aatgccttccttttt

SEQ ID NO: 101451 - DNA, 15 bp, Homo sapiens
caatgccttcctttt

SEQ ID NO: 101452 - DNA, 15 bp, Homo sapiens
ccaatgccttccttt

SEQ ID NO: 101453 - DNA, 15 bp, Homo sapiens
accaatgccttcctt

SEQ ID NO: 101454 - DNA, 15 bp, Homo sapiens
taccaatgccttcct

SEQ ID NO: 101455 - DNA, 15 bp, Homo sapiens
ctaccaatgccttcc

SEQ ID NO: 101456 - DNA, 15 bp, Homo sapiens
gctaccaatgccttc

SEQ ID NO: 101457 - DNA, 15 bp, Homo sapiens
tgctaccaatgcctt

SEQ ID NO: 101458 - DNA, 15 bp, Homo sapiens
ttgctaccaatgcct

SEQ ID NO: 101459 - DNA, 15 bp, Homo sapiens
cttgctaccaatgcc

SEQ ID NO: 101460 - DNA, 15 bp, Homo sapiens
tcttgctaccaatgc

SEQ ID NO: 101461 - DNA, 15 bp, Homo sapiens
ctcttgctaccaatg

SEQ ID NO: 101462 - DNA, 15 bp, Homo sapiens
tctcttgctaccaat

SEQ ID NO: 101463 - DNA, 15 bp, Homo sapiens
atctcttgctaccaa

SEQ ID NO: 101464 - DNA, 15 bp, Homo sapiens
catctcttgctacca

SEQ ID NO: 101465 - DNA, 15 bp, Homo sapiens
ccatctcttgctacc

SEQ ID NO: 101466 - DNA, 15 bp, Homo sapiens
gccatctcttgctac

SEQ ID NO: 101467 - DNA, 15 bp, Homo sapiens
tgccatctcttgcta

SEQ ID NO: 101468 - DNA, 15 bp, Homo sapiens
ctgccatctcttgct

SEQ ID NO: 101469 - DNA, 15 bp, Homo sapiens
cctgccatctcttgc

SEQ ID NO: 101470 - DNA, 15 bp, Homo sapiens
gcctgccatctcttg

SEQ ID NO: 101471 - DNA, 15 bp, Homo sapiens
ggcctgccatctctt

SEQ ID NO: 101472 - DNA, 15 bp, Homo sapiens
aggcctgccatctct

SEQ ID NO: 101473 - DNA, 15 bp, Homo sapiens
aaggcctgccatctc

SEQ ID NO: 101474 - DNA, 15 bp, Homo sapiens
caaggcctgccatct

SEQ ID NO: 101475 - DNA, 15 bp, Homo sapiens
tcaaggcctgccatc

SEQ ID NO: 101476 - DNA, 15 bp, Homo sapiens
ttcaaggcctgccat

SEQ ID NO: 101477 - DNA, 15 bp, Homo sapiens
tttcaaggcctgcca

SEQ ID NO: 101478 - DNA, 15 bp, Homo sapiens
ctttcaaggcctgcc

SEQ ID NO: 101479 - DNA, 15 bp, Homo sapiens
gctttcaaggcctgc

SEQ ID NO: 101480 - DNA, 15 bp, Homo sapiens
ggctttcaaggcctg

SEQ ID NO: 101481 - DNA, 15 bp, Homo sapiens
tggctttcaaggcct

SEQ ID NO: 101482 - DNA, 15 bp, Homo sapiens
ctggctttcaaggcc

SEQ ID NO: 101483 - DNA, 15 bp, Homo sapiens
cctggctttcaaggc

SEQ ID NO: 101484 - DNA, 15 bp, Homo sapiens
gcctggctttcaagg

SEQ ID NO: 101485 - DNA, 15 bp, Homo sapiens
ggcctggctttcaag

SEQ ID NO: 101486 - DNA, 15 bp, Homo sapiens
tggcctggctttcaa

SEQ ID NO: 101487 - DNA, 15 bp, Homo sapiens
ctggcctggctttca

SEQ ID NO: 101488 - DNA, 15 bp, Homo sapiens
cctggcctggctttc

SEQ ID NO: 101489 - DNA, 15 bp, Homo sapiens
ccctggcctggcttt

SEQ ID NO: 101490 - DNA, 15 bp, Homo sapiens
accctggcctggctt

SEQ ID NO: 101491 - DNA, 15 bp, Homo sapiens
caccctggcctggct

SEQ ID NO: 101492 - DNA, 15 bp, Homo sapiens
tcaccctggcctggc

SEQ ID NO: 101493 - DNA, 15 bp, Homo sapiens
ttcaccctggcctgg

SEQ ID NO: 101494 - DNA, 15 bp, Homo sapiens
cttcaccctggcctg

SEQ ID NO: 101495 - DNA, 15 bp, Homo sapiens
acttcaccctggcct

SEQ ID NO: 101496 - DNA, 15 bp, Homo sapiens
cacttcaccctggcc

SEQ ID NO: 101497 - DNA, 15 bp, Homo sapiens
acacttcaccctggc

SEQ ID NO: 101498 - DNA, 15 bp, Homo sapiens
aacacttcaccctgg

SEQ ID NO: 101499 - DNA, 15 bp, Homo sapiens
aaacacttcaccctg

SEQ ID NO: 101500 - DNA, 15 bp, Homo sapiens
gaaacacttcaccct

SEQ ID NO: 101501 - DNA, 15 bp, Homo sapiens
agaaacacttcaccc

SEQ ID NO: 101502 - DNA, 15 bp, Homo sapiens
aagaaacacttcacc

SEQ ID NO: 101503 - DNA, 15 bp, Homo sapiens
aaagaaacacttcac

SEQ ID NO: 101504 - DNA, 15 bp, Homo sapiens
aaaagaaacacttca

SEQ ID NO: 101505 - DNA, 15 bp, Homo sapiens
aaaaagaaacacttc

SEQ ID NO: 101506 - DNA, 15 bp, Homo sapiens
aaaaaagaaacactt

SEQ ID NO: 101507 - DNA, 15 bp, Homo sapiens
aaaaaaagaaacact

SEQ ID NO: 101508 - DNA, 15 bp, Homo sapiens
aaaaaaaagaaacac

SEQ ID NO: 101509 - DNA, 15 bp, Homo sapiens
taaaaagaaaaaaaa

SEQ ID NO: 101510 - DNA, 15 bp, Homo sapiens
ttaaaaagaaaaaaa

SEQ ID NO: 101511 - DNA, 15 bp, Homo sapiens
tttaaaaagaaaaaa

SEQ ID NO: 101512 - DNA, 15 bp, Homo sapiens
atttaaaaagaaaaa

SEQ ID NO: 101513 - DNA, 15 bp, Homo sapiens
aatttaaaaagaaaa

SEQ ID NO: 101514 - DNA, 15 bp, Homo sapiens
aaatttaaaaagaaa

SEQ ID NO: 101515 - DNA, 15 bp, Homo sapiens
aaaatttaaaaagaa

SEQ ID NO: 101516 - DNA, 15 bp, Homo sapiens
aaaaatttaaaaaga

SEQ ID NO: 101517 - DNA, 15 bp, Homo sapiens
aaaaaatttaaaaag

SEQ ID NO: 101518 - DNA, 15 bp, Homo sapiens
aaaaaaaaatttaaa

SEQ ID NO: 101519 - DNA, 15 bp, Homo sapiens
aaaaaaaaaatttaa

SEQ ID NO: 101520 - DNA, 15 bp, Homo sapiens
aaaaaaaaaaattta

SEQ ID NO: 101521 - DNA, 15 bp, Homo sapiens
caaaaaaaaaaattt

SEQ ID NO: 101522 - DNA, 15 bp, Homo sapiens
tcaaaaaaaaaaatt

SEQ ID NO: 101523 - DNA, 15 bp, Homo sapiens
ctcaaaaaaaaaaat

SEQ ID NO: 101524 - DNA, 15 bp, Homo sapiens
cgtctcaaaaaaaaa

SEQ ID NO: 101525 - DNA, 15 bp, Homo sapiens
ccgtctcaaaaaaaa

SEQ ID NO: 101526 - DNA, 15 bp, Homo sapiens
tccgtctcaaaaaaa

SEQ ID NO: 101527 - DNA, 15 bp, Homo sapiens
ctccgtctcaaaaaa

SEQ ID NO: 101528 - DNA, 15 bp, Homo sapiens
tgacagagcgagact

SEQ ID NO: 101529 - DNA, 15 bp, Homo sapiens
gtgacagagcgagac

SEQ ID NO: 101530 - DNA, 15 bp, Homo sapiens
ggtgacagagcgaga

SEQ ID NO: 101531 - DNA, 15 bp, Homo sapiens
gggtgacagagcgag

SEQ ID NO: 101532 - DNA, 15 bp, Homo sapiens
tgggtgacagagcga

SEQ ID NO: 101533 - DNA, 15 bp, Homo sapiens
ctgggtgacagagcg

SEQ ID NO: 101534 - DNA, 15 bp, Homo sapiens
cagcctgggtgacag

SEQ ID NO: 101535 - DNA, 15 bp, Homo sapiens
ccagcctgggtgaca

SEQ ID NO: 101536 - DNA, 15 bp, Homo sapiens
tccagcctgggtgac

SEQ ID NO: 101537 - DNA, 15 bp, Homo sapiens
atccagcctgggtga

SEQ ID NO: 101538 - DNA, 15 bp, Homo sapiens
aatccagcctgggtg

SEQ ID NO: 101539 - DNA, 15 bp, Homo sapiens
caatccagcctgggt

SEQ ID NO: 101540 - DNA, 15 bp, Homo sapiens
gcaatccagcctggg

SEQ ID NO: 101541 - DNA, 15 bp, Homo sapiens
tgcaatccagcctgg

SEQ ID NO: 101542 - DNA, 15 bp, Homo sapiens
ctgcaatccagcctg

SEQ ID NO: 101543 - DNA, 15 bp, Homo sapiens
actgcaatccagcct

SEQ ID NO: 101544 - DNA, 15 bp, Homo sapiens
cactgcaatccagcc

SEQ ID NO: 101545 - DNA, 15 bp, Homo sapiens
ccactgcaatccagc

SEQ ID NO: 101546 - DNA, 15 bp, Homo sapiens
gccactgcaatccag

SEQ ID NO: 101547 - DNA, 15 bp, Homo sapiens
ggccactgcaatcca

SEQ ID NO: 101548 - DNA, 15 bp, Homo sapiens
aggccactgcaatcc

SEQ ID NO: 101549 - DNA, 15 bp, Homo sapiens
caggccactgcaatc

SEQ ID NO: 101550 - DNA, 15 bp, Homo sapiens
tcaggccactgcaat

SEQ ID NO: 101551 - DNA, 15 bp, Homo sapiens
atcaggccactgcaa

SEQ ID NO: 101552 - DNA, 15 bp, Homo sapiens
gatcaggccactgca

SEQ ID NO: 101553 - DNA, 15 bp, Homo sapiens
agatcaggccactgc

SEQ ID NO: 101554 - DNA, 15 bp, Homo sapiens
gagatcaggccactg

SEQ ID NO: 101555 - DNA, 15 bp, Homo sapiens
cgagatcaggccact

SEQ ID NO: 101556 - DNA, 15 bp, Homo sapiens
ccgagatcaggccac

SEQ ID NO: 101557 - DNA, 15 bp, Homo sapiens
gccgagatcaggcca

SEQ ID NO: 101558 - DNA, 15 bp, Homo sapiens
agccgagatcaggcc

SEQ ID NO: 101559 - DNA, 15 bp, Homo sapiens
gagccgagatcaggc

SEQ ID NO: 101560 - DNA, 15 bp, Homo sapiens
tgagccgagatcagg

SEQ ID NO: 101561 - DNA, 15 bp, Homo sapiens
gtgagccgagatcag

SEQ ID NO: 101562 - DNA, 15 bp, Homo sapiens
agtgagccgagatca

SEQ ID NO: 101563 - DNA, 15 bp, Homo sapiens
acttgcagtgagccg

SEQ ID NO: 101564 - DNA, 15 bp, Homo sapiens
aacttgcagtgagcc

SEQ ID NO: 101565 - DNA, 15 bp, Homo sapiens
gaacttgcagtgagc

SEQ ID NO: 101566 - DNA, 15 bp, Homo sapiens
ggaacttgcagtgag

SEQ ID NO: 101567 - DNA, 15 bp, Homo sapiens
cggaacttgcagtga

SEQ ID NO: 101568 - DNA, 15 bp, Homo sapiens
gcggaacttgcagtg

SEQ ID NO: 101569 - DNA, 15 bp, Homo sapiens
ggcggaacttgcagt

SEQ ID NO: 101570 - DNA, 15 bp, Homo sapiens
aggcggaacttgcag

SEQ ID NO: 101571 - DNA, 15 bp, Homo sapiens
gaggcggaacttgca

SEQ ID NO: 101572 - DNA, 15 bp, Homo sapiens
ggaggcggaacttgc

SEQ ID NO: 101573 - DNA, 15 bp, Homo sapiens
gggaggcggaacttg

SEQ ID NO: 101574 - DNA, 15 bp, Homo sapiens
cgggaggcggaactt

SEQ ID NO: 101575 - DNA, 15 bp, Homo sapiens
ccgggaggcggaact

SEQ ID NO: 101576 - DNA, 15 bp, Homo sapiens
cccgggaggcggaac

SEQ ID NO: 101577 - DNA, 15 bp, Homo sapiens
atgaacccgggaggc

SEQ ID NO: 101578 - DNA, 15 bp, Homo sapiens
catgaacccgggagg

SEQ ID NO: 101579 - DNA, 15 bp, Homo sapiens
gcatgaacccgggag

SEQ ID NO: 101580 - DNA, 15 bp, Homo sapiens
ggcatgaacccggga

SEQ ID NO: 101581 - DNA, 15 bp, Homo sapiens
tggcatgaacccggg

SEQ ID NO: 101582 - DNA, 15 bp, Homo sapiens
atggcatgaacccgg

SEQ ID NO: 101583 - DNA, 15 bp, Homo sapiens
aatggcatgaacccg

SEQ ID NO: 101584 - DNA, 15 bp, Homo sapiens
gaatggcatgaaccc

SEQ ID NO: 101585 - DNA, 15 bp, Homo sapiens
agaatggcatgaacc

SEQ ID NO: 101586 - DNA, 15 bp, Homo sapiens
gagaatggcatgaac

SEQ ID NO: 101587 - DNA, 15 bp, Homo sapiens
ggagaatggcatgaa

SEQ ID NO: 101588 - DNA, 15 bp, Homo sapiens
aggagaatggcatga

SEQ ID NO: 101589 - DNA, 15 bp, Homo sapiens
caggagaatggcatg

SEQ ID NO: 101590 - DNA, 15 bp, Homo sapiens
gcaggagaatggcat

SEQ ID NO: 101591 - DNA, 15 bp, Homo sapiens
ggcaggagaatggca

SEQ ID NO: 101592 - DNA, 15 bp, Homo sapiens
gtgaggcaggagaat

SEQ ID NO: 101593 - DNA, 15 bp, Homo sapiens
ggtgaggcaggagaa

SEQ ID NO: 101594 - DNA, 15 bp, Homo sapiens
gggtgaggcaggaga

SEQ ID NO: 101595 - DNA, 15 bp, Homo sapiens
agggtgaggcaggag

SEQ ID NO: 101596 - DNA, 15 bp, Homo sapiens
gagggtgaggcagga

SEQ ID NO: 101597 - DNA, 15 bp, Homo sapiens
cgggagggtgaggca

SEQ ID NO: 101598 - DNA, 15 bp, Homo sapiens
tcgggagggtgaggc

SEQ ID NO: 101599 - DNA, 15 bp, Homo sapiens
ctcgggagggtgagg

SEQ ID NO: 101600 - DNA, 15 bp, Homo sapiens
actcgggagggtgag

SEQ ID NO: 101601 - DNA, 15 bp, Homo sapiens
tactcgggagggtga

SEQ ID NO: 101602 - DNA, 15 bp, Homo sapiens
ctactcgggagggtg

SEQ ID NO: 101603 - DNA, 15 bp, Homo sapiens
gctactcgggagggt

SEQ ID NO: 101604 - DNA, 15 bp, Homo sapiens
agctactcgggaggg

SEQ ID NO: 101605 - DNA, 15 bp, Homo sapiens
gtcccagctactcgg

SEQ ID NO: 101606 - DNA, 15 bp, Homo sapiens
agtcccagctactcg

SEQ ID NO: 101607 - DNA, 15 bp, Homo sapiens
ggtgcctgtagtccc

SEQ ID NO: 101608 - DNA, 15 bp, Homo sapiens
aggtgcctgtagtcc

SEQ ID NO: 101609 - DNA, 15 bp, Homo sapiens
caggtgcctgtagtc

SEQ ID NO: 101610 - DNA, 15 bp, Homo sapiens
gcaggtgcctgtagt

SEQ ID NO: 101611 - DNA, 15 bp, Homo sapiens
ggcaggtgcctgtag

SEQ ID NO: 101612 - DNA, 15 bp, Homo sapiens
tggcaggtgcctgta

SEQ ID NO: 101613 - DNA, 15 bp, Homo sapiens
gtggcaggtgcctgt

SEQ ID NO: 101614 - DNA, 15 bp, Homo sapiens
ggtggcaggtgcctg

SEQ ID NO: 101615 - DNA, 15 bp, Homo sapiens
tggtggcaggtgcct

SEQ ID NO: 101616 - DNA, 15 bp, Homo sapiens
gtggtggcaggtgcc

SEQ ID NO: 101617 - DNA, 15 bp, Homo sapiens
cgtggtggcaggtgc

SEQ ID NO: 101618 - DNA, 15 bp, Homo sapiens
gcgtggtggcaggtg

SEQ ID NO: 101619 - DNA, 15 bp, Homo sapiens
ggcgtggtggcaggt

SEQ ID NO: 101620 - DNA, 15 bp, Homo sapiens
tggcgtggtggcagg

SEQ ID NO: 101621 - DNA, 15 bp, Homo sapiens
ctggcgtggtggcag

SEQ ID NO: 101622 - DNA, 15 bp, Homo sapiens
gctggcgtggtggca

SEQ ID NO: 101623 - DNA, 15 bp, Homo sapiens
agctggcgtggtggc

SEQ ID NO: 101624 - DNA, 15 bp, Homo sapiens
tagctggcgtggtgg

SEQ ID NO: 101625 - DNA, 15 bp, Homo sapiens
ttagctggcgtggtg

SEQ ID NO: 101626 - DNA, 15 bp, Homo sapiens
attagctggcgtggt

SEQ ID NO: 101627 - DNA, 15 bp, Homo sapiens
aattagctggcgtgg

SEQ ID NO: 101628 - DNA, 15 bp, Homo sapiens
aaattagctggcgtg

SEQ ID NO: 101629 - DNA, 15 bp, Homo sapiens
aaaattagctggcgt

SEQ ID NO: 101630 - DNA, 15 bp, Homo sapiens
aaaaattagctggcg

SEQ ID NO: 101631 - DNA, 15 bp, Homo sapiens
aaaaaattagctggc

SEQ ID NO: 101632 - DNA, 15 bp, Homo sapiens
caaaaaattagctgg

SEQ ID NO: 101633 - DNA, 15 bp, Homo sapiens
acaaaaaattagctg

SEQ ID NO: 101634 - DNA, 15 bp, Homo sapiens
tacaaaaaattagct

SEQ ID NO: 101635 - DNA, 15 bp, Homo sapiens
gaatacaaaaaatta

SEQ ID NO: 101636 - DNA, 15 bp, Homo sapiens
agaatacaaaaaatt

SEQ ID NO: 101637 - DNA, 15 bp, Homo sapiens
aagaatacaaaaaat

SEQ ID NO: 101638 - DNA, 15 bp, Homo sapiens
taagaatacaaaaaa

SEQ ID NO: 101639 - DNA, 15 bp, Homo sapiens
ctaagaatacaaaaa

SEQ ID NO: 101640 - DNA, 15 bp, Homo sapiens
actaagaatacaaaa

SEQ ID NO: 101641 - DNA, 15 bp, Homo sapiens
tactaagaatacaaa

SEQ ID NO: 101642 - DNA, 15 bp, Homo sapiens
ctactaagaatacaa

SEQ ID NO: 101643 - DNA, 15 bp, Homo sapiens
tctactaagaataca

SEQ ID NO: 101644 - DNA, 15 bp, Homo sapiens
ttctactaagaatac

SEQ ID NO: 101645 - DNA, 15 bp, Homo sapiens
attctactaagaata

SEQ ID NO: 101646 - DNA, 15 bp, Homo sapiens
cattctactaagaat

SEQ ID NO: 101647 - DNA, 15 bp, Homo sapiens
acattctactaagaa

SEQ ID NO: 101648 - DNA, 15 bp, Homo sapiens
tacattctactaaga

SEQ ID NO: 101649 - DNA, 15 bp, Homo sapiens
ctacattctactaag

SEQ ID NO: 101650 - DNA, 15 bp, Homo sapiens
tctacattctactaa

SEQ ID NO: 101651 - DNA, 15 bp, Homo sapiens
ttctacattctacta

SEQ ID NO: 101652 - DNA, 15 bp, Homo sapiens
attctacattctact

SEQ ID NO: 101653 - DNA, 15 bp, Homo sapiens
aattctacattctac

SEQ ID NO: 101654 - DNA, 15 bp, Homo sapiens
aaattctacattcta

SEQ ID NO: 101655 - DNA, 15 bp, Homo sapiens
taaattctacattct

SEQ ID NO: 101656 - DNA, 15 bp, Homo sapiens
gtaaattctacattc

SEQ ID NO: 101657 - DNA, 15 bp, Homo sapiens
agtaaattctacatt

SEQ ID NO: 101658 - DNA, 15 bp, Homo sapiens
aagtaaattctacat

SEQ ID NO: 101659 - DNA, 15 bp, Homo sapiens
taagtaaattctaca

SEQ ID NO: 101660 - DNA, 15 bp, Homo sapiens
ctaagtaaattctac

SEQ ID NO: 101661 - DNA, 15 bp, Homo sapiens
actaagtaaattcta

SEQ ID NO: 101662 - DNA, 15 bp, Homo sapiens
tactaagtaaattct

SEQ ID NO: 101663 - DNA, 15 bp, Homo sapiens
ctactaagtaaattc

SEQ ID NO: 101664 - DNA, 15 bp, Homo sapiens
tctactaagtaaatt

SEQ ID NO: 101665 - DNA, 15 bp, Homo sapiens
ttctactaagtaaat

SEQ ID NO: 101666 - DNA, 15 bp, Homo sapiens
attctactaagtaaa

SEQ ID NO: 101667 - DNA, 15 bp, Homo sapiens
aattctactaagtaa

SEQ ID NO: 101668 - DNA, 15 bp, Homo sapiens
aaattctactaagta

SEQ ID NO: 101669 - DNA, 15 bp, Homo sapiens
aaaattctactaagt

SEQ ID NO: 101670 - DNA, 15 bp, Homo sapiens
aaaaattctactaag

SEQ ID NO: 101671 - DNA, 15 bp, Homo sapiens
aaaaaattctactaa

SEQ ID NO: 101672 - DNA, 15 bp, Homo sapiens
caaaaaattctacta

SEQ ID NO: 101673 - DNA, 15 bp, Homo sapiens
acaaaaaattctact

SEQ ID NO: 101674 - DNA, 15 bp, Homo sapiens
tacaaaaaattctac

SEQ ID NO: 101675 - DNA, 15 bp, Homo sapiens
atacaaaaaattcta

SEQ ID NO: 101676 - DNA, 15 bp, Homo sapiens
aatacaaaaaattct

SEQ ID NO: 101677 - DNA, 15 bp, Homo sapiens
gaatacaaaaaattc

SEQ ID NO: 101678 - DNA, 15 bp, Homo sapiens
gctaagaatacaaaa

SEQ ID NO: 101679 - DNA, 15 bp, Homo sapiens
ggctaagaatacaaa

SEQ ID NO: 101680 - DNA, 15 bp, Homo sapiens
tggctaagaatacaa

SEQ ID NO: 101681 - DNA, 15 bp, Homo sapiens
ctggctaagaataca

SEQ ID NO: 101682 - DNA, 15 bp, Homo sapiens
gctggctaagaatac

SEQ ID NO: 101683 - DNA, 15 bp, Homo sapiens
tgctggctaagaata

SEQ ID NO: 101684 - DNA, 15 bp, Homo sapiens
atgctggctaagaat

SEQ ID NO: 101685 - DNA, 15 bp, Homo sapiens
catgctggctaagaa

SEQ ID NO: 101686 - DNA, 15 bp, Homo sapiens
ccatgctggctaaga

SEQ ID NO: 101687 - DNA, 15 bp, Homo sapiens
accatgctggctaag

SEQ ID NO: 101688 - DNA, 15 bp, Homo sapiens
gaccatgctggctaa

SEQ ID NO: 101689 - DNA, 15 bp, Homo sapiens
agaccatgctggcta

SEQ ID NO: 101690 - DNA, 15 bp, Homo sapiens
gagaccatgctggct

SEQ ID NO: 101691 - DNA, 15 bp, Homo sapiens
cgagaccatgctggc

SEQ ID NO: 101692 - DNA, 15 bp, Homo sapiens
tcgagaccatgctgg

SEQ ID NO: 101693 - DNA, 15 bp, Homo sapiens
atcgagaccatgctg

SEQ ID NO: 101694 - DNA, 15 bp, Homo sapiens
gatcgagaccatgct

SEQ ID NO: 101695 - DNA, 15 bp, Homo sapiens
agatcgagaccatgc

SEQ ID NO: 101696 - DNA, 15 bp, Homo sapiens
gagatcgagaccatg

SEQ ID NO: 101697 - DNA, 15 bp, Homo sapiens
ggagatcgagaccat

SEQ ID NO: 101698 - DNA, 15 bp, Homo sapiens
ggtcaggagatcgag

SEQ ID NO: 101699 - DNA, 15 bp, Homo sapiens
aggtcaggagatcga

SEQ ID NO: 101700 - DNA, 15 bp, Homo sapiens
caggtcaggagatcg

SEQ ID NO: 101701 - DNA, 15 bp, Homo sapiens
ccaggtcaggagatc

SEQ ID NO: 101702 - DNA, 15 bp, Homo sapiens
accaggtcaggagat

SEQ ID NO: 101703 - DNA, 15 bp, Homo sapiens
caccaggtcaggaga

SEQ ID NO: 101704 - DNA, 15 bp, Homo sapiens
tcaccaggtcaggag

SEQ ID NO: 101705 - DNA, 15 bp, Homo sapiens
atcaccaggtcagga

SEQ ID NO: 101706 - DNA, 15 bp, Homo sapiens
gatcaccaggtcagg

SEQ ID NO: 101707 - DNA, 15 bp, Homo sapiens
ggatcaccaggtcag

SEQ ID NO: 101708 - DNA, 15 bp, Homo sapiens
tggatcaccaggtca

SEQ ID NO: 101709 - DNA, 15 bp, Homo sapiens
gtggatcaccaggtc

SEQ ID NO: 101710 - DNA, 15 bp, Homo sapiens
ggtggatcaccaggt

SEQ ID NO: 101711 - DNA, 15 bp, Homo sapiens
gggtggatcaccagg

SEQ ID NO: 101712 - DNA, 15 bp, Homo sapiens
cgggtggatcaccag

SEQ ID NO: 101713 - DNA, 15 bp, Homo sapiens
gcgggtggatcacca

SEQ ID NO: 101714 - DNA, 15 bp, Homo sapiens
cgtggctcacgcctg

SEQ ID NO: 101715 - DNA, 15 bp, Homo sapiens
ccgtggctcacgcct

SEQ ID NO: 101716 - DNA, 15 bp, Homo sapiens
gccgtggctcacgcc

SEQ ID NO: 101717 - DNA, 15 bp, Homo sapiens
cgccgtggctcacgc

SEQ ID NO: 101718 - DNA, 15 bp, Homo sapiens
gcgccgtggctcacg

SEQ ID NO: 101719 - DNA, 15 bp, Homo sapiens
ggcgccgtggctcac

SEQ ID NO: 101720 - DNA, 15 bp, Homo sapiens
gggcgccgtggctca

SEQ ID NO: 101721 - DNA, 15 bp, Homo sapiens
cgggcgccgtggctc

SEQ ID NO: 101722 - DNA, 15 bp, Homo sapiens
ccgggcgccgtggct

SEQ ID NO: 101723 - DNA, 15 bp, Homo sapiens
gccgggcgccgtggc

SEQ ID NO: 101724 - DNA, 15 bp, Homo sapiens
ggccgggcgccgtgg

SEQ ID NO: 101725 - DNA, 15 bp, Homo sapiens
aggccgggcgccgtg

SEQ ID NO: 101726 - DNA, 15 bp, Homo sapiens
aaggccgggcgccgt

SEQ ID NO: 101727 - DNA, 15 bp, Homo sapiens
taaggccgggcgccg

SEQ ID NO: 101728 - DNA, 15 bp, Homo sapiens
ataaggccgggcgcc

SEQ ID NO: 101729 - DNA, 15 bp, Homo sapiens
aataaggccgggcgc

SEQ ID NO: 101730 - DNA, 15 bp, Homo sapiens
aaataaggccgggcg

SEQ ID NO: 101731 - DNA, 15 bp, Homo sapiens
aaaataaggccgggc

SEQ ID NO: 101732 - DNA, 15 bp, Homo sapiens
aaaaataaggccggg

SEQ ID NO: 101733 - DNA, 15 bp, Homo sapiens
aaaaaataaggccgg

SEQ ID NO: 101734 - DNA, 15 bp, Homo sapiens
gaaaaaataaggccg

SEQ ID NO: 101735 - DNA, 15 bp, Homo sapiens
agaaaaaataaggcc

SEQ ID NO: 101736 - DNA, 15 bp, Homo sapiens
aagaaaaaataaggc

SEQ ID NO: 101737 - DNA, 15 bp, Homo sapiens
aaagaaaaaataagg

SEQ ID NO: 101738 - DNA, 15 bp, Homo sapiens
aaaagaaaaaataag

SEQ ID NO: 101739 - DNA, 15 bp, Homo sapiens
aaaaagaaaaaataa

SEQ ID NO: 101740 - DNA, 15 bp, Homo sapiens
caaaaagaaaaaata

SEQ ID NO: 101741 - DNA, 15 bp, Homo sapiens
tcaaaaagaaaaaat

SEQ ID NO: 101742 - DNA, 15 bp, Homo sapiens
ctcaaaaagaaaaaa

SEQ ID NO: 101743 - DNA, 15 bp, Homo sapiens
tctcaaaaagaaaaa

SEQ ID NO: 101744 - DNA, 15 bp, Homo sapiens
atctcaaaaagaaaa

SEQ ID NO: 101745 - DNA, 15 bp, Homo sapiens
catctcaaaaagaaa

SEQ ID NO: 101746 - DNA, 15 bp, Homo sapiens
acatctcaaaaagaa

SEQ ID NO: 101747 - DNA, 15 bp, Homo sapiens
tacatctcaaaaaga

SEQ ID NO: 101748 - DNA, 15 bp, Homo sapiens
gtacatctcaaaaag

SEQ ID NO: 101749 - DNA, 15 bp, Homo sapiens
ggtacatctcaaaaa

SEQ ID NO: 101750 - DNA, 15 bp, Homo sapiens
gggtacatctcaaaa

SEQ ID NO: 101751 - DNA, 15 bp, Homo sapiens
tgggtacatctcaaa

SEQ ID NO: 101752 - DNA, 15 bp, Homo sapiens
ctgggtacatctcaa

SEQ ID NO: 101753 - DNA, 15 bp, Homo sapiens
tctgggtacatctca

SEQ ID NO: 101754 - DNA, 15 bp, Homo sapiens
gtctgggtacatctc

SEQ ID NO: 101755 - DNA, 15 bp, Homo sapiens
agtctgggtacatct

SEQ ID NO: 101756 - DNA, 15 bp, Homo sapiens
cagtctgggtacatc

SEQ ID NO: 101757 - DNA, 15 bp, Homo sapiens
ccagtctgggtacat

SEQ ID NO: 101758 - DNA, 15 bp, Homo sapiens
tccagtctgggtaca

SEQ ID NO: 101759 - DNA, 15 bp, Homo sapiens
ctccagtctgggtac

SEQ ID NO: 101760 - DNA, 15 bp, Homo sapiens
actccagtctgggta

SEQ ID NO: 101761 - DNA, 15 bp, Homo sapiens
tactccagtctgggt

SEQ ID NO: 101762 - DNA, 15 bp, Homo sapiens
gtactccagtctggg

SEQ ID NO: 101763 - DNA, 15 bp, Homo sapiens
tgtactccagtctgg

SEQ ID NO: 101764 - DNA, 15 bp, Homo sapiens
ctgtactccagtctg

SEQ ID NO: 101765 - DNA, 15 bp, Homo sapiens
actgtactccagtct

SEQ ID NO: 101766 - DNA, 15 bp, Homo sapiens
cactgtactccagtc

SEQ ID NO: 101767 - DNA, 15 bp, Homo sapiens
ccactgtactccagt

SEQ ID NO: 101768 - DNA, 15 bp, Homo sapiens
accactgtactccag

SEQ ID NO: 101769 - DNA, 15 bp, Homo sapiens
caccactgtactcca

SEQ ID NO: 101770 - DNA, 15 bp, Homo sapiens
gcaccactgtactcc

SEQ ID NO: 101771 - DNA, 15 bp, Homo sapiens
cgcaccactgtactc

SEQ ID NO: 101772 - DNA, 15 bp, Homo sapiens
tcgcaccactgtact

SEQ ID NO: 101773 - DNA, 15 bp, Homo sapiens
atcgcaccactgtac

SEQ ID NO: 101774 - DNA, 15 bp, Homo sapiens
gatcgcaccactgta

SEQ ID NO: 101775 - DNA, 15 bp, Homo sapiens
agatcgcaccactgt

SEQ ID NO: 101776 - DNA, 15 bp, Homo sapiens
gagatcgcaccactg

SEQ ID NO: 101777 - DNA, 15 bp, Homo sapiens
cgagatcgcaccact

SEQ ID NO: 101778 - DNA, 15 bp, Homo sapiens
ccgagatcgcaccac

SEQ ID NO: 101779 - DNA, 15 bp, Homo sapiens
gccgagatcgcacca

SEQ ID NO: 101780 - DNA, 15 bp, Homo sapiens
agccgagatcgcacc

SEQ ID NO: 101781 - DNA, 15 bp, Homo sapiens
aagccgagatcgcac

SEQ ID NO: 101782 - DNA, 15 bp, Homo sapiens
taagccgagatcgca

SEQ ID NO: 101783 - DNA, 15 bp, Homo sapiens
gtaagccgagatcgc

SEQ ID NO: 101784 - DNA, 15 bp, Homo sapiens
agtaagccgagatcg

SEQ ID NO: 101785 - DNA, 15 bp, Homo sapiens
cagtaagccgagatc

SEQ ID NO: 101786 - DNA, 15 bp, Homo sapiens
ccagtaagccgagat

SEQ ID NO: 101787 - DNA, 15 bp, Homo sapiens
tccagtaagccgaga

SEQ ID NO: 101788 - DNA, 15 bp, Homo sapiens
ttccagtaagccgag

SEQ ID NO: 101789 - DNA, 15 bp, Homo sapiens
gttccagtaagccga

SEQ ID NO: 101790 - DNA, 15 bp, Homo sapiens
ggttccagtaagccg

SEQ ID NO: 101791 - DNA, 15 bp, Homo sapiens
aggttccagtaagcc

SEQ ID NO: 101792 - DNA, 15 bp, Homo sapiens
gaggttccagtaagc

SEQ ID NO: 101793 - DNA, 15 bp, Homo sapiens
ggaggttccagtaag

SEQ ID NO: 101794 - DNA, 15 bp, Homo sapiens
tggaggttccagtaa

SEQ ID NO: 101795 - DNA, 15 bp, Homo sapiens
gtggaggttccagta

SEQ ID NO: 101796 - DNA, 15 bp, Homo sapiens
ggtggaggttccagt

SEQ ID NO: 101797 - DNA, 15 bp, Homo sapiens
aggtggaggttccag

SEQ ID NO: 101798 - DNA, 15 bp, Homo sapiens
gaggtggaggttcca

SEQ ID NO: 101799 - DNA, 15 bp, Homo sapiens
ggaggtggaggttcc

SEQ ID NO: 101800 - DNA, 15 bp, Homo sapiens
gggaggtggaggttc

SEQ ID NO: 101801 - DNA, 15 bp, Homo sapiens
cgggaggtggaggtt

SEQ ID NO: 101802 - DNA, 15 bp, Homo sapiens
ccgggaggtggaggt

SEQ ID NO: 101803 - DNA, 15 bp, Homo sapiens
acccgggaggtggag

SEQ ID NO: 101804 - DNA, 15 bp, Homo sapiens
aacccgggaggtgga

SEQ ID NO: 101805 - DNA, 15 bp, Homo sapiens
gaacccgggaggtgg

SEQ ID NO: 101806 - DNA, 15 bp, Homo sapiens
tgaacccgggaggtg

SEQ ID NO: 101807 - DNA, 15 bp, Homo sapiens
ctgaacccgggaggt

SEQ ID NO: 101808 - DNA, 15 bp, Homo sapiens
cctgaacccgggagg

SEQ ID NO: 101809 - DNA, 15 bp, Homo sapiens
gcctgaacccgggag

SEQ ID NO: 101810 - DNA, 15 bp, Homo sapiens
tgcctgaacccggga

SEQ ID NO: 101811 - DNA, 15 bp, Homo sapiens
ttgcctgaacccggg

SEQ ID NO: 101812 - DNA, 15 bp, Homo sapiens
attgcctgaacccgg

SEQ ID NO: 101813 - DNA, 15 bp, Homo sapiens
aattgcctgaacccg

SEQ ID NO: 101814 - DNA, 15 bp, Homo sapiens
gaattgcctgaaccc

SEQ ID NO: 101815 - DNA, 15 bp, Homo sapiens
agaattgcctgaacc

SEQ ID NO: 101816 - DNA, 15 bp, Homo sapiens
gagaattgcctgaac

SEQ ID NO: 101817 - DNA, 15 bp, Homo sapiens
ggagaattgcctgaa

SEQ ID NO: 101818 - DNA, 15 bp, Homo sapiens
aggagaattgcctga

SEQ ID NO: 101819 - DNA, 15 bp, Homo sapiens
caggagaattgcctg

SEQ ID NO: 101820 - DNA, 15 bp, Homo sapiens
gcaggagaattgcct

SEQ ID NO: 101821 - DNA, 15 bp, Homo sapiens
ggcaggagaattgcc

SEQ ID NO: 101822 - DNA, 15 bp, Homo sapiens
tgaggctgaggcagg

SEQ ID NO: 101823 - DNA, 15 bp, Homo sapiens
atgaggctgaggcag

SEQ ID NO: 101824 - DNA, 15 bp, Homo sapiens
catgaggctgaggca

SEQ ID NO: 101825 - DNA, 15 bp, Homo sapiens
tcatgaggctgaggc

SEQ ID NO: 101826 - DNA, 15 bp, Homo sapiens
ctcatgaggctgagg

SEQ ID NO: 101827 - DNA, 15 bp, Homo sapiens
actcatgaggctgag

SEQ ID NO: 101828 - DNA, 15 bp, Homo sapiens
tactcatgaggctga

SEQ ID NO: 101829 - DNA, 15 bp, Homo sapiens
gtactcatgaggctg

SEQ ID NO: 101830 - DNA, 15 bp, Homo sapiens
agtactcatgaggct

SEQ ID NO: 101831 - DNA, 15 bp, Homo sapiens
aagtactcatgaggc

SEQ ID NO: 101832 - DNA, 15 bp, Homo sapiens
caagtactcatgagg

SEQ ID NO: 101833 - DNA, 15 bp, Homo sapiens
ccaagtactcatgag

SEQ ID NO: 101834 - DNA, 15 bp, Homo sapiens
tccaagtactcatga

SEQ ID NO: 101835 - DNA, 15 bp, Homo sapiens
ttccaagtactcatg

SEQ ID NO: 101836 - DNA, 15 bp, Homo sapiens
gttccaagtactcat

SEQ ID NO: 101837 - DNA, 15 bp, Homo sapiens
agttccaagtactca

SEQ ID NO: 101838 - DNA, 15 bp, Homo sapiens
tagttccaagtactc

SEQ ID NO: 101839 - DNA, 15 bp, Homo sapiens
gtagttccaagtact

SEQ ID NO: 101840 - DNA, 15 bp, Homo sapiens
tgtagttccaagtac

SEQ ID NO: 101841 - DNA, 15 bp, Homo sapiens
ctgtagttccaagta

SEQ ID NO: 101842 - DNA, 15 bp, Homo sapiens
cctgtagttccaagt

SEQ ID NO: 101843 - DNA, 15 bp, Homo sapiens
acctgtagttccaag

SEQ ID NO: 101844 - DNA, 15 bp, Homo sapiens
cacctgtagttccaa

SEQ ID NO: 101845 - DNA, 15 bp, Homo sapiens
acacctgtagttcca

SEQ ID NO: 101846 - DNA, 15 bp, Homo sapiens
cacacctgtagttcc

SEQ ID NO: 101847 - DNA, 15 bp, Homo sapiens
acacacctgtagttc

SEQ ID NO: 101848 - DNA, 15 bp, Homo sapiens
cacacacctgtagtt

SEQ ID NO: 101849 - DNA, 15 bp, Homo sapiens
tcacacacctgtagt

SEQ ID NO: 101850 - DNA, 15 bp, Homo sapiens
gtcacacacctgtag

SEQ ID NO: 101851 - DNA, 15 bp, Homo sapiens
tgtcacacacctgta

SEQ ID NO: 101852 - DNA, 15 bp, Homo sapiens
gtgtcacacacctgt

SEQ ID NO: 101853 - DNA, 15 bp, Homo sapiens
ggtgtcacacacctg

SEQ ID NO: 101854 - DNA, 15 bp, Homo sapiens
tggtgtcacacacct

SEQ ID NO: 101855 - DNA, 15 bp, Homo sapiens
gtggtgtcacacacc

SEQ ID NO: 101856 - DNA, 15 bp, Homo sapiens
tgtggtgtcacacac

SEQ ID NO: 101857 - DNA, 15 bp, Homo sapiens
gtgtggtgtcacaca

SEQ ID NO: 101858 - DNA, 15 bp, Homo sapiens
tgtgtggtgtcacac

SEQ ID NO: 101859 - DNA, 15 bp, Homo sapiens
atgtgtggtgtcaca

SEQ ID NO: 101860 - DNA, 15 bp, Homo sapiens
catgtgtggtgtcac

SEQ ID NO: 101861 - DNA, 15 bp, Homo sapiens
ccatgtgtggtgtca

SEQ ID NO: 101862 - DNA, 15 bp, Homo sapiens
accatgtgtggtgtc

SEQ ID NO: 101863 - DNA, 15 bp, Homo sapiens
taccatgtgtggtgt

SEQ ID NO: 101864 - DNA, 15 bp, Homo sapiens
ataccatgtgtggtg

SEQ ID NO: 101865 - DNA, 15 bp, Homo sapiens
aataccatgtgtggt

SEQ ID NO: 101866 - DNA, 15 bp, Homo sapiens
aaataccatgtgtgg

SEQ ID NO: 101867 - DNA, 15 bp, Homo sapiens
aaaataccatgtgtg

SEQ ID NO: 101868 - DNA, 15 bp, Homo sapiens
aaaaataccatgtgt

SEQ ID NO: 101869 - DNA, 15 bp, Homo sapiens
aaaaaataccatgtg

SEQ ID NO: 101870 - DNA, 15 bp, Homo sapiens
caaaaaataccatgt

SEQ ID NO: 101871 - DNA, 15 bp, Homo sapiens
acaaaaaataccatg

SEQ ID NO: 101872 - DNA, 15 bp, Homo sapiens
tacaaaaaataccat

SEQ ID NO: 101873 - DNA, 15 bp, Homo sapiens
atacaaaaaatacca

SEQ ID NO: 101874 - DNA, 15 bp, Homo sapiens
aatacaaaaaatacc

SEQ ID NO: 101875 - DNA, 15 bp, Homo sapiens
aaatacaaaaaatac

SEQ ID NO: 101876 - DNA, 15 bp, Homo sapiens
aaaatacaaaaaata

SEQ ID NO: 101877 - DNA, 15 bp, Homo sapiens
aaaaatacaaaaaat

SEQ ID NO: 101878 - DNA, 15 bp, Homo sapiens
taaaaatacaaaaaa

SEQ ID NO: 101879 - DNA, 15 bp, Homo sapiens
cactaaaaatacaaa

SEQ ID NO: 101880 - DNA, 15 bp, Homo sapiens
tcactaaaaatacaa

SEQ ID NO: 101881 - DNA, 15 bp, Homo sapiens
ttcactaaaaataca

SEQ ID NO: 101882 - DNA, 15 bp, Homo sapiens
cttcactaaaaatac

SEQ ID NO: 101883 - DNA, 15 bp, Homo sapiens
tcttcactaaaaata

SEQ ID NO: 101884 - DNA, 15 bp, Homo sapiens
atcttcactaaaaat

SEQ ID NO: 101885 - DNA, 15 bp, Homo sapiens
catcttcactaaaaa

SEQ ID NO: 101886 - DNA, 15 bp, Homo sapiens
tcatcttcactaaaa

SEQ ID NO: 101887 - DNA, 15 bp, Homo sapiens
gtcatcttcactaaa

SEQ ID NO: 101888 - DNA, 15 bp, Homo sapiens
tgtcatcttcactaa

SEQ ID NO: 101889 - DNA, 15 bp, Homo sapiens
atgtcatcttcacta

SEQ ID NO: 101890 - DNA, 15 bp, Homo sapiens
aatgtcatcttcact

SEQ ID NO: 101891 - DNA, 15 bp, Homo sapiens
aaatgtcatcttcac

SEQ ID NO: 101892 - DNA, 15 bp, Homo sapiens
gaaatgtcatcttca

SEQ ID NO: 101893 - DNA, 15 bp, Homo sapiens
tgaaatgtcatcttc

SEQ ID NO: 101894 - DNA, 15 bp, Homo sapiens
gtgaaatgtcatctt

SEQ ID NO: 101895 - DNA, 15 bp, Homo sapiens
ggtgaaatgtcatct

SEQ ID NO: 101896 - DNA, 15 bp, Homo sapiens
tggtgaaatgtcatc

SEQ ID NO: 101897 - DNA, 15 bp, Homo sapiens
atggtgaaatgtcat

SEQ ID NO: 101898 - DNA, 15 bp, Homo sapiens
catggtgaaatgtca

SEQ ID NO: 101899 - DNA, 15 bp, Homo sapiens
acatggtgaaatgtc

SEQ ID NO: 101900 - DNA, 15 bp, Homo sapiens
aacatggtgaaatgt

SEQ ID NO: 101901 - DNA, 15 bp, Homo sapiens
caacatggtgaaatg

SEQ ID NO: 101902 - DNA, 15 bp, Homo sapiens
gcaacatggtgaaat

SEQ ID NO: 101903 - DNA, 15 bp, Homo sapiens
acctgggcaacatgg

SEQ ID NO: 101904 - DNA, 15 bp, Homo sapiens
aacctgggcaacatg

SEQ ID NO: 101905 - DNA, 15 bp, Homo sapiens
caacctgggcaacat

SEQ ID NO: 101906 - DNA, 15 bp, Homo sapiens
ccaacctgggcaaca

SEQ ID NO: 101907 - DNA, 15 bp, Homo sapiens
accaacctgggcaac

SEQ ID NO: 101908 - DNA, 15 bp, Homo sapiens
gaccaacctgggcaa

SEQ ID NO: 101909 - DNA, 15 bp, Homo sapiens
agaccaacctgggca

SEQ ID NO: 101910 - DNA, 15 bp, Homo sapiens
gagaccaacctgggc

SEQ ID NO: 101911 - DNA, 15 bp, Homo sapiens
cgagaccaacctggg

SEQ ID NO: 101912 - DNA, 15 bp, Homo sapiens
tcgagaccaacctgg

SEQ ID NO: 101913 - DNA, 15 bp, Homo sapiens
ttcgagaccaacctg

SEQ ID NO: 101914 - DNA, 15 bp, Homo sapiens
gttcgagaccaacct

SEQ ID NO: 101915 - DNA, 15 bp, Homo sapiens
agttcgagaccaacc

SEQ ID NO: 101916 - DNA, 15 bp, Homo sapiens
gagttcgagaccaac

SEQ ID NO: 101917 - DNA, 15 bp, Homo sapiens
ggagttcgagaccaa

SEQ ID NO: 101918 - DNA, 15 bp, Homo sapiens
tcacttgaggtcagg

SEQ ID NO: 101919 - DNA, 15 bp, Homo sapiens
atcacttgaggtcag

SEQ ID NO: 101920 - DNA, 15 bp, Homo sapiens
gatcacttgaggtca

SEQ ID NO: 101921 - DNA, 15 bp, Homo sapiens
tgatcacttgaggtc

SEQ ID NO: 101922 - DNA, 15 bp, Homo sapiens
ctgatcacttgaggt

SEQ ID NO: 101923 - DNA, 15 bp, Homo sapiens
gctgatcacttgagg

SEQ ID NO: 101924 - DNA, 15 bp, Homo sapiens
ggctgatcacttgag

SEQ ID NO: 101925 - DNA, 15 bp, Homo sapiens
aggctgatcacttga

SEQ ID NO: 101926 - DNA, 15 bp, Homo sapiens
taggctgatcacttg

SEQ ID NO: 101927 - DNA, 15 bp, Homo sapiens
gtaggctgatcactt

SEQ ID NO: 101928 - DNA, 15 bp, Homo sapiens
ggtaggctgatcact

SEQ ID NO: 101929 - DNA, 15 bp, Homo sapiens
aggtaggctgatcac

SEQ ID NO: 101930 - DNA, 15 bp, Homo sapiens
gaggtaggctgatca

SEQ ID NO: 101931 - DNA, 15 bp, Homo sapiens
cgaggtaggctgatc

SEQ ID NO: 101932 - DNA, 15 bp, Homo sapiens
ccgaggtaggctgat

SEQ ID NO: 101933 - DNA, 15 bp, Homo sapiens
gccgaggtaggctga

SEQ ID NO: 101934 - DNA, 15 bp, Homo sapiens
ggccgaggtaggctg

SEQ ID NO: 101935 - DNA, 15 bp, Homo sapiens
aggccgaggtaggct

SEQ ID NO: 101936 - DNA, 15 bp, Homo sapiens
gaggccgaggtaggc

SEQ ID NO: 101937 - DNA, 15 bp, Homo sapiens
ggaggccgaggtagg

SEQ ID NO: 101938 - DNA, 15 bp, Homo sapiens
gggaggccgaggtag

SEQ ID NO: 101939 - DNA, 15 bp, Homo sapiens
tgggaggccgaggta

SEQ ID NO: 101940 - DNA, 15 bp, Homo sapiens
ttgggaggccgaggt

SEQ ID NO: 101941 - DNA, 15 bp, Homo sapiens
acactttgggaggcc

SEQ ID NO: 101942 - DNA, 15 bp, Homo sapiens
aacactttgggaggc

SEQ ID NO: 101943 - DNA, 15 bp, Homo sapiens
caacactttgggagg

SEQ ID NO: 101944 - DNA, 15 bp, Homo sapiens
ccaacactttgggag

SEQ ID NO: 101945 - DNA, 15 bp, Homo sapiens
cccaacactttggga

SEQ ID NO: 101946 - DNA, 15 bp, Homo sapiens
tcccaacactttggg

SEQ ID NO: 101947 - DNA, 15 bp, Homo sapiens
atcccaacactttgg

SEQ ID NO: 101948 - DNA, 15 bp, Homo sapiens
aatcccaacactttg

SEQ ID NO: 101949 - DNA, 15 bp, Homo sapiens
taatcccaacacttt

SEQ ID NO: 101950 - DNA, 15 bp, Homo sapiens
gtaatcccaacactt

SEQ ID NO: 101951 - DNA, 15 bp, Homo sapiens
tgtaatcccaacact

SEQ ID NO: 101952 - DNA, 15 bp, Homo sapiens
ctgtaatcccaacac

SEQ ID NO: 101953 - DNA, 15 bp, Homo sapiens
cctgtaatcccaaca

SEQ ID NO: 101954 - DNA, 15 bp, Homo sapiens
gcctgtaatcccaac

SEQ ID NO: 101955 - DNA, 15 bp, Homo sapiens
cgcctgtaatcccaa

SEQ ID NO: 101956 - DNA, 15 bp, Homo sapiens
ttggctcacgcctgt

SEQ ID NO: 101957 - DNA, 15 bp, Homo sapiens
tttggctcacgcctg

SEQ ID NO: 101958 - DNA, 15 bp, Homo sapiens
atttggctcacgcct

SEQ ID NO: 101959 - DNA, 15 bp, Homo sapiens
catttggctcacgcc

SEQ ID NO: 101960 - DNA, 15 bp, Homo sapiens
gcatttggctcacgc

SEQ ID NO: 101961 - DNA, 15 bp, Homo sapiens
ggcatttggctcacg

SEQ ID NO: 101962 - DNA, 15 bp, Homo sapiens
gggcatttggctcac

SEQ ID NO: 101963 - DNA, 15 bp, Homo sapiens
tgggcatttggctca

SEQ ID NO: 101964 - DNA, 15 bp, Homo sapiens
ctgggcatttggctc

SEQ ID NO: 101965 - DNA, 15 bp, Homo sapiens
gctgggcatttggct

SEQ ID NO: 101966 - DNA, 15 bp, Homo sapiens
ggctgggcatttggc

SEQ ID NO: 101967 - DNA, 15 bp, Homo sapiens
tggctgggcatttgg

SEQ ID NO: 101968 - DNA, 15 bp, Homo sapiens
ttggctgggcatttg

SEQ ID NO: 101969 - DNA, 15 bp, Homo sapiens
cttggctgggcattt

SEQ ID NO: 101970 - DNA, 15 bp, Homo sapiens
ccttggctgggcatt

SEQ ID NO: 101971 - DNA, 15 bp, Homo sapiens
cccttggctgggcat

SEQ ID NO: 101972 - DNA, 15 bp, Homo sapiens
acccttggctgggca

SEQ ID NO: 101973 - DNA, 15 bp, Homo sapiens
tacccttggctgggc

SEQ ID NO: 101974 - DNA, 15 bp, Homo sapiens
ttacccttggctggg

SEQ ID NO: 101975 - DNA, 15 bp, Homo sapiens
tttacccttggctgg

SEQ ID NO: 101976 - DNA, 15 bp, Homo sapiens
ctttacccttggctg

SEQ ID NO: 101977 - DNA, 15 bp, Homo sapiens
actttacccttggct

SEQ ID NO: 101978 - DNA, 15 bp, Homo sapiens
cactttacccttggc

SEQ ID NO: 101979 - DNA, 15 bp, Homo sapiens
acactttacccttgg

SEQ ID NO: 101980 - DNA, 15 bp, Homo sapiens
aacactttacccttg

SEQ ID NO: 101981 - DNA, 15 bp, Homo sapiens
aaacactttaccctt

SEQ ID NO: 101982 - DNA, 15 bp, Homo sapiens
taaacactttaccct

SEQ ID NO: 101983 - DNA, 15 bp, Homo sapiens
ctaaacactttaccc

SEQ ID NO: 101984 - DNA, 15 bp, Homo sapiens
tctaaacactttacc

SEQ ID NO: 101985 - DNA, 15 bp, Homo sapiens
gtctaaacactttac

SEQ ID NO: 101986 - DNA, 15 bp, Homo sapiens
agtctaaacacttta

SEQ ID NO: 101987 - DNA, 15 bp, Homo sapiens
aagtctaaacacttt

SEQ ID NO: 101988 - DNA, 15 bp, Homo sapiens
gaagtctaaacactt

SEQ ID NO: 101989 - DNA, 15 bp, Homo sapiens
tgaagtctaaacact

SEQ ID NO: 101990 - DNA, 15 bp, Homo sapiens
ttgaagtctaaacac

SEQ ID NO: 101991 - DNA, 15 bp, Homo sapiens
gttgaagtctaaaca

SEQ ID NO: 101992 - DNA, 15 bp, Homo sapiens
cgttgaagtctaaac

SEQ ID NO: 101993 - DNA, 15 bp, Homo sapiens
acgttgaagtctaaa

SEQ ID NO: 101994 - DNA, 15 bp, Homo sapiens
cacgttgaagtctaa

SEQ ID NO: 101995 - DNA, 15 bp, Homo sapiens
gcacgttgaagtcta

SEQ ID NO: 101996 - DNA, 15 bp, Homo sapiens
agcacgttgaagtct

SEQ ID NO: 101997 - DNA, 15 bp, Homo sapiens
aagcacgttgaagtc

SEQ ID NO: 101998 - DNA, 15 bp, Homo sapiens
aaagcacgttgaagt

SEQ ID NO: 101999 - DNA, 15 bp, Homo sapiens
caaagcacgttgaag

SEQ ID NO: 102000 - DNA, 15 bp, Homo sapiens
ccaaagcacgttgaa

SEQ ID NO: 102001 - DNA, 15 bp, Homo sapiens
accaaagcacgttga

SEQ ID NO: 102002 - DNA, 15 bp, Homo sapiens
gaccaaagcacgttg

SEQ ID NO: 102003 - DNA, 15 bp, Homo sapiens
ggaccaaagcacgtt

SEQ ID NO: 102004 - DNA, 15 bp, Homo sapiens
tggaccaaagcacgt

SEQ ID NO: 102005 - DNA, 15 bp, Homo sapiens
atggaccaaagcacg

SEQ ID NO: 102006 - DNA, 15 bp, Homo sapiens
gatggaccaaagcac

SEQ ID NO: 102007 - DNA, 15 bp, Homo sapiens
agatggaccaaagca

SEQ ID NO: 102008 - DNA, 15 bp, Homo sapiens
cagatggaccaaagc

SEQ ID NO: 102009 - DNA, 15 bp, Homo sapiens
ccagatggaccaaag

SEQ ID NO: 102010 - DNA, 15 bp, Homo sapiens
cccagatggaccaaa

SEQ ID NO: 102011 - DNA, 15 bp, Homo sapiens
tcccagatggaccaa

SEQ ID NO: 102012 - DNA, 15 bp, Homo sapiens
ttcccagatggacca

SEQ ID NO: 102013 - DNA, 15 bp, Homo sapiens
tttcccagatggacc

SEQ ID NO: 102014 - DNA, 15 bp, Homo sapiens
gtttcccagatggac

SEQ ID NO: 102015 - DNA, 15 bp, Homo sapiens
agtttcccagatgga

SEQ ID NO: 102016 - DNA, 15 bp, Homo sapiens
cagtttcccagatgg

SEQ ID NO: 102017 - DNA, 15 bp, Homo sapiens
tcagtttcccagatg

SEQ ID NO: 102018 - DNA, 15 bp, Homo sapiens
ctcagtttcccagat

SEQ ID NO: 102019 - DNA, 15 bp, Homo sapiens
cctcagtttcccaga

SEQ ID NO: 102020 - DNA, 15 bp, Homo sapiens
gcctcagtttcccag

SEQ ID NO: 102021 - DNA, 15 bp, Homo sapiens
tgcctcagtttccca

SEQ ID NO: 102022 - DNA, 15 bp, Homo sapiens
gtgcctcagtttccc

SEQ ID NO: 102023 - DNA, 15 bp, Homo sapiens
tgtgcctcagtttcc

SEQ ID NO: 102024 - DNA, 15 bp, Homo sapiens
ctgtgcctcagtttc

SEQ ID NO: 102025 - DNA, 15 bp, Homo sapiens
tctgtgcctcagttt

SEQ ID NO: 102026 - DNA, 15 bp, Homo sapiens
ttctgtgcctcagtt

SEQ ID NO: 102027 - DNA, 15 bp, Homo sapiens
cttctgtgcctcagt

SEQ ID NO: 102028 - DNA, 15 bp, Homo sapiens
acttctgtgcctcag

SEQ ID NO: 102029 - DNA, 15 bp, Homo sapiens
aacttctgtgcctca

SEQ ID NO: 102030 - DNA, 15 bp, Homo sapiens
caacttctgtgcctc

SEQ ID NO: 102031 - DNA, 15 bp, Homo sapiens
ccaacttctgtgcct

SEQ ID NO: 102032 - DNA, 15 bp, Homo sapiens
gccaacttctgtgcc

SEQ ID NO: 102033 - DNA, 15 bp, Homo sapiens
ggccaacttctgtgc

SEQ ID NO: 102034 - DNA, 15 bp, Homo sapiens
gggccaacttctgtg

SEQ ID NO: 102035 - DNA, 15 bp, Homo sapiens
tgggccaacttctgt

SEQ ID NO: 102036 - DNA, 15 bp, Homo sapiens
gtgggccaacttctg

SEQ ID NO: 102037 - DNA, 15 bp, Homo sapiens
ggtgggccaacttct

SEQ ID NO: 102038 - DNA, 15 bp, Homo sapiens
gggtgggccaacttc

SEQ ID NO: 102039 - DNA, 15 bp, Homo sapiens
tgggtgggccaactt

SEQ ID NO: 102040 - DNA, 15 bp, Homo sapiens
ctgggtgggccaact

SEQ ID NO: 102041 - DNA, 15 bp, Homo sapiens
gctgggtgggccaac

SEQ ID NO: 102042 - DNA, 15 bp, Homo sapiens
ggctgggtgggccaa

SEQ ID NO: 102043 - DNA, 15 bp, Homo sapiens
gggctgggtgggcca

SEQ ID NO: 102044 - DNA, 15 bp, Homo sapiens
tgggctgggtgggcc

SEQ ID NO: 102045 - DNA, 15 bp, Homo sapiens
ctgggctgggtgggc

SEQ ID NO: 102046 - DNA, 15 bp, Homo sapiens
gctgggctgggtggg

SEQ ID NO: 102047 - DNA, 15 bp, Homo sapiens
cgctgggctgggtgg

SEQ ID NO: 102048 - DNA, 15 bp, Homo sapiens
ccgctgggctgggtg

SEQ ID NO: 102049 - DNA, 15 bp, Homo sapiens
accgctgggctgggt

SEQ ID NO: 102050 - DNA, 15 bp, Homo sapiens
gaccgctgggctggg

SEQ ID NO: 102051 - DNA, 15 bp, Homo sapiens
ggaccgctgggctgg

SEQ ID NO: 102052 - DNA, 15 bp, Homo sapiens
aggaccgctgggctg

SEQ ID NO: 102053 - DNA, 15 bp, Homo sapiens
gaggaccgctgggct

SEQ ID NO: 102054 - DNA, 15 bp, Homo sapiens
ggaggaccgctgggc

SEQ ID NO: 102055 - DNA, 15 bp, Homo sapiens
aggaggaccgctggg

SEQ ID NO: 102056 - DNA, 15 bp, Homo sapiens
taggaggaccgctgg

SEQ ID NO: 102057 - DNA, 15 bp, Homo sapiens
ttaggaggaccgctg

SEQ ID NO: 102058 - DNA, 15 bp, Homo sapiens
attaggaggaccgct

SEQ ID NO: 102059 - DNA, 15 bp, Homo sapiens
gattaggaggaccgc

SEQ ID NO: 102060 - DNA, 15 bp, Homo sapiens
ggattaggaggaccg

SEQ ID NO: 102061 - DNA, 15 bp, Homo sapiens
gggattaggaggacc

SEQ ID NO: 102062 - DNA, 15 bp, Homo sapiens
tgggattaggaggac

SEQ ID NO: 102063 - DNA, 15 bp, Homo sapiens
gtgggattaggagga

SEQ ID NO: 102064 - DNA, 15 bp, Homo sapiens
tgtgggattaggagg

SEQ ID NO: 102065 - DNA, 15 bp, Homo sapiens
ctgtgggattaggag

SEQ ID NO: 102066 - DNA, 15 bp, Homo sapiens
tctgtgggattagga

SEQ ID NO: 102067 - DNA, 15 bp, Homo sapiens
gtctgtgggattagg

SEQ ID NO: 102068 - DNA, 15 bp, Homo sapiens
tgtctgtgggattag

SEQ ID NO: 102069 - DNA, 15 bp, Homo sapiens
ctgtctgtgggatta

SEQ ID NO: 102070 - DNA, 15 bp, Homo sapiens
actgtctgtgggatt

SEQ ID NO: 102071 - DNA, 15 bp, Homo sapiens
cactgtctgtgggat

SEQ ID NO: 102072 - DNA, 15 bp, Homo sapiens
ccactgtctgtggga

SEQ ID NO: 102073 - DNA, 15 bp, Homo sapiens
cccactgtctgtggg

SEQ ID NO: 102074 - DNA, 15 bp, Homo sapiens
ccccactgtctgtgg

SEQ ID NO: 102075 - DNA, 15 bp, Homo sapiens
tccccactgtctgtg

SEQ ID NO: 102076 - DNA, 15 bp, Homo sapiens
atccccactgtctgt

SEQ ID NO: 102077 - DNA, 15 bp, Homo sapiens
catccccactgtctg

SEQ ID NO: 102078 - DNA, 15 bp, Homo sapiens
ccatccccactgtct

SEQ ID NO: 102079 - DNA, 15 bp, Homo sapiens
tccatccccactgtc

SEQ ID NO: 102080 - DNA, 15 bp, Homo sapiens
ctccatccccactgt

SEQ ID NO: 102081 - DNA, 15 bp, Homo sapiens
tctccatccccactg

SEQ ID NO: 102082 - DNA, 15 bp, Homo sapiens
atctccatccccact

SEQ ID NO: 102083 - DNA, 15 bp, Homo sapiens
aatctccatccccac

SEQ ID NO: 102084 - DNA, 15 bp, Homo sapiens
gaatctccatcccca

SEQ ID NO: 102085 - DNA, 15 bp, Homo sapiens
agaatctccatcccc

SEQ ID NO: 102086 - DNA, 15 bp, Homo sapiens
cagaatctccatccc

SEQ ID NO: 102087 - DNA, 15 bp, Homo sapiens
gcagaatctccatcc

SEQ ID NO: 102088 - DNA, 15 bp, Homo sapiens
tgcagaatctccatc

SEQ ID NO: 102089 - DNA, 15 bp, Homo sapiens
ttgcagaatctccat

SEQ ID NO: 102090 - DNA, 15 bp, Homo sapiens
cttgcagaatctcca

SEQ ID NO: 102091 - DNA, 15 bp, Homo sapiens
ccttgcagaatctcc

SEQ ID NO: 102092 - DNA, 15 bp, Homo sapiens
cccttgcagaatctc

SEQ ID NO: 102093 - DNA, 15 bp, Homo sapiens
ccccttgcagaatct

SEQ ID NO: 102094 - DNA, 15 bp, Homo sapiens
tccccttgcagaatc

SEQ ID NO: 102095 - DNA, 15 bp, Homo sapiens
ttccccttgcagaat

SEQ ID NO: 102096 - DNA, 15 bp, Homo sapiens
cttccccttgcagaa

SEQ ID NO: 102097 - DNA, 15 bp, Homo sapiens
tcttccccttgcaga

SEQ ID NO: 102098 - DNA, 15 bp, Homo sapiens
ctcttccccttgcag

SEQ ID NO: 102099 - DNA, 15 bp, Homo sapiens
cctcttccccttgca

SEQ ID NO: 102100 - DNA, 15 bp, Homo sapiens
acctcttccccttgc

SEQ ID NO: 102101 - DNA, 15 bp, Homo sapiens
cacctcttccccttg

SEQ ID NO: 102102 - DNA, 15 bp, Homo sapiens
ccacctcttcccctt

SEQ ID NO: 102103 - DNA, 15 bp, Homo sapiens
cccacctcttcccct

SEQ ID NO: 102104 - DNA, 15 bp, Homo sapiens
tcccacctcttcccc

SEQ ID NO: 102105 - DNA, 15 bp, Homo sapiens
ctcccacctcttccc

SEQ ID NO: 102106 - DNA, 15 bp, Homo sapiens
actcccacctcttcc

SEQ ID NO: 102107 - DNA, 15 bp, Homo sapiens
gactcccacctcttc

SEQ ID NO: 102108 - DNA, 15 bp, Homo sapiens
tgactcccacctctt

SEQ ID NO: 102109 - DNA, 15 bp, Homo sapiens
ctgactcccacctct

SEQ ID NO: 102110 - DNA, 15 bp, Homo sapiens
cctgactcccacctc

SEQ ID NO: 102111 - DNA, 15 bp, Homo sapiens
acctgactcccacct

SEQ ID NO: 102112 - DNA, 15 bp, Homo sapiens
tacctgactcccacc

SEQ ID NO: 102113 - DNA, 15 bp, Homo sapiens
ctacctgactcccac

SEQ ID NO: 102114 - DNA, 15 bp, Homo sapiens
gctacctgactccca

SEQ ID NO: 102115 - DNA, 15 bp, Homo sapiens
tgctacctgactccc

SEQ ID NO: 102116 - DNA, 15 bp, Homo sapiens
ctgctacctgactcc

SEQ ID NO: 102117 - DNA, 15 bp, Homo sapiens
cctgctacctgactc

SEQ ID NO: 102118 - DNA, 15 bp, Homo sapiens
gcctgctacctgact

SEQ ID NO: 102119 - DNA, 15 bp, Homo sapiens
tgcctgctacctgac

SEQ ID NO: 102120 - DNA, 15 bp, Homo sapiens
ctgcctgctacctga

SEQ ID NO: 102121 - DNA, 15 bp, Homo sapiens
tctgcctgctacctg

SEQ ID NO: 102122 - DNA, 15 bp, Homo sapiens
ttctgcctgctacct

SEQ ID NO: 102123 - DNA, 15 bp, Homo sapiens
attctgcctgctacc

SEQ ID NO: 102124 - DNA, 15 bp, Homo sapiens
aattctgcctgctac

SEQ ID NO: 102125 - DNA, 15 bp, Homo sapiens
aaattctgcctgcta

SEQ ID NO: 102126 - DNA, 15 bp, Homo sapiens
caaattctgcctgct

SEQ ID NO: 102127 - DNA, 15 bp, Homo sapiens
ccaaattctgcctgc

SEQ ID NO: 102128 - DNA, 15 bp, Homo sapiens
tccaaattctgcctg

SEQ ID NO: 102129 - DNA, 15 bp, Homo sapiens
gtccaaattctgcct

SEQ ID NO: 102130 - DNA, 15 bp, Homo sapiens
tgtccaaattctgcc

SEQ ID NO: 102131 - DNA, 15 bp, Homo sapiens
ctgtccaaattctgc

SEQ ID NO: 102132 - DNA, 15 bp, Homo sapiens
gctgtccaaattctg

SEQ ID NO: 102133 - DNA, 15 bp, Homo sapiens
ggctgtccaaattct

SEQ ID NO: 102134 - DNA, 15 bp, Homo sapiens
aggctgtccaaattc

SEQ ID NO: 102135 - DNA, 15 bp, Homo sapiens
caggctgtccaaatt

SEQ ID NO: 102136 - DNA, 15 bp, Homo sapiens
ccaggctgtccaaat

SEQ ID NO: 102137 - DNA, 15 bp, Homo sapiens
cccaggctgtccaaa

SEQ ID NO: 102138 - DNA, 15 bp, Homo sapiens
tcccaggctgtccaa

SEQ ID NO: 102139 - DNA, 15 bp, Homo sapiens
ctcccaggctgtcca

SEQ ID NO: 102140 - DNA, 15 bp, Homo sapiens
cctcccaggctgtcc

SEQ ID NO: 102141 - DNA, 15 bp, Homo sapiens
acctcccaggctgtc

SEQ ID NO: 102142 - DNA, 15 bp, Homo sapiens
tacctcccaggctgt

SEQ ID NO: 102143 - DNA, 15 bp, Homo sapiens
ctacctcccaggctg

SEQ ID NO: 102144 - DNA, 15 bp, Homo sapiens
gctacctcccaggct

SEQ ID NO: 102145 - DNA, 15 bp, Homo sapiens
agctacctcccaggc

SEQ ID NO: 102146 - DNA, 15 bp, Homo sapiens
cagctacctcccagg

SEQ ID NO: 102147 - DNA, 15 bp, Homo sapiens
gcagctacctcccag

SEQ ID NO: 102148 - DNA, 15 bp, Homo sapiens
tgcagctacctccca

SEQ ID NO: 102149 - DNA, 15 bp, Homo sapiens
gtgcagctacctccc

SEQ ID NO: 102150 - DNA, 15 bp, Homo sapiens
tgtgcagctacctcc

SEQ ID NO: 102151 - DNA, 15 bp, Homo sapiens
gtgtgcagctacctc

SEQ ID NO: 102152 - DNA, 15 bp, Homo sapiens
tgtgtgcagctacct

SEQ ID NO: 102153 - DNA, 15 bp, Homo sapiens
ctgtgtgcagctacc

SEQ ID NO: 102154 - DNA, 15 bp, Homo sapiens
actgtgtgcagctac

SEQ ID NO: 102155 - DNA, 15 bp, Homo sapiens
cactgtgtgcagcta

SEQ ID NO: 102156 - DNA, 15 bp, Homo sapiens
tcactgtgtgcagct

SEQ ID NO: 102157 - DNA, 15 bp, Homo sapiens
gtcactgtgtgcagc

SEQ ID NO: 102158 - DNA, 15 bp, Homo sapiens
ggtcactgtgtgcag

SEQ ID NO: 102159 - DNA, 15 bp, Homo sapiens
gggtcactgtgtgca

SEQ ID NO: 102160 - DNA, 15 bp, Homo sapiens
ggggtcactgtgtgc

SEQ ID NO: 102161 - DNA, 15 bp, Homo sapiens
gggggtcactgtgtg

SEQ ID NO: 102162 - DNA, 15 bp, Homo sapiens
agggggtcactgtgt

SEQ ID NO: 102163 - DNA, 15 bp, Homo sapiens
aagggggtcactgtg

SEQ ID NO: 102164 - DNA, 15 bp, Homo sapiens
gaagggggtcactgt

SEQ ID NO: 102165 - DNA, 15 bp, Homo sapiens
ggaagggggtcactg

SEQ ID NO: 102166 - DNA, 15 bp, Homo sapiens
aggaagggggtcact

SEQ ID NO: 102167 - DNA, 15 bp, Homo sapiens
aaggaagggggtcac

SEQ ID NO: 102168 - DNA, 15 bp, Homo sapiens
taaggaagggggtca

SEQ ID NO: 102169 - DNA, 15 bp, Homo sapiens
ataaggaagggggtc

SEQ ID NO: 102170 - DNA, 15 bp, Homo sapiens
aataaggaagggggt

SEQ ID NO: 102171 - DNA, 15 bp, Homo sapiens
gaataaggaaggggg

SEQ ID NO: 102172 - DNA, 15 bp, Homo sapiens
ggaataaggaagggg

SEQ ID NO: 102173 - DNA, 15 bp, Homo sapiens
aggaataaggaaggg

SEQ ID NO: 102174 - DNA, 15 bp, Homo sapiens
gaggaataaggaagg

SEQ ID NO: 102175 - DNA, 15 bp, Homo sapiens
ggaggaataaggaag

SEQ ID NO: 102176 - DNA, 15 bp, Homo sapiens
gggaggaataaggaa

SEQ ID NO: 102177 - DNA, 15 bp, Homo sapiens
ggggaggaataagga

SEQ ID NO: 102178 - DNA, 15 bp, Homo sapiens
tggggaggaataagg

SEQ ID NO: 102179 - DNA, 15 bp, Homo sapiens
gtggggaggaataag

SEQ ID NO: 102180 - DNA, 15 bp, Homo sapiens
tgtggggaggaataa

SEQ ID NO: 102181 - DNA, 15 bp, Homo sapiens
ctgtggggaggaata

SEQ ID NO: 102182 - DNA, 15 bp, Homo sapiens
cctgtggggaggaat

SEQ ID NO: 102183 - DNA, 15 bp, Homo sapiens
ccctgtggggaggaa

SEQ ID NO: 102184 - DNA, 15 bp, Homo sapiens
tccctgtggggagga

SEQ ID NO: 102185 - DNA, 15 bp, Homo sapiens
ctccctgtggggagg

SEQ ID NO: 102186 - DNA, 15 bp, Homo sapiens
actccctgtggggag

SEQ ID NO: 102187 - DNA, 15 bp, Homo sapiens
cactccctgtgggga

SEQ ID NO: 102188 - DNA, 15 bp, Homo sapiens
ccactccctgtgggg

SEQ ID NO: 102189 - DNA, 15 bp, Homo sapiens
accactccctgtggg

SEQ ID NO: 102190 - DNA, 15 bp, Homo sapiens
aaccactccctgtgg

SEQ ID NO: 102191 - DNA, 15 bp, Homo sapiens
aaaccactccctgtg

SEQ ID NO: 102192 - DNA, 15 bp, Homo sapiens
aaaaccactccctgt

SEQ ID NO: 102193 - DNA, 15 bp, Homo sapiens
gaaaaccactccctg

SEQ ID NO: 102194 - DNA, 15 bp, Homo sapiens
tgaaaaccactccct

SEQ ID NO: 102195 - DNA, 15 bp, Homo sapiens
ctgaaaaccactccc

SEQ ID NO: 102196 - DNA, 15 bp, Homo sapiens
tctgaaaaccactcc

SEQ ID NO: 102197 - DNA, 15 bp, Homo sapiens
ctctgaaaaccactc

SEQ ID NO: 102198 - DNA, 15 bp, Homo sapiens
tctctgaaaaccact

SEQ ID NO: 102199 - DNA, 15 bp, Homo sapiens
gtctctgaaaaccac

SEQ ID NO: 102200 - DNA, 15 bp, Homo sapiens
tgtctctgaaaacca

SEQ ID NO: 102201 - DNA, 15 bp, Homo sapiens
atgtctctgaaaacc

SEQ ID NO: 102202 - DNA, 15 bp, Homo sapiens
aatgtctctgaaaac

SEQ ID NO: 102203 - DNA, 15 bp, Homo sapiens
aaatgtctctgaaaa

SEQ ID NO: 102204 - DNA, 15 bp, Homo sapiens
gaaatgtctctgaaa

SEQ ID NO: 102205 - DNA, 15 bp, Homo sapiens
tgaaatgtctctgaa

SEQ ID NO: 102206 - DNA, 15 bp, Homo sapiens
ctgaaatgtctctga

SEQ ID NO: 102207 - DNA, 15 bp, Homo sapiens
tctgaaatgtctctg

SEQ ID NO: 102208 - DNA, 15 bp, Homo sapiens
ttctgaaatgtctct

SEQ ID NO: 102209 - DNA, 15 bp, Homo sapiens
tttctgaaatgtctc

SEQ ID NO: 102210 - DNA, 15 bp, Homo sapiens
ctttctgaaatgtct

SEQ ID NO: 102211 - DNA, 15 bp, Homo sapiens
actttctgaaatgtc

SEQ ID NO: 102212 - DNA, 15 bp, Homo sapiens
cactttctgaaatgt

SEQ ID NO: 102213 - DNA, 15 bp, Homo sapiens
tcactttctgaaatg

SEQ ID NO: 102214 - DNA, 15 bp, Homo sapiens
ttcactttctgaaat

SEQ ID NO: 102215 - DNA, 15 bp, Homo sapiens
cttcactttctgaaa

SEQ ID NO: 102216 - DNA, 15 bp, Homo sapiens
ccttcactttctgaa

SEQ ID NO: 102217 - DNA, 15 bp, Homo sapiens
tccttcactttctga

SEQ ID NO: 102218 - DNA, 15 bp, Homo sapiens
ctccttcactttctg

SEQ ID NO: 102219 - DNA, 15 bp, Homo sapiens
tctccttcactttct

SEQ ID NO: 102220 - DNA, 15 bp, Homo sapiens
ttctccttcactttc

SEQ ID NO: 102221 - DNA, 15 bp, Homo sapiens
tttctccttcacttt

SEQ ID NO: 102222 - DNA, 15 bp, Homo sapiens
gtttctccttcactt

SEQ ID NO: 102223 - DNA, 15 bp, Homo sapiens
agtttctccttcact

SEQ ID NO: 102224 - DNA, 15 bp, Homo sapiens
gagtttctccttcac

SEQ ID NO: 102225 - DNA, 15 bp, Homo sapiens
tgagtttctccttca

SEQ ID NO: 102226 - DNA, 15 bp, Homo sapiens
ttgagtttctccttc

SEQ ID NO: 102227 - DNA, 15 bp, Homo sapiens
cttgagtttctcctt

SEQ ID NO: 102228 - DNA, 15 bp, Homo sapiens
tcttgagtttctcct

SEQ ID NO: 102229 - DNA, 15 bp, Homo sapiens
atcttgagtttctcc

SEQ ID NO: 102230 - DNA, 15 bp, Homo sapiens
aatcttgagtttctc

SEQ ID NO: 102231 - DNA, 15 bp, Homo sapiens
caatcttgagtttct

SEQ ID NO: 102232 - DNA, 15 bp, Homo sapiens
tcaatcttgagtttc

SEQ ID NO: 102233 - DNA, 15 bp, Homo sapiens
gtcaatcttgagttt

SEQ ID NO: 102234 - DNA, 15 bp, Homo sapiens
agtcaatcttgagtt

SEQ ID NO: 102235 - DNA, 15 bp, Homo sapiens
gagtcaatcttgagt

SEQ ID NO: 102236 - DNA, 15 bp, Homo sapiens
tgagtcaatcttgag

SEQ ID NO: 102237 - DNA, 15 bp, Homo sapiens
atgagtcaatcttga

SEQ ID NO: 102238 - DNA, 15 bp, Homo sapiens
catgagtcaatcttg

SEQ ID NO: 102239 - DNA, 15 bp, Homo sapiens
tcatgagtcaatctt

SEQ ID NO: 102240 - DNA, 15 bp, Homo sapiens
ctcatgagtcaatct

SEQ ID NO: 102241 - DNA, 15 bp, Homo sapiens
cctcatgagtcaatc

SEQ ID NO: 102242 - DNA, 15 bp, Homo sapiens
tcctcatgagtcaat

SEQ ID NO: 102243 - DNA, 15 bp, Homo sapiens
gtcctcatgagtcaa

SEQ ID NO: 102244 - DNA, 15 bp, Homo sapiens
ggtcctcatgagtca

SEQ ID NO: 102245 - DNA, 15 bp, Homo sapiens
aggtcctcatgagtc

SEQ ID NO: 102246 - DNA, 15 bp, Homo sapiens
caggtcctcatgagt

SEQ ID NO: 102247 - DNA, 15 bp, Homo sapiens
tcaggtcctcatgag

SEQ ID NO: 102248 - DNA, 15 bp, Homo sapiens
ttcaggtcctcatga

SEQ ID NO: 102249 - DNA, 15 bp, Homo sapiens
cttcaggtcctcatg

SEQ ID NO: 102250 - DNA, 15 bp, Homo sapiens
ccttcaggtcctcat

SEQ ID NO: 102251 - DNA, 15 bp, Homo sapiens
cccttcaggtcctca

SEQ ID NO: 102252 - DNA, 15 bp, Homo sapiens
acccttcaggtcctc

SEQ ID NO: 102253 - DNA, 15 bp, Homo sapiens
cacccttcaggtcct

SEQ ID NO: 102254 - DNA, 15 bp, Homo sapiens
tcacccttcaggtcc

SEQ ID NO: 102255 - DNA, 15 bp, Homo sapiens
gtcacccttcaggtc

SEQ ID NO: 102256 - DNA, 15 bp, Homo sapiens
tgtcacccttcaggt

SEQ ID NO: 102257 - DNA, 15 bp, Homo sapiens
atgtcacccttcagg

SEQ ID NO: 102258 - DNA, 15 bp, Homo sapiens
gatgtcacccttcag

SEQ ID NO: 102259 - DNA, 15 bp, Homo sapiens
ggatgtcacccttca

SEQ ID NO: 102260 - DNA, 15 bp, Homo sapiens
gggatgtcacccttc

SEQ ID NO: 102261 - DNA, 15 bp, Homo sapiens
tgggatgtcaccctt

SEQ ID NO: 102262 - DNA, 15 bp, Homo sapiens
ctgggatgtcaccct

SEQ ID NO: 102263 - DNA, 15 bp, Homo sapiens
cctgggatgtcaccc

SEQ ID NO: 102264 - DNA, 15 bp, Homo sapiens
tcctgggatgtcacc

SEQ ID NO: 102265 - DNA, 15 bp, Homo sapiens
ctcctgggatgtcac

SEQ ID NO: 102266 - DNA, 15 bp, Homo sapiens
cctcctgggatgtca

SEQ ID NO: 102267 - DNA, 15 bp, Homo sapiens
ccctcctgggatgtc

SEQ ID NO: 102268 - DNA, 15 bp, Homo sapiens
cccctcctgggatgt

SEQ ID NO: 102269 - DNA, 15 bp, Homo sapiens
gcccctcctgggatg

SEQ ID NO: 102270 - DNA, 15 bp, Homo sapiens
ggcccctcctgggat

SEQ ID NO: 102271 - DNA, 15 bp, Homo sapiens
aggcccctcctggga

SEQ ID NO: 102272 - DNA, 15 bp, Homo sapiens
gaggcccctcctggg

SEQ ID NO: 102273 - DNA, 15 bp, Homo sapiens
agaggcccctcctgg

SEQ ID NO: 102274 - DNA, 15 bp, Homo sapiens
cagaggcccctcctg

SEQ ID NO: 102275 - DNA, 15 bp, Homo sapiens
tcagaggcccctcct

SEQ ID NO: 102276 - DNA, 15 bp, Homo sapiens
ttcagaggcccctcc

SEQ ID NO: 102277 - DNA, 15 bp, Homo sapiens
tttcagaggcccctc

SEQ ID NO: 102278 - DNA, 15 bp, Homo sapiens
atttcagaggcccct

SEQ ID NO: 102279 - DNA, 15 bp, Homo sapiens
aatttcagaggcccc

SEQ ID NO: 102280 - DNA, 15 bp, Homo sapiens
aaatttcagaggccc

SEQ ID NO: 102281 - DNA, 15 bp, Homo sapiens
gaaatttcagaggcc

SEQ ID NO: 102282 - DNA, 15 bp, Homo sapiens
ggaaatttcagaggc

SEQ ID NO: 102283 - DNA, 15 bp, Homo sapiens
gggaaatttcagagg

SEQ ID NO: 102284 - DNA, 15 bp, Homo sapiens
tgggaaatttcagag

SEQ ID NO: 102285 - DNA, 15 bp, Homo sapiens
gtgggaaatttcaga

SEQ ID NO: 102286 - DNA, 15 bp, Homo sapiens
tgtgggaaatttcag

SEQ ID NO: 102287 - DNA, 15 bp, Homo sapiens
gtgtgggaaatttca

SEQ ID NO: 102288 - DNA, 15 bp, Homo sapiens
ggtgtgggaaatttc

SEQ ID NO: 102289 - DNA, 15 bp, Homo sapiens
gggtgtgggaaattt

SEQ ID NO: 102290 - DNA, 15 bp, Homo sapiens
ggggtgtgggaaatt

SEQ ID NO: 102291 - DNA, 15 bp, Homo sapiens
tggggtgtgggaaat

SEQ ID NO: 102292 - DNA, 15 bp, Homo sapiens
ctggggtgtgggaaa

SEQ ID NO: 102293 - DNA, 15 bp, Homo sapiens
gctggggtgtgggaa

SEQ ID NO: 102294 - DNA, 15 bp, Homo sapiens
cgctggggtgtggga

SEQ ID NO: 102295 - DNA, 15 bp, Homo sapiens
gcgctggggtgtggg

SEQ ID NO: 102296 - DNA, 15 bp, Homo sapiens
ggcgctggggtgtgg

SEQ ID NO: 102297 - DNA, 15 bp, Homo sapiens
aggcgctggggtgtg

SEQ ID NO: 102298 - DNA, 15 bp, Homo sapiens
caggcgctggggtgt

SEQ ID NO: 102299 - DNA, 15 bp, Homo sapiens
acaggcgctggggtg

SEQ ID NO: 102300 - DNA, 15 bp, Homo sapiens
cacaggcgctggggt

SEQ ID NO: 102301 - DNA, 15 bp, Homo sapiens
gcacaggcgctgggg

SEQ ID NO: 102302 - DNA, 15 bp, Homo sapiens
agcacaggcgctggg

SEQ ID NO: 102303 - DNA, 15 bp, Homo sapiens
cagcacaggcgctgg

SEQ ID NO: 102304 - DNA, 15 bp, Homo sapiens
tcagcacaggcgctg

SEQ ID NO: 102305 - DNA, 15 bp, Homo sapiens
ctcagcacaggcgct

SEQ ID NO: 102306 - DNA, 15 bp, Homo sapiens
cctcagcacaggcgc

SEQ ID NO: 102307 - DNA, 15 bp, Homo sapiens
tcctcagcacaggcg

SEQ ID NO: 102308 - DNA, 15 bp, Homo sapiens
gtcctcagcacaggc

SEQ ID NO: 102309 - DNA, 15 bp, Homo sapiens
agtcctcagcacagg

SEQ ID NO: 102310 - DNA, 15 bp, Homo sapiens
gagtcctcagcacag

SEQ ID NO: 102311 - DNA, 15 bp, Homo sapiens
ggagtcctcagcaca

SEQ ID NO: 102312 - DNA, 15 bp, Homo sapiens
gggagtcctcagcac

SEQ ID NO: 102313 - DNA, 15 bp, Homo sapiens
agggagtcctcagca

SEQ ID NO: 102314 - DNA, 15 bp, Homo sapiens
gagggagtcctcagc

SEQ ID NO: 102315 - DNA, 15 bp, Homo sapiens
ggagggagtcctcag

SEQ ID NO: 102316 - DNA, 15 bp, Homo sapiens
tggagggagtcctca

SEQ ID NO: 102317 - DNA, 15 bp, Homo sapiens
atggagggagtcctc

SEQ ID NO: 102318 - DNA, 15 bp, Homo sapiens
catggagggagtcct

SEQ ID NO: 102319 - DNA, 15 bp, Homo sapiens
acatggagggagtcc

SEQ ID NO: 102320 - DNA, 15 bp, Homo sapiens
cacatggagggagtc

SEQ ID NO: 102321 - DNA, 15 bp, Homo sapiens
ccacatggagggagt

SEQ ID NO: 102322 - DNA, 15 bp, Homo sapiens
gccacatggagggag

SEQ ID NO: 102323 - DNA, 15 bp, Homo sapiens
ggccacatggaggga

SEQ ID NO: 102324 - DNA, 15 bp, Homo sapiens
gggccacatggaggg

SEQ ID NO: 102325 - DNA, 15 bp, Homo sapiens
ggggccacatggagg

SEQ ID NO: 102326 - DNA, 15 bp, Homo sapiens
tggggccacatggag

SEQ ID NO: 102327 - DNA, 15 bp, Homo sapiens
ctggggccacatgga

SEQ ID NO: 102328 - DNA, 15 bp, Homo sapiens
cctggggccacatgg

SEQ ID NO: 102329 - DNA, 15 bp, Homo sapiens
acctggggccacatg

SEQ ID NO: 102330 - DNA, 15 bp, Homo sapiens
cacctggggccacat

SEQ ID NO: 102331 - DNA, 15 bp, Homo sapiens
gcacctggggccaca

SEQ ID NO: 102332 - DNA, 15 bp, Homo sapiens
ggcacctggggccac

SEQ ID NO: 102333 - DNA, 15 bp, Homo sapiens
tggcacctggggcca

SEQ ID NO: 102334 - DNA, 15 bp, Homo sapiens
gtggcacctggggcc

SEQ ID NO: 102335 - DNA, 15 bp, Homo sapiens
ggtggcacctggggc

SEQ ID NO: 102336 - DNA, 15 bp, Homo sapiens
tggtggcacctgggg

SEQ ID NO: 102337 - DNA, 15 bp, Homo sapiens
ttggtggcacctggg

SEQ ID NO: 102338 - DNA, 15 bp, Homo sapiens
attggtggcacctgg

SEQ ID NO: 102339 - DNA, 15 bp, Homo sapiens
tattggtggcacctg

SEQ ID NO: 102340 - DNA, 15 bp, Homo sapiens
ttattggtggcacct

SEQ ID NO: 102341 - DNA, 15 bp, Homo sapiens
tttattggtggcacc

SEQ ID NO: 102342 - DNA, 15 bp, Homo sapiens
ttttattggtggcac

SEQ ID NO: 102343 - DNA, 15 bp, Homo sapiens
tttttattggtggca

SEQ ID NO: 102344 - DNA, 15 bp, Homo sapiens
atttttattggtggc

SEQ ID NO: 102345 - DNA, 15 bp, Homo sapiens
gatttttattggtgg

SEQ ID NO: 102346 - DNA, 15 bp, Homo sapiens
ggatttttattggtg

SEQ ID NO: 102347 - DNA, 15 bp, Homo sapiens
aggatttttattggt

SEQ ID NO: 102348 - DNA, 15 bp, Homo sapiens
taggatttttattgg

SEQ ID NO: 102349 - DNA, 15 bp, Homo sapiens
gtaggatttttattg

SEQ ID NO: 102350 - DNA, 15 bp, Homo sapiens
tgtaggatttttatt

SEQ ID NO: 102351 - DNA, 15 bp, Homo sapiens
ctgtaggatttttat

SEQ ID NO: 102352 - DNA, 15 bp, Homo sapiens
tctgtaggattttta

SEQ ID NO: 102353 - DNA, 15 bp, Homo sapiens
ttctgtaggattttt

SEQ ID NO: 102354 - DNA, 15 bp, Homo sapiens
tttctgtaggatttt

SEQ ID NO: 102355 - DNA, 15 bp, Homo sapiens
ttttctgtaggattt

SEQ ID NO: 102356 - DNA, 15 bp, Homo sapiens
attttctgtaggatt

SEQ ID NO: 102357 - DNA, 15 bp, Homo sapiens
aattttctgtaggat

SEQ ID NO: 102358 - DNA, 15 bp, Homo sapiens
gaattttctgtagga

SEQ ID NO: 102359 - DNA, 15 bp, Homo sapiens
agaattttctgtagg

SEQ ID NO: 102360 - DNA, 15 bp, Homo sapiens
gagaattttctgtag

SEQ ID NO: 102361 - DNA, 15 bp, Homo sapiens
agagaattttctgta

SEQ ID NO: 102362 - DNA, 15 bp, Homo sapiens
gagagaattttctgt

SEQ ID NO: 102363 - DNA, 15 bp, Homo sapiens
ggagagaattttctg

SEQ ID NO: 102364 - DNA, 15 bp, Homo sapiens
aggagagaattttct

SEQ ID NO: 102365 - DNA, 15 bp, Homo sapiens
caggagagaattttc

SEQ ID NO: 102366 - DNA, 15 bp, Homo sapiens
tcaggagagaatttt

SEQ ID NO: 102367 - DNA, 15 bp, Homo sapiens
ctcaggagagaattt

SEQ ID NO: 102368 - DNA, 15 bp, Homo sapiens
actcaggagagaatt

SEQ ID NO: 102369 - DNA, 15 bp, Homo sapiens
cactcaggagagaat

SEQ ID NO: 102370 - DNA, 15 bp, Homo sapiens
gcactcaggagagaa

SEQ ID NO: 102371 - DNA, 15 bp, Homo sapiens
agcactcaggagaga

SEQ ID NO: 102372 - DNA, 15 bp, Homo sapiens
aagcactcaggagag

SEQ ID NO: 102373 - DNA, 15 bp, Homo sapiens
gaagcactcaggaga

SEQ ID NO: 102374 - DNA, 15 bp, Homo sapiens
agaagcactcaggag

SEQ ID NO: 102375 - DNA, 15 bp, Homo sapiens
aagaagcactcagga

SEQ ID NO: 102376 - DNA, 15 bp, Homo sapiens
aaagaagcactcagg

SEQ ID NO: 102377 - DNA, 15 bp, Homo sapiens
taaagaagcactcag

SEQ ID NO: 102378 - DNA, 15 bp, Homo sapiens
gtaaagaagcactca

SEQ ID NO: 102379 - DNA, 15 bp, Homo sapiens
agtaaagaagcactc

SEQ ID NO: 102380 - DNA, 15 bp, Homo sapiens
gagtaaagaagcact

SEQ ID NO: 102381 - DNA, 15 bp, Homo sapiens
agagtaaagaagcac

SEQ ID NO: 102382 - DNA, 15 bp, Homo sapiens
cagagtaaagaagca

SEQ ID NO: 102383 - DNA, 15 bp, Homo sapiens
ccagagtaaagaagc

SEQ ID NO: 102384 - DNA, 15 bp, Homo sapiens
cccagagtaaagaag

SEQ ID NO: 102385 - DNA, 15 bp, Homo sapiens
ccccagagtaaagaa

SEQ ID NO: 102386 - DNA, 15 bp, Homo sapiens
tccccagagtaaaga

SEQ ID NO: 102387 - DNA, 15 bp, Homo sapiens
ttccccagagtaaag

SEQ ID NO: 102388 - DNA, 15 bp, Homo sapiens
cttccccagagtaaa

SEQ ID NO: 102389 - DNA, 15 bp, Homo sapiens
ccttccccagagtaa

SEQ ID NO: 102390 - DNA, 15 bp, Homo sapiens
cccttccccagagta

SEQ ID NO: 102391 - DNA, 15 bp, Homo sapiens
ccccttccccagagt

SEQ ID NO: 102392 - DNA, 15 bp, Homo sapiens
gccccttccccagag

SEQ ID NO: 102393 - DNA, 15 bp, Homo sapiens
agccccttccccaga

SEQ ID NO: 102394 - DNA, 15 bp, Homo sapiens
cagccccttccccag

SEQ ID NO: 102395 - DNA, 15 bp, Homo sapiens
gcagccccttcccca

SEQ ID NO: 102396 - DNA, 15 bp, Homo sapiens
cgcagccccttcccc

SEQ ID NO: 102397 - DNA, 15 bp, Homo sapiens
ccgcagccccttccc

SEQ ID NO: 102398 - DNA, 15 bp, Homo sapiens
cccgcagccccttcc

SEQ ID NO: 102399 - DNA, 15 bp, Homo sapiens
tcccgcagccccttc

SEQ ID NO: 102400 - DNA, 15 bp, Homo sapiens
ctcccgcagcccctt

SEQ ID NO: 102401 - DNA, 15 bp, Homo sapiens
tctcccgcagcccct

SEQ ID NO: 102402 - DNA, 15 bp, Homo sapiens
ctctcccgcagcccc

SEQ ID NO: 102403 - DNA, 15 bp, Homo sapiens
cctctcccgcagccc

SEQ ID NO: 102404 - DNA, 15 bp, Homo sapiens
ccctctcccgcagcc

SEQ ID NO: 102405 - DNA, 15 bp, Homo sapiens
accctctcccgcagc

SEQ ID NO: 102406 - DNA, 15 bp, Homo sapiens
taccctctcccgcag

SEQ ID NO: 102407 - DNA, 15 bp, Homo sapiens
ctaccctctcccgca

SEQ ID NO: 102408 - DNA, 15 bp, Homo sapiens
cctaccctctcccgc

SEQ ID NO: 102409 - DNA, 15 bp, Homo sapiens
ccctaccctctcccg

SEQ ID NO: 102410 - DNA, 15 bp, Homo sapiens
cccctaccctctccc

SEQ ID NO: 102411 - DNA, 15 bp, Homo sapiens
gcccctaccctctcc

SEQ ID NO: 102412 - DNA, 15 bp, Homo sapiens
agcccctaccctctc

SEQ ID NO: 102413 - DNA, 15 bp, Homo sapiens
aagcccctaccctct

SEQ ID NO: 102414 - DNA, 15 bp, Homo sapiens
gaagcccctaccctc

SEQ ID NO: 102415 - DNA, 15 bp, Homo sapiens
ggaagcccctaccct

SEQ ID NO: 102416 - DNA, 15 bp, Homo sapiens
tggaagcccctaccc

SEQ ID NO: 102417 - DNA, 15 bp, Homo sapiens
ctggaagcccctacc

SEQ ID NO: 102418 - DNA, 15 bp, Homo sapiens
tctggaagcccctac

SEQ ID NO: 102419 - DNA, 15 bp, Homo sapiens
ctctggaagccccta

SEQ ID NO: 102420 - DNA, 15 bp, Homo sapiens
tctctggaagcccct

SEQ ID NO: 102421 - DNA, 15 bp, Homo sapiens
ctctctggaagcccc

SEQ ID NO: 102422 - DNA, 15 bp, Homo sapiens
cctctctggaagccc

SEQ ID NO: 102423 - DNA, 15 bp, Homo sapiens
ccctctctggaagcc

SEQ ID NO: 102424 - DNA, 15 bp, Homo sapiens
gccctctctggaagc

SEQ ID NO: 102425 - DNA, 15 bp, Homo sapiens
tgccctctctggaag

SEQ ID NO: 102426 - DNA, 15 bp, Homo sapiens
ctgccctctctggaa

SEQ ID NO: 102427 - DNA, 15 bp, Homo sapiens
cctgccctctctgga

SEQ ID NO: 102428 - DNA, 15 bp, Homo sapiens
ccctgccctctctgg

SEQ ID NO: 102429 - DNA, 15 bp, Homo sapiens
accctgccctctctg

SEQ ID NO: 102430 - DNA, 15 bp, Homo sapiens
gaccctgccctctct

SEQ ID NO: 102431 - DNA, 15 bp, Homo sapiens
agaccctgccctctc

SEQ ID NO: 102432 - DNA, 15 bp, Homo sapiens
cagaccctgccctct

SEQ ID NO: 102433 - DNA, 15 bp, Homo sapiens
gcagaccctgccctc

SEQ ID NO: 102434 - DNA, 15 bp, Homo sapiens
tgcagaccctgccct

SEQ ID NO: 102435 - DNA, 15 bp, Homo sapiens
ctgcagaccctgccc

SEQ ID NO: 102436 - DNA, 15 bp, Homo sapiens
cctgcagaccctgcc

SEQ ID NO: 102437 - DNA, 15 bp, Homo sapiens
tcctgcagaccctgc

SEQ ID NO: 102438 - DNA, 15 bp, Homo sapiens
ctcctgcagaccctg

SEQ ID NO: 102439 - DNA, 15 bp, Homo sapiens
tctcctgcagaccct

SEQ ID NO: 102440 - DNA, 15 bp, Homo sapiens
ctctcctgcagaccc

SEQ ID NO: 102441 - DNA, 15 bp, Homo sapiens
cctctcctgcagacc

SEQ ID NO: 102442 - DNA, 15 bp, Homo sapiens
ccctctcctgcagac

SEQ ID NO: 102443 - DNA, 15 bp, Homo sapiens
gccctctcctgcaga

SEQ ID NO: 102444 - DNA, 15 bp, Homo sapiens
tgccctctcctgcag

SEQ ID NO: 102445 - DNA, 15 bp, Homo sapiens
ctgccctctcctgca

SEQ ID NO: 102446 - DNA, 15 bp, Homo sapiens
cctgccctctcctgc

SEQ ID NO: 102447 - DNA, 15 bp, Homo sapiens
ccctgccctctcctg

SEQ ID NO: 102448 - DNA, 15 bp, Homo sapiens
cccctgccctctcct

SEQ ID NO: 102449 - DNA, 15 bp, Homo sapiens
gcccctgccctctcc

SEQ ID NO: 102450 - DNA, 15 bp, Homo sapiens
agcccctgccctctc

SEQ ID NO: 102451 - DNA, 15 bp, Homo sapiens
tagcccctgccctct

SEQ ID NO: 102452 - DNA, 15 bp, Homo sapiens
ttagcccctgccctc

SEQ ID NO: 102453 - DNA, 15 bp, Homo sapiens
tttagcccctgccct

SEQ ID NO: 102454 - DNA, 15 bp, Homo sapiens
gtttagcccctgccc

SEQ ID NO: 102455 - DNA, 15 bp, Homo sapiens
ggtttagcccctgcc

SEQ ID NO: 102456 - DNA, 15 bp, Homo sapiens
aggtttagcccctgc

SEQ ID NO: 102457 - DNA, 15 bp, Homo sapiens
aaggtttagcccctg

SEQ ID NO: 102458 - DNA, 15 bp, Homo sapiens
taaggtttagcccct

SEQ ID NO: 102459 - DNA, 15 bp, Homo sapiens
ctaaggtttagcccc

SEQ ID NO: 102460 - DNA, 15 bp, Homo sapiens
cctaaggtttagccc

SEQ ID NO: 102461 - DNA, 15 bp, Homo sapiens
acctaaggtttagcc

SEQ ID NO: 102462 - DNA, 15 bp, Homo sapiens
tacctaaggtttagc

SEQ ID NO: 102463 - DNA, 15 bp, Homo sapiens
gtacctaaggtttag

SEQ ID NO: 102464 - DNA, 15 bp, Homo sapiens
agtacctaaggttta

SEQ ID NO: 102465 - DNA, 15 bp, Homo sapiens
gagtacctaaggttt

SEQ ID NO: 102466 - DNA, 15 bp, Homo sapiens
ggagtacctaaggtt

SEQ ID NO: 102467 - DNA, 15 bp, Homo sapiens
aggagtacctaaggt

SEQ ID NO: 102468 - DNA, 15 bp, Homo sapiens
gaggagtacctaagg

SEQ ID NO: 102469 - DNA, 15 bp, Homo sapiens
tgaggagtacctaag

SEQ ID NO: 102470 - DNA, 15 bp, Homo sapiens
gtgaggagtacctaa

SEQ ID NO: 102471 - DNA, 15 bp, Homo sapiens
tgtgaggagtaccta

SEQ ID NO: 102472 - DNA, 15 bp, Homo sapiens
ttgtgaggagtacct

SEQ ID NO: 102473 - DNA, 15 bp, Homo sapiens
cttgtgaggagtacc

SEQ ID NO: 102474 - DNA, 15 bp, Homo sapiens
gcttgtgaggagtac

SEQ ID NO: 102475 - DNA, 15 bp, Homo sapiens
ggcttgtgaggagta

SEQ ID NO: 102476 - DNA, 15 bp, Homo sapiens
gggcttgtgaggagt

SEQ ID NO: 102477 - DNA, 15 bp, Homo sapiens
agggcttgtgaggag

SEQ ID NO: 102478 - DNA, 15 bp, Homo sapiens
gagggcttgtgagga

SEQ ID NO: 102479 - DNA, 15 bp, Homo sapiens
ggagggcttgtgagg

SEQ ID NO: 102480 - DNA, 15 bp, Homo sapiens
tggagggcttgtgag

SEQ ID NO: 102481 - DNA, 15 bp, Homo sapiens
ttggagggcttgtga

SEQ ID NO: 102482 - DNA, 15 bp, Homo sapiens
attggagggcttgtg

SEQ ID NO: 102483 - DNA, 15 bp, Homo sapiens
cattggagggcttgt

SEQ ID NO: 102484 - DNA, 15 bp, Homo sapiens
gcattggagggcttg

SEQ ID NO: 102485 - DNA, 15 bp, Homo sapiens
ggcattggagggctt

SEQ ID NO: 102486 - DNA, 15 bp, Homo sapiens
gggcattggagggct

SEQ ID NO: 102487 - DNA, 15 bp, Homo sapiens
agggcattggagggc

SEQ ID NO: 102488 - DNA, 15 bp, Homo sapiens
tagggcattggaggg

SEQ ID NO: 102489 - DNA, 15 bp, Homo sapiens
atagggcattggagg

SEQ ID NO: 102490 - DNA, 15 bp, Homo sapiens
gatagggcattggag

SEQ ID NO: 102491 - DNA, 15 bp, Homo sapiens
agatagggcattgga

SEQ ID NO: 102492 - DNA, 15 bp, Homo sapiens
tagatagggcattgg

SEQ ID NO: 102493 - DNA, 15 bp, Homo sapiens
gtagatagggcattg

SEQ ID NO: 102494 - DNA, 15 bp, Homo sapiens
agtagatagggcatt

SEQ ID NO: 102495 - DNA, 15 bp, Homo sapiens
aagtagatagggcat

SEQ ID NO: 102496 - DNA, 15 bp, Homo sapiens
caagtagatagggca

SEQ ID NO: 102497 - DNA, 15 bp, Homo sapiens
gcaagtagatagggc

SEQ ID NO: 102498 - DNA, 15 bp, Homo sapiens
ggcaagtagataggg

SEQ ID NO: 102499 - DNA, 15 bp, Homo sapiens
gggcaagtagatagg

SEQ ID NO: 102500 - DNA, 15 bp, Homo sapiens
agggcaagtagatag

SEQ ID NO: 102501 - DNA, 15 bp, Homo sapiens
cagggcaagtagata

SEQ ID NO: 102502 - DNA, 15 bp, Homo sapiens
acagggcaagtagat

SEQ ID NO: 102503 - DNA, 15 bp, Homo sapiens
cacagggcaagtaga

SEQ ID NO: 102504 - DNA, 15 bp, Homo sapiens
gcacagggcaagtag

SEQ ID NO: 102505 - DNA, 15 bp, Homo sapiens
agcacagggcaagta

SEQ ID NO: 102506 - DNA, 15 bp, Homo sapiens
cagcacagggcaagt

SEQ ID NO: 102507 - DNA, 15 bp, Homo sapiens
tcagcacagggcaag

SEQ ID NO: 102508 - DNA, 15 bp, Homo sapiens
ctcagcacagggcaa

SEQ ID NO: 102509 - DNA, 15 bp, Homo sapiens
cctcagcacagggca

SEQ ID NO: 102510 - DNA, 15 bp, Homo sapiens
tcctcagcacagggc

SEQ ID NO: 102511 - DNA, 15 bp, Homo sapiens
atcctcagcacaggg

SEQ ID NO: 102512 - DNA, 15 bp, Homo sapiens
catcctcagcacagg

SEQ ID NO: 102513 - DNA, 15 bp, Homo sapiens
acatcctcagcacag

SEQ ID NO: 102514 - DNA, 15 bp, Homo sapiens
aacatcctcagcaca

SEQ ID NO: 102515 - DNA, 15 bp, Homo sapiens
aaacatcctcagcac

SEQ ID NO: 102516 - DNA, 15 bp, Homo sapiens
aaaacatcctcagca

SEQ ID NO: 102517 - DNA, 15 bp, Homo sapiens
taaaacatcctcagc

SEQ ID NO: 102518 - DNA, 15 bp, Homo sapiens
ttaaaacatcctcag

SEQ ID NO: 102519 - DNA, 15 bp, Homo sapiens
gttaaaacatcctca

SEQ ID NO: 102520 - DNA, 15 bp, Homo sapiens
agttaaaacatcctc

SEQ ID NO: 102521 - DNA, 15 bp, Homo sapiens
gagttaaaacatcct

SEQ ID NO: 102522 - DNA, 15 bp, Homo sapiens
ggagttaaaacatcc

SEQ ID NO: 102523 - DNA, 15 bp, Homo sapiens
tggagttaaaacatc

SEQ ID NO: 102524 - DNA, 15 bp, Homo sapiens
atggagttaaaacat

SEQ ID NO: 102525 - DNA, 15 bp, Homo sapiens
catggagttaaaaca

SEQ ID NO: 102526 - DNA, 15 bp, Homo sapiens
ccatggagttaaaac

SEQ ID NO: 102527 - DNA, 15 bp, Homo sapiens
accatggagttaaaa

SEQ ID NO: 102528 - DNA, 15 bp, Homo sapiens
gaccatggagttaaa

SEQ ID NO: 102529 - DNA, 15 bp, Homo sapiens
agaccatggagttaa

SEQ ID NO: 102530 - DNA, 15 bp, Homo sapiens
gagaccatggagtta

SEQ ID NO: 102531 - DNA, 15 bp, Homo sapiens
tgagaccatggagtt

SEQ ID NO: 102532 - DNA, 15 bp, Homo sapiens
ttgagaccatggagt

SEQ ID NO: 102533 - DNA, 15 bp, Homo sapiens
tttgagaccatggag

SEQ ID NO: 102534 - DNA, 15 bp, Homo sapiens
ttttgagaccatgga

SEQ ID NO: 102535 - DNA, 15 bp, Homo sapiens
cttttgagaccatgg

SEQ ID NO: 102536 - DNA, 15 bp, Homo sapiens
tcttttgagaccatg

SEQ ID NO: 102537 - DNA, 15 bp, Homo sapiens
ctcttttgagaccat

SEQ ID NO: 102538 - DNA, 15 bp, Homo sapiens
actcttttgagacca

SEQ ID NO: 102539 - DNA, 15 bp, Homo sapiens
gactcttttgagacc

SEQ ID NO: 102540 - DNA, 15 bp, Homo sapiens
agactcttttgagac

SEQ ID NO: 102541 - DNA, 15 bp, Homo sapiens
aagactcttttgaga

SEQ ID NO: 102542 - DNA, 15 bp, Homo sapiens
gaagactcttttgag

SEQ ID NO: 102543 - DNA, 15 bp, Homo sapiens
ggaagactcttttga

SEQ ID NO: 102544 - DNA, 15 bp, Homo sapiens
aggaagactcttttg

SEQ ID NO: 102545 - DNA, 15 bp, Homo sapiens
taggaagactctttt

SEQ ID NO: 102546 - DNA, 15 bp, Homo sapiens
ttaggaagactcttt

SEQ ID NO: 102547 - DNA, 15 bp, Homo sapiens
cttaggaagactctt

SEQ ID NO: 102548 - DNA, 15 bp, Homo sapiens
tcttaggaagactct

SEQ ID NO: 102549 - DNA, 15 bp, Homo sapiens
ttcttaggaagactc

SEQ ID NO: 102550 - DNA, 15 bp, Homo sapiens
gttcttaggaagact

SEQ ID NO: 102551 - DNA, 15 bp, Homo sapiens
ggttcttaggaagac

SEQ ID NO: 102552 - DNA, 15 bp, Homo sapiens
gggttcttaggaaga

SEQ ID NO: 102553 - DNA, 15 bp, Homo sapiens
agggttcttaggaag

SEQ ID NO: 102554 - DNA, 15 bp, Homo sapiens
cagggttcttaggaa

SEQ ID NO: 102555 - DNA, 15 bp, Homo sapiens
gcagggttcttagga

SEQ ID NO: 102556 - DNA, 15 bp, Homo sapiens
tgcagggttcttagg

SEQ ID NO: 102557 - DNA, 15 bp, Homo sapiens
ttgcagggttcttag

SEQ ID NO: 102558 - DNA, 15 bp, Homo sapiens
tttgcagggttctta

SEQ ID NO: 102559 - DNA, 15 bp, Homo sapiens
gtttgcagggttctt

SEQ ID NO: 102560 - DNA, 15 bp, Homo sapiens
agtttgcagggttct

SEQ ID NO: 102561 - DNA, 15 bp, Homo sapiens
cagtttgcagggttc

SEQ ID NO: 102562 - DNA, 15 bp, Homo sapiens
ccagtttgcagggtt

SEQ ID NO: 102563 - DNA, 15 bp, Homo sapiens
cccagtttgcagggt

SEQ ID NO: 102564 - DNA, 15 bp, Homo sapiens
gcccagtttgcaggg

SEQ ID NO: 102565 - DNA, 15 bp, Homo sapiens
ggcccagtttgcagg

SEQ ID NO: 102566 - DNA, 15 bp, Homo sapiens
aggcccagtttgcag

SEQ ID NO: 102567 - DNA, 15 bp, Homo sapiens
aaggcccagtttgca

SEQ ID NO: 102568 - DNA, 15 bp, Homo sapiens
taaggcccagtttgc

SEQ ID NO: 102569 - DNA, 15 bp, Homo sapiens
ataaggcccagtttg

SEQ ID NO: 102570 - DNA, 15 bp, Homo sapiens
aataaggcccagttt

SEQ ID NO: 102571 - DNA, 15 bp, Homo sapiens
taataaggcccagtt

SEQ ID NO: 102572 - DNA, 15 bp, Homo sapiens
ttaataaggcccagt

SEQ ID NO: 102573 - DNA, 15 bp, Homo sapiens
attaataaggcccag

SEQ ID NO: 102574 - DNA, 15 bp, Homo sapiens
gattaataaggccca

SEQ ID NO: 102575 - DNA, 15 bp, Homo sapiens
ggattaataaggccc

SEQ ID NO: 102576 - DNA, 15 bp, Homo sapiens
gggattaataaggcc

SEQ ID NO: 102577 - DNA, 15 bp, Homo sapiens
tgggattaataaggc

SEQ ID NO: 102578 - DNA, 15 bp, Homo sapiens
atgggattaataagg

SEQ ID NO: 102579 - DNA, 15 bp, Homo sapiens
tatgggattaataag

SEQ ID NO: 102580 - DNA, 15 bp, Homo sapiens
ttatgggattaataa

SEQ ID NO: 102581 - DNA, 15 bp, Homo sapiens
cttatgggattaata

SEQ ID NO: 102582 - DNA, 15 bp, Homo sapiens
ccttatgggattaat

SEQ ID NO: 102583 - DNA, 15 bp, Homo sapiens
cccttatgggattaa

SEQ ID NO: 102584 - DNA, 15 bp, Homo sapiens
gcccttatgggatta

SEQ ID NO: 102585 - DNA, 15 bp, Homo sapiens
tgcccttatgggatt

SEQ ID NO: 102586 - DNA, 15 bp, Homo sapiens
atgcccttatgggat

SEQ ID NO: 102587 - DNA, 15 bp, Homo sapiens
aatgcccttatggga

SEQ ID NO: 102588 - DNA, 15 bp, Homo sapiens
caatgcccttatggg

SEQ ID NO: 102589 - DNA, 15 bp, Homo sapiens
tcaatgcccttatgg

SEQ ID NO: 102590 - DNA, 15 bp, Homo sapiens
ctcaatgcccttatg

SEQ ID NO: 102591 - DNA, 15 bp, Homo sapiens
cctcaatgcccttat

SEQ ID NO: 102592 - DNA, 15 bp, Homo sapiens
gcctcaatgccctta

SEQ ID NO: 102593 - DNA, 15 bp, Homo sapiens
ggcctcaatgccctt

SEQ ID NO: 102594 - DNA, 15 bp, Homo sapiens
gggcctcaatgccct

SEQ ID NO: 102595 - DNA, 15 bp, Homo sapiens
tgggcctcaatgccc

SEQ ID NO: 102596 - DNA, 15 bp, Homo sapiens
ctgggcctcaatgcc

SEQ ID NO: 102597 - DNA, 15 bp, Homo sapiens
tctgggcctcaatgc

SEQ ID NO: 102598 - DNA, 15 bp, Homo sapiens
ctctgggcctcaatg

SEQ ID NO: 102599 - DNA, 15 bp, Homo sapiens
tctctgggcctcaat

SEQ ID NO: 102600 - DNA, 15 bp, Homo sapiens
ctctctgggcctcaa

SEQ ID NO: 102601 - DNA, 15 bp, Homo sapiens
cctctctgggcctca

SEQ ID NO: 102602 - DNA, 15 bp, Homo sapiens
acctctctgggcctc

SEQ ID NO: 102603 - DNA, 15 bp, Homo sapiens
cacctctctgggcct

SEQ ID NO: 102604 - DNA, 15 bp, Homo sapiens
tcacctctctgggcc

SEQ ID NO: 102605 - DNA, 15 bp, Homo sapiens
ttcacctctctgggc

SEQ ID NO: 102606 - DNA, 15 bp, Homo sapiens
cttcacctctctggg

SEQ ID NO: 102607 - DNA, 15 bp, Homo sapiens
acttcacctctctgg

SEQ ID NO: 102608 - DNA, 15 bp, Homo sapiens
aacttcacctctctg

SEQ ID NO: 102609 - DNA, 15 bp, Homo sapiens
taacttcacctctct

SEQ ID NO: 102610 - DNA, 15 bp, Homo sapiens
gtaacttcacctctc

SEQ ID NO: 102611 - DNA, 15 bp, Homo sapiens
agtaacttcacctct

SEQ ID NO: 102612 - DNA, 15 bp, Homo sapiens
aagtaacttcacctc

SEQ ID NO: 102613 - DNA, 15 bp, Homo sapiens
caagtaacttcacct

SEQ ID NO: 102614 - DNA, 15 bp, Homo sapiens
acaagtaacttcacc

SEQ ID NO: 102615 - DNA, 15 bp, Homo sapiens
tacaagtaacttcac

SEQ ID NO: 102616 - DNA, 15 bp, Homo sapiens
atacaagtaacttca

SEQ ID NO: 102617 - DNA, 15 bp, Homo sapiens
tatacaagtaacttc

SEQ ID NO: 102618 - DNA, 15 bp, Homo sapiens
ttatacaagtaactt

SEQ ID NO: 102619 - DNA, 15 bp, Homo sapiens
cttatacaagtaact

SEQ ID NO: 102620 - DNA, 15 bp, Homo sapiens
ccttatacaagtaac

SEQ ID NO: 102621 - DNA, 15 bp, Homo sapiens
accttatacaagtaa

SEQ ID NO: 102622 - DNA, 15 bp, Homo sapiens
gaccttatacaagta

SEQ ID NO: 102623 - DNA, 15 bp, Homo sapiens
tgaccttatacaagt

SEQ ID NO: 102624 - DNA, 15 bp, Homo sapiens
gtgaccttatacaag

SEQ ID NO: 102625 - DNA, 15 bp, Homo sapiens
tgtgaccttatacaa

SEQ ID NO: 102626 - DNA, 15 bp, Homo sapiens
gtgtgaccttataca

SEQ ID NO: 102627 - DNA, 15 bp, Homo sapiens
tgtgtgaccttatac

SEQ ID NO: 102628 - DNA, 15 bp, Homo sapiens
ctgtgtgaccttata

SEQ ID NO: 102629 - DNA, 15 bp, Homo sapiens
gctgtgtgaccttat

SEQ ID NO: 102630 - DNA, 15 bp, Homo sapiens
ggctgtgtgacctta

SEQ ID NO: 102631 - DNA, 15 bp, Homo sapiens
tggctgtgtgacctt

SEQ ID NO: 102632 - DNA, 15 bp, Homo sapiens
ctggctgtgtgacct

SEQ ID NO: 102633 - DNA, 15 bp, Homo sapiens
cctggctgtgtgacc

SEQ ID NO: 102634 - DNA, 15 bp, Homo sapiens
tcctggctgtgtgac

SEQ ID NO: 102635 - DNA, 15 bp, Homo sapiens
ttcctggctgtgtga

SEQ ID NO: 102636 - DNA, 15 bp, Homo sapiens
cttcctggctgtgtg

SEQ ID NO: 102637 - DNA, 15 bp, Homo sapiens
acttcctggctgtgt

SEQ ID NO: 102638 - DNA, 15 bp, Homo sapiens
tacttcctggctgtg

SEQ ID NO: 102639 - DNA, 15 bp, Homo sapiens
ctacttcctggctgt

SEQ ID NO: 102640 - DNA, 15 bp, Homo sapiens
tctacttcctggctg

SEQ ID NO: 102641 - DNA, 15 bp, Homo sapiens
ctctacttcctggct

SEQ ID NO: 102642 - DNA, 15 bp, Homo sapiens
tctctacttcctggc

SEQ ID NO: 102643 - DNA, 15 bp, Homo sapiens
ttctctacttcctgg

SEQ ID NO: 102644 - DNA, 15 bp, Homo sapiens
gttctctacttcctg

SEQ ID NO: 102645 - DNA, 15 bp, Homo sapiens
agttctctacttcct

SEQ ID NO: 102646 - DNA, 15 bp, Homo sapiens
cagttctctacttcc

SEQ ID NO: 102647 - DNA, 15 bp, Homo sapiens
ccagttctctacttc

SEQ ID NO: 102648 - DNA, 15 bp, Homo sapiens
tccagttctctactt

SEQ ID NO: 102649 - DNA, 15 bp, Homo sapiens
ttccagttctctact

SEQ ID NO: 102650 - DNA, 15 bp, Homo sapiens
gttccagttctctac

SEQ ID NO: 102651 - DNA, 15 bp, Homo sapiens
agttccagttctcta

SEQ ID NO: 102652 - DNA, 15 bp, Homo sapiens
tagttccagttctct

SEQ ID NO: 102653 - DNA, 15 bp, Homo sapiens
ctagttccagttctc

SEQ ID NO: 102654 - DNA, 15 bp, Homo sapiens
tctagttccagttct

SEQ ID NO: 102655 - DNA, 15 bp, Homo sapiens
atctagttccagttc

SEQ ID NO: 102656 - DNA, 15 bp, Homo sapiens
aatctagttccagtt

SEQ ID NO: 102657 - DNA, 15 bp, Homo sapiens
caatctagttccagt

SEQ ID NO: 102658 - DNA, 15 bp, Homo sapiens
tcaatctagttccag

SEQ ID NO: 102659 - DNA, 15 bp, Homo sapiens
ttcaatctagttcca

SEQ ID NO: 102660 - DNA, 15 bp, Homo sapiens
gttcaatctagttcc

SEQ ID NO: 102661 - DNA, 15 bp, Homo sapiens
ggttcaatctagttc

SEQ ID NO: 102662 - DNA, 15 bp, Homo sapiens
gggttcaatctagtt

SEQ ID NO: 102663 - DNA, 15 bp, Homo sapiens
agggttcaatctagt

SEQ ID NO: 102664 - DNA, 15 bp, Homo sapiens
gagggttcaatctag

SEQ ID NO: 102665 - DNA, 15 bp, Homo sapiens
tgagggttcaatcta

SEQ ID NO: 102666 - DNA, 15 bp, Homo sapiens
ctgagggttcaatct

SEQ ID NO: 102667 - DNA, 15 bp, Homo sapiens
gctgagggttcaatc

SEQ ID NO: 102668 - DNA, 15 bp, Homo sapiens
ggctgagggttcaat

SEQ ID NO: 102669 - DNA, 15 bp, Homo sapiens
aggctgagggttcaa

SEQ ID NO: 102670 - DNA, 15 bp, Homo sapiens
taggctgagggttca

SEQ ID NO: 102671 - DNA, 15 bp, Homo sapiens
ctaggctgagggttc

SEQ ID NO: 102672 - DNA, 15 bp, Homo sapiens
gctaggctgagggtt

SEQ ID NO: 102673 - DNA, 15 bp, Homo sapiens
tgctaggctgagggt

SEQ ID NO: 102674 - DNA, 15 bp, Homo sapiens
ttgctaggctgaggg

SEQ ID NO: 102675 - DNA, 15 bp, Homo sapiens
attgctaggctgagg

SEQ ID NO: 102676 - DNA, 15 bp, Homo sapiens
cattgctaggctgag

SEQ ID NO: 102677 - DNA, 15 bp, Homo sapiens
acattgctaggctga

SEQ ID NO: 102678 - DNA, 15 bp, Homo sapiens
gacattgctaggctg

SEQ ID NO: 102679 - DNA, 15 bp, Homo sapiens
tgacattgctaggct

SEQ ID NO: 102680 - DNA, 15 bp, Homo sapiens
gtgacattgctaggc

SEQ ID NO: 102681 - DNA, 15 bp, Homo sapiens
agtgacattgctagg

SEQ ID NO: 102682 - DNA, 15 bp, Homo sapiens
tagtgacattgctag

SEQ ID NO: 102683 - DNA, 15 bp, Homo sapiens
atagtgacattgcta

SEQ ID NO: 102684 - DNA, 15 bp, Homo sapiens
catagtgacattgct

SEQ ID NO: 102685 - DNA, 15 bp, Homo sapiens
gcatagtgacattgc

SEQ ID NO: 102686 - DNA, 15 bp, Homo sapiens
agcatagtgacattg

SEQ ID NO: 102687 - DNA, 15 bp, Homo sapiens
tagcatagtgacatt

SEQ ID NO: 102688 - DNA, 15 bp, Homo sapiens
gtagcatagtgacat

SEQ ID NO: 102689 - DNA, 15 bp, Homo sapiens
tgtagcatagtgaca

SEQ ID NO: 102690 - DNA, 15 bp, Homo sapiens
gtgtagcatagtgac

SEQ ID NO: 102691 - DNA, 15 bp, Homo sapiens
agtgtagcatagtga

SEQ ID NO: 102692 - DNA, 15 bp, Homo sapiens
aagtgtagcatagtg

SEQ ID NO: 102693 - DNA, 15 bp, Homo sapiens
aaagtgtagcatagt

SEQ ID NO: 102694 - DNA, 15 bp, Homo sapiens
aaaagtgtagcatag

SEQ ID NO: 102695 - DNA, 15 bp, Homo sapiens
gaaaagtgtagcata

SEQ ID NO: 102696 - DNA, 15 bp, Homo sapiens
ggaaaagtgtagcat

SEQ ID NO: 102697 - DNA, 15 bp, Homo sapiens
aggaaaagtgtagca

SEQ ID NO: 102698 - DNA, 15 bp, Homo sapiens
taggaaaagtgtagc

SEQ ID NO: 102699 - DNA, 15 bp, Homo sapiens
ctaggaaaagtgtag

SEQ ID NO: 102700 - DNA, 15 bp, Homo sapiens
actaggaaaagtgta

SEQ ID NO: 102701 - DNA, 15 bp, Homo sapiens
cactaggaaaagtgt

SEQ ID NO: 102702 - DNA, 15 bp, Homo sapiens
acactaggaaaagtg

SEQ ID NO: 102703 - DNA, 15 bp, Homo sapiens
cacactaggaaaagt

SEQ ID NO: 102704 - DNA, 15 bp, Homo sapiens
ccacactaggaaaag

SEQ ID NO: 102705 - DNA, 15 bp, Homo sapiens
accacactaggaaaa

SEQ ID NO: 102706 - DNA, 15 bp, Homo sapiens
gaccacactaggaaa

SEQ ID NO: 102707 - DNA, 15 bp, Homo sapiens
agaccacactaggaa

SEQ ID NO: 102708 - DNA, 15 bp, Homo sapiens
tagaccacactagga

SEQ ID NO: 102709 - DNA, 15 bp, Homo sapiens
gtagaccacactagg

SEQ ID NO: 102710 - DNA, 15 bp, Homo sapiens
ggtagaccacactag

SEQ ID NO: 102711 - DNA, 15 bp, Homo sapiens
gggtagaccacacta

SEQ ID NO: 102712 - DNA, 15 bp, Homo sapiens
cgggtagaccacact

SEQ ID NO: 102713 - DNA, 15 bp, Homo sapiens
tcgggtagaccacac

SEQ ID NO: 102714 - DNA, 15 bp, Homo sapiens
ctcgggtagaccaca

SEQ ID NO: 102715 - DNA, 15 bp, Homo sapiens
tctcgggtagaccac

SEQ ID NO: 102716 - DNA, 15 bp, Homo sapiens
atctcgggtagacca

SEQ ID NO: 102717 - DNA, 15 bp, Homo sapiens
catctcgggtagacc

SEQ ID NO: 102718 - DNA, 15 bp, Homo sapiens
tcatctcgggtagac

SEQ ID NO: 102719 - DNA, 15 bp, Homo sapiens
ctcatctcgggtaga

SEQ ID NO: 102720 - DNA, 15 bp, Homo sapiens
cctcatctcgggtag

SEQ ID NO: 102721 - DNA, 15 bp, Homo sapiens
ccctcatctcgggta

SEQ ID NO: 102722 - DNA, 15 bp, Homo sapiens
cccctcatctcgggt

SEQ ID NO: 102723 - DNA, 15 bp, Homo sapiens
gcccctcatctcggg

SEQ ID NO: 102724 - DNA, 15 bp, Homo sapiens
agcccctcatctcgg

SEQ ID NO: 102725 - DNA, 15 bp, Homo sapiens
cagcccctcatctcg

SEQ ID NO: 102726 - DNA, 15 bp, Homo sapiens
tcagcccctcatctc

SEQ ID NO: 102727 - DNA, 15 bp, Homo sapiens
ctcagcccctcatct

SEQ ID NO: 102728 - DNA, 15 bp, Homo sapiens
cctcagcccctcatc

SEQ ID NO: 102729 - DNA, 15 bp, Homo sapiens
acctcagcccctcat

SEQ ID NO: 102730 - DNA, 15 bp, Homo sapiens
aacctcagcccctca

SEQ ID NO: 102731 - DNA, 15 bp, Homo sapiens
aaacctcagcccctc

SEQ ID NO: 102732 - DNA, 15 bp, Homo sapiens
aaaacctcagcccct

SEQ ID NO: 102733 - DNA, 15 bp, Homo sapiens
aaaaacctcagcccc

SEQ ID NO: 102734 - DNA, 15 bp, Homo sapiens
aaaaaacctcagccc

SEQ ID NO: 102735 - DNA, 15 bp, Homo sapiens
aaaaaaacctcagcc

SEQ ID NO: 102736 - DNA, 15 bp, Homo sapiens
aaaaaaaacctcagc

SEQ ID NO: 102737 - DNA, 15 bp, Homo sapiens
aaaaaaaaacctcag

SEQ ID NO: 102738 - DNA, 15 bp, Homo sapiens
caaaaaaaaacctca

SEQ ID NO: 102739 - DNA, 15 bp, Homo sapiens
acaaaaaaaaacctc

SEQ ID NO: 102740 - DNA, 15 bp, Homo sapiens
aacaaaaaaaaacct

SEQ ID NO: 102741 - DNA, 15 bp, Homo sapiens
aaacaaaaaaaaacc

SEQ ID NO: 102742 - DNA, 15 bp, Homo sapiens
aaaacaaaaaaaaac

SEQ ID NO: 102743 - DNA, 15 bp, Homo sapiens
aaaaacaaaaaaaaa

SEQ ID NO: 102744 - DNA, 15 bp, Homo sapiens
caaaaacaaaaaaaa

SEQ ID NO: 102745 - DNA, 15 bp, Homo sapiens
acaaaaacaaaaaaa

SEQ ID NO: 102746 - DNA, 15 bp, Homo sapiens
aacaaaaacaaaaaa

SEQ ID NO: 102747 - DNA, 15 bp, Homo sapiens
aaacaaaaacaaaaa

SEQ ID NO: 102748 - DNA, 15 bp, Homo sapiens
gaaacaaaaacaaaa

SEQ ID NO: 102749 - DNA, 15 bp, Homo sapiens
agaaacaaaaacaaa

SEQ ID NO: 102750 - DNA, 15 bp, Homo sapiens
cagaaacaaaaacaa

SEQ ID NO: 102751 - DNA, 15 bp, Homo sapiens
acagaaacaaaaaca

SEQ ID NO: 102752 - DNA, 15 bp, Homo sapiens
aacagaaacaaaaac

SEQ ID NO: 102753 - DNA, 15 bp, Homo sapiens
aaacagaaacaaaaa

SEQ ID NO: 102754 - DNA, 15 bp, Homo sapiens
aaaacagaaacaaaa

SEQ ID NO: 102755 - DNA, 15 bp, Homo sapiens
caaaacagaaacaaa

SEQ ID NO: 102756 - DNA, 15 bp, Homo sapiens
tcaaaacagaaacaa

SEQ ID NO: 102757 - DNA, 15 bp, Homo sapiens
ctcaaaacagaaaca

SEQ ID NO: 102758 - DNA, 15 bp, Homo sapiens
cctcaaaacagaaac

SEQ ID NO: 102759 - DNA, 15 bp, Homo sapiens
gcctcaaaacagaaa

SEQ ID NO: 102760 - DNA, 15 bp, Homo sapiens
tgcctcaaaacagaa

SEQ ID NO: 102761 - DNA, 15 bp, Homo sapiens
ctgcctcaaaacaga

SEQ ID NO: 102762 - DNA, 15 bp, Homo sapiens
tctgcctcaaaacag

SEQ ID NO: 102763 - DNA, 15 bp, Homo sapiens
gtctgcctcaaaaca

SEQ ID NO: 102764 - DNA, 15 bp, Homo sapiens
agtctgcctcaaaac

SEQ ID NO: 102765 - DNA, 15 bp, Homo sapiens
gagtctgcctcaaaa

SEQ ID NO: 102766 - DNA, 15 bp, Homo sapiens
tgagtctgcctcaaa

SEQ ID NO: 102767 - DNA, 15 bp, Homo sapiens
gtgagtctgcctcaa

SEQ ID NO: 102768 - DNA, 15 bp, Homo sapiens
agtgagtctgcctca

SEQ ID NO: 102769 - DNA, 15 bp, Homo sapiens
gagtgagtctgcctc

SEQ ID NO: 102770 - DNA, 15 bp, Homo sapiens
agagtgagtctgcct

SEQ ID NO: 102771 - DNA, 15 bp, Homo sapiens
gagagtgagtctgcc

SEQ ID NO: 102772 - DNA, 15 bp, Homo sapiens
agagagtgagtctgc

SEQ ID NO: 102773 - DNA, 15 bp, Homo sapiens
gagagagtgagtctg

SEQ ID NO: 102774 - DNA, 15 bp, Homo sapiens
ggagagagtgagtct

SEQ ID NO: 102775 - DNA, 15 bp, Homo sapiens
gggagagagtgagtc

SEQ ID NO: 102776 - DNA, 15 bp, Homo sapiens
ggggagagagtgagt

SEQ ID NO: 102777 - DNA, 15 bp, Homo sapiens
gggggagagagtgag

SEQ ID NO: 102778 - DNA, 15 bp, Homo sapiens
tgggggagagagtga

SEQ ID NO: 102779 - DNA, 15 bp, Homo sapiens
ctgggggagagagtg

SEQ ID NO: 102780 - DNA, 15 bp, Homo sapiens
cctgggggagagagt

SEQ ID NO: 102781 - DNA, 15 bp, Homo sapiens
tcctgggggagagag

SEQ ID NO: 102782 - DNA, 15 bp, Homo sapiens
atcctgggggagaga

SEQ ID NO: 102783 - DNA, 15 bp, Homo sapiens
catcctgggggagag

SEQ ID NO: 102784 - DNA, 15 bp, Homo sapiens
ccatcctgggggaga

SEQ ID NO: 102785 - DNA, 15 bp, Homo sapiens
tccatcctgggggag

SEQ ID NO: 102786 - DNA, 15 bp, Homo sapiens
ctccatcctggggga

SEQ ID NO: 102787 - DNA, 15 bp, Homo sapiens
actccatcctggggg

SEQ ID NO: 102788 - DNA, 15 bp, Homo sapiens
tactccatcctgggg

SEQ ID NO: 102789 - DNA, 15 bp, Homo sapiens
gtactccatcctggg

SEQ ID NO: 102790 - DNA, 15 bp, Homo sapiens
tgtactccatcctgg

SEQ ID NO: 102791 - DNA, 15 bp, Homo sapiens
ctgtactccatcctg

SEQ ID NO: 102792 - DNA, 15 bp, Homo sapiens
actgtactccatcct

SEQ ID NO: 102793 - DNA, 15 bp, Homo sapiens
cactgtactccatcc

SEQ ID NO: 102794 - DNA, 15 bp, Homo sapiens
ccactgtactccatc

SEQ ID NO: 102795 - DNA, 15 bp, Homo sapiens
accactgtactccat

SEQ ID NO: 102796 - DNA, 15 bp, Homo sapiens
tgagatcgcaccact

SEQ ID NO: 102797 - DNA, 15 bp, Homo sapiens
ctgagatcgcaccac

SEQ ID NO: 102798 - DNA, 15 bp, Homo sapiens
gctgagatcgcacca

SEQ ID NO: 102799 - DNA, 15 bp, Homo sapiens
agctgagatcgcacc

SEQ ID NO: 102800 - DNA, 15 bp, Homo sapiens
gagctgagatcgcac

SEQ ID NO: 102801 - DNA, 15 bp, Homo sapiens
tgagctgagatcgca

SEQ ID NO: 102802 - DNA, 15 bp, Homo sapiens
gtgagctgagatcgc

SEQ ID NO: 102803 - DNA, 15 bp, Homo sapiens
agtgagctgagatcg

SEQ ID NO: 102804 - DNA, 15 bp, Homo sapiens
cagtgagctgagatc

SEQ ID NO: 102805 - DNA, 15 bp, Homo sapiens
gcagtgagctgagat

SEQ ID NO: 102806 - DNA, 15 bp, Homo sapiens
tgcagtgagctgaga

SEQ ID NO: 102807 - DNA, 15 bp, Homo sapiens
ttgcagtgagctgag

SEQ ID NO: 102808 - DNA, 15 bp, Homo sapiens
gttgcagtgagctga

SEQ ID NO: 102809 - DNA, 15 bp, Homo sapiens
ggttgcagtgagctg

SEQ ID NO: 102810 - DNA, 15 bp, Homo sapiens
aggttgcagtgagct

SEQ ID NO: 102811 - DNA, 15 bp, Homo sapiens
ggaggtggaggttgc

SEQ ID NO: 102812 - DNA, 15 bp, Homo sapiens
gggaggtggaggttg

SEQ ID NO: 102813 - DNA, 15 bp, Homo sapiens
tgggaggtggaggtt

SEQ ID NO: 102814 - DNA, 15 bp, Homo sapiens
ctgggaggtggaggt

SEQ ID NO: 102815 - DNA, 15 bp, Homo sapiens
cctgggaggtggagg

SEQ ID NO: 102816 - DNA, 15 bp, Homo sapiens
acctgggaggtggag

SEQ ID NO: 102817 - DNA, 15 bp, Homo sapiens
aacctgggaggtgga

SEQ ID NO: 102818 - DNA, 15 bp, Homo sapiens
gaacctgggaggtgg

SEQ ID NO: 102819 - DNA, 15 bp, Homo sapiens
tgaacctgggaggtg

SEQ ID NO: 102820 - DNA, 15 bp, Homo sapiens
ttgaacctgggaggt

SEQ ID NO: 102821 - DNA, 15 bp, Homo sapiens
cttgaacctgggagg

SEQ ID NO: 102822 - DNA, 15 bp, Homo sapiens
tcttgaacctgggag

SEQ ID NO: 102823 - DNA, 15 bp, Homo sapiens
ctcttgaacctggga

SEQ ID NO: 102824 - DNA, 15 bp, Homo sapiens
tctcttgaacctggg

SEQ ID NO: 102825 - DNA, 15 bp, Homo sapiens
atctcttgaacctgg

SEQ ID NO: 102826 - DNA, 15 bp, Homo sapiens
aatctcttgaacctg

SEQ ID NO: 102827 - DNA, 15 bp, Homo sapiens
taatctcttgaacct

SEQ ID NO: 102828 - DNA, 15 bp, Homo sapiens
ataatctcttgaacc

SEQ ID NO: 102829 - DNA, 15 bp, Homo sapiens
gataatctcttgaac

SEQ ID NO: 102830 - DNA, 15 bp, Homo sapiens
ggataatctcttgaa

SEQ ID NO: 102831 - DNA, 15 bp, Homo sapiens
aggataatctcttga

SEQ ID NO: 102832 - DNA, 15 bp, Homo sapiens
caggataatctcttg

SEQ ID NO: 102833 - DNA, 15 bp, Homo sapiens
gcaggataatctctt

SEQ ID NO: 102834 - DNA, 15 bp, Homo sapiens
ggcaggataatctct

SEQ ID NO: 102835 - DNA, 15 bp, Homo sapiens
aggcaggataatctc

SEQ ID NO: 102836 - DNA, 15 bp, Homo sapiens
gaggcaggataatct

SEQ ID NO: 102837 - DNA, 15 bp, Homo sapiens
tgaggcaggataatc

SEQ ID NO: 102838 - DNA, 15 bp, Homo sapiens
ctgaggcaggataat

SEQ ID NO: 102839 - DNA, 15 bp, Homo sapiens
gctgaggcaggataa

SEQ ID NO: 102840 - DNA, 15 bp, Homo sapiens
ggctgaggcaggata

SEQ ID NO: 102841 - DNA, 15 bp, Homo sapiens
aggctgaggcaggat

SEQ ID NO: 102842 - DNA, 15 bp, Homo sapiens
aaatcccagctactt

SEQ ID NO: 102843 - DNA, 15 bp, Homo sapiens
taaatcccagctact

SEQ ID NO: 102844 - DNA, 15 bp, Homo sapiens
gtaaatcccagctac

SEQ ID NO: 102845 - DNA, 15 bp, Homo sapiens
tgtaaatcccagcta

SEQ ID NO: 102846 - DNA, 15 bp, Homo sapiens
ctgtaaatcccagct

SEQ ID NO: 102847 - DNA, 15 bp, Homo sapiens
cctgtaaatcccagc

SEQ ID NO: 102848 - DNA, 15 bp, Homo sapiens
acctgtaaatcccag

SEQ ID NO: 102849 - DNA, 15 bp, Homo sapiens
cacctgtaaatccca

SEQ ID NO: 102850 - DNA, 15 bp, Homo sapiens
acacctgtaaatccc

SEQ ID NO: 102851 - DNA, 15 bp, Homo sapiens
cacacctgtaaatcc

SEQ ID NO: 102852 - DNA, 15 bp, Homo sapiens
gcacacctgtaaatc

SEQ ID NO: 102853 - DNA, 15 bp, Homo sapiens
cgcacacctgtaaat

SEQ ID NO: 102854 - DNA, 15 bp, Homo sapiens
gcgcacacctgtaaa

SEQ ID NO: 102855 - DNA, 15 bp, Homo sapiens
ggcgcacacctgtaa

SEQ ID NO: 102856 - DNA, 15 bp, Homo sapiens
tggcgcacacctgta

SEQ ID NO: 102857 - DNA, 15 bp, Homo sapiens
gtggcgcacacctgt

SEQ ID NO: 102858 - DNA, 15 bp, Homo sapiens
ggtggcgcacacctg

SEQ ID NO: 102859 - DNA, 15 bp, Homo sapiens
tggtggcgcacacct

SEQ ID NO: 102860 - DNA, 15 bp, Homo sapiens
gtggtggcgcacacc

SEQ ID NO: 102861 - DNA, 15 bp, Homo sapiens
tgtggtggcgcacac

SEQ ID NO: 102862 - DNA, 15 bp, Homo sapiens
gtgtggtggcgcaca

SEQ ID NO: 102863 - DNA, 15 bp, Homo sapiens
ggtgtggtggcgcac

SEQ ID NO: 102864 - DNA, 15 bp, Homo sapiens
gggtgtggtggcgca

SEQ ID NO: 102865 - DNA, 15 bp, Homo sapiens
tgggtgtggtggcgc

SEQ ID NO: 102866 - DNA, 15 bp, Homo sapiens
ctgggtgtggtggcg

SEQ ID NO: 102867 - DNA, 15 bp, Homo sapiens
tagctgggtgtggtg

SEQ ID NO: 102868 - DNA, 15 bp, Homo sapiens
ttagctgggtgtggt

SEQ ID NO: 102869 - DNA, 15 bp, Homo sapiens
attagctgggtgtgg

SEQ ID NO: 102870 - DNA, 15 bp, Homo sapiens
aattagctgggtgtg

SEQ ID NO: 102871 - DNA, 15 bp, Homo sapiens
aaattagctgggtgt

SEQ ID NO: 102872 - DNA, 15 bp, Homo sapiens
aaaattagctgggtg

SEQ ID NO: 102873 - DNA, 15 bp, Homo sapiens
aaaaattagctgggt

SEQ ID NO: 102874 - DNA, 15 bp, Homo sapiens
caaaaattagctggg

SEQ ID NO: 102875 - DNA, 15 bp, Homo sapiens
acaaaaattagctgg

SEQ ID NO: 102876 - DNA, 15 bp, Homo sapiens
tacaaaaattagctg

SEQ ID NO: 102877 - DNA, 15 bp, Homo sapiens
atacaaaaattagct

SEQ ID NO: 102878 - DNA, 15 bp, Homo sapiens
atgaaaccctgtctc

SEQ ID NO: 102879 - DNA, 15 bp, Homo sapiens
gatgaaaccctgtct

SEQ ID NO: 102880 - DNA, 15 bp, Homo sapiens
tgatgaaaccctgtc

SEQ ID NO: 102881 - DNA, 15 bp, Homo sapiens
atgatgaaaccctgt

SEQ ID NO: 102882 - DNA, 15 bp, Homo sapiens
catgatgaaaccctg

SEQ ID NO: 102883 - DNA, 15 bp, Homo sapiens
acatgatgaaaccct

SEQ ID NO: 102884 - DNA, 15 bp, Homo sapiens
aacatgatgaaaccc

SEQ ID NO: 102885 - DNA, 15 bp, Homo sapiens
caacatgatgaaacc

SEQ ID NO: 102886 - DNA, 15 bp, Homo sapiens
ccaacatgatgaaac

SEQ ID NO: 102887 - DNA, 15 bp, Homo sapiens
gccaacatgatgaaa

SEQ ID NO: 102888 - DNA, 15 bp, Homo sapiens
ggccaacatgatgaa

SEQ ID NO: 102889 - DNA, 15 bp, Homo sapiens
tggccaacatgatga

SEQ ID NO: 102890 - DNA, 15 bp, Homo sapiens
ctggccaacatgatg

SEQ ID NO: 102891 - DNA, 15 bp, Homo sapiens
cctggccaacatgat

SEQ ID NO: 102892 - DNA, 15 bp, Homo sapiens
gcctggccaacatga

SEQ ID NO: 102893 - DNA, 15 bp, Homo sapiens
ggagaccagcctggc

SEQ ID NO: 102894 - DNA, 15 bp, Homo sapiens
tggagaccagcctgg

SEQ ID NO: 102895 - DNA, 15 bp, Homo sapiens
ttggagaccagcctg

SEQ ID NO: 102896 - DNA, 15 bp, Homo sapiens
gttggagaccagcct

SEQ ID NO: 102897 - DNA, 15 bp, Homo sapiens
agttggagaccagcc

SEQ ID NO: 102898 - DNA, 15 bp, Homo sapiens
gagttggagaccagc

SEQ ID NO: 102899 - DNA, 15 bp, Homo sapiens
ggagttggagaccag

SEQ ID NO: 102900 - DNA, 15 bp, Homo sapiens
aggagttggagacca

SEQ ID NO: 102901 - DNA, 15 bp, Homo sapiens
caggagttggagacc

SEQ ID NO: 102902 - DNA, 15 bp, Homo sapiens
ccaggagttggagac

SEQ ID NO: 102903 - DNA, 15 bp, Homo sapiens
cccaggagttggaga

SEQ ID NO: 102904 - DNA, 15 bp, Homo sapiens
gcccaggagttggag

SEQ ID NO: 102905 - DNA, 15 bp, Homo sapiens
agcccaggagttgga

SEQ ID NO: 102906 - DNA, 15 bp, Homo sapiens
aagcccaggagttgg

SEQ ID NO: 102907 - DNA, 15 bp, Homo sapiens
taagcccaggagttg

SEQ ID NO: 102908 - DNA, 15 bp, Homo sapiens
ttaagcccaggagtt

SEQ ID NO: 102909 - DNA, 15 bp, Homo sapiens
cttaagcccaggagt

SEQ ID NO: 102910 - DNA, 15 bp, Homo sapiens
aggaggattgcttaa

SEQ ID NO: 102911 - DNA, 15 bp, Homo sapiens
caggaggattgctta

SEQ ID NO: 102912 - DNA, 15 bp, Homo sapiens
gcaggaggattgctt

SEQ ID NO: 102913 - DNA, 15 bp, Homo sapiens
ggcaggaggattgct

SEQ ID NO: 102914 - DNA, 15 bp, Homo sapiens
aggcaggaggattgc

SEQ ID NO: 102915 - DNA, 15 bp, Homo sapiens
aaggcaggaggattg

SEQ ID NO: 102916 - DNA, 15 bp, Homo sapiens
caaggcaggaggatt

SEQ ID NO: 102917 - DNA, 15 bp, Homo sapiens
ccaaggcaggaggat

SEQ ID NO: 102918 - DNA, 15 bp, Homo sapiens
gccaaggcaggagga

SEQ ID NO: 102919 - DNA, 15 bp, Homo sapiens
ggccaaggcaggagg

SEQ ID NO: 102920 - DNA, 15 bp, Homo sapiens
aggccaaggcaggag

SEQ ID NO: 102921 - DNA, 15 bp, Homo sapiens
gaggccaaggcagga

SEQ ID NO: 102922 - DNA, 15 bp, Homo sapiens
ggaggccaaggcagg

SEQ ID NO: 102923 - DNA, 15 bp, Homo sapiens
gggaggccaaggcag

SEQ ID NO: 102924 - DNA, 15 bp, Homo sapiens
tgggaggccaaggca

SEQ ID NO: 102925 - DNA, 15 bp, Homo sapiens
tactttgggaggcca

SEQ ID NO: 102926 - DNA, 15 bp, Homo sapiens
atactttgggaggcc

SEQ ID NO: 102927 - DNA, 15 bp, Homo sapiens
aatactttgggaggc

SEQ ID NO: 102928 - DNA, 15 bp, Homo sapiens
taatactttgggagg

SEQ ID NO: 102929 - DNA, 15 bp, Homo sapiens
ctaatactttgggag

SEQ ID NO: 102930 - DNA, 15 bp, Homo sapiens
tctaatactttggga

SEQ ID NO: 102931 - DNA, 15 bp, Homo sapiens
ttctaatactttggg

SEQ ID NO: 102932 - DNA, 15 bp, Homo sapiens
attctaatactttgg

SEQ ID NO: 102933 - DNA, 15 bp, Homo sapiens
aattctaatactttg

SEQ ID NO: 102934 - DNA, 15 bp, Homo sapiens
taattctaatacttt

SEQ ID NO: 102935 - DNA, 15 bp, Homo sapiens
gtaattctaatactt

SEQ ID NO: 102936 - DNA, 15 bp, Homo sapiens
tgtaattctaatact

SEQ ID NO: 102937 - DNA, 15 bp, Homo sapiens
ctgtaattctaatac

SEQ ID NO: 102938 - DNA, 15 bp, Homo sapiens
cctgtaattctaata

SEQ ID NO: 102939 - DNA, 15 bp, Homo sapiens
gcctgtaattctaat

SEQ ID NO: 102940 - DNA, 15 bp, Homo sapiens
cgcctgtaattctaa

SEQ ID NO: 102941 - DNA, 15 bp, Homo sapiens
acgcctgtaattcta

SEQ ID NO: 102942 - DNA, 15 bp, Homo sapiens
cacgcctgtaattct

SEQ ID NO: 102943 - DNA, 15 bp, Homo sapiens
tcacgcctgtaattc

SEQ ID NO: 102944 - DNA, 15 bp, Homo sapiens
ctcacgcctgtaatt

SEQ ID NO: 102945 - DNA, 15 bp, Homo sapiens
acagtggctcacgcc

SEQ ID NO: 102946 - DNA, 15 bp, Homo sapiens
cacagtggctcacgc

SEQ ID NO: 102947 - DNA, 15 bp, Homo sapiens
gcacagtggctcacg

SEQ ID NO: 102948 - DNA, 15 bp, Homo sapiens
ggcacagtggctcac

SEQ ID NO: 102949 - DNA, 15 bp, Homo sapiens
agccaggcacagtgg

SEQ ID NO: 102950 - DNA, 15 bp, Homo sapiens
gagccaggcacagtg

SEQ ID NO: 102951 - DNA, 15 bp, Homo sapiens
agagccaggcacagt

SEQ ID NO: 102952 - DNA, 15 bp, Homo sapiens
aagagccaggcacag

SEQ ID NO: 102953 - DNA, 15 bp, Homo sapiens
taagagccaggcaca

SEQ ID NO: 102954 - DNA, 15 bp, Homo sapiens
ataagagccaggcac

SEQ ID NO: 102955 - DNA, 15 bp, Homo sapiens
cataagagccaggca

SEQ ID NO: 102956 - DNA, 15 bp, Homo sapiens
acataagagccaggc

SEQ ID NO: 102957 - DNA, 15 bp, Homo sapiens
tacataagagccagg

SEQ ID NO: 102958 - DNA, 15 bp, Homo sapiens
ttacataagagccag

SEQ ID NO: 102959 - DNA, 15 bp, Homo sapiens
tttacataagagcca

SEQ ID NO: 102960 - DNA, 15 bp, Homo sapiens
ttttacataagagcc

SEQ ID NO: 102961 - DNA, 15 bp, Homo sapiens
attttacataagagc

SEQ ID NO: 102962 - DNA, 15 bp, Homo sapiens
aattttacataagag

SEQ ID NO: 102963 - DNA, 15 bp, Homo sapiens
taattttacataaga

SEQ ID NO: 102964 - DNA, 15 bp, Homo sapiens
ttaattttacataag

SEQ ID NO: 102965 - DNA, 15 bp, Homo sapiens
tttaattttacataa

SEQ ID NO: 102966 - DNA, 15 bp, Homo sapiens
gtttaattttacata

SEQ ID NO: 102967 - DNA, 15 bp, Homo sapiens
ggtttaattttacat

SEQ ID NO: 102968 - DNA, 15 bp, Homo sapiens
tggtttaattttaca

SEQ ID NO: 102969 - DNA, 15 bp, Homo sapiens
gtggtttaattttac

SEQ ID NO: 102970 - DNA, 15 bp, Homo sapiens
tgtggtttaatttta

SEQ ID NO: 102971 - DNA, 15 bp, Homo sapiens
atgtggtttaatttt

SEQ ID NO: 102972 - DNA, 15 bp, Homo sapiens
tatgtggtttaattt

SEQ ID NO: 102973 - DNA, 15 bp, Homo sapiens
gtatgtggtttaatt

SEQ ID NO: 102974 - DNA, 15 bp, Homo sapiens
tgtatgtggtttaat

SEQ ID NO: 102975 - DNA, 15 bp, Homo sapiens
gtgtatgtggtttaa

SEQ ID NO: 102976 - DNA, 15 bp, Homo sapiens
tgtgtatgtggttta

SEQ ID NO: 102977 - DNA, 15 bp, Homo sapiens
atgtgtatgtggttt

SEQ ID NO: 102978 - DNA, 15 bp, Homo sapiens
catgtgtatgtggtt

SEQ ID NO: 102979 - DNA, 15 bp, Homo sapiens
tcatgtgtatgtggt

SEQ ID NO: 102980 - DNA, 15 bp, Homo sapiens
ctcatgtgtatgtgg

SEQ ID NO: 102981 - DNA, 15 bp, Homo sapiens
tctcatgtgtatgtg

SEQ ID NO: 102982 - DNA, 15 bp, Homo sapiens
ttctcatgtgtatgt

SEQ ID NO: 102983 - DNA, 15 bp, Homo sapiens
tttctcatgtgtatg

SEQ ID NO: 102984 - DNA, 15 bp, Homo sapiens
gtttctcatgtgtat

SEQ ID NO: 102985 - DNA, 15 bp, Homo sapiens
tgtttctcatgtgta

SEQ ID NO: 102986 - DNA, 15 bp, Homo sapiens
ttgtttctcatgtgt

SEQ ID NO: 102987 - DNA, 15 bp, Homo sapiens
gttgtttctcatgtg

SEQ ID NO: 102988 - DNA, 15 bp, Homo sapiens
ggttgtttctcatgt

SEQ ID NO: 102989 - DNA, 15 bp, Homo sapiens
gggttgtttctcatg

SEQ ID NO: 102990 - DNA, 15 bp, Homo sapiens
agggttgtttctcat

SEQ ID NO: 102991 - DNA, 15 bp, Homo sapiens
tagggttgtttctca

SEQ ID NO: 102992 - DNA, 15 bp, Homo sapiens
atagggttgtttctc

SEQ ID NO: 102993 - DNA, 15 bp, Homo sapiens
catagggttgtttct

SEQ ID NO: 102994 - DNA, 15 bp, Homo sapiens
acatagggttgtttc

SEQ ID NO: 102995 - DNA, 15 bp, Homo sapiens
tacatagggttgttt

SEQ ID NO: 102996 - DNA, 15 bp, Homo sapiens
ttacatagggttgtt

SEQ ID NO: 102997 - DNA, 15 bp, Homo sapiens
attacatagggttgt

SEQ ID NO: 102998 - DNA, 15 bp, Homo sapiens
aattacatagggttg

SEQ ID NO: 102999 - DNA, 15 bp, Homo sapiens
taattacatagggtt

SEQ ID NO: 103000 - DNA, 15 bp, Homo sapiens
ttaattacatagggt

SEQ ID NO: 103001 - DNA, 15 bp, Homo sapiens
cttaattacataggg

SEQ ID NO: 103002 - DNA, 15 bp, Homo sapiens
tcttaattacatagg

SEQ ID NO: 103003 - DNA, 15 bp, Homo sapiens
atcttaattacatag

SEQ ID NO: 103004 - DNA, 15 bp, Homo sapiens
aatcttaattacata

SEQ ID NO: 103005 - DNA, 15 bp, Homo sapiens
aaatcttaattacat

SEQ ID NO: 103006 - DNA, 15 bp, Homo sapiens
gaaatcttaattaca

SEQ ID NO: 103007 - DNA, 15 bp, Homo sapiens
agaaatcttaattac

SEQ ID NO: 103008 - DNA, 15 bp, Homo sapiens
aagaaatcttaatta

SEQ ID NO: 103009 - DNA, 15 bp, Homo sapiens
aaagaaatcttaatt

SEQ ID NO: 103010 - DNA, 15 bp, Homo sapiens
gaaagaaatcttaat

SEQ ID NO: 103011 - DNA, 15 bp, Homo sapiens
agaaagaaatcttaa

SEQ ID NO: 103012 - DNA, 15 bp, Homo sapiens
aagaaagaaatctta

SEQ ID NO: 103013 - DNA, 15 bp, Homo sapiens
aaagaaagaaatctt

SEQ ID NO: 103014 - DNA, 15 bp, Homo sapiens
aaaagaaagaaatct

SEQ ID NO: 103015 - DNA, 15 bp, Homo sapiens
aaaaagaaagaaatc

SEQ ID NO: 103016 - DNA, 15 bp, Homo sapiens
aaaaaagaaagaaat

SEQ ID NO: 103017 - DNA, 15 bp, Homo sapiens
ttaaaaaaaaaaaaa

SEQ ID NO: 103018 - DNA, 15 bp, Homo sapiens
cttaaaaaaaaaaaa

SEQ ID NO: 103019 - DNA, 15 bp, Homo sapiens
tcttaaaaaaaaaaa

SEQ ID NO: 103020 - DNA, 15 bp, Homo sapiens
ctcttaaaaaaaaaa

SEQ ID NO: 103021 - DNA, 15 bp, Homo sapiens
tctcttaaaaaaaaa

SEQ ID NO: 103022 - DNA, 15 bp, Homo sapiens
atctcttaaaaaaaa

SEQ ID NO: 103023 - DNA, 15 bp, Homo sapiens
catctcttaaaaaaa

SEQ ID NO: 103024 - DNA, 15 bp, Homo sapiens
ccatctcttaaaaaa

SEQ ID NO: 103025 - DNA, 15 bp, Homo sapiens
tccatctcttaaaaa

SEQ ID NO: 103026 - DNA, 15 bp, Homo sapiens
ctccatctcttaaaa

SEQ ID NO: 103027 - DNA, 15 bp, Homo sapiens
actccatctcttaaa

SEQ ID NO: 103028 - DNA, 15 bp, Homo sapiens
gactccatctcttaa

SEQ ID NO: 103029 - DNA, 15 bp, Homo sapiens
tgactccatctctta

SEQ ID NO: 103030 - DNA, 15 bp, Homo sapiens
gtgactccatctctt

SEQ ID NO: 103031 - DNA, 15 bp, Homo sapiens
ggtgactccatctct

SEQ ID NO: 103032 - DNA, 15 bp, Homo sapiens
gggtgactccatctc

SEQ ID NO: 103033 - DNA, 15 bp, Homo sapiens
tgggtgactccatct

SEQ ID NO: 103034 - DNA, 15 bp, Homo sapiens
ctgggtgactccatc

SEQ ID NO: 103035 - DNA, 15 bp, Homo sapiens
cctgggtgactccat

SEQ ID NO: 103036 - DNA, 15 bp, Homo sapiens
gcctgggtgactcca

SEQ ID NO: 103037 - DNA, 15 bp, Homo sapiens
agcctgggtgactcc

SEQ ID NO: 103038 - DNA, 15 bp, Homo sapiens
cagcctgggtgactc

SEQ ID NO: 103039 - DNA, 15 bp, Homo sapiens
ccagcctgggtgact

SEQ ID NO: 103040 - DNA, 15 bp, Homo sapiens
ctccagcctgggtga

SEQ ID NO: 103041 - DNA, 15 bp, Homo sapiens
actccagcctgggtg

SEQ ID NO: 103042 - DNA, 15 bp, Homo sapiens
cactccagcctgggt

SEQ ID NO: 103043 - DNA, 15 bp, Homo sapiens
aactgcactccagcc

SEQ ID NO: 103044 - DNA, 15 bp, Homo sapiens
caactgcactccagc

SEQ ID NO: 103045 - DNA, 15 bp, Homo sapiens
gcaactgcactccag

SEQ ID NO: 103046 - DNA, 15 bp, Homo sapiens
tgcaactgcactcca

SEQ ID NO: 103047 - DNA, 15 bp, Homo sapiens
gtgcaactgcactcc

SEQ ID NO: 103048 - DNA, 15 bp, Homo sapiens
tgtgcaactgcactc

SEQ ID NO: 103049 - DNA, 15 bp, Homo sapiens
ttgtgcaactgcact

SEQ ID NO: 103050 - DNA, 15 bp, Homo sapiens
attgtgcaactgcac

SEQ ID NO: 103051 - DNA, 15 bp, Homo sapiens
gattgtgcaactgca

SEQ ID NO: 103052 - DNA, 15 bp, Homo sapiens
agattgtgcaactgc

SEQ ID NO: 103053 - DNA, 15 bp, Homo sapiens
gagattgtgcaactg

SEQ ID NO: 103054 - DNA, 15 bp, Homo sapiens
ggagattgtgcaact

SEQ ID NO: 103055 - DNA, 15 bp, Homo sapiens
tggagattgtgcaac

SEQ ID NO: 103056 - DNA, 15 bp, Homo sapiens
atggagattgtgcaa

SEQ ID NO: 103057 - DNA, 15 bp, Homo sapiens
aatggagattgtgca

SEQ ID NO: 103058 - DNA, 15 bp, Homo sapiens
gaatggagattgtgc

SEQ ID NO: 103059 - DNA, 15 bp, Homo sapiens
tgaatggagattgtg

SEQ ID NO: 103060 - DNA, 15 bp, Homo sapiens
gtgaatggagattgt

SEQ ID NO: 103061 - DNA, 15 bp, Homo sapiens
agtgaatggagattg

SEQ ID NO: 103062 - DNA, 15 bp, Homo sapiens
cagtgaatggagatt

SEQ ID NO: 103063 - DNA, 15 bp, Homo sapiens
gcagtgaatggagat

SEQ ID NO: 103064 - DNA, 15 bp, Homo sapiens
tgcagtgaatggaga

SEQ ID NO: 103065 - DNA, 15 bp, Homo sapiens
ctgcagtgaatggag

SEQ ID NO: 103066 - DNA, 15 bp, Homo sapiens
gctgcagtgaatgga

SEQ ID NO: 103067 - DNA, 15 bp, Homo sapiens
ggctgcagtgaatgg

SEQ ID NO: 103068 - DNA, 15 bp, Homo sapiens
aggctgcagtgaatg

SEQ ID NO: 103069 - DNA, 15 bp, Homo sapiens
aaggctgcagtgaat

SEQ ID NO: 103070 - DNA, 15 bp, Homo sapiens
caaggctgcagtgaa

SEQ ID NO: 103071 - DNA, 15 bp, Homo sapiens
gcaaggctgcagtga

SEQ ID NO: 103072 - DNA, 15 bp, Homo sapiens
tgcaaggctgcagtg

SEQ ID NO: 103073 - DNA, 15 bp, Homo sapiens
ttgcaaggctgcagt

SEQ ID NO: 103074 - DNA, 15 bp, Homo sapiens
gttgcaaggctgcag

SEQ ID NO: 103075 - DNA, 15 bp, Homo sapiens
ggttgcaaggctgca

SEQ ID NO: 103076 - DNA, 15 bp, Homo sapiens
aggttgcaaggctgc

SEQ ID NO: 103077 - DNA, 15 bp, Homo sapiens
gaggttgcaaggctg

SEQ ID NO: 103078 - DNA, 15 bp, Homo sapiens
ggaggttgcaaggct

SEQ ID NO: 103079 - DNA, 15 bp, Homo sapiens
tggaggttgcaaggc

SEQ ID NO: 103080 - DNA, 15 bp, Homo sapiens
gtggaggttgcaagg

SEQ ID NO: 103081 - DNA, 15 bp, Homo sapiens
ggtggaggttgcaag

SEQ ID NO: 103082 - DNA, 15 bp, Homo sapiens
tggtggaggttgcaa

SEQ ID NO: 103083 - DNA, 15 bp, Homo sapiens
gtggtggaggttgca

SEQ ID NO: 103084 - DNA, 15 bp, Homo sapiens
ggtggtggaggttgc

SEQ ID NO: 103085 - DNA, 15 bp, Homo sapiens
aggtggtggaggttg

SEQ ID NO: 103086 - DNA, 15 bp, Homo sapiens
caggtggtggaggtt

SEQ ID NO: 103087 - DNA, 15 bp, Homo sapiens
tcaggtggtggaggt

SEQ ID NO: 103088 - DNA, 15 bp, Homo sapiens
ctcaggtggtggagg

SEQ ID NO: 103089 - DNA, 15 bp, Homo sapiens
actcaggtggtggag

SEQ ID NO: 103090 - DNA, 15 bp, Homo sapiens
aactcaggtggtgga

SEQ ID NO: 103091 - DNA, 15 bp, Homo sapiens
gaactcaggtggtgg

SEQ ID NO: 103092 - DNA, 15 bp, Homo sapiens
tgaactcaggtggtg

SEQ ID NO: 103093 - DNA, 15 bp, Homo sapiens
ttgaactcaggtggt

SEQ ID NO: 103094 - DNA, 15 bp, Homo sapiens
cttgaactcaggtgg

SEQ ID NO: 103095 - DNA, 15 bp, Homo sapiens
ccttgaactcaggtg

SEQ ID NO: 103096 - DNA, 15 bp, Homo sapiens
cccttgaactcaggt

SEQ ID NO: 103097 - DNA, 15 bp, Homo sapiens
tcccttgaactcagg

SEQ ID NO: 103098 - DNA, 15 bp, Homo sapiens
atcccttgaactcag

SEQ ID NO: 103099 - DNA, 15 bp, Homo sapiens
aatcccttgaactca

SEQ ID NO: 103100 - DNA, 15 bp, Homo sapiens
gaatcccttgaactc

SEQ ID NO: 103101 - DNA, 15 bp, Homo sapiens
agaatcccttgaact

SEQ ID NO: 103102 - DNA, 15 bp, Homo sapiens
gagaatcccttgaac

SEQ ID NO: 103103 - DNA, 15 bp, Homo sapiens
ggagaatcccttgaa

SEQ ID NO: 103104 - DNA, 15 bp, Homo sapiens
aggagaatcccttga

SEQ ID NO: 103105 - DNA, 15 bp, Homo sapiens
caggagaatcccttg

SEQ ID NO: 103106 - DNA, 15 bp, Homo sapiens
gcaggagaatccctt

SEQ ID NO: 103107 - DNA, 15 bp, Homo sapiens
ggcaggagaatccct

SEQ ID NO: 103108 - DNA, 15 bp, Homo sapiens
aggcaggagaatccc

SEQ ID NO: 103109 - DNA, 15 bp, Homo sapiens
gaggcaggagaatcc

SEQ ID NO: 103110 - DNA, 15 bp, Homo sapiens
atcccagctactcag

SEQ ID NO: 103111 - DNA, 15 bp, Homo sapiens
aatcccagctactca

SEQ ID NO: 103112 - DNA, 15 bp, Homo sapiens
ataatcccagctact

SEQ ID NO: 103113 - DNA, 15 bp, Homo sapiens
tataatcccagctac

SEQ ID NO: 103114 - DNA, 15 bp, Homo sapiens
ctataatcccagcta

SEQ ID NO: 103115 - DNA, 15 bp, Homo sapiens
cctataatcccagct

SEQ ID NO: 103116 - DNA, 15 bp, Homo sapiens
gcctataatcccagc

SEQ ID NO: 103117 - DNA, 15 bp, Homo sapiens
tgcctataatcccag

SEQ ID NO: 103118 - DNA, 15 bp, Homo sapiens
atgcctataatccca

SEQ ID NO: 103119 - DNA, 15 bp, Homo sapiens
catgcctataatccc

SEQ ID NO: 103120 - DNA, 15 bp, Homo sapiens
acatgcctataatcc

SEQ ID NO: 103121 - DNA, 15 bp, Homo sapiens
cacatgcctataatc

SEQ ID NO: 103122 - DNA, 15 bp, Homo sapiens
gcacatgcctataat

SEQ ID NO: 103123 - DNA, 15 bp, Homo sapiens
ggcacatgcctataa

SEQ ID NO: 103124 - DNA, 15 bp, Homo sapiens
tggcacatgcctata

SEQ ID NO: 103125 - DNA, 15 bp, Homo sapiens
gtggcacatgcctat

SEQ ID NO: 103126 - DNA, 15 bp, Homo sapiens
ggtggcacatgccta

SEQ ID NO: 103127 - DNA, 15 bp, Homo sapiens
tggtggcacatgcct

SEQ ID NO: 103128 - DNA, 15 bp, Homo sapiens
gtggtggcacatgcc

SEQ ID NO: 103129 - DNA, 15 bp, Homo sapiens
cgtggtggcacatgc

SEQ ID NO: 103130 - DNA, 15 bp, Homo sapiens
gcgtggtggcacatg

SEQ ID NO: 103131 - DNA, 15 bp, Homo sapiens
ggcgtggtggcacat

SEQ ID NO: 103132 - DNA, 15 bp, Homo sapiens
gggcgtggtggcaca

SEQ ID NO: 103133 - DNA, 15 bp, Homo sapiens
tgggcgtggtggcac

SEQ ID NO: 103134 - DNA, 15 bp, Homo sapiens
ctgggcgtggtggca

SEQ ID NO: 103135 - DNA, 15 bp, Homo sapiens
agctgggcgtggtgg

SEQ ID NO: 103136 - DNA, 15 bp, Homo sapiens
tagctgggcgtggtg

SEQ ID NO: 103137 - DNA, 15 bp, Homo sapiens
ttagctgggcgtggt

SEQ ID NO: 103138 - DNA, 15 bp, Homo sapiens
attagctgggcgtgg

SEQ ID NO: 103139 - DNA, 15 bp, Homo sapiens
aattagctgggcgtg

SEQ ID NO: 103140 - DNA, 15 bp, Homo sapiens
aaattagctgggcgt

SEQ ID NO: 103141 - DNA, 15 bp, Homo sapiens
aaaattagctgggcg

SEQ ID NO: 103142 - DNA, 15 bp, Homo sapiens
acaaaaaaattagct

SEQ ID NO: 103143 - DNA, 15 bp, Homo sapiens
tacaaaaaaattagc

SEQ ID NO: 103144 - DNA, 15 bp, Homo sapiens
atacaaaaaaattag

SEQ ID NO: 103145 - DNA, 15 bp, Homo sapiens
aatacaaaaaaatta

SEQ ID NO: 103146 - DNA, 15 bp, Homo sapiens
aaatacaaaaaaatt

SEQ ID NO: 103147 - DNA, 15 bp, Homo sapiens
aaaatacaaaaaaat

SEQ ID NO: 103148 - DNA, 15 bp, Homo sapiens
aaaaatacaaaaaaa

SEQ ID NO: 103149 - DNA, 15 bp, Homo sapiens
ccgtctctactaaaa

SEQ ID NO: 103150 - DNA, 15 bp, Homo sapiens
tccgtctctactaaa

SEQ ID NO: 103151 - DNA, 15 bp, Homo sapiens
ttccgtctctactaa

SEQ ID NO: 103152 - DNA, 15 bp, Homo sapiens
attccgtctctacta

SEQ ID NO: 103153 - DNA, 15 bp, Homo sapiens
aattccgtctctact

SEQ ID NO: 103154 - DNA, 15 bp, Homo sapiens
aaattccgtctctac

SEQ ID NO: 103155 - DNA, 15 bp, Homo sapiens
gaaattccgtctcta

SEQ ID NO: 103156 - DNA, 15 bp, Homo sapiens
ggaaattccgtctct

SEQ ID NO: 103157 - DNA, 15 bp, Homo sapiens
gggaaattccgtctc

SEQ ID NO: 103158 - DNA, 15 bp, Homo sapiens
ggggaaattccgtct

SEQ ID NO: 103159 - DNA, 15 bp, Homo sapiens
tggggaaattccgtc

SEQ ID NO: 103160 - DNA, 15 bp, Homo sapiens
atggggaaattccgt

SEQ ID NO: 103161 - DNA, 15 bp, Homo sapiens
catggggaaattccg

SEQ ID NO: 103162 - DNA, 15 bp, Homo sapiens
acatggggaaattcc

SEQ ID NO: 103163 - DNA, 15 bp, Homo sapiens
aacatggggaaattc

SEQ ID NO: 103164 - DNA, 15 bp, Homo sapiens
caacatggggaaatt

SEQ ID NO: 103165 - DNA, 15 bp, Homo sapiens
ccaacatggggaaat

SEQ ID NO: 103166 - DNA, 15 bp, Homo sapiens
gccaacatggggaaa

SEQ ID NO: 103167 - DNA, 15 bp, Homo sapiens
ggccaacatggggaa

SEQ ID NO: 103168 - DNA, 15 bp, Homo sapiens
tggccaacatgggga

SEQ ID NO: 103169 - DNA, 15 bp, Homo sapiens
ctggccaacatgggg

SEQ ID NO: 103170 - DNA, 15 bp, Homo sapiens
cctggccaacatggg

SEQ ID NO: 103171 - DNA, 15 bp, Homo sapiens
ccaggagtttgagac

SEQ ID NO: 103172 - DNA, 15 bp, Homo sapiens
gccaggagtttgaga

SEQ ID NO: 103173 - DNA, 15 bp, Homo sapiens
ggccaggagtttgag

SEQ ID NO: 103174 - DNA, 15 bp, Homo sapiens
aggccaggagtttga

SEQ ID NO: 103175 - DNA, 15 bp, Homo sapiens
aaggccaggagtttg

SEQ ID NO: 103176 - DNA, 15 bp, Homo sapiens
taaggccaggagttt

SEQ ID NO: 103177 - DNA, 15 bp, Homo sapiens
ttaaggccaggagtt

SEQ ID NO: 103178 - DNA, 15 bp, Homo sapiens
tttaaggccaggagt

SEQ ID NO: 103179 - DNA, 15 bp, Homo sapiens
atttaaggccaggag

SEQ ID NO: 103180 - DNA, 15 bp, Homo sapiens
catttaaggccagga

SEQ ID NO: 103181 - DNA, 15 bp, Homo sapiens
tcatttaaggccagg

SEQ ID NO: 103182 - DNA, 15 bp, Homo sapiens
atcatttaaggccag

SEQ ID NO: 103183 - DNA, 15 bp, Homo sapiens
gatcatttaaggcca

SEQ ID NO: 103184 - DNA, 15 bp, Homo sapiens
ggatcatttaaggcc

SEQ ID NO: 103185 - DNA, 15 bp, Homo sapiens
tggatcatttaaggc

SEQ ID NO: 103186 - DNA, 15 bp, Homo sapiens
gtggatcatttaagg

SEQ ID NO: 103187 - DNA, 15 bp, Homo sapiens
ggtggatcatttaag

SEQ ID NO: 103188 - DNA, 15 bp, Homo sapiens
gggtggatcatttaa

SEQ ID NO: 103189 - DNA, 15 bp, Homo sapiens
cgggtggatcattta

SEQ ID NO: 103190 - DNA, 15 bp, Homo sapiens
acgggtggatcattt

SEQ ID NO: 103191 - DNA, 15 bp, Homo sapiens
gacgggtggatcatt

SEQ ID NO: 103192 - DNA, 15 bp, Homo sapiens
ggacgggtggatcat

SEQ ID NO: 103193 - DNA, 15 bp, Homo sapiens
aggacgggtggatca

SEQ ID NO: 103194 - DNA, 15 bp, Homo sapiens
caggacgggtggatc

SEQ ID NO: 103195 - DNA, 15 bp, Homo sapiens
ccaggacgggtggat

SEQ ID NO: 103196 - DNA, 15 bp, Homo sapiens
gccaggacgggtgga

SEQ ID NO: 103197 - DNA, 15 bp, Homo sapiens
ggccaggacgggtgg

SEQ ID NO: 103198 - DNA, 15 bp, Homo sapiens
aggccaggacgggtg

SEQ ID NO: 103199 - DNA, 15 bp, Homo sapiens
gaggccaggacgggt

SEQ ID NO: 103200 - DNA, 15 bp, Homo sapiens
ggaggccaggacggg

SEQ ID NO: 103201 - DNA, 15 bp, Homo sapiens
gggaggccaggacgg

SEQ ID NO: 103202 - DNA, 15 bp, Homo sapiens
tgggaggccaggacg

SEQ ID NO: 103203 - DNA, 15 bp, Homo sapiens
ttgggaggccaggac

SEQ ID NO: 103204 - DNA, 15 bp, Homo sapiens
tttgggaggccagga

SEQ ID NO: 103205 - DNA, 15 bp, Homo sapiens
ctttgggaggccagg

SEQ ID NO: 103206 - DNA, 15 bp, Homo sapiens
actttgggaggccag

SEQ ID NO: 103207 - DNA, 15 bp, Homo sapiens
tgcggtggctcacac

SEQ ID NO: 103208 - DNA, 15 bp, Homo sapiens
gtgcggtggctcaca

SEQ ID NO: 103209 - DNA, 15 bp, Homo sapiens
gggtgcggtggctca

SEQ ID NO: 103210 - DNA, 15 bp, Homo sapiens
tgggtgcggtggctc

SEQ ID NO: 103211 - DNA, 15 bp, Homo sapiens
ctgggtgcggtggct

SEQ ID NO: 103212 - DNA, 15 bp, Homo sapiens
gctgggtgcggtggc

SEQ ID NO: 103213 - DNA, 15 bp, Homo sapiens
agctgggtgcggtgg

SEQ ID NO: 103214 - DNA, 15 bp, Homo sapiens
aagctgggtgcggtg

SEQ ID NO: 103215 - DNA, 15 bp, Homo sapiens
taagctgggtgcggt

SEQ ID NO: 103216 - DNA, 15 bp, Homo sapiens
ttaagctgggtgcgg

SEQ ID NO: 103217 - DNA, 15 bp, Homo sapiens
cttaagctgggtgcg

SEQ ID NO: 103218 - DNA, 15 bp, Homo sapiens
tcttaagctgggtgc

SEQ ID NO: 103219 - DNA, 15 bp, Homo sapiens
atcttaagctgggtg

SEQ ID NO: 103220 - DNA, 15 bp, Homo sapiens
aatcttaagctgggt

SEQ ID NO: 103221 - DNA, 15 bp, Homo sapiens
aaatcttaagctggg

SEQ ID NO: 103222 - DNA, 15 bp, Homo sapiens
gaaatcttaagctgg

SEQ ID NO: 103223 - DNA, 15 bp, Homo sapiens
tgaaatcttaagctg

SEQ ID NO: 103224 - DNA, 15 bp, Homo sapiens
atgaaatcttaagct

SEQ ID NO: 103225 - DNA, 15 bp, Homo sapiens
tatgaaatcttaagc

SEQ ID NO: 103226 - DNA, 15 bp, Homo sapiens
ttatgaaatcttaag

SEQ ID NO: 103227 - DNA, 15 bp, Homo sapiens
cttatgaaatcttaa

SEQ ID NO: 103228 - DNA, 15 bp, Homo sapiens
tcttatgaaatctta

SEQ ID NO: 103229 - DNA, 15 bp, Homo sapiens
ttcttatgaaatctt

SEQ ID NO: 103230 - DNA, 15 bp, Homo sapiens
tttcttatgaaatct

SEQ ID NO: 103231 - DNA, 15 bp, Homo sapiens
ttttcttatgaaatc

SEQ ID NO: 103232 - DNA, 15 bp, Homo sapiens
tttttcttatgaaat

SEQ ID NO: 103233 - DNA, 15 bp, Homo sapiens
atttttcttatgaaa

SEQ ID NO: 103234 - DNA, 15 bp, Homo sapiens
tatttttcttatgaa

SEQ ID NO: 103235 - DNA, 15 bp, Homo sapiens
atatttttcttatga

SEQ ID NO: 103236 - DNA, 15 bp, Homo sapiens
aatatttttcttatg

SEQ ID NO: 103237 - DNA, 15 bp, Homo sapiens
aaatatttttcttat

SEQ ID NO: 103238 - DNA, 15 bp, Homo sapiens
caaatatttttctta

SEQ ID NO: 103239 - DNA, 15 bp, Homo sapiens
acaaatatttttctt

SEQ ID NO: 103240 - DNA, 15 bp, Homo sapiens
tacaaatatttttct

SEQ ID NO: 103241 - DNA, 15 bp, Homo sapiens
ttacaaatatttttc

SEQ ID NO: 103242 - DNA, 15 bp, Homo sapiens
cttacaaatattttt

SEQ ID NO: 103243 - DNA, 15 bp, Homo sapiens
gcttacaaatatttt

SEQ ID NO: 103244 - DNA, 15 bp, Homo sapiens
ggcttacaaatattt

SEQ ID NO: 103245 - DNA, 15 bp, Homo sapiens
tggcttacaaatatt

SEQ ID NO: 103246 - DNA, 15 bp, Homo sapiens
gtggcttacaaatat

SEQ ID NO: 103247 - DNA, 15 bp, Homo sapiens
tgtggcttacaaata

SEQ ID NO: 103248 - DNA, 15 bp, Homo sapiens
atgtggcttacaaat

SEQ ID NO: 103249 - DNA, 15 bp, Homo sapiens
tatgtggcttacaaa

SEQ ID NO: 103250 - DNA, 15 bp, Homo sapiens
atatgtggcttacaa

SEQ ID NO: 103251 - DNA, 15 bp, Homo sapiens
gatatgtggcttaca

SEQ ID NO: 103252 - DNA, 15 bp, Homo sapiens
agatatgtggcttac

SEQ ID NO: 103253 - DNA, 15 bp, Homo sapiens
tagatatgtggctta

SEQ ID NO: 103254 - DNA, 15 bp, Homo sapiens
ttagatatgtggctt

SEQ ID NO: 103255 - DNA, 15 bp, Homo sapiens
attagatatgtggct

SEQ ID NO: 103256 - DNA, 15 bp, Homo sapiens
tattagatatgtggc

SEQ ID NO: 103257 - DNA, 15 bp, Homo sapiens
ttattagatatgtgg

SEQ ID NO: 103258 - DNA, 15 bp, Homo sapiens
gttattagatatgtg

SEQ ID NO: 103259 - DNA, 15 bp, Homo sapiens
ggttattagatatgt

SEQ ID NO: 103260 - DNA, 15 bp, Homo sapiens
cggttattagatatg

SEQ ID NO: 103261 - DNA, 15 bp, Homo sapiens
ccggttattagatat

SEQ ID NO: 103262 - DNA, 15 bp, Homo sapiens
accggttattagata

SEQ ID NO: 103263 - DNA, 15 bp, Homo sapiens
aaccggttattagat

SEQ ID NO: 103264 - DNA, 15 bp, Homo sapiens
taaccggttattaga

SEQ ID NO: 103265 - DNA, 15 bp, Homo sapiens
ttaaccggttattag

SEQ ID NO: 103266 - DNA, 15 bp, Homo sapiens
attaaccggttatta

SEQ ID NO: 103267 - DNA, 15 bp, Homo sapiens
tattaaccggttatt

SEQ ID NO: 103268 - DNA, 15 bp, Homo sapiens
atattaaccggttat

SEQ ID NO: 103269 - DNA, 15 bp, Homo sapiens
aatattaaccggtta

SEQ ID NO: 103270 - DNA, 15 bp, Homo sapiens
gaatattaaccggtt

SEQ ID NO: 103271 - DNA, 15 bp, Homo sapiens
tgaatattaaccggt

SEQ ID NO: 103272 - DNA, 15 bp, Homo sapiens
ctgaatattaaccgg

SEQ ID NO: 103273 - DNA, 15 bp, Homo sapiens
cctgaatattaaccg

SEQ ID NO: 103274 - DNA, 15 bp, Homo sapiens
gcctgaatattaacc

SEQ ID NO: 103275 - DNA, 15 bp, Homo sapiens
agcctgaatattaac

SEQ ID NO: 103276 - DNA, 15 bp, Homo sapiens
cagcctgaatattaa

SEQ ID NO: 103277 - DNA, 15 bp, Homo sapiens
ccagcctgaatatta

SEQ ID NO: 103278 - DNA, 15 bp, Homo sapiens
cccagcctgaatatt

SEQ ID NO: 103279 - DNA, 15 bp, Homo sapiens
acccagcctgaatat

SEQ ID NO: 103280 - DNA, 15 bp, Homo sapiens
cacccagcctgaata

SEQ ID NO: 103281 - DNA, 15 bp, Homo sapiens
tcacccagcctgaat

SEQ ID NO: 103282 - DNA, 15 bp, Homo sapiens
ttcacccagcctgaa

SEQ ID NO: 103283 - DNA, 15 bp, Homo sapiens
cttcacccagcctga

SEQ ID NO: 103284 - DNA, 15 bp, Homo sapiens
acttcacccagcctg

SEQ ID NO: 103285 - DNA, 15 bp, Homo sapiens
cacttcacccagcct

SEQ ID NO: 103286 - DNA, 15 bp, Homo sapiens
ccacttcacccagcc

SEQ ID NO: 103287 - DNA, 15 bp, Homo sapiens
gccacttcacccagc

SEQ ID NO: 103288 - DNA, 15 bp, Homo sapiens
agccacttcacccag

SEQ ID NO: 103289 - DNA, 15 bp, Homo sapiens
gagccacttcaccca

SEQ ID NO: 103290 - DNA, 15 bp, Homo sapiens
tgagccacttcaccc

SEQ ID NO: 103291 - DNA, 15 bp, Homo sapiens
atgagccacttcacc

SEQ ID NO: 103292 - DNA, 15 bp, Homo sapiens
catgagccacttcac

SEQ ID NO: 103293 - DNA, 15 bp, Homo sapiens
gcatgagccacttca

SEQ ID NO: 103294 - DNA, 15 bp, Homo sapiens
ggcatgagccacttc

SEQ ID NO: 103295 - DNA, 15 bp, Homo sapiens
aggcatgagccactt

SEQ ID NO: 103296 - DNA, 15 bp, Homo sapiens
caggcatgagccact

SEQ ID NO: 103297 - DNA, 15 bp, Homo sapiens
ttcccaaagtgctgg

SEQ ID NO: 103298 - DNA, 15 bp, Homo sapiens
cttcccaaagtgctg

SEQ ID NO: 103299 - DNA, 15 bp, Homo sapiens
tcttcccaaagtgct

SEQ ID NO: 103300 - DNA, 15 bp, Homo sapiens
gtcttcccaaagtgc

SEQ ID NO: 103301 - DNA, 15 bp, Homo sapiens
tgtcttcccaaagtg

SEQ ID NO: 103302 - DNA, 15 bp, Homo sapiens
ttgtcttcccaaagt

SEQ ID NO: 103303 - DNA, 15 bp, Homo sapiens
cttgtcttcccaaag

SEQ ID NO: 103304 - DNA, 15 bp, Homo sapiens
ccttgtcttcccaaa

SEQ ID NO: 103305 - DNA, 15 bp, Homo sapiens
gccttgtcttcccaa

SEQ ID NO: 103306 - DNA, 15 bp, Homo sapiens
cgccttgtcttccca

SEQ ID NO: 103307 - DNA, 15 bp, Homo sapiens
ccgccttgtcttccc

SEQ ID NO: 103308 - DNA, 15 bp, Homo sapiens
cccgccttgtcttcc

SEQ ID NO: 103309 - DNA, 15 bp, Homo sapiens
gcccgccttgtcttc

SEQ ID NO: 103310 - DNA, 15 bp, Homo sapiens
cgcccgccttgtctt

SEQ ID NO: 103311 - DNA, 15 bp, Homo sapiens
ccgcccgccttgtct

SEQ ID NO: 103312 - DNA, 15 bp, Homo sapiens
tccgcccgccttgtc

SEQ ID NO: 103313 - DNA, 15 bp, Homo sapiens
atccgcccgccttgt

SEQ ID NO: 103314 - DNA, 15 bp, Homo sapiens
aatccgcccgccttg

SEQ ID NO: 103315 - DNA, 15 bp, Homo sapiens
taatccgcccgcctt

SEQ ID NO: 103316 - DNA, 15 bp, Homo sapiens
gtaatccgcccgcct

SEQ ID NO: 103317 - DNA, 15 bp, Homo sapiens
ggtaatccgcccgcc

SEQ ID NO: 103318 - DNA, 15 bp, Homo sapiens
aggtaatccgcccgc

SEQ ID NO: 103319 - DNA, 15 bp, Homo sapiens
caggtaatccgcccg

SEQ ID NO: 103320 - DNA, 15 bp, Homo sapiens
tcaggtaatccgccc

SEQ ID NO: 103321 - DNA, 15 bp, Homo sapiens
ttcaggtaatccgcc

SEQ ID NO: 103322 - DNA, 15 bp, Homo sapiens
cttcaggtaatccgc

SEQ ID NO: 103323 - DNA, 15 bp, Homo sapiens
acttcaggtaatccg

SEQ ID NO: 103324 - DNA, 15 bp, Homo sapiens
gacttcaggtaatcc

SEQ ID NO: 103325 - DNA, 15 bp, Homo sapiens
tgacttcaggtaatc

SEQ ID NO: 103326 - DNA, 15 bp, Homo sapiens
ttgacttcaggtaat

SEQ ID NO: 103327 - DNA, 15 bp, Homo sapiens
tttgacttcaggtaa

SEQ ID NO: 103328 - DNA, 15 bp, Homo sapiens
ttttgacttcaggta

SEQ ID NO: 103329 - DNA, 15 bp, Homo sapiens
cttttgacttcaggt

SEQ ID NO: 103330 - DNA, 15 bp, Homo sapiens
acttttgacttcagg

SEQ ID NO: 103331 - DNA, 15 bp, Homo sapiens
aacttttgacttcag

SEQ ID NO: 103332 - DNA, 15 bp, Homo sapiens
aaacttttgacttca

SEQ ID NO: 103333 - DNA, 15 bp, Homo sapiens
caaacttttgacttc

SEQ ID NO: 103334 - DNA, 15 bp, Homo sapiens
tcaaacttttgactt

SEQ ID NO: 103335 - DNA, 15 bp, Homo sapiens
ctcaaacttttgact

SEQ ID NO: 103336 - DNA, 15 bp, Homo sapiens
tctcaaacttttgac

SEQ ID NO: 103337 - DNA, 15 bp, Homo sapiens
gtctcaaacttttga

SEQ ID NO: 103338 - DNA, 15 bp, Homo sapiens
ggtctcaaacttttg

SEQ ID NO: 103339 - DNA, 15 bp, Homo sapiens
aggtctcaaactttt

SEQ ID NO: 103340 - DNA, 15 bp, Homo sapiens
caggtctcaaacttt

SEQ ID NO: 103341 - DNA, 15 bp, Homo sapiens
gcaggtctcaaactt

SEQ ID NO: 103342 - DNA, 15 bp, Homo sapiens
ggcaggtctcaaact

SEQ ID NO: 103343 - DNA, 15 bp, Homo sapiens
aggcaggtctcaaac

SEQ ID NO: 103344 - DNA, 15 bp, Homo sapiens
caggcaggtctcaaa

SEQ ID NO: 103345 - DNA, 15 bp, Homo sapiens
ccaggcaggtctcaa

SEQ ID NO: 103346 - DNA, 15 bp, Homo sapiens
gccaggcaggtctca

SEQ ID NO: 103347 - DNA, 15 bp, Homo sapiens
ggccaggcaggtctc

SEQ ID NO: 103348 - DNA, 15 bp, Homo sapiens
tggccaggcaggtct

SEQ ID NO: 103349 - DNA, 15 bp, Homo sapiens
ttggccaggcaggtc

SEQ ID NO: 103350 - DNA, 15 bp, Homo sapiens
gttggccaggcaggt

SEQ ID NO: 103351 - DNA, 15 bp, Homo sapiens
tgttggccaggcagg

SEQ ID NO: 103352 - DNA, 15 bp, Homo sapiens
atgttggccaggcag

SEQ ID NO: 103353 - DNA, 15 bp, Homo sapiens
catgttggccaggca

SEQ ID NO: 103354 - DNA, 15 bp, Homo sapiens
gggtttcaccatgtt

SEQ ID NO: 103355 - DNA, 15 bp, Homo sapiens
agggtttcaccatgt

SEQ ID NO: 103356 - DNA, 15 bp, Homo sapiens
cagggtttcaccatg

SEQ ID NO: 103357 - DNA, 15 bp, Homo sapiens
acagggtttcaccat

SEQ ID NO: 103358 - DNA, 15 bp, Homo sapiens
gacagggtttcacca

SEQ ID NO: 103359 - DNA, 15 bp, Homo sapiens
agacagggtttcacc

SEQ ID NO: 103360 - DNA, 15 bp, Homo sapiens
gagacagggtttcac

SEQ ID NO: 103361 - DNA, 15 bp, Homo sapiens
agagacagggtttca

SEQ ID NO: 103362 - DNA, 15 bp, Homo sapiens
cggctaatttttttg

SEQ ID NO: 103363 - DNA, 15 bp, Homo sapiens
ccggctaattttttt

SEQ ID NO: 103364 - DNA, 15 bp, Homo sapiens
cccggctaatttttt

SEQ ID NO: 103365 - DNA, 15 bp, Homo sapiens
acccggctaattttt

SEQ ID NO: 103366 - DNA, 15 bp, Homo sapiens
ccacccggctaattt

SEQ ID NO: 103367 - DNA, 15 bp, Homo sapiens
cccacccggctaatt

SEQ ID NO: 103368 - DNA, 15 bp, Homo sapiens
ccccacccggctaat

SEQ ID NO: 103369 - DNA, 15 bp, Homo sapiens
accccacccggctaa

SEQ ID NO: 103370 - DNA, 15 bp, Homo sapiens
caccccacccggcta

SEQ ID NO: 103371 - DNA, 15 bp, Homo sapiens
ccaccccacccggct

SEQ ID NO: 103372 - DNA, 15 bp, Homo sapiens
gccaccccacccggc

SEQ ID NO: 103373 - DNA, 15 bp, Homo sapiens
tgccaccccacccgg

SEQ ID NO: 103374 - DNA, 15 bp, Homo sapiens
gtgccaccccacccg

SEQ ID NO: 103375 - DNA, 15 bp, Homo sapiens
tgtgccaccccaccc

SEQ ID NO: 103376 - DNA, 15 bp, Homo sapiens
atgtgccaccccacc

SEQ ID NO: 103377 - DNA, 15 bp, Homo sapiens
catgtgccaccccac

SEQ ID NO: 103378 - DNA, 15 bp, Homo sapiens
gcatgtgccacccca

SEQ ID NO: 103379 - DNA, 15 bp, Homo sapiens
ggcatgtgccacccc

SEQ ID NO: 103380 - DNA, 15 bp, Homo sapiens
aggcatgtgccaccc

SEQ ID NO: 103381 - DNA, 15 bp, Homo sapiens
caggcatgtgccacc

SEQ ID NO: 103382 - DNA, 15 bp, Homo sapiens
acaggcatgtgccac

SEQ ID NO: 103383 - DNA, 15 bp, Homo sapiens
tacaggcatgtgcca

SEQ ID NO: 103384 - DNA, 15 bp, Homo sapiens
ttacaggcatgtgcc

SEQ ID NO: 103385 - DNA, 15 bp, Homo sapiens
attacaggcatgtgc

SEQ ID NO: 103386 - DNA, 15 bp, Homo sapiens
gattacaggcatgtg

SEQ ID NO: 103387 - DNA, 15 bp, Homo sapiens
ggattacaggcatgt

SEQ ID NO: 103388 - DNA, 15 bp, Homo sapiens
cagctgggattacag

SEQ ID NO: 103389 - DNA, 15 bp, Homo sapiens
gcagctgggattaca

SEQ ID NO: 103390 - DNA, 15 bp, Homo sapiens
agcagctgggattac

SEQ ID NO: 103391 - DNA, 15 bp, Homo sapiens
aagcagctgggatta

SEQ ID NO: 103392 - DNA, 15 bp, Homo sapiens
caagcagctgggatt

SEQ ID NO: 103393 - DNA, 15 bp, Homo sapiens
ccaagcagctgggat

SEQ ID NO: 103394 - DNA, 15 bp, Homo sapiens
cccaagcagctggga

SEQ ID NO: 103395 - DNA, 15 bp, Homo sapiens
tcccaagcagctggg

SEQ ID NO: 103396 - DNA, 15 bp, Homo sapiens
ctcccaagcagctgg

SEQ ID NO: 103397 - DNA, 15 bp, Homo sapiens
cctcccaagcagctg

SEQ ID NO: 103398 - DNA, 15 bp, Homo sapiens
gcctcccaagcagct

SEQ ID NO: 103399 - DNA, 15 bp, Homo sapiens
agcctcccaagcagc

SEQ ID NO: 103400 - DNA, 15 bp, Homo sapiens
cagcctcccaagcag

SEQ ID NO: 103401 - DNA, 15 bp, Homo sapiens
tcagcctcccaagca

SEQ ID NO: 103402 - DNA, 15 bp, Homo sapiens
ctcagcctcccaagc

SEQ ID NO: 103403 - DNA, 15 bp, Homo sapiens
ttgcctcagcctccc

SEQ ID NO: 103404 - DNA, 15 bp, Homo sapiens
cttgcctcagcctcc

SEQ ID NO: 103405 - DNA, 15 bp, Homo sapiens
tcttgcctcagcctc

SEQ ID NO: 103406 - DNA, 15 bp, Homo sapiens
ctcttgcctcagcct

SEQ ID NO: 103407 - DNA, 15 bp, Homo sapiens
tctcttgcctcagcc

SEQ ID NO: 103408 - DNA, 15 bp, Homo sapiens
ttctcttgcctcagc

SEQ ID NO: 103409 - DNA, 15 bp, Homo sapiens
attctcttgcctcag

SEQ ID NO: 103410 - DNA, 15 bp, Homo sapiens
gattctcttgcctca

SEQ ID NO: 103411 - DNA, 15 bp, Homo sapiens
ggattctcttgcctc

SEQ ID NO: 103412 - DNA, 15 bp, Homo sapiens
gggattctcttgcct

SEQ ID NO: 103413 - DNA, 15 bp, Homo sapiens
agggattctcttgcc

SEQ ID NO: 103414 - DNA, 15 bp, Homo sapiens
aagggattctcttgc

SEQ ID NO: 103415 - DNA, 15 bp, Homo sapiens
caagggattctcttg

SEQ ID NO: 103416 - DNA, 15 bp, Homo sapiens
tcaagggattctctt

SEQ ID NO: 103417 - DNA, 15 bp, Homo sapiens
ttcaagggattctct

SEQ ID NO: 103418 - DNA, 15 bp, Homo sapiens
gttcaagggattctc

SEQ ID NO: 103419 - DNA, 15 bp, Homo sapiens
ggttcaagggattct

SEQ ID NO: 103420 - DNA, 15 bp, Homo sapiens
gggttcaagggattc

SEQ ID NO: 103421 - DNA, 15 bp, Homo sapiens
tgggttcaagggatt

SEQ ID NO: 103422 - DNA, 15 bp, Homo sapiens
ctgggttcaagggat

SEQ ID NO: 103423 - DNA, 15 bp, Homo sapiens
cctgggttcaaggga

SEQ ID NO: 103424 - DNA, 15 bp, Homo sapiens
tcctgggttcaaggg

SEQ ID NO: 103425 - DNA, 15 bp, Homo sapiens
ctcctgggttcaagg

SEQ ID NO: 103426 - DNA, 15 bp, Homo sapiens
actcctgggttcaag

SEQ ID NO: 103427 - DNA, 15 bp, Homo sapiens
gactcctgggttcaa

SEQ ID NO: 103428 - DNA, 15 bp, Homo sapiens
cgactcctgggttca

SEQ ID NO: 103429 - DNA, 15 bp, Homo sapiens
tcgactcctgggttc

SEQ ID NO: 103430 - DNA, 15 bp, Homo sapiens
ttcgactcctgggtt

SEQ ID NO: 103431 - DNA, 15 bp, Homo sapiens
cttcgactcctgggt

SEQ ID NO: 103432 - DNA, 15 bp, Homo sapiens
ccttcgactcctggg

SEQ ID NO: 103433 - DNA, 15 bp, Homo sapiens
accttcgactcctgg

SEQ ID NO: 103434 - DNA, 15 bp, Homo sapiens
aaccttcgactcctg

SEQ ID NO: 103435 - DNA, 15 bp, Homo sapiens
caaccttcgactcct

SEQ ID NO: 103436 - DNA, 15 bp, Homo sapiens
gcaaccttcgactcc

SEQ ID NO: 103437 - DNA, 15 bp, Homo sapiens
tgcaaccttcgactc

SEQ ID NO: 103438 - DNA, 15 bp, Homo sapiens
ctgcaaccttcgact

SEQ ID NO: 103439 - DNA, 15 bp, Homo sapiens
actgcaaccttcgac

SEQ ID NO: 103440 - DNA, 15 bp, Homo sapiens
cactgcaaccttcga

SEQ ID NO: 103441 - DNA, 15 bp, Homo sapiens
tcactgcaaccttcg

SEQ ID NO: 103442 - DNA, 15 bp, Homo sapiens
ctcactgcaaccttc

SEQ ID NO: 103443 - DNA, 15 bp, Homo sapiens
gctcactgcaacctt

SEQ ID NO: 103444 - DNA, 15 bp, Homo sapiens
tggctcactgcaacc

SEQ ID NO: 103445 - DNA, 15 bp, Homo sapiens
ttggctcactgcaac

SEQ ID NO: 103446 - DNA, 15 bp, Homo sapiens
cttggctcactgcaa

SEQ ID NO: 103447 - DNA, 15 bp, Homo sapiens
tcttggctcactgca

SEQ ID NO: 103448 - DNA, 15 bp, Homo sapiens
atcttggctcactgc

SEQ ID NO: 103449 - DNA, 15 bp, Homo sapiens
catcttggctcactg

SEQ ID NO: 103450 - DNA, 15 bp, Homo sapiens
ccatcttggctcact

SEQ ID NO: 103451 - DNA, 15 bp, Homo sapiens
gccatcttggctcac

SEQ ID NO: 103452 - DNA, 15 bp, Homo sapiens
cgccatcttggctca

SEQ ID NO: 103453 - DNA, 15 bp, Homo sapiens
gcgccatcttggctc

SEQ ID NO: 103454 - DNA, 15 bp, Homo sapiens
ggcgccatcttggct

SEQ ID NO: 103455 - DNA, 15 bp, Homo sapiens
tggcgccatcttggc

SEQ ID NO: 103456 - DNA, 15 bp, Homo sapiens
gtggcgccatcttgg

SEQ ID NO: 103457 - DNA, 15 bp, Homo sapiens
agtggcgccatcttg

SEQ ID NO: 103458 - DNA, 15 bp, Homo sapiens
cagtggcgccatctt

SEQ ID NO: 103459 - DNA, 15 bp, Homo sapiens
gcagtggcgccatct

SEQ ID NO: 103460 - DNA, 15 bp, Homo sapiens
ggcagtggcgccatc

SEQ ID NO: 103461 - DNA, 15 bp, Homo sapiens
gggcagtggcgccat

SEQ ID NO: 103462 - DNA, 15 bp, Homo sapiens
agggcagtggcgcca

SEQ ID NO: 103463 - DNA, 15 bp, Homo sapiens
gagggcagtggcgcc

SEQ ID NO: 103464 - DNA, 15 bp, Homo sapiens
ggagggcagtggcgc

SEQ ID NO: 103465 - DNA, 15 bp, Homo sapiens
tggagggcagtggcg

SEQ ID NO: 103466 - DNA, 15 bp, Homo sapiens
ctggagggcagtggc

SEQ ID NO: 103467 - DNA, 15 bp, Homo sapiens
gctggagggcagtgg

SEQ ID NO: 103468 - DNA, 15 bp, Homo sapiens
ggctggagggcagtg

SEQ ID NO: 103469 - DNA, 15 bp, Homo sapiens
aggctggagggcagt

SEQ ID NO: 103470 - DNA, 15 bp, Homo sapiens
caggctggagggcag

SEQ ID NO: 103471 - DNA, 15 bp, Homo sapiens
ccaggctggagggca

SEQ ID NO: 103472 - DNA, 15 bp, Homo sapiens
cccaggctggagggc

SEQ ID NO: 103473 - DNA, 15 bp, Homo sapiens
tcccaggctggaggg

SEQ ID NO: 103474 - DNA, 15 bp, Homo sapiens
ctcccaggctggagg

SEQ ID NO: 103475 - DNA, 15 bp, Homo sapiens
tctcccaggctggag

SEQ ID NO: 103476 - DNA, 15 bp, Homo sapiens
gtctcccaggctgga

SEQ ID NO: 103477 - DNA, 15 bp, Homo sapiens
tgtctcccaggctgg

SEQ ID NO: 103478 - DNA, 15 bp, Homo sapiens
ctgtctcccaggctg

SEQ ID NO: 103479 - DNA, 15 bp, Homo sapiens
tctgtctcccaggct

SEQ ID NO: 103480 - DNA, 15 bp, Homo sapiens
ctctgtctcccaggc

SEQ ID NO: 103481 - DNA, 15 bp, Homo sapiens
actctgtctcccagg

SEQ ID NO: 103482 - DNA, 15 bp, Homo sapiens
cactctgtctcccag

SEQ ID NO: 103483 - DNA, 15 bp, Homo sapiens
ccactctgtctccca

SEQ ID NO: 103484 - DNA, 15 bp, Homo sapiens
cccactctgtctccc

SEQ ID NO: 103485 - DNA, 15 bp, Homo sapiens
tcccactctgtctcc

SEQ ID NO: 103486 - DNA, 15 bp, Homo sapiens
gtcccactctgtctc

SEQ ID NO: 103487 - DNA, 15 bp, Homo sapiens
agtcccactctgtct

SEQ ID NO: 103488 - DNA, 15 bp, Homo sapiens
gagtcccactctgtc

SEQ ID NO: 103489 - DNA, 15 bp, Homo sapiens
ggagtcccactctgt

SEQ ID NO: 103490 - DNA, 15 bp, Homo sapiens
tggagtcccactctg

SEQ ID NO: 103491 - DNA, 15 bp, Homo sapiens
atggagtcccactct

SEQ ID NO: 103492 - DNA, 15 bp, Homo sapiens
gatggagtcccactc

SEQ ID NO: 103493 - DNA, 15 bp, Homo sapiens
agatggagtcccact

SEQ ID NO: 103494 - DNA, 15 bp, Homo sapiens
gagatggagtcccac

SEQ ID NO: 103495 - DNA, 15 bp, Homo sapiens
tgagatggagtccca

SEQ ID NO: 103496 - DNA, 15 bp, Homo sapiens
ttgagatggagtccc

SEQ ID NO: 103497 - DNA, 15 bp, Homo sapiens
tttgagatggagtcc

SEQ ID NO: 103498 - DNA, 15 bp, Homo sapiens
gaatttttttttttt

SEQ ID NO: 103499 - DNA, 15 bp, Homo sapiens
tgaattttttttttt

SEQ ID NO: 103500 - DNA, 15 bp, Homo sapiens
ttgaatttttttttt

SEQ ID NO: 103501 - DNA, 15 bp, Homo sapiens
tttgaattttttttt

SEQ ID NO: 103502 - DNA, 15 bp, Homo sapiens
ttttgaatttttttt

SEQ ID NO: 103503 - DNA, 15 bp, Homo sapiens
attttgaattttttt

SEQ ID NO: 103504 - DNA, 15 bp, Homo sapiens
cattttgaatttttt

SEQ ID NO: 103505 - DNA, 15 bp, Homo sapiens
acattttgaattttt

SEQ ID NO: 103506 - DNA, 15 bp, Homo sapiens
tacattttgaatttt

SEQ ID NO: 103507 - DNA, 15 bp, Homo sapiens
atacattttgaattt

SEQ ID NO: 103508 - DNA, 15 bp, Homo sapiens
tatacattttgaatt

SEQ ID NO: 103509 - DNA, 15 bp, Homo sapiens
ttatacattttgaat

SEQ ID NO: 103510 - DNA, 15 bp, Homo sapiens
attatacattttgaa

SEQ ID NO: 103511 - DNA, 15 bp, Homo sapiens
tattatacattttga

SEQ ID NO: 103512 - DNA, 15 bp, Homo sapiens
atattatacattttg

SEQ ID NO: 103513 - DNA, 15 bp, Homo sapiens
tatattatacatttt

SEQ ID NO: 103514 - DNA, 15 bp, Homo sapiens
gtatattatacattt

SEQ ID NO: 103515 - DNA, 15 bp, Homo sapiens
tgtatattatacatt

SEQ ID NO: 103516 - DNA, 15 bp, Homo sapiens
ttgtatattatacat

SEQ ID NO: 103517 - DNA, 15 bp, Homo sapiens
attgtatattataca

SEQ ID NO: 103518 - DNA, 15 bp, Homo sapiens
gattgtatattatac

SEQ ID NO: 103519 - DNA, 15 bp, Homo sapiens
ggattgtatattata

SEQ ID NO: 103520 - DNA, 15 bp, Homo sapiens
aggattgtatattat

SEQ ID NO: 103521 - DNA, 15 bp, Homo sapiens
taggattgtatatta

SEQ ID NO: 103522 - DNA, 15 bp, Homo sapiens
ctaggattgtatatt

SEQ ID NO: 103523 - DNA, 15 bp, Homo sapiens
actaggattgtatat

SEQ ID NO: 103524 - DNA, 15 bp, Homo sapiens
aactaggattgtata

SEQ ID NO: 103525 - DNA, 15 bp, Homo sapiens
caactaggattgtat

SEQ ID NO: 103526 - DNA, 15 bp, Homo sapiens
ccaactaggattgta

SEQ ID NO: 103527 - DNA, 15 bp, Homo sapiens
cccaactaggattgt

SEQ ID NO: 103528 - DNA, 15 bp, Homo sapiens
tcccaactaggattg

SEQ ID NO: 103529 - DNA, 15 bp, Homo sapiens
gtcccaactaggatt

SEQ ID NO: 103530 - DNA, 15 bp, Homo sapiens
tgtcccaactaggat

SEQ ID NO: 103531 - DNA, 15 bp, Homo sapiens
atgtcccaactagga

SEQ ID NO: 103532 - DNA, 15 bp, Homo sapiens
gatgtcccaactagg

SEQ ID NO: 103533 - DNA, 15 bp, Homo sapiens
tgatgtcccaactag

SEQ ID NO: 103534 - DNA, 15 bp, Homo sapiens
ttgatgtcccaacta

SEQ ID NO: 103535 - DNA, 15 bp, Homo sapiens
tttgatgtcccaact

SEQ ID NO: 103536 - DNA, 15 bp, Homo sapiens
gtttgatgtcccaac

SEQ ID NO: 103537 - DNA, 15 bp, Homo sapiens
tgtttgatgtcccaa

SEQ ID NO: 103538 - DNA, 15 bp, Homo sapiens
gtgtttgatgtccca

SEQ ID NO: 103539 - DNA, 15 bp, Homo sapiens
agtgtttgatgtccc

SEQ ID NO: 103540 - DNA, 15 bp, Homo sapiens
cagtgtttgatgtcc

SEQ ID NO: 103541 - DNA, 15 bp, Homo sapiens
gcagtgtttgatgtc

SEQ ID NO: 103542 - DNA, 15 bp, Homo sapiens
tgcagtgtttgatgt

SEQ ID NO: 103543 - DNA, 15 bp, Homo sapiens
ctgcagtgtttgatg

SEQ ID NO: 103544 - DNA, 15 bp, Homo sapiens
gctgcagtgtttgat

SEQ ID NO: 103545 - DNA, 15 bp, Homo sapiens
ggctgcagtgtttga

SEQ ID NO: 103546 - DNA, 15 bp, Homo sapiens
tggctgcagtgtttg

SEQ ID NO: 103547 - DNA, 15 bp, Homo sapiens
gtggctgcagtgttt

SEQ ID NO: 103548 - DNA, 15 bp, Homo sapiens
agtggctgcagtgtt

SEQ ID NO: 103549 - DNA, 15 bp, Homo sapiens
cagtggctgcagtgt

SEQ ID NO: 103550 - DNA, 15 bp, Homo sapiens
acagtggctgcagtg

SEQ ID NO: 103551 - DNA, 15 bp, Homo sapiens
cacagtggctgcagt

SEQ ID NO: 103552 - DNA, 15 bp, Homo sapiens
ccacagtggctgcag

SEQ ID NO: 103553 - DNA, 15 bp, Homo sapiens
tccacagtggctgca

SEQ ID NO: 103554 - DNA, 15 bp, Homo sapiens
ttccacagtggctgc

SEQ ID NO: 103555 - DNA, 15 bp, Homo sapiens
tttccacagtggctg

SEQ ID NO: 103556 - DNA, 15 bp, Homo sapiens
ttttccacagtggct

SEQ ID NO: 103557 - DNA, 15 bp, Homo sapiens
gttttccacagtggc

SEQ ID NO: 103558 - DNA, 15 bp, Homo sapiens
tgttttccacagtgg

SEQ ID NO: 103559 - DNA, 15 bp, Homo sapiens
ctgttttccacagtg

SEQ ID NO: 103560 - DNA, 15 bp, Homo sapiens
actgttttccacagt

SEQ ID NO: 103561 - DNA, 15 bp, Homo sapiens
tactgttttccacag

SEQ ID NO: 103562 - DNA, 15 bp, Homo sapiens
atactgttttccaca

SEQ ID NO: 103563 - DNA, 15 bp, Homo sapiens
catactgttttccac

SEQ ID NO: 103564 - DNA, 15 bp, Homo sapiens
ccatactgttttcca

SEQ ID NO: 103565 - DNA, 15 bp, Homo sapiens
cccatactgttttcc

SEQ ID NO: 103566 - DNA, 15 bp, Homo sapiens
ccccatactgttttc

SEQ ID NO: 103567 - DNA, 15 bp, Homo sapiens
accccatactgtttt

SEQ ID NO: 103568 - DNA, 15 bp, Homo sapiens
aaccccatactgttt

SEQ ID NO: 103569 - DNA, 15 bp, Homo sapiens
aaaccccatactgtt

SEQ ID NO: 103570 - DNA, 15 bp, Homo sapiens
gaaaccccatactgt

SEQ ID NO: 103571 - DNA, 15 bp, Homo sapiens
ggaaaccccatactg

SEQ ID NO: 103572 - DNA, 15 bp, Homo sapiens
aggaaaccccatact

SEQ ID NO: 103573 - DNA, 15 bp, Homo sapiens
gaggaaaccccatac

SEQ ID NO: 103574 - DNA, 15 bp, Homo sapiens
tgaggaaaccccata

SEQ ID NO: 103575 - DNA, 15 bp, Homo sapiens
ttgaggaaaccccat

SEQ ID NO: 103576 - DNA, 15 bp, Homo sapiens
tttgaggaaacccca

SEQ ID NO: 103577 - DNA, 15 bp, Homo sapiens
ttttgaggaaacccc

SEQ ID NO: 103578 - DNA, 15 bp, Homo sapiens
gttttgaggaaaccc

SEQ ID NO: 103579 - DNA, 15 bp, Homo sapiens
tgttttgaggaaacc

SEQ ID NO: 103580 - DNA, 15 bp, Homo sapiens
atgttttgaggaaac

SEQ ID NO: 103581 - DNA, 15 bp, Homo sapiens
aatgttttgaggaaa

SEQ ID NO: 103582 - DNA, 15 bp, Homo sapiens
taatgttttgaggaa

SEQ ID NO: 103583 - DNA, 15 bp, Homo sapiens
ttaatgttttgagga

SEQ ID NO: 103584 - DNA, 15 bp, Homo sapiens
tttaatgttttgagg

SEQ ID NO: 103585 - DNA, 15 bp, Homo sapiens
ctttaatgttttgag

SEQ ID NO: 103586 - DNA, 15 bp, Homo sapiens
tctttaatgttttga

SEQ ID NO: 103587 - DNA, 15 bp, Homo sapiens
atctttaatgttttg

SEQ ID NO: 103588 - DNA, 15 bp, Homo sapiens
tatctttaatgtttt

SEQ ID NO: 103589 - DNA, 15 bp, Homo sapiens
ctatctttaatgttt

SEQ ID NO: 103590 - DNA, 15 bp, Homo sapiens
tctatctttaatgtt

SEQ ID NO: 103591 - DNA, 15 bp, Homo sapiens
ttctatctttaatgt

SEQ ID NO: 103592 - DNA, 15 bp, Homo sapiens
gttctatctttaatg

SEQ ID NO: 103593 - DNA, 15 bp, Homo sapiens
agttctatctttaat

SEQ ID NO: 103594 - DNA, 15 bp, Homo sapiens
gagttctatctttaa

SEQ ID NO: 103595 - DNA, 15 bp, Homo sapiens
agagttctatcttta

SEQ ID NO: 103596 - DNA, 15 bp, Homo sapiens
gagagttctatcttt

SEQ ID NO: 103597 - DNA, 15 bp, Homo sapiens
tgagagttctatctt

SEQ ID NO: 103598 - DNA, 15 bp, Homo sapiens
ttgagagttctatct

SEQ ID NO: 103599 - DNA, 15 bp, Homo sapiens
tttgagagttctatc

SEQ ID NO: 103600 - DNA, 15 bp, Homo sapiens
atttgagagttctat

SEQ ID NO: 103601 - DNA, 15 bp, Homo sapiens
catttgagagttcta

SEQ ID NO: 103602 - DNA, 15 bp, Homo sapiens
tcatttgagagttct

SEQ ID NO: 103603 - DNA, 15 bp, Homo sapiens
atcatttgagagttc

SEQ ID NO: 103604 - DNA, 15 bp, Homo sapiens
gatcatttgagagtt

SEQ ID NO: 103605 - DNA, 15 bp, Homo sapiens
ggatcatttgagagt

SEQ ID NO: 103606 - DNA, 15 bp, Homo sapiens
aggatcatttgagag

SEQ ID NO: 103607 - DNA, 15 bp, Homo sapiens
aaggatcatttgaga

SEQ ID NO: 103608 - DNA, 15 bp, Homo sapiens
gaaggatcatttgag

SEQ ID NO: 103609 - DNA, 15 bp, Homo sapiens
tgaaggatcatttga

SEQ ID NO: 103610 - DNA, 15 bp, Homo sapiens
ttgaaggatcatttg

SEQ ID NO: 103611 - DNA, 15 bp, Homo sapiens
attgaaggatcattt

SEQ ID NO: 103612 - DNA, 15 bp, Homo sapiens
gattgaaggatcatt

SEQ ID NO: 103613 - DNA, 15 bp, Homo sapiens
ggattgaaggatcat

SEQ ID NO: 103614 - DNA, 15 bp, Homo sapiens
gggattgaaggatca

SEQ ID NO: 103615 - DNA, 15 bp, Homo sapiens
tgggattgaaggatc

SEQ ID NO: 103616 - DNA, 15 bp, Homo sapiens
gtgggattgaaggat

SEQ ID NO: 103617 - DNA, 15 bp, Homo sapiens
agtgggattgaagga

SEQ ID NO: 103618 - DNA, 15 bp, Homo sapiens
aagtgggattgaagg

SEQ ID NO: 103619 - DNA, 15 bp, Homo sapiens
gaagtgggattgaag

SEQ ID NO: 103620 - DNA, 15 bp, Homo sapiens
agaagtgggattgaa

SEQ ID NO: 103621 - DNA, 15 bp, Homo sapiens
cagaagtgggattga

SEQ ID NO: 103622 - DNA, 15 bp, Homo sapiens
ccagaagtgggattg

SEQ ID NO: 103623 - DNA, 15 bp, Homo sapiens
cccagaagtgggatt

SEQ ID NO: 103624 - DNA, 15 bp, Homo sapiens
acccagaagtgggat

SEQ ID NO: 103625 - DNA, 15 bp, Homo sapiens
tacccagaagtggga

SEQ ID NO: 103626 - DNA, 15 bp, Homo sapiens
atacccagaagtggg

SEQ ID NO: 103627 - DNA, 15 bp, Homo sapiens
aatacccagaagtgg

SEQ ID NO: 103628 - DNA, 15 bp, Homo sapiens
aaatacccagaagtg

SEQ ID NO: 103629 - DNA, 15 bp, Homo sapiens
taaatacccagaagt

SEQ ID NO: 103630 - DNA, 15 bp, Homo sapiens
ataaatacccagaag

SEQ ID NO: 103631 - DNA, 15 bp, Homo sapiens
aataaatacccagaa

SEQ ID NO: 103632 - DNA, 15 bp, Homo sapiens
gaataaatacccaga

SEQ ID NO: 103633 - DNA, 15 bp, Homo sapiens
tgaataaatacccag

SEQ ID NO: 103634 - DNA, 15 bp, Homo sapiens
ttgaataaataccca

SEQ ID NO: 103635 - DNA, 15 bp, Homo sapiens
tttgaataaataccc

SEQ ID NO: 103636 - DNA, 15 bp, Homo sapiens
ttttgaataaatacc

SEQ ID NO: 103637 - DNA, 15 bp, Homo sapiens
cttttgaataaatac

SEQ ID NO: 103638 - DNA, 15 bp, Homo sapiens
tcttttgaataaata

SEQ ID NO: 103639 - DNA, 15 bp, Homo sapiens
ttcttttgaataaat

SEQ ID NO: 103640 - DNA, 15 bp, Homo sapiens
attcttttgaataaa

SEQ ID NO: 103641 - DNA, 15 bp, Homo sapiens
aattcttttgaataa

SEQ ID NO: 103642 - DNA, 15 bp, Homo sapiens
caattcttttgaata

SEQ ID NO: 103643 - DNA, 15 bp, Homo sapiens
tcaattcttttgaat

SEQ ID NO: 103644 - DNA, 15 bp, Homo sapiens
ttcaattcttttgaa

SEQ ID NO: 103645 - DNA, 15 bp, Homo sapiens
tttcaattcttttga

SEQ ID NO: 103646 - DNA, 15 bp, Homo sapiens
atttcaattcttttg

SEQ ID NO: 103647 - DNA, 15 bp, Homo sapiens
gatttcaattctttt

SEQ ID NO: 103648 - DNA, 15 bp, Homo sapiens
tgatttcaattcttt

SEQ ID NO: 103649 - DNA, 15 bp, Homo sapiens
ctgatttcaattctt

SEQ ID NO: 103650 - DNA, 15 bp, Homo sapiens
cctgatttcaattct

SEQ ID NO: 103651 - DNA, 15 bp, Homo sapiens
tcctgatttcaattc

SEQ ID NO: 103652 - DNA, 15 bp, Homo sapiens
gtcctgatttcaatt

SEQ ID NO: 103653 - DNA, 15 bp, Homo sapiens
ggtcctgatttcaat

SEQ ID NO: 103654 - DNA, 15 bp, Homo sapiens
aggtcctgatttcaa

SEQ ID NO: 103655 - DNA, 15 bp, Homo sapiens
aaggtcctgatttca

SEQ ID NO: 103656 - DNA, 15 bp, Homo sapiens
caaggtcctgatttc

SEQ ID NO: 103657 - DNA, 15 bp, Homo sapiens
tcaaggtcctgattt

SEQ ID NO: 103658 - DNA, 15 bp, Homo sapiens
ttcaaggtcctgatt

SEQ ID NO: 103659 - DNA, 15 bp, Homo sapiens
cttcaaggtcctgat

SEQ ID NO: 103660 - DNA, 15 bp, Homo sapiens
tcttcaaggtcctga

SEQ ID NO: 103661 - DNA, 15 bp, Homo sapiens
ctcttcaaggtcctg

SEQ ID NO: 103662 - DNA, 15 bp, Homo sapiens
tctcttcaaggtcct

SEQ ID NO: 103663 - DNA, 15 bp, Homo sapiens
atctcttcaaggtcc

SEQ ID NO: 103664 - DNA, 15 bp, Homo sapiens
tatctcttcaaggtc

SEQ ID NO: 103665 - DNA, 15 bp, Homo sapiens
gtatctcttcaaggt

SEQ ID NO: 103666 - DNA, 15 bp, Homo sapiens
ggtatctcttcaagg

SEQ ID NO: 103667 - DNA, 15 bp, Homo sapiens
aggtatctcttcaag

SEQ ID NO: 103668 - DNA, 15 bp, Homo sapiens
caggtatctcttcaa

SEQ ID NO: 103669 - DNA, 15 bp, Homo sapiens
gcaggtatctcttca

SEQ ID NO: 103670 - DNA, 15 bp, Homo sapiens
ggcaggtatctcttc

SEQ ID NO: 103671 - DNA, 15 bp, Homo sapiens
gggcaggtatctctt

SEQ ID NO: 103672 - DNA, 15 bp, Homo sapiens
agggcaggtatctct

SEQ ID NO: 103673 - DNA, 15 bp, Homo sapiens
gagggcaggtatctc

SEQ ID NO: 103674 - DNA, 15 bp, Homo sapiens
ggagggcaggtatct

SEQ ID NO: 103675 - DNA, 15 bp, Homo sapiens
gggagggcaggtatc

SEQ ID NO: 103676 - DNA, 15 bp, Homo sapiens
tgggagggcaggtat

SEQ ID NO: 103677 - DNA, 15 bp, Homo sapiens
atgggagggcaggta

SEQ ID NO: 103678 - DNA, 15 bp, Homo sapiens
catgggagggcaggt

SEQ ID NO: 103679 - DNA, 15 bp, Homo sapiens
acatgggagggcagg

SEQ ID NO: 103680 - DNA, 15 bp, Homo sapiens
aacatgggagggcag

SEQ ID NO: 103681 - DNA, 15 bp, Homo sapiens
gaacatgggagggca

SEQ ID NO: 103682 - DNA, 15 bp, Homo sapiens
tgaacatgggagggc

SEQ ID NO: 103683 - DNA, 15 bp, Homo sapiens
gtgaacatgggaggg

SEQ ID NO: 103684 - DNA, 15 bp, Homo sapiens
agtgaacatgggagg

SEQ ID NO: 103685 - DNA, 15 bp, Homo sapiens
cagtgaacatgggag

SEQ ID NO: 103686 - DNA, 15 bp, Homo sapiens
gcagtgaacatggga

SEQ ID NO: 103687 - DNA, 15 bp, Homo sapiens
tgcagtgaacatggg

SEQ ID NO: 103688 - DNA, 15 bp, Homo sapiens
ctgcagtgaacatgg

SEQ ID NO: 103689 - DNA, 15 bp, Homo sapiens
cctgcagtgaacatg

SEQ ID NO: 103690 - DNA, 15 bp, Homo sapiens
acctgcagtgaacat

SEQ ID NO: 103691 - DNA, 15 bp, Homo sapiens
gacctgcagtgaaca

SEQ ID NO: 103692 - DNA, 15 bp, Homo sapiens
agacctgcagtgaac

SEQ ID NO: 103693 - DNA, 15 bp, Homo sapiens
cagacctgcagtgaa

SEQ ID NO: 103694 - DNA, 15 bp, Homo sapiens
gcagacctgcagtga

SEQ ID NO: 103695 - DNA, 15 bp, Homo sapiens
agcagacctgcagtg

SEQ ID NO: 103696 - DNA, 15 bp, Homo sapiens
gagcagacctgcagt

SEQ ID NO: 103697 - DNA, 15 bp, Homo sapiens
tgagcagacctgcag

SEQ ID NO: 103698 - DNA, 15 bp, Homo sapiens
ttgagcagacctgca

SEQ ID NO: 103699 - DNA, 15 bp, Homo sapiens
attgagcagacctgc

SEQ ID NO: 103700 - DNA, 15 bp, Homo sapiens
tattgagcagacctg

SEQ ID NO: 103701 - DNA, 15 bp, Homo sapiens
gtattgagcagacct

SEQ ID NO: 103702 - DNA, 15 bp, Homo sapiens
ggtattgagcagacc

SEQ ID NO: 103703 - DNA, 15 bp, Homo sapiens
gggtattgagcagac

SEQ ID NO: 103704 - DNA, 15 bp, Homo sapiens
tgggtattgagcaga

SEQ ID NO: 103705 - DNA, 15 bp, Homo sapiens
ttgggtattgagcag

SEQ ID NO: 103706 - DNA, 15 bp, Homo sapiens
cttgggtattgagca

SEQ ID NO: 103707 - DNA, 15 bp, Homo sapiens
tcttgggtattgagc

SEQ ID NO: 103708 - DNA, 15 bp, Homo sapiens
atcttgggtattgag

SEQ ID NO: 103709 - DNA, 15 bp, Homo sapiens
tatcttgggtattga

SEQ ID NO: 103710 - DNA, 15 bp, Homo sapiens
atatcttgggtattg

SEQ ID NO: 103711 - DNA, 15 bp, Homo sapiens
catatcttgggtatt

SEQ ID NO: 103712 - DNA, 15 bp, Homo sapiens
ccatatcttgggtat

SEQ ID NO: 103713 - DNA, 15 bp, Homo sapiens
tccatatcttgggta

SEQ ID NO: 103714 - DNA, 15 bp, Homo sapiens
ttccatatcttgggt

SEQ ID NO: 103715 - DNA, 15 bp, Homo sapiens
tttccatatcttggg

SEQ ID NO: 103716 - DNA, 15 bp, Homo sapiens
gtttccatatcttgg

SEQ ID NO: 103717 - DNA, 15 bp, Homo sapiens
tgtttccatatcttg

SEQ ID NO: 103718 - DNA, 15 bp, Homo sapiens
ttgtttccatatctt

SEQ ID NO: 103719 - DNA, 15 bp, Homo sapiens
gttgtttccatatct

SEQ ID NO: 103720 - DNA, 15 bp, Homo sapiens
ggttgtttccatatc

SEQ ID NO: 103721 - DNA, 15 bp, Homo sapiens
aggttgtttccatat

SEQ ID NO: 103722 - DNA, 15 bp, Homo sapiens
taggttgtttccata

SEQ ID NO: 103723 - DNA, 15 bp, Homo sapiens
ttaggttgtttccat

SEQ ID NO: 103724 - DNA, 15 bp, Homo sapiens
tttaggttgtttcca

SEQ ID NO: 103725 - DNA, 15 bp, Homo sapiens
atttaggttgtttcc

SEQ ID NO: 103726 - DNA, 15 bp, Homo sapiens
catttaggttgtttc

SEQ ID NO: 103727 - DNA, 15 bp, Homo sapiens
acatttaggttgttt

SEQ ID NO: 103728 - DNA, 15 bp, Homo sapiens
aacatttaggttgtt

SEQ ID NO: 103729 - DNA, 15 bp, Homo sapiens
aaacatttaggttgt

SEQ ID NO: 103730 - DNA, 15 bp, Homo sapiens
taaacatttaggttg

SEQ ID NO: 103731 - DNA, 15 bp, Homo sapiens
ataaacatttaggtt

SEQ ID NO: 103732 - DNA, 15 bp, Homo sapiens
gataaacatttaggt

SEQ ID NO: 103733 - DNA, 15 bp, Homo sapiens
tgataaacatttagg

SEQ ID NO: 103734 - DNA, 15 bp, Homo sapiens
ttgataaacatttag

SEQ ID NO: 103735 - DNA, 15 bp, Homo sapiens
gttgataaacattta

SEQ ID NO: 103736 - DNA, 15 bp, Homo sapiens
tgttgataaacattt

SEQ ID NO: 103737 - DNA, 15 bp, Homo sapiens
ctgttgataaacatt

SEQ ID NO: 103738 - DNA, 15 bp, Homo sapiens
tctgttgataaacat

SEQ ID NO: 103739 - DNA, 15 bp, Homo sapiens
atctgttgataaaca

SEQ ID NO: 103740 - DNA, 15 bp, Homo sapiens
catctgttgataaac

SEQ ID NO: 103741 - DNA, 15 bp, Homo sapiens
tcatctgttgataaa

SEQ ID NO: 103742 - DNA, 15 bp, Homo sapiens
ttcatctgttgataa

SEQ ID NO: 103743 - DNA, 15 bp, Homo sapiens
attcatctgttgata

SEQ ID NO: 103744 - DNA, 15 bp, Homo sapiens
cattcatctgttgat

SEQ ID NO: 103745 - DNA, 15 bp, Homo sapiens
ccattcatctgttga

SEQ ID NO: 103746 - DNA, 15 bp, Homo sapiens
cccattcatctgttg

SEQ ID NO: 103747 - DNA, 15 bp, Homo sapiens
acccattcatctgtt

SEQ ID NO: 103748 - DNA, 15 bp, Homo sapiens
gacccattcatctgt

SEQ ID NO: 103749 - DNA, 15 bp, Homo sapiens
tgacccattcatctg

SEQ ID NO: 103750 - DNA, 15 bp, Homo sapiens
ttgacccattcatct

SEQ ID NO: 103751 - DNA, 15 bp, Homo sapiens
cttgacccattcatc

SEQ ID NO: 103752 - DNA, 15 bp, Homo sapiens
ccttgacccattcat

SEQ ID NO: 103753 - DNA, 15 bp, Homo sapiens
tccttgacccattca

SEQ ID NO: 103754 - DNA, 15 bp, Homo sapiens
ttccttgacccattc

SEQ ID NO: 103755 - DNA, 15 bp, Homo sapiens
tttccttgacccatt

SEQ ID NO: 103756 - DNA, 15 bp, Homo sapiens
atttccttgacccat

SEQ ID NO: 103757 - DNA, 15 bp, Homo sapiens
catttccttgaccca

SEQ ID NO: 103758 - DNA, 15 bp, Homo sapiens
acatttccttgaccc

SEQ ID NO: 103759 - DNA, 15 bp, Homo sapiens
cacatttccttgacc

SEQ ID NO: 103760 - DNA, 15 bp, Homo sapiens
ccacatttccttgac

SEQ ID NO: 103761 - DNA, 15 bp, Homo sapiens
accacatttccttga

SEQ ID NO: 103762 - DNA, 15 bp, Homo sapiens
gaccacatttccttg

SEQ ID NO: 103763 - DNA, 15 bp, Homo sapiens
agaccacatttcctt

SEQ ID NO: 103764 - DNA, 15 bp, Homo sapiens
gagaccacatttcct

SEQ ID NO: 103765 - DNA, 15 bp, Homo sapiens
agagaccacatttcc

SEQ ID NO: 103766 - DNA, 15 bp, Homo sapiens
tagagaccacatttc

SEQ ID NO: 103767 - DNA, 15 bp, Homo sapiens
gtagagaccacattt

SEQ ID NO: 103768 - DNA, 15 bp, Homo sapiens
tgtagagaccacatt

SEQ ID NO: 103769 - DNA, 15 bp, Homo sapiens
atgtagagaccacat

SEQ ID NO: 103770 - DNA, 15 bp, Homo sapiens
catgtagagaccaca

SEQ ID NO: 103771 - DNA, 15 bp, Homo sapiens
acatgtagagaccac

SEQ ID NO: 103772 - DNA, 15 bp, Homo sapiens
tacatgtagagacca

SEQ ID NO: 103773 - DNA, 15 bp, Homo sapiens
ttacatgtagagacc

SEQ ID NO: 103774 - DNA, 15 bp, Homo sapiens
attacatgtagagac

SEQ ID NO: 103775 - DNA, 15 bp, Homo sapiens
cattacatgtagaga

SEQ ID NO: 103776 - DNA, 15 bp, Homo sapiens
ccattacatgtagag

SEQ ID NO: 103777 - DNA, 15 bp, Homo sapiens
tccattacatgtaga

SEQ ID NO: 103778 - DNA, 15 bp, Homo sapiens
ttccattacatgtag

SEQ ID NO: 103779 - DNA, 15 bp, Homo sapiens
attccattacatgta

SEQ ID NO: 103780 - DNA, 15 bp, Homo sapiens
cattccattacatgt

SEQ ID NO: 103781 - DNA, 15 bp, Homo sapiens
acattccattacatg

SEQ ID NO: 103782 - DNA, 15 bp, Homo sapiens
tacattccattacat

SEQ ID NO: 103783 - DNA, 15 bp, Homo sapiens
ttacattccattaca

SEQ ID NO: 103784 - DNA, 15 bp, Homo sapiens
gttacattccattac

SEQ ID NO: 103785 - DNA, 15 bp, Homo sapiens
cgttacattccatta

SEQ ID NO: 103786 - DNA, 15 bp, Homo sapiens
gcgttacattccatt

SEQ ID NO: 103787 - DNA, 15 bp, Homo sapiens
tgcgttacattccat

SEQ ID NO: 103788 - DNA, 15 bp, Homo sapiens
atgcgttacattcca

SEQ ID NO: 103789 - DNA, 15 bp, Homo sapiens
gatgcgttacattcc

SEQ ID NO: 103790 - DNA, 15 bp, Homo sapiens
ggatgcgttacattc

SEQ ID NO: 103791 - DNA, 15 bp, Homo sapiens
aggatgcgttacatt

SEQ ID NO: 103792 - DNA, 15 bp, Homo sapiens
aaggatgcgttacat

SEQ ID NO: 103793 - DNA, 15 bp, Homo sapiens
taaggatgcgttaca

SEQ ID NO: 103794 - DNA, 15 bp, Homo sapiens
ttaaggatgcgttac

SEQ ID NO: 103795 - DNA, 15 bp, Homo sapiens
tttaaggatgcgtta

SEQ ID NO: 103796 - DNA, 15 bp, Homo sapiens
ttttaaggatgcgtt

SEQ ID NO: 103797 - DNA, 15 bp, Homo sapiens
tttttaaggatgcgt

SEQ ID NO: 103798 - DNA, 15 bp, Homo sapiens
ctttttaaggatgcg

SEQ ID NO: 103799 - DNA, 15 bp, Homo sapiens
cctttttaaggatgc

SEQ ID NO: 103800 - DNA, 15 bp, Homo sapiens
tcctttttaaggatg

SEQ ID NO: 103801 - DNA, 15 bp, Homo sapiens
ttcctttttaaggat

SEQ ID NO: 103802 - DNA, 15 bp, Homo sapiens
tttcctttttaagga

SEQ ID NO: 103803 - DNA, 15 bp, Homo sapiens
gtttcctttttaagg

SEQ ID NO: 103804 - DNA, 15 bp, Homo sapiens
ggtttcctttttaag

SEQ ID NO: 103805 - DNA, 15 bp, Homo sapiens
gggtttcctttttaa

SEQ ID NO: 103806 - DNA, 15 bp, Homo sapiens
agggtttccttttta

SEQ ID NO: 103807 - DNA, 15 bp, Homo sapiens
tagggtttccttttt

SEQ ID NO: 103808 - DNA, 15 bp, Homo sapiens
ttagggtttcctttt

SEQ ID NO: 103809 - DNA, 15 bp, Homo sapiens
cttagggtttccttt

SEQ ID NO: 103810 - DNA, 15 bp, Homo sapiens
ccttagggtttcctt

SEQ ID NO: 103811 - DNA, 15 bp, Homo sapiens
gccttagggtttcct

SEQ ID NO: 103812 - DNA, 15 bp, Homo sapiens
ggccttagggtttcc

SEQ ID NO: 103813 - DNA, 15 bp, Homo sapiens
cggccttagggtttc

SEQ ID NO: 103814 - DNA, 15 bp, Homo sapiens
ccggccttagggttt

SEQ ID NO: 103815 - DNA, 15 bp, Homo sapiens
cccggccttagggtt

SEQ ID NO: 103816 - DNA, 15 bp, Homo sapiens
gcccggccttagggt

SEQ ID NO: 103817 - DNA, 15 bp, Homo sapiens
agcccggccttaggg

SEQ ID NO: 103818 - DNA, 15 bp, Homo sapiens
gagcccggccttagg

SEQ ID NO: 103819 - DNA, 15 bp, Homo sapiens
agagcccggccttag

SEQ ID NO: 103820 - DNA, 15 bp, Homo sapiens
cagagcccggcctta

SEQ ID NO: 103821 - DNA, 15 bp, Homo sapiens
acagagcccggcctt

SEQ ID NO: 103822 - DNA, 15 bp, Homo sapiens
cacagagcccggcct

SEQ ID NO: 103823 - DNA, 15 bp, Homo sapiens
ccacagagcccggcc

SEQ ID NO: 103824 - DNA, 15 bp, Homo sapiens
gccacagagcccggc

SEQ ID NO: 103825 - DNA, 15 bp, Homo sapiens
agccacagagcccgg

SEQ ID NO: 103826 - DNA, 15 bp, Homo sapiens
gagccacagagcccg

SEQ ID NO: 103827 - DNA, 15 bp, Homo sapiens
tgagccacagagccc

SEQ ID NO: 103828 - DNA, 15 bp, Homo sapiens
gtgagccacagagcc

SEQ ID NO: 103829 - DNA, 15 bp, Homo sapiens
tgtgagccacagagc

SEQ ID NO: 103830 - DNA, 15 bp, Homo sapiens
gtgtgagccacagag

SEQ ID NO: 103831 - DNA, 15 bp, Homo sapiens
gtgccgtgggccccc

SEQ ID NO: 103832 - DNA, 15 bp, Homo sapiens
tgtgccgtgggcccc

SEQ ID NO: 103833 - DNA, 15 bp, Homo sapiens
gtgtgccgtgggccc

SEQ ID NO: 103834 - DNA, 15 bp, Homo sapiens
tgtgtgccgtgggcc

SEQ ID NO: 103835 - DNA, 15 bp, Homo sapiens
atgtgtgccgtgggc

SEQ ID NO: 103836 - DNA, 15 bp, Homo sapiens
aatgtgtgccgtggg

SEQ ID NO: 103837 - DNA, 15 bp, Homo sapiens
aaatgtgtgccgtgg

SEQ ID NO: 103838 - DNA, 15 bp, Homo sapiens
gaaatgtgtgccgtg

SEQ ID NO: 103839 - DNA, 15 bp, Homo sapiens
tgaaatgtgtgccgt

SEQ ID NO: 103840 - DNA, 15 bp, Homo sapiens
ctgaaatgtgtgccg

SEQ ID NO: 103841 - DNA, 15 bp, Homo sapiens
cctgaaatgtgtgcc

SEQ ID NO: 103842 - DNA, 15 bp, Homo sapiens
ccctgaaatgtgtgc

SEQ ID NO: 103843 - DNA, 15 bp, Homo sapiens
cccctgaaatgtgtg

SEQ ID NO: 103844 - DNA, 15 bp, Homo sapiens
ccccctgaaatgtgt

SEQ ID NO: 103845 - DNA, 15 bp, Homo sapiens
accccctgaaatgtg

SEQ ID NO: 103846 - DNA, 15 bp, Homo sapiens
gaccccctgaaatgt

SEQ ID NO: 103847 - DNA, 15 bp, Homo sapiens
agaccccctgaaatg

SEQ ID NO: 103848 - DNA, 15 bp, Homo sapiens
cagaccccctgaaat

SEQ ID NO: 103849 - DNA, 15 bp, Homo sapiens
acagaccccctgaaa

SEQ ID NO: 103850 - DNA, 15 bp, Homo sapiens
cacagaccccctgaa

SEQ ID NO: 103851 - DNA, 15 bp, Homo sapiens
ccacagaccccctga

SEQ ID NO: 103852 - DNA, 15 bp, Homo sapiens
cccacagaccccctg

SEQ ID NO: 103853 - DNA, 15 bp, Homo sapiens
tcccacagaccccct

SEQ ID NO: 103854 - DNA, 15 bp, Homo sapiens
gtcccacagaccccc

SEQ ID NO: 103855 - DNA, 15 bp, Homo sapiens
agtcccacagacccc

SEQ ID NO: 103856 - DNA, 15 bp, Homo sapiens
aagtcccacagaccc

SEQ ID NO: 103857 - DNA, 15 bp, Homo sapiens
taagtcccacagacc

SEQ ID NO: 103858 - DNA, 15 bp, Homo sapiens
ctaagtcccacagac

SEQ ID NO: 103859 - DNA, 15 bp, Homo sapiens
gctaagtcccacaga

SEQ ID NO: 103860 - DNA, 15 bp, Homo sapiens
agctaagtcccacag

SEQ ID NO: 103861 - DNA, 15 bp, Homo sapiens
cagctaagtcccaca

SEQ ID NO: 103862 - DNA, 15 bp, Homo sapiens
tcagctaagtcccac

SEQ ID NO: 103863 - DNA, 15 bp, Homo sapiens
gtcagctaagtccca

SEQ ID NO: 103864 - DNA, 15 bp, Homo sapiens
ggtcagctaagtccc

SEQ ID NO: 103865 - DNA, 15 bp, Homo sapiens
gggtcagctaagtcc

SEQ ID NO: 103866 - DNA, 15 bp, Homo sapiens
ggggtcagctaagtc

SEQ ID NO: 103867 - DNA, 15 bp, Homo sapiens
tggggtcagctaagt

SEQ ID NO: 103868 - DNA, 15 bp, Homo sapiens
gtggggtcagctaag

SEQ ID NO: 103869 - DNA, 15 bp, Homo sapiens
ggtggggtcagctaa

SEQ ID NO: 103870 - DNA, 15 bp, Homo sapiens
aggtggggtcagcta

SEQ ID NO: 103871 - DNA, 15 bp, Homo sapiens
gaggtggggtcagct

SEQ ID NO: 103872 - DNA, 15 bp, Homo sapiens
tgaggtggggtcagc

SEQ ID NO: 103873 - DNA, 15 bp, Homo sapiens
ctgaggtggggtcag

SEQ ID NO: 103874 - DNA, 15 bp, Homo sapiens
tctgaggtggggtca

SEQ ID NO: 103875 - DNA, 15 bp, Homo sapiens
gtctgaggtggggtc

SEQ ID NO: 103876 - DNA, 15 bp, Homo sapiens
tgtctgaggtggggt

SEQ ID NO: 103877 - DNA, 15 bp, Homo sapiens
ctgtctgaggtgggg

SEQ ID NO: 103878 - DNA, 15 bp, Homo sapiens
tctgtctgaggtggg

SEQ ID NO: 103879 - DNA, 15 bp, Homo sapiens
atctgtctgaggtgg

SEQ ID NO: 103880 - DNA, 15 bp, Homo sapiens
catctgtctgaggtg

SEQ ID NO: 103881 - DNA, 15 bp, Homo sapiens
gcatctgtctgaggt

SEQ ID NO: 103882 - DNA, 15 bp, Homo sapiens
tgcatctgtctgagg

SEQ ID NO: 103883 - DNA, 15 bp, Homo sapiens
ctgcatctgtctgag

SEQ ID NO: 103884 - DNA, 15 bp, Homo sapiens
tctgcatctgtctga

SEQ ID NO: 103885 - DNA, 15 bp, Homo sapiens
gtctgcatctgtctg

SEQ ID NO: 103886 - DNA, 15 bp, Homo sapiens
tgtctgcatctgtct

SEQ ID NO: 103887 - DNA, 15 bp, Homo sapiens
ctgtctgcatctgtc

SEQ ID NO: 103888 - DNA, 15 bp, Homo sapiens
gctgtctgcatctgt

SEQ ID NO: 103889 - DNA, 15 bp, Homo sapiens
cgctgtctgcatctg

SEQ ID NO: 103890 - DNA, 15 bp, Homo sapiens
ccgctgtctgcatct

SEQ ID NO: 103891 - DNA, 15 bp, Homo sapiens
gccgctgtctgcatc

SEQ ID NO: 103892 - DNA, 15 bp, Homo sapiens
agccgctgtctgcat

SEQ ID NO: 103893 - DNA, 15 bp, Homo sapiens
gagccgctgtctgca

SEQ ID NO: 103894 - DNA, 15 bp, Homo sapiens
tgagccgctgtctgc

SEQ ID NO: 103895 - DNA, 15 bp, Homo sapiens
atgagccgctgtctg

SEQ ID NO: 103896 - DNA, 15 bp, Homo sapiens
gatgagccgctgtct

SEQ ID NO: 103897 - DNA, 15 bp, Homo sapiens
tgatgagccgctgtc

SEQ ID NO: 103898 - DNA, 15 bp, Homo sapiens
gtgatgagccgctgt

SEQ ID NO: 103899 - DNA, 15 bp, Homo sapiens
ggtgatgagccgctg

SEQ ID NO: 103900 - DNA, 15 bp, Homo sapiens
cggtgatgagccgct

SEQ ID NO: 103901 - DNA, 15 bp, Homo sapiens
ccggtgatgagccgc

SEQ ID NO: 103902 - DNA, 15 bp, Homo sapiens
cccggtgatgagccg

SEQ ID NO: 103903 - DNA, 15 bp, Homo sapiens
ccccggtgatgagcc

SEQ ID NO: 103904 - DNA, 15 bp, Homo sapiens
cccccggtgatgagc

SEQ ID NO: 103905 - DNA, 15 bp, Homo sapiens
ccccccggtgatgag

SEQ ID NO: 103906 - DNA, 15 bp, Homo sapiens
accccccggtgatga

SEQ ID NO: 103907 - DNA, 15 bp, Homo sapiens
gaccccccggtgatg

SEQ ID NO: 103908 - DNA, 15 bp, Homo sapiens
ggaccccccggtgat

SEQ ID NO: 103909 - DNA, 15 bp, Homo sapiens
gggaccccccggtga

SEQ ID NO: 103910 - DNA, 15 bp, Homo sapiens
agggaccccccggtg

SEQ ID NO: 103911 - DNA, 15 bp, Homo sapiens
gagggaccccccggt

SEQ ID NO: 103912 - DNA, 15 bp, Homo sapiens
tgagggaccccccgg

SEQ ID NO: 103913 - DNA, 15 bp, Homo sapiens
gtgagggaccccccg

SEQ ID NO: 103914 - DNA, 15 bp, Homo sapiens
cgtgagggacccccc

SEQ ID NO: 103915 - DNA, 15 bp, Homo sapiens
ccgtgagggaccccc

SEQ ID NO: 103916 - DNA, 15 bp, Homo sapiens
cccgtgagggacccc

SEQ ID NO: 103917 - DNA, 15 bp, Homo sapiens
acccgtgagggaccc

SEQ ID NO: 103918 - DNA, 15 bp, Homo sapiens
cacccgtgagggacc

SEQ ID NO: 103919 - DNA, 15 bp, Homo sapiens
acacccgtgagggac

SEQ ID NO: 103920 - DNA, 15 bp, Homo sapiens
gacacccgtgaggga

SEQ ID NO: 103921 - DNA, 15 bp, Homo sapiens
agacacccgtgaggg

SEQ ID NO: 103922 - DNA, 15 bp, Homo sapiens
cagacacccgtgagg

SEQ ID NO: 103923 - DNA, 15 bp, Homo sapiens
acagacacccgtgag

SEQ ID NO: 103924 - DNA, 15 bp, Homo sapiens
gacagacacccgtga

SEQ ID NO: 103925 - DNA, 15 bp, Homo sapiens
agacagacacccgtg

SEQ ID NO: 103926 - DNA, 15 bp, Homo sapiens
gagacagacacccgt

SEQ ID NO: 103927 - DNA, 15 bp, Homo sapiens
agagacagacacccg

SEQ ID NO: 103928 - DNA, 15 bp, Homo sapiens
gagagacagacaccc

SEQ ID NO: 103929 - DNA, 15 bp, Homo sapiens
agagagacagacacc

SEQ ID NO: 103930 - DNA, 15 bp, Homo sapiens
aagagagacagacac

SEQ ID NO: 103931 - DNA, 15 bp, Homo sapiens
taagagagacagaca

SEQ ID NO: 103932 - DNA, 15 bp, Homo sapiens
ctaagagagacagac

SEQ ID NO: 103933 - DNA, 15 bp, Homo sapiens
cctaagagagacaga

SEQ ID NO: 103934 - DNA, 15 bp, Homo sapiens
acctaagagagacag

SEQ ID NO: 103935 - DNA, 15 bp, Homo sapiens
aacctaagagagaca

SEQ ID NO: 103936 - DNA, 15 bp, Homo sapiens
caacctaagagagac

SEQ ID NO: 103937 - DNA, 15 bp, Homo sapiens
ccaacctaagagaga

SEQ ID NO: 103938 - DNA, 15 bp, Homo sapiens
tccaacctaagagag

SEQ ID NO: 103939 - DNA, 15 bp, Homo sapiens
ctccaacctaagaga

SEQ ID NO: 103940 - DNA, 15 bp, Homo sapiens
gctccaacctaagag

SEQ ID NO: 103941 - DNA, 15 bp, Homo sapiens
tgctccaacctaaga

SEQ ID NO: 103942 - DNA, 15 bp, Homo sapiens
ttgctccaacctaag

SEQ ID NO: 103943 - DNA, 15 bp, Homo sapiens
tttgctccaacctaa

SEQ ID NO: 103944 - DNA, 15 bp, Homo sapiens
ttttgctccaaccta

SEQ ID NO: 103945 - DNA, 15 bp, Homo sapiens
gttttgctccaacct

SEQ ID NO: 103946 - DNA, 15 bp, Homo sapiens
cgttttgctccaacc

SEQ ID NO: 103947 - DNA, 15 bp, Homo sapiens
acgttttgctccaac

SEQ ID NO: 103948 - DNA, 15 bp, Homo sapiens
gacgttttgctccaa

SEQ ID NO: 103949 - DNA, 15 bp, Homo sapiens
ggacgttttgctcca

SEQ ID NO: 103950 - DNA, 15 bp, Homo sapiens
gggacgttttgctcc

SEQ ID NO: 103951 - DNA, 15 bp, Homo sapiens
tgggacgttttgctc

SEQ ID NO: 103952 - DNA, 15 bp, Homo sapiens
gtgggacgttttgct

SEQ ID NO: 103953 - DNA, 15 bp, Homo sapiens
agtgggacgttttgc

SEQ ID NO: 103954 - DNA, 15 bp, Homo sapiens
gagtgggacgttttg

SEQ ID NO: 103955 - DNA, 15 bp, Homo sapiens
tgagtgggacgtttt

SEQ ID NO: 103956 - DNA, 15 bp, Homo sapiens
gtgagtgggacgttt

SEQ ID NO: 103957 - DNA, 15 bp, Homo sapiens
agtgagtgggacgtt

SEQ ID NO: 103958 - DNA, 15 bp, Homo sapiens
cagtgagtgggacgt

SEQ ID NO: 103959 - DNA, 15 bp, Homo sapiens
ccagtgagtgggacg

SEQ ID NO: 103960 - DNA, 15 bp, Homo sapiens
tccagtgagtgggac

SEQ ID NO: 103961 - DNA, 15 bp, Homo sapiens
ctccagtgagtggga

SEQ ID NO: 103962 - DNA, 15 bp, Homo sapiens
cctccagtgagtggg

SEQ ID NO: 103963 - DNA, 15 bp, Homo sapiens
gcctccagtgagtgg

SEQ ID NO: 103964 - DNA, 15 bp, Homo sapiens
tgcctccagtgagtg

SEQ ID NO: 103965 - DNA, 15 bp, Homo sapiens
gtgcctccagtgagt

SEQ ID NO: 103966 - DNA, 15 bp, Homo sapiens
ggtgcctccagtgag

SEQ ID NO: 103967 - DNA, 15 bp, Homo sapiens
aggtgcctccagtga

SEQ ID NO: 103968 - DNA, 15 bp, Homo sapiens
caggtgcctccagtg

SEQ ID NO: 103969 - DNA, 15 bp, Homo sapiens
tcaggtgcctccagt

SEQ ID NO: 103970 - DNA, 15 bp, Homo sapiens
ctcaggtgcctccag

SEQ ID NO: 103971 - DNA, 15 bp, Homo sapiens
cctcaggtgcctcca

SEQ ID NO: 103972 - DNA, 15 bp, Homo sapiens
tcctcaggtgcctcc

SEQ ID NO: 103973 - DNA, 15 bp, Homo sapiens
gtcctcaggtgcctc

SEQ ID NO: 103974 - DNA, 15 bp, Homo sapiens
cgtcctcaggtgcct

SEQ ID NO: 103975 - DNA, 15 bp, Homo sapiens
tcgtcctcaggtgcc

SEQ ID NO: 103976 - DNA, 15 bp, Homo sapiens
gtcgtcctcaggtgc

SEQ ID NO: 103977 - DNA, 15 bp, Homo sapiens
cgtcgtcctcaggtg

SEQ ID NO: 103978 - DNA, 15 bp, Homo sapiens
ccgtcgtcctcaggt

SEQ ID NO: 103979 - DNA, 15 bp, Homo sapiens
cccgtcgtcctcagg

SEQ ID NO: 103980 - DNA, 15 bp, Homo sapiens
ccccgtcgtcctcag

SEQ ID NO: 103981 - DNA, 15 bp, Homo sapiens
cccccgtcgtcctca

SEQ ID NO: 103982 - DNA, 15 bp, Homo sapiens
gcccccgtcgtcctc

SEQ ID NO: 103983 - DNA, 15 bp, Homo sapiens
agcccccgtcgtcct

SEQ ID NO: 103984 - DNA, 15 bp, Homo sapiens
cagcccccgtcgtcc

SEQ ID NO: 103985 - DNA, 15 bp, Homo sapiens
ccagcccccgtcgtc

SEQ ID NO: 103986 - DNA, 15 bp, Homo sapiens
accagcccccgtcgt

SEQ ID NO: 103987 - DNA, 15 bp, Homo sapiens
gaccagcccccgtcg

SEQ ID NO: 103988 - DNA, 15 bp, Homo sapiens
tgaccagcccccgtc

SEQ ID NO: 103989 - DNA, 15 bp, Homo sapiens
ttgaccagcccccgt

SEQ ID NO: 103990 - DNA, 15 bp, Homo sapiens
cttgaccagcccccg

SEQ ID NO: 103991 - DNA, 15 bp, Homo sapiens
acttgaccagccccc

SEQ ID NO: 103992 - DNA, 15 bp, Homo sapiens
cacttgaccagcccc

SEQ ID NO: 103993 - DNA, 15 bp, Homo sapiens
gcacttgaccagccc

SEQ ID NO: 103994 - DNA, 15 bp, Homo sapiens
tgcacttgaccagcc

SEQ ID NO: 103995 - DNA, 15 bp, Homo sapiens
ctgcacttgaccagc

SEQ ID NO: 103996 - DNA, 15 bp, Homo sapiens
tctgcacttgaccag

SEQ ID NO: 103997 - DNA, 15 bp, Homo sapiens
ctctgcacttgacca

SEQ ID NO: 103998 - DNA, 15 bp, Homo sapiens
cctctgcacttgacc

SEQ ID NO: 103999 - DNA, 15 bp, Homo sapiens
tcctctgcacttgac

SEQ ID NO: 104000 - DNA, 15 bp, Homo sapiens
ctcctctgcacttga

SEQ ID NO: 104001 - DNA, 15 bp, Homo sapiens
gctcctctgcacttg

SEQ ID NO: 104002 - DNA, 15 bp, Homo sapiens
tgctcctctgcactt

SEQ ID NO: 104003 - DNA, 15 bp, Homo sapiens
ctgctcctctgcact

SEQ ID NO: 104004 - DNA, 15 bp, Homo sapiens
tctgctcctctgcac

SEQ ID NO: 104005 - DNA, 15 bp, Homo sapiens
atctgctcctctgca

SEQ ID NO: 104006 - DNA, 15 bp, Homo sapiens
aatctgctcctctgc

SEQ ID NO: 104007 - DNA, 15 bp, Homo sapiens
taatctgctcctctg

SEQ ID NO: 104008 - DNA, 15 bp, Homo sapiens
ttaatctgctcctct

SEQ ID NO: 104009 - DNA, 15 bp, Homo sapiens
gttaatctgctcctc

SEQ ID NO: 104010 - DNA, 15 bp, Homo sapiens
agttaatctgctcct

SEQ ID NO: 104011 - DNA, 15 bp, Homo sapiens
gagttaatctgctcc

SEQ ID NO: 104012 - DNA, 15 bp, Homo sapiens
cgagttaatctgctc

SEQ ID NO: 104013 - DNA, 15 bp, Homo sapiens
acgagttaatctgct

SEQ ID NO: 104014 - DNA, 15 bp, Homo sapiens
gacgagttaatctgc

SEQ ID NO: 104015 - DNA, 15 bp, Homo sapiens
ggacgagttaatctg

SEQ ID NO: 104016 - DNA, 15 bp, Homo sapiens
cggacgagttaatct

SEQ ID NO: 104017 - DNA, 15 bp, Homo sapiens
tcggacgagttaatc

SEQ ID NO: 104018 - DNA, 15 bp, Homo sapiens
gtcggacgagttaat

SEQ ID NO: 104019 - DNA, 15 bp, Homo sapiens
cgtcggacgagttaa

SEQ ID NO: 104020 - DNA, 15 bp, Homo sapiens
gcgtcggacgagtta

SEQ ID NO: 104021 - DNA, 15 bp, Homo sapiens
tgcgtcggacgagtt

SEQ ID NO: 104022 - DNA, 15 bp, Homo sapiens
ctgcgtcggacgagt

SEQ ID NO: 104023 - DNA, 15 bp, Homo sapiens
tctgcgtcggacgag

SEQ ID NO: 104024 - DNA, 15 bp, Homo sapiens
ctctgcgtcggacga

SEQ ID NO: 104025 - DNA, 15 bp, Homo sapiens
cctctgcgtcggacg

SEQ ID NO: 104026 - DNA, 15 bp, Homo sapiens
tcctctgcgtcggac

SEQ ID NO: 104027 - DNA, 15 bp, Homo sapiens
ctcctctgcgtcgga

SEQ ID NO: 104028 - DNA, 15 bp, Homo sapiens
cctcctctgcgtcgg

SEQ ID NO: 104029 - DNA, 15 bp, Homo sapiens
tcctcctctgcgtcg

SEQ ID NO: 104030 - DNA, 15 bp, Homo sapiens
gtcctcctctgcgtc

SEQ ID NO: 104031 - DNA, 15 bp, Homo sapiens
cgtcctcctctgcgt

SEQ ID NO: 104032 - DNA, 15 bp, Homo sapiens
ccgtcctcctctgcg

SEQ ID NO: 104033 - DNA, 15 bp, Homo sapiens
gccgtcctcctctgc

SEQ ID NO: 104034 - DNA, 15 bp, Homo sapiens
cgccgtcctcctctg

SEQ ID NO: 104035 - DNA, 15 bp, Homo sapiens
ccgccgtcctcctct

SEQ ID NO: 104036 - DNA, 15 bp, Homo sapiens
cccgccgtcctcctc

SEQ ID NO: 104037 - DNA, 15 bp, Homo sapiens
acccgccgtcctcct

SEQ ID NO: 104038 - DNA, 15 bp, Homo sapiens
aacccgccgtcctcc

SEQ ID NO: 104039 - DNA, 15 bp, Homo sapiens
caacccgccgtcctc

SEQ ID NO: 104040 - DNA, 15 bp, Homo sapiens
ccaacccgccgtcct

SEQ ID NO: 104041 - DNA, 15 bp, Homo sapiens
cccaacccgccgtcc

SEQ ID NO: 104042 - DNA, 15 bp, Homo sapiens
gcccaacccgccgtc

SEQ ID NO: 104043 - DNA, 15 bp, Homo sapiens
ggcccaacccgccgt

SEQ ID NO: 104044 - DNA, 15 bp, Homo sapiens
gggcccaacccgccg

SEQ ID NO: 104045 - DNA, 15 bp, Homo sapiens
ggggcccaacccgcc

SEQ ID NO: 104046 - DNA, 15 bp, Homo sapiens
tggggcccaacccgc

SEQ ID NO: 104047 - DNA, 15 bp, Homo sapiens
ttggggcccaacccg

SEQ ID NO: 104048 - DNA, 15 bp, Homo sapiens
cttggggcccaaccc

SEQ ID NO: 104049 - DNA, 15 bp, Homo sapiens
tcttggggcccaacc

SEQ ID NO: 104050 - DNA, 15 bp, Homo sapiens
ttcttggggcccaac

SEQ ID NO: 104051 - DNA, 15 bp, Homo sapiens
cttcttggggcccaa

SEQ ID NO: 104052 - DNA, 15 bp, Homo sapiens
gcttcttggggccca

SEQ ID NO: 104053 - DNA, 15 bp, Homo sapiens
agcttcttggggccc

SEQ ID NO: 104054 - DNA, 15 bp, Homo sapiens
cagcttcttggggcc

SEQ ID NO: 104055 - DNA, 15 bp, Homo sapiens
ccagcttcttggggc

SEQ ID NO: 104056 - DNA, 15 bp, Homo sapiens
accagcttcttgggg

SEQ ID NO: 104057 - DNA, 15 bp, Homo sapiens
taccagcttcttggg

SEQ ID NO: 104058 - DNA, 15 bp, Homo sapiens
ttaccagcttcttgg

SEQ ID NO: 104059 - DNA, 15 bp, Homo sapiens
gttaccagcttcttg

SEQ ID NO: 104060 - DNA, 15 bp, Homo sapiens
ggttaccagcttctt

SEQ ID NO: 104061 - DNA, 15 bp, Homo sapiens
tggttaccagcttct

SEQ ID NO: 104062 - DNA, 15 bp, Homo sapiens
gtggttaccagcttc

SEQ ID NO: 104063 - DNA, 15 bp, Homo sapiens
cgtggttaccagctt

SEQ ID NO: 104064 - DNA, 15 bp, Homo sapiens
ccgtggttaccagct

SEQ ID NO: 104065 - DNA, 15 bp, Homo sapiens
gccgtggttaccagc

SEQ ID NO: 104066 - DNA, 15 bp, Homo sapiens
agccgtggttaccag

SEQ ID NO: 104067 - DNA, 15 bp, Homo sapiens
aagccgtggttacca

SEQ ID NO: 104068 - DNA, 15 bp, Homo sapiens
gaagccgtggttacc

SEQ ID NO: 104069 - DNA, 15 bp, Homo sapiens
ggaagccgtggttac

SEQ ID NO: 104070 - DNA, 15 bp, Homo sapiens
gggaagccgtggtta

SEQ ID NO: 104071 - DNA, 15 bp, Homo sapiens
agggaagccgtggtt

SEQ ID NO: 104072 - DNA, 15 bp, Homo sapiens
cagggaagccgtggt

SEQ ID NO: 104073 - DNA, 15 bp, Homo sapiens
acagggaagccgtgg

SEQ ID NO: 104074 - DNA, 15 bp, Homo sapiens
cacagggaagccgtg

SEQ ID NO: 104075 - DNA, 15 bp, Homo sapiens
ccacagggaagccgt

SEQ ID NO: 104076 - DNA, 15 bp, Homo sapiens
cccacagggaagccg

SEQ ID NO: 104077 - DNA, 15 bp, Homo sapiens
gcccacagggaagcc

SEQ ID NO: 104078 - DNA, 15 bp, Homo sapiens
tgcccacagggaagc

SEQ ID NO: 104079 - DNA, 15 bp, Homo sapiens
gtgcccacagggaag

SEQ ID NO: 104080 - DNA, 15 bp, Homo sapiens
agtgcccacagggaa

SEQ ID NO: 104081 - DNA, 15 bp, Homo sapiens
aagtgcccacaggga

SEQ ID NO: 104082 - DNA, 15 bp, Homo sapiens
caagtgcccacaggg

SEQ ID NO: 104083 - DNA, 15 bp, Homo sapiens
ccaagtgcccacagg

SEQ ID NO: 104084 - DNA, 15 bp, Homo sapiens
cccaagtgcccacag

SEQ ID NO: 104085 - DNA, 15 bp, Homo sapiens
ccccaagtgcccaca

SEQ ID NO: 104086 - DNA, 15 bp, Homo sapiens
accccaagtgcccac

SEQ ID NO: 104087 - DNA, 15 bp, Homo sapiens
caccccaagtgccca

SEQ ID NO: 104088 - DNA, 15 bp, Homo sapiens
ccaccccaagtgccc

SEQ ID NO: 104089 - DNA, 15 bp, Homo sapiens
cccaccccaagtgcc

SEQ ID NO: 104090 - DNA, 15 bp, Homo sapiens
ccccaccccaagtgc

SEQ ID NO: 104091 - DNA, 15 bp, Homo sapiens
cccccaccccaagtg

SEQ ID NO: 104092 - DNA, 15 bp, Homo sapiens
gcccccaccccaagt

SEQ ID NO: 104093 - DNA, 15 bp, Homo sapiens
agcccccaccccaag

SEQ ID NO: 104094 - DNA, 15 bp, Homo sapiens
cagcccccaccccaa

SEQ ID NO: 104095 - DNA, 15 bp, Homo sapiens
gcagcccccacccca

SEQ ID NO: 104096 - DNA, 15 bp, Homo sapiens
ggcagcccccacccc

SEQ ID NO: 104097 - DNA, 15 bp, Homo sapiens
gggcagcccccaccc

SEQ ID NO: 104098 - DNA, 15 bp, Homo sapiens
agggcagcccccacc

SEQ ID NO: 104099 - DNA, 15 bp, Homo sapiens
gagggcagcccccac

SEQ ID NO: 104100 - DNA, 15 bp, Homo sapiens
ggagggcagccccca

SEQ ID NO: 104101 - DNA, 15 bp, Homo sapiens
cggagggcagccccc

SEQ ID NO: 104102 - DNA, 15 bp, Homo sapiens
ccggagggcagcccc

SEQ ID NO: 104103 - DNA, 15 bp, Homo sapiens
cccggagggcagccc

SEQ ID NO: 104104 - DNA, 15 bp, Homo sapiens
ccccggagggcagcc

SEQ ID NO: 104105 - DNA, 15 bp, Homo sapiens
tccccggagggcagc

SEQ ID NO: 104106 - DNA, 15 bp, Homo sapiens
atccccggagggcag

SEQ ID NO: 104107 - DNA, 15 bp, Homo sapiens
aatccccggagggca

SEQ ID NO: 104108 - DNA, 15 bp, Homo sapiens
taatccccggagggc

SEQ ID NO: 104109 - DNA, 15 bp, Homo sapiens
ctaatccccggaggg

SEQ ID NO: 104110 - DNA, 15 bp, Homo sapiens
cctaatccccggagg

SEQ ID NO: 104111 - DNA, 15 bp, Homo sapiens
ccctaatccccggag

SEQ ID NO: 104112 - DNA, 15 bp, Homo sapiens
cccctaatccccgga

SEQ ID NO: 104113 - DNA, 15 bp, Homo sapiens
acccctaatccccgg

SEQ ID NO: 104114 - DNA, 15 bp, Homo sapiens
cacccctaatccccg

SEQ ID NO: 104115 - DNA, 15 bp, Homo sapiens
gcacccctaatcccc

SEQ ID NO: 104116 - DNA, 15 bp, Homo sapiens
agcacccctaatccc

SEQ ID NO: 104117 - DNA, 15 bp, Homo sapiens
aagcacccctaatcc

SEQ ID NO: 104118 - DNA, 15 bp, Homo sapiens
gaagcacccctaatc

SEQ ID NO: 104119 - DNA, 15 bp, Homo sapiens
agaagcacccctaat

SEQ ID NO: 104120 - DNA, 15 bp, Homo sapiens
cagaagcacccctaa

SEQ ID NO: 104121 - DNA, 15 bp, Homo sapiens
ccagaagcaccccta

SEQ ID NO: 104122 - DNA, 15 bp, Homo sapiens
gccagaagcacccct

SEQ ID NO: 104123 - DNA, 15 bp, Homo sapiens
tgccagaagcacccc

SEQ ID NO: 104124 - DNA, 15 bp, Homo sapiens
ctgccagaagcaccc

SEQ ID NO: 104125 - DNA, 15 bp, Homo sapiens
cctgccagaagcacc

SEQ ID NO: 104126 - DNA, 15 bp, Homo sapiens
acctgccagaagcac

SEQ ID NO: 104127 - DNA, 15 bp, Homo sapiens
gacctgccagaagca

SEQ ID NO: 104128 - DNA, 15 bp, Homo sapiens
ggacctgccagaagc

SEQ ID NO: 104129 - DNA, 15 bp, Homo sapiens
tggacctgccagaag

SEQ ID NO: 104130 - DNA, 15 bp, Homo sapiens
gtggacctgccagaa

SEQ ID NO: 104131 - DNA, 15 bp, Homo sapiens
ggtggacctgccaga

SEQ ID NO: 104132 - DNA, 15 bp, Homo sapiens
gggtggacctgccag

SEQ ID NO: 104133 - DNA, 15 bp, Homo sapiens
tgggtggacctgcca

SEQ ID NO: 104134 - DNA, 15 bp, Homo sapiens
ctgggtggacctgcc

SEQ ID NO: 104135 - DNA, 15 bp, Homo sapiens
cctgggtggacctgc

SEQ ID NO: 104136 - DNA, 15 bp, Homo sapiens
gcctgggtggacctg

SEQ ID NO: 104137 - DNA, 15 bp, Homo sapiens
agcctgggtggacct

SEQ ID NO: 104138 - DNA, 15 bp, Homo sapiens
aagcctgggtggacc

SEQ ID NO: 104139 - DNA, 15 bp, Homo sapiens
caagcctgggtggac

SEQ ID NO: 104140 - DNA, 15 bp, Homo sapiens
ccaagcctgggtgga

SEQ ID NO: 104141 - DNA, 15 bp, Homo sapiens
cccaagcctgggtgg

SEQ ID NO: 104142 - DNA, 15 bp, Homo sapiens
acccaagcctgggtg

SEQ ID NO: 104143 - DNA, 15 bp, Homo sapiens
gacccaagcctgggt

SEQ ID NO: 104144 - DNA, 15 bp, Homo sapiens
agacccaagcctggg

SEQ ID NO: 104145 - DNA, 15 bp, Homo sapiens
aagacccaagcctgg

SEQ ID NO: 104146 - DNA, 15 bp, Homo sapiens
taagacccaagcctg

SEQ ID NO: 104147 - DNA, 15 bp, Homo sapiens
ctaagacccaagcct

SEQ ID NO: 104148 - DNA, 15 bp, Homo sapiens
cctaagacccaagcc

SEQ ID NO: 104149 - DNA, 15 bp, Homo sapiens
tcctaagacccaagc

SEQ ID NO: 104150 - DNA, 15 bp, Homo sapiens
gtcctaagacccaag

SEQ ID NO: 104151 - DNA, 15 bp, Homo sapiens
tgtcctaagacccaa

SEQ ID NO: 104152 - DNA, 15 bp, Homo sapiens
gtgtcctaagaccca

SEQ ID NO: 104153 - DNA, 15 bp, Homo sapiens
tgtgtcctaagaccc

SEQ ID NO: 104154 - DNA, 15 bp, Homo sapiens
ctgtgtcctaagacc

SEQ ID NO: 104155 - DNA, 15 bp, Homo sapiens
gctgtgtcctaagac

SEQ ID NO: 104156 - DNA, 15 bp, Homo sapiens
ggctgtgtcctaaga

SEQ ID NO: 104157 - DNA, 15 bp, Homo sapiens
gggctgtgtcctaag

SEQ ID NO: 104158 - DNA, 15 bp, Homo sapiens
ggggctgtgtcctaa

SEQ ID NO: 104159 - DNA, 15 bp, Homo sapiens
tggggctgtgtccta

SEQ ID NO: 104160 - DNA, 15 bp, Homo sapiens
ctggggctgtgtcct

SEQ ID NO: 104161 - DNA, 15 bp, Homo sapiens
gctggggctgtgtcc

SEQ ID NO: 104162 - DNA, 15 bp, Homo sapiens
agctggggctgtgtc

SEQ ID NO: 104163 - DNA, 15 bp, Homo sapiens
gagctggggctgtgt

SEQ ID NO: 104164 - DNA, 15 bp, Homo sapiens
ggagctggggctgtg

SEQ ID NO: 104165 - DNA, 15 bp, Homo sapiens
aggagctggggctgt

SEQ ID NO: 104166 - DNA, 15 bp, Homo sapiens
gaggagctggggctg

SEQ ID NO: 104167 - DNA, 15 bp, Homo sapiens
ggaggagctggggct

SEQ ID NO: 104168 - DNA, 15 bp, Homo sapiens
aggaggagctggggc

SEQ ID NO: 104169 - DNA, 15 bp, Homo sapiens
taggaggagctgggg

SEQ ID NO: 104170 - DNA, 15 bp, Homo sapiens
ttaggaggagctggg

SEQ ID NO: 104171 - DNA, 15 bp, Homo sapiens
gttaggaggagctgg

SEQ ID NO: 104172 - DNA, 15 bp, Homo sapiens
ggttaggaggagctg

SEQ ID NO: 104173 - DNA, 15 bp, Homo sapiens
gggttaggaggagct

SEQ ID NO: 104174 - DNA, 15 bp, Homo sapiens
agggttaggaggagc

SEQ ID NO: 104175 - DNA, 15 bp, Homo sapiens
cagggttaggaggag

SEQ ID NO: 104176 - DNA, 15 bp, Homo sapiens
ccagggttaggagga

SEQ ID NO: 104177 - DNA, 15 bp, Homo sapiens
tccagggttaggagg

SEQ ID NO: 104178 - DNA, 15 bp, Homo sapiens
ttccagggttaggag

SEQ ID NO: 104179 - DNA, 15 bp, Homo sapiens
cttccagggttagga

SEQ ID NO: 104180 - DNA, 15 bp, Homo sapiens
ccttccagggttagg

SEQ ID NO: 104181 - DNA, 15 bp, Homo sapiens
accttccagggttag

SEQ ID NO: 104182 - DNA, 15 bp, Homo sapiens
gaccttccagggtta

SEQ ID NO: 104183 - DNA, 15 bp, Homo sapiens
ggaccttccagggtt

SEQ ID NO: 104184 - DNA, 15 bp, Homo sapiens
tggaccttccagggt

SEQ ID NO: 104185 - DNA, 15 bp, Homo sapiens
gtggaccttccaggg

SEQ ID NO: 104186 - DNA, 15 bp, Homo sapiens
tgtggaccttccagg

SEQ ID NO: 104187 - DNA, 15 bp, Homo sapiens
atgtggaccttccag

SEQ ID NO: 104188 - DNA, 15 bp, Homo sapiens
catgtggaccttcca

SEQ ID NO: 104189 - DNA, 15 bp, Homo sapiens
ccatgtggaccttcc

SEQ ID NO: 104190 - DNA, 15 bp, Homo sapiens
cccatgtggaccttc

SEQ ID NO: 104191 - DNA, 15 bp, Homo sapiens
gcccatgtggacctt

SEQ ID NO: 104192 - DNA, 15 bp, Homo sapiens
ggcccatgtggacct

SEQ ID NO: 104193 - DNA, 15 bp, Homo sapiens
aggcccatgtggacc

SEQ ID NO: 104194 - DNA, 15 bp, Homo sapiens
caggcccatgtggac

SEQ ID NO: 104195 - DNA, 15 bp, Homo sapiens
ccaggcccatgtgga

SEQ ID NO: 104196 - DNA, 15 bp, Homo sapiens
cccaggcccatgtgg

SEQ ID NO: 104197 - DNA, 15 bp, Homo sapiens
acccaggcccatgtg

SEQ ID NO: 104198 - DNA, 15 bp, Homo sapiens
gacccaggcccatgt

SEQ ID NO: 104199 - DNA, 15 bp, Homo sapiens
agacccaggcccatg

SEQ ID NO: 104200 - DNA, 15 bp, Homo sapiens
aagacccaggcccat

SEQ ID NO: 104201 - DNA, 15 bp, Homo sapiens
taagacccaggccca

SEQ ID NO: 104202 - DNA, 15 bp, Homo sapiens
gtaagacccaggccc

SEQ ID NO: 104203 - DNA, 15 bp, Homo sapiens
cgtaagacccaggcc

SEQ ID NO: 104204 - DNA, 15 bp, Homo sapiens
ccgtaagacccaggc

SEQ ID NO: 104205 - DNA, 15 bp, Homo sapiens
cccgtaagacccagg

SEQ ID NO: 104206 - DNA, 15 bp, Homo sapiens
gcccgtaagacccag

SEQ ID NO: 104207 - DNA, 15 bp, Homo sapiens
tgcccgtaagaccca

SEQ ID NO: 104208 - DNA, 15 bp, Homo sapiens
ctgcccgtaagaccc

SEQ ID NO: 104209 - DNA, 15 bp, Homo sapiens
actgcccgtaagacc

SEQ ID NO: 104210 - DNA, 15 bp, Homo sapiens
cactgcccgtaagac

SEQ ID NO: 104211 - DNA, 15 bp, Homo sapiens
gcactgcccgtaaga

SEQ ID NO: 104212 - DNA, 15 bp, Homo sapiens
ggcactgcccgtaag

SEQ ID NO: 104213 - DNA, 15 bp, Homo sapiens
tggcactgcccgtaa

SEQ ID NO: 104214 - DNA, 15 bp, Homo sapiens
ctggcactgcccgta

SEQ ID NO: 104215 - DNA, 15 bp, Homo sapiens
gctggcactgcccgt

SEQ ID NO: 104216 - DNA, 15 bp, Homo sapiens
agctggcactgcccg

SEQ ID NO: 104217 - DNA, 15 bp, Homo sapiens
gagctggcactgccc

SEQ ID NO: 104218 - DNA, 15 bp, Homo sapiens
ggagctggcactgcc

SEQ ID NO: 104219 - DNA, 15 bp, Homo sapiens
aggagctggcactgc

SEQ ID NO: 104220 - DNA, 15 bp, Homo sapiens
gaggagctggcactg

SEQ ID NO: 104221 - DNA, 15 bp, Homo sapiens
ggaggagctggcact

SEQ ID NO: 104222 - DNA, 15 bp, Homo sapiens
aggaggagctggcac

SEQ ID NO: 104223 - DNA, 15 bp, Homo sapiens
taggaggagctggca

SEQ ID NO: 104224 - DNA, 15 bp, Homo sapiens
ttaggaggagctggc

SEQ ID NO: 104225 - DNA, 15 bp, Homo sapiens
agttaggaggagctg

SEQ ID NO: 104226 - DNA, 15 bp, Homo sapiens
gagttaggaggagct

SEQ ID NO: 104227 - DNA, 15 bp, Homo sapiens
agagttaggaggagc

SEQ ID NO: 104228 - DNA, 15 bp, Homo sapiens
gagagttaggaggag

SEQ ID NO: 104229 - DNA, 15 bp, Homo sapiens
agagagttaggagga

SEQ ID NO: 104230 - DNA, 15 bp, Homo sapiens
gagagagttaggagg

SEQ ID NO: 104231 - DNA, 15 bp, Homo sapiens
agagagagttaggag

SEQ ID NO: 104232 - DNA, 15 bp, Homo sapiens
cagagagagttagga

SEQ ID NO: 104233 - DNA, 15 bp, Homo sapiens
ccagagagagttagg

SEQ ID NO: 104234 - DNA, 15 bp, Homo sapiens
tccagagagagttag

SEQ ID NO: 104235 - DNA, 15 bp, Homo sapiens
ttccagagagagtta

SEQ ID NO: 104236 - DNA, 15 bp, Homo sapiens
cttccagagagagtt

SEQ ID NO: 104237 - DNA, 15 bp, Homo sapiens
ccttccagagagagt

SEQ ID NO: 104238 - DNA, 15 bp, Homo sapiens
accttccagagagag

SEQ ID NO: 104239 - DNA, 15 bp, Homo sapiens
gaccttccagagaga

SEQ ID NO: 104240 - DNA, 15 bp, Homo sapiens
ggaccttccagagag

SEQ ID NO: 104241 - DNA, 15 bp, Homo sapiens
tggaccttccagaga

SEQ ID NO: 104242 - DNA, 15 bp, Homo sapiens
gtggaccttccagag

SEQ ID NO: 104243 - DNA, 15 bp, Homo sapiens
ggtggaccttccaga

SEQ ID NO: 104244 - DNA, 15 bp, Homo sapiens
gggtggaccttccag

SEQ ID NO: 104245 - DNA, 15 bp, Homo sapiens
tgggtggaccttcca

SEQ ID NO: 104246 - DNA, 15 bp, Homo sapiens
ctgggtggaccttcc

SEQ ID NO: 104247 - DNA, 15 bp, Homo sapiens
tctgggtggaccttc

SEQ ID NO: 104248 - DNA, 15 bp, Homo sapiens
gtctgggtggacctt

SEQ ID NO: 104249 - DNA, 15 bp, Homo sapiens
ggtctgggtggacct

SEQ ID NO: 104250 - DNA, 15 bp, Homo sapiens
aggtctgggtggacc

SEQ ID NO: 104251 - DNA, 15 bp, Homo sapiens
caggtctgggtggac

SEQ ID NO: 104252 - DNA, 15 bp, Homo sapiens
ccaggtctgggtgga

SEQ ID NO: 104253 - DNA, 15 bp, Homo sapiens
cccaggtctgggtgg

SEQ ID NO: 104254 - DNA, 15 bp, Homo sapiens
acccaggtctgggtg

SEQ ID NO: 104255 - DNA, 15 bp, Homo sapiens
gacccaggtctgggt

SEQ ID NO: 104256 - DNA, 15 bp, Homo sapiens
agacccaggtctggg

SEQ ID NO: 104257 - DNA, 15 bp, Homo sapiens
aagacccaggtctgg

SEQ ID NO: 104258 - DNA, 15 bp, Homo sapiens
caagacccaggtctg

SEQ ID NO: 104259 - DNA, 15 bp, Homo sapiens
ccaagacccaggtct

SEQ ID NO: 104260 - DNA, 15 bp, Homo sapiens
cccaagacccaggtc

SEQ ID NO: 104261 - DNA, 15 bp, Homo sapiens
ccccaagacccaggt

SEQ ID NO: 104262 - DNA, 15 bp, Homo sapiens
gccccaagacccagg

SEQ ID NO: 104263 - DNA, 15 bp, Homo sapiens
tgccccaagacccag

SEQ ID NO: 104264 - DNA, 15 bp, Homo sapiens
gtgccccaagaccca

SEQ ID NO: 104265 - DNA, 15 bp, Homo sapiens
tgtgccccaagaccc

SEQ ID NO: 104266 - DNA, 15 bp, Homo sapiens
ctgtgccccaagacc

SEQ ID NO: 104267 - DNA, 15 bp, Homo sapiens
gctgtgccccaagac

SEQ ID NO: 104268 - DNA, 15 bp, Homo sapiens
ggctgtgccccaaga

SEQ ID NO: 104269 - DNA, 15 bp, Homo sapiens
gggctgtgccccaag

SEQ ID NO: 104270 - DNA, 15 bp, Homo sapiens
ggggctgtgccccaa

SEQ ID NO: 104271 - DNA, 15 bp, Homo sapiens
tggggctgtgcccca

SEQ ID NO: 104272 - DNA, 15 bp, Homo sapiens
ctggggctgtgcccc

SEQ ID NO: 104273 - DNA, 15 bp, Homo sapiens
gctggggctgtgccc

SEQ ID NO: 104274 - DNA, 15 bp, Homo sapiens
agctggggctgtgcc

SEQ ID NO: 104275 - DNA, 15 bp, Homo sapiens
gagctggggctgtgc

SEQ ID NO: 104276 - DNA, 15 bp, Homo sapiens
aggtggaccttccag

SEQ ID NO: 104277 - DNA, 15 bp, Homo sapiens
caggtggaccttcca

SEQ ID NO: 104278 - DNA, 15 bp, Homo sapiens
ccaggtggaccttcc

SEQ ID NO: 104279 - DNA, 15 bp, Homo sapiens
cccaggtggaccttc

SEQ ID NO: 104280 - DNA, 15 bp, Homo sapiens
gcccaggtggacctt

SEQ ID NO: 104281 - DNA, 15 bp, Homo sapiens
ggcccaggtggacct

SEQ ID NO: 104282 - DNA, 15 bp, Homo sapiens
aggcccaggtggacc

SEQ ID NO: 104283 - DNA, 15 bp, Homo sapiens
caggcccaggtggac

SEQ ID NO: 104284 - DNA, 15 bp, Homo sapiens
ccaggcccaggtgga

SEQ ID NO: 104285 - DNA, 15 bp, Homo sapiens
cccaggcccaggtgg

SEQ ID NO: 104286 - DNA, 15 bp, Homo sapiens
acccaggcccaggtg

SEQ ID NO: 104287 - DNA, 15 bp, Homo sapiens
gacccaggcccaggt

SEQ ID NO: 104288 - DNA, 15 bp, Homo sapiens
agacccaggcccagg

SEQ ID NO: 104289 - DNA, 15 bp, Homo sapiens
aagacccaggcccag

SEQ ID NO: 104290 - DNA, 15 bp, Homo sapiens
ctaagacccaggccc

SEQ ID NO: 104291 - DNA, 15 bp, Homo sapiens
cctaagacccaggcc

SEQ ID NO: 104292 - DNA, 15 bp, Homo sapiens
tcctaagacccaggc

SEQ ID NO: 104293 - DNA, 15 bp, Homo sapiens
atcctaagacccagg

SEQ ID NO: 104294 - DNA, 15 bp, Homo sapiens
catcctaagacccag

SEQ ID NO: 104295 - DNA, 15 bp, Homo sapiens
gcatcctaagaccca

SEQ ID NO: 104296 - DNA, 15 bp, Homo sapiens
tgcatcctaagaccc

SEQ ID NO: 104297 - DNA, 15 bp, Homo sapiens
ctgcatcctaagacc

SEQ ID NO: 104298 - DNA, 15 bp, Homo sapiens
gctgcatcctaagac

SEQ ID NO: 104299 - DNA, 15 bp, Homo sapiens
ggctgcatcctaaga

SEQ ID NO: 104300 - DNA, 15 bp, Homo sapiens
gggctgcatcctaag

SEQ ID NO: 104301 - DNA, 15 bp, Homo sapiens
ggggctgcatcctaa

SEQ ID NO: 104302 - DNA, 15 bp, Homo sapiens
tggggctgcatccta

SEQ ID NO: 104303 - DNA, 15 bp, Homo sapiens
ctggggctgcatcct

SEQ ID NO: 104304 - DNA, 15 bp, Homo sapiens
gctggggctgcatcc

SEQ ID NO: 104305 - DNA, 15 bp, Homo sapiens
agctggggctgcatc

SEQ ID NO: 104306 - DNA, 15 bp, Homo sapiens
gagctggggctgcat

SEQ ID NO: 104307 - DNA, 15 bp, Homo sapiens
ggagctggggctgca

SEQ ID NO: 104308 - DNA, 15 bp, Homo sapiens
aggagctggggctgc

SEQ ID NO: 104309 - DNA, 15 bp, Homo sapiens
ctaggaggagctggg

SEQ ID NO: 104310 - DNA, 15 bp, Homo sapiens
gctaggaggagctgg

SEQ ID NO: 104311 - DNA, 15 bp, Homo sapiens
agctaggaggagctg

SEQ ID NO: 104312 - DNA, 15 bp, Homo sapiens
gagctaggaggagct

SEQ ID NO: 104313 - DNA, 15 bp, Homo sapiens
ggagctaggaggagc

SEQ ID NO: 104314 - DNA, 15 bp, Homo sapiens
aggagctaggaggag

SEQ ID NO: 104315 - DNA, 15 bp, Homo sapiens
gaggagctaggagga

SEQ ID NO: 104316 - DNA, 15 bp, Homo sapiens
agaggagctaggagg

SEQ ID NO: 104317 - DNA, 15 bp, Homo sapiens
cagaggagctaggag

SEQ ID NO: 104318 - DNA, 15 bp, Homo sapiens
acagaggagctagga

SEQ ID NO: 104319 - DNA, 15 bp, Homo sapiens
gacagaggagctagg

SEQ ID NO: 104320 - DNA, 15 bp, Homo sapiens
agacagaggagctag

SEQ ID NO: 104321 - DNA, 15 bp, Homo sapiens
gagacagaggagcta

SEQ ID NO: 104322 - DNA, 15 bp, Homo sapiens
tgagacagaggagct

SEQ ID NO: 104323 - DNA, 15 bp, Homo sapiens
ctgagacagaggagc

SEQ ID NO: 104324 - DNA, 15 bp, Homo sapiens
gctgagacagaggag

SEQ ID NO: 104325 - DNA, 15 bp, Homo sapiens
tgctgagacagagga

SEQ ID NO: 104326 - DNA, 15 bp, Homo sapiens
ctgctgagacagagg

SEQ ID NO: 104327 - DNA, 15 bp, Homo sapiens
gctgctgagacagag

SEQ ID NO: 104328 - DNA, 15 bp, Homo sapiens
tgctgctgagacaga

SEQ ID NO: 104329 - DNA, 15 bp, Homo sapiens
gtgctgctgagacag

SEQ ID NO: 104330 - DNA, 15 bp, Homo sapiens
agtgctgctgagaca

SEQ ID NO: 104331 - DNA, 15 bp, Homo sapiens
aagtgctgctgagac

SEQ ID NO: 104332 - DNA, 15 bp, Homo sapiens
aaagtgctgctgaga

SEQ ID NO: 104333 - DNA, 15 bp, Homo sapiens
caaagtgctgctgag

SEQ ID NO: 104334 - DNA, 15 bp, Homo sapiens
acaaagtgctgctga

SEQ ID NO: 104335 - DNA, 15 bp, Homo sapiens
cacaaagtgctgctg

SEQ ID NO: 104336 - DNA, 15 bp, Homo sapiens
acacaaagtgctgct

SEQ ID NO: 104337 - DNA, 15 bp, Homo sapiens
aacacaaagtgctgc

SEQ ID NO: 104338 - DNA, 15 bp, Homo sapiens
aaacacaaagtgctg

SEQ ID NO: 104339 - DNA, 15 bp, Homo sapiens
gaaacacaaagtgct

SEQ ID NO: 104340 - DNA, 15 bp, Homo sapiens
agaaacacaaagtgc

SEQ ID NO: 104341 - DNA, 15 bp, Homo sapiens
cagaaacacaaagtg

SEQ ID NO: 104342 - DNA, 15 bp, Homo sapiens
ccagaaacacaaagt

SEQ ID NO: 104343 - DNA, 15 bp, Homo sapiens
cccagaaacacaaag

SEQ ID NO: 104344 - DNA, 15 bp, Homo sapiens
acccagaaacacaaa

SEQ ID NO: 104345 - DNA, 15 bp, Homo sapiens
aacccagaaacacaa

SEQ ID NO: 104346 - DNA, 15 bp, Homo sapiens
taacccagaaacaca

SEQ ID NO: 104347 - DNA, 15 bp, Homo sapiens
ttaacccagaaacac

SEQ ID NO: 104348 - DNA, 15 bp, Homo sapiens
attaacccagaaaca

SEQ ID NO: 104349 - DNA, 15 bp, Homo sapiens
aattaacccagaaac

SEQ ID NO: 104350 - DNA, 15 bp, Homo sapiens
aaattaacccagaaa

SEQ ID NO: 104351 - DNA, 15 bp, Homo sapiens
gaaattaacccagaa

SEQ ID NO: 104352 - DNA, 15 bp, Homo sapiens
ggaaattaacccaga

SEQ ID NO: 104353 - DNA, 15 bp, Homo sapiens
tggaaattaacccag

SEQ ID NO: 104354 - DNA, 15 bp, Homo sapiens
ctggaaattaaccca

SEQ ID NO: 104355 - DNA, 15 bp, Homo sapiens
cctggaaattaaccc

SEQ ID NO: 104356 - DNA, 15 bp, Homo sapiens
acctggaaattaacc

SEQ ID NO: 104357 - DNA, 15 bp, Homo sapiens
cacctggaaattaac

SEQ ID NO: 104358 - DNA, 15 bp, Homo sapiens
gcacctggaaattaa

SEQ ID NO: 104359 - DNA, 15 bp, Homo sapiens
ggcacctggaaatta

SEQ ID NO: 104360 - DNA, 15 bp, Homo sapiens
gggcacctggaaatt

SEQ ID NO: 104361 - DNA, 15 bp, Homo sapiens
tgggcacctggaaat

SEQ ID NO: 104362 - DNA, 15 bp, Homo sapiens
gtgggcacctggaaa

SEQ ID NO: 104363 - DNA, 15 bp, Homo sapiens
ggtgggcacctggaa

SEQ ID NO: 104364 - DNA, 15 bp, Homo sapiens
gggtgggcacctgga

SEQ ID NO: 104365 - DNA, 15 bp, Homo sapiens
tgggtgggcacctgg

SEQ ID NO: 104366 - DNA, 15 bp, Homo sapiens
ctgggtgggcacctg

SEQ ID NO: 104367 - DNA, 15 bp, Homo sapiens
gctgggtgggcacct

SEQ ID NO: 104368 - DNA, 15 bp, Homo sapiens
ggctgggtgggcacc

SEQ ID NO: 104369 - DNA, 15 bp, Homo sapiens
aggctgggtgggcac

SEQ ID NO: 104370 - DNA, 15 bp, Homo sapiens
gaggctgggtgggca

SEQ ID NO: 104371 - DNA, 15 bp, Homo sapiens
ggaggctgggtgggc

SEQ ID NO: 104372 - DNA, 15 bp, Homo sapiens
aggaggctgggtggg

SEQ ID NO: 104373 - DNA, 15 bp, Homo sapiens
caggaggctgggtgg

SEQ ID NO: 104374 - DNA, 15 bp, Homo sapiens
acaggaggctgggtg

SEQ ID NO: 104375 - DNA, 15 bp, Homo sapiens
tacaggaggctgggt

SEQ ID NO: 104376 - DNA, 15 bp, Homo sapiens
ctacaggaggctggg

SEQ ID NO: 104377 - DNA, 15 bp, Homo sapiens
tctacaggaggctgg

SEQ ID NO: 104378 - DNA, 15 bp, Homo sapiens
ctctacaggaggctg

SEQ ID NO: 104379 - DNA, 15 bp, Homo sapiens
gctctacaggaggct

SEQ ID NO: 104380 - DNA, 15 bp, Homo sapiens
ggctctacaggaggc

SEQ ID NO: 104381 - DNA, 15 bp, Homo sapiens
gggctctacaggagg

SEQ ID NO: 104382 - DNA, 15 bp, Homo sapiens
tgggctctacaggag

SEQ ID NO: 104383 - DNA, 15 bp, Homo sapiens
gtgggctctacagga

SEQ ID NO: 104384 - DNA, 15 bp, Homo sapiens
agtgggctctacagg

SEQ ID NO: 104385 - DNA, 15 bp, Homo sapiens
gagtgggctctacag

SEQ ID NO: 104386 - DNA, 15 bp, Homo sapiens
cgagtgggctctaca

SEQ ID NO: 104387 - DNA, 15 bp, Homo sapiens
acgagtgggctctac

SEQ ID NO: 104388 - DNA, 15 bp, Homo sapiens
cacgagtgggctcta

SEQ ID NO: 104389 - DNA, 15 bp, Homo sapiens
ccacgagtgggctct

SEQ ID NO: 104390 - DNA, 15 bp, Homo sapiens
cccacgagtgggctc

SEQ ID NO: 104391 - DNA, 15 bp, Homo sapiens
acccacgagtgggct

SEQ ID NO: 104392 - DNA, 15 bp, Homo sapiens
cacccacgagtgggc

SEQ ID NO: 104393 - DNA, 15 bp, Homo sapiens
gcacccacgagtggg

SEQ ID NO: 104394 - DNA, 15 bp, Homo sapiens
tgcacccacgagtgg

SEQ ID NO: 104395 - DNA, 15 bp, Homo sapiens
gtgcacccacgagtg

SEQ ID NO: 104396 - DNA, 15 bp, Homo sapiens
ggtgcacccacgagt

SEQ ID NO: 104397 - DNA, 15 bp, Homo sapiens
aggtgcacccacgag

SEQ ID NO: 104398 - DNA, 15 bp, Homo sapiens
aaggtgcacccacga

SEQ ID NO: 104399 - DNA, 15 bp, Homo sapiens
gaaggtgcacccacg

SEQ ID NO: 104400 - DNA, 15 bp, Homo sapiens
ggaaggtgcacccac

SEQ ID NO: 104401 - DNA, 15 bp, Homo sapiens
aggaaggtgcaccca

SEQ ID NO: 104402 - DNA, 15 bp, Homo sapiens
gaggaaggtgcaccc

SEQ ID NO: 104403 - DNA, 15 bp, Homo sapiens
tgaggaaggtgcacc

SEQ ID NO: 104404 - DNA, 15 bp, Homo sapiens
ctgaggaaggtgcac

SEQ ID NO: 104405 - DNA, 15 bp, Homo sapiens
tctgaggaaggtgca

SEQ ID NO: 104406 - DNA, 15 bp, Homo sapiens
ctctgaggaaggtgc

SEQ ID NO: 104407 - DNA, 15 bp, Homo sapiens
cctctgaggaaggtg

SEQ ID NO: 104408 - DNA, 15 bp, Homo sapiens
tcctctgaggaaggt

SEQ ID NO: 104409 - DNA, 15 bp, Homo sapiens
ctcctctgaggaagg

SEQ ID NO: 104410 - DNA, 15 bp, Homo sapiens
tctcctctgaggaag

SEQ ID NO: 104411 - DNA, 15 bp, Homo sapiens
gtctcctctgaggaa

SEQ ID NO: 104412 - DNA, 15 bp, Homo sapiens
tgtctcctctgagga

SEQ ID NO: 104413 - DNA, 15 bp, Homo sapiens
ctgtctcctctgagg

SEQ ID NO: 104414 - DNA, 15 bp, Homo sapiens
actgtctcctctgag

SEQ ID NO: 104415 - DNA, 15 bp, Homo sapiens
gactgtctcctctga

SEQ ID NO: 104416 - DNA, 15 bp, Homo sapiens
ggactgtctcctctg

SEQ ID NO: 104417 - DNA, 15 bp, Homo sapiens
gggactgtctcctct

SEQ ID NO: 104418 - DNA, 15 bp, Homo sapiens
ggggactgtctcctc

SEQ ID NO: 104419 - DNA, 15 bp, Homo sapiens
tggggactgtctcct

SEQ ID NO: 104420 - DNA, 15 bp, Homo sapiens
gtggggactgtctcc

SEQ ID NO: 104421 - DNA, 15 bp, Homo sapiens
ggtggggactgtctc

SEQ ID NO: 104422 - DNA, 15 bp, Homo sapiens
gggtggggactgtct

SEQ ID NO: 104423 - DNA, 15 bp, Homo sapiens
ggggtggggactgtc

SEQ ID NO: 104424 - DNA, 15 bp, Homo sapiens
gggggtggggactgt

SEQ ID NO: 104425 - DNA, 15 bp, Homo sapiens
ggggggtggggactg

SEQ ID NO: 104426 - DNA, 15 bp, Homo sapiens
aggggggtggggact

SEQ ID NO: 104427 - DNA, 15 bp, Homo sapiens
taggggggtggggac

SEQ ID NO: 104428 - DNA, 15 bp, Homo sapiens
gtaggggggtgggga

SEQ ID NO: 104429 - DNA, 15 bp, Homo sapiens
ggtaggggggtgggg

SEQ ID NO: 104430 - DNA, 15 bp, Homo sapiens
gggtaggggggtggg

SEQ ID NO: 104431 - DNA, 15 bp, Homo sapiens
agggtaggggggtgg

SEQ ID NO: 104432 - DNA, 15 bp, Homo sapiens
aagggtaggggggtg

SEQ ID NO: 104433 - DNA, 15 bp, Homo sapiens
aaagggtaggggggt

SEQ ID NO: 104434 - DNA, 15 bp, Homo sapiens
taaagggtagggggg

SEQ ID NO: 104435 - DNA, 15 bp, Homo sapiens
ataaagggtaggggg

SEQ ID NO: 104436 - DNA, 15 bp, Homo sapiens
cataaagggtagggg

SEQ ID NO: 104437 - DNA, 15 bp, Homo sapiens
acataaagggtaggg

SEQ ID NO: 104438 - DNA, 15 bp, Homo sapiens
gacataaagggtagg

SEQ ID NO: 104439 - DNA, 15 bp, Homo sapiens
tgacataaagggtag

SEQ ID NO: 104440 - DNA, 15 bp, Homo sapiens
atgacataaagggta

SEQ ID NO: 104441 - DNA, 15 bp, Homo sapiens
tatgacataaagggt

SEQ ID NO: 104442 - DNA, 15 bp, Homo sapiens
ctatgacataaaggg

SEQ ID NO: 104443 - DNA, 15 bp, Homo sapiens
tctatgacataaagg

SEQ ID NO: 104444 - DNA, 15 bp, Homo sapiens
ttctatgacataaag

SEQ ID NO: 104445 - DNA, 15 bp, Homo sapiens
attctatgacataaa

SEQ ID NO: 104446 - DNA, 15 bp, Homo sapiens
cattctatgacataa

SEQ ID NO: 104447 - DNA, 15 bp, Homo sapiens
gcattctatgacata

SEQ ID NO: 104448 - DNA, 15 bp, Homo sapiens
agcattctatgacat

SEQ ID NO: 104449 - DNA, 15 bp, Homo sapiens
cagcattctatgaca

SEQ ID NO: 104450 - DNA, 15 bp, Homo sapiens
acagcattctatgac

SEQ ID NO: 104451 - DNA, 15 bp, Homo sapiens
gacagcattctatga

SEQ ID NO: 104452 - DNA, 15 bp, Homo sapiens
tgacagcattctatg

SEQ ID NO: 104453 - DNA, 15 bp, Homo sapiens
gtgacagcattctat

SEQ ID NO: 104454 - DNA, 15 bp, Homo sapiens
agtgacagcattcta

SEQ ID NO: 104455 - DNA, 15 bp, Homo sapiens
cagtgacagcattct

SEQ ID NO: 104456 - DNA, 15 bp, Homo sapiens
tcagtgacagcattc

SEQ ID NO: 104457 - DNA, 15 bp, Homo sapiens
ctcagtgacagcatt

SEQ ID NO: 104458 - DNA, 15 bp, Homo sapiens
gctcagtgacagcat

SEQ ID NO: 104459 - DNA, 15 bp, Homo sapiens
ggctcagtgacagca

SEQ ID NO: 104460 - DNA, 15 bp, Homo sapiens
aggctcagtgacagc

SEQ ID NO: 104461 - DNA, 15 bp, Homo sapiens
aaggctcagtgacag

SEQ ID NO: 104462 - DNA, 15 bp, Homo sapiens
gaaggctcagtgaca

SEQ ID NO: 104463 - DNA, 15 bp, Homo sapiens
ggaaggctcagtgac

SEQ ID NO: 104464 - DNA, 15 bp, Homo sapiens
aggaaggctcagtga

SEQ ID NO: 104465 - DNA, 15 bp, Homo sapiens
taggaaggctcagtg

SEQ ID NO: 104466 - DNA, 15 bp, Homo sapiens
ttaggaaggctcagt

SEQ ID NO: 104467 - DNA, 15 bp, Homo sapiens
gttaggaaggctcag

SEQ ID NO: 104468 - DNA, 15 bp, Homo sapiens
agttaggaaggctca

SEQ ID NO: 104469 - DNA, 15 bp, Homo sapiens
tagttaggaaggctc

SEQ ID NO: 104470 - DNA, 15 bp, Homo sapiens
atagttaggaaggct

SEQ ID NO: 104471 - DNA, 15 bp, Homo sapiens
tatagttaggaaggc

SEQ ID NO: 104472 - DNA, 15 bp, Homo sapiens
gtatagttaggaagg

SEQ ID NO: 104473 - DNA, 15 bp, Homo sapiens
tgtatagttaggaag

SEQ ID NO: 104474 - DNA, 15 bp, Homo sapiens
atgtatagttaggaa

SEQ ID NO: 104475 - DNA, 15 bp, Homo sapiens
tatgtatagttagga

SEQ ID NO: 104476 - DNA, 15 bp, Homo sapiens
gtatgtatagttagg

SEQ ID NO: 104477 - DNA, 15 bp, Homo sapiens
tgtatgtatagttag

SEQ ID NO: 104478 - DNA, 15 bp, Homo sapiens
ttgtatgtatagtta

SEQ ID NO: 104479 - DNA, 15 bp, Homo sapiens
attgtatgtatagtt

SEQ ID NO: 104480 - DNA, 15 bp, Homo sapiens
aattgtatgtatagt

SEQ ID NO: 104481 - DNA, 15 bp, Homo sapiens
gaattgtatgtatag

SEQ ID NO: 104482 - DNA, 15 bp, Homo sapiens
agaattgtatgtata

SEQ ID NO: 104483 - DNA, 15 bp, Homo sapiens
gagaattgtatgtat

SEQ ID NO: 104484 - DNA, 15 bp, Homo sapiens
tgagaattgtatgta

SEQ ID NO: 104485 - DNA, 15 bp, Homo sapiens
atgagaattgtatgt

SEQ ID NO: 104486 - DNA, 15 bp, Homo sapiens
aatgagaattgtatg

SEQ ID NO: 104487 - DNA, 15 bp, Homo sapiens
aaatgagaattgtat

SEQ ID NO: 104488 - DNA, 15 bp, Homo sapiens
aaaatgagaattgta

SEQ ID NO: 104489 - DNA, 15 bp, Homo sapiens
caaaatgagaattgt

SEQ ID NO: 104490 - DNA, 15 bp, Homo sapiens
acaaaatgagaattg

SEQ ID NO: 104491 - DNA, 15 bp, Homo sapiens
tacaaaatgagaatt

SEQ ID NO: 104492 - DNA, 15 bp, Homo sapiens
ttacaaaatgagaat

SEQ ID NO: 104493 - DNA, 15 bp, Homo sapiens
cttacaaaatgagaa

SEQ ID NO: 104494 - DNA, 15 bp, Homo sapiens
tcttacaaaatgaga

SEQ ID NO: 104495 - DNA, 15 bp, Homo sapiens
ttcttacaaaatgag

SEQ ID NO: 104496 - DNA, 15 bp, Homo sapiens
tttcttacaaaatga

SEQ ID NO: 104497 - DNA, 15 bp, Homo sapiens
ttttcttacaaaatg

SEQ ID NO: 104498 - DNA, 15 bp, Homo sapiens
attttcttacaaaat

SEQ ID NO: 104499 - DNA, 15 bp, Homo sapiens
cattttcttacaaaa

SEQ ID NO: 104500 - DNA, 15 bp, Homo sapiens
ccattttcttacaaa

SEQ ID NO: 104501 - DNA, 15 bp, Homo sapiens
tccattttcttacaa

SEQ ID NO: 104502 - DNA, 15 bp, Homo sapiens
ttccattttcttaca

SEQ ID NO: 104503 - DNA, 15 bp, Homo sapiens
gttccattttcttac

SEQ ID NO: 104504 - DNA, 15 bp, Homo sapiens
agttccattttctta

SEQ ID NO: 104505 - DNA, 15 bp, Homo sapiens
cagttccattttctt

SEQ ID NO: 104506 - DNA, 15 bp, Homo sapiens
gcagttccattttct

SEQ ID NO: 104507 - DNA, 15 bp, Homo sapiens
agcagttccattttc

SEQ ID NO: 104508 - DNA, 15 bp, Homo sapiens
tagcagttccatttt

SEQ ID NO: 104509 - DNA, 15 bp, Homo sapiens
ttagcagttccattt

SEQ ID NO: 104510 - DNA, 15 bp, Homo sapiens
cttagcagttccatt

SEQ ID NO: 104511 - DNA, 15 bp, Homo sapiens
gcttagcagttccat

SEQ ID NO: 104512 - DNA, 15 bp, Homo sapiens
tgcttagcagttcca

SEQ ID NO: 104513 - DNA, 15 bp, Homo sapiens
atgcttagcagttcc

SEQ ID NO: 104514 - DNA, 15 bp, Homo sapiens
catgcttagcagttc

SEQ ID NO: 104515 - DNA, 15 bp, Homo sapiens
ccatgcttagcagtt

SEQ ID NO: 104516 - DNA, 15 bp, Homo sapiens
tccatgcttagcagt

SEQ ID NO: 104517 - DNA, 15 bp, Homo sapiens
atccatgcttagcag

SEQ ID NO: 104518 - DNA, 15 bp, Homo sapiens
aatccatgcttagca

SEQ ID NO: 104519 - DNA, 15 bp, Homo sapiens
aaatccatgcttagc

SEQ ID NO: 104520 - DNA, 15 bp, Homo sapiens
caaatccatgcttag

SEQ ID NO: 104521 - DNA, 15 bp, Homo sapiens
gcaaatccatgctta

SEQ ID NO: 104522 - DNA, 15 bp, Homo sapiens
tgcaaatccatgctt

SEQ ID NO: 104523 - DNA, 15 bp, Homo sapiens
atgcaaatccatgct

SEQ ID NO: 104524 - DNA, 15 bp, Homo sapiens
aatgcaaatccatgc

SEQ ID NO: 104525 - DNA, 15 bp, Homo sapiens
aaatgcaaatccatg

SEQ ID NO: 104526 - DNA, 15 bp, Homo sapiens
caaatgcaaatccat

SEQ ID NO: 104527 - DNA, 15 bp, Homo sapiens
tcaaatgcaaatcca

SEQ ID NO: 104528 - DNA, 15 bp, Homo sapiens
ttcaaatgcaaatcc

SEQ ID NO: 104529 - DNA, 15 bp, Homo sapiens
tttcaaatgcaaatc

SEQ ID NO: 104530 - DNA, 15 bp, Homo sapiens
ttttcaaatgcaaat

SEQ ID NO: 104531 - DNA, 15 bp, Homo sapiens
tttttcaaatgcaaa

SEQ ID NO: 104532 - DNA, 15 bp, Homo sapiens
ttttttcaaatgcaa

SEQ ID NO: 104533 - DNA, 15 bp, Homo sapiens
gttttttcaaatgca

SEQ ID NO: 104534 - DNA, 15 bp, Homo sapiens
tgttttttcaaatgc

SEQ ID NO: 104535 - DNA, 15 bp, Homo sapiens
atgttttttcaaatg

SEQ ID NO: 104536 - DNA, 15 bp, Homo sapiens
aatgttttttcaaat

SEQ ID NO: 104537 - DNA, 15 bp, Homo sapiens
gaatgttttttcaaa

SEQ ID NO: 104538 - DNA, 15 bp, Homo sapiens
tgaatgttttttcaa

SEQ ID NO: 104539 - DNA, 15 bp, Homo sapiens
atgaatgttttttca

SEQ ID NO: 104540 - DNA, 15 bp, Homo sapiens
aatgaatgttttttc

SEQ ID NO: 104541 - DNA, 15 bp, Homo sapiens
caatgaatgtttttt

SEQ ID NO: 104542 - DNA, 15 bp, Homo sapiens
acaatgaatgttttt

SEQ ID NO: 104543 - DNA, 15 bp, Homo sapiens
aacaatgaatgtttt

SEQ ID NO: 104544 - DNA, 15 bp, Homo sapiens
taacaatgaatgttt

SEQ ID NO: 104545 - DNA, 15 bp, Homo sapiens
ttaacaatgaatgtt

SEQ ID NO: 104546 - DNA, 15 bp, Homo sapiens
attaacaatgaatgt

SEQ ID NO: 104547 - DNA, 15 bp, Homo sapiens
cattaacaatgaatg

SEQ ID NO: 104548 - DNA, 15 bp, Homo sapiens
acattaacaatgaat

SEQ ID NO: 104549 - DNA, 15 bp, Homo sapiens
gacattaacaatgaa

SEQ ID NO: 104550 - DNA, 15 bp, Homo sapiens
tgacattaacaatga

SEQ ID NO: 104551 - DNA, 15 bp, Homo sapiens
ctgacattaacaatg

SEQ ID NO: 104552 - DNA, 15 bp, Homo sapiens
tctgacattaacaat

SEQ ID NO: 104553 - DNA, 15 bp, Homo sapiens
ttctgacattaacaa

SEQ ID NO: 104554 - DNA, 15 bp, Homo sapiens
cttctgacattaaca

SEQ ID NO: 104555 - DNA, 15 bp, Homo sapiens
gcttctgacattaac

SEQ ID NO: 104556 - DNA, 15 bp, Homo sapiens
tgcttctgacattaa

SEQ ID NO: 104557 - DNA, 15 bp, Homo sapiens
ttgcttctgacatta

SEQ ID NO: 104558 - DNA, 15 bp, Homo sapiens
cttgcttctgacatt

SEQ ID NO: 104559 - DNA, 15 bp, Homo sapiens
tcttgcttctgacat

SEQ ID NO: 104560 - DNA, 15 bp, Homo sapiens
ttcttgcttctgaca

SEQ ID NO: 104561 - DNA, 15 bp, Homo sapiens
tttcttgcttctgac

SEQ ID NO: 104562 - DNA, 15 bp, Homo sapiens
ttttcttgcttctga

SEQ ID NO: 104563 - DNA, 15 bp, Homo sapiens
tttttcttgcttctg

SEQ ID NO: 104564 - DNA, 15 bp, Homo sapiens
ctttttcttgcttct

SEQ ID NO: 104565 - DNA, 15 bp, Homo sapiens
gctttttcttgcttc

SEQ ID NO: 104566 - DNA, 15 bp, Homo sapiens
agctttttcttgctt

SEQ ID NO: 104567 - DNA, 15 bp, Homo sapiens
cagctttttcttgct

SEQ ID NO: 104568 - DNA, 15 bp, Homo sapiens
gcagctttttcttgc

SEQ ID NO: 104569 - DNA, 15 bp, Homo sapiens
ggcagctttttcttg

SEQ ID NO: 104570 - DNA, 15 bp, Homo sapiens
tggcagctttttctt

SEQ ID NO: 104571 - DNA, 15 bp, Homo sapiens
atggcagctttttct

SEQ ID NO: 104572 - DNA, 15 bp, Homo sapiens
catggcagctttttc

SEQ ID NO: 104573 - DNA, 15 bp, Homo sapiens
acatggcagcttttt

SEQ ID NO: 104574 - DNA, 15 bp, Homo sapiens
cacatggcagctttt

SEQ ID NO: 104575 - DNA, 15 bp, Homo sapiens
acacatggcagcttt

SEQ ID NO: 104576 - DNA, 15 bp, Homo sapiens
aacacatggcagctt

SEQ ID NO: 104577 - DNA, 15 bp, Homo sapiens
taacacatggcagct

SEQ ID NO: 104578 - DNA, 15 bp, Homo sapiens
ttaacacatggcagc

SEQ ID NO: 104579 - DNA, 15 bp, Homo sapiens
attaacacatggcag

SEQ ID NO: 104580 - DNA, 15 bp, Homo sapiens
gattaacacatggca

SEQ ID NO: 104581 - DNA, 15 bp, Homo sapiens
tgattaacacatggc

SEQ ID NO: 104582 - DNA, 15 bp, Homo sapiens
atgattaacacatgg

SEQ ID NO: 104583 - DNA, 15 bp, Homo sapiens
aatgattaacacatg

SEQ ID NO: 104584 - DNA, 15 bp, Homo sapiens
gaatgattaacacat

SEQ ID NO: 104585 - DNA, 15 bp, Homo sapiens
ggaatgattaacaca

SEQ ID NO: 104586 - DNA, 15 bp, Homo sapiens
tggaatgattaacac

SEQ ID NO: 104587 - DNA, 15 bp, Homo sapiens
ctggaatgattaaca

SEQ ID NO: 104588 - DNA, 15 bp, Homo sapiens
actggaatgattaac

SEQ ID NO: 104589 - DNA, 15 bp, Homo sapiens
cactggaatgattaa

SEQ ID NO: 104590 - DNA, 15 bp, Homo sapiens
tcactggaatgatta

SEQ ID NO: 104591 - DNA, 15 bp, Homo sapiens
ctcactggaatgatt

SEQ ID NO: 104592 - DNA, 15 bp, Homo sapiens
cctcactggaatgat

SEQ ID NO: 104593 - DNA, 15 bp, Homo sapiens
ccctcactggaatga

SEQ ID NO: 104594 - DNA, 15 bp, Homo sapiens
accctcactggaatg

SEQ ID NO: 104595 - DNA, 15 bp, Homo sapiens
aaccctcactggaat

SEQ ID NO: 104596 - DNA, 15 bp, Homo sapiens
taaccctcactggaa

SEQ ID NO: 104597 - DNA, 15 bp, Homo sapiens
gtaaccctcactgga

SEQ ID NO: 104598 - DNA, 15 bp, Homo sapiens
tgtaaccctcactgg

SEQ ID NO: 104599 - DNA, 15 bp, Homo sapiens
gtgtaaccctcactg

SEQ ID NO: 104600 - DNA, 15 bp, Homo sapiens
ggtgtaaccctcact

SEQ ID NO: 104601 - DNA, 15 bp, Homo sapiens
tggtgtaaccctcac

SEQ ID NO: 104602 - DNA, 15 bp, Homo sapiens
ttggtgtaaccctca

SEQ ID NO: 104603 - DNA, 15 bp, Homo sapiens
cttggtgtaaccctc

SEQ ID NO: 104604 - DNA, 15 bp, Homo sapiens
tcttggtgtaaccct

SEQ ID NO: 104605 - DNA, 15 bp, Homo sapiens
ttcttggtgtaaccc

SEQ ID NO: 104606 - DNA, 15 bp, Homo sapiens
cttcttggtgtaacc

SEQ ID NO: 104607 - DNA, 15 bp, Homo sapiens
acttcttggtgtaac

SEQ ID NO: 104608 - DNA, 15 bp, Homo sapiens
cacttcttggtgtaa

SEQ ID NO: 104609 - DNA, 15 bp, Homo sapiens
acacttcttggtgta

SEQ ID NO: 104610 - DNA, 15 bp, Homo sapiens
gacacttcttggtgt

SEQ ID NO: 104611 - DNA, 15 bp, Homo sapiens
agacacttcttggtg

SEQ ID NO: 104612 - DNA, 15 bp, Homo sapiens
cagacacttcttggt

SEQ ID NO: 104613 - DNA, 15 bp, Homo sapiens
gcagacacttcttgg

SEQ ID NO: 104614 - DNA, 15 bp, Homo sapiens
agcagacacttcttg

SEQ ID NO: 104615 - DNA, 15 bp, Homo sapiens
cagcagacacttctt

SEQ ID NO: 104616 - DNA, 15 bp, Homo sapiens
gcagcagacacttct

SEQ ID NO: 104617 - DNA, 15 bp, Homo sapiens
tgcagcagacacttc

SEQ ID NO: 104618 - DNA, 15 bp, Homo sapiens
gtgcagcagacactt

SEQ ID NO: 104619 - DNA, 15 bp, Homo sapiens
ggtgcagcagacact

SEQ ID NO: 104620 - DNA, 15 bp, Homo sapiens
aggtgcagcagacac

SEQ ID NO: 104621 - DNA, 15 bp, Homo sapiens
aaggtgcagcagaca

SEQ ID NO: 104622 - DNA, 15 bp, Homo sapiens
gaaggtgcagcagac

SEQ ID NO: 104623 - DNA, 15 bp, Homo sapiens
agaaggtgcagcaga

SEQ ID NO: 104624 - DNA, 15 bp, Homo sapiens
cagaaggtgcagcag

SEQ ID NO: 104625 - DNA, 15 bp, Homo sapiens
acagaaggtgcagca

SEQ ID NO: 104626 - DNA, 15 bp, Homo sapiens
cacagaaggtgcagc

SEQ ID NO: 104627 - DNA, 15 bp, Homo sapiens
gcacagaaggtgcag

SEQ ID NO: 104628 - DNA, 15 bp, Homo sapiens
agcacagaaggtgca

SEQ ID NO: 104629 - DNA, 15 bp, Homo sapiens
cagcacagaaggtgc

SEQ ID NO: 104630 - DNA, 15 bp, Homo sapiens
acagcacagaaggtg

SEQ ID NO: 104631 - DNA, 15 bp, Homo sapiens
cacagcacagaaggt

SEQ ID NO: 104632 - DNA, 15 bp, Homo sapiens
gcacagcacagaagg

SEQ ID NO: 104633 - DNA, 15 bp, Homo sapiens
cgcacagcacagaag

SEQ ID NO: 104634 - DNA, 15 bp, Homo sapiens
acgcacagcacagaa

SEQ ID NO: 104635 - DNA, 15 bp, Homo sapiens
cacgcacagcacaga

SEQ ID NO: 104636 - DNA, 15 bp, Homo sapiens
ccacgcacagcacag

SEQ ID NO: 104637 - DNA, 15 bp, Homo sapiens
accacgcacagcaca

SEQ ID NO: 104638 - DNA, 15 bp, Homo sapiens
gaccacgcacagcac

SEQ ID NO: 104639 - DNA, 15 bp, Homo sapiens
ggaccacgcacagca

SEQ ID NO: 104640 - DNA, 15 bp, Homo sapiens
tggaccacgcacagc

SEQ ID NO: 104641 - DNA, 15 bp, Homo sapiens
atggaccacgcacag

SEQ ID NO: 104642 - DNA, 15 bp, Homo sapiens
catggaccacgcaca

SEQ ID NO: 104643 - DNA, 15 bp, Homo sapiens
gcatggaccacgcac

SEQ ID NO: 104644 - DNA, 15 bp, Homo sapiens
ggcatggaccacgca

SEQ ID NO: 104645 - DNA, 15 bp, Homo sapiens
gggcatggaccacgc

SEQ ID NO: 104646 - DNA, 15 bp, Homo sapiens
ggggcatggaccacg

SEQ ID NO: 104647 - DNA, 15 bp, Homo sapiens
tggggcatggaccac

SEQ ID NO: 104648 - DNA, 15 bp, Homo sapiens
ttggggcatggacca

SEQ ID NO: 104649 - DNA, 15 bp, Homo sapiens
cttggggcatggacc

SEQ ID NO: 104650 - DNA, 15 bp, Homo sapiens
ccttggggcatggac

SEQ ID NO: 104651 - DNA, 15 bp, Homo sapiens
gccttggggcatgga

SEQ ID NO: 104652 - DNA, 15 bp, Homo sapiens
agccttggggcatgg

SEQ ID NO: 104653 - DNA, 15 bp, Homo sapiens
cagccttggggcatg

SEQ ID NO: 104654 - DNA, 15 bp, Homo sapiens
ccagccttggggcat

SEQ ID NO: 104655 - DNA, 15 bp, Homo sapiens
tccagccttggggca

SEQ ID NO: 104656 - DNA, 15 bp, Homo sapiens
ctccagccttggggc

SEQ ID NO: 104657 - DNA, 15 bp, Homo sapiens
cctccagccttgggg

SEQ ID NO: 104658 - DNA, 15 bp, Homo sapiens
acctccagccttggg

SEQ ID NO: 104659 - DNA, 15 bp, Homo sapiens
cacctccagccttgg

SEQ ID NO: 104660 - DNA, 15 bp, Homo sapiens
gcacctccagccttg

SEQ ID NO: 104661 - DNA, 15 bp, Homo sapiens
tgcacctccagcctt

SEQ ID NO: 104662 - DNA, 15 bp, Homo sapiens
ttgcacctccagcct

SEQ ID NO: 104663 - DNA, 15 bp, Homo sapiens
tttgcacctccagcc

SEQ ID NO: 104664 - DNA, 15 bp, Homo sapiens
ctttgcacctccagc

SEQ ID NO: 104665 - DNA, 15 bp, Homo sapiens
cctttgcacctccag

SEQ ID NO: 104666 - DNA, 15 bp, Homo sapiens
ccctttgcacctcca

SEQ ID NO: 104667 - DNA, 15 bp, Homo sapiens
cccctttgcacctcc

SEQ ID NO: 104668 - DNA, 15 bp, Homo sapiens
tcccctttgcacctc

SEQ ID NO: 104669 - DNA, 15 bp, Homo sapiens
gtcccctttgcacct

SEQ ID NO: 104670 - DNA, 15 bp, Homo sapiens
tgtcccctttgcacc

SEQ ID NO: 104671 - DNA, 15 bp, Homo sapiens
ctgtcccctttgcac

SEQ ID NO: 104672 - DNA, 15 bp, Homo sapiens
cctgtcccctttgca

SEQ ID NO: 104673 - DNA, 15 bp, Homo sapiens
acctgtcccctttgc

SEQ ID NO: 104674 - DNA, 15 bp, Homo sapiens
gacctgtcccctttg

SEQ ID NO: 104675 - DNA, 15 bp, Homo sapiens
ggacctgtccccttt

SEQ ID NO: 104676 - DNA, 15 bp, Homo sapiens
gggacctgtcccctt

SEQ ID NO: 104677 - DNA, 15 bp, Homo sapiens
cgggacctgtcccct

SEQ ID NO: 104678 - DNA, 15 bp, Homo sapiens
ccgggacctgtcccc

SEQ ID NO: 104679 - DNA, 15 bp, Homo sapiens
tccgggacctgtccc

SEQ ID NO: 104680 - DNA, 15 bp, Homo sapiens
ctccgggacctgtcc

SEQ ID NO: 104681 - DNA, 15 bp, Homo sapiens
cctccgggacctgtc

SEQ ID NO: 104682 - DNA, 15 bp, Homo sapiens
gcctccgggacctgt

SEQ ID NO: 104683 - DNA, 15 bp, Homo sapiens
agcctccgggacctg

SEQ ID NO: 104684 - DNA, 15 bp, Homo sapiens
gagcctccgggacct

SEQ ID NO: 104685 - DNA, 15 bp, Homo sapiens
agagcctccgggacc

SEQ ID NO: 104686 - DNA, 15 bp, Homo sapiens
cagagcctccgggac

SEQ ID NO: 104687 - DNA, 15 bp, Homo sapiens
ccagagcctccggga

SEQ ID NO: 104688 - DNA, 15 bp, Homo sapiens
tccagagcctccggg

SEQ ID NO: 104689 - DNA, 15 bp, Homo sapiens
ttccagagcctccgg

SEQ ID NO: 104690 - DNA, 15 bp, Homo sapiens
cttccagagcctccg

SEQ ID NO: 104691 - DNA, 15 bp, Homo sapiens
ccttccagagcctcc

SEQ ID NO: 104692 - DNA, 15 bp, Homo sapiens
cccttccagagcctc

SEQ ID NO: 104693 - DNA, 15 bp, Homo sapiens
gcccttccagagcct

SEQ ID NO: 104694 - DNA, 15 bp, Homo sapiens
tgcccttccagagcc

SEQ ID NO: 104695 - DNA, 15 bp, Homo sapiens
ctgcccttccagagc

SEQ ID NO: 104696 - DNA, 15 bp, Homo sapiens
tctgcccttccagag

SEQ ID NO: 104697 - DNA, 15 bp, Homo sapiens
ctctgcccttccaga

SEQ ID NO: 104698 - DNA, 15 bp, Homo sapiens
tctctgcccttccag

SEQ ID NO: 104699 - DNA, 15 bp, Homo sapiens
ttctctgcccttcca

SEQ ID NO: 104700 - DNA, 15 bp, Homo sapiens
cttctctgcccttcc

SEQ ID NO: 104701 - DNA, 15 bp, Homo sapiens
gcttctctgcccttc

SEQ ID NO: 104702 - DNA, 15 bp, Homo sapiens
ggcttctctgccctt

SEQ ID NO: 104703 - DNA, 15 bp, Homo sapiens
tggcttctctgccct

SEQ ID NO: 104704 - DNA, 15 bp, Homo sapiens
ctggcttctctgccc

SEQ ID NO: 104705 - DNA, 15 bp, Homo sapiens
cctggcttctctgcc

SEQ ID NO: 104706 - DNA, 15 bp, Homo sapiens
gcctggcttctctgc

SEQ ID NO: 104707 - DNA, 15 bp, Homo sapiens
cgcctggcttctctg

SEQ ID NO: 104708 - DNA, 15 bp, Homo sapiens
acgcctggcttctct

SEQ ID NO: 104709 - DNA, 15 bp, Homo sapiens
cacgcctggcttctc

SEQ ID NO: 104710 - DNA, 15 bp, Homo sapiens
ccacgcctggcttct

SEQ ID NO: 104711 - DNA, 15 bp, Homo sapiens
tccacgcctggcttc

SEQ ID NO: 104712 - DNA, 15 bp, Homo sapiens
ttccacgcctggctt

SEQ ID NO: 104713 - DNA, 15 bp, Homo sapiens
cttccacgcctggct

SEQ ID NO: 104714 - DNA, 15 bp, Homo sapiens
ccttccacgcctggc

SEQ ID NO: 104715 - DNA, 15 bp, Homo sapiens
cccttccacgcctgg

SEQ ID NO: 104716 - DNA, 15 bp, Homo sapiens
acccttccacgcctg

SEQ ID NO: 104717 - DNA, 15 bp, Homo sapiens
tacccttccacgcct

SEQ ID NO: 104718 - DNA, 15 bp, Homo sapiens
ctacccttccacgcc

SEQ ID NO: 104719 - DNA, 15 bp, Homo sapiens
cctacccttccacgc

SEQ ID NO: 104720 - DNA, 15 bp, Homo sapiens
ccctacccttccacg

SEQ ID NO: 104721 - DNA, 15 bp, Homo sapiens
tccctacccttccac

SEQ ID NO: 104722 - DNA, 15 bp, Homo sapiens
ctccctacccttcca

SEQ ID NO: 104723 - DNA, 15 bp, Homo sapiens
tctccctacccttcc

SEQ ID NO: 104724 - DNA, 15 bp, Homo sapiens
ctctccctacccttc

SEQ ID NO: 104725 - DNA, 15 bp, Homo sapiens
gctctccctaccctt

SEQ ID NO: 104726 - DNA, 15 bp, Homo sapiens
ggctctccctaccct

SEQ ID NO: 104727 - DNA, 15 bp, Homo sapiens
gggctctccctaccc

SEQ ID NO: 104728 - DNA, 15 bp, Homo sapiens
agggctctccctacc

SEQ ID NO: 104729 - DNA, 15 bp, Homo sapiens
gagggctctccctac

SEQ ID NO: 104730 - DNA, 15 bp, Homo sapiens
cgagggctctcccta

SEQ ID NO: 104731 - DNA, 15 bp, Homo sapiens
ccgagggctctccct

SEQ ID NO: 104732 - DNA, 15 bp, Homo sapiens
cccgagggctctccc

SEQ ID NO: 104733 - DNA, 15 bp, Homo sapiens
ccccgagggctctcc

SEQ ID NO: 104734 - DNA, 15 bp, Homo sapiens
gccccgagggctctc

SEQ ID NO: 104735 - DNA, 15 bp, Homo sapiens
ggccccgagggctct

SEQ ID NO: 104736 - DNA, 15 bp, Homo sapiens
aggccccgagggctc

SEQ ID NO: 104737 - DNA, 15 bp, Homo sapiens
gaggccccgagggct

SEQ ID NO: 104738 - DNA, 15 bp, Homo sapiens
agaggccccgagggc

SEQ ID NO: 104739 - DNA, 15 bp, Homo sapiens
cagaggccccgaggg

SEQ ID NO: 104740 - DNA, 15 bp, Homo sapiens
ccagaggccccgagg

SEQ ID NO: 104741 - DNA, 15 bp, Homo sapiens
gccagaggccccgag

SEQ ID NO: 104742 - DNA, 15 bp, Homo sapiens
ggccagaggccccga

SEQ ID NO: 104743 - DNA, 15 bp, Homo sapiens
aggccagaggccccg

SEQ ID NO: 104744 - DNA, 15 bp, Homo sapiens
gaggccagaggcccc

SEQ ID NO: 104745 - DNA, 15 bp, Homo sapiens
agaggccagaggccc

SEQ ID NO: 104746 - DNA, 15 bp, Homo sapiens
gagaggccagaggcc

SEQ ID NO: 104747 - DNA, 15 bp, Homo sapiens
ggagaggccagaggc

SEQ ID NO: 104748 - DNA, 15 bp, Homo sapiens
gggagaggccagagg

SEQ ID NO: 104749 - DNA, 15 bp, Homo sapiens
tgggagaggccagag

SEQ ID NO: 104750 - DNA, 15 bp, Homo sapiens
gtgggagaggccaga

SEQ ID NO: 104751 - DNA, 15 bp, Homo sapiens
tgtgggagaggccag

SEQ ID NO: 104752 - DNA, 15 bp, Homo sapiens
ctgtgggagaggcca

SEQ ID NO: 104753 - DNA, 15 bp, Homo sapiens
tctgtgggagaggcc

SEQ ID NO: 104754 - DNA, 15 bp, Homo sapiens
ctctgtgggagaggc

SEQ ID NO: 104755 - DNA, 15 bp, Homo sapiens
tctctgtgggagagg

SEQ ID NO: 104756 - DNA, 15 bp, Homo sapiens
gtctctgtgggagag

SEQ ID NO: 104757 - DNA, 15 bp, Homo sapiens
tgtctctgtgggaga

SEQ ID NO: 104758 - DNA, 15 bp, Homo sapiens
ctgtctctgtgggag

SEQ ID NO: 104759 - DNA, 15 bp, Homo sapiens
gctgtctctgtggga

SEQ ID NO: 104760 - DNA, 15 bp, Homo sapiens
tgctgtctctgtggg

SEQ ID NO: 104761 - DNA, 15 bp, Homo sapiens
atgctgtctctgtgg

SEQ ID NO: 104762 - DNA, 15 bp, Homo sapiens
catgctgtctctgtg

SEQ ID NO: 104763 - DNA, 15 bp, Homo sapiens
tcatgctgtctctgt

SEQ ID NO: 104764 - DNA, 15 bp, Homo sapiens
ttcatgctgtctctg

SEQ ID NO: 104765 - DNA, 15 bp, Homo sapiens
cttcatgctgtctct

SEQ ID NO: 104766 - DNA, 15 bp, Homo sapiens
ccttcatgctgtctc

SEQ ID NO: 104767 - DNA, 15 bp, Homo sapiens
tccttcatgctgtct

SEQ ID NO: 104768 - DNA, 15 bp, Homo sapiens
ttccttcatgctgtc

SEQ ID NO: 104769 - DNA, 15 bp, Homo sapiens
cttccttcatgctgt

SEQ ID NO: 104770 - DNA, 15 bp, Homo sapiens
ccttccttcatgctg

SEQ ID NO: 104771 - DNA, 15 bp, Homo sapiens
gccttccttcatgct

SEQ ID NO: 104772 - DNA, 15 bp, Homo sapiens
ggccttccttcatgc

SEQ ID NO: 104773 - DNA, 15 bp, Homo sapiens
aggccttccttcatg

SEQ ID NO: 104774 - DNA, 15 bp, Homo sapiens
caggccttccttcat

SEQ ID NO: 104775 - DNA, 15 bp, Homo sapiens
ccaggccttccttca

SEQ ID NO: 104776 - DNA, 15 bp, Homo sapiens
cccaggccttccttc

SEQ ID NO: 104777 - DNA, 15 bp, Homo sapiens
gcccaggccttcctt

SEQ ID NO: 104778 - DNA, 15 bp, Homo sapiens
cgcccaggccttcct

SEQ ID NO: 104779 - DNA, 15 bp, Homo sapiens
acgcccaggccttcc

SEQ ID NO: 104780 - DNA, 15 bp, Homo sapiens
cacgcccaggccttc

SEQ ID NO: 104781 - DNA, 15 bp, Homo sapiens
tcacgcccaggcctt

SEQ ID NO: 104782 - DNA, 15 bp, Homo sapiens
ctcacgcccaggcct

SEQ ID NO: 104783 - DNA, 15 bp, Homo sapiens
tctcacgcccaggcc

SEQ ID NO: 104784 - DNA, 15 bp, Homo sapiens
ttctcacgcccaggc

SEQ ID NO: 104785 - DNA, 15 bp, Homo sapiens
gttctcacgcccagg

SEQ ID NO: 104786 - DNA, 15 bp, Homo sapiens
tgttctcacgcccag

SEQ ID NO: 104787 - DNA, 15 bp, Homo sapiens
ctgttctcacgccca

SEQ ID NO: 104788 - DNA, 15 bp, Homo sapiens
tctgttctcacgccc

SEQ ID NO: 104789 - DNA, 15 bp, Homo sapiens
atctgttctcacgcc

SEQ ID NO: 104790 - DNA, 15 bp, Homo sapiens
catctgttctcacgc

SEQ ID NO: 104791 - DNA, 15 bp, Homo sapiens
acatctgttctcacg

SEQ ID NO: 104792 - DNA, 15 bp, Homo sapiens
cacatctgttctcac

SEQ ID NO: 104793 - DNA, 15 bp, Homo sapiens
ccacatctgttctca

SEQ ID NO: 104794 - DNA, 15 bp, Homo sapiens
cccacatctgttctc

SEQ ID NO: 104795 - DNA, 15 bp, Homo sapiens
ccccacatctgttct

SEQ ID NO: 104796 - DNA, 15 bp, Homo sapiens
cccccacatctgttc

SEQ ID NO: 104797 - DNA, 15 bp, Homo sapiens
tcccccacatctgtt

SEQ ID NO: 104798 - DNA, 15 bp, Homo sapiens
gtcccccacatctgt

SEQ ID NO: 104799 - DNA, 15 bp, Homo sapiens
tgtcccccacatctg

SEQ ID NO: 104800 - DNA, 15 bp, Homo sapiens
gtgtcccccacatct

SEQ ID NO: 104801 - DNA, 15 bp, Homo sapiens
tgtgtcccccacatc

SEQ ID NO: 104802 - DNA, 15 bp, Homo sapiens
ctgtgtcccccacat

SEQ ID NO: 104803 - DNA, 15 bp, Homo sapiens
tctgtgtcccccaca

SEQ ID NO: 104804 - DNA, 15 bp, Homo sapiens
ctctgtgtcccccac

SEQ ID NO: 104805 - DNA, 15 bp, Homo sapiens
cctctgtgtccccca

SEQ ID NO: 104806 - DNA, 15 bp, Homo sapiens
gcctctgtgtccccc

SEQ ID NO: 104807 - DNA, 15 bp, Homo sapiens
cgcctctgtgtcccc

SEQ ID NO: 104808 - DNA, 15 bp, Homo sapiens
ccgcctctgtgtccc

SEQ ID NO: 104809 - DNA, 15 bp, Homo sapiens
tccgcctctgtgtcc

SEQ ID NO: 104810 - DNA, 15 bp, Homo sapiens
ctccgcctctgtgtc

SEQ ID NO: 104811 - DNA, 15 bp, Homo sapiens
cctccgcctctgtgt

SEQ ID NO: 104812 - DNA, 15 bp, Homo sapiens
gcctccgcctctgtg

SEQ ID NO: 104813 - DNA, 15 bp, Homo sapiens
ggcctccgcctctgt

SEQ ID NO: 104814 - DNA, 15 bp, Homo sapiens
tggcctccgcctctg

SEQ ID NO: 104815 - DNA, 15 bp, Homo sapiens
gtggcctccgcctct

SEQ ID NO: 104816 - DNA, 15 bp, Homo sapiens
cgtggcctccgcctc

SEQ ID NO: 104817 - DNA, 15 bp, Homo sapiens
acgtggcctccgcct

SEQ ID NO: 104818 - DNA, 15 bp, Homo sapiens
cacgtggcctccgcc

SEQ ID NO: 104819 - DNA, 15 bp, Homo sapiens
ccacgtggcctccgc

SEQ ID NO: 104820 - DNA, 15 bp, Homo sapiens
gccacgtggcctccg

SEQ ID NO: 104821 - DNA, 15 bp, Homo sapiens
tgccacgtggcctcc

SEQ ID NO: 104822 - DNA, 15 bp, Homo sapiens
ctgccacgtggcctc

SEQ ID NO: 104823 - DNA, 15 bp, Homo sapiens
cctgccacgtggcct

SEQ ID NO: 104824 - DNA, 15 bp, Homo sapiens
tcctgccacgtggcc

SEQ ID NO: 104825 - DNA, 15 bp, Homo sapiens
ctcctgccacgtggc

SEQ ID NO: 104826 - DNA, 15 bp, Homo sapiens
cctcctgccacgtgg

SEQ ID NO: 104827 - DNA, 15 bp, Homo sapiens
ccctcctgccacgtg

SEQ ID NO: 104828 - DNA, 15 bp, Homo sapiens
cccctcctgccacgt

SEQ ID NO: 104829 - DNA, 15 bp, Homo sapiens
tcccctcctgccacg

SEQ ID NO: 104830 - DNA, 15 bp, Homo sapiens
ttcccctcctgccac

SEQ ID NO: 104831 - DNA, 15 bp, Homo sapiens
tttcccctcctgcca

SEQ ID NO: 104832 - DNA, 15 bp, Homo sapiens
gtttcccctcctgcc

SEQ ID NO: 104833 - DNA, 15 bp, Homo sapiens
tgtttcccctcctgc

SEQ ID NO: 104834 - DNA, 15 bp, Homo sapiens
ctgtttcccctcctg

SEQ ID NO: 104835 - DNA, 15 bp, Homo sapiens
cctgtttcccctcct

SEQ ID NO: 104836 - DNA, 15 bp, Homo sapiens
gcctgtttcccctcc

SEQ ID NO: 104837 - DNA, 15 bp, Homo sapiens
agcctgtttcccctc

SEQ ID NO: 104838 - DNA, 15 bp, Homo sapiens
cagcctgtttcccct

SEQ ID NO: 104839 - DNA, 15 bp, Homo sapiens
ccagcctgtttcccc

SEQ ID NO: 104840 - DNA, 15 bp, Homo sapiens
accagcctgtttccc

SEQ ID NO: 104841 - DNA, 15 bp, Homo sapiens
caccagcctgtttcc

SEQ ID NO: 104842 - DNA, 15 bp, Homo sapiens
ccaccagcctgtttc

SEQ ID NO: 104843 - DNA, 15 bp, Homo sapiens
tccaccagcctgttt

SEQ ID NO: 104844 - DNA, 15 bp, Homo sapiens
ttccaccagcctgtt

SEQ ID NO: 104845 - DNA, 15 bp, Homo sapiens
gttccaccagcctgt

SEQ ID NO: 104846 - DNA, 15 bp, Homo sapiens
tgttccaccagcctg

SEQ ID NO: 104847 - DNA, 15 bp, Homo sapiens
ctgttccaccagcct

SEQ ID NO: 104848 - DNA, 15 bp, Homo sapiens
cctgttccaccagcc

SEQ ID NO: 104849 - DNA, 15 bp, Homo sapiens
ccctgttccaccagc

SEQ ID NO: 104850 - DNA, 15 bp, Homo sapiens
accctgttccaccag

SEQ ID NO: 104851 - DNA, 15 bp, Homo sapiens
caccctgttccacca

SEQ ID NO: 104852 - DNA, 15 bp, Homo sapiens
gcaccctgttccacc

SEQ ID NO: 104853 - DNA, 15 bp, Homo sapiens
tgcaccctgttccac

SEQ ID NO: 104854 - DNA, 15 bp, Homo sapiens
gtgcaccctgttcca

SEQ ID NO: 104855 - DNA, 15 bp, Homo sapiens
cgtgcaccctgttcc

SEQ ID NO: 104856 - DNA, 15 bp, Homo sapiens
ccgtgcaccctgttc

SEQ ID NO: 104857 - DNA, 15 bp, Homo sapiens
cccgtgcaccctgtt

SEQ ID NO: 104858 - DNA, 15 bp, Homo sapiens
ccccgtgcaccctgt

SEQ ID NO: 104859 - DNA, 15 bp, Homo sapiens
gccccgtgcaccctg

SEQ ID NO: 104860 - DNA, 15 bp, Homo sapiens
ggccccgtgcaccct

SEQ ID NO: 104861 - DNA, 15 bp, Homo sapiens
aggccccgtgcaccc

SEQ ID NO: 104862 - DNA, 15 bp, Homo sapiens
caggccccgtgcacc

SEQ ID NO: 104863 - DNA, 15 bp, Homo sapiens
ccaggccccgtgcac

SEQ ID NO: 104864 - DNA, 15 bp, Homo sapiens
cccaggccccgtgca

SEQ ID NO: 104865 - DNA, 15 bp, Homo sapiens
ccccaggccccgtgc

SEQ ID NO: 104866 - DNA, 15 bp, Homo sapiens
tccccaggccccgtg

SEQ ID NO: 104867 - DNA, 15 bp, Homo sapiens
ctccccaggccccgt

SEQ ID NO: 104868 - DNA, 15 bp, Homo sapiens
cctccccaggccccg

SEQ ID NO: 104869 - DNA, 15 bp, Homo sapiens
ccctccccaggcccc

SEQ ID NO: 104870 - DNA, 15 bp, Homo sapiens
tccctccccaggccc

SEQ ID NO: 104871 - DNA, 15 bp, Homo sapiens
atccctccccaggcc

SEQ ID NO: 104872 - DNA, 15 bp, Homo sapiens
aatccctccccaggc

SEQ ID NO: 104873 - DNA, 15 bp, Homo sapiens
aaatccctccccagg

SEQ ID NO: 104874 - DNA, 15 bp, Homo sapiens
caaatccctccccag

SEQ ID NO: 104875 - DNA, 15 bp, Homo sapiens
ccaaatccctcccca

SEQ ID NO: 104876 - DNA, 15 bp, Homo sapiens
tccaaatccctcccc

SEQ ID NO: 104877 - DNA, 15 bp, Homo sapiens
atccaaatccctccc

SEQ ID NO: 104878 - DNA, 15 bp, Homo sapiens
gatccaaatccctcc

SEQ ID NO: 104879 - DNA, 15 bp, Homo sapiens
agatccaaatccctc

SEQ ID NO: 104880 - DNA, 15 bp, Homo sapiens
gagatccaaatccct

SEQ ID NO: 104881 - DNA, 15 bp, Homo sapiens
tgagatccaaatccc

SEQ ID NO: 104882 - DNA, 15 bp, Homo sapiens
atgagatccaaatcc

SEQ ID NO: 104883 - DNA, 15 bp, Homo sapiens
aatgagatccaaatc

SEQ ID NO: 104884 - DNA, 15 bp, Homo sapiens
gaatgagatccaaat

SEQ ID NO: 104885 - DNA, 15 bp, Homo sapiens
agaatgagatccaaa

SEQ ID NO: 104886 - DNA, 15 bp, Homo sapiens
aagaatgagatccaa

SEQ ID NO: 104887 - DNA, 15 bp, Homo sapiens
aaagaatgagatcca

SEQ ID NO: 104888 - DNA, 15 bp, Homo sapiens
caaagaatgagatcc

SEQ ID NO: 104889 - DNA, 15 bp, Homo sapiens
acaaagaatgagatc

SEQ ID NO: 104890 - DNA, 15 bp, Homo sapiens
cacaaagaatgagat

SEQ ID NO: 104891 - DNA, 15 bp, Homo sapiens
ccacaaagaatgaga

SEQ ID NO: 104892 - DNA, 15 bp, Homo sapiens
cccacaaagaatgag

SEQ ID NO: 104893 - DNA, 15 bp, Homo sapiens
ccccacaaagaatga

SEQ ID NO: 104894 - DNA, 15 bp, Homo sapiens
accccacaaagaatg

SEQ ID NO: 104895 - DNA, 15 bp, Homo sapiens
caccccacaaagaat

SEQ ID NO: 104896 - DNA, 15 bp, Homo sapiens
acaccccacaaagaa

SEQ ID NO: 104897 - DNA, 15 bp, Homo sapiens
cacaccccacaaaga

SEQ ID NO: 104898 - DNA, 15 bp, Homo sapiens
ccacaccccacaaag

SEQ ID NO: 104899 - DNA, 15 bp, Homo sapiens
cccacaccccacaaa

SEQ ID NO: 104900 - DNA, 15 bp, Homo sapiens
ccccacaccccacaa

SEQ ID NO: 104901 - DNA, 15 bp, Homo sapiens
tccccacaccccaca

SEQ ID NO: 104902 - DNA, 15 bp, Homo sapiens
ctccccacaccccac

SEQ ID NO: 104903 - DNA, 15 bp, Homo sapiens
actccccacacccca

SEQ ID NO: 104904 - DNA, 15 bp, Homo sapiens
cactccccacacccc

SEQ ID NO: 104905 - DNA, 15 bp, Homo sapiens
tcactccccacaccc

SEQ ID NO: 104906 - DNA, 15 bp, Homo sapiens
atcactccccacacc

SEQ ID NO: 104907 - DNA, 15 bp, Homo sapiens
gatcactccccacac

SEQ ID NO: 104908 - DNA, 15 bp, Homo sapiens
ggatcactccccaca

SEQ ID NO: 104909 - DNA, 15 bp, Homo sapiens
aggatcactccccac

SEQ ID NO: 104910 - DNA, 15 bp, Homo sapiens
caggatcactcccca

SEQ ID NO: 104911 - DNA, 15 bp, Homo sapiens
ccaggatcactcccc

SEQ ID NO: 104912 - DNA, 15 bp, Homo sapiens
gccaggatcactccc

SEQ ID NO: 104913 - DNA, 15 bp, Homo sapiens
agccaggatcactcc

SEQ ID NO: 104914 - DNA, 15 bp, Homo sapiens
tagccaggatcactc

SEQ ID NO: 104915 - DNA, 15 bp, Homo sapiens
gtagccaggatcact

SEQ ID NO: 104916 - DNA, 15 bp, Homo sapiens
agtagccaggatcac

SEQ ID NO: 104917 - DNA, 15 bp, Homo sapiens
gagtagccaggatca

SEQ ID NO: 104918 - DNA, 15 bp, Homo sapiens
agagtagccaggatc

SEQ ID NO: 104919 - DNA, 15 bp, Homo sapiens
cagagtagccaggat

SEQ ID NO: 104920 - DNA, 15 bp, Homo sapiens
ccagagtagccagga

SEQ ID NO: 104921 - DNA, 15 bp, Homo sapiens
cccagagtagccagg

SEQ ID NO: 104922 - DNA, 15 bp, Homo sapiens
gcccagagtagccag

SEQ ID NO: 104923 - DNA, 15 bp, Homo sapiens
tgcccagagtagcca

SEQ ID NO: 104924 - DNA, 15 bp, Homo sapiens
gtgcccagagtagcc

SEQ ID NO: 104925 - DNA, 15 bp, Homo sapiens
ggtgcccagagtagc

SEQ ID NO: 104926 - DNA, 15 bp, Homo sapiens
tggtgcccagagtag

SEQ ID NO: 104927 - DNA, 15 bp, Homo sapiens
gtggtgcccagagta

SEQ ID NO: 104928 - DNA, 15 bp, Homo sapiens
tgtggtgcccagagt

SEQ ID NO: 104929 - DNA, 15 bp, Homo sapiens
ctgtggtgcccagag

SEQ ID NO: 104930 - DNA, 15 bp, Homo sapiens
tctgtggtgcccaga

SEQ ID NO: 104931 - DNA, 15 bp, Homo sapiens
ctctgtggtgcccag

SEQ ID NO: 104932 - DNA, 15 bp, Homo sapiens
cctctgtggtgccca

SEQ ID NO: 104933 - DNA, 15 bp, Homo sapiens
gcctctgtggtgccc

SEQ ID NO: 104934 - DNA, 15 bp, Homo sapiens
tgcctctgtggtgcc

SEQ ID NO: 104935 - DNA, 15 bp, Homo sapiens
ctgcctctgtggtgc

SEQ ID NO: 104936 - DNA, 15 bp, Homo sapiens
cctgcctctgtggtg

SEQ ID NO: 104937 - DNA, 15 bp, Homo sapiens
tcctgcctctgtggt

SEQ ID NO: 104938 - DNA, 15 bp, Homo sapiens
ctcctgcctctgtgg

SEQ ID NO: 104939 - DNA, 15 bp, Homo sapiens
gctcctgcctctgtg

SEQ ID NO: 104940 - DNA, 15 bp, Homo sapiens
ggctcctgcctctgt

SEQ ID NO: 104941 - DNA, 15 bp, Homo sapiens
tggctcctgcctctg

SEQ ID NO: 104942 - DNA, 15 bp, Homo sapiens
ctggctcctgcctct

SEQ ID NO: 104943 - DNA, 15 bp, Homo sapiens
actggctcctgcctc

SEQ ID NO: 104944 - DNA, 15 bp, Homo sapiens
tactggctcctgcct

SEQ ID NO: 104945 - DNA, 15 bp, Homo sapiens
gtactggctcctgcc

SEQ ID NO: 104946 - DNA, 15 bp, Homo sapiens
tgtactggctcctgc

SEQ ID NO: 104947 - DNA, 15 bp, Homo sapiens
ctgtactggctcctg

SEQ ID NO: 104948 - DNA, 15 bp, Homo sapiens
cctgtactggctcct

SEQ ID NO: 104949 - DNA, 15 bp, Homo sapiens
gcctgtactggctcc

SEQ ID NO: 104950 - DNA, 15 bp, Homo sapiens
ggcctgtactggctc

SEQ ID NO: 104951 - DNA, 15 bp, Homo sapiens
tggcctgtactggct

SEQ ID NO: 104952 - DNA, 15 bp, Homo sapiens
atggcctgtactggc

SEQ ID NO: 104953 - DNA, 15 bp, Homo sapiens
gatggcctgtactgg

SEQ ID NO: 104954 - DNA, 15 bp, Homo sapiens
tgatggcctgtactg

SEQ ID NO: 104955 - DNA, 15 bp, Homo sapiens
gtgatggcctgtact

SEQ ID NO: 104956 - DNA, 15 bp, Homo sapiens
cgtgatggcctgtac

SEQ ID NO: 104957 - DNA, 15 bp, Homo sapiens
acgtgatggcctgta

SEQ ID NO: 104958 - DNA, 15 bp, Homo sapiens
cacgtgatggcctgt

SEQ ID NO: 104959 - DNA, 15 bp, Homo sapiens
tcacgtgatggcctg

SEQ ID NO: 104960 - DNA, 15 bp, Homo sapiens
ctcacgtgatggcct

SEQ ID NO: 104961 - DNA, 15 bp, Homo sapiens
cctcacgtgatggcc

SEQ ID NO: 104962 - DNA, 15 bp, Homo sapiens
ccctcacgtgatggc

SEQ ID NO: 104963 - DNA, 15 bp, Homo sapiens
gccctcacgtgatgg

SEQ ID NO: 104964 - DNA, 15 bp, Homo sapiens
tgccctcacgtgatg

SEQ ID NO: 104965 - DNA, 15 bp, Homo sapiens
ctgccctcacgtgat

SEQ ID NO: 104966 - DNA, 15 bp, Homo sapiens
cctgccctcacgtga

SEQ ID NO: 104967 - DNA, 15 bp, Homo sapiens
gcctgccctcacgtg

SEQ ID NO: 104968 - DNA, 15 bp, Homo sapiens
tgcctgccctcacgt

SEQ ID NO: 104969 - DNA, 15 bp, Homo sapiens
ctgcctgccctcacg

SEQ ID NO: 104970 - DNA, 15 bp, Homo sapiens
gctgcctgccctcac

SEQ ID NO: 104971 - DNA, 15 bp, Homo sapiens
ggctgcctgccctca

SEQ ID NO: 104972 - DNA, 15 bp, Homo sapiens
gggctgcctgccctc

SEQ ID NO: 104973 - DNA, 15 bp, Homo sapiens
tgggctgcctgccct

SEQ ID NO: 104974 - DNA, 15 bp, Homo sapiens
ctgggctgcctgccc

SEQ ID NO: 104975 - DNA, 15 bp, Homo sapiens
actgggctgcctgcc

SEQ ID NO: 104976 - DNA, 15 bp, Homo sapiens
gactgggctgcctgc

SEQ ID NO: 104977 - DNA, 15 bp, Homo sapiens
tgactgggctgcctg

SEQ ID NO: 104978 - DNA, 15 bp, Homo sapiens
gtgactgggctgcct

SEQ ID NO: 104979 - DNA, 15 bp, Homo sapiens
ggtgactgggctgcc

SEQ ID NO: 104980 - DNA, 15 bp, Homo sapiens
cggtgactgggctgc

SEQ ID NO: 104981 - DNA, 15 bp, Homo sapiens
acggtgactgggctg

SEQ ID NO: 104982 - DNA, 15 bp, Homo sapiens
gacggtgactgggct

SEQ ID NO: 104983 - DNA, 15 bp, Homo sapiens
ggacggtgactgggc

SEQ ID NO: 104984 - DNA, 15 bp, Homo sapiens
aggacggtgactggg

SEQ ID NO: 104985 - DNA, 15 bp, Homo sapiens
gaggacggtgactgg

SEQ ID NO: 104986 - DNA, 15 bp, Homo sapiens
agaggacggtgactg

SEQ ID NO: 104987 - DNA, 15 bp, Homo sapiens
aagaggacggtgact

SEQ ID NO: 104988 - DNA, 15 bp, Homo sapiens
caagaggacggtgac

SEQ ID NO: 104989 - DNA, 15 bp, Homo sapiens
gcaagaggacggtga

SEQ ID NO: 104990 - DNA, 15 bp, Homo sapiens
agcaagaggacggtg

SEQ ID NO: 104991 - DNA, 15 bp, Homo sapiens
gagcaagaggacggt

SEQ ID NO: 104992 - DNA, 15 bp, Homo sapiens
ggagcaagaggacgg

SEQ ID NO: 104993 - DNA, 15 bp, Homo sapiens
tggagcaagaggacg

SEQ ID NO: 104994 - DNA, 15 bp, Homo sapiens
ctggagcaagaggac

SEQ ID NO: 104995 - DNA, 15 bp, Homo sapiens
cctggagcaagagga

SEQ ID NO: 104996 - DNA, 15 bp, Homo sapiens
gcctggagcaagagg

SEQ ID NO: 104997 - DNA, 15 bp, Homo sapiens
ggcctggagcaagag

SEQ ID NO: 104998 - DNA, 15 bp, Homo sapiens
tggcctggagcaaga

SEQ ID NO: 104999 - DNA, 15 bp, Homo sapiens
atggcctggagcaag

SEQ ID NO: 105000 - DNA, 15 bp, Homo sapiens
gatggcctggagcaa

SEQ ID NO: 105001 - DNA, 15 bp, Homo sapiens
tgatggcctggagca

SEQ ID NO: 105002 - DNA, 15 bp, Homo sapiens
atgatggcctggagc

SEQ ID NO: 105003 - DNA, 15 bp, Homo sapiens
catgatggcctggag

SEQ ID NO: 105004 - DNA, 15 bp, Homo sapiens
acatgatggcctgga

SEQ ID NO: 105005 - DNA, 15 bp, Homo sapiens
cacatgatggcctgg

SEQ ID NO: 105006 - DNA, 15 bp, Homo sapiens
tcacatgatggcctg

SEQ ID NO: 105007 - DNA, 15 bp, Homo sapiens
ctcacatgatggcct

SEQ ID NO: 105008 - DNA, 15 bp, Homo sapiens
tctcacatgatggcc

SEQ ID NO: 105009 - DNA, 15 bp, Homo sapiens
ctctcacatgatggc

SEQ ID NO: 105010 - DNA, 15 bp, Homo sapiens
gctctcacatgatgg

SEQ ID NO: 105011 - DNA, 15 bp, Homo sapiens
tgctctcacatgatg

SEQ ID NO: 105012 - DNA, 15 bp, Homo sapiens
ctgctctcacatgat

SEQ ID NO: 105013 - DNA, 15 bp, Homo sapiens
cctgctctcacatga

SEQ ID NO: 105014 - DNA, 15 bp, Homo sapiens
acctgctctcacatg

SEQ ID NO: 105015 - DNA, 15 bp, Homo sapiens
cacctgctctcacat

SEQ ID NO: 105016 - DNA, 15 bp, Homo sapiens
ccacctgctctcaca

SEQ ID NO: 105017 - DNA, 15 bp, Homo sapiens
gccacctgctctcac

SEQ ID NO: 105018 - DNA, 15 bp, Homo sapiens
ggccacctgctctca

SEQ ID NO: 105019 - DNA, 15 bp, Homo sapiens
gggccacctgctctc

SEQ ID NO: 105020 - DNA, 15 bp, Homo sapiens
tgggccacctgctct

SEQ ID NO: 105021 - DNA, 15 bp, Homo sapiens
ctgggccacctgctc

SEQ ID NO: 105022 - DNA, 15 bp, Homo sapiens
actgggccacctgct

SEQ ID NO: 105023 - DNA, 15 bp, Homo sapiens
gactgggccacctgc

SEQ ID NO: 105024 - DNA, 15 bp, Homo sapiens
tgactgggccacctg

SEQ ID NO: 105025 - DNA, 15 bp, Homo sapiens
gtgactgggccacct

SEQ ID NO: 105026 - DNA, 15 bp, Homo sapiens
ggtgactgggccacc

SEQ ID NO: 105027 - DNA, 15 bp, Homo sapiens
cggtgactgggccac

SEQ ID NO: 105028 - DNA, 15 bp, Homo sapiens
acggtgactgggcca

SEQ ID NO: 105029 - DNA, 15 bp, Homo sapiens
gacggtgactgggcc

SEQ ID NO: 105030 - DNA, 15 bp, Homo sapiens
ggaggacggtgactg

SEQ ID NO: 105031 - DNA, 15 bp, Homo sapiens
aggaggacggtgact

SEQ ID NO: 105032 - DNA, 15 bp, Homo sapiens
caggaggacggtgac

SEQ ID NO: 105033 - DNA, 15 bp, Homo sapiens
gcaggaggacggtga

SEQ ID NO: 105034 - DNA, 15 bp, Homo sapiens
agcaggaggacggtg

SEQ ID NO: 105035 - DNA, 15 bp, Homo sapiens
gagcaggaggacggt

SEQ ID NO: 105036 - DNA, 15 bp, Homo sapiens
ggagcaggaggacgg

SEQ ID NO: 105037 - DNA, 15 bp, Homo sapiens
tggagcaggaggacg

SEQ ID NO: 105038 - DNA, 15 bp, Homo sapiens
ctggagcaggaggac

SEQ ID NO: 105039 - DNA, 15 bp, Homo sapiens
cctggagcaggagga

SEQ ID NO: 105040 - DNA, 15 bp, Homo sapiens
gcctggagcaggagg

SEQ ID NO: 105041 - DNA, 15 bp, Homo sapiens
ggcctggagcaggag

SEQ ID NO: 105042 - DNA, 15 bp, Homo sapiens
tggcctggagcagga

SEQ ID NO: 105043 - DNA, 15 bp, Homo sapiens
atggcctggagcagg

SEQ ID NO: 105044 - DNA, 15 bp, Homo sapiens
gatggcctggagcag

SEQ ID NO: 105045 - DNA, 15 bp, Homo sapiens
gtgatggcctggagc

SEQ ID NO: 105046 - DNA, 15 bp, Homo sapiens
cgtgatggcctggag

SEQ ID NO: 105047 - DNA, 15 bp, Homo sapiens
acgtgatggcctgga

SEQ ID NO: 105048 - DNA, 15 bp, Homo sapiens
cacgtgatggcctgg

SEQ ID NO: 105049 - DNA, 15 bp, Homo sapiens
acctgccctcacgtg

SEQ ID NO: 105050 - DNA, 15 bp, Homo sapiens
cacctgccctcacgt

SEQ ID NO: 105051 - DNA, 15 bp, Homo sapiens
ccacctgccctcacg

SEQ ID NO: 105052 - DNA, 15 bp, Homo sapiens
gccacctgccctcac

SEQ ID NO: 105053 - DNA, 15 bp, Homo sapiens
ggccacctgccctca

SEQ ID NO: 105054 - DNA, 15 bp, Homo sapiens
gggccacctgccctc

SEQ ID NO: 105055 - DNA, 15 bp, Homo sapiens
tgggccacctgccct

SEQ ID NO: 105056 - DNA, 15 bp, Homo sapiens
ctgggccacctgccc

SEQ ID NO: 105057 - DNA, 15 bp, Homo sapiens
actgggccacctgcc

SEQ ID NO: 105058 - DNA, 15 bp, Homo sapiens
gggcctggagcagga

SEQ ID NO: 105059 - DNA, 15 bp, Homo sapiens
agggcctggagcagg

SEQ ID NO: 105060 - DNA, 15 bp, Homo sapiens
cagggcctggagcag

SEQ ID NO: 105061 - DNA, 15 bp, Homo sapiens
gcagggcctggagca

SEQ ID NO: 105062 - DNA, 15 bp, Homo sapiens
tgcagggcctggagc

SEQ ID NO: 105063 - DNA, 15 bp, Homo sapiens
ctgcagggcctggag

SEQ ID NO: 105064 - DNA, 15 bp, Homo sapiens
gctgcagggcctgga

SEQ ID NO: 105065 - DNA, 15 bp, Homo sapiens
ggctgcagggcctgg

SEQ ID NO: 105066 - DNA, 15 bp, Homo sapiens
cggctgcagggcctg

SEQ ID NO: 105067 - DNA, 15 bp, Homo sapiens
ccggctgcagggcct

SEQ ID NO: 105068 - DNA, 15 bp, Homo sapiens
gccggctgcagggcc

SEQ ID NO: 105069 - DNA, 15 bp, Homo sapiens
tgccggctgcagggc

SEQ ID NO: 105070 - DNA, 15 bp, Homo sapiens
ctgccggctgcaggg

SEQ ID NO: 105071 - DNA, 15 bp, Homo sapiens
gctgccggctgcagg

SEQ ID NO: 105072 - DNA, 15 bp, Homo sapiens
tgctgccggctgcag

SEQ ID NO: 105073 - DNA, 15 bp, Homo sapiens
gtgctgccggctgca

SEQ ID NO: 105074 - DNA, 15 bp, Homo sapiens
ggtgctgccggctgc

SEQ ID NO: 105075 - DNA, 15 bp, Homo sapiens
gggtgctgccggctg

SEQ ID NO: 105076 - DNA, 15 bp, Homo sapiens
ggggtgctgccggct

SEQ ID NO: 105077 - DNA, 15 bp, Homo sapiens
aggggtgctgccggc

SEQ ID NO: 105078 - DNA, 15 bp, Homo sapiens
gaggggtgctgccgg

SEQ ID NO: 105079 - DNA, 15 bp, Homo sapiens
ggaggggtgctgccg

SEQ ID NO: 105080 - DNA, 15 bp, Homo sapiens
cggaggggtgctgcc

SEQ ID NO: 105081 - DNA, 15 bp, Homo sapiens
gcggaggggtgctgc

SEQ ID NO: 105082 - DNA, 15 bp, Homo sapiens
tgcggaggggtgctg

SEQ ID NO: 105083 - DNA, 15 bp, Homo sapiens
ctgcggaggggtgct

SEQ ID NO: 105084 - DNA, 15 bp, Homo sapiens
gctgcggaggggtgc

SEQ ID NO: 105085 - DNA, 15 bp, Homo sapiens
ggctgcggaggggtg

SEQ ID NO: 105086 - DNA, 15 bp, Homo sapiens
gggctgcggaggggt

SEQ ID NO: 105087 - DNA, 15 bp, Homo sapiens
tgggctgcggagggg

SEQ ID NO: 105088 - DNA, 15 bp, Homo sapiens
gtgggctgcggaggg

SEQ ID NO: 105089 - DNA, 15 bp, Homo sapiens
ggtgggctgcggagg

SEQ ID NO: 105090 - DNA, 15 bp, Homo sapiens
tggtgggctgcggag

SEQ ID NO: 105091 - DNA, 15 bp, Homo sapiens
gtggtgggctgcgga

SEQ ID NO: 105092 - DNA, 15 bp, Homo sapiens
tgtggtgggctgcgg

SEQ ID NO: 105093 - DNA, 15 bp, Homo sapiens
gtgtggtgggctgcg

SEQ ID NO: 105094 - DNA, 15 bp, Homo sapiens
cgtgtggtgggctgc

SEQ ID NO: 105095 - DNA, 15 bp, Homo sapiens
gcgtgtggtgggctg

SEQ ID NO: 105096 - DNA, 15 bp, Homo sapiens
tgcgtgtggtgggct

SEQ ID NO: 105097 - DNA, 15 bp, Homo sapiens
ctgcgtgtggtgggc

SEQ ID NO: 105098 - DNA, 15 bp, Homo sapiens
gctgcgtgtggtggg

SEQ ID NO: 105099 - DNA, 15 bp, Homo sapiens
tgctgcgtgtggtgg

SEQ ID NO: 105100 - DNA, 15 bp, Homo sapiens
gtgctgcgtgtggtg

SEQ ID NO: 105101 - DNA, 15 bp, Homo sapiens
ggtgctgcgtgtggt

SEQ ID NO: 105102 - DNA, 15 bp, Homo sapiens
tggtgctgcgtgtgg

SEQ ID NO: 105103 - DNA, 15 bp, Homo sapiens
ctggtgctgcgtgtg

SEQ ID NO: 105104 - DNA, 15 bp, Homo sapiens
cctggtgctgcgtgt

SEQ ID NO: 105105 - DNA, 15 bp, Homo sapiens
tcctggtgctgcgtg

SEQ ID NO: 105106 - DNA, 15 bp, Homo sapiens
ctcctggtgctgcgt

SEQ ID NO: 105107 - DNA, 15 bp, Homo sapiens
cctcctggtgctgcg

SEQ ID NO: 105108 - DNA, 15 bp, Homo sapiens
gcctcctggtgctgc

SEQ ID NO: 105109 - DNA, 15 bp, Homo sapiens
agcctcctggtgctg

SEQ ID NO: 105110 - DNA, 15 bp, Homo sapiens
cagcctcctggtgct

SEQ ID NO: 105111 - DNA, 15 bp, Homo sapiens
acagcctcctggtgc

SEQ ID NO: 105112 - DNA, 15 bp, Homo sapiens
cacagcctcctggtg

SEQ ID NO: 105113 - DNA, 15 bp, Homo sapiens
tcacagcctcctggt

SEQ ID NO: 105114 - DNA, 15 bp, Homo sapiens
ttcacagcctcctgg

SEQ ID NO: 105115 - DNA, 15 bp, Homo sapiens
attcacagcctcctg

SEQ ID NO: 105116 - DNA, 15 bp, Homo sapiens
gattcacagcctcct

SEQ ID NO: 105117 - DNA, 15 bp, Homo sapiens
agattcacagcctcc

SEQ ID NO: 105118 - DNA, 15 bp, Homo sapiens
gagattcacagcctc

SEQ ID NO: 105119 - DNA, 15 bp, Homo sapiens
ggagattcacagcct

SEQ ID NO: 105120 - DNA, 15 bp, Homo sapiens
gggagattcacagcc

SEQ ID NO: 105121 - DNA, 15 bp, Homo sapiens
ggggagattcacagc

SEQ ID NO: 105122 - DNA, 15 bp, Homo sapiens
tggggagattcacag

SEQ ID NO: 105123 - DNA, 15 bp, Homo sapiens
gtggggagattcaca

SEQ ID NO: 105124 - DNA, 15 bp, Homo sapiens
agtggggagattcac

SEQ ID NO: 105125 - DNA, 15 bp, Homo sapiens
gagtggggagattca

SEQ ID NO: 105126 - DNA, 15 bp, Homo sapiens
agagtggggagattc

SEQ ID NO: 105127 - DNA, 15 bp, Homo sapiens
cagagtggggagatt

SEQ ID NO: 105128 - DNA, 15 bp, Homo sapiens
acagagtggggagat

SEQ ID NO: 105129 - DNA, 15 bp, Homo sapiens
tacagagtggggaga

SEQ ID NO: 105130 - DNA, 15 bp, Homo sapiens
ctacagagtggggag

SEQ ID NO: 105131 - DNA, 15 bp, Homo sapiens
cctacagagtgggga

SEQ ID NO: 105132 - DNA, 15 bp, Homo sapiens
tcctacagagtgggg

SEQ ID NO: 105133 - DNA, 15 bp, Homo sapiens
ttcctacagagtggg

SEQ ID NO: 105134 - DNA, 15 bp, Homo sapiens
gttcctacagagtgg

SEQ ID NO: 105135 - DNA, 15 bp, Homo sapiens
tgttcctacagagtg

SEQ ID NO: 105136 - DNA, 15 bp, Homo sapiens
ctgttcctacagagt

SEQ ID NO: 105137 - DNA, 15 bp, Homo sapiens
gctgttcctacagag

SEQ ID NO: 105138 - DNA, 15 bp, Homo sapiens
agctgttcctacaga

SEQ ID NO: 105139 - DNA, 15 bp, Homo sapiens
cagctgttcctacag

SEQ ID NO: 105140 - DNA, 15 bp, Homo sapiens
gcagctgttcctaca

SEQ ID NO: 105141 - DNA, 15 bp, Homo sapiens
ggcagctgttcctac

SEQ ID NO: 105142 - DNA, 15 bp, Homo sapiens
cggcagctgttccta

SEQ ID NO: 105143 - DNA, 15 bp, Homo sapiens
gcggcagctgttcct

SEQ ID NO: 105144 - DNA, 15 bp, Homo sapiens
agcggcagctgttcc

SEQ ID NO: 105145 - DNA, 15 bp, Homo sapiens
aagcggcagctgttc

SEQ ID NO: 105146 - DNA, 15 bp, Homo sapiens
gaagcggcagctgtt

SEQ ID NO: 105147 - DNA, 15 bp, Homo sapiens
ggaagcggcagctgt

SEQ ID NO: 105148 - DNA, 15 bp, Homo sapiens
aggaagcggcagctg

SEQ ID NO: 105149 - DNA, 15 bp, Homo sapiens
caggaagcggcagct

SEQ ID NO: 105150 - DNA, 15 bp, Homo sapiens
ccaggaagcggcagc

SEQ ID NO: 105151 - DNA, 15 bp, Homo sapiens
cccaggaagcggcag

SEQ ID NO: 105152 - DNA, 15 bp, Homo sapiens
acccaggaagcggca

SEQ ID NO: 105153 - DNA, 15 bp, Homo sapiens
gacccaggaagcggc

SEQ ID NO: 105154 - DNA, 15 bp, Homo sapiens
ggacccaggaagcgg

SEQ ID NO: 105155 - DNA, 15 bp, Homo sapiens
gggacccaggaagcg

SEQ ID NO: 105156 - DNA, 15 bp, Homo sapiens
ggggacccaggaagc

SEQ ID NO: 105157 - DNA, 15 bp, Homo sapiens
tggggacccaggaag

SEQ ID NO: 105158 - DNA, 15 bp, Homo sapiens
atggggacccaggaa

SEQ ID NO: 105159 - DNA, 15 bp, Homo sapiens
aatggggacccagga

SEQ ID NO: 105160 - DNA, 15 bp, Homo sapiens
gaatggggacccagg

SEQ ID NO: 105161 - DNA, 15 bp, Homo sapiens
ggaatggggacccag

SEQ ID NO: 105162 - DNA, 15 bp, Homo sapiens
gggaatggggaccca

SEQ ID NO: 105163 - DNA, 15 bp, Homo sapiens
ggggaatggggaccc

SEQ ID NO: 105164 - DNA, 15 bp, Homo sapiens
tggggaatggggacc

SEQ ID NO: 105165 - DNA, 15 bp, Homo sapiens
ttggggaatggggac

SEQ ID NO: 105166 - DNA, 15 bp, Homo sapiens
gttggggaatgggga

SEQ ID NO: 105167 - DNA, 15 bp, Homo sapiens
cgttggggaatgggg

SEQ ID NO: 105168 - DNA, 15 bp, Homo sapiens
ccgttggggaatggg

SEQ ID NO: 105169 - DNA, 15 bp, Homo sapiens
tccgttggggaatgg

SEQ ID NO: 105170 - DNA, 15 bp, Homo sapiens
ttccgttggggaatg

SEQ ID NO: 105171 - DNA, 15 bp, Homo sapiens
gttccgttggggaat

SEQ ID NO: 105172 - DNA, 15 bp, Homo sapiens
cgttccgttggggaa

SEQ ID NO: 105173 - DNA, 15 bp, Homo sapiens
acgttccgttgggga

SEQ ID NO: 105174 - DNA, 15 bp, Homo sapiens
cacgttccgttgggg

SEQ ID NO: 105175 - DNA, 15 bp, Homo sapiens
acacgttccgttggg

SEQ ID NO: 105176 - DNA, 15 bp, Homo sapiens
aacacgttccgttgg

SEQ ID NO: 105177 - DNA, 15 bp, Homo sapiens
gaacacgttccgttg

SEQ ID NO: 105178 - DNA, 15 bp, Homo sapiens
ggaacacgttccgtt

SEQ ID NO: 105179 - DNA, 15 bp, Homo sapiens
tggaacacgttccgt

SEQ ID NO: 105180 - DNA, 15 bp, Homo sapiens
atggaacacgttccg

SEQ ID NO: 105181 - DNA, 15 bp, Homo sapiens
catggaacacgttcc

SEQ ID NO: 105182 - DNA, 15 bp, Homo sapiens
tcatggaacacgttc

SEQ ID NO: 105183 - DNA, 15 bp, Homo sapiens
gtcatggaacacgtt

SEQ ID NO: 105184 - DNA, 15 bp, Homo sapiens
tgtcatggaacacgt

SEQ ID NO: 105185 - DNA, 15 bp, Homo sapiens
atgtcatggaacacg

SEQ ID NO: 105186 - DNA, 15 bp, Homo sapiens
gatgtcatggaacac

SEQ ID NO: 105187 - DNA, 15 bp, Homo sapiens
agatgtcatggaaca

SEQ ID NO: 105188 - DNA, 15 bp, Homo sapiens
cagatgtcatggaac

SEQ ID NO: 105189 - DNA, 15 bp, Homo sapiens
acagatgtcatggaa

SEQ ID NO: 105190 - DNA, 15 bp, Homo sapiens
cacagatgtcatgga

SEQ ID NO: 105191 - DNA, 15 bp, Homo sapiens
gcacagatgtcatgg

SEQ ID NO: 105192 - DNA, 15 bp, Homo sapiens
tgcacagatgtcatg

SEQ ID NO: 105193 - DNA, 15 bp, Homo sapiens
ctgcacagatgtcat

SEQ ID NO: 105194 - DNA, 15 bp, Homo sapiens
gctgcacagatgtca

SEQ ID NO: 105195 - DNA, 15 bp, Homo sapiens
tgctgcacagatgtc

SEQ ID NO: 105196 - DNA, 15 bp, Homo sapiens
atgctgcacagatgt

SEQ ID NO: 105197 - DNA, 15 bp, Homo sapiens
gatgctgcacagatg

SEQ ID NO: 105198 - DNA, 15 bp, Homo sapiens
ggatgctgcacagat

SEQ ID NO: 105199 - DNA, 15 bp, Homo sapiens
cggatgctgcacaga

SEQ ID NO: 105200 - DNA, 15 bp, Homo sapiens
gcggatgctgcacag

SEQ ID NO: 105201 - DNA, 15 bp, Homo sapiens
agcggatgctgcaca

SEQ ID NO: 105202 - DNA, 15 bp, Homo sapiens
cagcggatgctgcac

SEQ ID NO: 105203 - DNA, 15 bp, Homo sapiens
acagcggatgctgca

SEQ ID NO: 105204 - DNA, 15 bp, Homo sapiens
cacagcggatgctgc

SEQ ID NO: 105205 - DNA, 15 bp, Homo sapiens
acacagcggatgctg

SEQ ID NO: 105206 - DNA, 15 bp, Homo sapiens
cacacagcggatgct

SEQ ID NO: 105207 - DNA, 15 bp, Homo sapiens
gcacacagcggatgc

SEQ ID NO: 105208 - DNA, 15 bp, Homo sapiens
ggcacacagcggatg

SEQ ID NO: 105209 - DNA, 15 bp, Homo sapiens
tggcacacagcggat

SEQ ID NO: 105210 - DNA, 15 bp, Homo sapiens
ctggcacacagcgga

SEQ ID NO: 105211 - DNA, 15 bp, Homo sapiens
cctggcacacagcgg

SEQ ID NO: 105212 - DNA, 15 bp, Homo sapiens
gcctggcacacagcg

SEQ ID NO: 105213 - DNA, 15 bp, Homo sapiens
tgcctggcacacagc

SEQ ID NO: 105214 - DNA, 15 bp, Homo sapiens
gtgcctggcacacag

SEQ ID NO: 105215 - DNA, 15 bp, Homo sapiens
tgtgcctggcacaca

SEQ ID NO: 105216 - DNA, 15 bp, Homo sapiens
ctgtgcctggcacac

SEQ ID NO: 105217 - DNA, 15 bp, Homo sapiens
actgtgcctggcaca

SEQ ID NO: 105218 - DNA, 15 bp, Homo sapiens
aactgtgcctggcac

SEQ ID NO: 105219 - DNA, 15 bp, Homo sapiens
gaactgtgcctggca

SEQ ID NO: 105220 - DNA, 15 bp, Homo sapiens
agaactgtgcctggc

SEQ ID NO: 105221 - DNA, 15 bp, Homo sapiens
tagaactgtgcctgg

SEQ ID NO: 105222 - DNA, 15 bp, Homo sapiens
ctagaactgtgcctg

SEQ ID NO: 105223 - DNA, 15 bp, Homo sapiens
cctagaactgtgcct

SEQ ID NO: 105224 - DNA, 15 bp, Homo sapiens
gcctagaactgtgcc

SEQ ID NO: 105225 - DNA, 15 bp, Homo sapiens
ggcctagaactgtgc

SEQ ID NO: 105226 - DNA, 15 bp, Homo sapiens
gggcctagaactgtg

SEQ ID NO: 105227 - DNA, 15 bp, Homo sapiens
ggggcctagaactgt

SEQ ID NO: 105228 - DNA, 15 bp, Homo sapiens
cggggcctagaactg

SEQ ID NO: 105229 - DNA, 15 bp, Homo sapiens
ccggggcctagaact

SEQ ID NO: 105230 - DNA, 15 bp, Homo sapiens
tccggggcctagaac

SEQ ID NO: 105231 - DNA, 15 bp, Homo sapiens
ctccggggcctagaa

SEQ ID NO: 105232 - DNA, 15 bp, Homo sapiens
tctccggggcctaga

SEQ ID NO: 105233 - DNA, 15 bp, Homo sapiens
gtctccggggcctag

SEQ ID NO: 105234 - DNA, 15 bp, Homo sapiens
tgtctccggggccta

SEQ ID NO: 105235 - DNA, 15 bp, Homo sapiens
ttgtctccggggcct

SEQ ID NO: 105236 - DNA, 15 bp, Homo sapiens
tttgtctccggggcc

SEQ ID NO: 105237 - DNA, 15 bp, Homo sapiens
ctttgtctccggggc

SEQ ID NO: 105238 - DNA, 15 bp, Homo sapiens
gctttgtctccgggg

SEQ ID NO: 105239 - DNA, 15 bp, Homo sapiens
cgctttgtctccggg

SEQ ID NO: 105240 - DNA, 15 bp, Homo sapiens
ccgctttgtctccgg

SEQ ID NO: 105241 - DNA, 15 bp, Homo sapiens
cccgctttgtctccg

SEQ ID NO: 105242 - DNA, 15 bp, Homo sapiens
tcccgctttgtctcc

SEQ ID NO: 105243 - DNA, 15 bp, Homo sapiens
ttcccgctttgtctc

SEQ ID NO: 105244 - DNA, 15 bp, Homo sapiens
gttcccgctttgtct

SEQ ID NO: 105245 - DNA, 15 bp, Homo sapiens
tgttcccgctttgtc

SEQ ID NO: 105246 - DNA, 15 bp, Homo sapiens
ctgttcccgctttgt

SEQ ID NO: 105247 - DNA, 15 bp, Homo sapiens
gctgttcccgctttg

SEQ ID NO: 105248 - DNA, 15 bp, Homo sapiens
tgctgttcccgcttt

SEQ ID NO: 105249 - DNA, 15 bp, Homo sapiens
gtgctgttcccgctt

SEQ ID NO: 105250 - DNA, 15 bp, Homo sapiens
tgtgctgttcccgct

SEQ ID NO: 105251 - DNA, 15 bp, Homo sapiens
ctgtgctgttcccgc

SEQ ID NO: 105252 - DNA, 15 bp, Homo sapiens
tctgtgctgttcccg

SEQ ID NO: 105253 - DNA, 15 bp, Homo sapiens
gtctgtgctgttccc

SEQ ID NO: 105254 - DNA, 15 bp, Homo sapiens
tgtctgtgctgttcc

SEQ ID NO: 105255 - DNA, 15 bp, Homo sapiens
ctgtctgtgctgttc

SEQ ID NO: 105256 - DNA, 15 bp, Homo sapiens
cctgtctgtgctgtt

SEQ ID NO: 105257 - DNA, 15 bp, Homo sapiens
tcctgtctgtgctgt

SEQ ID NO: 105258 - DNA, 15 bp, Homo sapiens
ttcctgtctgtgctg

SEQ ID NO: 105259 - DNA, 15 bp, Homo sapiens
gttcctgtctgtgct

SEQ ID NO: 105260 - DNA, 15 bp, Homo sapiens
ggttcctgtctgtgc

SEQ ID NO: 105261 - DNA, 15 bp, Homo sapiens
aggttcctgtctgtg

SEQ ID NO: 105262 - DNA, 15 bp, Homo sapiens
gaggttcctgtctgt

SEQ ID NO: 105263 - DNA, 15 bp, Homo sapiens
ggaggttcctgtctg

SEQ ID NO: 105264 - DNA, 15 bp, Homo sapiens
tggaggttcctgtct

SEQ ID NO: 105265 - DNA, 15 bp, Homo sapiens
gtggaggttcctgtc

SEQ ID NO: 105266 - DNA, 15 bp, Homo sapiens
agtggaggttcctgt

SEQ ID NO: 105267 - DNA, 15 bp, Homo sapiens
gagtggaggttcctg

SEQ ID NO: 105268 - DNA, 15 bp, Homo sapiens
agagtggaggttcct

SEQ ID NO: 105269 - DNA, 15 bp, Homo sapiens
aagagtggaggttcc

SEQ ID NO: 105270 - DNA, 15 bp, Homo sapiens
taagagtggaggttc

SEQ ID NO: 105271 - DNA, 15 bp, Homo sapiens
gtaagagtggaggtt

SEQ ID NO: 105272 - DNA, 15 bp, Homo sapiens
tgtaagagtggaggt

SEQ ID NO: 105273 - DNA, 15 bp, Homo sapiens
ctgtaagagtggagg

SEQ ID NO: 105274 - DNA, 15 bp, Homo sapiens
actgtaagagtggag

SEQ ID NO: 105275 - DNA, 15 bp, Homo sapiens
cactgtaagagtgga

SEQ ID NO: 105276 - DNA, 15 bp, Homo sapiens
tcactgtaagagtgg

SEQ ID NO: 105277 - DNA, 15 bp, Homo sapiens
ctcactgtaagagtg

SEQ ID NO: 105278 - DNA, 15 bp, Homo sapiens
cctcactgtaagagt

SEQ ID NO: 105279 - DNA, 15 bp, Homo sapiens
tcctcactgtaagag

SEQ ID NO: 105280 - DNA, 15 bp, Homo sapiens
ctcctcactgtaaga

SEQ ID NO: 105281 - DNA, 15 bp, Homo sapiens
tctcctcactgtaag

SEQ ID NO: 105282 - DNA, 15 bp, Homo sapiens
ctctcctcactgtaa

SEQ ID NO: 105283 - DNA, 15 bp, Homo sapiens
tctctcctcactgta

SEQ ID NO: 105284 - DNA, 15 bp, Homo sapiens
ttctctcctcactgt

SEQ ID NO: 105285 - DNA, 15 bp, Homo sapiens
tttctctcctcactg

SEQ ID NO: 105286 - DNA, 15 bp, Homo sapiens
ctttctctcctcact

SEQ ID NO: 105287 - DNA, 15 bp, Homo sapiens
tctttctctcctcac

SEQ ID NO: 105288 - DNA, 15 bp, Homo sapiens
ctctttctctcctca

SEQ ID NO: 105289 - DNA, 15 bp, Homo sapiens
cctctttctctcctc

SEQ ID NO: 105290 - DNA, 15 bp, Homo sapiens
tcctctttctctcct

SEQ ID NO: 105291 - DNA, 15 bp, Homo sapiens
ctcctctttctctcc

SEQ ID NO: 105292 - DNA, 15 bp, Homo sapiens
actcctctttctctc

SEQ ID NO: 105293 - DNA, 15 bp, Homo sapiens
cactcctctttctct

SEQ ID NO: 105294 - DNA, 15 bp, Homo sapiens
tcactcctctttctc

SEQ ID NO: 105295 - DNA, 15 bp, Homo sapiens
ctcactcctctttct

SEQ ID NO: 105296 - DNA, 15 bp, Homo sapiens
cctcactcctctttc

SEQ ID NO: 105297 - DNA, 15 bp, Homo sapiens
gcctcactcctcttt

SEQ ID NO: 105298 - DNA, 15 bp, Homo sapiens
agcctcactcctctt

SEQ ID NO: 105299 - DNA, 15 bp, Homo sapiens
aagcctcactcctct

SEQ ID NO: 105300 - DNA, 15 bp, Homo sapiens
caagcctcactcctc

SEQ ID NO: 105301 - DNA, 15 bp, Homo sapiens
ccaagcctcactcct

SEQ ID NO: 105302 - DNA, 15 bp, Homo sapiens
cccaagcctcactcc

SEQ ID NO: 105303 - DNA, 15 bp, Homo sapiens
ccccaagcctcactc

SEQ ID NO: 105304 - DNA, 15 bp, Homo sapiens
tccccaagcctcact

SEQ ID NO: 105305 - DNA, 15 bp, Homo sapiens
ctccccaagcctcac

SEQ ID NO: 105306 - DNA, 15 bp, Homo sapiens
cctccccaagcctca

SEQ ID NO: 105307 - DNA, 15 bp, Homo sapiens
acctccccaagcctc

SEQ ID NO: 105308 - DNA, 15 bp, Homo sapiens
aacctccccaagcct

SEQ ID NO: 105309 - DNA, 15 bp, Homo sapiens
caacctccccaagcc

SEQ ID NO: 105310 - DNA, 15 bp, Homo sapiens
ccaacctccccaagc

SEQ ID NO: 105311 - DNA, 15 bp, Homo sapiens
cccaacctccccaag

SEQ ID NO: 105312 - DNA, 15 bp, Homo sapiens
gcccaacctccccaa

SEQ ID NO: 105313 - DNA, 15 bp, Homo sapiens
tgcccaacctcccca

SEQ ID NO: 105314 - DNA, 15 bp, Homo sapiens
ctgcccaacctcccc

SEQ ID NO: 105315 - DNA, 15 bp, Homo sapiens
cctgcccaacctccc

SEQ ID NO: 105316 - DNA, 15 bp, Homo sapiens
tcctgcccaacctcc

SEQ ID NO: 105317 - DNA, 15 bp, Homo sapiens
gtcctgcccaacctc

SEQ ID NO: 105318 - DNA, 15 bp, Homo sapiens
tgtcctgcccaacct

SEQ ID NO: 105319 - DNA, 15 bp, Homo sapiens
ctgtcctgcccaacc

SEQ ID NO: 105320 - DNA, 15 bp, Homo sapiens
gctgtcctgcccaac

SEQ ID NO: 105321 - DNA, 15 bp, Homo sapiens
agctgtcctgcccaa

SEQ ID NO: 105322 - DNA, 15 bp, Homo sapiens
cagctgtcctgccca

SEQ ID NO: 105323 - DNA, 15 bp, Homo sapiens
gcagctgtcctgccc

SEQ ID NO: 105324 - DNA, 15 bp, Homo sapiens
tgcagctgtcctgcc

SEQ ID NO: 105325 - DNA, 15 bp, Homo sapiens
ctgcagctgtcctgc

SEQ ID NO: 105326 - DNA, 15 bp, Homo sapiens
cctgcagctgtcctg

SEQ ID NO: 105327 - DNA, 15 bp, Homo sapiens
ccctgcagctgtcct

SEQ ID NO: 105328 - DNA, 15 bp, Homo sapiens
tccctgcagctgtcc

SEQ ID NO: 105329 - DNA, 15 bp, Homo sapiens
ctccctgcagctgtc

SEQ ID NO: 105330 - DNA, 15 bp, Homo sapiens
tctccctgcagctgt

SEQ ID NO: 105331 - DNA, 15 bp, Homo sapiens
ctctccctgcagctg

SEQ ID NO: 105332 - DNA, 15 bp, Homo sapiens
cctctccctgcagct

SEQ ID NO: 105333 - DNA, 15 bp, Homo sapiens
ccctctccctgcagc

SEQ ID NO: 105334 - DNA, 15 bp, Homo sapiens
tccctctccctgcag

SEQ ID NO: 105335 - DNA, 15 bp, Homo sapiens
ctccctctccctgca

SEQ ID NO: 105336 - DNA, 15 bp, Homo sapiens
cctccctctccctgc

SEQ ID NO: 105337 - DNA, 15 bp, Homo sapiens
ccctccctctccctg

SEQ ID NO: 105338 - DNA, 15 bp, Homo sapiens
gccctccctctccct

SEQ ID NO: 105339 - DNA, 15 bp, Homo sapiens
tgccctccctctccc

SEQ ID NO: 105340 - DNA, 15 bp, Homo sapiens
ctgccctccctctcc

SEQ ID NO: 105341 - DNA, 15 bp, Homo sapiens
tctgccctccctctc

SEQ ID NO: 105342 - DNA, 15 bp, Homo sapiens
ctctgccctccctct

SEQ ID NO: 105343 - DNA, 15 bp, Homo sapiens
cctctgccctccctc

SEQ ID NO: 105344 - DNA, 15 bp, Homo sapiens
tcctctgccctccct

SEQ ID NO: 105345 - DNA, 15 bp, Homo sapiens
gtcctctgccctccc

SEQ ID NO: 105346 - DNA, 15 bp, Homo sapiens
cgtcctctgccctcc

SEQ ID NO: 105347 - DNA, 15 bp, Homo sapiens
ccgtcctctgccctc

SEQ ID NO: 105348 - DNA, 15 bp, Homo sapiens
cccgtcctctgccct

SEQ ID NO: 105349 - DNA, 15 bp, Homo sapiens
gcccgtcctctgccc

SEQ ID NO: 105350 - DNA, 15 bp, Homo sapiens
cgcccgtcctctgcc

SEQ ID NO: 105351 - DNA, 15 bp, Homo sapiens
tcgcccgtcctctgc

SEQ ID NO: 105352 - DNA, 15 bp, Homo sapiens
ctcgcccgtcctctg

SEQ ID NO: 105353 - DNA, 15 bp, Homo sapiens
actcgcccgtcctct

SEQ ID NO: 105354 - DNA, 15 bp, Homo sapiens
gactcgcccgtcctc

SEQ ID NO: 105355 - DNA, 15 bp, Homo sapiens
cgactcgcccgtcct

SEQ ID NO: 105356 - DNA, 15 bp, Homo sapiens
ccgactcgcccgtcc

SEQ ID NO: 105357 - DNA, 15 bp, Homo sapiens
cccgactcgcccgtc

SEQ ID NO: 105358 - DNA, 15 bp, Homo sapiens
ccccgactcgcccgt

SEQ ID NO: 105359 - DNA, 15 bp, Homo sapiens
tccccgactcgcccg

SEQ ID NO: 105360 - DNA, 15 bp, Homo sapiens
ctccccgactcgccc

SEQ ID NO: 105361 - DNA, 15 bp, Homo sapiens
actccccgactcgcc

SEQ ID NO: 105362 - DNA, 15 bp, Homo sapiens
tactccccgactcgc

SEQ ID NO: 105363 - DNA, 15 bp, Homo sapiens
gtactccccgactcg

SEQ ID NO: 105364 - DNA, 15 bp, Homo sapiens
ggtactccccgactc

SEQ ID NO: 105365 - DNA, 15 bp, Homo sapiens
tggtactccccgact

SEQ ID NO: 105366 - DNA, 15 bp, Homo sapiens
ttggtactccccgac

SEQ ID NO: 105367 - DNA, 15 bp, Homo sapiens
cttggtactccccga

SEQ ID NO: 105368 - DNA, 15 bp, Homo sapiens
ccttggtactccccg

SEQ ID NO: 105369 - DNA, 15 bp, Homo sapiens
tccttggtactcccc

SEQ ID NO: 105370 - DNA, 15 bp, Homo sapiens
ttccttggtactccc

SEQ ID NO: 105371 - DNA, 15 bp, Homo sapiens
cttccttggtactcc

SEQ ID NO: 105372 - DNA, 15 bp, Homo sapiens
ccttccttggtactc

SEQ ID NO: 105373 - DNA, 15 bp, Homo sapiens
gccttccttggtact

SEQ ID NO: 105374 - DNA, 15 bp, Homo sapiens
ggccttccttggtac

SEQ ID NO: 105375 - DNA, 15 bp, Homo sapiens
aggccttccttggta

SEQ ID NO: 105376 - DNA, 15 bp, Homo sapiens
gaggccttccttggt

SEQ ID NO: 105377 - DNA, 15 bp, Homo sapiens
tgaggccttccttgg

SEQ ID NO: 105378 - DNA, 15 bp, Homo sapiens
ctgaggccttccttg

SEQ ID NO: 105379 - DNA, 15 bp, Homo sapiens
gctgaggccttcctt

SEQ ID NO: 105380 - DNA, 15 bp, Homo sapiens
tgctgaggccttcct

SEQ ID NO: 105381 - DNA, 15 bp, Homo sapiens
ttgctgaggccttcc

SEQ ID NO: 105382 - DNA, 15 bp, Homo sapiens
tttgctgaggccttc

SEQ ID NO: 105383 - DNA, 15 bp, Homo sapiens
ctttgctgaggcctt

SEQ ID NO: 105384 - DNA, 15 bp, Homo sapiens
gctttgctgaggcct

SEQ ID NO: 105385 - DNA, 15 bp, Homo sapiens
tgctttgctgaggcc

SEQ ID NO: 105386 - DNA, 15 bp, Homo sapiens
ctgctttgctgaggc

SEQ ID NO: 105387 - DNA, 15 bp, Homo sapiens
gctgctttgctgagg

SEQ ID NO: 105388 - DNA, 15 bp, Homo sapiens
tgctgctttgctgag

SEQ ID NO: 105389 - DNA, 15 bp, Homo sapiens
atgctgctttgctga

SEQ ID NO: 105390 - DNA, 15 bp, Homo sapiens
catgctgctttgctg

SEQ ID NO: 105391 - DNA, 15 bp, Homo sapiens
ccatgctgctttgct

SEQ ID NO: 105392 - DNA, 15 bp, Homo sapiens
tccatgctgctttgc

SEQ ID NO: 105393 - DNA, 15 bp, Homo sapiens
ttccatgctgctttg

SEQ ID NO: 105394 - DNA, 15 bp, Homo sapiens
tttccatgctgcttt

SEQ ID NO: 105395 - DNA, 15 bp, Homo sapiens
atttccatgctgctt

SEQ ID NO: 105396 - DNA, 15 bp, Homo sapiens
tatttccatgctgct

SEQ ID NO: 105397 - DNA, 15 bp, Homo sapiens
ttatttccatgctgc

SEQ ID NO: 105398 - DNA, 15 bp, Homo sapiens
cttatttccatgctg

SEQ ID NO: 105399 - DNA, 15 bp, Homo sapiens
tcttatttccatgct

SEQ ID NO: 105400 - DNA, 15 bp, Homo sapiens
gtcttatttccatgc

SEQ ID NO: 105401 - DNA, 15 bp, Homo sapiens
ggtcttatttccatg

SEQ ID NO: 105402 - DNA, 15 bp, Homo sapiens
aggtcttatttccat

SEQ ID NO: 105403 - DNA, 15 bp, Homo sapiens
caggtcttatttcca

SEQ ID NO: 105404 - DNA, 15 bp, Homo sapiens
tcaggtcttatttcc

SEQ ID NO: 105405 - DNA, 15 bp, Homo sapiens
ttcaggtcttatttc

SEQ ID NO: 105406 - DNA, 15 bp, Homo sapiens
tttcaggtcttattt

SEQ ID NO: 105407 - DNA, 15 bp, Homo sapiens
ctttcaggtcttatt

SEQ ID NO: 105408 - DNA, 15 bp, Homo sapiens
gctttcaggtcttat

SEQ ID NO: 105409 - DNA, 15 bp, Homo sapiens
tgctttcaggtctta

SEQ ID NO: 105410 - DNA, 15 bp, Homo sapiens
gtgctttcaggtctt

SEQ ID NO: 105411 - DNA, 15 bp, Homo sapiens
cgtgctttcaggtct

SEQ ID NO: 105412 - DNA, 15 bp, Homo sapiens
ccgtgctttcaggtc

SEQ ID NO: 105413 - DNA, 15 bp, Homo sapiens
tccgtgctttcaggt

SEQ ID NO: 105414 - DNA, 15 bp, Homo sapiens
ttccgtgctttcagg

SEQ ID NO: 105415 - DNA, 15 bp, Homo sapiens
cttccgtgctttcag

SEQ ID NO: 105416 - DNA, 15 bp, Homo sapiens
ccttccgtgctttca

SEQ ID NO: 105417 - DNA, 15 bp, Homo sapiens
cccttccgtgctttc

SEQ ID NO: 105418 - DNA, 15 bp, Homo sapiens
gcccttccgtgcttt

SEQ ID NO: 105419 - DNA, 15 bp, Homo sapiens
ggcccttccgtgctt

SEQ ID NO: 105420 - DNA, 15 bp, Homo sapiens
gggcccttccgtgct

SEQ ID NO: 105421 - DNA, 15 bp, Homo sapiens
agggcccttccgtgc

SEQ ID NO: 105422 - DNA, 15 bp, Homo sapiens
gagggcccttccgtg

SEQ ID NO: 105423 - DNA, 15 bp, Homo sapiens
ggagggcccttccgt

SEQ ID NO: 105424 - DNA, 15 bp, Homo sapiens
cggagggcccttccg

SEQ ID NO: 105425 - DNA, 15 bp, Homo sapiens
ccggagggcccttcc

SEQ ID NO: 105426 - DNA, 15 bp, Homo sapiens
cccggagggcccttc

SEQ ID NO: 105427 - DNA, 15 bp, Homo sapiens
tcccggagggccctt

SEQ ID NO: 105428 - DNA, 15 bp, Homo sapiens
ctcccggagggccct

SEQ ID NO: 105429 - DNA, 15 bp, Homo sapiens
cctcccggagggccc

SEQ ID NO: 105430 - DNA, 15 bp, Homo sapiens
gcctcccggagggcc

SEQ ID NO: 105431 - DNA, 15 bp, Homo sapiens
cgcctcccggagggc

SEQ ID NO: 105432 - DNA, 15 bp, Homo sapiens
ccgcctcccggaggg

SEQ ID NO: 105433 - DNA, 15 bp, Homo sapiens
cccgcctcccggagg

SEQ ID NO: 105434 - DNA, 15 bp, Homo sapiens
acccgcctcccggag

SEQ ID NO: 105435 - DNA, 15 bp, Homo sapiens
tacccgcctcccgga

SEQ ID NO: 105436 - DNA, 15 bp, Homo sapiens
atacccgcctcccgg

SEQ ID NO: 105437 - DNA, 15 bp, Homo sapiens
catacccgcctcccg

SEQ ID NO: 105438 - DNA, 15 bp, Homo sapiens
gcatacccgcctccc

SEQ ID NO: 105439 - DNA, 15 bp, Homo sapiens
tgcatacccgcctcc

SEQ ID NO: 105440 - DNA, 15 bp, Homo sapiens
ctgcatacccgcctc

SEQ ID NO: 105441 - DNA, 15 bp, Homo sapiens
cctgcatacccgcct

SEQ ID NO: 105442 - DNA, 15 bp, Homo sapiens
gcctgcatacccgcc

SEQ ID NO: 105443 - DNA, 15 bp, Homo sapiens
cgcctgcatacccgc

SEQ ID NO: 105444 - DNA, 15 bp, Homo sapiens
gcgcctgcatacccg

SEQ ID NO: 105445 - DNA, 15 bp, Homo sapiens
tgcgcctgcataccc

SEQ ID NO: 105446 - DNA, 15 bp, Homo sapiens
ttgcgcctgcatacc

SEQ ID NO: 105447 - DNA, 15 bp, Homo sapiens
tttgcgcctgcatac

SEQ ID NO: 105448 - DNA, 15 bp, Homo sapiens
ctttgcgcctgcata

SEQ ID NO: 105449 - DNA, 15 bp, Homo sapiens
cctttgcgcctgcat

SEQ ID NO: 105450 - DNA, 15 bp, Homo sapiens
gcctttgcgcctgca

SEQ ID NO: 105451 - DNA, 15 bp, Homo sapiens
ggcctttgcgcctgc

SEQ ID NO: 105452 - DNA, 15 bp, Homo sapiens
gggcctttgcgcctg

SEQ ID NO: 105453 - DNA, 15 bp, Homo sapiens
agggcctttgcgcct

SEQ ID NO: 105454 - DNA, 15 bp, Homo sapiens
cagggcctttgcgcc

SEQ ID NO: 105455 - DNA, 15 bp, Homo sapiens
ccagggcctttgcgc

SEQ ID NO: 105456 - DNA, 15 bp, Homo sapiens
cccagggcctttgcg

SEQ ID NO: 105457 - DNA, 15 bp, Homo sapiens
ccccagggcctttgc

SEQ ID NO: 105458 - DNA, 15 bp, Homo sapiens
gccccagggcctttg

SEQ ID NO: 105459 - DNA, 15 bp, Homo sapiens
ggccccagggccttt

SEQ ID NO: 105460 - DNA, 15 bp, Homo sapiens
cggccccagggcctt

SEQ ID NO: 105461 - DNA, 15 bp, Homo sapiens
tcggccccagggcct

SEQ ID NO: 105462 - DNA, 15 bp, Homo sapiens
ctcggccccagggcc

SEQ ID NO: 105463 - DNA, 15 bp, Homo sapiens
tctcggccccagggc

SEQ ID NO: 105464 - DNA, 15 bp, Homo sapiens
ctctcggccccaggg

SEQ ID NO: 105465 - DNA, 15 bp, Homo sapiens
gctctcggccccagg

SEQ ID NO: 105466 - DNA, 15 bp, Homo sapiens
agctctcggccccag

SEQ ID NO: 105467 - DNA, 15 bp, Homo sapiens
cagctctcggcccca

SEQ ID NO: 105468 - DNA, 15 bp, Homo sapiens
acagctctcggcccc

SEQ ID NO: 105469 - DNA, 15 bp, Homo sapiens
cacagctctcggccc

SEQ ID NO: 105470 - DNA, 15 bp, Homo sapiens
acacagctctcggcc

SEQ ID NO: 105471 - DNA, 15 bp, Homo sapiens
cacacagctctcggc

SEQ ID NO: 105472 - DNA, 15 bp, Homo sapiens
acacacagctctcgg

SEQ ID NO: 105473 - DNA, 15 bp, Homo sapiens
cacacacagctctcg

SEQ ID NO: 105474 - DNA, 15 bp, Homo sapiens
ccacacacagctctc

SEQ ID NO: 105475 - DNA, 15 bp, Homo sapiens
tccacacacagctct

SEQ ID NO: 105476 - DNA, 15 bp, Homo sapiens
ctccacacacagctc

SEQ ID NO: 105477 - DNA, 15 bp, Homo sapiens
tctccacacacagct

SEQ ID NO: 105478 - DNA, 15 bp, Homo sapiens
gtctccacacacagc

SEQ ID NO: 105479 - DNA, 15 bp, Homo sapiens
ggtctccacacacag

SEQ ID NO: 105480 - DNA, 15 bp, Homo sapiens
tggtctccacacaca

SEQ ID NO: 105481 - DNA, 15 bp, Homo sapiens
ctggtctccacacac

SEQ ID NO: 105482 - DNA, 15 bp, Homo sapiens
gctggtctccacaca

SEQ ID NO: 105483 - DNA, 15 bp, Homo sapiens
cgctggtctccacac

SEQ ID NO: 105484 - DNA, 15 bp, Homo sapiens
acgctggtctccaca

SEQ ID NO: 105485 - DNA, 15 bp, Homo sapiens
cacgctggtctccac

SEQ ID NO: 105486 - DNA, 15 bp, Homo sapiens
tcacgctggtctcca

SEQ ID NO: 105487 - DNA, 15 bp, Homo sapiens
ctcacgctggtctcc

SEQ ID NO: 105488 - DNA, 15 bp, Homo sapiens
cctcacgctggtctc

SEQ ID NO: 105489 - DNA, 15 bp, Homo sapiens
ccctcacgctggtct

SEQ ID NO: 105490 - DNA, 15 bp, Homo sapiens
cccctcacgctggtc

SEQ ID NO: 105491 - DNA, 15 bp, Homo sapiens
gcccctcacgctggt

SEQ ID NO: 105492 - DNA, 15 bp, Homo sapiens
agcccctcacgctgg

SEQ ID NO: 105493 - DNA, 15 bp, Homo sapiens
cagcccctcacgctg

SEQ ID NO: 105494 - DNA, 15 bp, Homo sapiens
ccagcccctcacgct

SEQ ID NO: 105495 - DNA, 15 bp, Homo sapiens
cccagcccctcacgc

SEQ ID NO: 105496 - DNA, 15 bp, Homo sapiens
ccccagcccctcacg

SEQ ID NO: 105497 - DNA, 15 bp, Homo sapiens
gccccagcccctcac

SEQ ID NO: 105498 - DNA, 15 bp, Homo sapiens
tgccccagcccctca

SEQ ID NO: 105499 - DNA, 15 bp, Homo sapiens
ctgccccagcccctc

SEQ ID NO: 105500 - DNA, 15 bp, Homo sapiens
gctgccccagcccct

SEQ ID NO: 105501 - DNA, 15 bp, Homo sapiens
agctgccccagcccc

SEQ ID NO: 105502 - DNA, 15 bp, Homo sapiens
cagctgccccagccc

SEQ ID NO: 105503 - DNA, 15 bp, Homo sapiens
ccagctgccccagcc

SEQ ID NO: 105504 - DNA, 15 bp, Homo sapiens
cccagctgccccagc

SEQ ID NO: 105505 - DNA, 15 bp, Homo sapiens
gcccagctgccccag

SEQ ID NO: 105506 - DNA, 15 bp, Homo sapiens
ggcccagctgcccca

SEQ ID NO: 105507 - DNA, 15 bp, Homo sapiens
gggcccagctgcccc

SEQ ID NO: 105508 - DNA, 15 bp, Homo sapiens
tgggcccagctgccc

SEQ ID NO: 105509 - DNA, 15 bp, Homo sapiens
ttgggcccagctgcc

SEQ ID NO: 105510 - DNA, 15 bp, Homo sapiens
tttgggcccagctgc

SEQ ID NO: 105511 - DNA, 15 bp, Homo sapiens
ctttgggcccagctg

SEQ ID NO: 105512 - DNA, 15 bp, Homo sapiens
tctttgggcccagct

SEQ ID NO: 105513 - DNA, 15 bp, Homo sapiens
gtctttgggcccagc

SEQ ID NO: 105514 - DNA, 15 bp, Homo sapiens
tgtctttgggcccag

SEQ ID NO: 105515 - DNA, 15 bp, Homo sapiens
ctgtctttgggccca

SEQ ID NO: 105516 - DNA, 15 bp, Homo sapiens
tctgtctttgggccc

SEQ ID NO: 105517 - DNA, 15 bp, Homo sapiens
atctgtctttgggcc

SEQ ID NO: 105518 - DNA, 15 bp, Homo sapiens
aatctgtctttgggc

SEQ ID NO: 105519 - DNA, 15 bp, Homo sapiens
gaatctgtctttggg

SEQ ID NO: 105520 - DNA, 15 bp, Homo sapiens
tgaatctgtctttgg

SEQ ID NO: 105521 - DNA, 15 bp, Homo sapiens
gtgaatctgtctttg

SEQ ID NO: 105522 - DNA, 15 bp, Homo sapiens
tgtgaatctgtcttt

SEQ ID NO: 105523 - DNA, 15 bp, Homo sapiens
ctgtgaatctgtctt

SEQ ID NO: 105524 - DNA, 15 bp, Homo sapiens
tctgtgaatctgtct

SEQ ID NO: 105525 - DNA, 15 bp, Homo sapiens
gtctgtgaatctgtc

SEQ ID NO: 105526 - DNA, 15 bp, Homo sapiens
cgtctgtgaatctgt

SEQ ID NO: 105527 - DNA, 15 bp, Homo sapiens
gcgtctgtgaatctg

SEQ ID NO: 105528 - DNA, 15 bp, Homo sapiens
ggcgtctgtgaatct

SEQ ID NO: 105529 - DNA, 15 bp, Homo sapiens
aggcgtctgtgaatc

SEQ ID NO: 105530 - DNA, 15 bp, Homo sapiens
aaggcgtctgtgaat

SEQ ID NO: 105531 - DNA, 15 bp, Homo sapiens
gaaggcgtctgtgaa

SEQ ID NO: 105532 - DNA, 15 bp, Homo sapiens
ggaaggcgtctgtga

SEQ ID NO: 105533 - DNA, 15 bp, Homo sapiens
tggaaggcgtctgtg

SEQ ID NO: 105534 - DNA, 15 bp, Homo sapiens
atggaaggcgtctgt

SEQ ID NO: 105535 - DNA, 15 bp, Homo sapiens
gatggaaggcgtctg

SEQ ID NO: 105536 - DNA, 15 bp, Homo sapiens
cgatggaaggcgtct

SEQ ID NO: 105537 - DNA, 15 bp, Homo sapiens
gcgatggaaggcgtc

SEQ ID NO: 105538 - DNA, 15 bp, Homo sapiens
ggcgatggaaggcgt

SEQ ID NO: 105539 - DNA, 15 bp, Homo sapiens
cggcgatggaaggcg

SEQ ID NO: 105540 - DNA, 15 bp, Homo sapiens
gcggcgatggaaggc

SEQ ID NO: 105541 - DNA, 15 bp, Homo sapiens
agcggcgatggaagg

SEQ ID NO: 105542 - DNA, 15 bp, Homo sapiens
cagcggcgatggaag

SEQ ID NO: 105543 - DNA, 15 bp, Homo sapiens
gcagcggcgatggaa

SEQ ID NO: 105544 - DNA, 15 bp, Homo sapiens
cgcagcggcgatgga

SEQ ID NO: 105545 - DNA, 15 bp, Homo sapiens
ccgcagcggcgatgg

SEQ ID NO: 105546 - DNA, 15 bp, Homo sapiens
accgcagcggcgatg

SEQ ID NO: 105547 - DNA, 15 bp, Homo sapiens
taccgcagcggcgat

SEQ ID NO: 105548 - DNA, 15 bp, Homo sapiens
ctaccgcagcggcga

SEQ ID NO: 105549 - DNA, 15 bp, Homo sapiens
actaccgcagcggcg

SEQ ID NO: 105550 - DNA, 15 bp, Homo sapiens
gactaccgcagcggc

SEQ ID NO: 105551 - DNA, 15 bp, Homo sapiens
tgactaccgcagcgg

SEQ ID NO: 105552 - DNA, 15 bp, Homo sapiens
atgactaccgcagcg

SEQ ID NO: 105553 - DNA, 15 bp, Homo sapiens
catgactaccgcagc

SEQ ID NO: 105554 - DNA, 15 bp, Homo sapiens
gcatgactaccgcag

SEQ ID NO: 105555 - DNA, 15 bp, Homo sapiens
ggcatgactaccgca

SEQ ID NO: 105556 - DNA, 15 bp, Homo sapiens
gggcatgactaccgc

SEQ ID NO: 105557 - DNA, 15 bp, Homo sapiens
agggcatgactaccg

SEQ ID NO: 105558 - DNA, 15 bp, Homo sapiens
cagggcatgactacc

SEQ ID NO: 105559 - DNA, 15 bp, Homo sapiens
gcagggcatgactac

SEQ ID NO: 105560 - DNA, 15 bp, Homo sapiens
cgcagggcatgacta

SEQ ID NO: 105561 - DNA, 15 bp, Homo sapiens
ccgcagggcatgact

SEQ ID NO: 105562 - DNA, 15 bp, Homo sapiens
gccgcagggcatgac

SEQ ID NO: 105563 - DNA, 15 bp, Homo sapiens
cgccgcagggcatga

SEQ ID NO: 105564 - DNA, 15 bp, Homo sapiens
acgccgcagggcatg

SEQ ID NO: 105565 - DNA, 15 bp, Homo sapiens
tacgccgcagggcat

SEQ ID NO: 105566 - DNA, 15 bp, Homo sapiens
ctacgccgcagggca

SEQ ID NO: 105567 - DNA, 15 bp, Homo sapiens
gctacgccgcagggc

SEQ ID NO: 105568 - DNA, 15 bp, Homo sapiens
ggctacgccgcaggg

SEQ ID NO: 105569 - DNA, 15 bp, Homo sapiens
aggctacgccgcagg

SEQ ID NO: 105570 - DNA, 15 bp, Homo sapiens
gaggctacgccgcag

SEQ ID NO: 105571 - DNA, 15 bp, Homo sapiens
ggaggctacgccgca

SEQ ID NO: 105572 - DNA, 15 bp, Homo sapiens
aggaggctacgccgc

SEQ ID NO: 105573 - DNA, 15 bp, Homo sapiens
gaggaggctacgccg

SEQ ID NO: 105574 - DNA, 15 bp, Homo sapiens
ggaggaggctacgcc

SEQ ID NO: 105575 - DNA, 15 bp, Homo sapiens
gggaggaggctacgc

SEQ ID NO: 105576 - DNA, 15 bp, Homo sapiens
tgggaggaggctacg

SEQ ID NO: 105577 - DNA, 15 bp, Homo sapiens
ttgggaggaggctac

SEQ ID NO: 105578 - DNA, 15 bp, Homo sapiens
cttgggaggaggcta

SEQ ID NO: 105579 - DNA, 15 bp, Homo sapiens
ccttgggaggaggct

SEQ ID NO: 105580 - DNA, 15 bp, Homo sapiens
gccttgggaggaggc

SEQ ID NO: 105581 - DNA, 15 bp, Homo sapiens
agccttgggaggagg

SEQ ID NO: 105582 - DNA, 15 bp, Homo sapiens
cagccttgggaggag

SEQ ID NO: 105583 - DNA, 15 bp, Homo sapiens
ccagccttgggagga

SEQ ID NO: 105584 - DNA, 15 bp, Homo sapiens
tccagccttgggagg

SEQ ID NO: 105585 - DNA, 15 bp, Homo sapiens
ctccagccttgggag

SEQ ID NO: 105586 - DNA, 15 bp, Homo sapiens
gctccagccttggga

SEQ ID NO: 105587 - DNA, 15 bp, Homo sapiens
ggctccagccttggg

SEQ ID NO: 105588 - DNA, 15 bp, Homo sapiens
gggctccagccttgg

SEQ ID NO: 105589 - DNA, 15 bp, Homo sapiens
agggctccagccttg

SEQ ID NO: 105590 - DNA, 15 bp, Homo sapiens
aagggctccagcctt

SEQ ID NO: 105591 - DNA, 15 bp, Homo sapiens
gaagggctccagcct

SEQ ID NO: 105592 - DNA, 15 bp, Homo sapiens
ggaagggctccagcc

SEQ ID NO: 105593 - DNA, 15 bp, Homo sapiens
gggaagggctccagc

SEQ ID NO: 105594 - DNA, 15 bp, Homo sapiens
ggggaagggctccag

SEQ ID NO: 105595 - DNA, 15 bp, Homo sapiens
cggggaagggctcca

SEQ ID NO: 105596 - DNA, 15 bp, Homo sapiens
ccggggaagggctcc

SEQ ID NO: 105597 - DNA, 15 bp, Homo sapiens
tccggggaagggctc

SEQ ID NO: 105598 - DNA, 15 bp, Homo sapiens
ctccggggaagggct

SEQ ID NO: 105599 - DNA, 15 bp, Homo sapiens
gctccggggaagggc

SEQ ID NO: 105600 - DNA, 15 bp, Homo sapiens
agctccggggaaggg

SEQ ID NO: 105601 - DNA, 15 bp, Homo sapiens
cagctccggggaagg

SEQ ID NO: 105602 - DNA, 15 bp, Homo sapiens
ccagctccggggaag

SEQ ID NO: 105603 - DNA, 15 bp, Homo sapiens
accagctccggggaa

SEQ ID NO: 105604 - DNA, 15 bp, Homo sapiens
gaccagctccgggga

SEQ ID NO: 105605 - DNA, 15 bp, Homo sapiens
cgaccagctccgggg

SEQ ID NO: 105606 - DNA, 15 bp, Homo sapiens
acgaccagctccggg

SEQ ID NO: 105607 - DNA, 15 bp, Homo sapiens
cacgaccagctccgg

SEQ ID NO: 105608 - DNA, 15 bp, Homo sapiens
ccacgaccagctccg

SEQ ID NO: 105609 - DNA, 15 bp, Homo sapiens
gccacgaccagctcc

SEQ ID NO: 105610 - DNA, 15 bp, Homo sapiens
ggccacgaccagctc

SEQ ID NO: 105611 - DNA, 15 bp, Homo sapiens
tggccacgaccagct

SEQ ID NO: 105612 - DNA, 15 bp, Homo sapiens
ctggccacgaccagc

SEQ ID NO: 105613 - DNA, 15 bp, Homo sapiens
cctggccacgaccag

SEQ ID NO: 105614 - DNA, 15 bp, Homo sapiens
tcctggccacgacca

SEQ ID NO: 105615 - DNA, 15 bp, Homo sapiens
ctcctggccacgacc

SEQ ID NO: 105616 - DNA, 15 bp, Homo sapiens
gctcctggccacgac

SEQ ID NO: 105617 - DNA, 15 bp, Homo sapiens
agctcctggccacga

SEQ ID NO: 105618 - DNA, 15 bp, Homo sapiens
gagctcctggccacg

SEQ ID NO: 105619 - DNA, 15 bp, Homo sapiens
ggagctcctggccac

SEQ ID NO: 105620 - DNA, 15 bp, Homo sapiens
gggagctcctggcca

SEQ ID NO: 105621 - DNA, 15 bp, Homo sapiens
tgggagctcctggcc

SEQ ID NO: 105622 - DNA, 15 bp, Homo sapiens
gtgggagctcctggc

SEQ ID NO: 105623 - DNA, 15 bp, Homo sapiens
ggtgggagctcctgg

SEQ ID NO: 105624 - DNA, 15 bp, Homo sapiens
cggtgggagctcctg

SEQ ID NO: 105625 - DNA, 15 bp, Homo sapiens
ccggtgggagctcct

SEQ ID NO: 105626 - DNA, 15 bp, Homo sapiens
cccggtgggagctcc

SEQ ID NO: 105627 - DNA, 15 bp, Homo sapiens
ccccggtgggagctc

SEQ ID NO: 105628 - DNA, 15 bp, Homo sapiens
gccccggtgggagct

SEQ ID NO: 105629 - DNA, 15 bp, Homo sapiens
tgccccggtgggagc

SEQ ID NO: 105630 - DNA, 15 bp, Homo sapiens
ctgccccggtgggag

SEQ ID NO: 105631 - DNA, 15 bp, Homo sapiens
cctgccccggtggga

SEQ ID NO: 105632 - DNA, 15 bp, Homo sapiens
ccctgccccggtggg

SEQ ID NO: 105633 - DNA, 15 bp, Homo sapiens
gccctgccccggtgg

SEQ ID NO: 105634 - DNA, 15 bp, Homo sapiens
cgccctgccccggtg

SEQ ID NO: 105635 - DNA, 15 bp, Homo sapiens
gcgccctgccccggt

SEQ ID NO: 105636 - DNA, 15 bp, Homo sapiens
agcgccctgccccgg

SEQ ID NO: 105637 - DNA, 15 bp, Homo sapiens
tagcgccctgccccg

SEQ ID NO: 105638 - DNA, 15 bp, Homo sapiens
ttagcgccctgcccc

SEQ ID NO: 105639 - DNA, 15 bp, Homo sapiens
cttagcgccctgccc

SEQ ID NO: 105640 - DNA, 15 bp, Homo sapiens
ccttagcgccctgcc

SEQ ID NO: 105641 - DNA, 15 bp, Homo sapiens
gccttagcgccctgc

SEQ ID NO: 105642 - DNA, 15 bp, Homo sapiens
ggccttagcgccctg

SEQ ID NO: 105643 - DNA, 15 bp, Homo sapiens
gggccttagcgccct

SEQ ID NO: 105644 - DNA, 15 bp, Homo sapiens
cgggccttagcgccc

SEQ ID NO: 105645 - DNA, 15 bp, Homo sapiens
ccgggccttagcgcc

SEQ ID NO: 105646 - DNA, 15 bp, Homo sapiens
gccgggccttagcgc

SEQ ID NO: 105647 - DNA, 15 bp, Homo sapiens
tgccgggccttagcg

SEQ ID NO: 105648 - DNA, 15 bp, Homo sapiens
gtgccgggccttagc

SEQ ID NO: 105649 - DNA, 15 bp, Homo sapiens
agtgccgggccttag

SEQ ID NO: 105650 - DNA, 15 bp, Homo sapiens
gagtgccgggcctta

SEQ ID NO: 105651 - DNA, 15 bp, Homo sapiens
ggagtgccgggcctt

SEQ ID NO: 105652 - DNA, 15 bp, Homo sapiens
cggagtgccgggcct

SEQ ID NO: 105653 - DNA, 15 bp, Homo sapiens
gcggagtgccgggcc

SEQ ID NO: 105654 - DNA, 15 bp, Homo sapiens
ggcggagtgccgggc

SEQ ID NO: 105655 - DNA, 15 bp, Homo sapiens
aggcggagtgccggg

SEQ ID NO: 105656 - DNA, 15 bp, Homo sapiens
caggcggagtgccgg

SEQ ID NO: 105657 - DNA, 15 bp, Homo sapiens
ccaggcggagtgccg

SEQ ID NO: 105658 - DNA, 15 bp, Homo sapiens
gccaggcggagtgcc

SEQ ID NO: 105659 - DNA, 15 bp, Homo sapiens
agccaggcggagtgc

SEQ ID NO: 105660 - DNA, 15 bp, Homo sapiens
cagccaggcggagtg

SEQ ID NO: 105661 - DNA, 15 bp, Homo sapiens
gcagccaggcggagt

SEQ ID NO: 105662 - DNA, 15 bp, Homo sapiens
agcagccaggcggag

SEQ ID NO: 105663 - DNA, 15 bp, Homo sapiens
cagcagccaggcgga

SEQ ID NO: 105664 - DNA, 15 bp, Homo sapiens
acagcagccaggcgg

SEQ ID NO: 105665 - DNA, 15 bp, Homo sapiens
cacagcagccaggcg

SEQ ID NO: 105666 - DNA, 15 bp, Homo sapiens
ccacagcagccaggc

SEQ ID NO: 105667 - DNA, 15 bp, Homo sapiens
cccacagcagccagg

SEQ ID NO: 105668 - DNA, 15 bp, Homo sapiens
ccccacagcagccag

SEQ ID NO: 105669 - DNA, 15 bp, Homo sapiens
gccccacagcagcca

SEQ ID NO: 105670 - DNA, 15 bp, Homo sapiens
agccccacagcagcc

SEQ ID NO: 105671 - DNA, 15 bp, Homo sapiens
cagccccacagcagc

SEQ ID NO: 105672 - DNA, 15 bp, Homo sapiens
gcagccccacagcag

SEQ ID NO: 105673 - DNA, 15 bp, Homo sapiens
agcagccccacagca

SEQ ID NO: 105674 - DNA, 15 bp, Homo sapiens
cagcagccccacagc

SEQ ID NO: 105675 - DNA, 15 bp, Homo sapiens
gcagcagccccacag

SEQ ID NO: 105676 - DNA, 15 bp, Homo sapiens
ggcagcagccccaca

SEQ ID NO: 105677 - DNA, 15 bp, Homo sapiens
cggcagcagccccac

SEQ ID NO: 105678 - DNA, 15 bp, Homo sapiens
ccggcagcagcccca

SEQ ID NO: 105679 - DNA, 15 bp, Homo sapiens
cccggcagcagcccc

SEQ ID NO: 105680 - DNA, 15 bp, Homo sapiens
ccccggcagcagccc

SEQ ID NO: 105681 - DNA, 15 bp, Homo sapiens
gccccggcagcagcc

SEQ ID NO: 105682 - DNA, 15 bp, Homo sapiens
cgccccggcagcagc

SEQ ID NO: 105683 - DNA, 15 bp, Homo sapiens
ccgccccggcagcag

SEQ ID NO: 105684 - DNA, 15 bp, Homo sapiens
cccgccccggcagca

SEQ ID NO: 105685 - DNA, 15 bp, Homo sapiens
acccgccccggcagc

SEQ ID NO: 105686 - DNA, 15 bp, Homo sapiens
cacccgccccggcag

SEQ ID NO: 105687 - DNA, 15 bp, Homo sapiens
gcacccgccccggca

SEQ ID NO: 105688 - DNA, 15 bp, Homo sapiens
agcacccgccccggc

SEQ ID NO: 105689 - DNA, 15 bp, Homo sapiens
cagcacccgccccgg

SEQ ID NO: 105690 - DNA, 15 bp, Homo sapiens
tcagcacccgccccg

SEQ ID NO: 105691 - DNA, 15 bp, Homo sapiens
gtcagcacccgcccc

SEQ ID NO: 105692 - DNA, 15 bp, Homo sapiens
cgtcagcacccgccc

SEQ ID NO: 105693 - DNA, 15 bp, Homo sapiens
gcgtcagcacccgcc

SEQ ID NO: 105694 - DNA, 15 bp, Homo sapiens
agcgtcagcacccgc

SEQ ID NO: 105695 - DNA, 15 bp, Homo sapiens
cagcgtcagcacccg

SEQ ID NO: 105696 - DNA, 15 bp, Homo sapiens
acagcgtcagcaccc

SEQ ID NO: 105697 - DNA, 15 bp, Homo sapiens
gacagcgtcagcacc

SEQ ID NO: 105698 - DNA, 15 bp, Homo sapiens
agacagcgtcagcac

SEQ ID NO: 105699 - DNA, 15 bp, Homo sapiens
cagacagcgtcagca

SEQ ID NO: 105700 - DNA, 15 bp, Homo sapiens
acagacagcgtcagc

SEQ ID NO: 105701 - DNA, 15 bp, Homo sapiens
cacagacagcgtcag

SEQ ID NO: 105702 - DNA, 15 bp, Homo sapiens
gcacagacagcgtca

SEQ ID NO: 105703 - DNA, 15 bp, Homo sapiens
ggcacagacagcgtc

SEQ ID NO: 105704 - DNA, 15 bp, Homo sapiens
gggcacagacagcgt

SEQ ID NO: 105705 - DNA, 15 bp, Homo sapiens
ggggcacagacagcg

SEQ ID NO: 105706 - DNA, 15 bp, Homo sapiens
aggggcacagacagc

SEQ ID NO: 105707 - DNA, 15 bp, Homo sapiens
caggggcacagacag

SEQ ID NO: 105708 - DNA, 15 bp, Homo sapiens
gcaggggcacagaca

SEQ ID NO: 105709 - DNA, 15 bp, Homo sapiens
ggcaggggcacagac

SEQ ID NO: 105710 - DNA, 15 bp, Homo sapiens
gggcaggggcacaga

SEQ ID NO: 105711 - DNA, 15 bp, Homo sapiens
cgggcaggggcacag

SEQ ID NO: 105712 - DNA, 15 bp, Homo sapiens
acgggcaggggcaca

SEQ ID NO: 105713 - DNA, 15 bp, Homo sapiens
gacgggcaggggcac

SEQ ID NO: 105714 - DNA, 15 bp, Homo sapiens
agacgggcaggggca

SEQ ID NO: 105715 - DNA, 15 bp, Homo sapiens
gagacgggcaggggc

SEQ ID NO: 105716 - DNA, 15 bp, Homo sapiens
ggagacgggcagggg

SEQ ID NO: 105717 - DNA, 15 bp, Homo sapiens
gggagacgggcaggg

SEQ ID NO: 105718 - DNA, 15 bp, Homo sapiens
tgggagacgggcagg

SEQ ID NO: 105719 - DNA, 15 bp, Homo sapiens
gtgggagacgggcag

SEQ ID NO: 105720 - DNA, 15 bp, Homo sapiens
ggtgggagacgggca

SEQ ID NO: 105721 - DNA, 15 bp, Homo sapiens
tggtgggagacgggc

SEQ ID NO: 105722 - DNA, 15 bp, Homo sapiens
ctggtgggagacggg

SEQ ID NO: 105723 - DNA, 15 bp, Homo sapiens
cctggtgggagacgg

SEQ ID NO: 105724 - DNA, 15 bp, Homo sapiens
acctggtgggagacg

SEQ ID NO: 105725 - DNA, 15 bp, Homo sapiens
aacctggtgggagac

SEQ ID NO: 105726 - DNA, 15 bp, Homo sapiens
gaacctggtgggaga

SEQ ID NO: 105727 - DNA, 15 bp, Homo sapiens
ggaacctggtgggag

SEQ ID NO: 105728 - DNA, 15 bp, Homo sapiens
tggaacctggtggga

SEQ ID NO: 105729 - DNA, 15 bp, Homo sapiens
ctggaacctggtggg

SEQ ID NO: 105730 - DNA, 15 bp, Homo sapiens
cctggaacctggtgg

SEQ ID NO: 105731 - DNA, 15 bp, Homo sapiens
acctggaacctggtg

SEQ ID NO: 105732 - DNA, 15 bp, Homo sapiens
tacctggaacctggt

SEQ ID NO: 105733 - DNA, 15 bp, Homo sapiens
ttacctggaacctgg

SEQ ID NO: 105734 - DNA, 15 bp, Homo sapiens
tttacctggaacctg

SEQ ID NO: 105735 - DNA, 15 bp, Homo sapiens
atttacctggaacct

SEQ ID NO: 105736 - DNA, 15 bp, Homo sapiens
tatttacctggaacc

SEQ ID NO: 105737 - DNA, 15 bp, Homo sapiens
gtatttacctggaac

SEQ ID NO: 105738 - DNA, 15 bp, Homo sapiens
tgtatttacctggaa

SEQ ID NO: 105739 - DNA, 15 bp, Homo sapiens
gtgtatttacctgga

SEQ ID NO: 105740 - DNA, 15 bp, Homo sapiens
cgtgtatttacctgg

SEQ ID NO: 105741 - DNA, 15 bp, Homo sapiens
ccgtgtatttacctg

SEQ ID NO: 105742 - DNA, 15 bp, Homo sapiens
accgtgtatttacct

SEQ ID NO: 105743 - DNA, 15 bp, Homo sapiens
gaccgtgtatttacc

SEQ ID NO: 105744 - DNA, 15 bp, Homo sapiens
cgaccgtgtatttac

SEQ ID NO: 105745 - DNA, 15 bp, Homo sapiens
acgaccgtgtattta

SEQ ID NO: 105746 - DNA, 15 bp, Homo sapiens
cacgaccgtgtattt

SEQ ID NO: 105747 - DNA, 15 bp, Homo sapiens
ccacgaccgtgtatt

SEQ ID NO: 105748 - DNA, 15 bp, Homo sapiens
gccacgaccgtgtat

SEQ ID NO: 105749 - DNA, 15 bp, Homo sapiens
cgccacgaccgtgta

SEQ ID NO: 105750 - DNA, 15 bp, Homo sapiens
ccgccacgaccgtgt

SEQ ID NO: 105751 - DNA, 15 bp, Homo sapiens
tccgccacgaccgtg

SEQ ID NO: 105752 - DNA, 15 bp, Homo sapiens
gtccgccacgaccgt

SEQ ID NO: 105753 - DNA, 15 bp, Homo sapiens
ggtccgccacgaccg

SEQ ID NO: 105754 - DNA, 15 bp, Homo sapiens
tggtccgccacgacc

SEQ ID NO: 105755 - DNA, 15 bp, Homo sapiens
gtggtccgccacgac

SEQ ID NO: 105756 - DNA, 15 bp, Homo sapiens
cgtggtccgccacga

SEQ ID NO: 105757 - DNA, 15 bp, Homo sapiens
tcgtggtccgccacg

SEQ ID NO: 105758 - DNA, 15 bp, Homo sapiens
ctcgtggtccgccac

SEQ ID NO: 105759 - DNA, 15 bp, Homo sapiens
tctcgtggtccgcca

SEQ ID NO: 105760 - DNA, 15 bp, Homo sapiens
ttctcgtggtccgcc

SEQ ID NO: 105761 - DNA, 15 bp, Homo sapiens
cttctcgtggtccgc

SEQ ID NO: 105762 - DNA, 15 bp, Homo sapiens
ccttctcgtggtccg

SEQ ID NO: 105763 - DNA, 15 bp, Homo sapiens
cccttctcgtggtcc

SEQ ID NO: 105764 - DNA, 15 bp, Homo sapiens
tcccttctcgtggtc

SEQ ID NO: 105765 - DNA, 15 bp, Homo sapiens
ctcccttctcgtggt

SEQ ID NO: 105766 - DNA, 15 bp, Homo sapiens
cctcccttctcgtgg

SEQ ID NO: 105767 - DNA, 15 bp, Homo sapiens
gcctcccttctcgtg

SEQ ID NO: 105768 - DNA, 15 bp, Homo sapiens
ggcctcccttctcgt

SEQ ID NO: 105769 - DNA, 15 bp, Homo sapiens
gggcctcccttctcg

SEQ ID NO: 105770 - DNA, 15 bp, Homo sapiens
ggggcctcccttctc

SEQ ID NO: 105771 - DNA, 15 bp, Homo sapiens
cggggcctcccttct

SEQ ID NO: 105772 - DNA, 15 bp, Homo sapiens
tcggggcctcccttc

SEQ ID NO: 105773 - DNA, 15 bp, Homo sapiens
atcggggcctccctt

SEQ ID NO: 105774 - DNA, 15 bp, Homo sapiens
catcggggcctccct

SEQ ID NO: 105775 - DNA, 15 bp, Homo sapiens
gcatcggggcctccc

SEQ ID NO: 105776 - DNA, 15 bp, Homo sapiens
cgcatcggggcctcc

SEQ ID NO: 105777 - DNA, 15 bp, Homo sapiens
gcgcatcggggcctc

SEQ ID NO: 105778 - DNA, 15 bp, Homo sapiens
agcgcatcggggcct

SEQ ID NO: 105779 - DNA, 15 bp, Homo sapiens
cagcgcatcggggcc

SEQ ID NO: 105780 - DNA, 15 bp, Homo sapiens
gcagcgcatcggggc

SEQ ID NO: 105781 - DNA, 15 bp, Homo sapiens
cgcagcgcatcgggg

SEQ ID NO: 105782 - DNA, 15 bp, Homo sapiens
gcgcagcgcatcggg

SEQ ID NO: 105783 - DNA, 15 bp, Homo sapiens
cgcgcagcgcatcgg

SEQ ID NO: 105784 - DNA, 15 bp, Homo sapiens
acgcgcagcgcatcg

SEQ ID NO: 105785 - DNA, 15 bp, Homo sapiens
cacgcgcagcgcatc

SEQ ID NO: 105786 - DNA, 15 bp, Homo sapiens
tcacgcgcagcgcat

SEQ ID NO: 105787 - DNA, 15 bp, Homo sapiens
ctcacgcgcagcgca

SEQ ID NO: 105788 - DNA, 15 bp, Homo sapiens
cctcacgcgcagcgc

SEQ ID NO: 105789 - DNA, 15 bp, Homo sapiens
tcctcacgcgcagcg

SEQ ID NO: 105790 - DNA, 15 bp, Homo sapiens
ctcctcacgcgcagc

SEQ ID NO: 105791 - DNA, 15 bp, Homo sapiens
gctcctcacgcgcag

SEQ ID NO: 105792 - DNA, 15 bp, Homo sapiens
cgctcctcacgcgca

SEQ ID NO: 105793 - DNA, 15 bp, Homo sapiens
ccgctcctcacgcgc

SEQ ID NO: 105794 - DNA, 15 bp, Homo sapiens
cccgctcctcacgcg

SEQ ID NO: 105795 - DNA, 15 bp, Homo sapiens
ccccgctcctcacgc

SEQ ID NO: 105796 - DNA, 15 bp, Homo sapiens
tccccgctcctcacg

SEQ ID NO: 105797 - DNA, 15 bp, Homo sapiens
gtccccgctcctcac

SEQ ID NO: 105798 - DNA, 15 bp, Homo sapiens
cgtccccgctcctca

SEQ ID NO: 105799 - DNA, 15 bp, Homo sapiens
acgtccccgctcctc

SEQ ID NO: 105800 - DNA, 15 bp, Homo sapiens
cacgtccccgctcct

SEQ ID NO: 105801 - DNA, 15 bp, Homo sapiens
ccacgtccccgctcc

SEQ ID NO: 105802 - DNA, 15 bp, Homo sapiens
accacgtccccgctc

SEQ ID NO: 105803 - DNA, 15 bp, Homo sapiens
caccacgtccccgct

SEQ ID NO: 105804 - DNA, 15 bp, Homo sapiens
ccaccacgtccccgc

SEQ ID NO: 105805 - DNA, 15 bp, Homo sapiens
tccaccacgtccccg

SEQ ID NO: 105806 - DNA, 15 bp, Homo sapiens
ctccaccacgtcccc

SEQ ID NO: 105807 - DNA, 15 bp, Homo sapiens
gctccaccacgtccc

SEQ ID NO: 105808 - DNA, 15 bp, Homo sapiens
agctccaccacgtcc

SEQ ID NO: 105809 - DNA, 15 bp, Homo sapiens
cagctccaccacgtc

SEQ ID NO: 105810 - DNA, 15 bp, Homo sapiens
ccagctccaccacgt

SEQ ID NO: 105811 - DNA, 15 bp, Homo sapiens
accagctccaccacg

SEQ ID NO: 105812 - DNA, 15 bp, Homo sapiens
caccagctccaccac

SEQ ID NO: 105813 - DNA, 15 bp, Homo sapiens
gcaccagctccacca

SEQ ID NO: 105814 - DNA, 15 bp, Homo sapiens
tgcaccagctccacc

SEQ ID NO: 105815 - DNA, 15 bp, Homo sapiens
ctgcaccagctccac

SEQ ID NO: 105816 - DNA, 15 bp, Homo sapiens
cctgcaccagctcca

SEQ ID NO: 105817 - DNA, 15 bp, Homo sapiens
tcctgcaccagctcc

SEQ ID NO: 105818 - DNA, 15 bp, Homo sapiens
ctcctgcaccagctc

SEQ ID NO: 105819 - DNA, 15 bp, Homo sapiens
cctcctgcaccagct

SEQ ID NO: 105820 - DNA, 15 bp, Homo sapiens
ccctcctgcaccagc

SEQ ID NO: 105821 - DNA, 15 bp, Homo sapiens
gccctcctgcaccag

SEQ ID NO: 105822 - DNA, 15 bp, Homo sapiens
cgccctcctgcacca

SEQ ID NO: 105823 - DNA, 15 bp, Homo sapiens
tcgccctcctgcacc

SEQ ID NO: 105824 - DNA, 15 bp, Homo sapiens
gtcgccctcctgcac

SEQ ID NO: 105825 - DNA, 15 bp, Homo sapiens
cgtcgccctcctgca

SEQ ID NO: 105826 - DNA, 15 bp, Homo sapiens
tcgtcgccctcctgc

SEQ ID NO: 105827 - DNA, 15 bp, Homo sapiens
ctcgtcgccctcctg

SEQ ID NO: 105828 - DNA, 15 bp, Homo sapiens
cctcgtcgccctcct

SEQ ID NO: 105829 - DNA, 15 bp, Homo sapiens
ccctcgtcgccctcc

SEQ ID NO: 105830 - DNA, 15 bp, Homo sapiens
gccctcgtcgccctc

SEQ ID NO: 105831 - DNA, 15 bp, Homo sapiens
ggccctcgtcgccct

SEQ ID NO: 105832 - DNA, 15 bp, Homo sapiens
aggccctcgtcgccc

SEQ ID NO: 105833 - DNA, 15 bp, Homo sapiens
gaggccctcgtcgcc

SEQ ID NO: 105834 - DNA, 15 bp, Homo sapiens
agaggccctcgtcgc

SEQ ID NO: 105835 - DNA, 15 bp, Homo sapiens
cagaggccctcgtcg

SEQ ID NO: 105836 - DNA, 15 bp, Homo sapiens
ccagaggccctcgtc

SEQ ID NO: 105837 - DNA, 15 bp, Homo sapiens
accagaggccctcgt

SEQ ID NO: 105838 - DNA, 15 bp, Homo sapiens
taccagaggccctcg

SEQ ID NO: 105839 - DNA, 15 bp, Homo sapiens
ttaccagaggccctc

SEQ ID NO: 105840 - DNA, 15 bp, Homo sapiens
cttaccagaggccct

SEQ ID NO: 105841 - DNA, 15 bp, Homo sapiens
tcttaccagaggccc

SEQ ID NO: 105842 - DNA, 15 bp, Homo sapiens
gtcttaccagaggcc

SEQ ID NO: 105843 - DNA, 15 bp, Homo sapiens
ggtcttaccagaggc

SEQ ID NO: 105844 - DNA, 15 bp, Homo sapiens
gggtcttaccagagg

SEQ ID NO: 105845 - DNA, 15 bp, Homo sapiens
ggggtcttaccagag

SEQ ID NO: 105846 - DNA, 15 bp, Homo sapiens
cggggtcttaccaga

SEQ ID NO: 105847 - DNA, 15 bp, Homo sapiens
gcggggtcttaccag

SEQ ID NO: 105848 - DNA, 15 bp, Homo sapiens
cgcggggtcttacca

SEQ ID NO: 105849 - DNA, 15 bp, Homo sapiens
gcgcggggtcttacc

SEQ ID NO: 105850 - DNA, 15 bp, Homo sapiens
agcgcggggtcttac

SEQ ID NO: 105851 - DNA, 15 bp, Homo sapiens
gagcgcggggtctta

SEQ ID NO: 105852 - DNA, 15 bp, Homo sapiens
tgagcgcggggtctt

SEQ ID NO: 105853 - DNA, 15 bp, Homo sapiens
ctgagcgcggggtct

SEQ ID NO: 105854 - DNA, 15 bp, Homo sapiens
gctgagcgcggggtc

SEQ ID NO: 105855 - DNA, 15 bp, Homo sapiens
ggctgagcgcggggt

SEQ ID NO: 105856 - DNA, 15 bp, Homo sapiens
gggctgagcgcgggg

SEQ ID NO: 105857 - DNA, 15 bp, Homo sapiens
ggggctgagcgcggg

SEQ ID NO: 105858 - DNA, 15 bp, Homo sapiens
cggggctgagcgcgg

SEQ ID NO: 105859 - DNA, 15 bp, Homo sapiens
ccggggctgagcgcg

SEQ ID NO: 105860 - DNA, 15 bp, Homo sapiens
tccggggctgagcgc

SEQ ID NO: 105861 - DNA, 15 bp, Homo sapiens
gtccggggctgagcg

SEQ ID NO: 105862 - DNA, 15 bp, Homo sapiens
agtccggggctgagc

SEQ ID NO: 105863 - DNA, 15 bp, Homo sapiens
cagtccggggctgag

SEQ ID NO: 105864 - DNA, 15 bp, Homo sapiens
gcagtccggggctga

SEQ ID NO: 105865 - DNA, 15 bp, Homo sapiens
ggcagtccggggctg

SEQ ID NO: 105866 - DNA, 15 bp, Homo sapiens
gggcagtccggggct

SEQ ID NO: 105867 - DNA, 15 bp, Homo sapiens
ggggcagtccggggc

SEQ ID NO: 105868 - DNA, 15 bp, Homo sapiens
cggggcagtccgggg

SEQ ID NO: 105869 - DNA, 15 bp, Homo sapiens
gcggggcagtccggg

SEQ ID NO: 105870 - DNA, 15 bp, Homo sapiens
tgcggggcagtccgg

SEQ ID NO: 105871 - DNA, 15 bp, Homo sapiens
gtgcggggcagtccg

SEQ ID NO: 105872 - DNA, 15 bp, Homo sapiens
cgtgcggggcagtcc

SEQ ID NO: 105873 - DNA, 15 bp, Homo sapiens
acgtgcggggcagtc

SEQ ID NO: 105874 - DNA, 15 bp, Homo sapiens
cacgtgcggggcagt

SEQ ID NO: 105875 - DNA, 15 bp, Homo sapiens
ccacgtgcggggcag

SEQ ID NO: 105876 - DNA, 15 bp, Homo sapiens
gccacgtgcggggca

SEQ ID NO: 105877 - DNA, 15 bp, Homo sapiens
agccacgtgcggggc

SEQ ID NO: 105878 - DNA, 15 bp, Homo sapiens
cagccacgtgcgggg

SEQ ID NO: 105879 - DNA, 15 bp, Homo sapiens
gcagccacgtgcggg

SEQ ID NO: 105880 - DNA, 15 bp, Homo sapiens
ggcagccacgtgcgg

SEQ ID NO: 105881 - DNA, 15 bp, Homo sapiens
cggcagccacgtgcg

SEQ ID NO: 105882 - DNA, 15 bp, Homo sapiens
gcggcagccacgtgc

SEQ ID NO: 105883 - DNA, 15 bp, Homo sapiens
agcggcagccacgtg

SEQ ID NO: 105884 - DNA, 15 bp, Homo sapiens
cagcggcagccacgt

SEQ ID NO: 105885 - DNA, 15 bp, Homo sapiens
tcagcggcagccacg

SEQ ID NO: 105886 - DNA, 15 bp, Homo sapiens
gtcagcggcagccac

SEQ ID NO: 105887 - DNA, 15 bp, Homo sapiens
ggtcagcggcagcca

SEQ ID NO: 105888 - DNA, 15 bp, Homo sapiens
gggtcagcggcagcc

SEQ ID NO: 105889 - DNA, 15 bp, Homo sapiens
agggtcagcggcagc

SEQ ID NO: 105890 - DNA, 15 bp, Homo sapiens
gagggtcagcggcag

SEQ ID NO: 105891 - DNA, 15 bp, Homo sapiens
cgagggtcagcggca

SEQ ID NO: 105892 - DNA, 15 bp, Homo sapiens
gcgagggtcagcggc

SEQ ID NO: 105893 - DNA, 15 bp, Homo sapiens
ggcgagggtcagcgg

SEQ ID NO: 105894 - DNA, 15 bp, Homo sapiens
gggcgagggtcagcg

SEQ ID NO: 105895 - DNA, 15 bp, Homo sapiens
ggggcgagggtcagc

SEQ ID NO: 105896 - DNA, 15 bp, Homo sapiens
aggggcgagggtcag

SEQ ID NO: 105897 - DNA, 15 bp, Homo sapiens
aaggggcgagggtca

SEQ ID NO: 105898 - DNA, 15 bp, Homo sapiens
caaggggcgagggtc

SEQ ID NO: 105899 - DNA, 15 bp, Homo sapiens
gcaaggggcgagggt

SEQ ID NO: 105900 - DNA, 15 bp, Homo sapiens
tgcaaggggcgaggg

SEQ ID NO: 105901 - DNA, 15 bp, Homo sapiens
ctgcaaggggcgagg

SEQ ID NO: 105902 - DNA, 15 bp, Homo sapiens
cctgcaaggggcgag

SEQ ID NO: 105903 - DNA, 15 bp, Homo sapiens
acctgcaaggggcga

SEQ ID NO: 105904 - DNA, 15 bp, Homo sapiens
tacctgcaaggggcg

SEQ ID NO: 105905 - DNA, 15 bp, Homo sapiens
gtacctgcaaggggc

SEQ ID NO: 105906 - DNA, 15 bp, Homo sapiens
cgtacctgcaagggg

SEQ ID NO: 105907 - DNA, 15 bp, Homo sapiens
acgtacctgcaaggg

SEQ ID NO: 105908 - DNA, 15 bp, Homo sapiens
gacgtacctgcaagg

SEQ ID NO: 105909 - DNA, 15 bp, Homo sapiens
tgacgtacctgcaag

SEQ ID NO: 105910 - DNA, 15 bp, Homo sapiens
ctgacgtacctgcaa

SEQ ID NO: 105911 - DNA, 15 bp, Homo sapiens
cctgacgtacctgca

SEQ ID NO: 105912 - DNA, 15 bp, Homo sapiens
ccctgacgtacctgc

SEQ ID NO: 105913 - DNA, 15 bp, Homo sapiens
tccctgacgtacctg

SEQ ID NO: 105914 - DNA, 15 bp, Homo sapiens
gtccctgacgtacct

SEQ ID NO: 105915 - DNA, 15 bp, Homo sapiens
ggtccctgacgtacc

SEQ ID NO: 105916 - DNA, 15 bp, Homo sapiens
gggtccctgacgtac

SEQ ID NO: 105917 - DNA, 15 bp, Homo sapiens
cgggtccctgacgta

SEQ ID NO: 105918 - DNA, 15 bp, Homo sapiens
tcgggtccctgacgt

SEQ ID NO: 105919 - DNA, 15 bp, Homo sapiens
gtcgggtccctgacg

SEQ ID NO: 105920 - DNA, 15 bp, Homo sapiens
ggtcgggtccctgac

SEQ ID NO: 105921 - DNA, 15 bp, Homo sapiens
tggtcgggtccctga

SEQ ID NO: 105922 - DNA, 15 bp, Homo sapiens
gtggtcgggtccctg

SEQ ID NO: 105923 - DNA, 15 bp, Homo sapiens
agtggtcgggtccct

SEQ ID NO: 105924 - DNA, 15 bp, Homo sapiens
cagtggtcgggtccc

SEQ ID NO: 105925 - DNA, 15 bp, Homo sapiens
ccagtggtcgggtcc

SEQ ID NO: 105926 - DNA, 15 bp, Homo sapiens
gccagtggtcgggtc

SEQ ID NO: 105927 - DNA, 15 bp, Homo sapiens
tgccagtggtcgggt

SEQ ID NO: 105928 - DNA, 15 bp, Homo sapiens
ttgccagtggtcggg

SEQ ID NO: 105929 - DNA, 15 bp, Homo sapiens
cttgccagtggtcgg

SEQ ID NO: 105930 - DNA, 15 bp, Homo sapiens
ccttgccagtggtcg

SEQ ID NO: 105931 - DNA, 15 bp, Homo sapiens
tccttgccagtggtc

SEQ ID NO: 105932 - DNA, 15 bp, Homo sapiens
ctccttgccagtggt

SEQ ID NO: 105933 - DNA, 15 bp, Homo sapiens
cctccttgccagtgg

SEQ ID NO: 105934 - DNA, 15 bp, Homo sapiens
ccctccttgccagtg

SEQ ID NO: 105935 - DNA, 15 bp, Homo sapiens
gccctccttgccagt

SEQ ID NO: 105936 - DNA, 15 bp, Homo sapiens
agccctccttgccag

SEQ ID NO: 105937 - DNA, 15 bp, Homo sapiens
cagccctccttgcca

SEQ ID NO: 105938 - DNA, 15 bp, Homo sapiens
ccagccctccttgcc

SEQ ID NO: 105939 - DNA, 15 bp, Homo sapiens
cccagccctccttgc

SEQ ID NO: 105940 - DNA, 15 bp, Homo sapiens
acccagccctccttg

SEQ ID NO: 105941 - DNA, 15 bp, Homo sapiens
cacccagccctcctt

SEQ ID NO: 105942 - DNA, 15 bp, Homo sapiens
gcacccagccctcct

SEQ ID NO: 105943 - DNA, 15 bp, Homo sapiens
ggcacccagccctcc

SEQ ID NO: 105944 - DNA, 15 bp, Homo sapiens
cggcacccagccctc

SEQ ID NO: 105945 - DNA, 15 bp, Homo sapiens
ccggcacccagccct

SEQ ID NO: 105946 - DNA, 15 bp, Homo sapiens
gccggcacccagccc

SEQ ID NO: 105947 - DNA, 15 bp, Homo sapiens
ggccggcacccagcc

SEQ ID NO: 105948 - DNA, 15 bp, Homo sapiens
tggccggcacccagc

SEQ ID NO: 105949 - DNA, 15 bp, Homo sapiens
ctggccggcacccag

SEQ ID NO: 105950 - DNA, 15 bp, Homo sapiens
gctggccggcaccca

SEQ ID NO: 105951 - DNA, 15 bp, Homo sapiens
tgctggccggcaccc

SEQ ID NO: 105952 - DNA, 15 bp, Homo sapiens
ctgctggccggcacc

SEQ ID NO: 105953 - DNA, 15 bp, Homo sapiens
gctgctggccggcac

SEQ ID NO: 105954 - DNA, 15 bp, Homo sapiens
ggctgctggccggca

SEQ ID NO: 105955 - DNA, 15 bp, Homo sapiens
aggctgctggccggc

SEQ ID NO: 105956 - DNA, 15 bp, Homo sapiens
caggctgctggccgg

SEQ ID NO: 105957 - DNA, 15 bp, Homo sapiens
acaggctgctggccg

SEQ ID NO: 105958 - DNA, 15 bp, Homo sapiens
gacaggctgctggcc

SEQ ID NO: 105959 - DNA, 15 bp, Homo sapiens
ggacaggctgctggc

SEQ ID NO: 105960 - DNA, 15 bp, Homo sapiens
cggacaggctgctgg

SEQ ID NO: 105961 - DNA, 15 bp, Homo sapiens
acggacaggctgctg

SEQ ID NO: 105962 - DNA, 15 bp, Homo sapiens
gacggacaggctgct

SEQ ID NO: 105963 - DNA, 15 bp, Homo sapiens
ggacggacaggctgc

SEQ ID NO: 105964 - DNA, 15 bp, Homo sapiens
cggacggacaggctg

SEQ ID NO: 105965 - DNA, 15 bp, Homo sapiens
ccggacggacaggct

SEQ ID NO: 105966 - DNA, 15 bp, Homo sapiens
gccggacggacaggc

SEQ ID NO: 105967 - DNA, 15 bp, Homo sapiens
agccggacggacagg

SEQ ID NO: 105968 - DNA, 15 bp, Homo sapiens
gagccggacggacag

SEQ ID NO: 105969 - DNA, 15 bp, Homo sapiens
cgagccggacggaca

SEQ ID NO: 105970 - DNA, 15 bp, Homo sapiens
ccgagccggacggac

SEQ ID NO: 105971 - DNA, 15 bp, Homo sapiens
gccgagccggacgga

SEQ ID NO: 105972 - DNA, 15 bp, Homo sapiens
ggccgagccggacgg

SEQ ID NO: 105973 - DNA, 15 bp, Homo sapiens
gggccgagccggacg

SEQ ID NO: 105974 - DNA, 15 bp, Homo sapiens
cgggccgagccggac

SEQ ID NO: 105975 - DNA, 15 bp, Homo sapiens
acgggccgagccgga

SEQ ID NO: 105976 - DNA, 15 bp, Homo sapiens
gacgggccgagccgg

SEQ ID NO: 105977 - DNA, 15 bp, Homo sapiens
ggacgggccgagccg

SEQ ID NO: 105978 - DNA, 15 bp, Homo sapiens
cggacgggccgagcc

SEQ ID NO: 105979 - DNA, 15 bp, Homo sapiens
ccggacgggccgagc

SEQ ID NO: 105980 - DNA, 15 bp, Homo sapiens
gccggacgggccgag

SEQ ID NO: 105981 - DNA, 15 bp, Homo sapiens
agccggacgggccga

SEQ ID NO: 105982 - DNA, 15 bp, Homo sapiens
gagccggacgggccg

SEQ ID NO: 105983 - DNA, 15 bp, Homo sapiens
cgagccggacgggcc

SEQ ID NO: 105984 - DNA, 15 bp, Homo sapiens
ccgagccggacgggc

SEQ ID NO: 105985 - DNA, 15 bp, Homo sapiens
gccgagccggacggg

SEQ ID NO: 105986 - DNA, 15 bp, Homo sapiens
tgggccgagccggac

SEQ ID NO: 105987 - DNA, 15 bp, Homo sapiens
ctgggccgagccgga

SEQ ID NO: 105988 - DNA, 15 bp, Homo sapiens
actgggccgagccgg

SEQ ID NO: 105989 - DNA, 15 bp, Homo sapiens
cactgggccgagccg

SEQ ID NO: 105990 - DNA, 15 bp, Homo sapiens
gcactgggccgagcc

SEQ ID NO: 105991 - DNA, 15 bp, Homo sapiens
ggcactgggccgagc

SEQ ID NO: 105992 - DNA, 15 bp, Homo sapiens
aggcactgggccgag

SEQ ID NO: 105993 - DNA, 15 bp, Homo sapiens
caggcactgggccga

SEQ ID NO: 105994 - DNA, 15 bp, Homo sapiens
tcaggcactgggccg

SEQ ID NO: 105995 - DNA, 15 bp, Homo sapiens
ctcaggcactgggcc

SEQ ID NO: 105996 - DNA, 15 bp, Homo sapiens
gctcaggcactgggc

SEQ ID NO: 105997 - DNA, 15 bp, Homo sapiens
tgctcaggcactggg

SEQ ID NO: 105998 - DNA, 15 bp, Homo sapiens
ctgctcaggcactgg

SEQ ID NO: 105999 - DNA, 15 bp, Homo sapiens
gctgctcaggcactg

SEQ ID NO: 106000 - DNA, 15 bp, Homo sapiens
agctgctcaggcact

SEQ ID NO: 106001 - DNA, 15 bp, Homo sapiens
gagctgctcaggcac

SEQ ID NO: 106002 - DNA, 15 bp, Homo sapiens
tgagctgctcaggca

SEQ ID NO: 106003 - DNA, 15 bp, Homo sapiens
ctgagctgctcaggc

SEQ ID NO: 106004 - DNA, 15 bp, Homo sapiens
cctgagctgctcagg

SEQ ID NO: 106005 - DNA, 15 bp, Homo sapiens
acctgagctgctcag

SEQ ID NO: 106006 - DNA, 15 bp, Homo sapiens
tacctgagctgctca

SEQ ID NO: 106007 - DNA, 15 bp, Homo sapiens
ttacctgagctgctc

SEQ ID NO: 106008 - DNA, 15 bp, Homo sapiens
cttacctgagctgct

SEQ ID NO: 106009 - DNA, 15 bp, Homo sapiens
ccttacctgagctgc

SEQ ID NO: 106010 - DNA, 15 bp, Homo sapiens
gccttacctgagctg

SEQ ID NO: 106011 - DNA, 15 bp, Homo sapiens
ggccttacctgagct

SEQ ID NO: 106012 - DNA, 15 bp, Homo sapiens
gggccttacctgagc

SEQ ID NO: 106013 - DNA, 15 bp, Homo sapiens
tgggccttacctgag

SEQ ID NO: 106014 - DNA, 15 bp, Homo sapiens
gtgggccttacctga

SEQ ID NO: 106015 - DNA, 15 bp, Homo sapiens
cgtgggccttacctg

SEQ ID NO: 106016 - DNA, 15 bp, Homo sapiens
acgtgggccttacct

SEQ ID NO: 106017 - DNA, 15 bp, Homo sapiens
cacgtgggccttacc

SEQ ID NO: 106018 - DNA, 15 bp, Homo sapiens
gcacgtgggccttac

SEQ ID NO: 106019 - DNA, 15 bp, Homo sapiens
ggcacgtgggcctta

SEQ ID NO: 106020 - DNA, 15 bp, Homo sapiens
gggcacgtgggcctt

SEQ ID NO: 106021 - DNA, 15 bp, Homo sapiens
ggggcacgtgggcct

SEQ ID NO: 106022 - DNA, 15 bp, Homo sapiens
cggggcacgtgggcc

SEQ ID NO: 106023 - DNA, 15 bp, Homo sapiens
tcggggcacgtgggc

SEQ ID NO: 106024 - DNA, 15 bp, Homo sapiens
ctcggggcacgtggg

SEQ ID NO: 106025 - DNA, 15 bp, Homo sapiens
gctcggggcacgtgg

SEQ ID NO: 106026 - DNA, 15 bp, Homo sapiens
ggctcggggcacgtg

SEQ ID NO: 106027 - DNA, 15 bp, Homo sapiens
gggctcggggcacgt

SEQ ID NO: 106028 - DNA, 15 bp, Homo sapiens
tgggctcggggcacg

SEQ ID NO: 106029 - DNA, 15 bp, Homo sapiens
gtgggctcggggcac

SEQ ID NO: 106030 - DNA, 15 bp, Homo sapiens
ggtgggctcggggca

SEQ ID NO: 106031 - DNA, 15 bp, Homo sapiens
gggtgggctcggggc

SEQ ID NO: 106032 - DNA, 15 bp, Homo sapiens
cgggtgggctcgggg

SEQ ID NO: 106033 - DNA, 15 bp, Homo sapiens
acgggtgggctcggg

SEQ ID NO: 106034 - DNA, 15 bp, Homo sapiens
cacgggtgggctcgg

SEQ ID NO: 106035 - DNA, 15 bp, Homo sapiens
tcacgggtgggctcg

SEQ ID NO: 106036 - DNA, 15 bp, Homo sapiens
gtcacgggtgggctc

SEQ ID NO: 106037 - DNA, 15 bp, Homo sapiens
cgtcacgggtgggct

SEQ ID NO: 106038 - DNA, 15 bp, Homo sapiens
gcgtcacgggtgggc

SEQ ID NO: 106039 - DNA, 15 bp, Homo sapiens
agcgtcacgggtggg

SEQ ID NO: 106040 - DNA, 15 bp, Homo sapiens
cagcgtcacgggtgg

SEQ ID NO: 106041 - DNA, 15 bp, Homo sapiens
gcagcgtcacgggtg

SEQ ID NO: 106042 - DNA, 15 bp, Homo sapiens
ggcagcgtcacgggt

SEQ ID NO: 106043 - DNA, 15 bp, Homo sapiens
tggcagcgtcacggg

SEQ ID NO: 106044 - DNA, 15 bp, Homo sapiens
ttggcagcgtcacgg

SEQ ID NO: 106045 - DNA, 15 bp, Homo sapiens
cttggcagcgtcacg

SEQ ID NO: 106046 - DNA, 15 bp, Homo sapiens
ccttggcagcgtcac

SEQ ID NO: 106047 - DNA, 15 bp, Homo sapiens
cccttggcagcgtca

SEQ ID NO: 106048 - DNA, 15 bp, Homo sapiens
gcccttggcagcgtc

SEQ ID NO: 106049 - DNA, 15 bp, Homo sapiens
ggcccttggcagcgt

SEQ ID NO: 106050 - DNA, 15 bp, Homo sapiens
gggcccttggcagcg

SEQ ID NO: 106051 - DNA, 15 bp, Homo sapiens
cgggcccttggcagc

SEQ ID NO: 106052 - DNA, 15 bp, Homo sapiens
ccgggcccttggcag

SEQ ID NO: 106053 - DNA, 15 bp, Homo sapiens
cccgggcccttggca

SEQ ID NO: 106054 - DNA, 15 bp, Homo sapiens
gcccgggcccttggc

SEQ ID NO: 106055 - DNA, 15 bp, Homo sapiens
cgcccgggcccttgg

SEQ ID NO: 106056 - DNA, 15 bp, Homo sapiens
tcgcccgggcccttg

SEQ ID NO: 106057 - DNA, 15 bp, Homo sapiens
ctcgcccgggccctt

SEQ ID NO: 106058 - DNA, 15 bp, Homo sapiens
cctcgcccgggccct

SEQ ID NO: 106059 - DNA, 15 bp, Homo sapiens
tcctcgcccgggccc

SEQ ID NO: 106060 - DNA, 15 bp, Homo sapiens
ttcctcgcccgggcc

SEQ ID NO: 106061 - DNA, 15 bp, Homo sapiens
cttcctcgcccgggc

SEQ ID NO: 106062 - DNA, 15 bp, Homo sapiens
gcttcctcgcccggg

SEQ ID NO: 106063 - DNA, 15 bp, Homo sapiens
agcttcctcgcccgg

SEQ ID NO: 106064 - DNA, 15 bp, Homo sapiens
cagcttcctcgcccg

SEQ ID NO: 106065 - DNA, 15 bp, Homo sapiens
gcagcttcctcgccc

SEQ ID NO: 106066 - DNA, 15 bp, Homo sapiens
ggcagcttcctcgcc

SEQ ID NO: 106067 - DNA, 15 bp, Homo sapiens
gggcagcttcctcgc

SEQ ID NO: 106068 - DNA, 15 bp, Homo sapiens
ggggcagcttcctcg

SEQ ID NO: 106069 - DNA, 15 bp, Homo sapiens
cggggcagcttcctc

SEQ ID NO: 106070 - DNA, 15 bp, Homo sapiens
acggggcagcttcct

SEQ ID NO: 106071 - DNA, 15 bp, Homo sapiens
cacggggcagcttcc

SEQ ID NO: 106072 - DNA, 15 bp, Homo sapiens
acacggggcagcttc

SEQ ID NO: 106073 - DNA, 15 bp, Homo sapiens
cacacggggcagctt

SEQ ID NO: 106074 - DNA, 15 bp, Homo sapiens
acacacggggcagct

SEQ ID NO: 106075 - DNA, 15 bp, Homo sapiens
cacacacggggcagc

SEQ ID NO: 106076 - DNA, 15 bp, Homo sapiens
gcacacacggggcag

SEQ ID NO: 106077 - DNA, 15 bp, Homo sapiens
ggcacacacggggca

SEQ ID NO: 106078 - DNA, 15 bp, Homo sapiens
gggcacacacggggc

SEQ ID NO: 106079 - DNA, 15 bp, Homo sapiens
cgggcacacacgggg

SEQ ID NO: 106080 - DNA, 15 bp, Homo sapiens
ccgggcacacacggg

SEQ ID NO: 106081 - DNA, 15 bp, Homo sapiens
gccgggcacacacgg

SEQ ID NO: 106082 - DNA, 15 bp, Homo sapiens
tgccgggcacacacg

SEQ ID NO: 106083 - DNA, 15 bp, Homo sapiens
ctgccgggcacacac

SEQ ID NO: 106084 - DNA, 15 bp, Homo sapiens
tctgccgggcacaca

SEQ ID NO: 106085 - DNA, 15 bp, Homo sapiens
ctctgccgggcacac

SEQ ID NO: 106086 - DNA, 15 bp, Homo sapiens
gctctgccgggcaca

SEQ ID NO: 106087 - DNA, 15 bp, Homo sapiens
ggctctgccgggcac

SEQ ID NO: 106088 - DNA, 15 bp, Homo sapiens
cggctctgccgggca

SEQ ID NO: 106089 - DNA, 15 bp, Homo sapiens
tcggctctgccgggc

SEQ ID NO: 106090 - DNA, 15 bp, Homo sapiens
gtcggctctgccggg

SEQ ID NO: 106091 - DNA, 15 bp, Homo sapiens
cgtcggctctgccgg

SEQ ID NO: 106092 - DNA, 15 bp, Homo sapiens
gcgtcggctctgccg

SEQ ID NO: 106093 - DNA, 15 bp, Homo sapiens
ggcgtcggctctgcc

SEQ ID NO: 106094 - DNA, 15 bp, Homo sapiens
cggcgtcggctctgc

SEQ ID NO: 106095 - DNA, 15 bp, Homo sapiens
tcggcgtcggctctg

SEQ ID NO: 106096 - DNA, 15 bp, Homo sapiens
ttcggcgtcggctct

SEQ ID NO: 106097 - DNA, 15 bp, Homo sapiens
cttcggcgtcggctc

SEQ ID NO: 106098 - DNA, 15 bp, Homo sapiens
gcttcggcgtcggct

SEQ ID NO: 106099 - DNA, 15 bp, Homo sapiens
ggcttcggcgtcggc

SEQ ID NO: 106100 - DNA, 15 bp, Homo sapiens
gggcttcggcgtcgg

SEQ ID NO: 106101 - DNA, 15 bp, Homo sapiens
cgggcttcggcgtcg

SEQ ID NO: 106102 - DNA, 15 bp, Homo sapiens
acgggcttcggcgtc

SEQ ID NO: 106103 - DNA, 15 bp, Homo sapiens
gacgggcttcggcgt

SEQ ID NO: 106104 - DNA, 15 bp, Homo sapiens
ggacgggcttcggcg

SEQ ID NO: 106105 - DNA, 15 bp, Homo sapiens
gggacgggcttcggc

SEQ ID NO: 106106 - DNA, 15 bp, Homo sapiens
ggggacgggcttcgg

SEQ ID NO: 106107 - DNA, 15 bp, Homo sapiens
cggggacgggcttcg

SEQ ID NO: 106108 - DNA, 15 bp, Homo sapiens
gcggggacgggcttc

SEQ ID NO: 106109 - DNA, 15 bp, Homo sapiens
ggcggggacgggctt

SEQ ID NO: 106110 - DNA, 15 bp, Homo sapiens
aggcggggacgggct

SEQ ID NO: 106111 - DNA, 15 bp, Homo sapiens
caggcggggacgggc

SEQ ID NO: 106112 - DNA, 15 bp, Homo sapiens
tcaggcggggacggg

SEQ ID NO: 106113 - DNA, 15 bp, Homo sapiens
atcaggcggggacgg

SEQ ID NO: 106114 - DNA, 15 bp, Homo sapiens
gatcaggcggggacg

SEQ ID NO: 106115 - DNA, 15 bp, Homo sapiens
agatcaggcggggac

SEQ ID NO: 106116 - DNA, 15 bp, Homo sapiens
gagatcaggcgggga

SEQ ID NO: 106117 - DNA, 15 bp, Homo sapiens
ggagatcaggcgggg

SEQ ID NO: 106118 - DNA, 15 bp, Homo sapiens
gggagatcaggcggg

SEQ ID NO: 106119 - DNA, 15 bp, Homo sapiens
ggggagatcaggcgg

SEQ ID NO: 106120 - DNA, 15 bp, Homo sapiens
cggggagatcaggcg

SEQ ID NO: 106121 - DNA, 15 bp, Homo sapiens
gcggggagatcaggc

SEQ ID NO: 106122 - DNA, 15 bp, Homo sapiens
tgcggggagatcagg

SEQ ID NO: 106123 - DNA, 15 bp, Homo sapiens
ctgcggggagatcag

SEQ ID NO: 106124 - DNA, 15 bp, Homo sapiens
tctgcggggagatca

SEQ ID NO: 106125 - DNA, 15 bp, Homo sapiens
ctctgcggggagatc

SEQ ID NO: 106126 - DNA, 15 bp, Homo sapiens
actctgcggggagat

SEQ ID NO: 106127 - DNA, 15 bp, Homo sapiens
gactctgcggggaga

SEQ ID NO: 106128 - DNA, 15 bp, Homo sapiens
cgactctgcggggag

SEQ ID NO: 106129 - DNA, 15 bp, Homo sapiens
tcgactctgcgggga

SEQ ID NO: 106130 - DNA, 15 bp, Homo sapiens
ctcgactctgcgggg

SEQ ID NO: 106131 - DNA, 15 bp, Homo sapiens
gctcgactctgcggg

SEQ ID NO: 106132 - DNA, 15 bp, Homo sapiens
ggctcgactctgcgg

SEQ ID NO: 106133 - DNA, 15 bp, Homo sapiens
gggctcgactctgcg

SEQ ID NO: 106134 - DNA, 15 bp, Homo sapiens
cgggctcgactctgc

SEQ ID NO: 106135 - DNA, 15 bp, Homo sapiens
ccgggctcgactctg

SEQ ID NO: 106136 - DNA, 15 bp, Homo sapiens
cccgggctcgactct

SEQ ID NO: 106137 - DNA, 15 bp, Homo sapiens
ccccgggctcgactc

SEQ ID NO: 106138 - DNA, 15 bp, Homo sapiens
accccgggctcgact

SEQ ID NO: 106139 - DNA, 15 bp, Homo sapiens
gaccccgggctcgac

SEQ ID NO: 106140 - DNA, 15 bp, Homo sapiens
cgaccccgggctcga

SEQ ID NO: 106141 - DNA, 15 bp, Homo sapiens
ccgaccccgggctcg

SEQ ID NO: 106142 - DNA, 15 bp, Homo sapiens
gccgaccccgggctc

SEQ ID NO: 106143 - DNA, 15 bp, Homo sapiens
ggccgaccccgggct

SEQ ID NO: 106144 - DNA, 15 bp, Homo sapiens
cggccgaccccgggc

SEQ ID NO: 106145 - DNA, 15 bp, Homo sapiens
acggccgaccccggg

SEQ ID NO: 106146 - DNA, 15 bp, Homo sapiens
cacggccgaccccgg

SEQ ID NO: 106147 - DNA, 15 bp, Homo sapiens
gcacggccgaccccg

SEQ ID NO: 106148 - DNA, 15 bp, Homo sapiens
agcacggccgacccc

SEQ ID NO: 106149 - DNA, 15 bp, Homo sapiens
cagcacggccgaccc

SEQ ID NO: 106150 - DNA, 15 bp, Homo sapiens
tcagcacggccgacc

SEQ ID NO: 106151 - DNA, 15 bp, Homo sapiens
ctcagcacggccgac

SEQ ID NO: 106152 - DNA, 15 bp, Homo sapiens
gctcagcacggccga

SEQ ID NO: 106153 - DNA, 15 bp, Homo sapiens
tgctcagcacggccg

SEQ ID NO: 106154 - DNA, 15 bp, Homo sapiens
ttgctcagcacggcc

SEQ ID NO: 106155 - DNA, 15 bp, Homo sapiens
gttgctcagcacggc

SEQ ID NO: 106156 - DNA, 15 bp, Homo sapiens
agttgctcagcacgg

SEQ ID NO: 106157 - DNA, 15 bp, Homo sapiens
gagttgctcagcacg

SEQ ID NO: 106158 - DNA, 15 bp, Homo sapiens
cgagttgctcagcac

SEQ ID NO: 106159 - DNA, 15 bp, Homo sapiens
acgagttgctcagca

SEQ ID NO: 106160 - DNA, 15 bp, Homo sapiens
gacgagttgctcagc

SEQ ID NO: 106161 - DNA, 15 bp, Homo sapiens
ggacgagttgctcag

SEQ ID NO: 106162 - DNA, 15 bp, Homo sapiens
tggacgagttgctca

SEQ ID NO: 106163 - DNA, 15 bp, Homo sapiens
ctggacgagttgctc

SEQ ID NO: 106164 - DNA, 15 bp, Homo sapiens
gctggacgagttgct

SEQ ID NO: 106165 - DNA, 15 bp, Homo sapiens
agctggacgagttgc

SEQ ID NO: 106166 - DNA, 15 bp, Homo sapiens
cagctggacgagttg

SEQ ID NO: 106167 - DNA, 15 bp, Homo sapiens
gcagctggacgagtt

SEQ ID NO: 106168 - DNA, 15 bp, Homo sapiens
tgcagctggacgagt

SEQ ID NO: 106169 - DNA, 15 bp, Homo sapiens
ctgcagctggacgag

SEQ ID NO: 106170 - DNA, 15 bp, Homo sapiens
gctgcagctggacga

SEQ ID NO: 106171 - DNA, 15 bp, Homo sapiens
cgctgcagctggacg

SEQ ID NO: 106172 - DNA, 15 bp, Homo sapiens
tcgctgcagctggac

SEQ ID NO: 106173 - DNA, 15 bp, Homo sapiens
ctcgctgcagctgga

SEQ ID NO: 106174 - DNA, 15 bp, Homo sapiens
cctcgctgcagctgg

SEQ ID NO: 106175 - DNA, 15 bp, Homo sapiens
ccctcgctgcagctg

SEQ ID NO: 106176 - DNA, 15 bp, Homo sapiens
gccctcgctgcagct

SEQ ID NO: 106177 - DNA, 15 bp, Homo sapiens
cgccctcgctgcagc

SEQ ID NO: 106178 - DNA, 15 bp, Homo sapiens
ccgccctcgctgcag

SEQ ID NO: 106179 - DNA, 15 bp, Homo sapiens
gccgccctcgctgca

SEQ ID NO: 106180 - DNA, 15 bp, Homo sapiens
ggccgccctcgctgc

SEQ ID NO: 106181 - DNA, 15 bp, Homo sapiens
tggccgccctcgctg

SEQ ID NO: 106182 - DNA, 15 bp, Homo sapiens
ctggccgccctcgct

SEQ ID NO: 106183 - DNA, 15 bp, Homo sapiens
cctggccgccctcgc

SEQ ID NO: 106184 - DNA, 15 bp, Homo sapiens
gcctggccgccctcg

SEQ ID NO: 106185 - DNA, 15 bp, Homo sapiens
ggcctggccgccctc

SEQ ID NO: 106186 - DNA, 15 bp, Homo sapiens
gggcctggccgccct

SEQ ID NO: 106187 - DNA, 15 bp, Homo sapiens
ggggcctggccgccc

SEQ ID NO: 106188 - DNA, 15 bp, Homo sapiens
gggggcctggccgcc

SEQ ID NO: 106189 - DNA, 15 bp, Homo sapiens
agggggcctggccgc

SEQ ID NO: 106190 - DNA, 15 bp, Homo sapiens
aagggggcctggccg

SEQ ID NO: 106191 - DNA, 15 bp, Homo sapiens
gaagggggcctggcc

SEQ ID NO: 106192 - DNA, 15 bp, Homo sapiens
agaagggggcctggc

SEQ ID NO: 106193 - DNA, 15 bp, Homo sapiens
gagaagggggcctgg

SEQ ID NO: 106194 - DNA, 15 bp, Homo sapiens
ggagaagggggcctg

SEQ ID NO: 106195 - DNA, 15 bp, Homo sapiens
cggagaagggggcct

SEQ ID NO: 106196 - DNA, 15 bp, Homo sapiens
tcggagaagggggcc

SEQ ID NO: 106197 - DNA, 15 bp, Homo sapiens
gtcggagaagggggc

SEQ ID NO: 106198 - DNA, 15 bp, Homo sapiens
ggtcggagaaggggg

SEQ ID NO: 106199 - DNA, 15 bp, Homo sapiens
aggtcggagaagggg

SEQ ID NO: 106200 - DNA, 15 bp, Homo sapiens
caggtcggagaaggg

SEQ ID NO: 106201 - DNA, 15 bp, Homo sapiens
gcaggtcggagaagg

SEQ ID NO: 106202 - DNA, 15 bp, Homo sapiens
tgcaggtcggagaag

SEQ ID NO: 106203 - DNA, 15 bp, Homo sapiens
ctgcaggtcggagaa

SEQ ID NO: 106204 - DNA, 15 bp, Homo sapiens
cctgcaggtcggaga

SEQ ID NO: 106205 - DNA, 15 bp, Homo sapiens
ccctgcaggtcggag

SEQ ID NO: 106206 - DNA, 15 bp, Homo sapiens
cccctgcaggtcgga

SEQ ID NO: 106207 - DNA, 15 bp, Homo sapiens
acccctgcaggtcgg

SEQ ID NO: 106208 - DNA, 15 bp, Homo sapiens
tacccctgcaggtcg

SEQ ID NO: 106209 - DNA, 15 bp, Homo sapiens
ctacccctgcaggtc

SEQ ID NO: 106210 - DNA, 15 bp, Homo sapiens
gctacccctgcaggt

SEQ ID NO: 106211 - DNA, 15 bp, Homo sapiens
cgctacccctgcagg

SEQ ID NO: 106212 - DNA, 15 bp, Homo sapiens
gcgctacccctgcag

SEQ ID NO: 106213 - DNA, 15 bp, Homo sapiens
cgcgctacccctgca

SEQ ID NO: 106214 - DNA, 15 bp, Homo sapiens
ccgcgctacccctgc

SEQ ID NO: 106215 - DNA, 15 bp, Homo sapiens
gccgcgctacccctg

SEQ ID NO: 106216 - DNA, 15 bp, Homo sapiens
ggccgcgctacccct

SEQ ID NO: 106217 - DNA, 15 bp, Homo sapiens
aggccgcgctacccc

SEQ ID NO: 106218 - DNA, 15 bp, Homo sapiens
gaggccgcgctaccc

SEQ ID NO: 106219 - DNA, 15 bp, Homo sapiens
cgaggccgcgctacc

SEQ ID NO: 106220 - DNA, 15 bp, Homo sapiens
ccgaggccgcgctac

SEQ ID NO: 106221 - DNA, 15 bp, Homo sapiens
gccgaggccgcgcta

SEQ ID NO: 106222 - DNA, 15 bp, Homo sapiens
cgccgaggccgcgct

SEQ ID NO: 106223 - DNA, 15 bp, Homo sapiens
gcgccgaggccgcgc

SEQ ID NO: 106224 - DNA, 15 bp, Homo sapiens
ggcgccgaggccgcg

SEQ ID NO: 106225 - DNA, 15 bp, Homo sapiens
cggcgccgaggccgc

SEQ ID NO: 106226 - DNA, 15 bp, Homo sapiens
ccggcgccgaggccg

SEQ ID NO: 106227 - DNA, 15 bp, Homo sapiens
tccggcgccgaggcc

SEQ ID NO: 106228 - DNA, 15 bp, Homo sapiens
ctccggcgccgaggc

SEQ ID NO: 106229 - DNA, 15 bp, Homo sapiens
tctccggcgccgagg

SEQ ID NO: 106230 - DNA, 15 bp, Homo sapiens
gtctccggcgccgag

SEQ ID NO: 106231 - DNA, 15 bp, Homo sapiens
ggtctccggcgccga

SEQ ID NO: 106232 - DNA, 15 bp, Homo sapiens
gggtctccggcgccg

SEQ ID NO: 106233 - DNA, 15 bp, Homo sapiens
cgggtctccggcgcc

SEQ ID NO: 106234 - DNA, 15 bp, Homo sapiens
gcgggtctccggcgc

SEQ ID NO: 106235 - DNA, 15 bp, Homo sapiens
cgcgggtctccggcg

SEQ ID NO: 106236 - DNA, 15 bp, Homo sapiens
gcgcgggtctccggc

SEQ ID NO: 106237 - DNA, 15 bp, Homo sapiens
cgcgcgggtctccgg

SEQ ID NO: 106238 - DNA, 15 bp, Homo sapiens
gcgcgcgggtctccg

SEQ ID NO: 106239 - DNA, 15 bp, Homo sapiens
agcgcgcgggtctcc

SEQ ID NO: 106240 - DNA, 15 bp, Homo sapiens
cagcgcgcgggtctc

SEQ ID NO: 106241 - DNA, 15 bp, Homo sapiens
acagcgcgcgggtct

SEQ ID NO: 106242 - DNA, 15 bp, Homo sapiens
gacagcgcgcgggtc

SEQ ID NO: 106243 - DNA, 15 bp, Homo sapiens
agacagcgcgcgggt

SEQ ID NO: 106244 - DNA, 15 bp, Homo sapiens
cagacagcgcgcggg

SEQ ID NO: 106245 - DNA, 15 bp, Homo sapiens
ccagacagcgcgcgg

SEQ ID NO: 106246 - DNA, 15 bp, Homo sapiens
cccagacagcgcgcg

SEQ ID NO: 106247 - DNA, 15 bp, Homo sapiens
ccccagacagcgcgc

SEQ ID NO: 106248 - DNA, 15 bp, Homo sapiens
gccccagacagcgcg

SEQ ID NO: 106249 - DNA, 15 bp, Homo sapiens
agccccagacagcgc

SEQ ID NO: 106250 - DNA, 15 bp, Homo sapiens
cagccccagacagcg

SEQ ID NO: 106251 - DNA, 15 bp, Homo sapiens
gcagccccagacagc

SEQ ID NO: 106252 - DNA, 15 bp, Homo sapiens
cgcagccccagacag

SEQ ID NO: 106253 - DNA, 15 bp, Homo sapiens
ccgcagccccagaca

SEQ ID NO: 106254 - DNA, 15 bp, Homo sapiens
accgcagccccagac

SEQ ID NO: 106255 - DNA, 15 bp, Homo sapiens
caccgcagccccaga

SEQ ID NO: 106256 - DNA, 15 bp, Homo sapiens
ccaccgcagccccag

SEQ ID NO: 106257 - DNA, 15 bp, Homo sapiens
gccaccgcagcccca

SEQ ID NO: 106258 - DNA, 15 bp, Homo sapiens
cgccaccgcagcccc

SEQ ID NO: 106259 - DNA, 15 bp, Homo sapiens
acgccaccgcagccc

SEQ ID NO: 106260 - DNA, 15 bp, Homo sapiens
cacgccaccgcagcc

SEQ ID NO: 106261 - DNA, 15 bp, Homo sapiens
ccacgccaccgcagc

SEQ ID NO: 106262 - DNA, 15 bp, Homo sapiens
cccacgccaccgcag

SEQ ID NO: 106263 - DNA, 15 bp, Homo sapiens
ccccacgccaccgca

SEQ ID NO: 106264 - DNA, 15 bp, Homo sapiens
tccccacgccaccgc

SEQ ID NO: 106265 - DNA, 15 bp, Homo sapiens
ctccccacgccaccg

SEQ ID NO: 106266 - DNA, 15 bp, Homo sapiens
cctccccacgccacc

SEQ ID NO: 106267 - DNA, 15 bp, Homo sapiens
ccctccccacgccac

SEQ ID NO: 106268 - DNA, 15 bp, Homo sapiens
gccctccccacgcca

SEQ ID NO: 106269 - DNA, 15 bp, Homo sapiens
cgccctccccacgcc

SEQ ID NO: 106270 - DNA, 15 bp, Homo sapiens
gcgccctccccacgc

SEQ ID NO: 106271 - DNA, 15 bp, Homo sapiens
cgcgccctccccacg

SEQ ID NO: 106272 - DNA, 15 bp, Homo sapiens
ccgcgccctccccac

SEQ ID NO: 106273 - DNA, 15 bp, Homo sapiens
gccgcgccctcccca

SEQ ID NO: 106274 - DNA, 15 bp, Homo sapiens
ggccgcgccctcccc

SEQ ID NO: 106275 - DNA, 15 bp, Homo sapiens
gggccgcgccctccc

SEQ ID NO: 106276 - DNA, 15 bp, Homo sapiens
ggggccgcgccctcc

SEQ ID NO: 106277 - DNA, 15 bp, Homo sapiens
gggggccgcgccctc

SEQ ID NO: 106278 - DNA, 15 bp, Homo sapiens
cgggggccgcgccct

SEQ ID NO: 106279 - DNA, 15 bp, Homo sapiens
ccgggggccgcgccc

SEQ ID NO: 106280 - DNA, 15 bp, Homo sapiens
tccgggggccgcgcc

SEQ ID NO: 106281 - DNA, 15 bp, Homo sapiens
gtccgggggccgcgc

SEQ ID NO: 106282 - DNA, 15 bp, Homo sapiens
cgtccgggggccgcg

SEQ ID NO: 106283 - DNA, 15 bp, Homo sapiens
gcgtccgggggccgc

SEQ ID NO: 106284 - DNA, 15 bp, Homo sapiens
ggcgtccgggggccg

SEQ ID NO: 106285 - DNA, 15 bp, Homo sapiens
gggcgtccgggggcc

SEQ ID NO: 106286 - DNA, 15 bp, Homo sapiens
ggggcgtccgggggc

SEQ ID NO: 106287 - DNA, 15 bp, Homo sapiens
cggggcgtccggggg

SEQ ID NO: 106288 - DNA, 15 bp, Homo sapiens
tcggggcgtccgggg

SEQ ID NO: 106289 - DNA, 15 bp, Homo sapiens
ctcggggcgtccggg

SEQ ID NO: 106290 - DNA, 15 bp, Homo sapiens
cctcggggcgtccgg

SEQ ID NO: 106291 - DNA, 15 bp, Homo sapiens
tcctcggggcgtccg

SEQ ID NO: 106292 - DNA, 15 bp, Homo sapiens
ttcctcggggcgtcc

SEQ ID NO: 106293 - DNA, 15 bp, Homo sapiens
cttcctcggggcgtc

SEQ ID NO: 106294 - DNA, 15 bp, Homo sapiens
ccttcctcggggcgt

SEQ ID NO: 106295 - DNA, 15 bp, Homo sapiens
cccttcctcggggcg

SEQ ID NO: 106296 - DNA, 15 bp, Homo sapiens
ccccttcctcggggc

SEQ ID NO: 106297 - DNA, 15 bp, Homo sapiens
gccccttcctcgggg

SEQ ID NO: 106298 - DNA, 15 bp, Homo sapiens
tgccccttcctcggg

SEQ ID NO: 106299 - DNA, 15 bp, Homo sapiens
gtgccccttcctcgg

SEQ ID NO: 106300 - DNA, 15 bp, Homo sapiens
ggtgccccttcctcg

SEQ ID NO: 106301 - DNA, 15 bp, Homo sapiens
aggtgccccttcctc

SEQ ID NO: 106302 - DNA, 15 bp, Homo sapiens
gaggtgccccttcct

SEQ ID NO: 106303 - DNA, 15 bp, Homo sapiens
tgaggtgccccttcc

SEQ ID NO: 106304 - DNA, 15 bp, Homo sapiens
gtgaggtgccccttc

SEQ ID NO: 106305 - DNA, 15 bp, Homo sapiens
ggtgaggtgcccctt

SEQ ID NO: 106306 - DNA, 15 bp, Homo sapiens
cggtgaggtgcccct

SEQ ID NO: 106307 - DNA, 15 bp, Homo sapiens
gcggtgaggtgcccc

SEQ ID NO: 106308 - DNA, 15 bp, Homo sapiens
ggcggtgaggtgccc

SEQ ID NO: 106309 - DNA, 15 bp, Homo sapiens
gggcggtgaggtgcc

SEQ ID NO: 106310 - DNA, 15 bp, Homo sapiens
ggggcggtgaggtgc

SEQ ID NO: 106311 - DNA, 15 bp, Homo sapiens
gggggcggtgaggtg

SEQ ID NO: 106312 - DNA, 15 bp, Homo sapiens
tgggggcggtgaggt

SEQ ID NO: 106313 - DNA, 15 bp, Homo sapiens
gtgggggcggtgagg

SEQ ID NO: 106314 - DNA, 15 bp, Homo sapiens
ggtgggggcggtgag

SEQ ID NO: 106315 - DNA, 15 bp, Homo sapiens
gggtgggggcggtga

SEQ ID NO: 106316 - DNA, 15 bp, Homo sapiens
tgggtgggggcggtg

SEQ ID NO: 106317 - DNA, 15 bp, Homo sapiens
ctgggtgggggcggt

SEQ ID NO: 106318 - DNA, 15 bp, Homo sapiens
tctgggtgggggcgg

SEQ ID NO: 106319 - DNA, 15 bp, Homo sapiens
ctctgggtgggggcg

SEQ ID NO: 106320 - DNA, 15 bp, Homo sapiens
gctctgggtgggggc

SEQ ID NO: 106321 - DNA, 15 bp, Homo sapiens
cgctctgggtggggg

SEQ ID NO: 106322 - DNA, 15 bp, Homo sapiens
gcgctctgggtgggg

SEQ ID NO: 106323 - DNA, 15 bp, Homo sapiens
ggcgctctgggtggg

SEQ ID NO: 106324 - DNA, 15 bp, Homo sapiens
aggcgctctgggtgg

SEQ ID NO: 106325 - DNA, 15 bp, Homo sapiens
caggcgctctgggtg

SEQ ID NO: 106326 - DNA, 15 bp, Homo sapiens
ccaggcgctctgggt

SEQ ID NO: 106327 - DNA, 15 bp, Homo sapiens
gccaggcgctctggg

SEQ ID NO: 106328 - DNA, 15 bp, Homo sapiens
ggccaggcgctctgg

SEQ ID NO: 106329 - DNA, 15 bp, Homo sapiens
cggccaggcgctctg

SEQ ID NO: 106330 - DNA, 15 bp, Homo sapiens
acggccaggcgctct

SEQ ID NO: 106331 - DNA, 15 bp, Homo sapiens
cacggccaggcgctc

SEQ ID NO: 106332 - DNA, 15 bp, Homo sapiens
gcacggccaggcgct

SEQ ID NO: 106333 - DNA, 15 bp, Homo sapiens
cgcacggccaggcgc

SEQ ID NO: 106334 - DNA, 15 bp, Homo sapiens
ccgcacggccaggcg

SEQ ID NO: 106335 - DNA, 15 bp, Homo sapiens
cccgcacggccaggc

SEQ ID NO: 106336 - DNA, 15 bp, Homo sapiens
gcccgcacggccagg

SEQ ID NO: 106337 - DNA, 15 bp, Homo sapiens
agcccgcacggccag

SEQ ID NO: 106338 - DNA, 15 bp, Homo sapiens
cagcccgcacggcca

SEQ ID NO: 106339 - DNA, 15 bp, Homo sapiens
gcagcccgcacggcc

SEQ ID NO: 106340 - DNA, 15 bp, Homo sapiens
tgcagcccgcacggc

SEQ ID NO: 106341 - DNA, 15 bp, Homo sapiens
ctgcagcccgcacgg

SEQ ID NO: 106342 - DNA, 15 bp, Homo sapiens
tctgcagcccgcacg

SEQ ID NO: 106343 - DNA, 15 bp, Homo sapiens
ctctgcagcccgcac

SEQ ID NO: 106344 - DNA, 15 bp, Homo sapiens
cctctgcagcccgca

SEQ ID NO: 106345 - DNA, 15 bp, Homo sapiens
tcctctgcagcccgc

SEQ ID NO: 106346 - DNA, 15 bp, Homo sapiens
gtcctctgcagcccg

SEQ ID NO: 106347 - DNA, 15 bp, Homo sapiens
ggtcctctgcagccc

SEQ ID NO: 106348 - DNA, 15 bp, Homo sapiens
gggtcctctgcagcc

SEQ ID NO: 106349 - DNA, 15 bp, Homo sapiens
ggggtcctctgcagc

SEQ ID NO: 106350 - DNA, 15 bp, Homo sapiens
aggggtcctctgcag

SEQ ID NO: 106351 - DNA, 15 bp, Homo sapiens
gaggggtcctctgca

SEQ ID NO: 106352 - DNA, 15 bp, Homo sapiens
ggaggggtcctctgc

SEQ ID NO: 106353 - DNA, 15 bp, Homo sapiens
cggaggggtcctctg

SEQ ID NO: 106354 - DNA, 15 bp, Homo sapiens
ccggaggggtcctct

SEQ ID NO: 106355 - DNA, 15 bp, Homo sapiens
cccggaggggtcctc

SEQ ID NO: 106356 - DNA, 15 bp, Homo sapiens
ccccggaggggtcct

SEQ ID NO: 106357 - DNA, 15 bp, Homo sapiens
gccccggaggggtcc

SEQ ID NO: 106358 - DNA, 15 bp, Homo sapiens
tgccccggaggggtc

SEQ ID NO: 106359 - DNA, 15 bp, Homo sapiens
ctgccccggaggggt

SEQ ID NO: 106360 - DNA, 15 bp, Homo sapiens
tctgccccggagggg

SEQ ID NO: 106361 - DNA, 15 bp, Homo sapiens
ctctgccccggaggg

SEQ ID NO: 106362 - DNA, 15 bp, Homo sapiens
cctctgccccggagg

SEQ ID NO: 106363 - DNA, 15 bp, Homo sapiens
gcctctgccccggag

SEQ ID NO: 106364 - DNA, 15 bp, Homo sapiens
tgcctctgccccgga

SEQ ID NO: 106365 - DNA, 15 bp, Homo sapiens
ctgcctctgccccgg

SEQ ID NO: 106366 - DNA, 15 bp, Homo sapiens
cctgcctctgccccg

SEQ ID NO: 106367 - DNA, 15 bp, Homo sapiens
acctgcctctgcccc

SEQ ID NO: 106368 - DNA, 15 bp, Homo sapiens
aacctgcctctgccc

SEQ ID NO: 106369 - DNA, 15 bp, Homo sapiens
gaacctgcctctgcc

SEQ ID NO: 106370 - DNA, 15 bp, Homo sapiens
ggaacctgcctctgc

SEQ ID NO: 106371 - DNA, 15 bp, Homo sapiens
tggaacctgcctctg

SEQ ID NO: 106372 - DNA, 15 bp, Homo sapiens
gtggaacctgcctct

SEQ ID NO: 106373 - DNA, 15 bp, Homo sapiens
cgtggaacctgcctc

SEQ ID NO: 106374 - DNA, 15 bp, Homo sapiens
ccgtggaacctgcct

SEQ ID NO: 106375 - DNA, 15 bp, Homo sapiens
tccgtggaacctgcc

SEQ ID NO: 106376 - DNA, 15 bp, Homo sapiens
ttccgtggaacctgc

SEQ ID NO: 106377 - DNA, 15 bp, Homo sapiens
cttccgtggaacctg

SEQ ID NO: 106378 - DNA, 15 bp, Homo sapiens
tcttccgtggaacct

SEQ ID NO: 106379 - DNA, 15 bp, Homo sapiens
gtcttccgtggaacc

SEQ ID NO: 106380 - DNA, 15 bp, Homo sapiens
ggtcttccgtggaac

SEQ ID NO: 106381 - DNA, 15 bp, Homo sapiens
gggtcttccgtggaa

SEQ ID NO: 106382 - DNA, 15 bp, Homo sapiens
ggggtcttccgtgga

SEQ ID NO: 106383 - DNA, 15 bp, Homo sapiens
cggggtcttccgtgg

SEQ ID NO: 106384 - DNA, 15 bp, Homo sapiens
ccggggtcttccgtg

SEQ ID NO: 106385 - DNA, 15 bp, Homo sapiens
gccggggtcttccgt

SEQ ID NO: 106386 - DNA, 15 bp, Homo sapiens
ggccggggtcttccg

SEQ ID NO: 106387 - DNA, 15 bp, Homo sapiens
gggccggggtcttcc

SEQ ID NO: 106388 - DNA, 15 bp, Homo sapiens
cgggccggggtcttc

SEQ ID NO: 106389 - DNA, 15 bp, Homo sapiens
gcgggccggggtctt

SEQ ID NO: 106390 - DNA, 15 bp, Homo sapiens
agcgggccggggtct

SEQ ID NO: 106391 - DNA, 15 bp, Homo sapiens
cagcgggccggggtc

SEQ ID NO: 106392 - DNA, 15 bp, Homo sapiens
ccagcgggccggggt

SEQ ID NO: 106393 - DNA, 15 bp, Homo sapiens
cccagcgggccgggg

SEQ ID NO: 106394 - DNA, 15 bp, Homo sapiens
ccccagcgggccggg

SEQ ID NO: 106395 - DNA, 15 bp, Homo sapiens
gccccagcgggccgg

SEQ ID NO: 106396 - DNA, 15 bp, Homo sapiens
agccccagcgggccg

SEQ ID NO: 106397 - DNA, 15 bp, Homo sapiens
aagccccagcgggcc

SEQ ID NO: 106398 - DNA, 15 bp, Homo sapiens
gaagccccagcgggc

SEQ ID NO: 106399 - DNA, 15 bp, Homo sapiens
ggaagccccagcggg

SEQ ID NO: 106400 - DNA, 15 bp, Homo sapiens
gggaagccccagcgg

SEQ ID NO: 106401 - DNA, 15 bp, Homo sapiens
ggggaagccccagcg

SEQ ID NO: 106402 - DNA, 15 bp, Homo sapiens
cggggaagccccagc

SEQ ID NO: 106403 - DNA, 15 bp, Homo sapiens
ccggggaagccccag

SEQ ID NO: 106404 - DNA, 15 bp, Homo sapiens
tccggggaagcccca

SEQ ID NO: 106405 - DNA, 15 bp, Homo sapiens
ctccggggaagcccc

SEQ ID NO: 106406 - DNA, 15 bp, Homo sapiens
tctccggggaagccc

SEQ ID NO: 106407 - DNA, 15 bp, Homo sapiens
gtctccggggaagcc

SEQ ID NO: 106408 - DNA, 15 bp, Homo sapiens
agtctccggggaagc

SEQ ID NO: 106409 - DNA, 15 bp, Homo sapiens
gagtctccggggaag

SEQ ID NO: 106410 - DNA, 15 bp, Homo sapiens
ggagtctccggggaa

SEQ ID NO: 106411 - DNA, 15 bp, Homo sapiens
tggagtctccgggga

SEQ ID NO: 106412 - DNA, 15 bp, Homo sapiens
ctggagtctccgggg

SEQ ID NO: 106413 - DNA, 15 bp, Homo sapiens
tctggagtctccggg

SEQ ID NO: 106414 - DNA, 15 bp, Homo sapiens
ctctggagtctccgg

SEQ ID NO: 106415 - DNA, 15 bp, Homo sapiens
gctctggagtctccg

SEQ ID NO: 106416 - DNA, 15 bp, Homo sapiens
ggctctggagtctcc

SEQ ID NO: 106417 - DNA, 15 bp, Homo sapiens
gggctctggagtctc

SEQ ID NO: 106418 - DNA, 15 bp, Homo sapiens
tgggctctggagtct

SEQ ID NO: 106419 - DNA, 15 bp, Homo sapiens
gtgggctctggagtc

SEQ ID NO: 106420 - DNA, 15 bp, Homo sapiens
tgtgggctctggagt

SEQ ID NO: 106421 - DNA, 15 bp, Homo sapiens
ctgtgggctctggag

SEQ ID NO: 106422 - DNA, 15 bp, Homo sapiens
tctgtgggctctgga

SEQ ID NO: 106423 - DNA, 15 bp, Homo sapiens
ctctgtgggctctgg

SEQ ID NO: 106424 - DNA, 15 bp, Homo sapiens
cctctgtgggctctg

SEQ ID NO: 106425 - DNA, 15 bp, Homo sapiens
tcctctgtgggctct

SEQ ID NO: 106426 - DNA, 15 bp, Homo sapiens
ctcctctgtgggctc

SEQ ID NO: 106427 - DNA, 15 bp, Homo sapiens
cctcctctgtgggct

SEQ ID NO: 106428 - DNA, 15 bp, Homo sapiens
ccctcctctgtgggc

SEQ ID NO: 106429 - DNA, 15 bp, Homo sapiens
cccctcctctgtggg

SEQ ID NO: 106430 - DNA, 15 bp, Homo sapiens
gcccctcctctgtgg

SEQ ID NO: 106431 - DNA, 15 bp, Homo sapiens
ggcccctcctctgtg

SEQ ID NO: 106432 - DNA, 15 bp, Homo sapiens
cggcccctcctctgt

SEQ ID NO: 106433 - DNA, 15 bp, Homo sapiens
gcggcccctcctctg

SEQ ID NO: 106434 - DNA, 15 bp, Homo sapiens
tgcggcccctcctct

SEQ ID NO: 106435 - DNA, 15 bp, Homo sapiens
ctgcggcccctcctc

SEQ ID NO: 106436 - DNA, 15 bp, Homo sapiens
cctgcggcccctcct

SEQ ID NO: 106437 - DNA, 15 bp, Homo sapiens
ccctgcggcccctcc

SEQ ID NO: 106438 - DNA, 15 bp, Homo sapiens
tccctgcggcccctc

SEQ ID NO: 106439 - DNA, 15 bp, Homo sapiens
ttccctgcggcccct

SEQ ID NO: 106440 - DNA, 15 bp, Homo sapiens
gttccctgcggcccc

SEQ ID NO: 106441 - DNA, 15 bp, Homo sapiens
tgttccctgcggccc

SEQ ID NO: 106442 - DNA, 15 bp, Homo sapiens
ctgttccctgcggcc

SEQ ID NO: 106443 - DNA, 15 bp, Homo sapiens
gctgttccctgcggc

SEQ ID NO: 106444 - DNA, 15 bp, Homo sapiens
ggctgttccctgcgg

SEQ ID NO: 106445 - DNA, 15 bp, Homo sapiens
gggctgttccctgcg

SEQ ID NO: 106446 - DNA, 15 bp, Homo sapiens
ggggctgttccctgc

SEQ ID NO: 106447 - DNA, 15 bp, Homo sapiens
cggggctgttccctg

SEQ ID NO: 106448 - DNA, 15 bp, Homo sapiens
ccggggctgttccct

SEQ ID NO: 106449 - DNA, 15 bp, Homo sapiens
cccggggctgttccc

SEQ ID NO: 106450 - DNA, 15 bp, Homo sapiens
gcccggggctgttcc

SEQ ID NO: 106451 - DNA, 15 bp, Homo sapiens
cgcccggggctgttc

SEQ ID NO: 106452 - DNA, 15 bp, Homo sapiens
ccgcccggggctgtt

SEQ ID NO: 106453 - DNA, 15 bp, Homo sapiens
gccgcccggggctgt

SEQ ID NO: 106454 - DNA, 15 bp, Homo sapiens
tgccgcccggggctg

SEQ ID NO: 106455 - DNA, 15 bp, Homo sapiens
ctgccgcccggggct

SEQ ID NO: 106456 - DNA, 15 bp, Homo sapiens
cctgccgcccggggc

SEQ ID NO: 106457 - DNA, 15 bp, Homo sapiens
gcctgccgcccgggg

SEQ ID NO: 106458 - DNA, 15 bp, Homo sapiens
cgcctgccgcccggg

SEQ ID NO: 106459 - DNA, 15 bp, Homo sapiens
gcgcctgccgcccgg

SEQ ID NO: 106460 - DNA, 15 bp, Homo sapiens
ggcgcctgccgcccg

SEQ ID NO: 106461 - DNA, 15 bp, Homo sapiens
cggcgcctgccgccc

SEQ ID NO: 106462 - DNA, 15 bp, Homo sapiens
ccggcgcctgccgcc

SEQ ID NO: 106463 - DNA, 15 bp, Homo sapiens
cccggcgcctgccgc

SEQ ID NO: 106464 - DNA, 15 bp, Homo sapiens
gcccggcgcctgccg

SEQ ID NO: 106465 - DNA, 15 bp, Homo sapiens
tgcccggcgcctgcc

SEQ ID NO: 106466 - DNA, 15 bp, Homo sapiens
ctgcccggcgcctgc

SEQ ID NO: 106467 - DNA, 15 bp, Homo sapiens
gctgcccggcgcctg

SEQ ID NO: 106468 - DNA, 15 bp, Homo sapiens
cgctgcccggcgcct

SEQ ID NO: 106469 - DNA, 15 bp, Homo sapiens
ccgctgcccggcgcc

SEQ ID NO: 106470 - DNA, 15 bp, Homo sapiens
gccgctgcccggcgc

SEQ ID NO: 106471 - DNA, 15 bp, Homo sapiens
tgccgctgcccggcg

SEQ ID NO: 106472 - DNA, 15 bp, Homo sapiens
atgccgctgcccggc

SEQ ID NO: 106473 - DNA, 15 bp, Homo sapiens
gatgccgctgcccgg

SEQ ID NO: 106474 - DNA, 15 bp, Homo sapiens
agatgccgctgcccg

SEQ ID NO: 106475 - DNA, 15 bp, Homo sapiens
gagatgccgctgccc

SEQ ID NO: 106476 - DNA, 15 bp, Homo sapiens
cgagatgccgctgcc

SEQ ID NO: 106477 - DNA, 15 bp, Homo sapiens
acgagatgccgctgc

SEQ ID NO: 106478 - DNA, 15 bp, Homo sapiens
gacgagatgccgctg

SEQ ID NO: 106479 - DNA, 15 bp, Homo sapiens
ggacgagatgccgct

SEQ ID NO: 106480 - DNA, 15 bp, Homo sapiens
aggacgagatgccgc

SEQ ID NO: 106481 - DNA, 15 bp, Homo sapiens
caggacgagatgccg

SEQ ID NO: 106482 - DNA, 15 bp, Homo sapiens
ccaggacgagatgcc

SEQ ID NO: 106483 - DNA, 15 bp, Homo sapiens
gccaggacgagatgc

SEQ ID NO: 106484 - DNA, 15 bp, Homo sapiens
agccaggacgagatg

SEQ ID NO: 106485 - DNA, 15 bp, Homo sapiens
gagccaggacgagat

SEQ ID NO: 106486 - DNA, 15 bp, Homo sapiens
ggagccaggacgaga

SEQ ID NO: 106487 - DNA, 15 bp, Homo sapiens
tggagccaggacgag

SEQ ID NO: 106488 - DNA, 15 bp, Homo sapiens
gtggagccaggacga

SEQ ID NO: 106489 - DNA, 15 bp, Homo sapiens
ggtggagccaggacg

SEQ ID NO: 106490 - DNA, 15 bp, Homo sapiens
cggtggagccaggac

SEQ ID NO: 106491 - DNA, 15 bp, Homo sapiens
acggtggagccagga

SEQ ID NO: 106492 - DNA, 15 bp, Homo sapiens
cacggtggagccagg

SEQ ID NO: 106493 - DNA, 15 bp, Homo sapiens
gcacggtggagccag

SEQ ID NO: 106494 - DNA, 15 bp, Homo sapiens
agcacggtggagcca

SEQ ID NO: 106495 - DNA, 15 bp, Homo sapiens
cagcacggtggagcc

SEQ ID NO: 106496 - DNA, 15 bp, Homo sapiens
gcagcacggtggagc

SEQ ID NO: 106497 - DNA, 15 bp, Homo sapiens
agcagcacggtggag

SEQ ID NO: 106498 - DNA, 15 bp, Homo sapiens
aagcagcacggtgga

SEQ ID NO: 106499 - DNA, 15 bp, Homo sapiens
gaagcagcacggtgg

SEQ ID NO: 106500 - DNA, 15 bp, Homo sapiens
agaagcagcacggtg

SEQ ID NO: 106501 - DNA, 15 bp, Homo sapiens
cagaagcagcacggt

SEQ ID NO: 106502 - DNA, 15 bp, Homo sapiens
gcagaagcagcacgg

SEQ ID NO: 106503 - DNA, 15 bp, Homo sapiens
ggcagaagcagcacg

SEQ ID NO: 106504 - DNA, 15 bp, Homo sapiens
aggcagaagcagcac

SEQ ID NO: 106505 - DNA, 15 bp, Homo sapiens
gaggcagaagcagca

SEQ ID NO: 106506 - DNA, 15 bp, Homo sapiens
agaggcagaagcagc

SEQ ID NO: 106507 - DNA, 15 bp, Homo sapiens
cagaggcagaagcag

SEQ ID NO: 106508 - DNA, 15 bp, Homo sapiens
ccagaggcagaagca

SEQ ID NO: 106509 - DNA, 15 bp, Homo sapiens
tccagaggcagaagc

SEQ ID NO: 106510 - DNA, 15 bp, Homo sapiens
gtccagaggcagaag

SEQ ID NO: 106511 - DNA, 15 bp, Homo sapiens
cgtccagaggcagaa

SEQ ID NO: 106512 - DNA, 15 bp, Homo sapiens
ccgtccagaggcaga

SEQ ID NO: 106513 - DNA, 15 bp, Homo sapiens
accgtccagaggcag

SEQ ID NO: 106514 - DNA, 15 bp, Homo sapiens
caccgtccagaggca

SEQ ID NO: 106515 - DNA, 15 bp, Homo sapiens
gcaccgtccagaggc

SEQ ID NO: 106516 - DNA, 15 bp, Homo sapiens
agcaccgtccagagg

SEQ ID NO: 106517 - DNA, 15 bp, Homo sapiens
aagcaccgtccagag

SEQ ID NO: 106518 - DNA, 15 bp, Homo sapiens
aaagcaccgtccaga

SEQ ID NO: 106519 - DNA, 15 bp, Homo sapiens
gaaagcaccgtccag

SEQ ID NO: 106520 - DNA, 15 bp, Homo sapiens
tgaaagcaccgtcca

SEQ ID NO: 106521 - DNA, 15 bp, Homo sapiens
ctgaaagcaccgtcc

SEQ ID NO: 106522 - DNA, 15 bp, Homo sapiens
cctgaaagcaccgtc

SEQ ID NO: 106523 - DNA, 15 bp, Homo sapiens
ccctgaaagcaccgt

SEQ ID NO: 106524 - DNA, 15 bp, Homo sapiens
cccctgaaagcaccg

SEQ ID NO: 106525 - DNA, 15 bp, Homo sapiens
tcccctgaaagcacc

SEQ ID NO: 106526 - DNA, 15 bp, Homo sapiens
gtcccctgaaagcac

SEQ ID NO: 106527 - DNA, 15 bp, Homo sapiens
cgtcccctgaaagca

SEQ ID NO: 106528 - DNA, 15 bp, Homo sapiens
gcgtcccctgaaagc

SEQ ID NO: 106529 - DNA, 15 bp, Homo sapiens
cgcgtcccctgaaag

SEQ ID NO: 106530 - DNA, 15 bp, Homo sapiens
gcgcgtcccctgaaa

SEQ ID NO: 106531 - DNA, 15 bp, Homo sapiens
cgcgcgtcccctgaa

SEQ ID NO: 106532 - DNA, 15 bp, Homo sapiens
ccgcgcgtcccctga

SEQ ID NO: 106533 - DNA, 15 bp, Homo sapiens
tccgcgcgtcccctg

SEQ ID NO: 106534 - DNA, 15 bp, Homo sapiens
gtccgcgcgtcccct

SEQ ID NO: 106535 - DNA, 15 bp, Homo sapiens
ggtccgcgcgtcccc

SEQ ID NO: 106536 - DNA, 15 bp, Homo sapiens
cggtccgcgcgtccc

SEQ ID NO: 106537 - DNA, 15 bp, Homo sapiens
acggtccgcgcgtcc

SEQ ID NO: 106538 - DNA, 15 bp, Homo sapiens
cacggtccgcgcgtc

SEQ ID NO: 106539 - DNA, 15 bp, Homo sapiens
ccacggtccgcgcgt

SEQ ID NO: 106540 - DNA, 15 bp, Homo sapiens
accacggtccgcgcg

SEQ ID NO: 106541 - DNA, 15 bp, Homo sapiens
caccacggtccgcgc

SEQ ID NO: 106542 - DNA, 15 bp, Homo sapiens
ccaccacggtccgcg

SEQ ID NO: 106543 - DNA, 15 bp, Homo sapiens
tccaccacggtccgc

SEQ ID NO: 106544 - DNA, 15 bp, Homo sapiens
ctccaccacggtccg

SEQ ID NO: 106545 - DNA, 15 bp, Homo sapiens
gctccaccacggtcc

SEQ ID NO: 106546 - DNA, 15 bp, Homo sapiens
agctccaccacggtc

SEQ ID NO: 106547 - DNA, 15 bp, Homo sapiens
cagctccaccacggt

SEQ ID NO: 106548 - DNA, 15 bp, Homo sapiens
gcagctccaccacgg

SEQ ID NO: 106549 - DNA, 15 bp, Homo sapiens
agcagctccaccacg

SEQ ID NO: 106550 - DNA, 15 bp, Homo sapiens
aagcagctccaccac

SEQ ID NO: 106551 - DNA, 15 bp, Homo sapiens
gaagcagctccacca

SEQ ID NO: 106552 - DNA, 15 bp, Homo sapiens
ggaagcagctccacc

SEQ ID NO: 106553 - DNA, 15 bp, Homo sapiens
cggaagcagctccac

SEQ ID NO: 106554 - DNA, 15 bp, Homo sapiens
ccggaagcagctcca

SEQ ID NO: 106555 - DNA, 15 bp, Homo sapiens
tccggaagcagctcc

SEQ ID NO: 106556 - DNA, 15 bp, Homo sapiens
ctccggaagcagctc

SEQ ID NO: 106557 - DNA, 15 bp, Homo sapiens
tctccggaagcagct

SEQ ID NO: 106558 - DNA, 15 bp, Homo sapiens
ttctccggaagcagc

SEQ ID NO: 106559 - DNA, 15 bp, Homo sapiens
cttctccggaagcag

SEQ ID NO: 106560 - DNA, 15 bp, Homo sapiens
acttctccggaagca

SEQ ID NO: 106561 - DNA, 15 bp, Homo sapiens
cacttctccggaagc

SEQ ID NO: 106562 - DNA, 15 bp, Homo sapiens
ccacttctccggaag

SEQ ID NO: 106563 - DNA, 15 bp, Homo sapiens
tccacttctccggaa

SEQ ID NO: 106564 - DNA, 15 bp, Homo sapiens
ctccacttctccgga

SEQ ID NO: 106565 - DNA, 15 bp, Homo sapiens
cctccacttctccgg

SEQ ID NO: 106566 - DNA, 15 bp, Homo sapiens
tcctccacttctccg

SEQ ID NO: 106567 - DNA, 15 bp, Homo sapiens
atcctccacttctcc

SEQ ID NO: 106568 - DNA, 15 bp, Homo sapiens
gatcctccacttctc

SEQ ID NO: 106569 - DNA, 15 bp, Homo sapiens
ggatcctccacttct

SEQ ID NO: 106570 - DNA, 15 bp, Homo sapiens
aggatcctccacttc

SEQ ID NO: 106571 - DNA, 15 bp, Homo sapiens
gaggatcctccactt

SEQ ID NO: 106572 - DNA, 15 bp, Homo sapiens
agaggatcctccact

SEQ ID NO: 106573 - DNA, 15 bp, Homo sapiens
cagaggatcctccac

SEQ ID NO: 106574 - DNA, 15 bp, Homo sapiens
ccagaggatcctcca

SEQ ID NO: 106575 - DNA, 15 bp, Homo sapiens
gccagaggatcctcc

SEQ ID NO: 106576 - DNA, 15 bp, Homo sapiens
ggccagaggatcctc

SEQ ID NO: 106577 - DNA, 15 bp, Homo sapiens
tggccagaggatcct

SEQ ID NO: 106578 - DNA, 15 bp, Homo sapiens
ttggccagaggatcc

SEQ ID NO: 106579 - DNA, 15 bp, Homo sapiens
gttggccagaggatc

SEQ ID NO: 106580 - DNA, 15 bp, Homo sapiens
cgttggccagaggat

SEQ ID NO: 106581 - DNA, 15 bp, Homo sapiens
ccgttggccagagga

SEQ ID NO: 106582 - DNA, 15 bp, Homo sapiens
gccgttggccagagg

SEQ ID NO: 106583 - DNA, 15 bp, Homo sapiens
ggccgttggccagag

SEQ ID NO: 106584 - DNA, 15 bp, Homo sapiens
aggccgttggccaga

SEQ ID NO: 106585 - DNA, 15 bp, Homo sapiens
caggccgttggccag

SEQ ID NO: 106586 - DNA, 15 bp, Homo sapiens
tcaggccgttggcca

SEQ ID NO: 106587 - DNA, 15 bp, Homo sapiens
ctcaggccgttggcc

SEQ ID NO: 106588 - DNA, 15 bp, Homo sapiens
cctcaggccgttggc

SEQ ID NO: 106589 - DNA, 15 bp, Homo sapiens
tcctcaggccgttgg

SEQ ID NO: 106590 - DNA, 15 bp, Homo sapiens
ctcctcaggccgttg

SEQ ID NO: 106591 - DNA, 15 bp, Homo sapiens
tctcctcaggccgtt

SEQ ID NO: 106592 - DNA, 15 bp, Homo sapiens
ctctcctcaggccgt

SEQ ID NO: 106593 - DNA, 15 bp, Homo sapiens
gctctcctcaggccg

SEQ ID NO: 106594 - DNA, 15 bp, Homo sapiens
cgctctcctcaggcc

SEQ ID NO: 106595 - DNA, 15 bp, Homo sapiens
ccgctctcctcaggc

SEQ ID NO: 106596 - DNA, 15 bp, Homo sapiens
cccgctctcctcagg

SEQ ID NO: 106597 - DNA, 15 bp, Homo sapiens
ccccgctctcctcag

SEQ ID NO: 106598 - DNA, 15 bp, Homo sapiens
gccccgctctcctca

SEQ ID NO: 106599 - DNA, 15 bp, Homo sapiens
tgccccgctctcctc

SEQ ID NO: 106600 - DNA, 15 bp, Homo sapiens
gtgccccgctctcct

SEQ ID NO: 106601 - DNA, 15 bp, Homo sapiens
cgtgccccgctctcc

SEQ ID NO: 106602 - DNA, 15 bp, Homo sapiens
ccgtgccccgctctc

SEQ ID NO: 106603 - DNA, 15 bp, Homo sapiens
cccgtgccccgctct

SEQ ID NO: 106604 - DNA, 15 bp, Homo sapiens
ccccgtgccccgctc

SEQ ID NO: 106605 - DNA, 15 bp, Homo sapiens
accccgtgccccgct

SEQ ID NO: 106606 - DNA, 15 bp, Homo sapiens
gaccccgtgccccgc

SEQ ID NO: 106607 - DNA, 15 bp, Homo sapiens
agaccccgtgccccg

SEQ ID NO: 106608 - DNA, 15 bp, Homo sapiens
gagaccccgtgcccc

SEQ ID NO: 106609 - DNA, 15 bp, Homo sapiens
agagaccccgtgccc

SEQ ID NO: 106610 - DNA, 15 bp, Homo sapiens
aagagaccccgtgcc

SEQ ID NO: 106611 - DNA, 15 bp, Homo sapiens
aaagagaccccgtgc

SEQ ID NO: 106612 - DNA, 15 bp, Homo sapiens
taaagagaccccgtg

SEQ ID NO: 106613 - DNA, 15 bp, Homo sapiens
ctaaagagaccccgt

SEQ ID NO: 106614 - DNA, 15 bp, Homo sapiens
gctaaagagaccccg

SEQ ID NO: 106615 - DNA, 15 bp, Homo sapiens
agctaaagagacccc

SEQ ID NO: 106616 - DNA, 15 bp, Homo sapiens
aagctaaagagaccc

SEQ ID NO: 106617 - DNA, 15 bp, Homo sapiens
aaagctaaagagacc

SEQ ID NO: 106618 - DNA, 15 bp, Homo sapiens
aaaagctaaagagac

SEQ ID NO: 106619 - DNA, 15 bp, Homo sapiens
taaaagctaaagaga

SEQ ID NO: 106620 - DNA, 15 bp, Homo sapiens
gtaaaagctaaagag

SEQ ID NO: 106621 - DNA, 15 bp, Homo sapiens
tgtaaaagctaaaga

SEQ ID NO: 106622 - DNA, 15 bp, Homo sapiens
ttgtaaaagctaaag

SEQ ID NO: 106623 - DNA, 15 bp, Homo sapiens
cttgtaaaagctaaa

SEQ ID NO: 106624 - DNA, 15 bp, Homo sapiens
acttgtaaaagctaa

SEQ ID NO: 106625 - DNA, 15 bp, Homo sapiens
aacttgtaaaagcta

SEQ ID NO: 106626 - DNA, 15 bp, Homo sapiens
aaacttgtaaaagct

SEQ ID NO: 106627 - DNA, 15 bp, Homo sapiens
aaaacttgtaaaagc

SEQ ID NO: 106628 - DNA, 15 bp, Homo sapiens
taaaacttgtaaaag

SEQ ID NO: 106629 - DNA, 15 bp, Homo sapiens
ctaaaacttgtaaaa

SEQ ID NO: 106630 - DNA, 15 bp, Homo sapiens
cctaaaacttgtaaa

SEQ ID NO: 106631 - DNA, 15 bp, Homo sapiens
tcctaaaacttgtaa

SEQ ID NO: 106632 - DNA, 15 bp, Homo sapiens
atcctaaaacttgta

SEQ ID NO: 106633 - DNA, 15 bp, Homo sapiens
aatcctaaaacttgt

SEQ ID NO: 106634 - DNA, 15 bp, Homo sapiens
aaatcctaaaacttg

SEQ ID NO: 106635 - DNA, 15 bp, Homo sapiens
aaaatcctaaaactt

SEQ ID NO: 106636 - DNA, 15 bp, Homo sapiens
aaaaatcctaaaact

SEQ ID NO: 106637 - DNA, 15 bp, Homo sapiens
aaaaaatcctaaaac

SEQ ID NO: 106638 - DNA, 15 bp, Homo sapiens
gaaaaaatcctaaaa

SEQ ID NO: 106639 - DNA, 15 bp, Homo sapiens
tgaaaaaatcctaaa

SEQ ID NO: 106640 - DNA, 15 bp, Homo sapiens
ttgaaaaaatcctaa

SEQ ID NO: 106641 - DNA, 15 bp, Homo sapiens
cttgaaaaaatccta

SEQ ID NO: 106642 - DNA, 15 bp, Homo sapiens
gcttgaaaaaatcct

SEQ ID NO: 106643 - DNA, 15 bp, Homo sapiens
tgcttgaaaaaatcc

SEQ ID NO: 106644 - DNA, 15 bp, Homo sapiens
ctgcttgaaaaaatc

SEQ ID NO: 106645 - DNA, 15 bp, Homo sapiens
cctgcttgaaaaaat

SEQ ID NO: 106646 - DNA, 15 bp, Homo sapiens
ccctgcttgaaaaaa

SEQ ID NO: 106647 - DNA, 15 bp, Homo sapiens
tccctgcttgaaaaa

SEQ ID NO: 106648 - DNA, 15 bp, Homo sapiens
atccctgcttgaaaa

SEQ ID NO: 106649 - DNA, 15 bp, Homo sapiens
gatccctgcttgaaa

SEQ ID NO: 106650 - DNA, 15 bp, Homo sapiens
tgatccctgcttgaa

SEQ ID NO: 106651 - DNA, 15 bp, Homo sapiens
ttgatccctgcttga

SEQ ID NO: 106652 - DNA, 15 bp, Homo sapiens
attgatccctgcttg

SEQ ID NO: 106653 - DNA, 15 bp, Homo sapiens
gattgatccctgctt

SEQ ID NO: 106654 - DNA, 15 bp, Homo sapiens
ggattgatccctgct

SEQ ID NO: 106655 - DNA, 15 bp, Homo sapiens
gggattgatccctgc

SEQ ID NO: 106656 - DNA, 15 bp, Homo sapiens
cgggattgatccctg

SEQ ID NO: 106657 - DNA, 15 bp, Homo sapiens
acgggattgatccct

SEQ ID NO: 106658 - DNA, 15 bp, Homo sapiens
cacgggattgatccc

SEQ ID NO: 106659 - DNA, 15 bp, Homo sapiens
ccacgggattgatcc

SEQ ID NO: 106660 - DNA, 15 bp, Homo sapiens
gccacgggattgatc

SEQ ID NO: 106661 - DNA, 15 bp, Homo sapiens
ggccacgggattgat

SEQ ID NO: 106662 - DNA, 15 bp, Homo sapiens
tggccacgggattga

SEQ ID NO: 106663 - DNA, 15 bp, Homo sapiens
atggccacgggattg

SEQ ID NO: 106664 - DNA, 15 bp, Homo sapiens
aatggccacgggatt

SEQ ID NO: 106665 - DNA, 15 bp, Homo sapiens
aaatggccacgggat

SEQ ID NO: 106666 - DNA, 15 bp, Homo sapiens
aaaatggccacggga

SEQ ID NO: 106667 - DNA, 15 bp, Homo sapiens
aaaaatggccacggg

SEQ ID NO: 106668 - DNA, 15 bp, Homo sapiens
aaaaaatggccacgg

SEQ ID NO: 106669 - DNA, 15 bp, Homo sapiens
caaaaaatggccacg

SEQ ID NO: 106670 - DNA, 15 bp, Homo sapiens
acaaaaaatggccac

SEQ ID NO: 106671 - DNA, 15 bp, Homo sapiens
cacaaaaaatggcca

SEQ ID NO: 106672 - DNA, 15 bp, Homo sapiens
ccacaaaaaatggcc

SEQ ID NO: 106673 - DNA, 15 bp, Homo sapiens
accacaaaaaatggc

SEQ ID NO: 106674 - DNA, 15 bp, Homo sapiens
taccacaaaaaatgg

SEQ ID NO: 106675 - DNA, 15 bp, Homo sapiens
gtaccacaaaaaatg

SEQ ID NO: 106676 - DNA, 15 bp, Homo sapiens
agtaccacaaaaaat

SEQ ID NO: 106677 - DNA, 15 bp, Homo sapiens
aagtaccacaaaaaa

SEQ ID NO: 106678 - DNA, 15 bp, Homo sapiens
aaagtaccacaaaaa

SEQ ID NO: 106679 - DNA, 15 bp, Homo sapiens
caaagtaccacaaaa

SEQ ID NO: 106680 - DNA, 15 bp, Homo sapiens
ccaaagtaccacaaa

SEQ ID NO: 106681 - DNA, 15 bp, Homo sapiens
gccaaagtaccacaa

SEQ ID NO: 106682 - DNA, 15 bp, Homo sapiens
ggccaaagtaccaca

SEQ ID NO: 106683 - DNA, 15 bp, Homo sapiens
aggccaaagtaccac

SEQ ID NO: 106684 - DNA, 15 bp, Homo sapiens
gaggccaaagtacca

SEQ ID NO: 106685 - DNA, 15 bp, Homo sapiens
tgaggccaaagtacc

SEQ ID NO: 106686 - DNA, 15 bp, Homo sapiens
ttgaggccaaagtac

SEQ ID NO: 106687 - DNA, 15 bp, Homo sapiens
attgaggccaaagta

SEQ ID NO: 106688 - DNA, 15 bp, Homo sapiens
aattgaggccaaagt

SEQ ID NO: 106689 - DNA, 15 bp, Homo sapiens
gaattgaggccaaag

SEQ ID NO: 106690 - DNA, 15 bp, Homo sapiens
agaattgaggccaaa

SEQ ID NO: 106691 - DNA, 15 bp, Homo sapiens
aagaattgaggccaa

SEQ ID NO: 106692 - DNA, 15 bp, Homo sapiens
gaagaattgaggcca

SEQ ID NO: 106693 - DNA, 15 bp, Homo sapiens
tgaagaattgaggcc

SEQ ID NO: 106694 - DNA, 15 bp, Homo sapiens
gtgaagaattgaggc

SEQ ID NO: 106695 - DNA, 15 bp, Homo sapiens
ggtgaagaattgagg

SEQ ID NO: 106696 - DNA, 15 bp, Homo sapiens
tggtgaagaattgag

SEQ ID NO: 106697 - DNA, 15 bp, Homo sapiens
ctggtgaagaattga

SEQ ID NO: 106698 - DNA, 15 bp, Homo sapiens
cctggtgaagaattg

SEQ ID NO: 106699 - DNA, 15 bp, Homo sapiens
tcctggtgaagaatt

SEQ ID NO: 106700 - DNA, 15 bp, Homo sapiens
ttcctggtgaagaat

SEQ ID NO: 106701 - DNA, 15 bp, Homo sapiens
attcctggtgaagaa

SEQ ID NO: 106702 - DNA, 15 bp, Homo sapiens
gattcctggtgaaga

SEQ ID NO: 106703 - DNA, 15 bp, Homo sapiens
tgattcctggtgaag

SEQ ID NO: 106704 - DNA, 15 bp, Homo sapiens
gtgattcctggtgaa

SEQ ID NO: 106705 - DNA, 15 bp, Homo sapiens
agtgattcctggtga

SEQ ID NO: 106706 - DNA, 15 bp, Homo sapiens
cagtgattcctggtg

SEQ ID NO: 106707 - DNA, 15 bp, Homo sapiens
acagtgattcctggt

SEQ ID NO: 106708 - DNA, 15 bp, Homo sapiens
cacagtgattcctgg

SEQ ID NO: 106709 - DNA, 15 bp, Homo sapiens
acacagtgattcctg

SEQ ID NO: 106710 - DNA, 15 bp, Homo sapiens
aacacagtgattcct

SEQ ID NO: 106711 - DNA, 15 bp, Homo sapiens
aaacacagtgattcc

SEQ ID NO: 106712 - DNA, 15 bp, Homo sapiens
taaacacagtgattc

SEQ ID NO: 106713 - DNA, 15 bp, Homo sapiens
gtaaacacagtgatt

SEQ ID NO: 106714 - DNA, 15 bp, Homo sapiens
tgtaaacacagtgat

SEQ ID NO: 106715 - DNA, 15 bp, Homo sapiens
atgtaaacacagtga

SEQ ID NO: 106716 - DNA, 15 bp, Homo sapiens
catgtaaacacagtg

SEQ ID NO: 106717 - DNA, 15 bp, Homo sapiens
tcatgtaaacacagt

SEQ ID NO: 106718 - DNA, 15 bp, Homo sapiens
ttcatgtaaacacag

SEQ ID NO: 106719 - DNA, 15 bp, Homo sapiens
tttcatgtaaacaca

SEQ ID NO: 106720 - DNA, 15 bp, Homo sapiens
atttcatgtaaacac

SEQ ID NO: 106721 - DNA, 15 bp, Homo sapiens
catttcatgtaaaca

SEQ ID NO: 106722 - DNA, 15 bp, Homo sapiens
tcatttcatgtaaac

SEQ ID NO: 106723 - DNA, 15 bp, Homo sapiens
gtcatttcatgtaaa

SEQ ID NO: 106724 - DNA, 15 bp, Homo sapiens
tgtcatttcatgtaa

SEQ ID NO: 106725 - DNA, 15 bp, Homo sapiens
ttgtcatttcatgta

SEQ ID NO: 106726 - DNA, 15 bp, Homo sapiens
attgtcatttcatgt

SEQ ID NO: 106727 - DNA, 15 bp, Homo sapiens
aattgtcatttcatg

SEQ ID NO: 106728 - DNA, 15 bp, Homo sapiens
aaattgtcatttcat

SEQ ID NO: 106729 - DNA, 15 bp, Homo sapiens
caaattgtcatttca

SEQ ID NO: 106730 - DNA, 15 bp, Homo sapiens
tcaaattgtcatttc

SEQ ID NO: 106731 - DNA, 15 bp, Homo sapiens
atcaaattgtcattt

SEQ ID NO: 106732 - DNA, 15 bp, Homo sapiens
tatcaaattgtcatt

SEQ ID NO: 106733 - DNA, 15 bp, Homo sapiens
gtatcaaattgtcat

SEQ ID NO: 106734 - DNA, 15 bp, Homo sapiens
agtatcaaattgtca

SEQ ID NO: 106735 - DNA, 15 bp, Homo sapiens
cagtatcaaattgtc

SEQ ID NO: 106736 - DNA, 15 bp, Homo sapiens
acagtatcaaattgt

SEQ ID NO: 106737 - DNA, 15 bp, Homo sapiens
tacagtatcaaattg

SEQ ID NO: 106738 - DNA, 15 bp, Homo sapiens
atacagtatcaaatt

SEQ ID NO: 106739 - DNA, 15 bp, Homo sapiens
aatacagtatcaaat

SEQ ID NO: 106740 - DNA, 15 bp, Homo sapiens
aaatacagtatcaaa

SEQ ID NO: 106741 - DNA, 15 bp, Homo sapiens
caaatacagtatcaa

SEQ ID NO: 106742 - DNA, 15 bp, Homo sapiens
tcaaatacagtatca

SEQ ID NO: 106743 - DNA, 15 bp, Homo sapiens
atcaaatacagtatc

SEQ ID NO: 106744 - DNA, 15 bp, Homo sapiens
tatcaaatacagtat

SEQ ID NO: 106745 - DNA, 15 bp, Homo sapiens
ctatcaaatacagta

SEQ ID NO: 106746 - DNA, 15 bp, Homo sapiens
tctatcaaatacagt

SEQ ID NO: 106747 - DNA, 15 bp, Homo sapiens
ttctatcaaatacag

SEQ ID NO: 106748 - DNA, 15 bp, Homo sapiens
tttctatcaaataca

SEQ ID NO: 106749 - DNA, 15 bp, Homo sapiens
ttttctatcaaatac

SEQ ID NO: 106750 - DNA, 15 bp, Homo sapiens
gttttctatcaaata

SEQ ID NO: 106751 - DNA, 15 bp, Homo sapiens
agttttctatcaaat

SEQ ID NO: 106752 - DNA, 15 bp, Homo sapiens
tagttttctatcaaa

SEQ ID NO: 106753 - DNA, 15 bp, Homo sapiens
atagttttctatcaa

SEQ ID NO: 106754 - DNA, 15 bp, Homo sapiens
aatagttttctatca

SEQ ID NO: 106755 - DNA, 15 bp, Homo sapiens
aaatagttttctatc

SEQ ID NO: 106756 - DNA, 15 bp, Homo sapiens
aaaatagttttctat

SEQ ID NO: 106757 - DNA, 15 bp, Homo sapiens
aaaaatagttttcta

SEQ ID NO: 106758 - DNA, 15 bp, Homo sapiens
aaaaaatagttttct

SEQ ID NO: 106759 - DNA, 15 bp, Homo sapiens
aaaaaaatagttttc

SEQ ID NO: 106760 - DNA, 15 bp, Homo sapiens
caaaaaaatagtttt

SEQ ID NO: 106761 - DNA, 15 bp, Homo sapiens
acaaaaaaatagttt

SEQ ID NO: 106762 - DNA, 15 bp, Homo sapiens
aacaaaaaaatagtt

SEQ ID NO: 106763 - DNA, 15 bp, Homo sapiens
taacaaaaaaatagt

SEQ ID NO: 106764 - DNA, 15 bp, Homo sapiens
gtaacaaaaaaatag

SEQ ID NO: 106765 - DNA, 15 bp, Homo sapiens
ggtaacaaaaaaata

SEQ ID NO: 106766 - DNA, 15 bp, Homo sapiens
cggtaacaaaaaaat

SEQ ID NO: 106767 - DNA, 15 bp, Homo sapiens
ccggtaacaaaaaaa

SEQ ID NO: 106768 - DNA, 15 bp, Homo sapiens
cccggtaacaaaaaa

SEQ ID NO: 106769 - DNA, 15 bp, Homo sapiens
ccccggtaacaaaaa

SEQ ID NO: 106770 - DNA, 15 bp, Homo sapiens
accccggtaacaaaa

SEQ ID NO: 106771 - DNA, 15 bp, Homo sapiens
aaccccggtaacaaa

SEQ ID NO: 106772 - DNA, 15 bp, Homo sapiens
aaaccccggtaacaa

SEQ ID NO: 106773 - DNA, 15 bp, Homo sapiens
taaaccccggtaaca

SEQ ID NO: 106774 - DNA, 15 bp, Homo sapiens
gtaaaccccggtaac

SEQ ID NO: 106775 - DNA, 15 bp, Homo sapiens
tgtaaaccccggtaa

SEQ ID NO: 106776 - DNA, 15 bp, Homo sapiens
atgtaaaccccggta

SEQ ID NO: 106777 - DNA, 15 bp, Homo sapiens
tatgtaaaccccggt

SEQ ID NO: 106778 - DNA, 15 bp, Homo sapiens
ctatgtaaaccccgg

SEQ ID NO: 106779 - DNA, 15 bp, Homo sapiens
tctatgtaaaccccg

SEQ ID NO: 106780 - DNA, 15 bp, Homo sapiens
ttctatgtaaacccc

SEQ ID NO: 106781 - DNA, 15 bp, Homo sapiens
cttctatgtaaaccc

SEQ ID NO: 106782 - DNA, 15 bp, Homo sapiens
gcttctatgtaaacc

SEQ ID NO: 106783 - DNA, 15 bp, Homo sapiens
tgcttctatgtaaac

SEQ ID NO: 106784 - DNA, 15 bp, Homo sapiens
gtgcttctatgtaaa

SEQ ID NO: 106785 - DNA, 15 bp, Homo sapiens
cgtgcttctatgtaa

SEQ ID NO: 106786 - DNA, 15 bp, Homo sapiens
acgtgcttctatgta

SEQ ID NO: 106787 - DNA, 15 bp, Homo sapiens
aacgtgcttctatgt

SEQ ID NO: 106788 - DNA, 15 bp, Homo sapiens
caacgtgcttctatg

SEQ ID NO: 106789 - DNA, 15 bp, Homo sapiens
acaacgtgcttctat

SEQ ID NO: 106790 - DNA, 15 bp, Homo sapiens
aacaacgtgcttcta

SEQ ID NO: 106791 - DNA, 15 bp, Homo sapiens
aaacaacgtgcttct

SEQ ID NO: 106792 - DNA, 15 bp, Homo sapiens
taaacaacgtgcttc

SEQ ID NO: 106793 - DNA, 15 bp, Homo sapiens
ataaacaacgtgctt

SEQ ID NO: 106794 - DNA, 15 bp, Homo sapiens
tataaacaacgtgct

SEQ ID NO: 106795 - DNA, 15 bp, Homo sapiens
gtataaacaacgtgc

SEQ ID NO: 106796 - DNA, 15 bp, Homo sapiens
ggtataaacaacgtg

SEQ ID NO: 106797 - DNA, 15 bp, Homo sapiens
tggtataaacaacgt

SEQ ID NO: 106798 - DNA, 15 bp, Homo sapiens
gtggtataaacaacg

SEQ ID NO: 106799 - DNA, 15 bp, Homo sapiens
agtggtataaacaac

SEQ ID NO: 106800 - DNA, 15 bp, Homo sapiens
tagtggtataaacaa

SEQ ID NO: 106801 - DNA, 15 bp, Homo sapiens
ttagtggtataaaca

SEQ ID NO: 106802 - DNA, 15 bp, Homo sapiens
cttagtggtataaac

SEQ ID NO: 106803 - DNA, 15 bp, Homo sapiens
acttagtggtataaa

SEQ ID NO: 106804 - DNA, 15 bp, Homo sapiens
cacttagtggtataa

SEQ ID NO: 106805 - DNA, 15 bp, Homo sapiens
tcacttagtggtata

SEQ ID NO: 106806 - DNA, 15 bp, Homo sapiens
gtcacttagtggtat

SEQ ID NO: 106807 - DNA, 15 bp, Homo sapiens
agtcacttagtggta

SEQ ID NO: 106808 - DNA, 15 bp, Homo sapiens
aagtcacttagtggt

SEQ ID NO: 106809 - DNA, 15 bp, Homo sapiens
aaagtcacttagtgg

SEQ ID NO: 106810 - DNA, 15 bp, Homo sapiens
caaagtcacttagtg

SEQ ID NO: 106811 - DNA, 15 bp, Homo sapiens
ccaaagtcacttagt

SEQ ID NO: 106812 - DNA, 15 bp, Homo sapiens
cccaaagtcacttag

SEQ ID NO: 106813 - DNA, 15 bp, Homo sapiens
ccccaaagtcactta

SEQ ID NO: 106814 - DNA, 15 bp, Homo sapiens
cccccaaagtcactt

SEQ ID NO: 106815 - DNA, 15 bp, Homo sapiens
ccccccaaagtcact

SEQ ID NO: 106816 - DNA, 15 bp, Homo sapiens
cccccccaaagtcac

SEQ ID NO: 106817 - DNA, 15 bp, Homo sapiens
gcccccccaaagtca

SEQ ID NO: 106818 - DNA, 15 bp, Homo sapiens
agcccccccaaagtc

SEQ ID NO: 106819 - DNA, 15 bp, Homo sapiens
gagcccccccaaagt

SEQ ID NO: 106820 - DNA, 15 bp, Homo sapiens
agagcccccccaaag

SEQ ID NO: 106821 - DNA, 15 bp, Homo sapiens
gagagcccccccaaa

SEQ ID NO: 106822 - DNA, 15 bp, Homo sapiens
ggagagcccccccaa

SEQ ID NO: 106823 - DNA, 15 bp, Homo sapiens
gggagagccccccca

SEQ ID NO: 106824 - DNA, 15 bp, Homo sapiens
tgggagagccccccc

SEQ ID NO: 106825 - DNA, 15 bp, Homo sapiens
atgggagagcccccc

SEQ ID NO: 106826 - DNA, 15 bp, Homo sapiens
catgggagagccccc

SEQ ID NO: 106827 - DNA, 15 bp, Homo sapiens
ccatgggagagcccc

SEQ ID NO: 106828 - DNA, 15 bp, Homo sapiens
tccatgggagagccc

SEQ ID NO: 106829 - DNA, 15 bp, Homo sapiens
ttccatgggagagcc

SEQ ID NO: 106830 - DNA, 15 bp, Homo sapiens
tttccatgggagagc

SEQ ID NO: 106831 - DNA, 15 bp, Homo sapiens
gtttccatgggagag

SEQ ID NO: 106832 - DNA, 15 bp, Homo sapiens
cgtttccatgggaga

SEQ ID NO: 106833 - DNA, 15 bp, Homo sapiens
ccgtttccatgggag

SEQ ID NO: 106834 - DNA, 15 bp, Homo sapiens
tccgtttccatggga

SEQ ID NO: 106835 - DNA, 15 bp, Homo sapiens
atccgtttccatggg

SEQ ID NO: 106836 - DNA, 15 bp, Homo sapiens
catccgtttccatgg

SEQ ID NO: 106837 - DNA, 15 bp, Homo sapiens
ccatccgtttccatg

SEQ ID NO: 106838 - DNA, 15 bp, Homo sapiens
gccatccgtttccat

SEQ ID NO: 106839 - DNA, 15 bp, Homo sapiens
tgccatccgtttcca

SEQ ID NO: 106840 - DNA, 15 bp, Homo sapiens
gtgccatccgtttcc

SEQ ID NO: 106841 - DNA, 15 bp, Homo sapiens
agtgccatccgtttc

SEQ ID NO: 106842 - DNA, 15 bp, Homo sapiens
gagtgccatccgttt

SEQ ID NO: 106843 - DNA, 15 bp, Homo sapiens
ggagtgccatccgtt

SEQ ID NO: 106844 - DNA, 15 bp, Homo sapiens
gggagtgccatccgt

SEQ ID NO: 106845 - DNA, 15 bp, Homo sapiens
agggagtgccatccg

SEQ ID NO: 106846 - DNA, 15 bp, Homo sapiens
cagggagtgccatcc

SEQ ID NO: 106847 - DNA, 15 bp, Homo sapiens
tcagggagtgccatc

SEQ ID NO: 106848 - DNA, 15 bp, Homo sapiens
ttcagggagtgccat

SEQ ID NO: 106849 - DNA, 15 bp, Homo sapiens
cttcagggagtgcca

SEQ ID NO: 106850 - DNA, 15 bp, Homo sapiens
gcttcagggagtgcc

SEQ ID NO: 106851 - DNA, 15 bp, Homo sapiens
agcttcagggagtgc

SEQ ID NO: 106852 - DNA, 15 bp, Homo sapiens
gagcttcagggagtg

SEQ ID NO: 106853 - DNA, 15 bp, Homo sapiens
ggagcttcagggagt

SEQ ID NO: 106854 - DNA, 15 bp, Homo sapiens
gggagcttcagggag

SEQ ID NO: 106855 - DNA, 15 bp, Homo sapiens
agggagcttcaggga

SEQ ID NO: 106856 - DNA, 15 bp, Homo sapiens
cagggagcttcaggg

SEQ ID NO: 106857 - DNA, 15 bp, Homo sapiens
ccagggagcttcagg

SEQ ID NO: 106858 - DNA, 15 bp, Homo sapiens
accagggagcttcag

SEQ ID NO: 106859 - DNA, 15 bp, Homo sapiens
gaccagggagcttca

SEQ ID NO: 106860 - DNA, 15 bp, Homo sapiens
tgaccagggagcttc

SEQ ID NO: 106861 - DNA, 15 bp, Homo sapiens
gtgaccagggagctt

SEQ ID NO: 106862 - DNA, 15 bp, Homo sapiens
tgtgaccagggagct

SEQ ID NO: 106863 - DNA, 15 bp, Homo sapiens
ctgtgaccagggagc

SEQ ID NO: 106864 - DNA, 15 bp, Homo sapiens
cctgtgaccagggag

SEQ ID NO: 106865 - DNA, 15 bp, Homo sapiens
acctgtgaccaggga

SEQ ID NO: 106866 - DNA, 15 bp, Homo sapiens
cacctgtgaccaggg

SEQ ID NO: 106867 - DNA, 15 bp, Homo sapiens
ccacctgtgaccagg

SEQ ID NO: 106868 - DNA, 15 bp, Homo sapiens
tccacctgtgaccag

SEQ ID NO: 106869 - DNA, 15 bp, Homo sapiens
atccacctgtgacca

SEQ ID NO: 106870 - DNA, 15 bp, Homo sapiens
catccacctgtgacc

SEQ ID NO: 106871 - DNA, 15 bp, Homo sapiens
tcatccacctgtgac

SEQ ID NO: 106872 - DNA, 15 bp, Homo sapiens
ttcatccacctgtga

SEQ ID NO: 106873 - DNA, 15 bp, Homo sapiens
tttcatccacctgtg

SEQ ID NO: 106874 - DNA, 15 bp, Homo sapiens
ttttcatccacctgt

SEQ ID NO: 106875 - DNA, 15 bp, Homo sapiens
gttttcatccacctg

SEQ ID NO: 106876 - DNA, 15 bp, Homo sapiens
cgttttcatccacct

SEQ ID NO: 106877 - DNA, 15 bp, Homo sapiens
acgttttcatccacc

SEQ ID NO: 106878 - DNA, 15 bp, Homo sapiens
cacgttttcatccac

SEQ ID NO: 106879 - DNA, 15 bp, Homo sapiens
acacgttttcatcca

SEQ ID NO: 106880 - DNA, 15 bp, Homo sapiens
gacacgttttcatcc

SEQ ID NO: 106881 - DNA, 15 bp, Homo sapiens
ggacacgttttcatc

SEQ ID NO: 106882 - DNA, 15 bp, Homo sapiens
cggacacgttttcat

SEQ ID NO: 106883 - DNA, 15 bp, Homo sapiens
acggacacgttttca

SEQ ID NO: 106884 - DNA, 15 bp, Homo sapiens
cacggacacgttttc

SEQ ID NO: 106885 - DNA, 15 bp, Homo sapiens
ccacggacacgtttt

SEQ ID NO: 106886 - DNA, 15 bp, Homo sapiens
cccacggacacgttt

SEQ ID NO: 106887 - DNA, 15 bp, Homo sapiens
acccacggacacgtt

SEQ ID NO: 106888 - DNA, 15 bp, Homo sapiens
cacccacggacacgt

SEQ ID NO: 106889 - DNA, 15 bp, Homo sapiens
tcacccacggacacg

SEQ ID NO: 106890 - DNA, 15 bp, Homo sapiens
gtcacccacggacac

SEQ ID NO: 106891 - DNA, 15 bp, Homo sapiens
tgtcacccacggaca

SEQ ID NO: 106892 - DNA, 15 bp, Homo sapiens
atgtcacccacggac

SEQ ID NO: 106893 - DNA, 15 bp, Homo sapiens
gatgtcacccacgga

SEQ ID NO: 106894 - DNA, 15 bp, Homo sapiens
tgatgtcacccacgg

SEQ ID NO: 106895 - DNA, 15 bp, Homo sapiens
ctgatgtcacccacg

SEQ ID NO: 106896 - DNA, 15 bp, Homo sapiens
cctgatgtcacccac

SEQ ID NO: 106897 - DNA, 15 bp, Homo sapiens
acctgatgtcaccca

SEQ ID NO: 106898 - DNA, 15 bp, Homo sapiens
cacctgatgtcaccc

SEQ ID NO: 106899 - DNA, 15 bp, Homo sapiens
ccacctgatgtcacc

SEQ ID NO: 106900 - DNA, 15 bp, Homo sapiens
accacctgatgtcac

SEQ ID NO: 106901 - DNA, 15 bp, Homo sapiens
caccacctgatgtca

SEQ ID NO: 106902 - DNA, 15 bp, Homo sapiens
acaccacctgatgtc

SEQ ID NO: 106903 - DNA, 15 bp, Homo sapiens
gacaccacctgatgt

SEQ ID NO: 106904 - DNA, 15 bp, Homo sapiens
agacaccacctgatg

SEQ ID NO: 106905 - DNA, 15 bp, Homo sapiens
gagacaccacctgat

SEQ ID NO: 106906 - DNA, 15 bp, Homo sapiens
ggagacaccacctga

SEQ ID NO: 106907 - DNA, 15 bp, Homo sapiens
tggagacaccacctg

SEQ ID NO: 106908 - DNA, 15 bp, Homo sapiens
gtggagacaccacct

SEQ ID NO: 106909 - DNA, 15 bp, Homo sapiens
ggtggagacaccacc

SEQ ID NO: 106910 - DNA, 15 bp, Homo sapiens
tggtggagacaccac

SEQ ID NO: 106911 - DNA, 15 bp, Homo sapiens
gtggtggagacacca

SEQ ID NO: 106912 - DNA, 15 bp, Homo sapiens
ggtggtggagacacc

SEQ ID NO: 106913 - DNA, 15 bp, Homo sapiens
tggtggtggagacac

SEQ ID NO: 106914 - DNA, 15 bp, Homo sapiens
ttggtggtggagaca

SEQ ID NO: 106915 - DNA, 15 bp, Homo sapiens
tttggtggtggagac

SEQ ID NO: 106916 - DNA, 15 bp, Homo sapiens
ttttggtggtggaga

SEQ ID NO: 106917 - DNA, 15 bp, Homo sapiens
cttttggtggtggag

SEQ ID NO: 106918 - DNA, 15 bp, Homo sapiens
gcttttggtggtgga

SEQ ID NO: 106919 - DNA, 15 bp, Homo sapiens
tgcttttggtggtgg

SEQ ID NO: 106920 - DNA, 15 bp, Homo sapiens
ctgcttttggtggtg

SEQ ID NO: 106921 - DNA, 15 bp, Homo sapiens
actgcttttggtggt

SEQ ID NO: 106922 - DNA, 15 bp, Homo sapiens
aactgcttttggtgg

SEQ ID NO: 106923 - DNA, 15 bp, Homo sapiens
taactgcttttggtg

SEQ ID NO: 106924 - DNA, 15 bp, Homo sapiens
ctaactgcttttggt

SEQ ID NO: 106925 - DNA, 15 bp, Homo sapiens
tctaactgcttttgg

SEQ ID NO: 106926 - DNA, 15 bp, Homo sapiens
ttctaactgcttttg

SEQ ID NO: 106927 - DNA, 15 bp, Homo sapiens
cttctaactgctttt

SEQ ID NO: 106928 - DNA, 15 bp, Homo sapiens
gcttctaactgcttt

SEQ ID NO: 106929 - DNA, 15 bp, Homo sapiens
ggcttctaactgctt

SEQ ID NO: 106930 - DNA, 15 bp, Homo sapiens
tggcttctaactgct

SEQ ID NO: 106931 - DNA, 15 bp, Homo sapiens
ttggcttctaactgc

SEQ ID NO: 106932 - DNA, 15 bp, Homo sapiens
cttggcttctaactg

SEQ ID NO: 106933 - DNA, 15 bp, Homo sapiens
ccttggcttctaact

SEQ ID NO: 106934 - DNA, 15 bp, Homo sapiens
tccttggcttctaac

SEQ ID NO: 106935 - DNA, 15 bp, Homo sapiens
ctccttggcttctaa

SEQ ID NO: 106936 - DNA, 15 bp, Homo sapiens
tctccttggcttcta

SEQ ID NO: 106937 - DNA, 15 bp, Homo sapiens
atctccttggcttct

SEQ ID NO: 106938 - DNA, 15 bp, Homo sapiens
aatctccttggcttc

SEQ ID NO: 106939 - DNA, 15 bp, Homo sapiens
gaatctccttggctt

SEQ ID NO: 106940 - DNA, 15 bp, Homo sapiens
ggaatctccttggct

SEQ ID NO: 106941 - DNA, 15 bp, Homo sapiens
aggaatctccttggc

SEQ ID NO: 106942 - DNA, 15 bp, Homo sapiens
aaggaatctccttgg

SEQ ID NO: 106943 - DNA, 15 bp, Homo sapiens
aaaggaatctccttg

SEQ ID NO: 106944 - DNA, 15 bp, Homo sapiens
taaaggaatctcctt

SEQ ID NO: 106945 - DNA, 15 bp, Homo sapiens
ataaaggaatctcct

SEQ ID NO: 106946 - DNA, 15 bp, Homo sapiens
gataaaggaatctcc

SEQ ID NO: 106947 - DNA, 15 bp, Homo sapiens
agataaaggaatctc

SEQ ID NO: 106948 - DNA, 15 bp, Homo sapiens
tagataaaggaatct

SEQ ID NO: 106949 - DNA, 15 bp, Homo sapiens
gtagataaaggaatc

SEQ ID NO: 106950 - DNA, 15 bp, Homo sapiens
ggtagataaaggaat

SEQ ID NO: 106951 - DNA, 15 bp, Homo sapiens
aggtagataaaggaa

SEQ ID NO: 106952 - DNA, 15 bp, Homo sapiens
taggtagataaagga

SEQ ID NO: 106953 - DNA, 15 bp, Homo sapiens
ctaggtagataaagg

SEQ ID NO: 106954 - DNA, 15 bp, Homo sapiens
cctaggtagataaag

SEQ ID NO: 106955 - DNA, 15 bp, Homo sapiens
ccctaggtagataaa

SEQ ID NO: 106956 - DNA, 15 bp, Homo sapiens
accctaggtagataa

SEQ ID NO: 106957 - DNA, 15 bp, Homo sapiens
aaccctaggtagata

SEQ ID NO: 106958 - DNA, 15 bp, Homo sapiens
gaaccctaggtagat

SEQ ID NO: 106959 - DNA, 15 bp, Homo sapiens
tgaaccctaggtaga

SEQ ID NO: 106960 - DNA, 15 bp, Homo sapiens
atgaaccctaggtag

SEQ ID NO: 106961 - DNA, 15 bp, Homo sapiens
aatgaaccctaggta

SEQ ID NO: 106962 - DNA, 15 bp, Homo sapiens
aaatgaaccctaggt

SEQ ID NO: 106963 - DNA, 15 bp, Homo sapiens
aaaatgaaccctagg

SEQ ID NO: 106964 - DNA, 15 bp, Homo sapiens
gaaaatgaaccctag

SEQ ID NO: 106965 - DNA, 15 bp, Homo sapiens
tgaaaatgaacccta

SEQ ID NO: 106966 - DNA, 15 bp, Homo sapiens
ttgaaaatgaaccct

SEQ ID NO: 106967 - DNA, 15 bp, Homo sapiens
tttgaaaatgaaccc

SEQ ID NO: 106968 - DNA, 15 bp, Homo sapiens
ttttgaaaatgaacc

SEQ ID NO: 106969 - DNA, 15 bp, Homo sapiens
cttttgaaaatgaac

SEQ ID NO: 106970 - DNA, 15 bp, Homo sapiens
tcttttgaaaatgaa

SEQ ID NO: 106971 - DNA, 15 bp, Homo sapiens
ttcttttgaaaatga

SEQ ID NO: 106972 - DNA, 15 bp, Homo sapiens
tttcttttgaaaatg

SEQ ID NO: 106973 - DNA, 15 bp, Homo sapiens
ttttcttttgaaaat

SEQ ID NO: 106974 - DNA, 15 bp, Homo sapiens
attttcttttgaaaa

SEQ ID NO: 106975 - DNA, 15 bp, Homo sapiens
aattttcttttgaaa

SEQ ID NO: 106976 - DNA, 15 bp, Homo sapiens
aaattttcttttgaa

SEQ ID NO: 106977 - DNA, 15 bp, Homo sapiens
taaattttcttttga

SEQ ID NO: 106978 - DNA, 15 bp, Homo sapiens
ttaaattttcttttg

SEQ ID NO: 106979 - DNA, 15 bp, Homo sapiens
tttaaattttctttt

SEQ ID NO: 106980 - DNA, 15 bp, Homo sapiens
gtttaaattttcttt

SEQ ID NO: 106981 - DNA, 15 bp, Homo sapiens
agtttaaattttctt

SEQ ID NO: 106982 - DNA, 15 bp, Homo sapiens
tagtttaaattttct

SEQ ID NO: 106983 - DNA, 15 bp, Homo sapiens
atagtttaaattttc

SEQ ID NO: 106984 - DNA, 15 bp, Homo sapiens
tatagtttaaatttt

SEQ ID NO: 106985 - DNA, 15 bp, Homo sapiens
ttatagtttaaattt

SEQ ID NO: 106986 - DNA, 15 bp, Homo sapiens
attatagtttaaatt

SEQ ID NO: 106987 - DNA, 15 bp, Homo sapiens
aattatagtttaaat

SEQ ID NO: 106988 - DNA, 15 bp, Homo sapiens
aaattatagtttaaa

SEQ ID NO: 106989 - DNA, 15 bp, Homo sapiens
taaattatagtttaa

SEQ ID NO: 106990 - DNA, 15 bp, Homo sapiens
ttaaattatagttta

SEQ ID NO: 106991 - DNA, 15 bp, Homo sapiens
tttaaattatagttt

SEQ ID NO: 106992 - DNA, 15 bp, Homo sapiens
gtttaaattatagtt

SEQ ID NO: 106993 - DNA, 15 bp, Homo sapiens
tgtttaaattatagt

SEQ ID NO: 106994 - DNA, 15 bp, Homo sapiens
ttgtttaaattatag

SEQ ID NO: 106995 - DNA, 15 bp, Homo sapiens
attgtttaaattata

SEQ ID NO: 106996 - DNA, 15 bp, Homo sapiens
aattgtttaaattat

SEQ ID NO: 106997 - DNA, 15 bp, Homo sapiens
taattgtttaaatta

SEQ ID NO: 106998 - DNA, 15 bp, Homo sapiens
ttaattgtttaaatt

SEQ ID NO: 106999 - DNA, 15 bp, Homo sapiens
gttaattgtttaaat

SEQ ID NO: 107000 - DNA, 15 bp, Homo sapiens
cgttaattgtttaaa

SEQ ID NO: 107001 - DNA, 15 bp, Homo sapiens
acgttaattgtttaa

SEQ ID NO: 107002 - DNA, 15 bp, Homo sapiens
aacgttaattgttta

SEQ ID NO: 107003 - DNA, 15 bp, Homo sapiens
gaacgttaattgttt

SEQ ID NO: 107004 - DNA, 15 bp, Homo sapiens
agaacgttaattgtt

SEQ ID NO: 107005 - DNA, 15 bp, Homo sapiens
aagaacgttaattgt

SEQ ID NO: 107006 - DNA, 15 bp, Homo sapiens
aaagaacgttaattg

SEQ ID NO: 107007 - DNA, 15 bp, Homo sapiens
aaaagaacgttaatt

SEQ ID NO: 107008 - DNA, 15 bp, Homo sapiens
gaaaagaacgttaat

SEQ ID NO: 107009 - DNA, 15 bp, Homo sapiens
agaaaagaacgttaa

SEQ ID NO: 107010 - DNA, 15 bp, Homo sapiens
tagaaaagaacgtta

SEQ ID NO: 107011 - DNA, 15 bp, Homo sapiens
gtagaaaagaacgtt

SEQ ID NO: 107012 - DNA, 15 bp, Homo sapiens
tgtagaaaagaacgt

SEQ ID NO: 107013 - DNA, 15 bp, Homo sapiens
ttgtagaaaagaacg

SEQ ID NO: 107014 - DNA, 15 bp, Homo sapiens
tttgtagaaaagaac

SEQ ID NO: 107015 - DNA, 15 bp, Homo sapiens
ttttgtagaaaagaa

SEQ ID NO: 107016 - DNA, 15 bp, Homo sapiens
tttttgtagaaaaga

SEQ ID NO: 107017 - DNA, 15 bp, Homo sapiens
ttttttgtagaaaag

SEQ ID NO: 107018 - DNA, 15 bp, Homo sapiens
tttttttgtagaaaa

SEQ ID NO: 107019 - DNA, 15 bp, Homo sapiens
ttttttttgtagaaa

SEQ ID NO: 107020 - DNA, 15 bp, Homo sapiens
attttttttgtagaa

SEQ ID NO: 107021 - DNA, 15 bp, Homo sapiens
cattttttttgtaga

SEQ ID NO: 107022 - DNA, 15 bp, Homo sapiens
gcattttttttgtag

SEQ ID NO: 107023 - DNA, 15 bp, Homo sapiens
tgcattttttttgta

SEQ ID NO: 107024 - DNA, 15 bp, Homo sapiens
ctgcattttttttgt

SEQ ID NO: 107025 - DNA, 15 bp, Homo sapiens
cctgcattttttttg

SEQ ID NO: 107026 - DNA, 15 bp, Homo sapiens
ccctgcatttttttt

SEQ ID NO: 107027 - DNA, 15 bp, Homo sapiens
tccctgcattttttt

SEQ ID NO: 107028 - DNA, 15 bp, Homo sapiens
gtccctgcatttttt

SEQ ID NO: 107029 - DNA, 15 bp, Homo sapiens
agtccctgcattttt

SEQ ID NO: 107030 - DNA, 15 bp, Homo sapiens
aagtccctgcatttt

SEQ ID NO: 107031 - DNA, 15 bp, Homo sapiens
caagtccctgcattt

SEQ ID NO: 107032 - DNA, 15 bp, Homo sapiens
tcaagtccctgcatt

SEQ ID NO: 107033 - DNA, 15 bp, Homo sapiens
atcaagtccctgcat

SEQ ID NO: 107034 - DNA, 15 bp, Homo sapiens
aatcaagtccctgca

SEQ ID NO: 107035 - DNA, 15 bp, Homo sapiens
aaatcaagtccctgc

SEQ ID NO: 107036 - DNA, 15 bp, Homo sapiens
aaaatcaagtccctg

SEQ ID NO: 107037 - DNA, 15 bp, Homo sapiens
aaaaatcaagtccct

SEQ ID NO: 107038 - DNA, 15 bp, Homo sapiens
aaaaaatcaagtccc

SEQ ID NO: 107039 - DNA, 15 bp, Homo sapiens
aaaaaaatcaagtcc

SEQ ID NO: 107040 - DNA, 15 bp, Homo sapiens
taaaaaaatcaagtc

SEQ ID NO: 107041 - DNA, 15 bp, Homo sapiens
ttaaaaaaatcaagt

SEQ ID NO: 107042 - DNA, 15 bp, Homo sapiens
tttaaaaaaatcaag

SEQ ID NO: 107043 - DNA, 15 bp, Homo sapiens
ctttaaaaaaatcaa

SEQ ID NO: 107044 - DNA, 15 bp, Homo sapiens
tctttaaaaaaatca

SEQ ID NO: 107045 - DNA, 15 bp, Homo sapiens
ctctttaaaaaaatc

SEQ ID NO: 107046 - DNA, 15 bp, Homo sapiens
gctctttaaaaaaat

SEQ ID NO: 107047 - DNA, 15 bp, Homo sapiens
agctctttaaaaaaa

SEQ ID NO: 107048 - DNA, 15 bp, Homo sapiens
aagctctttaaaaaa

SEQ ID NO: 107049 - DNA, 15 bp, Homo sapiens
gaagctctttaaaaa

SEQ ID NO: 107050 - DNA, 15 bp, Homo sapiens
tgaagctctttaaaa

SEQ ID NO: 107051 - DNA, 15 bp, Homo sapiens
gtgaagctctttaaa

SEQ ID NO: 107052 - DNA, 15 bp, Homo sapiens
agtgaagctctttaa

SEQ ID NO: 107053 - DNA, 15 bp, Homo sapiens
cagtgaagctcttta

SEQ ID NO: 107054 - DNA, 15 bp, Homo sapiens
tcagtgaagctcttt

SEQ ID NO: 107055 - DNA, 15 bp, Homo sapiens
ttcagtgaagctctt

SEQ ID NO: 107056 - DNA, 15 bp, Homo sapiens
attcagtgaagctct

SEQ ID NO: 107057 - DNA, 15 bp, Homo sapiens
aattcagtgaagctc

SEQ ID NO: 107058 - DNA, 15 bp, Homo sapiens
taattcagtgaagct

SEQ ID NO: 107059 - DNA, 15 bp, Homo sapiens
ctaattcagtgaagc

SEQ ID NO: 107060 - DNA, 15 bp, Homo sapiens
cctaattcagtgaag

SEQ ID NO: 107061 - DNA, 15 bp, Homo sapiens
tcctaattcagtgaa

SEQ ID NO: 107062 - DNA, 15 bp, Homo sapiens
atcctaattcagtga

SEQ ID NO: 107063 - DNA, 15 bp, Homo sapiens
tatcctaattcagtg

SEQ ID NO: 107064 - DNA, 15 bp, Homo sapiens
atatcctaattcagt

SEQ ID NO: 107065 - DNA, 15 bp, Homo sapiens
aatatcctaattcag

SEQ ID NO: 107066 - DNA, 15 bp, Homo sapiens
aaatatcctaattca

SEQ ID NO: 107067 - DNA, 15 bp, Homo sapiens
aaaatatcctaattc

SEQ ID NO: 107068 - DNA, 15 bp, Homo sapiens
aaaaatatcctaatt

SEQ ID NO: 107069 - DNA, 15 bp, Homo sapiens
taaaaatatcctaat

SEQ ID NO: 107070 - DNA, 15 bp, Homo sapiens
ataaaaatatcctaa

SEQ ID NO: 107071 - DNA, 15 bp, Homo sapiens
aataaaaatatccta

SEQ ID NO: 107072 - DNA, 15 bp, Homo sapiens
caataaaaatatcct

SEQ ID NO: 107073 - DNA, 15 bp, Homo sapiens
gcaataaaaatatcc

SEQ ID NO: 107074 - DNA, 15 bp, Homo sapiens
agcaataaaaatatc

SEQ ID NO: 107075 - DNA, 15 bp, Homo sapiens
aagcaataaaaatat

SEQ ID NO: 107076 - DNA, 15 bp, Homo sapiens
aaagcaataaaaata

SEQ ID NO: 107077 - DNA, 15 bp, Homo sapiens
aaaagcaataaaaat

SEQ ID NO: 107078 - DNA, 15 bp, Homo sapiens
taaaagcaataaaaa

SEQ ID NO: 107079 - DNA, 15 bp, Homo sapiens
ttaaaagcaataaaa

SEQ ID NO: 107080 - DNA, 15 bp, Homo sapiens
tttaaaagcaataaa

SEQ ID NO: 107081 - DNA, 15 bp, Homo sapiens
ctttaaaagcaataa

SEQ ID NO: 107082 - DNA, 15 bp, Homo sapiens
tctttaaaagcaata

SEQ ID NO: 107083 - DNA, 15 bp, Homo sapiens
ttctttaaaagcaat

SEQ ID NO: 107084 - DNA, 15 bp, Homo sapiens
tttctttaaaagcaa

SEQ ID NO: 107085 - DNA, 15 bp, Homo sapiens
ttttctttaaaagca

SEQ ID NO: 107086 - DNA, 15 bp, Homo sapiens
attttctttaaaagc

SEQ ID NO: 107087 - DNA, 15 bp, Homo sapiens
tattttctttaaaag

SEQ ID NO: 107088 - DNA, 15 bp, Homo sapiens
gtattttctttaaaa

SEQ ID NO: 107089 - DNA, 15 bp, Homo sapiens
tgtattttctttaaa

SEQ ID NO: 107090 - DNA, 15 bp, Homo sapiens
ttgtattttctttaa

SEQ ID NO: 107091 - DNA, 15 bp, Homo sapiens
tttgtattttcttta

SEQ ID NO: 107092 - DNA, 15 bp, Homo sapiens
ctttgtattttcttt

SEQ ID NO: 107093 - DNA, 15 bp, Homo sapiens
tctttgtattttctt

SEQ ID NO: 107094 - DNA, 15 bp, Homo sapiens
atctttgtattttct

SEQ ID NO: 107095 - DNA, 15 bp, Homo sapiens
catctttgtattttc

SEQ ID NO: 107096 - DNA, 15 bp, Homo sapiens
gcatctttgtatttt

SEQ ID NO: 107097 - DNA, 15 bp, Homo sapiens
tgcatctttgtattt

SEQ ID NO: 107098 - DNA, 15 bp, Homo sapiens
ctgcatctttgtatt

SEQ ID NO: 107099 - DNA, 15 bp, Homo sapiens
actgcatctttgtat

SEQ ID NO: 107100 - DNA, 15 bp, Homo sapiens
aactgcatctttgta

SEQ ID NO: 107101 - DNA, 15 bp, Homo sapiens
aaactgcatctttgt

SEQ ID NO: 107102 - DNA, 15 bp, Homo sapiens
gaaactgcatctttg

SEQ ID NO: 107103 - DNA, 15 bp, Homo sapiens
agaaactgcatcttt

SEQ ID NO: 107104 - DNA, 15 bp, Homo sapiens
cagaaactgcatctt

SEQ ID NO: 107105 - DNA, 15 bp, Homo sapiens
gcagaaactgcatct

SEQ ID NO: 107106 - DNA, 15 bp, Homo sapiens
tgcagaaactgcatc

SEQ ID NO: 107107 - DNA, 15 bp, Homo sapiens
ctgcagaaactgcat

SEQ ID NO: 107108 - DNA, 15 bp, Homo sapiens
cctgcagaaactgca

SEQ ID NO: 107109 - DNA, 15 bp, Homo sapiens
ccctgcagaaactgc

SEQ ID NO: 107110 - DNA, 15 bp, Homo sapiens
accctgcagaaactg

SEQ ID NO: 107111 - DNA, 15 bp, Homo sapiens
caccctgcagaaact

SEQ ID NO: 107112 - DNA, 15 bp, Homo sapiens
acaccctgcagaaac

SEQ ID NO: 107113 - DNA, 15 bp, Homo sapiens
cacaccctgcagaaa

SEQ ID NO: 107114 - DNA, 15 bp, Homo sapiens
ccacaccctgcagaa

SEQ ID NO: 107115 - DNA, 15 bp, Homo sapiens
gccacaccctgcaga

SEQ ID NO: 107116 - DNA, 15 bp, Homo sapiens
cgccacaccctgcag

SEQ ID NO: 107117 - DNA, 15 bp, Homo sapiens
acgccacaccctgca

SEQ ID NO: 107118 - DNA, 15 bp, Homo sapiens
cacgccacaccctgc

SEQ ID NO: 107119 - DNA, 15 bp, Homo sapiens
ccacgccacaccctg

SEQ ID NO: 107120 - DNA, 15 bp, Homo sapiens
tccacgccacaccct

SEQ ID NO: 107121 - DNA, 15 bp, Homo sapiens
gtccacgccacaccc

SEQ ID NO: 107122 - DNA, 15 bp, Homo sapiens
ggtccacgccacacc

SEQ ID NO: 107123 - DNA, 15 bp, Homo sapiens
tggtccacgccacac

SEQ ID NO: 107124 - DNA, 15 bp, Homo sapiens
ctggtccacgccaca

SEQ ID NO: 107125 - DNA, 15 bp, Homo sapiens
actggtccacgccac

SEQ ID NO: 107126 - DNA, 15 bp, Homo sapiens
cactggtccacgcca

SEQ ID NO: 107127 - DNA, 15 bp, Homo sapiens
gcactggtccacgcc

SEQ ID NO: 107128 - DNA, 15 bp, Homo sapiens
agcactggtccacgc

SEQ ID NO: 107129 - DNA, 15 bp, Homo sapiens
cagcactggtccacg

SEQ ID NO: 107130 - DNA, 15 bp, Homo sapiens
gcagcactggtccac

SEQ ID NO: 107131 - DNA, 15 bp, Homo sapiens
ggcagcactggtcca

SEQ ID NO: 107132 - DNA, 15 bp, Homo sapiens
cggcagcactggtcc

SEQ ID NO: 107133 - DNA, 15 bp, Homo sapiens
tcggcagcactggtc

SEQ ID NO: 107134 - DNA, 15 bp, Homo sapiens
gtcggcagcactggt

SEQ ID NO: 107135 - DNA, 15 bp, Homo sapiens
ggtcggcagcactgg

SEQ ID NO: 107136 - DNA, 15 bp, Homo sapiens
tggtcggcagcactg

SEQ ID NO: 107137 - DNA, 15 bp, Homo sapiens
atggtcggcagcact

SEQ ID NO: 107138 - DNA, 15 bp, Homo sapiens
tatggtcggcagcac

SEQ ID NO: 107139 - DNA, 15 bp, Homo sapiens
ctatggtcggcagca

SEQ ID NO: 107140 - DNA, 15 bp, Homo sapiens
gctatggtcggcagc

SEQ ID NO: 107141 - DNA, 15 bp, Homo sapiens
agctatggtcggcag

SEQ ID NO: 107142 - DNA, 15 bp, Homo sapiens
gagctatggtcggca

SEQ ID NO: 107143 - DNA, 15 bp, Homo sapiens
tgagctatggtcggc

SEQ ID NO: 107144 - DNA, 15 bp, Homo sapiens
ctgagctatggtcgg

SEQ ID NO: 107145 - DNA, 15 bp, Homo sapiens
tctgagctatggtcg

SEQ ID NO: 107146 - DNA, 15 bp, Homo sapiens
ctctgagctatggtc

SEQ ID NO: 107147 - DNA, 15 bp, Homo sapiens
tctctgagctatggt

SEQ ID NO: 107148 - DNA, 15 bp, Homo sapiens
ctctctgagctatgg

SEQ ID NO: 107149 - DNA, 15 bp, Homo sapiens
gctctctgagctatg

SEQ ID NO: 107150 - DNA, 15 bp, Homo sapiens
ggctctctgagctat

SEQ ID NO: 107151 - DNA, 15 bp, Homo sapiens
gggctctctgagcta

SEQ ID NO: 107152 - DNA, 15 bp, Homo sapiens
agggctctctgagct

SEQ ID NO: 107153 - DNA, 15 bp, Homo sapiens
cagggctctctgagc

SEQ ID NO: 107154 - DNA, 15 bp, Homo sapiens
gcagggctctctgag

SEQ ID NO: 107155 - DNA, 15 bp, Homo sapiens
ggcagggctctctga

SEQ ID NO: 107156 - DNA, 15 bp, Homo sapiens
gggcagggctctctg

SEQ ID NO: 107157 - DNA, 15 bp, Homo sapiens
ggggcagggctctct

SEQ ID NO: 107158 - DNA, 15 bp, Homo sapiens
aggggcagggctctc

SEQ ID NO: 107159 - DNA, 15 bp, Homo sapiens
caggggcagggctct

SEQ ID NO: 107160 - DNA, 15 bp, Homo sapiens
gcaggggcagggctc

SEQ ID NO: 107161 - DNA, 15 bp, Homo sapiens
ggcaggggcagggct

SEQ ID NO: 107162 - DNA, 15 bp, Homo sapiens
aggcaggggcagggc

SEQ ID NO: 107163 - DNA, 15 bp, Homo sapiens
gaggcaggggcaggg

SEQ ID NO: 107164 - DNA, 15 bp, Homo sapiens
tgaggcaggggcagg

SEQ ID NO: 107165 - DNA, 15 bp, Homo sapiens
gtgaggcaggggcag

SEQ ID NO: 107166 - DNA, 15 bp, Homo sapiens
agtgaggcaggggca

SEQ ID NO: 107167 - DNA, 15 bp, Homo sapiens
cagtgaggcaggggc

SEQ ID NO: 107168 - DNA, 15 bp, Homo sapiens
gcagtgaggcagggg

SEQ ID NO: 107169 - DNA, 15 bp, Homo sapiens
tgcagtgaggcaggg

SEQ ID NO: 107170 - DNA, 15 bp, Homo sapiens
gtgcagtgaggcagg

SEQ ID NO: 107171 - DNA, 15 bp, Homo sapiens
agtgcagtgaggcag

SEQ ID NO: 107172 - DNA, 15 bp, Homo sapiens
cagtgcagtgaggca

SEQ ID NO: 107173 - DNA, 15 bp, Homo sapiens
gcagtgcagtgaggc

SEQ ID NO: 107174 - DNA, 15 bp, Homo sapiens
tgcagtgcagtgagg

SEQ ID NO: 107175 - DNA, 15 bp, Homo sapiens
ctgcagtgcagtgag

SEQ ID NO: 107176 - DNA, 15 bp, Homo sapiens
gctgcagtgcagtga

SEQ ID NO: 107177 - DNA, 15 bp, Homo sapiens
ggctgcagtgcagtg

SEQ ID NO: 107178 - DNA, 15 bp, Homo sapiens
aggctgcagtgcagt

SEQ ID NO: 107179 - DNA, 15 bp, Homo sapiens
gaggctgcagtgcag

SEQ ID NO: 107180 - DNA, 15 bp, Homo sapiens
ggaggctgcagtgca

SEQ ID NO: 107181 - DNA, 15 bp, Homo sapiens
aggaggctgcagtgc

SEQ ID NO: 107182 - DNA, 15 bp, Homo sapiens
gaggaggctgcagtg

SEQ ID NO: 107183 - DNA, 15 bp, Homo sapiens
cgaggaggctgcagt

SEQ ID NO: 107184 - DNA, 15 bp, Homo sapiens
ccgaggaggctgcag

SEQ ID NO: 107185 - DNA, 15 bp, Homo sapiens
tccgaggaggctgca

SEQ ID NO: 107186 - DNA, 15 bp, Homo sapiens
ctccgaggaggctgc

SEQ ID NO: 107187 - DNA, 15 bp, Homo sapiens
cctccgaggaggctg

SEQ ID NO: 107188 - DNA, 15 bp, Homo sapiens
gcctccgaggaggct

SEQ ID NO: 107189 - DNA, 15 bp, Homo sapiens
ggcctccgaggaggc

SEQ ID NO: 107190 - DNA, 15 bp, Homo sapiens
cggcctccgaggagg

SEQ ID NO: 107191 - DNA, 15 bp, Homo sapiens
gcggcctccgaggag

SEQ ID NO: 107192 - DNA, 15 bp, Homo sapiens
tgcggcctccgagga

SEQ ID NO: 107193 - DNA, 15 bp, Homo sapiens
gtgcggcctccgagg

SEQ ID NO: 107194 - DNA, 15 bp, Homo sapiens
ggtgcggcctccgag

SEQ ID NO: 107195 - DNA, 15 bp, Homo sapiens
aggtgcggcctccga

SEQ ID NO: 107196 - DNA, 15 bp, Homo sapiens
gaggtgcggcctccg

SEQ ID NO: 107197 - DNA, 15 bp, Homo sapiens
ggaggtgcggcctcc

SEQ ID NO: 107198 - DNA, 15 bp, Homo sapiens
tggaggtgcggcctc

SEQ ID NO: 107199 - DNA, 15 bp, Homo sapiens
gtggaggtgcggcct

SEQ ID NO: 107200 - DNA, 15 bp, Homo sapiens
agtggaggtgcggcc

SEQ ID NO: 107201 - DNA, 15 bp, Homo sapiens
gagtggaggtgcggc

SEQ ID NO: 107202 - DNA, 15 bp, Homo sapiens
ggagtggaggtgcgg

SEQ ID NO: 107203 - DNA, 15 bp, Homo sapiens
tggagtggaggtgcg

SEQ ID NO: 107204 - DNA, 15 bp, Homo sapiens
gtggagtggaggtgc

SEQ ID NO: 107205 - DNA, 15 bp, Homo sapiens
agtggagtggaggtg

SEQ ID NO: 107206 - DNA, 15 bp, Homo sapiens
gagtggagtggaggt

SEQ ID NO: 107207 - DNA, 15 bp, Homo sapiens
ggagtggagtggagg

SEQ ID NO: 107208 - DNA, 15 bp, Homo sapiens
gggagtggagtggag

SEQ ID NO: 107209 - DNA, 15 bp, Homo sapiens
ggggagtggagtgga

SEQ ID NO: 107210 - DNA, 15 bp, Homo sapiens
tggggagtggagtgg

SEQ ID NO: 107211 - DNA, 15 bp, Homo sapiens
gtggggagtggagtg

SEQ ID NO: 107212 - DNA, 15 bp, Homo sapiens
cgtggggagtggagt

SEQ ID NO: 107213 - DNA, 15 bp, Homo sapiens
gcgtggggagtggag

SEQ ID NO: 107214 - DNA, 15 bp, Homo sapiens
cgcgtggggagtgga

SEQ ID NO: 107215 - DNA, 15 bp, Homo sapiens
gcgcgtggggagtgg

SEQ ID NO: 107216 - DNA, 15 bp, Homo sapiens
ggcgcgtggggagtg

SEQ ID NO: 107217 - DNA, 15 bp, Homo sapiens
gggcgcgtggggagt

SEQ ID NO: 107218 - DNA, 15 bp, Homo sapiens
ggggcgcgtggggag

SEQ ID NO: 107219 - DNA, 15 bp, Homo sapiens
gggggcgcgtgggga

SEQ ID NO: 107220 - DNA, 15 bp, Homo sapiens
agggggcgcgtgggg

SEQ ID NO: 107221 - DNA, 15 bp, Homo sapiens
cagggggcgcgtggg

SEQ ID NO: 107222 - DNA, 15 bp, Homo sapiens
gcagggggcgcgtgg

SEQ ID NO: 107223 - DNA, 15 bp, Homo sapiens
ggcagggggcgcgtg

SEQ ID NO: 107224 - DNA, 15 bp, Homo sapiens
aggcagggggcgcgt

SEQ ID NO: 107225 - DNA, 15 bp, Homo sapiens
gaggcagggggcgcg

SEQ ID NO: 107226 - DNA, 15 bp, Homo sapiens
ggaggcagggggcgc

SEQ ID NO: 107227 - DNA, 15 bp, Homo sapiens
gggaggcagggggcg

SEQ ID NO: 107228 - DNA, 15 bp, Homo sapiens
tgggaggcagggggc

SEQ ID NO: 107229 - DNA, 15 bp, Homo sapiens
gtgggaggcaggggg

SEQ ID NO: 107230 - DNA, 15 bp, Homo sapiens
ggtgggaggcagggg

SEQ ID NO: 107231 - DNA, 15 bp, Homo sapiens
gggtgggaggcaggg

SEQ ID NO: 107232 - DNA, 15 bp, Homo sapiens
tgggtgggaggcagg

SEQ ID NO: 107233 - DNA, 15 bp, Homo sapiens
ctgggtgggaggcag

SEQ ID NO: 107234 - DNA, 15 bp, Homo sapiens
cctgggtgggaggca

SEQ ID NO: 107235 - DNA, 15 bp, Homo sapiens
acctgggtgggaggc

SEQ ID NO: 107236 - DNA, 15 bp, Homo sapiens
gacctgggtgggagg

SEQ ID NO: 107237 - DNA, 15 bp, Homo sapiens
ggacctgggtgggag

SEQ ID NO: 107238 - DNA, 15 bp, Homo sapiens
tggacctgggtggga

SEQ ID NO: 107239 - DNA, 15 bp, Homo sapiens
gtggacctgggtggg

SEQ ID NO: 107240 - DNA, 15 bp, Homo sapiens
ggtggacctgggtgg

SEQ ID NO: 107241 - DNA, 15 bp, Homo sapiens
aggtggacctgggtg

SEQ ID NO: 107242 - DNA, 15 bp, Homo sapiens
caggtggacctgggt

SEQ ID NO: 107243 - DNA, 15 bp, Homo sapiens
gcaggtggacctggg

SEQ ID NO: 107244 - DNA, 15 bp, Homo sapiens
ggcaggtggacctgg

SEQ ID NO: 107245 - DNA, 15 bp, Homo sapiens
tggcaggtggacctg

SEQ ID NO: 107246 - DNA, 15 bp, Homo sapiens
gtggcaggtggacct

SEQ ID NO: 107247 - DNA, 15 bp, Homo sapiens
ggtggcaggtggacc

SEQ ID NO: 107248 - DNA, 15 bp, Homo sapiens
aggtggcaggtggac

SEQ ID NO: 107249 - DNA, 15 bp, Homo sapiens
caggtggcaggtgga

SEQ ID NO: 107250 - DNA, 15 bp, Homo sapiens
ccaggtggcaggtgg

SEQ ID NO: 107251 - DNA, 15 bp, Homo sapiens
accaggtggcaggtg

SEQ ID NO: 107252 - DNA, 15 bp, Homo sapiens
caccaggtggcaggt

SEQ ID NO: 107253 - DNA, 15 bp, Homo sapiens
tcaccaggtggcagg

SEQ ID NO: 107254 - DNA, 15 bp, Homo sapiens
gtcaccaggtggcag

SEQ ID NO: 107255 - DNA, 15 bp, Homo sapiens
ggtcaccaggtggca

SEQ ID NO: 107256 - DNA, 15 bp, Homo sapiens
tggtcaccaggtggc

SEQ ID NO: 107257 - DNA, 15 bp, Homo sapiens
gtggtcaccaggtgg

SEQ ID NO: 107258 - DNA, 15 bp, Homo sapiens
ggtggtcaccaggtg

SEQ ID NO: 107259 - DNA, 15 bp, Homo sapiens
aggtggtcaccaggt

SEQ ID NO: 107260 - DNA, 15 bp, Homo sapiens
aaggtggtcaccagg

SEQ ID NO: 107261 - DNA, 15 bp, Homo sapiens
caaggtggtcaccag

SEQ ID NO: 107262 - DNA, 15 bp, Homo sapiens
tcaaggtggtcacca

SEQ ID NO: 107263 - DNA, 15 bp, Homo sapiens
ctcaaggtggtcacc

SEQ ID NO: 107264 - DNA, 15 bp, Homo sapiens
actcaaggtggtcac

SEQ ID NO: 107265 - DNA, 15 bp, Homo sapiens
tactcaaggtggtca

SEQ ID NO: 107266 - DNA, 15 bp, Homo sapiens
gtactcaaggtggtc

SEQ ID NO: 107267 - DNA, 15 bp, Homo sapiens
tgtactcaaggtggt

SEQ ID NO: 107268 - DNA, 15 bp, Homo sapiens
ctgtactcaaggtgg

SEQ ID NO: 107269 - DNA, 15 bp, Homo sapiens
tctgtactcaaggtg

SEQ ID NO: 107270 - DNA, 15 bp, Homo sapiens
ttctgtactcaaggt

SEQ ID NO: 107271 - DNA, 15 bp, Homo sapiens
cttctgtactcaagg

SEQ ID NO: 107272 - DNA, 15 bp, Homo sapiens
acttctgtactcaag

SEQ ID NO: 107273 - DNA, 15 bp, Homo sapiens
cacttctgtactcaa

SEQ ID NO: 107274 - DNA, 15 bp, Homo sapiens
tcacttctgtactca

SEQ ID NO: 107275 - DNA, 15 bp, Homo sapiens
ttcacttctgtactc

SEQ ID NO: 107276 - DNA, 15 bp, Homo sapiens
tttcacttctgtact

SEQ ID NO: 107277 - DNA, 15 bp, Homo sapiens
ctttcacttctgtac

SEQ ID NO: 107278 - DNA, 15 bp, Homo sapiens
actttcacttctgta

SEQ ID NO: 107279 - DNA, 15 bp, Homo sapiens
cactttcacttctgt

SEQ ID NO: 107280 - DNA, 15 bp, Homo sapiens
ccactttcacttctg

SEQ ID NO: 107281 - DNA, 15 bp, Homo sapiens
cccactttcacttct

SEQ ID NO: 107282 - DNA, 15 bp, Homo sapiens
ccccactttcacttc

SEQ ID NO: 107283 - DNA, 15 bp, Homo sapiens
tccccactttcactt

SEQ ID NO: 107284 - DNA, 15 bp, Homo sapiens
ctccccactttcact

SEQ ID NO: 107285 - DNA, 15 bp, Homo sapiens
tctccccactttcac

SEQ ID NO: 107286 - DNA, 15 bp, Homo sapiens
ctctccccactttca

SEQ ID NO: 107287 - DNA, 15 bp, Homo sapiens
actctccccactttc

SEQ ID NO: 107288 - DNA, 15 bp, Homo sapiens
tactctccccacttt

SEQ ID NO: 107289 - DNA, 15 bp, Homo sapiens
atactctccccactt

SEQ ID NO: 107290 - DNA, 15 bp, Homo sapiens
aatactctccccact

SEQ ID NO: 107291 - DNA, 15 bp, Homo sapiens
aaatactctccccac

SEQ ID NO: 107292 - DNA, 15 bp, Homo sapiens
aaaatactctcccca

SEQ ID NO: 107293 - DNA, 15 bp, Homo sapiens
taaaatactctcccc

SEQ ID NO: 107294 - DNA, 15 bp, Homo sapiens
ataaaatactctccc

SEQ ID NO: 107295 - DNA, 15 bp, Homo sapiens
aataaaatactctcc

SEQ ID NO: 107296 - DNA, 15 bp, Homo sapiens
gaataaaatactctc

SEQ ID NO: 107297 - DNA, 15 bp, Homo sapiens
tgaataaaatactct

SEQ ID NO: 107298 - DNA, 15 bp, Homo sapiens
ttgaataaaatactc

SEQ ID NO: 107299 - DNA, 15 bp, Homo sapiens
cttgaataaaatact

SEQ ID NO: 107300 - DNA, 15 bp, Homo sapiens
acttgaataaaatac

SEQ ID NO: 107301 - DNA, 15 bp, Homo sapiens
gacttgaataaaata

SEQ ID NO: 107302 - DNA, 15 bp, Homo sapiens
tgacttgaataaaat

SEQ ID NO: 107303 - DNA, 15 bp, Homo sapiens
gtgacttgaataaaa

SEQ ID NO: 107304 - DNA, 15 bp, Homo sapiens
tgtgacttgaataaa

SEQ ID NO: 107305 - DNA, 15 bp, Homo sapiens
ctgtgacttgaataa

SEQ ID NO: 107306 - DNA, 15 bp, Homo sapiens
gctgtgacttgaata

SEQ ID NO: 107307 - DNA, 15 bp, Homo sapiens
tgctgtgacttgaat

SEQ ID NO: 107308 - DNA, 15 bp, Homo sapiens
ctgctgtgacttgaa

SEQ ID NO: 107309 - DNA, 15 bp, Homo sapiens
tctgctgtgacttga

SEQ ID NO: 107310 - DNA, 15 bp, Homo sapiens
ttctgctgtgacttg

SEQ ID NO: 107311 - DNA, 15 bp, Homo sapiens
gttctgctgtgactt

SEQ ID NO: 107312 - DNA, 15 bp, Homo sapiens
agttctgctgtgact

SEQ ID NO: 107313 - DNA, 15 bp, Homo sapiens
cagttctgctgtgac

SEQ ID NO: 107314 - DNA, 15 bp, Homo sapiens
ccagttctgctgtga

SEQ ID NO: 107315 - DNA, 15 bp, Homo sapiens
tccagttctgctgtg

SEQ ID NO: 107316 - DNA, 15 bp, Homo sapiens
ttccagttctgctgt

SEQ ID NO: 107317 - DNA, 15 bp, Homo sapiens
tttccagttctgctg

SEQ ID NO: 107318 - DNA, 15 bp, Homo sapiens
ttttccagttctgct

SEQ ID NO: 107319 - DNA, 15 bp, Homo sapiens
tttttccagttctgc

SEQ ID NO: 107320 - DNA, 15 bp, Homo sapiens
ttttttccagttctg

SEQ ID NO: 107321 - DNA, 15 bp, Homo sapiens
tttttttccagttct

SEQ ID NO: 107322 - DNA, 15 bp, Homo sapiens
gtttttttccagttc

SEQ ID NO: 107323 - DNA, 15 bp, Homo sapiens
agtttttttccagtt

SEQ ID NO: 107324 - DNA, 15 bp, Homo sapiens
gagtttttttccagt

SEQ ID NO: 107325 - DNA, 15 bp, Homo sapiens
agagtttttttccag

SEQ ID NO: 107326 - DNA, 15 bp, Homo sapiens
aagagtttttttcca

SEQ ID NO: 107327 - DNA, 15 bp, Homo sapiens
gaagagtttttttcc

SEQ ID NO: 107328 - DNA, 15 bp, Homo sapiens
agaagagtttttttc

SEQ ID NO: 107329 - DNA, 15 bp, Homo sapiens
cagaagagttttttt

SEQ ID NO: 107330 - DNA, 15 bp, Homo sapiens
acagaagagtttttt

SEQ ID NO: 107331 - DNA, 15 bp, Homo sapiens
aacagaagagttttt

SEQ ID NO: 107332 - DNA, 15 bp, Homo sapiens
aaacagaagagtttt

SEQ ID NO: 107333 - DNA, 15 bp, Homo sapiens
aaaacagaagagttt

SEQ ID NO: 107334 - DNA, 15 bp, Homo sapiens
taaaacagaagagtt

SEQ ID NO: 107335 - DNA, 15 bp, Homo sapiens
gtaaaacagaagagt

SEQ ID NO: 107336 - DNA, 15 bp, Homo sapiens
ggtaaaacagaagag

SEQ ID NO: 107337 - DNA, 15 bp, Homo sapiens
tggtaaaacagaaga

SEQ ID NO: 107338 - DNA, 15 bp, Homo sapiens
ttggtaaaacagaag

SEQ ID NO: 107339 - DNA, 15 bp, Homo sapiens
gttggtaaaacagaa

SEQ ID NO: 107340 - DNA, 15 bp, Homo sapiens
agttggtaaaacaga

SEQ ID NO: 107341 - DNA, 15 bp, Homo sapiens
aagttggtaaaacag

SEQ ID NO: 107342 - DNA, 15 bp, Homo sapiens
gaagttggtaaaaca

SEQ ID NO: 107343 - DNA, 15 bp, Homo sapiens
agaagttggtaaaac

SEQ ID NO: 107344 - DNA, 15 bp, Homo sapiens
aagaagttggtaaaa

SEQ ID NO: 107345 - DNA, 15 bp, Homo sapiens
caagaagttggtaaa

SEQ ID NO: 107346 - DNA, 15 bp, Homo sapiens
acaagaagttggtaa

SEQ ID NO: 107347 - DNA, 15 bp, Homo sapiens
cacaagaagttggta

SEQ ID NO: 107348 - DNA, 15 bp, Homo sapiens
acacaagaagttggt

SEQ ID NO: 107349 - DNA, 15 bp, Homo sapiens
aacacaagaagttgg

SEQ ID NO: 107350 - DNA, 15 bp, Homo sapiens
aaacacaagaagttg

SEQ ID NO: 107351 - DNA, 15 bp, Homo sapiens
gaaacacaagaagtt

SEQ ID NO: 107352 - DNA, 15 bp, Homo sapiens
tgaaacacaagaagt

SEQ ID NO: 107353 - DNA, 15 bp, Homo sapiens
ctgaaacacaagaag

SEQ ID NO: 107354 - DNA, 15 bp, Homo sapiens
tctgaaacacaagaa

SEQ ID NO: 107355 - DNA, 15 bp, Homo sapiens
ttctgaaacacaaga

SEQ ID NO: 107356 - DNA, 15 bp, Homo sapiens
tttctgaaacacaag

SEQ ID NO: 107357 - DNA, 15 bp, Homo sapiens
gtttctgaaacacaa

SEQ ID NO: 107358 - DNA, 15 bp, Homo sapiens
tgtttctgaaacaca

SEQ ID NO: 107359 - DNA, 15 bp, Homo sapiens
atgtttctgaaacac

SEQ ID NO: 107360 - DNA, 15 bp, Homo sapiens
tatgtttctgaaaca

SEQ ID NO: 107361 - DNA, 15 bp, Homo sapiens
atatgtttctgaaac

SEQ ID NO: 107362 - DNA, 15 bp, Homo sapiens
aatatgtttctgaaa

SEQ ID NO: 107363 - DNA, 15 bp, Homo sapiens
gaatatgtttctgaa

SEQ ID NO: 107364 - DNA, 15 bp, Homo sapiens
agaatatgtttctga

SEQ ID NO: 107365 - DNA, 15 bp, Homo sapiens
cagaatatgtttctg

SEQ ID NO: 107366 - DNA, 15 bp, Homo sapiens
acagaatatgtttct

SEQ ID NO: 107367 - DNA, 15 bp, Homo sapiens
aacagaatatgtttc

SEQ ID NO: 107368 - DNA, 15 bp, Homo sapiens
gaacagaatatgttt

SEQ ID NO: 107369 - DNA, 15 bp, Homo sapiens
tgaacagaatatgtt

SEQ ID NO: 107370 - DNA, 15 bp, Homo sapiens
ttgaacagaatatgt

SEQ ID NO: 107371 - DNA, 15 bp, Homo sapiens
tttgaacagaatatg

SEQ ID NO: 107372 - DNA, 15 bp, Homo sapiens
ttttgaacagaatat

SEQ ID NO: 107373 - DNA, 15 bp, Homo sapiens
gttttgaacagaata

SEQ ID NO: 107374 - DNA, 15 bp, Homo sapiens
agttttgaacagaat

SEQ ID NO: 107375 - DNA, 15 bp, Homo sapiens
aagttttgaacagaa

SEQ ID NO: 107376 - DNA, 15 bp, Homo sapiens
aaagttttgaacaga

SEQ ID NO: 107377 - DNA, 15 bp, Homo sapiens
aaaagttttgaacag

SEQ ID NO: 107378 - DNA, 15 bp, Homo sapiens
caaaagttttgaaca

SEQ ID NO: 107379 - DNA, 15 bp, Homo sapiens
tcaaaagttttgaac

SEQ ID NO: 107380 - DNA, 15 bp, Homo sapiens
ttcaaaagttttgaa

SEQ ID NO: 107381 - DNA, 15 bp, Homo sapiens
cttcaaaagttttga

SEQ ID NO: 107382 - DNA, 15 bp, Homo sapiens
gcttcaaaagttttg

SEQ ID NO: 107383 - DNA, 15 bp, Homo sapiens
ggcttcaaaagtttt

SEQ ID NO: 107384 - DNA, 15 bp, Homo sapiens
gggcttcaaaagttt

SEQ ID NO: 107385 - DNA, 15 bp, Homo sapiens
agggcttcaaaagtt

SEQ ID NO: 107386 - DNA, 15 bp, Homo sapiens
aagggcttcaaaagt

SEQ ID NO: 107387 - DNA, 15 bp, Homo sapiens
aaagggcttcaaaag

SEQ ID NO: 107388 - DNA, 15 bp, Homo sapiens
gaaagggcttcaaaa

SEQ ID NO: 107389 - DNA, 15 bp, Homo sapiens
cgaaagggcttcaaa

SEQ ID NO: 107390 - DNA, 15 bp, Homo sapiens
ccgaaagggcttcaa

SEQ ID NO: 107391 - DNA, 15 bp, Homo sapiens
accgaaagggcttca

SEQ ID NO: 107392 - DNA, 15 bp, Homo sapiens
caccgaaagggcttc

SEQ ID NO: 107393 - DNA, 15 bp, Homo sapiens
acaccgaaagggctt

SEQ ID NO: 107394 - DNA, 15 bp, Homo sapiens
gacaccgaaagggct

SEQ ID NO: 107395 - DNA, 15 bp, Homo sapiens
agacaccgaaagggc

SEQ ID NO: 107396 - DNA, 15 bp, Homo sapiens
tagacaccgaaaggg

SEQ ID NO: 107397 - DNA, 15 bp, Homo sapiens
ctagacaccgaaagg

SEQ ID NO: 107398 - DNA, 15 bp, Homo sapiens
actagacaccgaaag

SEQ ID NO: 107399 - DNA, 15 bp, Homo sapiens
gactagacaccgaaa

SEQ ID NO: 107400 - DNA, 15 bp, Homo sapiens
agactagacaccgaa

SEQ ID NO: 107401 - DNA, 15 bp, Homo sapiens
cagactagacaccga

SEQ ID NO: 107402 - DNA, 15 bp, Homo sapiens
gcagactagacaccg

SEQ ID NO: 107403 - DNA, 15 bp, Homo sapiens
tgcagactagacacc

SEQ ID NO: 107404 - DNA, 15 bp, Homo sapiens
ctgcagactagacac

SEQ ID NO: 107405 - DNA, 15 bp, Homo sapiens
tctgcagactagaca

SEQ ID NO: 107406 - DNA, 15 bp, Homo sapiens
atctgcagactagac

SEQ ID NO: 107407 - DNA, 15 bp, Homo sapiens
catctgcagactaga

SEQ ID NO: 107408 - DNA, 15 bp, Homo sapiens
acatctgcagactag

SEQ ID NO: 107409 - DNA, 15 bp, Homo sapiens
aacatctgcagacta

SEQ ID NO: 107410 - DNA, 15 bp, Homo sapiens
aaacatctgcagact

SEQ ID NO: 107411 - DNA, 15 bp, Homo sapiens
aaaacatctgcagac

SEQ ID NO: 107412 - DNA, 15 bp, Homo sapiens
aaaaacatctgcaga

SEQ ID NO: 107413 - DNA, 15 bp, Homo sapiens
caaaaacatctgcag

SEQ ID NO: 107414 - DNA, 15 bp, Homo sapiens
acaaaaacatctgca

SEQ ID NO: 107415 - DNA, 15 bp, Homo sapiens
tacaaaaacatctgc

SEQ ID NO: 107416 - DNA, 15 bp, Homo sapiens
atacaaaaacatctg

SEQ ID NO: 107417 - DNA, 15 bp, Homo sapiens
catacaaaaacatct

SEQ ID NO: 107418 - DNA, 15 bp, Homo sapiens
acatacaaaaacatc

SEQ ID NO: 107419 - DNA, 15 bp, Homo sapiens
cacatacaaaaacat

SEQ ID NO: 107420 - DNA, 15 bp, Homo sapiens
acacatacaaaaaca

SEQ ID NO: 107421 - DNA, 15 bp, Homo sapiens
cacacatacaaaaac

SEQ ID NO: 107422 - DNA, 15 bp, Homo sapiens
gcacacatacaaaaa

SEQ ID NO: 107423 - DNA, 15 bp, Homo sapiens
tgcacacatacaaaa

SEQ ID NO: 107424 - DNA, 15 bp, Homo sapiens
gtgcacacatacaaa

SEQ ID NO: 107425 - DNA, 15 bp, Homo sapiens
ggtgcacacatacaa

SEQ ID NO: 107426 - DNA, 15 bp, Homo sapiens
aggtgcacacataca

SEQ ID NO: 107427 - DNA, 15 bp, Homo sapiens
gaggtgcacacatac

SEQ ID NO: 107428 - DNA, 15 bp, Homo sapiens
agaggtgcacacata

SEQ ID NO: 107429 - DNA, 15 bp, Homo sapiens
cagaggtgcacacat

SEQ ID NO: 107430 - DNA, 15 bp, Homo sapiens
tcagaggtgcacaca

SEQ ID NO: 107431 - DNA, 15 bp, Homo sapiens
gtcagaggtgcacac

SEQ ID NO: 107432 - DNA, 15 bp, Homo sapiens
ggtcagaggtgcaca

SEQ ID NO: 107433 - DNA, 15 bp, Homo sapiens
tggtcagaggtgcac

SEQ ID NO: 107434 - DNA, 15 bp, Homo sapiens
atggtcagaggtgca

SEQ ID NO: 107435 - DNA, 15 bp, Homo sapiens
catggtcagaggtgc

SEQ ID NO: 107436 - DNA, 15 bp, Homo sapiens
acatggtcagaggtg

SEQ ID NO: 107437 - DNA, 15 bp, Homo sapiens
cacatggtcagaggt

SEQ ID NO: 107438 - DNA, 15 bp, Homo sapiens
acacatggtcagagg

SEQ ID NO: 107439 - DNA, 15 bp, Homo sapiens
cacacatggtcagag

SEQ ID NO: 107440 - DNA, 15 bp, Homo sapiens
acacacatggtcaga

SEQ ID NO: 107441 - DNA, 15 bp, Homo sapiens
tacacacatggtcag

SEQ ID NO: 107442 - DNA, 15 bp, Homo sapiens
gtacacacatggtca

SEQ ID NO: 107443 - DNA, 15 bp, Homo sapiens
tgtacacacatggtc

SEQ ID NO: 107444 - DNA, 15 bp, Homo sapiens
atgtacacacatggt

SEQ ID NO: 107445 - DNA, 15 bp, Homo sapiens
tatgtacacacatgg

SEQ ID NO: 107446 - DNA, 15 bp, Homo sapiens
atatgtacacacatg

SEQ ID NO: 107447 - DNA, 15 bp, Homo sapiens
catatgtacacacat

SEQ ID NO: 107448 - DNA, 15 bp, Homo sapiens
acatatgtacacaca

SEQ ID NO: 107449 - DNA, 15 bp, Homo sapiens
cacatatgtacacac

SEQ ID NO: 107450 - DNA, 15 bp, Homo sapiens
acacatatgtacaca

SEQ ID NO: 107451 - DNA, 15 bp, Homo sapiens
gacacatatgtacac

SEQ ID NO: 107452 - DNA, 15 bp, Homo sapiens
agacacatatgtaca

SEQ ID NO: 107453 - DNA, 15 bp, Homo sapiens
aagacacatatgtac

SEQ ID NO: 107454 - DNA, 15 bp, Homo sapiens
caagacacatatgta

SEQ ID NO: 107455 - DNA, 15 bp, Homo sapiens
gcaagacacatatgt

SEQ ID NO: 107456 - DNA, 15 bp, Homo sapiens
agcaagacacatatg

SEQ ID NO: 107457 - DNA, 15 bp, Homo sapiens
cagcaagacacatat

SEQ ID NO: 107458 - DNA, 15 bp, Homo sapiens
ccagcaagacacata

SEQ ID NO: 107459 - DNA, 15 bp, Homo sapiens
tccagcaagacacat

SEQ ID NO: 107460 - DNA, 15 bp, Homo sapiens
ttccagcaagacaca

SEQ ID NO: 107461 - DNA, 15 bp, Homo sapiens
tttccagcaagacac

SEQ ID NO: 107462 - DNA, 15 bp, Homo sapiens
ctttccagcaagaca

SEQ ID NO: 107463 - DNA, 15 bp, Homo sapiens
cctttccagcaagac

SEQ ID NO: 107464 - DNA, 15 bp, Homo sapiens
tcctttccagcaaga

SEQ ID NO: 107465 - DNA, 15 bp, Homo sapiens
gtcctttccagcaag

SEQ ID NO: 107466 - DNA, 15 bp, Homo sapiens
tgtcctttccagcaa

SEQ ID NO: 107467 - DNA, 15 bp, Homo sapiens
atgtcctttccagca

SEQ ID NO: 107468 - DNA, 15 bp, Homo sapiens
tatgtcctttccagc

SEQ ID NO: 107469 - DNA, 15 bp, Homo sapiens
atatgtcctttccag

SEQ ID NO: 107470 - DNA, 15 bp, Homo sapiens
aatatgtcctttcca

SEQ ID NO: 107471 - DNA, 15 bp, Homo sapiens
gaatatgtcctttcc

SEQ ID NO: 107472 - DNA, 15 bp, Homo sapiens
cgaatatgtcctttc

SEQ ID NO: 107473 - DNA, 15 bp, Homo sapiens
gcgaatatgtccttt

SEQ ID NO: 107474 - DNA, 15 bp, Homo sapiens
agcgaatatgtcctt

SEQ ID NO: 107475 - DNA, 15 bp, Homo sapiens
cagcgaatatgtcct

SEQ ID NO: 107476 - DNA, 15 bp, Homo sapiens
acagcgaatatgtcc

SEQ ID NO: 107477 - DNA, 15 bp, Homo sapiens
gacagcgaatatgtc

SEQ ID NO: 107478 - DNA, 15 bp, Homo sapiens
ggacagcgaatatgt

SEQ ID NO: 107479 - DNA, 15 bp, Homo sapiens
gggacagcgaatatg

SEQ ID NO: 107480 - DNA, 15 bp, Homo sapiens
ggggacagcgaatat

SEQ ID NO: 107481 - DNA, 15 bp, Homo sapiens
cggggacagcgaata

SEQ ID NO: 107482 - DNA, 15 bp, Homo sapiens
acggggacagcgaat

SEQ ID NO: 107483 - DNA, 15 bp, Homo sapiens
cacggggacagcgaa

SEQ ID NO: 107484 - DNA, 15 bp, Homo sapiens
gcacggggacagcga

SEQ ID NO: 107485 - DNA, 15 bp, Homo sapiens
agcacggggacagcg

SEQ ID NO: 107486 - DNA, 15 bp, Homo sapiens
cagcacggggacagc

SEQ ID NO: 107487 - DNA, 15 bp, Homo sapiens
gcagcacggggacag

SEQ ID NO: 107488 - DNA, 15 bp, Homo sapiens
agcagcacggggaca

SEQ ID NO: 107489 - DNA, 15 bp, Homo sapiens
cagcagcacggggac

SEQ ID NO: 107490 - DNA, 15 bp, Homo sapiens
ccagcagcacgggga

SEQ ID NO: 107491 - DNA, 15 bp, Homo sapiens
cccagcagcacgggg

SEQ ID NO: 107492 - DNA, 15 bp, Homo sapiens
tcccagcagcacggg

SEQ ID NO: 107493 - DNA, 15 bp, Homo sapiens
ctcccagcagcacgg

SEQ ID NO: 107494 - DNA, 15 bp, Homo sapiens
cctcccagcagcacg

SEQ ID NO: 107495 - DNA, 15 bp, Homo sapiens
ccctcccagcagcac

SEQ ID NO: 107496 - DNA, 15 bp, Homo sapiens
gccctcccagcagca

SEQ ID NO: 107497 - DNA, 15 bp, Homo sapiens
ggccctcccagcagc

SEQ ID NO: 107498 - DNA, 15 bp, Homo sapiens
cggccctcccagcag

SEQ ID NO: 107499 - DNA, 15 bp, Homo sapiens
gcggccctcccagca

SEQ ID NO: 107500 - DNA, 15 bp, Homo sapiens
ggcggccctcccagc

SEQ ID NO: 107501 - DNA, 15 bp, Homo sapiens
aggcggccctcccag

SEQ ID NO: 107502 - DNA, 15 bp, Homo sapiens
gaggcggccctccca

SEQ ID NO: 107503 - DNA, 15 bp, Homo sapiens
tgaggcggccctccc

SEQ ID NO: 107504 - DNA, 15 bp, Homo sapiens
gtgaggcggccctcc

SEQ ID NO: 107505 - DNA, 15 bp, Homo sapiens
tgtgaggcggccctc

SEQ ID NO: 107506 - DNA, 15 bp, Homo sapiens
ctgtgaggcggccct

SEQ ID NO: 107507 - DNA, 15 bp, Homo sapiens
gctgtgaggcggccc

SEQ ID NO: 107508 - DNA, 15 bp, Homo sapiens
ggctgtgaggcggcc

SEQ ID NO: 107509 - DNA, 15 bp, Homo sapiens
aggctgtgaggcggc

SEQ ID NO: 107510 - DNA, 15 bp, Homo sapiens
gaggctgtgaggcgg

SEQ ID NO: 107511 - DNA, 15 bp, Homo sapiens
tgaggctgtgaggcg

SEQ ID NO: 107512 - DNA, 15 bp, Homo sapiens
gtgaggctgtgaggc

SEQ ID NO: 107513 - DNA, 15 bp, Homo sapiens
cgtgaggctgtgagg

SEQ ID NO: 107514 - DNA, 15 bp, Homo sapiens
ccgtgaggctgtgag

SEQ ID NO: 107515 - DNA, 15 bp, Homo sapiens
accgtgaggctgtga

SEQ ID NO: 107516 - DNA, 15 bp, Homo sapiens
aaccgtgaggctgtg

SEQ ID NO: 107517 - DNA, 15 bp, Homo sapiens
gaaccgtgaggctgt

SEQ ID NO: 107518 - DNA, 15 bp, Homo sapiens
ggaaccgtgaggctg

SEQ ID NO: 107519 - DNA, 15 bp, Homo sapiens
gggaaccgtgaggct

SEQ ID NO: 107520 - DNA, 15 bp, Homo sapiens
tgggaaccgtgaggc

SEQ ID NO: 107521 - DNA, 15 bp, Homo sapiens
ctgggaaccgtgagg

SEQ ID NO: 107522 - DNA, 15 bp, Homo sapiens
gctgggaaccgtgag

SEQ ID NO: 107523 - DNA, 15 bp, Homo sapiens
ggctgggaaccgtga

SEQ ID NO: 107524 - DNA, 15 bp, Homo sapiens
gggctgggaaccgtg

SEQ ID NO: 107525 - DNA, 15 bp, Homo sapiens
ggggctgggaaccgt

SEQ ID NO: 107526 - DNA, 15 bp, Homo sapiens
tggggctgggaaccg

SEQ ID NO: 107527 - DNA, 15 bp, Homo sapiens
ctggggctgggaacc

SEQ ID NO: 107528 - DNA, 15 bp, Homo sapiens
gctggggctgggaac

SEQ ID NO: 107529 - DNA, 15 bp, Homo sapiens
tgctggggctgggaa

SEQ ID NO: 107530 - DNA, 15 bp, Homo sapiens
gtgctggggctggga

SEQ ID NO: 107531 - DNA, 15 bp, Homo sapiens
tgtgctggggctggg

SEQ ID NO: 107532 - DNA, 15 bp, Homo sapiens
ctgtgctggggctgg

SEQ ID NO: 107533 - DNA, 15 bp, Homo sapiens
actgtgctggggctg

SEQ ID NO: 107534 - DNA, 15 bp, Homo sapiens
cactgtgctggggct

SEQ ID NO: 107535 - DNA, 15 bp, Homo sapiens
ccactgtgctggggc

SEQ ID NO: 107536 - DNA, 15 bp, Homo sapiens
tccactgtgctgggg

SEQ ID NO: 107537 - DNA, 15 bp, Homo sapiens
ctccactgtgctggg

SEQ ID NO: 107538 - DNA, 15 bp, Homo sapiens
cctccactgtgctgg

SEQ ID NO: 107539 - DNA, 15 bp, Homo sapiens
gcctccactgtgctg

SEQ ID NO: 107540 - DNA, 15 bp, Homo sapiens
tgcctccactgtgct

SEQ ID NO: 107541 - DNA, 15 bp, Homo sapiens
ctgcctccactgtgc

SEQ ID NO: 107542 - DNA, 15 bp, Homo sapiens
cctgcctccactgtg

SEQ ID NO: 107543 - DNA, 15 bp, Homo sapiens
gcctgcctccactgt

SEQ ID NO: 107544 - DNA, 15 bp, Homo sapiens
cgcctgcctccactg

SEQ ID NO: 107545 - DNA, 15 bp, Homo sapiens
acgcctgcctccact

SEQ ID NO: 107546 - DNA, 15 bp, Homo sapiens
cacgcctgcctccac

SEQ ID NO: 107547 - DNA, 15 bp, Homo sapiens
ccacgcctgcctcca

SEQ ID NO: 107548 - DNA, 15 bp, Homo sapiens
gccacgcctgcctcc

SEQ ID NO: 107549 - DNA, 15 bp, Homo sapiens
agccacgcctgcctc

SEQ ID NO: 107550 - DNA, 15 bp, Homo sapiens
cagccacgcctgcct

SEQ ID NO: 107551 - DNA, 15 bp, Homo sapiens
gcagccacgcctgcc

SEQ ID NO: 107552 - DNA, 15 bp, Homo sapiens
tgcagccacgcctgc

SEQ ID NO: 107553 - DNA, 15 bp, Homo sapiens
atgcagccacgcctg

SEQ ID NO: 107554 - DNA, 15 bp, Homo sapiens
aatgcagccacgcct

SEQ ID NO: 107555 - DNA, 15 bp, Homo sapiens
gaatgcagccacgcc

SEQ ID NO: 107556 - DNA, 15 bp, Homo sapiens
ggaatgcagccacgc

SEQ ID NO: 107557 - DNA, 15 bp, Homo sapiens
gggaatgcagccacg

SEQ ID NO: 107558 - DNA, 15 bp, Homo sapiens
ggggaatgcagccac

SEQ ID NO: 107559 - DNA, 15 bp, Homo sapiens
aggggaatgcagcca

SEQ ID NO: 107560 - DNA, 15 bp, Homo sapiens
gaggggaatgcagcc

SEQ ID NO: 107561 - DNA, 15 bp, Homo sapiens
tgaggggaatgcagc

SEQ ID NO: 107562 - DNA, 15 bp, Homo sapiens
gtgaggggaatgcag

SEQ ID NO: 107563 - DNA, 15 bp, Homo sapiens
cgtgaggggaatgca

SEQ ID NO: 107564 - DNA, 15 bp, Homo sapiens
gcgtgaggggaatgc

SEQ ID NO: 107565 - DNA, 15 bp, Homo sapiens
agcgtgaggggaatg

SEQ ID NO: 107566 - DNA, 15 bp, Homo sapiens
tagcgtgaggggaat

SEQ ID NO: 107567 - DNA, 15 bp, Homo sapiens
gtagcgtgaggggaa

SEQ ID NO: 107568 - DNA, 15 bp, Homo sapiens
ggtagcgtgagggga

SEQ ID NO: 107569 - DNA, 15 bp, Homo sapiens
gggtagcgtgagggg

SEQ ID NO: 107570 - DNA, 15 bp, Homo sapiens
agggtagcgtgaggg

SEQ ID NO: 107571 - DNA, 15 bp, Homo sapiens
gagggtagcgtgagg

SEQ ID NO: 107572 - DNA, 15 bp, Homo sapiens
ggagggtagcgtgag

SEQ ID NO: 107573 - DNA, 15 bp, Homo sapiens
gggagggtagcgtga

SEQ ID NO: 107574 - DNA, 15 bp, Homo sapiens
tgggagggtagcgtg

SEQ ID NO: 107575 - DNA, 15 bp, Homo sapiens
ctgggagggtagcgt

SEQ ID NO: 107576 - DNA, 15 bp, Homo sapiens
gctgggagggtagcg

SEQ ID NO: 107577 - DNA, 15 bp, Homo sapiens
cgctgggagggtagc

SEQ ID NO: 107578 - DNA, 15 bp, Homo sapiens
ccgctgggagggtag

SEQ ID NO: 107579 - DNA, 15 bp, Homo sapiens
gccgctgggagggta

SEQ ID NO: 107580 - DNA, 15 bp, Homo sapiens
agccgctgggagggt

SEQ ID NO: 107581 - DNA, 15 bp, Homo sapiens
aagccgctgggaggg

SEQ ID NO: 107582 - DNA, 15 bp, Homo sapiens
caagccgctgggagg

SEQ ID NO: 107583 - DNA, 15 bp, Homo sapiens
acaagccgctgggag

SEQ ID NO: 107584 - DNA, 15 bp, Homo sapiens
tacaagccgctggga

SEQ ID NO: 107585 - DNA, 15 bp, Homo sapiens
ctacaagccgctggg

SEQ ID NO: 107586 - DNA, 15 bp, Homo sapiens
gctacaagccgctgg

SEQ ID NO: 107587 - DNA, 15 bp, Homo sapiens
ggctacaagccgctg

SEQ ID NO: 107588 - DNA, 15 bp, Homo sapiens
cggctacaagccgct

SEQ ID NO: 107589 - DNA, 15 bp, Homo sapiens
acggctacaagccgc

SEQ ID NO: 107590 - DNA, 15 bp, Homo sapiens
gacggctacaagccg

SEQ ID NO: 107591 - DNA, 15 bp, Homo sapiens
tgacggctacaagcc

SEQ ID NO: 107592 - DNA, 15 bp, Homo sapiens
gtgacggctacaagc

SEQ ID NO: 107593 - DNA, 15 bp, Homo sapiens
agtgacggctacaag

SEQ ID NO: 107594 - DNA, 15 bp, Homo sapiens
cagtgacggctacaa

SEQ ID NO: 107595 - DNA, 15 bp, Homo sapiens
ccagtgacggctaca

SEQ ID NO: 107596 - DNA, 15 bp, Homo sapiens
gccagtgacggctac

SEQ ID NO: 107597 - DNA, 15 bp, Homo sapiens
ggccagtgacggcta

SEQ ID NO: 107598 - DNA, 15 bp, Homo sapiens
tggccagtgacggct

SEQ ID NO: 107599 - DNA, 15 bp, Homo sapiens
ctggccagtgacggc

SEQ ID NO: 107600 - DNA, 15 bp, Homo sapiens
tctggccagtgacgg

SEQ ID NO: 107601 - DNA, 15 bp, Homo sapiens
gtctggccagtgacg

SEQ ID NO: 107602 - DNA, 15 bp, Homo sapiens
ggtctggccagtgac

SEQ ID NO: 107603 - DNA, 15 bp, Homo sapiens
aggtctggccagtga

SEQ ID NO: 107604 - DNA, 15 bp, Homo sapiens
gaggtctggccagtg

SEQ ID NO: 107605 - DNA, 15 bp, Homo sapiens
ggaggtctggccagt

SEQ ID NO: 107606 - DNA, 15 bp, Homo sapiens
tggaggtctggccag

SEQ ID NO: 107607 - DNA, 15 bp, Homo sapiens
ctggaggtctggcca

SEQ ID NO: 107608 - DNA, 15 bp, Homo sapiens
cctggaggtctggcc

SEQ ID NO: 107609 - DNA, 15 bp, Homo sapiens
ccctggaggtctggc

SEQ ID NO: 107610 - DNA, 15 bp, Homo sapiens
accctggaggtctgg

SEQ ID NO: 107611 - DNA, 15 bp, Homo sapiens
caccctggaggtctg

SEQ ID NO: 107612 - DNA, 15 bp, Homo sapiens
gcaccctggaggtct

SEQ ID NO: 107613 - DNA, 15 bp, Homo sapiens
cgcaccctggaggtc

SEQ ID NO: 107614 - DNA, 15 bp, Homo sapiens
ccgcaccctggaggt

SEQ ID NO: 107615 - DNA, 15 bp, Homo sapiens
tccgcaccctggagg

SEQ ID NO: 107616 - DNA, 15 bp, Homo sapiens
ttccgcaccctggag

SEQ ID NO: 107617 - DNA, 15 bp, Homo sapiens
attccgcaccctgga

SEQ ID NO: 107618 - DNA, 15 bp, Homo sapiens
gattccgcaccctgg

SEQ ID NO: 107619 - DNA, 15 bp, Homo sapiens
tgattccgcaccctg

SEQ ID NO: 107620 - DNA, 15 bp, Homo sapiens
ttgattccgcaccct

SEQ ID NO: 107621 - DNA, 15 bp, Homo sapiens
tttgattccgcaccc

SEQ ID NO: 107622 - DNA, 15 bp, Homo sapiens
atttgattccgcacc

SEQ ID NO: 107623 - DNA, 15 bp, Homo sapiens
tatttgattccgcac

SEQ ID NO: 107624 - DNA, 15 bp, Homo sapiens
ctatttgattccgca

SEQ ID NO: 107625 - DNA, 15 bp, Homo sapiens
cctatttgattccgc

SEQ ID NO: 107626 - DNA, 15 bp, Homo sapiens
tcctatttgattccg

SEQ ID NO: 107627 - DNA, 15 bp, Homo sapiens
ttcctatttgattcc

SEQ ID NO: 107628 - DNA, 15 bp, Homo sapiens
cttcctatttgattc

SEQ ID NO: 107629 - DNA, 15 bp, Homo sapiens
gcttcctatttgatt

SEQ ID NO: 107630 - DNA, 15 bp, Homo sapiens
tgcttcctatttgat

SEQ ID NO: 107631 - DNA, 15 bp, Homo sapiens
atgcttcctatttga

SEQ ID NO: 107632 - DNA, 15 bp, Homo sapiens
catgcttcctatttg

SEQ ID NO: 107633 - DNA, 15 bp, Homo sapiens
gcatgcttcctattt

SEQ ID NO: 107634 - DNA, 15 bp, Homo sapiens
tgcatgcttcctatt

SEQ ID NO: 107635 - DNA, 15 bp, Homo sapiens
ctgcatgcttcctat

SEQ ID NO: 107636 - DNA, 15 bp, Homo sapiens
tctgcatgcttccta

SEQ ID NO: 107637 - DNA, 15 bp, Homo sapiens
ctctgcatgcttcct

SEQ ID NO: 107638 - DNA, 15 bp, Homo sapiens
tctctgcatgcttcc

SEQ ID NO: 107639 - DNA, 15 bp, Homo sapiens
gtctctgcatgcttc

SEQ ID NO: 107640 - DNA, 15 bp, Homo sapiens
agtctctgcatgctt

SEQ ID NO: 107641 - DNA, 15 bp, Homo sapiens
gagtctctgcatgct

SEQ ID NO: 107642 - DNA, 15 bp, Homo sapiens
cgagtctctgcatgc

SEQ ID NO: 107643 - DNA, 15 bp, Homo sapiens
ccgagtctctgcatg

SEQ ID NO: 107644 - DNA, 15 bp, Homo sapiens
gccgagtctctgcat

SEQ ID NO: 107645 - DNA, 15 bp, Homo sapiens
tgccgagtctctgca

SEQ ID NO: 107646 - DNA, 15 bp, Homo sapiens
ctgccgagtctctgc

SEQ ID NO: 107647 - DNA, 15 bp, Homo sapiens
gctgccgagtctctg

SEQ ID NO: 107648 - DNA, 15 bp, Homo sapiens
agctgccgagtctct

SEQ ID NO: 107649 - DNA, 15 bp, Homo sapiens
aagctgccgagtctc

SEQ ID NO: 107650 - DNA, 15 bp, Homo sapiens
aaagctgccgagtct

SEQ ID NO: 107651 - DNA, 15 bp, Homo sapiens
aaaagctgccgagtc

SEQ ID NO: 107652 - DNA, 15 bp, Homo sapiens
gaaaagctgccgagt

SEQ ID NO: 107653 - DNA, 15 bp, Homo sapiens
ggaaaagctgccgag

SEQ ID NO: 107654 - DNA, 15 bp, Homo sapiens
aggaaaagctgccga

SEQ ID NO: 107655 - DNA, 15 bp, Homo sapiens
gaggaaaagctgccg

SEQ ID NO: 107656 - DNA, 15 bp, Homo sapiens
agaggaaaagctgcc

SEQ ID NO: 107657 - DNA, 15 bp, Homo sapiens
cagaggaaaagctgc

SEQ ID NO: 107658 - DNA, 15 bp, Homo sapiens
tcagaggaaaagctg

SEQ ID NO: 107659 - DNA, 15 bp, Homo sapiens
atcagaggaaaagct

SEQ ID NO: 107660 - DNA, 15 bp, Homo sapiens
catcagaggaaaagc

SEQ ID NO: 107661 - DNA, 15 bp, Homo sapiens
acatcagaggaaaag

SEQ ID NO: 107662 - DNA, 15 bp, Homo sapiens
cacatcagaggaaaa

SEQ ID NO: 107663 - DNA, 15 bp, Homo sapiens
acacatcagaggaaa

SEQ ID NO: 107664 - DNA, 15 bp, Homo sapiens
tacacatcagaggaa

SEQ ID NO: 107665 - DNA, 15 bp, Homo sapiens
ttacacatcagagga

SEQ ID NO: 107666 - DNA, 15 bp, Homo sapiens
cttacacatcagagg

SEQ ID NO: 107667 - DNA, 15 bp, Homo sapiens
acttacacatcagag

SEQ ID NO: 107668 - DNA, 15 bp, Homo sapiens
aacttacacatcaga

SEQ ID NO: 107669 - DNA, 15 bp, Homo sapiens
taacttacacatcag

SEQ ID NO: 107670 - DNA, 15 bp, Homo sapiens
ataacttacacatca

SEQ ID NO: 107671 - DNA, 15 bp, Homo sapiens
aataacttacacatc

SEQ ID NO: 107672 - DNA, 15 bp, Homo sapiens
aaataacttacacat

SEQ ID NO: 107673 - DNA, 15 bp, Homo sapiens
caaataacttacaca

SEQ ID NO: 107674 - DNA, 15 bp, Homo sapiens
ccaaataacttacac

SEQ ID NO: 107675 - DNA, 15 bp, Homo sapiens
tccaaataacttaca

SEQ ID NO: 107676 - DNA, 15 bp, Homo sapiens
ttccaaataacttac

SEQ ID NO: 107677 - DNA, 15 bp, Homo sapiens
gttccaaataactta

SEQ ID NO: 107678 - DNA, 15 bp, Homo sapiens
cgttccaaataactt

SEQ ID NO: 107679 - DNA, 15 bp, Homo sapiens
gcgttccaaataact

SEQ ID NO: 107680 - DNA, 15 bp, Homo sapiens
cgcgttccaaataac

SEQ ID NO: 107681 - DNA, 15 bp, Homo sapiens
acgcgttccaaataa

SEQ ID NO: 107682 - DNA, 15 bp, Homo sapiens
cacgcgttccaaata

SEQ ID NO: 107683 - DNA, 15 bp, Homo sapiens
gcacgcgttccaaat

SEQ ID NO: 107684 - DNA, 15 bp, Homo sapiens
agcacgcgttccaaa

SEQ ID NO: 107685 - DNA, 15 bp, Homo sapiens
cagcacgcgttccaa

SEQ ID NO: 107686 - DNA, 15 bp, Homo sapiens
acagcacgcgttcca

SEQ ID NO: 107687 - DNA, 15 bp, Homo sapiens
cacagcacgcgttcc

SEQ ID NO: 107688 - DNA, 15 bp, Homo sapiens
acacagcacgcgttc

SEQ ID NO: 107689 - DNA, 15 bp, Homo sapiens
gacacagcacgcgtt

SEQ ID NO: 107690 - DNA, 15 bp, Homo sapiens
ggacacagcacgcgt

SEQ ID NO: 107691 - DNA, 15 bp, Homo sapiens
gggacacagcacgcg

SEQ ID NO: 107692 - DNA, 15 bp, Homo sapiens
cgggacacagcacgc

SEQ ID NO: 107693 - DNA, 15 bp, Homo sapiens
gcgggacacagcacg

SEQ ID NO: 107694 - DNA, 15 bp, Homo sapiens
cgcgggacacagcac

SEQ ID NO: 107695 - DNA, 15 bp, Homo sapiens
tcgcgggacacagca

SEQ ID NO: 107696 - DNA, 15 bp, Homo sapiens
atcgcgggacacagc

SEQ ID NO: 107697 - DNA, 15 bp, Homo sapiens
catcgcgggacacag

SEQ ID NO: 107698 - DNA, 15 bp, Homo sapiens
acatcgcgggacaca

SEQ ID NO: 107699 - DNA, 15 bp, Homo sapiens
gacatcgcgggacac

SEQ ID NO: 107700 - DNA, 15 bp, Homo sapiens
ggacatcgcgggaca

SEQ ID NO: 107701 - DNA, 15 bp, Homo sapiens
gggacatcgcgggac

SEQ ID NO: 107702 - DNA, 15 bp, Homo sapiens
agggacatcgcggga

SEQ ID NO: 107703 - DNA, 15 bp, Homo sapiens
cagggacatcgcggg

SEQ ID NO: 107704 - DNA, 15 bp, Homo sapiens
tcagggacatcgcgg

SEQ ID NO: 107705 - DNA, 15 bp, Homo sapiens
atcagggacatcgcg

SEQ ID NO: 107706 - DNA, 15 bp, Homo sapiens
catcagggacatcgc

SEQ ID NO: 107707 - DNA, 15 bp, Homo sapiens
acatcagggacatcg

SEQ ID NO: 107708 - DNA, 15 bp, Homo sapiens
tacatcagggacatc

SEQ ID NO: 107709 - DNA, 15 bp, Homo sapiens
gtacatcagggacat

SEQ ID NO: 107710 - DNA, 15 bp, Homo sapiens
agtacatcagggaca

SEQ ID NO: 107711 - DNA, 15 bp, Homo sapiens
cagtacatcagggac

SEQ ID NO: 107712 - DNA, 15 bp, Homo sapiens
acagtacatcaggga

SEQ ID NO: 107713 - DNA, 15 bp, Homo sapiens
cacagtacatcaggg

SEQ ID NO: 107714 - DNA, 15 bp, Homo sapiens
gcacagtacatcagg

SEQ ID NO: 107715 - DNA, 15 bp, Homo sapiens
tgcacagtacatcag

SEQ ID NO: 107716 - DNA, 15 bp, Homo sapiens
ctgcacagtacatca

SEQ ID NO: 107717 - DNA, 15 bp, Homo sapiens
cctgcacagtacatc

SEQ ID NO: 107718 - DNA, 15 bp, Homo sapiens
gcctgcacagtacat

SEQ ID NO: 107719 - DNA, 15 bp, Homo sapiens
cgcctgcacagtaca

SEQ ID NO: 107720 - DNA, 15 bp, Homo sapiens
gcgcctgcacagtac

SEQ ID NO: 107721 - DNA, 15 bp, Homo sapiens
cgcgcctgcacagta

SEQ ID NO: 107722 - DNA, 15 bp, Homo sapiens
ccgcgcctgcacagt

SEQ ID NO: 107723 - DNA, 15 bp, Homo sapiens
accgcgcctgcacag

SEQ ID NO: 107724 - DNA, 15 bp, Homo sapiens
caccgcgcctgcaca

SEQ ID NO: 107725 - DNA, 15 bp, Homo sapiens
gcaccgcgcctgcac

SEQ ID NO: 107726 - DNA, 15 bp, Homo sapiens
ggcaccgcgcctgca

SEQ ID NO: 107727 - DNA, 15 bp, Homo sapiens
aggcaccgcgcctgc

SEQ ID NO: 107728 - DNA, 15 bp, Homo sapiens
gaggcaccgcgcctg

SEQ ID NO: 107729 - DNA, 15 bp, Homo sapiens
ggaggcaccgcgcct

SEQ ID NO: 107730 - DNA, 15 bp, Homo sapiens
cggaggcaccgcgcc

SEQ ID NO: 107731 - DNA, 15 bp, Homo sapiens
acggaggcaccgcgc

SEQ ID NO: 107732 - DNA, 15 bp, Homo sapiens
gacggaggcaccgcg

SEQ ID NO: 107733 - DNA, 15 bp, Homo sapiens
agacggaggcaccgc

SEQ ID NO: 107734 - DNA, 15 bp, Homo sapiens
gagacggaggcaccg

SEQ ID NO: 107735 - DNA, 15 bp, Homo sapiens
cgagacggaggcacc

SEQ ID NO: 107736 - DNA, 15 bp, Homo sapiens
acgagacggaggcac

SEQ ID NO: 107737 - DNA, 15 bp, Homo sapiens
gacgagacggaggca

SEQ ID NO: 107738 - DNA, 15 bp, Homo sapiens
cgacgagacggaggc

SEQ ID NO: 107739 - DNA, 15 bp, Homo sapiens
gcgacgagacggagg

SEQ ID NO: 107740 - DNA, 15 bp, Homo sapiens
tgcgacgagacggag

SEQ ID NO: 107741 - DNA, 15 bp, Homo sapiens
gtgcgacgagacgga

SEQ ID NO: 107742 - DNA, 15 bp, Homo sapiens
tgtgcgacgagacgg

SEQ ID NO: 107743 - DNA, 15 bp, Homo sapiens
ctgtgcgacgagacg

SEQ ID NO: 107744 - DNA, 15 bp, Homo sapiens
gctgtgcgacgagac

SEQ ID NO: 107745 - DNA, 15 bp, Homo sapiens
agctgtgcgacgaga

SEQ ID NO: 107746 - DNA, 15 bp, Homo sapiens
cagctgtgcgacgag

SEQ ID NO: 107747 - DNA, 15 bp, Homo sapiens
gcagctgtgcgacga

SEQ ID NO: 107748 - DNA, 15 bp, Homo sapiens
cgcagctgtgcgacg

SEQ ID NO: 107749 - DNA, 15 bp, Homo sapiens
gcgcagctgtgcgac

SEQ ID NO: 107750 - DNA, 15 bp, Homo sapiens
cgcgcagctgtgcga

SEQ ID NO: 107751 - DNA, 15 bp, Homo sapiens
gcgcgcagctgtgcg

SEQ ID NO: 107752 - DNA, 15 bp, Homo sapiens
ggcgcgcagctgtgc

SEQ ID NO: 107753 - DNA, 15 bp, Homo sapiens
gggcgcgcagctgtg

SEQ ID NO: 107754 - DNA, 15 bp, Homo sapiens
agggcgcgcagctgt

SEQ ID NO: 107755 - DNA, 15 bp, Homo sapiens
aagggcgcgcagctg

SEQ ID NO: 107756 - DNA, 15 bp, Homo sapiens
caagggcgcgcagct

SEQ ID NO: 107757 - DNA, 15 bp, Homo sapiens
acaagggcgcgcagc

SEQ ID NO: 107758 - DNA, 15 bp, Homo sapiens
cacaagggcgcgcag

SEQ ID NO: 107759 - DNA, 15 bp, Homo sapiens
acacaagggcgcgca

SEQ ID NO: 107760 - DNA, 15 bp, Homo sapiens
cacacaagggcgcgc

SEQ ID NO: 107761 - DNA, 15 bp, Homo sapiens
tcacacaagggcgcg

SEQ ID NO: 107762 - DNA, 15 bp, Homo sapiens
gtcacacaagggcgc

SEQ ID NO: 107763 - DNA, 15 bp, Homo sapiens
ggtcacacaagggcg

SEQ ID NO: 107764 - DNA, 15 bp, Homo sapiens
gggtcacacaagggc

SEQ ID NO: 107765 - DNA, 15 bp, Homo sapiens
agggtcacacaaggg

SEQ ID NO: 107766 - DNA, 15 bp, Homo sapiens
gagggtcacacaagg

SEQ ID NO: 107767 - DNA, 15 bp, Homo sapiens
ggagggtcacacaag

SEQ ID NO: 107768 - DNA, 15 bp, Homo sapiens
gggagggtcacacaa

SEQ ID NO: 107769 - DNA, 15 bp, Homo sapiens
ggggagggtcacaca

SEQ ID NO: 107770 - DNA, 15 bp, Homo sapiens
tggggagggtcacac

SEQ ID NO: 107771 - DNA, 15 bp, Homo sapiens
atggggagggtcaca

SEQ ID NO: 107772 - DNA, 15 bp, Homo sapiens
tatggggagggtcac

SEQ ID NO: 107773 - DNA, 15 bp, Homo sapiens
ttatggggagggtca

SEQ ID NO: 107774 - DNA, 15 bp, Homo sapiens
tttatggggagggtc

SEQ ID NO: 107775 - DNA, 15 bp, Homo sapiens
ctttatggggagggt

SEQ ID NO: 107776 - DNA, 15 bp, Homo sapiens
cctttatggggaggg

SEQ ID NO: 107777 - DNA, 15 bp, Homo sapiens
gcctttatggggagg

SEQ ID NO: 107778 - DNA, 15 bp, Homo sapiens
tgcctttatggggag

SEQ ID NO: 107779 - DNA, 15 bp, Homo sapiens
gtgcctttatgggga

SEQ ID NO: 107780 - DNA, 15 bp, Homo sapiens
agtgcctttatgggg

SEQ ID NO: 107781 - DNA, 15 bp, Homo sapiens
aagtgcctttatggg

SEQ ID NO: 107782 - DNA, 15 bp, Homo sapiens
aaagtgcctttatgg

SEQ ID NO: 107783 - DNA, 15 bp, Homo sapiens
taaagtgcctttatg

SEQ ID NO: 107784 - DNA, 15 bp, Homo sapiens
gtaaagtgcctttat

SEQ ID NO: 107785 - DNA, 15 bp, Homo sapiens
tgtaaagtgccttta

SEQ ID NO: 107786 - DNA, 15 bp, Homo sapiens
ctgtaaagtgccttt

SEQ ID NO: 107787 - DNA, 15 bp, Homo sapiens
gctgtaaagtgcctt

SEQ ID NO: 107788 - DNA, 15 bp, Homo sapiens
agctgtaaagtgcct

SEQ ID NO: 107789 - DNA, 15 bp, Homo sapiens
aagctgtaaagtgcc

SEQ ID NO: 107790 - DNA, 15 bp, Homo sapiens
gaagctgtaaagtgc

SEQ ID NO: 107791 - DNA, 15 bp, Homo sapiens
tgaagctgtaaagtg

SEQ ID NO: 107792 - DNA, 15 bp, Homo sapiens
atgaagctgtaaagt

SEQ ID NO: 107793 - DNA, 15 bp, Homo sapiens
catgaagctgtaaag

SEQ ID NO: 107794 - DNA, 15 bp, Homo sapiens
acatgaagctgtaaa

SEQ ID NO: 107795 - DNA, 15 bp, Homo sapiens
aacatgaagctgtaa

SEQ ID NO: 107796 - DNA, 15 bp, Homo sapiens
aaacatgaagctgta

SEQ ID NO: 107797 - DNA, 15 bp, Homo sapiens
gaaacatgaagctgt

SEQ ID NO: 107798 - DNA, 15 bp, Homo sapiens
tgaaacatgaagctg

SEQ ID NO: 107799 - DNA, 15 bp, Homo sapiens
atgaaacatgaagct

SEQ ID NO: 107800 - DNA, 15 bp, Homo sapiens
gatgaaacatgaagc

SEQ ID NO: 107801 - DNA, 15 bp, Homo sapiens
ggatgaaacatgaag

SEQ ID NO: 107802 - DNA, 15 bp, Homo sapiens
tggatgaaacatgaa

SEQ ID NO: 107803 - DNA, 15 bp, Homo sapiens
gtggatgaaacatga

SEQ ID NO: 107804 - DNA, 15 bp, Homo sapiens
agtggatgaaacatg

SEQ ID NO: 107805 - DNA, 15 bp, Homo sapiens
cagtggatgaaacat

SEQ ID NO: 107806 - DNA, 15 bp, Homo sapiens
acagtggatgaaaca

SEQ ID NO: 107807 - DNA, 15 bp, Homo sapiens
gacagtggatgaaac

SEQ ID NO: 107808 - DNA, 15 bp, Homo sapiens
tgacagtggatgaaa

SEQ ID NO: 107809 - DNA, 15 bp, Homo sapiens
gtgacagtggatgaa

SEQ ID NO: 107810 - DNA, 15 bp, Homo sapiens
agtgacagtggatga

SEQ ID NO: 107811 - DNA, 15 bp, Homo sapiens
aagtgacagtggatg

SEQ ID NO: 107812 - DNA, 15 bp, Homo sapiens
aaagtgacagtggat

SEQ ID NO: 107813 - DNA, 15 bp, Homo sapiens
aaaagtgacagtgga

SEQ ID NO: 107814 - DNA, 15 bp, Homo sapiens
aaaaagtgacagtgg

SEQ ID NO: 107815 - DNA, 15 bp, Homo sapiens
aaaaaagtgacagtg

SEQ ID NO: 107816 - DNA, 15 bp, Homo sapiens
aaaaaaagtgacagt

SEQ ID NO: 107817 - DNA, 15 bp, Homo sapiens
aaaaaaaagtgacag

SEQ ID NO: 107818 - DNA, 15 bp, Homo sapiens
taaaaaaaagtgaca

SEQ ID NO: 107819 - DNA, 15 bp, Homo sapiens
gctcccgggacaccc

SEQ ID NO: 107820 - DNA, 15 bp, Homo sapiens
cgctcccgggacacc

SEQ ID NO: 107821 - DNA, 15 bp, Homo sapiens
acgctcccgggacac

SEQ ID NO: 107822 - DNA, 15 bp, Homo sapiens
cacgctcccgggaca

SEQ ID NO: 107823 - DNA, 15 bp, Homo sapiens
ccacgctcccgggac

SEQ ID NO: 107824 - DNA, 15 bp, Homo sapiens
cccacgctcccggga

SEQ ID NO: 107825 - DNA, 15 bp, Homo sapiens
acccacgctcccggg

SEQ ID NO: 107826 - DNA, 15 bp, Homo sapiens
cacccacgctcccgg

SEQ ID NO: 107827 - DNA, 15 bp, Homo sapiens
acacccacgctcccg

SEQ ID NO: 107828 - DNA, 15 bp, Homo sapiens
gacacccacgctccc

SEQ ID NO: 107829 - DNA, 15 bp, Homo sapiens
ggacacccacgctcc

SEQ ID NO: 107830 - DNA, 15 bp, Homo sapiens
gggacacccacgctc

SEQ ID NO: 107831 - DNA, 15 bp, Homo sapiens
cgggacacccacgct

SEQ ID NO: 107832 - DNA, 15 bp, Homo sapiens
aacacccacactccc

SEQ ID NO: 107833 - DNA, 15 bp, Homo sapiens
gaacacccacactcc

SEQ ID NO: 107834 - DNA, 15 bp, Homo sapiens
ggaacacccacactc

SEQ ID NO: 107835 - DNA, 15 bp, Homo sapiens
cggaacacccacact

SEQ ID NO: 107836 - DNA, 15 bp, Homo sapiens
ccggaacacccacac

SEQ ID NO: 107837 - DNA, 15 bp, Homo sapiens
tccggaacacccaca

SEQ ID NO: 107838 - DNA, 15 bp, Homo sapiens
ctccggaacacccac

SEQ ID NO: 107839 - DNA, 15 bp, Homo sapiens
cctccggaacaccca

SEQ ID NO: 107840 - DNA, 15 bp, Homo sapiens
gcctccggaacaccc

SEQ ID NO: 107841 - DNA, 15 bp, Homo sapiens
cgcctccggaacacc

SEQ ID NO: 107842 - DNA, 15 bp, Homo sapiens
tcgcctccggaacac

SEQ ID NO: 107843 - DNA, 15 bp, Homo sapiens
ctcgcctccggaaca

SEQ ID NO: 107844 - DNA, 15 bp, Homo sapiens
cctcgcctccggaac

SEQ ID NO: 107845 - DNA, 15 bp, Homo sapiens
ccctcgcctccggaa

SEQ ID NO: 107846 - DNA, 15 bp, Homo sapiens
accctcgcctccgga

SEQ ID NO: 107847 - DNA, 15 bp, Homo sapiens
gcacactcccgggac

SEQ ID NO: 107848 - DNA, 15 bp, Homo sapiens
cgcacactcccggga

SEQ ID NO: 107849 - DNA, 15 bp, Homo sapiens
acgcacactcccggg

SEQ ID NO: 107850 - DNA, 15 bp, Homo sapiens
cacgcacactcccgg

SEQ ID NO: 107851 - DNA, 15 bp, Homo sapiens
acacgcacactcccg

SEQ ID NO: 107852 - DNA, 15 bp, Homo sapiens
gacacgcacactccc

SEQ ID NO: 107853 - DNA, 15 bp, Homo sapiens
ggacacgcacactcc

SEQ ID NO: 107854 - DNA, 15 bp, Homo sapiens
gggacacgcacactc

SEQ ID NO: 107855 - DNA, 15 bp, Homo sapiens
cgggacacgcacact

SEQ ID NO: 107856 - DNA, 15 bp, Homo sapiens
ccgggacacgcacac

SEQ ID NO: 107857 - DNA, 15 bp, Homo sapiens
cccgggacacgcaca

SEQ ID NO: 107858 - DNA, 15 bp, Homo sapiens
ccccgggacacgcac

SEQ ID NO: 107859 - DNA, 15 bp, Homo sapiens
cccccgggacacgca

SEQ ID NO: 107860 - DNA, 15 bp, Homo sapiens
gcccccgggacacgc

SEQ ID NO: 107861 - DNA, 15 bp, Homo sapiens
cgcccccgggacacg

SEQ ID NO: 107862 - DNA, 15 bp, Homo sapiens
aacacccacgccccc

SEQ ID NO: 107863 - DNA, 15 bp, Homo sapiens
gaacacccacgcccc

SEQ ID NO: 107864 - DNA, 15 bp, Homo sapiens
acctccggaacaccc

SEQ ID NO: 107865 - DNA, 15 bp, Homo sapiens
cacctccggaacacc

SEQ ID NO: 107866 - DNA, 15 bp, Homo sapiens
tcacctccggaacac

SEQ ID NO: 107867 - DNA, 15 bp, Homo sapiens
ctcacctccggaaca

SEQ ID NO: 107868 - DNA, 15 bp, Homo sapiens
cctcacctccggaac

SEQ ID NO: 107869 - DNA, 15 bp, Homo sapiens
ccctcacctccggaa

SEQ ID NO: 107870 - DNA, 15 bp, Homo sapiens
accctcacctccgga

SEQ ID NO: 107871 - DNA, 15 bp, Homo sapiens
caccctcacctccgg

SEQ ID NO: 107872 - DNA, 15 bp, Homo sapiens
acaccctcacctccg

SEQ ID NO: 107873 - DNA, 15 bp, Homo sapiens
gacaccctcacctcc

SEQ ID NO: 107874 - DNA, 15 bp, Homo sapiens
ggacaccctcacctc

SEQ ID NO: 107875 - DNA, 15 bp, Homo sapiens
gggacaccctcacct

SEQ ID NO: 107876 - DNA, 15 bp, Homo sapiens
cgggacaccctcacc

SEQ ID NO: 107877 - DNA, 15 bp, Homo sapiens
ccgggacaccctcac

SEQ ID NO: 107878 - DNA, 15 bp, Homo sapiens
cccgggacaccctca

SEQ ID NO: 107879 - DNA, 15 bp, Homo sapiens
tgggacacccacact

SEQ ID NO: 107880 - DNA, 15 bp, Homo sapiens
ctgggacacccacac

SEQ ID NO: 107881 - DNA, 15 bp, Homo sapiens
cctgggacacccaca

SEQ ID NO: 107882 - DNA, 15 bp, Homo sapiens
ccctgggacacccac

SEQ ID NO: 107883 - DNA, 15 bp, Homo sapiens
cccctgggacaccca

SEQ ID NO: 107884 - DNA, 15 bp, Homo sapiens
gcccctgggacaccc

SEQ ID NO: 107885 - DNA, 15 bp, Homo sapiens
cgcccctgggacacc

SEQ ID NO: 107886 - DNA, 15 bp, Homo sapiens
aacccccgggacacc

SEQ ID NO: 107887 - DNA, 15 bp, Homo sapiens
caacccccgggacac

SEQ ID NO: 107888 - DNA, 15 bp, Homo sapiens
acaacccccgggaca

SEQ ID NO: 107889 - DNA, 15 bp, Homo sapiens
cacaacccccgggac

SEQ ID NO: 107890 - DNA, 15 bp, Homo sapiens
tggaacacccacact

SEQ ID NO: 107891 - DNA, 15 bp, Homo sapiens
ctggaacacccacac

SEQ ID NO: 107892 - DNA, 15 bp, Homo sapiens
tctggaacacccaca

SEQ ID NO: 107893 - DNA, 15 bp, Homo sapiens
ctctggaacacccac

SEQ ID NO: 107894 - DNA, 15 bp, Homo sapiens
cctctggaacaccca

SEQ ID NO: 107895 - DNA, 15 bp, Homo sapiens
gcctctggaacaccc

SEQ ID NO: 107896 - DNA, 15 bp, Homo sapiens
cgcctctggaacacc

SEQ ID NO: 107897 - DNA, 15 bp, Homo sapiens
tcgcctctggaacac

SEQ ID NO: 107898 - DNA, 15 bp, Homo sapiens
ctcgcctctggaaca

SEQ ID NO: 107899 - DNA, 15 bp, Homo sapiens
cctcgcctctggaac

SEQ ID NO: 107900 - DNA, 15 bp, Homo sapiens
ccctcgcctctggaa

SEQ ID NO: 107901 - DNA, 15 bp, Homo sapiens
accctcgcctctgga

SEQ ID NO: 107902 - DNA, 15 bp, Homo sapiens
taccctcgcctctgg

SEQ ID NO: 107903 - DNA, 15 bp, Homo sapiens
ataccctcgcctctg

SEQ ID NO: 107904 - DNA, 15 bp, Homo sapiens
gataccctcgcctct

SEQ ID NO: 107905 - DNA, 15 bp, Homo sapiens
cgggacactcacact

SEQ ID NO: 107906 - DNA, 15 bp, Homo sapiens
ccgggacactcacac

SEQ ID NO: 107907 - DNA, 15 bp, Homo sapiens
cccgggacactcaca

SEQ ID NO: 107908 - DNA, 15 bp, Homo sapiens
ccccgggacactcac

SEQ ID NO: 107909 - DNA, 15 bp, Homo sapiens
cccccgggacactca

SEQ ID NO: 107910 - DNA, 15 bp, Homo sapiens
acccccgggacactc

SEQ ID NO: 107911 - DNA, 15 bp, Homo sapiens
cacccccgggacact

SEQ ID NO: 107912 - DNA, 15 bp, Homo sapiens
gacccccgggacacc

SEQ ID NO: 107913 - DNA, 15 bp, Homo sapiens
cgacccccgggacac

SEQ ID NO: 107914 - DNA, 15 bp, Homo sapiens
acgacccccgggaca

SEQ ID NO: 107915 - DNA, 15 bp, Homo sapiens
cacgacccccgggac

SEQ ID NO: 107916 - DNA, 15 bp, Homo sapiens
ccacgacccccggga

SEQ ID NO: 107917 - DNA, 15 bp, Homo sapiens
cccacgacccccggg

SEQ ID NO: 107918 - DNA, 15 bp, Homo sapiens
acccacgacccccgg

SEQ ID NO: 107919 - DNA, 15 bp, Homo sapiens
cacccacgacccccg

SEQ ID NO: 107920 - DNA, 15 bp, Homo sapiens
acacccacgaccccc

SEQ ID NO: 107921 - DNA, 15 bp, Homo sapiens
gacacccacgacccc

SEQ ID NO: 107922 - DNA, 15 bp, Homo sapiens
ggacacccacgaccc

SEQ ID NO: 107923 - DNA, 15 bp, Homo sapiens
gggacacccacgacc

SEQ ID NO: 107924 - DNA, 15 bp, Homo sapiens
cgggacacccacgac

SEQ ID NO: 107925 - DNA, 15 bp, Homo sapiens
ccgggacacccacga

SEQ ID NO: 107926 - DNA, 15 bp, Homo sapiens
caccctcgcctctgg

SEQ ID NO: 107927 - DNA, 15 bp, Homo sapiens
acaccctcgcctctg

SEQ ID NO: 107928 - DNA, 15 bp, Homo sapiens
gacaccctcgcctct

SEQ ID NO: 107929 - DNA, 15 bp, Homo sapiens
ctgagtgtgaggtgt

SEQ ID NO: 107930 - DNA, 15 bp, Homo sapiens
cctgagtgtgaggtg

SEQ ID NO: 107931 - DNA, 15 bp, Homo sapiens
ccctgagtgtgaggt

SEQ ID NO: 107932 - DNA, 15 bp, Homo sapiens
gccctgagtgtgagg

SEQ ID NO: 107933 - DNA, 15 bp, Homo sapiens
cgccctgagtgtgag

SEQ ID NO: 107934 - DNA, 15 bp, Homo sapiens
gcgccctgagtgtga

SEQ ID NO: 107935 - DNA, 15 bp, Homo sapiens
tgcgccctgagtgtg

SEQ ID NO: 107936 - DNA, 15 bp, Homo sapiens
gtgcgccctgagtgt

SEQ ID NO: 107937 - DNA, 15 bp, Homo sapiens
agtgcgccctgagtg

SEQ ID NO: 107938 - DNA, 15 bp, Homo sapiens
aagtgcgccctgagt

SEQ ID NO: 107939 - DNA, 15 bp, Homo sapiens
gaagtgcgccctgag

SEQ ID NO: 107940 - DNA, 15 bp, Homo sapiens
tgaagtgcgccctga

SEQ ID NO: 107941 - DNA, 15 bp, Homo sapiens
gtgaagtgcgccctg

SEQ ID NO: 107942 - DNA, 15 bp, Homo sapiens
tgtgaagtgcgccct

SEQ ID NO: 107943 - DNA, 15 bp, Homo sapiens
gtgtgaagtgcgccc

SEQ ID NO: 107944 - DNA, 15 bp, Homo sapiens
agtgtgaagtgcgcc

SEQ ID NO: 107945 - DNA, 15 bp, Homo sapiens
gagtgtgaagtgcgc

SEQ ID NO: 107946 - DNA, 15 bp, Homo sapiens
tgagtgtgaagtgcg

SEQ ID NO: 107947 - DNA, 15 bp, Homo sapiens
gtgagtgtgaagtgc

SEQ ID NO: 107948 - DNA, 15 bp, Homo sapiens
ggtgtgaggtgaccc

SEQ ID NO: 107949 - DNA, 15 bp, Homo sapiens
ctgtgaggtgtcctg

SEQ ID NO: 107950 - DNA, 15 bp, Homo sapiens
tctgtgaggtgtcct

SEQ ID NO: 107951 - DNA, 15 bp, Homo sapiens
ctctgtgaggtgtcc

SEQ ID NO: 107952 - DNA, 15 bp, Homo sapiens
cctctgtgaggtgtc

SEQ ID NO: 107953 - DNA, 15 bp, Homo sapiens
acctctgtgaggtgt

SEQ ID NO: 107954 - DNA, 15 bp, Homo sapiens
gacctctgtgaggtg

SEQ ID NO: 107955 - DNA, 15 bp, Homo sapiens
tgacctctgtgaggt

SEQ ID NO: 107956 - DNA, 15 bp, Homo sapiens
gtgacctctgtgagg

SEQ ID NO: 107957 - DNA, 15 bp, Homo sapiens
ggtgacctctgtgag

SEQ ID NO: 107958 - DNA, 15 bp, Homo sapiens
aggtgacctctgtga

SEQ ID NO: 107959 - DNA, 15 bp, Homo sapiens
gaggtgacctctgtg

SEQ ID NO: 107960 - DNA, 15 bp, Homo sapiens
tgaggtgacctctgt

SEQ ID NO: 107961 - DNA, 15 bp, Homo sapiens
gtgaggtgacctctg

SEQ ID NO: 107962 - DNA, 15 bp, Homo sapiens
tgtgaggtgacctct

SEQ ID NO: 107963 - DNA, 15 bp, Homo sapiens
gtgtgaggtgacctc

SEQ ID NO: 107964 - DNA, 15 bp, Homo sapiens
tgtgtgaggtgacct

SEQ ID NO: 107965 - DNA, 15 bp, Homo sapiens
ctgtgtgaggtgacc

SEQ ID NO: 107966 - DNA, 15 bp, Homo sapiens
cctgtgtgaggtgac

SEQ ID NO: 107967 - DNA, 15 bp, Homo sapiens
tcctgtgtgaggtga

SEQ ID NO: 107968 - DNA, 15 bp, Homo sapiens
gtcctgtgtgaggtg

SEQ ID NO: 107969 - DNA, 15 bp, Homo sapiens
tgtcctgtgtgaggt

SEQ ID NO: 107970 - DNA, 15 bp, Homo sapiens
gtgtcctgtgtgagg

SEQ ID NO: 107971 - DNA, 15 bp, Homo sapiens
ggtgtcctgtgtgag

SEQ ID NO: 107972 - DNA, 15 bp, Homo sapiens
aggtgtcctgtgtga

SEQ ID NO: 107973 - DNA, 15 bp, Homo sapiens
gaggtgtcctgtgtg

SEQ ID NO: 107974 - DNA, 15 bp, Homo sapiens
tgaggtgtcctgtgt

SEQ ID NO: 107975 - DNA, 15 bp, Homo sapiens
accctgagtgtgagg

SEQ ID NO: 107976 - DNA, 15 bp, Homo sapiens
caccctgagtgtgag

SEQ ID NO: 107977 - DNA, 15 bp, Homo sapiens
gcaccctgagtgtga

SEQ ID NO: 107978 - DNA, 15 bp, Homo sapiens
tgcaccctgagtgtg

SEQ ID NO: 107979 - DNA, 15 bp, Homo sapiens
gtgcaccctgagtgt

SEQ ID NO: 107980 - DNA, 15 bp, Homo sapiens
agtgcaccctgagtg

SEQ ID NO: 107981 - DNA, 15 bp, Homo sapiens
aagtgcaccctgagt

SEQ ID NO: 107982 - DNA, 15 bp, Homo sapiens
gaagtgcaccctgag

SEQ ID NO: 107983 - DNA, 15 bp, Homo sapiens
tgaagtgcaccctga

SEQ ID NO: 107984 - DNA, 15 bp, Homo sapiens
ttgaagtgcaccctg

SEQ ID NO: 107985 - DNA, 15 bp, Homo sapiens
tttgaagtgcaccct

SEQ ID NO: 107986 - DNA, 15 bp, Homo sapiens
gtttgaagtgcaccc

SEQ ID NO: 107987 - DNA, 15 bp, Homo sapiens
ggtttgaagtgcacc

SEQ ID NO: 107988 - DNA, 15 bp, Homo sapiens
gggtttgaagtgcac

SEQ ID NO: 107989 - DNA, 15 bp, Homo sapiens
tgggtttgaagtgca

SEQ ID NO: 107990 - DNA, 15 bp, Homo sapiens
gtgggtttgaagtgc

SEQ ID NO: 107991 - DNA, 15 bp, Homo sapiens
tgtgggtttgaagtg

SEQ ID NO: 107992 - DNA, 15 bp, Homo sapiens
ctgtgggtttgaagt

SEQ ID NO: 107993 - DNA, 15 bp, Homo sapiens
cctgtgggtttgaag

SEQ ID NO: 107994 - DNA, 15 bp, Homo sapiens
acctgtgggtttgaa

SEQ ID NO: 107995 - DNA, 15 bp, Homo sapiens
gacctgtgggtttga

SEQ ID NO: 107996 - DNA, 15 bp, Homo sapiens
tgacctgtgggtttg

SEQ ID NO: 107997 - DNA, 15 bp, Homo sapiens
atgacctgtgggttt

SEQ ID NO: 107998 - DNA, 15 bp, Homo sapiens
aatgacctgtgggtt

SEQ ID NO: 107999 - DNA, 15 bp, Homo sapiens
aaatgacctgtgggt

SEQ ID NO: 108000 - DNA, 15 bp, Homo sapiens
gaaatgacctgtggg

SEQ ID NO: 108001 - DNA, 15 bp, Homo sapiens
tgaaatgacctgtgg

SEQ ID NO: 108002 - DNA, 15 bp, Homo sapiens
gtgaaatgacctgtg

SEQ ID NO: 108003 - DNA, 15 bp, Homo sapiens
ggtgaaatgacctgt

SEQ ID NO: 108004 - DNA, 15 bp, Homo sapiens
aggtgaaatgacctg

SEQ ID NO: 108005 - DNA, 15 bp, Homo sapiens
gaggtgaaatgacct

SEQ ID NO: 108006 - DNA, 15 bp, Homo sapiens
tgaggtgaaatgacc

SEQ ID NO: 108007 - DNA, 15 bp, Homo sapiens
gtgaggtgaaatgac

SEQ ID NO: 108008 - DNA, 15 bp, Homo sapiens
tgtgaggtgaaatga

SEQ ID NO: 108009 - DNA, 15 bp, Homo sapiens
gtgtgaggtgaaatg

SEQ ID NO: 108010 - DNA, 15 bp, Homo sapiens
agtgtgaggtgaaat

SEQ ID NO: 108011 - DNA, 15 bp, Homo sapiens
gagtgtgaggtgaaa

SEQ ID NO: 108012 - DNA, 15 bp, Homo sapiens
tgagtgtgaggtgaa

SEQ ID NO: 108013 - DNA, 15 bp, Homo sapiens
atcttgtgtgaggtg

SEQ ID NO: 108014 - DNA, 15 bp, Homo sapiens
tatcttgtgtgaggt

SEQ ID NO: 108015 - DNA, 15 bp, Homo sapiens
gtatcttgtgtgagg

SEQ ID NO: 108016 - DNA, 15 bp, Homo sapiens
ggtatcttgtgtgag

SEQ ID NO: 108017 - DNA, 15 bp, Homo sapiens
tggtatcttgtgtga

SEQ ID NO: 108018 - DNA, 15 bp, Homo sapiens
gtggtatcttgtgtg

SEQ ID NO: 108019 - DNA, 15 bp, Homo sapiens
tgtggtatcttgtgt

SEQ ID NO: 108020 - DNA, 15 bp, Homo sapiens
gtgtggtatcttgtg

SEQ ID NO: 108021 - DNA, 15 bp, Homo sapiens
cgtgtggtatcttgt

SEQ ID NO: 108022 - DNA, 15 bp, Homo sapiens
ccgtgtggtatcttg

SEQ ID NO: 108023 - DNA, 15 bp, Homo sapiens
cccgtgtggtatctt

SEQ ID NO: 108024 - DNA, 15 bp, Homo sapiens
ccccgtgtggtatct

SEQ ID NO: 108025 - DNA, 15 bp, Homo sapiens
gccccgtgtggtatc

SEQ ID NO: 108026 - DNA, 15 bp, Homo sapiens
tgccccgtgtggtat

SEQ ID NO: 108027 - DNA, 15 bp, Homo sapiens
gtgccccgtgtggta

SEQ ID NO: 108028 - DNA, 15 bp, Homo sapiens
tgtgccccgtgtggt

SEQ ID NO: 108029 - DNA, 15 bp, Homo sapiens
gtgtgccccgtgtgg

SEQ ID NO: 108030 - DNA, 15 bp, Homo sapiens
cgtgtgaggtgacct

SEQ ID NO: 108031 - DNA, 15 bp, Homo sapiens
ccgtgtgaggtgacc

SEQ ID NO: 108032 - DNA, 15 bp, Homo sapiens
cccgtgtgaggtgac

SEQ ID NO: 108033 - DNA, 15 bp, Homo sapiens
ccccgtgtgaggtga

SEQ ID NO: 108034 - DNA, 15 bp, Homo sapiens
tcctgtgtgaggtgt

SEQ ID NO: 108035 - DNA, 15 bp, Homo sapiens
atgagtgtgaggtgt

SEQ ID NO: 108036 - DNA, 15 bp, Homo sapiens
tatgagtgtgaggtg

SEQ ID NO: 108037 - DNA, 15 bp, Homo sapiens
ctatgagtgtgaggt

SEQ ID NO: 108038 - DNA, 15 bp, Homo sapiens
cctatgagtgtgagg

SEQ ID NO: 108039 - DNA, 15 bp, Homo sapiens
acctatgagtgtgag

SEQ ID NO: 108040 - DNA, 15 bp, Homo sapiens
gacctatgagtgtga

SEQ ID NO: 108041 - DNA, 15 bp, Homo sapiens
tgacctatgagtgtg

SEQ ID NO: 108042 - DNA, 15 bp, Homo sapiens
gtgacctatgagtgt

SEQ ID NO: 108043 - DNA, 15 bp, Homo sapiens
ggtgacctatgagtg

SEQ ID NO: 108044 - DNA, 15 bp, Homo sapiens
aggtgacctatgagt

SEQ ID NO: 108045 - DNA, 15 bp, Homo sapiens
gaggtgacctatgag

SEQ ID NO: 108046 - DNA, 15 bp, Homo sapiens
tgaggtgacctatga

SEQ ID NO: 108047 - DNA, 15 bp, Homo sapiens
ctgaggtgacctatg

SEQ ID NO: 108048 - DNA, 15 bp, Homo sapiens
actgaggtgacctat

SEQ ID NO: 108049 - DNA, 15 bp, Homo sapiens
gactgaggtgaccta

SEQ ID NO: 108050 - DNA, 15 bp, Homo sapiens
agactgaggtgacct

SEQ ID NO: 108051 - DNA, 15 bp, Homo sapiens
aagactgaggtgacc

SEQ ID NO: 108052 - DNA, 15 bp, Homo sapiens
taagactgaggtgac

SEQ ID NO: 108053 - DNA, 15 bp, Homo sapiens
gtaagactgaggtga

SEQ ID NO: 108054 - DNA, 15 bp, Homo sapiens
tgtaagactgaggtg

SEQ ID NO: 108055 - DNA, 15 bp, Homo sapiens
ctgtaagactgaggt

SEQ ID NO: 108056 - DNA, 15 bp, Homo sapiens
cctgtaagactgagg

SEQ ID NO: 108057 - DNA, 15 bp, Homo sapiens
tcctgtaagactgag

SEQ ID NO: 108058 - DNA, 15 bp, Homo sapiens
gtcctgtaagactga

SEQ ID NO: 108059 - DNA, 15 bp, Homo sapiens
tgtcctgtaagactg

SEQ ID NO: 108060 - DNA, 15 bp, Homo sapiens
ttgtcctgtaagact

SEQ ID NO: 108061 - DNA, 15 bp, Homo sapiens
gttgtcctgtaagac

SEQ ID NO: 108062 - DNA, 15 bp, Homo sapiens
agttgtcctgtaaga

SEQ ID NO: 108063 - DNA, 15 bp, Homo sapiens
gagttgtcctgtaag

SEQ ID NO: 108064 - DNA, 15 bp, Homo sapiens
tgagttgtcctgtaa

SEQ ID NO: 108065 - DNA, 15 bp, Homo sapiens
gtgagttgtcctgta

SEQ ID NO: 108066 - DNA, 15 bp, Homo sapiens
tgtgagttgtcctgt

SEQ ID NO: 108067 - DNA, 15 bp, Homo sapiens
gtgtgagttgtcctg

SEQ ID NO: 108068 - DNA, 15 bp, Homo sapiens
agtgtgagttgtcct

SEQ ID NO: 108069 - DNA, 15 bp, Homo sapiens
gagtgtgagttgtcc

SEQ ID NO: 108070 - DNA, 15 bp, Homo sapiens
tgagtgtgagttgtc

SEQ ID NO: 108071 - DNA, 15 bp, Homo sapiens
gtgagtgtgagttgt

SEQ ID NO: 108072 - DNA, 15 bp, Homo sapiens
tgtgagtgtgagttg

SEQ ID NO: 108073 - DNA, 15 bp, Homo sapiens
ctgtgagtgtgagtt

SEQ ID NO: 108074 - DNA, 15 bp, Homo sapiens
cctgtgagtgtgagt

SEQ ID NO: 108075 - DNA, 15 bp, Homo sapiens
acctgtgagtgtgag

SEQ ID NO: 108076 - DNA, 15 bp, Homo sapiens
aaggtgacctgtgag

SEQ ID NO: 108077 - DNA, 15 bp, Homo sapiens
taaggtgacctgtga

SEQ ID NO: 108078 - DNA, 15 bp, Homo sapiens
gtaaggtgacctgtg

SEQ ID NO: 108079 - DNA, 15 bp, Homo sapiens
agtaaggtgacctgt

SEQ ID NO: 108080 - DNA, 15 bp, Homo sapiens
gagtaaggtgacctg

SEQ ID NO: 108081 - DNA, 15 bp, Homo sapiens
agagtaaggtgacct

SEQ ID NO: 108082 - DNA, 15 bp, Homo sapiens
gagagtaaggtgacc

SEQ ID NO: 108083 - DNA, 15 bp, Homo sapiens
tgagagtaaggtgac

SEQ ID NO: 108084 - DNA, 15 bp, Homo sapiens
gtgagagtaaggtga

SEQ ID NO: 108085 - DNA, 15 bp, Homo sapiens
tgtgagagtaaggtg

SEQ ID NO: 108086 - DNA, 15 bp, Homo sapiens
ctgtgagagtaaggt

SEQ ID NO: 108087 - DNA, 15 bp, Homo sapiens
cctgtgagagtaagg

SEQ ID NO: 108088 - DNA, 15 bp, Homo sapiens
tcctgtgagagtaag

SEQ ID NO: 108089 - DNA, 15 bp, Homo sapiens
gtcctgtgagagtaa

SEQ ID NO: 108090 - DNA, 15 bp, Homo sapiens
tgtcctgtgagagta

SEQ ID NO: 108091 - DNA, 15 bp, Homo sapiens
gtgtcctgtgagagt

SEQ ID NO: 108092 - DNA, 15 bp, Homo sapiens
ggtgtcctgtgagag

SEQ ID NO: 108093 - DNA, 15 bp, Homo sapiens
aggtgtcctgtgaga

SEQ ID NO: 108094 - DNA, 15 bp, Homo sapiens
agtgaggtgtcctgt

SEQ ID NO: 108095 - DNA, 15 bp, Homo sapiens
gagtgaggtgtcctg

SEQ ID NO: 108096 - DNA, 15 bp, Homo sapiens
agagtgaggtgtcct

SEQ ID NO: 108097 - DNA, 15 bp, Homo sapiens
gagagtgaggtgtcc

SEQ ID NO: 108098 - DNA, 15 bp, Homo sapiens
tgagagtgaggtgtc

SEQ ID NO: 108099 - DNA, 15 bp, Homo sapiens
gtgagagtgaggtgt

SEQ ID NO: 108100 - DNA, 15 bp, Homo sapiens
tgtgagagtgaggtg

SEQ ID NO: 108101 - DNA, 15 bp, Homo sapiens
ctgtgagagtgaggt

SEQ ID NO: 108102 - DNA, 15 bp, Homo sapiens
cctgtgagagtgagg

SEQ ID NO: 108103 - DNA, 15 bp, Homo sapiens
tcctgtgagagtgag

SEQ ID NO: 108104 - DNA, 15 bp, Homo sapiens
gtcctgtgagagtga

SEQ ID NO: 108105 - DNA, 15 bp, Homo sapiens
tgtcctgtgagagtg

SEQ ID NO: 108106 - DNA, 15 bp, Homo sapiens
agtgaagtgtgccct

SEQ ID NO: 108107 - DNA, 15 bp, Homo sapiens
gagtgaagtgtgccc

SEQ ID NO: 108108 - DNA, 15 bp, Homo sapiens
ggagtgaagtgtgcc

SEQ ID NO: 108109 - DNA, 15 bp, Homo sapiens
gggagtgaagtgtgc

SEQ ID NO: 108110 - DNA, 15 bp, Homo sapiens
tgggagtgaagtgtg

SEQ ID NO: 108111 - DNA, 15 bp, Homo sapiens
gtgggagtgaagtgt

SEQ ID NO: 108112 - DNA, 15 bp, Homo sapiens
tgtgggagtgaagtg

SEQ ID NO: 108113 - DNA, 15 bp, Homo sapiens
ctgtgggagtgaagt

SEQ ID NO: 108114 - DNA, 15 bp, Homo sapiens
cctgtgggagtgaag

SEQ ID NO: 108115 - DNA, 15 bp, Homo sapiens
acctgtgggagtgaa

SEQ ID NO: 108116 - DNA, 15 bp, Homo sapiens
gacctgtgggagtga

SEQ ID NO: 108117 - DNA, 15 bp, Homo sapiens
tgacctgtgggagtg

SEQ ID NO: 108118 - DNA, 15 bp, Homo sapiens
gtgacctgtgggagt

SEQ ID NO: 108119 - DNA, 15 bp, Homo sapiens
ggtgacctgtgggag

SEQ ID NO: 108120 - DNA, 15 bp, Homo sapiens
tggtgacctgtggga

SEQ ID NO: 108121 - DNA, 15 bp, Homo sapiens
atggtgacctgtggg

SEQ ID NO: 108122 - DNA, 15 bp, Homo sapiens
tatggtgacctgtgg

SEQ ID NO: 108123 - DNA, 15 bp, Homo sapiens
gtatggtgacctgtg

SEQ ID NO: 108124 - DNA, 15 bp, Homo sapiens
ggtatggtgacctgt

SEQ ID NO: 108125 - DNA, 15 bp, Homo sapiens
aggtatggtgacctg

SEQ ID NO: 108126 - DNA, 15 bp, Homo sapiens
gaggtatggtgacct

SEQ ID NO: 108127 - DNA, 15 bp, Homo sapiens
tgaggtatggtgacc

SEQ ID NO: 108128 - DNA, 15 bp, Homo sapiens
gtgaggtatggtgac

SEQ ID NO: 108129 - DNA, 15 bp, Homo sapiens
tgtgaggtatggtga

SEQ ID NO: 108130 - DNA, 15 bp, Homo sapiens
gtgtgaggtatggtg

SEQ ID NO: 108131 - DNA, 15 bp, Homo sapiens
tgtgtgaggtatggt

SEQ ID NO: 108132 - DNA, 15 bp, Homo sapiens
ctgtgtgaggtatgg

SEQ ID NO: 108133 - DNA, 15 bp, Homo sapiens
tctgtgtgaggtatg

SEQ ID NO: 108134 - DNA, 15 bp, Homo sapiens
atctgtgtgaggtat

SEQ ID NO: 108135 - DNA, 15 bp, Homo sapiens
gatctgtgtgaggta

SEQ ID NO: 108136 - DNA, 15 bp, Homo sapiens
tgatctgtgtgaggt

SEQ ID NO: 108137 - DNA, 15 bp, Homo sapiens
gtgatctgtgtgagg

SEQ ID NO: 108138 - DNA, 15 bp, Homo sapiens
ggtgatctgtgtgag

SEQ ID NO: 108139 - DNA, 15 bp, Homo sapiens
aggtgatctgtgtga

SEQ ID NO: 108140 - DNA, 15 bp, Homo sapiens
gaggtgatctgtgtg

SEQ ID NO: 108141 - DNA, 15 bp, Homo sapiens
tgaggtgatctgtgt

SEQ ID NO: 108142 - DNA, 15 bp, Homo sapiens
atgaggtgatctgtg

SEQ ID NO: 108143 - DNA, 15 bp, Homo sapiens
tatgaggtgatctgt

SEQ ID NO: 108144 - DNA, 15 bp, Homo sapiens
gtatgaggtgatctg

SEQ ID NO: 108145 - DNA, 15 bp, Homo sapiens
agtatgaggtgatct

SEQ ID NO: 108146 - DNA, 15 bp, Homo sapiens
gagtatgaggtgatc

SEQ ID NO: 108147 - DNA, 15 bp, Homo sapiens
tgagtatgaggtgat

SEQ ID NO: 108148 - DNA, 15 bp, Homo sapiens
gtgagtatgaggtga

SEQ ID NO: 108149 - DNA, 15 bp, Homo sapiens
tgtgagtatgaggtg

SEQ ID NO: 108150 - DNA, 15 bp, Homo sapiens
ctgtgagtatgaggt

SEQ ID NO: 108151 - DNA, 15 bp, Homo sapiens
tctgtgagtatgagg

SEQ ID NO: 108152 - DNA, 15 bp, Homo sapiens
atctgtgagtatgag

SEQ ID NO: 108153 - DNA, 15 bp, Homo sapiens
gatctgtgagtatga

SEQ ID NO: 108154 - DNA, 15 bp, Homo sapiens
tgatctgtgagtatg

SEQ ID NO: 108155 - DNA, 15 bp, Homo sapiens
gtgatctgtgagtat

SEQ ID NO: 108156 - DNA, 15 bp, Homo sapiens
agtgatctgtgagta

SEQ ID NO: 108157 - DNA, 15 bp, Homo sapiens
aagtgatctgtgagt

SEQ ID NO: 108158 - DNA, 15 bp, Homo sapiens
gaagtgatctgtgag

SEQ ID NO: 108159 - DNA, 15 bp, Homo sapiens
tgaagtgatctgtga

SEQ ID NO: 108160 - DNA, 15 bp, Homo sapiens
atgaagtgatctgtg

SEQ ID NO: 108161 - DNA, 15 bp, Homo sapiens
aatgaagtgatctgt

SEQ ID NO: 108162 - DNA, 15 bp, Homo sapiens
gaatgaagtgatctg

SEQ ID NO: 108163 - DNA, 15 bp, Homo sapiens
agaatgaagtgatct

SEQ ID NO: 108164 - DNA, 15 bp, Homo sapiens
gagaatgaagtgatc

SEQ ID NO: 108165 - DNA, 15 bp, Homo sapiens
tgagaatgaagtgat

SEQ ID NO: 108166 - DNA, 15 bp, Homo sapiens
gtgagaatgaagtga

SEQ ID NO: 108167 - DNA, 15 bp, Homo sapiens
tgtgagaatgaagtg

SEQ ID NO: 108168 - DNA, 15 bp, Homo sapiens
ctgtgagaatgaagt

SEQ ID NO: 108169 - DNA, 15 bp, Homo sapiens
cctgtgagaatgaag

SEQ ID NO: 108170 - DNA, 15 bp, Homo sapiens
tcctgtgagaatgaa

SEQ ID NO: 108171 - DNA, 15 bp, Homo sapiens
atcctgtgagaatga

SEQ ID NO: 108172 - DNA, 15 bp, Homo sapiens
tatcctgtgagaatg

SEQ ID NO: 108173 - DNA, 15 bp, Homo sapiens
gtatcctgtgagaat

SEQ ID NO: 108174 - DNA, 15 bp, Homo sapiens
ggtatcctgtgagaa

SEQ ID NO: 108175 - DNA, 15 bp, Homo sapiens
aggtatcctgtgaga

SEQ ID NO: 108176 - DNA, 15 bp, Homo sapiens
gaggtatcctgtgag

SEQ ID NO: 108177 - DNA, 15 bp, Homo sapiens
tgaggtatcctgtga

SEQ ID NO: 108178 - DNA, 15 bp, Homo sapiens
gtgaggtatcctgtg

SEQ ID NO: 108179 - DNA, 15 bp, Homo sapiens
tgtgaggtatcctgt

SEQ ID NO: 108180 - DNA, 15 bp, Homo sapiens
gtgtgaggtatcctg

SEQ ID NO: 108181 - DNA, 15 bp, Homo sapiens
agtgtgaggtatcct

SEQ ID NO: 108182 - DNA, 15 bp, Homo sapiens
gagtgtgaggtatcc

SEQ ID NO: 108183 - DNA, 15 bp, Homo sapiens
tgagtgtgaggtatc

SEQ ID NO: 108184 - DNA, 15 bp, Homo sapiens
ctgagtgtgaggtat

SEQ ID NO: 108185 - DNA, 15 bp, Homo sapiens
cctgagtgtgaggta

SEQ ID NO: 108186 - DNA, 15 bp, Homo sapiens
tgccctgagtgtgag

SEQ ID NO: 108187 - DNA, 15 bp, Homo sapiens
gtgccctgagtgtga

SEQ ID NO: 108188 - DNA, 15 bp, Homo sapiens
tgtgccctgagtgtg

SEQ ID NO: 108189 - DNA, 15 bp, Homo sapiens
gtgtgccctgagtgt

SEQ ID NO: 108190 - DNA, 15 bp, Homo sapiens
agtgtgccctgagtg

SEQ ID NO: 108191 - DNA, 15 bp, Homo sapiens
aagtgtgccctgagt

SEQ ID NO: 108192 - DNA, 15 bp, Homo sapiens
gaagtgtgccctgag

SEQ ID NO: 108193 - DNA, 15 bp, Homo sapiens
tgaagtgtgccctga

SEQ ID NO: 108194 - DNA, 15 bp, Homo sapiens
tgtgacctgtgagtg

SEQ ID NO: 108195 - DNA, 15 bp, Homo sapiens
gtgtgacctgtgagt

SEQ ID NO: 108196 - DNA, 15 bp, Homo sapiens
ggtgtgacctgtgag

SEQ ID NO: 108197 - DNA, 15 bp, Homo sapiens
aggtgtgacctgtga

SEQ ID NO: 108198 - DNA, 15 bp, Homo sapiens
gaggtgtgacctgtg

SEQ ID NO: 108199 - DNA, 15 bp, Homo sapiens
tgaggtgtgacctgt

SEQ ID NO: 108200 - DNA, 15 bp, Homo sapiens
gtgaggtgtgacctg

SEQ ID NO: 108201 - DNA, 15 bp, Homo sapiens
tgtgaggtgtgacct

SEQ ID NO: 108202 - DNA, 15 bp, Homo sapiens
gtgtgaggtgtgacc

SEQ ID NO: 108203 - DNA, 15 bp, Homo sapiens
tgtgtgaggtgtgac

SEQ ID NO: 108204 - DNA, 15 bp, Homo sapiens
ctgtgtgaggtgtga

SEQ ID NO: 108205 - DNA, 15 bp, Homo sapiens
tctgtgtgaggtgtg

SEQ ID NO: 108206 - DNA, 15 bp, Homo sapiens
atctgtgtgaggtgt

SEQ ID NO: 108207 - DNA, 15 bp, Homo sapiens
gatctgtgtgaggtg

SEQ ID NO: 108208 - DNA, 15 bp, Homo sapiens
atgatctgtgtgagg

SEQ ID NO: 108209 - DNA, 15 bp, Homo sapiens
gatgatctgtgtgag

SEQ ID NO: 108210 - DNA, 15 bp, Homo sapiens
agatgatctgtgtga

SEQ ID NO: 108211 - DNA, 15 bp, Homo sapiens
gagatgatctgtgtg

SEQ ID NO: 108212 - DNA, 15 bp, Homo sapiens
tgagatgatctgtgt

SEQ ID NO: 108213 - DNA, 15 bp, Homo sapiens
atgagatgatctgtg

SEQ ID NO: 108214 - DNA, 15 bp, Homo sapiens
aatgagatgatctgt

SEQ ID NO: 108215 - DNA, 15 bp, Homo sapiens
gaatgagatgatctg

SEQ ID NO: 108216 - DNA, 15 bp, Homo sapiens
agaatgagatgatct

SEQ ID NO: 108217 - DNA, 15 bp, Homo sapiens
gagaatgagatgatc

SEQ ID NO: 108218 - DNA, 15 bp, Homo sapiens
tgagaatgagatgat

SEQ ID NO: 108219 - DNA, 15 bp, Homo sapiens
gtgagaatgagatga

SEQ ID NO: 108220 - DNA, 15 bp, Homo sapiens
tgtgagaatgagatg

SEQ ID NO: 108221 - DNA, 15 bp, Homo sapiens
ctgtgagaatgagat

SEQ ID NO: 108222 - DNA, 15 bp, Homo sapiens
cctgtgagaatgaga

SEQ ID NO: 108223 - DNA, 15 bp, Homo sapiens
tcctgtgagaatgag

SEQ ID NO: 108224 - DNA, 15 bp, Homo sapiens
gtcctgtgagaatga

SEQ ID NO: 108225 - DNA, 15 bp, Homo sapiens
tgtcctgtgagaatg

SEQ ID NO: 108226 - DNA, 15 bp, Homo sapiens
gtgtcctgtgagaat

SEQ ID NO: 108227 - DNA, 15 bp, Homo sapiens
ggtgtcctgtgagaa

SEQ ID NO: 108228 - DNA, 15 bp, Homo sapiens
ggaggtgtcctgtga

SEQ ID NO: 108229 - DNA, 15 bp, Homo sapiens
gggaggtgtcctgtg

SEQ ID NO: 108230 - DNA, 15 bp, Homo sapiens
agggaggtgtcctgt

SEQ ID NO: 108231 - DNA, 15 bp, Homo sapiens
gagggaggtgtcctg

SEQ ID NO: 108232 - DNA, 15 bp, Homo sapiens
agagggaggtgtcct

SEQ ID NO: 108233 - DNA, 15 bp, Homo sapiens
gagagggaggtgtcc

SEQ ID NO: 108234 - DNA, 15 bp, Homo sapiens
tgagagggaggtgtc

SEQ ID NO: 108235 - DNA, 15 bp, Homo sapiens
gtgagagggaggtgt

SEQ ID NO: 108236 - DNA, 15 bp, Homo sapiens
tgtgagagggaggtg

SEQ ID NO: 108237 - DNA, 15 bp, Homo sapiens
ctgtgagagggaggt

SEQ ID NO: 108238 - DNA, 15 bp, Homo sapiens
cctgtgagagggagg

SEQ ID NO: 108239 - DNA, 15 bp, Homo sapiens
acctgtgagagggag

SEQ ID NO: 108240 - DNA, 15 bp, Homo sapiens
gacctgtgagaggga

SEQ ID NO: 108241 - DNA, 15 bp, Homo sapiens
tgacctgtgagaggg

SEQ ID NO: 108242 - DNA, 15 bp, Homo sapiens
gtgacctgtgagagg

SEQ ID NO: 108243 - DNA, 15 bp, Homo sapiens
ggtgacctgtgagag

SEQ ID NO: 108244 - DNA, 15 bp, Homo sapiens
aggtgacctgtgaga

SEQ ID NO: 108245 - DNA, 15 bp, Homo sapiens
ctgagtgtgaagtgt

SEQ ID NO: 108246 - DNA, 15 bp, Homo sapiens
cctgagtgtgaagtg

SEQ ID NO: 108247 - DNA, 15 bp, Homo sapiens
acctgagtgtgaagt

SEQ ID NO: 108248 - DNA, 15 bp, Homo sapiens
gacctgagtgtgaag

SEQ ID NO: 108249 - DNA, 15 bp, Homo sapiens
tgacctgagtgtgaa

SEQ ID NO: 108250 - DNA, 15 bp, Homo sapiens
gtgacctgagtgtga

SEQ ID NO: 108251 - DNA, 15 bp, Homo sapiens
ggtgacctgagtgtg

SEQ ID NO: 108252 - DNA, 15 bp, Homo sapiens
aggtgacctgagtgt

SEQ ID NO: 108253 - DNA, 15 bp, Homo sapiens
gaggtgacctgagtg

SEQ ID NO: 108254 - DNA, 15 bp, Homo sapiens
tgaggtgacctgagt

SEQ ID NO: 108255 - DNA, 15 bp, Homo sapiens
gtgaggtgacctgag

SEQ ID NO: 108256 - DNA, 15 bp, Homo sapiens
tgtgaggtgacctga

SEQ ID NO: 108257 - DNA, 15 bp, Homo sapiens
ttgtcctgtgggtgt

SEQ ID NO: 108258 - DNA, 15 bp, Homo sapiens
gttgtcctgtgggtg

SEQ ID NO: 108259 - DNA, 15 bp, Homo sapiens
agttgtcctgtgggt

SEQ ID NO: 108260 - DNA, 15 bp, Homo sapiens
gagttgtcctgtggg

SEQ ID NO: 108261 - DNA, 15 bp, Homo sapiens
tgagttgtcctgtgg

SEQ ID NO: 108262 - DNA, 15 bp, Homo sapiens
gtgagttgtcctgtg

SEQ ID NO: 108263 - DNA, 15 bp, Homo sapiens
ctgtgagttgtcctg

SEQ ID NO: 108264 - DNA, 15 bp, Homo sapiens
tctgtgagttgtcct

SEQ ID NO: 108265 - DNA, 15 bp, Homo sapiens
ctctgtgagttgtcc

SEQ ID NO: 108266 - DNA, 15 bp, Homo sapiens
cctctgtgagttgtc

SEQ ID NO: 108267 - DNA, 15 bp, Homo sapiens
acctctgtgagttgt

SEQ ID NO: 108268 - DNA, 15 bp, Homo sapiens
gacctctgtgagttg

SEQ ID NO: 108269 - DNA, 15 bp, Homo sapiens
tgacctctgtgagtt

SEQ ID NO: 108270 - DNA, 15 bp, Homo sapiens
gtgacctctgtgagt

SEQ ID NO: 108271 - DNA, 15 bp, Homo sapiens
ttgtgaggtgtcctg

SEQ ID NO: 108272 - DNA, 15 bp, Homo sapiens
tttgtgaggtgtcct

SEQ ID NO: 108273 - DNA, 15 bp, Homo sapiens
ctttgtgaggtgtcc

SEQ ID NO: 108274 - DNA, 15 bp, Homo sapiens
cctttgtgaggtgtc

SEQ ID NO: 108275 - DNA, 15 bp, Homo sapiens
acctttgtgaggtgt

SEQ ID NO: 108276 - DNA, 15 bp, Homo sapiens
gacctttgtgaggtg

SEQ ID NO: 108277 - DNA, 15 bp, Homo sapiens
tgacctttgtgaggt

SEQ ID NO: 108278 - DNA, 15 bp, Homo sapiens
gtgacctttgtgagg

SEQ ID NO: 108279 - DNA, 15 bp, Homo sapiens
ggtgacctttgtgag

SEQ ID NO: 108280 - DNA, 15 bp, Homo sapiens
aggtgacctttgtga

SEQ ID NO: 108281 - DNA, 15 bp, Homo sapiens
gaggtgacctttgtg

SEQ ID NO: 108282 - DNA, 15 bp, Homo sapiens
tgaggtgacctttgt

SEQ ID NO: 108283 - DNA, 15 bp, Homo sapiens
gtgaggtgacctttg

SEQ ID NO: 108284 - DNA, 15 bp, Homo sapiens
tgtgaggtgaccttt

SEQ ID NO: 108285 - DNA, 15 bp, Homo sapiens
gtgtgaggtgacctt

SEQ ID NO: 108286 - DNA, 15 bp, Homo sapiens
tgtaaggtgacctgt

SEQ ID NO: 108287 - DNA, 15 bp, Homo sapiens
gtgtaaggtgacctg

SEQ ID NO: 108288 - DNA, 15 bp, Homo sapiens
agtgtaaggtgacct

SEQ ID NO: 108289 - DNA, 15 bp, Homo sapiens
gagtgtaaggtgacc

SEQ ID NO: 108290 - DNA, 15 bp, Homo sapiens
tgagtgtaaggtgac

SEQ ID NO: 108291 - DNA, 15 bp, Homo sapiens
atgagtgtaaggtga

SEQ ID NO: 108292 - DNA, 15 bp, Homo sapiens
gatgagtgtaaggtg

SEQ ID NO: 108293 - DNA, 15 bp, Homo sapiens
agatgagtgtaaggt

SEQ ID NO: 108294 - DNA, 15 bp, Homo sapiens
gagatgagtgtaagg

SEQ ID NO: 108295 - DNA, 15 bp, Homo sapiens
tgagatgagtgtaag

SEQ ID NO: 108296 - DNA, 15 bp, Homo sapiens
gtgagatgagtgtaa

SEQ ID NO: 108297 - DNA, 15 bp, Homo sapiens
tgtgagatgagtgta

SEQ ID NO: 108298 - DNA, 15 bp, Homo sapiens
gtgtgagatgagtgt

SEQ ID NO: 108299 - DNA, 15 bp, Homo sapiens
agtgtgagatgagtg

SEQ ID NO: 108300 - DNA, 15 bp, Homo sapiens
gagtgtgagatgagt

SEQ ID NO: 108301 - DNA, 15 bp, Homo sapiens
tgagtgtgagatgag

SEQ ID NO: 108302 - DNA, 15 bp, Homo sapiens
gtgagtgtgagatga

SEQ ID NO: 108303 - DNA, 15 bp, Homo sapiens
tgtgagtgtgagatg

SEQ ID NO: 108304 - DNA, 15 bp, Homo sapiens
ctgtgagtgtgagat

SEQ ID NO: 108305 - DNA, 15 bp, Homo sapiens
cctgtgagtgtgaga

SEQ ID NO: 108306 - DNA, 15 bp, Homo sapiens
cgacctgtgagtgtg

SEQ ID NO: 108307 - DNA, 15 bp, Homo sapiens
gcgacctgtgagtgt

SEQ ID NO: 108308 - DNA, 15 bp, Homo sapiens
ggcgacctgtgagtg

SEQ ID NO: 108309 - DNA, 15 bp, Homo sapiens
tggcgacctgtgagt

SEQ ID NO: 108310 - DNA, 15 bp, Homo sapiens
gtggcgacctgtgag

SEQ ID NO: 108311 - DNA, 15 bp, Homo sapiens
tgtggcgacctgtga

SEQ ID NO: 108312 - DNA, 15 bp, Homo sapiens
gtgtggcgacctgtg

SEQ ID NO: 108313 - DNA, 15 bp, Homo sapiens
ggtgtggcgacctgt

SEQ ID NO: 108314 - DNA, 15 bp, Homo sapiens
aggtgtggcgacctg

SEQ ID NO: 108315 - DNA, 15 bp, Homo sapiens
gaggtgtggcgacct

SEQ ID NO: 108316 - DNA, 15 bp, Homo sapiens
tgaggtgtggcgacc

SEQ ID NO: 108317 - DNA, 15 bp, Homo sapiens
gtgaggtgtggcgac

SEQ ID NO: 108318 - DNA, 15 bp, Homo sapiens
tgtgaggtgtggcga

SEQ ID NO: 108319 - DNA, 15 bp, Homo sapiens
gtgtgaggtgtggcg

SEQ ID NO: 108320 - DNA, 15 bp, Homo sapiens
agtgtgaggtgtggc

SEQ ID NO: 108321 - DNA, 15 bp, Homo sapiens
gagtgtgaggtgtgg

SEQ ID NO: 108322 - DNA, 15 bp, Homo sapiens
tgagtgtgaggtgtg

SEQ ID NO: 108323 - DNA, 15 bp, Homo sapiens
atcctgtgagtgtga

SEQ ID NO: 108324 - DNA, 15 bp, Homo sapiens
catcctgtgagtgtg

SEQ ID NO: 108325 - DNA, 15 bp, Homo sapiens
gcatcctgtgagtgt

SEQ ID NO: 108326 - DNA, 15 bp, Homo sapiens
ggcatcctgtgagtg

SEQ ID NO: 108327 - DNA, 15 bp, Homo sapiens
aggcatcctgtgagt

SEQ ID NO: 108328 - DNA, 15 bp, Homo sapiens
gaggcatcctgtgag

SEQ ID NO: 108329 - DNA, 15 bp, Homo sapiens
tgaggcatcctgtga

SEQ ID NO: 108330 - DNA, 15 bp, Homo sapiens
gtgaggcatcctgtg

SEQ ID NO: 108331 - DNA, 15 bp, Homo sapiens
tgtgaggcatcctgt

SEQ ID NO: 108332 - DNA, 15 bp, Homo sapiens
gtgtgaggcatcctg

SEQ ID NO: 108333 - DNA, 15 bp, Homo sapiens
agtgtgaggcatcct

SEQ ID NO: 108334 - DNA, 15 bp, Homo sapiens
gagtgtgaggcatcc

SEQ ID NO: 108335 - DNA, 15 bp, Homo sapiens
tgagtgtgaggcatc

SEQ ID NO: 108336 - DNA, 15 bp, Homo sapiens
gtgagtgtgaggcat

SEQ ID NO: 108337 - DNA, 15 bp, Homo sapiens
tgtgagtgtgaggca

SEQ ID NO: 108338 - DNA, 15 bp, Homo sapiens
ctgtgagtgtgaggc

SEQ ID NO: 108339 - DNA, 15 bp, Homo sapiens
tctgtgagtgtgagg

SEQ ID NO: 108340 - DNA, 15 bp, Homo sapiens
ttctgtgagtgtgag

SEQ ID NO: 108341 - DNA, 15 bp, Homo sapiens
gttctgtgagtgtga

SEQ ID NO: 108342 - DNA, 15 bp, Homo sapiens
ggttctgtgagtgtg

SEQ ID NO: 108343 - DNA, 15 bp, Homo sapiens
tggttctgtgagtgt

SEQ ID NO: 108344 - DNA, 15 bp, Homo sapiens
gtggttctgtgagtg

SEQ ID NO: 108345 - DNA, 15 bp, Homo sapiens
tgtggttctgtgagt

SEQ ID NO: 108346 - DNA, 15 bp, Homo sapiens
atgtggttctgtgag

SEQ ID NO: 108347 - DNA, 15 bp, Homo sapiens
gatgtggttctgtga

SEQ ID NO: 108348 - DNA, 15 bp, Homo sapiens
agatgtggttctgtg

SEQ ID NO: 108349 - DNA, 15 bp, Homo sapiens
gagatgtggttctgt

SEQ ID NO: 108350 - DNA, 15 bp, Homo sapiens
tgagatgtggttctg

SEQ ID NO: 108351 - DNA, 15 bp, Homo sapiens
atgagatgtggttct

SEQ ID NO: 108352 - DNA, 15 bp, Homo sapiens
tatgagatgtggttc

SEQ ID NO: 108353 - DNA, 15 bp, Homo sapiens
atatgagatgtggtt

SEQ ID NO: 108354 - DNA, 15 bp, Homo sapiens
catatgagatgtggt

SEQ ID NO: 108355 - DNA, 15 bp, Homo sapiens
gcatatgagatgtgg

SEQ ID NO: 108356 - DNA, 15 bp, Homo sapiens
tgcatatgagatgtg

SEQ ID NO: 108357 - DNA, 15 bp, Homo sapiens
gtgcatatgagatgt

SEQ ID NO: 108358 - DNA, 15 bp, Homo sapiens
tgtgcatatgagatg

SEQ ID NO: 108359 - DNA, 15 bp, Homo sapiens
ttgtgcatatgagat

SEQ ID NO: 108360 - DNA, 15 bp, Homo sapiens
cttgtgcatatgaga

SEQ ID NO: 108361 - DNA, 15 bp, Homo sapiens
tcttgtgcatatgag

SEQ ID NO: 108362 - DNA, 15 bp, Homo sapiens
gtcttgtgcatatga

SEQ ID NO: 108363 - DNA, 15 bp, Homo sapiens
tgtcttgtgcatatg

SEQ ID NO: 108364 - DNA, 15 bp, Homo sapiens
gtgtcttgtgcatat

SEQ ID NO: 108365 - DNA, 15 bp, Homo sapiens
ggtgtcttgtgcata

SEQ ID NO: 108366 - DNA, 15 bp, Homo sapiens
aggtgtcttgtgcat

SEQ ID NO: 108367 - DNA, 15 bp, Homo sapiens
gaggtgtcttgtgca

SEQ ID NO: 108368 - DNA, 15 bp, Homo sapiens
tgaggtgtcttgtgc

SEQ ID NO: 108369 - DNA, 15 bp, Homo sapiens
agtgtgaggtgtctt

SEQ ID NO: 108370 - DNA, 15 bp, Homo sapiens
gagtgtgaggtgtct

SEQ ID NO: 108371 - DNA, 15 bp, Homo sapiens
tcctgagtgtgaggt

SEQ ID NO: 108372 - DNA, 15 bp, Homo sapiens
gtcctgagtgtgagg

SEQ ID NO: 108373 - DNA, 15 bp, Homo sapiens
tgtcctgagtgtgag

SEQ ID NO: 108374 - DNA, 15 bp, Homo sapiens
gtgtcctgagtgtga

SEQ ID NO: 108375 - DNA, 15 bp, Homo sapiens
ggtgtcctgagtgtg

SEQ ID NO: 108376 - DNA, 15 bp, Homo sapiens
aggtgtcctgagtgt

SEQ ID NO: 108377 - DNA, 15 bp, Homo sapiens
gaggtgtcctgagtg

SEQ ID NO: 108378 - DNA, 15 bp, Homo sapiens
tgaggtgtcctgagt

SEQ ID NO: 108379 - DNA, 15 bp, Homo sapiens
atgaggtgtcctgag

SEQ ID NO: 108380 - DNA, 15 bp, Homo sapiens
catgaggtgtcctga

SEQ ID NO: 108381 - DNA, 15 bp, Homo sapiens
gcatgaggtgtcctg

SEQ ID NO: 108382 - DNA, 15 bp, Homo sapiens
agcatgaggtgtcct

SEQ ID NO: 108383 - DNA, 15 bp, Homo sapiens
gagcatgaggtgtcc

SEQ ID NO: 108384 - DNA, 15 bp, Homo sapiens
tgagcatgaggtgtc

SEQ ID NO: 108385 - DNA, 15 bp, Homo sapiens
ttgagcatgaggtgt

SEQ ID NO: 108386 - DNA, 15 bp, Homo sapiens
tttgagcatgaggtg

SEQ ID NO: 108387 - DNA, 15 bp, Homo sapiens
ctttgagcatgaggt

SEQ ID NO: 108388 - DNA, 15 bp, Homo sapiens
tctttgagcatgagg

SEQ ID NO: 108389 - DNA, 15 bp, Homo sapiens
ttctttgagcatgag

SEQ ID NO: 108390 - DNA, 15 bp, Homo sapiens
cttctttgagcatga

SEQ ID NO: 108391 - DNA, 15 bp, Homo sapiens
gcttctttgagcatg

SEQ ID NO: 108392 - DNA, 15 bp, Homo sapiens
ggcttctttgagcat

SEQ ID NO: 108393 - DNA, 15 bp, Homo sapiens
aggcttctttgagca

SEQ ID NO: 108394 - DNA, 15 bp, Homo sapiens
gaggcttctttgagc

SEQ ID NO: 108395 - DNA, 15 bp, Homo sapiens
tgaggcttctttgag

SEQ ID NO: 108396 - DNA, 15 bp, Homo sapiens
gtgaggcttctttga

SEQ ID NO: 108397 - DNA, 15 bp, Homo sapiens
tgtgaggcttctttg

SEQ ID NO: 108398 - DNA, 15 bp, Homo sapiens
gtgtgaggcttcttt

SEQ ID NO: 108399 - DNA, 15 bp, Homo sapiens
agtgtgaggcttctt

SEQ ID NO: 108400 - DNA, 15 bp, Homo sapiens
gagtgtgaggcttct

SEQ ID NO: 108401 - DNA, 15 bp, Homo sapiens
tgagtgtgaggcttc

SEQ ID NO: 108402 - DNA, 15 bp, Homo sapiens
gtgagtgtgaggctt

SEQ ID NO: 108403 - DNA, 15 bp, Homo sapiens
tgtgagtgtgaggct

SEQ ID NO: 108404 - DNA, 15 bp, Homo sapiens
ctcctgtgagtgtga

SEQ ID NO: 108405 - DNA, 15 bp, Homo sapiens
cctcctgtgagtgtg

SEQ ID NO: 108406 - DNA, 15 bp, Homo sapiens
acctcctgtgagtgt

SEQ ID NO: 108407 - DNA, 15 bp, Homo sapiens
gacctcctgtgagtg

SEQ ID NO: 108408 - DNA, 15 bp, Homo sapiens
ggacctcctgtgagt

SEQ ID NO: 108409 - DNA, 15 bp, Homo sapiens
tggacctcctgtgag

SEQ ID NO: 108410 - DNA, 15 bp, Homo sapiens
ctggacctcctgtga

SEQ ID NO: 108411 - DNA, 15 bp, Homo sapiens
gctggacctcctgtg

SEQ ID NO: 108412 - DNA, 15 bp, Homo sapiens
agctggacctcctgt

SEQ ID NO: 108413 - DNA, 15 bp, Homo sapiens
cagctggacctcctg

SEQ ID NO: 108414 - DNA, 15 bp, Homo sapiens
acagctggacctcct

SEQ ID NO: 108415 - DNA, 15 bp, Homo sapiens
gacagctggacctcc

SEQ ID NO: 108416 - DNA, 15 bp, Homo sapiens
agacagctggacctc

SEQ ID NO: 108417 - DNA, 15 bp, Homo sapiens
cagacagctggacct

SEQ ID NO: 108418 - DNA, 15 bp, Homo sapiens
tcagacagctggacc

SEQ ID NO: 108419 - DNA, 15 bp, Homo sapiens
ctcagacagctggac

SEQ ID NO: 108420 - DNA, 15 bp, Homo sapiens
cctcagacagctgga

SEQ ID NO: 108421 - DNA, 15 bp, Homo sapiens
gcctcagacagctgg

SEQ ID NO: 108422 - DNA, 15 bp, Homo sapiens
tgcctcagacagctg

SEQ ID NO: 108423 - DNA, 15 bp, Homo sapiens
ttgcctcagacagct

SEQ ID NO: 108424 - DNA, 15 bp, Homo sapiens
tttgcctcagacagc

SEQ ID NO: 108425 - DNA, 15 bp, Homo sapiens
ctttgcctcagacag

SEQ ID NO: 108426 - DNA, 15 bp, Homo sapiens
cctttgcctcagaca

SEQ ID NO: 108427 - DNA, 15 bp, Homo sapiens
gcctttgcctcagac

SEQ ID NO: 108428 - DNA, 15 bp, Homo sapiens
agcctttgcctcaga

SEQ ID NO: 108429 - DNA, 15 bp, Homo sapiens
tagcctttgcctcag

SEQ ID NO: 108430 - DNA, 15 bp, Homo sapiens
ttagcctttgcctca

SEQ ID NO: 108431 - DNA, 15 bp, Homo sapiens
gttagcctttgcctc

SEQ ID NO: 108432 - DNA, 15 bp, Homo sapiens
tgttagcctttgcct

SEQ ID NO: 108433 - DNA, 15 bp, Homo sapiens
atgttagcctttgcc

SEQ ID NO: 108434 - DNA, 15 bp, Homo sapiens
catgttagcctttgc

SEQ ID NO: 108435 - DNA, 15 bp, Homo sapiens
tcatgttagcctttg

SEQ ID NO: 108436 - DNA, 15 bp, Homo sapiens
gtcatgttagccttt

SEQ ID NO: 108437 - DNA, 15 bp, Homo sapiens
ggtcatgttagcctt

SEQ ID NO: 108438 - DNA, 15 bp, Homo sapiens
gggtcatgttagcct

SEQ ID NO: 108439 - DNA, 15 bp, Homo sapiens
agggtcatgttagcc

SEQ ID NO: 108440 - DNA, 15 bp, Homo sapiens
aagggtcatgttagc

SEQ ID NO: 108441 - DNA, 15 bp, Homo sapiens
aaagggtcatgttag

SEQ ID NO: 108442 - DNA, 15 bp, Homo sapiens
gaaagggtcatgtta

SEQ ID NO: 108443 - DNA, 15 bp, Homo sapiens
ggaaagggtcatgtt

SEQ ID NO: 108444 - DNA, 15 bp, Homo sapiens
tggaaagggtcatgt

SEQ ID NO: 108445 - DNA, 15 bp, Homo sapiens
ctggaaagggtcatg

SEQ ID NO: 108446 - DNA, 15 bp, Homo sapiens
tctggaaagggtcat

SEQ ID NO: 108447 - DNA, 15 bp, Homo sapiens
gtctggaaagggtca

SEQ ID NO: 108448 - DNA, 15 bp, Homo sapiens
tgtctggaaagggtc

SEQ ID NO: 108449 - DNA, 15 bp, Homo sapiens
ttgtctggaaagggt

SEQ ID NO: 108450 - DNA, 15 bp, Homo sapiens
tttgtctggaaaggg

SEQ ID NO: 108451 - DNA, 15 bp, Homo sapiens
atttgtctggaaagg

SEQ ID NO: 108452 - DNA, 15 bp, Homo sapiens
aatttgtctggaaag

SEQ ID NO: 108453 - DNA, 15 bp, Homo sapiens
caatttgtctggaaa

SEQ ID NO: 108454 - DNA, 15 bp, Homo sapiens
tcaatttgtctggaa

SEQ ID NO: 108455 - DNA, 15 bp, Homo sapiens
ctcaatttgtctgga

SEQ ID NO: 108456 - DNA, 15 bp, Homo sapiens
cctcaatttgtctgg

SEQ ID NO: 108457 - DNA, 15 bp, Homo sapiens
tcctcaatttgtctg

SEQ ID NO: 108458 - DNA, 15 bp, Homo sapiens
atcctcaatttgtct

SEQ ID NO: 108459 - DNA, 15 bp, Homo sapiens
catcctcaatttgtc

SEQ ID NO: 108460 - DNA, 15 bp, Homo sapiens
ccatcctcaatttgt

SEQ ID NO: 108461 - DNA, 15 bp, Homo sapiens
accatcctcaatttg

SEQ ID NO: 108462 - DNA, 15 bp, Homo sapiens
gaccatcctcaattt

SEQ ID NO: 108463 - DNA, 15 bp, Homo sapiens
tgaccatcctcaatt

SEQ ID NO: 108464 - DNA, 15 bp, Homo sapiens
atgaccatcctcaat

SEQ ID NO: 108465 - DNA, 15 bp, Homo sapiens
catgaccatcctcaa

SEQ ID NO: 108466 - DNA, 15 bp, Homo sapiens
gcatgaccatcctca

SEQ ID NO: 108467 - DNA, 15 bp, Homo sapiens
ggcatgaccatcctc

SEQ ID NO: 108468 - DNA, 15 bp, Homo sapiens
aggcatgaccatcct

SEQ ID NO: 108469 - DNA, 15 bp, Homo sapiens
taggcatgaccatcc

SEQ ID NO: 108470 - DNA, 15 bp, Homo sapiens
ctaggcatgaccatc

SEQ ID NO: 108471 - DNA, 15 bp, Homo sapiens
gctaggcatgaccat

SEQ ID NO: 108472 - DNA, 15 bp, Homo sapiens
tgctaggcatgacca

SEQ ID NO: 108473 - DNA, 15 bp, Homo sapiens
atgctaggcatgacc

SEQ ID NO: 108474 - DNA, 15 bp, Homo sapiens
aatgctaggcatgac

SEQ ID NO: 108475 - DNA, 15 bp, Homo sapiens
aaatgctaggcatga

SEQ ID NO: 108476 - DNA, 15 bp, Homo sapiens
aaaatgctaggcatg

SEQ ID NO: 108477 - DNA, 15 bp, Homo sapiens
aaaaatgctaggcat

SEQ ID NO: 108478 - DNA, 15 bp, Homo sapiens
taaaaatgctaggca

SEQ ID NO: 108479 - DNA, 15 bp, Homo sapiens
ataaaaatgctaggc

SEQ ID NO: 108480 - DNA, 15 bp, Homo sapiens
tataaaaatgctagg

SEQ ID NO: 108481 - DNA, 15 bp, Homo sapiens
gtataaaaatgctag

SEQ ID NO: 108482 - DNA, 15 bp, Homo sapiens
tgtataaaaatgcta

SEQ ID NO: 108483 - DNA, 15 bp, Homo sapiens
gtgtataaaaatgct

SEQ ID NO: 108484 - DNA, 15 bp, Homo sapiens
ggtgtataaaaatgc

SEQ ID NO: 108485 - DNA, 15 bp, Homo sapiens
aggtgtataaaaatg

SEQ ID NO: 108486 - DNA, 15 bp, Homo sapiens
taggtgtataaaaat

SEQ ID NO: 108487 - DNA, 15 bp, Homo sapiens
ctaggtgtataaaaa

SEQ ID NO: 108488 - DNA, 15 bp, Homo sapiens
actaggtgtataaaa

SEQ ID NO: 108489 - DNA, 15 bp, Homo sapiens
aactaggtgtataaa

SEQ ID NO: 108490 - DNA, 15 bp, Homo sapiens
aaactaggtgtataa

SEQ ID NO: 108491 - DNA, 15 bp, Homo sapiens
aaaactaggtgtata

SEQ ID NO: 108492 - DNA, 15 bp, Homo sapiens
caaaactaggtgtat

SEQ ID NO: 108493 - DNA, 15 bp, Homo sapiens
tcaaaactaggtgta

SEQ ID NO: 108494 - DNA, 15 bp, Homo sapiens
ttcaaaactaggtgt

SEQ ID NO: 108495 - DNA, 15 bp, Homo sapiens
tttcaaaactaggtg

SEQ ID NO: 108496 - DNA, 15 bp, Homo sapiens
ctttcaaaactaggt

SEQ ID NO: 108497 - DNA, 15 bp, Homo sapiens
gctttcaaaactagg

SEQ ID NO: 108498 - DNA, 15 bp, Homo sapiens
tgctttcaaaactag

SEQ ID NO: 108499 - DNA, 15 bp, Homo sapiens
atgctttcaaaacta

SEQ ID NO: 108500 - DNA, 15 bp, Homo sapiens
aatgctttcaaaact

SEQ ID NO: 108501 - DNA, 15 bp, Homo sapiens
aaatgctttcaaaac

SEQ ID NO: 108502 - DNA, 15 bp, Homo sapiens
gaaatgctttcaaaa

SEQ ID NO: 108503 - DNA, 15 bp, Homo sapiens
agaaatgctttcaaa

SEQ ID NO: 108504 - DNA, 15 bp, Homo sapiens
gagaaatgctttcaa

SEQ ID NO: 108505 - DNA, 15 bp, Homo sapiens
tgagaaatgctttca

SEQ ID NO: 108506 - DNA, 15 bp, Homo sapiens
atgagaaatgctttc

SEQ ID NO: 108507 - DNA, 15 bp, Homo sapiens
gatgagaaatgcttt

SEQ ID NO: 108508 - DNA, 15 bp, Homo sapiens
agatgagaaatgctt

SEQ ID NO: 108509 - DNA, 15 bp, Homo sapiens
cagatgagaaatgct

SEQ ID NO: 108510 - DNA, 15 bp, Homo sapiens
acagatgagaaatgc

SEQ ID NO: 108511 - DNA, 15 bp, Homo sapiens
aacagatgagaaatg

SEQ ID NO: 108512 - DNA, 15 bp, Homo sapiens
caacagatgagaaat

SEQ ID NO: 108513 - DNA, 15 bp, Homo sapiens
acaacagatgagaaa

SEQ ID NO: 108514 - DNA, 15 bp, Homo sapiens
tacaacagatgagaa

SEQ ID NO: 108515 - DNA, 15 bp, Homo sapiens
atacaacagatgaga

SEQ ID NO: 108516 - DNA, 15 bp, Homo sapiens
aatacaacagatgag

SEQ ID NO: 108517 - DNA, 15 bp, Homo sapiens
gaatacaacagatga

SEQ ID NO: 108518 - DNA, 15 bp, Homo sapiens
agaatacaacagatg

SEQ ID NO: 108519 - DNA, 15 bp, Homo sapiens
gagaatacaacagat

SEQ ID NO: 108520 - DNA, 15 bp, Homo sapiens
tgagaatacaacaga

SEQ ID NO: 108521 - DNA, 15 bp, Homo sapiens
gtgagaatacaacag

SEQ ID NO: 108522 - DNA, 15 bp, Homo sapiens
tgtgagaatacaaca

SEQ ID NO: 108523 - DNA, 15 bp, Homo sapiens
ctgtgagaatacaac

SEQ ID NO: 108524 - DNA, 15 bp, Homo sapiens
gctgtgagaatacaa

SEQ ID NO: 108525 - DNA, 15 bp, Homo sapiens
tgctgtgagaataca

SEQ ID NO: 108526 - DNA, 15 bp, Homo sapiens
gtgctgtgagaatac

SEQ ID NO: 108527 - DNA, 15 bp, Homo sapiens
ggtgctgtgagaata

SEQ ID NO: 108528 - DNA, 15 bp, Homo sapiens
gggtgctgtgagaat

SEQ ID NO: 108529 - DNA, 15 bp, Homo sapiens
ggggtgctgtgagaa

SEQ ID NO: 108530 - DNA, 15 bp, Homo sapiens
cggggtgctgtgaga

SEQ ID NO: 108531 - DNA, 15 bp, Homo sapiens
acggggtgctgtgag

SEQ ID NO: 108532 - DNA, 15 bp, Homo sapiens
cacggggtgctgtga

SEQ ID NO: 108533 - DNA, 15 bp, Homo sapiens
tcacggggtgctgtg

SEQ ID NO: 108534 - DNA, 15 bp, Homo sapiens
ctcacggggtgctgt

SEQ ID NO: 108535 - DNA, 15 bp, Homo sapiens
actcacggggtgctg

SEQ ID NO: 108536 - DNA, 15 bp, Homo sapiens
aactcacggggtgct

SEQ ID NO: 108537 - DNA, 15 bp, Homo sapiens
aaactcacggggtgc

SEQ ID NO: 108538 - DNA, 15 bp, Homo sapiens
taaactcacggggtg

SEQ ID NO: 108539 - DNA, 15 bp, Homo sapiens
ttaaactcacggggt

SEQ ID NO: 108540 - DNA, 15 bp, Homo sapiens
cttaaactcacgggg

SEQ ID NO: 108541 - DNA, 15 bp, Homo sapiens
acttaaactcacggg

SEQ ID NO: 108542 - DNA, 15 bp, Homo sapiens
aacttaaactcacgg

SEQ ID NO: 108543 - DNA, 15 bp, Homo sapiens
gaacttaaactcacg

SEQ ID NO: 108544 - DNA, 15 bp, Homo sapiens
tgaacttaaactcac

SEQ ID NO: 108545 - DNA, 15 bp, Homo sapiens
ctgaacttaaactca

SEQ ID NO: 108546 - DNA, 15 bp, Homo sapiens
cctgaacttaaactc

SEQ ID NO: 108547 - DNA, 15 bp, Homo sapiens
acctgaacttaaact

SEQ ID NO: 108548 - DNA, 15 bp, Homo sapiens
cacctgaacttaaac

SEQ ID NO: 108549 - DNA, 15 bp, Homo sapiens
ccacctgaacttaaa

SEQ ID NO: 108550 - DNA, 15 bp, Homo sapiens
gccacctgaacttaa

SEQ ID NO: 108551 - DNA, 15 bp, Homo sapiens
ggccacctgaactta

SEQ ID NO: 108552 - DNA, 15 bp, Homo sapiens
tggccacctgaactt

SEQ ID NO: 108553 - DNA, 15 bp, Homo sapiens
ttggccacctgaact

SEQ ID NO: 108554 - DNA, 15 bp, Homo sapiens
gttggccacctgaac

SEQ ID NO: 108555 - DNA, 15 bp, Homo sapiens
tgttggccacctgaa

SEQ ID NO: 108556 - DNA, 15 bp, Homo sapiens
ctgttggccacctga

SEQ ID NO: 108557 - DNA, 15 bp, Homo sapiens
actgttggccacctg

SEQ ID NO: 108558 - DNA, 15 bp, Homo sapiens
aactgttggccacct

SEQ ID NO: 108559 - DNA, 15 bp, Homo sapiens
aaactgttggccacc

SEQ ID NO: 108560 - DNA, 15 bp, Homo sapiens
gaaactgttggccac

SEQ ID NO: 108561 - DNA, 15 bp, Homo sapiens
agaaactgttggcca

SEQ ID NO: 108562 - DNA, 15 bp, Homo sapiens
aagaaactgttggcc

SEQ ID NO: 108563 - DNA, 15 bp, Homo sapiens
gaagaaactgttggc

SEQ ID NO: 108564 - DNA, 15 bp, Homo sapiens
tgaagaaactgttgg

SEQ ID NO: 108565 - DNA, 15 bp, Homo sapiens
ctgaagaaactgttg

SEQ ID NO: 108566 - DNA, 15 bp, Homo sapiens
gctgaagaaactgtt

SEQ ID NO: 108567 - DNA, 15 bp, Homo sapiens
tgctgaagaaactgt

SEQ ID NO: 108568 - DNA, 15 bp, Homo sapiens
ttgctgaagaaactg

SEQ ID NO: 108569 - DNA, 15 bp, Homo sapiens
attgctgaagaaact

SEQ ID NO: 108570 - DNA, 15 bp, Homo sapiens
gattgctgaagaaac

SEQ ID NO: 108571 - DNA, 15 bp, Homo sapiens
tgattgctgaagaaa

SEQ ID NO: 108572 - DNA, 15 bp, Homo sapiens
gtgattgctgaagaa

SEQ ID NO: 108573 - DNA, 15 bp, Homo sapiens
agtgattgctgaaga

SEQ ID NO: 108574 - DNA, 15 bp, Homo sapiens
aagtgattgctgaag

SEQ ID NO: 108575 - DNA, 15 bp, Homo sapiens
aaagtgattgctgaa

SEQ ID NO: 108576 - DNA, 15 bp, Homo sapiens
aaaagtgattgctga

SEQ ID NO: 108577 - DNA, 15 bp, Homo sapiens
aaaaagtgattgctg

SEQ ID NO: 108578 - DNA, 15 bp, Homo sapiens
aaaaaagtgattgct

SEQ ID NO: 108579 - DNA, 15 bp, Homo sapiens
gaaaaaagtgattgc

SEQ ID NO: 108580 - DNA, 15 bp, Homo sapiens
agaaaaaagtgattg

SEQ ID NO: 108581 - DNA, 15 bp, Homo sapiens
cagaaaaaagtgatt

SEQ ID NO: 108582 - DNA, 15 bp, Homo sapiens
acagaaaaaagtgat

SEQ ID NO: 108583 - DNA, 15 bp, Homo sapiens
cacagaaaaaagtga

SEQ ID NO: 108584 - DNA, 15 bp, Homo sapiens
ccacagaaaaaagtg

SEQ ID NO: 108585 - DNA, 15 bp, Homo sapiens
tccacagaaaaaagt

SEQ ID NO: 108586 - DNA, 15 bp, Homo sapiens
ctccacagaaaaaag

SEQ ID NO: 108587 - DNA, 15 bp, Homo sapiens
actccacagaaaaaa

SEQ ID NO: 108588 - DNA, 15 bp, Homo sapiens
cactccacagaaaaa

SEQ ID NO: 108589 - DNA, 15 bp, Homo sapiens
gcactccacagaaaa

SEQ ID NO: 108590 - DNA, 15 bp, Homo sapiens
agcactccacagaaa

SEQ ID NO: 108591 - DNA, 15 bp, Homo sapiens
aagcactccacagaa

SEQ ID NO: 108592 - DNA, 15 bp, Homo sapiens
aaagcactccacaga

SEQ ID NO: 108593 - DNA, 15 bp, Homo sapiens
aaaagcactccacag

SEQ ID NO: 108594 - DNA, 15 bp, Homo sapiens
caaaagcactccaca

SEQ ID NO: 108595 - DNA, 15 bp, Homo sapiens
gcaaaagcactccac

SEQ ID NO: 108596 - DNA, 15 bp, Homo sapiens
agcaaaagcactcca

SEQ ID NO: 108597 - DNA, 15 bp, Homo sapiens
cagcaaaagcactcc

SEQ ID NO: 108598 - DNA, 15 bp, Homo sapiens
acagcaaaagcactc

SEQ ID NO: 108599 - DNA, 15 bp, Homo sapiens
aacagcaaaagcact

SEQ ID NO: 108600 - DNA, 15 bp, Homo sapiens
aaacagcaaaagcac

SEQ ID NO: 108601 - DNA, 15 bp, Homo sapiens
caaacagcaaaagca

SEQ ID NO: 108602 - DNA, 15 bp, Homo sapiens
acaaacagcaaaagc

SEQ ID NO: 108603 - DNA, 15 bp, Homo sapiens
cacaaacagcaaaag

SEQ ID NO: 108604 - DNA, 15 bp, Homo sapiens
ccacaaacagcaaaa

SEQ ID NO: 108605 - DNA, 15 bp, Homo sapiens
tccacaaacagcaaa

SEQ ID NO: 108606 - DNA, 15 bp, Homo sapiens
ttccacaaacagcaa

SEQ ID NO: 108607 - DNA, 15 bp, Homo sapiens
attccacaaacagca

SEQ ID NO: 108608 - DNA, 15 bp, Homo sapiens
tattccacaaacagc

SEQ ID NO: 108609 - DNA, 15 bp, Homo sapiens
atattccacaaacag

SEQ ID NO: 108610 - DNA, 15 bp, Homo sapiens
aatattccacaaaca

SEQ ID NO: 108611 - DNA, 15 bp, Homo sapiens
aaatattccacaaac

SEQ ID NO: 108612 - DNA, 15 bp, Homo sapiens
aaaatattccacaaa

SEQ ID NO: 108613 - DNA, 15 bp, Homo sapiens
caaaatattccacaa

SEQ ID NO: 108614 - DNA, 15 bp, Homo sapiens
gcaaaatattccaca

SEQ ID NO: 108615 - DNA, 15 bp, Homo sapiens
tgcaaaatattccac

SEQ ID NO: 108616 - DNA, 15 bp, Homo sapiens
atgcaaaatattcca

SEQ ID NO: 108617 - DNA, 15 bp, Homo sapiens
gatgcaaaatattcc

SEQ ID NO: 108618 - DNA, 15 bp, Homo sapiens
agatgcaaaatattc

SEQ ID NO: 108619 - DNA, 15 bp, Homo sapiens
cagatgcaaaatatt

SEQ ID NO: 108620 - DNA, 15 bp, Homo sapiens
gcagatgcaaaatat

SEQ ID NO: 108621 - DNA, 15 bp, Homo sapiens
agcagatgcaaaata

SEQ ID NO: 108622 - DNA, 15 bp, Homo sapiens
tagcagatgcaaaat

SEQ ID NO: 108623 - DNA, 15 bp, Homo sapiens
gtagcagatgcaaaa

SEQ ID NO: 108624 - DNA, 15 bp, Homo sapiens
agtagcagatgcaaa

SEQ ID NO: 108625 - DNA, 15 bp, Homo sapiens
cagtagcagatgcaa

SEQ ID NO: 108626 - DNA, 15 bp, Homo sapiens
gcagtagcagatgca

SEQ ID NO: 108627 - DNA, 15 bp, Homo sapiens
tgcagtagcagatgc

SEQ ID NO: 108628 - DNA, 15 bp, Homo sapiens
gtgcagtagcagatg

SEQ ID NO: 108629 - DNA, 15 bp, Homo sapiens
ggtgcagtagcagat

SEQ ID NO: 108630 - DNA, 15 bp, Homo sapiens
gggtgcagtagcaga

SEQ ID NO: 108631 - DNA, 15 bp, Homo sapiens
agggtgcagtagcag

SEQ ID NO: 108632 - DNA, 15 bp, Homo sapiens
gagggtgcagtagca

SEQ ID NO: 108633 - DNA, 15 bp, Homo sapiens
agagggtgcagtagc

SEQ ID NO: 108634 - DNA, 15 bp, Homo sapiens
gagagggtgcagtag

SEQ ID NO: 108635 - DNA, 15 bp, Homo sapiens
ggagagggtgcagta

SEQ ID NO: 108636 - DNA, 15 bp, Homo sapiens
gggagagggtgcagt

SEQ ID NO: 108637 - DNA, 15 bp, Homo sapiens
ggggagagggtgcag

SEQ ID NO: 108638 - DNA, 15 bp, Homo sapiens
cggggagagggtgca

SEQ ID NO: 108639 - DNA, 15 bp, Homo sapiens
acggggagagggtgc

SEQ ID NO: 108640 - DNA, 15 bp, Homo sapiens
tacggggagagggtg

SEQ ID NO: 108641 - DNA, 15 bp, Homo sapiens
atacggggagagggt

SEQ ID NO: 108642 - DNA, 15 bp, Homo sapiens
catacggggagaggg

SEQ ID NO: 108643 - DNA, 15 bp, Homo sapiens
acatacggggagagg

SEQ ID NO: 108644 - DNA, 15 bp, Homo sapiens
cacatacggggagag

SEQ ID NO: 108645 - DNA, 15 bp, Homo sapiens
acacatacggggaga

SEQ ID NO: 108646 - DNA, 15 bp, Homo sapiens
cacacatacggggag

SEQ ID NO: 108647 - DNA, 15 bp, Homo sapiens
ccacacatacgggga

SEQ ID NO: 108648 - DNA, 15 bp, Homo sapiens
gccacacatacgggg

SEQ ID NO: 108649 - DNA, 15 bp, Homo sapiens
ggccacacatacggg

SEQ ID NO: 108650 - DNA, 15 bp, Homo sapiens
tggccacacatacgg

SEQ ID NO: 108651 - DNA, 15 bp, Homo sapiens
gtggccacacatacg

SEQ ID NO: 108652 - DNA, 15 bp, Homo sapiens
ggtggccacacatac

SEQ ID NO: 108653 - DNA, 15 bp, Homo sapiens
gggtggccacacata

SEQ ID NO: 108654 - DNA, 15 bp, Homo sapiens
agggtggccacacat

SEQ ID NO: 108655 - DNA, 15 bp, Homo sapiens
cagggtggccacaca

SEQ ID NO: 108656 - DNA, 15 bp, Homo sapiens
acagggtggccacac

SEQ ID NO: 108657 - DNA, 15 bp, Homo sapiens
gacagggtggccaca

SEQ ID NO: 108658 - DNA, 15 bp, Homo sapiens
tgacagggtggccac

SEQ ID NO: 108659 - DNA, 15 bp, Homo sapiens
ctgacagggtggcca

SEQ ID NO: 108660 - DNA, 15 bp, Homo sapiens
tctgacagggtggcc

SEQ ID NO: 108661 - DNA, 15 bp, Homo sapiens
ctctgacagggtggc

SEQ ID NO: 108662 - DNA, 15 bp, Homo sapiens
cctctgacagggtgg

SEQ ID NO: 108663 - DNA, 15 bp, Homo sapiens
acctctgacagggtg

SEQ ID NO: 108664 - DNA, 15 bp, Homo sapiens
cacctctgacagggt

SEQ ID NO: 108665 - DNA, 15 bp, Homo sapiens
ccacctctgacaggg

SEQ ID NO: 108666 - DNA, 15 bp, Homo sapiens
tccacctctgacagg

SEQ ID NO: 108667 - DNA, 15 bp, Homo sapiens
ctccacctctgacag

SEQ ID NO: 108668 - DNA, 15 bp, Homo sapiens
gctccacctctgaca

SEQ ID NO: 108669 - DNA, 15 bp, Homo sapiens
agctccacctctgac

SEQ ID NO: 108670 - DNA, 15 bp, Homo sapiens
cagctccacctctga

SEQ ID NO: 108671 - DNA, 15 bp, Homo sapiens
acagctccacctctg

SEQ ID NO: 108672 - DNA, 15 bp, Homo sapiens
cacagctccacctct

SEQ ID NO: 108673 - DNA, 15 bp, Homo sapiens
ccacagctccacctc

SEQ ID NO: 108674 - DNA, 15 bp, Homo sapiens
gccacagctccacct

SEQ ID NO: 108675 - DNA, 15 bp, Homo sapiens
agccacagctccacc

SEQ ID NO: 108676 - DNA, 15 bp, Homo sapiens
gagccacagctccac

SEQ ID NO: 108677 - DNA, 15 bp, Homo sapiens
tgagccacagctcca

SEQ ID NO: 108678 - DNA, 15 bp, Homo sapiens
ctgagccacagctcc

SEQ ID NO: 108679 - DNA, 15 bp, Homo sapiens
tctgagccacagctc

SEQ ID NO: 108680 - DNA, 15 bp, Homo sapiens
ctctgagccacagct

SEQ ID NO: 108681 - DNA, 15 bp, Homo sapiens
gctctgagccacagc

SEQ ID NO: 108682 - DNA, 15 bp, Homo sapiens
ggctctgagccacag

SEQ ID NO: 108683 - DNA, 15 bp, Homo sapiens
aggctctgagccaca

SEQ ID NO: 108684 - DNA, 15 bp, Homo sapiens
caggctctgagccac

SEQ ID NO: 108685 - DNA, 15 bp, Homo sapiens
acaggctctgagcca

SEQ ID NO: 108686 - DNA, 15 bp, Homo sapiens
cacaggctctgagcc

SEQ ID NO: 108687 - DNA, 15 bp, Homo sapiens
acacaggctctgagc

SEQ ID NO: 108688 - DNA, 15 bp, Homo sapiens
tacacaggctctgag

SEQ ID NO: 108689 - DNA, 15 bp, Homo sapiens
gtacacaggctctga

SEQ ID NO: 108690 - DNA, 15 bp, Homo sapiens
ggtacacaggctctg

SEQ ID NO: 108691 - DNA, 15 bp, Homo sapiens
aggtacacaggctct

SEQ ID NO: 108692 - DNA, 15 bp, Homo sapiens
gaggtacacaggctc

SEQ ID NO: 108693 - DNA, 15 bp, Homo sapiens
cgaggtacacaggct

SEQ ID NO: 108694 - DNA, 15 bp, Homo sapiens
acgaggtacacaggc

SEQ ID NO: 108695 - DNA, 15 bp, Homo sapiens
gacgaggtacacagg

SEQ ID NO: 108696 - DNA, 15 bp, Homo sapiens
ggacgaggtacacag

SEQ ID NO: 108697 - DNA, 15 bp, Homo sapiens
gggacgaggtacaca

SEQ ID NO: 108698 - DNA, 15 bp, Homo sapiens
tgggacgaggtacac

SEQ ID NO: 108699 - DNA, 15 bp, Homo sapiens
ctgggacgaggtaca

SEQ ID NO: 108700 - DNA, 15 bp, Homo sapiens
cctgggacgaggtac

SEQ ID NO: 108701 - DNA, 15 bp, Homo sapiens
acctgggacgaggta

SEQ ID NO: 108702 - DNA, 15 bp, Homo sapiens
gacctgggacgaggt

SEQ ID NO: 108703 - DNA, 15 bp, Homo sapiens
ggacctgggacgagg

SEQ ID NO: 108704 - DNA, 15 bp, Homo sapiens
tggacctgggacgag

SEQ ID NO: 108705 - DNA, 15 bp, Homo sapiens
gtggacctgggacga

SEQ ID NO: 108706 - DNA, 15 bp, Homo sapiens
tgtggacctgggacg

SEQ ID NO: 108707 - DNA, 15 bp, Homo sapiens
ctgtggacctgggac

SEQ ID NO: 108708 - DNA, 15 bp, Homo sapiens
gctgtggacctggga

SEQ ID NO: 108709 - DNA, 15 bp, Homo sapiens
agctgtggacctggg

SEQ ID NO: 108710 - DNA, 15 bp, Homo sapiens
gagctgtggacctgg

SEQ ID NO: 108711 - DNA, 15 bp, Homo sapiens
tgagctgtggacctg

SEQ ID NO: 108712 - DNA, 15 bp, Homo sapiens
ctgagctgtggacct

SEQ ID NO: 108713 - DNA, 15 bp, Homo sapiens
gctgagctgtggacc

SEQ ID NO: 108714 - DNA, 15 bp, Homo sapiens
cgctgagctgtggac

SEQ ID NO: 108715 - DNA, 15 bp, Homo sapiens
tcgctgagctgtgga

SEQ ID NO: 108716 - DNA, 15 bp, Homo sapiens
gtcgctgagctgtgg

SEQ ID NO: 108717 - DNA, 15 bp, Homo sapiens
tgtcgctgagctgtg

SEQ ID NO: 108718 - DNA, 15 bp, Homo sapiens
ctgtcgctgagctgt

SEQ ID NO: 108719 - DNA, 15 bp, Homo sapiens
tctgtcgctgagctg

SEQ ID NO: 108720 - DNA, 15 bp, Homo sapiens
ttctgtcgctgagct

SEQ ID NO: 108721 - DNA, 15 bp, Homo sapiens
cttctgtcgctgagc

SEQ ID NO: 108722 - DNA, 15 bp, Homo sapiens
tcttctgtcgctgag

SEQ ID NO: 108723 - DNA, 15 bp, Homo sapiens
ctcttctgtcgctga

SEQ ID NO: 108724 - DNA, 15 bp, Homo sapiens
actcttctgtcgctg

SEQ ID NO: 108725 - DNA, 15 bp, Homo sapiens
gactcttctgtcgct

SEQ ID NO: 108726 - DNA, 15 bp, Homo sapiens
tgactcttctgtcgc

SEQ ID NO: 108727 - DNA, 15 bp, Homo sapiens
ctgactcttctgtcg

SEQ ID NO: 108728 - DNA, 15 bp, Homo sapiens
cctgactcttctgtc

SEQ ID NO: 108729 - DNA, 15 bp, Homo sapiens
ccctgactcttctgt

SEQ ID NO: 108730 - DNA, 15 bp, Homo sapiens
accctgactcttctg

SEQ ID NO: 108731 - DNA, 15 bp, Homo sapiens
aaccctgactcttct

SEQ ID NO: 108732 - DNA, 15 bp, Homo sapiens
caaccctgactcttc

SEQ ID NO: 108733 - DNA, 15 bp, Homo sapiens
tcaaccctgactctt

SEQ ID NO: 108734 - DNA, 15 bp, Homo sapiens
ttcaaccctgactct

SEQ ID NO: 108735 - DNA, 15 bp, Homo sapiens
gttcaaccctgactc

SEQ ID NO: 108736 - DNA, 15 bp, Homo sapiens
ggttcaaccctgact

SEQ ID NO: 108737 - DNA, 15 bp, Homo sapiens
aggttcaaccctgac

SEQ ID NO: 108738 - DNA, 15 bp, Homo sapiens
gaggttcaaccctga

SEQ ID NO: 108739 - DNA, 15 bp, Homo sapiens
cgaggttcaaccctg

SEQ ID NO: 108740 - DNA, 15 bp, Homo sapiens
ccgaggttcaaccct

SEQ ID NO: 108741 - DNA, 15 bp, Homo sapiens
cccgaggttcaaccc

SEQ ID NO: 108742 - DNA, 15 bp, Homo sapiens
acccgaggttcaacc

SEQ ID NO: 108743 - DNA, 15 bp, Homo sapiens
cacccgaggttcaac

SEQ ID NO: 108744 - DNA, 15 bp, Homo sapiens
acacccgaggttcaa

SEQ ID NO: 108745 - DNA, 15 bp, Homo sapiens
aacacccgaggttca

SEQ ID NO: 108746 - DNA, 15 bp, Homo sapiens
gaacacccgaggttc

SEQ ID NO: 108747 - DNA, 15 bp, Homo sapiens
agaacacccgaggtt

SEQ ID NO: 108748 - DNA, 15 bp, Homo sapiens
cagaacacccgaggt

SEQ ID NO: 108749 - DNA, 15 bp, Homo sapiens
tcagaacacccgagg

SEQ ID NO: 108750 - DNA, 15 bp, Homo sapiens
gtcagaacacccgag

SEQ ID NO: 108751 - DNA, 15 bp, Homo sapiens
agtcagaacacccga

SEQ ID NO: 108752 - DNA, 15 bp, Homo sapiens
aagtcagaacacccg

SEQ ID NO: 108753 - DNA, 15 bp, Homo sapiens
caagtcagaacaccc

SEQ ID NO: 108754 - DNA, 15 bp, Homo sapiens
ccaagtcagaacacc

SEQ ID NO: 108755 - DNA, 15 bp, Homo sapiens
cccaagtcagaacac

SEQ ID NO: 108756 - DNA, 15 bp, Homo sapiens
tcccaagtcagaaca

SEQ ID NO: 108757 - DNA, 15 bp, Homo sapiens
ctcccaagtcagaac

SEQ ID NO: 108758 - DNA, 15 bp, Homo sapiens
gctcccaagtcagaa

SEQ ID NO: 108759 - DNA, 15 bp, Homo sapiens
tgctcccaagtcaga

SEQ ID NO: 108760 - DNA, 15 bp, Homo sapiens
ctgctcccaagtcag

SEQ ID NO: 108761 - DNA, 15 bp, Homo sapiens
cctgctcccaagtca

SEQ ID NO: 108762 - DNA, 15 bp, Homo sapiens
tcctgctcccaagtc

SEQ ID NO: 108763 - DNA, 15 bp, Homo sapiens
ttcctgctcccaagt

SEQ ID NO: 108764 - DNA, 15 bp, Homo sapiens
tttcctgctcccaag

SEQ ID NO: 108765 - DNA, 15 bp, Homo sapiens
atttcctgctcccaa

SEQ ID NO: 108766 - DNA, 15 bp, Homo sapiens
catttcctgctccca

SEQ ID NO: 108767 - DNA, 15 bp, Homo sapiens
acatttcctgctccc

SEQ ID NO: 108768 - DNA, 15 bp, Homo sapiens
cacatttcctgctcc

SEQ ID NO: 108769 - DNA, 15 bp, Homo sapiens
acacatttcctgctc

SEQ ID NO: 108770 - DNA, 15 bp, Homo sapiens
cacacatttcctgct

SEQ ID NO: 108771 - DNA, 15 bp, Homo sapiens
ccacacatttcctgc

SEQ ID NO: 108772 - DNA, 15 bp, Homo sapiens
accacacatttcctg

SEQ ID NO: 108773 - DNA, 15 bp, Homo sapiens
gaccacacatttcct

SEQ ID NO: 108774 - DNA, 15 bp, Homo sapiens
tgaccacacatttcc

SEQ ID NO: 108775 - DNA, 15 bp, Homo sapiens
gtgaccacacatttc

SEQ ID NO: 108776 - DNA, 15 bp, Homo sapiens
ggtgaccacacattt

SEQ ID NO: 108777 - DNA, 15 bp, Homo sapiens
gggtgaccacacatt

SEQ ID NO: 108778 - DNA, 15 bp, Homo sapiens
tgggtgaccacacat

SEQ ID NO: 108779 - DNA, 15 bp, Homo sapiens
atgggtgaccacaca

SEQ ID NO: 108780 - DNA, 15 bp, Homo sapiens
tatgggtgaccacac

SEQ ID NO: 108781 - DNA, 15 bp, Homo sapiens
ctatgggtgaccaca

SEQ ID NO: 108782 - DNA, 15 bp, Homo sapiens
actatgggtgaccac

SEQ ID NO: 108783 - DNA, 15 bp, Homo sapiens
aactatgggtgacca

SEQ ID NO: 108784 - DNA, 15 bp, Homo sapiens
gaactatgggtgacc

SEQ ID NO: 108785 - DNA, 15 bp, Homo sapiens
ggaactatgggtgac

SEQ ID NO: 108786 - DNA, 15 bp, Homo sapiens
tggaactatgggtga

SEQ ID NO: 108787 - DNA, 15 bp, Homo sapiens
ctggaactatgggtg

SEQ ID NO: 108788 - DNA, 15 bp, Homo sapiens
tctggaactatgggt

SEQ ID NO: 108789 - DNA, 15 bp, Homo sapiens
atctggaactatggg

SEQ ID NO: 108790 - DNA, 15 bp, Homo sapiens
catctggaactatgg

SEQ ID NO: 108791 - DNA, 15 bp, Homo sapiens
acatctggaactatg

SEQ ID NO: 108792 - DNA, 15 bp, Homo sapiens
gacatctggaactat

SEQ ID NO: 108793 - DNA, 15 bp, Homo sapiens
ggacatctggaacta

SEQ ID NO: 108794 - DNA, 15 bp, Homo sapiens
aggacatctggaact

SEQ ID NO: 108795 - DNA, 15 bp, Homo sapiens
caggacatctggaac

SEQ ID NO: 108796 - DNA, 15 bp, Homo sapiens
ccaggacatctggaa

SEQ ID NO: 108797 - DNA, 15 bp, Homo sapiens
cccaggacatctgga

SEQ ID NO: 108798 - DNA, 15 bp, Homo sapiens
ccccaggacatctgg

SEQ ID NO: 108799 - DNA, 15 bp, Homo sapiens
tccccaggacatctg

SEQ ID NO: 108800 - DNA, 15 bp, Homo sapiens
ctccccaggacatct

SEQ ID NO: 108801 - DNA, 15 bp, Homo sapiens
cctccccaggacatc

SEQ ID NO: 108802 - DNA, 15 bp, Homo sapiens
ccctccccaggacat

SEQ ID NO: 108803 - DNA, 15 bp, Homo sapiens
cccctccccaggaca

SEQ ID NO: 108804 - DNA, 15 bp, Homo sapiens
gcccctccccaggac

SEQ ID NO: 108805 - DNA, 15 bp, Homo sapiens
ggcccctccccagga

SEQ ID NO: 108806 - DNA, 15 bp, Homo sapiens
tggcccctccccagg

SEQ ID NO: 108807 - DNA, 15 bp, Homo sapiens
ttggcccctccccag

SEQ ID NO: 108808 - DNA, 15 bp, Homo sapiens
cttggcccctcccca

SEQ ID NO: 108809 - DNA, 15 bp, Homo sapiens
tcttggcccctcccc

SEQ ID NO: 108810 - DNA, 15 bp, Homo sapiens
atcttggcccctccc

SEQ ID NO: 108811 - DNA, 15 bp, Homo sapiens
aatcttggcccctcc

SEQ ID NO: 108812 - DNA, 15 bp, Homo sapiens
taatcttggcccctc

SEQ ID NO: 108813 - DNA, 15 bp, Homo sapiens
ctaatcttggcccct

SEQ ID NO: 108814 - DNA, 15 bp, Homo sapiens
tctaatcttggcccc

SEQ ID NO: 108815 - DNA, 15 bp, Homo sapiens
ttctaatcttggccc

SEQ ID NO: 108816 - DNA, 15 bp, Homo sapiens
cttctaatcttggcc

SEQ ID NO: 108817 - DNA, 15 bp, Homo sapiens
tcttctaatcttggc

SEQ ID NO: 108818 - DNA, 15 bp, Homo sapiens
ttcttctaatcttgg

SEQ ID NO: 108819 - DNA, 15 bp, Homo sapiens
tttcttctaatcttg

SEQ ID NO: 108820 - DNA, 15 bp, Homo sapiens
gtttcttctaatctt

SEQ ID NO: 108821 - DNA, 15 bp, Homo sapiens
ggtttcttctaatct

SEQ ID NO: 108822 - DNA, 15 bp, Homo sapiens
aggtttcttctaatc

SEQ ID NO: 108823 - DNA, 15 bp, Homo sapiens
taggtttcttctaat

SEQ ID NO: 108824 - DNA, 15 bp, Homo sapiens
gtaggtttcttctaa

SEQ ID NO: 108825 - DNA, 15 bp, Homo sapiens
ggtaggtttcttcta

SEQ ID NO: 108826 - DNA, 15 bp, Homo sapiens
aggtaggtttcttct

SEQ ID NO: 108827 - DNA, 15 bp, Homo sapiens
gaggtaggtttcttc

SEQ ID NO: 108828 - DNA, 15 bp, Homo sapiens
tgaggtaggtttctt

SEQ ID NO: 108829 - DNA, 15 bp, Homo sapiens
ctgaggtaggtttct

SEQ ID NO: 108830 - DNA, 15 bp, Homo sapiens
gctgaggtaggtttc

SEQ ID NO: 108831 - DNA, 15 bp, Homo sapiens
agctgaggtaggttt

SEQ ID NO: 108832 - DNA, 15 bp, Homo sapiens
gagctgaggtaggtt

SEQ ID NO: 108833 - DNA, 15 bp, Homo sapiens
ggagctgaggtaggt

SEQ ID NO: 108834 - DNA, 15 bp, Homo sapiens
tggagctgaggtagg

SEQ ID NO: 108835 - DNA, 15 bp, Homo sapiens
ctggagctgaggtag

SEQ ID NO: 108836 - DNA, 15 bp, Homo sapiens
tctggagctgaggta

SEQ ID NO: 108837 - DNA, 15 bp, Homo sapiens
ctctggagctgaggt

SEQ ID NO: 108838 - DNA, 15 bp, Homo sapiens
cctctggagctgagg

SEQ ID NO: 108839 - DNA, 15 bp, Homo sapiens
tcctctggagctgag

SEQ ID NO: 108840 - DNA, 15 bp, Homo sapiens
ttcctctggagctga

SEQ ID NO: 108841 - DNA, 15 bp, Homo sapiens
tttcctctggagctg

SEQ ID NO: 108842 - DNA, 15 bp, Homo sapiens
ctttcctctggagct

SEQ ID NO: 108843 - DNA, 15 bp, Homo sapiens
actttcctctggagc

SEQ ID NO: 108844 - DNA, 15 bp, Homo sapiens
gactttcctctggag

SEQ ID NO: 108845 - DNA, 15 bp, Homo sapiens
agactttcctctgga

SEQ ID NO: 108846 - DNA, 15 bp, Homo sapiens
cagactttcctctgg

SEQ ID NO: 108847 - DNA, 15 bp, Homo sapiens
ccagactttcctctg

SEQ ID NO: 108848 - DNA, 15 bp, Homo sapiens
gccagactttcctct

SEQ ID NO: 108849 - DNA, 15 bp, Homo sapiens
agccagactttcctc

SEQ ID NO: 108850 - DNA, 15 bp, Homo sapiens
aagccagactttcct

SEQ ID NO: 108851 - DNA, 15 bp, Homo sapiens
gaagccagactttcc

SEQ ID NO: 108852 - DNA, 15 bp, Homo sapiens
ggaagccagactttc

SEQ ID NO: 108853 - DNA, 15 bp, Homo sapiens
aggaagccagacttt

SEQ ID NO: 108854 - DNA, 15 bp, Homo sapiens
caggaagccagactt

SEQ ID NO: 108855 - DNA, 15 bp, Homo sapiens
tcaggaagccagact

SEQ ID NO: 108856 - DNA, 15 bp, Homo sapiens
ctcaggaagccagac

SEQ ID NO: 108857 - DNA, 15 bp, Homo sapiens
gctcaggaagccaga

SEQ ID NO: 108858 - DNA, 15 bp, Homo sapiens
ggctcaggaagccag

SEQ ID NO: 108859 - DNA, 15 bp, Homo sapiens
gggctcaggaagcca

SEQ ID NO: 108860 - DNA, 15 bp, Homo sapiens
tgggctcaggaagcc

SEQ ID NO: 108861 - DNA, 15 bp, Homo sapiens
gtgggctcaggaagc

SEQ ID NO: 108862 - DNA, 15 bp, Homo sapiens
ggtgggctcaggaag

SEQ ID NO: 108863 - DNA, 15 bp, Homo sapiens
gggtgggctcaggaa

SEQ ID NO: 108864 - DNA, 15 bp, Homo sapiens
ggggtgggctcagga

SEQ ID NO: 108865 - DNA, 15 bp, Homo sapiens
cggggtgggctcagg

SEQ ID NO: 108866 - DNA, 15 bp, Homo sapiens
gcggggtgggctcag

SEQ ID NO: 108867 - DNA, 15 bp, Homo sapiens
ggcggggtgggctca

SEQ ID NO: 108868 - DNA, 15 bp, Homo sapiens
tggcggggtgggctc

SEQ ID NO: 108869 - DNA, 15 bp, Homo sapiens
ctggcggggtgggct

SEQ ID NO: 108870 - DNA, 15 bp, Homo sapiens
tctggcggggtgggc

SEQ ID NO: 108871 - DNA, 15 bp, Homo sapiens
gtctggcggggtggg

SEQ ID NO: 108872 - DNA, 15 bp, Homo sapiens
ggtctggcggggtgg

SEQ ID NO: 108873 - DNA, 15 bp, Homo sapiens
gggtctggcggggtg

SEQ ID NO: 108874 - DNA, 15 bp, Homo sapiens
tgggtctggcggggt

SEQ ID NO: 108875 - DNA, 15 bp, Homo sapiens
ctgggtctggcgggg

SEQ ID NO: 108876 - DNA, 15 bp, Homo sapiens
cctgggtctggcggg

SEQ ID NO: 108877 - DNA, 15 bp, Homo sapiens
acctgggtctggcgg

SEQ ID NO: 108878 - DNA, 15 bp, Homo sapiens
gacctgggtctggcg

SEQ ID NO: 108879 - DNA, 15 bp, Homo sapiens
ggacctgggtctggc

SEQ ID NO: 108880 - DNA, 15 bp, Homo sapiens
tggacctgggtctgg

SEQ ID NO: 108881 - DNA, 15 bp, Homo sapiens
ttggacctgggtctg

SEQ ID NO: 108882 - DNA, 15 bp, Homo sapiens
cttggacctgggtct

SEQ ID NO: 108883 - DNA, 15 bp, Homo sapiens
acttggacctgggtc

SEQ ID NO: 108884 - DNA, 15 bp, Homo sapiens
gacttggacctgggt

SEQ ID NO: 108885 - DNA, 15 bp, Homo sapiens
ggacttggacctggg

SEQ ID NO: 108886 - DNA, 15 bp, Homo sapiens
gggacttggacctgg

SEQ ID NO: 108887 - DNA, 15 bp, Homo sapiens
ggggacttggacctg

SEQ ID NO: 108888 - DNA, 15 bp, Homo sapiens
gggggacttggacct

SEQ ID NO: 108889 - DNA, 15 bp, Homo sapiens
tgggggacttggacc

SEQ ID NO: 108890 - DNA, 15 bp, Homo sapiens
ttgggggacttggac

SEQ ID NO: 108891 - DNA, 15 bp, Homo sapiens
gttgggggacttgga

SEQ ID NO: 108892 - DNA, 15 bp, Homo sapiens
ggttgggggacttgg

SEQ ID NO: 108893 - DNA, 15 bp, Homo sapiens
gggttgggggacttg

SEQ ID NO: 108894 - DNA, 15 bp, Homo sapiens
ggggttgggggactt

SEQ ID NO: 108895 - DNA, 15 bp, Homo sapiens
tggggttgggggact

SEQ ID NO: 108896 - DNA, 15 bp, Homo sapiens
ctggggttgggggac

SEQ ID NO: 108897 - DNA, 15 bp, Homo sapiens
actggggttggggga

SEQ ID NO: 108898 - DNA, 15 bp, Homo sapiens
aactggggttggggg

SEQ ID NO: 108899 - DNA, 15 bp, Homo sapiens
gaactggggttgggg

SEQ ID NO: 108900 - DNA, 15 bp, Homo sapiens
tgaactggggttggg

SEQ ID NO: 108901 - DNA, 15 bp, Homo sapiens
atgaactggggttgg

SEQ ID NO: 108902 - DNA, 15 bp, Homo sapiens
catgaactggggttg

SEQ ID NO: 108903 - DNA, 15 bp, Homo sapiens
ccatgaactggggtt

SEQ ID NO: 108904 - DNA, 15 bp, Homo sapiens
accatgaactggggt

SEQ ID NO: 108905 - DNA, 15 bp, Homo sapiens
caccatgaactgggg

SEQ ID NO: 108906 - DNA, 15 bp, Homo sapiens
acaccatgaactggg

SEQ ID NO: 108907 - DNA, 15 bp, Homo sapiens
cacaccatgaactgg

SEQ ID NO: 108908 - DNA, 15 bp, Homo sapiens
acacaccatgaactg

SEQ ID NO: 108909 - DNA, 15 bp, Homo sapiens
gacacaccatgaact

SEQ ID NO: 108910 - DNA, 15 bp, Homo sapiens
ggacacaccatgaac

SEQ ID NO: 108911 - DNA, 15 bp, Homo sapiens
tggacacaccatgaa

SEQ ID NO: 108912 - DNA, 15 bp, Homo sapiens
ctggacacaccatga

SEQ ID NO: 108913 - DNA, 15 bp, Homo sapiens
actggacacaccatg

SEQ ID NO: 108914 - DNA, 15 bp, Homo sapiens
cactggacacaccat

SEQ ID NO: 108915 - DNA, 15 bp, Homo sapiens
gcactggacacacca

SEQ ID NO: 108916 - DNA, 15 bp, Homo sapiens
agcactggacacacc

SEQ ID NO: 108917 - DNA, 15 bp, Homo sapiens
aagcactggacacac

SEQ ID NO: 108918 - DNA, 15 bp, Homo sapiens
taagcactggacaca

SEQ ID NO: 108919 - DNA, 15 bp, Homo sapiens
gtaagcactggacac

SEQ ID NO: 108920 - DNA, 15 bp, Homo sapiens
ggtaagcactggaca

SEQ ID NO: 108921 - DNA, 15 bp, Homo sapiens
cggtaagcactggac

SEQ ID NO: 108922 - DNA, 15 bp, Homo sapiens
acggtaagcactgga

SEQ ID NO: 108923 - DNA, 15 bp, Homo sapiens
aacggtaagcactgg

SEQ ID NO: 108924 - DNA, 15 bp, Homo sapiens
caacggtaagcactg

SEQ ID NO: 108925 - DNA, 15 bp, Homo sapiens
ccaacggtaagcact

SEQ ID NO: 108926 - DNA, 15 bp, Homo sapiens
cccaacggtaagcac

SEQ ID NO: 108927 - DNA, 15 bp, Homo sapiens
acccaacggtaagca

SEQ ID NO: 108928 - DNA, 15 bp, Homo sapiens
cacccaacggtaagc

SEQ ID NO: 108929 - DNA, 15 bp, Homo sapiens
gcacccaacggtaag

SEQ ID NO: 108930 - DNA, 15 bp, Homo sapiens
agcacccaacggtaa

SEQ ID NO: 108931 - DNA, 15 bp, Homo sapiens
gagcacccaacggta

SEQ ID NO: 108932 - DNA, 15 bp, Homo sapiens
agagcacccaacggt

SEQ ID NO: 108933 - DNA, 15 bp, Homo sapiens
cagagcacccaacgg

SEQ ID NO: 108934 - DNA, 15 bp, Homo sapiens
ccagagcacccaacg

SEQ ID NO: 108935 - DNA, 15 bp, Homo sapiens
accagagcacccaac

SEQ ID NO: 108936 - DNA, 15 bp, Homo sapiens
caccagagcacccaa

SEQ ID NO: 108937 - DNA, 15 bp, Homo sapiens
tcaccagagcaccca

SEQ ID NO: 108938 - DNA, 15 bp, Homo sapiens
ttcaccagagcaccc

SEQ ID NO: 108939 - DNA, 15 bp, Homo sapiens
cttcaccagagcacc

SEQ ID NO: 108940 - DNA, 15 bp, Homo sapiens
ccttcaccagagcac

SEQ ID NO: 108941 - DNA, 15 bp, Homo sapiens
accttcaccagagca

SEQ ID NO: 108942 - DNA, 15 bp, Homo sapiens
caccttcaccagagc

SEQ ID NO: 108943 - DNA, 15 bp, Homo sapiens
gcaccttcaccagag

SEQ ID NO: 108944 - DNA, 15 bp, Homo sapiens
tgcaccttcaccaga

SEQ ID NO: 108945 - DNA, 15 bp, Homo sapiens
atgcaccttcaccag

SEQ ID NO: 108946 - DNA, 15 bp, Homo sapiens
gatgcaccttcacca

SEQ ID NO: 108947 - DNA, 15 bp, Homo sapiens
agatgcaccttcacc

SEQ ID NO: 108948 - DNA, 15 bp, Homo sapiens
gagatgcaccttcac

SEQ ID NO: 108949 - DNA, 15 bp, Homo sapiens
tgagatgcaccttca

SEQ ID NO: 108950 - DNA, 15 bp, Homo sapiens
gtgagatgcaccttc

SEQ ID NO: 108951 - DNA, 15 bp, Homo sapiens
cgtgagatgcacctt

SEQ ID NO: 108952 - DNA, 15 bp, Homo sapiens
tcgtgagatgcacct

SEQ ID NO: 108953 - DNA, 15 bp, Homo sapiens
ctcgtgagatgcacc

SEQ ID NO: 108954 - DNA, 15 bp, Homo sapiens
cctcgtgagatgcac

SEQ ID NO: 108955 - DNA, 15 bp, Homo sapiens
gcctcgtgagatgca

SEQ ID NO: 108956 - DNA, 15 bp, Homo sapiens
agcctcgtgagatgc

SEQ ID NO: 108957 - DNA, 15 bp, Homo sapiens
aagcctcgtgagatg

SEQ ID NO: 108958 - DNA, 15 bp, Homo sapiens
caagcctcgtgagat

SEQ ID NO: 108959 - DNA, 15 bp, Homo sapiens
gcaagcctcgtgaga

SEQ ID NO: 108960 - DNA, 15 bp, Homo sapiens
agcaagcctcgtgag

SEQ ID NO: 108961 - DNA, 15 bp, Homo sapiens
gagcaagcctcgtga

SEQ ID NO: 108962 - DNA, 15 bp, Homo sapiens
agagcaagcctcgtg

SEQ ID NO: 108963 - DNA, 15 bp, Homo sapiens
gagagcaagcctcgt

SEQ ID NO: 108964 - DNA, 15 bp, Homo sapiens
agagagcaagcctcg

SEQ ID NO: 108965 - DNA, 15 bp, Homo sapiens
aagagagcaagcctc

SEQ ID NO: 108966 - DNA, 15 bp, Homo sapiens
caagagagcaagcct

SEQ ID NO: 108967 - DNA, 15 bp, Homo sapiens
acaagagagcaagcc

SEQ ID NO: 108968 - DNA, 15 bp, Homo sapiens
aacaagagagcaagc

SEQ ID NO: 108969 - DNA, 15 bp, Homo sapiens
gaacaagagagcaag

SEQ ID NO: 108970 - DNA, 15 bp, Homo sapiens
ggaacaagagagcaa

SEQ ID NO: 108971 - DNA, 15 bp, Homo sapiens
aggaacaagagagca

SEQ ID NO: 108972 - DNA, 15 bp, Homo sapiens
aaggaacaagagagc

SEQ ID NO: 108973 - DNA, 15 bp, Homo sapiens
gaaggaacaagagag

SEQ ID NO: 108974 - DNA, 15 bp, Homo sapiens
tgaaggaacaagaga

SEQ ID NO: 108975 - DNA, 15 bp, Homo sapiens
ctgaaggaacaagag

SEQ ID NO: 108976 - DNA, 15 bp, Homo sapiens
tctgaaggaacaaga

SEQ ID NO: 108977 - DNA, 15 bp, Homo sapiens
ttctgaaggaacaag

SEQ ID NO: 108978 - DNA, 15 bp, Homo sapiens
cttctgaaggaacaa

SEQ ID NO: 108979 - DNA, 15 bp, Homo sapiens
gcttctgaaggaaca

SEQ ID NO: 108980 - DNA, 15 bp, Homo sapiens
agcttctgaaggaac

SEQ ID NO: 108981 - DNA, 15 bp, Homo sapiens
cagcttctgaaggaa

SEQ ID NO: 108982 - DNA, 15 bp, Homo sapiens
acagcttctgaagga

SEQ ID NO: 108983 - DNA, 15 bp, Homo sapiens
aacagcttctgaagg

SEQ ID NO: 108984 - DNA, 15 bp, Homo sapiens
gaacagcttctgaag

SEQ ID NO: 108985 - DNA, 15 bp, Homo sapiens
agaacagcttctgaa

SEQ ID NO: 108986 - DNA, 15 bp, Homo sapiens
cagaacagcttctga

SEQ ID NO: 108987 - DNA, 15 bp, Homo sapiens
ccagaacagcttctg

SEQ ID NO: 108988 - DNA, 15 bp, Homo sapiens
tccagaacagcttct

SEQ ID NO: 108989 - DNA, 15 bp, Homo sapiens
atccagaacagcttc

SEQ ID NO: 108990 - DNA, 15 bp, Homo sapiens
aatccagaacagctt

SEQ ID NO: 108991 - DNA, 15 bp, Homo sapiens
aaatccagaacagct

SEQ ID NO: 108992 - DNA, 15 bp, Homo sapiens
gaaatccagaacagc

SEQ ID NO: 108993 - DNA, 15 bp, Homo sapiens
agaaatccagaacag

SEQ ID NO: 108994 - DNA, 15 bp, Homo sapiens
aagaaatccagaaca

SEQ ID NO: 108995 - DNA, 15 bp, Homo sapiens
taagaaatccagaac

SEQ ID NO: 108996 - DNA, 15 bp, Homo sapiens
gtaagaaatccagaa

SEQ ID NO: 108997 - DNA, 15 bp, Homo sapiens
tgtaagaaatccaga

SEQ ID NO: 108998 - DNA, 15 bp, Homo sapiens
ctgtaagaaatccag

SEQ ID NO: 108999 - DNA, 15 bp, Homo sapiens
actgtaagaaatcca

SEQ ID NO: 109000 - DNA, 15 bp, Homo sapiens
cactgtaagaaatcc

SEQ ID NO: 109001 - DNA, 15 bp, Homo sapiens
ccactgtaagaaatc

SEQ ID NO: 109002 - DNA, 15 bp, Homo sapiens
accactgtaagaaat

SEQ ID NO: 109003 - DNA, 15 bp, Homo sapiens
caccactgtaagaaa

SEQ ID NO: 109004 - DNA, 15 bp, Homo sapiens
tcaccactgtaagaa

SEQ ID NO: 109005 - DNA, 15 bp, Homo sapiens
ctcaccactgtaaga

SEQ ID NO: 109006 - DNA, 15 bp, Homo sapiens
actcaccactgtaag

SEQ ID NO: 109007 - DNA, 15 bp, Homo sapiens
cactcaccactgtaa

SEQ ID NO: 109008 - DNA, 15 bp, Homo sapiens
ccactcaccactgta

SEQ ID NO: 109009 - DNA, 15 bp, Homo sapiens
tccactcaccactgt

SEQ ID NO: 109010 - DNA, 15 bp, Homo sapiens
atccactcaccactg

SEQ ID NO: 109011 - DNA, 15 bp, Homo sapiens
catccactcaccact

SEQ ID NO: 109012 - DNA, 15 bp, Homo sapiens
tcatccactcaccac

SEQ ID NO: 109013 - DNA, 15 bp, Homo sapiens
atcatccactcacca

SEQ ID NO: 109014 - DNA, 15 bp, Homo sapiens
gatcatccactcacc

SEQ ID NO: 109015 - DNA, 15 bp, Homo sapiens
tgatcatccactcac

SEQ ID NO: 109016 - DNA, 15 bp, Homo sapiens
gtgatcatccactca

SEQ ID NO: 109017 - DNA, 15 bp, Homo sapiens
ggtgatcatccactc

SEQ ID NO: 109018 - DNA, 15 bp, Homo sapiens
tggtgatcatccact

SEQ ID NO: 109019 - DNA, 15 bp, Homo sapiens
gtggtgatcatccac

SEQ ID NO: 109020 - DNA, 15 bp, Homo sapiens
ggtggtgatcatcca

SEQ ID NO: 109021 - DNA, 15 bp, Homo sapiens
tggtggtgatcatcc

SEQ ID NO: 109022 - DNA, 15 bp, Homo sapiens
ctggtggtgatcatc

SEQ ID NO: 109023 - DNA, 15 bp, Homo sapiens
actggtggtgatcat

SEQ ID NO: 109024 - DNA, 15 bp, Homo sapiens
gactggtggtgatca

SEQ ID NO: 109025 - DNA, 15 bp, Homo sapiens
ggactggtggtgatc

SEQ ID NO: 109026 - DNA, 15 bp, Homo sapiens
aggactggtggtgat

SEQ ID NO: 109027 - DNA, 15 bp, Homo sapiens
caggactggtggtga

SEQ ID NO: 109028 - DNA, 15 bp, Homo sapiens
gcaggactggtggtg

SEQ ID NO: 109029 - DNA, 15 bp, Homo sapiens
ggcaggactggtggt

SEQ ID NO: 109030 - DNA, 15 bp, Homo sapiens
aggcaggactggtgg

SEQ ID NO: 109031 - DNA, 15 bp, Homo sapiens
caggcaggactggtg

SEQ ID NO: 109032 - DNA, 15 bp, Homo sapiens
gcaggcaggactggt

SEQ ID NO: 109033 - DNA, 15 bp, Homo sapiens
tgcaggcaggactgg

SEQ ID NO: 109034 - DNA, 15 bp, Homo sapiens
ttgcaggcaggactg

SEQ ID NO: 109035 - DNA, 15 bp, Homo sapiens
gttgcaggcaggact

SEQ ID NO: 109036 - DNA, 15 bp, Homo sapiens
ggttgcaggcaggac

SEQ ID NO: 109037 - DNA, 15 bp, Homo sapiens
gggttgcaggcagga

SEQ ID NO: 109038 - DNA, 15 bp, Homo sapiens
agggttgcaggcagg

SEQ ID NO: 109039 - DNA, 15 bp, Homo sapiens
aagggttgcaggcag

SEQ ID NO: 109040 - DNA, 15 bp, Homo sapiens
gaagggttgcaggca

SEQ ID NO: 109041 - DNA, 15 bp, Homo sapiens
agaagggttgcaggc

SEQ ID NO: 109042 - DNA, 15 bp, Homo sapiens
gagaagggttgcagg

SEQ ID NO: 109043 - DNA, 15 bp, Homo sapiens
tgagaagggttgcag

SEQ ID NO: 109044 - DNA, 15 bp, Homo sapiens
ctgagaagggttgca

SEQ ID NO: 109045 - DNA, 15 bp, Homo sapiens
gctgagaagggttgc

SEQ ID NO: 109046 - DNA, 15 bp, Homo sapiens
agctgagaagggttg

SEQ ID NO: 109047 - DNA, 15 bp, Homo sapiens
aagctgagaagggtt

SEQ ID NO: 109048 - DNA, 15 bp, Homo sapiens
taagctgagaagggt

SEQ ID NO: 109049 - DNA, 15 bp, Homo sapiens
gtaagctgagaaggg

SEQ ID NO: 109050 - DNA, 15 bp, Homo sapiens
agtaagctgagaagg

SEQ ID NO: 109051 - DNA, 15 bp, Homo sapiens
cagtaagctgagaag

SEQ ID NO: 109052 - DNA, 15 bp, Homo sapiens
tcagtaagctgagaa

SEQ ID NO: 109053 - DNA, 15 bp, Homo sapiens
gtcagtaagctgaga

SEQ ID NO: 109054 - DNA, 15 bp, Homo sapiens
tgtcagtaagctgag

SEQ ID NO: 109055 - DNA, 15 bp, Homo sapiens
gtgtcagtaagctga

SEQ ID NO: 109056 - DNA, 15 bp, Homo sapiens
ggtgtcagtaagctg

SEQ ID NO: 109057 - DNA, 15 bp, Homo sapiens
tggtgtcagtaagct

SEQ ID NO: 109058 - DNA, 15 bp, Homo sapiens
ctggtgtcagtaagc

SEQ ID NO: 109059 - DNA, 15 bp, Homo sapiens
gctggtgtcagtaag

SEQ ID NO: 109060 - DNA, 15 bp, Homo sapiens
ggctggtgtcagtaa

SEQ ID NO: 109061 - DNA, 15 bp, Homo sapiens
gggctggtgtcagta

SEQ ID NO: 109062 - DNA, 15 bp, Homo sapiens
tgggctggtgtcagt

SEQ ID NO: 109063 - DNA, 15 bp, Homo sapiens
gtgggctggtgtcag

SEQ ID NO: 109064 - DNA, 15 bp, Homo sapiens
agtgggctggtgtca

SEQ ID NO: 109065 - DNA, 15 bp, Homo sapiens
gagtgggctggtgtc

SEQ ID NO: 109066 - DNA, 15 bp, Homo sapiens
ggagtgggctggtgt

SEQ ID NO: 109067 - DNA, 15 bp, Homo sapiens
tggagtgggctggtg

SEQ ID NO: 109068 - DNA, 15 bp, Homo sapiens
gtggagtgggctggt

SEQ ID NO: 109069 - DNA, 15 bp, Homo sapiens
tgtggagtgggctgg

SEQ ID NO: 109070 - DNA, 15 bp, Homo sapiens
ctgtggagtgggctg

SEQ ID NO: 109071 - DNA, 15 bp, Homo sapiens
tctgtggagtgggct

SEQ ID NO: 109072 - DNA, 15 bp, Homo sapiens
atctgtggagtgggc

SEQ ID NO: 109073 - DNA, 15 bp, Homo sapiens
catctgtggagtggg

SEQ ID NO: 109074 - DNA, 15 bp, Homo sapiens
ccatctgtggagtgg

SEQ ID NO: 109075 - DNA, 15 bp, Homo sapiens
cccatctgtggagtg

SEQ ID NO: 109076 - DNA, 15 bp, Homo sapiens
ccccatctgtggagt

SEQ ID NO: 109077 - DNA, 15 bp, Homo sapiens
tccccatctgtggag

SEQ ID NO: 109078 - DNA, 15 bp, Homo sapiens
gtccccatctgtgga

SEQ ID NO: 109079 - DNA, 15 bp, Homo sapiens
ggtccccatctgtgg

SEQ ID NO: 109080 - DNA, 15 bp, Homo sapiens
tggtccccatctgtg

SEQ ID NO: 109081 - DNA, 15 bp, Homo sapiens
ctggtccccatctgt

SEQ ID NO: 109082 - DNA, 15 bp, Homo sapiens
actggtccccatctg

SEQ ID NO: 109083 - DNA, 15 bp, Homo sapiens
cactggtccccatct

SEQ ID NO: 109084 - DNA, 15 bp, Homo sapiens
acactggtccccatc

SEQ ID NO: 109085 - DNA, 15 bp, Homo sapiens
cacactggtccccat

SEQ ID NO: 109086 - DNA, 15 bp, Homo sapiens
gcacactggtcccca

SEQ ID NO: 109087 - DNA, 15 bp, Homo sapiens
ggcacactggtcccc

SEQ ID NO: 109088 - DNA, 15 bp, Homo sapiens
aggcacactggtccc

SEQ ID NO: 109089 - DNA, 15 bp, Homo sapiens
gaggcacactggtcc

SEQ ID NO: 109090 - DNA, 15 bp, Homo sapiens
tgaggcacactggtc

SEQ ID NO: 109091 - DNA, 15 bp, Homo sapiens
ttgaggcacactggt

SEQ ID NO: 109092 - DNA, 15 bp, Homo sapiens
cttgaggcacactgg

SEQ ID NO: 109093 - DNA, 15 bp, Homo sapiens
acttgaggcacactg

SEQ ID NO: 109094 - DNA, 15 bp, Homo sapiens
gacttgaggcacact

SEQ ID NO: 109095 - DNA, 15 bp, Homo sapiens
ggacttgaggcacac

SEQ ID NO: 109096 - DNA, 15 bp, Homo sapiens
tggacttgaggcaca

SEQ ID NO: 109097 - DNA, 15 bp, Homo sapiens
atggacttgaggcac

SEQ ID NO: 109098 - DNA, 15 bp, Homo sapiens
catggacttgaggca

SEQ ID NO: 109099 - DNA, 15 bp, Homo sapiens
gcatggacttgaggc

SEQ ID NO: 109100 - DNA, 15 bp, Homo sapiens
ggcatggacttgagg

SEQ ID NO: 109101 - DNA, 15 bp, Homo sapiens
tggcatggacttgag

SEQ ID NO: 109102 - DNA, 15 bp, Homo sapiens
ctggcatggacttga

SEQ ID NO: 109103 - DNA, 15 bp, Homo sapiens
tctggcatggacttg

SEQ ID NO: 109104 - DNA, 15 bp, Homo sapiens
ttctggcatggactt

SEQ ID NO: 109105 - DNA, 15 bp, Homo sapiens
attctggcatggact

SEQ ID NO: 109106 - DNA, 15 bp, Homo sapiens
cattctggcatggac

SEQ ID NO: 109107 - DNA, 15 bp, Homo sapiens
ccattctggcatgga

SEQ ID NO: 109108 - DNA, 15 bp, Homo sapiens
cccattctggcatgg

SEQ ID NO: 109109 - DNA, 15 bp, Homo sapiens
ccccattctggcatg

SEQ ID NO: 109110 - DNA, 15 bp, Homo sapiens
cccccattctggcat

SEQ ID NO: 109111 - DNA, 15 bp, Homo sapiens
gcccccattctggca

SEQ ID NO: 109112 - DNA, 15 bp, Homo sapiens
agcccccattctggc

SEQ ID NO: 109113 - DNA, 15 bp, Homo sapiens
gagcccccattctgg

SEQ ID NO: 109114 - DNA, 15 bp, Homo sapiens
ggagcccccattctg

SEQ ID NO: 109115 - DNA, 15 bp, Homo sapiens
aggagcccccattct

SEQ ID NO: 109116 - DNA, 15 bp, Homo sapiens
caggagcccccattc

SEQ ID NO: 109117 - DNA, 15 bp, Homo sapiens
gcaggagcccccatt

SEQ ID NO: 109118 - DNA, 15 bp, Homo sapiens
tgcaggagcccccat

SEQ ID NO: 109119 - DNA, 15 bp, Homo sapiens
ttgcaggagccccca

SEQ ID NO: 109120 - DNA, 15 bp, Homo sapiens
cttgcaggagccccc

SEQ ID NO: 109121 - DNA, 15 bp, Homo sapiens
ccttgcaggagcccc

SEQ ID NO: 109122 - DNA, 15 bp, Homo sapiens
tccttgcaggagccc

SEQ ID NO: 109123 - DNA, 15 bp, Homo sapiens
gtccttgcaggagcc

SEQ ID NO: 109124 - DNA, 15 bp, Homo sapiens
ggtccttgcaggagc

SEQ ID NO: 109125 - DNA, 15 bp, Homo sapiens
tggtccttgcaggag

SEQ ID NO: 109126 - DNA, 15 bp, Homo sapiens
ctggtccttgcagga

SEQ ID NO: 109127 - DNA, 15 bp, Homo sapiens
gctggtccttgcagg

SEQ ID NO: 109128 - DNA, 15 bp, Homo sapiens
agctggtccttgcag

SEQ ID NO: 109129 - DNA, 15 bp, Homo sapiens
gagctggtccttgca

SEQ ID NO: 109130 - DNA, 15 bp, Homo sapiens
ggagctggtccttgc

SEQ ID NO: 109131 - DNA, 15 bp, Homo sapiens
tggagctggtccttg

SEQ ID NO: 109132 - DNA, 15 bp, Homo sapiens
ctggagctggtcctt

SEQ ID NO: 109133 - DNA, 15 bp, Homo sapiens
actggagctggtcct

SEQ ID NO: 109134 - DNA, 15 bp, Homo sapiens
gactggagctggtcc

SEQ ID NO: 109135 - DNA, 15 bp, Homo sapiens
ggactggagctggtc

SEQ ID NO: 109136 - DNA, 15 bp, Homo sapiens
aggactggagctggt

SEQ ID NO: 109137 - DNA, 15 bp, Homo sapiens
taggactggagctgg

SEQ ID NO: 109138 - DNA, 15 bp, Homo sapiens
ataggactggagctg

SEQ ID NO: 109139 - DNA, 15 bp, Homo sapiens
tataggactggagct

SEQ ID NO: 109140 - DNA, 15 bp, Homo sapiens
atataggactggagc

SEQ ID NO: 109141 - DNA, 15 bp, Homo sapiens
gatataggactggag

SEQ ID NO: 109142 - DNA, 15 bp, Homo sapiens
agatataggactgga

SEQ ID NO: 109143 - DNA, 15 bp, Homo sapiens
cagatataggactgg

SEQ ID NO: 109144 - DNA, 15 bp, Homo sapiens
gcagatataggactg

SEQ ID NO: 109145 - DNA, 15 bp, Homo sapiens
agcagatataggact

SEQ ID NO: 109146 - DNA, 15 bp, Homo sapiens
aagcagatataggac

SEQ ID NO: 109147 - DNA, 15 bp, Homo sapiens
gaagcagatatagga

SEQ ID NO: 109148 - DNA, 15 bp, Homo sapiens
agaagcagatatagg

SEQ ID NO: 109149 - DNA, 15 bp, Homo sapiens
cagaagcagatatag

SEQ ID NO: 109150 - DNA, 15 bp, Homo sapiens
gcagaagcagatata

SEQ ID NO: 109151 - DNA, 15 bp, Homo sapiens
ggcagaagcagatat

SEQ ID NO: 109152 - DNA, 15 bp, Homo sapiens
aggcagaagcagata

SEQ ID NO: 109153 - DNA, 15 bp, Homo sapiens
gaggcagaagcagat

SEQ ID NO: 109154 - DNA, 15 bp, Homo sapiens
ggaggcagaagcaga

SEQ ID NO: 109155 - DNA, 15 bp, Homo sapiens
gggaggcagaagcag

SEQ ID NO: 109156 - DNA, 15 bp, Homo sapiens
agggaggcagaagca

SEQ ID NO: 109157 - DNA, 15 bp, Homo sapiens
cagggaggcagaagc

SEQ ID NO: 109158 - DNA, 15 bp, Homo sapiens
gcagggaggcagaag

SEQ ID NO: 109159 - DNA, 15 bp, Homo sapiens
ggcagggaggcagaa

SEQ ID NO: 109160 - DNA, 15 bp, Homo sapiens
aggcagggaggcaga

SEQ ID NO: 109161 - DNA, 15 bp, Homo sapiens
aaggcagggaggcag

SEQ ID NO: 109162 - DNA, 15 bp, Homo sapiens
gaaggcagggaggca

SEQ ID NO: 109163 - DNA, 15 bp, Homo sapiens
cgaaggcagggaggc

SEQ ID NO: 109164 - DNA, 15 bp, Homo sapiens
tcgaaggcagggagg

SEQ ID NO: 109165 - DNA, 15 bp, Homo sapiens
ctcgaaggcagggag

SEQ ID NO: 109166 - DNA, 15 bp, Homo sapiens
cctcgaaggcaggga

SEQ ID NO: 109167 - DNA, 15 bp, Homo sapiens
ccctcgaaggcaggg

SEQ ID NO: 109168 - DNA, 15 bp, Homo sapiens
gccctcgaaggcagg

SEQ ID NO: 109169 - DNA, 15 bp, Homo sapiens
ggccctcgaaggcag

SEQ ID NO: 109170 - DNA, 15 bp, Homo sapiens
cggccctcgaaggca

SEQ ID NO: 109171 - DNA, 15 bp, Homo sapiens
ccggccctcgaaggc

SEQ ID NO: 109172 - DNA, 15 bp, Homo sapiens
tccggccctcgaagg

SEQ ID NO: 109173 - DNA, 15 bp, Homo sapiens
ttccggccctcgaag

SEQ ID NO: 109174 - DNA, 15 bp, Homo sapiens
gttccggccctcgaa

SEQ ID NO: 109175 - DNA, 15 bp, Homo sapiens
agttccggccctcga

SEQ ID NO: 109176 - DNA, 15 bp, Homo sapiens
cagttccggccctcg

SEQ ID NO: 109177 - DNA, 15 bp, Homo sapiens
acagttccggccctc

SEQ ID NO: 109178 - DNA, 15 bp, Homo sapiens
cacagttccggccct

SEQ ID NO: 109179 - DNA, 15 bp, Homo sapiens
tcacagttccggccc

SEQ ID NO: 109180 - DNA, 15 bp, Homo sapiens
ctcacagttccggcc

SEQ ID NO: 109181 - DNA, 15 bp, Homo sapiens
tctcacagttccggc

SEQ ID NO: 109182 - DNA, 15 bp, Homo sapiens
gtctcacagttccgg

SEQ ID NO: 109183 - DNA, 15 bp, Homo sapiens
cgtctcacagttccg

SEQ ID NO: 109184 - DNA, 15 bp, Homo sapiens
gcgtctcacagttcc

SEQ ID NO: 109185 - DNA, 15 bp, Homo sapiens
ctccttccttgcccc

SEQ ID NO: 109186 - DNA, 15 bp, Homo sapiens
tctccttccttgccc

SEQ ID NO: 109187 - DNA, 15 bp, Homo sapiens
ttctccttccttgcc

SEQ ID NO: 109188 - DNA, 15 bp, Homo sapiens
tttctccttccttgc

SEQ ID NO: 109189 - DNA, 15 bp, Homo sapiens
ttttctccttccttg

SEQ ID NO: 109190 - DNA, 15 bp, Homo sapiens
cttttctccttcctt

SEQ ID NO: 109191 - DNA, 15 bp, Homo sapiens
tcttttctccttcct

SEQ ID NO: 109192 - DNA, 15 bp, Homo sapiens
ttcttttctccttcc

SEQ ID NO: 109193 - DNA, 15 bp, Homo sapiens
tttcttttctccttc

SEQ ID NO: 109194 - DNA, 15 bp, Homo sapiens
ttttcttttctcctt

SEQ ID NO: 109195 - DNA, 15 bp, Homo sapiens
gttttcttttctcct

SEQ ID NO: 109196 - DNA, 15 bp, Homo sapiens
cgttttcttttctcc

SEQ ID NO: 109197 - DNA, 15 bp, Homo sapiens
tcgttttcttttctc

SEQ ID NO: 109198 - DNA, 15 bp, Homo sapiens
gtcgttttcttttct

SEQ ID NO: 109199 - DNA, 15 bp, Homo sapiens
tgtcgttttcttttc

SEQ ID NO: 109200 - DNA, 15 bp, Homo sapiens
gtgtcgttttctttt

SEQ ID NO: 109201 - DNA, 15 bp, Homo sapiens
agtgtcgttttcttt

SEQ ID NO: 109202 - DNA, 15 bp, Homo sapiens
gagtgtcgttttctt

SEQ ID NO: 109203 - DNA, 15 bp, Homo sapiens
tgagtgtcgttttct

SEQ ID NO: 109204 - DNA, 15 bp, Homo sapiens
gtgagtgtcgttttc

SEQ ID NO: 109205 - DNA, 15 bp, Homo sapiens
agtgagtgtcgtttt

SEQ ID NO: 109206 - DNA, 15 bp, Homo sapiens
cagtgagtgtcgttt

SEQ ID NO: 109207 - DNA, 15 bp, Homo sapiens
tcagtgagtgtcgtt

SEQ ID NO: 109208 - DNA, 15 bp, Homo sapiens
ctcagtgagtgtcgt

SEQ ID NO: 109209 - DNA, 15 bp, Homo sapiens
cctcagtgagtgtcg
